United States Patent Application Publication US 2008/0050393 A1 - sequence listing, part 27

SEQ ID NO: 92956 - DNA, 388 bp, Homo sapiens
gctgctcttaggcgtagactgccaccgattacggatcgtttctcagaatcaagttagatgtgacagttcaaataagtgacgccgtcattgctgctctgaacacctcttaagggtagaatggatttatcaggagcgaaaatgaagatcttgctaggactcaaacaaccccatacaaagtccagctctagggctccttcacctaccaaacgcatagaccgctcacatgagatgtccaaggatcgctcacaagataaagggtccaccaacgactccagtgagaaggatcgcggccgatacaaaacccgaaagaggcgcatcgcttccagtggtagcagcagtaccaggtctcggtccagctcgacttccagctcacgctccagcaccagca

SEQ ID NO: 92957 - DNA, 612 bp, Homo sapiens
gaaaaaacattttcttttatttaagccggagagggctctttttaggtaaactcccgtggggggaagaaggggggaatgagggggggcggggctggagaatccgaggaagggcgcgcgcgaacataggcccggagtggctccaaaaccttttctcaacataccattcggcatttaacccacaaaatctagggtaggtcaatgttctgtctaatttccatactaatgaggcaactgagacctggagaatgtaagtaactgcccaagatcacataggcttggagtggctccaaaacctttgctttttttttcatacggcatttaacatataaaatagaggtctaaccctttatatgtctaaaagctttcttctttctacatttcacatagcgtagtggttaagaatgcagactttctgagtacagtcctggcgctacagcgtcttaaaacatataaagtacttagaatagtacctgatgtagccacaagtgcccccagaacattagcaattgtgaatctatttcatcatgcccaaatctggccatgcctgaagcctgccctgcttccatactggaatcagtcttccacctctgttttgtactccttgtctcccat

SEQ ID NO: 92958 - DNA, 492 bp, Homo sapiens
cgtacctgacgcgtcgtagacgtcctgcattaccgctcgacaccatgcgggcggacccacgcgtgcgagggacagctggtatttatcagactcctaagaagctttccttgctccctagtacaagagagagattatgcagggggcttttgattgatccaatgggaattacattgatctggcgtctggccttggttcttatcaaggggatcacctctaagaggcggggagctatttcctatgacagttctgatcagactgcattatacattcgtatgctagctcaatctgaaattgaagtgtctgtctctgcaaggaatatcagaaggctactaagtttccagcgatatcttagatcttcacgcttttttcgtggtactgcggcttcaaattccctaaacattttagatgatgattataatggacaagccaaggtgtgtatacgttttttaagaaaacattacttctttgataagcttactgaaggcctttatt

SEQ ID NO: 92959 - DNA, 546 bp, Homo sapiens
tgaccggaagcggctgcggttctcgccggttctcagccggggtttgatagttgtcaggaggattcgacgttcagtgcccagggatgtggagagttcttggagtctctgcggagtccctgggccagatctcacagtgaaagctgcaggatcttccttctgaccccagcagtccccgttgagtccaccgatcccactggaattataaagttgtcagcaagaaagccccagggctgaagtccaagtccgtcgggaacatgccagctaacgaggacgctccccagccaggggaacatggcagtgcctgtgaggtatcagtgtcatttgaggatgtgactgtggacttcagtagagaggagtggcagcaactggactctactcaaagacgcctgtaccaggatgtaatgttggagaactacagccacctgctctcagtggggttcgaagttcctaaaccagaggtcatcttcaagttggagcaaggagaggggccatggacattggaaggggaagccccacatcagagctgttcagggatttccacatatt

SEQ ID NO: 92960 - DNA, 409 bp, Homo sapiens
accagcggtagagcgcgagggttcagcacgggatggacggaacagactctgtgtctgtcctccaggctccgaaccgccctaccgatttgggtgtccgcttgtaaaactccgggaccatgttctcggccatctcctgcttctgggacctgccagcaccgtttttgtgggtagctccttcttgccaaccaaccatgatctcccaaatacctcatatttattgcgccgacgtggaggcacccgcccccagcctggtcaatttgtacctgcgggcctcctacacctacctctctctgggcttctatttcgaccgcaatgatgtggctctggaaagcgtgacccacttcttccgcgaattggccgaggataagcgcgagggctacgagcgtctcctgaagatgcaaaaccagcg

SEQ ID NO: 92961 - DNA, 239 bp, Homo sapiens
  misc_feature (1)...(239): n = a,t,c or g
gctaccggcgcggcgtaatggatgcagcatcctagtggttgacgcccctgtgatctgccctccttggaactgtgcttccccagagggggggcctcgctgttcccatggacctggcccaggagccagcgacctttagggacgtggccatctacttctcaagggaggagtgggcgtgtctggaacccagccagagggccctctaccgggacgtgatgctggacaacttcagcagtntggct

SEQ ID NO: 92962 - DNA, 374 bp, Homo sapiens
  misc_feature (1)...(374): n = a,t,c or g
gctcgggcgtcggatcggagccgccggggcttgggcggcccancagagctggcctgaacctccaggacttcagcccttctaggagaatctgatcccaggtgagggaggtcacttggggtgtggcccaccaggcaggcgggactccagactgggaacggaagtcagccctgctggggctgggagctgaagcatctgttccttcctcgcgggtgtgagacaaggaagagtgatcattgccacaccaggagctgaagccatggcctcaaagcctgagaagagggtggcatcgtctgtctttatcaccctggcacccccgcgccgcgatgtggccgtggcggaggaagagaggcaggcactttgtgaggcccggcgtg

SEQ ID NO: 92963 - DNA, 1428 bp, Homo sapiens
attcggggagagggagtgagtcccaggaaaccggtgggggcccacaggaatgaatgggccgggtccccctttctaaaaggtgtcggttccgcgggaaattttgttgaaggagctttttccaaagaccaagaatgacgactgacttttggctcggttgcacgtggtataacttaattgggccaacttagttattatgtggccgagggaggaagaaaaagagaaagttcaggactattccctaggaggcttgagccctgacctgagaattgatgtctcccgaaaaaaaaaaatcctgaaagcttacgatgaggacgaagatgaagacctgtatcctgacatccacccgcctccttccttgccccttccagggcagttcacctgcccccagtgccgaaagagctttacacgtcgcagctttcgtcccaacttgcagctagccaacatggtccagataattcgccagatgtgccccactccttatcggggaaaccggagtaatgatcagggcatgtgctttaaacaccaggaagccctgaaactcttctgtgaggtggacaaagaggccatctgtgtggtgtgccgagaatccaggagccacaaacagcacagcgtgctgcctttggaggaggtggtgcaggagtacaaggccaaactgcaggggcacgtggaaccactgaggaagcacctggaggcagtgcagaagatgaaagccaaggaggagaggcgagtgacagaactgaagagccagatgaagtcagagctggcagcggtggcctcggagtttgggcgactgacacggtttctggctgaagagcaggcagggctggaacggcgtctcagagagatgcatgaagcccagctggggcgtgcgggagccgcggctagtcgccttgcagaacaggccgcccagctcagccgcctgctggcagaggcccaggagcggagccagcaggggggtctccggctgctccaggacatcaaggagactttcaataggtgtgaagaggtacagctgcagcccccagaggtctggtcccctgacccgtgccaaccccatagccatgacttcctgacagatgccatcgtgaggaaaatgagccggatgttctgtcaggctgcgagagtggacctgacgctggaccctgacacggctcacccggccctgatgctgtcccctgaccgccggggggtccgcctggcagagcggcggcaggaggttgctgaccatcccaagcgcttctcggccgactgctgcgtactgggggcccagggcttccgctccggccggcactactgggaggtctgcatgggtccctgataatgagaacagctgcctggtcttctctcccagtctgcctagcccagccctgggactggaatttgaaccggccagaatttagcttcacttgagagagatctggaatggtc

SEQ ID NO: 92964 - DNA, 1980 bp, Homo sapiens
tcaacatatgaaaaatcaatgtaatatttcatattaacagttggaagactcacaattcatagtttcagaatttacaacacaaacctacaggaataaagacaatgtagtattagaataaggtcagatatatagatcaatggacagaattgacagtccagaaatacacccatacgattacggtcacctgatttttgactaaggttccaaaacaattcactaggggaaagaatagtcttgtcaaaaaatggtgctcagacaagtggatagccataagcacagaatgagtttggacccctatctcaaatctcaaatacaaacattaactccgaattaatcaaatgcctaaatttaagagctaaaattttaaagctcttagaagaaaacataggtacacatctttgtgactttgaattaggtcacggtttccttgacatgacacttaaaagtacaagcaacaaaagaaaaaaatagataaaatgaacttcagcaaaattagaatgtttatgcttcagaaaacactgtgaagaaagtgatcagacaactcacagaatgggaaaaatatttgtgaatcatatctcttaataagggtccagcagaaaagggcaaaggtggaaatggaggaggaaaacctccttctggtccaaaccgaatgaatggtcatcaccaacagaatggagtggaaaacatgatgttgtttgaagttgttaaaatgggcaagagtgctatgcagtcggtggtagatgattggatagaatcatacaagcatgaccgagatatagcacttcttgaccttatcaacttttttattcagtgttcaggctgtaaaggagttgtcacagcagaaatgtttagacatatgcagaactctgagataattcgaaaaatgactgaagaattcgatgaggatagtggagattatccacttaccatggctggtcctcagtggaagaagttcaaatccagtttttgtgaattcattggcgtgttagtacggcaatgtcaatatagtatcatatatgatgagtatatgatggatacagtcatttcacttcttacaggattgtctgactcacaagtcagagcatttcgacatacaagcaccctggcagctatgaagttgatgacagctttggtgaatgtggcactaaatcttagcattaatatggataatacacaaagacaatatgaagcagaacgaaataaaatgattgggaaacgagccaatgagaggctagaactcctgctacaaaagcggaaagagcttcaggaaaatcaagatgaaatagaaaatatgatgaatgcaatatttaaaggagtgtttgtacatagataccgtgatgcgatacgtgaaattcgagctatttgcattgaagagattggcatttggatgaagatgtatagtgatgcctttcttaatgacagttatttaaaatatgttggttggactatgcatgataagcaaggtgaagtaagactcaaatgtcttactgctctacaagggctttattataacaaagagcttaattccaaactggaactttttaccagtcggttcaaggatagaattgtgtctatgacccttgacaaagaatatgatgttgcagtacaagcaataaaattactcactcttgttttacagagtagtgaagaagttctcactgcagaagattgtgaaaatgtctatcatctggtttattcagctcaccggccagtagcagtagcagctggagaatttctctacaaaaagctcttcagtcgtagagatccagaggaggatggaatgatgaaaagaagaggaagacaaggtccaaatgccaaccttgttaagacattggtttttttctttctagaaagtgaggttagttgatagtatttattttatacttaggttcgaaaaattttggaaaaggggttaaaatgaggcacatttaaaaaaatattccttgtagcacagtaaattgtgaatagaatggagagcca

SEQ ID NO: 92965 - DNA, 345 bp, Homo sapiens
ctcctctgtagttttactctgagctttaccagcactgagacaaaggaaagagaagtcagagttaggggctggaggtggggttagaaagatggggaaggagaggaggaccaagagatgcaaagtccacagctttgaacccctgtacccagtttctctcagaggagaagctgcactatcgtagtgcccgaaccaaggagctggatgcattgctgggggacctgcactgcgagatccggggtgaggaaaagccagaggttatatgcattgtaagatgtttaaaaagagcagcagccaggggaaggaggggagtgggcaacttgggtcgacgcggccgcgaattccaag

SEQ ID NO: 92966 - DNA, 354 bp, Homo sapiens
  misc_feature (1)...(354): n = a,t,c or g
gcattgttttcgggatcgaggggtgagggcgctatggcacccggctgcaaaactgagttacgcagcgtgacaaatggtcagtctaaccaaccaagtaatgaaggtgatgccatcaaagtttttgtgcgaattcgtcctcctgcagaaagatctgggtcagctgatggagagcagaacttatgcttatctgtgctgtcctccacgagtctccggctgcactccaaccctgagcccaagaccttcacgtttgatcatgttgcagatgtggataccactcaggaatctgtattcgcaactgtggctaaaagcattgtggagtcttgcatgagcggttataatggtaccatctttgcn

SEQ ID NO: 92967 - DNA, 662 bp, Homo sapiens
acaacttcctggtggaaaaccgcgactcttgcaagtgggcaaacttgacgttttcgctatgggcaaacgcgggagccggagccagagccagctactcaacaccctaactaaaaagcagaagaaacatcttcgagatttcggcgaggagcatcccttctatgacagggtttccagaaaggaagcaaagccacagatttgtcaactgtcagagagttcagattcttcagattctgaaagcgactcagagagtgaaccacaacaagtttctggctaccacagactacttgctacattaaagaatgtttctgaggaagaagaggaagatgaggaggaggaagaggaagaagacagtattgtagatgatgcagaaatgaacgatgaagatggtggtagcgatgtcagtgtggaagaagagatggctgcagagtctactgaaagtccagagaatgtagctttatctgctgaccctgagggaaaagaagatggggaagagccaccgggcacatcacaaacatcccctgaagagttcacagatgcaaaacacgagtcactgttcagcctggaaaccaattttctggaagaggaaagtggagacaactcttctttgaaagcctctcaagatccatttcttcaacatgtgaacaaagaatctaaaaaaaaaa

SEQ ID NO: 92968 - DNA, 1383 bp, Homo sapiens
atggatgaaggatgctgtggaaaatgggaagttttgtcagacctggtgggctggaaggacaatggggtaaatgaattgagtttgctgatgaaagatcagctgttgagtccaggtagatcaggaagagaaagagaaagggcagctgatcttaccaagatgcatctcacagaaaaccctcatccacaggtgactcatgtgtcttctagtcagtctggttgtagcattgccagtgactctggaagcagcagtttatctgatatctatcaggctacggagagtgaggtaggagatgtagatttgacacgtcttccagaaggacctgttgattctgaggatgacgaagaggaagatgaagagattgatcgaacagatccattgcaggggcgagatcttgttcgagaatgtcttgaaaaagaacctgcagacaaaactgatgatgacattgaacaattgctggagtttatgcaccagctccctgcatttgcaaacatgaccatgtctgtaaggagagaactctgctcagtgatgatttttgaagtggtagagcaggctggagctattattcttgaagatgggcaagagcttgactcatggtatgttattttaaacggcactgtggaaatcagtcatccagatggaaaagttgaaaatttgtttatgggaaatagttttggaattactcccactctggataagcagtacatgcatggaattgtcaggactaaagtagatgattgtcagtttgtctgcatagcccagcaagattattggagaattttaaaccatgtggaaaaaaatacccataaagttgaggaagagggagaaattgttatggtacatgagcatcgggaactagaccggagtggaaccaggaaaggacacattgtgatcaaggcaacacctgagcgtctcataatgcatttaatagaagaacattccatcgtggatccaacttatatagaagattttctattaacttacaggacatttcttgaaagtcctttggatgttgggatcaaactattggaatggtttaagatcgacagcttaagagataaggtgacacggattgtattattatgggtaaataatcattttaatgattttgaaggtgaccctgctatgactcgatttctagaggaatttgaaaaaaatctggaagatacaaagatgaatggtcatctccggttattgaatattgcctgtgctgcaaaggctaagtggagacaggttgtgctgcaaaaggcttcccgcgagtcccctctacaattcagccttaatggagggagtgagaagggatttggtatttttgttgaaggagtagaacctggtagcaaagctgctgattcaggactgaaacgtggtgatcagattatggaagta

SEQ ID NO: 92969 - DNA, 683 bp, Homo sapiens
tacaattgcatatgtacgagtggatgaacataccattggtgatcccgaggatttttgtcaagattggataaacccatgtatcacattgattgtagagatcagcttgaacgggtctttttacgacttggccatgctgaaacagatgaacaattacagaatattatatctaaattccttcctcctgttttgctcaaactctctagcacccaagaaggagtacgtaaaaaggtaatggaactgctggtccatctgaataaacgtataaaaagccgccccaaaatacaacttccagtagagacactgttggttcagtaccaggaccctgctgcagtttcctttgtcacaaattttactataatttatgttaaaatgggctatcctcgcctaccagtggaaaaacaatgtgaactggcccctacgcttcttactgccatggaagggaagcctcagccacagcaggatagcttaatgcatcttttaataccaaccctttttcacatgaaataccctgttgaatcatcaaaatcagcttctccatttaatcttgctgagaaaccaaagactgtgcagctgcttttggacttcatgctagatgtccttctgatgccttatggttacgtgttaaatgaatcccagagtcgccaaaattcatcttcagcacagggttcttctttcaacagtgg

SEQ ID NO: 92970 - DNA, 343 bp, Homo sapiens
  misc_feature (1)...(343): n = a,t,c or g
cttttgcccgaaaccctcacttcggccagctgagctgacttttcagccaggtggaagctgttttctttgctccacctggggccagctcttgaatggccatggttgtcaacactgagcaacagatgctccggggtagaagcaagtaagctttccgagggcccagactcttcatcgtctccgaggagccctcaacatcctgcctgccatgtggcaggcactctgtaaatattatttgattttgctcgcgtctgagccaagactgtaaatatcccaaggtttgtttgtcctctcccataaacctgtacttgaatcctgcagagggtggaataacatgtttttcaan

SEQ ID NO: 92971 - DNA, 165 bp, Homo sapiens
agagaacccaccatggcgctgactcctgccgacaagaccaacggcacggccgcctggggtaaggtctggacgcacgctggcgagtttggtgctgaggccctgcagaggatgatcctgtccttgcccaccaccaagacctactttccgcatgtcgacgcgggcgga

SEQ ID NO: 92972 - DNA, 532 bp, Homo sapiens
  misc_feature (1)...(532): n = a,t,c or g
aataatccttttcatcctatagtttccctgccctaaccctgtagtcaggcatatccccaaggagcccagcttttttccaatggagaatgacaattcataattaccaggcttcgtgcttgcctggagtgctgatgcccctataggccacttaaatgccaaagcactgcactgaagcattgtggctccaagcnnnnnnnnnnnnnnnnnnnnnnnnnnnnnnnnnnnnnnnnnnnnnnnnnnnnnnnnnnttacctccagattttaaaatattttagcaatcatctattttcccttccccaggctttttctcctccgtgacagccagagtaatccaaaggcatttgcactcacactgtgtcatcaccagaaaattaaaaatttccagatcttacctgtaagtattgatgctctcacaccaccccttgtggtttgttttctggtttcattcttaacgcacttttcaagatataaaccgacaagaccggtatgtatcacacagtttcaaggctgcagttaagacactctcaagaat

SEQ ID NO: 92973 - DNA, 393 bp, Homo sapiens
  misc_feature (1)...(393): n = a,t,c or g
cagcancacaataaaggcaggacatgcaggttcagaaaatggctttgaaaagaagaataaagggctgatagcagagagactaataagatagttttgcctcaagaaaaatcttacaaacattcttaggactcctcaggatcacatcctccaataaaaaacactgaatcaatgcacagctactttataatgatgacttaaataaaataccaatgcattcttctcttaaatctaacgagtaaaatacacatgaaagaaactaagtattaagcagacacacatttatggtcacacatgacttctaccaagttcctcacacctggcttgtggcaaaaacctccacttctgcagcactgcatattacatgttcacagactgtgcaaagtaatcatcacc

SEQ ID NO: 92974 - DNA, 346 bp, Homo sapiens
cagaatgatgataagccaatcttcttggtcttataagttgcttactgttttgcctaaatacccaaacaaaggccattttttcttttgctttgaagcccagtaattttactaaaatgtgtctgggtgttgtgggtcgtccatggtcagtgttctcatatatgctgctgagtgttttcagtaagtactttctaatctttttttaatttcagggagaatgttcttgaattataggtttaagcatttgttctgttccttgtatttggttttggtctctatggaaactcctattacccatataattggagttaggtcctctgtggagttgggtcccctgtggagttgggtt

SEQ ID NO: 92975 - DNA, 1740 bp, Homo sapiens
aagagctcagtctcttcaccaggggctcccagtccttccatctgggaggccaaggcggcttcgcgttctgagaatagacggaacctctgttactctgtgaccggcaggcaccgggagatccgtagctcagacgccaggacatcccggaagctgggaaatggtctcgctgtctctaagccggacctgatcacctttttggagcaaaggaaagagccctggaatgtgaagagtgcagagacagtagccatccagccagatatcttttctcatgatactcaaggcctcttaagaaagaagcttatagaagcatcattccaaaaagtgatattggatggatatgggagctgtggccctcagaatttaaacttaaggaaagagtgggaaagtgaggagaaaaatcagtacaataaatctgatacaacattaagccaaggcataagccccagaagacatcagaaaactcattttctacataaccattgcaaacgtaaaaaatgtgagaaagcctttcatgaatgcaccaaccatgtccatcagagtatctttattcaagagaagtctgccaaatgtaataagtgtatagaaacttttatccagtcatcaaaacatactcagcctcagagaatccatattggagaaaagtcacacagatgtaataatggtgagaaaatccttagtaaattgtcaagtctaagaaaacataagataatccataatgaagagaaaccttacaaatgtaaagaatgtgacaaagcctttaaccatcgttcacaccttactcaacatcaaataattcatactggagagaaaccatacaaatgtaaagaatgtggcaaagccttcaattctagttcatattttactagacatcagagaattcacactggagaaaaactttacaaatgtaaagcgtgtagcaaatgttttactcattcttcaaatcttcttgtgcatcagagaattcatactggagagaaaccttacaaatgtaaagaatgtggtaaatcatttaaagtgtcttcagcccttactcagcatgagagaattcatactggagagaaaccctataaatgtaaggaatgcagcaaagcctttaactgtaggtcgtacctaactaaacatcagagaattcataccggagaaaaactttacaaatgtaaatcatgtagcaaatctttttctcgttcctcaagtcttattgtccaccagagaattcatactggagaaaaaccctataaatgcaaagaatgtggcaaagcctttaattgtagttcacgccttactcaacatcaaagaattcataccggagagaaaccctacatatgtaaagaatgtggcaaagcctttaactgtagttcatcccttactaaacatcagagaattcatactggagtaaaactttacaaatgtaaagcatgtagcaaatctttctctcattcctcatgtctttctgtgcatcagataactcatactggaatgaaaccatatatatgtaaggattgtggcatctcctttaaccggtcttcaaaccttagacgacatcagatgattcatactggagagaaaccctacaaatgtaaagaatgtggcaaattatttaatcgatgctcaacccttactcgacataaaagtattcatactagagaatttctatagctggagtaaatgggaaaagagttttatccaaaatttagaacttagaaatcaccatagagcttatagggaaaccgactttacaag

SEQ ID NO: 92976 - DNA, 709 bp, Homo sapiens
tttaagtttatttttaacaacaaaaaaatctgtatttttctcctaaaaggtaccaaaatttgggcaactataaatgtttcattctatacttagaaataaaataaatggtttcttttttatcattatctgaaagaatggattgtctggcttcttgaaatccatggcctcttactgggacaggaaaggcattggagttatgtccctaggactaggaaagagtatggttcatgaggtcccgggccctctccataactctgcatttgggtcactaaatattgggtaggaaaaagtatttgtccattactttacttgttccaccacctaggagccaaaggcattagaaggtaattaatagtgatacggatagaatgcaagccacagtcacctccatccttctcaccatctctcaagcccatgtccttgacctttggtatttacatccatgtgacacgctctacctgaaatgtcacctttttccagcctgtcaaagttattcatccttcaacactgaggcagaaatgccacctcttcttagaagccccctagtctctggccccctcttctcccagcagcagcacacagcatgtgaagagccccctgacaggcgcctgtgcctatccagggcctctccagggcgctctaccggatacctgccctgaaggtatggctcctaatcaatgtggaattaaaaaagcaaatgatggctcat

SEQ ID NO: 92977 - DNA, 392 bp, Homo sapiens
  misc_feature (1)...(392): n = a,t,c or g
acgatcaaatgtcatcactccctccactagtgttctatcccacagggaataaagtccttgccatgacttataagagctgcgtgatctgacctccaccagatcatccatgcttatttcctatcactgtctccctggttcactatgctctaactggcctgccgaccttttcattttggaacacactcaacccacttctagctggtggctttttcctttgctgtttcccgtctagaaaggctcttctcttatgtccttgggagactggctcttgctctcccttaggtctcagctcagaaatgtcttacctgctgactacatgtaaagcaaaaccccaccccactccccaccacacattgcctatacagntattctgatctacttatgggatttat

SEQ ID NO: 92978 - DNA, 392 bp, Homo sapiens
  misc_feature (1)...(392): n = a,t,c or g
caggggttttcccctccccacgttgttaaaagacggcccgggaaattaatttagggggccccataaaaaaaatattcactcgcacgcccgggtaagtaaactttgttccttttaaacggccgccccnnnnnnnnnnnnnnacatgtaggtatatatgtattagccagctgttgccatgtgacgaattacccccccgccaaaggttggcagcttaacacaacaaacatttatcatctcatccatgttctgagcattaggaactcaggagctgctgagccggctgttcccgtgatcagtgtttggggcaccaccacgaggcgatttgtgggccataccaaggatgtgctgagtgtggccttctcctctgacaaccggcagattgtctctggatc

SEQ ID NO: 92979 - DNA, 479 bp, Homo sapiens
cggcgcccattgcccgtcgtgcagcattcggcacgagctctggctagtgaaatgcccctcatggacaatccctacgacctggccaacagtggcctgtctcaaacagacccagaaaaccctgacctggggatggaggccacagataagacaaaaagcagggtgtttatgatggctcggcagtacagtcagaagattaagaaggcgaatcaacttttaaaagtgaaaagtctggagctggagcagccgccggccagtcagcatcagaaatccatgcacaaagacctggctgccatcttggaagagaagaagcaaggagggcccgccattggtgccaggattgctgagtattcccagttgtatgaccagattgtattcagagagtctcccttgaaaattcagaaggatggctgggccagccctcaagaatcctccctcctgaggtctgtgtcaccttcccaggtccaccatggtagtggaga

SEQ ID NO: 92980 - DNA, 2030 bp, Homo sapiens
gaaggtcagacatacgttggtagagacgatgcttccacggagcaagatattgttcttcatggccttgacttggagagtgagcattgcatctttgaaatatcggggggacagtgactctgatacccctgagtgggtcccagtgctctgtgaatggtgttcagatcgtggaggccacacatctaaatcaaggtgctgtgattctcttgggaagaaccaatatgtttcgctttaaccatccaaaggaagccgccaagctcagggagaagaggaagagtggccttctgtcctccttcagcttgtccatgaccgacctctcgaagtcccgtgagaacctgtctgcagtcatgttgtataaccccggacttgaatttgagaggcaacagcgtgaagaacttgaaaaattagaaagtaaaaggaaactcatagaagaaatggaggaaaagcagaaatcagacaaggctgaactggagcggatgcagcaggaggtggagacccagcgcaaggagacagaaatcgtgcagctccagattcgcaagcaggaggagagcctcaaacgccgcagcttccacatcgagaacaagctaaaggatttacttgcggtgaaggaaaaatttgaagaggagaggctgagggaacagcaggaaatcgagctgtagaagaagagacaagaagaagagacctttctccgcgtccaagaagaactccaacgactcaaagaactcaacaacaacgagaaggctgagaagtttcagatatttcaagaactggaccagctccaaaaggaaaaagatgaacagtatgccaagcttgaactggaaaaaaagagactagaggagcaggagaaggagcaggtcatgctcgtggcccatctggaagagcagctccgagagaagcaggagatgatccagctcctgcggcgtggggaggtacagtgggtggaagaggagaagagggacctggaaggcattcgggaatccctcctgcgggtgaaggaggctcgtgccggaggggatgaagatggcgaggagttagaaaaggctcaactgcgtttcttcgaattcaagagaaggcagcttgtcaagctagtgaacttggagaaggacctggttcagcagaaagacatcctgaaaaaagaagtccaagaagaacaggagatcctagagtgtttaaaatgtgaacatgacaaagaatctagattgttggaaaaacatgatgagagtgtcacagatgtcacggaagtgcctcaagatttcgagaaaataaagccagtggagtacaggctgcaatataaagaacgccagctacagtacctcctgcagaatcacttgccaactctgttggaagaaaagcagagagcatttgaaattcttgacagaggccctctcagcttagacaacactctttatcaagtagaaaaggaaatggaagaaaaagaagaacagcttgcacagtaccaggccaatgcaaaccagctgcaaaagctccaagccacctttgaattcactgccaacattgcacgtcaggaggaaaaagtgaggaaaaaggaaaaggagattttggagtccagagagaagcagcagagagaggcgctggagcgggccctggccaggctggagaggagacattctgcgctgcagaggcactccaccctgggcacggagattgaagagcagaggcagaaacttgccagtctgaacagtggcagcagagagcagtcagggctccaggctagcctggaggctgagcaggaagccctggagaaggaccaggagaggttagaatatgaaatccagcagctgaaacagaagatttatgaggtcgatggtgttcaaaaagatcatcatgggaccctggaagggaaggtggcttcttccagcttgccagtcagtgctgaaaaatcacacctggttcccctcatggatgccaggttcaatgcttacattgaagaagaagtccaaagacgccttcaggatttgcatcgtgtgattagtgaaggctgcagtacatcttcagacacgatgaaggataat

SEQ ID NO: 92981 - DNA, 967 bp, Homo sapiens
ttttgtggtccttagtcagtgtggtggaattcctaggttcagacgttagtgaagtgaatactcaccgacggtatcggaatgtgccatttggaccggtcggcagcagctacggttgccggtcccgcactgaaaaacgacagtggtgacgggtgagctcccagaagcagaagaatgacaggcaacacctgaagccacgcagccgccgccatcttcacagccgtggagtgcctaccgaaagcatttcaccctcttccggactcattgcgtacacgccctcaccgccgcccagtttcggttcctaacaaaagcacgttcctcatcagccacccataatcaagacaaatttgccaaataaatcattgtagaaacgctagtttgggcctgaaaaattccaggagcaagagtcaagatttgtcactccatgagaatctggaggggactcccttcccagaaacttgacgatgaagtactggttgtaattttagaaagacacccaatcggcttttttaaaagatcgcccagggcccttgtcctgagagctgggagctggtcggagtgacagagaagccatggaagcagcagtgaaagaggaaataagtgttgaagatgaagctgtagataaaaacattttcagagactgtaacaagatcgcattttacaggcgtcagaaacagtggctttccaagaagtccacctatcgggcattattggattcagtcacaacagatgaagacagcaccaggttccaaatcatcaatgaagcaagtaaggttcctctcctggctgaaatttatggtatagaaggaaacattttcaggcttaaaattaatgaagagactcctctaaaacccagatttgaagttccggatgtcctcacaagcaagccaagcactgtaaggctgatttcatgctctggggacacaggcagtctgatattggcagatggaaaaggagacctgaagtgcca

SEQ ID NO: 92982 - DNA, 732 bp, Homo sapiens
atcctagagcagtggaattcgtgaagttagaggtctttacattttataatattgaatgtaatcatatatgctgcaaataattacacaatttattttaacaaaacactttcgattataaaataaacatattacaattataaaatcatgccattttgattttttgtcaaattcttatataaagactggcctttcagtggttaatatgttagatcttgtattttctgcacctagcttcacattgtcttgaatttaaattttgctgttagaaatgggatagactttgttttgctgtgacatgctcagttctttgttgtgaaattttgccaagccttgatactgcatatacagtacccatggcactctgattgctagtttgatttctgttgagggtgacctcttgtttatgttaacatttcctttgggatcccgttttattgtttaagtgaggtttcttcctttaaagtctttttgggtttagatcagcttgattttttggctttattttatttatttatttgagactgcgcgtctggaaccgaggggggccaccactcccatgcctgggcccgcacgcccgaccccccccttccgacgcctaaccctccacaacgcaagctacacgttcgcgcccagcaaccgccaccatccccacccccatccgaacggctatcggcacgcgcttccatgtcaccccccacacccctccccatcctgaatcccccaccgcccacg

SEQ ID NO: 92983 - DNA, 746 bp, Homo sapiens
gtaaccactgtgtagtaattcctttaactcggaactctgctggggtggcccttgaccctatcctaagaacctttaactcggaactctgttggggtggagggcccctcttttcagccggtgtcttgccttccattctcccttcatcctgctcaacaccccgaagctggtgaaaacagcagagctgcccccggatcggaactacgtgctgggcgcccaccctcatgggatcatgtgtacaggcttcctctgtaatttctccaccgagagcaatggcttctcccagctcttcccggggctccggccctggttagccgtgctggctggcctcttctacctcccggtctatcgcgactacatcatgtcctttggactctgtccggtgagccgccagagcctggacttcatcctgtcccagccccagctcgggcaggccgtggtcatcatggtggggggtgcgcacgaggccctgtattcagtccccggggagcactgccttacgctccagaagcgcaaaggcttcgtgcgcctggcgctgaggcacggggcgtccctggtgcccgtgtactcctttggggagaatgacatctttagacttaaggcttttgccacaggctcctggcagcattggtgccagctcaccttcaagaagctcatgggcttctctccttgcatcttctggggtcgcggtctcttctcagccacctcctggggcctgctgccctttgctgtgcccatcaccactgtgg

SEQ ID NO: 92984 - DNA, 540 bp, Homo sapiens
tgagtccctagtccgtgtggtggaattcagacgctgggccggcgggcggtggccgtgcagagctccgcagacgtctgtgccacccagagccggcgggccgctaggtccccggagaccctgctatggtgcgtgcgggcgccgtgggggctcatctccccgcgtccggcttggatatcttcggggacctgaagaagatgaacaagcgccagctctattaccaggttttaaacttcgccatgatcgtgtcttctgcactcatgatatggaaaggcttgatcgtgctcacaggcagtgagagccccatcgtggtggtgctgagtggcagtatggagccggcctttcacagaggagacctcctgttcctcacaaatttccgggaagacccaatcagagctggtgaaatagttgtttttaaagttgaaggacgagacattccaatagttcacagagtaatcaaagttcatgaaaaagataatggagacatcaaatttctgactaaaggagataataatgaaggtgatgatcgaggctcgtacaaag

SEQ ID NO: 92985 - DNA, 721 bp, Homo sapiens
cgatgccgcgtttcagggaggcgctccccccctgcatgcccctttatttcccttcccaaaggtcccattttcttgttgccccctagggggttagaatttccaccttttcagcatataaatttgtttggggttgaggagagcccaaccatcagtctattgcaggtgatgcctgttttcttataaaccaataagaattatatttgccaaagaatcagtgtgatagtatttgtgactcattcataaaaatgtttgattgtcttccatcaagaaactcctaccaagttaagttaatgagcagtggaggtggcaaagcaatacttgagaacttttatatgctgtgtcattagaacccatcatgatttgcaggcagaatataaaatctttggcgttcactacttagagtcattatcaccacatcacaaaaccaggctgtgacctcaggatccttgccaaatgccactgaacacaggggtgtcttgcttcacagggagaattggagacttagcaggctttgatgtgtttgagagccccattgcacttccccggcttctctccagtaggggagtccgcctgctgttttgcggctcgccggggtgcccacccccaacagtaaagggatgggtgcaggtcacacacaccacacttcacacgaatggaaagggcgaggacccgcctctgcccgagcccaccgcacataccattcgaattacccggaacgggc

SEQ ID NO: 92986 - DNA, 396 bp, Homo sapiens
gtcgaagatcttgtacctgtcgttcgcagtggctcactttcccaagccatgggcagcaggaagaaggaaattgccctgcaggtcaacatcagcacccaagagctttgggaggaaatgctcagttccaaaggactaactgttgttgatgtctatcaaggctggtgtggcccctgcaaacctgtggtgagcctcttccagaagatgaggatcgaggtcggcctggaccttctgcactttgcattagcagaggcagatcgtcttgatgtcctcgaaaagtacagagggaagtgcgagccaacctttctgttttatgcaggaggagaactggtggctgtggttagaggagcaaatgccccactgctgcagaaaaccatcctagaccagctggaggccgaa

SEQ ID NO: 92987 - DNA, 1003 bp, Homo sapiens
atgatcggctatctcgcggctgtggatatggaaaaacagcaaatctccccggcgcaggtcgttgttcgccacaatcgttgcccggcgatagtggtacatctcattggccgtgcgcgggagcttagcctcaaggatcttgttgtaggcataaaaaaccaacccgctacagtcaaagcctttatcaggccgcgtaccgccccagacgtaaggcttgccaagctgctgctccaggcggtgaatcgccacttcgaaggcgtcgtcatcacgacgctggcccgttatttgttgggtgaaaagtgcggtaatcgattgaaaaccatagatgagctggcaaatgaatgccgttcatccgttggcctgacgcaggccgcgttgaaaacgctggaatcaagcggagcgatacggattgaacgccgtgggcgcaatggcagttatctggtcgagatggataacaaagcattgctgactcatgtggatatcaacaacgtggtatgtgcaatgcccttgccctatacccgtttgtacgaaggcctggcgagcggattgaaagcccagtttgatggcattcctttttactatgcgcacatgcgtggcgcggatattcgcgtggagtgtctgcttaatggcgtgtatgacatggcggtggtttcgcgactagcggcggaaagttatctcacgcaaaaaggcttatgcctcgcgctggagttggggccgcacacctacgttggcgagcaccagttgatttgccgtaaaggcgagtccgcaaacgtgaagcgcgtggggctggataaccgttcggcggatcagaaaatcatgaccgatgttttttttggcggtagtgatgtggaacgagtcgatctctcttatcacgagagtttacaacgcattgttaaaggcgatgtcgatgcggtgatctggaacgtggtggcggaaaacgaactgaccatgctgggattagaggcgacgccgctcacagacgatccgcgatttttacaggccaccc

SEQ ID NO: 92988 - DNA, 787 bp, Homo sapiens
  misc_feature (1)...(787): n = a,t,c or g
ctagccactgtggtggaattcgagatgtttgctcttcctgatggatgggaactctctaaagcacagcaacttctcctatgccttgtgtgcaaataactgtcttgcagtttgcagtttgcacgtggaagtttttctcgtgttgtgaaatccacgtgtcctttcctcagggcctggcttgctggagtgcgtagagagcagtcccttgctgggcttatgtatgcaagggtagcctttgcccagattctcaccaccgttttaatgaattactgcttaacctgtaattgtataaccaatctagcattaatttttgtgtaaggtttgagagccagctatctagatctatccccaaacaatgggcgtgatcgagtaatccatttcttttccctggtgggcatatgcctgcctcttagttgccgtaggggccccttctgtgttctgctgtctccacctgcagctctgtggccttttcacatctgccaggacaggcccaccctcctcttcaccggccctgtgaaaggccctgcggggaccatgtgctttttcttccagatgaattgtgcagggtgtgtcaagttctaaaatgtctcggtgggacttagcaattatcttggtttatttggaggggagcccccccccccccccccccccttattttttctcccccccccccccccccccccggggggaantgggatatgggaggaagaattagggtgatttaggtgttaggtagtccggctgganggagttgggagaagagggacccccccccccccccccccctggc

SEQ ID NO: 92989 - DNA, 1391 bp, Homo sapiens
atgatctcctatccttttccctcttttcccccaaatgaggaggacaatgaagatctgaagtgccagctgcagtttgttaaggaagaagccgctttgatgagaaagaaaatggccaagattgataaagaaaaggacagatttgaacacgagctccagaagtacagatccttttatggggatctggacagtcctttgcccaaaggagaagccggaggccctcccagcactagggaggccgagctcaagctacggctaaggctggtggaggaagaagccaacatcctgggcaggaaaatcgtcgaactggaggtggagaacagaggcctgaaggcggaactggacgaccttaggggcgatgacttcaacggctcggccaacccgctcatgagggagcagagcgaatccctgtcggagctgcggcagcacctgcagctggtggaagacgagacggagctgctgcggaggaacgtggccgacctggaggagcagaacaagcgcatcacggcggagctcaacaagtacaagtacaagtccggcggccacgacagcgcgcggcaccacgacaacgccaagaccgaggccctgcaggaggagctgaaggcggcgcgcctgcagatcaacgagctcagcggcaaggtcatgcagctgcagtacgagaaccgcgtgcttatgtccaacatgcagcgctacgacctggcctcgcacctgggcatccgcggcagcccccgcgacagcgacgccgagagcgacgcgggcaagaaggagagcgacgacgactcgcggcctccgcaccgcaagcgcgaagggcccatcggcggcgagagcgactcggaggaggtgcgcaacatccgctgcctcacgcccactcgctccttctacccggcgcccgggccctggcccaagagcttctccgatcggcagcagatgaaggacatccgctcggaggccgagcgcctgggcaagaccatcgaccggctcatcgccgacacgagcaccatcatcaccgaggcgcgcatctacgtggccaacggggacctgttcggactcatggacgaggaggacgacggcagccgcatccgggagcacgagctgctctaccgcatcaacgctcagatgaaggccttccgcaaggagctgcagaccttcatcgaccgcctcgaggtgcccaagtctgcggacgaccgcggcgccgaggagcccatttccgtgagtcaggcaattattggaaatagaatgctgccacccggtagtgataaatctaacatttctcgtagaagatataggtggattagttactccctggggcaatatggattagttcctgtgtccttcaaattgcactcaccaagcctgagccatgctttactgctgaaacatcctagcagagagaa

SEQ ID NO: 92990 - DNA, 1645 bp, Homo sapiens
agcttcaggcctggcggcggcttccaagctaaggaacggtttggggcagtgtcgttcccggaggtcggccgccgttacccgctcaccagctacgcggcgcgtcaggacactgcccatctctaagataagaacctggaaaggggactctgttggccattggaaattgcagaataatgtctcagcgtcagtacccagagtgttacctggcaccaaatggatgcttagtaagtaattgtggagtgaataagatgagtaatgaagaactggtggggcagaatcatggcatggaaggtgaagcttgcacaggaggggatgtgacatttagtgatgtggctatagacttctctcatgaagagtggggatgcctagattctgctcagagggacttatacaaggatgtgatggtccagaattatgagaacctggtctctgtagcaggtctttctgtaactaagccatatgtgatcacgttattggaggatggaaaagagccctggatgatggagaaaaaactgtcaaaaggtatgattccagattgggaatcaagatgggaaaacaaggaattatcaacaaagaaggataattatgatgaagattcaccccaaacagtaataatagaaaaagttgtaaaacaaagttatgaattttcaaattctaagaagaatttggaatatatagagaagttggaagggaagcatggaagtcaggtagaccatttcagaccagcaattctcacctctagagaaagccccactgcagacagtgtttacaaatacaatatatttagaagcacctttcattcaaagtctactctttctgaaccacaaaaaatttctgctgaagggaattcacacaaatatgatatattaaagaagaacttaccaaaaaagtcagttataaaaaatgagaaagtcaatggtggaaagaaacttttgaattctaataaaagtggggcagccttcagccagggcaaatctcttacccttccccagacttggaatagagagaaaacctatacatgcagtgaaggcgggaaagcctttggcaaacagtcaatcctcaatcgccactggagaattcatacaggagagaagccctatgaatgtcgtgaatgtgggaagacttttacccatggctcatcccttacacgacatctgataagccatagtggagagaaaccttacaaatgtattgaatgtgggaaggcctttagccatgtctcatcacttactaaccatcagagcactcacactggagagaaaccatatgaatgtatgaactgtggaaagtcttttagtcgtgtgtcccatcttattgaacatctaagaattcatactcaagaaaaactctatgagtgtcgtatatgtggaaaggccttcattcataggtcatctctcattcaccatcagaaaatccatactggagagaagccttatgaatgtagagaatgtgggaaagctttctgctgtagctcacaccttactcgacatcaaagaattcacactatggagaaacaatatgaatgcaacaaatgtctgaaagtctttagtagcctctcatttcttgttcagcatcagagtattcatactgaagaaaaaccctttgaatgtcagaaatgcaggaaatccttcaaccagcttgaatc

SEQ ID NO: 92991 - DNA, 468 bp, Homo sapiens
gtgcggtacgcccttcttgatacccttacagtccaggcctgcaaaacccggccggaactaccgggacgacaccacgcgttcgtacaataaccagatagcctctgttttctttttcttttcttcggaatgagagactcagccataatagaaagaatggagaactattaaccaccattcttcagtgggctgtgattttcagaggggaatactaagaactcagttttctgtgcttggaccctctgggcccatcctggccatggtgggtgaagacgctgatctgccctgtcacctgttcccgaccatgagtgcagagaccatggagctgacgtgggtgagtcccatcctaaggcaggtggcgaacgtgtatgcagatggaaaggaagtggaagacaggcagagtgcaccgtatcgagggagaacttcgattctgcgggatggcatcactgcagggaaagctgctctccgaag

SEQ ID NO: 92992 - DNA, 469 bp, Homo sapiens
  misc_feature (1)...(469): n = a,t,c or g
agggggcgcccgcgccgccatattccctcccgccggccggctccgcggcgcgcagccaccatgagcaccgccgccttccacatctccagcctcctggagaagatgacgtccagcgacaaggacttcaggttcatggccaccagcgacctgatgtcggagttgcagaaggactccatccagctggacgaggacagcgagcgcaaggtggtgaagatgctgctccggctcctggaggacaagaacggtgaggtgcagaacctggctgtcaagtgcctgggtcctctggtggccaaagtgaaggagtaccaggtggagaccattgtggacaccctgtgcaccaacatgcggtcagacaaggagcagctgcgagacattgccggcattggcctcaagaccgtgctctcggagctccctcctgcagccacaggctccgggctggccaccaacgtgtgccggaagatacaagccn

SEQ ID NO: 92993 - DNA, 496 bp, Homo sapiens
gaattcggcacgaggggaatcgtgtcttactcatctttgtatccccagtgtctagcagttcctgatacatagttttagctgaattttgggacatggccactgcttcaccaaggtctgatactagtaataaccacagtggaaggttgcagttacaggtaactgtttctagtgccaaacttaaaagaaaaaagaactggttcggaacagcaatatatacagaagtagttgtagatggagaaattacgaaaacagcaaaatccagtagttcttctaatccaaaatgggatgaacagctaactgtaaatgttacgccacagactacattggaatttcaagtttggagccatcgcactttaaaagcagatgctttattaggaaaagcaacgatagatttgaaacaagctctgttgatacacaatagaaaattggaaagagtgaaagaacaattaaaactttccttggaaaacaagaatggcatagcacaaactggtgaatt

SEQ ID NO: 92994 - DNA, 529 bp, Homo sapiens
  misc_feature (1)...(529): n = a,t,c or g
tgagtgcgcnggnnnttnngnnnnaaccttgatngccngtagnatttcgcacgcgctcgctgttcgttcgagctccttcatcagcccgaggacggtgccctcaacactaggccacgccttgtctccgcccctctcgtccgacccctggagagaggctggcgcctgcgcgatggggggttccagcgtcgactcacggagtccttcggatgagagcgtctgggtgccagacgaggccggggccttgccctcccaagacactgttcttcaagagaaagaccagaagagaaggcaaaaatgaatgttgaagtagtaaaagtcatgccccaggacttagtgacattcaaggatgtggcaatagatttttcccaggaagaatggcaatggatgaaccctgctcagaagcgtttatacaggagtatgatgttggagaactatcagagcctggtatcacttggtctttgcatttctaagccatatgtgatctccttattggagcaagggagagagcctttggagatgacnagtgaga

SEQ ID NO: 92995 - DNA, 793 bp, Homo sapiens; identical to SEQ ID NO: 62390

SEQ ID NO: 92996 - DNA, 911 bp, Homo sapiens
agcgcgcccatacatacggaggctgtaaaaccttgaggagattcatcttgcaggctctccttccatcaagtctctcctccctagcgctctgggtccttaatggcagcagccgccgctaccaagatccttctgtgcctcccgcttctgctcctgctgtccggctggtcccgggctgggcgagccgaccctcactctctttgctatgacatcaccgtcatccctaagttcagacctggaccacggtggtgtgcggttcaaggccaggtggatgaaaagacttttcttcactatgactgtggcaacaagacagtcacacctgtcagtcccctggggaagaaactaaatgtcacaacggcctggaaagcacagaacccagtactgagagaggtggtggacatacttacagagcaactgcgtgacattcagctggagaattacacacccaaggaacccctcaccctgcaggccaggatgtcttgtgagcagaaagctgaaggacacagcagtggatcttggcagttcagtttcgatgggcagatcttcctcctctttgactcagagaagagaatgtggacaacggttcatcctggagccagaaagatgaaagaaaagtgggagaatgacaaggttgtggccatgtccttccattacttctcaatgggagactgtataggatggcttgaggacttcttgatgggcatggacagcaccctggagccaagtgcaggagcaccactcgccatgtcctcaggcacaacccaactcagggccacagccaccaccctcatcctttgctgcctcctcatcctcctcccctgcttcatcctccctggcatctgaggagagtcctttagagtgacaggttaaagctgataccaaaaggctcctgtgagcacggtcttgatcaaact

SEQ ID NO: 92997 - DNA, 1394 bp, Homo sapiens
atgcaggccaaaaacttagaaaaaaccgtccagactgaaagtaaaaattggtgcacgatgagccagtatggcctctttcgaggactcggccctctcggatccgctccccggagctcgctgctcgtccagccccgctttgcgcgggcgccgaccgccgatcgcccggccggccgccggcaggcccgtcaccaggcaacacccaccagcctgagcggccctgggaggcctaacccgggcgcgagtcctccattccctcctcgccggctccgggagcccaggcgagagagccgccggaggggcggtgctggggctctttccccccgcccccctaataaacgcctcctggctgttcctgctctgccttcgtgcctggccactgactctggctttactccatatcctccgccgcccccgcggccgcaaacgtcggagctagaaggaaaggggtggggaggggagggaccggggacgaagagtaagggagggggaaaaagactaaaagacctgccggccgggggcatgacgtcacttcctgccggttcggaagaggcggagccagtacttctctccgccccgggtgtcaggtggggcggggctatggtgccaggggaggagccagcgcgcgagcttatggcggttcttttgactccgaggttccgtagacttgtcagtcagaacgagcttccgggcccagggctgaacgggccaagttccaggaaccgtagagatggcttctgccggaaaaggaggacaggatgctctggtccttttcaagctactcagctatgggatggtattattcactctcttcaggcccaagtggaaataaaaagaaggaggcatcatttacagacatacaaagactgtttcactggttctgatgctgtcgatgtggtcttaagtcatcttatgcaaaacacgtgcctaagtagcaatgacatctcttgtcttaaaggggttcatctttgccaagttctaatgaatcacaaagtatttgaaccagtaggaatgaagaagcttttcaaaaaagaaaaggaattagaatttgaagattccaacattagtctctacaggtttctaggcaataaatcatcttacgattgttgcaaaagacaaaaggatgctgagaatgagttcaatgaaaccttgagaccaggatatgaaatgatttcaaatcctctagcacaggagattggtgaggaaagaattgaggaacttattcatacaataaatgggaatccagctttatgtccaaatatcacagttcagaaaccttttctccggctttcaaaagaagatgtttggaaagaacaaacattattatgtcttcttcaattgattcaccttccattcttggacaatattttggagccttcagttaaaacacaaaatct

SEQ ID NO: 92998 - DNA, 396 bp, Homo sapiens
agacagacggacgggaccccctgccttgcgcagccaggcgtcgaggaggcggcggcgagtgctgcggtgctggctgggtggccgagtggtccccgcagcctctggacccagccatgctgctctggatgcagggcttcgtgctggaggcggtggcctgccaggataacgatgactacttacgctacgggatcctcttcgaagacctggattgcaatggggacggcgtggtggacatcattgagctccaggaggggctgagaaactggagctccgcgtttgaccccaactccgaggagcatggatagtgatggatcaatgacagtagactgggatgaatggaagtactactttttactgcatcctgcaacaaatatcactgaaatgattcatttctgg

SEQ ID NO: 92999 - DNA, 436 bp, Homo sapiens
  misc_feature (1)...(436): n = a,t,c or g
cgtgcggaggaattcgctgggaagccacagcagcctccaccaccctcagttctttgggatcacccccagatacctgctcccactgccccgacactcccgactccaggcccaatgactgaaccttctctccaggctgggaaccactcccctcccatcccctccatccccatatctggggttgcatctatatctaggtcccagtgggcctggggactccctcttttaagtcctcccctctgacctattccgtttatatcccacccgactgattttagcgcctccaatatatgactgattgttcccgctggaaaccagtgtttgtgtctgtgtgtaaacagggccaggatgacctagaatattgactcctgagttttaaaactgtacagcagatttttgttgtcctaggtgcctttaggaaaatncccggattgaacca

SEQ ID NO: 93000 - DNA, 715 bp, Homo sapiens
agccactcctaatgcctgcattgttcaagcatcaactatattttgtagttctatagagattccaagagttatgttatggtttttacactttagtaaattgtgtgtcccaccaatgacatggtaattttatgttacattattattatattgttgggtattgatgtattttacataagattttatttcacattttccaacttaaaactaggtgttggtattgatatttgtcttttgcagtaaattaccttacattagtcttttaaaatagtttttaaaaaggtgaaagctattatttgttattttgtaaagttttaaatcagtaaagactaataaatctagaagtagattcctagatataaacttttgtctaaaatattttaaaatatttggtttaaaaattaggacatatcttggcaatttttcctattaatatgagtgtctctctctctccctctctttctcaaaatcttaagaatgtttagaagtctaatcttagagacaagactaaattgcatagtgagactaaacatagcatccactgtactttagtatctctgtcctcataggaatttttcaagttaaagttatttaggaaatataaaatatgttgccataattatccctacaaactctactaacctactgtacacatctgagtatgttgaacttttgtgattccactaaagaattcagtcagatcataaacattgtgggc

SEQ ID NO: 93001 - DNA, 447 bp, Homo sapiens
  misc_feature (1)...(447): n = a,t,c or g
ggaattgatnccccttgnnnnnnccttgaggactctctantccatgtggtggaattcgtaggttgtgaatcctaggaatcaggtttttaaggaacagtttatcttaaatattttaaggtctatatatttggtatgcttatttgaaatgtagcagagcatttatattttttataatttttgatagcttttaaaaaatgatttaaataattagctaataacgatgcctattttaacaaataaaaattacttatagtaaaatcgaatatgctacagtttattacatggatttagatttagcaccattcaaatggattgtctggtacttgacatctacttacgtataaaagttttatgtaacagtttttacatggtgtttgcattgtcattcatgtttccttttctttgctggtttatctctgtttaagaccttctgcactgataaagaat

SEQ ID NO: 93002 - DNA, 947 bp, Homo sapiens
agcttcatcccaccgggcaattttcctgcacagcagctgttacagtcccattctcacctggcccctggcagtatcggaagcctctgagcagcacttgcacctcctgcgccgccgccccccatccaaggatatgcattcaagcctccacctagacccgactttgggacctccgggagaacaatcaaattacaggccaatttcttcgaaatggacatccccaaaattgacatctatcattatggattggatatcaagccagagaagtgcccgaggagagttaacagggaaatcgtggaaaatatggtccagcactttaaaacacagatctttggggatcggaagcccgtgtttgacggcaggaagaatctatacacagccatgccccttccgattgggagggacaaggtggagctggaggtcacgctgccaggagaaggcaaggatcgcatcttcaaggtgtccatcaagtgggtgtcctgcgtgagcttgcaggcgttacacgatgcactttcagggcggctgcccagcgtcccttttgagacgatccaggccctggacgtggtcatgaggcacttgccatccatgaggtacacccccgtgggccgctccttcttcaccgcgtccgaaggctgctctaaccctcttggcgggggccgagaagtgtggtttggcttccatcagtccgtccggccttctctctggaaaatgatgctgaatattgatgtgtcagcaacagcgttttacaaggcacagccagtaatcgagtttgtttgtgaagttttggattttaaaagtattgaagaacaacaaaaacctctgacagattcccaaagggtaaagtttaccaaagaaattaaaggtctaaaggtggagataacgcactgtgggcagatgaagaggaagtaccgcgtttgcaatgtgacccggcggcccgccagtcaccaaac

SEQ ID NO: 93003 - DNA, 724 bp, Homo sapiens
ccgacggtggagtaattcaaccaagtagtcagttctatgattttggtgacaggttgtgcctgccatgacaatcagtgtctcaggttactgctcaggagactgtttctgattgtcacatcctggtgcttgcttttgtgattttagtacccaaatagaatgtattaaggaattcattaaggaaattgttttataatggttttgatgggggaagggtgtattgtaaaatatactgttttataatgaattgttggtaaatctattactatgaagatgcatgtagcacgtgctagacttcaagaggaataagtcacacacgccagtctgtttcactgacatgttttggattcatgatttgttaaagtatgttttctcaaatgtgttttcttttgtgtgcatggaaagtgttcagataaatatggtgtattaactgtaaagttgtaatgtaactacgcataaagttgtaatggcagattttttacactaatttttaatacttcatttgttagcagtcttgcttgaacagtctttttgagcagaactaatacaatattttgatgtgccacaggtaaatttttccataaccttatggagagaaaggactttgagacatggcttgataacatttttgtacatctgttttctgacggacttgacaagaatgaactctgcatacctgatagtctgagtgagcatcccgctctgcactcgtccaggactacaacct

SEQ ID NO: 93004 - DNA, 52 bp, Homo sapiens; identical to SEQ ID NO: 92891

SEQ ID NO: 93005 - DNA, 648 bp, Homo sapiens
cttgtctttatccctctagatactctcctggtccttagttatttagtaaatttcattctgtctgctcattcacgtccctcacctccaaccatgcctcctatgacattgggaattctcgttcttgattgtgtagccgtctccggttgggatactctgaatgagatgtgtaggcatgctagatcatgactggagcagcttctctaaatgtgactgccattgcgacagtggcctcctgcttaggctttccctgggttcttgtcaagaatgagctcgtttttataaggggtattataattctgacgtggccttactcttgactattgatggtaactatttttcttggcatctgaaatcaaagagatggaaacccggcccctccttctaaattctatggattcagtaggattaggaatgcttactgagagtactgataaaccaaacattacttatgtctcatcatgaaaattattgagtaaaataatgttttgtgaagtcaatcatatataaacttttttatttttacatataaaattccctatttaaaataattttatgattaaagcttttataaaataattttcacctaatttgtgttgctcaaaggagcttctgctaagattcaagggctcccaggggtttccctgtaca

SEQ ID NO: 93006 - DNA, 375 bp, Homo sapiens
caccatggactggacctggaggatcctctttttggtggcagcagccacagctgtccactcccgggtccaacctgtgcagtctggggcagaggtgaagaagcctggggcctcagcgaaactttcctgcgaggcttctggataccccttcagtaactatgctatccactgggtgcgccaggcccccggacaaagccttgagtggctggggtggatcaacgctgccagtggcaaaacacaatattcacggaagtaccaggacagagtcaccattacctgggacagttccgcgagcacaacctacatggaattgaacaggctgacatctgaagacacggctgtatatttttgtgcgggtgatggctattacgatttccc

SEQ ID NO: 93007 - DNA, 300 bp, Homo sapiens
  misc_feature (1)...(300): n = a,t,c or g
ctctggtcaccctgcctaactagaggatctgtgaccccagccatgaggaccctcgccatccttgctgccattctcctggtggccctgctggcccaggctgagccactccaggcaagagctgatgaggttgctgcagccccggagcagattgcagcggacatcccagaagcgggtgtttcccttgcatgggacgaaagcttggctccaaagcatccaggctcaaggaaaaacacatgtggcnaactggnangcctcacttgtgatttccaaacaaaggatgctaaaaggcaacgcgtccga

SEQ ID NO: 93008 - DNA, 1220 bp, Homo sapiens; identical to SEQ ID NO: 62439

SEQ ID NO: 93009 - DNA, 339 bp, Homo sapiens
gggattccgaggtgtttccattcggtgatcagcactgcacacagaagactcaccatggagttttggctgagctgggttttccttcttgctatgtcaaaaggtgtccagtgtgaggtgcatctggtggagtctggaggacgcttgattcagcctggggggtccctgagactctcctgtgaagcctctggcttcgtcgtcagtcgcaactacatgagctgggtccgccaggctccagggaaggggctagagtgggtctcaattctctacagcggtggcaatacatattatgcagactccgtgaagggccgattcaccgtctccagagacaattccaagaac

SEQ ID NO: 93010 - DNA, 781 bp, Homo sapiens
tttcgtcgggaagtttgtgggaaagcgcatttgtaacgcgggcgacaacgtgcccgaaatccccggacggtgggtctgcatcgagaccccgagctctggagctggaaaaacccggatgccatactgctgttaacatatgtgacactggagactttgtccctacctcatagaatcccatgcatgatgatacatgaagggttttccgtggctatctacttctgattcttttgaaagctttaaagacattgggcatgaaaggttcagtgagtttccggggatccctcgtttgtggtagagccaggaggaaaacagttccgttcattctttcacagctgaggctttacagttctctatactctcccaagagccacagaaaatgaacacatttcaggcatcagtgtcattccaggacgtgactgtggaattcacccgggaggagtggcagcacctgggccctgtcgagaggacgctgtacagagatgtgatgctggagaactacagccacctcatctcagtgggatattgcattactaaacccaaggtgatctccaagttggagaaaggagaagagccatggtctttagaagatgaattcctgaaccagaggtacccaggatattttaaagttgatcacatcaaagggatccgggaaaaacaagaaaaacctctgtggcaagaaatattcatcagtgatgctgacaaaacattgagtaaagaaggacagaaagttttagaaaaaccatttaatctggaaatagctccagagctttcagaaaaaata

SEQ ID NO: 93011 - DNA, 463 bp, Homo sapiens
  misc_feature (1)...(463): n = a,t,c or g
ccatggcgtgaaataaatataaatgagccagtgctcccaaatgtatctctcattataggctctacagcaggttcatctgcaaaggctatggttgcacaacagacttctttaaattctctttctaaagttttattagataataaaattgctctagattacctatgaaaagagaggaatctgtgcagtttttgacacttattacacatagatgaatacctcaggtattatagagactcagtcacaggggattaaccaacaagctgcttagttaaaataggtagattcctcatctggttcattctttgatctatttgattttgattggttttgttcatggaaaacctggctaagaagcatactccaaactcttggtattatccttttgatagccataatagtagtctccctgatgtgccggaattccnccgcnctggcgtagtgttctacgaggctcaaanccccg

SEQ ID NO: 93012 - DNA, 443 bp, Homo sapiens
  misc_feature (1)...(443): n = a,t,c or g
gaggggcnnncncnnactgatnacattgcagatctctgagaccagcgnggnggaattcggggaaaggcccttcatctgggggatggtggaaggtacaggaataaggcctttagaaagccctggagaggggaaccatgtcttgtgcagccatcagtgcacccatcaaacatggagcccattgggtttccttgaaaatggatgacatatgtgtatgtttttaatatctctctttttccttttttaataaaaaagtattatcatagagcagacagagtttacagccaaacatattgccatgcattttctaaaaataaaataattgcctttataaaacaagaacataaagcagagatgctgctcagggaaggtatggcaagagagaaggaaatgaggcatgctcaaactggcagaacttgggaagacgtgaaagggaaacatacaan

SEQ ID NO: 93013 - DNA, 1380 bp, Homo sapiens
  misc_feature (1)...(1380): n = a,t,c or g
caaaacaaaaaacaatatttccatacctttcctctaatcccaaggaaacctaaagaacttgattaaaaagccgtggccaagagttcgaagtgaaagtcagccctttagctattatttattgctttattagagcagagggaagtgacactcattgccttcacagagctctgcagaaatatatgcacagagtggtcaatgaccaacatctgagtaagtcttccaaattatcacattaaaataacctttcaaatttgagtgcctctcctttgcaaacaactgcaacctcataatgaataattttatatattatcaaaaagaaccagaagcccaggtgcttttttccccaaaatccacttactaaggacttgagtgaaaatccactctaagcagatcactgttactatttccctttcaaaacagttggaaatcctaaggtacgggtactaagaagatagcaatatccttcttaagctggtaagaatctagccccacagggacaatttggcaatcctgtttctggaagccaggactccagagatttgtcttagtgatggacagatactcctctaaccttaaggcatgagggctgtcaaaacaaggctctgaatagtgccttcctgctcatcaatgtcatcacaatgaaggagagaacaggttttcgttttcctgaagagtggtcagtaggagtgcagtggtttggcatagatcggctccagaacataatggattaaaaccaagaagaggcctccaaggaagatggcactaaggaaagccagcaggacatagcggccaatgaaaaagtcatccacaatcttaacttccacttctggggctgggaattcaccagctcgcgggaaaagcaacagaactgatgtgatgatcacagcaccgaagaataaaaaaatgacagagaacctcgccgccccggaggctctggacagcagcacacacagcagcagcactgccacccagagcagggctaagatgaacacgcccgcaccgactccgagcacagtgccagccatcccgcggggaggcagcggcggccccccgccctgcgcgccgcacgatcgagtgtcctctgtgctccagtgcgacacacaggcaatggatcacaagacagaaagttcccactctgttgtcgagttcttattcaagaggacgaaaactcccagtccctttcatccagctgtcagagaaaataggaataaatggnctgatccctgcacaggtaactatctaagacaaatgtggattcctcagagggtaatgtggcctaagtgctgctgctggagggagatatctcacccatcccccgattctcacactgactcaagccctctgcccccttcaaaaggatccactctcccccaggctcta

SEQ ID NO: 93014 - DNA, 643 bp, Homo sapiens
  misc_feature (1)...(643): n = a,t,c or g
cccttataccaataatcaatttctactttgttagaagttggttatctgcatttactacatcccaagaactttaaagatgcatatattttaaagaatattcctttccctaaacctncccaaaacaagttaaaaaattgacccaggttataaatttaggttacataataaattatttctactatgataatttcatttaaattagagatcaattcttatgtgtaaaacattttcagtatctcaaaagtggcctaggctctaaattatccattatcaatggcacacaagtgctttagaacacacaattccccaaactgccctaagtatgagcttccaaatactgaaaaatggccttcctattctagtcaagtactatcaatatagtgaataaaactgaagctgacctattttgtctcctacgagaatacaggaaattttctattttaaatacagcattttgtttcaacataggagacatatttcagcagctcatgggttataactaactcaggtttcatatgattcaagtaagagaagtaacaaattactcaatgataacagctaccatttgttgaacacttacaagtatatccgatactgttcaaagcacttaacatatattatctcatttagtttttatgaaact

SEQ ID NO: 93015 - DNA, 409 bp, Homo sapiens
cgagccaccgcacctggccctgatgtatttttttaagtatccttttaatctgtgtatttttattttgtggcatttggttaatacttaaaaaggactaaatgtttttaaacagcaaattttaaggctttactcatttatgatataatcaccatatttttaaattgtgatttttagtaatttaaactactaattgaaattatttctataatattcaacaattccttgggctcatgaacaaacataaattttcaaacacacacattttttacctcgaccattttagcaacagaaaaatacacgatatcaactcaaatttatgtagtttatcattccttgaattaggaacagcttttttaaaaaaagaaattgagtttttaagcacaaatatactgaacaatcctatattcat

SEQ ID NO: 93016 - DNA, 1683 bp, Homo sapiens
tttcgtgcggggcgccaaggggcgcgccaggagctgctcgggcgctgggagggagaccagggcgcagttccgggcgcgtctgagcggttctcgaggcgttctcgcctcggtctctggcgagtgcacggatcaaaagcagcatggatctgcctgtggatgaatggaaatcatatctgcttcaaaagtgggcttcactcccgacgtctgttcaggtcacaatttctacagcagagaccttgagggatatctttcttcactcctcttcacttcttcaacctgaggatgagctgtttctaaaaagactttctaaaggttacttggtgggaaaggactcggacgctcctcttttctacagagaagaaggaaacaaaaaatttcaggagaaagattacacatggagctgcagcgctgaactctaagggagagtcacattcaaggcctaacactgaggacatgtcactgtgtcatgctaaccgctcggcagccctcttccacctgggtcagaatgagacgtgtcttaaagacattaacagagcacagacacatgggtatgcagaaaggttgcaacccaagattatgttacgtaaagcagaatgtctggtggccctggggagactgcaggaggcaagccagaccatcagtgatcttgaaaggaacttcacagccacaccagccctagcagatgtcctccctcagactctgcagagaaacctccatcgtctgaaaatgaagatgcaagaaaaggacagtctcacagaaagcttcccagcagctctggccaaaacccttgaggatgcagcgctgagggaggagaatgaacaactttccaatgcctcatcatccatcggcttatgcgtagatcctttaaaaggtcgctgtctcgttgccacaaaagatattctcccaggagagctcctggtgcaggaggatgcttttgtgagtgttctcaacccaggagaactgccaccaccgcatcacggcctagacagcaaatgggacaccagagtcaccaatggggacctctattgtcaccgatgtttgaagcacactttggccacagttccgtgtgacggatgcagttatgccaagtattgcagccaggagtgtttgcagcaggcctgggagctctaccacaggacagaatgtcctctgggagggctgcttctcacactgggtgtcttttgccacattgcccagaggttgactcttttggtgggatttgaggatgttcgcaaaatcataacgaagctttgtgataagattagtaacaaggacatctgtttacgtgaaagcaacaatcaggtcaagacacttaattatggcctaggggagagtgagaaaaatggcaacatcgttgagaccccaattcctggatgcgatattaatgggaagtatgaaaataattataatgctgtcttcaaccttttgccccacactgaaaaccatagcccagagcacaaattcctctgtgctctctgtgtttctgcactgtgcagacagctagaagcagccagtttacaggcctcccaaagtactgggattacaggcgtgagccaccgcgcccggccaaaatgaacaaaattttaaagtaaactatgggcctgaaaagaccaaaaaagaaaaaaataataaatgttacaattagagtaaaactttttttaaatttttatttatttttcttca

SEQ ID NO: 93017 - DNA, 333 bp, Homo sapiens
cggacgcgtgggtcattacaaattttcagtttgttttttaggtaataatgtgtgcttttgtgtgtctgtctgatacacacacacaagccctcttcaaagctttaaggaacattatagctatatgaaatgttcatatgttttcaaagagcaattgtaagctaaatggaattatttgtttttataatttaaagggtgtgtatataataagtccattccgtagccaaagaaatacttctaaatctctggtcatttattattttttgttaactgccagaaagtctgtaatcagttcagcttttgtttggttggttggttatttgccccacgcgtccg

SEQ ID NO: 93018 - DNA, 633 bp, Homo sapiens
tctccacaaacaagcagagggacacaggccgctcctcttccagcccctcctagggcgcagcaaagggctgagctccgggtaattctacagctgttcagcgagcacaagtcaggcactgcagggatggtgcagacgacaccacgccgtcgtccactggacaagatgaccccaaagcgcaaagctagagatcctcacgggacacagcggaagggcgcggggaaagccaggcaatgtcggacccaggcggcaccgggtctgggagtgatgtccgagctcagcgatgaagccagcgagccggaactcctgaaccgcagcttgtccatgtggcacgggctcgggacacaggtcagcggggaggagctggatgtccccctggatcttcacacagctgcttccattggccagtatgaagtggtgaaggagtgtgtgcagcggagagagttagatttgaataagaagaatggtggtggctggaccccgctgatgtatgcctcctacattggccacgacacaatcgtgcacctgctgcttgaggcgggggtgagtgtgaatgtgccgaccccagaagggcagactccactgatgctggcctccagctgtggcaacgagagcatcgcctactttcttctccag

SEQ ID NO: 93019 - DNA, 718 bp, Homo sapiens
aggtttcgactgtccgagctgcatagagacctgcctcccgcgacccaggaggccacagcagcaatcagcttctgcctcctggccatccttccacacccccggatgaatggggctgagcctgatctctccccactgaaggtaagttcggggagacttcaggccagggcagactcctgtcttctcttggaaaccacagcagcccatgcacacagaatggcagccacattccagcttccagggcaccaggagatgccgctgaccttccaggatgtggccgtgtacttctctcaggcggaggggcggcagctgggcccccagcagcgggcgctctaccgggatgtgatgctggagaactatgggaacgtggcctctctgggattccctgtccctaagccggagttgatctcccagctggagcaggggaaggaactttgggtcctgaatcttctgggagctgaggaaccagatatcttgaaaagctgccagaaaggtgagaatggatgggatgctaatcctgggagcagcctcccaatcctgccttaagaggctccaagcgagggacagctggggcatggcgttcatattaatggcctcccccaggggcagtctcacagatacagcccctctacaaatgtgagcatgtgcacatgctttagaagttttatcttgctggtctgtttctttgctttaaaaatatatatatactacttctgatcat

SEQ ID NO: 93020 - DNA, 402 bp, Homo sapiens
tttcgtccgaaagctccggagcgtggaggtggggggcctaggcccctgagggggccccgccgcgatgggcaacctggagagcgccgagggggtcccgggagagcccccctctgtcccgttgttgctgccgcccggcaagatgccgatgcctgagccctgtgagctggaggaaaggttcgccctggtgctgagctccatgaacctgcctccagacaaggcccggctcctgcggcagtatgacaatgagaagaaatgggatctgatctgtgaccaggaacgattccaggtgaagaatcctccccacacttacattcagaaactccagagcttcttggaccccagtgtaactcggaagaagttcaggaggagggtgcaggagtcaaccaaagtactaagggagct

SEQ ID NO: 93021 - DNA, 451 bp, Homo sapiens
tttcgtggagatgcgccgagggatggaggtgtatgtcaccgaggaggctgctgcgctcctgccccacgccctgggcccttgaagggctctgcgagtgacccggcgggcgagctccgtgctgcatggaacggctgcagaaggccaagatggacaatcaggtgctgggctacaaggacctggctgccatccccaaggacaaggccatcctggacatcgagcggcccgacctcatgatctacgagcctcacttcacttattccctcctggaacacgtggagctgcctcgcagccgcgagcgctcgctgtcacccaaatccacatcccccccaccatccccagaggtgtgggcggacagccggtcgcctggaatcatctctcaggcctcggcccccagaaccactggaaccccccggaccagcctgccccatttccaccaccctgagacctcccg

SEQ ID NO: 93022 - DNA, 590 bp, Homo sapiens
ttacgatttcgtgtggcccagccacagagccacctgcctcgctgctcagcagtgcctcctcagatgacttctgtaaggagaagaccgaggatcgctactcactgggcagcagcttggacagtggtatgaggaccccactctgccgcatctgcttccaggggccagaacagggggagctgctgagcccatgccgctgtgatggctcggtcaagtgcacacaccagccttgcctcatcaagtggatcagcgagcggggctgctggagctgcgagctgtgctactacaagtaccacgtcatcgccataagcacaaaaaatcctctgcagtggcaggccatctctctgacggtcattgagaaggttcaggttgcagccgccatcctgggctccctcttcctcatcgccagtatttcttggctcatctggtcaactttcagcccctcggcaagatggcagcgccaagaccttctcttccagatctgctacgggatgtatggcttcatggacgtgatgattgtggctgttgactctgaagatatggtccaagcagctaaggaggtggggaagcgctggtcagacatcccaccctag

SEQ ID NO: 93023 - DNA, 705 bp, Homo sapiens
ggcattgggcctggaaccccgggtcgacgatttcgtctgagagggacgcgtgccgcggagccaggcttactacgtgacccggacaccaggcatacgctaggggcagtcagctgtgccttctctttcggagttgttccgtgctcccacgtgcttccccttctccactggctgggatcccccgggctcggggcgcagtaataatttttcaccatgcatcggaaaaaggtggataaccgaatccggattctcattgagaatggagtagctgagcggcaaagatctctctttgttgtagttggggatcgaggaaaagatcaggtggtaatacttcatcacatgttatccaaagcaactgtgaaggctcggccttcagtgctgtggtgttataagaaagagctggggtttagcagtcaccggaagaaaagaatgcgacagctgcagaagaaaataaagaatggaacactgaacataaagcaggacgacccctttgaactcttcatagcagccacaaacattcgctactgctactacaacgagacccacaagatcctgggcaataccttcggcatgtgtgtgctgcaggattttgaagccttaactccaaacttgctggccaggactgtagaaacagtggaaggtggtgggctagtggtcatcctcctacggaccatgaactcactcaagcaattgtacacagtgactatg

SEQ ID NO: 93024 - DNA, 655 bp, Homo sapiens
agacgatttcgtgcgggctgatgcacttcgccgccgtccgactttcgccattgtgcggcgcgcgccgggactctgcccacttccaccagagacacattgagaaggaggaaactatggcctccaggcttccgacggcctggtcctgtgaaccagtgacctttgaagatgtaacactgggttttaccccggaagagtggggactgctggacctcaaacagaagtccctgtacagggaagtgatgctggagaactacaggaacctggtctcagtggaacatcagctttccaaaccagatgtggtatctcagttagaggaggcagaagatttctggccagtggagagaggaattcctcaagacaccattccagagtatcctgagctccagctggaccctaaattggatcctcttcctgctgagagtcccctaatgaacattgaggttgttgaggtcctcacactgaaccaggaggtggctggtccccggaatgcccagatccaggccctatatgctgaagatggaagcctgagtgcagatgcccccagtgagcaggtccaacagcagggcaagcatccaggtgaccctgaggccgcgcgccagaggttccggcagttccgttataaggacatgacaggtccccgggaggccctggacca

SEQ ID NO: 93025 - DNA, 411 bp, Homo sapiens
tttcgtcggggagcgctcttggggctcctcctgccacagccggggcggctggaactctctccctttctccctccatccttgcacttcccctgctcggccccgccgtcaggccgggccccccttccctgccgtcatcaggttccccttctcccttcttggcactttcctttcgaaccatccttctggacaaactttgatggagaatttcacaccacgctggaaaaatgccggttatgaaaggattactggcgccgcaaaacacctttctggacaccatcgccacccgttttgacggaacacatagcaacttcatccttgccaatgcccaggtggctaagggtttccccatagtctactgttccgatggcttctgcgagcttgctggatttgcccgaactgaagtcatgcagc

SEQ ID NO: 93026 - DNA, 430 bp, Homo sapiens
tttcgtagaggagcggctccggccgccgcgcctgacccttgtccggggtcttccgcacaggatagaccatgaagctgaaggaacttgagcggccagctgtccaggcatggagcccagccagccaataccctttgtatctggccacaggaacatctgcccaacagctagattcctccttcagcacaaatggcacattggaaatatttgaggttgatttcagggacccttctctggacttgaaacacagaggagtcctttctgccttgagcagggcaacctcctggcttcaggggccagcgattctgaaatcttcatttgggatctgaataacttgaatgtgccaatgaccctgggatccaagtcacaggtgagcagcacccccactacccaaccctggagtgtgcagctgattctcctaagaaaaagcttg

SEQ ID NO: 93027 - DNA, 650 bp, Homo sapiens
cccacgcgtccggcagctgtcttttccggcccccgtgcactctccgcccgaggcggagccccccggctcgcggggatcgcccccgagcgctgcgtcctgcgggtgggtcacctaacccatttgtggcttcctctacctgtgctcagccatggccagcgagagctcacctctgctggcctaccggctcctgggggaggagggggttgccctccctgccaatggggccgggggtcctggaggggcgtctgcccggaagctgtccaccttcctgggtgtggtggtgcccactgtcctgtccatgttcagcatagttgtttttctgaggattgggttcgtggtgggtcatgctgggctactgcaggccctggccatgctgctggttgcctacttcatcctggcactcaccgtcctctctgtctgtgccatcgccaccaatggagccgtgcaggggggcggagcctactgtatcctccaacatcgatggactggggtctggcctgttctgcctgctagggaggtcatgatcagccgcacactggggcccgaggtcgggggcagcattgggctcatgttctacctggctaacgtctgtggctgtgccgtctccctcctggggctggtggagtctgtgcttgatgtcttcggggccg

SEQ ID NO: 93028 - DNA, 1620 bp, Homo sapiens
gcgcctcgccgggtctccgcttatcacacctcaggtgcggtgggcttcgggtggggggcctgcagctagctgatggcaagggaggaatagcaggggtggggattgtggtgtgcgagaggtcccgcggacggggggctcgggggtctcttcagacgagattcccttcaggcttgggccgggtcccttcgcacggagatcccaatgaacgcgggcccctggaggccggtggttggggcttctccgcgtcggggatggggccggtaccctagcccgtttccagcgcctcagtcgggtccccatgccctcagaggtggcccggggcaagcgcgccgccctcttcttcgctgcggtggccatcgtgctggggctaccgctctggtggaagaccacggagacctaccgggccatcgttgccttactcccagatcagtggcctgaatgcccttcagctccgcctcatggtgcctgtcactgtcgtgtttacgcgggagtcagtgcccctggacgaccaggagaagctgcccttcacccgttgtgcatgaaagagagattcctcctgaaatacaaaatgaaaatccaaatgccgtttcccagaaggcctatcggagggctttggacccatgaggaaggaggccctgtcatcgggcagtgtgcaagaggcagaagccatgttagatgagcctcaggaacaagcggagggctccctgactgtgtacgtgatatctgaacactcctcacttcttccccaggacatgatgagctacattgggcccaagaggacagcagtggtgcgggggataatgcaccgggaggcctttaacatcattggccgccgcatagtccaggtggcccaggccatgtctttgactgaggatgtgcttgctgctgctctggctgaccaccttccagaggacaagtggagcgctgagaagaggcggcctctcaagtccagcttgggctatgagatcaccttcagtttactcaacccagaccccaagtcccatgatgtctactgggacattgagggggctgtccggcgctatgtgcaacctttcctgaatgccctcggtgccgctggcaacttctctgtggactctcagattctttactatgcaatgttgggggtgaatccccgctttgactcagcttcctccagctactatttggacatgcacagcctcccccatgtcatcaacccagtggagtcccggctgggatccagtgctgcctccttgtaccctgtgctcaactttctactctacgtgcctgagcttgcacactcaccgctgtacattcaggacaaggatggcgctccagtggccaccaatgccttccatagtccccgctggggtggcattatggtatataatgttgactccaaaacctataatgcctcagtgctgccagtgagagtcgaggtggacatggtgcgagtgatggaggtgttcctggcacagttgcggttgctctttgggattgctcagccccagctgcctccaaaatgcctgctttcagggcctacgagtgaagggctaatgacctgggagctagaccggctgctctgggctcggtcagtggagaacctggccacagccaccaccacccttacctccctggcgc

SEQ ID NO: 93029 - DNA, 464 bp, Homo sapiens
  misc_feature (1)...(464): n = a,t,c or g
agagtatgcccgnnttttgaactccgatgatcgtcgcaagagcaccggnctggaatcccggtcgacgatttcgtgggcggtgaggcctggtccacgtgcgttccttcctgtgacccccgcagcttggcgcccagcgggtacgtgagccaaggcacccggatgtccgcgcccctctccgagtgaccagtcccggcctccggtcccgcagtgcccgcagcctcgggcggcgtccacgcattgccatggtgactgtgggcaactactgcgaggccgaagggcccgtgggtccggcctggatgcaggatggcctgagtccctgcttcttcttcacgctcgtgccctcgacgcggatggctctggggactctggccttggtgctggctcttccctgcaaacgccgggagcggcccgctggtgctgattcgctgtcttggggggccggccctcgcatctcttcctacgtg

SEQ ID NO: 93030 - DNA, 398 bp, Homo sapiens
tttcgtacgtaacaagaagatgacccgaagttgctccgcagtgggctgcagcacccgtgacaccgtgctcagccgggagcgcggcctctccttccaccaatttccaactgataccatacagcgctcaaaatggatcagggctgttaatcgtgtggaccccagaagcaaaaagatttggattccaggaccaggtgctatactgtgttccaaacattttcaagaaagtgactttgagtcatatggcataagaagaaagctgaaaaaaggagctgtgccttctgtttctctatacaaggtatttaaatattcctcaaggtgtacatcttaaaggtaaagcaagacaaaaaatcctaaaacaacctcttccagacaattctcaagaagttgctactgaggac

SEQ ID NO: 93031 - DNA, 514 bp, Homo sapiens
tttcgtcgccgccaccgccgccaccgcctcctgggactcggaacgcagcgctcggagccatggcctcggcccccgcggaggcggagacccgacagaggctgctacgcaccgtcaagaaggaggtgaagcagatcatggaggaggctgtgacacgcaagtttgtccacgaagacagcagccacatcatctccttctgtgcggctgtggaggcctgcgttctgcacgggcttcggcggcgggcggctggcttcctacgcagcaataagattgcagccctctttatgaaagtgggcaagaacttcccgccggctgaggatctgagccgcaaggtgcaagacctggagcagctgatcgagagcgcgagaaaccagattcaaggcctccaggagaatgtgcggaagctgccgaagctgcccaacttgtccccacttgccatcaagcatctgtggattcgcacagccttgtttgagaaggtcctggacaaaattgtgcattaccttgtggaaaacagcag

SEQ ID NO: 93032 - DNA, 483 bp, Homo sapiens
  misc_feature (1)...(483): n = a,t,c or g
tgggtgtngnttttgaacccattgaagccgtacgcctgcggcaccggtccgnnnnnccgggtcgacgatttcgtctactccaaaggaggcaaggacgcaggaggggccgacgtttccctggcgtgccgcagacagagcattccagaggagttccgagggatcactgtggtggagctgatcaagaaagaaggcagcacgctgggcctgactatctcaggtggcaccgacaaggatggaaagcccagggtctccaacctgagacctgggggacttgcagccaggagtgatctgctgaacattggtgactatattcggtctgtgaacgggatccacctgaccaggctccgccacgatgagatcatcaccctgctcaagaatgtgggcgagcgcgtggtgctggaggtggagtatgagctgcccccgcccggtgggtgcccttggacggngaactttctccactgcctcggttgcgggtggacacgg

SEQ ID NO: 93033 - DNA, 691 bp, Homo sapiens
agtggcagagcctaggtgttccagcccaggcagctggctgcagccacgtccgatcctctccagctgcctctctgttacagcgcagaacatcagcagcatcaggagtcatgtgctcttccagctctgccttgagtacccgatgacctcgtttcctcagcggtagatagcgatggttaatattggctagcctgtagagttatcgggagaccaacgcacaaaaagggtttaataccgtgcccagcacataggcccgctcaccacgcagtatctgtggcaccgcttcagcgccgacctcggctacaatggcacccgccaaagggggggctgcagcaaccgcagcgcggaccccaccatgcaggaagtggagacccttacctcccactggaccctctacatgaacgtgggcggcttcctggtggggctcttctcgtccaccctgctgggagcttggagcgacagtgtgggccgccgcccgctgctagtgctggcctcgctgggcctgctgctccaggccctagtgtccgtttttgtggtgcagctgcagctccacgtcggctacttcgtgctgggtcgcatcctttgtgccctcctcggcgacttcggtggccttctggctgatagctatgcgtccgtggcagatgtcagctccagtcgcagccgcaccttccgggaattccaccacgctgactaa

SEQ ID NO: 93034 - DNA, 414 bp, Homo sapiens
  misc_feature (1)...(414): n = a,t,c or g
tttcgtccggcagaggcccggctccggtggctccagctttcctcccactctggctccccaggggctgctctggaattctctcggggcccgccggtgccatgcactcggctggaactcccagagccgagtcccccatgagcaggcaggagaaggacgcagagctggatcggaggatagttgccctgcgcaagaagaaccaggccttgctccgcaggtaccaggagatccaggaggaccgtcggcaggcagagcagggggggatggctgtgaccacaccagcactcctccagcctgatggcctcaccgttaccatcagccaggttcccggtgtaagcctcaccctgggagacagggctcgtaacaaggaggtggaggcccagatcatgtcggngaaagacagctgcctctgttccc

SEQ ID NO: 93035 - DNA, 1265 bp, Homo sapiens
cctgccgcctccgcggcccagtcggcaccggcgaggccgtgctggaacccgggcctcagccgcagccgcagcggggccgacagtaagtgcggtgcgggctccggtgcgcgggcaggactcaggggcagggacgccccaggggcgactggccgggcggggtgcccacctctcgcgcgtgggcgcctccgggagtggtgtggccgccggtcccgccgcccgccacgctccgaggcgtcgctgtgcggacgcgggggaggcggtgggagcgagctgcgggcgctgcgcggtggccctgctgtctggcgtgtgcacgctagtgtccacacacgtgtgcgtgggctctgggtgccctggcgcggccggcacgcccatgggggccggggatgccggggcgtctgcggagagtgcagtgacgacagctccccaggagccccccgcccggcccctccaggcgggcagtggagctggcccggcgcctgggcgcgccatgcgcagcaccacgctcctggccctgctggcgctggtcttgctttacttggtgtctggtgccctggtgttccgggccctggagcagccccacgagcagcaggcccagagggagctgggggaggtccgagagaagttcctgagggcccatccgtgtgtgagcgaccaggagctgggcctcctcatcaaggaggtggctgatgccctgggagggggtgcggacccagaaaccaactcgaccagcaacagcagccactcagcctgggacctgggcagcgccttctttttctcagggaccatcatcaccaccatcggtgggggaggggattggcatgtggggggcggcaaggagcttcctcatgggggaaggtgcagggagacggaggggtcccaggtggcccctagacttcctgcatcgcccctctgcccaggctatggcaatgtggccctgcgcacagatgccgggcgcctcttctgcatcttttatgcgctggtggggattccgctgtttgggatcctactggcaggggtcggggaccggctgggctcctccctgcgccatggcatcggtcacattgaagccatcttcttgaagtggcacgtgccaccggagctagtaagagtgctgtcggcgatgcttttcctgctgatcggctgcctgctctttgtcctcacgcccacgttcgtgttctgctatatggaggactggagcaagctggaggccatctactttgtcatagtgacgcttaccaccgtgggctttggcgactatgtggccg

SEQ ID NO: 93036 - DNA, 405 bp, Homo sapiens
tttcgtcgcgctcctgtccgccgtgtctagcagcggggcccagcatggtcatggcggatggcccgaggcacttgcagcgcgggccggtccgggtggggttctacgacatcgagggcacgctgggcaagggcaacttcgctgtggtgaagctggggcggcaccggatcaccaagacggaggtggcaataaaaataatcgataagtctcagctggatgcagtgaaccttgagaaaatctaccgagaagtacaaataatgaaaatgttagaccaccctcacataatcaaactttatcaggtaatggagaccaaaagtatgttgtaccttgtgacagaatatgccaaaaatggagaaatttttgactatcttgctaatcatggccggttaaatgagtctgaagccaggc

SEQ ID NO: 93037 - DNA, 399 bp, Homo sapiens
tttcgtgcacgcgctctactcctggaacggatagggttcgggttgggggcctgggggcaccccgggcgagggggaaccccatcacccgcaggtacccaacgggctcgctctacgggggggacctccaccccgacgtgactggggggatgctctacgagaaggtcagcccgggagggcccatcctctccatccggatctggagggacttgatcaccagcgggtcctccaactacgcggatgggaacttccagcatacgaaggacgccgagcatgctctggacaccatgaattttgatggtataaagggcaaggcactacgcatcatgggggctcagcgggatccatcacttccaaaaaggggagggggcaacatattccgtaaaaatctggataagtgca

SEQ ID NO: 93038 - DNA, 395 bp, Homo sapiens
tttcgtggggtccacagccagttctcctgttgccttcctgtgtcacagactctcgattccatggacacagtcctcatgggctccctccagcactgctgttgcctgctgcctaagatgggtgacacttgggcccagcttccctggcccgggccaccccacccagcaatgctgctgatctccctcctcttggcagccgggttgatgcactcggatgccggcaccagctgccccgtcctttgcacatgccgtaaccaggtggtggattgtagcagccagcggctattctccgtgcccccagacctgccaatggacacccgaaacctcagcctggcccacaaccgcatcacagcagtgccgcctggctacctcacatgctacatggagctccaggtgct

SEQ ID NO: 93039 - DNA, 859 bp, Homo sapiens
tttcgtgccagctctactggcgtcctggcaagggcagcgtcgaggggtgctcctggtccagctctcctggctcagggattctttgcctaggcgccggcgccccgggctccttgcccaggcccctgtggcctgcatagagtggtgctgcctgtggaggcggtgggagagaagaaggagggcggtggtgggggtgatgcggcggccacggagggtggcacaggggctgcggccagccgggcgctgcagcagtgcgggcagctccagaagctcatcgtcatcttcattggcagcctgtgcgggctgtgcaccaagtgcgctgtgtccaatgacctcacccagcaggagatacggaccctggaggtgaggaaactgaaggcctgagggagaactgacttgccaggaacccctgttaaggagaattaacaaagtgtggttattaaagaagaactgagttgggagtcagacctggaggcccgcacccttggttaagacattataccaccattcttttcaatataccccatcatggttcaactcaaaagtcattgcttgtttaaaatctacaactgctgacgttttgtaaccttcgcattccagatacaacagagaaatgcataatgtccagtgaatttattaaagttccaaagtcggtcgcgcgcagtggctcacgcctgtaatctcaacacttcgggaggccgaggcgtgtggatcacgaggtcaggagctggagactagcctgaccaacatggtgaaaccccgtctctactaaaaatacaaaaattagccaggcatggtggcacgtggctgtaatcctcgctactcaggaggctgaggcaggagaattgcttgaacctgggag

SEQ ID NO: 93040 - DNA, 532 bp, Homo sapiens
tttcgtggggaactgtacggctcagtcactcctgcctcgtcacccccgccaggtttcccccgccctctccggccggggctggtcgcgactgcgcgcgcagggcctgagcgggcgccggagggaaggggaagcggcggggtagtaacagattatgggcaacagtccttttaattaatctaccgtcatcatggctaatgaggactgtcccaaggctgctgatagtcctttttcatcagataaacatgcccaactcatcttggcccaaatcaataagatgagaaatggacagcatttctgtgatgtgcagctgcaagttggacaggaaagttttaaagctcatcggctggttttggctgccagcagtccttactttgcagctttgttcactggaggaatgaaagagtcctcaaaagatgttgtaccgattctaggaattgaagcaggaatctttcagatacttctagatttcatttacacaggtatgttacatgagtctgttgctttgactgaagaatgattcaatcactcatgc

SEQ ID NO: 93041 - DNA, 434 bp, Homo sapiens
tttcgtcgagtgcaagacgggcgggctgctgagggcgccccgcgggtctggtctgggccggggaactccgggacggcgccgcagcagggctacggatctctcggcccctgcccttcaaatcacctctaggcacaggttattcagcttctcaaggctggaaaagcgaaggaagtttcctacaatgcactagcctcacacataatctcagaggatggggacaatccagaggtgggagaagctcgggaagtctttgacttacctgttgtaaagccttcttgggtgattctgtccgttcagtgtggaactcttctgccagtaaatggtttttctccagaatcatgtcagattttttttggaatcactgcctgcctttctcagagactcagagccgactatccagaaatgattccaattgaatgagaaagggagagagg

SEQ ID NO: 93042 - DNA, 406 bp, Homo sapiens
  misc_feature (1)...(406): n = a,t,c or g
tttcgtcctgagcagccgctgggagacagacggctaccaggttgcccctctttgctccagctagaaagacttgagttagacaagcagcaggacacgcctccctacctcatggcgacagaaaatggagcagttgagctgggaattcagaacccatcaacagacaaggcacctaaaggtcccacaggtgaaagacccctggctgcagggaaagaccctggccccccagacccaaagaaagctccggatccacccaccctgaataaagatgccaaagcccctgcctcagagaaaggggatggtaccctggcccaaccctcaactagcagccaaggccccaaaggagagggtgacaggggcggggggcccgcggagggcagtgctgggcccccggcagccctgccccaan

SEQ ID NO: 93043 - DNA, 391 bp, Homo sapiens
tcgaaaattttcaaacatggatgagaacattaatataatccaagaagttggaagtttagggtcagagaatataaataaatcagcatgacctcaggaaaaggctgtgtttggggatagtgagaatgataagacattttgctgggacagaattatggaaactttttagtgagaaatacagattcaatgaaataggaaagtatggagtggagtcctgtgctgaatgtgcgttgcttaatatgctgagtctcacagtggggtgcttgtaaaatgagcctcaggaaggcaagattatcaaccagtatatgttaagcaatgtgggagcttaataaggccctggtgcatgcggtggccgaggaaatggaatggaagaaaagaacacattcaatgtcag

SEQ ID NO: 93044 - DNA, 481 bp, Homo sapiens
gcgcatgatgagccgtcccgcagtagagaccgtattcccgggccgacccacgcgtccgttttgttgttgttaattcattgattagtgctttctcagatactaaaacctttgaggaggattcattctattccataatgcgaaagagtgtcttttctctttaggaggttgtaatttggatcacagcacaattttaaactaaaatttccaaatatcaagcatctgttttcttctcataaggtttacaacatcattaagaaagacagtaaccggcagagggttggattgcagctgattgcctcggagaatttcgccagccgagcagatttggaggccctaggctcttgcttaaataacaaatactctgaggggtacccgcgccagaggtatgtgaatatcttcaaaggcctggttctgacacagtcatagggagtactcagtcagcctatgacctaaacaatttggaaatttcagaaaacaataa

SEQ ID NO: 93045 - DNA, 86 bp, Homo sapiens
ttttttttttcccccccccattaaaaaaaaaccccctttataaacctctttttttaaaaaacgggggaaaaaagggtctttacatc

SEQ ID NO: 93046 - DNA, 384 bp, Homo sapiens
actccgggcggagtttggctggtggttcgttacgaggccccctcacgcagggcgcgggggcagagcctcgcctggattctggaggctgaggagccatacctccagatgcgaaagccatggagccgagctgcagcgaagcacctctttacgggcagatgatgatctatgcgaagtttgacaaaaaagtgtatcttcctgaagatgctgagttctactttacttatgacggatctcatcagcgacatgttatgattgcagagcgcatcgaggatatcgttctccagtccagcgtcccatgccatgggcttaaggagacggtgacggtatctgtgtgcctttgctcagaaggttactcttcggagaccatgggctctggctcaatgg

SEQ ID NO: 93047 - DNA, 1119 bp, Homo sapiens
cgatccacgcgtccgcgcatatacagtctatctacgtataaattcatatgtgcttgaaaagagtatgctttcttgcattgcttggcatagtgttctataaatgtcaattaggacaagaggattgataatgcttttcatatcttctatgcctttctctctttgaagcatgattttttatgattattcttgaatgtcctctgtactcaacaaggtctctccagttgatgggaacatgagtgattcccagctatgtgtaaactatgagaattatttgttctacagtttcccagtaattgtacttttcctaggaattgttctttgcccagcttcatggtggttcacattacacatgtacagattaatactcagccaaaatgttaaggcgctatgtagatttccagaagcatttctttgtgtacctctgatattcttttccacaaattcttagcaccaaatttggcctccctgtactctgatctctgtctcttcagtcagtgagttcactgggctgtatttgggatcctgatcctactccacaggctggtaatttcctctctgcggcagccaggagataataaggatcatgtctttttacttttctcaagaattacaggtttatgctgcttattttcagtgtctgaacatagttggttcacatattttttgttccagtttctggctggttatattatgaagataataatggggcctggtactcctacatggccagaagcacaagtagctcttctcttcccttccttccttttctttccttctttttcttccttcctttcctttctccttctcctttcctttctttaaaaaggaatccttattttatgcgactttcgctcgcaatggtgcccccactccgctcgccccggggtccgtccagcttcggctacctcgtcgccgcgacatcccacttgagatcctttgatccggcccccccaatatctcctttcacctccgaccacgtcccctctttatctcctaccgtcccgccgctccctacgccggcccatccacttgcggccccgcgtgttcacacgcccgatcaaacactcccgtcccacctccctcctcgctattcattcgcccccttcggtgacgggccca

SEQ ID NO: 93048 - DNA, 487 bp, Homo sapiens
  misc_feature (1)...(487): n = a,t,c or g
ggagtcccngnngccccccaatgagaccctggcagtgcggggaattccgtgcttcataaagccgctttcgccgctggctgtcgccgcgttttgcctccgcagcagctctgggctcttctcagctgcgcgagcagctgctccaatgccccggagtggccatgggcgccccgcactggtgggaccagctgcaggctggtagctcggaggtggactggtgcgaggacaactacaccatcgtgcctgctatcgccgagttctacaacacgatcagcaatgtcttatttttcattttaccgcccatctgcatgtgcttgtttcgtcagtatgcaacatgcttcaacagtggcatctacttaatctggactcttttggttgtagtgggaattggatccgtctacttccatgcaacccttagtttcttgggtcagatgcttgatgaacttgcagtcccttgggttctgatgtgtgctttagccatgtggttccc

SEQ ID NO: 93049 - DNA, 585 bp, Homo sapiens
ggtttgttttatagccagtttgcttttaaatttggccatgtgggctttaagttcaacgtatttgtgttctctttattgttactctctccagagtattacccaaactgtgaagttgtgtttatggggatggcaaacattcattctattcggaggagttttcagtctctgcggttgctgtgcactcagatgccagatccgggaaagtaagtccttggccttggctttcattttgcattgctcttaaataataagtttgcttctttccttgaactgcgttccagtatagtctccatgggaggcagcaggaatcctgcttgtctgccatgcagcctggcagctccaaggcaacagcatccctcctcttacccatatcttgaaatggagctcagcccctgccatgctcacgtgttctgtagcttccactactggcctatttatggcctccattgcagagggccaggctgagaggaaaagatgtcctgctctccaaagctgttgaacctcgccggggcaggcacctcctcaggaagccccggagcaggctgtcgttgtataggtggcccaggctggcggcccctcccgaag

SEQ ID NO: 93050 - DNA, 741 bp, Homo sapiens
aatcagagcaccgcagccagggagatgctggcgagacgacagcgagatcctctccaggccctgcggcgccgcaatcaggagctgaagcaacaggttgatagtttgctttctgagagccaactgaaagaagctctagaacccaataaaagacaacatatttatcaaagatgtatccagttaaagcaggcaatagatgaaaataaaaatgctcttcaaaaattaagcaaagctgatgaatctgcacctgttgcaaactataatcagagaaaagaagaggagcatactcttttggacaagcttacccaacaactgcagggccttgctgtgacaataagcagagaaaatataactgagtatgcttcctttctacctttcttttttcttttttaaagatatatcaccaatagctttaatgtttaactcaaagacatatagcagtatagatataaacaaatgacactaacaatagaatcagtcaacatttatttattgtgtataatagaaggtgttagatcccatgagaagatggaaagaagtgtaagtcatagtctctgccctcaggcaatttataatttagttgaaacaaaacagagatctgaaaagctaaatgaacaaatgttagaaaataaagatgatatatttaatgtcaatgttgatgtgtaaaagggaaatgatttggaatgtctacttgcattgttctccctttcataaacattctttaaaaatttgaaaaaaaaaaaa

SEQ ID NO: 93051 - DNA, 1461 bp, Homo sapiens
ttttttttgtttttatttgtaatcagagctcacactttattcgacatcatagaattcatagtggagaaaagccctatgaatgtgacaagcatgggaaagccttcagatggagctcagaccttgtgaggcatctggaaattcatattggagataaagttttggaatgtagcgagcgtggaagaattttcaatcagagctcaggtcttaatgcagcaccaaagaaaccatacagaatcataacctgaaattcaggctctgtcaatttcatctctgtaacctttattgtttctgagtcttgagttttctcataagggctcactctccacctgcgcaaggactgcaattcccaggggcctccagggcacccggccgctccagtccagtcgtgcaggcggcgcgctctttctcgctccgctcaagtccaggaaccggttcccgggctcccagcctctcggcagcgcccacgcgcctgggccaaagtccgcgaacggaagccggcggcgaggaggattctgggagttggaggccgaggctgcgacctgcgcaggcgcaaacctgcccctggggtgagggctgtaagtggcgcgattcgcggcagcgccccgatggaacctcctggtcctgtgagggggcccttgcaagattccagctggtatgagccttctgcagagctagtgcagactaggatggctgtatcactaacagcagctgaaactctggcccttcagggtacacagggacaagagaagatgatgatgatgggaccaaaggaagaggaacagtcttgtgagtatgagaccaggctacctgggaaccactctaccagtcaagagatcttccgccaacgcttcaggcatctccgctaccaggagactcctggtccccgggaggccttgagccaactacgagtactctgctgtgagtggctgaggccagagaaacacacgaaggagcagatcctggagttcctggtgctggaacaattcttgaccatcctgcctgaggagctccaatcctgggtgcggggacatcaccctaagagtggagaggaggctgtgactgtgctggaggatttagagaaaggacttgaaccagagccgcaggtcccaggccctgcacatggacctgcacaggaagagccatgggagaagaaggaatctctgggagcagcccaggaagcactgagcatccagctccagcctaaggagacccagcctttcccaaagagtggtgaggagcaggattctgtggggagggagaggagaaagagggactataaagggcacagtacctagtacctgtaaagggtaaatagtagtaggtgcttaaatgtttggtatcatcacagccttactattcttatctcttaggggagagactttgcctgtttcatcactcataaaattaggagtaagaataaactacctcataagatagctctgaggattaagctcaacttgg

SEQ ID NO: 93052 - DNA, 652 bp, Homo sapiens
tttcgtagttcctagtccgtgcggtggaattcccggccgcgctccgaacggcgcctcccgccccaccatgggcaacagcgcgagccgcaacgacttcgagtgggtctacaccgaccagccgcacacgcagcggcgcaaggagatactggccaagtacccggccatcaaggccctgatgcggccagacccgcgcctcaagtgggcggtgctggtgctggtgctggtgcagatgctggcctgctggctggtgcgcgggctggcctggcgctggctgctgttctgggcctacgcctttggtggctgcgtgaaccactcgctgacgctggccatccacgacatctcgcacaacgcggccttcggcacgggccgtgcggcacgcaaccgctggctggccgtgttcgccaacctgcccgagggtgtgccctacgccgcctccttcaagaagtaccacgtggaccaccaccgctacctgggcggcgacgggctggacgtggacgtgcccacgcgtctggagggctggttcttctgcacgcccgcccgcaagctgctctggctggtgctgcagcccttcttctactcactacggccgctctgcgtccaccccaaggccgtgacccgcatggaggtgctcaacacgctggtgcagctggcg

SEQ ID NO: 93053 - DNA, 477 bp, Homo sapiens
  misc_feature (1)...(477): n = a,t,c or g
cgagagggtnnnnnnnnnaactggagacctatagtccactgtcggtggaattcgggagccttctcaccgcgtggcaggctgagccccttttcggtgctccattaataactcagacgactattttctgtgcaactataggcacagtgctaaactggatactttgggctttcttggacattccaggccaggataacgcgccacatcttgctcgtgtgcagaagtatgctttcagagagaacaccttcaaccggcagattattgtcagagggctgcatgatatcttccgggacttcggtaacaatgaagaagacttcctcacggtaatggagattgtagtcagattgtcagaagatgcagagcccacagtgcggactgagctgatggaacagattcctcctattgccatttttttacaagaaaacagatcaaattttgcagcggtgctctctgaatatctcatacctattggagtgaggg

SEQ ID NO: 93054 - DNA, 1438 bp, Homo sapiens; identical to SEQ ID NO: 62240

SEQ ID NO: 93055 - DNA, 855 bp, Homo sapiens
tctccctctcacctctagagataatcagtatccagatttttgtgataagcatttttttactcttatgtacggtttaccagaaatgtatgtatgtttaaacaatttggttttgcttgtttttgaacttgatataattggaataatgctatatgtatttttgtacgtattgttttatgaattgcttttatccctcaatattatttgtgagatgtatccacgttgtatagagcatgagttcatttcattttcattgatgtctggtattctgtagtatgaatatactaaaatttatttacctgcttatgctgctataagcattcttgtacatgttttcttgtacataagcattattgtataagcattcttgtacattatgctgctataagcattcttgtacatgttttctggtgcgcaaatgcataagcttatctagtatatttgcccaatatcagaattgtcataggatttccactgcccctaaattaatgtcaaactcttttccaactggttgtgccagcagtgaataaagtggcctggtggtttttgatcccgtaaaacttgcttgtatcaaacttaacaattttggcatggggggtgcatttaatttacttatggggcgtctaacactttgcatctgctcaaaacccaaaagaagggcacgaccgcactatacccatactccccctcgccccgtcgtcgggctgctaacacacccaggtaaacagggcccgctctcattgggtcccctacctcaaccaacccccacctaccatcccccattcacccctcatttttatgacgtctatcactcaccccgcgcgcacctatcattcccgccaaggcactctcccactt

SEQ ID NO: 93056 - DNA, 514 bp, Homo sapiens
tgtaaatatagcattaagtaatgttcatgcctgtgttaatgtccttcattttatactgtatcatcaagaaaagtattgtatatacactggtttcgtgatcttatgccattttttctcagagttaaaaatacattagagaatatttctgtgctagaaagtatcctattggataactccagtaactcatataagtcagaaccagctctctttactctcattttacctgatgtcaaatcaagaattatttctttggtcacttggtaaatatgttttgtttttcagcgagtgctaacattcagggatgtggctgtagaattctccccagaagagtgggaatgcctggactctgctcagcagcgtttgtatagggatgtgatgttagagaactacggaaacctgttctccttgggtcttgctatctttaagccagacttgattacctatctggagcaaagaaaagagccttggaatgcaaggagacagaagacagtagccaaacacccaggttattatg

SEQ ID NO: 93057 - DNA, 524 bp, Homo sapiens
ttaatctgacaagaaggctagaaagctcaatgcgtcttcctattactctgcatatcttatgtcttccatccaaaaagaatcaacttatcagataaataaccacctcatgaactaagatgaatcatgttccggcttttgtcctcctgctgctcttgcctaaggacaacagaagagacacgaaggaatgtgaccatccctatcattggcttgaacaactctggcaaaactgttcttgtggaggcattccaaaaattacttcccagtaagacagaccattgcatgaaatcggaactgactacacttttgttagatgagtatgaactttccatctatgacctgaatggagacctgaagggccgggaagcatggccaaactactatgcacaggcccatgggcttgttttcgtcctggattccagtgacataagacgcatgcaggaagtgaagatcatcttaacacatctgctgtccgataaaagagtggcagggaaacccatcttaatgagccatgttcagccatcaga

SEQ ID NO: 93058 - DNA, 449 bp, Homo sapiens
tttgaaagcgtcctgatagccgtccgcctgcacagtaccgggcgggacccacgcgtccgcggacgcgtgggtgtgaacttctctactggaaagcaacaaaggcagtcggcataaaaatgggttctctcagcacagctaacgttgaattttgccttgatgtgttcaaagagctgaacagtaacaacataggagataacatcttcttttcttcgctgagtctgctttatgctctaagcatggtcctccttggtgccaggggagagactgaagagcaattggagaaggtatggaattcctcagaggtttgttcagaacccagaagtctttcatgctcccgctctgggtcagcaaaattaattctatctttataccaataaaattgccatcttgagagagaaaaaacacattgaataaatcatatttcttataaattgataatggtttgattc

SEQ ID NO: 93059 - DNA, 388 bp, Homo sapiens
  misc_feature (1)...(388): n = a,t,c or g
aaaagaagtcttctgggaatctccacactttgaagacacagtgagttagcaccaccaccaggaattggcctttcagctctgtgcctgtctccagtcaggctggaataagtctcctcatatttgcaagctcggccctcccctggaatctaaagcctcctcagccttctgagtcagcctgaaaggaacaggccgaactgctgtatgggctctactgccagtgtgacctcaccctctccagtcacccctcctcagttccagctatgagttcctgcaacttcacacatgccacctttgtgcttattggtatcccaggattagagaaagcccatttctgggttggcttccccctcctttccatgtatgtagcggcaatgtttggaaactgcan

SEQ ID NO: 93060 - DNA, 695 bp, Homo sapiens
gactgaagtaccaactaagtcatctcctttcaaattatcaccgacaccatcatggattcaagcaccgcacacagtccggtgtttctggtatttcctccagaaatcactgcttcagaatatgagtccacagaactttcagccacgaccttttcaactcaaagccccttgcaaaaattatttgctagaaaaatgaaaatcttagggactatccagatcctgtttggaattatgaccttttcttttggagttatcttccttttcactttgttaaaaccatatccaaggtttccctttatatttctttcaggatatccattctggggctctgttttgttcattaattctggagccttcctaattgcagtgaaaagaaaaaccacagaaactctgataatattgagccgaataatgaattttcttagtgccctgggagcaatagctggaatcattctcctcacatttgagtttcatcctagatcaaaactacatttgtgattattctcaccaaaatagtcagtgtaaggctgttactgtcctgatcttgggaatttagaatacattgatgactttcagcatatattgaattattcatattctctgcctttactcaattttggggtgccactcagaggattgtgattgtgaacaatgttgttgactagcactgtgagaataaagatgtgttaaaatataaa

SEQ ID NO: 93061 - DNA, 621 bp, Homo sapiens
gattttgttatggaagtataatttataatagaataaagagaatggggttaaaaatatttttgaaaagcaaagctcagattctctgttgcccctgttttaaaatgttatgaatgtttgaagtctgaaatacttgatttagactattaaaaaattctttgcatgatagacctcaacaaggcttcatctgtgtggtaattaaaatggaaatggtactttgaaaagatggttttgctctggtattctttcctagaaataggatatagttttgtggtctgggctgctaagttgtacccatttacctcaaggaatctcttctttattggcttgaaggatggcattcaaactcactagagactgaagagtaaacctgaacatcagcactggtttctacattttctgtaaagttatttctttgagtattcataactatcttagtaatatacttttttgtgtgtgttatactggtgcccagttggatatggtatagcagaggtatgaagcagtttgtaacaaagattctggctaagaagcattagtcatttgaaagggggttatttggtctgaaatttgaaactaagcccttttttaattaagggaaaaaaaaggggctgtgcccctgat

SEQ ID NO: 93062 - DNA, 890 bp, Homo sapiens
tttcgtgcgagggacgagcggagtaaaatctccacaagttgggaacaaacctcgtcccaactcccacccaccggcgtttctccagctcgatctggaggctgcttcgccagtgtgggacgcagctgacgcccgcttattagctctcgctgcgtcgccccggctcagaagctccgtggcggcggcgaccgtgacgagaagcccacggccagctcagttctcttctactttgggagagagagaaagtcagatgccccttttaaactccctcttcaaaactcatctcctgggtgactgagttaatagagtggatacaaccttgctgaagatgaagaatatacaatattgaggatatttttttcttttttttttcaagtcttgatttgtggcttacctcaagttaccatttttcagtcaagtctgtttgtttgcttcttcagaaatgttttttacaatctcaagaaaaaatatgtcccagaaattgagtttactgttgcttgtatttggactcatttggggattgatgttactgcactatacttttcaacaaccaagacatcaaagcagtgtcaagttacgtgagcaaatactagacttaagcaaaagatatgttaaagctctagcagaggaaaataagaacacagtggatgtcgagaacggtgcttctatggcaggatatggtaagataaccgtagaatatttctagtttcctccaatccctgtttaaagatggttttggaaattgaacttattacttcatgcataggtctttgcaaagtaattttttcttgactttttattatgaaaatttcaaatgtactgaaaaatagagatactatgataaatacgtacatattcatcatccagacttaacagttattaacatttggcag

SEQ ID NO: 93063 - DNA, 755 bp, Homo sapiens
tggaagcacgcacagttgtgaccatcatgtatgcaggaagcaatcattctcctggctctcctgggtgccatgtcagggggagaagcactacacctaatcctcttacctgctacaggcaatgtggcagagaattctccacctgggacttcagtgcacaagttttctgtgaagttatcagcatcattgtcacctgtgatcccaggatttccccagatagtcaactcaaatcccctcactgaagcttttagggtgaattggctgtcaggcacctactttgaggttgtcaccactgggatggaacaactagattttgaaacaggaccaaacatatttgatttgcagatttatgtgaaggatgaggttggtgtcacagacctgcaagtcctgactgtccaggtaacagatgtgaacgagccacctcagtttcaaggcaacttggcagaagacactggtctaggtctacacctctacatagtagaaagagcaaaccctggattcatttaccaggttgaggccttcgatccagaagacacaagccgaaacattcccctcagttatttcctgatttctcccccaaagagcttcagaatgtctgctaatggcaccctcttctccacaacagaattggactttgaagcaggacacagaagtttccatctcatcgtggaggtgagggacagtggaggcctcaaagcctccacagagctccaggtgaacatcgtgaacctcaacgacgaagtccctcgctttaccag

SEQ ID NO: 93064 - DNA, 1146 bp, Homo sapiens
aagtccgggaaactcattgaggctggttgggtaaagggagcccaggaagcaggagggaggagtttagagtagaagggatggagtttgtctggggtgtggcttaaagaagtaggtaggcctagtgaggggggtggagtttaagggtgtaatttggaggggtttaatgcaactatcaggtctttataatgaatgtggaaaggacttgcaggggatgggaatagacttcgtagagaaggcctgagaaggtgacgggagtccagtggagagtcttagaaaggatgtggcttctttaaaggaaaaattgggtggagttttggaagtgggtcttagtggacccgagaggggcttagataagtcaaataacttagcaatcatggtaggacttaaggaggaatccaggaggaacttacgggataatagtcatccaaacagcttacttgttgcgtctttgctgtgcaccagcttaagtaggcacgttagcatttattgccacaaattttactttaattcctcgccaccactccatgagagagagcccccacataccactgtattccccgccaccatggatgacgtccccgccccaacccctgcaccagcaccgcccgccgctgccgcccccagggtcccgtttcactgcagtgaatgtggcaagagcttccgctaccgctcagacctgcggcgccactttgcccggcacacagcgctcaagccccacgcatgtccgcgctgcggcaagggtttcaagcacagcttcaacctagccaaccacctgcgctcgcacaccggggagcggccctaccgctgctctgcctgccccaaggggttccgcgactccaccggcctgctgcaccaccaggtcgtccacactggtgagaaaccctactgctgcctggtctgcgagctccgcttctcctcacgctccagcctgggccgccacctcaagcgccagcaccgtggggttctcccctctcccctgcagcccggccctggcctgcccgccttgagtgcgccctgctccgtctgctgcaatgtggggccctgctcggtgtgcgggggctcaggggccggcggcggagagggccccgagggggcaggcgcgggtctgggcagctgggggctggcagaggcggcagctgcggccgc

SEQ ID NO: 93065 - DNA, 1391 bp, Homo sapiens; identical to SEQ ID NO: 62602

SEQ ID NO: 93066 - DNA, 415 bp, Homo sapiens
aagacatgcttataacagagatttaatcaacttatgtgtacggatgaaaatacagtgagatgagtcagaaaccggccaaggagggccccagactctccaaaaaccagaattactccgaacacttcagcatacactgctgcccgccgatcaccttcctcaattccaaaaaggagataggggatcggaaatacagcatttgtaagagcgggtgcttctaccagaagaaagaggaggactggatctgctgcgcctgccataataccagaaccagccgccgtgccaagtcccctgagaggcccaagcaacaggcagctgcgccccccgcggtggtcagagcgccagccaagccacggtcccctccgaggtctgagcgacaaccacggtaccgtccgaggtctgaacgtctggcacagcg

SEQ ID NO: 93067 - DNA, 383 bp, Homo sapiens
aaatagtcgatgtatatagaatgagttcaagcacaacagatatcgcagaaagaacagctgcagcaaggcgagaggcagaacaattaaaagaaaaaataaagcaaaagaaagaaaatttagcagatactacactttatcaagttgcacaaaaagtcgataaattaccacgattatcaatgaaagttcgtcgtacattaaaaggacatttagcaaagatttatgctatgcaatgggcagccgataaacgtcatttggtatctgcttcacaagatggaaaactattagtttgggatgcctattcaacaaacaaaatatacgctataccattaatatcttcttgggttatgacctgcgcttattctcccagaggaaattttgttgct

SEQ ID NO: 93068 - DNA, 402 bp, Homo sapiens
ttctgtcactgcccctgctggccaaacccagttggaagccagggacagagtggagaaagaatatggagaagcagatgaaagagatccagtctaggaaaatagtggcaaggtcatggcagtgggaatggaaaaggtacaatatagagataagccaaacaagacttttacattgattggatttggagataggaagagaaaagtcaaggatgatgtcatagtttcaagcccaagctctagactagaatgatgataacatcaactcaatgtcggcatagtgcctcaggcatcaaaggccttctataaacatttcctgggagaaaaagaggggagggatggacggatggatggatggatggatggatggatggatggatggatggatgaaggagaagcaaatctggg

SEQ ID NO: 93069 - DNA, 520 bp, Homo sapiens
gatttaaaagaagtggactgccagagatgaattatgtgacacagatgctaacatctagttattatgagtgatccattctgtcatgaggtagcacttgaaaaacaacctgggacaaaagaacaggcctctggcactactgaatttttggagagagaaacctttagaagttagcatgtggttctttctggacatgttcattgccttagttcttcttttgcaaatattttgtaaatattcatgaagtgaaatgagatgtttgagaaggcagatctgcagatcccctaaagagcattgtcagttatgctgggctgttcctaccctatccctctgtttacctgcggcggcctctcagagcgtgatcgtggtggctttgtggtggttttaaatgtaatcgcgagaagctagctgagagaatgctatcagtgttccttcggatcaagttgaaactagctggtacagttaagcctaagtttctttttgtttctttccttgcccctctcatttttctagactttgagaa

SEQ ID NO: 93070 - DNA, 625 bp, Homo sapiens
tttcgtggcagcggggcgatgaggtgaggacgcccgggaaccggaggcggcaccgcgcggcgcacggacctgggacgcggagtcctgaagccggcggacggttttcgtacgggcggccgtgcgcgaggcgaggagagaacattgaaagtattctctaagctatttgaagagagtgactaaatgcacctgggtcaggctgtctgtgggtatgaagtggttgggagaatccaagaacatggtggtgaatggcaggagaaatggaggcaagttgtctaatgaccatcagcagaatcaatcaaaattacagcacacggggaaggacaccctgaaggctggcaaaaatgcagtcgagaggaggtcgaacagatgtaatggtaactcgggatttgaaggacagagtcgctatgtaccatcctctggaatgtccgccaaggaactctgtgaaaatgatgacctagcaaccagtttggttcttgatccctatttaggttttcaaacacacaaaatgaatactagcgcctttccttcgaggagctcaaggcatttttcaaaatctgacagtttttctcacaacaaccctgtgagatttaggcctattaaaggaaggcaggaagaactaaaggaa

SEQ ID NO: 93071 - DNA, 571 bp, Homo sapiens
ggttagccttgggtatctgcagtgcctggcacaatgtaaattttaaatgaatgaacacaaatgaattgtatttccacaattttgaatcttggtatagtggaaagaatattactctggaggtcaaggggctgtagttcttgtcttctccatgaatattctttatgtgccacttctaccatctgtgaaatgagggatgggagggggaacttgaggaagtggtattagatgatcattaatagtcctgtcagcatattattgtagggttttatgaatattataattgcattttagaccataataaccaaacattacatattgatatatttaatttttttatttaagtggtacatgatcagcattgtccacatttacaatcgatggagaaacagtgaaattcagtgttatgttaatggacaactggtatcttatggtgatatggcttggcatgttaacacaaatgacgtaagtctttatttttctgtctgtgttttaatttgtttgagagtatgatctatcattacaaaatgaattgaataataaaatagtttggtagaaacttaaaaaaaaaaaa

SEQ ID NO: 93072 - DNA, 394 bp, Homo sapiens
tggacctcttgcacaagaacatgaaacacctgtggttcttcctcctcctgggggcagctcccagatgggtcctgtcccaggtgcagctgcagcagtggggcgcaggactgttgaagccttcggagaccctgtccctcacctgcgccgtctatggtgggtccttcggtggttactggtggacctggatccgccagcccccagggaagacgttggaatggattggagaaatcaatcatagtggaaccaccacttacaacccctccctcacgagtcgagtcaccatatccgtggacacgtcaaagaaccagatctccctgagtctcaattctgtgaccgccgcagacacggccatctattactgtgcgcgaggcgctagtttcgatttttggagggt

SEQ ID NO: 93073 - DNA, 1353 bp, Homo sapiens
gactctctgaatagcgggaggcgattgcggacattgagcatgcgtaccatatctgaagttcgtaaattgaaagtgaacatgcgtaattaatctttctgaataggaaaaaatatatacacaacaaaactctccgtttatggaacatgcgcatttgttctcagtaagtttttcgttttgaaagtgagcatgcgcatggtgagtaggttggtccgaagtttgaaccggacagaagcgctggtcggcgtctggcgttccaattgcccgggctgttcttgttgacatggaacccaaagttatcaatcaaatgctgtcaaaggctgcccagtctggccaatggaaatatggtcaacatgcatgcttctgtcaaaaacaaggttctggaaacaactgggcatatggttactctgttcatggacccaggcatgaagaatctataatgaacataatccggaaggaagtggagaaatgtgactctttcagtggttttttcatcataatgagtatggctgggggcacaggatcaggattaggagctttcgttacacagaatttagaagatcagtactcaaactcattgaaaatgaatcagattatttggccttatggaactggtgaggttattgttcaaaactacaactccattttgacactttctcacttgtaccgatcttcagacgccctccttcttcatgagaatgatgccatccataagatctgtgcaaaactgatgaatatcaagcagatctcctttagtgatatcaatcaagtcctcgcacatcagctgggaagtgtgttccagcctacttattctgcagaaagctcatttcactacagacgaaatccactaggagacttaatggagcatttagttccccatcctgaattcaagatgctgagtgttcgtaacattcctcacatgtctgagaattcattggcatacaccacatttacttgggctggcctcctcaagcatttgagacagatgctcatttctaatgcaaagatggaagaaggtattgataggcatgtatggcctcctttatcaggacttcctcctcttagtaaaatgtctctcaacaaggacctgcattttaacacttccattgctaacttggtcattcttcgggggaaagatgtgcaaagtgcagatgtgggtaagaaattcaggtgaaaattaagatttacattttgtacctgtacatgctatatggtacaaatggtttttaaaaagtccctgtgttcttggagaaaggaaagtaataactgtgtgttttagtggcaaaatttgaccatggcatcagttagtatgtgactagacaccaatatagaagtggtttaaacaagataaaagtt

SEQ ID NO: 93074 - DNA, 395 bp, Homo sapiens
aatgccacttgacttcaatgcaaactcaccaattgttccaaatagccagaaaatggcactttcaatttttcggtcctacaagatctagataattcttgtcgtgaaatgggcaaacggtctgagatgcctgacgtccaggcattcttttacacatcggtccctccctagcctctgttcccaatgtgacttgtagccattttgtccaaacaacttgaccttactgttttaggctggccatcatgtttctgtgtggtggctgctgttgccctaatacttttagaggccctcaaaatcacaaactatgctcaactcactctctacagttctcataacttccaaaatctattttcttcctcacatctgacacatatactttatgctccgcagctccttca

SEQ ID NO: 93075 - DNA, 386 bp, Homo sapiens
acgcagagcgagccaccggtcattgacttagataaccagcaaaattaaaaaagaagaaaaaaaacttgtagcgaccaggcagagagcaacgcgattgctttcaagcgcccccactcgggctcggcgggcgccagacagacatgatgcaccatcctctgacgggggccacctgcgtggggctccccaacgtgggcatgtgcccccagctttcgggggccttgacttttatgtacttacagcagggtaatcaggaagcaaccgttgcccctgacacaatggctcaaccttacgcttcggcccagtttgctcccccgcagaacggtatccccggggaatacacggcccctcatccccaccccgcgccagagtacacaggccagaccacg

SEQ ID NO: 93076 - DNA, 896 bp, Homo sapiens; identical to SEQ ID NO: 62720

SEQ ID NO: 93077 - DNA, 435 bp, Homo sapiens
gcgtataaatagagccggttttgtggtgttttcactactcggttggatgcctcagccatagtaagtgggaaagtgagcgagcaagcgagctactagcgaccggaggaaagtgaacagggggagaagggaacagcaagaacaggactccagagcgataaacactcgctggagagggagacgcaggaagcgatgaaagagatgtctgcaaacaccgtgctggacagccagcgtcaacaaaagcattatggaattacctccccaattagtttggcatctcctaaagaaattgatcatatttacacacagaaattaattgacgccatgaaaccatttggagtgtttgaagatgaggaagaattgaaccacaggctggtggttcttggtaaattgaacaatttagtaaaagaatggatttctgatgtcagcgagagtaag

SEQ ID NO: 93078 - DNA, 700 bp, Homo sapiens
gcggccgctgcaggtgaaggtggtggggctcttcagctgccccaactttcagattgcgaagagcgccgctgagaatctgaagaataatcatccatccaaatttgaagatcctatattagttcctcttcaagaatttgcatggcatcaatatctacaggagaaaaaaagggaactcaaaaatgaaacctggggaatattcttcctctgtgatttcttttgttaatggtcagtttctgggtgatgcattggatctgcagaaatgggcccacgaggtgtgggatatagttgacattaaaccctctgcactttatgacgcactcactgaggatttttccgctaagttcttaagagacaccaagcatgatttcgtgtttttggacatttgtattgattcttctccaattggaagattgatttttgagctatactgtgatgtgtgtcccaaaacatgtaaaaattttcaggtcttgtgcacaggaaaagcagggttttctcaacgtggcataagactacattacaaaaattccatttttcatcgaatagtacagaatggctggatacaaggaggggatatagtgtatggaaaaggagataatggagagtcgatttatggtccaacatttgaagatgaaaacttttcagttcctcataataaaagaggagtacttggaatggccaacaaaggccgtcacagcagcgg

SEQ ID NO: 93079 - DNA, 460 bp, Homo sapiens
  misc_feature (1)...(460): n = a,t,c or g
cttgacatcagttttccaaagtgtgaaaactcatctgattgttctcttcagaagcatgaaattccagaggatatcagtgacagagatgatgatttcatttccaatgataattatgacttggagcctgcatctgaattaggagaagatttattgaagctttatgtgaaaccttgttgcccagatattgatatttttgttgatggaaaacgttttaaagctcacagggccattttgagtgccagatctagttattttgctgcaatgctgagtggctgttgggctgaaagctcccaagagtacgttactcttcaaggtataagccatgtagaactgaatgttatgatgcattntatatatggaggaactctggacattccagacaaaactaatggtggggatgtattccttttntataaattanaatataaaagaatgagggtctgcttttgtgagctgtgtn

SEQ ID NO: 93080 - DNA, 626 bp, Homo sapiens; identical to SEQ ID NO: 62385

SEQ ID NO: 93081 - DNA, 407 bp, Homo sapiens
ctccagtcccatgccgggaggtctgggtgttggctggtccattccaggacagctacatctttggcagacctggtgctgacagaaccagctctgatcaggaggacctgcaggtttgttacataggccagtacttcctaaaatgggactctcaggacttctgccaatcctggtaccattcatccttttgggggacatccaggaacctgggcacgctgaaggcatccttggcaagccgtgtcccaaaatcaaagtggaatgcgaagtggaagaaatagaccagtgtaccaaacccagagattgcccagaaaacatgaagtgttgcccgttcagccgtggaaagaaatgtttagacttcagaaaggtcagccttactttataccataaggaggagcttgaataacctccag

SEQ ID NO: 93082 - DNA, 335 bp, Homo sapiens
ctgggcaacaagaatgaaactttgtctcaaaaaaataaataaataaaaataaaaatgaattaaattaactagcatatactgtactgctgtaatttcatagccacctcctattactattgaagtgagctcaagtattgccagtatccacttaaaatgctgtatgatgctaattttctagtgagcagttcttcatagcttagtgcaatatcataaatcttgaataacaccacgggacctacaacacgtgccactaatgatactggaattgctcttaagaagcagagaagagtcatgacattataagaaaaagttgaaaacgaaaaaaaaaaaaaaag

SEQ ID NO: 93083 - DNA, 386 bp, Homo sapiens
aaggagaaggagaaggagaaggagaaggagccagacaatgtggaccttgtctctgagctgcgtgctgagaaccagcggctgacggcgtcactgcgggagttgcaggagggcctgcagcaggaggcgagccggccgggggccccgggctccgagcgcatcctgctggacatcctagagcatgactggcgggaggcgcaggacagcaggcaggagctgtgccagaagctgcatgccgtgcagggggagctgcagtgggccgaggagctgcgcgaccaggtggggccctgcccgtgccctgccccttgtgcgggagggtgtcaggcagggcctgtgtgctcacgccttccctgagcatctgcttgacgcaggcgccgcgctgagaactg

SEQ ID NO: 93084 - DNA, 459 bp, Homo sapiens
  misc_feature (1)...(459): n = a,t,c or g
aggtgnccggncttgaannctaccgatactctcgtaannncccggaatttactactccttgaccgctgacctcactccccgccctgccatgtacatcctctgtgtaccctgggaacttgtatgtagttaattgtatctggacctgcacccccagcttctttcttggcttcatttaatctctctcttggcttccttgccttcagggatctccttcaaggcagggccatttctggtttcctccagctcccagggctccttcctgcaacagaaaatgttcctgccttcacagagcttacattttagtaagtggattgggaggttgcggccaagtgtatagtgaggtgacgcttanggaaagcttaagctgctctgagaacacctgaaaagtacacccaaccggcttggtgtggtggctcacacctgtaatcccagcactttgggaggccgaggcgggtggat

SEQ ID NO: 93085 - DNA, 421 bp, Homo sapiens
accggggaattccccaccagagcctggtgatgtggttgtacctgctgctatcagaggtcaattttgtgttctgaggcccacaaagaagtcacatttctttctctgaagatgataaaagcggaggcatctctcaatctggaaggggctagctgggcatgaaggtggtggcagaggctcccctataccccggtttgcaccgttcctctggcactgtgggacagaagtggacttgctggaagccaggagatcacatgaatgttaatgatcaccttgttgtggtctttgccctagagtgacagcccgtgcttcaaagagcatgaatatacggagtttgggaaatggatggatggctgggagaccaggaggaaaaggattccaggtcacgactggtgtgtcctcaggctggggatccaaggagtca

SEQ ID NO: 93086 - DNA, 494 bp, Homo sapiens
  misc_feature (1)...(494): n = a,t,c or g
aggaagnnnccccccnattgaattcatagcactagccanngcgnggaantcccagcctgccctcttagtccctgacagctgcagtgacagcatctgtgattgctaagcatgacaatttatatctctcatttcatcacaccatctatcagcagacagtcaggctttaaaaatcaatcccacactgactcagtccccagcagagatggcctctgacaacagtatccacactgcaggctggacaagggccctattaattttgagactcagccaaatttccttctgaccctaagctggtgaatccctgctcctttgctttggttggggttggtgtgagctaaggctgtgatcccatttgctcctatggcctccaggtggcctgggcctccatgaatgggccacatggtcatactgaatgcttgattacactcagacctagcagtcgtctgggcgcagctggtttatggatcactttgtcacaatgttccatccttcca

SEQ ID NO: 93087 - DNA, 540 bp, Homo sapiens
attagccttgcaccgcctgcaagaattcggcacgagcggtaacgttgctggaccgggacgcacgctcagctgaggaggacccccaaagatttttattgttaggtatattgaccaaagtttaacgagaagaactgtgatcagctgggaggattgctgcaaggaatggaattagctcatagcttactgctgaatgaagaagcatacaatcaactaggtgaagttcagaaggcagagtttatttttgagtggttgagatacttggagaagctcttgttggcaaccagcaggaatgatgtaagggagaaacagaagactcttgttgaacagctcctgtctttgttgaacagctccccagggcctcctacccgcaaactgcttgctaagaatctagccatactttatagtattggagacacattctccgttcatgaagcaatcgataaatgtaatgatcttattcgtagcaaagatgattctccaagttatcttcccactaagctgtaagtgaaacattaaaccagaccagaaaccaaaaaaaaa

SEQ ID NO: 93088 - DNA, 379 bp, Homo sapiens
cgaaagccacccctagcagaaggtacattttgtggcagggtcggtacagaagttacaggtcctgcttcatgcttttggactcttgtctttctagatttatcagtcctggctagacaagtccaccccctacacggctgtgcgatgggtcgtgacgctgggcctgagctttgtctacatgattcgagtttacctgatacaggtaggtgtgggctgaagtgacaagacttggctctgtccccgttacctgggcgtggtgtttgtggggatgttgataatccagtctgtctcgcaggaagtggtctttagtactcaattttcaggtaaacgccaaatgtcagaaagttctcagtgactgtctttaacgaacagggctcgtgcc

SEQ ID NO: 93089 - DNA, 518 bp, Homo sapiens
tcagttactttgtaacaaaagtgctgcagccgcttgctccggccggcaccctaggccggcccgccgccaggctgtcgccgacatggaacccttggccagcaacatccaggtcctgctgcaggcgggcgagttcctggagcgccgtgagagagaggccgagcatggttatgcgtccctgtgcccgcatcgcagtccaggccccatccacaggaggaagaagcgacccccccaggctcctggcgcgcaggacagcgggcggtcagtgcacaatgaactggagaagcgcaggagggcccagttgaagcggtgcctggagcggctgaagcagcagatgcccctgggggccgactgtgcccggtacaccacgctgagcctgctgcgccgtgccaggatgcacatccagaagctggaggatcaggagcagcgggcccgacagctcaaggagaggctgcgcagcaagcagcagagcctgcagcggcagctggagcagctccgggggctggcaggggcggccgagc

SEQ ID NO: 93090 - DNA, 1974 bp, Homo sapiens
atgccgccgtggggcgccgccctcgcgctcatcttggccgtgctcgcccttctcggcctgctcggcccgcggctccggggaccctgggggcgcgccgtcggagagaggaccctgccgggggcccaagaccgtagacgacggggaggaggcggacggcggaggcccggcggaccagttcagcgacgggcgcgagccactgccgggagggtgcagccttgtttgcaagccgtcggccctggcccagtgcctgctgcgcgccctgcggcgctcagaggcgctggaggccggcccgcgctcctggttctccgggccccacctgcagaccctctgccacttcgtcctgcccgtagcgcctgggcctgagctggcccgggagtacctgcagttggcggacgatgggctagtggccctggactgggtggtaggaccttgtgttcggggccgccggatcaccagcgccgggggccttcctgcggtgcttctggtgatccccaatgcgtggggtcgcctcacccgcaacgtgctcggcctttgcttgctcgccctggagcgcggctactacccggtcatcttccatcgccgcggccaccacggttgcccactggtcagcccccggctgcagcctttcggggacccgtccgacctcaaggaggcggtcacatacatccgcttccgacacccggcgggcggccttgtttcgcggtgagcgaaggctcgggctcggcgctgctcctgtcctacctgggcgagtgcggctcctccagctacgtgacaggcgccgcctgcatctcgcccgtgctgcgctgccgagagtggttcgaggccggcctgccctggccctacgagcggggctttctgctccaccagaagatcgccctcagcaggtatgccacagccctggaggacactgtggacaccagcagactgttcaggagccgttcccttcgagagtttgaggaggctctcttctgccacaccaaaagcttccccatcagctgggatgcctactgggaccgcaacgacccgctccgggatgtcgatgaggcagccgtgcctgtgctgtgtatctgcagtgctgacgaccccgtgtgtggacccccagaccacactctgacaactgaactcttccacagcaacccctacttcttcctcctgctcagtcgccacggaggccactgtggcttcctgcgccaggagcccttgccagcctggagccatgaggtcatcttggagtccttccgggccttgactgagttcttccgaacggaggagaggattaaagggctgagcaggcacagagcttccttccttgggggccgtcgtcgtgggggagccttgcagaggcgggaagtctcttcctcttccaacctggaggagatctttaactggaagcgatcatacacaaggttgatggcagcggcagctggggctgcagcggcgccgggctctagagagccgcaggatcggccagagtgcggagctggacacccgggtcccagatactacagacacccggagaggtggctccttcgccctgaagccttcctcggccccctacgcactcgggccccttccgcagaggattcgcagcgtgagcgccccgcagcccgctcaggaccagagatgcgagttcggtatcctgtggtggctgcagtcttggccccatacctggctttaagccaagatccaatggtcaagtcttctgcttctggacagggtgcctctgggagctacaaccacgtccgtgaagagatgctcatcaaggctggcggtgctatgagcagacgtgtggttcggcaaagcaagttccgccatgtgtttgggcaggcagcaaaggccgaccaggcctacgaggacatccgtgtgtccaaggtcacatgggacagctccttctgtgccgtcaaccccaaattcctggccattattgtggaggctggaggcgggggtgccttcatcgtcctgcctctggccaag

SEQ ID NO: 93091 - DNA, 393 bp, Homo sapiens
ggattaaacacttgcttggattattggaaatgatatttgcattctttctgtttgagatgccaatactagcaatatatttacacccactgtctcctcagtttggatatatcacatatgattagagtgaaatgaaatcagaatttcctaaaggaccactttttgccatgccaatatgtgataagatttcttggatgtataccagggtctactttcatattttcctagggctattttcctttccatgtttactccagctttcattttggtaattaccatactggaggtgataaccttcacaagggatggcattacttattccttatttactaatctaataggaaatgattgaaaagggcattcaatttgtttactcactttttattaagagatgtt

SEQ ID NO: 93092 - DNA, 450 bp, Homo sapiens
  misc_feature (1)...(450): n = a,t,c or g
taagaactgaccacagaggctcctcctgaaagacaccatcactctaagacccagcgagtatgcaaatccttccacttcccttagtcctttctatgaaggccttgactattcgatgttgcccctcctttctatcctttcccattatttttctccacatatcccagtttcctaccagatagtttcatttttctcatgtgtgaagtgaaggtaataataatatctggctcatattattactgtgagcataaggttggttaaaagaagcaaagcacttagaaccgtgcttggaacagtctttgtatggatagttgcttttatattactagcttttcttttttgtaaaatgaacatgatagttccgggtaggtgataattataggcgttaattcctcntaccnnnctaggngtnttgcnagatcgtaggtccctgggnccngaacccgctagcct

SEQ ID NO: 93093 - DNA, 472 bp, Homo sapiens
  misc_feature (1)...(472): n = a,t,c or g
gtgcgtgnnnngaactgatantcttgagnatctncgcacaagcntggnangaggttggaagaatttgctgccgacaggaatatgactccggacgagttgaagcagttggtcgaggctaaaagttgttggcctagacggtttagcggatcgcaaggcgctcatgggaggtacgtgagatgaagcgcattctgtggggtggggctaccgcggccagtcaatatgaaggcgggttctacgacggaaagggaatggacacccaagactgtcgtcgatggattccgcggctatcgaatgatacgatacaaactcgtctcctcaccgaggctgatattcgaaacgcaaagaattctcgttctgacgactgccggttcccgttccgtatgggatcgcggggttacgaatactgggaatcagacttacactacattaccagtcttggcctagatgtatatcgtctttcgattagctgggc

SEQ ID NO: 93094 - DNA, 445 bp, Homo sapiens
  misc_feature (1)...(445): n = a,t,c or g
natcgagaccatagagcagcgtggnggaattcgcgcggcggcgggaatgcacaacgttatgctcatcacctgcgtccaccaccgtcacccctgacggcgagacgcgaggtgctaagggcttgtccaggctaagcgggttctctgcgtccttaagcccactttgcagatgctaatcagaggggacaggcggccaagaacctggagcccacccgggcgtctgtgcccagtgccgaccctctaaattcccttcccacgtggctcctgttgcgtctgggctgtggaggattcctctaaacaggcacagccaccctctggaggtcggatccgcagctgcttgcccgggtctactatgccgacgaggagctgaaccaggtggccgcggagctggacagcctggatgggcggaaggacccccagcggtgcacgctgctggtcagccagttcn

SEQ ID NO: 93095 - DNA, 466 bp, Homo sapiens
  misc_feature (1)...(466): n = a,t,c or g
atggctttgcatcgtcggcgggcaatncgactgctagggcggctgatannaacccctcgaccattgctgctgctgcgtttgaggccctcatggatggagtgacatgctgggatggccccagaggccccatccccagggaactccttcttattggagaagccgccttccccgtgatggtgaatgacaagggccaggtgctcattgctgcctcctcctacggccgaggccgcctcgtggttgtgtcccatgagggctacctgtcgcatgctggcttggctccatttctcctcaatgcagngagctggctctgtccctgtcctggggctcccgtgggagtgcatccatccctggcacctctagtaaacatcctacaggatgctgggcttgaggcacaggtcaagccacaaccaggagagcccctaggggtttactgtatcaatgcctacaatgacaccttgactgcaac

SEQ ID NO: 93096 - DNA, 389 bp, Homo sapiens
gtccgcggcggcgccgggtttccctcatgatctttggcgggcggtggcggcggcagaggcggcgggaggatgacctcttaccgggagcggagtgccgacctggcccgtttctacactgtcaccgagccccagcgacacccgaggggctacacagtatataacggcaccgcccgggttgtttcacgaagaaatccacaggatgtccaggagataattgtatggaatagatacaccgtttttaacaaactacacctagaactatggctaattcacaaaaacttattccgacattcagagatgtttcctccatttgctaaaggaatagtgcttgggcgatttgatgaaactgtgataaaacagagaagacaatgggctgcagacctgctacc

SEQ ID NO: 93097 - DNA, 384 bp, Homo sapiens
tttcgtgagcagacagcgagctttggaatgtgaatgagaagatgtagtgtgacagcagcccgggtgacacctgctgggagcttggcgtggacaccccagccacccccagcccagcccagccggagcaccctacccctgggcatccccctggccatccagcctcaccatgtccaagaggggcatgagcagccgggccaagggggacaaggcagaggccctcgcggcgctgcaggcggccaacgaggatcttcgagccaagctcacagacatccagatcgagctgcagcaggagaagagcaaggtcagcaaagtggaacgcgagaagaaccaggagctgcggcaggtgcgcgagcatgagcagcataagaccgcggtcttgctcac

SEQ ID NO: 93098 - DNA, 935 bp, Homo sapiens
tcccaatcaacaagctatttaaaagcctacaaaaaaatttaaaagcccctgtttaattaaatatcccttcgtaagtacccaccttttgggtgtgggcccctttaccttacatcaaatcccccaagaaaagagcagaacttttttgtctgggaagggttttctgaaggagttataatggaataggcaggaaggagaactttagtttctgtatagcgctttttatattataggaatttacgaacagtagaaaactgtttgaggtacaggcaggggtttagataaatatgtgaagattgggtcttctttaggtaagcagaggtgcagaaagattaactctctcctgtacacctctcaagtgctgaaaagcatgtatactatatggaagttctagaattttagtacaatcaggttgctccgggtctggagggacaggagattctgtgtctatataatcttcaggactgatgtctttgctctccaaagttatgtatgtgccatcatatagatccaggtcccctaagggcaccttggctttgatgcagtctgggtcttctttattatgtctctgttccagtcctgtgtctctgtcctcattctcttctatgtgaattttttgagcaactaattgtttctctaattctttgaggtagttaactgttgcttcttgtctcattaatatgactaggtcatgaggatgcttcaagttcattggtgaatccacctgctgctggattttcccgtcctccgtgacgacccagtgcgtggtggcgaaggcccctcgtgccgccacactcagcaaggcggaaaggctgaggagccagcctgggccggagcaaggcggcagctcgtaccggccacgaacccctactgccgccgccatcttgcccccccggccgggccgctcacaccggaagcggaagctagtctccacgaaa

SEQ ID NO: 93099 - DNA, 400 bp, Homo sapiens
  misc_feature (1)...(400): n = a,t,c or g
cgagggatggcggcggctgcagcaggaactgctacatcccagaggtttttccagagcttctcggatgccctaatcgacgaggacccccaggcggcgttagaggtgagagagcccatttctgcttcctccactcttcttaggggagctgggccacttcgggtccctgctgacccgccttctccccgcaccgccggacagggacccaggctcttgttgatgctgcgtctcagctccggtattgagattctccgtctcttttctctgttacacggtagccgcgttaccccagactcctgtcttgccctttccactccctacagctcctgagaaaaacctcctctatttcttgggagcatggntggcatttgtagtttggctgaaaggatttttttttaatgac

SEQ ID NO: 93100 - DNA, 1082 bp, Homo sapiens
tttcgtgcaatgagctgttcaaatgtggagactacgggggcgccctggcggcctacactcaggccctgggtctggacgcgacgccccaggaccaggccgttctgcaccggaaccgggccgcctgccacctcaagctggaagattacgacaaagcagaaacagaggcatccaaaggtaggggaatggtgggccctggtgtggagctgtagggcttctgtggtgggcaaggactctgggaccgctgcaccgtcacattctcctcctttggccccagagacacatctgccttctttctttcccactgcctcgggcctttctttttctgcagctaccctcaccttttctgaggctgaagcaccgagccccacattcgtcccccccaccttcttctggcctttcctcgagatctttccctactgctcttgcctggagacagtggcctcatgggtgctgacagcgctcctgtttgtgctcagccattgaaaaggatggtggggatgtcaaagcactctaccggcggagccaagccctagagaagctgggccgcctggaccaggctgtccttgacctgcagagatgtgtgagcttggagcccaagaacaaagttttccaggaggccttgcggaacatcgggggccagattcaggagaaggtgcgatacatgtcctcgacggatgccaaagtggaacagatgtttcagatactgttggacccagaagagaagggcactgagaaaaagcaaaaggcttctcagaacctggtggtgctggccagggaggatgctggagcggagaagatcttccggagtaatggggttcagctcttgcaacgtttactggacatgggagagactgacctcatgctggcggctctgcgtacgctggttggcatttgctctgagcatcagtcacggacagtggcaaccctgagcatactgggaactcggcgagtagtctccatcctgggcgtggaaagccaggctgtgtccctggctgcctgccacctgctgcaggttatgtttgatgccctcaaggaaggtgtcaaaaaaggcttccgaggcaaagaaggtgccatcattgtgg

SEQ ID NO: 93101 - DNA, 409 bp, Homo sapiens
aaggggtgagattcgcccatggctcggccctgccctcgcgtgtgtggggtgccgctccgcgtggtacggtccgcgtgacgacttctcgcccggcgccgggctctaggatgggaaggccattgtgactatgtggtgattacagttgtcttactactgagtttcctactgaaatcatggaggagaaacagcagattatattggctaatcaagatggtggaacagtggcaggagcagcacctaccttctttgtcatcttaaagcagccaggaaatggcaaaactgatcaaggaattttggttactaatcaggatgcctgtgctttggctagtagtgtgtcatcaccagtaaaatctaaagggaagatttgccttccagctgattgtactgtgggtggaatcacttgtacccc

SEQ ID NO: 93102 - DNA, 1134 bp, Homo sapiens
agcttgtggtggaggaactcagggaagaactgtttgactggagcttcatggaagggagacagggacagaagaggcctggggagaagccaagaaccagatcatggcctggttggtttgggttttattctcaggaaatcagaaagcctctggagggctttaagcatgcaggcaacacagtctgacttgagtttctaaaaactctctctggctgagatgtggagaataaacctcagtgggtcgaggatggaatcactctccaatgagtggttaggaagccactgctggaattcaaatgagagctggtgcttggaattaaggggtggctatgacggtggagaaaagggaccagttctggatgttctggaggtaggtccagcaagacctgggctggttgcacaggtgatcttggcattgtcgagccacctgggggctgtagaatcagagaagcagaagctgcgggcgcaggtgcggcgtctggtgcaggagaaccagtggctgcgtgaggagctggcggggacacagcagaagctgcagcgcagtgagcaggccgtggcccagctcgaggaggagaagcagcacttgctgttcatgagccagatccgcaagttggatgaagacgcctcccctaacgaggagaagggggacgtccccaaagacacactggatgacctgttccccaatgaggatgagcagagcccagcccctagcccaggaggaggggatgtgtctggtcagcatgggggctacgagatcccggcccggctccgcaccctgcacaacctggtgatccaatacgcctcacagggccgctacgaggtagctgcgccactctgcaagcaggcactcgaagacctggagaagacgtcaggccacgaccaccctgacgttgccaccatgctgaacatcctggcactggtctatcgggatcagaacaagtacaaggaggctgcccacctgctcaatgatgctctggccatccgggagaaaacactgggcaaggaccacccagccgtggctgcgacactaaacaacctggcagtcctgtatggcaagaggggaaagtacaaggaggctgagccattgtgcaagcgggcactggagatccgggagaaggtcctgggcaagtttcacccc

SEQ ID NO: 93103 - DNA, 723 bp, Homo sapiens
atgcggggcggggagcgcgggcggccggggagggcggcggcccctttaagagcaggccacgccccctcccctcctcccgttcgctgccagcggtcggtggcggccgctacggtgctgacaagatggcggctggcggagctgtcgctgcggcgcccgagtgccggcttctcccctacgcgctacacaagtggagctccttttcctccacctaccttcccgagaacattttagtggacaaaccaaatgaccaatcttcaagatggtcttcagagagcaactatcctccccagtacttgattctaaagctcgaaaggcctgctatagttcagaatatcacatttggaaaatatgagaaaactcatgtttgcaatttgaagaaatttaaagtctttggtggaatgaatgaagaaaatatgacagagctgttgtccagtggcttaaagaatgattataacaaagaaacattcaccttgaagcataaaattgatgaacagatgttcccttgtcgattcattaaaatagttccactcttgtcctggggacccagctttaactttagcatctggtatgttgaacttagtggcattgatgatcctgatatagtacaaccttgtctcaactggtatagcaagtaccgtgaacaggaagctattcgcctttgcctaaaacacttcagacaacacaactatacagaagcttttgagtcactgcaaaagaaaacct

SEQ ID NO: 93104 - DNA, 1996 bp, Homo sapiens
tttcgtgctggtgggacagtgagcagagggctgggccctgtgcctggggactgtggcctggaggctgagcaggagctgaggaggggaccagagggacaaggcccctaagctggccaccatggccagactctgagtgcaggggaggtgaggggcctgcgtgtgccttatcttcccagacacactggatccttcttgtcctctgatcaagggaaagacaaacgacctggatggaccacaactttgctcctgctcctccagagatgcagtcgcatggagctccaggcccgggaacctccttctcccatagccatgtgctggggcgccctatccgcccctcgagactccctggaggagggtcccccctcacccccgtcctcaggaagaccatccatctggataccttcccccaaagccatatcccacagacctccagccggctgggccttggagccaggacccggagtgtgcccccacaggagacgggcatcgctctgggggcttccttgagccccctgcccaccagcagccttgtacccaggaagctcagctccatctccttgactctccatcagaacagccaggcacggtccctggatcgcccactttctcactgggaagagttgcctaccccaggaaagaaggctgctccccatgaaggagggagggtgtcctcgccaggctcgccacctgtgaccctagtgccagggggcagggtccactctgagggcccagggaacccaggtctgaccaaatccaacaggatgcttgccacggagaagcccctggtgagttcctacctagccttacctttccaatcccggttagcccagagtgcaccagtccttgcagagccaggctcgttgggccaggggcaccttgtctcagtgactgaccacatgcctaccagagcttctccaggaaaaggcaagccccgggccagggggatccccagaccccgggggcgtctccaaagggccaacacgactgtgaatttgactgctatggacacaaggacagacgcagccagacatttagccacaatggccaccaacagacctagcttggctatcaatttagccacaccaaacacatcccaactggacacaggcacagagttccctgccctggatatcaagctgggcacagccagagacttgtcttcggtagggacagtcaagtcaggcaaaaccgtgaacttggctacagcaggcacaatcaagccgggcacagccatgaatctgactacagttgggacaaccaagccagggatggtcatggatttgatagcctcagaaccagacaagctgggcaaagccatggctacaagaagcacagccaaaccagatatgaccacagagggtatagccatggattcagcaacatcagacccagtcaagccggacacaatcacagctacagtgggcaccagtaggttggaaacagccatggctttggccagagtgaacagagccaagctgggcacggctaagaattctcttgctttggacacaagcaggatgggcacagctgtgggttcagttgtgccagtaaccccagacccagccactgggaagaccacactgggcagtgttaataacctaaccatatcagacgttgctacatgcctgctaatgccaagcagatccacagacctagccctggacaacactaatgctgccatggacagagccacagagcctgcctcactggacctggccacagaatacaaaggtaaatgcagaaacttggttggggatggactaggctgccgggagggggaggtgtgtgagcttggagatggatccatgaagcccatgagcatcaactccaacctgctgggctacatcggcatcgacaccatcatcgagcagatgcgcaagaagaccatgaagaccggtttcgacttcaacatcatggtcgttggtacggaaggctgtggggctgctgcaggcctggtggcgggcagcaccaaggatcccatttctttcccccaaat

SEQ ID NO: 93105 - DNA, 436 bp, Homo sapiens
tgcgtcgggactggacctgggtgccgagcggagccgctgccatgggcctgggcgtcagcgctgagcagcccgcaggcggcgccgagggcttccacctccacggggtgcaggagaactccccagcccagcaggcgggcctggagccctactttgacttcatcatcaccattgggcactcgaggctgaacaaggagaatgacaccctgaaggcactactgaaagccaatgtggagaagcccgtgaagctggaggtgttcaatatgaaaaccatgagggtgcgcgaggtggaggtggtgcccaacaacatgtggggcggccagggcctactgggtgccagtgtgcgcttttgcagcttccgcatggccactgagcaagtgtgtcctgtgctggatgtggaaccatcttctcctgttggccctgtcggccttgcgcttcg

SEQ ID NO: 93106 - DNA, 459 bp, Homo sapiens
tttcgtggcgaggagcgagccgtgcggacagatttagaaatatactcctctttgcggccgagttctggagccgtcggaccccgactcctggggccgcggaagcggctgccaggggaccggcgtccgctgactcctgggctcccctcgtagcgacccgcgggatcggaaaaaaaggagaacatggaggaggagggtggcagaagcggcggcgccgcgaggaccagcgcggacggcggcgacggaggagagcatctcctcactgtgcagcacgagctgcggactgctaatttgacaggacatgctgagaaggtgggaatagataatattgagctcctgaaagtcctacgaactggagcttatggaaaagtatttctagatcggaaaataagtgggcatgatactggaaagctgtatgccatgaaagttatgaaaaaggcaacaatcgatcaaaggccaaac

SEQ ID NO: 93107 - DNA, 438 bp, Homo sapiens
ggatttcgtggcgcggaggccccgggcgcggcgcaggctccaaagaagaagaaaccaaggcccacagagggaggcccaggagcagggagcgggcgagggaaggatccgtacaggggcccaacactactccaccaaccgaagcccccaaaagatgagttcctgtccagtctggagagctatgagatcgccttccccacccgcgtggaccacaacggggcactgctggccttctcgccacctcctccccagaggcagcgccgcggcacgggggccacagccgagtcccgcctcttctacaaagaggcctcgcccagcacccacttcctgctgaacctgacccgcagctcccgtctactggcagggcacgtctccgtggagtactggacacgggagggcctggcctggcagagggcggaccggccccactgcctctacgct

SEQ ID NO: 93108 - DNA, 501 bp, Homo sapiens
tttcgtagcagggatggacatgatgctgttggtgcagggtgcttgttgctcgaaccagtggctggcggcggtgctcctcagcctgtgctgcctgctaccctcctgcctcccggctggacagagtgtggacttcccctgggcggccgtggacaacatgatggtcagaaaaggggacacggcggtgcttaggtgttatttggaagatggagcttcaaagggtgcctggctgaaccggtcaagtattatttttgcgggaggtgataagtggtcagtggatcctcgagtttcaatttcaacattgaataaaagggactacagcctccagatacagaatgtagatgtgacagatgatggcccatacacgtgttctgttcagactcaacatacacccagaacaatgcaggtgcatctaactgtgcaagtttcttctaagatatatgacctcttcaatgatatggaccgccaatcgagtgaaccataagcaccttttactttggttgg

SEQ ID NO: 93109 - DNA, 437 bp, Homo sapiens
tttcgtctcctgacccccggcggcctgtgaataatggctactgagggcgctcgcaggggctgctaaaaaggaaacgcggggcgcgagaggcgcggcgcgcgcgggagcgcgagggaaaggagcgagcctggggccgttgcaagcggctggcgagagaaaggattcgtgcgagcgctcacatttgtttctcccaaggatctcatctggccaccgcgttctggaagaggcgagagggagagcgtgcgcgagaggagagagacggcgggggaaagggagacggcgagacgcgcagcgccggcgcccgggagacccaggaggagcccgcagataaccagcccgagtcatgcagtcttttcgagaaaggtgtggtttccatggcaaacaacagaactaccagcagacctcgcaggaaacatcacgcctagagaattacaggg

SEQ ID NO: 93110 - DNA, 435 bp, Homo sapiens
  misc_feature (1)...(435): n = a,t,c or g
tttcgtgagagatgctgctgcggaagtcctcggtggagtgtgagaaggcagccagtgttggcctggaagacctctagaacctgagaagaggcagcgatcctggggcagagtccagggcagctcaaggctcctccacacacacacccgctgaaccctgagcaccctgagctgctgagatggggcgggccggggctgccgccgtgatcccgggcctggccctgctctgggcagtggggctggggagnnncnnccccanncccccacgccttccgttttgcttacaagagctccaaggccggcatgcgctccatacttttagcctggagcgaacctgctcgtaccaagactttttgtgggcagacgagggccgcctccttcatgtgggagcacaagaccttgctacctggcacactctgtccccgttaggcttgtggg

SEQ ID NO: 93111 - DNA, 983 bp, Homo sapiens
  misc_feature (1)...(983): n = a,t,c or g
cgacgtttcgtgttgagtcgtggtggtgcggacgcgctcgtgctttggaactatcggattaaacttgaatcgagtgaaattacacaaaggagcgccgcggaggaggcggcccggggacccggacaccctgaaactcaccagagacccgttcgcccccggccaactccgtgcccgtggattcagccccctggccgcagctgccgagccaactccggagcccgctctgcgttttgttttcccctcggcactaggcagcggaggagcccgaccgacccggacctatatccagactttgcctgacactgcagggtccaagagaattaaagaaatatggaatgacatgaagaagattagttaaggattataggctttgagggcaaacacctcagtgaagtgaagcacaggcaagctcctgagctgtggtttggaggagccgtgtgttggaagaagatggcagatccaggaatgatgagtctttttggcgaggatgggaatattttcagtgaaggtcttgaaggcctcggagaatgtggttacccggaaaatccagtaaatcctatgggtcagcaaatgccaataagacccaagggtttgcctctttacagccatcccttcatcatccttcaactaatcaaaatcaaacaaagctgacaccatttttggtcactatatatcggcatgaacaacaaaagatgcatctgatggatcagccgaacagaatgatgagcaacacccctgggaacggactcgctgtctccgcactcgcagtatcacacccctcccgttcctcaggtgccccatggtggcagtggtggcggtcagatgggtgtctaccctgggcatgcagaatgagaaggcatgggcaatcctttgtggacagcagctccatgtggggccccagggctggttcaggtaccagaccagatacgagccccctaccagcagcagcagccacagccgcagncaccgcagccggctccgtc

SEQ ID NO: 93112 - DNA, 450 bp, Homo sapiens
  misc_feature (1)...(450): n = a,t,c or g
aagtcttctggggctctctctggatgggtttctcctctccatggtttattcagctggaggcagattcattggtactcttttcatctggactgccctgcccattgcttggccctcagctcccagccgggctggactccaagctctctccccgcccagccggctggcggttgcgcccagggctagagcagggcccacctgcccctcacacaagcctcctccccacacgcagccccctcctcacccgcgattccctctcccacgcccctcacagcaaaccaaagccctgctcccaccatttggctctccgtcctccgaaagtcccggtttgcccctcttgcntactcgctcctcttcctctctcccctacttccacctcctttccccacgctcctcgcccaatccctctcccaccgtcatacatgctcccctcctcccggaccgagcacgaaa

SEQ ID NO: 93113 - DNA, 603 bp, Homo sapiens
tagagcaggaagatggcgacggacggcgcgagctgcgagcccgacttgtcccgggccccggaggacgcggcgggggccgcggcggaggcggcgaaaaaagagtttgatgtggatactctcagtaaatccgagctgcggatgctcctcagcgtgatggaaggggagctggaggccagagaccttgtcatcgaggccctgcgggctcgcaggaaggaggtatttatccaggaacggtatgggagatttaatctaaatgacccgttcctggcactccagagagactatgaagcaggtgctggtgacaaagagaagaagccagtttgtaccaaccccctctccatccttgaagcagtcatggcccactgcaagaaaatgcaagaaaggatgtccgcacagctggctgctgctgagagcagacaaaagaaggtcactcttgtgccatgcgcacatggcttactgcaggagcgctacgggaaggtgtgtggtgggaatcccatgcagagagaacagcaaggacaaagaccccgaggcaggaccatgtttaggaaactccgggcatccagcgaagctaagggagtaagcaggatcaaagtaggagacaag

SEQ ID NO: 93114 - DNA, 405 bp, Homo sapiens
  misc_feature (1)...(405): n = a,t,c or g
tttcgtcccggggctccgagccggagccgagtctgcgcctgggggaggaccatgcggcagtagcagccatgctgccctttctgctggccacactgggcaccacagccctcaacaacagcaaccccaaggactactgctacagcgcccgcatccgcagcactgtcctgcagggcctgccctttgggggcgtccccaccgtgctggctctcgacttcatgtgcttccttgcactgctgttcttattctctatcctccggaaggtggcctgggactatgggcggctggccttggtgacagatgcagacagtgtggcttcagctatgcacggngacagccatgaccggtatgagcgtctcacctctgtctccagctccgttgactttgaccaaagggacaatggatntn

SEQ ID NO: 93115 - DNA, 637 bp, Homo sapiens
  misc_feature (1)...(637): n = a,t,c or g
tttcgagaagaaacagctccgccgtccttcgctttttttgctgggctgctgctccttcggcatcatggcgccgtcgctgtggaaggggctggagggcatcggtctctttgccctagcccacgccgccttttccgctgcgcagcatcgttcttatatgcgattaacagaaaaagaagatgaatcactgccaatagatatagttcttcagacacttctggcctttgcagttacctgttacggtatagttcatattgcaggagagtttaaagacatggatgccacttcagaactgaaaaataagacatttgatacggtaaggaatcacccatccttttatgtatttaatcatcgtgggtccgagtacttttccggcccttcggatacagcaaattcttcaaaccaagatgcattgtcctctaacacatcattgaagttacgaaaactcgaatcactgcgtcgttaagatttttacaaattataataataggacaggacacagagctggaatattggagtttggggtataaaacactcctccctgcccccattagtatttatattgatctttcagacctactttagtaaaaaaaaccatggcccttgtttatatactgttaanccaatcattaatgcagtg

SEQ ID NO: 93116 - DNA, 425 bp, Homo sapiens
tgtcgtccgctggccagggtgctggacaagactggcccgtcggccacctcgccagctcaggcacccgctgcagccgtcgctgtctcctgccagaccggtccccatggaggagatggaagaggagttgaaatgccccgtgtgcggctccttctatcgggagcccatcatcctgccctgctctcacaatttgtgtcaggcgtgcgcccgcaacatcctggtgcagaccccagagtctgaatccccccagagccatcgggccgcgggctccggggtctccgactataactatctggacctggacaagatgagcctatacagcgaggcggacagcggctatggctcctacggggggttcgccagcgcccccactaccccgtgccagaagtcccccaacggcgtccgcgtgtttcccccggctatgccgc

SEQ ID NO: 93117 - DNA, 488 bp, Homo sapiens
  misc_feature (1)...(488): n = a,t,c or g
ctagatccccctcngntttagaacccgntcggaatgcccggcccgacgatttnntanngccaagcggaaaagacgggcctcttcctccgactcccgagcgcgagtccctcattttgggttctcagcgaacggcggcagcggcggcggctggaacaatcactcggccaagggcgacagccaactgctgtgagtgcacggggagaggcccaggcagcggcggcggcggcggctctcgggttgcggtgaagaatgtcagccactagcgtggatcaaagacctaaagggcaaggaaataaagtttcagtacaaaacggttcgattcatcaaaaagatggctgtaatgatgatgattttgagccctacttaaggagcccagacaatcaaagtaacagctatccaccaatgtcagatccatacatgcctagntactatgctccatccattggatttccatattctcttggggaagcagcgtggtcacagctggn

SEQ ID NO: 93118 - DNA, 398 bp, Homo sapiens
  misc_feature (1)...(398): n = a,t,c or g
ctccggcccccaccgcggatcatgtaccaggattatcccgggaactttgacacctcgtcccggggcagcagcggctctcctgcgcacgccgagtcctactccagcggcggcggcggccagcaggtaggtgcgggccccggtgcacctggcggcgcgggcggacccctgccctcttctcgccgccactgcctcttttgctttcttttctttttcttggcgagaaaatacctacgggccaccgttgtaagttctggattttngtcctccccttcccccccacccccttttaaactaggggattggagagtgggcttgaagagacaacatgcccttttcctctcacgttatattttacccagatagactcctggaattgtaggccccctaccaggagcctg

SEQ ID NO: 93119 - DNA, 395 bp, Homo sapiens
ggcacgaggttcctcggcggctgcaggatgggggactccaaagtgaaagtggcggtgcggatacgacccatgaaccggcgagagactgacttgcataccaaatgtgtggtggatgtggatgcaaacaaggttattcttaatcctgtaaatacgaatctttccaaaggagatgcccggggccagccgaaggtgtttgcttatgatcattgtttctggtctatggatgaatctgtcaaagaaaagtatgcaggtcaagatattgttttcaagtgccttggagagaatatcctgcagaatgcttttgatggctacaatgcatgtatctttgcctatggacagactggctctggaaaatcttataccatgatgggcacagctgaccaacctggattaat

SEQ ID NO: 93120 - DNA, 352 bp, Homo sapiens
ccggacagccctgctccctgcagccaggtgtaggttctggagccactggggccaaagtgagagtccatcggtcttacagcgcttgggccacggcggcggccctgggagcataggtggagcgaccccattacgctaaagatgaaaggctgggggtggctggccctgcttctgggggccctgctgggaaccgcctgggctcggaggagccaggatcttcactgtggagcatgcaaggctgtgcgtcgacgcgtccgtcaattcaacatctatgattactaaaaatggagaaggggtgtttgttactcctattgtagggccggcaccatatcacaatggctgatttatagattgt

SEQ ID NO: 93121 - DNA, 279 bp, Homo sapiens
cggccgcgtcgacatggaaaccaagcgcagcttctcttcctcctgctactctggctcccagatactaccggagagattgtgttgacgcaatctccaggcaccctgtttttgtctccaggggaaggagccaccctttcctgcacgaccagtcagagtataagcagcagcttcttagtctggtatcaacaaaaacatggccaggctcccagactcctcatttatggtacatccaccagggccactggcatcccaaacaggttcaatggcagtgggtctggg

SEQ ID NO: 93122 - DNA, 477 bp, Homo sapiens
  misc_feature (1)...(477): n = a,t,c or g
ngtgtgccnttttgaaacgattgacatccatacgccaagccnngagcgnaggagccggcttgctggcaatgcgcttgctaagacggatcgccggctttccggctcctacaggtaaaagaaggaaatacggggagggcaacgcaatgttcatgggctacggcgattaccgctcgggtaactgctacaaggtcaagctgatgctgcatctgcaggacaaggagtaccagtggattcccattgatatcctcaagggcgagacacagagcgaagcctttctggccaagaaccccaacggcaagatcccggtgctggaactggaagacggtacctgtctgtgggagtccaacgccatcctcaacctcctcgccgatggcagcgagtttctgccgaccgagccgcgcttgcgcacccaggtgctgcagtggcagttcttcgagcagtacagtcacgagccctacgttgcggtggcgcgtttag

SEQ ID NO: 93123 - DNA, 439 bp, Homo sapiens
  misc_feature (1)...(439): n = a,t,c or g
ggtttaattcttcctctaaaacctcactaatactgttccccctcctctgcctttgtccatcaagatctgtcctatacaacatagtaaattccaagtggaagaagttaagtgtgcaacgtcaacccataaaaaaactagggggaaaattgaatcgccttcgaaagttctagagtgggaagagctttggaacaatagaagaaaccataaaagtaagaatcaggctctctgctcctcccatttgacagacagctacatattcttatgcagaaccagccatgtccctgagacaccatggtgaaggtgaaggccagagtaaacgaacttggtcgtgttgggcacctggtcaccggaactgcttttcactctggtaaagnggatattgtcaccatcggttacccgttcattgacctcaacgacatggtctgcatgtcccagtatg

SEQ ID NO: 93124 - DNA, 483 bp, Homo sapiens
  misc_feature (1)...(483): n = a,t,c or g
gccccctttgaanccnctgataggataaccnttgaagggacacgccgatgctgtgctggctgcggggacggaggcggtgaagtgccatcttctgctaggtcgtcacttgctccggctcatggcatcaagtggcatccatcataagatcgttaactgaagacaatatgcaaaattctcacatggatgaatacagaaattctagtaatggcagcacaggcaacagttcagaggtaaagaaactgaaatggcaagtgctgtggaccttccagtgacgctgacagaaacagaagcaaatttccctccagaatatgaaaaattttggaaaactgtagaaaataatcctcaggattttacaggctgggtatatttgcttcaatatgtagaacaggagaatcacttgatggctgccaggaaggcatttgacagatttttcatacactatccgtattgctatggttactggaaaaagtatgcagaccttga

SEQ ID NO: 93125 - DNA, 519 bp, Homo sapiens
  misc_feature (1)...(519): n = a,t,c or g
attgaaccctattgcannggcggaatagagaccctatgcagngtgcnggaattctcctaccagtggagtatcgaaacgtaaatctatgaagttatcaacatacgaggagcttgattgagttatgatagagtggtttaaccaacagaaaacagatgggattccagtgtccggaacgatttgtgcaaaacaagccaagttcttttttgatgctttgggaatggaaggtgattttaatgcatcgtcaggctggctaactcgatttaagcagcgccatggtattccaaaggctgctggtaaaggaacaaaattaaaaggagatgaaactgctgccagagaattttgtggtagctttcaggaatttgttgaaaaagagaatctacaaccagagcaaatttatggtgctgatcaaactggattgttttggaaatgtctaccatcaaggacattaactcttgaaactgaccaaagtacttctgggtgtaggtcaagcagagagagaatcatcattatgtgttgcgn

SEQ ID NO: 93126 - DNA, 366 bp, Homo sapiens
ccggaggggctctgcgttctgtagtggcgctgcttgggcccgtggcggattgtaagctgctggttttgcggctgggaagagcggcgagagggttcggcatttttcgtcgggatccccgcaaggatgagtgctgccagagagtctcacccgcatggggtgaagcgttcagcctccccagacgacgatctgggatctagcaattgggaggcagcagacttgggtaatgaagagagaaaacaaaagttcttgagacttatgggtgcaggagaatcgcttgaacccaggaagcggaggttgcagtgagccgggatcgccccattgcactccagcctggggacagaatgagactccgtctcaaaaaaaaaa

SEQ ID NO: 93127 - DNA, 1714 bp, Homo sapiens
aaggccccaaggtgacccaaagactaccggcattacggctaaggtaatcaacgtgcggtctaccaagctagttggtctgccacaccgcatcacggcaaccaggtggaagagaaagcgtagccgaatgctacatacgaacacgggaaagttagttttaataaccgcgatcaaaaacgctgtacgcgaaaggtgatgttgataaggcgttaaaactgcttgatgaagctgaacgcctgggatcgacatctgcccgttccacctttatcagcagtgtaaaaggcaaggggtaattacgccccacagtgctgattttgcaacaactggtgcgtctcctagcgcacctatcgcaggagcgcttgggaaaattacaggacagtatttatatctcgctaactgaccattgccagtttgcgattaaacgctttcagcaaaacgtgttgctgcccaacccgttgctgtgggatatccagcggctttacccgaaagagttccagctaggggaagaagcgttaaccattattgataaacggttgggcgtgcagttaccgaaagatgaagtgggctttattgccatgcatctggtcagtgcccaaatgagcggaaatatggaggatgttgcaggtgtcacgcagttaatgcgcgaaatgctgcaattaataaaatttcagttcagccttaattaccaggaagaaagcttgagttatcagcgactgggtaccacatctgaagtttttatcctggcgtattcttgaacatgcttcaattaacgatagtgatgaatcattacaacaagcagtaaaacaaaattacccgcaagcatggcaatgtgcggaacggatcgccatttttattggtttgcagtatcaacaattagggttaactcaaccggccgtcagtaaaatcattaacgatattgaagattattttggtgtggaattagtggtgcggaaaaataccggtgtaacattaacacctgccggtcaattgttactctcccgttccgaatccattacccgtgaaatgaaaaatatggttaatgagataagcggtatgtcttctgaggcggtggtggaagtctcatttggttttccttcattgattggttttacttttatgtcagggatgatcaacaagttcaaagaggtgttcccgaaagcgcaggtttctatgtataaagcgcaactgtcttcgttcttaccggcaatccgcgacggtcgactggattttgcgattggtacgttaagtgcagaaatgaagcttcaggatttacatgttgagccgctgttcgagtccgagtttgtgctggtagccagtaagtcccgaacatgcaccggcaccaccacgctggagtcgttgaagaacgaacagtgggtgttgccacaaactaatatggggtactacagcgaactgcttactacgttacaaagaaatggcatcagtattgaaaacatcgttaaaaccgactcagtcgtgacaatttataatcttgttctcaatgctgatttcttaactgtaattccttgtgatatgacgtcaccttttggttctaatcaatttattactattccggttgaagaaacattacctgtggcacaatatgccgcggtatggtcgaaaaattatcgtattaaaaaagcagcatcggttttggtggaattagccaaagagtattcatcttataatgggtgtagacgaaggcaattaatagaagttg

SEQ ID NO: 93128 - DNA, 496 bp, Homo sapiens
gcccgggagtgggtagatttgatgtgcgtgtgtaacaggcagaggttgatggagtaacagggaagtgaggctcctagcattttggtctgagcaattgggtgtggccagttatcatctcaataaatgtctgcggggagcagggtgaagtatgggggtggagccatgagctccttttcacacttgctgagtttgaatgggccgtcagtccccaaggagagacgtctaatcagcagcaggatataagattcctaagcttagggaagggtcagtgctggagatgtaatttggaaatcgtcagcacataattagtgttgaaacatgaacctgggttagttcatccaaagagagagtaccaatatagggagtgaagggttaagaccagatagcaggtgctgggggctctccaggggcgaagcagcagaggaggctgagggggagcagtcagtgcagtgggaggagaagcggatgtgagtggcatcagagaatccagggggag

SEQ ID NO: 93129 - DNA, 887 bp, Homo sapiens
cgggcgggcgctcggctggcggctgcagcagcagagggagacccgcggcaaccccggcaacccagggctcggcgtcgctgccaccatgacgggaagcaatatgtcggacgccttggccaacgccgtgtgccagcgctgccaggcccgcttctcccccgccgagcgcattgtcaacagcaatggggagctgtaccatgagcactgcttcgtgtgtgcccagtgcttccggcccttccccgaggggctcttctatgagtttgaaggccggaagtactgcgaacacgacttccaaatgctgtttgctccgtgctgtggatcctgcggtgagttcatcattggccgcgtcatcaaggccatgaacaacaactggcacccgggctgcttccgctgcgagctgtgtgatgtggagctggctgacctgggctttgtgaagaatgccggcaggcatctctgccggccttgccacaaccgtgagaaggccaagggcctgggcaagtacatctgccagcggtgccacctggtcatcgacgagcagcccctcatgttcaggagcgacgcctaccaccctgaccacttcaactgcacccactgtgggaaggagctgacagccgaggcccgcgagctgaagggtgagctctactgcctgccctgccatgacaagatgggcgtccccatctgcggggcctgccgccggcccatcgagggccgagtggtcaacgcgctgggcaagcagtggcacgtggagcactttgtctgtgccaagtgtgagaagccattcctggggcaccggcactatgagaagaagggcctggcctactgcgagactcactacaaccagctcttcggggacgtctgctacaactgcagccatgtgattgaaggcgatg

SEQ ID NO: 93130 - DNA, 518 bp, Homo sapiens
attgctcatccctcctgttgccagctctccaccctgcctcccggggcccgttctgccacagagggaggtgtcctttcctctttggaagcccatagcagccttgggctgaagggctcaaaccccaggctgctacttcccttgagaattgctcacccaggcgggagggctgctccttccacacagcacagcctgtaaacgtcactctctgtcatcgtttataagcatgatgactgggttttcacgcttccccataggatgggccttccttaaatcttgttatgttgtcagcacattacttgtgtgacgcaaaagaaaaaaaattcactcttgcagtctgccaggcccaacatgtaggtttctgctttttagggcactaaaacgaggacacatttttatttctcagcaaataaatatatgaattctacgtatttttttatgtttcatagaattcaattcgccacaatctctctctgaatcgttatttcatcaaagtgccgcgttcccaggaagaaccaggc

SEQ ID NO: 93131 - DNA, 1023 bp, Homo sapiens
atgatgatggtagatctgaaagtggctgcgtacttggaccctcagatcagggctttgtgggagaccaaggggcctgcaagagagagctccggtcagagtaaaaaatctcctcaaatggactgtctcgatcctaagagctcttgctggcacttccggaatttcacctatgatgaagcaggtggaccccgtgaggctgtcagcaaacttcaagaattatgtcatctatggctgaagccagagatccactcaaaagagcagatactggaactgctggtgctggagcagttcctgactattctgcccagggagacacagacccagatgcagaagcaccatccacagagcattgaggaggctgtggctctggtagaacacttgcagagggaatctggtcaaacatggaatggggttgcagtccatgagctgggaaaggaggcagtgctcttgggagaaacagcagaggcctcaagtttcgggctgaagccaacagagtcccaaccagtgggcgtatcccaagatgaagaattttggaatacatacgagggtctgcaagaacagctcagcaggaatactcataaagagactgagcctgtgtatgagaggggtaaggagcttcatgataattttcttctcctgggagctgtgataatagtttattcacccaaaatgtcatgggcattttttgaataccctgctctgtggatttgtaaaaccagccttgatagcaactatgatgtccttccaggcagcagtagaaatgccaactgtggatgaaagtgggagtaggcctagagaacagaaatatctaaaccacagaactcttggtaataacagtgtgaactctgttccttagactagtggagaggaaggaaagaaatggagtgggaaggcttggggccacttcatccttgtaaaatacagaaggaattgagatcagatgggctgttagtggcagaatgtgaaaacagttgtgtaccaagaaaaacataataaaagacaaaaaacttcatctcctaccataaa

SEQ ID NO: 93132 - DNA, 3395 bp, Homo sapiens
gtttttaattaatagactttatgttttttgagcaactttaggtttctaggaaaattgagcagaaagtacagcaagttcccttgtgcccccatggcctcagtttcccatgaccttagttccgctgccctcagtttcccctgctgctcctgtcttgccttggcgtgtctgtccctactgcagccaggctgatctgtcccagcgcacctcactcttgcctccagccatgggcacggcctcatcgcgtctgcgttccccgctggaggccttgtggaggccctcacccatggcagcttttgccttccctctagagtttaaagaaacccattatccccaaagagtttgggggcaaagtccccaccgtcatccgccagcgctatctcaacctgttcatcgaggagtgtctcaagttctgtacctccaaccaggaggccatagagaaggtgaggtcctggagttcctatctggccggtcgggtggggactaggggtccagggtggtccccagacatcccccggcctctcagccgcagctgtgacccggagctgcctgggagagatgcaagtccccgaccccatggcgaccccaccgctggggctccccggcaccaggcaggcatggcctcagctgggcaccgcctgtcccccaggcactgaacgaggagaaggtggcctatgaccgcagccccagcaagaacatctacctgaatgtggccgtgaacaccctcaagaagctcaggggcctggcccccagcgctgtgcccggcctcagcagtgagtcctggcgggtgggcgggggaggctcagggttgctcttggggtggcagctgggctgggaccctcgctgggaccttcacagccctgagctcagccacagtctcagacaaaaggaaagcgcggtgctgtgggggggctgcctgctgcctggttcccaggcttctgtgtaggacggacctggccctggtgtcctcgctgtcagccgccttcctccgctgagtggggtctccaagccgagccgaggggccgcctgctaatggagctgcggcagcttcttcaaagcaggaggcccagggctgggcgagctccatgcattaagctctggggaggaagaaagcggagacctgggcgtttcattgcagcctctccaggctgcattaagctatcaccggcccctgcccccgtccccgcctgcattagcactcggaggggccctgggttggcgtcgcaggctgggtggcccatgaaggctcaaagccctcgaaagccattagatcccccgtgctgttctccccgcccttcccccttcgcttgaggggaggggacgaagactttgggtgtggggcctccgtgcagctctggggcctgcagagctggcggctgccctgcgtccctggctcaccgcatgtctgcctctcctgttcgggtcaggctggaacccggggtcagtggggtgctgtcccagaaagggggagttgaggcagaggtctgaggagggcagggtgggtgggagagcaggcggggcaggggtctgagccagctacttcacaccctcctcccctccctcccttccttccagaaaccagtggccgcagggttgtgtcccacgaggtggtgttggggggcaggttggccgccaagaccagcttctcgctcagccgtccaagcagcccccgggtggaggacctgaaaggtaaggccctgcccctgctctgccacacggtgcttcgtgggcctctgccggcccagcccctgctgtgccacacggtgcttcgtgggcccctgccggcccagccgcctttcccggtggtgtctaccgccccgtgggccatcccaggcaggggctgaccactgtgcctgtccacaggggctgccctgtacagccgcctcagggagtacctgctcacccaggaccagctcaaggagaacggctaccccttcccgcacccagagcggcccgggggcgcaatcatcttcacagctgaggagaagaggcccaaggactgtgagtcgctggcctgcgacggcctaggtgggcaggtgcgggatgtgggcaaggccgggcatgcgggccccagcgtgagcctcagcttccacctgggtccccacccacagcttcctgcaggacctgctgccgctgtggcaccgagtacctcgtgtcctcttcaggccgctgcatccgggacgaggagtgttattaccactggggacggctgcgccggaaccggggtaaggccttacccgggtccttccccttcccacccatggcccccggaacctgggccctcccttgaggcccccagaactggggtaaggctttacccaggccctccatcccactcagggtccctgggctgcaccgtctttggcagagccggggctagcccttggcctcattttctctccacctgttctttatgcaaaagtaagacaagagctttcccatgacaaggttcaaatgccaccacctgaaaggccctgtgtccctgccttcctgtgcccttggtccatggaaatgtggaggttgctggccccaggagcggaggggcttgtcccacccttggcctggtggttctattcaatcccccaggcaaccacgcagccacgctcagggcacatggccagccttgcacagccctgtggcggcccctaaagccatcgcctcagggatacctggagggtgctgcccggggcagcgctgccaagaggcctctgcagagggcactggtctccctggatccaggcctgggcgtcctggctgccacacgactgccggggcctgtggccggaggctgggagacccagtacatgtgctgctcggctgccgccggctctgtcggctgccaagtcgcaaagcaacacgtgcaggatggccggaaggagcgccttgagggcttcgtgaagacctttgagaaagagctctcaggagacacccacccggggatctacgccctggactgcgagatgtcctacaccacatatggcctggagctgacgcgcgtcacggtggtcgacacggacgtgcacgtggtttatgacaccttcgtgaagcctgacaacgagatcgtggactacaacaccaggttttcgggggtgacggaggctgaccttgccgacacaagtgtcacgctgcgtgacgtccaggccgttctgctgagcatgttcagcgctgacaccatcctcatcggacacagcctggagagcgacctcctggccctgaaggtcatccacagcaccgtggtggacacgtctgtgctcttcccccaccgcctgggcctcccctacaagcggtccctgcggaacctcatggccgactacctcagacagatcatccaggacaatgtggatgggcacagctccagcgaggacgccggcgcctgcatgcacctggtgatctggaag

SEQ ID NO: 93133 - DNA, 405 bp, Homo sapiens
ggaggcaggaggttggcgaacgtgcaggtcgccgtgcgtgtccggccgctcagcaagagggagaccaaagaagggggaagaattattgtggaagttgatggcaaagtggcaaaaatcaggaatttaaaggtggacaatcgaccagatggctttggggactcccgggagaaggttatggcatttggctttgattactgctactggtcagtcaacccagaggatccccagtatgcatctcaagatgtggtaatatcatttatcatttttctttcacctcagttctttttttatgtataatatttaagatgtttattataaagatactttgcaaggttagtatagcacagttgtacagattggaagtactctaattggtactttaagaaaactttgaaataactaaca

SEQ ID NO: 93134 - DNA, 1674 bp, Homo sapiens
gaagcggctggcgggcagcagaggaggatggcgaggggctgatactgaacccgggaagggtgggctgtgctgaagccagagccggagccggagctggggccagaacccgagcagtgagttcctccactgacgagttccggctggcggcgctcgccgccttgggcaggacccacctcgccttcctcccggcgtggcagatgctccagctgccatgtccacgcagagacttcggaatgaagactaccacgactacagctccacggacgtgagccctgaggagagcccgtcggaaggcctcaacaacctctcctccccgggctcctaccagcgctttggtcaaagcaatagcacaacatggttccagaccttgatccacctgttaaaaggcaacattggcacaggactcctgggactccctctggcggtgaaaaatgcaggcatcgtgatgggtcccatcagcctgctgatcataggcatcgtggccgtgcactgcatgggtatcctggtgaaatgtgctcaccacttctgccgcaggctgaataaatcctttgtggattatggtgatactgtgatgtatggactagaatccagcccctgctcctggctccggaaccacgcacactggggaagacgtgttgtggacttcttcctgattgtcacccagctgggattctgctgtgtctattttgtgtttctggctgacaactttaaacaggtgatagaagcggccaatgggaccaccaataactgccacaacaatgagacggtgattctgacgcctaccatggactcgcgactctacatgctctccttcctgcccttcctggtgctgctggttttcatcaggaacctccgagccctgtccatcttctccctgttggccaacatcaccatgctggtcagcttggtcatgatctaccagttcattgttcagaggatcccagaccccagccacctccccttggtggccccttggaagacctaccctctcttctttggcacagcgattttttcatttgaaggcattggaatggttctgcccctggaaaacaaaatgaaggatcctcggaagttcccactcatcctgtacctgggcatggtcatcgtcaccatcctctacatcagcctggggtgtctggggtacctgcaatttggagctaatatccaaggcagcataaccctcaacctgcccaactgctggttgtaccagtcagttaagctgctgtactccatcgggatctttttcacctacgcactccagttctacgtcccggctgagatcatcatccccttctttgtgtcccgagcgcccgagcactgtgagttagtggtggacctgtttgtgcgcacagtgctggtctgcctgacatgcatcttggccatcttcatccaccgcctggacctggtcatctccctggtgggctccgtgaccagcagcgccttggccctcatcatcccgccgctcctggaggtcacccctttctactcagagggcatgagccccctcaccatctttaaggccgccgtgatcagcatcctgggcttcgtgggccttgtggtggggacttatgaggctctgtatgaaaaaatacacccaagcactgctcccgtgtattgcggccgctctggagtatccaaccttacgtaagcgtgcgtgggcctgacaggacggca

SEQ ID NO: 93135 - DNA, 542 bp, Homo sapiens
tttcgtggcttctgaggtctccaaaatgcctgtcccagcctcctggccccatcctcctggtcctttcctgcttctgactctactgctgggacttacagaagtggcaggtgaggaggagctacagatgattcagcctgagaagctcctgttggtcacagttggaaagacagccactctgcactgcactgtgacctccctgcttcccgtgggacccgtcctgtggttcagaggagttggaccaggccgagaattaatctacaatcaaaaagaaggccacttccccagggtaacaacagtttcagacctcacaaagagaaacaacatggacttttccatccgcatcagtagcatcaccccagcagatgtcggcacatactactgtgtgaagttccggaaagggagccccgaccacgtggagtttaagtctggagcaggcaccgagctgtctgtgcgtggtgagtacagcgtgggcttccttagtcaggtgtggtggtggctgagcagccaccctttcatgaactgatgtcaccccttctccagat

SEQ ID NO: 93136 - DNA, 396 bp, Homo sapiens
  misc_feature (1)...(396): n = a,t,c or g
cggacgcctgggtgactacttaccacgctactcctacctattgccgcttttatactaataatcttattttaaaacaggcagacttctgcgatatgacccggctgctgggctacgaggaccccctggataccaactttgtggctgccagaatcaccatcaccttcaatccgctctactggaatgtggttgcacgatgggaacacaagacccgcatgctgagcagggccttcggatccccctacctggcctgctactctctaagcatcaccattctgctcatgaacttcctgcgctcgcactgcttcacgcagggcatgctgacccagcccaggatggagagcctggacacccccgcggtctacagcctgggccttgcgctcctgagactagacgttn

SEQ ID NO: 93137 - DNA, 400 bp, Homo sapiens
tttcgttatgacttggtgcctaagggcacagctgttgtccctggggagaccctcccaccccaaataggtttgggcaggccagggacctgggtcttgagggagtgccgctctctgcgggcctggctcccagcgggcaccgaggtcgcagcagggcctgctgggagctgggcctcgacaggtgaggcaggctgggactcctctgccgggccccgtgccccagacgccctgctgggccctctgctcgcaccactgtcccgacgtctgtgtccctcctgcctccggccaagggcagtgctgactcgcggtggtttcccagggtgttcaggggctacgcggagaggaagcgccggaaacgggagaatgattccgcgtctgtaatccagaggtagggcctgccagt

SEQ ID NO: 93138 - DNA, 400 bp, Homo sapiens
ccagcggcagcacagcctcgtcttcctggtaaatcatcctatggcctcgctggcaactgtgaccaagatgcccaacccccctccccacacattcaacccctccctccgtcctgtgctgccacagcacccccactgcctccttgtgcccggccctccactcccaggccggtgcctccaggaagcccagggggtcacctgcccgagccggctgctgccctctgtgtttcacccagggcttcccggcccaggctgccttctctgtcctcccgctccctacacaccccttcatttgtggaagccgccaggcagacactcggtctgggcaaggcccagggtccagcagcctcaggctgggcggggccaggctgggcagatgctgggtcgtcaccccggcacgaaa

SEQ ID NO: 93139 - DNA, 787 bp, Homo sapiens
attctggtggacttcggggcttaggccgcggccgcctctgcgagggccttggggcgtcaagcatcggttttccggtgctcgagcccggaggcatgagcaggggccatggccgatagcatcataattcgtgtccagtccccagatggagggaagcggatcacagcaacaaagagagaaacagcagcaacatttttgaaaaaggttgcaaaggagtttggcttccaaaataatggcttctcggtttacatcaatagaaacaagactggagagataacagcctcctccaacaaatccctcaacttgctaaaaatcaagcatggcgatttgttgttcctgtttccctcgagccttgctgggccctcatctgaaatggagacgtcagttccaccgggcttcaaagtctttggcgctcccaacgtggtggaggatgagattgatcagtacctcagcaaacaggacgggaagatttacagaagccgagacccacagctatgccgccacggccctttggggaaatgcgtgcactgcgtccctctagagccattcgatgaggactatctaaaccatctcgagcctcccgtgaagcacatgtccttccacgcctacatccggaagctgactggaggggctgacaaggggaagtttgttgccctggagaacatcagctgcaagattaagtcagggtgcgaggggcacctcccgtggccgaatggcatctgtactaagtgccagccgagcgccatcacgctgaacagacagaagtacaggcatgtggacaatatcatgg

SEQ ID NO: 93140 - DNA, 413 bp, Homo sapiens
tttcgtcgcgggctggcaggcttggttcctggcgagtttctaagcccccgcctgcggtctgaggcaccggctgaaccatgtcggagatcctgtgccagtggctcaacaaggagttgaaggtgtcccggaccgtgagtcccaagtcatttgcaaaggcattttccagtggctatctacttggagaagttctacacaagtttgaacttcaggatgatttttcagaatttttggacagcagggtttcaagtgccaaacttaataatttttctcgcttggagccaacacttcaccttctgggtgtgcagtttgatcagaatgtggcccatggcatcatcacagaaaagcctggggtggcaacaaagctgttatatcaattgtacattgctcttcagaaaaagaagaaaagtggactg

SEQ ID NO: 93141 - DNA, 832 bp, Homo sapiens
ggggcggcttccggcggcgtgacctgaccgcaagaggccaatggagtgtgggagctgaaagggtcttcgctggcggccggtaactggcggcggttgggaacggccgagtgtggctcttctggtgtttcagcttggggagagaggggtggccttcctcttgcagttgaggccggcgccgagccggacttcaggcggatctcgtggcggagcccatcttgctccctctcccaggcctttacccgctccctaggattcccgggccctgtaggtgggagttgggagacgacagtactgcttttaaagagacagtgttagggatcttggaagcacagccaacatgtgtgacattgaagaagccactaaccaactcctagatgtgaaccttcatgagaaccagaagtctgtacaagtgacagaaagcgacctcggaagtgaatctgagcttctagtcactattggagccactgtacctactggctttgagcaaacagctgcagatgaagtcagagagaaacttgggtcatcatgcaaaatatatcttgccacggtctctgctgattttgtcatttcagtggaaagtctggcacaggttcattgtctgagatcagttgataacttatttgtggtggttcaggagtttcaagattaccagttcaaacaaacaaaggaagaagttctaaaggattttgaagacttggctggaaaactcccatggtcaaaccccttaaaagtgtggaaaattaatgccagttttaaaagaaaagcaaggcaaaagtaatcagattcagtaagggaggttatatggacagagtcaatcgatcaggaatgttaa

SEQ ID NO: 93142 - DNA, 421 bp, Homo sapiens
tttcgtcaaaatgcagactcttcacggattacatttctcaaaggggacaaagtgaagaactgtacggtctatatccacgatgactccatgtttgagccagaggaacagttcagggtctacctcggccttcctcttggaaaccactggagtggagctagaattggaaagaataacatggccaccatcaccatatccaatgatgaagatgcccccaccattgagtttgaagaagctgcataccaagtccgggaacccgcaggcccagatgccattgcgattctgaacatcaaggtgatccgcagaggggatcagaacaggacctccaaggttcgctgcagcacgcgggatggctctgcccagtctggtgtggattattacccaaagagccgagtcttgaagttcagtcccggtgtggatcatt

SEQ ID NO: 93143 - DNA, 567 bp, Homo sapiens
  misc_feature (1)...(567): n = a,t,c or g
ccctccgctatactcctcgtacatattaatgtgnnncctgcctggacacatattacatattctatctactccacaccagggccncncncnntttggatgcatgcgctgcgcgaccggnnccggaatcccgggncgacgattccgncgcaaatagcagcactggcttggcgacgcctcttaatgagagacagcgccaaccaggtacccgcgaggacgaccccgccccgcaggacagggcatccccaccgcgcgctggacggaggatacaaccgagtcctgcgcgccccgtgcgccgggggtcgctcccaggccgaggtctgacagtgtcgccgaacgcgaaaggaagcgtgtggcacccgagagaggaagcaccctcgtcaccccggccggcaccgtattgaggcaggtgtgcaggtgcggttgcggcgagccaggtgctggcaaaacccccactctgggtggcggcttccacgtgaatctggggaaggagttgagagcgcacaccctgcagaaagggaggcgccacatccaccacctggggaaccagctgcagctgaaccagcactg

SEQ ID NO: 93144 - DNA, 798 bp, Homo sapiens
tttcgtgtgttggaaagcaaagggctggaacgtcccggtctgcggagctcgctgggttgggatggactcgttcagacctgagtgctaggacgccgaaggaggcggtgaggcgtcccggcgaggagctggggtcgtctggagtttaaaagacaggtggctctcggagatgtgcgggctgcatgcccacgcttcaccgctaagggaggtcagggctgtgcgatggggaaggaagagagtgtcggggcggtgcagtcgggatgggagaagagtgtcagggccactggcccccagctcggcagagggcagtgtcgggccgcgcgcaggcagggagtgggtgtggtgtgaggctggcgctggagcggtctgggaatgttaggaggtctagggtatcgcggccctgcgtcctcttgtctggactaaaagtccgggcagttctccccggacctggattgtgggcccagcgacaggtgcttggcgatctgtgcccgctgtgcctgcggggctgtggtgggagtcctgtctgcacggtattctgtgtggctgtgcataacccacaagaggagagaactgctgtgcgtctgaagtgatggcggagatgtgatcttgtttaatccacataacaaccctattagacagggcttgaagttcaaagatgtggtcatttacttctctcaaaaggagtgggaatgcttgcactctgctcagaaggatttgtaccgagatgtaatgttggaaaattacggcaacctggtcttactggggctttctgatactaagccaaatgtgatctccttattg

SEQ ID NO: 93145 - DNA, 580 bp, Homo sapiens; identical to SEQ ID NO: 62394

SEQ ID NO: 93146 - DNA, 564 bp, Homo sapiens
tttcgtgcccgttcttcctccggaataggggagggagagggaatgagaagctgctgcggcccaagagtcactgtgaaggaccccgccgctgccctcgggcctcctcggcccctgcgcctccggggagcagccggggctcgccgcgcctgacgcgtcccgagttatacagaaataatgttgatatttggaacccatgtcgaacttctatgaagaaaggacaacgatgattgcagcaagggatttgcaggaatttgttccttttggtcgagaccactgcaagcaccaccctaatgctttgaaccttcaacttcgccagctgcagccagcttctgaattatggtcttctgatggtgctgctggcttggtgggatcccttcaggaggttacaatccacgagaaacagaaggttccattgagtttcccattgtgtttttgaaatgtagagtgatataatctacttgtaatttaaggctactaagatgcaactgagagatcggtgtgatgccacttctagagtagagttaaggtgtggtaatttcaataaaaattgaaactaatgacttt

SEQ ID NO: 93147 - DNA, 1056 bp, Homo sapiens
cagcatgctgttccctctgggctgtaaaaggcacaggggactctggcctgcggaggccagaaaatgtatcgggaatcccaggaggacggcccgactggggcaaaagctccagcgttctggacaagtgctgagcaatgtgtgacccagacgtacagagaggattagcaggaggtagggactgcaggtagggcctgttatgtccatcattgcatgcgtccataccagggctgcaggccaagccctggaatcccagccctgggtctggcttggggaggagaaccttaaagccctcactgctcttcccctccccccgcccccaagtgtgactccagatggccagggtgtacaccacctttcggccactattgagtgtgccaagggggccgtgagaggccctcacacccttttgttgcagtgggtatatcagagcgccaagtgcctggattacaggaaagggctgcgtttagctgcgcacccggccacggctgggacaaacacgcgcagtgacacgcggcggctgcggttcccgcgctggccgcggtcgggctctggcgctcctgagcccgcgctcggcccgcaggacgtggagaccacgtacttctgcaacacgtgcggacagcccctatgcgcgcgctgccgcgacgagacgcaccgagcacgcatgttcgcgcgccacgacatcgtggccctgggtcagcgaagccgcgacgtgccccagaagtgcacgctgcacgcagagccctacctcttgttctccaccgacaagaagttgctgttgtgcatccgctgcttccgcgacatgcagaaggagagccgggcacactgcgtggacctggaatcggcttacgtgcagggctgcgagcggctggagcaggcggtgctggccgtgaaggccctgcagacggccacgcgggaggccatcgcgctgctgcaggccatggtggaggaggtgcggcacagcgccgccgaggaggaggacgctatccacgccctcttcggcagcatgcaggacaggctggcagagaggaaagcgctgctgctgcaggctgtgcagag

SEQ ID NO: 93148 - DNA, 780 bp, Homo sapiens
ccggccgcccgggtcgacgatttcgtagcgcccccgccccggccccgagagcacgccggtccagtcccccacctggggcgcccgtctgcccaccatgaggaagatacgcgccaatgccatcgccatcctgaccgtagcctggatcctgggcactttctactacttatggcaggacaaccgagcccacgcagtatcctccggcggccggggcgcgcagagggcaggcaggaggtcggagcagctccgcgaggaccgcaccatcccgctcattgtgacaggaactccctcgaaaggctttgatgagaaggcctacctgtcggccaagcagctgaaggctggagaggacccctacagacagcacgccttcaaccagctggagagtgacaagctgagcccagaccggcccatccgggacacccgccattacagctgcccatctgtgtcctactcctcggacctgccagccaccagcgtcatcatcaccttccacaatgaggcccgttccaccctgctgcgcacagtgaagagtgtcctgaaccgaactcctgccaacttgatccaggagatcattttagtggatgacttcagctcagatccggaagactgtctactcctgaccaggatccccaaggtcaagtgcctgcgcaatgatcggcgggaagggctgatccggtcccgagtgcgtggggcggacgtggctgcagctaccgttctcacctttctggatagccactgcgaagtgaacaccgagtggctgccgcccatgctgcagcgggtgaa

SEQ ID NO: 93149 - DNA, 549 bp, Homo sapiens
tttcgtcctcgatctcccgtgacttcctcggccaggccgcctgcgcctctgggaccatgttgcgctggctgcgggacttcgtgctgcccaccgcggcctgccaggacgcggagcagccgatgcgctacgagaccctcttccaggcactggaccgcaatggggacggagtggtggacatcggcgagctgcaggaggggctcaggaacctgggcatccctctgggccaggacgccgaggagaaaatttttactactggagatgtcaacaaagatgggaagctggattttgaagaatttatgaagtaccttaaagaccatgagaagaaaatgaaattggcatttaagagtttagacaaaaataatgatggaaaaattgaggcttcagaaattgtccagtctctccagacactgggtctgactatttctgaacaacaagcagagttgattcttcaaagcattgatgttgatgggacaatgacagtggactggaatgaatggagagactacttcttatttaatcctgttacagacattgaggaaattatccgtt

SEQ ID NO: 93150 - DNA, 1735 bp, Homo sapiens
atggtggttacctttaggaggggcacactgagtgggatagtgcacaagggaaccttcttaggccctgggaatgaactacatgatgatggcacggacttgggtgatgcgtgtgaccagagggaaaggctggtgccctttgccacagagctaaacatgtacctggcccaggaggcagagaatcccgaggagaaattcagcaggactggaagagctgtggatcagctgctgccccacaccgaggtgtgcccgcaaagccgcagcaccgttcatgggctgcacccgcgcgcgacacctgactcactaccggtcttcctactacttcacttccagcctcacacacgtgcctcccatggccacacagaaaggggaattctagccatacggcttaactactttgccctgggacatcaagtaaaagctcaggctctttctggattgggaagaagtaaggaagtgttaaaggaatttctctactgccttgctctgaatcctgaatgtaactctgtgaagaaagaagcacagaaggtaatgtgtgaagtgctgttttcagctacagcaaatgtgcatgaaaatttaacatcttccatccaaagcagattaaaggctcagggtcacagccacatgaatgcccaggctctgctggaagaaggtgatgcagggagctcggagaattcatctgagaaatctgatatgcttggaaataccaattcttcagttttgtattttatactgggtctacactttgaagaggataaaaaggcgttagaaagcatccttccaacagcacccagcgctggcttaaagagacagtttccggatgacgtggaggatgcacctgacctgaacgcccctggaaaaattcccaagaaagatctctcacctcaaaggagcccaaactctgagacagaagaaagtcaggggctctcgcttgatgtaactgactttgagtgtgccctctgcatgagattgctctttgaacctgtcactacgccctgtggacacacattttgcctaaaatgccttgagcgctgccttgaccacgccccacactgtcctttgtgcaaagacaaactttcggaattattggcaagcagaaactttaacataactgttctggccgaagaattaatatttcgatatttgccggatgaattgtctgataggaagagaatttatgatgaagaaatgtcagaactgtcaaatctgaccagagacgtccccatctttgtgtgtgccatggccttccccacggtcccatgcccactccacgtttttgagccccgctatcggcttatgataagaagatgcatggaaactggcaccaagcggtttggcatgtgtttatctgctgagcacgcggggctttcagagtatggatgcatgctggagattaaggacgtgagaacgtttcctgatggaagttctgttgtagacgcgattggcatcagtcggttccgagtgctaagccaccgccacagagatggctataacacagcggacattgaatatcttgaagatgaaaaggtggagggtccagagtatgaagaacttgccgctctccacgattctgtgcatcaacagtctgtttcctggttcgcgtctctccaggatcgcatgaaagaacaaattttaagtcattttggggtaatgccagacagagaacctgagcctcagagtaatcccagcggccctgcctggtcctggtggatcctggccgtgctgcccctggagcgca

SEQ ID NO: 93151 - DNA, 571 bp, Homo sapiens
tttcgtccgggacgcagggcaaagcgagccatggctgtctacgtcgggatgctgcgcctggggaggctgtgcgccgggagctcgggggtgctgggggcccgggccgccctctctcggagttggcaggaagccaggttgcagggtgtccgcttcctcagttccagagaggtggatcgcatggtctccacgcccatcggaggcctcagctacgttcaggggtgcaccaaaaagcatcttaacagcaagactgtgggccagtgcctggagaccacagcacagagggtcccagaacgagaggccttggtcgtcctccatgaagacgtcaggttgacctttgcccaactcaaggaggaggtggacaaagctgcttctggcctcctgagcattggcctctgcaaaggtgaccggctgggcatgtggggacctaactcctatgcatgggtgctcatgcagttggccaccgcccaggcgggcatcattctggtgtctgtgaacccagcctaccaggctatggaactggagtatgtcctcaagaaggtgggctgcaaggccttggtgttccccaagcaaa

SEQ ID NO: 93152 - DNA, 393 bp, Homo sapiens
tagaaaggaagcacagtggtcaagggccgggattctggattcataccacctggatttgaatcctgactttaccatttcctaagcgtattaagacagcttaacatctacaggtcttagtttcctcatttgtaaagtgggagtaataataataataccaacattataacaactaaataagttaagacctgcaaagcactgaaatagtcactggcacagagaaagcattttataatgccatcattttcattctcatccttggcaacattagtatccatattgttgcctgtttactttaaacttctggccatattggcatccacacacagcgccaccttgaaccagctcatcacgcagcattgctttattgaagattttgaacctgatataagtcct

SEQ ID NO: 93153 - DNA, 1180 bp, Homo sapiens
tcttatggtcccatgattattggtgtatactttttttttcttggtaagacctttaagttttatgattttcaattgagataatgtataatgtttgagttttaggctatataaggaattagctttcctgcatttaaaggaatcatttggcagtcagtagcatattttcctgattttttgttgttgttaaaggagataagttgataactgtatgttgaagggttctcatgatattctctaaaaagtgcaaatatcagtgcttgatttatagatgtgtaataaacagtggtcctgtaaaagcatgtagtataaaaaatatggtattttcccttatatacagcctataaactcttcctattccttgagtttagggtacactaacaaattacagcgtagaacagagtcagctaccagattaaatgcatgcgtaccatacagataatttattaagtatttttgcatattgaacattgacttacattaattttcccttttcaccaccacgtctttgtcattttgaccctgaacacttaataaatcactcagattgatctaaaatatgcttatgtatactttaatagaaaattacattgcatggctttctgacttgggtttttgttataaaagtgcctgttttgttcatgtgtcctgagagagcaagcattgtgacatacctgactaacttaaaagcagattgcctgtgaagcacaatttgagtccaattttttgaggtatggagttttagctatcatggctgggtttttactcaatctcaaataatagggctctggttattttgcagagtgtctctgaagaatggacagaattgccctggctaactacaagctacggttcacagtggataaatagatgcccgagtggtaaaagacatggcaacaggaaagtctaagggatatggctttgtctcctttttcaacaaatgggatgctgaaaacgccattcaacagatgggtggccagtggcttggtggaagacaaatcagaactaactgggcaacccgaaagcctcccgctccaaagagtacatatgagtgtaggtgtattggagaagaaaaggaaatgtggaattttggagaaaaatacgctagattttaaatgttagagctgttcccggagacttattgcagaaatagatgagaagcaaatcaagactactattcaaa

SEQ ID NO: 93154 - DNA, 2723 bp, Homo sapiens
atgtggggacaacagcattcgtcccctgtgcagcaacaagaccatcttggaagcgaggatcatctctcaccagacatcagtcctgctggcaccttgatcttggatttccccagccagcagaatcatgagaaatacatttctattgttcataaattacccagtctgttttacttggtacagcagcacagagagactaagacataccggacctttgacattcagggatgtagccatagaattctctcaggaggagtggaaatccctggaccctgtgcagaaagctttgtactgggatgtgatgttggagaactacaggaacctggtcttcctgggactctgtcttcctgacctgaatattatctccatgttggagcaagggaaagagccctggactgtggtgagccaagtgaaaatagcgaggaacccaaactgtggggaatgcatgaaaggcgtgatcaccggtatctctcctaaatgtgtgatcaaggaattaccaccaatacagaacagtaacacaggagaaaaattccaagcagtgatgttggaaggacatgaaagctatgacactgaaaatttttacttcagggaaatccggaaaaatctacaggaagttgactttcaatggaaagatggtgaaataaattataaagaagggccgatgacccataaaaacaatcttactggtcaaagagttcgacatagtcaaggggacgtagaaaacaagcatatggaaaatcagcttatattaaggtttcagtccggtctgggtgaattgcagaaatttcaaactgcagagaaaatttatggatgtaatcaaattgagaggacagttaataattgttttttagcttcaccacttcaaagaatttttcctggtgtccaaaccaacatttctaggaaatatgggaatgattttttgcaactttcgttacctacacaagacgagaaaacacatattagggaaaaaccttacataggtaatgagtgtggcaaagccttcagagtgtcttcaagtcttattaatcatcagatgatacatactacagagaaaccttacagatgcaatgagtctggtaaagcctttcatcggggctcactactaacagtacatcagatagtccatacaagagggaaaccataccaatgtgatgtatgtggcaggatcttcagacaaaattcagatcttgtaaatcaccggagaagtcacactggagacaaaccctacatatgtaatgaatgtggcaagtcctttagtaaaagttcccaccttgcagttcatcagagaattcatactggagagaaaccttacaaatgtaatcgatgtgggaagtgctttagtcaaagttcctctcttgcaactcatcagacagttcatactggagacaaaccctacaaatgtaatgaatgtggcaaaacctttaaacggaactcaagcctcactgcacatcatataatccatgcaggaaagaaaccatatacatgtgatgtatgtggcaaggtcttttatcagaattcacaacttgtaaggcaccagataattcatactggagagacaccttacaaatgtaatgaatgtggcaaggtcttctttcaacgttcacgtcttgcagggcaccggagaattcatactggagagaaaccctacaaatgtaatgaatgtggcaaggtcttcagtcaacattcacatcttgcagtgcatcagagagttcatactggagagaaaccttacaaatgtaatgaatgtggcaaagcctttaattggggctcattactaactgtacatcagagaattcataccggagagaaaccttacaaatgtaatgtgtgtggcaaggtctttaattacggtggatacctttcggttcatatgagatgtcatactggagagaaacctctccattgtaataaatgtggcatggtcttcacttactattcatgcctagcacgtcatcaaagaatgcataccggagagaaaccttacaaatgtaatgtgtgtggcaaggtcttcattgacagtggaaacctttcaattcataggcgaagtcataccggagagaaacctttccagtgtaacgaatgcggcaaggtcttcagttactactcatgcctagcacgtcatcggaaaattcataccggagagaaaccttataaatgtaatgattgtggcaaagcctatactcagcgttcaagcctcactaaacatctggtaattcatactggagagaacccttaccactgtaatgaatttggtgaggcttttatccaaaattcaaaacttgcaagatatcacagaaatcctactggggagaaaccacacaaatgtagtgaatgtggtagaacttttagtcataaaacaagtctggtgtaccatcagagaagacatactggagagatgccatacaaatgtattgaatgtgggaaagtctttaactccactacaaccctggcaaggcatcggagaattcatactggagagaaaccttacaaatgtaatgaatgtggcaaggtcttccgttatcgctcaggcctcgcacgtcattggagtattcatactggagagaaaccttacaaatgtaatgagtgtggcaaagcctttagagtttcccgagagggtgaacagacgtcagcgccatgtttcctataaagcctgcaaaattgcagggtctcgctctgtcgcccaggctggagtgcagcggcgcgatctcggctcacttcaagctcca

SEQ ID NO: 93155 - DNA, 497 bp, Homo sapiens
ttttcccagtgtaagttatcaggctaattcttgcatatagcagtaaacacatggagtttacagtgtaatgaaaaaggcaagcattaaacaggtgaattaaacagtgatgagtgctatgaaaaaaaggtgaatgtgttataggaatatggagtggaagatctaggttcatcaggcagaggagaaatcagggaaggcttccttgaggaagtgacaaccaagctgagacctgctctgtcgcctgccaccgctgctcgggcccgagtggttcactgcaccgtgaagacagattccagacaccgggaactcacgcctccaatcccagacgctatgtccagcaaaggctccatggttctggcctacagtggtggcctgaacacctcctgcatcctcgtgtggctgaaggaacaaggctatgatgtccctgcctacctggccaatactggccagaaggaagacttcgaggaagccaggaagaaaggactgaagcttggagccaa

SEQ ID NO: 93156 - DNA, 467 bp, Homo sapiens
  misc_feature (1)...(467): n = a,t,c or g
agaaaaaaanttttgattcgtagcatgcgcgaccgcnacngaattccaggtcccgggtcgacgatttcctgcgggcggaggcgacagcgaggacccaaggctggggtttcctacttggatcaagagtgcctggggatttgatccccatcctggtgcagctccaagacgctactgggctgcgcgcgcttttgggctgcgccaccgacagagacatctggaagccggagctagtggaagactctgcctcacctgcctccttgaatgaaacacggggaagccaggactggccgtcacgttggtgacaaatatgtcccaggactcggtgaccttctcagacgtggctgtgaacttcaccaaagaggagtggaccctgctggacccagctcagaggaatctctacagagacgtgatgcttggaaattctaagaacttggcattcatagattgggcaactccatgtaaaccan

SEQ ID NO: 93157 - DNA, 407 bp, Homo sapiens
tttcgtacgatggcagcgtcagtggcagctgcagcccggaggctgcggcgggccattcgaaggtcgcccgcatggcggggcctcagccatcggccgctctcatcggagccccctgcagccaaggcctcggccgtgagggccgcctttctgaacttctttcgggaccgccatggccaccggctggtgccctccgcttccgtgcggccccgcggcgaccccagtttgctttttgtcaatgcgggcatgaaccagttcaagccaatctttctgggcaccgtggatccacgaagcgagatggcaggcttccgacgtgtggccaacagccagaaatgtgtgagagctggaggacaccataacgacctggaagatgtgggtcgagacctttcccatcataccttctttgaaat

SEQ ID NO: 93158 - DNA, 403 bp, Homo sapiens
  misc_feature (1)...(403): n = a,t,c or g
tttcgtgaagatgcggaacgggcaaaaccgcccagtacggaacggcgcagcctcgggagcccggtgtggtgctcgcggacaggaagcaggagagtttgccaatagggatgtgacagcggttcccattaagcggtgatggtggttttgggacctgataatcgagctgggagtcagaggcgggatgtgtgcggtgaaggatgttttgatacccccatataaaataatctgtctgtcatgggagcccccacgtcctctgaaatagttcagctctgtctgcatgacttgtcctgggactgaggaaaatttaccaggggttagtatcattcaaggatgtggctgtggatttcacccaagaggagtggcagcaacttgacccttctcanaggaccctgtacaaggatgg

SEQ ID NO: 93159 - DNA, 1162 bp, Homo sapiens
ccggattcccgggtcgacgacttcgtggggagcctcgggaacgccggcacccctccctgcccccccacccccattcattcagcctccccaggccccgtcggggaagtttgcacctgcggactccattgctttggttattttcacaaagccaggccggcggggcaggtccggccgcgggggacacggatgcccaggaccccaggctaatcggctgtgccttcctcacctactgtgccagggattccgccatcaaagctcagactgccctgcacgagcagaagaccttgcccggaatggcgcggccaatccaggtgaagcctgcggacagtgaaagccgcggaggtagggaccggaagctgttcgtggggatgctgaacaagcagcagtcggaggaggacgtgctgcggctgttccagcccttcggggtcattgacgagtgcaccgtgctccgggggcctgacggcagcagcaaaggctgtgctttcgtgaagttctcctcccacacggaggcgcaggcggccatccacgccttgcatgggagccagaccatgccgggagcctcctccagcctggtggtcaagttcgccgacacggacaaggagcggacgctccggcgcatgcagcagatggtgggccagctgggcatcctgacgccgtccctcacattgcccttcagcccctacagtgcctacgcccaggctctcatgcaacagcagacaacagtcctgtccacctcgggcagctacctgagtcccggcgtggccttctcaccctgtcacatccagcagataggcgccgtcagcctcaacgggctgcctgccacacccatcgctcctgcctctgggctgcactcacccccgctgctgggcaccaccgctgtgcctggcctcgtggctcccatcaccaatggcttttgcaggcgccgggcccctttccagggggggcacccttgggcctggaaaagcggcctaatgcaaagggctctggagccgctaacccagcttcataagcccgaactgtgggccgagaacaattggattcctggccttttttccggagggccaagagggacaccaggccatgtgaaccccaccggggggccataaagtcccctattagggccaaaggggatcacccacaaaggggcttccgattttcgtgc

SEQ ID NO: 93160 - DNA, 418 bp, Homo sapiens
tttcgtggtgatcgtagctcggaaatggcgggatttggtgctatgttgaaatttttggtagaatataagagtgcaggggagaagaaactggcagagtacaaatgtaacaccaacacagcaattgaactaaaattaggtatgtatgccatttctaagtgatgttatgtacatactgtgtgtgtatatataatctttcattttaaatttgaagtaaaattttatgtaagagcagttatttatgcaaatgtatggttttctgcatttattgaacatattcagattttattcagttttgatttatgtcatggaaggtgtagatgtttgaaaggtgacagaattttatataaaaaggaaagacggtggggcaaaaagtaataagtatatatagttttagcctcttaaaaatattttctacttt

SEQ ID NO: 93161 - DNA, 637 bp, Homo sapiens
tttcgtgcgcggacacctgcggggcgcggagctcggcggacgcgggagggcagcaccacgggcggcagcctcatgtttgactgttggagatttatcctgtgcaagagacctggaagcaacagttattcttccccacaacggcccaatgaggccaaaaaggaggaaacggatcaccaaattgatgtgtctgacgtcatcaggcttgttcaagacacaccggaggcgacggccatggccacagatgaaatcatgcaccaggacatcgtcccgctctgtgctgccgacatccaggaccagctaaagaagcgctttgcttacctgtccggtgggcgggggcaggacggaagcccggttaacaccttccctgactacccggccttcagcgagattccggacaaggagttccagaatgtcatgacctacctcaccagcatccccagcctgcaggacgctggcatcggattcatcctggtgatagaccggcgacgggacaaatggacctccgtgaaggcgtccgtcctgcgcatcgcagtaagtgccacccggggctctgccctgcgcccggcccctccctgggctgcatgaccgcatggtgcccttcctctgtgtctgccgcagttcctgctttgtgacgaaa

SEQ ID NO: 93162 - DNA, 1355 bp, Homo sapiens
ttttttttttttcaaactccagttaaactttatttgcaaacacagatggcggccacaatttgccacctgctggtgtagaacgtgtttttccacggttttgccaagaaatagtgtccaactgttaccaccatctcccttttttccccgattttcctgttggtggcttttaagtcccccgtccctgctttgccatgagagcagggactcccagtgtccctggcgccctgcagcttccatagccattcggggtgtgcgtgggtgctctgctcccagctctgtgagctcgcaggtcgatgcttctgacactgatctgtgcacatgtgtgtgcacacgcgtgtgctcgattgtgagcgcctgccgtggccctgggccgccgtgtgctgagcgggccagttcgctgccttccactgctgggccgggtcctgtctcctcagcattgtgtggccaggcacacgcgcctctgcgtctcaggtccctcacctggaagccaggtcagaggatggctgtggtggccctgggtgagctggcgccagctcctgcccttacatgcccttcctcttgcaggaacccaagacagaccaggatgaggagcattgccggaaagtcaacgagtatctgaacaaccccccgatgcctggggcactgggggccagcggaagcagcggccacgaactctctgcgctaggcggtaactgtcacatgtgtcacgtgagctcagggtttcctgggaggccagagtctactgtggatgactcgccccctcagcacaggttgtttggaagtggaaatagaagattctaaaagttagagaccctgtgagctccctgggtcactccccactcccaccttcacggggtaggacgggtctgcatcccaccgtcgcctcacttcaagtggtgccccctgtagggttcaggggcagccgagtgcggtgctcagcagaggcgcaggcagcgcggtggggcccgcgtggatctggctggggcaggcccgcctgagctgcagtgttttccaggtgagggtggcctgcagagcctgctgggaaacatgagccacagccagctcatgcagctcatcggaccagccggcctcggaggactgggtaacgtgcgccacccgggctctcgggcagcttctgctgggaatgctttgaggcccggtctctgtttcctttaaacttctgctggctctgtctgcgtagtgtcggggagcctgtgtgtccgcaagctggttcccctttgggaatgcgcttgtttgcctgtggctagagctgggtaggcgagggcttctgggcccctggtgaggaccccagctgggtacttcagaggagggtggctggccgagcggtggggctg

SEQ ID NO: 93163 - DNA, 421 bp, Homo sapiens
aattaagatcaatttgatctacatctctttaaccaacaatatgtaagatctcaactatcgcatccgtggattaattcaattataacttctctctaacgctgtgtatcgtaacggtaacactgtagaggggagcacattgatgagcacgtcagacgatatccataacaccacagccactggcaaatgcccgttccatcagggcggtcacgaccagagtgcgggggcgggcacaaccactcgcgactggtggccaaatcaacttcgtgttgacctgttaaaccaacattctaatcgttctaacccactgggtgaggactttgactaccgcaaagaattcagcaaattagattactacggcctgaaaaaagatctgaaagccctgttgacagaatctcaaccgtggtggccagccgactgtggc

SEQ ID NO: 93164 - DNA, 391 bp, Homo sapiens
ataacagcagaagtggtatgcagccggttatatatctagaaataatgttctcatggtttgtatatacaagatagagtgaatattcttttcttttccataagtgatcctaaaaaggtgtactctgaacgttcccagagcggtagagtgagtaaagaagtatttttttatatttgtgaaaatgtaagacaaatgagatcctcaaacttttataatgagaatgatattctggtagacagcataggagaaatatatggggctgattaaacattaatagcctttcaagatgagtcattgttcagaccattgaacccagaatcaaactcctgccataatccaatttgtctttcaagtaccaccacgcatacgcagacacacacacacacaggtaccc

SEQ ID NO: 93165 - DNA, 436 bp, Homo sapiens
tctagtccgtgtggaggaattcacggacacgcccggcttcggggaccagatcaacaatgacaactgacagtgaagccgataatggctggaggtctccctgtgtgtctctgatgatgcagggaagtgggggaaagtaccggggtgacccacaggtcccgggccaaccgggacgattcatcatcccaagggaggaccgcccagaggacacagaggagaggggtggggctctctgggcacagcacagttctgaggggagggtccacctcccgcctcagctgggaccccatcctgggctacatcaacgagcaatacgagcagtacctgcaggaggagatcctcatcacccgccagcgccacatcccagacacccgggtacactgctgcgtgtactttgtaccacccactgggcactgcctgcggcccctggacattgagt

SEQ ID NO: 93166 - DNA, 669 bp, Homo sapiens
ggctacagtcgggatggcggtttctggtgggactaagtgtccgtttaggctgcagggataacgctacctggctcttcgtcttggctggaatctccagccttgcaacgttcttgactctgctgagagatagcaggccatggcagtggttggtaagaataatttagtggggctggctggagttgccttgggtcaagcagaatattaataggcaggggaatgcacctgtagctagtgggcgctactgccagcctgaataggaattggctcgactcttgaccatggctggggttcctggggatgagctaaaccctttccatgtactgggggctgaggccacagcatcagatgttgaactgaagaaggcctatagacagctggcagtgatggttcatcctgacaaaaatcatcatccccgggctgaggaggccttcaaggtttttgcgagcagcttgggacattgtcagcaatgctgaaaagcgaaaggagtatgagatgaaacgaatggcagagaatgagctgagccggtcagtaaatgagtttctgtccaagctgcaagatgacctcaaggaggcaatgaatactatgatgtgtagccgatgccaaggaaagcataggaggtttgaaatggaccgggaacctaagagtgccagatactgtgctgagtgtaat

SEQ ID NO: 93167 - DNA, 355 bp, Homo sapiens
  misc_feature (1)...(355): n = a,t,c or g
gcgctgcctacggaggtggcagccatctccttctcggcatcatggccgccctcagaccccttgtgaagcccaagatcgtcaaaaagagaaccaagaagttcatccggcaccagtcagaccgatatgtcaaaattaagcgtaactggcggggncccnnannnnntnncnncntnnnnannntnnncccttnctctccaccctccccgctttttaaacttcttttattttnctattgttgcactttgacatttttttataatctatatttaaacaaaattacttctttgcagaatcttttctaaaaccatctcccttaaaaatttccttatccttccacatttctttctgccccact

SEQ ID NO: 93168 - DNA, 416 bp, Homo sapiens
  misc_feature (1)...(416): n = a,t,c or g
gacccacgcgtccggattcttacacaaataacaacacactcaaataatgcacacctcttttatttttgcttttatttattaatttatttaagaaaataaagaattgaggaaaagtgaaaaaatcgatattttcaaagaaattattagttagttttggttcgcttgtggcactagctttaatacctctaatagctatttcatgtggacaaactaatacagataaatcacaacaaccaggatctggttcatctacaagtggagatcaatctggaacaacaacaggtggacattcaggatcaggaacatctacaagcggaggccaatctggaataaccagtggttctggaacaacaacaggtgaacaaacagaaactgctcctaaatctccagaatcaggatcacaagaagcagctccn

SEQ ID NO: 93169 - DNA, 456 bp, Homo sapiens
gcggccgcgtcccttcctgcggtccgctgctcgggcggctccagcaccagcgccggctgcgttccgggcctccggtcgcccgtccagcccctcggctaccgccgccgcctcccccgctcggcgccatggccgctgcggccggggacggcacggtgaagccgctgcagagcgccatgaagcttgccaacggggccatcgagctggacaccggcaaccggccccgggaggcatacacggaatacctgaggagcatccactatatctcccaggtgttactagaagaagtggaaaccactaaagaagctggggaaactgtgccccccgacacctccaagatgctgaaactagcacagcagtgtctggagagggcccagtcgacggccgccaagcttgggaaaacacgcctgaagccaaccatgcctgcagctgctcccatcccccagcctgccagccgac

SEQ ID NO: 93170 - DNA, 405 bp, Homo sapiens
agcccctgggagcacagctaattaccatggactgcacctggaggttcctccttgtgggggcagcagctacaggtgttcagtcccatgtgccgatggcgcactctggagctgacgggaaaaaccctgggtcctcgtggagggcctcctgcacggcttctggaggcaccttcaatacttatgctgtcagatggctgcgacaggtccctggacaagggcttgagtggctgggagggatcatccctaagtttgggacagccctctacgcacagaagttccaggacagagtcaccatttccgcggacgaatctactcccacagtctacatggagctgagcatcctgagatctgaggacacggccgtatattactgtgcgagagagaaagccattatggaaactacggcgg

SEQ ID NO: 93171 - DNA, 458 bp, Homo sapiens
gcgggtaagcgccgacactagcgggcgcctgaacagtccagcggcgtcagcgctgcggagcaggaaagggtcccaaacgcagggtggccatgcagcgtggcgcccacctgtccctctcctcgaagcgctgagccagcacgatgcacataagggaaggaggaaggtggcttgagggcagtgaccgagcggacagcggaagcccatttcaggagccccggtacccgagctcgggcccctttccaatcccccaggcgtccttcccatgtccttgtctcctagtcctgggaatccacggccactccactctcctgcagtaccgcggacaagaacaccatgtactcttcacaggcaggtgtcttctggtggacccaactctgttggtacttgtcgtctccaaaaagtccccaaatgcgctagaggccagccagcccggtatccgagagggccactctaggtga

SEQ ID NO: 93172 - DNA, 386 bp, Homo sapiens
aatttttttaggggggggcagcaagttacttcacctcctgtgcttctcttctctcttcatcatcatcatcatcatcactacctcatgggagtattacaaggcttaaattagaaaattaatgaattaaatggaggcagaaaagctaggccgctacccagaagggagtgacaaaacaggaaatattacacaatatagagacactactatatagtttactgtatacatagcatatatagttttattttggaaggaaacaaaagaatggaaacaataattgggctgcaaatgtggctgaacgtggggtggggaccccggctggaagtgcacagatgtggaatgccactgtggagtgttcccctccctgctcaaaagaacagtgaatcatg

SEQ ID NO: 93173 - DNA, 657 bp, Homo sapiens
ggcttaaggttcttggactctgcatggttccctttagcctgtcttcgggcctgccacaattaaatgaccgcaagaaagaagtctatgctaagccccataatgaacgtttcaagcaagaaggatgagaattttagatctggaagtgtccgcgggacaggatcttgtcaagacctgatggggaagttctagagtgctgccaggttgccagatttctaagaaggagtttgaagaggagaaaaggatttttgcatgtttagaaatcaaggttcaggagaatcttgacagtgaatgtgtctcattacattgaataacagctacaggatgttcgagagctgttctggcttttctggattctgtgcttcaccaatagaggaatcccatggagcattaattagttcttgcaattccagaaccatgactgatgggttggtgacattcagggatgtggccatcgacttctctcaggaggagtgggaatgcctggaccctgctcagagggacttgtacgtggatgtaatgttggagaactatagtaacctgatctcattggacttggaatccagttgtgtgaccaaaaagttatctccagaaaaggaaatttatgaaatggaatcactccagtgggagaatatggggaaacgtatcaaccatcacctt

SEQ ID NO: 93174 - DNA, 234 bp, Homo sapiens
  misc_feature (1)...(234): n = a,t,c or g
ctcacaaggttatcagaaagatcaaattaaataatagatgtgaaaatgctttgaaaatgtttttaagtgctatgcatatttatagagttattatagttattcaaatccataagcaggttatttttatttttttactgtttgtaagcaactagtggtaaganaaancncccctctcnanaaaccacacacttccataaacaatcattaacttattcttttatttcctcccttttt

SEQ ID NO: 93175 - DNA, 419 bp, Homo sapiens
  misc_feature (1)...(419): n = a,t,c or g
cgtccgaaattgtctatacacataaagatggagattatcttaggtatactttagtaaccacatttattgaatatatgggcatcttttcataccaataataaggatactcagtcattatgttaaaggcttcagcatatgtcaatatatgaatgtaccaaaaaatttttaattcctcataattcaacaaaggtaaaaagatagtatatgaaaaatatattataaagtatgttatgcagttaaggaataaaattcctggggagctttttcgtgtttgtggtgtcagctttttacagactgtaatttttttgtgtttttgttttcaataagcgtttatttttatatcactgatataattcaccatcatgtacttgttggaagaatttcaaactggaacatgtangtttctttgcccctctccc

SEQ ID NO: 93176 - DNA, 1866 bp, Homo sapiens
gaattccggggagcaggaagagccaacatgctggccccgcgcggagccgccgtcctcctgctgcacctggtcctgcagcggtggctagcggcaggcgcccaggccaccccccaggtctttgaccttctcccatcttccagtcagaggctaaacccaggcgctctgctgccagtcctgacagaccccgccctgaatgatctctatgtgatttccaccttcaagctgcagactaaaagttcagccaccatcttcggtctttactcttcaactgacaacagtaaatattttgaatttactgtgatgggacgcttaagcaaagccatcctccgttacctgaagaacgatgggaaggtgcatttggtggttttcaacaacctgcagctggcagacggaaggcggcacaggatcctcctgaggctgagcaatttgcagcgaggggccggctccctagagctctacctggactgcatccaggtggattccgttcacaatctccccagggcctttgctggcccctcccagaaacctgagaccattgaattgaggactttccagaggaagccacaggacttcttggaagagctgaagctggtggtgagaggctcactgttccaggtggccagcctgcaagactgcttcctgcagcagagtgagccactggctgccacaggcacaggggactttaaccggcagttcttgggtcaaatgacacaattaaaccaactcctgggagaggtgaaggaccttctgagacaggaggtgaatgaaacatcatttttgcgaaacaccataactgaatgccaggcttgcggtcctctcaagtttcagtctccgaccccaagcacggtggtgcccccggcttcccctgcaccgccaacacgcccacctcgtcggtgtgactccaacccatgtttccgaggtgtccaatgtaccgacagtagagatggcttccagtgtgggccctgtcccgagggctacacaggaaacgggatcacctgtattgatgttgatgagtgcaaataccatccctgctacccgggcgagcactgcataaatttgtctcctggcttcagatgtgacgcctgcccagtgggcttcacagggcccatggtgcagggtgttgggatcagttttgccaagtcaaacaagcaggtctgcactgacattgatgagtgtcgaaatggagcgtgcgttcccaactcgatctgcgttaatactttgggatcttaccgctgtgggccttgtaagccggggtatactggtgatcagataaggggatgcaaagcggaaagaaactgcagaaacccagagctgaacccttgcagtgtgaatgcccagtgcattgaagagaggcagggggatgtgacatgtgtgtgtggagtcggttgggctggagatggctatatctgtggaaaggatgtggacatcgacagttaccccgacgaagaactgccatgctctgccaggaactgtaaaaaggacaactgcaaatatgtgccaaattctggccaagaagatgcagacagagatggcattggcgacgcttgtgacgaggatgctgacggagatgggatcctgaatgagcaggataactgtgtcctgattcataatgtggaccaaaggaacagcgataaagatatctttggggatgcctgtgataactgcctgagtgtcttaaataacgaccagaaagacaccgatggggatggaagaggagatgcctgtgatgatgacatggatggagatggaataaaaaacattctggacaactgcccaaaatttcccaatcgtgaccaacgggacaaggatggtgatggtgtgggggatgcctgtgacagttgtcctgatgtcagcaaccctaaccag

SEQ ID NO: 93177 - DNA, 943 bp, Homo sapiens
atggagcctggtgacgcggcgcgccctggctcgggtcgggctaccggggcgccgccgccgcggctgctgctgctgccgctgctgctgggttgggggctgcgagtcgcggccgcggcctcggcctcctcctctggggcggcggcggaggacagcagcgccatggaggagctcgctactgagaaggaggcggaggagagccaccggcaagacagcgtgagcctgctcaccttcatcctgctgctcacgctcaccatcctcaccatctggctcttcaagcaccgccgggtgcgctttctgcacgagaccgggctggccatgatctatgggctcatcgttggggtgatcctgaggtatggtacccctgctaccagtggccgtgacaaatcactcagctgcactcaggaagacagggccttcagtaccttattagtgaatgtcagcggaaagttcttcgaatacactctgaaaggagaaatcagtcctggcaagatcaacagcgtagagcagaatgatatgctacggaaggtaacattcgatccagaagtatttttcaacattcttctgcctccaattatttttcatgctggatacagcttaaagaagagacactttttcagaaatcttggatctatactggcctatgccttcttggggactgctgtttcatgcttcattattggaaatctcatgtatggtgtggtgaagctcatgaagattatgggacagctctcagataaattttactacacagattgtctcttttttggagcaatcatctctgccactgacccagtgactgtgctggcgatatttaatgaattgcatgcagacgtggatctttacgcacttctttttggagagagcgtcctaaatgatgctgttgccattggactggcctcggttattggtgcctaccagccagcgggactggacactcacgcct

SEQ ID NO: 93178 - DNA, 406 bp, Homo sapiens
cgtccgggaagatttggtgggaggagaagcagatgtgatttagacgggttgagagtgaggtgaggagggcatttaggtcactgcttccggggggcacaaagttcgcgatgtggctgaagcctgaggaagtgcttctgaaaaatgcgctgaagctgtggctgatggaaaggtccaacgactacttcgtgctgcagcggcgtcggggctacggggaggaaggcggaggggggctcacagggcttctggttgggactcttgattcagtcttggactctactgctaaagtagctccatttcgcatcctacaccagacaccagattctcaagtttacttgtcaattgcatgtggagccaacagagaagaaataaccaagcattgggattggttggaacaaaatattatgaa

SEQ ID NO: 93179 - DNA, 395 bp, Homo sapiens
gcgtccggaggctgcgcccttgagcagctctcagtgtggcggagttttcttggctaagaggctgaaagggtagccacgctgatgggaccctccgttatgggctccctctcgagtcaaggctcaggctgctttttgtctcttgttttcccaaacaggccaattctcccccagtgattgtcaacacagataccctagaagccccaggatatgtgagttgtttacattttggggctggggccattgcacaaggaaggagggagtaagggagggcagcagatgacgggcaggtggtcagacaggaatgtctgtctcactgcttttgtgtttctgtcccgtgctggagttgcaggcgaacgggaccgagggggagatggaatacgaggaaatcacattgg

SEQ ID NO: 93180 - DNA, 695 bp, Homo sapiens
acgcttccgccccacggttcaggattttcttttatgaggacttccctgcaggcaggggcactctggggacagaaggcccctccccacagcattactgccatcatgattactgatgaccagcgaacgattgtgactggaagtcaagagggtcagctctgtctctggaatctctcacatgaactaaagatttcagcgaaagaactcctatttggtcattcagcttcggtaacatgtttggcaagagcaagggacttctctaaacagccctacattgttagtgctgctgaaaatggggagatgtgtgtttggaatgtcaccaatggacagtgcgtggagaaggctacacttccttacaggcacaatgcaatccggtattacccctggtccattccggatgacaggaagaagggctgtcttctttgttgtggagaatatcaagatgtccttataattgatgccaaaactttggctgttgttcacagttttagatcatctcagtttcctgactggatcaactgcatgtgcattgttcactccatgagaattcaagaagattctctcttggtggtatcagtagctggtgagctcaaagtatgggatctttcctcatctatcaacagcattcaggttggcttgggaaccctactcttttttccttacaatttcaagcatattcattaaaatttataaatttt

SEQ ID NO: 93181 - DNA, 457 bp, Homo sapiens
tttagttttacctagttttatttgtctatttgagtattgtccttgaatttaaaatttttttcagccccaactgatacacacacatatacatacataatacatgtgtgtgtgtgtagcttacagagtgtttataggaaactgattttgtatactttggctactttgttgtaagttctagttttttttcttttattattaaactagtgcacgacatcaatgctatatgattggtgtttcgttgacctaaaaataatgcatgccatcttcttttcacagctgtgtgccaaccacgatgcaaacatggtgaatgtatcgggccaaacaagtgcaagtgtcatcctggttatgctggaaaaacctgtaatcaaggtaggaaaacagtctgacataaatacacaatcgaagacacctctatcactcccaaattaaaaatattcttatctcaaactactttcca

SEQ ID NO: 93182 - DNA, 394 bp, Homo sapiens
catgatgctacagagattgtcaagtatctcagtagacattcaaatcacttcatttctaatattacatctacattgctgagggagtgacagattgcagagtagattgcactagataatctctaaatctcatgaaaattaagacagactaaagtcaagataaacatggtatagtagatgactggtccaggaacaagtaaatatggatttaaatctcccttagccattaactagctactttctaaattccctttcatttataaattctggaatggcatgctctacttgcttacatttgcagatcatcttttgttacaaatttgggcttcatttaaaagcctagagaatgcctttaaaggattttggtgataaaacaggatgtgttcccacgcgtccg

SEQ ID NO: 93183 - DNA, 1029 bp, Homo sapiens; identical to SEQ ID NO: 62260

SEQ ID NO: 93184 - DNA, 403 bp, Homo sapiens
aggtgaaggttatgaattatttgtcccatctaatggtgttccagcagtctgccacatggtgggaaggaggccccacagagctgtgctgtctccttcccaggatgagctggagcacagcctgggggagagtgcggcccagggggcagctggagtggtgctctgggtgagctgggaaaatacaagaaccaaggtgagcttaggcctggcatgagggtgggggtgggggaggggtggggccattaagctgacggggtagaccctgacttaccctttctacctgcaaagtcctggctgaccagcaggtgagtgcctcagtgccctgggtgggtccatacatggccatggtgtccctgacgctatcctcccttcccacatagaaatcatgtcaggccatcaaggagta

SEQ ID NO: 93185 - DNA, 377 bp, Homo sapiens
tttcgtggggcgttgtcgtgatgattccgcggccagcggatcgctgcgagtggccttgaaggcagctgctgcaggtgaagagtaggcggcggggcagagagcggcctccgagggtcacctgaatggttgagcatggaccctgttgctacccacagctgccatctgctccagcaactgcatgagcagcgaatccaaggcctgctttgtgactgtatgttggtggtaaaaggagtctgctttaaagcgcataagaatgtcctggcagcattcagccagtattttaggagcctctttcagaattcttcaagccagaagaatgatgtttttcacttggatgttaaaaatgtcagtggcatagggcagatcctggacttcat

SEQ ID NO: 93186 - DNA, 417 bp, Homo sapiens
aacgatttcgtgcagccgccattgtccgcggctgaagttgggatttgctgtgttcctgggcaggtgcctggtcaatcagtcctcgggatggcagccatcaacccgtgggcctcctggggtgcccttacggaccaatcttgggggatgacagctgttgacccatgggcctcctgggctctgtgtcctcagtatcctgcctggcacgtggagggaagcctggaggaggggaggagggccactgggctcccagcagcccaggttcaggaaccagtgaccttcaaggacgtggccgtggacttcacccaagaagagtgggggcagctggaccttgttcagaggaccctgcaccgtgatgtgatgctggagacctatggtcacctgctctctgtgggaaatcagattgccaagcctgaggtc

SEQ ID NO: 93187 - DNA, 417 bp, Homo sapiens
  misc_feature (1)...(417): n = a,t,c or g
ccctgtccggaatccccgggtcgacgatttcgtgtcaaattcaagatggatggaatcacagcggctgcggcggctgcggcgcgcgcgagccgagtgtgagcggaaaggggcccggcgtctgcctcgagactgaagaccgataaactcaagccatggagggattactgcattacatcaaccctgcacacgccatttctctcctaagtgccctgaatgaggagcgtctcaaaggacagctgtgtgatgtgctgctgattgttggagaccaaaagttccgagctcataaaaacgtcttggctgccagcagcgaatactttcagagtttattcacaaataaggaaaatgagtcacaaactgtatttcagcttgacttctgtgagccagatgcttttgataatgttttaaactacatttatn

SEQ ID NO: 93188 - DNA, 573 bp, Homo sapiens
cggacttcccgggtcgacgatttcgtgcttgttgacactgcaggatgcgatggtgctgcgtgaagggagctgtgctgggagacagaatgcgtccgcgtgctggccccacgggaccacagggtgcccgtggttgacacgagctgtgtccccagctgttcccgtctacaatggcatcatcttcctctttgtcctggccaacttcagcatggccactttcatggaccctggtgttttcccccgagcggatgaggatgaggacaaggaggacgacttccgggctccgctgtacaagaacgtggatgtgcgaggtatccaggtccgcatgaagtggtgtgccacgtgccacttctaccgcccgccgcgctgctcccactgcagcgtctgtgacaactgtgtagaggactttgaccaccactgcccctgggtcaacaactgcatcgggcgtcgaaactatcgctacttcttcctgttcctgctgtcactcagtgcacacatggtgggcgtcgtggccttcggcctggtctacgtgctgaaccacgctgaggggctgggagccgcgcacaccaccatcac

SEQ ID NO: 93189 - DNA, 1107 bp, Homo sapiens
tttcgtccggtgttcgcggaggagtcgaggcacggagaggcttcgggggagggacggaaagaagggtggcccgccaggcgggcggggtccatggattcggggtgagggccgtccgcggcctcgctttcgcctcctccgagccgggccggcgatggccgcagctgtgaggcgagcagaagaatagaaggaaggtgataggatgtgatgatagaatttgtgatagccaagcaacaacttttcctaattcggcatgttaaaaaataagggtcactcatctaagaaagataacttggcagtcaatgcagttgctttacaagatcacattttacatgatcttcaacttcgaaatctttcagttgcagatcattctaagacacaagtacaaaagaaagagaacaaatctctaaaaagagatacaaaggcaataatagatactggacttaaaaaaactacacagtgccccaaactagaagactcagaaaaagaatatgttcttgatcccaaaccgccgccgttgactttggcacagaagttgggcctcattgggcctccaccacctccactgtcatcagatgaatgggagaaggtgaaacagcgctctctcctgcaaggggactccgtgcaaccatgccccatctgtaaagaagaattcgagcttcgtcctcaggtgtttagcatacgagggtgagctagagagctcctgggctgtttcctagggacgaggcccagagctggagcctaagattccaagcttcctttttccagtttcatcctcctgtgtgagcctcacacacttccattttgttttccattaattaaagtgtgtgaagagctaaacaccctcattaaatagttttgtttgtttactaactggtattctcaagtactaaagtttgtacaaaaggaatgtttctgttcaacaggccccatgcggctgtgcagacaactggggggcttcccaggagcagctgtgtcccagcgcgggaaggatgaaagcagagggactcttaagtggttttgtgatttgagtcagaaacgaaaaaaaaacctgtgcttgaatgtctccaaagaatttgtgagagaatctttaagaaaagtaaaatcttt

SEQ ID NO: 93190 - DNA, 588 bp, Homo sapiens
acgggtcgacgatttcgtccgccccctccccccaggcctgatgagcaggtctcgagcctccatccatcgggggagcatccccgcgatgtcctatgcccccttcagagatgtacggggaccctctacgcaccgaacccaatacgttcattccccgtatgatcgtcctggttggaaccctcggttctgcatcatctcggggaaccagctgctcatgctggatgaggatgagatacaccccctactgatccgggaccggaggagcgagtccagtcgcaacaaactgctgagacgcacagtctccgtgccggtggaggggcggccccacggcgagcatgaataccacttgggtcgctcgaggaggaagagtgtcccaggggggaagcagtacagcatggagggtgcccctgctgcgcccttccggccctcgcaaggcttcctgagccgacggctaaaaagctccatcaaacgaacgaagtcacaacccaaacttgaccggaccagcagctttcgccagatcctgcctcgcttccgaagtgctgaccatgaccggtacaggggctggagcatgtgggatgagattgatgtaat

SEQ ID NO: 93191 - DNA, 464 bp, Homo sapiens
tttcgtggacggcgggaccggccgctgggtcccagcgagggctgagccgggcggtgggaggaggtcaggatggtgggggaacggcatgctggggacctcatggtgcccttagggcctcggctgcaggcatatcctgaagaactcattcgacagaggcctgggcatgacgggcatcctgaatacctgatccgatggagtgtcctgaagtgtggggaagtgggcaaagtgggtgtggaagaaggcaaagcagagcacatcctcatgtggctgtcggctcctgaggtctacgccaactgccctgggctgttaggtgagcgggcactatctaagggacttcagcacgaaccagctggggtttcaggaagctttcctcgagatccaggaggcctggatgaagtggcaatgggagagatggaggctgatgttcaggcgctggtacgcagggcggccaggcagctggcaga

SEQ ID NO: 93192 - DNA, 407 bp, Homo sapiens
tttcgtagggtctgagacggtgggagcggttgtgtgattatggaggtaggaacctgatagctaagaaggctggcgagagaacgcggccgaccgggttgaagcagggacgggaagccgggcggagaggcgactgacgggagaggagagagagcggggtttggggagtgttgtcagaatgtcagggtcaaaagccatcgctccaagctgactccctgctccccctaacttatccccgcgactttcttttggtttccagtttcccggaggaaatgacaattacctgacgatcacagggccttcgcaccccttcctgtcaggggccgaggtgagccagagctgccgacgccgcgggggtagggcctgaggcagcggtggggtagggtagtggggaggagagcacggactcc

SEQ ID NO: 93193 - DNA, 388 bp, Homo sapiens
  misc_feature (1)...(388): n = a,t,c or g
aaacnaagcgctgtcacgatttcgtggaaatggcgctccgtcatggggatacagacgagccccgccctgctggcctccctgggggcggggctggtcactctgctcgggctggctgtgggctcctacttggttcggaggtcccgccggcctcaagtcactctcctggaccccaatgaaaaggacctgctacgactgatagacaagacgctctctgcacggtccccatgcaaacatatctacctctccacccgaattgatggcagcctgagcatcaggccatacactcctgtcaccagtgatgaggatcaaggctatgtggatattgacatcaaggtctacctgaagggtgtgcaccccacatttcctgagggagggaagatgtctcact

SEQ ID NO: 93194 - DNA, 531 bp, Homo sapiens
aacgtcttccagtgcggccaggtgagtatagccagctgtgacccacagcccacccataccacgcccccagctctggccagtgggcctccggggtgagctgtggggtcatctgcctgaggccaagctgaggccagagctccttcttccaaagcagctgctctgggtcgtacctctcaggtcccaggatgggaggacaggtgaggatgggctgggctgaccccatacttacccctgtcccctccccaggcgggcatcaagatccggaacctgtacacagagctggctgacggcatccacctcctgcggctgctggagctcatctcaggggaggccctgccacccccgagccggggccgcctgcgtgtgcacttcctggagaacagcagccgagctatggccttcctcagggccaaggtgccagtaccactcatcgggccagagaacatcgtggacggagaccagacactcatcctgggactcatctgggtcatcattctgcgtttccagatctcccacatctccttggacaag

SEQ ID NO: 93195 - DNA, 1339 bp, Homo sapiens
atggcggcgcgcaccctgggccgcggcgtcgggaggctgctgggcagcctgcgagggctctcggggcagcccgcgcggccgccgtgcggggtgagcgcgccgcgcagggcggcctcgggaccctcgggcagcgctcccgcagttgcagcagcagcagcacagccaggctcgtatcccgcgctgagtgcacaggcagcccgggagccggccgccttctgggggcctctggcgcgggacactctcgtgtgggacacaccctaccacaccgtctgggactgcgacttcagcactggcaagatcggctggttcctgggaggccagttaaatgtctctgtcaactgcttggaccagcatgttcggaagtcccccgagagcgttgctttgatctgggagcgcgatgagcctggaacggaagtgaggatcacctacagggaactactggagaccacgtgccgcctggccaacacgctgaagaggcatggagtccaccgtggggaccgtgttgccatctacatgcccgtgtccccattggctgtggcagcaatgctggcctgtgccaggatcggagctgtccacacagtcatctttgctggcttcagtgcagagtccttggctgggaggatcaatgatgccaagtgcaaggtggttatcaccttcaaccaaggactccggggtgggcgcgtggtggagctgaagaaaatagtggatgaggctgtgaagcactgccccaccgtgcagcatgtcctggtggctcacaggacagacaacaaggtccacatgggggatctggacgtcccgctggagcaggaaatggccaaggaggaccctgtttgcgccccagagagcatgggcagtgaggacatgctcttcatgctgtacacctcagggagcaccggaatgcccaagggcatcgtccatacccaggcaggctacctgctctatgccgccctgactcacaagcttgtgtttgaccaccagccaggtgacatctttggctgtgtggccgacatcggttggattacaggacacagctacgtggtgtatgggcctctctgcaatggtgccaccagcgtcctttttgagagcaccccagtttatcccaatgctggtcggtactgggagacagtagagaggttgaagatcaatcagttctatggcgccccaacggctgtccggctgttgctgaaatacggtgatgcctgggtgaagaagtatgatcgctcctccctgcggaccctggggtcagtgggagagcccatcaactgtgaggcctgggagtggcttcacagggtggtgggggacagcaggtgcacgctggtggacacctggtggcagacag

SEQ ID NO: 93196 - DNA, 3750 bp, Homo sapiens
tttcgtcctcaggggaccccgcgcagtccagcttctcacgttctcactatgtctgctccagacgaagggagacgggatccccccaaaccgaagggcaagaccctgggcagcttctttgggtccctgcctggcttcagctctgcccggaacctggtggccaacgcacatagctcggcgagagcccggccggccgctgaccccacaggagcgcctgctgccgaggctgcccaaccacaggctcaggtggctgcccacccagagcagacggccccatggacggagaaggagctgcaaccttcggaaaagatggtgtccggggccaaagacctggtgtgttccaagatgtccagggccaaggatgccgtgtcctccggggtggccagcgtggtggacgtggctaagggagtggtccagggaggcctggacaccactcggtctgcacttacgggcaccaaggaggtggtgtccagcggggtcacaggggccatggacatggctaagggggccgtccaagggggtctggacacctcgaaggctgtcctcaccggcaccaaggacacggtgtccactgggctcacgggggcagtgaatgtggccaaagggaccgtacaggccggtgtggacaccaccaagactgtgctgaccggcaccaaagacacagtgactactggggtcatgggggcagtgaacttggccaaagggactgtccagactggcgtggaaacctccaaggctgtgctgaccggcaccaaagatgctgtgtccactgggctcacaggggcagtgaatgtggccagaggaagcattcagaccggtgtggacaccagtaagactgtcctaacaggtaccaaggacaccgtctgtagtggggtgactggtgccatgaatgtggccaaaggaaccatccagaccggcgtggacaccagtaagactgtcctaacaggtaccaaggacaccgtctgtagtggggtgactggtgccatgaatgtggccaaaggaaccatccagaccggcgtggacaccagtaagactgtcctaacaggtaccaaggacaccgtctgtagtggggtgactggtgccatgaatgtggccaaaggaaccatccagaccggcgtggacaccaccaagactgtcctaactggcaccaagaacactgtctgcagtggggtgaccggtgccgtgaacttggccaaagaggccatccaggggggcctggataccaccaagtctatggtcatgggtacgaaagacacgatgtccactgggctcacaggggcagcgaatgtggccaagggggccatgcaaactgggctgaacacaacccaaaatatcgcaacaggtacaaaggacaccgtctgcagtggggtgactggtgccatgaatttggccagaggaaccatccagacaggcgtggacaccaccaagatcgttctaactggtaccaaggacactgtctgcagtggggtcaccggtgctgcgaatgtggccaaaggggccgtccagggcggcctggacactacaaagtctgtcctgactggcactaaagatgctgtgtccactgggctcacaggggctgtgaacgtggccaaagggaccgtccagaccggcgtagacaccaccaagactgtcctaaccggcaccaaggacaccgtctgcagtggggtgaccagtgctgtgaacgtggccaaaggggccgtccaggggggcctggacaccaccaagtctgtggtcataggtacaaaagacacgatgtccactgggctcacgggggcagcgaatgtggccaagggggctgtccagacaggtgtagacacagccaagaccgtgctgaccggcaccaaggacacagtgactactgggctcgtgggggcagtgaatgtcgccaaagggaccgtccagacaggcatggacaccaccaaaactgtcctaaccggtaccaaggacaccatctacagtggggtcaccagtgccgtgaacgtggccaagggggctgtgcaaactgggctgaaaacgacccaaaatatcgcgacaggtacaaagaacacctttggcagtggggtgaccagtgctgtgaatgtggccaaaggggctgcccagacaggtgtagacacggccaagaccgtgctgaccggcaccaaggacacagtcactactgggctcatgggggcagtgaatgtcgccaaagggactgtccagaccagtgtggacaccaccaagactgtcctaactggtaccaaggacaccgtctgcagtggggtgaccggtgctgcgaatgtggccaaaggggccatccaagggggcctggacactacaaagtctgtcctgactggcactaaagatgctgtgtccactgggctcacaggggctgtgaagttggccaaagggactgtccagaccggcatggacaccaccaagactgtgttaactggtaccaaggatgctgtgtgcagtggggtgaccggtgctgcgaatgtggccaagggggccgtccagatgggtgtagacacggccaagaccgtgctgaccggtaccaaggacactgtctgcagtggggtcaccggtgctgcgaacgtggccaagggtgctgtgcaaactgggctgaaaacgacccaaaatatcgcaacaggtacaaagaacacccttggcagtggggtgaccggtgctgcgaaagtggccaaaggggccgtccaggggggcctggacactacaaagtctgtcctgactggcactaaagatgccgtgtccactgggctcacaggggctgtgaacttggccaaagggactgtccagaccggcgtggacaccagcaagactgtcctgaccggtaccaaggacaccgtctgcagtggagtcactggtgccgtaaatgtggccaaagggaccgtccagacaggtgtggacacagccaagacggtgctgagtggcgctaaggatgcagtgactactggagtcacgggggcagtgaatgtggccaaaggaaccgtgcagaccggcgtggacgcctccaaggctgtgcttatgggtaccaaggacactgtcttcagtggggttaccggtgccatgagcatggccaaaggggccgtccaggggggcctggacaccaccaagacagtgctgaccggaaccaaagacgcagtgtccgctgggctcatggggtcagggaacgtggcgacaggggccacccacactggcctcagcaccttccagaactggttacctagtacccccgccacctcctggggtggactcaccagttccaggaccacagacaatggtggggagcagactgccctgagcccccaagaggccccgttctctggcatctccacgcccccggatgtgctcagtgtaggcccggagcctgcctgggaagccgcagccactaccaagggccttgcgactgacgtggcgacgttcacccaaggggccgccccaggcagggaggacacggggcttttggccaccacacacggccccgaagaagccccacgcttggcaatgctgcagaatgagttggaggggctgggggacatcttccaccccatgaatgcggaggagcaagctcagctggctgcctcccagcctgggccaaaggtgctgtcggcggaacaggggagctacttcgttcgtttaggtgacctgggtcccagcttccgccagcgggcatttgaacacgcggtgagccacctgcagcacggccagttccaagccagggacactctggcccagctccaggactgcttcaggctg

SEQ ID NO: 93197 - DNA, 511 bp, Homo sapiens
cacgagtccaagctgcagctggcagggattgcggggtgccggccgtctgagtttttttaaaactgctcgccgcgaagtctgtctgcagccaaaatgtccaacagaaacaacaacaagcttcccagcaacctgccgcagttacagaatctaatcaagcgagacccgccggcctacatcgaggagtttctacagcagtataatcactacaaatccaatgtggagattttcaaattgcaaccaaataaacccagcaaagaactagcagagctggtgatgtttatggcacaggtaaaaatataattgcttaaataaagaccagtattaacacacagtttgctgaatgttttttcactaatactcgaccttattccactctggaatgggaacttaattaaaatatttttctaactttccctttttgcaaattttattttctccctatcatgagttagagaatgtcactagatctttttgcataactaaccaggacaaaactttaagactatttttt

SEQ ID NO: 93198 - DNA, 619 bp, Homo sapiens
gagacaaagtctgcagtcggcacagagtcaccgtcagctgtcctggccgcagggtgttcaaggcgggacacaccaggctagagatccgcgatcgggccccgcctcaggtactgcgctccaggccaggcgggcgcgggagcccgtaagcgctcagctcccgagccaggcgggcttccagggcacttcccctaggctgcattcccaaaggctcccgagggcgagggctctgtgcacacccctgcctggtgacctccattggtgctccagcgtgaacatggtgcaaagataccagtctcctgtccgagtctacaagtacccgtttgagctggtcatggcggcctacgagaagcgtttccccacgtgcccacagatcccagtcttcctgggcagcgaggtcttgcgcgagtcccgcagcccggacggggctgtgcacgtggtggagcggagctgccggctgcgcgtggacgccccgcggctgctgcggaagatcgcaggtgttgagcacgtggtcttcgtgcagacaaacatcttgaactggaaggagaggacgctcctcatcgaagcgcacaatgagaccttcgccaaccgcgtggtggtgaacgagcactgcagctacacg

SEQ ID NO: 93199 - DNA, 417 bp, Homo sapiens
  misc_feature (1)...(417): n = a,t,c or g
tttcgtcagcaagggacgctcaggcggttaccatggcggttggcggctcggagcgggctgacgggcgcatcgtgaagatggaggtggactacagcgccacggtggatcagcgcctacccgagtgtgcgaagctagccaaggtgaggagaggccggctggctgttggcgggcgccaggggctgagtcacggcgcggagcctgcttaggcctcagggggcctgcgggctggagcgtgcaccccccaatgcctgtccagccctagttgggcctgcacgagtgggagaccccaggtcggcccggccagggctgcggagtacgccagcgcctatagcttcccagaccctccccaaaacagatggtcacttccctccgtaggacttagggctccgtttaactttttgccggttcttggatgcn

SEQ ID NO: 93200 - DNA, 888 bp, Homo sapiens
accattagtccagtgcggtggaattcggaagaacgctgctttccaagatggcgacggagggaggagggaaggagatgaacgagattaagacccaattcaccacccgggaaggtctgtacaagctgctgccgcactcggagtacagccggcccaaccgggtgcccttcaactcgcagggatccaaccctgtccgcgtctccttcgtaaacctcaacgaccagtctggcaacggcgaccgcctctgcttcaatgtgggccgggagctgtacttctatatctacaagggggtccgcaaggctgctgacttgagtaaaccaatagataaaaggatatacaaaggaacacagcctacttgtcatgacttcaaccacctaacagccacagcagaaagtgtctctctcctagtgggcttttccgcaggccaagtccagcttatagacccaatcaaaaaagaaactagcaaactttttaatgaggaaggctcattgtcatccccaagccaggccagttctccaggtggaactgtagtgtagcgacctcactgctgcgcgcacagtctcccgggacttggactcgagggagtgacgaggaggagctccgagctgcgcctgagccgtgccagccggcggacctcaggcggtggacgtcggcgatagccgtgtggacggtgaccggctcactctgcggcgccgtgctcccgctgctcacccaaagaagttgtttccattttaaaccggtcttttggggctgcagtaaaaaataagaaatgggagttttcttgctttttactctgaaaattcaatgtgaattgaaatttcagatgatgatgagaatatgagacagatgatgacagagtgtgaaatgaaaatggttttcttgggaccaaga

SEQ ID NO: 93201 - DNA, 1066 bp, Homo sapiens
gtcgacgatttcgtccccacggcgctgcggcgttcactccccgcgcagcctgcctttgcaccccttcccccaaaccctatcccgcgccctgcttccccttctgctgcggcgccctcttcatctctagccgccccccctccccaaatcaggcgatctccggagatgtgaagaaggggggcgagcggacaggaagatgaagggagcaaagctgcccgccgcgggacaggcgtctaggtgaacaagaaaatgaccgaagaaacacacccagacgatgacagctatattgtgcgtgtcaaggctgtggttatgaccagagatgactccagcgggggatggttcccacaggaaggaggcgggatcagtcgcgtcggggtctgtaaggtcatgcaccccgaaggcaatggacgaagcggctttctcatccatggtgaacgacagaaagacaaactggtggtattggaatgctatgtaagaaaggacttggtctacaccaaagccaatccaacgtttcatcactggaaggtcgataataggaagtttggacttactttccaaagccctgctgatgcccgagcctttgacaggggagtaaggaaagcaatcgaagaccttatagaaggttcaacaacgtcatcttccaccatccataatgaagctgagcttggcgatgatgacgtttttacaacagctacagacagttcttctaattcctctcagaagagagagcaacctactcggacaatctcctctcccacatcctgtgagcaccggaggatttataccctgggccacctccacgactcataccccacagaccactatcacctcgatcagctccaaggacggctgcagaagtgcactaagctggctgggtttctgggagccaatgcatccaactggtaaaaagtcggtggcctctgtgggagcggttttgccgagagggcagggtcctgctcagtggcacttgccctgggtcagagcactgtctccagagtactgcctgcctgaacctcccaccccgcttctctggcctttggggtcgcctcctgcaagtcacgcctctgcc

SEQ ID NO: 93202 - DNA, 918 bp, Homo sapiens; identical to SEQ ID NO: 62166

SEQ ID NO: 93203 - DNA, 398 bp, Homo sapiens
attatacttgttttaccacagataaagaaacaatctgcgagtgtgaataacctgtccaagatcacataaactagtacatggcagggccacagtttgaacccagatctgtttgatttcatggcactagactaagaagaatatctaaaaacacagtaaatcttaatttccctcaaaccaagtgaacaaacaaatagaaagtatcctggcctaattcaaaagtggaccactaccgaggcaagccatgtacaccccaacaccaccattctctctttgtttccagtcctggccgaccaaccctgccctcagctgggcctcaccagccaaccaccatgagcacacagaatggcagtgacacacaagacagcccagcactgagtgactcagtcattacaacctat

SEQ ID NO: 93204 - DNA, 415 bp, Homo sapiens
cgtccgactagatcttgattcaatagaaaaatgcagcaaacttttaataacagactctctacatgactaagggaacttatctatggatagtagtaacatttttctaccatttgtccgtaataaaccatacttgctcgtaagaaagagaaaacatgtccttgtaaaaaagaaataggaaggaattcccgatctggcatgtattccagaaaggccatgtacaagaggaagtactcagccgctaacaccaaggttgaaaagaaaaagaaggagaaggttctcgcacctgttacaaaaccagttggtggtgacaagaacggcggtacccgggtggttaaacttcccacaatgcctagatattatcctactgaagatgtgcctcgaaagctgttgagccacggcaaaaaacccttcagtc

SEQ ID NO: 93205 - DNA, 883 bp, Homo sapiens
cacgagaccaccccggctgtggtgcaaagcgtcctcctggagagggggtggaataagtttgataagcaggagcagaacgcggaggactggaacctgtactggaggacatcctctttccgaatgaccgaacacaacagtgttaaaccgtggcagcagctaaaccaccaccctggaaccaccaagcttaccaggaaagactgtttggccaaacacctgaagcacatgaggaggatgtatggcacttccctgtaccagttcatccccctgacgttcgtcatgcccaatgactataccaagttcgtggctgaatactttcaggagaggcagatgctgggcaccaagcatagctattggatttgcaagcctgctgagttatctcgtgggagggggatactaattttcagtgactttaaagacttcatctttgatgatatgtacatagtgcagaaatatatctccaatcctttacttattggcagatataaatgtgatctccgcatctatgtttgtgttactggctttaagcctttgaccatttatgtttatcaggaagggttggttcggtttgccacggaaaagtttgacctcagtaatttgcaaaacaattatgcccatttgaccaacagcagcatcaataaatccggggcctcttatgagaagatcaaagaagtgattggtcatggttgtaaatggacgctcagcagatttttttcctaccttcgtagctgggatgtggacgatctgcttttgtggaagaaaatccaccgcatggttattctcaccattctcgccattgcaccatctgtcccctttgctgccaattgctttgagctctttgggtttgatattttgattgatgacaacgaattccaccgcactggac

SEQ ID NO: 93206 - DNA, 368 bp, Homo sapiens
attaaaattaggtccttcctccctctaccagccctgatttcactcacccccgatctcccttcctcttaatatttttctgcctttatgtattctatattattaaggctaatgacaaatagttacttatctattaagttattgatgttcaacttatcttgcagctgctgtattaaagtatgaaaataatgtgatgaatattcgacagtttaactgttctccacatccttactggttgcctaattttatggatgtcttcacgtggtctttaccgtttgttggagaaaaaggtataatttttatttttaaaaaaaatttgctttattactgttacatttactccaggttactatcataggcccatacttgct

SEQ ID NO: 93207 - DNA, 393 bp, Homo sapiens
tttcgttgcgttttctgtctgcaaagtagagggccatgcctcaccaatagaataacgggggccctgatgacctgctccgagtccactcacagccagtgacacttgcaaaaaactcccaaagccgtcttgggtttggctcccacagctcttgaccaatgtggccaaagctggacacctccttgggacactgggattattcataaatgcagcccgccctgactctccctgaatagcatctgaagtctttgtgaaggtcatggatcctgaacaaagtgtcaagggcaccaagaaggctgagggaagtccccggaagcggctgaccaaaggagaggccattcagaccagtgtttcttccagcgtcccatacccaggcagcggcacagctgccacccc

SEQ ID NO: 93208 - DNA, 402 bp, Homo sapiens
tttcgtgcgggagggacccagccagggggctgtcctagtagattccggcattgcctccaccccgctgtggcggagacgcagagggcgggtcgcgctcgagggtcagggaggagagtgacccggccctggtccagggcctgttttccgtgcctcacgccctgcttttcgcctccttcagcgctgtctgctagctgcttttcctgctctctctccctggaggcgaacccttgtgctcgagatggcagccaccctgctcatggctgggtcccaggcacctgtgacgtttgaagatatggccatgtatctcacccgggaagaatggagacctctggacgctgcacagagggacctttaccgggatgttatgcaggagaattatggaaatgttgtctcactagattt

SEQ ID NO: 93209 - DNA, 595 bp, Homo sapiens
ggggcggttccttgcgcttcagtcccccccgggtcccctcctgctcccgggttttctgccccgttcccccgggtggctgtgggctcccgagccccatgtcggccagccggccccagagccccacgaccccatggtgtctcccaagaaggtacatgaagcacaagcgcgacgatgggcccgagaagcaggaggacgaggcggtggacgtgacgccggtgatgacctgcgtgtttgtggtgatgtgctgctccatgctggtgctgctctactatttctacgacctcctcgtgtacgtggtcatcgggatcttctgcctggcctccgccaccggcctctacagctgcctggcgccctgtgtgcggcggctgcccttcggcaagtgcaggatccccaacaacagcctgccctacttccacaagcgcccgcaggcccgtatgctgctcctggcgctcttctgcgtggccgtcagcgtggtgtggggcgtcttccgcaacgaggaccagtaagtgctgcttcccccgggccccggcgggcagcggagtcctcgggcgcaccaaggctcctggggccctgactccctgccctccctggaggc

SEQ ID NO: 93210 - DNA, 406 bp, Homo sapiens
  misc_feature (1)...(406): n = a,t,c or g
ggtccagtttttcccactgcaccacactactgacttgttctttgggtgtatgcatcctcattgtctatctgttgttttaattttgctttcctaaatgttaaaatgatgtttcaataataatgaaacaagcaaacaaaataagaaagacagaaaagaccaatcatttatcttgacatatccccagacttcattttgtgaggagtccagtgtcctgggagtggcaccatccacccagcaaactgaccacattttgtccattaagccttggctctaagagcacttggttaaagtagagctctgtaaaagaagcatgaattcactgttgaccaagcttatctgaatcacagtgctgagagggggtcaactccctggaccctaccgacttcgccagtttannnntcactcc

SEQ ID NO: 93211 - DNA, 990 bp, Homo sapiens
gaaaagaaccctttaaaagagtgccttccacatagccatgacgtgtctgcttggctccctgatataagctgctttaaccctgatgagctgataagtggccagggcagtgaagaaggggaggggctcctttattactgctaccatgacctggaggatccccaatggatctgtgcctggcagacagctctgtgtcagcacctgcacctcacaggcaagattcgaattgctgcagaaggaatcaatgggacagttggtggaagcaaattggctaccagactttatgtggaagtcatgctttccttcccattgtttaaggatgacctgtgtaaagatgattttaagaccagcaaaggaggagctcactgttttccagaattgcgtgttggtgtatttgaagaaatcgtgcccatggggatcagccccaaaaagatctcctacaagaagcctggaggagggagattgaggatacctggaattactggaattactaagttatttcatcatgatcatcaagtagtgttcttttcagacagttgtaattatgaagagaagagatttgggtggaaagaaacaaagcaacacgaatccatttatccccaggtgaatttcataaagaagtagaaaagtttttatctcaggcaaatcaagaacaaagtgatactatccttcttgattgcagaaacttctatgaaagcaaaatagtaagtaaaagccagaactgagttctctgaattggtagatctccccattcccacagtgtggtatatttcccaaggggaccttgtgtgtgcccacctgtggccacatggatctcctcccagtactggcagcttcagagaaaacccaagtcctaaaactcagaaatctggtgagagagtctaagaaaatatgaattaaaggcatccaggcacataatatactttgtgactcccatgagcctgcctttgacatgtatcaaggatcttgcaaagttgcctttgggcagcctct

SEQ ID NO: 93212 - DNA, 436 bp, Homo sapiens
  misc_feature (1)...(436): n = a,t,c or g
atctatcaccacgattacgccaagctttatgactggtgggttttgggagtatcaaatcggcttgcatggggatgtcctacaaaggaacaccttcttccacactttctggaacatttaggtaacaaccatctggatattggtgttggaactgggttttaccttactcacgtacctgagagtagtctgatatctttaatggatttgaacgaagctagcctgaacgcggcatctacaagggctggggaatcaaaaattaaacataaaattagccatgatgtttttgaaccttatcccgcggcgttacatggtcaatttgattccatttccatgtcttaccttcttcactgcctgcctggaaatatatctacaaaaagctgtgtaatacgcaatgcggcgcaggccttaactgacgatggaactctatacggagccacan

SEQ ID NO: 93213 - DNA, 697 bp, Homo sapiens
  misc_feature (1)...(697): n = a,t,c or g
atgtcccgccctcgcatgcgcctggtggtcaccgcggacgactttggttactgcccgcgacgcgatgagggtatcgtggaggcctttctggccggggctgtgaccagcgtgtccctgctggtcaacggtgcggccacggagagcgcggcggagctggcccgcaggcacagcatccccacgggcctccacgccaacctgtccgagggccgccccgtgggtccggcccgccgtggcgcctcatcgctgctcggcccggaaggcttcttccttggcaagatgggattccgggaggcggtggcggccggagacgtggatttgcctcaggtgcggagccgcagctacaggaggatgctcgcgaggacccccagagctccgcccggagggtactgtgaggccgttaggagctggcggtggatgacttccgcattcaaacactggagccatcacacggaagcacgaggagggtatcctcggcagctactcccggtcgctcaaggtgtctctcgctcgccctctaggtgcgggaggagctcgaggcccaactaagctgcttccgggagctgctgggcagggcccccacgcacgcggacgggcaccagcacgtgcacgtgctcccaggtggacagacgccttcgtgggcctgagcacttgcggccggcacatgtccgctcaccgcgtgtccggngccctggcgcgg

SEQ ID NO: 93214 - DNA, 869 bp, Homo sapiens
atctcagagtggcggaattcgccgggaccagccgctcggggccgggctgatacagccgcttcaccgtgcccctgcccgcgaccatggcctcctccgaggtggcgcggcacctgctctttcagtctcacatggcaacgaaaacaacttgtatgtcttcacaaggatcagatgatgaacagataaaaagagaaaacattcgttcgttgactatgtctggccatgttggttttgagagtttgcctgatcagctggtgaacagatccattcagcaaggtttctgctttaatattctctgtgtgggggaaactggaattggaaaatcaacactgattgacacattgtttaatactaattttgaagactatgaatcctcacatttttgcccaaatgttaaacttaaagctcagacatatgaactccaggaaagtaatgttcaattgaaattgaccattgtgaatacagtgggatttggtgaccaaataaataaagaagagaggcagcttggcagaagccagtctactgaaaatcctcagaagtacaggtctgagcagcatcctgttgagcctaagaaatgtaccagcttctggaagggggccctgggcaagtgggctggaatagagtcgagtggccagtctgcacagcagccttacctccccattaactcacctccccatcgactggctgatgttgctgatgtccacctcttcagttcagttctgtctggggcatttggatgttatcatctagatgttactgtcaatgagttcaagaaacaacaaaatagggacgaacaggaaggttatagcaagggagaccaagagcagggttcctggaagcatggtgcagacccacttcgtggaggagagatg

SEQ ID NO: 93215 - DNA, 458 bp, Homo sapiens
  misc_feature (1)...(458): n = a,t,c or g
cgcgggcgttcgatgtgagaaggaaaaagagcctcagaccctgctgcccaagggacttccatgctggctgtctgactgtgagtggccccagcaccgtgatgggcgccgtgggggaatccctgagtgttcagtgtcggtatgaagagaaatacaagacgtttaacaaatactggtgcagacaaccatgcttgccaatttggcatgaaatggtggagaccggagggtctgagggagtggtgaggagtgaccaagtgatcatcacggaccatcctggagacctcaccttcaccgtgaccttggagaacctcacggcagacgatgcaggaaaataccgatgtgggattgcaacaatactgcaggaagatggcctgtctggtttcctgcccgatcccttcttccaggttcaagtgctggtctcatcggcctccagtactgagaactctgtgaagacacctgcn

SEQ ID NO: 93216 - DNA, 382 bp, Homo sapiens
  misc_feature (1)...(382): n = a,t,c or g
ctgacggannnnggtgggttcttttcagattggcttcctcctgctactctggcttcgagattccactggagaaatagtgaagacgcagtctccatccaccctgtctgggtctccaggggaaagagccaccctctcctgcagggccagtcagagggttagcatcatcctagcctgggaccaacagaaacctggccaggctcccatgcttctcatgtatcgcgcatgcaccagggccattgatatcccagccaggttcagtggcggggggtctgggacagagttcactctcaccatcagcagcctgcagtctggagattgtgcagtttatttctggcaacactataataactggcctccgtggacgttcggacaagggaccagg

SEQ ID NO: 93217 - DNA, 544 bp, Homo sapiens
cccacgcgttcgttcaaaaggagtttattaacgatctttggggatgatggaaacttaaatattggatcacggtgctggttgcacaattctgcaaatttaaaataactgaatcatatacttaaatgagtaaattttatgatatgtagattatacttcaatggttttcctaaacctactggccaattatcatgtcactgcttctcatgtccaagtccacccttcattgcctgctctgcaatgaagaggtctcctttgcagtgggcatgttaagttctgtcaatagagacgctggagagacactgctggcggaaggccctggccttttgtccttgctctggctcaatggctgctagagacatgtgtggagacctgcccctaccgcacacctgtcacttcggccccagtggtgttatggtggccaccttgctgtggccgtccaggcatgggtaatgcacacctcacccttgtgccaccctgctggccagcaggttcccaactccccaacggatttctcaactctggaatagggatctcgaaagggggc

SEQ ID NO: 93218 - DNA, 435 bp, Homo sapiens
tttcctggcctcgtggcaggcagcagcagcagtgaatgtggctacagaattgctaatggagtgggccatgccatgggaactgttttgggggtgttcctggctcgactgaagcttaaaaatgaactggtgactttagcagagaagtgagaccctgcagctgagggagcatcatggcagtgtttctggaggccaaggatgcccattcggtcctgaaacgattccctcgtgccaatgagttcctggaggagctgcgccagggcaccatcgagcgagagtgcatggaggagatctgcagctacgaggaggtcaaggaagtgtttgagaacaaagagaaaacgatggagttctggaaagggtacccaaatgcagtctactctgtccgagacccctcgcagagctcagatgccatgtatgtggtggtaccccttctggggg

SEQ ID NO: 93219 - DNA, 387 bp, Homo sapiens
cggacgcgtgggtcgcggctgagacgtatgatgttgctcccgctcctgctgggagaggactgggagacaagacttgaaaccaaagagccaactccgaagccgggtattactgaagatttatgccatggggtaacaatggaaagggaaggtatctggcattctactctaggggaaacctgggaacctaataattggttagagggacaacaggatagtcatctgagccaagtgggagttacccataaggaaaccttcactgagatgagagtatgtggaggtaatgaatttgaaagatgttccagtcaggattcaatccttgatacacagcaaagcattcctatggtaaaaaggccccataactgtaattcacatggagaagatgccact

SEQ ID NO: 93220 - DNA, 862 bp, Homo sapiens
aaaacattgtattgtatactttaaatgagtgagttttatgataatctgagttggatctcaataggagacaacctcttaagaaaggttgagtctagattcctttgttagtttgtatcactaagttactgccttcttgagtaccccagcaagaagactgactattgtttctgacactgagggtgggccctagacacaattggaggtcaagcgttctacagaaaacactgaattaagttaaaatgctcaatattgagaccgttactgaggcctcttctctttggcttccagaattctggcaatcaagtaggaatttggaggatggttctcttactaacccaagaagagaatctgtgttatttacaatagcttttatggccctccttttaaatatgagaagataatcagggatcaccagacatgtgaagaaagcttctcatataagaaacctcttataagaaatagaaaacaaactgggaacaatcagaacaacagaaaaaaaaggcctcagtaaaacagccaataaaaatgttgaagttagagaaaaggagttttttcatacagtaaaggaaaagagggaaaatctttgaaaacagaaaattaaagggccccgccagaggcccctttccaaatacccgaagtcctattagcctctcagaaaaaagagggagtattttgtaaaaacttccggaaaaattccccagaatcaggcaacggatttttcaaaaggaaagcttcttgggattacccggaaaaaagaaaaaaaaaaaaataccccctccatttaaagcctcatcagcagaagggggaccacccccttatctgacccgaatcccaagataagagtgtgttcgcccacccacgc

SEQ ID NO: 93221 - DNA, 932 bp, Homo sapiens
ccgcagcccccagctcgcccccaagatgatgaagaggcagctgcaccgcatgcggcagctggcccagacgggcagcttgggacgcaccccggagaccgctgagttcctgggtgaggacctgctgcaggtagaacagcggctggagccggccaagcgggcagcccacaacatccacaagcggctgcaggcctgtctgcagggccagagcggggcagacatggacaagcgggtgaagaagcttcccctcatggctctgtccaccacgatggctgagagcctcaaggagctggaccctgattccagcatggggaaggccttggagatgagctgtgccatccagaatcagctggcccgcatcctggccgagtttgagatgaccctggagagggacgtcctgcagccactcagcaggctgagtgaggaggagctgccagccatcctcaaacacaagaaaagcctccagaagctcgtgtccgactggaacacactcaagagcaggctcagtcaggcaaccaagaattcaggcagcagtcaaggcctaggaggcagcccgggtagtcacagccatacgaccatggccaacaaggtggagacgctgaaggaggaggaggaggagctgaagaggaaagtggagcaatgcagggacgagtacttggctgacctgtaccactttgttaccaaggaggactcctatgccaactacttcattcgtctcctggagattcaggccgattaccatcgcaggtcactgagctcgctggacacagccctagctgagctgagggagaaccacggccaagcaggtggggacataggcccggcgataccacacccctgaccctgccctgctcggggcttattgagaagctcgcacttcatcctgaaaggtagcaggaagctgtggatgggttctgagagctaggctcaatctg

SEQ ID NO: 93222 - DNA, 517 bp, Homo sapiens
gcgggcgacatggcacaacgcggggaaggagcgtgaggcagtacagctgatggcgggggccgagaagcgagtcaaggcctcccactccttcctccgagggctgtttggaggaaacacaagaatagaagaggcttgtgaaatgtataccagagctgcaaatatgttcaagatggctaaaaattggagtgctgcaggaaacgcattttgtcaggcagccaagctccacatgcagcttcagagcaaacatgactctgctaccagctttgtggatgctggaaatgcttacaaaaaggcagatccccaaggtaagacagccaggcatgtagcatgctatctctgtgtgtaactaaccagtcagtacttccctcaacgttaaggtcagtgttggtgtgctttcaagtcctggtaaaaaggaatttttgtattttggaataatagagaattttgataaccttagggatttttcttttttaatcatttggggggctttatgaggagaaattatgttaaatttata

SEQ ID NO: 93223 - DNA, 576 bp, Homo sapiens
cggcgcgtgggtcgctgtcttcacccagcaccagcggacagggaagggcagagaaggccaccatggcgacactcctctcccatccgcagcagcgccctcccttcttgcgccaggccatcaagataaggcgccgcagagtcagagatctacaggatcccccgccccaaatggccccggagatccagcctccatcccaccacttctcccccgagcagcgggccctgctctacgaggacgcactctacactgtcttgcaccgcctgggtcatcctgagcccaaccatgtgacggaggcctctgagctgctgcgatacctgcaggaggccttccacgtggagcccgaggagcaccagcagacactgcagcgggtcagggagcttgagaagccaatattttgtctgaaggcaacagtgaaacaggccaagggcattctgggcaaagatgtcagtgggttcagcgacccctactgcctgctgggcattgagcagggggtaggtgtgccagggggcagccccgggtcccggcatcggcagaaggctgtggtgaggcacaccatccccgaggaggagacccacc

SEQ ID NO: 93224 - DNA, 553 bp, Homo sapiens
caaagctatacctcctcagaagttggaagtgctctttcattttttccttaggactccttaatgaaataacagaaatggtgtcttccatagatattaatagtaagtggatctatgttaatatctaaagtttcttaaggacaaatatttacctctgaatttgttaaaaatgctgaaatgtgatgctgtattggaattctataaggaattatcttgttttaggatggtcttcacaataccctcttcaatcccttctgactggttatcagtgcagtggtaatgatgaacacacttcttatggagaaacaggagtcccagttcctccttttggatgtaccttctcttctgctcccaatatggaacatgtactagcagttgccaatgaagaaggctttgttcgattgtataacacagaatcacaaagtttcagaaagaagtgcttcaaagaatggatggctcactggaatgccgtctttgacctggcctgggttcctggtgaacttaaacttgttacagcagcaggtgatcaaacagccaaattttgggacgtaaaagc

SEQ ID NO: 93225 - DNA, 446 bp, Homo sapiens
gcgcggttgttttcctgcacaggtttcgcatggccgtatgccggcattgcgcccacccggagtggcatggactcgatttctaacttccacaatgactggcagttgcgcgtggacacgtggttcaaccagccggcccgtaagatccgcaaacgtatggcccgtttagccaaggcgcgccttatcgcccctcgccccttgtcgggaaccatccggcccatcgtgcgctgccccacggatcggtaccacacgaaggtgcgcgccggccgcggctttagcctggaggagctcagggtggccggcattcacaagaaggcggcccggaccatcggcatttctgtggatccgaggaggcggaacaagtccacggagtccctgcagaccaacgtgcagcggctgaaggagtaccgctccaaactcattctcttccccaggaagccctcggcccg

SEQ ID NO: 93226 - DNA, 663 bp, Homo sapiens
tttgtttcattaagttttagttaattttctcatctataaaataatgaaaatatgtttatagctgctcatagagttcttgcaaatgccaaatatattattgtttgtgggcttaatctgttgttcttgtcctagacatagaccttgctggaatcatccatctaaagatattacctatggaagttgttctaggatataaagttcttggagactgagataacaacagtcagaattgtagtctaggtgatccgttattttggttgcaaggatgatagagtgaaggtaaattcaaagagtaagccaagaaagaaaataggataatgaatagatattgatgagaaaagaataaaattcaagacattgcgtaggtctggttgcttgaatttaatgaatatagcgtgcatttgtgccttgataatgaagcgattgacttgaagactccataggattgcagacaggtatgatgacctgatactctacgtcgttagaacgattcgcccctagcccgcagggaggctttgacaaatccttaggttggctaccatgtctgggccgcccttatattaaagggggtttcttgcctggccctcacggctaacttgagcttaggggcacgaaacaaatacttcaaccctctgtattgggaccccctatcccccgtcttcg

SEQ ID NO: 93227 - DNA, 407 bp, Homo sapiens
aaacggcggctgctcatggaaacgtgtgctgtcaacaatggaggctgtgaccgcacctgtaaggatacttcgacaggtgtccactgcagttgtcctgttggattcactctccagttggatgggaagacatgtaaagatattgatgagtgccacacccgcaatggaggttgtgatcatttctgcaaaaacatcgtgggcagttttgactgcggctgcaagaaaggatttaaattattaacagatgagaagtcttgccaagatgtggatgagtgctctttggataggacctgtgaccacagctgcatcaaccaccctggcacatttgcttgtgcttgcaaccgagggtacaccctgtatggcttcacccactgtggagacaccaatgagtgcagcatcaacaacggagg

SEQ ID NO: 93228 - DNA, 1710 bp, Homo sapiens
  misc_feature (1)...(1710): n = a,t,c or g
tttcgtcgcgaccatgctgttaaggggcgtcctcctggcgttgcaagccctgcagctcgccggtgccctcgacctgcccgctgggtcctgtgcctttgaagagagcacttgcggctttgactccgtgttggcctctctgccgtggattttaaatgaggaaggccattacatttatgtggatacctcctttggcaagcagggggagaaagctgtgctgctaagtcctgacttacaggctgaggaatggagctgcctccgtttggtctaccagataaccacatcttcggagtctctgtcagatcccagccagctgaacctctacatgagatttgaagatgaaagctttgatcgcttgctttggtcagctaaggaaccttcagacagctggctcatagccagcttggatttgcaaaacagttccaagaaattcaagattttaatagaaggtgtactaggacagggaaacacagccagcatcgcactatttgaaatcaagatgacaaccggctactgtattgaatgtgactttgaagaaaatcatctctgtggctttgtgaaccgctggaatcccaatgtgaactggtttgttggaggaggaagtattcggaatgtccactccattctcccacaggatcacaccttcaagagtgaactgggccactacatgtacgtggactcagtttatgtgaagcacttccaggaggtggcacagctcatctccccgttgaccacggcccccatggctggctgcctgtcattttattaccagatccagcaggggaatgacaatgtcttttccctttacactcgggatgtggctggcctttacgaggaaatctggaaagcagacaggccagggaatgctgcctggaaccttgcggaggtcgagttcaatgctccttaccccatggaggttatttttgaagttgctttcaatggtcccaagggaggttatgttgccctggatgatatttcattctctcctgttcactgccagaatcagacagaacttctgttcagtgccgtggaagccagctgcaattttgagcaagatctctgcaacttttaccaagataaagaaggtccaggttggacccgagtgaaagtaaaaccaaacatgtatcgggctggagaccacactacaggcttaggtaaatcagagatctgtctatgtggggacatcttgggtagtcgtgagctttattggccattcctacttcacacctgcaaagacatcgacttaaagaaaaaaggcagctgtgaagaagcaaagacaatcagtagtcttgtgtttgaccatttttaaaaattggaattcaagttgccgtgttaacaaacatatttgctagttaattaaacaggcaaatccttgtaaaatattttggaactcactttagatgcaatacctttaaggaaaaaaaatctgttgaattgtnnnnnnnnnnnnnnnnnnnnnnnnnnnnnnnnnnnnnnnnnnnnnnnnnnnnnnnnnnnnnnnnnnnnnnnnnnnnnnnnnnnnnnnnnnnnnnnnnnnnnnnnnnnnnnnnnnnnnnnnnnnnnnnnnnnnnnnnnnnnnnnnnnnnnnnnnnnnnnnnnnnnnnnnnnnnnnnnnnnnnnnnnnnnnnnnnnnnnnnnnnnnnnnnnnnnnnnnnnnnnnnnnnnnnnnnnnnnnnnnnnnnnnnnnnnaaatctattctgagggggtgtatt

SEQ ID NO: 93229 - DNA, 413 bp, Homo sapiens
aatgaaaagttaactttgacttcaccctttctagctaaccacattttcttaatctcaaattacttttccaatgtcataaagaacacttctgtgtatttttttcctaattttcctacattcagaggaaaacaaactaattttaatattcacaaaggaaaatatctataaactaagtcaactttgtagagaaacaacacacaattttataacgtattccaaagccaagcaccacgacatgtgtcttaaattccaggacaataccaaacttaataccttgtaagaaaaaaaaccttagaaaaagcatcgtgccacttcctagtgaaccaattttacttgatgatatgtaatttattcttacatttaaaaatatggcaacaaaagagactaatttacaaaatctatatgaatatttg

SEQ ID NO: 93230 - DNA, 448 bp, Homo sapiens
gctattgtggcttgaaaacggccatagacaagacataagtaaaagaatgtggctggtgactggtgtttcaaaaaaactctatttacaaaaacgcaactggctggatctggcccataggcctagagttagccaattcctgctttcatgtgtaattttattattgtgagtagctatgaggtcacgcctggatttcaacttgggaaggggagggaatcaatggtgctaacactcttctttggtctggttattaccaatattctccaatgctcttctcgctacttatacttttgtcagctttcccagctgaagaggatcatcataatgaagaaagccaaccaaagaaaaaaagaaaaccaaaacaccaacataaattttttgaagaattattgcaggaacttaaggaaatatttggagagaacggttatcctgatttcaccactaggaaaac

SEQ ID NO: 93231 - DNA, 395 bp, Homo sapiens
caagggagtcctacatctgtaagtgaaaggacaataatcactattatgaaaaaacacaaaagtgtaacattcactgttagaaaagatggacaaaggagaaagagaagagaatcaaaccttatcacttcaaaaaaaccaccaaacatcaatgataaacaataaaggcagaacaaaggaaataaggatataccaagcaaccagaaaacaattaacaaaatgtcagcagtaagtccttacctatcagtaataaccttgagtataaacagattaaatcccccacttaaaagatatggactggctgaatggataaaaagatatggcctaactatatgctgcctacaagaaattgtcttcacttgtaaagacatacacagactgaaagtaaagttatggag

SEQ ID NO: 93232 - DNA, 348 bp, Homo sapiens
ccctctttgttagataatcccaacatctctgtcatcttggtgttggcatctctttattgccttatttacagcttgagatctttctggttcttctgacagatgcgatttttcaactgaatcttgaacattcttggtactatgttattacattctggatcgcattacaaccttctgaattcactggctttctctcacatatgggattggggatgctgcctcattactgactggtgggggctgaaagaccacttttcccactctgcctatgtaacacctgaggccattggggccactcattactgctggatggggtgggagctctggctccccatatggcttgcactgaca

SEQ ID NO: 93233 - DNA, 403 bp, Homo sapiens
aacaatgtttttatttcaggttgccaggatcatttaacattaggaaatttgttggtgtagattaaagaagaaaaacgttttctcaatagatgtggagaagtctgaggctaattcccccaatagaatatgcatccctcatgcatgaataaataagagtgatcacaggctgtcattgattaagactactagacattttaaaggaagcggaagaaagacagtctcaggaataggtcgaactgaagagacaatatacctgcagcaaacagctacaggactgtttaaagccaagcaagtgcagaattcagtttttcttctttcggggacgtggcctgcatggctatctgctcctgccagtgtccagcagccatggccttctgctttctggagaccctgtggtgggaat

SEQ ID NO: 93234 - DNA, 376 bp, Homo sapiens
  misc_feature (1)...(376): n = a,t,c or g
gtccaggtggaagtggctagggggacgcagcacaggtcagcctgggcccaccctgccccagccttcacccccgctctgggcttgtgggtcactggccccttcattcgcntgctgtgcgccaggcctcatcccgagtaccgaagagtcagtaatgagcaaacacaaaactgtctccctggaactttcagtctcaaagtctagcaaggcaataagcaaacgggaaattgaacacgtcggtgacggcgacatgctcgcgagacaatgcaaagctgctgagggaaccgcgcataggggagccgctggcttttcaggcagtcaggacaggctgagtggagctaatgatcccccagtccagcatgncaatcataccacataa

SEQ ID NO: 93235 - DNA, 734 bp, Homo sapiens
cacattctttagcttgactcatcattgtttatttagacagattgtttcctcaatacatgcacatctatgtgcctctctgtcaccagcaccatctcgactcttgtcattgattgcctgttctttgagaacaaagtagagtcaacgactcataagtcctacagttcccttccccggcctactctagaatttttctctaattgttttttaaagtcataatggtaaagtaataattgcatggtttcattgtagccacgtgcaatgtttccaagcatagtttgaaaaccacctgctccagaatctcccagaccttatttagaatgcaggttcctgagccctgttagcaactaactgaatcctgatttctggtcaaggcccaagaatctgcatgtttaaaccactccacagctgattctataacttttgagaacgactggcatgcagaatacagacttggcattgaaatgagaagagatctggggtcgagtcttagtctccccactagtcctgagccaattgctagcttctctactaagcttggtttcttcatagagactaaaggtagtacctaatgcagagaatgtttgtaaaagagttagcactaacacacagtaagcacttcaaaagggaagtattattcttatatcatttaaatggggggacacaccccaggggggtggggggattatcccctttttaaaagaccaaaaaacttgggcctccaccaagggtgtagg

SEQ ID NO: 93236 - DNA, 364 bp, Homo sapiens
tgcatttcttaatcatgccgagaaaatgggtggtaacagatcaacttctgtaaactccacagatttatgcagaatgcgttctacaagagaaatctctttaggaattcactatgactcaatataggaattatgggttattgtcatgattccttgagattctttttacttgattgagttaggagcaaaatgcttactcattgctttattcttggagtagaggcaaatgcaatttcacataaatgtgtgggataaaatgtgtgggatgggagttgaaagatagaagattttacatatgccgattgaaagtggctttgagcatcatttcttcattaattcattccatgtttatttattggatgcttac

SEQ ID NO: 93237 - DNA, 390 bp, Homo sapiens
aaggcttccatgaattctcttgtcacaggaaatattgatcaaatcacatttttgatgccacgaagctgagggcagacctgggacagatggtgtctcccactgagggagcggaggcccctgggaggtcagtttctcctgctgctgaacaccatcttccaatcacaacagcaaggaattgggaatgtgtcattttagctgtaaaggaatgtacatgcaaaatgtcctgattaatgatgattaaaggaaagaccatttctcttttccccaaacccaacctctttgtcacttcagacccctaagggagcctgtgcaacatcggtgaaggttgctattgacacagggtaccgacatattgatggggcctacatctaccaaaatgaacacgaagtt

SEQ ID NO: 93238 - DNA, 377 bp, Homo sapiens
  misc_feature (1)...(377): n = a,t,c or g
gttaggcttaatggagtccagtagtccagaatttagagacacatatgaccgtttgctcccttatctcttaggtctccatttcttggtttggcttaaatcttcagtcactttttctttatgtgaatttgcaaagggatcatttgaagccctagatgcaattattacctgccttgcaatcttggtaggatgtgtcctcttgtccatgtaaaagttggtgggtgaagagatggacaaggcttgagtcactaagacattcactgacctgggaataactcaggataggtctggtcatatccccaatggaggcaatgtaccctaatgaaaaggtcagggtcactggtctcattgtccaaggtgttatctgagctcatggtctn

SEQ ID NO: 93239 - DNA, 744 bp, Homo sapiens; identical to SEQ ID NO: 62234

SEQ ID NO: 93240 - DNA, 1094 bp, Homo sapiens
ggatcccccgggctgcaggaattcggcacgaggggagttcggcgtttgctggggctgcagcagctgaagtgtagtgttttcttgggactggcggtctgcacttctctcccgggttccatctccccccgcccggtggtgaggccctcgaggagggctcggacgggtgtagcgatccgcgctagaggaagacgaggcccgggaacgcatggcccccagggcaggttagggggctggaggggtcaaatcccggggtacttgtggagactctttagcgtggcttcttctctctgctgagaccccgagagctttcccagttctcctcccaggaccaccggggttcctgaagatcgggacttttctgcgcccctccaccaacagcccatctcctgtctatgaagaaagacccttcgtagaaacaacttccccgctgctgacgcgttttcccgtcccgtccccgaagtagcctactattacctcgtttgtgagccgtctgaacgattttgacactttcccgaggcctagggtattatatcctaaccttactaaagaccacagaggtgcttgccattatgggaaatcagcttgctggcattgctccctcccagatcctttctgtagagagttatttttcagatattcatgactttgaatatgataaaagcctggggagtactcggttttttaaagttgctcgagccaagcaccgagaaggcctggtcgttgtgaaggtttttgcaattcaggatcccacattgcctttaaccagctataaacaagagctggaggaactgaaaatcaggcttaattctgcacagaattgtctacctttccagaaagcatcagaaaaagcatctgagaaagcagctatgctctttaggcagtatgtgcgagacaatctctatgatcgcatcagtacccgtccattcttgaataacattgagaagcgctggattgctttccagatcctgacagctgtggaccaagcacacaaatctggagttcgtcatggggacatcaagactgagaatgtgatggtcaccagttggaattgggttcttctaactgattttgccagttttaagcccacttgtatt

SEQ ID NO: 93241 - DNA, 391 bp, Homo sapiens
agggaggagagaggacagacagcgggagggagacacagagacagggaaagagaaggagagaattaggcttgacagagagggactgggctactcggcagctcctccgagaggctgccagatggaacctgagtcagttacacctcacagcacatctcattccctgcttccggagaacccgtcatgtcggggccagaggcagagactggactggacaccagccatggctctctggggaggctgaggacagggtgacccgggctctccccactgcagagttcccagctatgtgagggtctcccagcacacgtgtgtgtggctgtgtgcatgtgcctgtgtgtgtgcatgcacctgttatgtgtgcctgtgtgtgttcgtgtgcatgtgtgcctat

SEQ ID NO: 93242 - DNA, 429 bp, Homo sapiens
tgctgggttacgcgctgaccggcagtgcggttatggaaaaactggccttgaacaaagaacttccgccgttgctggcgtaaataccggtcgttctgtcggaataaccctgtgtttcgctctagaaaggtcgccgcgagactggcggagcgtgcgagggcatgccatcctcactcccgtctgccgcagagtaaagcctgcggcgccttgggcgttgctccataagagagcagcacggacataacaacaaaaaaccgtcaaagaggcttcacttatgcgtaaaccagaactcgcagccgccatcgctgaaaaagcggatctcaccaaagaacaggccaaccgcgtgctcaactgccgtctcgaagaaatcaccggcgccctgcaccgcaaggacagcgtcacactggttggcttcggcacgcttctgcaacg

SEQ ID NO: 93243 - DNA, 433 bp, Homo sapiens
  misc_feature (1)...(433): n = a,t,c or g
ttctcctccacccagccctccagctctgactcatccagaaagtactgctggaaagtgacagcctgctgcagacactgggcccgcgcttcacatgccctctccagctctgcccagtggccttccagctcctggcactgctccacgatgtgttgggcttgggggtgccctgaggctgccaggctccgcccagaactcagcacccgttgcacctgcccctggtgagcttttacctccacctggagctcctgccacagagtggcttgagaggctgctgctcttaacccaggggcgtccggagcagagccatggatgtggctccaggccccaatcatggaaagacccccagggtcaaaatagctggggcagagatttcggaaattgggatacccaggggttgagggcttagaggccagnacacctgaagtagggggca

SEQ ID NO: 93244 - DNA, 636 bp, Homo sapiens
gaattcccgggtcgacgatttcgtgccgcgagcaggggtgaagagacccagcggtgcaccagccgcccagtgggggaggcagctacgtgagcaggacgcccgccctggagcagttaggaccgaaggtctccggagagtcgccggcggtgccaggaagtcaacttcaagcagattgacttgaaacgggatctcatttaggaagcataagtgtccaatcaaaaactgtgtatttttttaaatttggaaaatactcaagttccagttgcttatcattctccttcactttctgaaaacctggcaatcccatgtggacttctggtagaatgagcaatgcaaagaactggcttggacttggcatgtccttgtacttctgggggctgatggaccttacgaccaccgttctctcggacaccccaacaccacaaggtgaattagaagcactcctgtcagacaagccacagtcacatcagcggaccaagaggagctgggtttggaaccagtttttcgttctggaagagtacactgggaccgaccctttgtatgtcggcaaggaaggaaaaaaaacattttcccaagatgtacgtaactgtgctgctgactctgctcggaagcttcttaccttcctccaaatagctg

SEQ ID NO: 93245 - DNA, 876 bp, Homo sapiens
agccaagagtttgatatctacactcagtattgcaacaattaccccaactccgtggccgccctgacggaatgcatgcgggacaagcagcaggccaagttctttcgggaccggcaggagctgctacagcactcgctgcccttgggctcctacctgctgaagccagtccagcgcatcctcaagtaccacctgctgctccaggaaattgccaagcattttgatgaagaagaggatggctttgaggtggtggaggatgccattgacaccatgacctgtgtggcctggtacatcaacgacatgaagaggaggcatgagcacgcggtccggctccaggagattcagtcactcctcatcaactggaaggggcccgacctgaccacctacggggagcttgtcctggagggcacattccgcgtgcatcgcgtgcgcaatgaaaggacctttttcctctttgacaaaacactgcttatcaccaagaagcggggcgatcactttgtctacaagggcaacatcccgtgctcctccctgatgctgatcgaaagcaccagagactccctgtgcttcactgtcacccactacaagcacagcaagcagcagtacagcatccaggccaagacagtggaggagaaacggaactggactcaccacatcaagaggctcatcctagagaaccaccatgccaccattccccagaaggccaaggaagccatcttggaaatggattcctattatcccaatcggtaccgctgcagcccagagcggctgaagaaggcttggtcctcccaggatgaggtgtccaccaatgtgcaacagaagcgccggcaatctgagccaaccatgtattgcggccgctctggtggctcaaagctagcagcgcac

SEQ ID NO: 93246 - DNA, 421 bp, Homo sapiens
aatacatttcccgacaatacaagatctaccttttctgcagatgtaggagcgaccttttctgaggacacaggatgctcttttcctgaatacctgggctcctcctttcttgggaatacagggtccactttgtctgaggacacaggatccacctttctcaaagacccaggatcctccttcctcggtgacactgtatacgtcttgctggagcacaaaggatctacttttcccagggatccaagatcttcctttcttacagtcatgggatccatccttccaggagccacaggatccccctttcccaagatttcaggctctgcctttcctgtaaacatgggatctgccttccgtgaggacccaggatcctcctttcctatggaagtggaatcggcctgctttgaggacttgaaatccatcttctcta

SEQ ID NO: 93247 - DNA, 560 bp, Homo sapiens
agccccggcgagcgtagcggacaggtgtaggtctgagcggggcggcggcgggattagagatgctggctgcgggtggtggccggtggggctgttagggggagcagtgaggtctgagtgctggtggtgctccgagacggggaaagcctcaccggggatggtaggaggactcccaagagagctgcctggcatggccccactggaatgtggggaattccagaggcccgagagcttatgtgccgacaggaacgagctaggatcccagtctcccgagttcccagggcaggaagaggaggacgaggatgaggatgatgaggaggaagacgaggacgaatgagagtcatctccacaagactgtgcatttgcaggatgtgtgtgacaaggagatcgccactgcatgttctcgacctgtctgcctttcatcttcctccatgctctttcggcaactctggcagacccacagaggcatctcgcctaggagattcttgacgagctttggcatgaagtcagggggcagcttctcaccctgcaacaccagtccattttgagaagggccttcttcc

SEQ ID NO: 93248 - DNA, 1014 bp, Homo sapiens
ccgactcggcttgaggtaccgggtccacgatttcgtggatgcagagagctcagtttttttttctaccatttaaactttaaatctctgtggttcggctcataaagcaggctttcaagagggtgtcaaccgccgagagaacccagaggcagggagtccgagatggggggaggtcgtgtcgcggcgtctgaaaggggccactggcactcaaaaagagtgaatgaaatgtgcagctcagagtgtcatttctgaagggaggagtctttctcttggagaagagtcctcaatgagcctggccgaggcccgggatctgtgtgaagtggactaaggattaagtaggatgtcaactgagacagaacttcaagtagctgtgaaaaccagcgccaagaaagactccagaaagaaaggtcaggatcgcagtgaagccactttgataaagaggtttaaaggtgaaggggtccggtacaaagccaaattgatcgggattgatgaagtttccgcagctcggggagacaagttatgtcaagattccatgatgaaactcaagggcgttgttgctggcgctcgttccaaaggagaacacaaacagaaaatctttttaaccatctcctttggaggaatcaaaatctttgatgagaagacaggggcccttcagcatcatcatgctgttcatgaaatatcctacattgcaaaggacattacagatcaccgggcctttggatatgtttgtgggaaggaagggaatcacagatttgtggccataaaaacagcccaggcggctgaacctgttattctggacttgagagatctctttcaactcatttatgaattgaagcaaagagaagaattagaaaaaaaggcacaaaaggataagcagtgtgaacaagctgtgtaccaggtatacctgtgaatttatccttgcgctggagatcgggccttcaaataaacacatgtaaaaactgacagtcaggccttctcttcctgctgccaagtagaaataaacgaagatgatgtatt

SEQ ID NO: 93249 - DNA, 645 bp, Homo sapiens
agatctgtggctgcgggagatctctgcggattggggctccagcctgactgacccgacagtgcgggtggcctagggggaggcgctcagatcgtatttttatccaaaagaaggacctggaggaggatgagagcgttactgctgcacacctaaagtcaagggggagaagcccgaggaagattgaccagttttgtaattctagcaacatggtccatggatcagtgacattcagggatgtggccattgacttctctcaggaggagtgggagtgcctgcagcctgatcagaggaccttgtacagggatgtgatgttggagaactacagccacctgatctcactgggtaaggtcgttgagtcccagctatttttatatctattttctggaatatcagctttcttcaccgtgaatttcagggctatcttttaagaggtggctgaattccttcttcttgttcccaaaggaatggattgggatttgttgggttgaaaacaggcacctccctggagcccctgcatcttgcctactccacaatggcctccttcgttacgctggtcctctctgtaattgcctctctcttcatgaccatggggctgaatttgaaatcttgtacattcattaaaagatattgtctaagaaccagtgtatt

SEQ ID NO: 93250 - DNA, 605 bp, Homo sapiens
ggcgggaggctgcttttttgcggggtgtgcgcccatgctgcggccgggggctgttcctgtaaggcggggagacaatgagtaaactctccttccgagcgcgggcgctggacgccgccaagccgctgcctatctaccgcggcaaggacatgcctgatctcaacgactgcgtctccatcaaccgggccgtgccccagatgcccaccgggatggagaaggaggaggaatcggaacatcatttacagcgagcaatttcagcacagcaagtgtttagagaaaaaaaagagagtatggtcattcctgttcctgaggcagagagcaacgtcaactattacaatcgcttgtacaaaggagagtttaaacagccaaaacagttcattcatattcagctgaaattgcatcttaaattgctgttgttcaggattgaagtcttgttcttctaaagagaattttcatttgtttctgccaggcatttggggacactaccaaccggagaccacgttaaagtttttgcttgtttgttttggtcatttgtttttggaccacagtattagctttaatttacgctgcagatctgctcaaggttcagttctcaggaagattttttg

SEQ ID NO: 93251 - DNA, 3804 bp, Homo sapiens
ggtctttgaaggaattaaataagaaaacggaccagaatattgctccaagaacagaaaaatgctgcaggaaggaattcctaatggtgggaatcaccagttcaatccaccggccagctttgcggatgagaacacagacagacccagccactctgttgagttttgtgtctgctgatggctgggtggagcagttaccttggctaagaaaagtcgggtttcgggagttttccaccatgactattgccctgctgggttttgccatattcttgctccattgtgcgacctgtgagaagcctctagaagggattctctcctcctctgcttggcacttcacacactcccattacaatgccaccatctatgaaaattcttctcccaagacctatgtggagagcttcgagaaaatgggcatctacctcgcggagccacagtgggcagtgaggtaccggatcatctctggggatgtggccaatgtatttaaaactgaggagtatgtggtgggcaacttctgcttcctaagaataaggacaaagagcagcaacacagctcttctgaacagagaggtgcgagacagctacaccctcatcatccaagccacagagaagaccttggagttggaagctttgacccgtgtggtggtccacatcctggaccagaatgacctgaagcctctcttctctccaccttcgtacagagtcaccatctctgaggacatgcccctgaagagccccatctgcaaggtgactgccacagatgctgatctaggccagaatgctgagttctattatgcctttaacacaaggtcagagatgtttgccatccatcccaccagcggtgtggtcactgtggctgggaagcttaacgtcacctggcgaggaaagcatgagctccaggtgctagctgtggaccgcatgcggaaaatctctgagggcaatgggtttggcagcctggctgcacttgtggttcatgtggagcctgccctcaggaagcccccagccattgcttcggtggtggtgactccaccagacagcaatgatggtaccacctatgccactgtactggtcgatgcaaatagctcaggagctgaagtggagtcagtggaagttgttggtggtgaccctggaaagcacttcaaagccatcaagtcttatgcccggagcaatgagttcagtttggtgtctgtcaaagacatcaactggatggagtaccttcatgggttcaacctcagcctccaggccaggagtgggagcggcccttatttttattcccagatcaggggctttcacctaccaccttccaaactgtcttccctcaaattcgagaaggctgtttacagagtgcagcttagtgagttttcccctcctggcagccgcgtggtgatggtgagagtcaccccagccttccccaacctgcagtatgttctaaagccatcttcagagaatgtaggatttaaacttaatgctcgaactgggttgatcaccaccacaaagctcatggacttccacgacagagcccactatcagctacacatcagaacctcaccgggccaggcctccaccgtggtggtcattgacattgtggactgcaacaaccatgcccccctcttcaacaggtcttcctatgatggtaccttggatgagaacatccctccaggcaccagtgttttggctgtgactgccactgaccgggatcatggggaaaatggatatgtcacctattccattgctggaccaaaagctttgccattttctattgacccttacctggggatcatctccacctccaaacccatggactatgaactcatgaaaagaatttataccttccgggtaagagcatcagactggggatccccttttcgccgggagaaggaagtgtccatttttcttcagctcaggaacttgaatgacaaccagcctatgtttgaagaagtcaactgtacagggtctatctgccaagactggccagtagggaaatcgataatgactatgtcagccatagatgtggatgagtttcagaacctaaaatacgagattgtatcaggcaatgaactagagtattttgatctaaatcatttccccggagtgatatccctcaaacgcccttttatcaatcttactgctggtcaacccaccagttattccctgaagattacagcctcagatggcaaaaactatgcctcacccacaactttgaatattactgtggtgaaggaccctcattttgaagttcctgtaacatgtgataaaacaggggtattgacacaattcacaaagactatcctccactttattgggcttcagaaccaggagtccagtgatgaggaattcacttctttaagcacatatcagattaatcattacaccccacagtttgaggaccacttcccccaatccattgatgtccttgagagtgtccctatcaacacccccttggcccgcctagcagccactgaccctgatgctggttttaatggcaaactggtctatgtgattgcagatggcaatgaggagggctgctttgacatagagctggagacagggctgctcactgtagctgctcccttggactatgaagccaccaatttctacatcctcaatgtaacagtatatgacctgggcacaccccagaagtcctcctggaagctgctgacagtgaatgtgaaagactggaatgacaacgcacccagatttcctcccggtgggtaccagttaaccatctcggaggacacagaagttggaaccacaattgcagagctgacaaccaaagatgctgactcggaagacaatggcagggttcgctacaccctgctaagtcccacagagaagttctccctccaccctctcactggggaactggttgttacaggacacctggaccgcgaatcagagcctcggtacatactcaaggtggaggccagggatcagcccagcaaaggccaccagctcttctctgtcactgacctgataatcacattggaggatgtcaacgacaactctccccagtgcatcacagaacacaacaggctgaaggttccagaggacctgccccccgggactgtcttgacatttctggatgcctctgatcctgacctgggccccgcaggtgaagtgcgatatgttctgatggatggcgcccatgggaccttccgggtggacctgatgacaggggcgctcattctggagagagagctggactttgagaggcgagctgggtacaatctgagcctgtgggccagtgatggtgggaggcccctagcccgcaggactctctgccatgtggaggtgatcgtcctggatgtgaatgagaatctccaccctccccactttgcctccttcgtgcaccagggccaggtgcaggagaacagcccctcgggaactcaggtgattgtagtggctgcccaggacgatgacagtggcttggatggggagctccagtacttcctgcgtgctggcactggactcgcagccttcagcatcaaccaagatacaggaatgattcagactctggcacccctggaccgagaatttgcatcttactactggttgacggtattagcagtggacaggggttctgtgcccctctcttctgtaactgaagtctacatcgaggttacggatgccaatgacaacccaccccagatgtcccaagctgtgttctacccctccatccaggaggatgctcccgtgggcacctctgtgcttcaactggatgcctgggacccagactccagctccaaagggaagctgaccttcaacatcaccagtgggaactacatgggattctttatgattcaccctgttacag

SEQ ID NO: 93252 - DNA, 1636 bp, Homo sapiens
tttcgtgccggtacgtgagggggaggcctggcccgcggacccggctcccagctcgggcagttcttacagcccagctctgtgctctgctctctgctggctccaggaggggtcctcactcgctgaccacactgacctcaggaccaagggaacaaaacacagcaggggcaatccatctggtccacggagaagtgctaaaccccaaagggtaaatgagattcccacaggaggagcagggaggagacaacaggcagggtggagggaacagcatgaggaacagcatttgagcccagcgtgtgtggcctccatgtgctgaatgcgtactggataccaagcttgctctacggaggccctgtgaaggtggctgtggatcacagatatcctcagctctctccagagctcaacacagtaccagatgctccagaaatgtttgctgaactgaatttgattggaaaggaaaacagagccccaggcctgcgcggtggctcacgtctataatcccagcactgtgggaggccgaggcagacggatcacttgaggtcaggagttcaagaccagcctggccaacatggtcccagctgcagggcagccatgagcctggtggcctgtgagtgcctgcccagccccggcctggagcctgagccttgctcacgagcacggtcccaagctcacgtgtacctggagcagattcgcaacagggtggctctgggagtgcctgacatgacaaaacgtgactatctggtggatgcggccacgcagatccggctggccctggagcgcgatgttagtgaggactatgaggcggccttcaaccactatcagaatggcgtggacgtgctgctccgtggcatacacgttgaccccaacaaggagcgacgtgaggctgtgaagctgaaaattgccaaatacctgcggcgggcagaggagatcttcaactgccacctgcagcggccgctgagcagtggagccagccccagcgcgggtttcagcagcctgaggctccggcccattcgcacgctgagctctgccgtggagcagctgaggggctgcagggtggtcggggtcatcgagaaggtgcagctggtccaggacccggcaaccggagggacctttgtggtgaagagcctacccaggtgccacatggtgagcagggagcggctgaccatcatcccacacggagtcccctacatgacgaagctgctcaggtactttgtgagcgaggactccatcttcctgcacctggagcatgtgcaaggtgagcaggcctggggccccctgtcagctccccaggcctttggggtatgtcgtcaacccttaaaatgcggagccctggcagggcgtggtggctcacgcctgtaatcccagcactttgggaggccgaggcaggcggatcaactgaagtcaggagttcaagaacaggccggccaacatggcgaaaccccatctctactaaaaatacaaaaattagccaagtgcagtggcatgtgcttgtaatcccagctactctggaggctgaggcaggagaattgcttgaacccaggaggcagagattgcggtgagccaagatggcaccactgcactccagccgtgggcaacaagagcaaaactccgtctcaaaaaaaaaaaagtcgacgcggcc

SEQ ID NO: 93253 - DNA, 395 bp, Homo sapiens
caaacgaaagaacagtgccattgattatttagggggcatttttacttctgtgaagtcccttggaagttctcacttaacttggttaagaaggaaccaaaacaagaactgaaaatacttagtagaattatttaggctccaaacagtttgagctcccaagtacttcaggtaagaatattgggaactcataaatggtttatgaaaaaggaaaaggcagtgcttttcttctttcttcatttcttgaacttattgttcatattataagtgttttagaaaattcattgctataatcttgatttttatcaaggaaaattagtcagattattcaacatggaaagtaaaacagtttacacactccaaaattagtttttcctggaataactatgagggcatgtatt

SEQ ID NO: 93254 - DNA, 406 bp, Homo sapiens
gttcgcaccccagggtctcaccggcaagggaaggattttctggagagggatccctcaggagggtgtgttccggatttcttgcctcaggcccaagactccaaccattttataatggaatctttattttgtgaaagtagcggggactcatctctggagaaggagttcctcggggccccagtggggccctcggtgagcacccccaacagccagcactcttctcctagccgctcactcagtgccaactccatcaaggtggagatgtacagcgatgaggagtcaagcagactgctggggccagatgagcggctcctggaaaaggacgacagcgtgattgtggaagattcattgtctgagcccctgggctactgtgatgggagtgggccagagcctcactcccctgggggca

SEQ ID NO: 93255 - DNA, 403 bp, Homo sapiens
cattgtcctggcagagcggcgagccggtgagtgtggctgcggggtcgcgcccaccctctacctgtgccgggggccggaacctggccccggggagggcgcggcctcggggagacggcgtgcaggcccagcactgttggtcaccgcaggcctgtcttcctattcaccgtgggcagcagagggatggctgctcagctgctgactgatgaggcactggaatcagtgacgttcagggatgtgactgtggacttcacccaggaggagtggcagcagctggagcctgcccagaaggacctgtacagggatgtcatgctggagaactacaggaacctggtctcactggcttttctggaggtattattgacctgtaattaaccacgcatatataaagtgaagagtttgatgc

SEQ ID NO: 93256 - DNA, 1645 bp, Homo sapiens
atggccaggagaggtaagaagcccgtggtgagaacgctggaggatctgacgctggactcgggttatggtggcgcggcggactcggtgcgctcctccaacttgtctttgtgctgttccgactcgcacccggcgtccccgtatggcgggagctgctggccgcctctagctgactccatgcacagccggcacaacagctttgacactgtcaacactgccctggtggaagactccgaggggctggactgcgccggccagcactgctcgcggctgctgccggacctagacgaggtcccctggactctccaggagctggaggcgctgctgctgcgttcgcgggatccccgggcaggcccggcggtccccggcggcctgcccaaggacgcgctggccaagctgtcgacgctggtgagccgggcgctggtgcgcatagccaaagaggcgcagcgcctgagcctgcgcttcgccaagtgcaccaagtacgagatccagagcgccatggagatcgtgctgtcctggggcctggccgcgcactgtacggcggctgcgctggccgcactgtccctctacaacatgagcagcgccggcggcgaccgcctgggccgcggcaagtcggcccgctgcggcctcaccttctccgtgggccgcgtgtatcgctggatggtggacagccgcgtggcgctgcgcatccacgagcacgccgccatctacctgacagcctgcatggagagcctcttccgggacatctactcgcgggtcgtggcctccggggtgccccggagctgcagtggccctgggtcaggctcgggctccggcccaggcccgagctcgggccctggtgcggcccccgcggcggataaagagcgggaggcgcccgggggaggagcggcgagcggcggcgcctgcagcgcagccagcagcgccagcgggggcagcagctgttgcgccccgccggccgccgcggccgccgcagtcccgccggcagccgccgccaaccaccaccatcaccaccaccatgcgctccacgaggcgcccaagttcaccgtggagaccctggagcacacggtcaacaacgactcggagatctggggtctcctgcagccctaccagcacctgatctgcgggaagaacgccagcggggtgctgtgcctaccagacagcctgaatcttcacagagacccacagcggtcaaacaagccaggggaactgcccatgttcagccagtcggagctgaggaccatcgagcagtctttgctggccacgcgcgtaggcagcatcgccgaattgagtgacctggtgtcccgtgcaatgcatcacctgcagcccctcaatgccaagcaccacggcaatggcacccccctgcaccacaagcagggggcactgtactgggagcccgaggccctgtacaccctttgctatttcatgcactgcccacaaatggaatgggaaaaccccaacgtggagccttccaaagtcaacctccaggtggaaagaaatagtgatattgacagctgccagcacgcagctggttttcacatgttatgggaagtagccccggcagtaaatttggtcatttgcccagtagacatggtatctgagttgaatgtgtattcttcaaagtctgacttcacaaacaaaccctctacag

SEQ ID NO: 93257 - DNA, 405 bp, Homo sapiens
tcgcccacgcgtccgcccacgcgttcgtgtacgcgtgggaaaaaaaaagaaaaaagccgcagaggacacttcaactttctattgccattctgctgcttttcccctttggagagtttgataagggcatttctggagaccagggatcaatgctttgtttgtgtacaggaacctcttccagcatagagcatggggagcatctgcaagcagttgtgttgcggcccattaaaagcccatccttcttgcttgggttccttttgttcaaggaacaaaaggttgccatttttgcctgttgagatgaagtctcccctcctcttctataggttgaggctcctctgtacctgtttctctgcaaaaggatatttatccctcatgtttggtaggtaacagatctctgaatttggggcg

SEQ ID NO: 93258 - DNA, 432 bp, Homo sapiens
aattggaaggagaacacagttaataacctgcaaggaggatttagaaatataaaactagatctaagaactagaagtttaataattggggtcaatttaggtaagagaaaggcaactcaatacactacaatagtctttgggatatttctgtattcaaacactaatatgttaataaacttgagtcaccaagaaaaatgttaaattgtattccacatatgatacttaggatggtgtaatttatatggaaatgattaaataaaagcattgtattgtttaacagaattaaatagggatctgaaaaacctgcatatgaatttgtgggtttgtgtttatacacacactcacacttatacatgtatagaactctataagcactcacactcatgttttactctgtgcttttgtagacttctgtcatggtgtgactttttatcc

SEQ ID NO: 93259 - DNA, 841 bp, Homo sapiens
cggacgcgtgggctacaaggctgatttctcccatccctgcaatgctgaaagtctgtgcccttctaagcaaattctagtttccctgacaattaccctaatggaatgcctggatgtatgaatattgattccgatgacagtacttttacagatggacctgagatatttctgctggttcttcactgacaacacacaacatatggatgatcataactttcccatataccccactagggcaaaaccagaaactgagaaagctagatggaagaataatgatgtggaaggggagttctccactaggaaggatccgatgagtagatagacacaaggacaaagagggcctaactttgggctgtggaagcggagttgcactcataggagccatagtgagtcattgcatcagaaccactaagcatcagtcatgaagagcaaacgggcttgctgttacaggagctaaaccctgaacccttccatcgtggttacagagagcttctgggggacagcatgagacagcttatcacttccccaatattatgaggaaacccaaaggcccagatgccacttgggaaaggagaaccaagaaggaaggacttcagaaaaggaagaaaccatgaaacattaagtaatttacaaactagactcttctttattctcttattttatttatttctttatttttgagacagagtctcactttctgcccttgatgaaatggactggcccaatcatggctcactgcagcctcaaaatcctggcctcaagaaattctgcagactcagccttcctaagtgctggggatacaagcttgagccacagcacctgacctagactgttttaaactaga

SEQ ID NO: 93260 - DNA, 680 bp, Homo sapiens
atcttcacaaaatgaacaagtggcttagagatttgctcaaagaaatagtagattaaagataactgtaacactgcaaacaataacaaaaaggtagaactgacatttctcctcctggtgggagctctttgtcacatttcaaggtaattacatctgtcaaggagtcagcctaaaaaatgaaattgtcaagaagactatttgaaatatggatatatatacacattatcatcgataatgaatttcaccttaagaatgtattgtactttgagtcatatagtagctaatgatataatgacttcatctgggttatgtttatatcttatatatttttctgtatctcagtctttcttggtttctgtattttatatatggtttatagtatatatgcattaataaatattcatagattgagggccatatactcaaatttttactgatgtacatgtgctctgaaaaagttttaggccacaggttgctgccaaagtgctttaaatgagggaaaatgttttagaaagttgagagtggcagatggagtataggagctccagatacgaggtaagggaaagcagttaggaggctatgtgacaccataagtatagtgagactggataggatagtatgaagcggagaaatagtgagatagaaacaacaggcctaaatgtttgaggtcttaagagaaagaa

SEQ ID NO: 93261 - DNA, 641 bp, Homo sapiens
cccacgcgtccgcggacgcgtgttttttttctagggcacctctacaatccgggtttgagggaggaggaggaaaggactgagggatcccctcatcgccagctgggagcgggctgggaggccgcagggagggcctgaaaaaggagacgggattgccacgaggttgggggcgcggggtggtagcggcttggagcgggtgagaaaagctcaggtggggcccgccgggccgaaggaggtaacccggcgcccggccctagccagccccggggctcggggctggggagatcatggcccgccttttcagcccccggccgccccccagcgaagacctcttctacgagacctactacagcctgagccagcagtacccgctgctgctgctgctgctggggatcgtgctctgtgcgctcgcggcgctgctcgcagtggcctgggccagcggcagggagctgacctcagacccgagcttcctgaccactgtgctgtgcgcgctgggcggcttctcgctgctgctgggcctcgcttcccgggagcagcgactgcagcgctggacgcgtcccctgtccggcttggtatgggtcgcgctgctagcgctaggccacgccttcctgttcaccgggggcgtggtgagcgcctgggaccag

SEQ ID NO: 93262 - DNA, 692 bp, Homo sapiens
  misc_feature (1)...(692): n = a,t,c or g
cccgggtcgacccacgcgtccgttgattagaaatagtgagagcagacatccttgcctcattccagattttaaaagcaaatatctctctttcaccataagtataatgttacctgtgggactttcataagtgccctttataagaatcaacaagttcccttctattcctacatgggtgagtgtttttatcatggaaatatgttggattttgtaatgtgactaacagatctgcattcatttcctatggctgcaaaaccctcaacaaattaacacaaacttggtggctgaaaacaatacatatttactcttttacagaggccagacatgtaaaatcagtttcactgggccgagatcaaggttgcaacagggctgggctccctccagaggccctaggagacaatttgtaccttgcctcttctagcttgtggtagctactggcataccttgtcttgtagccacatcactctaatctgcctccatggtcacactgccttcttattttctgtggacaaatctctgtctccctcttataaggatacatgtgattgcacttagtgaccacccagtaatccagggaaaatcttctcaaggatccttaatttaatcacatctttcaaactcctttttgggcacacaagggtagtatttttcagggttccagaggttagggaacnggggaaatcttttaagggagg

SEQ ID NO: 93263 - DNA, 1640 bp, Homo sapiens
gtagtgcatcaataattattcggggtgataagcgagcatcaggagaagttgggatagctccgtcatctaggcacatcctcattggggaaccctcagcaaaatataatggtaccgctattatcagccttgttcgaggcccagggattttgggggaggtcacagtgttctggaggatattccctccttccgtgggggaatttgctgaaacatcaggaaaactgacaatgcgagacgaacagtctgcagtcattgtagtaatacaggctttgaacgatgacattcccgaggaaaaaagcttctatgagtttcagctcactgcagtcagtgagggaggagttctgagtgaatccagcagcactgccaacatcacggtggtggccagcgactctccctatggccgatttgccttttcacatgagcaacttcgagtgtcagaagcacagagggttaacatcacaatcatccgttccagtggagattttggccatgtgcgactctggtacaagacgatgagcgggacagcggaagcaggcttggattttgttcctgcagcaggggagctcctctttgaagcaggggagatgaggaaaagtctgcatgttgaaatccttgatgatgactatcctgaaggcccagaggaattttctctaacaattacaaaggtggaactccagggaagagggtatgattttaccattcaagaaaatggacttcagatagatcaacctcctgaaataggaaacatctccattgttcgcatcataataatgaaaaatgataacgcagaaggcatcattgaatttgacccaaagtatactgccttcgaagtggaggaagatgttgggctgatcatgatcccagtggtgaggctacatggaacttatggctatgtgacagctgatttcatctctcagagctcctctgccagtcccggaggtgttgattacattttgcatggcagtacagtcacctttcagcatgggcaaaacttaagttttataaatatctccatcattgatgacaatgaaagtgaatttgaggagcccattgaaattctactcactggagctactggaggagcggtccttgggcgccacctagtgagcagaatcataatagctaagagtgactctccctttggagttataaggtttctcaatcaaagcaaaatttctattgctaatcccaattccacaatgattttatcactggtgctggagcggactggaggactcttgggagagattcaggtgaactgggagacagtaggacccaactctcaagaagccttactgccacagaatagagacattgcagacccagtgagcgggttgttctattttggagaaggagaaggaggagtgagaaccataattctgacaatctatcctcatgaagaaattgaagttgaagagacattcattattaaacttcatcttgtgaaaggagaagctaaattagactccagagctaaagatgttacattaaccatacaagagtttggtgacccaaatggagttgttcagtttgctcctgaaactttgtctaagaagacttattcagagcctctggctctggaagggcccctgctcattaccttctttgtcagaagagtcaagggcacctttggagagattatg

SEQ ID NO: 93264 - DNA, 438 bp, Homo sapiens
  misc_feature (1)...(438): n = a,t,c or g
acccgtccggaattcccgggccgaannnnncgcccgcccacgcacgcgggcgtgcgacaggccacgctgtgtacaccgctgcctagatcaaagtcgcggaccgcccgtcgacgaaggtcggactgccaacgctactgccaagacacacgttcagccatgaagatgcaattctgtatcccggtgtcccagcagcggtccgacgcgctggggggccgctacgtgctgtactccgtgcacctggacgggttcctcttctgcagggtgcgctacagccagctgcacggttggaacgaacagctaaggcgggtctttggaaattgcctgccacccttcccaccaaagtactatctggcaatgaccacagctatggctcatgagaggagggaccaactggaacaatatttgcaaaatgtaaccatggacccaaacgtgttgaga

SEQ ID NO: 93265 - DNA, 458 bp, Homo sapiens
  misc_feature (1)...(458): n = a,t,c or g
tatatatcgcagtggctgcgcccgggatagctggctgcgccgccgcgcacatgcctaggttcgacgccctcctccctttgcccaggagttccttctgtcccggctctgttccgtctcgccccgaggttcacgccatcctcggagccccagcctttcacccagcgcctccaagctttggaccttgacttctgcaaaactagatggtcacagccatgaatgtctcacatgaagtaaatcagctgttccagccctataacttcgagctgtccaaggacatgaggccctttttcgaggagtattgggcaacctcattccccatagccctgatctacctggttctcatcgctgtggggcagaactacatgaaggaacgcaagggcttcaacctgcaagggcctctcatcctctggtccttctgccttgcaatcttcagtatcctggnggcagtgaggatgtgg

SEQ ID NO: 93266 - DNA, 409 bp, Homo sapiens
ggccgagcatttttggatttattttgttttatcttttcaagctctcaagcagtatgttggactcttagatcttaaaatgtgaaatacctttaaaccatctccactgatttcggtttctctgcattctgtggctggcattttgagtaatcagtcatttattccctcatctaggcatcagagataaagtatctgactgggatgagtttctgcggcagaccctgataggagcatgtagtcctcctgttccgctgctagagggcgtgagtattactacatgccacatcagcgtggaaaacccatctgatctttcaaagaatcttaaaatcggttgcttatttaccactctgaagaaaataaacgttgttattagagacataggcataggtattgggaagcttaaacttaccct

SEQ ID NO: 93267 - DNA, 517 bp, Homo sapiens
  misc_feature (1)...(517): n = a,t,c or g
cccacgcgtccggctcggcctctccccggcacgttctcagctgctcctgtttcaaacccagcgagggagccgcgagcgaggctcaccgtccccggcgtgcaggatccggggctgctgagcgctcgctcccgcgtgtccggcgcttggagtccccgcggcaggagaggagtcgggacactagagctccaggggcgcctgtgggctccagggcctccggcttccccagtccccttcagctaaagccccagagacgtgctcagccccaggacctctgcggaacaagatccggattgagaagccactgcaactaccgaaatgggcagcaaaaccttgccggcgccggtgcctatccacccttccctgcagctcaccaactactccttccttcaggcagtgaacggcctgcccacagtgccttcggaccatctgcccaacctgtatggtttcagcgcgttgcacgctgtgcacctgcatcagtggacgctgggctacccggccatgcacttgcngcgctctt

SEQ ID NO: 93268 - DNA, 412 bp, Homo sapiens
cgccggctgcggcgcctgggacgagagcggtttttatggtcgctagcaaaacgcccaacatgagtagaaaattcgccacgaaggaccaggagtctggctgtggctcccatcctttccagcatatgaagaagagtgctgttttacaggaggctcgtatattcaatgaaactccaatcaatccaagaagatgtttgcatattcttacaaagattctttacttactgaaccagggtgaacactttggaacaacggaagctacagaagccttctttgcaatgacgcgattgtttcaatctaatgatcaaacattgaagagaatgtgctaccttaccatcaaagaaatggctaccatctctgaggatgtgataattgtcacaagcagtctgactaaagacatgactggaaaagaaga

SEQ ID NO: 93269 - DNA, 407 bp, Homo sapiens
ctgttgtaaactttgcctgtaggaggactgatctcttaatgaaatacagaaaaaccatctcagaaaaaggaaaatgggcaatcgtcatagccagtcgtacaccctctcagaaggcagtcaacagttgcctaaaggggactcccaaccctcgacagtcgtgcagcctctcagccacccatcacggaatggagagccagaggccccacagcctgctaaagcgagcagtcctcagggttttgatgtggatcgagatgccaaaaagctgaacaaagcctgcaaaggaatggggaccaatgaagcagccatcattgaaatcttatcgggcaggacatcagatgagaggcaacaaatcaagcaaaagtacaaggcaacgtacggcaaggagctggaggaagtactcaagagtg

SEQ ID NO: 93270 - DNA, 569 bp, Homo sapiens
tttcgtgtctccctcccgcgcgatggcctcggcgctgatctatgtctccaagttcaagtccttcgtgatcttggtcgtcaccccgctcctgctgctgccactcgtcattctgatgcccgccaagtttgtcaggtgtgcctacgtcatcatcctcatggccatttactggtgcacagaagtcatccctctggctgtcacctctctcatgcctgtcttgcttttcccactcttccagattctggactccaggcaggtgtgtgtccagtacatgaaggacaccaacatgctgttcctgggcggcctcatcgtggccgtggctgtggagcgctggaacctgcacaagaggatcgccctgcgcacgctcctctgggtgggggccaagcctgcacggctgatgctgggctttatgggcgtcacagccctcctgtccatgtggatcagtaacacggcaaccacggccatgatggtgcccatcgtggaggccatattgcagcagatggaagccacaagcgcagccaccgaggccggcctggagctggtggacaagggcaaggccaaggagctgccag

SEQ ID NO: 93271 - DNA, 728 bp, Homo sapiens
cccttgtgcctgcagggtcgacaggcagggtcagtgtatgaggctttttgggtgggttttgggacaaactaggggatgcatggccctctctaggggtcatccaataccccagctctgaccagttgttcccctgctagcccagttggcctctgattttaggagaagccagaagtccagatttttctgtgagctctccttagttgtccacattggaagcaaacttttaaatgctgtgtatgcgtggcccaagcaaaacacatctggaggccagattgaatccacaggctgaaagcagtcaaccaggcctgatgtcatgaccctgtatcctctccactggcaggaagagatgtcaggagaaagtgtggtgagctcagcggtgccagcggctgctacccgcaccacttccttcaagggcacgagccccagctccaaatacgtgaagctgaatgtgggtggagccctctactataccaccatgcagacgctgaccaagcaggacaccatgctgaaggccatgttcagcgggcgcatggaagtgctcaccgacagtgaaggctggatcctcattgaccgctgtgggaagcactttggtacgatactcaactaccttcgagacggggcggtgcctttacccgagagccgccgggagatcgaggagctgctagcagaagccaagtactacctagtccaaggcctggtggaagagtgccaggcggccctacaagtac

SEQ ID NO: 93272 - DNA, 1174 bp, Homo sapiens
agtggccgtgtgagcgtgaggagctgccgccaccgcctgctcctcgtcgtcctcgtcctccggggccccggcgacgtgggccgcgcacggccctggaaaagacgtcgcctccccttcatccgtctctctctcaccgcgccgctcccgcctcctcgtcctgcgctgcgggctcaggcggaacccggaacggccgtcctcttcccccgccctccgccgcctcctccttctcctcctcctcctcctcctcctccttctcggcttcctcctcagccccgggccggagcggggtgtcggcggcggccggttcgggcggcgactcgcgcttctttgggcggcggcgcttggccatgtcgtgtcggggaaggtaatgagccgcagagccccggggtctcggctgagcagcggcggcggcggcggcggcaccaactattcgcggagctggaatgactggcaacccagaactgatagtgcatcagctgacccaggtaatttaaaatattcttcatccagagatagaggtggttcttcctcttacggactgcaaccttcaaattcagctgtggtgtctcggcaaaggcacgatgataccagagtccacgctgacatacagaatgacgaaaagggtggctacagtgtcaacggaggatctggggaaaatacttatggtcggaagtcgttggggcaagagctgagggttaacaatgtgaccagccctgagttcaccagtgttcagcatggcagtcgtgctttagccaccaaagacatgaggaaatcacaggagagatcgatgtcttattgtgatgagtctcgactgtcatatcttcttcggaggatcacccgggaaaacgaccgagaccgaagattggctactgtaaagcagttgaaagaatttattcagcaaccagaaaataagctggtactagttaaacaattggatatcttggctgctgtacatgatgtgcttaatgaaaggtaagtaactaataatggttcggtttaaatgactttaaaatatatttttagaaattacttaacaatacacaagaagacaaacccactggctttgtttatgaacatttattgacatttcagtgggtcttgtcatttttatctgcattaattatgtgttaattacggttgaatacaaatggaatccacttgaaaagaatattta

SEQ ID NO: 93273 - DNA, 1811 bp, Homo sapiens
tggcggatgtctgtttcctgggatattgtgagggcgggcggagatgtagacccggtagtgttgtgccttgtggtgacaactggcggcagcgcgccgcgggcccgagacttagtctcgggccgccatggccagcgtccacgagagcctctacttcaatcccatgatgaccaatggggttgtgcacgccaatgtgttcggcatcaaggactgggtgacgccgtacaagatcgcggtgctggtgctgctgaacgagatgagccgcacaggcgagggcgccgtcagcctcatggagcggcggaggctcaaccagctgctcctgcccctgctgcagggcccagatattacactgtcaaaactttacaagttaattgaagagtcttgtccacagctggcaaattcagtgcagatcagaatcaaactgatggctgaaggcgagttgaaggatatggaacagttttttgatgacctttcagattctttctctggaactgaaccagaggttcacaaaacaagtgtagtaggtttgtttctgcgtcacatgatcttggcctacagtaagctttctttcagccaagtgtttaaactgtacactgcccttcagcagtacttccagaatggtgagaaaaagacagtggaggatgctgatatggaactgaccagtagagatgagggtgaaagaaaaatggaaaaagaagaacttgatgtatctgtaagagaagaggaggtatcttgcagtgggcctctgtcccaaaaacaagcagaattttttctttctcaacaggcttctttgctaaagaatgatgagactaaggccctcactccagcttccttgcagaaggaattaaacaatttgttgaaatttaatcctgattttgctgaagcgcattatctcagctacttaaacaacctccgtgtccaagatgttttcagttcaacacacagtctcctccattattttgatcgtctgattcttaccggagccgaaagcaaaagtaatggggaagagggctatggccggagcttgagatacgccgctctgaatcttgccgccctgcactgccgcttcggtcactatcaacaggcagagctcgccctgcaggaggcaattaggattgcccaggagtccaacgatcacgtgtgtctccagcactgtttgagctggctttatgtgctggggcagaagagatccgatagctatgttctgctggagcattctgtgaagaaggcagtacattttgggttaccgtacctcgcctccctgggaatacagtcccttgttcaacagagagcttttgctgggaagacggcaaacaagctgatggatgccctaaaggactccgacctcctgcactggaaacacagcctgtcagagctcatcgatatcagcatcgcacagaaaacggccatctggaggctgtatggccgcagcaccatggcactgcaacaggcccagatgttgctgagcatgaacagcctggaggcggtgaatgcgggcgtgcagcagaacaacacagagtcctttgctgtcgcactctgccacctcgcagagctacacgcggagcaggtaggcaggtggccgggcccacgtgcttctggagcaatggaggctctaccatttctttcctctaatgcttgaggaaagcactggacacgtgttggacaggtctgctcgacactgtggctgaaagagtgaaatcccaccagtggaaggggaccaagggtggagtctgcaaagttggttgaatttgaggtctttttttggcatcaatgaagggaattctaagaggtcagccagtttcatgtaactaagg

SEQ ID NO: 93274 - DNA, 452 bp, Homo sapiens
gtaccgaaggtcaattcccgggtcgacgatttcgtccgtcccgccccaacccggggctccgagccgttttcgagtttgcgcccgggggaagaccatgcggcaggagcaggcatgctgccctttctgctggccacactggacaccacagccctcaacaacagcaaccccaaggactactgctacagcgtccgcatccgcaacactgtcctgcagggcctgccctttgggggcgaccccaccgtgctggctctcgacttcatgagcttccttgcactgctgttcttattctctatcctccggaaggtggcctgggactatgggcggctggccttggtgacaaatgcacacaggtaagggtatgggaccctccctctagctctacacacacacatcttgttccacactcctcaagaataggaaggagccagccctgtctcaatcccctttggtgc

SEQ ID NO: 93275 - DNA, 391 bp, Homo sapiens
tttcgtcttcgctgcgacgatttcgtgctaggtggtttgagcccggctttgggctggggtcgggctgtcacacaatggctagaagtcgtgacttcgcctccttcgtgccgcatggttttcaacgcccttgacccgccggtttcttttgtttgggaagcatggggtcgcatccagtccttcggatttggggaaatagaagggctacagcggcgtccctaggccgttctggaggtcgcctgaccagccctcggctgctgcgagttgtggcacccaccttgacctttgctcagaccagatccttcaatggtgccttagctgctgttcctgtccaggacctgcgctccactgtcatcaaagaagtcttgaagagggccactgtggctctcgaaga

SEQ ID NO: 93276 - DNA, 432 bp, Homo sapiens
ttcgagccttcgtgctgggccgcatccttagcgcctttttcgcttacttcagcggccttccggctgctagcgtggcgggcgtggcagatgtcagctccagtcgcaaccgcaccttccggatggccctgctggaagccagcatcggggcggctgggatgctggcaagcctcctcgggggccactggctccgggcccagggttatgccaaccccttctggctggccttggccttgctgatagccatgactctctatgcagctttctgctttggtgagaccttaaaggagccaaagtccacccggctcttcacgttccgtcaccaccgatccattgtccagctctatgcggctcccgccccagagaagtccaggaaacatttaaccctctactcactggccatcttccggaagatcactgtgcactctgtggccg

SEQ ID NO: 93277 - DNA, 753 bp, Homo sapiens
tttcgtccacacacatgcgtgtatcttgcttgggctatcttccctgctctgccacgccgggtctggagaaggggtttcagccccaggacatttactgagagtcggcgaatattgggagccgcgatgttcccccttcgggccctgtggttggtctgggcgcttctaggagtggccggatcatgcccggagccgtgcgcctgcgtggacaagtacgctcaccagttcgcggactgcgcttacaaagagttgcgtgaggtgccggaaggactgcctgccaacgtgacgacgcttagtctgtccgcgaacaagatcactgtgctgcggcgcggggccttcgccgacgtcacacaggtcacgtcgctgtggctggcgcacaatgaggtgcgcaccgtggagccaggcgcactggccgtgctgagtcagctcaagaacctcgatctgagccacaacttcatatccagctttccgtggagcgacctgcgcaacctgagcgcgctgcagctgctcaaaatgaaccacaaccgcctgggctctctgccccgggacgcactcggtgcgctacccgacctgcgttccctgcgcatcaacaacaaccggctgcgtacgctggcgcctggcaccttcgacgcgcttagcgcgctgtcacacttgcaactctatcacaatcccttccactgcggctgcggccttgtgtggctgcaggcctgggccgcgagcacccgggtgtccttacccgagcccgactcctgtatt

SEQ ID NO: 93278 - DNA, 394 bp, Homo sapiens
tttcgtcgcggtgggcttttcaagtgctcagtccctctgcggacagtgcgaggctgccgggccgggctccgggggaccgagactgtaccttccagccttcagcgccagcaccttccaaacctttccttctgagcaccccgccattctactcggcgtgctgcggagggtcctgtcggcgccctgcatcctccactgcttttccaagagaagagagcatgctgcctctcctgacacaggactctaattccaaagctcggaggggcattttaagaagagctgtcttttctgaggaccagagaaaggctctggagaaaatgtttcacaaacagaaatatatcagcaaaacagaccgaaagaaacttgccatcaacttgggactaaaggaatcacaggg

SEQ ID NO: 93279 - DNA, 574 bp, Homo sapiens
cggccgcggggccgaggagcctgggccgggccgggcggggactactccggagtcaggaggcagcagcggcggaggacgaggatctctggcagtcagcgcggctcggacgccgccggcaccatgggctgctgcaccggacgctgctcgctcatctgcctctgcgcgctgcagttggtctcagcattagagaggcagatctttgacttccttggtttccagtgggcgcctattcttggaaattttctacacataatagttgtcatattgggtttgtttgggaccattcagtacagacctcgatacataatggtgtatacagtgtggactgccctctgggtcacctggaatgtgttcattatctgcttttatttggaagtaggtggactctcaaaggacaccgatctaatgacattcaatatctctgtacatcggtcatggtggagagaacatgggcctggttgtgtcagaagagtgctgcctccctcagcccatggcatgatggacgattacacgtacgtctctgtcacaggctgcatcgttgacttccagtacctggaggtcatccacagtgctg

SEQ ID NO: 93280 - DNA, 406 bp, Homo sapiens
tttcgtgcggaggaaagatactggggagtgggattcgttttgttcagagcgatgattcccccacaggaggcatccgctcgacggcgggagattgatgactcgctgaagcaggaggaggagactctgtccttcattcgagacagcctggagaagagcgaccagctcactataaacatggtgagtctccccgcagctgggggagagggcaggcctccggaccctgggggagagccttgcgacctggcggtttcggttcctgcggcctggagttctggaatgggcatcgacggaggcagtgtgtggtgttatctagcaacagtttggcatcttttctgcctaaccccctccccatgttcctgaccctcactgaggagggtgtactttccactggcctggacttgcttgc

SEQ ID NO: 93281 - DNA, 590 bp, Homo sapiens
cctgcttacgccaagcttggcacgagggttcccgagcgccttcccggtgaccccgcagtgggtgtgtgaggggaggacggacagacccagacgccgccggaccaggaggacgctgacgaggcaccatgcgtgagatcgtgcacatccaggcgggccagtgcggcaaccagatcggcgccaagttttgggaggtcatcagtgatgagcatgggattgaccccactggcagttaccatggagacagtgatttgcagctggagagaatcaatgtttactacaatgaagccactggtaacaaatatgttcctcgggccatcctcgtggatctggagccaggcacgatggattcggttaggtctggaccattcggccagatcttcagaccagacaatttcgtgtttggccagagtggagccgggaataactgggccaagggccactacacagagggagccgagctggtcgactcggtcctggatgtggggaggaaggagtcagagagctgtgactgtctccagggcttccagctgacccactctctggggggcggcacggggtccgggatgggcaccctgctcatcagcaagatc

SEQ ID NO: 93282 - DNA, 614 bp, Homo sapiens
cggctggtggctggtgcaccggcctgcgccatggccaggcctttttctctagtcaggaccgtccggatggggccttagggccccgccccgtctagcctggcccggcctgcgcgagccccgcaagctctgcaggctggctagcgggcagaccccagccccacgtcctgctacccacctacgaaggatccggggatgggcagcgccacccggcccgctccagagtcagcatgggtctccgtgaggccgggtgacgctccagaatgggagacaagccaatttgggagcagattggatccagcttcattcaacattactaccagttatttgataatgatagaacccaactaggcgcaatttacgtaagtttccagctctagggccagaatggaccctaggggatcaatttggatgttgggccagtgtgtccagttcacaagttctggcagccctatctggactggctacacctctgtatctgaacttttgtccacgggacaggggtctgacgcttggcccaagtaattacctggtctatacttttccttttgtcaacttccacaagggtgagaatcctgctgttctgggcttgccattccatgtggccagcatttgtc

SEQ ID NO: 93283 - DNA, 671 bp, Homo sapiens
tttcgtcgtcagccggaccccacctggacggctggggccacttgtggtcgccgggaggtgtcacctctaactcttcgtgtcaggagtttttctacctctccggagttctttggctctcaggaacctagcacggcatcacgcgagtcccggctcagatgccccctccagggatccccccaccctttcctccgatggggctaccccccatgagtcagagaccaccagctatcccccccatgccacctggcatcctgcccccaatgcttccaccaatgggggcgccaccaccactcacacagataccaggaatggtacctccgatgatgccaggaatgctgatgccagcggtgcctgtcaccgcagcgacggctccgggtgcggacaccgccagctctgctgtggctgggacaggccctccgagggccctatggagtgagcatgtggccccagatgggcgcatctactactacaatgctgacgacaagcagtccgtgtgggagaagcccagcgtgctcaagtccaaggcagagctgctcctgtcccaatgtccctggaaagagtacaagtcggacacaggcaaaccttattactataacaaccagagtaaagagtcccgctggacccggcccaaggatctggatgacctagaggttctagtcaaacaagaggct

SEQ ID NO: 93284 - DNA, 454 bp, Homo sapiens
gaattcccgggtcgactaaggatatactatatcaacttttaattcaacatgtaagtaattattgcccagtttctcaagaagaactgaactatgctctttgttggaagcaaagacctgtcctcccttttcccttatgcacctgcccctactgtagaaccagtgagagaaggggggatcctggcaaagagaacagcacatgggatcccctagaccatcctccacctaatacccctagtccccctcctaatacacccaacccttcccctcaggcccagcctaagtccccctccccggaaaaactccaagctcctaattcgccaggtcgcttttgctggactagaaacatcaaggatccaccgcaacatgtctgcatcgtccctcccatagtacaccccagcggcaggcaaagcccatgctcctgcccccccgctgtgtcaacatccccacaacatat

SEQ ID NO: 93285 - DNA, 487 bp, Homo sapiens
  misc_feature (1)...(487): n = a,t,c or g
attgacttcgattgcgctcgccgnnnnggnnaggaattcccgggtcgacgatttcgtacttccagggtaatcagggcctccacactgtacttgttcagggtagactcatcctctaggggtgtgcttgccaggagcacaggttgatcttcccaggcagtgcccttcagtgaggctacatgtgccttgatttgggcagctgcctcctggccagtcacctcaagggtgtgtagctcctgggcgcggacaaagagctgcatgaaccatgctccccactgttgctaccacaaagacagagttgagaaagaggacccactatttttgaagcttaatgtaagaaaatagatacatgggaaattattggaagcttttactttccacaaaagcaagtgatggttttgctcagagcagcaacacaatgacctggtgctaatcttggcttaattttctctctccttgngaaggagagaggaaatgctagtacatatta

SEQ ID NO: 93286 - DNA, 478 bp, Homo sapiens
atggaggaagaagatgagtctcgagggaagacagaggagtcgggggaggatcggggcgatggtccgccagacagagaccccacgctttctccttctgcctttatcctgcgagccatccagcaggctgtgggaagctccctgcagggggacctgcccaatgataaagatggctctcggtgtcatggccttcgatggcggcgctgccggagtccacggtcagagccccgttcccaggaatcagggggcactgacacggctactgtgttggacatggccacggacagcttcctcgcagggctggtgagtgtcctggatcccccggatacctgggttcccagccgcctggacctgcggcctggcgaaagtgaggacatgctggagctggtggctgaggtccgaatcggggacagagatcccatccctctgcctgtgcccagcctgctgccccgtctcagggcctggaggacgggcaaaacgg

SEQ ID NO: 93287 - DNA, 423 bp, Homo sapiens
tttcgtttcattatgtgcactcttctgtgttatgtgatatgcgaggggtcggcagcagcaagtggcctgcgtgcgcgaggggggctttctctgtggtccgacgctgtgtcaagctctgcaccggccatgagtatgcagccaagatcatcaacaccaagaagctgtcagccagaggtagggcatggggagtgtcctgcgcagctgctgtcaggctggggcaggggctttggaggccgtgccctgtggactgggcagcaggcccctcccagtcttggccagcacttggcccaccctgcctgtggctccatgcacagatgcagtggggttcctggagtggaggctgtggcagagggaggcacaggagtgttggggacttgagggcacctctggcctggtggggcccaggctggtgggggtgccaag

SEQ ID NO: 93288 - DNA, 421 bp, Homo sapiens
tttcgtgcggcagcaacagcagcggggctacccgggccagtggcaagcacaggtctgcgtcctgctccttctgcatctggctcctgcagtcactcatccacatcttgcagctcgggcaaatctggagatatttccacacaatatacttaggtattcgaagccgacagagtggggagaatgacagatggaggttttactggaaaatggtatatgagtatgcggatgtgagtatgctgcatttgctagccacctttctggaaagtgctccacagctggtcctgcagctctgcattatcgtacagactcatagcttacaggccctccaaggtttcacagcggcagcttccctcgtgtccctggcctgggccttggcctcctaccagaaggccctccgggactctcgagatgacaagaagcccat

SEQ ID NO: 93289 - DNA, 552 bp, Homo sapiens
agtgtatacgcctgcggcaccgattcggagctaccgggtcgacgatttcgtctcccatcgcgccgcagaggcgcgcaggtgcgtgaggccgcgcccgcccgggaccctgcagacgtgggccagacatggagcacatccgcacgcccaaggttgaaaatgtccgcttggtagatcgagtgtctcctaaaaaagcagctctaggtactttgtatttgacggctacccatgtcatattcgtggaaaattcacctgacgcaagaaaagaaacatggattcttcacagtcagatttccaccattgagaaacaggcaacaaccgctaccggatgccctctgctgattcgctgcaagaactttcagataatacagctcatcatacctcaggaaagagattgccacgacgtgtacatctccctgatacgccttgcaaggccagtgaaatatgaggagttatactgcttttcattcaaccccatgctggataaagaagaaagagagcaaggctgggtgctgatcgatcttagtgaagaatacacgcggatgggcctcccta

SEQ ID NO: 93290 - DNA, 391 bp, Homo sapiens
tttcgtgagggtaacacgcttatctgagggctgcgcgtagcggggcgggacaaagcctgctgttgagctcagtatgttgtggaaattcccggccgggccacgtttatgttcccaggggatggatctcgtgtggagtgcgtggtaccgaaagcgcgttaaagggaaagggttgttgccactctccgcccacggtattttgggcgtctggatcagcagggccgagtgggaccaggtgaaggtttatctgttctgtgacgaccatatgttgcagtggtacacgcttaaccgcatcacggtgtgtaggagccggtttgtgaatcttatctctgagaggaagacaaagcttgccaaggtccccctcacgtgtttggctcaagagggaaatattctc

SEQ ID NO: 93291 - DNA, 473 bp, Homo sapiens
ctcttcgggtcgacgatttcgtgtaaggggacagggacaccgccgctcggagcccgggaccccgcggcatccagtgcgtctgtgtcggtcccagtgggagacctcccaccccgaaaagagaccgaagtggcggaaggagcccgcacccgcctccccaggtcggcggtttctctagcgcaaggatgctccagaccttgtatgattacttctggtgggaacgtctgtggctgcctgtgaacttgacctgggccgatctagaagaccgagatggacgtgtctacgccaaagcctcagatctctatatcacgctgcccctggccttgctcttcctcatcgttcgatacttctttgagctgtacgtggctacaccactggctgccctcttgaacataaaggagaaaactcggctgcgggcacctcccaacgccaccttggaacatttctacctgaccagtggcaagcagcccaagcag

SEQ ID NO: 93292 - DNA, 438 bp, Homo sapiens
  misc_feature (1)...(438): n = a,t,c or g
taccggtccggaattnnnagtcgacgatttcgtggcggcgatctgtcgccgggcccccttctccttctcactcctcaccctccagggtagcggctaccggagcgctgcagggggctgcgcctgcctgctccgccccagacctgtcggcgaaaggtagtttatgccaacgtgacttcattcatacagatgaaccaaggatcgggatagcagtataaaattagaatcaagacagctgactgctcagcaggatgccatcaactaacagagcaggcagcctgaaggaccctgaaattgcagagctcttcttcaaagaagatccagagaagctcttcacagatctcagagaaattggccatggaagctttggagcagcgtattttgcacgagatgtgcgtaccaatgaagtggtggccatcaagaaaatgtcttatagtggaa

SEQ ID NO: 93293 - DNA, 982 bp, Homo sapiens; identical to SEQ ID NO: 62523
  misc_feature (1)...(982): n = a,t,c or g

SEQ ID NO: 93294 - DNA, 423 bp, Homo sapiens
cctcagggatgctatgccaacagctgcctggctgggttctggagccgaaatgggcaacttgtacttagcctgcactcagacacctgcacacgtgtctctaggaaaagagggagtgccagcagcatggccagacactccctttcgggctgtaagtttttcctgaggctgcctgctaaacctcatgctaagacagacagacagacagactgacagacacacacgtccccagccttggagcccctttgctcaaggaggcttcccatagacaccttggcaaagacctacaaatgaagccaaggacacgtgtcctttgaaggggaggaaaaccaccaacccctgtgctcactcggccctcccatcccccttcttcaaatcggaagcctaagaggccagttaggaaacccagctttggcatgcacgaaa

SEQ ID NO: 93295 - DNA, 591 bp, Homo sapiens
aatttcgtcccgcgggaagctcggagcactcaggacgccgcgcgcccttccccgccctccctgaccagggagcagctcgctccaggcgcccagccgaggcccccagcccagtgggagcaagtcatagagaacaattcgagagacagagagacggagcgcgctttcctgctcagtcctgaaaagtgagccgctcccgggtttgcaacctcaagcttcgcagcagcggcggcggcggctgccgggaaggaggcaggtgcaggtgcaggagggaggcggctctgggctccgcgcctgggtcttggccatggcctcggtcctggggagcggcagagggtctggagggctgagcagtcaactcaaatgcaagtccaagaggaggaggaggcggaggtccaagcggaaagataaagtaagcatattgtcaaccttcctcgctcctttcaagcacctgagtcctggcatcacaaacacggaggatgacgacaccctcagtaccagcagcgcggaggtgaaggagaaccgcaacgtgggcaacctggccgcgcggccaccgccctccggggaccgggcccggggcggcgcgacccggcg

SEQ ID NO: 93296 - DNA, 493 bp, Homo sapiens
cggtcggatttcccgggccgacgatttcgtctgcaggggagtgagggagaggaggataggaagcaggaaagcgggagagctcgagggacaagggggctcggtgtgtttacaccaggcacgggctacgagcgtccatcccggcccctggcttgcgctcccgaagaggagagcaaggctgttctgggatccggccgtcgtgcggcaagaggcttgtctgtccgggttgccggaaccaggagaacccagagggaaaccgagggaaaggagcggcgcgttttactagagagagcgcgagcggaagaggcgagagcaggagcgcgcgagggagcatcgagcgcagcggagacatgaggacctactggctgcacagcgtctgggtgctgggctttttcctgtccctcttctcattgcaaggactgcctgttcgcagcgtggattttaaccgaggcacggacaacatcaccgtgaggcagggggacacagccatcctcag

SEQ ID NO: 93297 - DNA, 430 bp, Homo sapiens
  misc_feature (1)...(430): n = a,t,c or g
ctgggtaggaccacccgggctgacganancgnncgaagggggagacacaatttcctggcttattatgagcagaagttttgagtgagtttgtggatgtgtatatagattctagctttgtgaaacttttcttattaacgaacagaccccgagaaatactggctacatccaaagttctggcaaaggctcacttcatggactcactttgcgtgcttgttaaatgtgctgtgttgctcccaagaccatgtaaagcctactgaccactaacctccctcacagcagaaactagacgtcaggttaaaatgggcaactccgacagtcagtacacccttcaaggatctaaaaatcatagcaatactattactggtgctaagcaaattccttgctccctgaaaatacgtggcattcatgcaaaagaggaaaagtcattgca

SEQ ID NO: 93298 - DNA, 411 bp, Homo sapiens
  misc_feature (1)...(411): n = a,t,c or g
ttnnnattatggagggtggcttgggcgagggaagctgtttgacagaggggaccatgccagagaggagacctatggagggtggcttgggtgagggaagctgggtgacagaggggaccatgccagagaggagacctatggagggtggctttggcgaagggagctgggtgacagaggggaccatgccagagaggagacctatggagggtggcttgggcgagggaagctgggtgacagaggggaccatgccagagaggagacctatggagggtggcttgggcgagggtagctgggtgacagaggggaccatgccagagaggagacctatggagggtggcttgggcgaagggagctgggtgacagaggggaccatgccagagaggagacctatggagggtggcttgggcgaaggag

SEQ ID NO: 93299 - DNA, 405 bp, Homo sapiens
tttcgtagtgttgatccactgggagtgtgtgtgggtgtgcctactgttgatccaccaggagtgtgcctgggtgtgcacactgttgattgaccaggagtgtgtgtgggtgtgcatactcttgatcgattgggagtgtgtgggtgtgcacattgttgatcgggagtgtgcgtgggtgtgcacgctgttgctccaccgggagtgtgtgtgggtggggggtgtgcatgcctgtatgcacaatagagtcccgatctttgtgggacaagcataggggactgggcatcagtcaggaagcttgggcttgtcttgccctgccaccaccctgcgcacccctctttattcaagccacagctctgtgcacgttggatttcttacgtgcaaaacaagggggtctgccatgccggtggt

SEQ ID NO: 93300 - DNA, 749 bp, Homo sapiens; identical to SEQ ID NO: 62550

SEQ ID NO: 93301 - DNA, 410 bp, Homo sapiens
ctgggccgttggttgcgcgcgggtcggtatgatgataccccgtcctctgactttggtacggaggctgctcgccctccacctgtgtagtcggaggtgagcgcgactgcagctccgactacctgggagcagtgccgagcccctctacacccacgcgcgcccacccacagttaccatgtgacaggggtgttaatgaagaaccggtactcactggatgaacatggggtctgtactgccgacacagactgtgaagatgcttacagagtctgccacatcttatacatccctttgcatcaggtgccctacgtgaaggagtattggaaggaggagttcaatgactttttgaatgaaaacgaaactggcaggactccctggactgaaatattctggagctcgcgaaccttagcttgtag

SEQ ID NO: 93302 - DNA, 356 bp, Homo sapiens
cccaccatggtgctgtctcctgccgacaagaccaacgtcaaggccgcctggggtaaggtcggcgcgcacgctggcgagtatggtgcggaggccctggagaggatgttcctgtccttccccaccaccaagatttacttcccgcacttcgacctgagccacggcgtcagctcctacctctgaccctagcttctctctgattcccacaggccccatgcatcctccctgcctcactcccctcagcccctgccgaccttagcttatctgggagagaaacaaggcctggtgcctgtgaggaagagaggtcacccctaccctccctccccgcttccctgcctcaccctcaataaataaattaa

SEQ ID NO: 93303 - DNA, 989 bp, Homo sapiens; identical to SEQ ID NO: 62093

SEQ ID NO: 93304 - DNA, 1397 bp, Homo sapiens
gcagtatgtgtgagcatgtgtgtgtgtgtatgtgtgtgtgggggggtgtaaaatgtgtttttcaaagtactgagaggttgatgggactgttcgattagctcctctgagaagaagagaaaaggttcttggacctctccctgtttcttccttagaataatttggatgggatttgtgatgcaggaaagcctaagggaaaaagaatattcattctgtgtggtgaaaattttttgaaaaaaaaattgccttcttcaaacaagggtgtcattctgatatttatgaggactgttgttctcactatgaaggcatctgttattgaaatgttccttgttttgctggtgactggagtacattcaaacaaagaaacggcaaagaagattaaaaggcccaagttcactgtgcctcagatcaactgcgatgtcaaagccggaaagatcatcgatcctgagttcattgtgaaatgtccagcaggatgccaagaccccaaataccatgtttatggcactgacgtgtatgcatcctactccagtgtgtgtggcgctgccgtacacagtggtgtgcttgataattcaggagggaaaatacttgttcggaaggttgctggacagtctggttacaaagggagttattccaacggtgtccaatcgttatccctaccacgatggagagaatcctttatcgtcttagaaagtaaacccaaaaagggtgtaacctacccatcagctcttacatactcatcatcgaaaagtccagctgcccaagcaggcaagtgctcacgtgtgattgaatctaaaccttctgagtccatgaacacgcgacgtgttttgggagatagcggagaaattaacatcttaaccggtcaagctccactggctctggcaatattttaacagatgccaggaacatgggcacagaaatcaatgagatcagatggctgaggcaggagaatcgcttgaacccgggaggtggaggttgcagtgagcccaagatcacggcactgcactccagcctgggtgacagaacgagactccatctaaaaaaaaaagaaaaaagaaaggagtacttgtgcccttctggcttcagctttgggccgtatctggacagcaggaagggccacataaccttctgtgactgtagtcgtctgtccagtactttctctgtgccacacacctgcactacagtaaccctgaggtagagtgccagtatcttcccttttcagataaggaagctgaccttgagagaggtttagtaactcacccaaggccatagttctaagcagcccaaaaagtatgcaaactcggtatcaccttaaagcagggaaagttgcagggataagagtgtagggcagagaaactatagccaaatgataactcggataataaaagtctacttggtttgta

SEQ ID NO: 93305 - DNA, 450 bp, Homo sapiens
acgccgccaacatggtgttcaggcgcttcgtggaggttggccgggtggcctatgtctcctttggacctcatgccggaaaattggtcgcgattgtagatgttattgatcagaacagggtaagtgtcacaactttttactaaacatggcagtggacatgtgccctgcagatggcaataatgaattgtctcgatggctgtgtaagatgaggatgctatgggtagtcgctttattttaccattgaggaaacaggtaatggtacgggttttaagcacagcctgaagttagctattagtattgaatttcagtattagccacttaagctagagccagttataggctgaaacgttggttagttttaaatgagttactatacgtaaagtgagtttagaacagatccagcacgtagaaagcacttttgtatttactggtgtgtatttgaaacaagcaaac

SEQ ID NO: 93306 - DNA, 403 bp, Homo sapiens
aacccagacacaagtcttcactccttcctgcgagccctgaggaagccttactgggcagccccgggctcattgaaatgccccggatgacttggctagtgcagaggaattgatggaaaccaccggggtgagagggaggctccccatctcagccagccacatccacaaggtgtgtgtaagggtgcaggcgccggccggttaggccaaggctctactgtctgttgcccctccaggagaacttccaaggagctttccccagacatggccaacaagggtccttcctatggcatgagccgcgaagtgcagtccaaaatcgagaagaagtatgacgaggagctggaggagcggctggtggagtggatcatagtgcagtgtggccctgatgtgggccgcccagaccgtgggc

SEQ ID NO: 93307 - DNA, 429 bp, Homo sapiens
actgatataatttctcagaacaaatatcagaaggtaaactttatagattctttttctgccgggcaacatgccatccatttcttgagctctattttattaaagcatatcaaaaatcttattttactgatgaggaaatcaaggcacacaccaaaggtcaagtaattgaccactatcactaagctagccggcatctgaatcaagatctgaacacaggtttgtttgattcgaaagctcttattcattactggacaacaagaaagggagagatcatttcctacagttgaaattttctctttttgcaggttccaagcctgtggagtcactgccacatgagctatttggaagtgctagcaactggatttccatactgcccaacaatagcctaggcttcattctggcagatgctggttttgacgtgcgtatgaggag

SEQ ID NO: 93308 - DNA, 1042 bp, Homo sapiens
tacaactttgccagcactacagcctaagcttccagagtggacacggagaagggcatcagaaaaccattctggtgaggtccacacccataagtcaccatgtacaaggactgcatcgagtccactggagactattttcttctctgtgacgccgaggggccatggggcatcattctggagtccctggccatacttggcatcgtggtcacaattctgctactcttagcatttctcttcctcatgcgaaagatccaagactgcagccagtggaatgtcctccccacccagctcctcttcctcctgagtgtcctggggctcttcggactcgcttttgccttcatcatcgagctcaatcaacaaactgcccccgtacgctactttctctttggggttctctttgctctctgtttctcatgcctcttagctcatgcctccaatctagtgaagctggttcggggttgtgtctccttctcctggacgacaattctgtgcattgctattggttgcagtctgttgcaaatcattattgccactgagtatgtgactctcatcatgaccagaggtatgatgtttgtgaatatgacaccctgccagctcaatgtggactttgttgtactcctggtctatgtcctcttcctgatggccctcacattcttcgtctccaaagccaccttctgtggcccgtgtgagaactggaagcagcatggaaggctcatctttatcactgtgctcttctccatcatcatctgggtggtgtggatctccatgctcctgagaggcaacccgcagttccagcgacagccccagtgggacgacccggtcgtctgcattgctctggtcaccaacgcatgggttttcctgctgctgtacatcgtccctgagctctgcattctctacagatcgtgtagacaggagtgccctttacaaggcaatgcctgccccgtcacagcctaccaacacagcttccaagtggagaaccaggagctctccagagataaatggaaggtcttactcaactcggacttcctatcacacagtggtgcag

SEQ ID NO: 93309 - DNA, 426 bp, Homo sapiens
ctctcctctgctgcccttttctctctctcctttctccttcctctccctcctcctccccctcctcctgggctgcttcctccttcccacttacccttcctcctccccatcctcctcctccccattctctccctcctcacccctcctcctctttttcttcttattaccacggcatactttttaaaaactcaatgtttttcttcatgtggacttaaatgtttgtatttccaaacgaaatagatcccgggtgaggcgcccacaggagaaggaaaatcacaaccccagaaagaaacccagtagtcactactcgcctggcgctcagtggccaactgtctggtttttgcactgaaagccccttgtctgtccagaagcccctcagtcccactcttgggtcttgggctctgggcccggcgtggctgggatcgcaag

SEQ ID NO: 93310 - DNA, 390 bp, Homo sapiens
gccggggggatgccatcccctagcgcgtttcgcgctcggttgaggcgctgaacaaggggttggggctcccgcgcctaagtttttttttggggcgccgcctacctaacaaacttgggagcactcactgacgtgggtagcgcccagggcctgcggggcgcaggaaagctggagtcaggcggaaaccgaaggctgaccccgcagcggccgggctgtcgcggcccccacctaaggtaaccatgtgcgaccgaaaggccgggatcaaaaatgcggacatgtcggaaaaaatgcaacaggactcgggggagggcgctactcaggcgctggagaaatacaacataaagaaggacattgcggctcatatcaagaaggaattggacaagaagtccaatc

SEQ ID NO: 93311 - DNA, 370 bp, Homo sapiens
ctccgcccagccagtgcccagcgcgggtttccggatccttccgggcacttcccacaggcgccgcaaagcagcgtgggtgcaggctgcagtggctggcgccgtcctcgcccggccaggccatgaaggtagagtttgcaccgctcaacatccagctggcgcggcggctgcagacggtggccgtgctgcagtgggtcctgaaatacctgctgctcgggccgatgtccattggaatcactgtgatgctgatcatacacaactatttgttcctttacatcccttatttgatgtggctttactttgactggcataccccagagcgaggaggcaggagatccagctggatcaaaaattggactctttggaaacactt

SEQ ID NO: 93312 - DNA, 518 bp, Homo sapiens
ccgggaatttatttttggggccccctaaaaaaaaaattaccttgcccccccccgggagtaaaaattggttcttttaaaagggccccccctttttttttttttgttggatggaaaatgttttattggagttcctgaggcaggaaagagttatggtaggttgagaatcagcgctcacgctagccccctcttccagtggaggtcatggtcactgggcatcaggagttgcgctcctcagtcctttcagcttaggaaaggcatcccagttgaggaaaggaagtttccttttgatagactcaaagagggcgtgccagttcaggaactcatcagccttaaacgcagatcgcaatttgtcgatgttcaggaacggggtgttaaaggcctcgggtcgtgacgcataattctcaatggtgctttcttcctcaggaccacccagggtggctccctgggcagagtggagcaccaggagggagaggagctccacggcaggaaggaccgggatcttcatggcgtcaagtttg

SEQ ID NO: 93313 - DNA, 464 bp, Homo sapiens
gccactcctccctccgtccacctgtcacttcgggtagctgggaggccaggtgaggggcgcgcacgggggaggggcgtgcatagttgagacagaaacccggaagacccaactgtggcgcggcactgcttgaccgaggggctccggagcccagctgcaccggctgcggtttgagcgcccagggccggggtgcggggtggaccgcggcggcccttcgaccaaaggtgcttgaagctcgagcccattactttctgtggactctgactcgagctgcaaaagcttttctgcactgtttttctcatctatgttatgaagataataattccggccctaaccgtagtatgcttgcgagaatccaacaatatgatgtttctgaaagcgccggctgaactaagagcgcgtgaaatagaatgacagacagctctgcaagaacggaggccctgtctattttgtacccagctgtacgg

SEQ ID NO: 93314 - DNA, 551 bp, Homo sapiens
cagagtggagcctggacccattcatgggcatcatgagtggacaagtgggtgacctgagcccatcgcaggagaagtcgctggcccagttccgggagaacatccaagatgtgctatctgcgctgcccaatcctgatgactacttcctcctgcgctggctccaagctcggagctttgacctgcagaaatcagaggacatgctgaggaagcatatggagttccggaagcaacaagacctggccaacatccttgcctggcagcccccagaggtggtcaggctgtacaacgctaacggcatatgcggccacgacggtgagggcagccctgtctggtaccacattgtgggaagccaggaccccaaaggcctcttgctctcagcctccaaacaggagttgctcagggacagcttccggagctgcgagctgctcctgcgggagtgtgagctgcagagtcagaagctggggaagagggtggagaaaatcatagctatttttggtctcgaagggctgggcctgagggatctgtggaagccaggaatagagcttctccaggag

SEQ ID NO: 93315 - DNA, 415 bp, Homo sapiens
  misc_feature (1)...(415): n = a,t,c or g
cctcctgaaaacctcacgagccacgcgtacgcaggccctggggggcttttccccccaaggtttgctgacccagacccttctgggggcagcagcaggccccgtttcctcccggggggcaatgccccctctccagccccacctcctccacctgctatcagcctcaatgctccctcatacaactggggagctgccctcagatccagcctggtgccctctgacctgggctctcctccggcccctcatgcctcctcctcaccaccttcagaccctcctctctttcactggagtgatgccttaaccccacgcgtacgcccacgcgttcgcccacgcgtacggcggtacccgggtggttaaacttcgcaaaatgcctagatattatcctactgaagatgtgcctcgaaagctgntgagccat

SEQ ID NO: 93316 - DNA, 376 bp, Homo sapiens
tgttttaggcctgttcactttctcttactcactgtctattcacttgtcctgttcactgggggggaagatctcagccagcaccatgactgacaatgagctgtctgccttggtagtggataatgggtcagggatgtgcaaggcaggctttggtggtgacgatgccccccgggctgtgttcccctccatgatagggcgtcctcgacaccagggcgttatggtaggcatgggccagaaggactgctacgtgggagatgaggctcagagcaagagaggcgtcctgaccctgaagtatcctatcgagcatggagtggtcaccaactgggacgatatggaaaagatctggtaccacacattctacaatgagctccgtgtggca

SEQ ID NO: 93317 - DNA, 410 bp, Homo sapiens
  misc_feature (1)...(410): n = a,t,c or g
acttcactctcttgaaaacccacccagatcctccccgttctgacaccatggtcagctcctgttgtggctccgtgtgctctgaccagggctgcggccaagacctctgtcaggagacctgctgccgccccagctgctgtgagaccacctgctgcaggaccacctgctgccgccccagctgttgtgtatccagctgctgcaggccccagtgctgccagtctgtgtgctgccaacccacttgttcccgccccagctgctgtcagaccacctgttgcaggaccacctgctaccgccccagctgttgtgtgtccagctgctgcaggccccagtgctgccagcctgtgtgctgccaacccacctgctgtcgccccagctgctgtgagacgacctgctgccaccctangtgctgcatc

SEQ ID NO: 93318 - DNA, 371 bp, Homo sapiens
ccatccctgaggtagagccggaatttacctttgtacttcacacggtcagggttgggggtgactacgtgggtctggagctgactgccgtcctgacacgtcctagagctgcaagcaggtcctgccagagagccaccatgacctctcagcctctcaggctagcagaagagtatggcccaagtcctggggagtctgaactggctgtgaacccctttgatgggcttcccttctcttcccgctactatgagctgctgaagcagcgccaagccttgcccatctgggctgctcgctttaccttcttggagcagttggagagtaaccccactggagtggtgctggtgtctggggagcctggttctggcaagagcacccag

SEQ ID NO: 93319 - DNA, 367 bp, Homo sapiens
gtgatccttccatctcagcctcccgagtagctgggactacaggtgtccaccaccatgcctgggtaatgacctcttcttttgtagatacatcagctacatggaagcaggaaaccaaacaggatttttagagtttatccttctcggactctctgaggatccagaactacagccgttcatatttgggctgttcctgtccatgtacctggggacggtgctgggaaacctgctcatcatcctggccatcagctctgactcccacctccacacccccatgtacttcttcctctccaacctgtcctgggttgacatctgtttcagcacttgcatcgtccccaagatgctggtgaacatccagaccgagaacaaa

SEQ ID NO: 93320 - DNA, 369 bp, Homo sapiens
caaaagcagtatgttaccattttgtaccctcagacaaaaatgttaagggataacttgggcttttgaagattcagggcaactggcactcccacactttgctcctgagagtgttacttgttaaatccattgtggtaaattaatccaatattgatttacagttaaaaaatacatgtaccctttgacttagcagttccacacttgacctgtatactgtagaaataagagtacctatatatatgtataatattaaactgacaaatgatagactaatagcacattttctctgtgaaaagctggttaaaaaactttgttcaatgtggactattctgataaaattgaaaattagttcaattttatgtataaaagtgg

SEQ ID NO: 93321 - DNA, 364 bp, Homo sapiens; identical to SEQ ID NO: 78612

SEQ ID NO: 93322 - DNA, 431 bp, Homo sapiens
ggccccaggggggtgtgttccaggagacccatggggccaccccgccgtcgctgcctgccggcggccagcgggcctggggctgacgtgagcctgtggaacattctgcgcaacaacatcggcaaagacctgtccaaggtgtcaatgcctgtgcagctcaacgagccgctcaacactctgcagcggctctgcgaggagctggagtacagcagcctcctggaccaggccagccgcatcgccgacccctgcgagcgcatggtacctgcttcctgtcctcacgcccagcccaaggctgcttccttctccctgggatcttttctcccagaaaatcctggctgggctgttccttattgctgaagttccaccccaagatcccatactttgcttgcttggggtggcgggcccgtcctcagtaccctgcaccttccttgccg

SEQ ID NO: 93323 - DNA, 362 bp, Homo sapiens
ccccatcttagttaagaggtgagatttacatgtaagattgggttagcgtttataccactatgtttttgtaaacttatttcactgttttctaggattttaaacaatttgaacctaatgacttttatttgaaaaacactacatgggaggatgtaggactgtgggacccatcacttacgaaaaaccaggtaagtggcacaggagacttcctcagatggcagcatgcttggtatactcccttttcagctctaggccttttatagcggtgcagtgattgcgggcaagtgccaaacatcgaaagtgtcaaaattgcatttcatattttcctgaccagtgggaagactaagaaaaactttttgtccttt

SEQ ID NO: 93324 - DNA, 618 bp, Homo sapiens
ttaaatatcccacattgtgacacattttgagagaattaaagctctgtagtgtcaaaccttttatcagatagattaaaatattataatattaaagttattcattggtaaatataattgttataaatgataatgtatatgtttaacaattatcaagacagtagctaatagtaaatataattcgtagtaaaataaatctttctttttcctctttattttagttaagtatgagagagaagctagtaaatactgggacacattttacaagattcataagaataagtttttcaaggatcgtaattggctgttgagggaatttcctgaaattcttccagttgatcaaaaacctgaagagaaggcgagagaatcatcatgggatcatgtaaaaactagtgctacaaatcgtttctcaagaatgcactgtcctactgtgcctgatgaaaaaaatcattatgagaaaagttctggttcttcagaaggtcaaagcaaaacagaatctgatttttccaacctagactctgaaaaacacaaaaaaggacctatggagactggattgtttcctggtagcaatgccactttcaggatactagaggtattgtgctcaagggacaaaaatgggag

SEQ ID NO: 93325 - DNA, 425 bp, Homo sapiens
  misc_feature (1)...(425): n = a,t,c or g
agccgcgtctgtggaggagcttggctccgcacctgctgggctggcgaacccgaaattgggcttggaacccgggagccagatcttggaccctgaactgcacctctgtcaagagcccagaggagaaagaatggctgtttcagtagcaatgtccaagctctgcattctccagactctgtgctttcctaagataggaacccagaagaggactgatcatttcttgcagctctaaaaaccatggctcggaaattagtgatgttcagggatgttgccattgacttctctcaggaagagtgggaatgcctggactctgctcagagagatttgtatagagatgtgatgttggagaactatagcaacttggtatcactaggtaaggaatctagccttcatatttcaggatctacctttggatcggctgctttctn

SEQ ID NO: 93326 - DNA, 139 bp, Homo sapiens
ttttttttttttggaaaaaaactccaactttttcccccgtttgaaggaaaggggccccacctaatttaatggaatttcccccccccggggaaaagggattttcctccctcacccttctaagaaacccggataaacgggg

SEQ ID NO: 93327 - DNA, 531 bp, Homo sapiens
  misc_feature (1)...(531): n = a,t,c or g
ggggcgcagagaggagtgtaaactctagcggggctagagcaaacattggattagcggcagcagcctgccagcctgcccgaggagtgctgggaccagcgcgctgcacgccgactggcacgatggcctcgtctcaggggaaaaacgagctgaaattagccgactggatggcaactctgccggagagcatgcacagcatccccctcaccaatttagccattccagggtctcatgattccttcagcttctacattgatgaagcctctccagtaggtcctgagcagccagaaactgtccagaattttgtctctgtgtttggaactgtagccaaaaagctcatgcggaaatggttagccactcagacaatgaattttactggccagctaggagctggaattcgttattttgatcttcgaatttccaccaagcccagagaccccgacaatgaactctattttgctcatggtttgttcagtgccaaagtcaatgaaggccttgaggagatcaatggcaattttttcctcacangatcac

SEQ ID NO: 93328 - DNA, 186 bp, Homo sapiens
  misc_feature (1)...(186): n = a,t,c or g
gtaagatanccccaacataagtagagaagcatttttattatagtgattttacatggaggcaatggcaggaaatggaaccagctgctcaaaagcatactttgtttgtaacttaaatgtttatacatccaatcttctttataaagttgaattgtttaagataactatactacacttaatgttggggtg

SEQ ID NO: 93329 - DNA, 454 bp, Homo sapiens
gacgggaacacacttgccaggttttactttcggcatgacagaccttactcttacttcacacaatgttcaaaaggcacatgtccgtcgcttcggaacgcaagagagcattactttcccatagagctacacggttcatactgacggaagatatgagaaagtttcactttttgtcaaaacttggactctcagcgggccctctaagaccaactccagcagatcagacatttaacaacgactcactttgagattgaagtatttgatgctcaaacaaggaaacagatatgtattctggataaggcgacacactcatctactattcatgatgttaagcaaaagtgtcacaaagcatgccggccttttttgaaggactacattaccattcaaagtattgcagcttcctccattgtcacactgtatgctacagacctaggacaacgagtcagttggaccacag

SEQ ID NO: 93330 - DNA, 432 bp, Homo sapiens
agaattactatcaccactagacaacaactaggttcacaaagaatatatagctagattactataaattcagaatatcacttttaaaatctgtatctttgtattaagtaacaaactgaagacacaaactgaaaatggcttcagatcacttactgttagggaaattcctatggacctttcttctaagcactggggccaccccattggctagattagctttctgttctccagaagcccttttgattatgcttgtggttcattgagcttcttgaaactaaatttatatcttaaaccaaatttgggagatttttagccattatttcttcaaatctttttttctgttcttttctgttttggacttcagttacacctatgttagattgtttgatattgggccctagggaactaaggattgtttcacttttaaaaatcttt

SEQ ID NO: 93331 - DNA, 744 bp, Homo sapiens
ggtgtgacggctcaggactgcatttcccagaggctgcagctatccggccaatgtagcctgaaactacatttctcagcggccactggaacgacctcaatctctgcctcctcgccagttcattgtggtcgttgacccggcagcgagctttggagttcatcgtgggagaagtcagcgcccagctccgaggttggagcagccccgccgggcaacttgaatttctgcaaacgaacacagcaccgggagctctgcagacctgtgtcggcgcggaacccggactgagacatgccttttgaacttctcagatagaggaaccccagtgaagactgatcagttcttacagttctcaaagcatggcccataaatatgtgggtttgcagtatcacggatcagtgacatttgaggatgtggccatagccttctcccagcaggagtgggagagtctggactcttcccagaggggcttgtacagagatgtgatgttggagaactacaggaacttggtgtcaatggcaggacattcccgttctaaaccacatgtgatcgccttattggaacaatggaaagagcctgaagtgacagtgaggaaagatggaagaagatggtgcacaggtgagtaagagcatggcaggtagggaggccattgttgctggaaacagcccagctgtcagggaggaagtgcatctctgcaatgtttggaggtttcccttcaaagccctagggcctgggtggaaaaaggctgagact

SEQ ID NO: 93332 - DNA, 1313 bp, Homo sapiens
ctgtgcctgcacgtgaccctgcctggcttcaggaggacaaagtggaggaagaagctatggctcctgggctgccaaccgcctgttcacaggaaccagtcacctttgcagatgtggctgtggtgttcaccccagaagaatgggtgtttctggactctactcagaggagcctgtatagagatgtgatgctggagaactacaggaacctggcctctgtggctgatcaactgtgcaaacccaatgcgttgtcttatttggaagaaagaggagagcagtggaccactgacaggggcgtcctctcagacacctgtgcagaacctcagtgtcaaccccaagaggcaattcctagccaagatacttttacagagatcctgtccattgatgtgaaaggggagcaacctcagcctggagaaaaactctataaatataatgaacttgagaaaccttttaacagcattgaaccacttttccagtaccagagaattcatgctggagaggcatcctgtgaatgtcaagagattagaaattccttcttccagagtgcccacctaattgtgcccgagaaaatccgtagtggggataaatcctatgcatgtaacaaatgtgaaaaatccttcagatacagctctgaccttatcaggcatgagaagactcatactgcagagaagtgctttgactgtcaagaatgtgggcaagccttcaaatattcctcgaatctccggcgacacatgagaacccataccggagagaagccatttgaatgtagtcagtgtgggaaaaccttcacgaggaactttaacctgattttgcaccagagaaaccacacaggagagaagccctacgagtgtaaagattgtgggaaagccttcaatcagccatcatccctcaggagccacgtgagaactcacactggagagaagccctttgaatgcagccagtgtgggaaagccttcagggaacactcttcactgaagacacatctgcgaacccataccagagagaaaccatatgaatgcaaccagtgtggcaagcccttccggacgagcactcatctgaacgtgcacaagaggatacacacaggggagaaactgtatgagtgcgcgacttgcggtcaggtcttgagtcgtctttcaaccctgaagagtcacatgcgaactcacactggagagaagccctatgtgtgccaggaatgtgggcgagccttcagtgagccctcatccctcaggaaacatgcaaggactcacagtggcaagaagccctatgcatgccaggaatgcgggcgagcctttggtcagtcttcacatcttattgtacat

SEQ ID NO: 93333 - DNA, 505 bp, Homo sapiens
  misc_feature (1)...(505): n = a,t,c or g
tcgtgtggcggaattccgagccccaagtaagcaggcactctcattccctccctgacgtctcgggaggtaggggtgaggtgatcatgttcaccacagaccttgggctctccccttgtccttggctgtctcctgtccctgggcctctggcatccaatctagcggtcacagccaccacctttggtcagacttatcctgtcctccatttcccaccctgggacctctgggcctgtgagccctggggagaaatataaggcttcctcccttcatggaaggcggggggacccagaccgctctgtttgaatgtgagcaccctcccctccccctctcgtcttgtgtatggcctgagaaaagctcagtggttccggctccaggacccttcccaactgacccctgcctggctctggcctgcagatgaaaacgggccctacttcctggcccttcgcgagatgatcgaagagatgtaccagctgtatgggggccccgtggtgcttggtgcccacagaan

SEQ ID NO: 93334 - DNA, 599 bp, Homo sapiens
catgaatgtcatgagcccactatcagggaccttacaatttggagggttaggtcagatccacaaatttcttgtatctcatggtaaaggaaacctggcgtgcagcaggagatggtgtgataacaataacatgttgcatgatcaatatttgtattcttcttagcaatattaaactttttgaccccctccattgtgtcatcaatttgcttaatacagtttcttcctcagcgtcggtttttaggcctggcataagctgtttgaaacccaggaaggtaccccacccatcatctttggcctagttaacacctcccctccgtgtgtggtggtttggagaacctgctttttcctcatcccactgatcccaaacccaggacaccctacagctgctgaccaggattaaacctaatggagatttaatgccattaaatcagaagaaattctgattctcagggactgacattcattcacttacatacttacaggggtgaattaccctacctggccccatttcctcttataccataagtcattgcctgcagatgtgttttctccattagtttgcaaaagcttcctgagagtagtctgtacctcatttattctgg

SEQ ID NO: 93335 - DNA, 453 bp, Homo sapiens
ttttcgacgatttcgtgttgagctgtcctgggctgggtgccttgctctttgactgagactggagacagacggcaacagccacaggcagactgaggtggcaataggaaatctgccgagatgttcagtcaggtgcccaggaccccagcctcaggctgctactacctaaattccatgacacctgagggccaggagatgtacttgcgatttgatcagactacaagacgctctccttacaggatgagccggattctagcacgccatcagctagtgactaaaattcaacaagaaattgaggcaaaagaagcatgtgactggctccgtgctgccgggttcccgcaatacgctcagttatatgaggattcacaatttcccatcaacattgtggctgtcaagaatgatcatgattttcttgaaaaggaccttggagaacctctttgcagacgactaaatacg

SEQ ID NO: 93336 - DNA, 423 bp, Homo sapiens
tgctcaatacggaacatattctcagtcctcctctggtctacaaagcctgtgatttcttgtctatggacagaacgtctggtttaatctacaggaacccataacttcctgaagctttatgcttaacagtgacaacgtgagtcagttgaattttattgtgtttcagtccgtagagtattagctacagaaacctttccattgccatactgagaaactgcagcaggcagtgtgcctacaggtctacaaagaaacttcagatcatcttcttgagggaaagaagctgaagtgctacataagatgcttgtgcttcataactctcagaagctgcagattctgtataaatccttagaaaagagcatccctgaatccataaaggtatatggcgccattttcaacataaaagataaaaaccctttcaacatggag

SEQ ID NO: 93337 - DNA, 848 bp, Homo sapiens
aaatgctctgtcttgtttttcttccctcccagctctgccatatgatcctctcttctgaacctgcagttttgtggtggcagcagcagccaaccagacacttaaaaatccaagggaagtgaatcctctctgatcagaggaactatggtccaaacagtgtagaatgattcctattgcttttttctttttttaattctcttgctgtttggccccagagacagatctagttgcaggaagtacaagactttctagtcagaggaccgggtggcagtgggggatggaggtggggtagtagagtgtcattgagtggggcccttcacagataagagggagctcataaagggaccgcatgatgttatgtatgaacttctgggcccacccttgagccatacaacatagatctgaccctaaacagcataccaagtagctgtgggatagatagcccacccagatatcaggctggctcctggcctgatgcacatctaggacagattcaaatacatcctgttcttcatagaattggagcaagacccagagtctcatagcatcttatatcccaaatgttcatgatatgatacaaaattacttgacacaaaaagaacccggaaagtctgactaagtctcaagggagataacaagaaccaacccttgagatacccgaatggtgtatattagggaggggtttttaaccagctggtctaaccatggtgtggcaaaatgatccccgttaacgaaagatctttccaacgaacccaggaaattttaactggaacgagcatgtccaaacttgaacaaaatcccggattgggccgaacgcgcgcttgaaacagaagtagcatggttcggaacac

SEQ ID NO: 93338 - DNA, 436 bp, Homo sapiens
  misc_feature (1)...(436): n = a,t,c or g
nnnnnnnnnnnnnnnnnnnnnnnnnnnnnnnnnnnnnnnnnnnnnnnnnnnnnnnnncctagaatcttaaaaacaagttatctccattctaatagcagtctttatggaagtaacactgtaacaaataatctttatcacagtttgaaagctcactctattgagagaagacaaagctcagaagcagtaccacgtaccaatgccttgaaaaattatgaatccccaaatgaaagtgcgcaaccagcggatgaagttttaagttgtgatataaaaatgttctaatgctaacagaagcaataaatgcaatatccattgctctgcctcctacaactactagcagccttgttatctcagacacaagtgctctatcccacaaagtgcttgtgttctttcctaaggaatcctggagatatttatgccatctaaacccacgcgtccg

SEQ ID NO: 93339 - DNA, 508 bp, Homo sapiens
atggacgttcattacgccaagcttggcacgagggcaacataataggttttaaagcatgtattcatcaaattagctttgctaaccactttcctgtgaggatgaacctcaagccccagcaataccttctcattttccttttcttgcttccttaacttgcctgcatttcacccccatccttaatcaagtcccgaggaaggccagcaactggaagctagcaccaaaccaatctgcttgtttccttagattccatgtttttctttttccccccgtatattccaatggttcaaaattcaaaagatgtaaaatgatattcagtgacttgtctctctctccgataggtcagttccctcccttggaaattcccaatggtattaatttcttgtttatcctctcagaggatatattttatacatatataaatatatgcacacacacacacacatatacacacacacactcatacacacacagcttggatttgattttaatgactttaacattctctact

SEQ ID NO: 93340 - DNA, 393 bp, Homo sapiens
cccaggttctcggagcttgtggacggcagaggaagagtgagcgccaggttcggtggctcacccagcaaagcagccaccgtgagatcacaacccacagcctcggcgcagctcgagaacatggaggaagcccccaagcgggtcagcctggccctccagctccctgaacacggcagcaaggacatcggaaacgtccctggcaactgttcagaaaacccctgtcagaacggaggcacttgtgtgccgggcgcagacgcccacagctgtgactgcgggccagggttcaaaggcagacgctgcgagctcgcctgtataaaggtgtcccgcccctgcacaaggctgttctccgagacaaaggcctttccagtctgggagggaggcgtctgtcaccacgtg

SEQ ID NO: 93341 - DNA, 391 bp, Homo sapiens
gaaggttattttatacttcgtatctccaattcttttgcaatcaatcttttggaaggaacagcagttgattgtgaatttagttttgaaccatcattaggcaaagatagcttctctagagagaatcatgcctgctaattacacgtgtaccaggccagatggagacaatacagattttcgatactttatttatgctgtgacatacactggcattcttgggccaggtctcatagggaatatattagccctgtgggtattctatgggtatatgaaagaaacaaaacgagctgtgatatttatgataaacttagccattgctgacttactacaagttctttccttgccactgaggatcttctactacttgaaacatgactggccatttgtgcctgtt

SEQ ID NO: 93342 - DNA, 367 bp, Homo sapiens
ccaggacggtgtggctcatgcggcgccggcctcacctgcggtgtcccagatggagatgttgtaggagcgccactgcttcaggtagaaggcgccgcccaccgtgctgaccgtgtccgggaagcgccgctccatataccgctgcagcagcgacgtcttccccacgttcatgtcccccaggagcacgatcttgctgtcgggcttcctcatcttcccgtaagaacccccagcgcccccgcgccctctccccgaggctggccggctcgtgcgccctgggcgcagctggaggagcggaccccggactcgccgggacccggattctcgtgaacgctccgggaccttcgcctccggacgcccgggagctcaagag

SEQ ID NO: 93343 - DNA, 1758 bp, Homo sapiens
aactgtagaccctagtcagtgcggtggaattcctgttacatcagtgttgggaagctgatgccaagaaacggccatcattcaagcaaatcatttcaatcctggagtccatgtcaaatgacacgagccttcctgacaagtgtaactcattcctacacaacaaggcggagtggaggtgcgaaattgaggcaactcttgagaggctaaagaaactagagcgtgatctcagctttaaggagcaggagcttaaagaacgagaaagacgtttaaagatgtgggagcaaaagctgacagagcagtccaacaccccgctgctgccttcctttgagattggtgcatggacggaagacgatgtgtattgttgggttcagcagctcgtcagaaaaggtgactcttcagcagagatgagtgtatatgcaagcttgtttaaagaaaacaacattacagggaagcggctgctgctgctggaggaagaagacctgaaagacatgggcattgtctccaaggggcatatcattcacttcaagtcagccattgagaaattaacccatgattacataaatttgtttcacttcccaccactaattaaggactcaggaggtgaacctgaagaaaatgaggaaaaaatagtgaacctggaactggtttttggttttcacttgaaaccaggaactggcccacaggattgtaagtggaaaatgtatatggagatggatggggatgaaattgcaataacctacataaaagatgtgacattcaacactaacctacctgatgcggagattttaaagatgacaaagccaccatttgtaatggagaagtggattgtaggaatagcaaaaagtcagactgtggagtgcactgtcacatatgagagtgatgttagaactccaaaaagcactaaacatgtccatttgattcagtggagtagaacaaaacctcaggatgaagtgaaagcagtccaacttgccattcagacattattcaccaattcagatggcaaccctggaagcaggtccgactcaagtgctgattgccagtggttagatactctgaggatgcggcagattgcatccaacacttctttacagcgttcccagagcaatcctattctggggtcaccgttcttctcacactttgatggccaggattcctacgctgctgctgtgagacggccccaggtgcccattaagtatcaacagattacacctgtgaaccagtccagaagctcgtctcctactcagtatggactgaccaaaaacttctcttccctacatctcaactctagggacagtggcttttccagtggcaatactgacacctcttcagagaggggtcgatactcagacagaagcaggaacaaatatggacgtggtagtatatcactcaattcttctcctagaggaagatacagtggaaagagtcagcattccactccttcaagaggaagataccctggaaagttctacagggtttctcagtcagcactcaatcctcaccagtcgcctgacttcaagagaagccccagggacctccaccaacccaacaccataccagggatgcctttgcaccctgagactgactcaagagccagtgaagaggacagcaaagtcagcgaagggggctggacaaaagtggaataccggaaaaagccccacaggccatctcccgccaaaaccaataaagagagagccagaggggaccaccgtggatggagaaacttttgatgaattgaactacatagcttttctaagcaggtta

SEQ ID NO: 93344 - DNA, 7545 bp, Homo sapiens
  misc_feature (1)...(7545): n = a,t,c or g
cctggcataagggttggaattacaagtcagacagggctgagcagcaatcttcaagaaaattgctctaaattggccttcattagctctcacggcactgaaaaacaactccaatgcatgcctatggaagggagaggcagagcctctagctccatttcagacctgcaaggaaagggctttgagaagggaactggggagaagcacgttccaggtgtgggttcagctcggcactcgccacaggcctccgcaggtggctctccttggcagcgaggcaaggcgcaaacccgctggcttgggaagcctgaccctggcaggaagcgacgccggggttctccgcaagaagaaggcggcctccgggtgtcggccgcagccaggctactgtgctccggggcaaaccgctgcaaagtcctagtgaggcagaactcgacccccaacactcagcagcctgccgtccacccatccacacccccgtctcgccccctgccccaagctggcagatgccttgtcgcccctctaagaccgcacccggattgggtggctgcaaagacgctcgccaaagcgctcagagccccagggaagccgtggcgcctggcagctccctctcctctgggagatctgggggcgccagggctgccggggcctagcacagcgccgagaaccctcagcgtcgaggagccgggtgtcgagtgcaatcagctctgtctctatgcggatgtcacagatccagtgctctgcttgggacagaaggacccgggtgttgaaggcaagcattgtgaaaaggaaaaaatttcttcttcaaaggagctgaagcatgttcatgcaaaaagtgaaccaagtaaacctgcccggagactttcagagtctttgcatgtagttgacgaaaacaaaaatgaatccaaaatagaaagagaacataaaagacggacatctacccctgttatcatggagggggtacaggaagagactgacacaagagatgtaaaaaggcaagtagaacgctcagaaatttgcaccgaagagccccagaaacagaaaagcacacttaaaaacgaaaagcatctaaagaaagatgattctgaaacaccacatttgaaaagcctacttaagaaagaggtgaaatcctccaaggagaagcctgaaagagagaaaactccatcggaagacaaattgtctgtgaaacataaatataaaggtgattgtatgcataaaacaggtgatgagactgagcttcactcttctgagaaaggtttaaaagtagaggaaaatattcaaaagcaaagtcaacaaacaaagctttcttcagatgataaaaccgaacgaaaaagtaaacataggaatgaaaggaaattatcagtattaggcaaagatggaaagccagtttctgaatatattataaaaacagatgagaatgttcgtaaagaaaacaacaaaaaagagagacgcttgtcagctgaaaaaactaaggcagagcacaaatcaagaaggtcaagtgattctaaaattcagaaagattctctgggttccaagcaacatggtatcacattacagagaagaagtgaaagttattcggaagataagtgtgatatggactccactaacatggatagtaatttgaaaccagaagaggttgttcacaaggagaaacgacgaacaaagagcttgttagaagagaaacttgtgttgaagtctaaatcaaaaactcaaggcaaacaggtaaaagttgtagaaacagaattacaagaaggtgccacaaaacaggcaaccactccaaaaccagacaaggagaagaacacagaagaaaatgactcagaaaaacagcgtaagtctaaagttgaagacaaaccttttgaagaaactggtgttgaacctgtattagagactgcttcttcttcagcacatagtacacagaaggattctagtcatagagccaagttaccattagcaaaggagaaatataagagtgataaagactccacttccaccaggcttgagagaaagttgtcagatggccacaaaagcagaagcttaaagcatagtagtaaagacataaaaaagaaggacgaaaataaatcagatgacaaggatggtaaagaagttgacagtagtcatgaaaaggccagaggtaatagttcactcatggaaaagaaattaagtagaaggttgtgcgaaaatcggagaggaagcttgtcacaagaaatggccaaaggagaagaaaaattagcagcaaacactttgagcactcccagcggttcctcccttcagagaccaaaaaagagtggtgatatgacattgatccctgaacaagagccaatggaaattgattctgagccaggtgttgaaaatgtgtttgaagtatctaaaacccaagacaaccgcaataataattctcaccaagacattgactctgaaaatatgaaacaaaaaacttctgccactgttcaaaaggatgaattgagaacttgcacagcagattcaaaagcaacagctccagcttataagccaggccgtggaacaggagttaatagtaattctgaaaagcatgccgatcatagaagcaccttgaccaagaaaatgcatatacaaagtgctgtgtccaaaatgaaccctggggagaaagaacccattcatagaggaactactgaagtgaatatagattctgaaactgttcatagaatgttactgagtgccccatcagaaaatgatagggtacagaagaatttgaaaaacacagctgctgaagaacatgttgctcaaggagatgccactcttgaacattccacaaatttagactcctcaccatccttaagttcagtgactgttgtgcctctgagggaatcgtatgatccagatgtaattcctctgtttgacaaaagaactgttttggaaggtagcacagccagcacctcccctgcggatcactctgctctccctaaccaaagtctgactgttagggaatcagaagtccttaagacaagtgacagcaaagaaggtggtgaaggtttcacagtagatacaccagcaaaagcaagcatcactagcaaaagacacattccagaagctcaccaggctactttattggatggtaaacaaggaaaggtaatcatgcctcttggaagtaagttaacgggcgtgattgtggaaaatgagaatattaccaaagaaggtggcttagtggacatggccaagaaagaaaatgacttaaatgcagagcccaatttaaagcagacaattaaagcaacagtagagaatggcaagaaggatggcattgctgttgatcatgttgtaggcctgaatacagaaaaatatgctgaaactgtcaaacttaagcataaaagaagcccaggtaaagtaaaagacatatcaattgatgttgaaagaaggaatgaaaacagtgaggtagacaccagtgctggaagtggctctgcaccctctgttttacaccaaaggaacggacaaactgaggatgtggcaactgggcctaggagagcagaaaagacttctgttgccactagtactgaagggaaggacaaagatgtcaccttaagtccagtgaaggctgggcctgccacaaccacttcttcagaaacaagacaaagtgaggtggctttgccttgcaccagcattgaggcagatgaaggcctcataataggaacacattccagaaataatcctcttcatgttggtgcagaagccagtgaatgcactgtttttgctgcagctgaagaaggtggggctgttgtcacagagggatttgctgaaagtgaaaccttcctcacaagcactaaggaaggggaaagtggggagtgtgctgtggctgaatctgaggacagagcagcagacctactggctgtgcatgcagttaaaatcgaagccaatgtaaatagcgttgtgacagaggaaaaggatgatgctgtaaccagtgcaggctctgaagaaaaatgtgatggttctttaagtagagactcagaaatagttgaaggaactattacttttattagtgaagttgaaagtgatggagcagttacaagtgctggaacagagataagagcaggatctataagcagtgaagaggtggatggctcccagggaaatatgatgagaatgggtcccaaaaaagaaacagagggcactgtgacatgtacaggagcagaaggcagaagtgataactttgtgatctgctcagtaactggagcagggccccgggaggaacgcatggttacaggtgcaggtgttgtcctgggagataatgatgcaccaccaggaacaagtgccagccaagaaggagatggttctgtgaatgatggtacagaaggtgagagtgcagtcaccagcacggggataacagaagatggagaggggccagcaagttgcacaggttcagaagatagcagcgaaggctttgctataagttctgaatcggaagaaaatggagagagtgcaatggacagcacagtggccaaagaaggcactaatgtaccattagttgctgctggtccttgtgatgatgaaggcattgtgactagcacaggcgcaaaagaggaagacgaggaaggggaggatgttgtgactagtactggaagaggaaatgaaattgggcatgcttcaacttgtacagggttaggagaagaaagtgaaggggtcttgatttgtgaaagtgcagaaggggacagtcagattggtactgtggtagagcatgtggaagctgaggctggagctgccatcatgaatgcaaatgaaaataatgttgacagcatgagtggcacagagaaaggaagtaaagacacagatatctgctccagtgcaaaagggattgtagaaagcagtgtgaccagtgcagtctcaggaaaggatgaagtgacaccagttccaggaggttgtgagggtcctatgactagtgctgcatctgatcaaagtgacagtcagctcgaaaaagttgaagataccactatttccactggcctggtcgggggtagttacgatgttcttgtatctggtgaagtcccagaatgtgaagttgctcacacatcaccaagtgaaaaagaagatgaggacatcatcacctctgtagaaaatgaagagtgtgatggtctcatggcaactacagccagtggtgatattaccaaccagaatagcttagcagggggtaaaaatcaaggcaaagttttgattatttccaccagtaccacaaatgattacacccctcaggtaagcgcaattacagatgtggaaggaggtctctcagatgctctgagaactgaagaaaatatggaaggtaccagagtaaccacagaagaatttgaggcccccatgcccagtgcagtctcaggagatgacagccaactcactgccagcagaagtgaagagaaagatgagtgtgccatgatttccacaagcataggggaagaattcgaattgcctatctccagtgcaacaaccatcaagtgtgctgaaagtcttcagccggttgctgcagcagtggaagaaagggctacaggtccagtcttgataagcaccgccgactttgaggggcctatgcccagtgcgcccccagaagctgaaagtcctcttgcctcaaccagcaaggaggagaaggatgaatgtgctctcatttccactagcatagcagaagaatgtgaggcttctgtttccggtgtagttgttgaaagtgaaaatgagcgagctggcacagtcatggaagaaaaagacgggagtggcatcatctctacgagctcggtggaagactgtgagggcccagtgtccagtgctgtccctcaagaggaaggcgacccctcagtcacaccagcggaagagatgggtgacaccgccatgatttccacaagcacctctgaagggtgtgaagcagtcatgattggtgctgtcctccaggatgaagatcggctcaccatcacaagagtagaagacttgagcgatgctgccatcatctccaccagcacagcagaatgtatgccaatttccgccagcattgacagacatgaagagaatcagctgactgcagacaacccagaagggaacggtgacctgtcagccacagaagtgagcaagcacaaggtccccatgcccagcctaattgctgagaataactgtcggtgtcctgggccagtcaggggaggcaaagaaccgggtcccgtgttggcagtgagcaccgaggaggggcacaacgggccatcagtccacaagccctctgcagggcaaggccatccaagtgctgtttgtgcggaaaaagaagagaagcatggcaaggagtgccccgaaataggaccatttgcaggaagaggacagaaagagagcactttacacctcataaatgcagaagagaagaatgtattgttgaactcccttcagaaagaagataagagcccagagacagggacagcagggggcagtagcacagcaagttattcagcaggaaggggcttagaggggaatgctaactcacctgcccacctgagaggaccagaacagacgtctgggcagacggctaaggattcctctgtcagcagcattcgctatttggcagcagtaaacaccggtgctataaaagctgatgacatgccacctgttcaagggaccgtggctgagcattcctttcttcctgctgagcagcaggggtctgaagacaacttgaaaaccagtaccaccaaatgtattactggccaagaatcaaaaattgctccttcccacacaatgatccctccagctacttacagtgtagctctgttggctcctaaatgtgagcaggacttgactataaagaatgattatagtggcaaatggactgatcaagcatctgctgagaaaacaggagatgataacagcacaaggaaatcattccctgaggaaggagacataatggttactgtgtcttctgaagaaaatgtgtgtgacataggcaatgaagagtctccattgaatgttttgggaggattgaaactgaaagccaacttgaaaatggaggcttatgtgccttcagaggaagagaaaaatggtgaaattctggcaccaccagaaagtctgtgtgggggaaagccaagtggaatagctgaactccagagggagcctttgttggtgaatgaatcactaaatgttgaaaattcaggcttcagaacaaatgaagaaattcatagcgaatcttataacaaaggagagatatccagtggtagaaaagacaacgcagaagccataagcggtcacagtgttgaagcagatcctaaagaggttgaagaggaagaaaggcatatgcctaaaagaaaaagaaagcagcattatctctcttcagaagatgaaccagatgataatccagatgtcctggattccagaatagaaacagcacaaaggcagtgtcctgaaacggagccacatgncacaaaggaagagaactccagagatttggaagaattacctaaaaccagttctgagacaaatagcactacctcaagggtcatggaagaaaaagatgaatatagcagcagtgaaactactggtgaaaagccagagcagaacgatgatgacaccataaaatctcaggag

SEQ ID NO: 93345 - DNA, 2488 bp, Homo sapiens
ggtttactacttccccagattcagaacagaggagtaactaggggatctgattttagaggccttaattttctgttcatggactgttaaaagtaaaaccaaactttcaaaagggataaacctaaatatttacttgttatcattagagagggaacatcaaatgctgggacatcattactaaccaatagcatcagacactggatttaatggataatcacaatggtcgtaatgtatacagacatatataccacgttctagtataaatttttcaaaaaatacaataataatataatttataaagaacactcttctatgaacaaccaccaccaccaaaaaagaaaaagccctcagaaaatttctcacaaataaggcaactaatgcctgatatctcaaaatcctttacaaaaggagatagttctagtcaaggagttttgggtatgttacttttttttcttctttttcttttcatctgcctccatcttaagtgcaatttcttcagctgtaagagctcccagtttcttattctttgctttcttaaccttttccttgatgctggccacatcaattttagtttcagtagaagctagacaaattaaaagcacaacacatgtaatactttagattttaccaagtaaaacaaagaatatatgtttaacaaagaatatatgtttaaggcagttaacttcagagtattcttataattgaataattgaaagatgatcacagtataaaatataaaaacacttgcctaaagcagttagaaatttcttcagattaagataaaacaaatcataaaatactttatatattagtacaagtatacataaaaatggcataaatggcataattgaaccaattactggattcaactatattaagactatttccttaaatcctacttcagactaaattattttacctacattcttttccatattttggaacttctgagtcattattttccatcttgcacattaaaataatttaaaattacatgtatcccttctcaataagtttaatcagctaaccctaagctagaggtcaaaatctacttcctctaatatcaaaacgaaaatttaaagttttccaaatattaattcaatattaattgaatattcaatgaattaattcatttaatgttagattaattcattgaatattaattcgatgaatgactaattaatagtattttaacaagattttggtatatttaacaacattttggtaataaagacaataatttgagagtgtgtggaagtccccctaatagaagccaactatctaatcaatgccaaaagtgtgaacaaaatagagaaaggaagcagtgaaaaagaatgcaactttttcttaccattcaaagtacaggatcacagcataaaagaatcataagataaaacatcaaactacccagcaacctgagaagcacagagtgttaaagcctccaccgtgtggagaaactaaattagggtaactagctattgagtatattgagtaccttcaaagcactcaactgacaggttttacagactggaaattataatacttatgacatttctaccttttatataaccaataatctaccatagaatgtagtatttttaaagctattaacaagcaatatattaaaataataatgtattatatctgtttctgacccagtctatgtacaatattgctggtgagccctctcccttcagtgtgtcactgttcactttggagggttactttaggaagaggataagtgttaccacaggggaaaaaaatgcagaagaggatgcatcagaagaaatggcatgacaatgttttctcttagtgtcttttaaatactaggttagtgcgaaagtgatttctgccatttaaaaaccacaatcactttcgcactaatagctcctgaataagacctgtcagcatcctttagtctaaggtgatgagaaatccatgttaccgatatagaagccaaactctaagccaagatcacataaagagaagaaaaagtacaacttctgataattcctctttgagaggcatgacagcagagctcagggatcttcttgcatttctacagaagatgcactggctgccctgggtttgtatctttcacaacaaagagtcttttccaagcacagaccagaggtcaggagaggactgtcaatccagtttgcactgaaataggcattagctgcctctaaattataaattatctcagccatcccttgtccttaggattagtaattaatgaaatgctaagagaactgatgaaaagatacaactgtttcttaaaaagattcagacaaatttattaattaggaaaagtaaacccataataaagacttttacatcatagaaagcattaccttccttaggtttcacaattggtttttccttaggtggaataaatgctttgtttctttcctcttgtctcttactgatggcttctgcttgtttagcctacattaataaataaaaaatatatcagttaaaaaaaaaaaat

SEQ ID NO: 93346 - DNA, 842 bp, Homo sapiens
actagttctagatccgtcactcgccgaggttccttgggtcatggtgccagcctgactgagaagaggacgctcccgggagacgaatgaggaaccacctcctcctactgttcaagtacaggggcctggtccgcaaagggaagaaaagcaaaagacgaaaatggctaaattcgtgatccgcccagccactgccgccgactgcagtgacatactgcggctgatcaaggtagcggagagccagagctcctcccggggcgtggggtggaggtggctccgtttcccagggtggggtgattcacgtcttgaggtctcggccggtgtgagagcccagcctgttcccctttctgcgcccatccccggctcggccgccaccccgcccgcccgccccattcccttcccctgagctggccgggccggagcctcattttgttttctacttttttctctcctatgtgcatccccccaaggagctggctaaatatgaatacatggaagaacaagtaatcttaactgaaaaaggtaattcaacagtggcgggacgggggacaagcgttcggtgcctgtcaccttcgccaaggccattaccgcccctgctcccccttcttgcagatctgctagaagatggttttggagagcaccccttttaccactgcctggttgcagaagtgccgaaagagcactggactccggaaggtaacccctcgccctttccagaagccagagagaccaagtgttatgtaagaagtagtgtcggctgtgtagaaccactgactacacaggccgaagttactgagaacttggacagaaaaaatagccagcaagtgttcaaactactgaaaaaaaaa

SEQ ID NO: 93347 - DNA, 412 bp, Homo sapiens
cggatttcaaatccaattctatttcatacaaggcagagaggaattgagggggaaatcctctaggggctgctagagaccaaaactggagtcttttgagctctgctctgttctttcgggatgaaaatagcctctgggagagtctaaagcagcttaaagcaaattgtgggccatgaaaatggccagaacattcccaaagacattttttagttaagagtttgaggtttctaatgctgccctcccaaaaaagtactgaagtaagaaacatgagtcgacaaattccaaataacctgattttgaaaagtacataaatgggaagggcaagaaatggtgagcaggttgcttgcagagaagttggggagactgtcattgctccacaatctataaaccgtgcaggactgcacagagttggaat

SEQ ID NO: 93348 - DNA, 1799 bp, Homo sapiens
ctgcattgggtaaatccttgcctgccagagtgggtcagcggccccaggcgcagtttgctcgcggcgtggggatgaagtccgtgtccctggaggggcccaggaagggcgaggaaagcggagtggattttcctggagcgggtgagaagaccccagaccctcaggctgcctcccctgaggaggcccccctgcctgggctatttggggacaacgatgactgggaccagctactgagcaactttggcagccctccgcacggagccctgcagctctgctggagcccgcccccgaccccaagagccacctcaggcccccagacaccccgtgtggtcaggcagatctccatctcggagccacaggcttttctatttggtcaggagccatcttcagatccagatggggctccaaggaccccacctggggtgactttcagcgccaaggacaataaaggagtggacccacatgagcaggacattagagcagagcagcctgttgaaccgcacgacccggaccccaaccaggagccagggtccacacccgagggccgcctcctctggggtctctcaggaagcctggtggcacctgcattcaaagtgctcattcctttggaggatgggccccctccccttgagaactctccccctccccaggccccagctgggtccagcaaacagatccaggcctcagacccagatgacaagggccctgggtcttgggctcctcccagcggggctcagcctggggctggagcaggaccccaggaacccacacaaacccctcccaccatgactgagcgggaaacccagcccggaccctcacccacaactgccctcacaggagtgggcccagccaagccgcccaggcagagagatgccctccagcaggacctgcatgccactggctctgagccaagactggggacccagagggctagagccctcaccctggggccagctgagcccttccagggcctggaatttgtgggtccggtgcccacagagaggctggagcagggccaggcgggcccagcggtgcaggagggccttcctgaggggctaagagaagctcatggccaggtccttgggctgggtgagctgtctgccttcccccaccaggagctggaagaggaacccaggtctgaggaaggaaaacaagagggcagaggtgggcaggacctcagttcagagcagtcagagcagtcggttgaggctcacggcctagaaactgcgcattcggaactcccccagcaagactctctgcttgtttctctcccatctgccacaccacaggctcaggtggaagcagaaggccccactcctggaaaatcggcacctccaaggggctctcctcccaggggggctcagcctggggctggagcaggaccccaggaacccacgcaaacccctcccaccatggctgagcaggaagcccaacccaggccatccctcacgactgctcacgcagaagaacaaggcccgcctcactccagggaaccaagggcagagagcaggcttgaagatccaggaatggactccagggaagctgggctgaccccatccccgggagaccccatggctggagggggaccccaggccaaccctgattacctcttccatgtcatctttctgggagactccaacgtgggcaaaacatccttcctgcacctgctgcaccagaattctttcgccaccggattgacagctaccgtgggtaagggcattggggagggcggcagggagcaaggagagacgcaggggccagggccaacgagtgagagcgggcccagaccaagccctccctga

SEQ ID NO: 93349 - DNA, 504 bp, Homo sapiens
ggcacgaggtcgacctcgtccttgaggcgccagatgaagaacatcgtccacaactactcagaggcggagatcaaggttcgagaggccacgagcaatgacccctggggcccatccagctccctcatgtcagagattgccgacctcacctacaacgttgtcgccttctcggagatcatgagcatgatctggaagcggctcaatgaccatggcaagaactggcgtcacgtttacaaggccatgacgctgatggagtacctcatcaagaccggctcggagcgcgtgtcgcagcagtgcaaggagaacatgtacgccgtgcagacgctgaaggacttccagtacgtggaccgcgacggcaaggaccagggcgtgaacgtgcgtgagaaagctaagcagctggtggccctgctgcgcgacgaggaccggctgcgggaagagcgggcgcacgcgctcaagaccaaggaaaagctggcacagaccgccacggtaacacacaacgattactag

SEQ ID NO: 93350 - DNA, 429 bp, Homo sapiens
tttcgtagtactagcagcagtggttcctaaatgaaatgggctatttctgcttcattactttattattctgagttaaataaacatgggacataagaggatgatctctgctttccagggactgatgtggaaatggtaaactcagtcttcagtccactccatgcacatgtatggagactactgagggaaacaagaaggacagcgataaaacatgatcctcctgaagaagagacggctgcttatcaattcattgggtgaaggtacaataaatggcttactggatgaattattggagacaaatgtgctgagccaggaagacacagagatagtaaaatgtgaaaatgttacagttatcgataaggcccgagatttgcttgactctgttattcggaaaggggcacgggcatgtgaaatttgcatcacatacatttg

SEQ ID NO: 93351 - DNA, 458 bp, Homo sapiens
tccggaactcccgggtcgacgatttcgtgtgctctggaaccctgtggcttctttgagttcatctcctgctggttaccaccttactcatttctctccaacgatactggccttcttgttattccttgaacataccaagtatattctcttgcctcagggactttgcttctgcccttctccattcttgggatactcttctcccagttattctgcatgcctttctcccacacctcttttaaatatttgctttgaagtcaccttcttatcttttgccttgttgcactcctgaaggcaaaatggatcacaagcagctctgctggagccacccacaaaaatctggccagagttctcgctcttgttgcatctgctcaaaccagcatggtctgatctggaaatatagcctcaatatgtgcctccagtgttgccatcagtacgtgaaggatataggtttcattaaattg

SEQ ID NO: 93352 - DNA, 407 bp, Homo sapiens
tttcgtggccaaggagggcactgggagctccgttccgggagagctgtctaaggacgcggaaccgggtggggaggccagggaggactgtttctttttccaaaagaggagctcaaaagagaaagttcatctagaaatctcaaagccatgtctcaggatgaactagagtatgcccttacagggatcagtgtcattcaaggatgtgactgtggacttcacccaggaggagtggcagcaactagaccctgctcagaaggcgctttacagggatgtgatgttggaaaactattgccacttcgtatctgtggggtttcacatggctaagcctgatatgatccgcaagttggaacaaggagaagagctatggacacagagaatttttccaagttacagctacctagaagaagatg

SEQ ID NO: 93353 - DNA, 407 bp, Homo sapiens
tttcgtgcgagagggaggcaacgagagggttcccgggccgggcagcagcccagccccggcccggaggggggcccgacgtcatgtgatgcaggaagagagcgcaaatgatatggaatgtgagcagctgccagcagagatactgcgacaagtgaccgttcaccgagaccctatatatggctttggcttcgtggctggcagtgagaggcctgtggtggttcgatctgtgaggccaggaggcccctctgagaacaagctcctggctggtgaccagattgtggctattaatgaggaagacgtgagtgaagccccgagggagagactcatagaacttatcaggagcgctaaggaattcatcgttcttacagttctgcacactcatcagtcccccaaatctgctttcatcagtg

SEQ ID NO: 93354 - DNA, 410 bp, Homo sapiens
tttcgtctgaagcgctgggaggcggacattaaagtgaagtggttgcggtaacctggcctgggcctgaagtgagtgagaggcacatgaagagaagtattcaagtatttatacagataggaatcaagataatcaacaatgtctgtcactgaggaagacctgtgccaccatatgaaagtagtagttcgtgtacgtccggaaaacactaaagaaaaagcagctggatttcataaagtggttcatgttgtggataaacatatcctagtttttgatcccaaacaagaagaagtcagttttttccatggaaagaaaactacaaatcaaaatgttataaagaaacaaaataaggatcttaaatttgtatttgatgctgtttttgatgaaacgtcaactcagtcagaagtttttgaaca

SEQ ID NO: 93355 - DNA, 458 bp, Homo sapiens
  misc_feature (1)...(458): n = a,t,c or g
gcctgcgggncnggtccggaattaccgggtcgacgatttcgttggggaattgccggaaagagcaaacaaaaaaggcgctggtgtaggctccaaaataaacacatctgaattcatgatggcatcgacagaggctcttattggattaaaagtttcaaaacaaacaataacgctttggaaaaagggttgaatgcaccctcaggcacgaccatggagaaaggtgggaacatacaattggagattcctgacttcagcaactctgtcctgagccatctaaaccagttgcgcatgcagggccgtctctgtgatattgtggtcaatgtgcaaggacaagcttttcgggctcacaaagtggtgctggctgccagctccccctatttccgggatcacatgtccttgaatgagatgagtacagtctccatttcagtcatcaagaaccctactgtttttgaacagctcct

SEQ ID NO: 93356 - DNA, 801 bp, Homo sapiens
agtgcggtggaattcgttctctcgcaggtcccagatgtctagttccagatgcctggacccagagtgtgggggaaatatctctggagaagccctcactccaaaggctgtccaggcgcaatgtggtggctgcttctctggggagtcctccaggcttgcccaacccggggctccgtcctcttggcccaagagctaccccagcagctgacatcccccgggtacccagagccgtatggcaaaggccaagagagcagcacggacatcaaggctccagagggctttgctgtgaggctcgtcttccaggacttcgacctggagccgtcccaggactgtgcaggggactctgtcacagtgagctggggatggggggggtcccgccaggactgtggccagggagattcccggggttgtgggaagtggcggtgccctgaatcccccatctggaggagggatgaattttccatgtaggggcagtcgggcttggcttaccggggagcagtggtggaccccaggacacagcctcccaccagcgcctccggggctgccatctgggccccacagagcaaagagggcagcaagcaggccctgcgtttggaaggcttatgaatggacacacaaatcttgcaaatctatggagccaggggcagggacgcacatattggttgttaaaaatatgtcatcatgtatttgttgagtgcctgctctatcaggtgaggaagctggacacaaataataacaaaagattaagtcaccgttcacacttaccttggaagagctattacaaaacttctaacgccaaagcct

SEQ ID NO: 93357 - DNA, 489 bp, Homo sapiens
attgccgcgtcgacatttcgtctgtgctgataaaggctcgccgctgtgaccctgttacctgcaagaacttggaggttcacagctaagacgccaggaccccctggaagcctagaaatgggaccactgacatttagggatgtgaaaatagaattctctctagaggaatggcaatgcctggacactgcgcagcggaatttatatagagatgtgatgttagagaactacagaaacctggtcttccttggtgaggataacttcaatacacaatacacaatgctctaaaagtttcatttctcctctttgtaaaatgttttttggtaatttatgctttgcataaatgagtttcagatcccaggtttcaagacaacagagatttgtcagtatagaaaagaacttcttcaagatgtttcattttgacctgaactctccacattcctgagctgatctatatccttcactctaaattagtggtaattccagaaatttatt

SEQ ID NO: 93358 - DNA, 476 bp, Homo sapiens
tttcgtctctgtcctgtaaattaagagcagatggagtggataaactgagagcgcaggagaaggtaacacaagtcagaacttccaccaagggcattactgagacatggagaacgttgataattctctggatggcagtgatgtgtcagaaccagcaaaaccagaagccggacttgaagtggctcagtcgatcctgagtaagttctctatgaaatccctatttgggtttacgagtaaattagaatctgtgaatccagaagaggaagatgctgtgctgaaagcattccatagtttagacgtgaatcccacatctcagcaggatgattccagcaatggcttggatccacaggaagcagggtctcgggtttcacctgacctcggaaatgatgagaaaattgcaagcgtggagacagaatcagagggaagtcagagaaaagaagcagggacatctctccttgctcaagagctgcttccactgt

SEQ ID NO: 93359 - DNA, 664 bp, Homo sapiens
tcccgtgtcgacgatttcgtggctgccactgtggggcttctgccggccggtagtccctggcgctgctgacccagcatcggcttttctacgtcttgaacctggattcgcctaggggttgggaagggctgtggacggcgttgggggaggcctgacgagattaataaagaactcttcagaattcctggtgtttcatcatatatacgactaagatatcaactcttctagcttgctgtttctggaccaaaaaaaatgacgtctattatcaaattaactaccctttctggggtccaagaagaatctgccctttgctatcttctccaagttgatgagtttagatttttattggactgtggctgggatgagcacttttctatggatattattgattccctgaggaagcatgttcaccagattgatgcagtgctgttgtctcaccctgatcctctccaccttggtgccctcccgtatgctgtcggaaagttgggtctgaactgtgctatctatgcaaccattcctgtttataaaatgggacagatgttcatgtatgatctttatcagtctcgacacaatacagaagattttacactctttacattagatgatgtggatgcagcctttgataaaatacagcagctaaaattctctcagattgtgaatttgaaag

SEQ ID NO: 93360 - DNA, 470 bp, Homo sapiens
tttcgtgagagcgagacagttctgttctaggtggcaagaaccatgcacttctccagctcagccagggcagcagatgagaactttgactatttgttcaagattatcctcattggggattccaatgtggggaagacgtgtgtggtgcagcatttcaagtctggagtctacactgagacacagcagaacacgattggagtggactttaccgtgcgttcccttgatattgacggcaaaaaagtgaagatgcaggtgtgggacacagctggccaggagcgcttccgcaccatcacccaaagctactaccgcagtgcccacgcagccatcatcgcctatgacctcacccggcggtccacgttcgagtccatccctcactggattcatgagatagagaaatatggagctgcaaatgtggtcattatgctgattggaaataaatgtgacctctgggaaaagcggcacgtcctgttcga

SEQ ID NO: 93361 - DNA, 478 bp, Homo sapiens
gtattaccgtgccgacgatttcgtcgggcttcccgggtaaaaaatggctggggctagcgatttctacctgctttactacgttttgcacaagggcaagtttgggcacgagtttctggagttcgaatttcggccggacggacgcatgaagagtaccaagcaagaggggagaggtaaggttccacaggagggagtcaggaagatcttcttaaaggacggcactcttgagatgagtctcgaaatgagagacttggcctttgagagaaaaaaacagacttccagagcagtatgagcagaggatgaggtgaaactgctacccaagtagtgagcaacagtgtgttttctgacagcgctatccttagagaatgttacattgatcttgcctacctgcaacaagaaagttcatttggatatatattttttgggtttttttgaatgcacgttatgtgctggacaacaagcaaatacaaaattttagggg

SEQ ID NO: 93362 - DNA, 583 bp, Homo sapiens
tttcgtagctgagccaagagtcgggcggtggctgggatgggcgggagggcccggcccgatttcccttgctgctccccttgtggcctgacgctgacagaggcaaaaatctgctaactcagggggcagactcaaccaagactgtgagcaggcctggggaatgaccccccgatctccaaccagtgccttccgcagctgcacggctgtctccagctgtctctgcccctcttcctggccctggctccatctctctgtcacctcacccttccctgtgccacatgggccctctctctcctgccaggacgctgcggctctggggacctcggagcctgggggtggctctgggagtcttcatgaccattggctttgcactccagctcttgggagggcccttccagaggaggctacctgggctacagctccgacagccctcggccccatccctacgaccagcccttccgtcctgcccaccccggcagcgactggtgttcctgaagacacataaatccgggagcagctctgtgctgagcctgcttcaccgctatggggaccagcacgggctgcgccttcgccctccctgcccgct

SEQ ID NO: 93363 - DNA, 1557 bp, Homo sapiens
cccgggtcgagccacgcgtccgcggacgcgtgggggcgccgattccaaagactgtggggcggatcaagctagactgctctctacggcccagctgcccactggaggtcgctgctgcacccaaactttgcaaggaattcggtccagaggattacggcgaagaggacatagtggattttcttcgacggcttgtggagagtgatccccagggcctgcaccggatccatgtggatgggagcagcgggcggctgcagctgtggcaccatgattacctcctgggccacttggatgatgaagggaaatcaactggacagagtgacaggggcaagggggctgagggactgggcacctactgtggtctccgcaagtccttcctgtatcctccccaagagtctgagccctgccctcaaagcccctctgcctctgccaccttccccagtgtctcagacagcctgcttcaggtggccatgccccagaagctcctggtgacagaagaggaagccaatcgcctggctgaggagctggtggctgaggaggagcgcatgaaacagaaagcagagaaaaagcgactcaagaagaagcgtcaaaaggaacggaagcgacaggagcgtttggagcagtactgtggggagcccaaggccagcactacctcagatggagatgagagccccccatccagccctggaaacccagttcagggacagtgtggtgaagaagaggactcactggatctatctagcacttttgtgtctctggctttgcgcaaggttggggattggcccctcagtgcccgcagagagaagggactgaaccaggagccccaaggcaggggtctggccctccagaagatgggtcaagaggaagagagccctccaagagaggagaggccccagcagagtccaaaggtacagtgttacctgtttaaacaaaggagaaggatttggggaggctgagacctcaagacctgcttgactttgcaccctatccccaggcatctccgggactgctggcagctgccttacaacagagccaggaactgagttgggtaccagctttgctcaaaatggtttctaccatgaggccgtggtcctcttcacccaggccttgaagctcaacccccaggaccaccggttatttggaaatcgttccttctgccatgagcggttgggtcagccagcgtgggccctggctgatgcccaggtggcccttaccctacggcctggctggccccggggcctcttccgcctgggcaaggccttgatgggactacagcgcttcagagaggcagctgctgtgtttcaggaaactctgagaggtgggtcccagcctgacgcagcccgagagctccgctcttgccttctccacctcacactgcagggtcagcgaggaggaatctgtgcaccacctctgtcacctggggccctccagccacttccccatgctgagctggcaccctcaggcctaccttccctcaggtgccctcgaagcactgctttgaggtcccctggcctgtctccactcttgcattaaccataatgtcaccgaagccacccctgtatt

SEQ ID NO: 93364 - DNA, 468 bp, Homo sapiens
cggaattccctggtcgacgatttcgtattgggggcctgaactcttgcagagcctcctcctcactggaccttgtggtttataacacctgccttgatctggcccctggcacctctctgactttgccttctaccactctgcacctcactcttcagcatggtgatggggcccctggtggcctaccccatgtcttctctccccagaaatgtgagagcttcttgccgccagagttccgctcttttgctgtagatccccagatcacctcgctcgacgtgttgcagcacatcctcatccgagcctttgatttgagtgggtgagtgggaagatgctggggactggccagtgggccaccgacctctacagtggctatctggcctttgtttggtagggtttttgtttattttactactacaaataatcccacagtgaacagccacgtatgcatgtcttggagcacagtagtctactttt

SEQ ID NO: 93365 - DNA, 451 bp, Homo sapiens
cccgggcaaccttcaggtccagccctggagctggaggagtggagccccactctgaagacgcagcctttctccaggttctgtctctcccattctgattcttgacaccagatgcaggatggtgtcctctccctgcacgccggcaagctcacggacttgctcccgtatcctgggactgagccttgggactgcagccctgtttgctgctggggccaacgtggcactcctccttcctaactgggatgtcacctacctgttgaggggcctccttggcaggcatgccatgctgggaactgggctctggggaggaggcctcatggtgcttactgctctgttgtcaggtggcctggctttacttggagccctgatttgctttgtcacttctggagttgctctgaaagatggtcctttttgcatgtttgatgtttcatccttcaatcagacacaagcttgg

SEQ ID NO: 93366 - DNA, 157 bp, Homo sapiens
ttttttttttttaaaaaaagggatttgccttttggtttcccagctgagatggaagggcggaaatcttgtttaacaaaacccttctcctttggggtttaaggaaattctctggctcaacccttaaaagtatgtggatataagggcatacccccccact

SEQ ID NO: 93367 - DNA, 386 bp, Homo sapiens
  misc_feature (1)...(386): n = a,t,c or g
tttcgtgccggagcacacgtgtttcgtgtttcggtgagtgtggcggagatggagagccgggatcccgcccagccgatgtcgcctggagaagcgacgcagagtggcgcccggcctgccgaccgctatggcctattgaagcacagtcgcgagttcttggacttcttctgggacattgcgaagcctgagcaggagacgcgacttgcggccacggagaagctgctggagtatctgcctggcatgccgaaggtggagtggcggggtctggggcataggctgcgcatatcccggcaaggaagcggcggcgggcccagggagtagagactgggggcacgtggtcgcgaacctggatgccaaggtgcgcggagtcgtgcaccttgatgtcaccn

SEQ ID NO: 93368 - DNA, 386 bp, Homo sapiens
tttcgtagatgatgatatttggttgagaggagtgcctaggaataaactgactttgtgagtatcataaaaaccttcttgagtggcctcagcagggaaactgagtcttcttgctcagtccctggaaaaagttagactacttactccccatgccatggggtaggtgcccatttgctctctgggtactatggcacaggatggcagtaataattgtccatgataagtagtgatgttcagctgccagtcaggctctgccatggcaggctgtgaggcactcactcactctacctgctcctcagtttttctgccagtaaaatgggaagatagaagctgctggctcgctgaggtcctggaggttctactactctgtccctccataccacccattg

SEQ ID NO: 93369 - DNA, 406 bp, Homo sapiens
tttcgtgggatccttgagcttctccggcggcgaggggatagctgtttaccagaaggacttctttgcagggccagtggtttctgtcagattttcgccggtcacgactgctgaatatgagacgatctgcagcaccaagtcagttgcaggggaattccttcaaaaaaccaaaatttatacctccaggaagaagtaatccaggtctgaatgaagagattacaaaactgaatccagatataaaattatttgaggtaaggcaaaaaaagactcatgatatagataatatagagaagcatgtatgtttaagaaaatgccatttaaagagttaacagtattttctgcctgtaggaattttcagtatctctgaaaacatcttctaaaaaccttggaaatgaagattacataattt

SEQ ID NO: 93370 - DNA, 438 bp, Homo sapiens
cgggtcgacgatttcgtagtaacttaagcgattgttttggagtggcaagtgatagttaagggctgataaggttgctggggaggttacctgtcttaactcactgcccttttttctcagggagccactggtggggaccttttttgggccccctttccttcgtggggtactatggagttcccagaacacagtcagcagctgctgcagagcctccgggagcagcggtcccagggtttcctttgtgactgcaccgtgatggtgggtagtacccagttcttggcccatcgggctgtgctggcctcctgcagcccattcttccagcttttctacaaggagcgggaattggacaagagggatctggtgtgtattcacaatgaaattgtcacagccccagcctttgggctgcttctggactttatgtatgctggccagctgaccctg

SEQ ID NO: 93371 - DNA, 670 bp, Homo sapiens
tttcgtgccgcggcggggcccctggcggagacggcggcaggagttgggcccagagacgcggggacgggccgtgggcccccggaacgaggcaaagatgctggaaggagatctggtttcaaagatgctacgagctgttctgcagtctcataagaatggagtagcattaccccggctccaaggagagtacagatccttgactggagactggatccccttcaaacagctaggtttccctacactagaagcctatctgagaagtgtgccagcagtggtcaggatagagactagtagatctggagagattacctgctatgccatggcctgcacagaaactgcaagaattgctcagcttgtggctcgtcaaaggagttctaaaaggaaaaccgggcgtcaagttaattgtcagatgagagtgaagaaaaccatgccattttttctagaaggaaaaccaaaagcaaccctcagacaaccaggatttgcttcaaatttttctgttggcaaaaaacctaatccagcaccgttaagagacaaaggaaactctgctggagttaagcctgatgctgaaatgtctccttatatgctacacacaactcttggaaatgaggcattcaaagacattccagtgcgaaggcatgtgaccatgtccaccaacaacaggtttagcccaaag

SEQ ID NO: 93372 - DNA, 676 bp, Homo sapiens
tttcgtgaaagtgcagtgtgagcaacgtgtgtgtgtgtacatgtgtgaatatgtatgcatgtgtatacatgtgcacatgcacacatgtacatgcatgtgtgtgcatgtatgtgtgtgtgcgtgtgcacatgcaggttgagacgcagggcctgacttccctggtgctgatggggaagaaagataaggaagcaaaacagtgggctttggcaggctgaggcctccccctggtttcacatttgctctcaagcctttggtgagactgacatctggctgcaaatagggtgtgccttccagcacctccgtgggtccagactccatccacaggggcctgggcacccatcagaatgcccaggacacctgtctctccggtggaggcctctggggcagaggggatgcttgagaggtcacatggaagggggtttcctctccaggtgctggaagatcgtctcttctcaggacagatgctaacttcacacaggaggggagtgggggcctgtatttaagctgagaacagaacaggcccagtgtgtggctgttgcctgggatgatttgtttaaaatattaacaatcaaggcaagagggttgtttgaggcctggagtttgagaccagcctgggcaacatagtgagacctcatctctacaaaaaataaatataaaatacaaagtaaaaaaaaaa

SEQ ID NO: 93373 - DNA, 507 bp, Homo sapiens
gaccgacttgctgggtcgacgatttcgtgttgacggcgctgcgatggctgcctgcgagggcaggagaagcggagctctcggttcctctcagtcggacttcctgacgccgccagtgggcggggccccttgggccgtcgccaccactgtagtcatgtacccaccgccgccgccgccgcctcatcgggacttcatctcggtgacgctgagctttggcgagagctatgacaacagcaagagttggcggcggcgctcgtgctggaggaaatggaagcaactgtcgagattgcagcggaatatgattctcttcctccttgcctttctgcttttctgtggactcctcttctacatcaacttggctgaccattggaaaggtatcagaaacacgtgtacttgaaaacgatatctgtgttgagggttgattgggcagaagcaatcttgcattctaccttatacagctccaggaggcatatatggcaacgaattggcaagaaatcaagataaagagag

SEQ ID NO: 93374 - DNA, 470 bp, Homo sapiens
attcccgggtcgacgatttcgttggaagggccgctgagcaaatggactaacgtgatgaagggctggcagtaccgttggttcgtgctggactacaatgcaggactgctctcctactacacgtccaaggacaaaatgatgagaggctctcgcagaggatgtgttagactcagaggagctgtgattggtatagacgatgaggacgacagcaccttcacaataactgttgatcagaaaaccttccatttccaggcccgtgatgctgatgagcgagagaagtggatccatgccttagaagaaacaattcttcgacatactctccagcttcaagtaagggtctttacatggtttccagatagttcattagttggtgctttctttttttggctggtttctgggtttttttttaaataactgtggtatgatgtaataggaacttataatttctgagttgcttatttttcctttacagg

SEQ ID NO: 93375 - DNA, 765 bp, Homo sapiens
tttttttttgagacaaagtctcactctgtcaaaaaaaataaattaaatcaaataaaaaatttaaaaatgtatatatataaaataaagtgacagattcagagtcactgttcattgtgtgtttgggggctgcacaaagacacctagccaaagaagcaagtgaaagcctgcattctgctcaccatgccatacatcctggcatagggctgtatcctcccaaaggggattcctttgtctaattcataccaggccactgtattgactagagaaggccatggatgggtttctcactcttagaagggaaagaggaggaatggctacagcctccccaagccatagatgggactgcctcccactatccccagacacaaatggtaaattggaaaacctgtatccagacatttcttcagccacttcattggcaccaagcgtctctcaaaatgtcttctgttccttaacctaccaggccccccaaagacagcaatgggagaagtgaccccataactgcataaaataatccctcttctttgaagctcttggcaggaatcgctcagccagcaggaaacctttaacccaatacccagataaacagacatttggaggaagagggatcttccagattattcttccattctgccccatcctctacagagaaggaaactaagacacttttcaagaatcacaagataagttaatgatagaaagcagagtagaatcatgagtggaggagtgaaaataacattcgctttgttcaaatcccagacgaaa

SEQ ID NO: 93376 - DNA, 436 bp, Homo sapiens
  misc_feature (1)...(436): n = a,t,c or g
tttcgtggactgaactcccgcagtttctaatannnnccagttgcaagagctctggaaaagatgttggtgctaaactgttctaccaaattactgatactggagaaaacgttgaagagttgctttcctgaatctctcaaggtttacggagcggtgatgaacataaatcgtgggaacccctttcaaaaggaagtggtgttggattcatggccggatttcatagctgttatcacccgacgacaaagagaggctgagacagataaccttgatcattatactaatgcctatgctgtgttctacaaggatgtcagggcttatcgacagctattggaagaatgtgatgcttttaactgggaccaagtttttcaaatacaagggctgcagagtgagttatatgatgtttccaaagcggttgacaattcaaagcagttgaatataa

SEQ ID NO: 93377 - DNA, 386 bp, Homo sapiens
tttcgtgccggcgcctcagcgggcactgggtaccagcggacagggaagggcagagaaggccaccatggcgacactcctctcccatccgcagcagcgccctcccttcttgcgccaggccatcaagataaggcgccgcagagtcagagatctacaggatcccccgccccaaatggccccggagcttcagaagagccgactccattaggtgggggtgtccctgctgtggggtgagctgttcggggagcagcagacccccaggccgacgtggcacccccctcacctccgctgccgagcctcacttccgctgctggatccagcctccatcccaccacttctcccccgagcagcgggccctgctctacgaggacgcactctacactgtcttg

SEQ ID NO: 93378 - DNA, 890 bp, Homo sapiens; identical to SEQ ID NO: 62522

SEQ ID NO: 93379 - DNA, 402 bp, Homo sapiens
tttcgtctcgccccccgcctgtagctcggtcggcgttgcggccaggccccgttccgctggggattgctatgctatgccttgtatgactaagacctcttaccaagaatacgtgtcagaccataaaaccactgccaaggagtgcgggggtggcaatgaaacagcccaacaggaaaaggaagcttaatatggattccaaagagcgtttggatcaggacggacgcttggagcaagctgaagaggaaaagaagcccaaggatagcacaacccctttgagtcacggatcagtcctttccagagcatgaaaatggttttcagattggaatgagattagaaggcattgatccccgacatccatcggtattctgtgtgctttctgtagcggaggtttgtggttaccgtcta

SEQ ID NO: 93380 - DNA, 392 bp, Homo sapiens
  misc_feature (1)...(392): n = a,t,c or g
tttcgtcgggggcccaagctcccagctcccaaatttccctgcttctatgccctttgagctcagtccagatgggagctggctccttcagaaagggggctcagaacagggtgtggggagctacctctctctgcctccccccaccacatctgtctgcagggctgggagcccccacgattcagtggtcctgagccttctgaagttaggcttctgcctggtggtggggatcctgacatcaaggatgggacaccctggatggaggttcctggggcctggcccccaagactatgaagagcctttgctgaggccatgaggggttaccatggcgaccgaggcagccatccccgcccagcccgctttgctgaccaacagcatatggacgtgggccctgctgn

SEQ ID NO: 93381 - DNA, 622 bp, Homo sapiens
tttcgtggcggggcccggcggggagcgggtccggagcaggctcccggacccaaaactgaagggggcgtctgaggcgtcagggagctccctcgcctggctctcggcggcctgatggagtaagaggggttggctgtgaatgtgtgacgttgagtgcttcagatctggtcactatggtacgagaacgaaaatgcatattatgccacatcgtgtacagctcaaaaaaggagatggacgaacacatgcggagcatgttgcatcacagggaacttgagaacctcaagggcaggtatgggaacggctctcttccataagtttgtgaatgtgggtggatctgagtgatgatggtgcctgtcagtttgttttgcagtaatccgtcataagcaaatgttgtcttatggcgtagaacaaccttttagaattaataccaagtgtagtagatttttggcattcaaaagggataaactctgatacctttgggcatctcaaatgtgtgaattcacagcagccctatcaagtagattgcaacaaaggtgagttgggatgagctaactctctcattagtaagctttctcattcctacgtgctagccttgcaactaggacattttgtatttttacttcag

SEQ ID NO: 93382 - DNA, 478 bp, Homo sapiens; identical to SEQ ID NO: 61899

SEQ ID NO: 93383 - DNA, 399 bp, Homo sapiens
tcgaattcccggttcgacgatttcgtctcggccgcaggccgccttcagcgccgcgggaagtttcgcttctgaccgcggccctcagcagagcccggctgcccggcttttagaagaccaaactggacaatggactttgctcactatgatgacatgatctccattgacctccatttgtctaccatcagagggagagctttgccccctggggctgagagaccccaacctttccccaagctgaacctgcccggtcttgaggtaccattccacgatgtcttcccacaaaggatctgcggtggcacaggggaatggggctcctgccagtaacagggaagctgacacggtggaactggctgaacctggacccctgctagaaaacaagggcacacgggcttcctgctg

SEQ ID NO: 93384 - DNA, 455 bp, Homo sapiens
tttcgtccgcatcctccgcatccacatccgcatcgtcgtcctccccgaccgcgtcctgcagcagctgccagtggagccgcctgacaaggactgccatccaccatggtgaagctgggctgcagcttctctgggaagccaggtaaagaccctggggaccaggatggggctgccatggacagtgtgcctctgatcagccccttggacatcagccagctccagccgccactccctgaccaggtggtcatcaagacacagacagaataccagctgtcctccccagaccagcagaactatacaaagagtaggtaagcgtaggtggagtggcatggacaggtaaaatgaggaaagtgtttcccagaatgggaaatcttgtaaacccttaaaaaatgtgggtttattcagtcaaatgttggctcttaattgcagactttgaaaagcagtagatacaatggaag

SEQ ID NO: 93385 - DNA, 470 bp, Homo sapiens
  misc_feature (1)...(470): n = a,t,c or g
ggtaccgtcccggaattcccnnnncatcatgtcgtctcgcaaagtagagggggcgcagctggggcgggaggacagcgtttgtgcccggaagcgggagaggaagcgggaaagcgcatttgtaacgcgggcgacaacgtgcccgaaatccccggacggtgggtctgcatcgagaccccgagctctggagctggaaaaacccggctgaggctttacagttctctatactctcccaagagccacagaaaatgaacacatttcaggcatcagtgtcattccaggacgtgactgtggaattcagccaggaggagtggcagcacatgggccctgttgagaggaccctgtacagagatgtgatgctggagaactacagccacctcgtctcagtgggctactgctttacaaaaccagaactgatcttcacattggaacaaggagaagatccatggttattagagaaagagaaaggattt

SEQ ID NO: 93386 - DNA, 459 bp, Homo sapiens
  misc_feature (1)...(459): n = a,t,c or g
ntcttctgcctcataatctcaaattgacctaatgatgtcactggaagagtaaatataaggaagatcaagaagctaatgggataaatcatctgtttcactttttctctctttcagtctgtatcctctagatcatggacagcctattgatccttctaactctgcagcaaagcctccaagttaaaaaggaaaataagtctctcaacaccattatttattcagctgcacacagtcttgaactgctgaaatataaaaatgaaaccaaagcagtttccatctaatcacttttttaaaaaatgccatgcagaatatgtttatcacaatcaccatcatcatcatcatcaccactgctgttgccactgcatcaccatccaacatgaacaccaccaacttaatcatgtccctgattcaacagttttcaacttgtttatacataaaatacgaaatcgtcgaccgcgggag

SEQ ID NO: 93387 - DNA, 601 bp, Homo sapiens
tttcgtcgccccctggcgcgcgggcgtgtcggacccgcagagctctcggactttcggaagctctcggtgtgggtgcgacccgagagaaggagcggggctggtggggctgctgcagccgtcacaggaaataagtaatcatggtgctcaacagtttggataagatgattcaactccagaaaaacactgccaacatcaggaatatttgtgttttggctcatgttgaccatggaaaaactactctggctgactgtcttatatctagcaatggaatcatctccagccgcctagcaggcaagttaaggtacatggacagcagagaagatgaacagatccgagggatcactatgaaatccagtgccatttccctacattatgcaacaggtaatgaggagtacctgatcaatctgatagactctccaggacacgtggacttttcctcagaagtatcaaccgctgttcgcatttgtgatggatgcatcattgtggtagatgctgtggaaggagtctgtccacaggtaatggattgtgatgagaaaatacttaaatggttaagggtgaggaaagagggggaactgactgactttaggcatttcactgacaa

SEQ ID NO: 93388 - DNA, 698 bp, Homo sapiens
agataacacatgccacctctggcctcaaaaccactcatggattatcacaaggcccagggggttacctttgagtttgtgtcttctcttcctctgaaatttatatgcacacttattacaaacccacatgaggctgattaatactgcggccacagcagcgagaaaagcaaggatgacagcgacaaagtgcaggtcttcatagaggatctcagagacgtgcagcacgatggtgccaaactggctgctccccaggcgctccgtcacggtgatgacatagtagccggaatccctcactcccacgctgaagagctggatggagccgttgtcaaaggtgcagactctgtccttgtggctttgagagatgttggcctgagtccctggtttccactccacgatcttctgcgttccccaattggatgaatatgtccattcgatggtgggcactccatgacaggagtactcaactgagagcaggatgtcttctttgacagtggcattgatggtggcctgaggaatgtatagggacacaccctgactctgcagacagcgggctgcggccaggcagagggcgaagagtcctagggagatgcctcgggtcttcctcctcccgctgggcagaggcctcatgggcgagcccggggcctcgcgggccggggtgtgtgctggccgcaccgcgctgcagctcctatgcagccacgaaa

SEQ ID NO: 93389 - DNA, 704 bp, Homo sapiens
cacgcatgctcagcacctaccagggtcgagctcacacacgtgcctacgacccgccgcggcgcctgcgcggtagcatcgcggagtcggtgctttagtacgccgctggcacctttactctcgccggccgcgcgaacccgtttgagctcggtatcctagtgcacacgccttgcaagcgacggcgccatgagtctgacttccagttccagcgtacgagttgaatggatcgcagcagttaccattgctgctgggacagctgcaattggttatctagcttacaaaagattttatgttaaagatcatcgaaataaagctatgataaaccttcacatccagaaagacaaccccaagatagtacatgcttttgacatggaggatttgggagataaagctgtgtactgccgttgttggaggtccaaaaagttcccattctgtgatggggctcacacaaaacataacgaagagactggagacaatgtgggccctctgatcatcaagaaaaaagaaacttaaatggacacttttgatgctgcaaatcagcttgtcgtgaagttacctgattgtttaattagaatgactaccacctctgtctgattcaccttcgctggattctaaatgtggtatattgcaaactgcagctttcacatttatggcatttgtcttgttgaaacatcgtggtgcacatttgtttaaacaaaaaaaaaaaa

SEQ ID NO: 93390 - DNA, 397 bp, Homo sapiens
cggacgcgtgggagacaagatgtttctccatatagatattttctaacacatttctacaatataatgcattgtggattacttcatattgaccaggatattgtcaatacaatcatcaaacactgctcacctcaatttttttcacttggtttgcctggtgccacaatgcttattatggattttattgtagcagctggtagagtggcttcttcagcttttctcaatgcaccaagagtagaagcacaagttcttctgggatctttggtttgctttcccaacttatattgtgaactgccttctcttcatcccaacattcctgatgttgctgtgtctcagtttacagatgttaaggaacttataatcaaaactgtattaagctcggcaagagatgagccctctg

SEQ ID NO: 93391 - DNA, 861 bp, Homo sapiens
catccagtgagatttgattctaaagggttcacaattcagtctagtaacaacactaaaagttctgcagatgcagtaagagaactaggagagaactgcaggaaaaaaaactgaatttatttattttaataagttattacctctccctttcacatcacatgtctatcctaaatctatacatttgcaatccaatgaacatcaccaactcaggaacatacctccttcttgtctttatctttgtcttcataagggctgctaggctgtttcgtagcagtctccgggctactaggccgttgtgtgctggtagtacctggttcactgaaaggcgcatctccctccccgcgtcgccctgaagcaggggaaggacttcgcccagccaaggcagttgtatgagttttagctgcagcacttcgagacctgcaggagttaattgaggacgtgggagaggaaggaaatcagctcaaagggagaacagaaaaccccctccccaactcccatccacctttcctaactgggacaaccctcttccaaaaagcctttagtcgcacaactcaaatcattcactgaaatgcaagtacagtccactttggttcttcttttcccaacacaatccccaaagagcgttctccctctacccctttactcacctcccccaaacatccccaaaccatccacccagcccactccctacccgcttcattcacaactcacctctgagcccacctccttcaggaagccttccccgattaaggaaggccaggggtaaggattccttcctcccccaggacaccacggaacaaaccaccaccccccctattctgggcagttccattattacattcaggaacggaaacaaaaaaaaaa

SEQ ID NO: 93392 - DNA, 1213 bp, Homo sapiens
caccatcattatcgccttgcttggcacgaggggctcccggggcgggccgggcggaccgcgggagccgcactcggcgatatggaagaggagggcaagaagggcaagaagcctggaattgtctcgccatttaaacgagtattcctaaaaggtgaaaagagtagagataagaaagcccatgagaaggtgacagagaggcgccctctgcacactgtggtgttgtcattgcctgagcgcgtcgagccagacagactgctgagcgactatattgagaaggaggtaaagtatttaggtcagttaacgtccataccaggatacctgaatccctccagtaggactgaaatcctgcatttcatagacaatgcaaagagagcccaccagcttccgggacacttgactcaggagcacgatgctgtgctcagcctgtctgcgtacaacgtcaagctggcctggagggacggggaggatatcatcctcagggtgcccatccatgacatcgccgccgtctcctatgttcgggatgacgctgcacacctggtggtcctgaagacagcccaggacccagggatctcccccagccagagtctgtgtgcggaaagttccagaggcctcagtgcaggctccctgtcggagagtgcagttgggcccgtggaggcatgctgcctggtcatcctggctgcagagagcaaggtcgctgcggaggagctttgctgtctgctaggccaggtcttccaggttgtttacacggagtccaccatcgactttctggacagagcgatatttgatggggcctctaccccgacccaccacctgtccctgcacagcgatgactcttctacaaaagtggacattaaggagacctacgaggtggaagccagcactttctgcttccctgaatctgtggatgtgggtggtgcatcaccccacagcaagaccatcagtgagagcgagctgagcgccagcgccactgagctgctgcaggactacatgctgacgctgcgcaccaagctgtcatcacaggagatccagcagtttgcagcactgctgcacgagtaccgcaatggggcctctatccacgagttctgcatcaacctgcggcagctctacggggacagccgcaagttcctgctgcttggtctgaggcccttcatccctgagaaggacagccagcacttcgagaacttcctggagaccattggcgtgaaggatggccgcg

SEQ ID NO: 93393 - DNA, 453 bp, Homo sapiens
cgagtgcggtggaattcgacagcccggacccggccctccgcccgctctcgcctcggcgcccgcagccacgatgaaccgggtcggcggcagcccgtcggccgccgccaactacctgctctgtaccaactgccggaaagtgctgcggaaggataaaagaatcagagtgtctcaacccttgacaagaggaccaagtgcctttattccagagaaggaagttgtccaagcaaacacagtggatgaacgtactaactttcttgtggaagaatactctacatccggtcgtctggacaacatcacacaggtcatgagtttacacactcagtacctggagtctttcttgcggagccagttttacatgttgcgcatggatggtccccttcctctaccatacaggcactatattgcaataatggctgcagctagacatcagtgttcttacttaataaacatgcg

SEQ ID NO: 93394 - DNA, 444 bp, Homo sapiens
ccctgtcgtggaattcggacttgactcggtgtttttattctctgtcacaaaaatttattggactttcttgtactttgaatggatctttttacccgtgcatgattttatgatagccgacattgatcatttggaaaataattcttcactgagctatgtgatctttgaaatgttgataaatttcctattataatattaaaaactcagtcattaatataatctccagtctagaaatatgttgggaaaagtattgggaagttgtcagggtcatagtaataaatgaaacttcatatctgttcatgcctttttcaccagcttagctttaataaaataaaagtttaataaaataaaaacctcttttgaaaaaagtagcacccccataaattctcctctaaaaatacaagcaaaaatgtgtgtgtttgtgtgtgttagtatgtacttgcacat

SEQ ID NO: 93395 - DNA, 398 bp, Homo sapiens
gtctttgtctttatttcttttctcattccctcgtctccaccgggaaggggagagcctgcgggtggtgtatcaggcaggttcccctacatctttggcacccaacacggtctccttgaacccaggtgaagttacacctgagcgtggtcgttgtgaagaacggtctgtccaggaactcccgagaacgtgtggtcggccttgcggtaagcttgtgcactcggagcattccagggacaccatgggacaatccaaaagtaaacattctgcatatttacattttattaagctcctcttaaagagggcaggaattaaggctagcacagaaaatttgattactctgtttccaacagtagagcaatatcgtccttggtttcctgaacatggtaccatggacttcaaag

SEQ ID NO: 93396 - DNA, 450 bp, Homo sapiens
agtgtcgtggaattcctttctccgggatcttaagtgtgggggctgctggctggggggcccgtccggcccaacgtcggaggcttggaaaagagagttggcagcgggagcggactacgtgccgggccatggcccttctgcccgggccctggccacaatgacctctttgccctgccccctccccggccgggacgcctccaaagctgtcttcccagacctcgcccctgtcccgtcggtagcggctgcctacccgcttggcttgtcccctacaaccgcagcctcccccaatttgtcctactccaggccgtatggccacctcctgtcttacccctacaccgagccagcgaaccccggagactcctacctgtcctgccagcaacccgcggcgctctctcagcccctctgcggacctgcagagcaccctcaggaactcgaggcagactcggagaagcc

SEQ ID NO: 93397 - DNA, 467 bp, Homo sapiens
  misc_feature (1)...(467): n = a,t,c or g
ccgtgcgatggcattcttgtgcccnccttcgctctcttgctttccaggggcccattgggatgtgctgccttcatgtaccgtagacatctcatccctgcactcaaacaccccctactcctggccagggaggactggccccaggggacatgcagaggcccttggccctgggagcctcatccctggacatcaagggcagaggaatgtcagaagggatgtcagaagggcagagcgatgttagggtaaagagtcagaccgggagggatgggctttctgagagggaataaagctgaggtctcccacccgcccatccctctgcagaatgcggccactccaaggaggccgggaggattgtgggaggccaagacacccaggaaggacgctggccgtggcaggttggcctgtggttgacctcagtggggcatgtatgtgggggctccctcatccacccacgctgggtgctcacagcc

SEQ ID NO: 93398 - DNA, 412 bp, Homo sapiens
  misc_feature (1)...(412): n = a,t,c or g
cagcagaggcactcaccgcggagggtctgtgaggactacgggagatcaggcttggcacggcgcctggcacatagcgggcgctccctgaaggagagctggcaagatcgaatggtaccgccctgcacaaaggacagggggcagatggcctgtcggagccagagggcatctctctgaagcgggtcgctgtggtggaagatttctttgacatcatctactcgatgcatgtggagagctcagcggagccaggcaaagcccccaagcacgctgggcagaagaaaacctaccgagcgatcgcagagacctatgccttcctcccgagagaggccgtgacccggttcctgatgagctgtacggagtgtcagaagaggatgcactttaactccaatggcctggaacccanagaaaacgagcn

SEQ ID NO: 93399 - DNA, 436 bp, Homo sapiens
ccagtgtggtggaattcggcgcgggtggcccagtccactggctgcgtggcattggcagtgacacaggaggaacctgggcccgactcgtgccacccataggagtccttgtaatggcagccccaccctcagcctttttggcgacagcctggagagggcaaccaccctatgtggtgtaacgggtggagaaaccaggcttagatgggtgatgtggcctgcccagggcctcccgctagtgagggtggagctgggattccaaccctcatctgtgtgatctggagcttgctctcagccccaagggagtgtggcctgtgtcccccagggatgaagagtccccggtaacaggctcttcctcatcctcctcagggagaagaaatgggtgaccgttggtgacacatccctacgaatctacaaatgggtccctgtgacggagcccaag

SEQ ID NO: 93400 - DNA, 814 bp, Homo sapiens
attagtacagtgcggtggaattcgttagggtgaagatagaaacaggttagtatgttcacaactagggctagaaaaaaaaaacagatgagtaaccagccatcatcctttttctggaaaaatcaggctccccttcccagttcaaaggacacatgccctggtaacctttgaagtttccctacctatgtacaataagcccttcataacagtcagagaagatggtggccccaactctggtggaccccagaactctgagagattccaggaattaggcaaatcaggattaggtcaggaagcaaggattgcctctccatgaaacctacacaaatctccatgccatggaaaagtaattagtaagtagatgagctcatttatgaagtcacctctcacggtgcctgatgcatattaagcacgtaattgatgcctgctgttactataacgattatgtatttctgttgctgccacactaaaatgaataacaacatactttcccacctaaaacccaaaagaagaaaccagtgggagggatgtcttcagccagcccaccagcatagaaaagggtcacctgccagtcaccccaactcccagcggcccaatcctaggctcctccatgagcctctgacctctgttcaccttcctaggcagccagggtgctaagggcccaagtgactaccactagccacctagcagccaactatccttggtattaattaacagactgaggccttggtttttatcacctgagggagctgataaactcccatttccaggtcaaaaaagccaagggatcaaagctcaaacagggcttcccggccct

SEQ ID NO: 93401 - DNA, 766 bp, Homo sapiens
tttcgtctgggagacagcctgggagtgacagccacagcaagacagcgagagacacacagagtcacggagagagggcggacacagcggggacagagacgcagggtcagagagggggagacccgacagccgcggtctcgagtcacagggacacggagatgccgccgcacggagaccggcgagaacagaagaaacgtgacggggctggactttgatcgccgagggctctctgctcttcagagtctgcttggaacgggataagtggaaccaaaattacaagggccatggattgccaaagggaaaagagcgagagcagagagcatcgatccggttcaagaccaccctcatgaacacactcatggacgtccttcgccacaggccaggatgggtggaagtgaaggacgaaggggagtgggatttctactggtgtgacgtcagctggctccgggagaacttcgaccacacctacatggatgaacatgtgcggatcagtcacttccggaaccactatgagctgacccggaagaactacatggtgaagaacctgaagcggttccggaagcagctggagcgtgaggcaggaaagctggaggcagccaagtgtgacttcttccccaaaacctttgagatgccttgcgagtaccacctgtttgtagaggagtttcgcaaaaacccaggaatcacctggatcatgaagcctgtagcccggtctcaagggaaaggcatcttcctcttccgtaggctgaaggacatcgtggactggaggaag

SEQ ID NO: 93402 - DNA, 434 bp, Homo sapiens
  misc_feature (1)...(434): n = a,t,c or g
ctctagtccagcgtggtggaattcggacagtgcctgtggttgtcagatgctgtcccttcgagtaagggatgagagctatcctgaagatgggtcagctctgtggtgaccacccgttgggagcagtgacattcaggtgcgttgcactggtggctgtgtggctgtgtggtacggccaccaggagccatgtgggcaaggacagctgtgggctgggcacagagctctctctgctgggagtcagtcggtgctggggcgaggggaggcagagctcacagagcccctctacagctcaccctgcagctcggccctggccagtaaacccaccatccccctttctgccgcaggaggcagtggagaatgtgacacagcacattcacggcctgtctgggaagaatgatgggctggtgcccatgttcatcaatacccacagtggcctn

SEQ ID NO: 93403 - DNA, 424 bp, Homo sapiens
gcagtgggcttcaagatcaccgctggcaaggactgggttggtttttggagcagtttctgctgacgtgacaaaaagatctctcatatgatattccgaggtatctttgaggaagtctctctttgaggacctccctttgagctgatggagaactgggctccccacaccctctctgtccccagctgagattatggtggatttgggctacggcccaggcctgggcctcctgctgctgacccagccccagaggtgttagcaagagccgtgtgctatccaccctccccgagaccacccctccgaccaggggcctggagctggcgcgtgactatgcggcttgggctgtgtgtggtggccctggttctgagctggacgcacctcaccatcagcagccgggggatcaaggggaaaaggcagaggcggatcagtg

SEQ ID NO: 93404 - DNA, 442 bp, Homo sapiens
agcggtgcaattcccgtgcctcggtctgcacctctgtgaaacgggaaaatacccgccatgggccgttgtggttttaaatgagatcctgcagggaggccccgatctgctgtctatcaacaaacttactgagaagggaggccccgatctgttgtcaatcaacaaacttactgagaagggaggccccgatctgttgtcaatcaacaaacttactgagaagggaggccccgatctgctgtcaatcaacaaacttactgagaagggaggccccgatctgctgtcaatcaacaaacttactgagaagggaggccccgatctgctgtcaatcaacaaacttactgagaagggaggccccgatctgttgtcaatcaacaaacttactgagaagggaggccccgatctgctgtcaatcaacaaacttactgagaagggaggccccgatctg

SEQ ID NO: 93405 - DNA, 998 bp, Homo sapiens
tttcgtgcaaaggtgatgtcttcggaggatggaaaacccacaatcctagagctcaagctgcgcgggaggctgtagggattggggtgaggaaggggagcaagggaggagacgggaagtgcccgggcctcaagggtgaggccacagcttctagccctgcctcgcgaggcctctgagtcctagcgcggctcccccgctcctcccacacccacaggcttccggccatagctgcgcggccccaccttgccctccccccaactcacaggtggtggctgcttctctggggagtcctccaggcgtgcccaacccggggctccgtcctcttggcccaagagctaccccagcagctgacatcccccgggtacccagagccgtatggcaaaggccaagagagcagcacggacatcaaggctccagagggctttgctgtgaggctcgtctttcaggacttcgacctggagccgtcccaggactgtgcaggggactctgtcacaatctcattcgtcggttcggatccaagccagttctgtggtcagcaaggctcccctctgggcaggccccctggtcagagggagtttgtatcctcagggaggagtttgcggctgaccttccgcacacagccttcctcggagaacaagactgcccacctccacaagggcttcctggccctctaccaaaccgtggctgtgaactatagtcagcccatcagcgaggccagcaggggctctgaggccatcaacgcacctggagacaaccctgccaaggtccagaaccactgccaggagccctattatcaggccgcggcagcaggtgagtccccacctgccgaggggtggcttccatccacctcattcccacccaaatgcctgacaccctctgagcacctgcttcgttaaccaacagcttcaactccgagcctatttctttgcctctcctcatttacgccacaggggcactcacctgtgcaaccccagggacctggaaagacagacaggatgggg

SEQ ID NO: 93406 - DNA, 441 bp, Homo sapiens
ctggtggaattcgaagcaaagggtgtagctgatgtgcagattgggattgaatgtgggaatgagggtgtgatgggagtgattggaaatattgcagccctgcatagtctccatcagggatgtgacaaagtggataatctctaccacgtgagaaacttccaacattacttgcaaatcagatttaatgaataaaataaagctgtagcacttggcacattcattgggacccttacccaaacattatcaatattgtgtacgttatctttattatcaggtcacaaaagatgtcataaaagaatttgcagatgacggcgtcaagtacctggaactaaggagcacacccagaagagaaaatgctactggaatgactaaaaagacttatgtggaatctatacttgaaggtataaaacagtccaaacaagaaaacttggacattgatgttag

SEQ ID NO: 93407 - DNA, 1094 bp, Homo sapiens
ggttttttttttttttcttttgggaaaggcattggccactttggactttattagcaacagtaatgtcccctgacatacgcacaagcttgtagctccacggccaggtcttcccccaacctcacaatggccccgtgatgcaggcaggcaggcgagtgggggtctcccctccttatccacagggccaccgaaaggcccacgagacggccttgcccgaggtcacccagcggagtggcttgctgggagccctgggaataacagtcccacacaaggctctctccctccgcagctggacctgtacgcgggggccccgtttgtgcaacatctgcctggggctgggaacttctacctctccaccatcctcacggttgggcatcacagccctgtacaccatcgcaggtatggtgcctgcagcagggaggtccacccaggggacgtgtaaaggggtcagaaggccacctccccctacaggcccgagggagcagcccaggaagtggccccagcaggagccccagaagttcctccccgtgtccctcctccctggggccagggccccctccagcaaccttgcttccactggcagggggcctggctgctgtaatctacacggacgccctgcagacgctcatcatggtggtgggggctgtcatcctgacaatcaaaggtgaggacagagtctgtggccatggcggggctgtccccacagcgagccctttggagtctggcactgcccggcactgtgcaggattcatgccgttggggttctgggtagcatcgctgggagtgggtgggttcaggaggttgagccactaggcagtcagcccccctgctggcccctcagggactgccctggctggtagaggctacccaccctgctgccccgctgttaccagctctggccctggcaaggagctgactcaggaactcagggccagccacacccgcattggctcagcgcttgatggtgaggtggggctgtaggcgggtgtgaaggcacacaaccaggaggccataaaactgcctgggcagctcctccaattgtttaaaagcatgtacaaaatgccaagaggtgatgctacctcctgcgaatgccaccc

SEQ ID NO: 93408 - DNA, 410 bp, Homo sapiens
aagcaaaaaagaaatgggtaggtacagcaattcatacaaagggattataaacgggagaggccaagggtttttccaaatgacactactaaaaaactgggcagcgtacatggggtttacaggcaggacaataaagcagttactatcgtcccaaaaggagagtaaaacatgcctattaaaacagtatagacagactccccattctggaaataaaaagaggggacatccctaaccccaccccctctatccccagaaaaataccaaaacacacccaaagtgcatttgttttgtttatatcaaaacctctttccctttccccatcccaccctcagacccctcccaccccatttaagattggcctgcaagtctattttaaccattatagtatttttttatagtttatgaaaataaat

SEQ ID NO: 93409 - DNA, 515 bp, Homo sapiens
  misc_feature (1)...(515): n = a,t,c or g
cggagtcgctaccccgaggccggagccgtcgcaacccgcagccgcagtcagcccatctgccagcagtcactatgccttggccgttttcggagtctatcaagaagagggcctgccggtacctcctgcagaggtacctgggccactttctgcaggagaagctgagcctggagcagctcagcctggacctgtaccaaggcaccgggtccctcgcccaggtccccttggacaaatggtgtctcaatgagatcttggagtcagcagatgcacccttagaagtcactgaaggattcattcagtcaatttccctgtcagttccatggggctctttactgcaggataattgtgcactggaagtgagaggattagaaatggtcttccggcctagacctcgcccagcaactgggtctgagcctatgntatggtcatgtgttatgaccagcaggatgcaattggcaaaagaatgggtatcccgaaactatcagatgaacgaggagaaggatgccagccttttgagt

SEQ ID NO: 93410 - DNA, 492 bp, Homo sapiens
ggcagccatggccgagggggcagccagagggtccacgggcagctccgggctctgctcctgcttcaccatgatggagcacagtttgtgtcccagcgcccatgctccatgctctgcatcttgggtggtgtcctccatcttgatgggcacaagggggctctggggcgctgagtcgccgctcagggagtagctgtgctccgcctggatgcctggcgtaggggagtccagttccatgtccaatagagggctcttctcatccagcacagggtcatcaaagaagctgctgaacaggtcattggagaagtcctccatgttctccgtaaagtggtccaggtgctcaggaaagtgcgcattgttgaggaagtccgactcgttcagatcccccaagtccaggaagctggatccggggaacagcctgtcggccgggaagggttccaagacggcgtccatcgcagccggctcccgggacccccttccactgggcttccctcactc

SEQ ID NO: 93411 - DNA, 2223 bp, Homo sapiens
tcactgggcaggctcagggggtgccagcacagcctcagcatcagcccgcatctcatcgagagcctgcagcaggacgccgtgagccgctcggtagcccaggccacctgtcgccgctgcaccacccgcaggccacaggaaggagagagcccccagtgctgcgcccccagcagtgccctcgcccgcccaggcgcccagtcttgcttccacctcggcgcgcgtcaccgggcctgggaaatgagcgcgcgctgccagctctccagaagccaggcccagggcacgctcacgtcgagccagtgccgtgggttccagccccaggccccgtcgccactccgccagctgaccccgcagaagtgccacgtcgcatgcccagcccagccctgggagtggtgccgccgccgccgccagactagccagcagagctggcctccacgccccggctcgcaacgccgcagccttggttcgggcagcgctgggagatgctggtggcaacgccagcagcagtgcccctgcctgggctggggggagcgctcgccgcagccattcgcatagccctgggagtccgccaggccgtagggggaacactggcggcggcgcctcctccagcacctcccacgtctcgtcctccgggcttaacgcagcggcccgctctgagtcgccaccacctgatttcttcatgccgacaacctgctgcaaaccctcgctgccagctttcccaggaccttccccgctgcctgctttctgcgatccagcgctacatttctcccttcccttactgagtgcattctccaatccccctccacctgcgttctttaagctctcgcccttgggattctccatcttgccttctcccagacactccggatcctcgccctcgccgtctgtgcgcacgcagacaagaggcgcatctggtagcagcaaggcctggacctgggcccagtccttctcagtgggggccccaggggtgacgaggatgagggcgtcgtagtgcgttgggtgagaggcggcggccgcggtggtggcagtgcccgtgtggcccagaggcacggtccagagcaccacattcgggcgctctggggctgggaagggagtgggtgctgtggggaccgaagcaggcgcagcgcctgggtcgccaggatccaatccaagcagcatgtccaccacaaggcccacgtcagccttgccagccacggccaggtctagccgtgcgctgcccaggcgctccaggcctgagcgcacccacgacagcgcagcctcaaggccgccggtctcaaaggcctcacgcacagcctctagctctgctgcacccaacacctcgaagccatcctgcgccggtggcaggagcctccgcagcgcttctgcctggctctgcagcgccgcccggaggcgctctagctcctcgcagccgtcgctgctgccgcagttcgccggtagcacaaacagatccgcagctcctaaccccgcgctgttcagcagagctgctgtctgatcacgggcctgggcggcagtctgtgaatccccaggacggaggttccgcacagccagtagcggggtccctcgggccagggcggccagcgctgcctctcccagggctggagccaacggttccccgttcccctcgggtccgggcagcaccagtaccagcacgttggcttccgccgcccagggccccggcgctgcgggtgggcagctcagctcgcccagaaaaaggcctgggcccgcagctcttaggctgggaaccccggagtccggccgtccctcgggggcctcgagcgtctccacatccttgtcgcacagcgctgcgatcagcgcggacttccccaagcccggaggccccaggaacaaggcggtcacgtcaccctgcggcggaggcatggctggaaagcaacgggtagagaagacctgggtcagggagcacctagccttttcctttcctagccgccccactcggaacccaggcctcagtccttcaccctgtccccttcggttcttgagtgtcactctccaggacctaaaaaatccagagcccagaccctattcccccagaatcccaggcgtcctgtctgtccgccctccctctagatggaaacgtttccctttctgcttcaaaaactctgaaatcaggcgcggtggctcatgcctgtaatcccagtgctttgggaggccgaggcgaaggatcgcttgaggccaggaattcgagaccagcctggccaacatgtgggggga

SEQ ID NO: 93412 - DNA, 421 bp, Homo sapiens
  misc_feature (1)...(421): n = a,t,c or g
gaaggtgccagcttgggatttcgagcctgggtagtgcctgctaacggggttggccggagcagcagagcaccgggaggcccagggatgtggcgaggcagccgcggtgtcagaaagaggaaggcaggaggctgaggccgagggccctggaatctcgcacattccagggttcagaaagatcacggtggggtccacctctggagtccacaaaagaaaacgtacaatgtggccacaggcctgcttttccaaactcgtcatggttaccatttcatgaacggcttcaagtccagaatggtgagtgcccgtggcaagtgagtatccagatgtcacggaaacacctctgtggaggctcaatcttacattggtggtgggttctgacagccgcacactgcttccgaagaaccctattagacatggccgtggn

SEQ ID NO: 93413 - DNA, 427 bp, Homo sapiens
aattacgagtggctcttctcagcaagtgttccatgatggttgagcccttcttgggaacctggaagctggtctccagtgaaaactttgaggattacatgaaagaactgggagtgaatttcgcagcccggaacatggcagggttagtgaaaccgacagtaactattagtgttgatgggaaaatgatgaccataagaacagaaagttctttccaggacactaagatctccttcaagctgggggaagaatttgatgaaactacagcagacaaccggaaagtaaagagcaccataacattagagaatggctcaatgattcacgtccaaaaatggcttggcaaagagacaacaatcaaaagaaaaattgtggatgaaaaaatggtagtggaatgtaaaatgaataatattgtcagcaccagaatctacgaaaa

SEQ ID NO: 93414 - DNA, 761 bp, Homo sapiens
  misc_feature (1)...(761): n = a,t,c or g
ggtggttgaagatcccgcagaagttgggcaggctgctcatgagcttcttgtcgttcatcagctgcatcagctgaccaccaaatgaccccagagtgaagaaggcacatcaggctcctattaatgtggccacagattcacacatttgcttgatgaaagcctagtgcaaaggaatagagtcttattgtggacttggaaacctcctagttatttagatgtgaactcacgcttttgctcatctctgggaaacacagcacatttttttaaagtacatcttgcatcatggattgaaaggctaagaccttaccattagatctagcatgaagccctcacccatgccgtgtaactctacatttactccttccttccatcttcaggggaaaagaagcaggggctgataaaacaagcagagaaggcccagggtcggtttattgacttctaaggactattggtcttttgcagtgaaggaaaaaaaaaaatgccttaggacctgctaggtgctaatttgacctgggcaatgaggtgaagttaggctttggctgtcttcaacctcctaggatcggaatgccatctacttaggcatagggagtcagacaattccctgggcaatagatccgttttccanttgtgggagctacttgaataaatagcaaagttaattaacagtgttgctatgggctaggatgttttccaggttgggnattttcattaccagccggaaaggacttnggaggattnaaggggtcattttgttttcccccctt

SEQ ID NO: 93415 - DNA, 636 bp, Homo sapiens; identical to SEQ ID NO: 79219

SEQ ID NO: 93416 - DNA, 630 bp, Homo sapiens
gccggtgtcgacttactagctgcaagcctctgcctgccttcctgcgcgccgttccccgctagtcgctgctgctggcgcgcactcgccgggtttttcctcccacggcctcgagatggtggtgaatgtggcacggaggagccgggccttccaacccggtgggcccgagctccgaaaggccccctcggcagtgagaggggcgggagcccgcgggggccgcgcccttctctcgcttcggactgcgcaacgctgcgctctgggctgacaggcggataaaacggtcccatcaagactgagaaaaagcacaccagctattggcacagcgtgggcagtggggcctacaggatgactgacttagtctacagagatcccggcgtacttaagcagatgaagactcttaagatgacagaaggtgatttttctggtgatcgaggacttccggggtaatgacagtgatgaaatgcaggggacctggtaggtttcttttggagactaactgggggctgcctgggtgggacagaacagcatgtttccaagggctgtggctggtcatagccatgggatctccaactgcatgcaagagcaacctggaaagactttgacagcgcaggttgcccccaagtttcctggcag

SEQ ID NO: 93417 - DNA, 482 bp, Homo sapiens
  misc_feature (1)...(482): n = a,t,c or g
gtaccgtccctaattcctgnggcgacccacgcgtccgtattattgcacaaattctgtgcctctttccctaaaatggggtggggagagagaatgtttaaatcaaggcaggccccatgtttcttcactgggtggctacattaaagaactgctccccagaggtgttcttgatcagtgagggacccatcagggcttctgtaaggctgagtgggtcccatgcctgaaaggcagagccaggctgagcctggcctgagtctcccatgtgtaacaggtacgaggatgaaatcaacaagcacactgctgcagagaacgagtttgaggtgctcaagaaggatgtggatgcagcatacatgggccggatggatctgcatggcaaagtgggcaccttgacccaggagattgacttcctgcagcaactctatgaaatggagctgagccaagtgcagacccacgtgtctaacaccaatgtggtgctgtccatggac

SEQ ID NO: 93418 - DNA, 961 bp, Homo sapiens
caaccatgcaaggacagggcaggagaagaggaacctgcatagacatattttgttccaaaatggcatcttacctttatggagtactctttgctgttggcctctgtgctccaatctactgtgtgtccccggccaatgcccccagtgcatacccccgcccttcctccacaaagagcacccctgcctcacaggtgtattccctcaacaccgactttgccttccgcctataccgcaggctggttttggagaccccgagtcagaacatcttcttctcccctgtgagtgtctccacttccctggccatgctctcccttggggcccactcagtcaccaagacccagattctccagggcctgggcttcaacctcacacacacaccagagtctgccatccaccagggcttccagcacctggttcactcactgactgttcccagcaaagacctgaccttgaagatgggaagtgccctcttcgtcaagaaggagctgcagctgcaggcaaatttcttgggcaatgtcaagaggctgtatgaagcagaagtcttttctacagatttctccaacccctccattgcccaggcgaggatcaacagccatgtgaaaaagaagacccaagggaaggttgtagacataatccaaggccttgaccttctgacggccatggttctggtgaaccacattttctttaaagccaagtgggagaagccctttcaccctgaatatacaagaaagaacttcccattcctggtgggcgagcaggtcactgtgcatgtccccatgatgcaccagaaagagcagttcgcttttggggtggatacagagctgaactgctttgtgctgcagatggattacaagggagatgccgtggccttctttgtcctccctagcaagggcaagatgaggcaactggaacaggccttgtcagccagaacactgagaaagtggagccactcactccagaaaag

SEQ ID NO: 93419 - DNA, 424 bp, Homo sapiens
tgttccaactattgggggcgtcgctccccctcttcatggtcgcgggcaaacttcctcctcggcgcctcttctaatggagccccacctgctcgggctgctcctcggcctcctgctcggtggcaccagggtcctcgctggctacccaatttggtggtccctggccctgggccagcagtacacatctctgggctcacagcccctgctctgcggctccatcccaggcctggtccccaagcaactgcgcttctgccgcaattacatcgagatcatgcccagcgtggccgagggcgtgaagctgggcatccaggagtgccagcaccagttccggggccgccgctggaactgcaccaccatagatgacagcctggccatctttgggcccgtcctcgacaaagtgctatgcaaataccgctttggggtgggg

SEQ ID NO: 93420 - DNA, 442 bp, Homo sapiens
cattgagtacactgccgaaccgcgccggaagtcccgggtcgagaaatgactctacgcaaggaccttcatagtgtgacacagttacctgtcagttatgtgacagggttttggcccttgtgggcctcagttttgtaaaatgataagccagaactagcatattgatcttctaaggattccaagcttactcagcctcttggactttgtatagttaaatagtaagtcctttgcatttgtcactctaggctttccagctttttaatgcgaaatgcgagtcggctttcctttccaagaggaatcctctgcagagaaactggactgtcctctacagaaggaagcacaaaaagggacagtcggcagaaattcaaaagaaaagaacccgccgagcattcaaattccagagggccattactggtgcatctcttgctgatataatggccaagag

SEQ ID NO: 93421 - DNA, 617 bp, Homo sapiens
gcgacttcgcctgcccccggggcgaggctccccgcgcgggttcgcgtcccgtctgcagaggccgaggctgctgcctgccgggcagatgggtccgcctcgttccggctgcagctttcgccgccggggcttgctggctgacgggaactagtcaactggagtttttgttgacttcccacggttcaaaagggccttccagaatggggggctggaattaaatcttgggtctaacttaaaggaaggcgccatattattccataggtgatgctaatacctttgtgtttcgttatttgttttttaggaaacatgccctgaactgtcacagaatgaaaccagcgctcttcagcgtcctgtgtgagatcaaagagaaaacagccacagctcatgcatatgacacagagccagccaatcagatgcagtcacctgagtttggaagaaataactgcgaagaaggcggcgctgtgtggaatctgtgctgatgaacgtggaagaactggcagagagataggcttttggcggtggcaaatggtagaaatcttaactatagcattctctgctcccaagatgcgaggagaggcatctgtgcccagaggtagtcttccatgaggagctggatattt

SEQ ID NO: 93422 - DNA, 583 bp, Homo sapiens
  misc_feature (1)...(583): n = a,t,c or g
actgttctgagatctttgcctccctcaggctcccgagaatcatggctcattccaagcagcctagtcacttccagagtctgatgcttctgcagtggcctttgagctaccttgccatcttttggatcttgcagccattgttcgtctacctgctgtttacatccttgtggccgctaccagtgctttactttgcctggttgttcctggactggaagaccccagagcgaggtggcaggcgttcggcctgggtaaggaactggtgtgtctggacccacatcagggactatttccccattacgatcctgaagacaaaggacctatcacctgagcacaactacctcatgggggttcacccccatggcctcctgacctttggcgccttctgcaacttctgcactgaggccacaggcttctcgaagaccttcccaggcatcactcctcacttggccacgctgtcctggttcttcaagatcccctttgttagggagtacctcatggccaaaggtgcttctgaccatacttactggagcttctggtccatgtttctgcttggaaatgcacccttttnaaatcatccctcttcccc

SEQ ID NO: 93423 - DNA, 773 bp, Homo sapiens
tggccccttcggcgtcctctggccctctgcgaagcctgggcccgttactgcggttgaggccaggcccccagacgcatcagaccctgaaggactgcgtggtgggagccctgcaccgctcctggccccgggccccctggatccgtcggggcgcctccacccagctgttagcatgatgtcttacctcaaacaacccccatacggcatgaacgggctgggcctggccgggcccgccatggacctcctgcacccatccgtgggctatccggccactccgcggaagcagcggcgggagcgcaccaccttcacgcgttcacagctggacgtgctcgaggcgctcttcgccaagactcgctaccctgacatcttcatgcgggaggaggtggcgctcaagatcaacctgccggagtctagagtccaggtctggttcaagaaccgccgcgccaaatgccgccagcagcagcagagcgggagcggaaccaagagccgcccagccaagaagaagtcctctccagtgcgggagagctcgggctccgaaagcagtggccaattcacgccgccagctgtgtccagctctgcctcgtcctctagctcggcgtccagctcttccgccaacccagcggctgcagcggctgcgggactagttgttgcaaagctgccctgccctcttcacatcttctccctctgtgtatttattgaagagaaccgcttggtttcaggaagctgggcgcgggatatccgaagtgtggaggaaacagacaagtcagggtacagag

SEQ ID NO: 93424 - DNA, 1049 bp, Homo sapiens
ctgatccagatgatcgatgagaacaaggagcagctacggaatcttttccggaactacaacgtcctggacgtgcagcctgccatctctgtccggctgccggatgacatgtctgccctgcagatggcgatcatcgtcctggctatcctcctgttcctggccgccatgctctttgtcctcatgaactggtactacaggactgtacacaagaggaagctcaaggccattgtggctggctcagctgggaatcgtggcttcatcgacatcatggacatgcctaacaccaacaagtactcctttgatggagccaaccctgtgtggctggatcccttctgtcggaacctggagctggccgcccaggcggagcatgaggatgacctaccggagaacctgagtgagatcgccgacctgtggaacagccccacgcgcacccatggaacttttgggcgtgagccagcagctgtcaagcctgatgatgaccgatacctgcgggctgccatccaggagtatgacaacattgccaagctgggccagatcattcgtgaggggccaatcaagctgatacagactgagctggacgaggagccaggagaccacagcccagggcagggtagcctgcgcttccgccacaagccaccagtggagctcaaggggcccgatgggatccatgtggtgcacggcagcacgggcacgctgctggccaccgacctcaacagcctgcccgaggaagaccagaagggcctgggccgctcgctggagacgctgaccgctgccgaggccactgccttcgagcgcaacgcccgcacagaatccgccaaatccacacccctgcacaaacttcgcgacgtgatcatggagacccccctggagatcacagagctgtgactagacagggaagccttgtgggtgtgagcagcacccatccaccgtcccctcccagggagcaagggcagggacagggccggtcgggggggaccctccaaggccaggccttggggacaaccttagctttgccctggcagcccgcatcagctgctcagatcccacttttg

SEQ ID NO: 93425 - DNA, 618 bp, Homo sapiens
accggaagcggctccgaggaaggcctgtgggagtctcggagacgtgtctgtctgtgaggcgctgggtgcacgtccccagggctctgggctaggaaggcagcggcgaggtgcctccccacgtacccctcgcgggcccagccgagcaacgtggggcgaaggcggcggcgaaggcccgggctgggagcgttggcggccggagtcccagccatggcggagtctgtggagcgcctgcagcagcgggtccaggagctggagcgggaacttgcccaggagaggagtctgcaggtcccgaggagcggcgacggagggggcggccgggtccgcatcgagaagatgagctcagaggtggtggattcgaatccctacagccgcttgatggcattgaaacgaatgggaattgtaagcgactatgagaaaatccgtacctttgccgtagcaatagtaggtgttggtggagtaggtagtgtgactgctgaaatgctgacaagatgtggcattggtaagttgctactctttgattatgacaaggtggaactagccaatatgaatagacttttcttccaacctcatcaagcaggattaagtaaagttcaagcagcaggacatactcctgaggaa

SEQ ID NO: 93426 - DNA, 725 bp, Homo sapiens
tgggttttttttttaaattttaatttttaccctcattttattttagctggctgattgatggctatctttccaaatagaatcaatgtgtctgtggtgtctgaaacctaagattagcaaaatcgtaatgggtgatgtattcttcaaacgtttccactcatagagaagttttgcctcccggccaccacaggagcagcagtccacagctgagcccaccacgaggccacgcacctacctcctggatatgggccacgatgccagcctgggtctcaatgtccagctgtttgattctttcaatgaactcctctttcctctcacactggacagcacagcccagcaccagcagcagcaccttcttgatttcctccatgctcttcccagacagtgggtctctgccaatcatcaaaacattgggcaaattcattacaatcagctgctggagaacttcctggtagtaggtcttaatgtttctcaccaagatggtcaaattctgaatgcgaaggttcacatcattgttgacgtgcttattgatgcgttgatttgtgggcctgggatctatttgcagcataatttggttcaaaaagatgccgtccactaaatccatgtacatagtcaggttgtcctggctgccgcttccaaacgggccaaaagttttcacccaggtcaccagcgggctctgcaggaagagctccaggagctccgagactgtcacgtccatgctgaggctg

SEQ ID NO: 93427 - DNA, 1604 bp, Homo sapiens
ctcggaggcgcacctgtgaggtgtccctgaggagagggaggtgggtgcgcggcgcccgcggcctggggcgctgactcccctcacttggaggcgccctgcgtccggcagaggaggcgagcatcccgctcaggtgatgaggaacccctcgcgcacccagcgcagaaggctgctgccgccggacgcctccattgtttgaccacaacaagggccggattctcacccagcaggatcctaaggcctttgtagtccttcagccactgtgggccctgcctctgcctgttcttctggaatgtcttgggggttttgatcctgtcactgtgacctgcaaatccaagagacacatctttggaagataagagagcttcttcaagaccaaaaaaggagacggcatgatacccatgtagggaattccccaaagcagggcttgccatacctggaccccgaggagcctgcttgctggaaaggctttcctgtctgatgtgcaggagcagaatgccaaactgactcttcaaggggcaactgcaggggctcgagaccagccagcagtatctcatccttcgatacaggggatatactgtacagtcctttttctagaagtgagacatacaagattactctacaagaggaagattccaggggctcaaaaacgcaaaggtttgcactttgagagccccttggaatgttgacaactcaggatctaaaacaaagttctgtgttaatgagttacagaattcacgtggaagtcaatgtcactttataatcgataataatactgagtgaggaacactatgcaggaagaaaccttccgtagaaagacaggcagggaaaagcttaggctgaccttaaacttacctaatagagcaagcctgagatagactgccaaaatggccaaataagagactctatgaaataacagtcttgtaactgtagtaatcataaggaaattttctccttgaaatcacgataccaaataggaaaaatgatctacaagtgccccatgtgtagggaatttttctctgagagagcagatctttttatgcatcagaaaattcacacagctgagaagccccataaatgtgacaagtgtgataagggtttctttcatatatcagaacttcatattcattggagagaccatacaggagagaaggtctataaatgtgatgattgtggtaaggattttagcactacaacaaaacttaatagacataagaaaatccacacagtggagaagccctataaatgttacgagtgtggcaaagccttcaattggagctcccatcttcaaattcatatgagagttcatacaggtgaggaaccgtatgtctgtagtgagtgtggaaggggctttagtaatagttcaaacctttgcatgcatcagagagtccacaccggagagaagccctttaaatgtgaagagtgtgggaaggccttcaggcacacctccagcctctgcatgcatcaaagagtccacacaggagagaaaccctataaatgttatgagtgtgggaaggcgttcagtcagaggtcgagcctctgcatccaccagagagtccacactggagagaaaccctatagatgttgtggatgcgggaaagccttca

SEQ ID NO: 93428 - DNA, 1292 bp, Homo sapiens; identical to SEQ ID NO: 82917

SEQ ID NO: 93429 - DNA, 1129 bp, Homo sapiens
agtcaatgcagtcaacattggatcgattcatatcatataaaggctggaagctttatttctctgaagtttacagcgatagctctcctttgattgagaagattcaagcatttgaaaaatttttcacaaggcatattgatttgtatgacaaggatgaaatacaaagaaagggaagtattttggtagattttaaagaactgacagaaggtggtgaagtaactaacttgataccagatatagcaactgaactaagagatgcacctgagaaaaccttggcttgcatgggtttggcaatacatcaggtgttaactaaggaccttgaaaggcatgcagctgagttacaagcccaggaaggattgtctaatgatggagaaacaatggtaaatgtgccacatattcatgcaagggtgtacaactatgagcctttgacacagctcaagaatgtcagagcaaattactatggaaaatacattgctctaagagggacagtggttcgtgtcagtaatataaagcctctttgcaccaagatggcttttctttgtgctgcatgtggagaaattcagagctttcctcttccagatggaaaatacagtcttcccacaaagtgtcctgtgcctgtgtgtcgaggcaggtcatttactgctctccgcagctctcctctcacagttacgatggactggcagtcaatcaaaatccaggaattgatgtctgatgatcagagagaagcaggtcggattccacgaacaatagaatgtgagcttgttcatgatcttgtggatagctgtgtcccgggagacacagtgactattactggaattgtcaaagtctcaaatgcggaagaaggttctcgaaataagaatgacaagtgtatgttccttttgtatattgaagcaaattctattagtaatagcacaggacagaaaacaaagagttctgaggatgggtgtaagcatggaatgatgatggagttctcacttaaagacctttatgccatccaagagattcaagctgaagaaaacctgtttaaactcattgtcaagtatgtatgctgtcatttgaaattttattacatagatgcatgttgggggttctcttggctacaggtaacaaaaaactagtcaaaatggtcggc

SEQ ID NO: 93430 - DNA, 987 bp, Homo sapiens
cggcctcaagatggccgccttctggcgtctccggcgctgttgaatggcgaaagctttattgttcccttcgggcaggagtgttcgtgtcctctatggagctgtcaataaagaacggcagtttgaatcggtgctgaacagggcctgtcctcccaaagccaactctaaggagaggagaggaagagcagttcttggggcagagttgacgcaatggagctccccaactacagccggcagctgctgcagcagctgtacactctgtgcaaggagcagcagttctgtgattgcaccatctccattggtaccatttacttcagggctcacaagcttgtcctggctgctgccagcctcctgttcaaaaccctgctggataacacagataccatctccatcgatgcatctgtggtgagccccgaggagtttgcgctcttgttggaaatgatgtacacgggcaaactacctgtgggcaagcacaacttctccaaaatcatctccttagcagacagtctacagatgtttgatgtagctgttagctgcaaaaatcttctgaccagccttgtaaactgctcggttcagggtcaggtggtaagggatgtctctgcgccatcctcagagacattcagaaaggaaccagagaagcctcaagtagaaatcctttcatctgaaggtgctggagagcctcattcttccccagagcttgctgccactccagggggccctgtgaaagctgagactgaggaagcagcccattcagtttcacaagagatgagtgtgaattctcccacagcccaggagagccagaggaatgcagaaaccccagcggagactcctactacagctgaagcttgttccccctcccctgctgtgcaaacctttagtgaggcaaagaagacaagcacagaaccagaaaggcttgccctcatggtgacagaaatggcagcagctgctctaacttcaggtgcaatccaacagaaagtggccaaagccatg

SEQ ID NO: 93431 - DNA, 422 bp, Homo sapiens
cgaccttatccagccacacgccaccatgtgtcataccagctgctcctcgggctgccagccagcctgctgcgcgcccagcccctgccagccagcctgttgtgtgcccagctcctgccaggcatcctgctgtgtgcctgtgggctgccagtcctccgtgtgtgtgcccgtgagcttcaagccagccgtgtgcctgcccgtgagctgccagtcttctgtgtgtgtgcccatgagcttcaagtcagctgtgtgcgtgcccgtgagctgccagtcttctgtgtgtgtgcctgtgagctgcaggcccattgtgtgtgcagccccctcctgccagtcctccctgtgcgtgcctgtgagctgcaggcctgtcgtgtatgcggctccgtcctgccagtcctctgggtgctgccagccctcctgcaccagcg

SEQ ID NO: 93432 - DNA, 570 bp, Homo sapiens
cagagcatcaccgcagaaacaaaggctccagcctccggacaccatgtctgtgcgcttttcttctacctccaggagacttggctcttgcgggggcactggctctgtgaggctctctagtgggggagcaggctttggggctggaaacacatgcggtgtgccaggcattggaagtggcttctcttgtgcttttgggggcacctcatctgcaggaggctatggcggaggtctgggcgggggaagtgcttcctgtgctgccttcacagggaatgagcacggcctcctctctggcaatgagaaggtgaccatgcagaacctcaacgaccgcttggcctcctacctggagaatgttcgagccctagaggaggccaacgctgacttggagcagaagatcaaggggtggtatgagaaatttggacctggttcttgccgtggccttgatcatgattacagcagatatttcccaattattgacgaacttaagaaccagataatttctgcaactaccagtaatgcccatgttgtcctgcaaaatgataatgcaagactaacagctgatgacttcagactaaa

SEQ ID NO: 93433 - DNA, 443 bp, Homo sapiens
ctccggaatttttggtcgacccacgcgtccggggagatgagccttccgcaaactcctgacctgtgggtccgtccgttcaacggccaaaggctggcggaggagggatcccctgcctttctcggaacggaacggagcagagtcatgcgtggttgagtttagataaaagccgagtgagcgcgctctgttccttaagattagtttaaggtgccttggattgctctgaagagctttgaccacctgatattgcttacatctggaacttcttggcttctcattccccagatgtgcgggtcagagagaccatggagaaaaactgcagctcttctgtcaggaggatgggaaggtcatttgctggctttgtgagcggtctcaggagcaccgtggtcaccacacgttcctcgtggaggaggttgcccaggagtaccaggagaagtttcaggagt

SEQ ID NO: 93434 - DNA, 863 bp, Homo sapiens
tttcgtgcagcctcctgcgccccgccgagctggcggatggagctgcgcagcgggagcgtgggcagccaggcggtggcgcggaggatggatggggacagccgagatggcggcggcggcaaggacgccaccgggtcggaggactacgagaacctgccgactagcgcctccgtgtccacccacatgacagcaggagcgatggccgggatcctggagcactcggtcatgtacccggtggactcggtgaagacacgaatgcagagtttgagtccagatcccaaagcccagtacacaagtgtctacggagccctcaagaaaatcatgcggaccgaaggcttctggaggcccttgcgaggcgtcaacgtcatgatcatgggtgcagggccagcccatgccatgtattttgcctgctatgaaaacatgaaaaggactttaaatgacgttttccaccaccaaggaaacagccacctagccaacggtattttgaaagcgtttgtctggagttagaaagttctcttcttcaacacgtccctccccagggtgttcctccctgtgacccagccgcctcgacttcggcccgcttgctcacgaataaagaactcagagttgtgtgtgcaatgcacacccagacacacgcacgcacacacacgcgcgcgcacacacatgcttttttctgttcccctccgctttctgaagcctggggagaaatcagtgacagaggtgttttggttttattgttatgtgggttttcttttgtattttttttgtttgttttgtttttaaacattcaaaagcaattaatgatcagacataggagaaaccctgaatagaaacaaaacttttgaatgctggattcaaaaaaaaaa

SEQ ID NO: 93435 - DNA, 662 bp, Homo sapiens
ggatgtatgtatatggagggcctggcaggcacctgtagtccccctttttcagttcagaaaacatttctgtcccgcaggcggggtgctgtgcacgccgcgatccgcatttgcaggaccagggatgttgtgctgctctccgatgaggcagtcacagagtctgtctgctgcagccctttctgaacctctggctgtctggacgctccattgtgctccttaccaagatgaagtgcatcttggtggccattgagggcacagaggccctcttctactggacggatgaggagtttgaagagagtctccagctgaagttcgggcagtcagagaatgaggaagaagagctccctgccctacaggaccagctcagccccctcctagccccggtcatcatctcctccatgacgatgctggagaagctctcggacacctacacctgcttctccatggaaaacagcaactccctgtatgtccttcacctgtttggagaatgcctgttcattgccatcaatggcgtcgtggtctctcccgccctctctggctctgccctcaggctgcggcccccagacctggggcagcgtgtccagctgtgggagcactttcagagcctgctgtggacctatagccgcctgcgggagcaggaacagtgcttcgccatggaggtgatt

SEQ ID NO: 93436 - DNA, 616 bp, Homo sapiens
tttccattgtgaaatgatgtgtagtcatcacactcctttgtaatgcgaaattgctctctttctgtttgtccagatgttaacatgttggatactatatactatagtttagttatagctatatactataactaaaatgttctttaatgaggttcttatctctgtgtaatccactgcaaatgaattattgccttttattgatgcacatatattccccttcagcatttcccctttgttctcctctctgtcatagaatcatgcttaatatgcacagtgtctaattatgtattttcagcactgtaacagactaaaatattacaagctaagcaagcccacatatgattctttttatgaagaagaaccaaaggtgttggtaatattgtgtggtatttccctcttaatcaggaccaagctcatttgtcacctcagagttagaaagcaagatggagcaaaaatgatagccaagcaaggctgcaataggtcacctttgttgcacaaattaaaatttatatatgtggcagcttttatgtgaatatttaacaaagaaaaagtacatgcaaaaagtaaatcttggctgggcgccgtggctcacgcctgtaatcccagcacttttagaggc

SEQ ID NO: 93437 - DNA, 264 bp, Homo sapiens
gggaccgtcctgggctggcctggactatggtgctgctctgggagcctgcaggagcctggcttgctctgggcctggccctggccctgggccccagcgtggccgcagctgcccctcggcaggactgcacgggcgtggagtgcccgccgctggagaactgcattgaggaggcgctggagccgggtgcctgctgtgccacgtgtgtgcagcagggctgcgcctgcgagggctaccagtactatgactgcctacagggtggcttcgtgc

SEQ ID NO: 93438 - DNA, 332 bp, Homo sapiens
aaaaaaaattgactcagccggctggaggcagagacgcccctgctgggtggaggcagtaatcagccatgttggagaagcccccgtggcaggaactgtgggtggccgcaagggcttcaggggcagcctgcagctggcagccagaaaaagaccaggtgcccaagccagggcccagtcatatggcacaaggatatgaattctaccaacaacctgagtaagttactcaacctgagtaagtggcttttctcctggaggatcctccaggtgagcctggccaacaacctgcgtgtagccttgtgcaatactgagccaaggacccagctaagcaagccaag

SEQ ID NO: 93439 - DNA, 413 bp, Homo sapiens
agcggagagagtgaggaggctgcgtctggctcccgctctctcttcattgcagtacattgagctccatagagacagcgccggggcaagtgagagccggacgggcactggccgactctgggcctcgctgaggaaaaacaactaaacatgggcaaaggagatcctaagaagccgagaggcggaatgtcatcatatgcattttttgtgcaaacttgtcgggaggaagcccagaaaattgggtatggtctagagatttaccaccattgcttattgcttttttctttaataaagtttaggaaagttcttgcacacgatgttacgttaaactataacatacttagcgtgggggtgtgtatagagattagatttctttcccccggcatggggatgaagcattgtctatttgagcggccgcc

SEQ ID NO: 93440 - DNA, 912 bp, Homo sapiens
ttttttttttttcaacttcagcattcaattttattatagtaccatctccctcaacaaacaagatcagcagccagtgtgggatggtgctcaatggggctccacttcccactagagtgtaagctgcttccacgcatgctactgcgtgctccgagccatcgcagcggagtctcttctcacccagctttgatggtggggcgactcccgtgtctgcagctgtggtccaaagggtgtctgtgctggatacagaagttgccgtgacattgggcacataccatctgcagcatctctttcttcttgcagccctcttttgagcaacggtatgtaaaaatcttctctttcttcttcccagggtgagagtcacagtctctgtcaatgtgatcaccaaccaccacgtctggtatctggcccttttttactgggatgggggtattacagagtgggcatactgggacgtgaacatccttctggaatgcaaacggacacttatgtgcagcgtatggaaaatgatctttacagaaatcttgtttacatgcatcacattttactggaagaaaatctagctgcttgcaagtcttttctgaacaatgcttccccaaatcaggaaactccattatgagaacagtgctcaaaacgcagatggcggagttaagtgtcacctggctctcgtcggggacccaggcagctgaggtgagcagcagatggaagagacgtaaactcaggtgtcctcctccgtagtcggctccgggtagctaagcagaaagaacctcgacactggcaccgagacgccgtcggaggcacacccacacccacaccggaacgcaacatctcgctgcccgcggcctacggggatttatccgcagcccccggatctgagagccgtctgggccttgggggaattccaccgcactgaac

SEQ ID NO: 93441 - DNA, 395 bp, Homo sapiens
aaaaaaaaccccgaaaggaaaaacaatcctagttcagacttcagaaatgttgttattgagaatcacaactggaaaaaagttgttgccagacttgcaaaatcctgacaggagctggacaaggaacattttttggaaagcgccccgtgtaaaatgctggttattcatggtggaaccacagcatggtgaaagggaaaggaaatagcgatctcttcttgtccagccgtcaaagaaggcagcaaccttttcttccatcaaaaagaaaaaatttggaaaaaaaaacttcactctgtaggaaagctgcatgtcgcctcagtgggtttgagccacatttaaaaatggatgtaatgtggcagcgaaccacctggacagcaattcaaaaatgacaaagattatgg

SEQ ID NO: 93442 - DNA, 332 bp, Homo sapiens
gatgcctggaggcccctgcttttccgtttgccccacttttgattggcctaattatttctgtgggtctccaaagcctgggctgaagccattaaagcaaccagagacttggcatgtgctgcggccactctggctgttaagtgtcttgtttctctgtgcctgagcactttctttagttccagcccgggaatctccatgtgtccactggaggatggagctatagtttgtctgtcaggcactttcctttctaccctccctcctccaagtattgcctggagcaaggattccctccctttcctaccctgggacagcatgcattggtcatgaccactttt

SEQ ID NO: 93443 - DNA, 1345 bp, Homo sapiens
  misc_feature (1)...(1345): n = a,t,c or g
gcctccgcctcctcctcagtctccggctcttcccggccctgtctgtctctagcctgtggtgcagagcgggcggtcggcggcgcgggccggcggcgggatgaagcccgtctaactgctgcgcgctcacggccccgccctggccttccctcgttcggggctggctgatggctccgaggccccaccgcagcgcgtctctccggtgaatggccgagggctgggtggggctgcggtgggcagcggtggcctttctccttcacacacatacacatgccttccaaatgtgcatggcttgggattcgcgtatttgtttaagagacgacggccacatccttttgttcggcgttcagcagactcctccgagttccgggatttctcccgactgaggcgtctccgtctcagtactctcggaggaaagcctcgaggggcagaactgccctctgttgtttcacggggctggaacctccctctccgcagcccaaagaatccggatggacccgcctttcccagaaccggagaccttggcctcctcaggctcccctctgactcaaacaaaagccggaattggaaagaccacccctttgatgtgttcgctgtaatcgacgtcctgctttcctcaaccgcccattcccttagccttcttagttgacaggaatattgagtatttgcaaggatgcgaagccagnnnnnnnnnnnnngacttttaattctataaatcgtcccgctgcgtgcgcgcgtctgtccgtacagcgcggggcccaccccgagagagggcctggattcaccaaggctgggggccttgagggctttttagggcacgtgaaaggaaaatggagttagagttgtgtcgggatagagagtgggatcattttgcactcaaggaattgagaagatcccgttggtaccgcagtttccaaggatttgtgtagtgcgttttttggatctggtttgtacaagcgaccagtataggagacgggatccctcccgcccttacaccccgctgcggggtcagccgacgtgggtgggattttgctggcggcaaggggagaaggtgacgtgcgtggcgccatgatcggaagtctggactgaattcttagctgcgaggtggaaaatgcgcgtgggagggcgatcttaaggggtgaagtctggccttcccatctcctaccaggcaggagggttatgctgaaggctggttttgctggtctttcattgtggctaagggcagttccccagatacagtcatagatagactccttaagtcatgctctgcttgcttcttttagtccgctgttacctctttatctgaatttgatgtaaataaatctccccattccttaaaaaaaaaaaa

SEQ ID NO: 93444 - DNA, 399 bp, Homo sapiens
  misc_feature (1)...(399): n = a,t,c or g
aaattcatgcatagttttttcatcatatgcattttccatagctttgaacacccccatgtaactctcctcttccacaaaccaaacaatgaaaaagcacctttgtgatggaagtttattttgcaataggaactcacagtgatctaagccctgctattcatgaatataattcattactggagtccaagttgctttttggtttttgaagttctcttcttcccttgcaggtatagaacaagatgcagtgaatacttttaccaaatatatatctccagatgctgctaaaccaataccaattacagaagcaatgagaaatgacatcataggtaagcagtgcttgaaactatggcnnnnnnnnnntgacaaaaaatgcacagaactgacaattttcgttattgacta

SEQ ID NO: 93445 - DNA, 405 bp, Homo sapiens
cgactctgtattccaaagtttggcaaaggggttcatgaggggtggggagccagataagagctggtcacggatcgtgatggcaataaccatgataatcacagccagcacttaccttggttggtcccaccttggttctggtctaggccacttacaagcatcatctccttcactcacaaaaggactgctggaggaaggtgcagggagcaccctgcttttactcgactaaactgaggcgcagagcgactaatagacttgtccagaacccgacagctgctaattggcagagcccccactgccactcctacagggagccctgccccccgccctgctgatgttgacactgaccacggctctattattacaggagttccttgtagtcactgaggagctagcaacaagatgagc

SEQ ID NO: 93446 - DNA, 695 bp, Homo sapiens
ctggtttgtctttcttcaaaagatggtgtcatgatggatgcccagcaaatggtaacacccgcagagtagtagagagtagattcggggaccctgggctggcagctccataattctttctcccttttctgccaaagagacaggatattaaaccactgaactggcgcggtcctgggctgcctgccaatggaatatttggggagagaatggtgcagcttttgtttctcttgccttctgtggagccctggggtggattctgaagggatgttttccctcgcaggagtaacccatttggtattgagaaagcaggaaagcaagttttcctgttacgagcagtgaacaaaaagcagaaaagcaggcagcggatggcgatatcctgttgtaaaaggcttgcgggagcgaatgcagacaagtgcccctcattctttccgtgtctttaagaaaagccaggagatgagaaggaaattggttactttgcaggccacatccaaatggctttcctcttatttatggcgcttatcaaaggagggcataagaggctggtcctgtgatttaaaaacttggcacacccgggatctatccccccgggacaattaaacaaccaacttcacttgggggctttagggatgaggggttcccctcaagcggtccaatattgtattggaggggtaatggacagaaactttttattaccctcc

SEQ ID NO: 93447 - DNA, 416 bp, Homo sapiens
  misc_feature (1)...(416): n = a,t,c or g
tgaaaaaaaccaatcagcgcttatccatattttactgaaggtgctaagtaagaagctagtaaatgacggaatttcagctgagccaagtctgactcttgaaaactacatttcctctttagtgcagaaaatatttatgagaatgggagcgtagaaaaaatgaaatcacaataaaacaaattagtttctgatttttggacacggtctcattttctaaattatcactgtcagttttttttctgctgcttctagaacatgtttattttgcataatttctctggcttccaaaatctgaagaattgcctctgtttaaactctattttcttctttcgtgtacttgctcttgatttgctgaccttctaaatggngaccagcatctaatgcttaatgcagagtgctggggacatggngaggcagga

SEQ ID NO: 93448 - DNA, 417 bp, Homo sapiens
atgtggagatcacgtggtgagagaggaagcaagagatgggtgggggactctttttaacaagcagctctcatgggaactagtagagtaagaactcactcacacccaagagagggcatcaatctattcatgagggattctactccatgacccaaatacctctcattaggccccatttccaacactgggatcaaatttcaacattagatttgttggtgacaaacaaaccacattgaaatcatagcaatgggtatcttgctcatccttaaatacccagagtctaatgcagtgcctggcatatataaaaggtgttcaatgaatgctgacttgaaaagttgattcatgaatgaatagatgatgaatggattttaaataaatgaatttagtcatagggtgcggacgcgtgggcggacgcgtggg

SEQ ID NO: 93449 - DNA, 669 bp, Homo sapiens
tttctaccagcagtgatgaagggagccccagtgccagtacaccaatgatcaataaaactggctttaaattttcagctgagaagcctgtgattgaagttcccagcatgacaatcctggataaaaaggatggagagcaggccaaagccctgtttgagaaagtgaggaagttccgtgcccatgtggaagatagtgacttgatctataaactctatgtggtccaaacagttatcaaaacagccaagttcatttttattctctgctatacagcgaactttgtcaacgcaatcagctttgaacacgtctgcaagcccaaagttgagcatctgattggttatgaggtatttgagtgcacccacaatatggcttacatgttgaaaaagcttctcatcagttacatatccattatttgtgtttatggctttatctgcctctacactctcttctggttattcaggatacctttgaaggaatattctttcgaaaaagtcagagaagagagcagttttagtgacattccagatgtcaaaaacgattttgcgttccttcttcacatggtagaccagtatgaccagctatattccaagcgttttggtgtgttcttgtcagaagttagtgaaaataaacttagggaaattagtttgaaccatgagtggacatttgaaaaactca

SEQ ID NO: 93450 - DNA, 925 bp, Homo sapiens
  misc_feature (1)...(925): n = a,t,c or g
ttcgggacttttggattcctctctccccatttttaaggaacccttatgattctctttggggcccccccagaataatcccaagattaatttctctaatttattggcagggttacttttccttcgtgccagcctttaattcccttgaagctgtaataattcttagcatattctcaaggttcctggtgaataaaaacatagacatcttttgggagctccattattggggcctgctcaaccaagcaccaaaaattcttaaaaatgatattaagagcacaatttcaattcacaatatcataaaanagcttagtgtcagatttaacaaaagagtgtgagacatatacagagaaatctctcaaacattgctgggttaaattataaaatatatgactaaatgaagaacacccatgttcatgagtttaaagatgtaataaaataaagagcaattctgaccaaattggtctatgtagtcaacataattcttaacaaatcccagcaggcttttcatctaaaggttgataagatgattataaaatttatatgaaaagaaatcagaattgcccaaatgtgtctagtttaatcactaaatagaggcttttggagcattgtgatccatttaattgtcaccattttagtcctactctaggatctttaagtgtttctggaacacatcacagctctttgaagattgttgatagaaccaattgtaagttgattatttgcattctcaggctgataaagtttaccactctagtaatgcccagttatatttgtaataataattaaaatagccataaacacattttacaaaagaagatattatatacctgaacagagggttgggagataggttctgttgagctcaatatagatggattgaattaggttaatataaaaaattccccactttgaacagcaataatgtatt

SEQ ID NO: 93451 - DNA, 1923 bp, Homo sapiens
tcctcctgcacctggtccccaggatcagggttaagctagagaggaagcccgggaaagctctaaaggacaggcattggaagcagccccagtataggcctcttaccccttgtagggctccagctctgaccagactgcaacaccatcaggcacgtgtcatcctccagcagctggaagaagtcctcactgtccactgcagttccatcctcctctagcaccagggttagcactccattcagcagtagggtctccaatgcctgcccaatggcaagaaacaagaagggcaggtcttatcccatgccccttccctctttagctgcccaacatccatcagttggctctagacattggtcgatgtcccactttgactttctggcactttgatacctcctaaaggttgcagctctccgtgttcttcagtttttgggggatcctagctagaggctgacctttttcctctttgctcctaccatgtcattggcatctccccttgctcccctccaagtcacttctggtttggaattggaaagcaagccaggttctcacgaagtccacctttctgtcttatctacaatgctgcacctcacttcccacaccctcaagagttctccagaagtgttttcagtaatagtgtttaacctttttgagtccttactctgtgccaggtatgaggactttacctacattatcctcttactcctttcaacaaccctaggaggtgatgtattattattgcctttttatagttgaagaaactgaggttttggtaggttgaacaacttcccaaggtttgacaggcaggaagtggcagaatcagaatttgaacttgatttgtcacacaaatcacctttccatactagcttctgaattccgtccctcgaactctccctatctcctgctaacccctgctcccatagaaaagctcactaggtggaaaatgaacaaattgaccagagctcattaggcccactccgctgcttttagccctcagagggaggggcagctgtgtgacttcagccctctgctccatcatcacaagttgccactgttgtggagccccttggctacccctgctataggaaccgaggaacttggcctacttactttggctaggcagctcctgggcgggtgggcagctgttcaggccttttccggatgggtccgcttgtggatcacagacacggaaaggtcgctggggtggtggagctgaggtccagaccctccgtccaaactccgagcttatattagatactgacctggtagttgagaagaaaagtcaagaaggggcgaggaggggcttggtgagtgtaaagggcatgatgagggtagagtggctagagggctagggagggagagatctaggtttatcgattagggatgagggagagaccatggagtgcaggtgggggcgggtggctcaggagcttgacaagcccactgtggagtggggagcaggagaggaaggggtactggttagtctcctaggggctgagtggagtattgttgccctgcctatatcccctaaaggtggagggtagagcggagggttagcagtcacctgagtaagtcactggggttcagagctgagaggtactccatggtgggaccggagagttccttccctggaacttctgggctgggtggttctctcctgtgctggggctttaggtggtgttttctgttacaaacctgggatctcagcccaggacaaggtgggaatgagtcaagcctggactctggcccccctgcctggccagtaagaagggcaaagtccaaggggagggatgagggaggggcccagatggggtcctggaggaagaattgcctggcaaaagccattggagcttgtatgtgtgtctttggtgatgacatgtgttgtgagggtagatgggaaccatgtaaaaggatgaaatgtgaaaaaaaaaa

SEQ ID NO: 93452 - DNA, 1105 bp, Homo sapiens
ggaattcccgggtcgacgatttcgtaggcccggtccggttccagcctctgcccggacgctagccggcctggccatggctgaccgcgggtgcccgctggaggcggcgccgctgcctgccgaggtgcgggagagcctggctgagctggagctggagctgtcggaaggtgacatcactcaaaaaggatatgaaaagaaaagggcaaagctgcttgcacgttatataccgcttattcaaggaatagacccatctctgcaagcagagaatagaattcctgggccctcacaaaccacggccgctgcacccaagcagcagaagtctcggcccaccgcctcgagggatgagcgcttccggtcagatgtccacactgaagccgtgcaagcagctttggccgaatacaaagagaggaagatgcctatgccttcgaagagacgttctgtccttgtgcattcgtctgtggaaacctacacccctccagacacgtcgtctgcctcagaagatgagggctctttacggcgacccgggcgactcacctccactccgctccagagccattccagcgtcgagccctggctcgaccggtgcattcagggctcgtccacctcatcctctgcatccttcacctcatctgacccgggagggagacccaccactgctcccagtgctgcagccacgccgggggccgccgctaccactgcactcgcaggcctcgaggcccacacccacatagatctgcattctgcccctcctgatgtcaccacgggcctcgtggagcattcgtactttgagcgtccacaggtggcttctgtgagaagtgttcctcgggggtgcagcgggagcatgctggaaacagcagatggtgtccctgtgaacagcagagtgtcctccaaaatccagcagcttctgaacaccctgaagaggccaaagcgccctccactgaaggagttctttgtggatgattttgaggaattgttggaagttcagcaaccagatccaaatcagccaaagcctgagggaagcgagacgagtgtgctgagaggggagcctctcactgcaggtgtcccccgaccgccgtcgctgttggccaccttgcagcgctggggcaca

SEQ ID NO: 93453 - DNA, 829 bp, Homo sapiens
attcggcacgagggccgccgcctgagaggagagccgggccgccgccgtctctgcagcccgcgggtaactgggccgttgccgccgtccgcgctcggcccccgcggagagatcgagctgaaggactgcgcggctggctctcctctagtatggccaatgaagaggatgacccagttgtacaggagatcgatgtgtacttggccaagagtctggcggaaaagctgtatctatttcagtaccctgtgcgtccagcctcgatgacctacgatgacattccgcacctctcagccaagatcaagcccaagcagcagaaggtagagcttgagatggccatcgacaccctgaaccccaactattgccgcagcaaaggggagcagattgcgctgaacgtggacggggcctgcgccgacgagaccagcacgtattcctcgaagctgatggacaagcagaccttctgctcttcccagaccaccagtaacacatcccgttatgccgctgcactctacaggcaaggtgagctccacctgacacctttacatggcatcctgcagctgcggcccagcttctcctacctggataaggctgacgccaagcaccgggagagggaggcggccaacgaggcaggggactcttcacaggatgaggcggaagacgatgttaagcagatcacggtgcggttctcccggccggagtcagagcaggcccgccagcgccgtgtgcagtcctatgagttcctgcagaagaagcacgcagaggagccctgggtccacctgcattactatggcctgagggacaagcgctctgagcatgagcgtcagtacctgctgtgccg

SEQ ID NO: 93454 - DNA, 438 bp, Homo sapiens
acgatgaacctctgcagaattcccgggtcgacgatctcgtaggacagcttttttcctgcaagatctgttacctaaagcaataaaaaatggccagaggatcagtgtccgatgaggaaatgatggagctcagagaagcttttgccaaagttggtgagtagacctggtaccccaaattgcatcattctcttcttcactgagtagcttcagggtagattcaatgaaatgggaacatgagcaaaatttcagagatgacaagaaaccagtagtatttgtttagaggagctgggagaacttatttttgaaaaatatgcttcaataaaatgactttctctatcaaaacatggaatatggactctactcttacatagtttgttcctggaaatggtttgtaagtctcatcttttatatcttggcttctggtttgctggttccttgatt

SEQ ID NO: 93455 - DNA, 1093 bp, Homo sapiens
tttcgtggagctgcagggccccggcgggggaaaggggaagtggtgagggtgaggaggccggagggcgcctcatcccactctggaagctgagccggcggcgggaggagctagggctggagcctctccagcctcccgcgaaggtttgagcacaaaatgaacataattagggaaaataaggatctggcatgtttctacacaacaaaacattcatggagggggaagtataagcgtgtcttttcagttggaactcatgcgattactacatataatcccaataccttagaagtaacaaatcagtggccttatggagacatttgcagcatcagccctgttggaaaaggacaaggaacggagttcaacctcacatttcgtaaaggcagtggaaaaaagtcagaaactttaaaattttctacagagcacagaacagaacttcttacagaagcattgagatttagaactgatttttcaaagggaaaaatcacaggaaggagatacaactgctataagcatcactggagtgactcaagaaaacctgtaattttggaagtaactccaggaggctttgaccaaattaatcctgcaaccaacagagtactctgttcctatgactatagaaatattgaaggatttgtagatctctcagattatcaaggaggattttgtatactttatggaggatttagtagattgcatttatttgcgtcagagcaaagagaagagattattaaaagtgcaatagaccatgctggtaactacataggtatttcattgcggatcaggaaagagcctttagaattcgagcaatatttgaatcttcgctttggaaaatacagcactgatgaatccatcacatctttagcagagtttgtagtccaaaaaatatcacctagacattcggagcctgttaaaagagttctagcacttacagaaacatgtttagtagaacgtgatccggcaacctataatattgcaacattgaagcctttaggagaagtatttgcgttggtctgtgactcagaaaatccacaactttttaccattgaatttataaaagggcaagtacggaaatattcttcaacagagaggatgtatt

SEQ ID NO: 93456 - DNA, 706 bp, Homo sapiens
cgggtcgacgatttcgtcccaggactgcccctgacccaggcgcgcccgctgctcggtggcaggagggccggcggagcgccatggcctgcatcctgaagagaaagtctgtgattgctgtgagcttcatagcagcgttccttttcctgctggttgtgcgtcttgtaaatgaagtgaatttcccattgctactaaactgctttggacaacctggtacaaagtggataccattctcctacacatacaggcggccccttcgaactcactatggatacataaatgtgaagacacaagagcctttgcaactggactgtgacctttgtgccatagtgtcaaactcaggtcagatggttggccagaaggtgggaaatgagatagatcgatcctcctgcatttggagaatgaacaatgcccccaccaaaggttatgaagaagatgtcggccgcatgaccatgattcgagttgtgtcccataccagcgttcctcttttgctaaaaaaccctgattattttttcaaggaagcgaatactactatttatgttatttggggacctttccgcaatatgaggaaagatggcaatggcatcgtttacaacatgttgaaaaagacagttggtatctatccgaatgcccaaatatacgtgaccacagagaagcgcatgagttactgtgatggagtttttaagaaggaaactgggaaggacagggg

SEQ ID NO: 93457 - DNA, 776 bp, Homo sapiens
ccggaatatcccgggtcgacgatttcgtcctccgggtctgaggaggcttctaaaagggcctcacatgccccgggagccacgtggatacagaacgagggttcccgctctcagagagttggtccccagttcccatgcagggagtggagcctctgagcactgccagaacaacaggcagggttctcgacagcacagagcctcacgcaatgtgcaggcaggtggtgctctcgctccaccacggcacctctgcggtctctgcagccgtttgcatttcctgaaaccggatcttagtgtcagagccgcccccagccgggcgggcgcctcagtcatggccctgcgcaaggaactgctcaagtccatctggtacgcctttaccgcgctggacgtggagaagagtggcaaagtctccaagtcccagctcagggtgctgtcccacaacctgtacacggtcctgcacatcccccatgaccccgtggccctggaggaacactttcgagatgatgatgacggccctgtgtccagccagggatacatgccctacctcaacaagtacatcctggacaaggtggaggagggggcttttgttaaagagcactttgatgagctgtgctggacgctgacggccaagaagaactatcgggcagatagcaacgggaacagtatgctctccaatcaggatgccttccgcctctggtgcctcttcaacttcctgtctgaggacaagtaccctctgatcatggatcctgatgagggggaatacctgctgaaaaggtactcag

SEQ ID NO: 93458 - DNA, 833 bp, Homo sapiens
ccccgctgttccgctttaaagatgaagctgatgtgattgcgcaagccaatgacaccgagtttggccttgccgcctatttctacgcccgtgatttaagccgcgtcttccgcgtgggcgaagcgctggagtacggcatcgtcggcatcaataccggcattatttccaatgaagtggccccgttcggcggcatcaaagcctcgggtctgggtcgtgaaggttcgaacaataaagagttaatgcagcgccgcagtcaggcgattccccgtggcgttgggcaaattcacccgattttcgctgaccgcgcggaaaactgccgggtgtgggacgttgaaggccgtgagtatcttgatttcgcgggcgggattgcggtgctcaataccgggcacctgcatccgaaggtggtggccgcggtggaagcgcagttgaaaaaactgtcgcacacctgcttccaggtgctggcttacgagccgtatctggagctgtgcgagattatgaatcagaaggtgccgggcgatttcgccaagaaaacgctgctggttacgaccggttccgaagcggtggaaaacgcggtaaaaatcgcccgcgccgccaccaaacgtagcggcaccatcgcttttagcggcgcgtatcacgggcgcacgcattacacgctggcgctgaccggcaaggtgaatccgtactctgcgggcatggggctgatgccgggtcatgtttatcgcgcgctttatccttgcccgctgcacggcataagcgaggatgacgctatcggcagcatccaccggatcttcaaaaatgatgccgcgccggaagatatcgccgccatcgtgatttga

SEQ ID NO: 93459 - DNA, 513 bp, Homo sapiens
ttttttttttttctttgttataatcaggagataaaaatgtaaaggagagtagagaaatattttaaaatgaagaaatccattacacttcctgtgtagtttggtgatatcctcatagattttcttgttccatgcaaaaaagttagtgaatagaacttcccggtctttagctggttaacacgtccacctcagacactgagtgccacaggccttcacttgtgaacatcatttggcatttctgactctcctgagttctggctcagcaggacctcaccacggaatgtgctactgcaaacaaccccacagccatcacgcctgatgagtacttcaatgaagagtttgatccaggttctgccctcgcagcaccgcgtacggccggctccgctccagcggatccacggggctcggggcctctgcctcccccaccaggaggctgcagaggccaaggtacagccacggtaacgctggacgcagcatcttccccagccctgcagaagcagataggccaccggacgc

SEQ ID NO: 93460 - DNA, 730 bp, Homo sapiens
tagttggaaaacaagggtgcatatatgaatgaacgatgcagaggcaatgccgatggcgatagtgggtatcatgtagccgcttatgctggaaagaagcaataacccgcagaaaaacaaagctccaagctcaacaaaactaagggcatagacaataactaccgatgtcatatacccatactctctaatcttggccagtcggcgcgttctgcttccgattagaaacgtcaaggcagcaatcaggattgcaatcatggttcctgcatatgatgacaatgtcgccccaagaccatctctatgagctgaaaaagaaacaccaggaatgtagtggcggaaaaggagatagcaaatgcttacgataacgtaaggaattattactatgtaaacaccaggcatgattctgttccgcataattactcctgataattaatccttaactttgcccacctgccttttaaaacattccagtatatcacttttcattcttgcgtagcaatatgccatctcttcagctatctcagcattggtgaccttgttcagaggcgctgagagatggcctttttctgatagataatgttctgttaaaatatctccggcctcatcttttgcccgcaggctaatgtctgaaaattgaggtgacgggttaaaaataatatccttggcaaccttttttatatcccttttaaattttggcttaatgactatatccaatgagtcaaaaagctccccttca

SEQ ID NO: 93461 - DNA, 315 bp, Homo sapiens
catgaagcgatggcgctggggattgagaaagcgcatcagcacggtcttcagtataagcattcatttttcatatgatttgtgcgcttgaccgcaaactggcatcacacttgcgggaaattcgataaatagcacatatgattaaaactcagacccaagtggtcggatcacctgcatatcataagaaggaaacaccatgaccctacgcaagattctggcactcacctgcctgctgttgccgatgatggcttccgcacatcagttcgaaaccggtcagcgagtgccgccgattggcattaccgatcggggcgagttggt

SEQ ID NO: 93462 - DNA, 114 bp, Homo sapiens
ttttttttttttaaagttttgcggccaaaaagcggttcccgggcacctttttctcaaaaaaggccttaatatggttgccttttattagggggggaccccggcccgggggccccc

SEQ ID NO: 93463 - DNA, 433 bp, Homo sapiens
ccgtttcctcatctctgaacagatgggcctggtgcactaagatcccagcctgaagggaaatctcttagcagatctgcttagcgaggcttcttagaactgccccttcaccctccccagccacagtgggggcccccagacagcatgtgcatcctggacacagctcatcgggcaaggggggcacctatgtaggctgggccaatgagtccctgcccaagggaatttagagttggaaataagggaatggtggagcagcagctgccatgttgccaaccccttctcccaccaaaaagagagaaagatgctccagaacaagagaaagaagtcaagcaagggggcagaaaagcagggactgtaacaggtttggggtttctttggaggtgcgatatgctcaagaattaggataaggatcatcactcgtgccgaattcctgcag

SEQ ID NO: 93464 - DNA, 564 bp, Homo sapiens
ttaaaacggaatagcatattgaccttccgctgttttataactctcaatgttaaaaggtgcagaaacatccaggacatcgctgttatcacctaaatagagatagtaacccacggtatcgttgcctaactgtatcgccttatcgttaccggctattttatcgttggtaatcaacgagagttttacaccagcaacttctttcgggcagctaatttttaacatgctgctggttacaccgactgcatcatcataggtagaatatttagctttaccttcaaagacactggttggtacagtcggcatattaatacttactgaatcaccacccgcttcgaatttacacggagattctgcaatattccccttaatagttaatgttccggtatcaacgtctgcagcaaatactccagcgctcataaaaaaagaagaaaagacagcggcagcaataattgaactgccgcaggtcagcgacggcatgattcaggggaaatcggtacgtctgatcctcaaaaaagaggccacaccagacgatattcgccatgccgacgggatgccggaaatcaacat

SEQ ID NO: 93465 - DNA, 984 bp, Homo sapiens
gcaattcaaggggaaaagagtcactggaaggaggggccagctctgtgtcacatccagcagagacaccaggtacagcagaaggaccttggacatgaccatgaggagggccttgttggccatgacctgggatggatgggggtgagagcctgggggaccacaccatgtccccagtacacgaaacagtgcctggtagacaggatggatttatggatggatggataggtaggtggatgaatggacagatgatagatggatgcaaagacagatgaatagatggacagatggatggacggacagacggaatgaatgatcagaaaaggcttcatgaacaaagtgagactgagctgcatctccatgggtagatacaaaagcagaggactctcctcttgagtcaggaatgacccaatgtcctggtccagggagcaagtcaacttggcttgactgcagacacttgtggcagatttcagaggcccttaaaatgaggccaagtgaggtggacaggtccgagccagctgaggactcctcagccacacggcacagctgcctgaggggatgtgtcactcagggagttgctgggacctactgggcccagcgttgccatcagcaccaacagcttcagagagggggacatatgctggggtgactccaaggctgtgggcggcacctgcctcagatagagaacaggcacagagacactactgggggacactactgggatactggccacccccctgccctgtgcctgggtcacagcctacacactgcagccctgtgcccctcacacccagcaggttcctgctccagcgtggctcctggactggcgccagatgctggccctgggggtttcaatccaagcataattcagtgaagcatgtgtttggcagtgggacccagctcactgttttaggtacgtggctctcacaactttccctagcctgtcgcaccctctcctgtctctgcaaaaatctgttttcgttctctggg

SEQ ID NO: 93466 - DNA, 1898 bp, Homo sapiens
tttttttttttttaaaatgaaaatagcaactttaattaaagggctcatcccactgattctaagaccagggcatggcaagagaggagccaatttaaggagatctctatctcaggatcctgcaaggcctgacactgtacttgccaaaccctgaaagtcagcacttcctttaagaacgtgccctaggtgcctcctttgccaatccctacttcaacctcaggatcccactggcaggtggcagccaccaactatgcacccaaggactctatgtgaatcccaaactgaatgctgagggttcacttacttgtggtactggtttaataggtttttccatcaagcctccaatataaacagtgttgggaagcaggggccgggcaaaatcaaaggcacaatcagagttaacaaaccacaactctgctttcagtagaagatgagacaaaactggcctagagccttctgggaaatgctccttgatggtgttgtcaaatgtagactgcatgtcccattggctcctggagaaactaaagaacatcagaaaattcttcactcggccccagaagtccatgtgatcagtcagcaaggaagggaatactggaacataagacaaggggcttggtagcccaaaatccaaagagccgaatgtggtgggaagaatggccacaaatggtttcacaagcttctcagcaatcaggaaagaacagaaatcaaatgcttcaacaaataccagatcatagttctcattctttaaggaatccattatatcctttctgcttagcaaataactacattgagtcccaaatatttccattagctttacaagggcttcagattcttttctgccatccaatgctgtttctatgtagctatcaaaatgcttcttaattcttttttgatgatcttcaggtgaaaaccacctgataacttggtatgatttttcctcctctttaatatctgggatcaaaaactttccactctgatgaagcatagtcacattatgaccatgctcttgaagaatctgagacacccggtccaacagtaggtaatggcttccacccagtgtagatattgtcaggattttggcagcctctgagagcaggaccccagaaagaaggaaggccactagaagcagcacccgctgcccaaccatgctcacttccacagaagcagcggatctcagcctgggctgcgcgccctgcgccgggctaaggactctgtgcgcgcctcagtactccaaaggcactggctgtgggcctaggaagaggaaatctggaaacctacagtctccatgcctgctcagccaagaaggagctcactgtgggcaccagagacagggacccaatgtggagacctgtgagcctgtgtccggccctgaactctcaagcacagggcaggcttcctgagcattgaagagaatatgtgggagaacaaaacagaaactgaaagaatatgcaaggtgtctttcttggatgttattccatgatagatagtaggggcaggagtgagagaggctgactaggtctggacatggaggctggaagagtcagggtgtgattcggagaggcgcatgagaaggaaggtggattttaaggctggaaatctgagggtcagtggtccaagtcactcagagacagaatcacagcatagcccttgctgatggcaaacaaaggaggacaagaggactggaaagaattctgctagcaggcaggagctagtaaggatgaatttgtagcaaaattagcaagtggaaaggatgatttttggccatttttcctgttcttcaagaaaacaggagataactagaaggactagagaatggggctgccagaactagtgggaagctccctagaaatggtgacatcgcccaccaaacagaccccgccaaggctgcacctggccttatg

SEQ ID NO: 93467 - DNA, 1890 bp, Homo sapiens
  misc_feature (1)...(1890): n = a,t,c or g
tggattttgtgtcttccttactccagggttaaataaattgtgttttcctctgacatgtttccaagtttattttgtaaaaggcaactgccaagttgtctcaatacattttctttttttttttgagatagggttcttactttgtcacccagactggtcttgaactcctgggctcaagcgatctgcccgcctaggtctcccaaggtgctgtcattacaggactgattcactgtgcctggcctcaatactgtttattgcataatttatctcttcttagttggtttggatgccacttttataaaatctgaattcctagtacatttggatccatttctagactttctttttttgctgtttaaactaatatactgatgggtatgtttttaagaaataaaatggctacacatagcattaaggagtgttagtataaagagaacttaaatttcttcaaggtcctctgtgacccgggtgctttttacatgtattaactcacttaactattattctcactaattcagtttgtaactggaatttgtagaatgtgcagttggctaaattttcttcaacattggtttttttttttagctgtgatgcagatccatccgccctagcaaaatatgttctggctttggtaaagaaagacaaaagtgaaaaagagttaaaggcattatgtattgatcagctggatgtatttcttcagaaagagacacagatatttgtggaaaaactttttgatgctgtgaatacaaagagttacctacctcctccagagcagccatcatcaggaagcctgaaggtagaattttttccaccccaagaaaaagatataaagaaggaagagatcactaaggaggaagagcgagagaagaagttttctagaaggctaaatcacagtcctccccagtcaagctcccgatacagggaaaatagaagccgtgatgagaggaaaaaagatgatcgttctcgcaaaagagattatgatcgaaaccctcctcgaagagattcatacagagaccggtacaatagaagacgagggcggagtcgcagttatagcaggagtcgaagtcgaagttggagtaaagagaggcttcgtgagagggacagagatagaagcaggactagaagcagaagcagaacacgaagcagggaaagggatctggtaaaacctaaatatgacctggatagaacagatccattagaaaataattatactccagtctcttcggtacctagtatttcatctggccactaccctgtacctactttgagcagcactattacagtaattgctcctactcatcatggaaacaacactaccgaaagttggtctgaatttcatgaagaccaagtggaccataactcttacgtaagaccacccatgccaaagaaacggtgtagagactatgatgaaaagggtttttgtatgagaggagacatgtgtccttttgatcatggaagtgatccagtagttgtagaagatgtgaatcttcctggtatgcagcctttcccagcacagcctcctgttgttgaaggaccacctcctcntggactccccccacctccaccaattcttacacccccacctgtgaatctcaggcccccagtgccaccgccaggtccattgccacccagtctcccacctgttacaggaccaccacctccacttcctcctttgcagccatctggcatggatgctcctccaaactctgcaaccagttctgttcctactgtagtaacaactggcattcatcaccagcctcctcctgctccaccctctctttttactgcagatacatatgacacagatggctacaatcctgaagccccaagcataacaaacacttccagacctatgtatagacacagagtgcatcctcgtgccaagcttggcgt

SEQ ID NO: 93468 - DNA, 442 bp, Homo sapiens
tcattacgccaagcttggcacgagggggcaggggctggggcctggtcgggccggctggagagacatgcgattggtgaccgagccgagcggaccgaaggcgcgcccgagatgcaggtgagcaagaggatgctggcggggggcgtgaggagcatgcccagccccctcctggcctgctggcagcccatcctcctgctggtgctgggctcagtgctgtcaggctcggccacgggctgcccgccccgctgcgagtgctccgcccaggaccgcgctgtgctgtgccaccgcaagcgctttgtggcagtccccgagggcatccccaccgagacgcgcctgctggacctaggcaagaaccgcatcaaaacgctcaaccaggacgagttcgccagcttcccgcacctggaggagctggagctcaacgagaacatcgtgagcgccgtggagt

SEQ ID NO: 93469 - DNA, 449 bp, Homo sapiens
atcattacgccaagcttggcacgaggcctcgtgccatgcggagccgtctccgcggcgcgtgggcttcgtgggctcgggccgcatggcgggggccatcgcgcagggcctcatcagagcaggaaaagtggaagctcagcacatactggccagtgcaccaacagacaggaacctatgtcactttcaagctctgggttgccggaccacgcactccaaccaggaggtgctgcagagctgcctgctcgtcatctttgccaccaagcctcatgtgctgccagctgtcctggcagaggtggctcctgtggtcaccactgaacacatcttggtgtccgtggctgctggggtgtctctgagcaccctggaggagctgctgcccccaaacacacgggtgctgcgggtcttgcccaacctgccctgtgtggtccaggaaggggccatagtgatggcgcggg

SEQ ID NO: 93470 - DNA, 435 bp, Homo sapiens
tatttattttcaaataacagcacacagaaaacagatatgccacacacagaaaacctgtagaaccctaagacggatagacaggctcataactttcctagaccccattttgaggaataggaaatcagagaatggtgaaaaagcccaaatatcaccccatgaagaggtcaccattccccaaaaggaggtggctgccctcccatgatggaccacggaccccagagaacgacctgcacaggtgaaagcacagcactacctgctaagccaaatctgcatcctgttgatgccagacctgtcatttcaccgaagctataaactcaaactgcaagacccctttataatcggacctagagtcactttccaatttcattaccagtgtaccacttatttccagtaagaaccaaatggatctcgccctgtcactcgtgccgaattgca

SEQ ID NO: 93471 - DNA, 812 bp, Homo sapiens
cgctcccaacgtgtggcggctcgcgacccccggcaacccggagaaggtctacagagcggcctgcgccagcgagtgagtacccgccgcctgcgcacagctccgcccacccctccctgcctccttttcttcctcagcgggtccgcggcccgctactctccgggaggggcgcttcccgacgccaagacaaaaggatgccacggagaaagaaaaaagttaaagaagtctccgaatctcggaacctggagaagaaggatgtggaaactaccagttctgtcagtgtgaagaggaagcgtagacttgaggatgcattcattgtgatatccgatagtgatggagaggaaccaaaggaggaaaatgggttgcagaaaacgaagacaaaacagtcgaatagagcaaagtgtttggccaaaagaaaaattgcacagatgacagaagaagaacagtttgctctggctctcaaaatgagtgagcaggaagctagggaggtgaacagccaggaggaggaagaagaggagctcttgaggaaagccattgctgaaagcctgaatagttgccggccttctgatgcttccgctaccagatctcgacctctggccactggaccgtcttcccagtcccatcaagagaaaaccacagactctgggctcactgaaggcatatggcagctggtacctccatcactgtttaaaggctcacatatcagtcagggaaacgaggctgaggaaagagaggagccttgggaccacactgaaaaaactgaagaggagccggtctctggcagctcaggaagctgggaccagtcaagccagccc

SEQ ID NO: 93472 - DNA, 1587 bp, Homo sapiens
tcagctttggataagtcctccagcaagtactttgttgaaagcgagaaaggcagctgcataactctccagtccacagagctgacaaatcactgtgtcatcaaagaagagggaatcatgggaaatagcctgtggttcaccctctgctgattccaatttcacattccattccacattgatgaataataataatgatgtacttttagctttgtcagaaatcctatttttgatgtcccctctctcatacttagttaaccattttgaattccacttagtaagaaaagtttccattttctttttcttcgggggacttagatatgatctgcactcttctgactgtacctttgctttcacgagggctctttcccggaatgatatgtccatacaactattgttgttgttcttacttttagctcttttcttagaagcccacttgtacccaggtttgatcacaccccctactctcctgccccgagaaagtttcagccaaacttcgggcggcggctgaggcggcggccgaggagcggcggactcggggcgcggggagtcgaggcatttgcgctgggcttcggagcgtagcgccagggcctgagcctttgaagcaggaggaggggaggagagagtggggctcctctatcgggaccccctccccatgtggatctgcccaggcggcggcggcggcggcggcggaggaggcgaccgagaagatacccgccctgcgccccgctctgctgtgggcgctgctggcgctctggctgtgctgcgcgacccccgcgcatgcattgcagtgtcgagatggctatgaaccctgtgtaaatgaaggaatgtgtgttacctaccacaatggcacaggatactgcaaatgtccagaaggcttcttgggggaatattgtcaacatcgagacccctgtgagaagaaccgctgccagaatggtgggacttgtgtggcccaggccatgctggggaaagccacgtgccgatgtgcctcagggtttacaggagaggactgccagtactcgacatctcatccatgctttgtgtctcgaccttgcctgaatggcggcacatgccatatgctcagccgggatacctatgagtgcacctgtcaagtcgggtttacaggtaggaacccaaagtgtcctggtggcaatcttaactaccagtttaatggaatcattgttgtgtattctggtggcagtgttcctccctctggaactaagacctctaagccagcagaacataatgccatgggaacaggaagcaaaaattttgctagtggaacactatgggtgatggtgagtggtgccacttccacttccacttccaccctttgattcctggacccgtgaatcctgtctatgggagaaacagtaccatatattggacactgattcagagcatacacagccttctggagaactttgccccaggcctgcaaagtattgtcacctagttggcattgtaatcgtgacttcaaaaggccattcaaaagctgcttcaggatgatagggatcatggtaagaccagtaaattccatgagcatgagcccactgtcacacttctttagccataaagtgagtggcttggccg

SEQ ID NO: 93473 - DNA, 572 bp, Homo sapiens; identical to SEQ ID NO: 61825

SEQ ID NO: 93474 - DNA, 396 bp, Homo sapiens
caagcctcaaggaatctacacatcaataatttaaaataatgactctcctgtaatgggtgggtttctggatgcatggatagccaagtcttacccactgacaccaagttgctgtagttctccagcatcacctctcggtatagattctggtgagcaggagccagctgcccccactcttcctgggtgaagtcaatagatatgtccttgaaagtcaacaattcctagaacatcaaatacattcatttttagccggagaccacctctgttaagttccaaggagttctgacagtattctaaattctgagagattctaaacttacttttatcaggagccttctctggatctgtttggagatcctctgatctccaaatctgatcaacaaaactgtctggaactgt

SEQ ID NO: 93475 - DNA, 398 bp, Homo sapiens
gattctggctcaaggtctcataaagttgcacacaggatatcagctagggctggagtcatctgaatgtttgactggactggaagatttacttccaagctcattcacgtaactattggccagaggcttcacttccttgccaggaggcctctctttagggctgctcaatgtgacttcctccagagcaagtgatccaacagagagagcccaagacagaagctttatcttggaactcatatacagttaacttctgctctggtcttttggtcacatcagccaacgctgatccaatgtggaagcattttgaataccaagaggcaggagtcactgggggccatcttacaggctggctttccacaagtaccctgtatcagcagctggctacccacctaaatactgaa

SEQ ID NO: 93476 - DNA, 739 bp, Homo sapiens
tttatgtacgctgggacccacgacgacagaaggcgccgatggccgcgcctgctgagccctgcgcggggcagggggtctggaaccagacagagcctgaacctgccgccaccagcctgctgagcctgtgcttcctgagaacagcaggggtctgggtaccccccatgtacctctgggtccttggtcccatctacctcctcttcatccaccaccatggccggggctacctccggatgtccccactcttcaaagccaagatggtagctgccatccctgggagcctggaaccaggcaatgttcgggggaggcaggggacaggctggaacctggtgaagtcttaaagtagactcctcctatcggggtgtagaagggaatctgttaatcaaacagagcaatattagaaaggctacagaggtcaactcagtggaacacggttctccccaaacagatttttgttaatttccgaaaatcccacgcatgccgcaaacatacgcatacactccccatgttcccggacagtttatagcctacccataaccctggcattttcccaaaacatacccatgtagactcttggatacacaaggtaattttagagccacattaggatgaaccttttaaaaagttatgcatttatttttatgttccccccctggctgtattataggacaatttttatatgtgatatgtatttaccttagtgtgttaaataaaccctggcattccaagtgtaaaaaaaaaa

SEQ ID NO: 93477 - DNA, 593 bp, Homo sapiens
gccgcggagccggcgggagggcgggcgggcgggcggacgggcagcctaacatggcagaccagagacagcgctcactgtctacctctggggagtcattgtaccacgtccttgggttggacaagaacgcaacctcagatgacattaaaaagtcctatcggaagcttgccttgaaatatcaccccgacaagaaccccgacaacccggaggccgcggacaagtttaaggagatcaacaacgcgcacgccatcctcacggacgccacaaaaaggaacatctacgacaagtacggctcgctgggtctctacgtggccgagcagtttggggaagagaacgtgaacacctacttcgtgctgtccagctggtgggccaaggccctgtttgtcttctgcggcctcctcacgtgctgctactgctgctgctgtctgtgctgctgcttcaactgctgctgcgggaagtgtaagcccaaggcgcctgaaggcgaggagacggagttctacgtgtcccccgaggatctggaggcacagctgcagtctgacgagagggaggccacagacacgccgatcgtcatacagccggcatccgccaccgagccc

SEQ ID NO: 93478 - DNA, 646 bp, Homo sapiens
ccttcccgggtcgacgggaggcaggaggaagggagtgagagcttctactgagtttagttggttttgtgtccatgagccatttacaaactttgcacctgattgggctcagttgcagtttcttgtatttccctaccagccaagctgttgaagctgctgagcccggaatgatgttatcactgaggcagatgacaaaccctctagttgctagaaaccaaactgctccccgagctggtgtttccgttttttgtactgactgcttatttgggcttgatatataatggtgaaaacaggaactgtttattttaggtgataagaaaccaacattatgacaagaagatgtcatcttagttactctgttaccagtaccataggccagatactatctagatgcttataaacatcttatctaatccttgtaataataagccccaagctaggttttatatccccattttatggatgggggaactgaggccaataacttcatataacttatccaaggccacaaaactagtaataaacagtgaaattcaacccaaaaacaaactacaaatccaaatttctttacctctatgctgtctgtacttgctgttactagcaaagttctcttggtgggagttaccccattccctcttcaaaaaaaaaa

SEQ ID NO: 93479 - DNA, 382 bp, Homo sapiens
gaaaagaagagctcaggagtaaagattgataaatgaaaatattttttctttaagtcaatcaaggaaagttagaaagaaaatgtagattttttaaagagacaggaagtccaaaagaaatgtggttttctgagaagggagtggagtactttgtcaactcatatttgaatatgtatctcataggaacatggcaggtcccattactgaaccttcagttctctaccacattctcccgatgcaattctgaccttcaccgtgtattccccatctcaggaaatggcaccatcatccatgctgtcttacaggctggaaattatacttttcctactgtccatgtctgctcagtggccaaggcatgtctacctttgtctccatcagtgtaccc

SEQ ID NO: 93480 - DNA, 1956 bp, Homo sapiens; identical to SEQ ID NO: 62589

SEQ ID NO: 93481 - DNA, 396 bp, Homo sapiens
gtgccacgcatgcacttgcacttggcatgtaaacactgcaagcaaggctcaacgagtctcagcgctaacgccaggttagcataactaagtcgaacgaagttcaattaaaaactaaaatgcttctagcacttcatgactatgcgctgagcagcgctgagtgtaatttatttacataaattgtaatgtatcaaatcacacgtagaaataaacaacttatataaacacaataaaaaatatccttagtgaactgaagcttttgcttgatgtgagaaagtaccttttaactggctggctggtattcttccagcaaactgacatcattagcgatgggctaaatacgttctgtggaattaaatcacaaaatgtcgacgattctcattcaattctccaagccag

SEQ ID NO: 93482 - DNA, 879 bp, Homo sapiens; identical to SEQ ID NO: 61900

SEQ ID NO: 93483 - DNA, 387 bp, Homo sapiens
tgacatttcaagctcttagatgaagctcttagtcttataaaagactgctctattctagaattttactcaaaaggcaatataacttttgtttggatttcaagaatcaaaccacagaactctacagagtgtatgcataatcttttctatgtttatatgaatgtattttaacagcttgacttgaatataacagtaccatggttaataggctttttttaatgacatttcacacaaagctttattgctagctgacctcaaattattcacaagtatttttaagtacttcataacaaagttttgtagacagagcacaagtcttccagtcatactgttaccagacacaaaacatagttgctaagatgcataggcagctggttaaagttcacgttc

SEQ ID NO: 93484 - DNA, 777 bp, Homo sapiens
gccagcactggtactgggatgattggcaaggttctgtggtggaattcctttaaaggaagagtgcaagtcttcattattgataatttgggaatgttgaataaatacactttatttaaaggatgttggtaaataaataggttaaaatctcatcatgaaataaatagcttgtgacttagagtatggagctggtcactgatgtttgttctttttaagaggacaatgttgatattcagaaatttcaaaagtaatttgtgcagggcagtagttactagtttcttgagccagatttctcagcatgaacttgagaacagaccttttgtgtgaatcagattaataaaatattgagtttacataagacagcatatttttattaaaagctgtcaaagaactggagcagcagcatttcccaatgtggctccttgacaaaagggctctggagtcgaataaacttgggaaacaatgtgtactttattctctcttggaatgtcaagtacatattaacatgtaaaagacttacagtaaagaagcctgtttaacattaaattagtattttccaaatttatttgatctctgaaccttttttcctccttataacatcttgaggaactagtgatctgaggaacaagttttgggaaatgttaagtgatatggtttggctgggtccccccccaaatcttatcttgaattttaagttcccataatccctacgtgtggggggaggggacccggtgggaggtaaaatgaatccggggggatggttaccctcatgcctgtttc

SEQ ID NO: 93485 - DNA, 754 bp, Homo sapiens
atcattaactggtaatagatgggacatttgggtttaaaactgtattccttagaacccaaatatccgtttaacagccatcttttcaaagcaatccaatatctatttttgatcctccagtgatggcagcaggaggccaccaaacccaggttggggtgatcttagataagtcacctaagtcttccggttctacattttctcttctatcatgtaaggggtgaacggatcaatctgtaactgaggttctggaaagccaatttgcccaaaggctagtgctacattcgtcatggaaaacaacttaaaaattataaaacatggtaatgctttgaatgactgtcttagtttgctggggctgcagtaataaagtgccagagactgggtgacttaatcccaaaaatatgtttcacagttctggaggttggaagttgagaacaaggtgccggcagggtttgttcctttggaggcctctctcctgggcttgctgacagctgccttcttgctatcttcacctggtcttccttctgtgtgtgtctgtgtcttaatctcctcttgtaaagacaccagtcgtattggattggggcccatccatatgatttacttttatcttaatgaactcctttaaaggccctttcttttcaaatatactcacactctaaggtattgggagcaaggacttcaacacatgaatttgaggagatgcaattcagcccccactacatgaatcaaatatttatttcccaattttatttgttacatc

SEQ ID NO: 93486 - DNA, 1140 bp, Homo sapiens
cagaatggcacaggcaagtttgtcaagaagccagcctcttccagcagtgcccctcagaatatccctaagaggacagatgtgaagagccaggatgttgccgtttccccgcagcagcaacagtgctcaaagagctatgtcgacaggcacatggaatccttgagtcagtccaaaagtttccgtcgtcggcacaactcctggtcatctagtggcaggcacccaaatcaggcaactcccaagaaaagtggtttaaagaatggccagatgaagaataaagatgacgagtgcttcggggatgatattgaggagatcccagacacagattttgattttgaagggaacctggctctttttgacaaggcagctgtgtttgaggagattgatacctatgaaaggagaagtggtacccgttcccggggcatcccaaatgaaaggcccactcggtaccgccatgatgagaacatcttggagtccgagcccattgtctatcgacggatcatagtgccccacaacgtgagcaaggagttctgcacggactctggcctggttgtcccaagtatttcctatgagctgcataaaaagctgttgtccgtggctgagaagcatgggctgacccttgagcggagactggagatgacaggtgtgtgtgccagtcagatggcactgaccctcctcggaggacctaacaggttgaatcccaaaaatgttcaccagaggcctacagtggctctactgtgtggacctcatgtgaagggggctcagggtatcagctgtggaaggcacctagccaaccatgatgtccaggtcatccttttcctgcccaattttgtcaagatgttggaatctatcaccaatgagctgtcgctcttcagcaagacccaaggccaacaagtgtctagcctcaaaggtgagcacttaggcagggctgggctgaaggcctcctccctccttagcagtttgatggtctcgtcatgccacccagtggcgacaggtggaaaggcactacgtgtgtaaggatggtgcttcgcctctaaggagtcttagaacagtaatatactacttcccatccccttatgcttctccctctccaactactcacatgaagagctggggacccattggtccattccacaaatatctgtt

SEQ ID NO: 93487 - DNA, 833 bp, Homo sapiens
agagctagacctgagcttcaataccctgaatccatgcttacctgttcacaaatagctcctgtcatggtgactgggaaaggcctgacattcccgcggcccaagttttcgcgtttcctctggctgctgaaaagcttcagctccctcttctcttcctcatccagggagttgcaatatcgaacctcattgtcatgtggcggcagctggtgtagtagctgcttgattcgcagtttctctccaggactgttgacataagggactttctcttctgggagacagctatagtactggtgtacctgttcaggcttcagacccggcgggacccaggcatactcttccaaagcacagcctgagtcatcatctgaggtcgagttcctctgaaagtcaaacatgagtttgctgatggtcttctccatctccagcggcatcactgtcaccatgtgctcctcctggggacacttgcagtgcaggcagatcttcctccagggaggatgaaatgcccagtctcgtagtaagtgtgggccagacccttggagcttgtcaattgtcccagttcactttctccctggatctgacttataagaacgcaagcaggacctcaggcagccaaagcatcttctcctcaaacccccttttcagtctgatcccgtcatggaggtggcaaccgagtcgagccgagtggctcctcattcggtcagggcaagcagcactgcagaaaccagagtatcataggaaaaacatcaagcaacatatagaaagtataacccctgctcttcctgtgtgtgagcgcgagtactcaaaaaataatgtgctcgacctccagtttcctcttaact

SEQ ID NO: 93488 - DNA, 491 bp, Homo sapiens
cgccccggtgctctgaaggcactcaacacatccttctggaagatatggcccattggaaatgtccctctgacatcttccttcagtcccagtgaaaaatgggcctccctgaatctttcaagccacctgtcccggggcttgtcatttacaatcagtgcatgacaaatgacgttactgtgcacacgtgggctgaagtgacggtcaactgatcatcagccggcagaaatatttcctcaatgtcctgacttggggttggctgtgggaggaattccagaccaattagttattctgaatcatggagggttagaggatagtggtgctattgacctaagaataagctgaggctcttgttactccaccataaagagcccatagaaaagtcaccggtgtcaagagaggacatctgatccgatgcaagccgcttaagttgggtagcgccagggctatctcagtcttggcgttgtacagcgtcagccaatgaagcgtagtcatat

SEQ ID NO: 93489 - DNA, 440 bp, Homo sapiens
actaattctatcgtccgaccctgacaacgccttgactgtgaagaccctgccggtacccatcttagtcgccctgcctgagaccagcgccgcacgacacgccgccagatcgccttccaccaccagcgttaagcgaccagggtcaagcacttcgtgactgagcagacgaacgttagctgctttgagcatggcatccgctgcatctatcgcggcgaccatgccgtccacttccagcaatcccagtgcattgatcatcggcaacctccgttacgcacgctggattggattacgcgcgatttccagcactgcatcggtaaaggcgttacaggctgctttacacgctgcctggctaccggttaaaaatgctgccgagtagttggtttcagacggtggcgggacataagtcgccagctgtacgtcggcagacttcagggctgcatcaa

SEQ ID NO: 93490 - DNA, 594 bp, Homo sapiens
agcaagctgggcaaactaagtatctgaccccgcataaggaatagaacatgctccatccgcgagccagaaccatgttgttattatcgctccccgccgtggcaattgggattgcgtccagtcttattctgattgtggtgatgaaaatcgcctcggtattacagaatttgctctggcaacgactgccgggaactctggggatagcccaggattcacccctctggatcatcggtgtattaacgctaacgggtattgcggtggggttggttatccgtttcagccagggtcatgccggaccagaccccgcctgtgaaccgctgatcggcgcaccggttccgccctctgcgctacctggacttatcgtagcattaattctcggtcttgctggcggcgtcagcctggggccggaacatccgatcatgaccgtcaatatcgcccttgcggttgccattggcgctcgtctgttaccgcgcgtcaaccgaatggagtggactattttagcctctgccggaaccatcggcgcactgtttggcactcctgttgcggcggcgttgatattttcgcaaaccttaaatggcagtagtgaagttccgctat

SEQ ID NO: 93491 - DNA, 487 bp, Homo sapiens
attaaaatcgatgaagttgtcaaaggaagcccagctgctcaggctggcttgcaaaaagacgatgtgatcattggcgtcaaccgcgatcgggtgaactcgattgctgaaatgcgtaaagtgctggcggcaaaaccggccatcatcgccctgcaaattgtacgcggcaatgaaagcatctatctgctgatgcgttaatgtcgtaaaccgggcatcaggcttacgtgtgatgtccggttaactcgtggtatgctgctgccgttcccttttttaatgacgcctccatcatgtttgtgaagctcttacgttccgttgcgattggattaattgtcggcgctattctgctggttgccatgccttcgctgcgcagccttaacccgctttccactccgcaatttgacagtaccgatgagacgcctgccagctataatctggcggttcgccgcgccgcgccagcggtggttaacgtttacaacccgggttttgaaca

SEQ ID NO: 93492 - DNA, 445 bp, Homo sapiens
atggtgaatgaggatatcccccggatcgttgtcatcgtggttgaactccagcggctttttcagcgttaccagagagaaaccggttttcttaacgccctcttccggacgcccgtgcggcattgccaggcccggagcgataacgaaataaggaccgaactgttcaacgccatccagaatcgcctggtagtaacgcggctctaccacatctgccgccaccagcaggtcaacgccgattttcaccgcttcctgccatgtctctgcttcagcctgcaggcggatggatttattttccgccagcgaatcacgtaatttcatggcgcgtccttacttcacatcctgcgggaaatgctctttgatcacttccagcagtttcgggccaaagtcggcaggagagagcatgttgcgcacgccaaccacgtatttgttgccggtcacggtgatttcg

SEQ ID NO: 93493 - DNA, 415 bp, Homo sapiens
agggatctcccatccactgaagtcgcatccctgaattcctgcccgccgggttcactgggctctgggcgcggcgtagtgccgcaggatggggtttggtgccacggggcatgtgtgtggagtcagcagtctccaccatgggggctgtcgtcttttcccttattctcagattgtgggacaactcgtagggccaagatgtcagtctggttatttcctgtgggtttttatgagtttcatcactttactttagataactgtgcaggatcgtgagtttctttaatttcaagagctgtgaggctgctggttcctggggcacgcagtgtctctaagcttcatcccagccctcaccctctgtcaccccctccaatccctgatgggcaaggcgggggcagtcctcctgggactgatcccagagagt

SEQ ID NO: 93494 - DNA, 373 bp, Homo sapiens
  misc_feature (1)...(373): n = a,t,c or g
ggggagctgggtagggtggtataatctggttttggaacagggagtnnnnnccttagaagttaatcggtctctgcaccttggaaccctctgtgtacgccaggtacaagctgtgttgagggcttcgatgggttttcggtggtttcatcccatgattctcatcccaggggcattaaaggatggagagcatcgtgggcgcagctcttcaatgctcgtgtgcgccaggcagagagcataccggggggcggcagctcttcaatgcctgtgcacaccaggccgagagcatcctggggacagctctttcatgcctgtgtgcaccaaggggagagcattccgggggccgtttttcatgcctggggccccagcgaaaagcatc

SEQ ID NO: 93495 - DNA, 436 bp, Homo sapiens
caaaatggcggatttccgccagatgcagtaaggttttcagatcgcgtaaatccacagggactgccctctatgttgacgttgcataaattgcaatgtgacgttgtgaatatatcaatttccgcaataaatttcctgtcatatagtgaattcaatctcgcaaacgcgaaccgaacaataagaagcacaacatcacgaggaatcaccatggctaactacttcaatacactgaatctgcgccagcagctggcacagctgggcaaatgtcgctttatgggccgcgatgaattcgccgatggcgcgagctaccttcagggtaaaaaagtagtcatcgtcggctgtggcgcacagggtctgaaccagggcctgaacatgcgtgattctggtctcgatatctcctacgctctgcgtaaagaagcgattgccgagaagcgcgcgt

SEQ ID NO: 93496 - DNA, 872 bp, Homo sapiens
catggccgcgggattttcccgggtcgacgatttcgttgcgagcttgcgattcacttttttagccgggcaacccatattgatatcaataatctgggcaccgctttccacgttaatacgtgctgcatctgccatttctttcggatcgctaccagcaatttgcacggtgcgaataccgggttcatcaatgtgcgccatccgtaaacgagatttgtcgctttcccaaacctgtgggttagaagacatcatctcggatactgtcaatccggctcccatctcgtagcacaacgtccgaaaaggtctgtctgtaatgccagccatgggcgctgcgatcaggcgatttctgagctgatattgtccgatgcgcatgagttaagaaatgaccatactgtgactgcaaggcggcgtatattacgcattttttgcacgagatgaaaggccaaactttgaccaatcctctgagatggatcaaagaattgcatttaaaatgagcgtggtgcgataattactcataaaaatcatcatattagaaaatagtgactaaaatttacactcaaagaaatttgagtaagttctcaatttttctttatgaatgaaaattttggcacgcaaatttgcgtaaataatcggcaaatttacgtgccttttgtgagcttgctcgcacttcgccccgcgtcaccctacggcgatgcgaaggttaattcttacgaccggtaatacggcaccactcttctttttccacgaccgggtccagtgcgaagctatcggcataagcttcacaaacgctctctgcctggcttgccagaataccggaaaggcccagcaaaccgcctgaaaccggcaggacgctgattaacggtgccagttcacgtaat

SEQ ID NO: 93497 - DNA, 162 bp, Homo sapiens
atgtgcgacccaacgggtggctggctccaggcgtgcctgactatcgacaatccgcagatcgctaaaccccatcgttttcattgcccgcgccgctgccccaatattttctgctctggcgggtgcgaccagaataatcgttatacgcatattgccactcttctt

SEQ ID NO: 93498 - DNA, 1009 bp, Homo sapiens
  misc_feature (1)...(1009): n = a,t,c or g
cttcctcaccctcggtattaacatggtcgatggcggcatccaggcgctcacgtcgaggccagtattttgctgcctgcttcacgaccgtctttaggatcatctgctcttcatcggtgacccatggacacttcttgctgttgtcagatttgtacttcttccatgcttcagaccggtcacggatggagtagatggcatcgatgcgcatcgtatgggtaaggtaatcaccatcgtcagtttttaccgttacatacgcccctacaatgtccccgcgctgctcttcagtatcaaagtcgttgtagatgtggatcggcggcttatcgagcccctcgcggcggaactggtcgtttcttcgaacaatagccgactggcaccacttaatggcgccagactgctgcgcgatgtgcatcaggcccatgtaactgatgtcgaggcaaatagcccctttacgcggaaccaggtaagccagcttctgagctgggtttagcgaaataccgatagccgcaacgttgatgatcgcgttctgtgccctgctctgtttcatgcaaaggacatttccgctgaggcacatcgttctacttacagaccggcggctcggcgctggcttttctgtcggttccaccgtcggatcggggaggcgccccgtcctcacgccggcggggcaagcgcgtctgatgatgcccgcaggatcgtgctcttcttccatcacatcccagtcctattcgcgtgcctgtctcctcctccgccctccctcgtcggaggcagccgcgtcggatcagcttaacctttctccgccccccgtccgccttggttgcccgacgcgctgccgcgccgtctctgcgaaccgacgcgtatgtccctacactctaactgaactgggcgtcggggacacggttacgatctctccttacgtgtgcgtttgggcggtgtcccctgaccgcactatgggtgtggatcgtgccatgcgctgcactcttgattgnatgcgttccatgtgtaaccagcgatgtcc

SEQ ID NO: 93499 - DNA, 599 bp, Homo sapiens
tggattgcttcgctaacttctcttcaatcgggattatcgcacgtgcagttaaaggcctgaatgaagagcaaggtaacgagggttctcgcttcggtctgaagctggtttaccggtctaccctggtgagctgtgctgtctgcgtcaatcgcagcactggtgctgtctgaccatacttaaaaaagccggggataatttccataagcgctaacttaagggttgggcgattacccctgatatgatttaacgtgccgatgaattactctcacgataactggtcagcaattctggcccatattggtaagcccgaagaactggatacttcggcacgtaatgccggggctctaacccgccgccgcgaaattcgtgatgctgcaactgtgctacgtctggggctggcttacggccccggggggatgtcattacgtgaagtcactgcatgggctcagctccatgacgttgcatcattatctgacgtggctctcctgaagcggctgcggaatgccgccgaatggttaggcatacttgccgcacaaacacttgctgtacgctccgcagttgcgggttgtacaagcggaaagagattgcgtctcgtccatgga

SEQ ID NO: 93500 - DNA, 576 bp, Homo sapiens
atagcgcaatacgagggatggcgtgactgtaaccgctctgttgtgtactttcggcgagcgaaccggtattaaccagcaggcgaatttcaacacgatcgctgggacgctggggggtggtcagcacttgccactgtaaaccgttggaaagcgtcccctgttgccatgctggatcaggctggagcgcatctgcctgcacatagccagcagtggccatcatcagcaaaccgcccgctaaaagtcgaatttttgtgccctgcatgtgaacccctgatcaactatcctggtaataaaaaaactgcccgttgtcggtcagtctaaatgacgttaaaaacacttcgtgttagaccgcaagaacatgaaaatgtcacggaagaagtgaaataaacctgaactcacccaggtggtaagttcaggcacaggggtcaattatgcgcaaacacccgcactcggggaagggagtgcgggcataagtgatgagattaagaggataattcgtgcgttttgccatccggcgcacgattattcagcacatcgtccagttttttggggtccagttctttcacccacttaacaacg

SEQ ID NO: 93501 - DNA, 654 bp, Homo sapiens
  misc_feature (1)...(654): n = a,t,c or g
gggggcgtgggtgaaacgccgcgggcgttctcaacattctgaggttaagcggccaggattgtttattcattacaatgccttgccatcaaatattttaaatacctattcttaggctgcacatgctaacatatccaaataagatcgataacgataattaatttcattatcatggaagttcgtatgtctggttctgttgccgtgacacgcgccattgccgtgcccggattgctgttattactgattatcgcgacggcattaagcctgctcattggggcaaaatcactccccgcttccgtagtgctggaggccttctccggcacctgccagagcgccgactgcaccatcgtgctcgacgcgcggctgccgcgtacccttgccggtttactggcaggcggcgcgcttggccttgccggggcgttaatgcaaaccctcacccgaaacccacttgccgaccccggcttgcttggcgtgaacgccggagccagctttgccattgtgctgggtgcggcgctgtttggttactcttccgcgcaggaacaactggcgatggccttcgccggggcgctggtggcctcattgattgttgcctttaccggcagtcagggcggcgggcagttaagtccggtgcgtttaaccctggcgggcgtggcnctg

SEQ ID NO: 93502 - DNA, 452 bp, Homo sapiens
tttcgtcggatttcgagttgatctgaataatgcgcccctgaatcccgtcgcggatcatcaaacgcgaaaattcacgcgcacacaggaaataacccaccagattcacctgtagcgaacggtcaaaatcgccgagctggaagtcgctgataaaggctgcttttgctattccggcgctgtagaccagcaaatccacgcgaccaaagatttcatctaccccacgagagagcgccagaacgctttgctcgctagtggcgtcagcaccaaaaccgtacgccatactttcaccatattcggcgttaatttcttgtgccacatttgcggctttgtcgctctgaatatcgacaaccgcgacgcgatacccctcggcagccagaccgtggcacaggaacgcgcctaaggtttgcccaccaccgatgacaacggcaacctgattcattttttactccttaaca

SEQ ID NO: 93503 - DNA, 512 bp, Homo sapiens
ctagtcgattttcccgggtcgacgatttcgtattccgccagctcaatgaaaagctgggcgaagagtgacgtcaggctggcatattgccgtttttgcgccatcgtctcacatatcgcacagtgaccgttggttgcctgctgcacggcggcaatgagatagctggcgaaacgctcttgctggttatcaccttcatccagcgagtaccagccgatatcgtttttgcctgccgcccactgggaaatgagggtggtctttccgtagcccgcaggactcgtgatcagcgccagccggaagttgttcgcgccggaaagtttagccagcaggcgctcacgaaccacggtatggtcgagtcgaaccggacgacttagttttgacggaatcagcatagttaatcacttcactgtggaaaatgaggaaatattattttttttgcgcttcgtaattaatggttataaggtcggccagaaacctttctaatgcaagcgatgacgttttcttatgtgtctgaattt

SEQ ID NO: 93504 - DNA, 412 bp, Homo sapiens
ttcccgggtcgacgatttcgtttttattcatgtgataccctggcttaatgcttgggtatatttgctgatttaacagggatttttgtggatcggacttcagattggtaaaggggacgccgcgtagctccgacgacagcataaaaatcttgccgccaattttaaaaacatcgaactccgggccaaaaggccagcaaagctcgacaaagggtaactcaagggccaggcgtttcgccgtttcgtgcagtgattgcttatccataaacgtccctttaggcgaaggagaataagcaaagtatgccgcgaagtacggcgataatcgacgtttaatccgccagcgagaaccagcgtcgccagataaagcgcagaacaaaatactcaatagcgcccagcactaaaaaccacagacaaaaca

SEQ ID NO: 93505 - DNA, 303 bp, Homo sapiens
tgtgccttggttactccctctgttcttctgttgttttgttcttttgttactttgtgcattttggtgagttcttcgttcaacacgccaagaaactggacaactctatccagtaacattctgttctgaagccacaaagataataagatgcctgtactgagaagtccaggtggcattttcttacccccatcttgacactgccgttttctgtttcgaaccccagtccaccccacagctccaaaccaccctccctgcctccacctacagctggcacctgctgccgcgtcgtcgtggggctgccgctgt

SEQ ID NO: 93506 - DNA, 1775 bp, Homo sapiens
cgttgctgtcgagggtgtgtctgatgtggagagtgaaaggagccaagaacagccagataaaacagtggatataagtgatttggccaccaaactcctggacagttggaaagacctaaaggaggtatatcgaattccaaagaaaagtcaaactgaaaaggaaaacacaaaaaagaagcccagaaatgtttctgcggatcagccaattgccggggttacctgggaggagaaaacagagtcagcatcagagcagcaggagggaaaatgaagaaggaacgatctcgtaagaaggattcagtggatggagagctagaagctctgatggaaaatggtgagggtctctctgataaaaaccaggtgctcagcttatcccggctaatggttagaattgaaactttggagcagaaacttacctgtctggaactcatacagaacacacactcacagtcctgcctgaagtcctttctggaacgtcatgggctgtctttgttgtggatctggatggcagagctaggtgacggccgggaaagtaaccagaagcttcaggaagagattataaagactttggaacacttgcccattcctactaaaaatatgttggaggaaagcaaagtacttccaattattcaacgctggtctcagactaagactgctgtccctccgttgagtgaaggagatgggtattctagtgagaatacatcgcgtgctcatacaccactcaacacacctgatccttccaccaagctgagcacagaagctgacacagacactcccaagaaactaatgtttcgcagactgaaaattataagtgaaaatagcatggacagtgcaatctctgatgcaaccagtgagctagaaggcaaggatggcaaagaggatcttgatcaattagaaaatgtccctgtagaggaagaggaagaattgcagtcacaacagctactcccacaacagctgcctgaatgcaaagttgatagtgaaaccaacatagaagctagtaagctacctacatctgaaccagaagctgacgctgaaatagagcccaaagagagcaacggcacaaaactagaagaacctattaatgaagaaacaccatcccaagatgaagaggagggtgtgtctgatgtggagagtgaaaggagccaagaacagccagataaaacagtggatataagtgatttggccaccaaactcctggacagttggaaagacctaaaggaggtatatcgaattccaaagaaaagtcaaactgaaaaggaaaacacaacaactgaacgaggaagggatgctgttggcttcagagatcaaacacctgccccgaagactcctaataggtcaagagagagagacccagacaagcaaactcaaaataaagagaaaaggaaacgaagaagctccctctcaccaccctcttctgcctatgagcggggaacaaaaaggccagatgacagatatgatacaccaacttctaaaaagaaagtacgaattaaagaccgcaataaactttctacagaggaacgccggaagttgtttgagcaagaggtggctcaacgggaggctcagaaacaacagcaacagatgcagaacctgggaatgacatcaccactgccctatgactctcttggttataatgccccgcatcatccctttgctggttacccaccaggttatcccatgcaggcctatgtggatcccagcaaccctaatgctggaaaggtgctcctgcccacacccagcatggacccagtgtgttctcctgctccttatgatcatgctcagcc

SEQ ID NO: 93507 - DNA, 1348 bp, Homo sapiens
  misc_feature (1)...(1348): n = a,t,c or g
tttgcggaggggagacgatcccagtctcggttgcgggatccgcctcccctcagtttgccccctttagccttgcacctttcccttctcctctctcgcatttccgccagtcagcttacccgctggccgcctcctgacaagcgggagggatccgccgtggacccagggaagcggaggagcctggcggccaccccctcttccccacttccctgcactcttatcgctctcggtctcggcctcggcctccgacacgagaaagatgctggtttcgagttttggagatccttgttttttatggaacacagttctgtaaaattttcataagattccttggcaataacatacgcttgtgatggaccctagaaatactgctatgttaggattgggttctgattccgaaggtttttcaagaaagagtccttctgccatcagtactggcacattggtcagtaagagagaagtagagctagaaaaaaacacaaaggaggaagaggaccctgagcaaacggaatcgagaaagaaacatcgaaactgggaaagatgatggtttgactgatgcacagcaacagttttcagtgaaagaaacaaacttttcagagggaaatttaaaattgaaaattggcctccaggctaagagaactaaaaaacctccaaagaacttggagaactatgtatgtcgacctgccataaaaacaactattaagcacccaaggaaagcacttaaaagtggaaagatgacggatgaaaagaatgaacactgtccttcaaaacgagacccttcaaagttgtacaagaaagcagatgatgttgcagccattgaatgccagtctgaagaagtcatccgtcttcattcacagggagaaaacaatcctttgtctaagaagctgtctccagtacactcagaaatggcagattatattaatgcaacgccatctactcttcttggtagccgggatcctgatttaaaggacagagcattacttaatggaggaactagtgtaacagaaaagttggcacagctgattgctacctgtcctccttccaagtcttccaagacaaaaccgaagaagttaggaactggcactacagcaggattggttagcaaggatttgatcaggaaagcaggtgttggctctgtagctggaataatacataaggacttaataaaaaagccaaccatcagcacagcagttggattggtaactaaagatcctgggaaaaagccagtgtttaatgcagcagtaggattggtcaataaggactctntgaaaaacctgggaactggcactacagcggtattcattaataaaaacttaggcaaaaagccaggaactatcactacagtaggacc

SEQ ID NO: 93508 - DNA, 1422 bp, Homo sapiens
aattcccggttcgacgatttcgtcaggtcgggagtgagaaggaccggcctgggctgactgctctcccctcgcgcctagggagccggtcggagagcgcgattggggtgcggagccccgacgctgccctgccccggatttcattccgcggcgggggctccgcgagcggaattccggcggctgccgtgactccagtgcaacgtgacgacagcatgtacgatccctgaatgggcccgtgggcatatttagtcattcatttttgatcaggagaaagaagacagccatcatttgaaaggtaaagcttcagcgactgaaggagtgtggactttttgaatttcaagaacagtaaagttggaacacagcagagggtgtgtaataaaatacagattggaaagaagactgatgaagaaaaataacagcatgattcaggcacaccattgagttctttgggatgcccgaaagtgtctggttgggaaacatgaaatagaagacgagaacctgcctcagcaagcgtacctgagaatacttttaaaggaacctgttgataaatgcaaaacagtggctgttgcaggtgatggaactgtactggaacaatgggagaagctggtagcttataggaagccaagatgaccagaatgtttttaaataatccaaggaagaatcctgctcaaaaatgaggtgaattaatacttgggcgctcaggaaccctggacagctacatgaggtgtttaaaaactgccctgaccatcttgccaaacaagtctctgctcatgaggccccacaggatgaacgagccgaggcaggacagtgtcctgccctgtcggaacagtgactgctgacctgccaagagagagctggggactgcctgctgtctgccagtacaatgaaggaagtggtttattggtcacccaagaaggtggcagactggctgctggagaatgctatgccagaatactgtgagcctctggagcatttcacaggccaggacttgatcaacctaacccaagaggatttcaaaaaaccccccttgtgccgagtctcctctgacaacgggcagcggctcctggacatgatagaaaccctgaaaatggagcaccatttggaagcacacaagaacggccatgccaatgggcacctcaacattggcgtagacatccccacccccgacggcagcttcagcatcaagattaaacccaacgggatgccaaatgggtataggaaagagatgataaagatccccatgccagaactggagcgctctcagtaccccatggagtggggcaagacttttctggcctttctttatgcactttcctgtttcgttctcaccacagtgatgatctcggtcgtccacgaacgagtacctcctaaggaggtgcagcctccactaccggacttgtattgcggcggctctggagcattata

SEQ ID NO: 93509 - DNA, 402 bp, Homo sapiens
aatacatggtgtgtcacggggtgcgagacaaagagaactcaaggatgatccccagggtccggcctgggaaactggatgaatggagtgccattcatggcaatggggaagtctagggcaggcggcaggaacaccaggagctcaggtgaaggcatgttcagactaagatgtgaccaggacatccaacacaggctgagcatcccaaatccggaaatctgaaatgcaaaacgctccaaaatctgaaactttgagtgtcaacaggatgctcaagggaaatttcactggactactgtggatttcagattttttttttttgacatcgagtctcactctgttgcccaagctgcagtgcaatggtgcaatctcggctcactgcgacctccgcctcctgggttcaagcaattg

SEQ ID NO: 93510 - DNA, 1288 bp, Homo sapiens
  misc_feature (1)...(1288): n = a,t,c or g
tgctctggtccccaggagaggaagtgtctctgatgagggacctgcctgtgggaagatcatggagctgtctttgatcttcggagaagtctgtcccaccactgcagtgaccacagttgtgttgggctcacaccagtgaaccgaagctctggattctgagagtctgaggattccgtgaagatctcagacttgggctcaaagcaaggatgcgtgaaattgtccatattcagattggccagtgtggcaaccagatcggagccaagttctgggagatgattggtgaggaacacgggatcgacttggctgggagcgaccgcggggcctcggccttgcagctggagagaatcagcgtgtactacaacgaagcctacggtaggaaatatgtgccccgagcagtcttggtggacctagaacctgggacgatggacagcattcgatctagcaaattaggagctctctttcaacccgacagttttgtccatggtaactctggggctggcaacaactgggccaaaggccactacacggagggagccgagctgatcgagaatgtcctagaggtggtgaggcacgagagtgagagctgtgactgcctgcagggcttccagatcgtccactccctgggcgggggcacaggctccgggatgggcactctgctcatgaacaagattagagaggagtacccggaccggatcatgaattccttcagcgtcatgccttctcccaaggtgtcggacacggtggtggagccctacaacgcggttctgtctatccaccagctgattgagaatgcagatgcctgtttctgcattgacaatgaggccctctatgacatctgcttccgtaccctgaagctgacgacacccacctatggggatctcaaccacctagtgtccttgaccatgagcggcataaccacctccctccggttcccgggtcagctcaacgcagacctgcgcaagctggcggtgaacatggtccccttcccccgcctgcacttctttatgcccggctttgccccactcacggcccagggcagccagcagtaccgagccctctccgtggccgagctcacccagcagatgttcgatgcccgcaataccatggctgcctgtgacctccgccgtggccgctacctcacagtggcctgcattttccggggcaagatgtccaccaaggaagtggaccagcaactgctctccgtgcagaccaggaacagcagctgctttgtggagtggattcccaacaacgtcaaggtggctgtctgcgacatcccgccccggnggctgag

SEQ ID NO: 93511 - DNA, 453 bp, Homo sapiens
cggcaccgaaccgcaggtccaggatcgacgatttcgtcgcggaccgactcagcttcggcacctgccgcccgagcaatgccatgcgagtacacctatgcgaaactgacaagtgattgctcgaggccttcactgcaatggtacacccgagctcaaagcaagatgagaaggcccagattgttattaaaagacatcctcaaatgtacattgcttgtgtttggagtgaggatcctttatatcctcaagctaaattatactactgaagaatgtgacatgaaaaacatgcattatgtggaccctgaccatgtaaagagagctcagaaatatgctcagcaagtcttgcagaaggaaagtcctcccaagtttgccaagacatcaatggcgctgttatttgagcacaggtatagcgtggacttactcccttttgtgcagaaggcccccacagacagtgaagct

SEQ ID NO: 93512 - DNA, 423 bp, Homo sapiens
tttcgtgaggattttttaatttgagagccctcaaatgggccagtggtctattcagcattgggaaatgaagatgatgagatcctgctactcggaaaagatatcataggaacgttcgcggcatcagagagaaagatgagagctcaccaggtgctcaccttcctcctgctcttcgtgatcacctcgggggcctctgaaaacgccagcacatcccgaggctgtgggctggacctcctccctcagaacgtgtacctgtgcgacctggacgccatctggggcattgtggtggaggcggtggccggggcgggcgccctgatcacactgctcctgatgctcatcctcctggggcggctgcccttcatcaaggagaaggagaagaagagccctgcggtcctccactttttgttcctcctcgggaccctgggc

SEQ ID NO: 93513 - DNA, 426 bp, Homo sapiens
tttcgtgaggagtttttaatttgagagccctcaaatgggccagtggtctagtcatcattgggaaatgaagatgatgagatcctgtctctcgcaaaagatatcacaggaatgttcgtggcatcacacagaaagatgagagctcaccaggtgctcaccttcctcctgctcttcgtgatcacctcggtggcctctgaaaacgccagcacatcccgaggctgtgggctggacctcctccctcagtacgtgtccctgtgcgacctggacgccatctggggcattgtggtggaggcggcggccggcgccggcgccctgatcacactgctcctgatgctcatcctcctggtgcggctgcccttcttcaaggagaaggagaagaagagccctgtgggcctccactttctgttcctcctggggaccctgggcccg

SEQ ID NO: 93514 - DNA, 1179 bp, Homo sapiens
ggcacgaggtttgcggcagcggctgctgctgccactgctgtgctgggggcccggtcgccaggcaaaaagccctcccacgtttgaggggagtcatgagccgtttcctgaatgtgttaagaagttggctggttatggtgtccatcatagccatggggaacacgctgcagagcttccgagaccacacttttctctatgaaaagctctacactggcaagccaaaccttgtgaatggcctccaagctcggacctttgggatctggacgctgctctcatcagtgattcgctgcctctgtgccattgacattcacaacaagacgctctatcacatcacactctggaccttcctccttgccctggggcatttcctctctgagttgtttgtctatggaactgcagctcccacgattggcgtcctggcacccctgatggtggcaagtttctccatcctgggtatgctggtcgggctccggtatctagaagtagaaccagtatccagacagaagaagagaaactgaggccagcattatcacctccaggactttctcgttttccaccttggccatcttcttccttcgtcgtctctcctctttaatttcttttctattccatcatctgcccttttattcacttttagcctctttttttaatttttaaaatttaaagatatgcatactgaaaagtatataacatgtacgtacaatttaaagaataattttaaagtgaatactacgtaactccatccaagtcaagaaattgccagcttctcggaagcccactgtgtctccttcccctacctgcaacctcttccaggctcccttttccagccttcccctttttcccttttattttcatgccttgatttgacttgtgtggtgggaacatgtgaactatgaaacttaaacctgctgcccacccagagcagctgtgaccaagggctgcctcaaggggttgtccacgcaggttgggctcctctctgctgctggacccaagactctgaaccttccaagggacaggcagttcttctaagaagggctcccctgtgtgtgagcaagaccacagctctccttctatctacagatgcatgagggttggaagagtctgggctgtttttagaccttctggtcagctgtatttgtgtaacaacttttgtaataaatagaaaaaccctcaaaaaaaaaa

SEQ ID NO: 93515 - DNA, 1787 bp, Homo sapiens
gaacgtttgtgcttcccgtgcatgcagtcaaagatctattcctacatgagcccgaacaaatgctctggaatgcgtttcccccttcaggaagagaactcagttacacatcacgaagtcaaatgccaggggaaaccattagccggaatctacaggaaacgagaagagaaaagaaatgctgggaacgcagtacggagcgccatgaagtccgaggaacagaagatcaaagacgccaggaaaggtcccctggtaccttttccaaaccaaaaatctgaagcagcagaacctccaaaaactccaccctcatcttgtgattccaccaatgcagccatcgccaagcaagccctgaaaaagcccatcaagggcaaacaggccccccgaaaaaaagctcaaggaaaaacgcaacagaatcgcaaacttacggatttctaccctgtccgaaggagctccaggaagagcaaagccgagctgcagtctgaagaaaggaaaagaatagatgaattgattgaaagtgggaaggaagaaggaatgaagattgacctcatcgatggcaaaggcaggggtgtgattgccaccaagcagttctcccggggtgactttgtggtggaataccacggggacctcatcgagatcaccgacgccaagaaacgggaggctctgtacgcacaggacccttccacgggctgctacatgtactattttcagtatctgagcaaaacctactgcgtggatgcaactagagagacaaatcgcctaggaagactgatcaatcacagcaaatgtgggaactgccaaaccaaactgcacgacatcgacggcgtacctcacctcatcctcatcgcctcccgagacatcgcggctggggaggagctcctgtatgactatggggaccgcagcaaggcttccattgaagcccacccgtggctgaagcattaaccggtgggccccgtgccctccccgccccactttcccttcttcaaaggacaaagtgccctcaaagggaattgaatttttttttttacacacttaatcttagcggattacttcagatgtttttaaaaagtatattaagatgccttttcactgtagtatttaaatatctgttacaggtttccaaggtggacttgaacagatggccttatattaccaaaacttttatattctagttgtttttgtactttttttgcatacaagccgaacgtttgtgcttcccgtgcatgcagtcaaagactcagcacaggttttagaggaaatagtcaaacatgaactaggaagccaggtgagtctcctttctccagtggaagagccgggaccttccccctgcacccccgacatccagggacggggtgtgaggaagacgctgcctcccaatggcctggacgggatgtttccaagctcttgttcccctaacgtctcaacaggcgctcactgaagtgtatgaatattttttaaaaaggtttttgcagtaagctagtcttcccctctgctttctcgaaagcttactgagccctgggccccaagcacgggccgggcatagatttcctcttccacaagctgccgcttttctgggcaccttgaagcatcagggcgtgaaatcaaactagatgtgggcagggagagggttgcttacctgccctgctggggcagggtttcctgaaactgggttaattctttatagaaatgtgaacactgaatttattttaaaaaataataataaaaatttaaaaaaattaaaaataaaaaaaaccacagaaaacaactttacatgtatataggtcttgaagtgaaaa

SEQ ID NO: 93516 - DNA, 1667 bp, Homo sapiens
ggctgttgtgcgcgcccaggggtcccgcgggttttcgggcgcagggtggcgcccgcggcaggcggcggccatgaacttctccgaggtattcaagctctccagcttactctgcaagttctccccggacggcaagtacctggcttcctgtgtccagtaccggttagtggtccgggatgtgaacacccttcagatccttcagctgtacacgtgcctagaccagatccagcacatcgagtggtcggcagactcgctcttcatcctgtgcgccatgtacaagcgagggctggtgcaggtctggtctttagagcagcccgaatggcactgcaaaatagacgagggctcagccgggctggtggcctcgtgctggagcccggacgggcgccacattctcaacaccacggaattccatctgcggataaccgtctggtccttgtgcacaaaatccgtgtcttacatcaaatacccgaaagcttgtctgcagggaatcaccttcaccagggacggccgctacatggcgctggcagaacggcgcgactgcaaagattacgtgagcatcttcgtctgcagtgattggcagctcctgcggcattttgatacggacacccaggatctcacagggattgagtgggccccaaacggctgtgtgctggcagtgtgggacacctgcttggagtacaagattctgctgtactcattggatggccggttgttgtccacgtacagcgcttacgagtggtccctgggcatcaagtctgtggcctggagccccagcagtcagttcctggcagttgggagctatgatggaaaggtgcgcatccttaatcacgtgacttggaaaatgatcacggagtttgggcatcctgcagccattaatgatcccaagatagtggtgtataaggaggccgagaagagcccacagctgggactgggctgcctctccttcccgccgccccgggccggggccggccctctcccgagctcagagagtaaatatgagatcgcctctgtcccagtctccttacagacactgaaacctgttaccgacagagcaaacccgaaaatcggcataggaatgctggcatttagtcctgacagctacttcctggcgacaaggaacgacaacattcccaatgccgtctgggtctgggacattcagaagctgaggctgttcgcggtgctcgagcagctgtccccagtgcgcgcgtttcagtgggacccgcagcagccgcggctggccatctgcacgggaggcagcaggctctacctgtggtccccagcgggctgcatgtcggtgcaggtgcctggggaaggcgactttgcagtgctctctctgtgctggcatttaagcggagactcgatggccctcctcagcaaggatcacttctgcctctgcttcctggagacagaggcagtggtcggcacagcctgcagacagctgggcggccacacgtagcagcggtgcactaacgtgtgcagaaacagggctactctgtgtttccagtgtgggaaaaaacacagcttcaccaggaggttctccactgtggtggtctggattcagtgattgattctatttttctatagcaaagcatttttgtaaatatgtatgagtataaaccacaagttttattatttaaaataaatacttgctgatttataaaaaaaaaaaa

SEQ ID NO: 93517 - DNA, 1105 bp, Homo sapiens
atcccgggtcgacgatttcgtgttccgaactcaaaggaacccagtgccgggccacagccgggtcacgtggccggcggccccccatgacgtgctggctgcggggcgtcacggcgacgttcgggcgacctgccgagtggccaggctacctcagtcacctgtgtggtcgcagtgctgccatggacctgggacccatgcgcaagagttaccgcggggaccgagaggcatttgaggagactcatctgacctcccttgacccagtgaaacagtttgctgcctggtttgaggaggctgttcagtgtcctgacataggggaagccaatgccatgtgtctggctacctgcaccagagatggaaaaccctctgctcgcatgttgctgctgaagggcttcgggaaagatggcttccgcttcttcactaacttcgagagtcgaaaaggaaaagagctggactctaatccctttgcttcccttgtcttctactgggagccacttaaccgtcaggtgcgtgtggaaggccctgtgaagaaactgcctgaggaggaggctgagtgctacttccactcccgccccaagagcagccagattggggctgtggtcagccaccagagttctgtgatccctgatcgggagtatctgagaaagaaaaatgaggaactggaacagctctaccaggatcaagaggtgcccaagccaaaatcctggggtggctatgtcctgtaccctcaggtgatggagttctggcaaggtcaaaccaaccgcctgcatgaccggatagtctttcggcggggcctacccacaggagattcccctttggggcccatgacccaccgcggggaggaagactggctctatgagagacttgcaccttaactctgggacctgctggcccagagtggagctagggctaggtgtcaagagagggtgtgggattgggacccaggcccttctttctaaactcaacccatttccctccctaccccttatcttcaggactcttcagagctaatcctctaagttctctgtactcagttggttctcagttagctggtcaagtggagtgtaatggtggcgtagagaatcacaaatggaaaataattccataatta

SEQ ID NO: 93518 - DNA, 1606 bp, Homo sapiens
tacggctgcgagaagacgacagaagggggggtcccatattgaactcgggttggaagaggcgagtccggtctcaaaatggaggtaaaaccgccgcccggtcgcccccagcccgactccggccgtcgccgtcgccgccggggggaggagggccatgatccaaaggaaccagagcagttgagaaaactgtttattggtggtctgagctttgaaactacagatgatagtttacgagaacattttgagaaatggggcacactcacagattgtgtggtaatgagagacccccaaacaaaacgttccaggggctttggttttgtgacttattcttgtgttgaagaggtggatgcagcaatgtgtgctcgaccacacaaggttgatgggcgtgtagtggaaccaaagagagctgtttctagagaggattctgtaaagcctggtgcccatctaacagtgaagaaaatttttgttggtggtattaaagaagatacagaagaatataatttgagagactactttgaaaagtatggcaagattgaaaccatagaagttatggaagacaggcagagtggaaaaaagagaggatttgcttttgtaacttttgatgatcatgatacagttgataaaattgttgttcagaaataccacactattaatgggcataattgtgaagtgaaaaaggccctttctaaacaagagatgcagtctgctggatcacagaggggtcgtggaggtggatctggcaattttatgggtcgcggagggaactttggaggtggtggaggtaattttggccgtggtggaaactttggtggaagaggaggctatggtggtggaggtggtggcagcagaggtagttatggaggaggtgatggtggatataatggatttggaggtgatggtggcaactatggcggtggtcctggttatagtagtagagggggctatggtggtggtggaccaggatatggaaaccaaggtggtggatatggtggaggtggaggatatgatggttacaatgaaggaggaaattttggcggtggtaactatggtggtggtgggaactataatgattttggaaattatagtggacaacagcaatcaaattatggacccatgaaagggggcagttttggtggaagaagctcgggcagtccctatggtggtggttatggatctggtggtggaagtggtggatatggtagcagaaggttctaaaaacagcagaaaagggctacagttcttagcaggagagagagcgaggagttgtcaggaaagctgcaggttactttgagacagtcgtcccaaatgcattagaggaactgtaaaaatctgccacagaaggaacgatgatccatagtcagaaaagttactgcagcttaaacaggaaacccttcttgttcaggactgtcatagccacagtttgcaaaaagtgcagctattgattaatgcaatgtagtgtcaattagatgtacattcctgaggtcttttatctgttgtagctttgtctttttctttttcttttcattacatcaggtatattgccctgtaaattgtggtagtggtaccaggaataaaaaattaaggaatttttaacttttcaaaaaaaaaa

SEQ ID NO: 93519 - DNA, 1680 bp, Homo sapiens
gcggccgcgccccgccgccaccatgagggccgagggcctcggcggcctggagcgcttctgcagcccgggcaaaggccgggggctgcgggctctgcagcccttccaggtgggggacttgctgttctcctgcccggcctatgcctacgtgctcacggtcaacgagcggtgcaaccactgcgagtactgcttcaccaggaaagaaggattgtccaaatgtggaagatgcaagcaggcattttactgcaatgtggagtgtcagaaagaagattggcccatgcacaagctggaatgttctcccatggttgtttttggggaaaactggaatccctcggagactgtaagactaacagcaaggattctggccaaacagaaaatccacccagagagaacaccttcggaaaaattgttagctgtgaaggagtttgaatcacatctggataagttagacaatgagaagaaggatttgattcagagtgacatagctgctctccatcacttttactccaagcatctcgaattccctgacaatgatagcctcgtagtactctttgcacaggttaactgtaatggcttcacaattgaagatgaagaactttctcatttgggatcagcgatatttcctgatgttgcattgatgaatcatagctgttgccccaatgtcattgtgacctacaaagggaccctggcagaagtcagagctgtacaggaaatcaagccgggagaggaggtttttaccagctatattgatctcctgtacccaacggaagatagaaatgaccggttaagagattcttatttctttacctgtgagtgccaggagtgtaccaccaaggacaaggataaggccaaggtggaaatccggaagctcagcgatcccccaaaggcagaagccatccgagacatggtcagatatgcacgcaacgtcattgaagagttccggagggccaagcactataaatcccctagtgagctgctggagatctgcgagctcagccaggagaagatgagctctgtgtttgaggacagtaacgtgtacatgttgcacatgatgtaccaggccatgggtgtctgcttgtacatgcaggactgggaaggagccctgcaatatggacagaaaatcattaagccctacagtaagcactatcctttgtactccctcaacgtggcctccatgtggttgaagctagggagactctacatgggcctggaacacaaagccgcaggggagaaagccctgaagaaggccattgcaatcatggaagtagctcacggcaaagatcatccatatatttctgagatcaaacaggaaattgaaagccactgaaactatgcagcatttcagttttcatttaaacacttagttcagaaaccttaaaggatttgaatatttcaaattgcacacgtcactccagcatctctgtaaaataattggaatgaaaatacttcttgcacttaaacactgcacatgccgtactttgaggttagtctgaatcttgaactttaataccaaattaattttgaatgcttttgtttcctaagagataatggcatggtttcatatgttatactttggacagagttttaaaaatggaattattttttctttcatgcctcttgtaatgttctgaacaaacttgaatgatgaaagtattaaagagatatcagtaaaaaaaaaaaaaa

SEQ ID NO: 93520 - DNA, 967 bp, Homo sapiens
atggtctgcagggagcagttatcaaagaatcaggtcaagtgggtgtttgccggcattacctgtgtgtctgtggtggtcattgccgcaatagtccttgccatcaccctgcggcggccaggctgtgagctggaggcctgcagccctgatgccgacatgctggactacctgctgagcctgggccagatcagccggcgagatgccttggaggtcacctggtaccacgcagccaacagcaagaaagccatgacagctgccctgaacagcaacatcacagtcctggaggctgacgtcaatgtagaagggctcggcacagccaatgagacaggagttcccatcatggcacacccccccactatctacagtgacaacacactggagcagtggctggacgctgtgctgggctcttcccaaaagggcatcaaactggacttcaagaacatcaaggcagtgggcccctccctggacctcctgcggcagctgacagaggaaggcaaagtccggcggaccatatggatcaacgctgacatcttacagggccccaacatgctcatctcaactgaggtcaatgccacacagttcctggccctggtccaggagaagtatcccaaggctaccctatctccaggctggaccaccttctacatgtccacgtccccaaacaggacgtacacccaagccatggtggagaagatgcacgagctggtgggaggagtgccccagagggtcaccttccctgtacggtcttccatggtgcgggctgcctggccccacttcagctggctgctgagccaatctgagaggtgaaaaccaccaaacccacccccaccctcctggaggcactgatgcccccagcaagatcccagaagctcatggctggaagggtcttaaaggtcatttcgtccaacccctgccagtgctcatgccctctgcagagtccctgctttctgcttgcatacctctggtgacg

SEQ ID NO: 93521 - DNA, 1711 bp, Homo sapiens
cggacgcgtgggcagagagtgcgcgccctgagtcgcaggccgaggagacatggctgcacttcgtgacgctgagatacagaaggacgtgcagacctactacgggcaggtgctgaagagatcggcagacctccagaccaacggctgtgtcaccacagccaggccggtccccaagcacatccgggaagccttgcaaaatgtacacgaagaagtagccctaagatattatggctgtggtctggtgatccctgagcatctagaaaactgctggattttggatctgggtagtggaagtggcagagattgctatgtacttagccagctggttggtgaaaaaggacacgtgactggaatagacatgaccaaaggccaggtggaagtggctgaaaagtatcttgactatcacatggaaaaatatggcttccaggcatctaatgtgacttttattcatggctacattgagaagttgggagaggctggaatcaagaatgagagccatgatattgttgtatcaaactgtgttattaaccttgtgcctgataaacaacaagtgcttcaggaggcatatcgggtgctgaagcatggtggggagttatatttcagtgacgtctatacgagccttgaactgccagaagaaatcaggacacacaaagttttatggggtgagtgtctgggtggtgctttatactggaaggaacttgctgtccttgctcaaaaaattgggttctgccctccacgtttggtcactgccaatctcattacaattcaaaacaaggaactggaaagagttatcggtgactgtcgttttgtttctgcaacatttcgcctcttcaaacactctaagacaggaccaaccaagagatgccaagttatttacaatggaggaattacaggacatgaaaaagaactaatgtttgatgccaattttacatttaaggaaggtgaaattgttgaagtggatgaagaaacagcagctatcttgaagaattcaagatttgctcaagattttctgatcagaccaattggagagaagttgccaacatctggaggctgttctgctttggagttaaaggatataatcacagatccatttaagcttgcagaagagtctgacagtatgaagtccagatgtgtccctgatgctgctggaggctgctgtggcacaaagaaaagctgctaaatctatagccaaccaggggaccacagtagtgggcaagagtgatctgcatgttttttaacctgcttttccccatagcacagaccataagaaacaacaaatggagccactgcgcccggccataaatgaattatttttaagaggcattgattaaagattcacagcaaatcactagttaagcagattttttttctatttcctacttcaaagttctgggtgccacatagtggtcagaaatggaacagagaagctgtcttaagccttgttcaagaagcaggaaaggcatcagaagaagtaacagttggcagagggtctcgggaaaaacatcttccttctgatcttttgcatagcaccttttggaattttcatcatgtttgcttattaaacaaagctcctactgccatcatactaatcatgcaaaaagattgccaaatcatgtttggtaggaggacttttgaggtagcttttgaacaaatgtttttttctttaattctttttttttgcaataaagaaaacaaattaatcataaaaaaaaaa

SEQ ID NO: 93522 - DNA, 1945 bp, Homo sapiens
cccctgggttcgaacacggcacccgcactgcgcgtcatggtgcaggcctggtatatggacgacgccccgggcgacccgcggcaaccccaccgccccgaccccggccgcccagtgggcctggagcagctgcggcggctcggggtgctctactggaagctggatgctgacaaatatgagaatgatccagaattagaaaagatccgaagagagaggaactactcctggatggacatcataaccatatgcaaagataaactaccaaattatgaagaaaagattaagatgttctacgaggagcatttgcacttggacgatgagatccgctacatcctggatggcagtgggtacttcgatgtgagggacaaggaggaccagtggatccggatcttcatggagaagggagacatggtgacgctccccgcggggatctatcaccgcttcacggtggacgagaagaactacacgaaggccatgcggctgtttgtgggagaaccggtgtggacagcgtacaaccggcccgctgaccattttgaagcccgcgggcagtacgtgaaatttctggcacagaccgcctagcagtgctgcctgggaactaacacgtgcctcgtaaaggtccccaatgtaatgactgagcagaaaatcaatcactttctctttgcttttagaggatagccttgaggctagattatctttcctttgtaagattatttgatcagaatattttgtaatgaaaggatctagaaagcaacttggaagtgtaaagagtcaccttcattttctgtaactcaatcaagactggtgggtccatggccctgtgttagttcatgcattcagttgagtcccaaatgaaagtttcatctcccgaaatgcagttccttagatgcccatctggacgtgatgccgcgcctgccgtgtaagaaggtgcaatcctagataacacagctagccagatagaagacacttttttctccaaaatgatgccttggggtggggagtggtagggggaagagctcccaccctaaggggcacacactgagttgcttatgccacttccttgttcaaaataaagtaactgccttaatcttatactcatggcttggagttaccttatattcaggtatatgtgatattttgcctggtttgttaaaattgccccatttagattccttctataattgttcttatagataagtaatttatatatgagctgtgttagtattttttcagtgtgagatctctggattctttcacaataaagctgttgaattttaacaggagtattagtacataaattttctactcaacaattccgagataggattatgcctagtttgtcatatcacagaaaaactccaagttaacttcatgttttggaagggcaggtcgtttttaaagtatttctttttttaactggatgaaaaatcttcatgttaggattaattttcttaatcacctccacactgtacagaggaaactcaagccttaaatgtttaagtaaactctgtctcagttttaggattaaaatacccaccggtggtgtgatgatgccatataccgcagggcttgcttctgtcaagtgtgactctatctcagtaattaaaataagtgctgatctactgattttttttaatggattcatttctaaatgggcattataaatagagcttgttcatttttaagaacgaaacattcatatgataaactatcgctttaaattgcctttcttgcttcatataacttttccctgtcaggatccttagtgtttgaaactcctcgtgcggggctggcctcctgcggactctagtttcgcctccttgatgtggcgcctgggatttcttcacttcagagctgtatttttacaggcaagagtaagttcctgggcacagtggctcatgcctgtggtctcagctactcaggaggctgaggtgggaggattcttagagcc

SEQ ID NO: 93523 - DNA, 1646 bp, Homo sapiens; identical to SEQ ID NO: 58669

SEQ ID NO: 93524 - DNA, 1523 bp, Homo sapiens
ctgcagtccgccggcgagggagttacgcacgtcctgattctcctggagtctccagcccgcccagtggccgcagtcacccaggtccagaggcggcggtatcacaggctctccgacatgtctatgctggctgaacgtcggcggaagcagaagtgggctgtggatcctcagaacactgcctggagtaatgacgattccaagtttggccagcggatgctagagaagatggggtggtctaaaggaaagggtttaggggctcaggagcaaggagccacagatcatattaaagttcaagtgaaaaataaccacctgggactcggagctaccatcaataatgaagacaactggattgcccatcaggatgattttaaccagcttctggccgaactgaacacttgccatgggcaggaaaccacagattcctcggacaagaaggaaaagaaatcttttagccttgaggaaaagtccaaaatctccaaaaaccgtgttcactatatgaaattcacaaaagggaaggatctgtcatctcggagcaaaacagatcttgactgcatttttgggaaaagacagagtaagaagactcccgagggcgatgccagtccctccactccagaggagaacgaaaccacgacaaccagcgccttcaccatccaggagtactttgccaagcggatggcagcactgaagaacaagccccaggttccagttccagggtctgacatttctgagacgcaggtggaacgtaaaagggggaagaaaagaaataaagaggccacaggtaaagatgtggaaagttacctccagcctaaggccaagaggcacacggagggaaagcccgagagggccgaggcccaggagcgagtggccaagaagaagagcgcgccagcagaagagcagctcagaggcccctgctgggaccagagttccaaggcctctgctcaggatgcaggggaccatgtgcagcccgcctgagggccgggacttcaccctgaagcccaaaaagaggagagggaagaaaaagctgcaaaaacccagtagagatagcagaggaccgctacactagaagaaaccgctagttgaaaaaagaaggaagaagaaagattccaaaatgaatcctttcccagccggggcctttcccgaccacttcagctgtcagggcactgcgggggcagacacctctggcctgaagtcacagcagagttcaccccagagcgcctgggcgcatcttgtggcatgcccatgggctgccgagtcctgccctctcgccacatttcccccaagttacattcccaggaggacctttttaatgttctcaatcgtggctctcagacacaaataaatttttttgtaaactctgagcccttcagcaagagagtttaattataatcattacaaatacatgcattcatgtaagtgtgcacacgtgtgtgtgcatgtgcgcatctgtgtgtgtgtgtgtgtgtcactatctccgtttgctctcggttcccttcaataacaatgaatggtgctttcttctgaaagac

SEQ ID NO: 93525 - DNA, 741 bp, Homo sapiens
ggcacgagagactcggcgggcgctgttgagggagtcgggccgcgactgtggtcgtttttataccttcccgcgcggacgccggcgctgccaacggaagggcgggtagggcgagacggagtttcgtcatgttggccaggcccatttgagatctttgaagatatcctcaacgtgaggctctgctgccatgaaggtgaagattaagtgctggaacggcgtggccacttggctctgggtggccaacgatgagaactgtggcatctgcaggatggcatttaacggatgctgccctgactgcaaggtgcccggcgacgactgcccgctggtgtggggccagtgctcccactgcttccacatgcattgcatcctcaagtggctgcacgcacagcaggtgcagcagcactgccccatgtgccgccaggaatggaagttcaaggagtgaggcccgacctggctctcgctggaggggcatcctgagactccttcctcatgctggcgccgatggctgctggggacagcgcccctgagctgcaacaaggtggaaacaagggctggagctgcgtttgttttgccatcactatgtttgacactttttatccaataagtgaaaactcattaaactactcaaatcttgctggaggcctctgggtgcctgtgttctcagcatatagatgtggtctcggtgtgttttgatatgaaaactctcatgaataaacatctccgtgaaacgccaaaaaaaaaaaa

SEQ ID NO: 93526 - DNA, 1879 bp, Homo sapiens
tacggctgcgagaagacgacagaagggtacggctgcgagaagacgacagaaggggacactagaggaagtcgtgctacccccgcggagttgtcgtgtgttctggattcattccggcaccaccatgtcgaaggtttcctttaagatcacgctgacgtcggacccacggctgccgtacaaagtactcagtgttcctgaaagtacacctttcacagcagtcttaaagtttgcagcagaagaatttaaagttcctgctgcaacaagtgcaattattaccaatgatggaataggaataaatcctgcacagactgctggaaatgtttttctaaaacatggttcagaactgcggattattcctagagatcgtgttggaagttgttaatatctgctacttggaacatacgattgcctttcagaataaatattggtattttttgttgttgtaaaattgaaatcaggcatttaacatactatgaaaacaccaggagtcaatgattaatgaaaggtgactcatctgtccctttttgttgtccatactcttcctatgaagagggaatgcgtatgaattaaggctactactgtcacagaagatcatagtctttgatgctacctcacaacacaaacaggtagttcgttgggggcaaatgaattagccaactgttaactggaagcttttgataatttttttttttagaacaatttggaacattaaaatttactgaatcgtatatattcatctgagataaaaatataaaaagaattatggaccctggatggcaatttgcttgatagcatctgatttgcagactcataatttgatttttaattaaatatataggttatgatgaagtgaatagacatatcagtgaacagttaactatattaaatttttatcatttactttttttaagattcagacctcagttatataaatttcagtttaatatcaaccaaaaaattaaaattttaatctaacccttatgtgtataaattggtgtcccataccagcttttaatggtggacctatagaatccagtacttttaatggtgggaatttacagtagaagcatcctttgctgagttatacattcctttatcaatctcttttgatacaacatttaaaacaagtagcttcaagaaaccactggtgttttgaggatagtatttctaaatagcattcaggaacagagtattattgcacagatctgaagatcaaaaaaaagctcaaggaaatacagatcggaagtgctgatgagttatatttattgaaaacccaacttttaaggaagtgctaagatcagtcacccatgtgaataagaagccaggaaaggaaagatggggaagcccagatcaccaggcttctattaaggaggaaagcaacagaggaaacagtgaaggggaacagaagggggtagcaaagtgttacagaaaagcggactggatagacaaaactgcagaaggtgtatgttggggagaactgaaagggaaaacaaaatacttgacatagtcttaagtagaagaaggcagttagagaaaacaaagtatctactggccttgtcaacatacagacttcaaaataccccttatgagaatccaaagaatgatgtgtgtaagggaagattttatttgcccttccggaagaaatcagtatctatgcaaatcttgaaagacaaaatcaaagcccattaatgattcagaatcagtgcttgacctcctgtattctgaatggtgaactctggaagcagggattgtgtctggctctttttagagctggaaatgtagtggctttcattaaatacttgctgtaaagtctttctaagaccaattattatcttagcatgtttcagtatcttctctatcataggccctaagttcattgggg

SEQ ID NO: 93527 - DNA, 1749 bp, Homo sapiens
atggctgcagcgcagcggcggccggggccgggagcgggccctgggcggcccaggagaagcagttcccgccggcgctgctgagtttcttcatctacaacccgcgcttcgggccgcgcgaaggacaggaggaaaataagattttattttatcatccaaatgaggtagaaaagaatgagaagattagaaatgtcggattgtgtgaagctattgtacagtttacaaggacatttagcccatcaaaacctgcaaaatctttacatacacagaagaacagacagttcttcaatgaaccagaagaaaatttctggatggtcatggttgttcggaatcctataattgaaaaacagagtaaagatggaaaaccagttattgaatatcaagaggaggagttgttggacaaggtttatagctcggtgctgcggcagtgctacagcatgtacaagctttttaatggtacatttctgaaagccatggaagacggaggcgtcaagcttctgaaagaaagattagagaaattcttccatcggtatttgcaaacgctacatttgcagtcatgtgacctacttgacatttttggtggaatcagcttcttcccgttggataaaatgacttatttgaaaatccagtcctttattaatagaatggaggaaagcctgaatatagtcaaatacactgcttttctctataacgatcagctcatctggagtggattagaacaagatgacatgagaattttatacaaataccttaccacctcccttttcccaaggcacatcgaacctgagttagcaggaagggattctccaataagagcagaaatgccaggaaatcttcaacactatggaagatttcttaccggacccttgaacctcaatgatccagatgcaaaatgcagattccccaaaatttttgtaaatacagatgacacttatgaagagctccatttaatcgtttataaggccatgagtgcggctgtgtgctttatgatcgacgcctctgtccacccaacgttggatttttgccgaagactggacagcatcgttgggccccagctcacagtgctggcctctgacatctgtgaacagtttaacatcaacaagaggatgtccgggtctgagaaagaaccccagtttaagtttatctacttcaaccacatgaatctcgccgagaagagcacagttcacatgaggaaaacgcccagcgtgtcgctcacttccgtgcacccggatttaatgaagattctcggtgacatcaacagtgactttaccagagtggatgaagatgaggagatcattgtgaaggccatgagtgattactgggttgttggaaagaagtctgatcggcgggagctctatgttattttgaatcaaaaaaatgcaaacctgattgaagtaaatgaagaggtcaagaaactttgtgcaacgcagttcaacaacatcttcttcttggattgacggatgacggctcaccgagagcatatctaaaaaacactctgcaaacatttggtcacatgcaagttagtggtcatatgacggactgcattcaggacaagggtaaagcaatacttgctttgaagaatcagatttcgactcggtctgctgatctgaggtttttagattttaaatatttatgtggaattaattaaaggtagttggctatatcgctatcatttcattcttttgacattatttgaatattttactggaaaataagactaataaattgttaaaagtttttaaaaaaaaaaaa

SEQ ID NO: 93528 - DNA, 1854 bp, Homo sapiens
ccgatttcgttggggctgcacgtgtggtgaggcctacagaagcggccttcagctggaccttggtctccccgccggacttcgagggtgtcatcgccgcccctgttgggggtgagcgccgcgcggctgcagcatgcctcacaggaagaaaaagccctttatagagaagaagaaagctgtgtcttttcacttggtccaccggagccaacgagatcctttagcagcagatgagagtgcaccccagagggttctattgcccacacaaaaaatagacaatgaagaaaggcgagcagaacagaggaagtatggagtgttctttgatgacgactatgactacctgcagcacctgaaggaaccatctgggccttcagagcttattccctcaagtaccttcagtgcacacaacaggagagaggagaaagaagaaacgctagtaattccaagcactggaattaagttgccttcatcagtgtttgcttcagagtttgaggaagatgttggattgttaaataaagcagctccagtttcaggacctcgactggattttgatcctgacattgttgcagctcttgatgatgattttgactttgatgatccagataatctgcttgaggatgactttattcttcaggccaataaggcaacaggagaggaagagggaatggatatacagaaatctgagaatgaagatgacagcgagtgggaagatgtggatgatgagaagggagatagcaatgatgactatgactctgcaggcctattgtcagatgaagactgtatgtctgtgcccggaaaaactcacagagctatagcagatcacttgttctggagtgaggaaacaaagagtcgcttcacggagtattcgatgacttcctcagtcatgaggagaaatgaacagctgaccctacatgatgagaggtttgagaagttttatgagcaatatgatgatgatgaaattggagctctggataatgcagaattggaaggttctattcaagtggacagcaatcgcttacaggaagttttgaatgactactataaagagaaggcagagaattgtgtaaaattgaatacccttgaacccttggaggatcaagacctgccaatgaatgagcttgatgagtctgaggaggaagaaatgattactgtagtccttgaagaagccaaagagaagtgggattgtgaatctatttgtagtacatactcaaatttatataaccatccacagcttatcaagtatcaaccaaagcccaaacaaattcgaatatcttctaaaacaggaatacctctcaatgtcttaccaaagaaaggactcacagcaaagcaaactgaaagaatacagatgattaatggcagtgatcttcctaaagtatcaactcagccacgttctaaaaatgaaagcaaagaagataaaagagcaagaaagcaagctataaaagaagagcgcaaggaacgaagagtggagaagaaagctaacaaattagcatttaaactggagaaaagaaggcaagaaaaagagctgctgaacttgaagaagaatgttgagggtctaaagctatagacagtggagcatacagggcaaggcactttattaggggctccatcatctttggttattggactagaaacttcagaaagacaaaacctgtttgccattttttactggcagataagaggaaaatacaatatttgtattatttttatactagtaagtgtcccctgcccaaccatcttggtaaatattgtaatactttaatttttaatattataagcttacatttgctctgaagtaaatgacttcatgaatgtgaaatgtttgataaattaaaggaaaatatcttcataacgtgaaaaaaa

SEQ ID NO: 93529 - DNA, 4684 bp, Homo sapiens
tttcgtggcggcggtaagatggctgcccacgggggctccgcggcgtcctcggcgctgaaggggttaattcaacagttcaccaccattaccggtgcaagtgaaagtgtaggaaaacatatgcttgaagcgtgcaacaataatctggaaatggcagtcactatgtttttggatggtggaggaatcgctgaagagcccagtaccagttcagcaagtgtctctactgtcagaccacacacagaagaagaagttcgtgccccaattcctcaaaagcaggaaatactggtggaaccagaaccattatttggtgctcctaaaagacgacggcctgcacgttcaatttttgatggtttccgggattttcagactgaaactattcggcaagaacaagaattaagaaatggaggagctatcgataagaaattaactacccttgcagatctattccggccacccattgatttgatgcataaaggcagctttgaaacagccaaagagtgtggccagatgcaaaataagtggctgatgataaacattcaaaatgttcaagactttgcatgtcagtgcctcaaccgcgatgtgtggagcaacgaagctgtgaagaatattatccgggaacatttcattttctggaaggtttatcatgacagtgaggaaggtcagagatacatacagttttataagttaggggatttcccctatgtttccatattggacccacggacaggtcagaagctagtagaatggcaccagttagatgtatcttctttcttggaccaagtgacgggatttctgggtgaacatggacaactggatggactttctagcagtccccccaaaaaatgtgcccgttcagagagccttatagatgcaagtgaagacagccagctagaagctgccatcagagcctccttacaagaaacacattttgattcaacacagacaaaacaggatagccgctcagatgaagaatctgaatctgaacttttttctggcagtgaggagttcatatccgtttgtggctctgatgaagaagaagaggtagagaatcttgccaagtccagaaagtctccccacaaagatttggggcatagaaaagaggagaatagaaggccgctgactgagccaccagtcagaactgatcctggaacagccacaaaccaccaaggattgccagctgtggattcagagatactggagatgccacctgaaaaagcagatggagtagtggaggggatagatgtaaatggaccaaaagcacagctgatgttgcggtatccagatggaaaaagggaacagatcactcttccagagcaagctaaactgctagctttggtgaagcacgtgcagtctaaaggatacccaaatgaacgttttgaacttctcaccaactttcctcgaaggaaattatctcatctggactatgatattacattgcaagaggcaggcctttgtcctcaagagactgtctttgtacaggaaagaaattaacaccatggcttgacctctctcagcttaccccttttttcccttttcctgtgagatacatgtcactaagtatgcattttggctcataggaccacagagccaaagttgggcaagcaagtcaccttccttctcttatttcttgatctctcctataatcagtctctttctccccctttgtttctttctcctcttctgttttctcgctccccactccgtacccttctgcctccccctccccccacacttttctttcttacctaatctggtgaccaaactgaagtgtaaggataagacctctcctagtactagcagcaggaattgtgtgttccagtaagtggtctcttgcacggcacttttttgggatcaaatgttaacgttactccccagactcttcgggcaaaggaatggctagattcagagtaagaacaaccctcccttttttgtaagtccccgtgtttagcagggagaagaaattctctaacatgggtttggttttgttgtgttcttcatgtggaaatgtcgcttaacaaaatatccaggcttttgtttacgtggaaaaagcatcccttgtaatgattgctcatcatacttaaaaacctttttcaaaggattttcatgttcccagctataaggactatttccatgacatgtgttattggcagaatgagtgttaaatatggagcatatagcatggggtgactttcattgtcctaacctgagacagttttccttattactctgtattgatcctgctagtccaagaatggacatgaagtgaacctatcgtggtgactgggataggaaggtgcttgctatttttgccagcacagcatattagttcctttggagccctccattgtctgagtctgcagtgatctgtaggaaggcagctggtcaataatcatgtagtacaatggcttggaattgtaaccactatggttattgattgtcctgtgttgtttcaggcatacttaggtatgtccctggggaaaaagaaaaccattcagctgagagttgctaaccatgttcttttggttagaaataatggttcattttttgcccctggttggaatagtctctaaaaggctctggtgactgaattgaacatgagtccgcatgctgttttctttcaaaaggtatcaaaacggaaagcctctctaaggggaagacctttcaactccattcagaagacaacatttagtaaggaggatggcggaggttactagtaattttcagatgtcttgggctttttctgccaacaaaacccaaaatcaaattagagttggtgaaagctttcttcagtgtttttagaagaggccatcttgaatctgtagaataccatttacacatcaacttcaccctatgctcatttcgtattttgagcttaaatggagtcctctgaagggggggtagtcgtgattctggtggcaaaactagaacttttaacttgtaaaatgaaaaatattaaatggacctttttgtcagttgaggatttagattgattcttttatctgaggagcgtatgttcctcagatgttgcgtagagacctttaggttttcatctactttaagattgctctcttggcaattaggggatttgggaaaagaagaaaaaaagatgccatgtgttgctagtacacagttataggatatggtttctaatggttgaattttgaggaactctccctaaagaatgagttttatatctcctcaaggaaatcatggaaaaatctgtttattcttcagtgagtccttttgaattaatgttcttaaatttttttctaagtctgtgtaagtgcttatgtataagtatataattgtataaatatttataaatatatttatataattacggtttcatttctaccttgagtcaaagttctgtctttagattggtgactgagtaatacttacactttggtgttttttcttaggttcttgaggcttacttaactagcagcttctgatttattgagtgaaagatggttttcatgttaattcctcagttgcatctctgaacttggataacatacttgccgtttgaaaaatagagctgtatactgtcaaaggtgcactggagggtaaaacatttgttggtagtagacaagctcagaaatccaaaaattcagggagggcacagggtaagaagagaggtttgctcagctttgtgctctgatggcacccatctgtactccagcaaagtcatagctgaagcccaaatcgctcaaacgtgtgaagtcaatcatttttcctatagggctctgtttccttttctttaccttctagcttctcttgataaaacagttgggagaactgccaacgtgttcatcagtgagagggtgtggttctttccgatatgttcagcacgtgcatattcatttatgagaaaccaaagtaacttcttcaactcgggttactgtgggatgattaagtagatataaagtgatttaaaagacagcatggtactttcactcagcttaacatgcagctgggatgtctacaatacaagatgtggtgggttttattttattttattttgaggcaggagtgtaattatcttagggttgatataaaggcccatgggaagagttacggattgtacatgggaagaatccataaggagtattgccttgctcaagaatttaatccgctgacagtatgcttcttccagtttgccttacttcctctgcaagtttctttgctccttagggcagaggttttattgaatagattaaatgaggtcagtaagattagttaaaaatagtcattccttgtgggtgttggacacagcttgaaaggagtgtttaaaaaaaaaaagctagggaggaaaagaacaagaaagatagacttcgagagtgataagagaaaaatacagggagatggaatggaaactaccaggaaggccgggcgcggtggctcatgcctgtaatcccaacactttgggaggcggaggtgggcggatcacctaaggtcaggagatcgaggccagcctgagcaacatggtgaaaccccgtctctactaaaaatacaaaaattacctgggtgggggggcgtgcacctgtaatcccagctactcaaaggctgaggcaggggaatggcttgaacctgggaggcagaggttgcagtgagccaagatcgcaccattacactccagcctgggcgacaaagcgacactccatctcaaatttaaaaaaaaaaa

SEQ ID NO: 93530 - DNA, 965 bp, Homo sapiens
atcaaatggaaccaggaaatgatacacaaatttcagaatttcttcttctgggattttcacaagaacctggactgcaacccttcctctttgggctgttcctgtccatgtacctggtcactgtgctcgggaacctgctcatcatcctggccacaatctcagactcccacctccacacccccatgtacttcttcctctccaacctgtcctttgctgacatttgtgttacttccaccaccattccaaaaatgctgatgaacatccagacacagaacaaagtcatcacctacatagcctgcctcatgcagatgtattttttcatactctttgctggatttgaaaacttcctcctgtccgtgatggcctatgaccggtttgtggccatctgtcaccccctgcactacatggtcattatgaaccctcacctctgtggactgctggttctagcatcctggaccatgagtgctctgtattccttgctacaaatcttaatggtagtacggctgtccttctgcacagccttagaaatcccccactttttctgtgaacttaatcaggtcatccaacttgcttgttctgatagctttcttaatcacatggtgatatattttacagttgcgctgctgggtggaggtcccctgactgggatcctttactcttactctaagataatttcttccatacatgcaatctcatcagctcaggggaagtacaaggcattttccacctgtgcatctcacctctcagttgtctccttattttatggtgcaatcctaggggtgtaccttagttctgctgccacccgcaactcacactcaagtgcaacagcctcagtgatgtacactgtggtcacccccatgctgaacccctttatctatagtctgaggaataaagacataaagagggctctgggaatacatttgttgtggggaacaatgaaagggcaatttttcaagaagtgcccatga

SEQ ID NO: 93531 - DNA, 7445 bp, Homo sapiens; identical to SEQ ID NO: 59735

SEQ ID NO: 93532 - DNA, 2208 bp, Homo sapiens; identical to SEQ ID NO: 59453

SEQ ID NO: 93533 - DNA, 1681 bp, Homo sapiens
tacttcccggatgagaagggcggccgtgaagccagcagggaagccagccccacaggcaagggccccccagcctcctcacagctccccatagcctggacctgccggccctccctccaggaccgaggggctcccaagggaaactcaggcgtgtgctggtcccaatgtcagtgaaacccagctgggggcctggcccctcggagggggtcaccgcagtgcctaccagtgaccttggagagatccacaactggaccgagctgcttgacctcttcaaccacactttgtctgagtgccacgtggagctcagccagagcaccaagcgcgtggtcctctttgccctctacctggccatgtttgtggttgggctggtggagaacctcctggtgatatgcgtcaactggcgcggctcaggccgggcagggctgatgaacctctacatcctcaacatggccatcgcggacctgggcattgtcctgtctctgcccgtgtggatgctggaggtcacgctggactacacctggctctggggcagcttctcctgccgcttcactcactacttctactttgtcaacatgtatagcagcatcttcttcctggtgtgcctcagtgtcgaccgctatgtcaccctcaccagcgcctccccctcctggcagcgttaccagcaccgagtgcggcgggccatgtgtgcaggcatctgggtcctctcggccatcatcccgctgcctgaggtggtccacatccagctggtggagggccctgagcccatgtgcctcttcatggcaccttttgaaacgtacagcacctgggccctggcggtggccctgtccaccaccatcctgggcttcctgctgcccttccctctcatcacagtcttcaatgtgctgacagcctgccggctgcggcagccaggacaacccaagagccggcgccactgcctgctgctgtgcgcctacgtggccgtctttgtcatgtgctggctgccctatcatgtgaccctgctgctgctcacactgcatgggacccacatctccctccactgccacctggtccacctgctctacttcttctatgatgtcattgactgcttctccatgctgcactgtgtcatcaaccccatcctttacaactttctcagcccacacttccggggccggctcctgaatgctgtagtccattaccttcctaaggaccagaccaaggcgggcacatgcgcctcctcttcctcctgttccacccagcattccatcatcatcaccaagggtgatagccagcctgctgcagcagccccccaccctgagccaagcctgagctttcaggcacaccatttgcttccaaatacttcccccatctctcccactcagcctcttacacccagctgaggtagaggccagactcctccaacagtgaaggaaaaggcacagatcaccttagaggccacgctcccaagattagttatcaccctggcagtatgaatacttccctaaggcctcccatccatggaggggaagagtgggaaccagctgttacactcagcatttactgagcactgatgggagccctgcctgggccatgtgctgtggggccaaatggacatcactccctaacttcttgaggtctgtctcctctgtggattcacgcatgtatcaacctcattaaactatgccaaacttttaaaaaaaaaaaa

SEQ ID NO: 93534 - DNA, 1231 bp, Homo sapiens
caggcccgcagcccgagtgtcgccgccatggcttcgccgcagctctgccgcgcgctggtgtcggcgcaatgggtggcggaggcgctgcgggccccgcgcgctgggcagcctctgcagctgctggacgcctcctggtacctgccgaagctggggcgcgacgcgcgacgcgagttcgaggagcgccacatcccgggcgccgctttcttcgacatcgaccagtgcagcgaccgcacctcgccctacgaccacatgctgcccggggccgagcatttcgcggagtacgcaggccgcctgggcgtgggcgcggccacccacgtcgtgatctacgacgccagcgaccagggcctctactccgccccgcgcgtctggtggatgttccgcgccttcggccaccacgccgtgtcactgcttgatggcggcctccgccactggctgcgccagaacctcccgctcagctccggcaagagccaacctgctcccgccgagttccgcgctcagctcgaccccgccttcatcaagacctacgaggacatcaaggagaacctggaatcccggcgcttccaggtggtggactcccgagccactggcaggttccgcggcaccgagcccgagccccgagacggcattgaacctggccacatcccaggtaccgtgaacatccccttcacagacttcctgagccaggaggggctggagaagagccctgaggagatccgccatctgttccaggagaagaaagtggacctgtctaagccactggtggccacgtgtggctctggcgtcacagcctgccacgtggcactaggggcctacctctgcggcaagccagacgtgcccatctacgatggctcctgggtggagtggtacatgcgcgcccggcccgaggatgtcatctcagagggccgggggaagacccactgaagctgggcaggacacaggcgagctcaggtgatgccggccaccagcaatgcctggcctggtagctccgcttctgctttcaccaagagagtgtttcttcactcaactcaggtggcatttggggtgacatctcaaaggccaggaattccgttgacttgttggctgccagtaggggcgggaggaaaggcggaggcgagccctggaggagggaggccacaactccgagctgcccacctggtgctgagctggggccccgcctcctttctgttttatttttgaggaaataaaataaccaagtgctaaaaaaaaaaaa

SEQ ID NO: 93535 - DNA, 1599 bp, Homo sapiens
gcccgccggtccacgccgcgcaccgctccgagggccagcgccacccgctccgcagccggcaccatgcgcgagatcgtgcacatccaggcgggccagtgcggcaaccagatcggcgccaagttttgggaggtcatcagcgatgagcatgggatcgaccccacaggcagttaccatggagacagtgacttgcagctggagagaatcaacgtgtactacaatgaggctgctggtaacaaatatgtacctcgggccatcctggtggatctggagcctggcaccatggactctgtcaggtctggacccttcggccagatcttcagaccagacaacttcgtgttcggccagagtggagccgggaataactgggccaagggccactacacagagggagccgagctggtcgactcggtcctggatgtggtgaggaaggagtcagagagctgtgactgtctccagggcttccagctgacccactctctggggggcggcacggggtccgggatgggcaccctgctcatcagcaagatccgggaagagtacccagaccgcatcatgaacaccttcagcgtcatgccctcacccaaggtgtcagacacggtggtggagccctacaacgccaccctctctgtccaccagctggtggaaaacacagatgaaacctactccattgataacgaggccctgtatgacatctgcttccgcaccctgaagctgaccacccccacctacggggacctcaaccacctggtgtcggccaccatgagcggggtcaccacctgcctgcgcttcccgggccagctgaacgcagacctgcgcaagctggcggtgaacatggtgcccttccctcgcctgcacttcttcatgcccggcttcgcgcccctgaccagccggggcagccagcagtaccgggcgctcacggtgcccgagctcacccagcagatgttcgactccaagaacatgatggccgcctgcgacccgcgccacggccgctacctgacggtggctgccatcttccggggccgcatgtccatgaaggaggtggacgagcagatgctcaacgtgcagaacaagaacagcagctacttcgtggagtggatccccaacaacgtgaagacggccgtgtgcgacatcccgccccgcggcctgaagatgtcggccaccttcatcggcaacagcacggccatccaggagctgttcaagcgcatctccgagcagttcacggccatgttccggcgcaaggccttcctgcactggtacacgggcgagggcatggacgagatggagttcaccgaggccgagagcaacatgaacgacctggtgtccgagtaccagcagtaccaggacgccacggccgacgaacaaggggagttcgaggaggaggagggcgaggacgaggcttaaaaacttctcagatcaatcgtgcatccttagtgaacttctgttgtcctcaagcatggtctttctacttgtaaactatggtgctcagttttgcctctgttagaaattcacactgttgatgtaatgatgtggaactcctctaaaaattacagtattgtctgtgaaggtatctatactaataaaaaagcatgtgtagaaaaa

SEQ ID NO: 93536 - DNA, 895 bp, Homo sapiens
cgcgtccgcggacgcgtggacggacgcgtgggcgtctcttggcccgcgcttaaggccctcgcggggggcttgtgggtcctcctccccctcccactgacaactgccccaactgctcttcccgccccggtcacagtgaaaatgtagacggggtcgttgtccgtacgactgtgcgccagggctcggggaggggcgccctccgcgtgagcgcccccctgggaatattgaacataatcacctctcattccagactatgttaggtcttaatggtgggaggacgcccgagtgctcggcccgtttcaccccgaggaggaaggacactgggtcatgacgccatcagagggcgccagagcagggaccggacgcgagttggagatgttggactcgctgttggccttgggcggcctggtgctgcttcgggattccgtggagtgggaggggcgcagtctcttgaaggcgcttgtcaagaaatctgcactgtgtggggagcaagtgcatatcctgggctgtgaagtgagcgaggaagagtttcgtgaaggttttgactctgatatcaacaatcggctggtttaccatgacttcttcagagaccctctcaactggtcaaaaactgaggaggcctttcctggggggccgctgggagccttgagagccatgtgcaagaggacagatcctgttcctgtcaccattgctctcgattcactcagctggctgctacttcgccttccctgcaccacactctgccaggtcctgcatgctgtgagccatcaggactcttgtcctggtgagacccctccttcattgtttcccctcatacatctccctctgccaaggagtgtgccccttttcctttctaccctagaataaacatctgggttctccagtcggaaaaaaaaaa

SEQ ID NO: 93537 - DNA, 2710 bp, Homo sapiens
  misc_feature (1)...(2710): n = a,t,c or g
cgcagcgggtgcgggcgccgacgggcgagagccagcgagcgagcgagcgagccgagccgagcctcccgccgtcgccatgggccagaacgacctgatgggcacggccgaggacttcgccgaccagttcctccgtgtcacaaagcagtacctgccccacgtggcgcgcctctgtctgatcagcaccttcctggaggacggcatccgtatgtggttccagtggagcgagcagcgcgactacatcgacaccacctggaactgcggctacctgctggcctcgtccttcgtcttcctcaacttgctgggacagctgactggctgcgtcctggtgttgagcaggaacttcgtgcagtacgcctgcttcgggctctttggaatcatagctctgcagacgattgcctacagcattttatgggacttgaagtttttgatgaggaacctggccctgggaggaggcctgttgctgctcctagcagaatcccgttctgaagggaagagcatgtttgcgggcgtccccaccatgcgtgagagctcccccaaacagtacatgcagctcggaggcagggtcttgctggttctgatgttcatgaccctccttcactttgacgccagcttcttttctattgtccagaacatcgtgggcacagctctgatgattttagtggccattggttttaaaaccaagctggctgctttgactcttgttgtgtggctctttgccatcaacgtatatttcaacgccttctggaccattccagtctacaagcccatgcatgacttcctgaaatacgacttcttccagaccatgtcggtgattgggggcttgctcctggtggtggccctgggccctgggggtgtctccatggatgagaagaagaaggagtggtaacagtcacagatccctacctgcctggctaagacccgtggccgtcaaggactggttcggggtggattcaacaaaactgccagcttttatgtatcctcttcccttcccctcccttggtaaaggcacagatgttttgagaactttatttgcagagacacctgagaatcgatggctcagtctgctctggagccacagtctggcgtctgacccttcagtgcaggccagcctggcagctggaagcctcccccacgccgaggctttggagtgaacagcccgcttggctgtggcatctcagtcctatttttgagtttttttgtgggggtacaggagggggccttcaagctgtactgtgagcagacgcattggtattatcattcaaagcagtctccctcttatttgtaagtttacatttttagcggaaactactaaattattttgggtggttcagccaaacctcaaaacagttaatctccctggtttaaaatcacaccagtggctttgatgttgtttctgccccgcattgtattttataggaatactgaaaacatttagggacacccaaagaatgatgcagtattaaaggggtggtagaagctgctgtttatgataaaagtcatcggtcagaaaatcagcttggattggtgccaagtgttttattgggtaacaccctgggagttttagtagcttgaggcaaggtggaggggcaagaagtccttggggaagctgctggtctgggtgctgctggcctccaagctggcagtgggaagggctagtgagaccacacaggggtagccccagcagcagcaccctgcaagccagcctggccagctgctcagaccagcttgcagagccgcagccgctgtgggcagggggtgtggcaggagctcccagcactggagacccacggactcaacccagttacctcacatggggccttttctgagcaaggtctcgaaagcgcaggccgccctggctgagcagcaccgccctttcccagctgcactcgccctgtggacagccccgacacaccactttcctgaggctgtcgctcactcagattgtccgtttgctatgccgaatgcagccaaaattcctttttacaatttgtgatgccttaccgatttgatcttaatcctgtatttaaagttttctaacactgccttatactgtgtttctctttttgggggagcttaactgcttgttgctccctgtcgtctgcaccatagtaaatgccacaagggtagtcgaacacctctctggcccctagacctatctggggacaggctggctcagcctgtctccagggctgctgcggcccagccccgagcctgcctccctcttggcctctcatccattggctctgcagggcaggggtgaggcaggtttctgctcataagtgcttttggaagtcacctacctttttaacacagccgaactagtcccaacgcgtttgcaaatattcccctggtagcctacttccttacccccgaatattggtaagatcgagcaatggcttcaggacatgggttctcttctcctgtgatcattcaagtgctcactgcatgaagactggcttatctcagtgtttcaacctcaccagggctgtctcttggtccacacctcgctccctgttagtgccgtatgacagcccccatcaaatgaccttggccaagtcacggtttctctgtggtcaaggttggttggctgattggtggaaagtagggtggaccaaaggaggccacgtgagcagtcagcaccagttctgcancagagcgcctccgtcctagtgggtgtcctgtttctcctggccctgggtggntaaggctg

SEQ ID NO: 93538 - DNA, 1193 bp, Homo sapiens
cagagattccccgccgcgttccctggactcaggagctcgccgcgatgccccgccccactctccacccgctgaatgcagggcgcatgctgctacttggcggctcaagccccgcccgcaccgtccccattctctgaccgcccctctcccggtacactgcgcaggcacaacagagccgctcccctctcctcgccccgccaccgggacggagagcgcccgccgctgcatttccggcgacacctcgcagtcattcctgcggcttgcgcgcccttgtagacagccggggccttcgtgagaccggtgcaggcctggggtagtctcctgtctggacagagaagagaaaaatgcaggacactggctcagtagtgcctttgcattggtttggctttggctacgcagcactggttgcttctggtgggatcattggctatgtaaaagcaggcagcgtgccgtccctggctgcagggctgctctttggcagtctagccggcctgggtgcttaccagctgtctcaggatccaaggaacgtttgggttttcctagctacatctggtaccttggctggcattatgggaatgaggttctaccactctggaaaattcatgcctgcaggtttaattgcaggtgccagtttgctgatggtcgccaaagttggagttagtatgttcaacagaccccattagcagaagtcatgttccagcttagactgatgaagaattaaaaatctgcatcttccactattttcaatatattaagagaaataagtgcagcatttttgcatctgacattttacctaaaaaaaaagacaccaaacttggcagagaggtggaaaatcagtcatgattacaaacctacagaggtggcgagtatgtaacacaagagcttaataagaccctcatagagcttgattcttgtatattgatgttgtcttttctttctgtatctgtaggtaaatctcaagggtaaaatgttaggtgtcagctttcagggctctgaaaccccattccctgctctgaggaacagtgtgaaaaaaagtcttttaggagatttacaatatctgttcttttgctcatcttagaccacagactgactttgaaattatgttaagtgaaatatcaatgaaaataaagtttactataaataatatttcctatggggtcttcattgccagagctgtctagttcatagaatgagat

SEQ ID NO: 93539 - DNA, 1011 bp, Homo sapiens
ttttttttttttaaaaacaaagaaggacacatttattatttgttgtgcacctttagaaatggtccacaggtccactgcagtgcacaagctgctgcatgcacaccgcacgtgacaatccagtctgcctgactcccaggacagcctgtgtgatatgcaaaatgccattcccatgagggcgcatcatgtttcccaggagctctgaaggacacagatagagcttgtgctctaggctgcccccctgttcccgtgctggctccatgctggtgtccagaatgagccagttcacactccagtgccacgtggggggagaagtggctcccaaactcccctgctgacctccccccggcccctaggtgtaccttccaagtcagatgacagtcataggctaacatccccagctttgcctggaactcaggaaaggatacttacgggtagacagaaagattctgcagtgggcatggacttggccattgaagaccctgagaggacatcttgtccaccctctccaggctaggccctgtctgtgctgcctggagccagaagaaaaagattccagccttggaatctgcagggagggagactccttgcagtgagctttcttgcatttcattctagtatttgccacagatgctgatttcttgcctgagtcatatatattgaagtttttgctcatttcttactaggcttaagaaattggaattctctgccttacaaatcccaaagggctaaacatgcctccaagcccatgaacaagctttgagcatctgaaggacaaaaccccagctcctaaaacgttcatgagcatccactttctgctcagcctggaagagaaggagcactgctgccctctggtggtcaggcagcagagcatctaggagccacccaagggagctgggtcccctttgctttgtctttgggacagcagctttgagtattaggtcaatggatgtcctttcactgttcctggaacatggcaagcttgtttttgcctcagggctctctcctcgtgcc

SEQ ID NO: 93540 - DNA, 697 bp, Homo sapiens
tatttcatcaaatccaagatataccaattgtaagatgcaccattattatatgcatcactgataattttatgcatcactgatatttttcaaaaggcatcctgaatgttataagaagctgactgatatcagagatgttagaataggatctcagaacggatgaaatatgttatgaaatatggttatggttatgcaaatacctagtcataacagtcatcaatagaagtgtagctcctttttgcccacctcaaaggcaaagcctgtgtcatctttatacccactatggaacctaagactggatcatgatggaatgatggcaataaaaaacataactgatatttactgagcactttatttgtgttgcagcgcaactttatatgaattaatactcaagataacttttattgcttgttttggtaagtactattattcccactttgcagataagggtactgagacttaaagagaagttaaacatctcaaccaagttaggaagatgcttggattacaaacccaagtctatctaatgctagatctacaccttctaagccactgtgttacactgtccttaaggagggtcaggttgtgggtgtcaagactacaaaggcaagtaacacacgtgagaagctcaggccagaatcagagagaaggatggtcaagagttttggagatgaggtaacttaaagaactggctcgtgcc

SEQ ID NO: 93541 - DNA, 1065 bp, Homo sapiens
cgggtcgacccacgcgtccggcgcgagacccagcctaaagagagcccggagccagcgtgggaggccgctgccgtcgcgcgccttgccatcagcccacaaagacatgactaccaacgcgggccccttgcacccatactggcctcagcacctaagactggacaactttgtacctaatgaccgccccacctggcatatactggctggcctcttctctgtcacaggggtcttagtcgtgaccacatggctgttgtcaggtcgtgctgcggttgtcccattggggacttggcggcgactgtccctgtgctggtttgcagtgtgtgggttcattcacctggtgatcgagggctggttcgttctctactacgaagacctgcttggagaccaagccttcttatctcaactctggaaagagtatgccaagggagacagccgatacatcctgggtgacaacttcacagtgtgcatggaaaccatcacagcttgcctgtggggaccactcagcctgtgggtggtgatcgcctttctccgccagcatcccctccgcttcattctacagcttgtggtctctgtgggccagatctatggggatgtgctctacttcctgacagagcaccgcgacggattccagcacggagagctgggccaccctctctacttctggttttactttgtcttcatgaatgccctgtggctggtgctgcctggagtccttgtgcttgatgctgtgaagcacctcactcatgcccagagcacgctggatgccaaggccacaaaagccaagagcaagaagaactgaggagtggtggaccaggctcgaacactggccgaggaggagctctctgcctgccagaagagtctagtcctgctcccacagtttggagggacaaagctaattgatctgtcacactcaggctcatgggcaggcacaagaaggggaataaaggggctgtgtgaaggcactgctgggagccattagaacacagatacaagagaagccaggaggtctatgatggtgacgatttttaaaatcaggaaataaaagatcttgactctaaaaaaaaaaaa

SEQ ID NO: 93542 - DNA, 996 bp, Homo sapiens
ggtcttggacaagtgaggggacacaggcccacaaatacttatgtcatatttagattcagttgcatcaaagttattgcaaatggtgaaaaaattatcccagtccttttgcagtaattttaaatatctaacaaaatattcaagaaaacaggtttctgatgaaatcaaaaagtcaagaagaactgtggaatcaaatcctatatttttcaagaagaacaagaaaatacagtgaggattatagccattttcatgagtgtgatggtcccacatttcttttccctgagtcaagctttcagtggcttcacatcctctggtcagtgttaagtagatgcccagtgatgccttggcagcctccagcatgtcatcgtcttgttctatgaaaacccgagacagccatttgcacggattgtgtaattgcagagagggctgaagatgaggctttaagaaggtcagtaactcagacatgaacctctgtaagtcaactttcatttcacttgctgaagaataattttgaaacttgatttctaaggatttcattataactaagcttgctgctctaaggatcacatgatctggactagtgataagttcacattcaggttgaacttcatcacctccaaaaaaggaatgtttttcataaacagacagtgtcttcaacaaccccgaattcacagcttgcaaaacagcattagctaaagccagcatgtccaccgctacatgatggtctggcggcattaaggcaggcacagatccacgacagaggtcttcacccactttacagagaaggcactttttgaggaatatgatgaccttccttttaacaaaagcctgaataggccaggtaataacttctagcatgcaagatggtttcaaaaataaaatcctctggcaagtgaaatgtaacttcaggtggattctggaggcgatgagaagctcaagcaactccagaaaacacatcaggatgtttactattttagaagtatcccggcagttttcaaa

SEQ ID NO: 93543 - DNA, 747 bp, Homo sapiens
  misc_feature (1)...(747): n = a,t,c or g
ctggaccacattaaaagttttattgggctaaaatcaaaaacatctgacaagtttttgacttgtctttctcatgatttaatgtcccagcaganaactgggaacctaattctgaccaaaaaggaggaattgtttggctaattggaagtgacagaaaccttgggagaaagcaaccgcataccaaggataattataagaaggtaacatgggccctaaaggatagtgtcaagaaacctgaaacccccaaatgaggtgagacttgcaaaaaatgctaaggaaggacaaaaaacaggccttttaaaattctgttcagaaccagaagatgatcaagaaagggaaatgcccactagcagcttctactgtaaggttagagctgacagagaaagaactccttaactactatttgcttcattctctacaaaggaaactagagaagtgggttgacgtaatagaaagaacatgtgtttgtggggccaggcaaacctgggtttaattctgtttcaacactgcttaacaaaatttatgggaggctattgttttggattgggctcctgcaccaggcccctccggaccaaaccaaaatggagtcacttcattacttaaaactccaggtcactgaaccaaaacttaagttgtttattctggaccttccaagaaattcagggaggggagaaaacanccaaattttccaaacagggccagtttttaattcagccttgattaagggagttcctctctttttttaaccct

SEQ ID NO: 93544 - DNA, 1599 bp, Homo sapiens
tttgcaaacgccacagtgatgccctgcagaaaagctgtggcagaatccccttgatagtccccagcactcttcacatcactctccccatcaccagacaaccacatcagagcctgactgacgatgagatgcaggtaaaggtaacaagacaaggcccaggctcgcaagcttctgtccccaaaaggccacctgcttgacagccacaggtgtcacagctgtaactgggttcattttggccaagagataggtaaagtttaaaatattgataccctgttaactataatttcataactcctattttttaaagataatttcttcaaattccaaaagttttaaacagcaacagcaaattgttactggtgttaacaaattgttaaacagcaacagcaaactcttactgtggctggtcaccacagtgtagatacagtccgggctttctctgtgctttgcagacctcagtgagacaccagagggcagggcaggtgtcccagggtgcccacactcgtgtgacggtgtggcatcaggcaggccctgcagtcccagttctgctggttaacctgccacatgcacttctgtcctgacacacaaggacggcagggcaagaccgtaaaccatgaccttgtctttgtaaagaaaggcccagagcctgagaaaagcaggcctttagcaggaagggctctgccctcctcacctcagagcaaatccatttgccgcgttctgaagctcattaatagacctcctcaggccaaagagaacaatgtccccaccaaccctccctaacagtcacagatacacttcattgtccggacttacaggtcagttaatcagaagcctgagctctggaatattgtcaaagaaatggagttttgagtagtgagtacatggtgtactctcccaaatgcagcctaatcttagtaaccttgaagtttatcattctttaaaaataaatagaataccaatggtttagatattccaacaaagaatgctagaaacaaatgtctaatctcgattattagctttaccaaccctgtgaacactgaggttgcagaactgccaggttaatccctgtggcctagactactgaggattctgatagcacatgtaagactaagcactcttcaagctgtaataaagcatccacatgtatctgtgatgattttcattgctttagcattgcagccatgtaacaactgcagaaagaaggtatttttaaaaatacaatagactacactttttggatcacagagaaatacagatgcactctgagactgcctatgtttataaacatgttgtgtcccctaactgaagtgacaggtcttctggaattgacattaagaagtgtggatagtcatatcacacgcaatgtatttgttttcagcagtgagcagaccgtacaggagcagcacaccaggagccatgagaagtgccttggaaaccaacagggaaacagaactatctttatacacatcccctcatggacaagagatttatttttgcagacagactcttccataagtcctttgagttttgtatgttgttgacagtttgcagatatatattcgataaatcagtgtacttgacagtgttatctgtcacttattt

SEQ ID NO: 93545 - DNA, 2148 bp, Homo sapiens
aaaacctccagcaggttttaggaagtattcatgtatttttctggttactttctgtcatctctaattgaactcacctgatgaaggttcagtgttctggggccagaatttatgattttagatcaccttctttggaaccttagatcactgtgttttgaaatcatgagtttgcttttaacttcatagggtcaactttaaaatgatatgcactgttaattttaaagcatttgctgcagataattaaacttagaagtgcctttgactttaggatacaaatattacagaagaaaatataatttcactttttaaaattggggtgggaaaatcccattgcatatttgaaataggcttttcatactaagcttcatagccaggagtccccagagtcttgttcctctgaaagccactggggagtggcctctggggtgctgattccacagaggtgtatgctgtagacaggagagtgccatctatgccaaaactcgccctcaaaaacaaacaaggcttgctgggaggcgtgctgggcttggccatcagtatttccagtgtggtaaactattgctggcacttccccctggaaataactaatgaggttacgagttgggcacctgcacagatgtccttctctcatagttcctaatgcttaggaatagaggagaaataaaaaaatggattctctcaaaacactgccatttgaatagcgacagaagtgctcccccagcccccaactttggacagcaaagttgaggagaatgagcagacacagttgtttgcttgatctgaatctctctaaagtaaagtatttccaaactgtgtgacaagagcctacctaccactgtagcggtcaaagctgaagcttcttacagcagtgaaacggggcaccacctcccccacactcctcattccccgcttaaaacatggatactttcaaatttgactgtttcttaaactgccatcctaagatatggaaaatttttatagtaaagtgtctagttagcttatttccttttctaaaacaagtgttttcaagataactgtattttacctttatatgtactgaatagctgtttctttttgaattatttgccttttaaaatttgataatgtctctggatataacaggacaggagttcttaaaaaatatcttaagaaattcactttatgggtaaacccaaggtttttgccaacttgttgcctagaaaataagggctagtttcagtttatacaaatagaattattaaacattttacagtccttgattagaaaccagacccaatctccttataacaccacagcgtatcctgccattgacagtgtaatcacaattctccctttttcatttagctgcttttttattattactaaatgttttggattgagcatttttccctctgtaattttcttccttcacgtttattttattttaactcttgtagtattttattgttgttaatttacaagtttaaaaatattaggtactattaataatggttaaaaatagaaaaatgcatatttttgtatgataatcaaatgtaaaatacttttatttttgctggacagttgttatatcatgattattgtgctacagtttattgtgcataatatgaaaaacaactatgacagccttcagtcgggccagggtgaagctgcttataccacctctgccgtcagagggacatgtggtgacagcagtggtgtggctgcacagggcgcactagagagagctcagcacccctgctgcccgccagcagagcccgtgctgagggaatgccgcacagatgctgatgcactgggtgaaatttctagtattgaacgtaaaggtgtacagtgtcttgctgttattttatgatggaaactgattttgaaaccaaaaatagctaactaactttatttaaggaaaggatattaatttgtactaacagagggtgaaagctgttcacatttgtcaacaaaatctgcttgctgcagtagtaacctcaagtggttaaaacttgatttcccgagaaaactaaaacctttgtgcctaaaattgatgacttgagttcaagtgggatgagcaagaagatgtgttatcttgttgttcaacagtattgagtgtgaaggaaattttgatggcttaataaaattccacagcgactgttaaaaaaaaaa

SEQ ID NO: 93546 - DNA, 2395 bp, Homo sapiens
tttcgtgtcaccagcacttacggcactgaaaactcgctgctgccccaacctggcttgacaggcttggtctctgcaagtggctctcagccccttcttctttcctgcctcaccttccaattcgtttgccgccgccgtcccgcagctgctgtttccggagttgccccttccccatgttccggggcaggagtccgcaaagcgaagatccgcccgccggttcctcatcatgtccgaactgactaaagagctgatggagctggtgtggggcaccaagagcagccccggtctctcggacaccattttctgccgctggacgcaagggtttgtgtttagtgaatcagagggatctgcattagaacagtttgaaggtggcccctgtgctgttattgcacctgttcaggcatttcttttgaagaagctcctgttttcttcggagaagtcttcttggcgggattgttcacaggaagagcagaaggaactcctttgtcataccttgtgtgatattttagaaagtgcttgttgtgaccactctggatcatactgcttggtttcatggttaagaggaaagacaactgaggaaactgctagtatttctgggagtcctgcagagtctagttgccaagtggaacattcttctgccttggctgtcgaagagcttggctttgagcgatttcatgcattaattcaaaaaagatcgttcagaagtttaccagaattaaaagatgctgtcttggaccagtattcaatgtggggaaataaatttggagtattgctttttctgtattctgtattactgacaaagggcattgaaaacataaaaaacgaaattgaagatgcaagtgaacccttgatagatcctgtatatggacatggcagccaaagtttaattaatctcctgctgacgggacatgctgtttctaatgtatgggatggtgatagagagtgctcaggaatgaaacttcttggtatacatgaacaagcagcagtaggatttttaacactaatggaagctttaagatactgtaaggttggttcttacttgaaaatctccaaaattccctatttggattgtttggcaagtgagactcacctcaccgtattttttgccaaggatatggctttagttgcccctgaagctccttcagaacaagccagaagagtttttcaaacctacgacccagaagataatggattcatacccgattcacttctggaagatgtgatgaaagcattggaccttgtttcagatcctgaatatataaatctcatgaagaataaattagatccagaaggattaggaatcatattattgggcccatttcttcaagaattttttcctgatcagggctccagtggtccagaatcttttactgtctaccactacaatggattgaagcagtcaaattataatgaaaaggtcatgtacgtagaagggactgcagttgtgatgggttttgaagatcccatgctacagacagatgacactcctattaaacgctgtctgcaaaccaaatggccatacattgagttactctggaccacagatcgctctccttcactaaattaatttgtctaagtatttataaggaagatcttaataacagatgttgaaagaaggagtcaagactggcaattggctggattaagctaaacactggtatcactgattaactgtaaataacaattaaaaacacattttcagtgtttatgatatgtttaaattatttgtcctaaagctttatgttaaagattatcctattttaccccttcgtgtgaaatttactagcaaaattaagctttcatcaaagttcatcacttttgcattcagatacttggtcatttacttaccaaattacaaacgcaatactacagcatttgtatattaagtatcacagttactattgataaactacttttgggttttatttcattgaggcactttttttattgtttgaatgattccggcttgtaatatatcagcctctacaatgaaatgcagaagagttcatttttctaagatctgtttttcattagaaatattgacaaataacacattgtcaacctggatcctttgacaatttacttaactctggcatgttcacaaaaagtagaaactctaagagaccattaccatttattcacagatgtataggggatgtattctaaaaactgacagaaaagagaatctgatagtcaacactgttaacttttactgtgtaattgccaaatacactttttccaaatttgtcccaacagccctgtaagccagctttcttctatatttataaacacgataaatgcatgagaagatctgttattacattagtatattacgttatttattatgatcctagttgatggcctaaataaacacctttttctttaaaaaaaaaaaaac

SEQ ID NO: 93547 - DNA, 580 bp, Homo sapiens
ctgacgttgtcatccacccatcagtgcataaccttgttctccgcgtgctctgttcacagacaccttattgactacgtatgattgattcattaacacgaaacccacggccgccagcactgtcactgcggcctgaaccaagctcatctcacacatgcattttctctgcaagacacgtcaccgcctccttgtgcttagggagctccatgcttgaggctttcttaaatggcaaaatcaccaacgaaaagcaaaaagtgtgaaaactgtggcaccaatcaggccgaggagaggacacttgttggcccagaaaatccatatcaggtgactcaagtttttccccagtctgtgcacgtggatgtctgtggatcaccaagaaaataccacgagtatctgttttgggagttacaagtaaatattagcaggtggtcgaatttgcaaatacggaatctccaaatgatgagaccgactgtatgtgaacaagcagaactggcagtgctcccagtgtctagagagtgcgctcagggtttctgtctaagctaagcaaagtcaacataatgattgcttttagactctttgaaatcag

SEQ ID NO: 93548 - DNA, 1944 bp, Homo sapiens; identical to SEQ ID NO: 59366

SEQ ID NO: 93549 - DNA, 920 bp, Homo sapiens
  misc_feature (1)...(920): n = a,t,c or g
ttttattttttttttctgctttaatgttaaaaatatttattttttttcctaaaagatcacacaaaagttgggaagagaaggatgtcaattagactacatcaaaatctgggcagagggaggacaaagagctgcctaaagaaactggtagctggagcaaactgcagagatcaagatgaccctagtccacggaaccagcagcccaggtcagccacattcaggagcaccaccgaggcacggcagggagagcaaagttgctggccccaatcattcctccttttcagggcaggagaggcagaagctcactctttagacatgttcttgatggtcttgtgctctttcatggccttctcccaatcgctgccattgaattcctcagtgaccatactccgcacagtgccctcatccaggcagtggggggcaattccgaagcctccggggtttgatcgtggagtatagaagctctgaacgccacatctcttacagaaggtatgctgggctttgtgagtattgaacgtgtaagtcgttatgtgctcagctcccttcaggagcttgaagcgagaagctggaacaatgaagtgtctattctgcttcttcttgcaaatgctgcaactacagaaagacagagcaaattccagattgtgagcagccacctgcatcctctatgcctgagcggcccagccatgagagccagccgaccccacagatgatgcccctttcagcaccatccagggccgaggagctggggcaaaggcctggatagcagtgcctctggtttgcaggtacagcagagcccaggggggtcccaagtcagcagtcgaggttctgcaatgctcagaacacaggaccaacagacaggtctgtactgcccacccctcagttcgaattccaccacactgactaggggnctacgagtcttctat

SEQ ID NO: 93550 - DNA, 348 bp, Homo sapiens
  misc_feature (1)...(348): n = a,t,c or g
gactngaaggcggctggtcaccgactcctccttgctgccggtcatccttccatgcccagctctgattgcctcctctgggaaggctccctggagttacgtcccctgcagcatatttcctcactgctcgtgcttgtctctaccacatgcctgtttgctttcccgagagtccctatagcctttgaaagcaagagctgtctcatttatcattgccattgcgccttcactgtgaggcattatatgtgctcctcacacactggatgaatggataaaaccatcgtcttatgactcatttgtcagggattattgataatcaacttaataaatgaactgctattagcgacgccgatn

SEQ ID NO: 93551 - DNA, 2483 bp, Homo sapiens
tttcgtagaagctgggggtggagccggaggaggaaggcggcggcgacgacgaggaagacgccgaggcctgggccatggaactggcggacgtgggggcggcagccagctcgcagggagttcatgatcaagtgttgcccacaccaaatgcttcatccagagtcatagtacatgtggatctggattgcttttatgcacaagtagaaatgatctcaaatccagagctaaaagacaaacctttaggggttcaacagaaatatttggtggttacctgcaactatgaagctaggaaacttggagttaagaaacttatgaatgtcagagatgcaaaagaaaagtgtccacagttggtattagttaatggagaagacctgacccgctacagagaaatgtcttataaggttacagaattactggaagaatttagtccagttgttgagagacttggatttgatgaaaattttgtggatctaacagaaatggttgagaagagactacagcagctgcaaagtgatgaactttctgcggtgactgtgtcgggtcatgtatacaataatcagtctataaacctgcttgacgtcttgcacatcagactacttgttggatctcagattgcagcagagatgcgggaagccatgtataatcagttggggctcactggctgtgctggagtggcttctaataaactgttggcaaaattagtttctggtgtctttaaaccaaatcaacaaacagtcttattacctgaaagttgtcaacatcttattcatagtttgaatcacataaaggaaatacctggtattggctataaaactgccaaatgtcttgaagcactgggtatcaatagtgtgcgtgatctccaaaccttttcacccaaaattttagaaaaagaattaggaatttcagttgctcagcgtatccaaaagctcagttttggagaggataactcccctgtgatactctcaggaccacctcagtcctttagtgaagaagattcatttaaaaaatgttcatctgaagttgaagctaaaaataagattgaagaactacttgctagtcttttaaacagattatgccaagatgaaaggaagcctcatacagtgagattaataatccgtcggtattcctctgagaagcactatggtcgtgagagtcgtcagtgccctattccttcacatgtaattcagaaattagggacaggaaattatgatgtgatgaccccaatggttgatatacttatgaaactttttcgaaatatggtgaatgtgaagatgccatttcaccttacccttctaagtgtgtgcttctgcaaccttaaagcactaaatactgctaagaaagggcttattgattattatttaatgccatcattatcaactacttcacgctctggcaagcacagttttaaaatgaaagacactcatatggaagattttcccaaagacaaagaaacaaaccgggatttcctaccaagtggaagaattgaaagtacaagaactagggagtctccactagataccacaaatttttctaaagaaaaagacattaatgaattcccactctgttcacttcctgaaggtgttgaccaagaagtcttcaagcagcttccagtagatattcaagaagaaatcctttctggaaaatctagggaaaaatttcaagggaaaggaagtgtgagttgtccattacatgcctctagaggagtattatctttcttttctaaaaaacaaatgcaagatattcccataaatcctagagatcatttatccagtagcaaacaggtatcctctgtatctccttgtgaaccgggaacatcaggctttaatagcagtagttcttcttacatgtctagccaaaaggattattcatattatttagataatagattaaaagatgaacgaataagtcaaggacctaaagaacctcaaggattccactttacaaattcaaaccctgctgtgtctgcttttcattcatttccaaacttgcagagtgagcaacttttctccagaaaccacactacagatagccataagcaaacagtagcaacagactctcatgaaggacttacagaaaatagagagccagattctgttgatgagaaaattactttcccttctgacattgatcctcaagttttctatgaactaccagaagcagtacaaaaggaactgctggcagagtggaagagaacaggatcagatttccacattggacataaataagcatattcagcaaaaaggtctgaaaagcaagggaataccattattttcggattagcggtttattaagctcttctatattaaacactaatagatattcaataacggagtaaactgttccagataaagcaagaatagttgcaagaagtaaattctggcacaaagcgtaaaaatataacagaagaaataatgtaaaatacttatcttttatgtctaaagccattttatatatacttttcaattaaaaggatttcattgtccaaa

SEQ ID NO: 93552 - DNA, 1302 bp, Homo sapiens; identical to SEQ ID NO: 59767

SEQ ID NO: 93553 - DNA, 1872 bp, Homo sapiens; identical to SEQ ID NO: 59204

SEQ ID NO: 93554 - DNA, 4732 bp, Homo sapiens
gaaaagccaacgctccacgcccattttcgtcagggaatatgtacccatcggctttagataaataaggaaacagggggctgaaccagaactaagagaagattgggcagagagaaggcaatggcgagtccacctaggggctggggctgcggagagctgctgctgcccttcatgctcctggggacgctgtgcgagccaggatccgggcagatccgctactcgatgccggaggagctggacaaaggctccttcgtcggcaacatagccaaggaccttgggctggagccccaggagctggcggagcgcggagtccgcatcgtctccagaggtaggacgcagctttttgccctgaacccgcgaagcggcagcttggtcaccgcgggcaggatagaccgggaggagctctgcgctcagagcccactgtgtgtggtgaactttaacatcttggttgagaacaaaatgaaaatttatggagtagaagtagaaataatcgatattaatgataacttcccgcgtttccgggatgaagagttaaaagtaaaagttaatgaaaatgcggctgcagggacacggttagtgcttcccttcgcgcgggatgcggatgtgggtgtgaactctctccggagttaccagctcagctccaatctgcacttctctctggatgtggtaagcggaactgatggacaaaagtatccggagctggtgttggaacagcccctagaccgcgagaaagagactgttcacgacctcctcctcacagctttagatggcggagacccggtactctccggcaccacgcacatccgtgttacggtcctcgacgcaaacgacaatgcgcccctgttcaccccatccgagtacagcgtgagtgttccagagaacatacctgtgggcactcggctgctcatgctaaccgccacggatccagatgagggaataaacgggaaattgacctactcttttcgcaatgaagaagaaaaaatttcggagactttccaacttgattccaacctgggggaaatctcaactctacaatcactggactatgaagaatccagattctacctcatggaagtggtagctcaggatggaggcgctcttgttgccagcgctaaggtggtggtcacagtacaggacgtgaatgacaatgcccccgaagtgatcctcacctctctgaccagttcgatctctgaagactgtcttcccggaactgtaatcgcgctgtttagcgtacatgatggtgattctggagaaaatggtgagattgcatgctctattcctaggaatttgccttttaaattggagaagtcagttgataattactatcacctattaacaactagggacctggacagagaagagacttcagattataatatcactttaaccgtcatggaccatggaaccccgcccctctctacagaaagccacatccccttgaaagtagcagacgttaatgacaacccacccaatttccctcaagcctcctactccacctctgtcacagaaaacaatcccagaggtgtctctatcttctctgtgacagcccatgaccccgacagcggcgacaacgctcgagtcacctactccctggctgaagacacatttcagggggcgcccttgtcctcctatgtatccattaactctgacaccggtgtcctgtatgctctgagatccttcgactatgagcagttgagagacctacagttgtgggtgacagccagcgacagtgggaaccctccacttagcagcaacgtgtcgctgagcctgtttgtgctggaccagaacgacaatacgcctgagatcctgtaccccgccctccccacagacggttccacgggcgtggagctggcgcctcgctccgcagaacctggctacctggtgaccaaggtggtagcggtggacaaagattcaggccagaacgcctggctgtcctaccgcctgcttaaggccagcgagccaggactctttgcggttgggctgcacacgggcgaggtgcgcacagcgcgagccctgctggacagagacgcgctcaagcagagcctcgtggtggccgtcgaagaccatggccagccccctctgtcagccaccttcacggtcaccgttgccgtggccgacaggatccctgacatcctggctgacctaggcagtatcaagacccccattgaccctgaggatctggacctcacactctatcttgtggtggcagtggctgcagtctcctgcgtcttcctggccttcgtcatcgtgctgctggtgctcagactgaggcgctggcacaagtcacgcctgcttcaggctgaaggcagcaggttggcgggtgtgcccgcctcgcactttgtgggcgtggatggggttcgggctttcctgcagacctattcccacgaggtctccctcaccgcggactcgaggaagagtcacctgatctttccccagcccaactacgcagacacgctccttagtgaagagagctgtgagaaaagcgagcctcttctgatgtctgataaggtagatgcaaacaaagaagaacggcgagttcagcaagccccgcccaacacggactggcgtttctctcaggcccagagacccggcaccagcggctcccaaaatggcgatgacaccggcacctggcccaacaaccagtttgacacagagatgctgcaagccatgatcttggcgtccgccagtgaagctgctgatgggagctccaccctgggagggggtgccggcaccatgggattgagcgcccgctacggaccccagttcaccctgcagcacgtgctgcagggtgaactggggtccgactaccgccagaatgtctacatcccaggcagcaatgccacactgaccaacgcagctggcaagcgggatggcaaggccccagcaggtggcaatggcaacaagaagaagtcgggcaagaaggagaagaagtaacatggaggccaggccaagagccacagggcggcctctccccaaccagcccagcttctccttacctgcacccaggcctcagagtttcagggctaacccccagaatactggtaggggccaaggccatgctccccttgggaaacagaaacaagtgcccagtcagcacctaccccttcccccccagggggttgaatatgcaaaagcagttccgctgggaacccccatccaatcaactgctgtacccatgggggtagtggggttactgtagacaccaagaaccatttgccacaccccgtttagttacagctgaactcctccatcttccaaatcaatcaggcccatccatcccatgcctccctcctccccaccccactccaacagttcctctttcccgagtaaggtggttggggtgttgaagtaccaagtaacctacaagcctcctagttctgaaaagttggaagggcatcatgacctcttggcctctcctttgattctcaatcttcccccaaagcatggtttggtgccagccccttcacctccttccagagcccaagatcaatgctcaagttttggaggacatgatcaccatccccatggtactgatgcttgctggatttagggagggcattttgctaccaagcctcttcccaacgccctggggaccagtcttctgttttgtttttcattgtttgacgtttccactgcatgccttgacttcccccacctcctcctcaaacaagagactccactgcatgttccaagacagtatggggtggtaagataaggaagggaagtgtgtggatgtggatggtgggggcatggacaaagcttgacacatcaagttatcaaggccttggaggaggctctgtatgtcctcaggggactgacaacatcctccagattccagccataaaccaataactaggctggacccttcccactacataatagggctcagcccaggcagccagctttgggctgagctaacaggaccaatggattaaactggcatttcagtccaaggaagctcgaagcaggtttaaggaccaaggtccccttgagaggtcagaggggcctctgtgggtgctgggtactccagaggtgccactggtggaagggtcagcggagccccagcaggaagggtgggccagccaggccattcttagtccctgggttggggaggcagggagctagggcagggaccaaatgaacagaaagtctcagcccaggatggggcttcttcaacagggcccctgccctcctgaagcctcagtccttcaccttgccaggtgccgtttctcttccgtgaaggccactgcccaggtccccagtgcgccccctagtggccatagcctggttaaagttccccagtgcctccttgtgcatagaccttcttctcccacccccttctgcccctgggtccccggccatccagcggggctgccagagaaccccagacctgcccttacagtagtgtagcgccccctccctctttcggctggtgtagaatagccagtagtgtagtgcggtgtgcttttacgtgatggcgggtgggcagcgggcggcgggctccgcgcagccgtctgtccttgatctgcccgcggcggcccgtgttgtgttttgtgctgtgtccacgcggctaaggcgaccccctcccccgtactgacttctcctataagcgcttctcttcgcatagtcacgtagctcccaccccaccctcttcctgtgtctcacgcaagttttatactctaatatttatatggctttttttcttcgacaaaaaaataataaaacgtttcttctg

SEQ ID NO: 93555 - DNA, 1200 bp, Homo sapiens
cacaatttctccaaaagagatgcacaggtgattgagctgtaggtgagcagtgacgtgaagaggggttctagccccgtggaaaacagcccatggttaacatctcaggatgttctgcattcaaacacccaaggctggtaatgaactttcacatggactgaatattggaggcaaataatagaaggaatagaatatacagtgcctctgtcctgaaggaaaatatcatgcctcttctggaagaaacggactgcacagaggaaggattgagcaatttagcctgcagtggaagaaggtggacaccaaaagcttcaccctgtgttggagctgttcatgcttccatgaggccatggtgtccatgtccgtggaacctaccacagaaaatggctcatgaaaaggggaatccgacccaacacacagcttcctacacactgccatcttatcaacagttaggcactactttgtagaacgattagcttcaccctcttagctgccaggagatcccttcttaaagatggactatgtgaagattcgggagtcctgaaacatggggactccgggatggtctctagccctatcgatgatgaacactggccttctggaggggaaatggcagtctgggctggcgtggtaggaagggctttggtgttcatggaatgggcctgctgctctcagaccttcaaaggatggaaccaacgaaggaccaaatgagaaagcagatgctgtgccttgcagagggccatgaatgtcagttattatttttctccttatacaattattttgtggttattattacaatgtacatggctgttgcatagaagacatgactggtggaggctgaggaaagccatgacattctacaattgccatcaggctaaggccccgtgagcatttctctcccttgtaatattaaccctgtatttctgggatcacatcacggaatattctttgcctttccactttccaggaaatctctcggactgggctaccctccttgtgtgtgatgaaagatgagctatatttcagaacaaagtgctgtgttgtcataatttgcctggactcccagggcgtctcttacccaacttgataacgatgctgttcattagcagcctttgttaactgataaccaagagcggtaatgtgatactcataagcaattttctgtgtgtaggataaaataaaccatcttgtatgggaaaaaaaaaa

SEQ ID NO: 93556 - DNA, 2025 bp, Homo sapiens
  misc_feature (1)...(2025): n = a,t,c or g
cgctnccagcgccgcgcgatgtagcgcgggggaccgcggcccccagcagagcccgcctgcccggcttgtctaccatcagagggagatctctgccccctggggctgagagaccccaacctttccccaagctgaagctgcagggtattgaggtaccagccagatgtcttcccacaaaggatctgtggtggcacaggggaatggggctcctgccagtaacagggaagctgacacggcggaactggctgaactgggacccctgctagaagagaagggcaaacgggtaatcgccaacccacccaaagctgaagaagagcaaacatgcccagtgccccaggaagaagaggaggaggtgcgggtactgacacttcccctgcaagcccaccacgccatggagaagatggaagagtttgtgtacaaggtctgggagggacgttggagggtcatcccatatgatgtgctccctgactggctaaaggacaacgactatctgctacatggtcatagacctcccatgccctcctttcgggcttgcttcaagagcatcttccgcattcatacagaaactggcaacatctggacccatctgcttggtttcgtgctgtttctctttttgggaatcttgaccatgctcagaccaaatatgtacttcatggcccctctacaggagaaggtggtttttgggatgttctttttgggtgcagtgctctgcctcagcttctcctggctctttcacaccgtctattgtcattcagagaaagtctctcggactttttccaaactggactattcagggattgctcttctaattatggggagctttgtcccctggctctattattccttctactgctccccacagccacggctcatctacctctccatcgtctgtgtcctgggcatttctgccatcattgtggcgcagtgggaccggtttgccactcctaagcaccggcagacaagagcaggcgtgttcctgggacttggcttgagtggcgtcgtgcccaccatgcactttactatcgctgagggctttgtcaaggccaccacagtgggccagatgggctggttcttcctcatggctgtgatgtacatcactggagctggcctttatgctgctcgaattcctgagcgcttctttcctggaaaatttgacatatggttccagtctcatcagattttccatgtcctggtggtggcagcagcctttgtccacttctatggagtctccaaccttcaggaattccgttacggcctagaaggcggctgtactgatgacacccttctctgagccttcccacctgcggggtggaggaggaacttcccaagtgcttttaaaaataacttctttgctgaagtgagaggaagagtctgagttgtctgtttctagaagaaacctcttagagaattcagtaccaaccaagcttcagcccactttcacacccactgggcaataaactttccatttccattctcctagctggggatggggcatggtcaaacttagccatcccctcctcagcaaggcatctaccggcccctcacagagacagtactttgaaactcatgttgagattttaccctctcctccaaccattttgggaaaattatggactgggactcttcagaaattctgtcttttcttctggaagaaaatgtccctcccttacccccatccttaactttgtatcctggcttataacaggccatccatttttgtagcacacttttcaaaaacaattatataccctggtcccatctttctagggcctggatctgcttatagagcaggaagaataaagccaccaacttttacctagcccggctaatcatggaagtgtgtccaggcttcaagtaacttgagttttaattttttttttttcttggcagagtaatgtaaaatttaaagggggaaagatatttaatatttaatactaagctttaaaaagaaacctgctatcattgctatgtatcttgatgcaaagactatgatgttaataaaagaaagtccagaagaaaaaaaaaaaa

SEQ ID NO: 93557 - DNA, 1453 bp, Homo sapiens
ccgcgtcccagccatggcgacatcctcggccgcgctgccccgaatactcggcgcgggtgcccgggccccgtcgcgctggttgggctttctcgggaaggcgaccccccggcctgctcggccgagccgcaggacgcttggaagcgcgacggcccttatgatccgcgagtcggaggacagcaccgatttcaacgacaagattttgaatgagcccctcaagcactctgacttcttcaatgtcaaggaactgttttccgtgagaagcctcttcgatgcccgagtccatctgggacacaaagctggctgtcggcacaggtttatggagccgtacatctttgggagccgcctggaccacgacatcatcgacctggaacagacagccacgcacctccagctggccttgaacttcaccgcccacatggcctaccgcaagggcatcatcttgtttataagccgcaaccggcagttctcgtacctgattgagaacatggcccgtgactgtggcgagtacgcccacactcgctacttcaggggcggcatgctgaccaacgcgcgcctcctctttggccccacggtccgcctgccggacctcatcatcttcctgcacacgctcaacaacatctttgagccacacgtggccgtgagagacgcagccaagatgaacatccccacagtgggcatcgtggacaccaactgcaacccctgcctcatcacctaccctgtacccggcaatgacgactctccgctggctgtgcacctctactgcaggctcttccagacggccatcacccgggccaaggagaagcggcagcaggttgaggctctctatcgcctgcagggccagaaggagcccggggaccaggggccagcccaccctcctggggctgacatgagccattccctgtgatgttcactctcctcccaaagcaaaccacagccaagcctgtctgagctgggagtccccttccccagccctgggtcagcggcatcctcagtcgttgttacttactcagctgatgtcacagtgcagacatccaccgttccaccacagaaccagtggctgagcggaccaacgttgccatgtgcgtttgctctgtggggaacagagcacagagggtgagcgacatgtgcagaacggccccttggctgcagttaggacctcagtggctggtatggccaagctgctagaagatgctgctgtccctgtgatcccagcagccctcccttcaccgtgacccctgacctttgtcaggaaggtgcagtttttcttctcaatctaaatgcctttcaggtgggccgcttccttggctacctggttccagggggctgttttgtaatgagatgctgctggcaggccactcagaggctcccagctgggttggtgggacagccaggccagatgacctgattccagcaaaaataaaactcagatttgggcaaaatgaaaaaaaaaaaa

SEQ ID NO: 93558 - DNA, 1904 bp, Homo sapiens
cggccgcgtcgacggcagccatctttctcttgccgcgtgctggtgttggaggaccctccctgcttcagatttaccaacagcatgaatcaagaaaagttagccaaacttcaggctcaggtccggatagggggcaagggtacagctcgcagaaagaagaaggtggtacatagaacagccacagctgatgacaaaaagcttcagagttctctaaaaaaactggctgtgaataatatagctggtattgaagaggtgaacatgattaaagatgatgggacagttattcatttcaacaatcccaaagtccaagcttccctttctgctaatacctttgcaattactggtcatgcagaagccaaaccaatcacagaaatgcttcctggaatattaagtcagcttggtgctgacagtttaacaagccttaggaagttagctgaacagttcccacggcaagtcttggacagtaaagcaccaaaaccagaagacattgatgaggaagatgatgatgttccagatcttgtagaaaattttgatgaggcatcaaagaatgaagctaactaaaagtttggtttttggaagctggcatggactagatttaacaaatcagctatgtggttccaaagttttacagacatggagaacatcacctgttactagttcagtaatataaatattttgtatattaataatgctgtttgttcagcatttttcggtcatttgattttgcattttgcacttcctcccaggatatttttttggtcaaaatatgaagtattggtgcagtttgagggtgttttggtttttgattcctggtttttttgttttttgtttggggtatttttggtgtatgtatgtttatgtatgtgtgtgggtatgtgtgtatacagtggagagcaaattggaaaacagttctatttatcctcctccctccccagtagaaataaaaaaaatctttacatttgttacttttcttttccccccgtaagacacagaattaatggaaagtgagtatcttggatttcaaatctgaagagatttttaccattagtggtttgattttaatttgcttggttaactatcatatttttcatacacttctctggatttaaaatatcttgaggtattttgccactggcttcatgctggagtaatgggtaacatatctttggtatggttgccttagattaacttacctagtcagacccagaagaacttcttttactagcttgcttcctaaatgccttttttcctctccttttggtctccaaatggcctggtcagcttttggtaatattcttcctcatcttccacctagcttgagaaggatgttctccatatagagtttagcgagtgcctaatccctccttttgtaagattttgttccctcagcttgaggaacaacttcatcttcaactttttatttctccctgatgttacagtttggtagatttcaaactggaatagctagcatgtgcttgctaaataattttatgccagccttatcctgtatcctagctgttcttaacagcaggtacaaaaatgcctgtttttcagcaaggttgaaattgggaatgtccttttgaatcagaagaaaataggccatagactcatctcccagcacaaatgggcattctatgaaatggtactggccctaggaggatttcctcaaccactctcctactcttggccttgaacctacctctgggttggatcttactattgtagctgctcactataccctcctgcatgcttagaataatgctttgaggggagcactggtaaaacacagtatttatttttttacctcctttaagaggacttggaggtaagttgcattcattcactcaagtttccctcttgctgtctaatagaagcttactttttgctatatcagcatttgttacagc

SEQ ID NO: 93559 - DNA, 1404 bp, Homo sapiens
attcccgggtcgacgatttcgtggagcccggccgctgctcgcgggctgagtgtctgtcgctgctgccgcctccacccagcctccgccatggacctcttcggggacctgccggagcccgagcgctcgccgcgcccggctgccgggaaagaagctcagaaaggacccctgctctttgatgacctccctccggccagcagtactgactcaggatcagggggacctttgctttttgatgatctcccacccgctagcagtggcgattcaggttctcttgccacatcaatatcccagatggtaaagactgaagggaaaggagcaaagagaaaaacctccgaggaagagaagaatggcagtgaagagcttgtggaaaagaaagtttgtaaagcctcttcggtgatctttggtctgaagggctatgtggctgagcggaagggtgagagggaggagatgcaggatgcccacgtcatcctgaacgacatcaccgaggagtgtaggcccccatcgtccctcattactcgggtttcatattttgctgtttttgatggacatggaggaattcgagcctcaaaatttgctgcacagaatttgcatcaaaacttaatcagaaaatttcctaaaggagatgtaatcagtgtagagaaaaccgtgaagagatgccttttggacactttcaagcatactgatgaagagttccttaaacaagcttccagccagaagcctgcctggaaagatgggtccactgccacgtgtgttctggctgtagacaacattctttatattgccaacctcggagatagtcgggcaatcttgtgtcgttataatgaggagagtcaaaaacatgcagccttaagcctcagcaaagagcataatccaactcagtatgaagagcggatgaggatacagaaggctggaggaaacgtcagggatgggcgtgttttgggcgtgctagaggtgtcacgctccattggggacgggcagtacaagcgctgcggtgtcacctctgtgcccgacatcagacgctgccagctgacccccaatgacaggttcattttgttggcctgtgatgggctcttcaaggtctttaccccagaagaagccgtgaacttcatcttgtcctgtctcgaggatgaaaagatccagacccgggaagggaagtccgcagccgacgcccgctacgaagcagcctgcaacaggctggccaacaaggcggtgcagcggggctcggccgacaacgtcactgtgatggtggtgcggatagggcactgaggggtggcgcgcggccaggagcacgcatggtattgacttaaaaggttcattttgtgtgtgtgcacattgtgtgttttgtgtactcctgtgggactcccatggttgtaaataaaggtttctctttttaaaaaaaaaaaa

SEQ ID NO: 93560 - DNA, 1489 bp, Homo sapiens; identical to SEQ ID NO: 58930

SEQ ID NO: 93561 - DNA, 698 bp, Homo sapiens
cggacgcgtggggtgccggcgggagagctggcttggggcgctggcacctcctcttacagctttactcctgccagcttgggaaaaggccggagaaggtgaaattctgtgtgctccctccggcgagagactttgtcagctcccgcacagtaacatcctgaataaagtcaaaactcaaccaacaggtggaagtccaagaatccgagtggaggctcaccgaggcgaaggggccaaccatgggaaaggagagtggatgggactcaggcagggctgctgtagcagctgtggtcggaggagttgtggctgtggggactgtgctcgtggcgctcagtgccatgggcttcacctcagtaggaatcgccgcatcctccatagcagccaagatgatgtctacagcagccattgccaacgggggcggagttgctgctggcagtctggtggctattctgcagtcagtgggggcagctggactctctgtgacatctaaagttatcgggggctttgctgggacagctcttggggcctggctgggttcacccccttccagctgaacaccacactgaggcagggagttggctctcttggtggagatgactttcctgggcctctggatgacaatcttccaaaggacaagtctcctactcccaaaactatttaaggaagcatgaaaaataaagatgctggttatcttcaaaaaaaaa

SEQ ID NO: 93562 - DNA, 858 bp, Homo sapiens
gaatgtaaggaaaaaaaggttgagaccatgtacagcgcggggaattcggaaagggttccaagtgctttagtacccgacgctgtctgggaattccgggcgtttcggctccttggtcgcagaggcaggaggcgtgcgtggcaggagggttcgggttatatactcctaggtcctgggacagaatagttacgacctctgggacaggaactcttctctcttttgttaataaacttccaactccctcctcagacccgaccgcatgtctgtcatggacctcgccaatacttgctccagctttcagtcggacctggatttctgttcagattgcggctcggtcctgcctctgcccggggctcaggatacggtcacctgtattcgctgtggcttcaacatcaacgttcgggactttgaggggaaggttgtgaagacttcggttgtgttccaccaactggggacagccatgcctatgtcggtggaggaagggcctgagtgccagggacctgtggttgacaggcgctgccctcgatgtggtcatgaaggaatggcataccacaccagacagatgcgttcagccgatgaagggcaaactgtcttctacacctgtaccaactgcaagttccaggagaaggaagactcttgacctttttcctgggcaactctacagtccctccctcctttcggaaggtgaaggatactgggtttttagatgccttgtccatcctgtctggttgcaatgttttgctcccagaagagaatcagatcatcatgtggggattaccattgttcctggagtactcctacccttagttgaatttccttattaaagttatatttttctataagaccccgaaaaaaaaaaaa

SEQ ID NO: 93563 - DNA, 2001 bp, Homo sapiens; identical to SEQ ID NO: 59869

SEQ ID NO: 93564 - DNA, 719 bp, Homo sapiens
cggggccttcgcagagcatggcggcgggcgagcttgagggtggcaaacccctgagcgggctgctgaatgcgctggcccaggacactttccacgggtaccccggcatcacagaggagctgctacggagccagctatatccagaggtgccacccgaggagttccgcccctttctggcaaagatgagggggattcttaagtctattgcgtctgcagacatggatttcaaccagctggaggcattcttgactgctcaaaccaaaaagcaaggtgggatcacatctgaccaagctgctgtcatttccaaattctggaagagccacaagacaaaaatccgtgagagcctcatgaaccagagccgctggaatagcgggcttcggggcctgagctggagagttgatggcaagtctcagtcaaggcactcagctcaaatacacacacctgttgccattatagagctggaattaggcaaatatggacaggaatctgaatttctgtgtttggaatttgatgaggtcaaagtcaaccaaattctgaagacgctgtcagaggtagaagaaagtatcagcacactgatcagccagcctaactgaagatgatgtatgaaggagttggagttgttgaaaccaaggtgtccatgatccctccccactgaccttttctaagaaaattcttgtgcccgcattggtattaaatcctcgcattcagtcaaaaaaaaaaaa

SEQ ID NO: 93565 - DNA, 1085 bp, Homo sapiens
tctgacgaggtcttacggaagttcccgaaacttccggtggccggcttagttaggagctatggctaaacatcatcctgatttgatcttttgccgcaagcaggctggtgttgccatcggaagactgtgtgaaaaatgtgatggcaagtgtgtgatttgtgactcctatgtgcgtccctgcactctggtgcgcatatgtgatgagtgtaactatggatcttaccaggggcgctgtgtgatctgtggaggacctggggtctctgatgcctattattgtaaggagtgcaccatccaggagaaggacagagatggctgcccaaagattgtcaatctggggagctctaagacagacctcttctatgaacgcaaaaaatacggcttcaagaagaggtgattggtgggtggccccttcctccccccaacatcagtctgctgcagctgccagaaaacatgcctactactaccagcagaaagggagcagagcccagagcatcaccaggagtgcctgctagtgtactggcagcttgccaccccctcctctcccttcacccagacacgtggtagggatggaaaaggattcttcacagagcactctggcacaccatatcggagaaaacttgatagattagttaatggtttttcttgaattcgagaagcatagatctgttctccatattggtatgttctccctcaaccaagatcttctaaaaagaaataatattttagtcttctgcttgaggaactgactgtgaagcgacgcccagtgaaaaacatgttcttgcagcagctctggtggcagctgtccttgaggaacctttggtgtgtggtgggaagctatcagaacaagaaatgtaggcatttcccgtttttttggggggggggggggggggggccagggctctgccctcttgaaaggcatttacttgtttaacacttgtccagctacagtggggtacagtagctggctattcacaggcatcatcatagcccactagtctcatattattttccttttgagaaattggaaactctttctgttgctattatattaataaagttggtgtttattttctggtaaaaaaaaaaaa

SEQ ID NO: 93566 - DNA, 606 bp, Homo sapiens
ggaggacgacctttttccggttccggccttgcgagagtttgtgcggcgacatgaaactgcttacccacaatctgctgagctcgcatgtgcggggggtggggtcccgtggcttccccctgcgcctccaggccaccgaggtccgtatctgccctgtggaattcaaccccaacttcgtggcgcgtatgatacctaaagtggagtggtcggcgttcctggaggcggccgataacttgcgtctgatccaggtgccgaaagggccggttgagggatatgaggagaatgaggagtttctgaggaccatgcaccacctgctgctggaggtggaagtgatagagggcaccctgcagtgcccggaatctggacgtatgttccccatcagccgcgggatccccaacatgctgctgagtgaagaggaaactgagagttgattgtgccaggcgccagtttttcttgttatgactgtgtatttttgttgatctataccctgtttccgaattctgccgtgtgtatccccaacccttgacccaatgacaccaaacacagtgtttttgagctcggtattatatatttttttctcattaaaggtttaaaaccaaaaaaaaaaaa

SEQ ID NO: 93567 - DNA, 5271 bp, Homo sapiens; identical to SEQ ID NO: 59633

SEQ ID NO: 93568 - DNA, 2070 bp, Homo sapiens
caaggtcctccagcgttcctagagcggagaagaaagcgctccgaagagctagagctgacactcggcgatgagctaagacgctgtttcagagcgtttgggtcctctgaggccccttgaccaggagtgtctctgaagatacagtccaaagaaagttctccaaaacaaggagagcagtctgaagctggggatggcaacagcattggtgagtgcccattccctggctcccctgaatctgaagaaggaggggcttcgggtagtgagggaggatcactactctacttgggaacagggattcaagctgcaaggaaacagtaaaggccttggacaggagccattgtgcaaacaattcaggcagttgcgttatgaagagaccacaggacctcgagaagcactaagtcggctccgggagctctgtcaacagtggctacagcccgagacccataccaaggagcacatcctggagctgctggtgctggagcagtttctgatcatcctgcctaaggagctccaggcccgggtgcaggagcatcacccagagagcagggaggacgtggttgttgttctggaggatttgcagctggatcttggagaaacaggacaacaggtggacccagaccagccaaagaaacaaaaaatacttgtggaggagatggcccctctgaaaggagtacaggaacagcaggttcggcatgagtgtgaagttacaaagcctgagaaagagaagggtgaggagacaaggattgagaatgggaagcttattgtagtaacagactcttgtggaagagtagagtcatctgggaaaatatctgaacccatggaggctcataatgagggctctaacttggaaaggcatcaggccaagcccaaagagaagattgagtataaatgctcagaacgtgagcagagattcatccagcacttggacctgattgaacatgcgagtacacacacgggaaagaaactctgcgagtctgatgtgtgtcagagttccagtcttacaggacataagaaagtcctctctagagagaaaggtcatcagtgtcatgagtgtgggaaagcctttcagaggagttcacacctcgtcagacatcagaaaatccatcttggtgagaagccttatcagtgcaatgagtgtggcaaagtctttagccagaatgcaggccttttggaacatctcagaattcatactggagagaaaccttatctatgtatccattgtggaaaaaattttaggcgcagctctcaccttaatcgacatcagagaattcacagtcaggaggagccctgtgagtgcaaggagtgtggaaaaacctttagtcaggccttactcctcacccaccatcagagaatccatagtcactccaaaagccatcaatgtaacgagtgtggaaaagctttcagtttgacctcagaccttattcgacaccacagaattcatactggagaaaaacctttcaagtgtaacatatgccagaaagccttccgactaaactcacaccttgctcagcatgtaagaatccacaatgaagaaaaaccctatcagtgtagtgaatgtggagaagccttcaggcaaaggtcaggtctttttcaacatcagagatatcaccacaaagacaaactggcttgatgaggtgttctctccttgtagaacatcagagaaggcacattgactagcaaacagcactttaggaaaagtcaccgtagcccactgtggcatcagaaaattcttgggggctgagttggaggctccctgcctctattctctctcctttgctttccttgaagtcagctttggaccacaataatttcactgtagatgatatgctaggatcaaagttaaacagcattcttcactgcaggacatctcagagcatgtaacataactgcatgattatatactctaagcaatagagagcttcatgactgagtaagagttttgaagtcagcagtgaatcaagtgcccacagatttgcaggcttaagcagaacaagggaagattgatatttttggatatgctatagcagctttctcctatgaaataaaactgatgatgtttggaagtataaaaaa

SEQ ID NO: 93569 - DNA, 751 bp, Homo sapiens
cggcacgaggcggggagccgggagcacggtggagcggtggagggcgtcactgggtttcggcgtctggcaagcggttcagctgtctgctccctagcagccggccttcgggtcgggcgtctccgccggctactgccgcttcagttctcccggtgtggccacgagtcgggttgcactgctgtgatccatcctcatctcctaaagatgcatcctgacttatctccacacttgcacactgaagaatgcaacgtcttgattaacttgcttaaggaatgtcacaaaaatcacaacattctgaaattttttggttattgtaatgatgttgatcgggagttgagaaaatgcctgaagaatgagtacgtagaaaacaggaccaagagcagggagcatggcattgcaatgcgaaagaaactttttaatcctccagaggaatccgaaaaataaattgtattttcactcgatgcccttggctggagaagaagaccgtaaagacgtctgggttgatacctgaaagaatccgtgtcttatttggtctccgataatcctttgaatggaaaagtgacctgtgagagattgaaccatggagaaatatgaaaaccgtggattctgagtatttgttgggcagggcgtttagatactgtctcccctttaccagcaaacctgacttcaccatgtttattccctttgcctacaaccagttaatatctgagtaacttatctccttcaataaaataatttaaataaaaaaaaaaaa

SEQ ID NO: 93570 - DNA, 2226 bp, Homo sapiens
gcaggttgttgtcgggataccagatttcctactccgagaggccccgggtccctctgccacaacttctgtcgctctgccgcctgcaccgtgacccgcactattcacgggagccctagagaggacaccgggacacccagaagccgggaaatgatgtttcaggattcagtggcctttgaggatgtggctgtcagcttcacccaggaggagtgggctttgctggatccttcccagaagaatctctacagggatgtgatgcaggaaaccttcaagaacctgacctctgtaggaaaaacatggaaagttcagaacattgaagatgagtacaaaaatcccaggagaaatctaagtcttatgagagagaaactctgtgaaagtaaagaaagtcatcactgtggagaaagcttcaaccagattgcagatgacatgctgaacaggaaaactcttcctggaataacaccatgtgaaagcagtgtgtgtggagaagttggcacgggtcattcatctcttaatacgcatatcagagctgacactggacacaagtcatctgagtatcaggaatatggagagaatccatatagaaataaggaatgtaagaaagccttcagttatcttgactcctttcaatcacatgataaagcttgcactaaagagaaaccctatgatggtaaagaatgtacagaaaccttcatttcccattcatgcattcaaagacacagggtaatgcacagtggagatggaccttataaatgtaagttttgtgggaaagccttctattttctcaatttatgtcttatccatgaacgaattcacactggtgtgaaaccatataagtgtaaacaatgtggtaaggcctttactcgttccactacccttccagtacatgaaagaactcacacaggagtgaatgccgatgaatgtaaagaatgtgggaatgcattcagttttcctagtgaaattcgtagacataaaaggtctcacactggagaaaaaccctatgagtgtaagcaatgtgggaaagtcttcatttctttcagttccattcagtatcataagatgactcacactggagagaaaccctatgaatgtaagcagtgtgggaaagcctttagatgtggctcacaccttcaaaagcatggaaggactcacactggagagaaaccctatgaatgtaggcaatgtggtaaagccttcagatgtacctcggaccttcaaaggcatgaaaagacacacactgaggataaaccctatggatgtaagcagtgtgggaaaggctttagatgtgcttcacaacttcaaattcatgaaaggacgcacagtggagagaaaccccatgaatgtaaggaatgtggaaaagtattcaagtatttttcttccttgcgtatacatgaaaggacgcacactggagagaagccccatgaatgtaagcaatgtggaaaagcattcaggtatttctcttccttgcatatacatgaaaggacacacactggagataagccatatgagtgtaaggtatgtggcaaagccttcacttgttccagttccattcgatatcatgaaaggactcacactggagagaaaccctatgaatgtaagcactgtggtaaggcctttatttccaattacattcgatatcatgaaaggactcacactggagagaaaccctatcaatgcaagcaatgtggcaaagcctttattcgtgccagttcatgtcgagaacatgaaagaactcataccattaatagatgagaaatccttttagtggaagcaacgggagaagctttctgttgtcccacttcctttgaaacacaagaaaagagagtggtgaaagaacctctggataactgctttttgaattgagaagagagacttgcgataggacaataaaatctagaagaacttggatggtttcgtaatacaattcacctatagccaatcttgcatgagatttcaaaggcacagaaaaggaaggcatcagtcacatattagaggccccacacagggagagaggtgtgtggctacccgcttccagcccattttcctgattctttggcttgttaatcggagaatatcccccaaatcacttgtctctgttcctcagagttgtaggtctccagatatgtccccagtgctccacattaaagataacatgcccactttgctgtttcttcagaaatgttaaaatgtttaccagagaactaataaatgttgttatggctggaaatactc

SEQ ID NO: 93571 - DNA, 6332 bp, Homo sapiens
atgctgcctccaaagcacttgtctgccaccaaacctaagaagtcctgggccccaaatctgtatgagctagacagtgacttgactaaggagccggatgtcatcataggagaaggtccaactgactctgagttttttcatcagaggtttcggaacctaatctatgtggaatttgttgggcctcggaagaccctgatcaaactccgaaacctctgcctcgattggttgcagccggagacccgcaccaaggaggagatcatcgagctcttggtccttgagcagtacctgaccatcatccctgaaaagctcaagccttgggtgcgagcaaaaaagccggagaactgtgagaagctcgtcactctgctggagaattacaaggagatgtaccaaccagaaggtgagagtctccacggggtgttggtggtcagtgcaggcctcaggtgtcccctggggctctcagcctccacacttctgacatggtctggactggataactctctgtcctgggcagcggtggggatgtcctgtgtactgtgggatattgagctgcatcatgattttctgggtgtggccaccaaaagtgtctccacacatgcccagggagatgcggctcagggattggggggaactattgtgagaatgtgggccagagatagtaacttggcgaccggtgtcctcttagacgacaacaacagtgacgtgaccagcgacgacgacatgacccggaacagaagagagtcctcaccacctcactcagtccattctttcagtggtgaccgggactgggaccggaggggcagaagcagagacacggagccacgagaccgctggtcccacaccaggaacccaagaagcaggatgcctccgcgggatctttcccttcctgtggtggcgaaaacaagctttgaaatggacagagaggacgacagggactccagggcttatgagtcccgatctcaggatgctgaatcataccaaaatgtggtggacctcgctgaggacaggaaacctcacaacacaatccaggacaacatggaaaactacaggaagctgctctccctcggagtgcagcttgctgaagacgatggccactcccacatgacgcagggccactcatcaagatccaagagaagtgcctacccaagcaccagtcgaggtctaaaaactatgcctgaagccaaaaaatcaacccaccggcgggggatttgtgaagatgaatcttcccacggagtgataatggaaaaattcatcaaggatgtgtcacgcagttccaaatcgggaagagcaagggagtcaagcgaccggtcacagagattccccagaatgtcagatgataactggaaggacatttcattgaacaagagggagtcagtgatccagcagcgggtttatgaagggaatgcatttaggggaggctttaggtttaattcaacccttgtttccagaaagagagttcttgaaagaaagaggcgctatcattttgacacagatgggaagggctcgattcacgatcaaaaaggctgtcccaggaagaagccctttgaatgtggtagtgagatgagaaaagccatgagcgtgagcagcctgagcagcctcagctccccctcctttaccgagtcacagccaattgattttggggcaatgccatatgtatgtgatgagtgtgggaggtcgttcagtgtcatctcagaatttgttgagcaccagatcatgcatactagagagaacctctatgagtatggtgagtcctttatccacagtgtggctgtcagtgaagttcagaaaagtcaggttggagggaaacgttttgaatgtaaggactgtggagagaccttcaataagagtgccgccttggctgaacatcggaagattcatgctagaggttatcttgtggaatgtaagaatcaggaatgtgaggaagccttcatgcctagccccacctttagtgagcttcagaaaatatatggcaaagacaaattctacgagtgcagggtgtgcaaggaaaccttccttcatagttctgccctgattgagcaccagaaaatccactttggggatgacaaagataatgagcgtgaacatgaacgtgaacgtgaacgtgagcgcggggaaacctttaggcccagcccagcccttaatgagtttcagaaaatgtatggtaaagagaaaatgtacgaatgtaaggtgtgtggggagactttccttcatagctcatccctgaaagaacatcagaaaatccatactagagggaacccatttgaaaacaagggtaaagtgtgtgaggaaacctttattcctggtcagtcccttaaaaggcgtcagaaaacttacaataaggagaagctctgtgactttacagatggccgggatgccttcatgcaaagctcagagctcagtgagcatcagaaaattcattctcgaaagaacctctttgaaggcagagggtatgagaaatctgtcattcatagtgggccattcactgaatctcagaagagtcatactataacaagacctcttgaaagtgatgaggacgaaaaggcgttcaccattagctctaacccctatgaaaaccagaagattcccactaaggaaaatgtctatgaggcaaaatcatatgagaggtctgttattcatagcttagcctctgtggaagctcagaaaagtcacagtgtagcagggcccagtaaaccaaaagtaatggcagagtctaccattcagagcttcgatgctatcaaccatcagagagttcgtgctggagggaacacctctgaaggaagggaatacagtaggtctgttatccatagcttagtggcttccaaacctccaagaagtcacaatggaaatgaattggtggaatctaatgagaagggagaatcctccatttatatctcagaccttaatgataagcgacagaagattcctgccagagagaacccttgtgaagggggcagtaagaatcgcaactatgaagactctgtcatacagagtgtattccgtgccaaacctcagaaaagtgttcctggagagggatctggtgagtttaagaaggatggcgaattctctgttcccagctcaaatgtccgtgaataccagaaggctcgtgctaaaaagaaatacattgagcataggagcaatgagacctctgtaattcactctctgccttttggtgaacaaacatttcgccctcgagggatgctctatgaatgtcaggagtgtggggagtgctttgctcatagctctgacctcactgagcaccagaagattcatgatagggagaagccctctggaagcagaaactatgaatggtctgtcattcgcagcttggcccctactgaccctcaaacaagttacgcccaagagcagtatgctaaagagcaagcgcggaacaaatgtaaggacttcagacaattttttgctaccagcgaagacctcaacacaaaccagaaaatctatgaccaagagaagtctcatggcgaggagtctcaaggcgagaatactgatggggaggagacccacagcgaggagacccatggtcaggagacaattgaagaccctgtcattcaaggctcagacatggaagaccctcagaaggatgaccctgatgacaaaatctatgaatgtgaggactgtggcctgggctttgtggatctcacagacctcacagaccatcagaaagtccacagcaggaagtgcctggttgacagtcgggagtacacacattctgtaattcacacccattccatcagcgagtatcagagagattacactggagagcagctgtatgaatgtccaaagtgtggggaatcttttattcatagctcattccttttcgagcatcagagaatccatgaacaagaccagttgtattccatgaaggggtgtgatgatggttttattgccctcttgcccatgaagccacggaggaatcgtgctgcagagaggaatcctgctcttgctgggtcggccattcgatgccttttgtgtggacaaggcttcattcatagctctgcccttaatgagcatatgagacttcatagggaagatgatttactggagcagagccagatggctgaggaagctatcattccaggcttagccctcactgagtttcagagaagtcagaccgaagagagactctttgaatgtgcagtctgtggagaatctttcgtcaacccagcagaacttgcagatcacgtaactgttcataagaatgagccctatgagtacgggtcctcctatactcacacctcatttcttactgagcccctcaaaggagctataccattctatgaatgcaaggattgtggtaagtcctttattcatagcacagtcctcactaaacataaggagcttcatctggaagaagaagaagaagatgaagcagcagcagctgcagcagcagcagcccaggaagttgaagccaatgtccatgttccacaagtagttctgaggattcagggcttaaacgtagaggctgctgagccagaagtggaggctgccgagccagaagtggaggctgctgagccagaagtggaggctgctgagccaaacggagaggctgaagggccagatggagaggctgcagagcccattggagaggctggacagccaaatggagaggccgagcagccaaatggggatgctgatgagccagatggtgcaggtattgaagacccagaagaaagagctgaagagccagagggaaaagctgaagagccagagggagatgccgacgagcctgacggtgtgggaattgaagacccagaagaaggtgaagatcaagagattcaggtagaagaaccatactatgactgccatgaatgcacagaaaccttcacttccagcacagcattcagtgaacacctgaaaactcatgccagcatgatcatatttgagcctgcaaatgcctttggggagtgctcaggctacatcgaacgtgccagcaccagcacaggtggtgccaatcaagctgatgagaagtacttcaaatgtgacgtctgtgggcagctcttcaatgaccacctgtccctcgccagacaccagaatacccacactggctgagggcatggggtaaaggttagaaaaccttcacctaggacttgacccttaccaaaccacagagaatccaaaccaatccatgataatgtcagtaggagacttaaccttagtgtgttacacacctgacttaacatctctaaactcagattgaaaagagaccgaatgtgcagattccacagtcttaagctttccccttcagatgtcagtgtctgcatgtgggaaagccatagcacacatcttacctttccaagtaatcagattgagaaaaccctatgagtattccagactacagagtttgcccaaatcaactgtaaatgacacttgtgtaacgtatatatagtgtttcatgaggtgtatataaaatagcaaattatgacagaacagtgatcacatatatttggatttatatgatatacagttacagtttactctgcagaggtaccttacctggtattctttgaattttttttttttttggggggggaaaagagcaccaaatttgattatatttttaagggcctaaaatcctgaaaaaaatttattgggcattatttgaaccctgccaatatctttttgagaaatggtttggtttcttacccttaaaaagtcttgtgaagctgtaggcatgaaaaaaaacagggcttttactccttactgtttgaaaagataagtactttagtttttttttgcagccatttcatctgcgccaacactttgggaacctaatactggtgtaaggctttacaatatacggattgggctttttgtgacccagattgaatgggtgccacatggtaaggttggttgaagtggttctcatgcaaaaatattacacatttgtgttctgggtttttttttttttttttaacccaactcaatatgtgtttggatgatagtgaattgataaaaccccggaagcttttcccctgtaaatcttaccatcttttgccttttaaagaatgggttacaaccatcactagatcacagtagtgcctaatgaaggttgagaaccgtaggagaggctctcatgctgtaaataatgttgcaggctaataacctttcatcacttcctttgtgcgcttcctgccttaagtgacaagtagcaacatggcttgggtcccctgtgcagcatcagcttatgctgccacaagtcagtttgcaccctaggtgcccaggagctagtatccttagatctttctatcgctaacttaattctcttcgttatttatcctgacccctcctaactcccatgtcctaaccttgcattaaaaaaaaaa

SEQ ID NO: 93572 - DNA, 2117 bp, Homo sapiens; identical to SEQ ID NO: 60223

SEQ ID NO: 93573 - DNA, 969 bp, Homo sapiens; identical to SEQ ID NO: 59116

SEQ ID NO: 93574 - DNA, 5365 bp, Homo sapiens; identical to SEQ ID NO: 59945

SEQ ID NO: 93575 - DNA, 1187 bp, Homo sapiens
gcacgagcgcaaatagggtcactgggccgcttggcggtgtcgttgcggtaccaggtccgcgtgaggggttcgggggttctgggcaggcacaatggcgtctcgagcaggcccgcgagcggccggcaccgacggcagcgactttcagcaccgggagcgcgtcgccatgcactaccagatgagtgtgaccctcaagtatgaaatcaagaagctgatctacgtacatctggtcatatggctgctgctggttgctaagatgagcgtgggacacctgaggctcttgtcacatgatcaggtggccatgccctatcagtgggaatacccgtatttgctgagcattttgccctctctcttgggccttctctcctttccccgcaacaacattagctacctggtgctctccatgatcagcatgggactcttttccatcgctccactcatttatggcagcatggagatgttccctgctgcacagcagctctaccgccatggcaaggcctaccgtttcctctttggtttttctgccgtttccatcatgtacctggtgttggtgttggcagtgcaagtgcatgcctggcagttgtactacagcaagaagctcctagactcttggttcaccagcacacaggagaagaagcataaatgaagcctctttggggtgaagcctggacatcccatcgaatgaaaggacactagtacagcggttccaaaatcccttctggtgattttagcagctgtgatgttggtacctggtgcagaccaggccaaagttctggaaagctccttttgccatctgctgaggtggcaaaactataatttattcctggttggctagaactgggtgaccgacagctatgaaacaaatttcagctgtttgaagttgaactttgaggtttttctttaagaatgagcttcgtccttgcctctactcggtcattctccccatttccatccattaccccttagccattgagactaaaggaaatagggaataaatcaaattacttcatctctaggtcacgggtcaggaaacatttgggcagctgctcccttggcagctgtggtctcctctgcaaagcattttaattaaaaacctcaataaagatggccctgcccacactgtgccttgtgtttggggcttgatagagtgtgaaaggtgtgttgcttgaaaggtgtggccttagacacta

SEQ ID NO: 93576 - DNA, 2198 bp, Homo sapiens; identical to SEQ ID NO: 59835

SEQ ID NO: 93577 - DNA, 2041 bp, Homo sapiens
  misc_feature (1)...(2041): n = a,t,c or g
gacgatttcgtgcggtgcgggcctcagtctgcggccatgggggcgtccgcgcggctgctgcgagcggtgatcatgggggccccgggctcgggcaagggcaccgtgtcgtcgcgcatcactacacacttcgagctgaagcacctctccagcggggacctgctccgggacaacatgctgcggggcacagaaattggcgtgttagccaaggctttcattgaccaagggaaactcatcccagatgatgtcatgactcggctggcccttcatgagctgaaaaatctcacccagtatagctggctgttggatggttttccaaggacacttccacaggcagaagccctagatagagcttatcagatcgacacagtgattaacctgaatgtgccctttgaggtcattaaacaacgccttactgctcgctggattcatcccgccagtggccgagtctataacattgaattcaaccctcccaaaactgtgggcattgatgacctgactggggagcctctcattcagcgtgaggatgataaaccagagacggttatcaagagactaaaggcttatgaagaccaaacaaagccagtcctggaatattaccagaaaaaaggggtgctggaaacattctccggaacagaaaccaacaagatttggccctatgtatatgctttcctacaaactaaagttccacaaagaagccagaaagcttcagttactccatgaggagaaatgtgtgtaactattaatagtaagatgggcaaacctcctagtccttgcatttagaagctgcttttcctaagacttctagtatgtatgaattctttgaaaattatattacttttatttctactgattttattttggatactaaggatgtgccaaatgattcggatactaagatgcatcgtttgaaatcatctagtgtgttgtatgcagttatcctcaaaaacatcagcgatgtctgaacctttaaaacatctgttagagcaaaattaaaagagcatttggtagtaatctaactttttgttcagttaataagtggttgataaagtttccatatttttctggaaaagttaaaaaaagttacatgtcatttggagaaaatacgtaatcagaaatttgtgcatagattgatgccaaaaaagacatttccagcattgtggaacatggtgagacactatataaaattccagaaagaaagcaactggatttacagatttattgtgagacacaaattcactgctgcctttacactaagaaatgtatatgttaaccatatatgctgtatttattttgtcgttaagcatactttcagtttactcagaattttcaatttgctataaagatgtatcaattagcatatagaaaaatattactttaagatgacttgtttcctttgaaaatacctgtgtactgagggttatgatttgtgtcaaaaattgacataagtgcttttacaagcaccaaagttgaatgaattttcaacaaaatgtaattaaagtctatgttttcagttatgactcaggttaagaaatgtgttttaggatctacttgctggtttttctttttgatccaaatgtgtgatctgccctgataaataacaagttatagtaccatctcccccgccaataaaaaagagaagaaaaaagagaaacccgtggcactatgtaaataaagtaagcatactttgttgttagtaaatagatgaggcatgcctgggaaatgctcccttggcataaatagcaatcaattataattagtaaacaggtgtaccaataaaaagaatttacatgataggttaacaaggaccaggaaagtgagtttcctgaaggagttctttgttcctgatcaaagaaattgatacctgttagcattcactgccaccatattttaaggagaaagaactctattggtgtcgtctgagcagccatttaaaaattggaatctaaaggatggttgctgatgtactgtgtggtctggtagaagtggggaaatatgagagatggaggaaaaacttgattatgtnttccatggnatatttact

SEQ ID NO: 93578 - DNA, 1978 bp, Homo sapiens
ggaattccacccccacacccaagtgagcggcctgctcactcctcagctgcaggagccagacgtgtggagtcccagcagaggccaacctgtgtctcttcatctccctgggaaaggtgcccccgaggtgaaagagatggcctggtggaaatcctggattgaacaggagggtgtcacagtgaagagcagctcccacttcaacccagaccctgatgcagagaccctctacaaagccatgaaggggatcgggaccaacgagcaggctatcatcgatgtgctcaccaagagaagcaacacgcagcggcagcagatcgccaagtccttcaaggctcagttcggcaaggacctcactgagaccttgaagtctgagctcagtggcaagtttgagaggctcattgtggcccttatgtacccgccatacagatacgaagccaaggagctgcatgacgccatgaagggcttaggaaccaaggagggtgtcatcattgagatcctggcctctcggaccaagaaccagctgcgggagataatgaaggcgtatgaggaagactatgggtccagcctggaggaggacatccaagcagacacaagtggctacctggagaggatcctggtgtgcctcctgcagggcagcagggatgatgtgagcagctttgtggacccggcactggccctccaagacgcacaggatctgtatgcggcaggcgagaagattcgtgggactgatgagatgaaattcatcaccatcctgtgcacgcgcagtgccactcacctgctgagagtgtttgaagagtatgagaaaattgccaacaagagcattgaggacagcatcaagagtgagacccatggctcactggaggaggccatgctcactgtggtgaaatgcacccaaaacctccacagctactttgcagagagactctactatgccatgaagggagcagggacgcgtgatgggaccctgataagaaacatcgtttcaaggagcgagattgacttaaatcttatcaaatgtcacttcaagaagatgtacggcaagaccctcagcagcatgatcatggaagacaccagcggtgactacaagaacgccctgctgagcctggtgggcagcgacccctgaggcacagaagaacaagagcaaagaccatgaagccagagtctccaggactcctcactcaacctcggccatggacgcaggttgggtgtgaggggggtcccagcctttcggtcttctatttccctatttccagtgctttccagccgggtttctgacccagagggtggaaccggcctggactcctcttcccaacttcctccaggtcatttcccagtgtgagcacaatgccaaccttagtgtttctccagccagacagatgcctcagcatgaagggcttggggacttgtggatcattccttcctccctgcaggagcttcccaagctggtcacagagtctcctgggcacaggttatacagaccccagccccattcccatctactgaaacagggtctccacaagaggggccagggaatatgggtttttaacaagcgtcttacaaaacacttctctatcatgcagccggagagctggctgggagcccttttgttttagaacacacatccttcagcagctgagaaacgaacacgaatccatcccaaccgagatgccattaacattcatctaaaaatgttaggctctaaatggacgaaaaattctctcgccatcttaataacaaaataaactacaaattcctgacccaaggacactgtgttataagaggcgtgggctcccctggtggctgaccaggtcagctgccctggccttgcacccctctgcatgcagcacagaagggtgtgaccatgccctcagcaccactcttgtccccactgaacggcaactgagactgggtacctggagattctgaagtgcctttgctgtggttttcaaaataataaagatttgtattcaactcaaaaaaaaaa

SEQ ID NO: 93579 - DNA, 868 bp, Homo sapiens
ggcacgaggggtggtgtagggccgggcgataatggcggcgtcgaggctggagctaaacctggtgcggctgctatcccgctgcgaggcgatggcagcggagaaacgggacccggacgagtggcgcctggagaagtacgtgggagccctagaggacatgttgcaggccctgaaggtccacgcgaggttttgtttttcttcttcctgccttccagcaaaccggcctctgaggtgatcaatgaatattcctggaaggtggattttctgaaggggatgctgcaagccgagaagctgacctcctcctcagagaaagcactggccaaccagttcctggcccctggccgtgtgccaaccacagccagagagcgagtgcccgccacaaagacggtgcatctgcagtcacgggcgcggtacaccagcgagatgcggagtgagctactaggcacggactctgcagagcctgagatggacgtaaggaagagaactggagtggcagggtcccagccagtgagtgagaagcagtcggcagctgagctagacctcgtcctgcagcgacatcagaacctccaggaaaagctggcggaagagatgctaggactggcccggagcctcaagaccaataccctggccgcccagagtgtcatcaagaaggacaaccagaccctgtcacactcactgaaaatggcggaccagaacctggagaaactgaagacggagtcagagcgtctggagcagcacacgcagaagtcagtcaactggctgctctgggccatgctcattatcgtctgcttcatcttcattagcatgatcctcttcattcgaatcatgcctaaactcaaataaagacccccgcccacctaaaaaaaaaaaa

SEQ ID NO: 93580 - DNA, 671 bp, Homo sapiens
gacatcagaaccccaggctctccagcctttggacttcaggactgacacaagcaacctgctgggttcttaggcctttggcttggtactgagacttacaccatcagcttccctggtcctgagacttttggacttggattgagccacgctactggcatcccaggatctccagcttgcagacagcctgtcgtgggacttcacagcctccataattatagaatggcaatggtctctgcgatgtcctgggtcctgtatttgtggataagtgcttgtgcaatgctactctgccatggatcccttcagcacactttccagcagcatcacctgcacagaccagaaggagggacgtgtgaagtgatagcagcacaccgatgttgtaacaagaatcgcattgaggagcggtcacaaacagtaaagtgttcctgtctacctggaaaagtggctggaacaacaagaaaccggccttcttgcgtcgatgcctccatagtgattgggaaatggtggtgtgagatggagccttgcctagaaggagaagaatgtaagacactccctgacaattctggatggatgtgcgcaacaggcaacaaaattaagaccacgagaattcacccaagaacctaacagaaggctttgttgtagtaaagggaaaaccaaccctttggaaaatacttttt

SEQ ID NO: 93581 - DNA, 3044 bp, Homo sapiens
aagccattacaaaggttgcttaacttctaattatttgatcactgaggaaaatccagaaagctacacaacactgaaggggtgaaataaaagtccagcgatccagcgaaagaaaagagaagtgacagaaacaactttacctggactgaagataaaagcacagacaagagaacaatgccctggacatggctccagagatccacatgacaggcccaatgtgcctcattgagaacactaatggggaactggtggcgaatccagaagctctgaaaatcctgtctgccattacacagcctgtggtggtggtggcaattgtgggcctctaccgcacaggaaaatcctacctgatgaacaagctagctgggaagaataagggcttctctctgggctccacagtgaaatctcacaccaaaggaatctggatgtggtgtgtgcctcaccccaaaaagccagaacacaccttagtcctgcttgacactgagggcctgggagatgtaaagaagggtgacaaccagaatgactcctggatcttcaccctggccgtcctcctgagcagcactctcgtgtacaatagcatgggaaccatcaaccagcaggctatggaccaactgtactatgtgacagagctgacacatcgaatccgatcaaaatcctcacctgatgagaatgagaatgaggattcagctgactttgtgagcttcttcccagattttgtgtggacactgagagatttctccctggacttggaagcagatggacaacccctcacaccagatgagtacctggagtattccctgaagctaacgcaaggtaccagtcaaaaagataaaaattttaatctgccccgactctgtatccggaagttcttcccaaagaaaaaatgttttgtcttcgatctgcccattcaccgcaggaagcttgcccagcttgagaaactacaagatgaagagctggaccctgaatttgtgcaacaagtagcagacttctgttcctacatctttagcaattccaaaactaaaactctttcaggaggcatcaaggtcaatgggcctcgtctagagagcctagtgctgacctatatcaatgctatcagcagaggggatctgccctgcatggagaacgcagtcctggccttggcccagatagagaactcagccgcagtgcaaaaggctattgcccactatgaccagcagatgggccagaaggtgcagctgcccgcagaaaccctccaggagctgctggacctgcacagggttagtgagagggaggccactgaagtctatatgaagaactctttcaaggatgtggaccatctgtttcaaaagaaattagcggcccagctagacaaaaagcgggatgacttttgtaaacagaatcaagaagcatcatcagatcgttgctcagctttacttcaggtcattttcagtcctctagaagaagaagtgaaggcgggaatttattcgaaaccagggggctattgtctctttattcagaagctacaagacctggagaaaaagtactatgaggaaccaaggaaggggatacaggctgaagagattctgcagacatacttgaaatccaaggagtctgtgaccgatgcaattctacagacagaccagattctcacagaaaaggaaaaggagattgaagtggaatgtgtaaaagctgaatctgcacaggcttcagcaaaaatggtggaggaaatgcaaataaagtatcagcagatgatggaagagaaagagaagagttatcaagaacatgtgaaacaattgactgagaagatggagagggagagggcccagttgctggaagagcaagagaagaccctcactagtaaacttcaggaacaggcccgagtactaaaggagagatgccaaggtgaaagtacccaacttcaaaatgagatacaaaagctacagaagaccctgaaaaaaaaaaccaagagatatatgtcgcataagctaaagatctaaacaacagagcttttctgtcatcctaacccaaggcataactgaaacaattttagaatttggaacaagtgtcactatatttgataataattagatcttgcatcataacactaaaagtttacaagaacatgcagttcaatgatcaaaatcatgttttttccttaaaaagattgtaaattgtgcaacaaagatgcatttacctctgtaccaacagaggagggatcatgagttgccgccactcagaagtttattcttccagacgaccagtggatactgaggaaagtcttaggtaaaaatcttgggacatatttgggcactggtttggccaagtgtacaatgggtcccaatatcagaaacaaccatccctacgcttcctaggggaaggacagtgtacagttcttccattattatccagggctacaaggtctatgagcaataatgtgatttctggacattgcccatgggataattctcactgttggatctcaggctaaagcaaaccatcttttacagagatctagaatcctatattttccataggaagttaaagaaatcattagcaagagtaggaattgaatcataaacaaattggctaatgaagaaatcttttctttcttgttcaattcatctagattataaccttaatgtgacacctgagacctttaggacagttgaccctgaattaaatagtcacatgggtaacaattatggcactgtgtaattttaggtaatgtattaacatggcaatggatggcactttaactgaggataggggactatgttagggaaaattggaactaattttaattatttggattgttttaatccctaaaggccttaggttaggtcttttcctggattcttaaagggtcatacttgaaatcctgcccaattttcccccaaaggggaatttggggatttttttgactttcttttgagcaataaaataattgtcttgccattacttagtatatgtagacttcatcccaattgtcaaacatcctaggtaagtggttgacatttcttacagcaattacagattatttttgaactagaaataaactaaactagaaataa

SEQ ID NO: 93582 - DNA, 1483 bp, Homo sapiens; identical to SEQ ID NO: 59934
  misc_feature (1)...(1483): n = a,t,c or g

SEQ ID NO: 93583 - DNA, 1110 bp, Homo sapiens
gtgaacacaacttccggccccactgagcggtgtcctgagccgattacagctaggtagtggagcgccgctgcttacctgggtgcaggagacagccggagtcgctgggggagctccgcgccgccggacgcccgtgaccatgtggaggctgctggctcgcgctagtgcgccgctcctgcgggtgcccttgtcagattcctgggcactcctccccgccagtgctggcgtaaagacactgctcccagtaccaagttttgaagatgtttccattcctgaaaaacccaagcttagatttattgaaagggcaccacttgtgccaaaagtaagaagagaacctaaaaatttaagtgacatacggggaccttccactgaagctacggagtttacagaaggcaattttgcaatcttggcattgggtggtggctacctgcattggggccactttgaaatgatgcgcctgacaatcaaccgctctatggaccccaagaacatgtttgccatatggcgagtaccagcccctttcaagcccatcactcgcaaaagtgttgggcatcgcatggggggaggcaaaggtgctattgaccactacgtgacacctgtgaaggctggccgccttgttgtagagatgggtgggcgttgtgaatttgaagaagtgcaaggtttccttgaccaggttgcccacaagttgcccttcgcagcaaaggctgtgagccgcgggactctagagaagatgcgaaaagatcaagaggaaagagaacgtaacaaccagaacccctggacatttgagcgaatagccactgccaacatgctgggcatacggaaagtactgagcccatatgacttgacccacaaggggaaatactggggcaagttctacatgcccaaacgtgtgtagtgagtgtaggagataactgtatataggctactgaaagaaggattctgcatttctattcccctcagcctacccactgaagtctttgggtagctcttaagccataactaaggagcagcatttgagtagatttctgaaaaacaatgttatttgttgatttaaaaagaaaactgtatttttattaaataaaatttaaacatcacttcaggaaaaaaaaaaaa

SEQ ID NO: 93584 - DNA, 2103 bp, Homo sapiens
gggtcgacccacgcgtccgcgcgggtgcagtatatctcgcgctctctcccctttccccctcccctttccccaccccgggcgctcaggttggtctggaccggaagcgaagatggcgacttctggcgcggcctcggcggagctggtgatcggctggtgcatattcggcctcttactactggctattttggcattctgctggatatatgttcgtaaataccaaagtcggcgggaaagtgaagttgtctccaccataacagcaattttttctctagcaattgcacttatcacatcagcacttctaccagtggatatatttttggtttcttacatgaaaaatcaaaatggtacatttaaggactgggctaatgctaatgtcagcagacagattgaggacactgtattatacggttactatactttatattctgttatattgttctgtgtgttcttctggatcccttttgtctacttctattatgaagaaaaggatgatgatgatactagtaaatgtactcaaattaaaacggcactcaagtatactttgggatttgttgtgatttgtgcactgcttcttttagttggtgcctttgttccattgaatgttcccaataacaaaaattctacagagtgggaaaaagtgaagtccctatttgaagaacttggaagtagtcatggtttagctgcattgtcattttctatcagttctctgaccttgattggaatgttggcagctataacttacacagcctatggcatgtctgcgttacctttaaatctgataaaaggcactagaagcgctgcttatgaacgtttggaaaacactgaagacattgaagaagtagaacaacacattcaaacgattaaatcaaaaagcaaagatggtcgacctttgccagcaagggataaacgcgccttaaaacaatttgaagaaaggttacgaacacttaagaagagagagaggcatttagaattcattgaaaacagctggtggacaaaattttgtggcgctctgcgtcccctgaagatcgtctggggaatatttttcatcttagttgcattgctgtttgtaatttctctcttcttgtcaaatttagataaagctcttcattcagctggaatagattctggtttcataatttttggagctaacctgagtaatccactgaatatgcttttgcctttactacaaacagttttccctcttgattatattcttataacaattattattatgtactttatttttacttcaatggcaggaattcgaaatattggcatatggttcttttggattagattatataaaatcagaagaggtagaaccaggccccaagcactcctttttctctgcatgatacttctgcttattgtccttcacactagctacatgatttatagtcttgctccccaatatgttatgtatggaagccaaaattacttaatagagactaatataacttctgataatcataaaggcaattcaaccctttctgtgccaaagagatgtgatgcagatgctcctgaagatcagtgtactgttacccggacatacctattccttcacaagttctggttcttcagtgctgcttactattttggtaactgggcctttcttggggtatttttgattggattaattgtatcctgttgtaaagggaagaaatcggttattgaaggagtagatgaagattcagacataagtgatgatgagccctctgtctattctgcttgacagccttctgtcttaaaggttttataatgctgactgaatatctgttatgcatttttaaagtattaaactaacattaggatttgctaactagctttcatcaaaaatgggagcatggctataagacaacttatattttattatatgttttctgaagtaccattgtatcatagattaccattttaaattccccataaccatgctatgtaaatataagactactgtctttgtgagggaatttcttgtttaaaattttttcctttaatttataatagtgttaaattgccctaaaaatcttccagaattaatattcccttttgtcactttttgaaaacataataaatcatctgtatctgtgccttaaaaaaaaaaaa

SEQ ID NO: 93585 - DNA, 1149 bp, Homo sapiens
gcattttcagatgaatttgccagaagggctaatggaaatctcgtcagtgacaaaattccgaaggctaaagatacacaaggtttttatgggactgtttctagccctgattcaggtgtgtatgaaatgaagattggctccatcatcttccaggtggcttctggagatatcacgaaagaagaggcagatgtgattgtaaattcaacatcaaactcattcaatctcaaagcaggggtctccaaagcaattttagaatgtgctggacaaaatgtagaaagggaatgttctcagcaagctcagcagcgcaaaaatgattatataatcaccggaggtggatttttgaggtgcaagaatatcattcatgtaattggtggaaatgatgtcaagagttcagtttcctctgttttgcaggagtgtgaaaaaaaaaattactcatccatttgcctcccagccattgggacaggaaatgccaaacaacacccagataaggttgctgaagccataattgatgccattgaagactttgtccagaaaggatcagcccagtctgtgaaaaaagttaaagttgttatctttctgcctcaagtactggatgtgttttatgccaacatgaagaaaagagaagggactcagctttcttcccaacagtctgtgatgtctaaacttgcatcatttttgggcttttcaaagcaatctccccaaaaaaagaatcatttggttttggaaaagaaaacagaatcagcaacttttcgggtgtgtggtgaaaatgtcacgtgtgtggaatacgctatctcctggctacaagacctgattgaaaaagaacagtgtccttacaccagtgaagatgagtgcatcaaagactttgatgaaaaggagtatcaggagttgaatgagctgcagaagaagttaaatattaacatttccctggaccataagagacctttgattaaggttttgggaattagcagagatgtgatgcaggctagagatgaaattgaggcgatgatcaagagagttcgattggccaaagaacaggaatcccgggcagattgtatcagtgagtttatagaatggcagtataatgacaataacacttctcattgttttaacaaaatgaccaatctgaaattagaggatgcaaggagagaaaag

SEQ ID NO: 93586 - DNA, 2221 bp, Homo sapiens
tttcgtcgcaggcgggcctcgcgggtccgggagcgcggcggagacgatgcctgagatcagagtcacgcccttgggggccggccaggacgtgggccgaagctgcatcctggtctccattgcgggcaagaatgtcatgctggactgtggaatgcacatgggcttcaatgacgaccgacgcttccctgacttctcctacatcacccagaacggccgcctaacagacttcctggactgtgtgatcattagccacttccacctggaccactgcggggcactcccctacttcagcgagatggtgggctacgacggccccatctacatgactcaccccacccaggccatctgccccatcttgctggaggactaccgcaagatcgccgtagacaagaagggcgaggccaacttcttcacctcccagatgatcaaagactgcatgaagaaggtggtggctgtccacctccaccagacggtccaggtagatgatgagctggagatcaaggcctactatgcaggccacgtgctgggggcagccatgttccagattaaagtgggctcagagtctgtggtctacacgggtgattataacatgaccccagaccgacacttaggagctgcctggattgacaagtgccgccccaacctgctcatcacagagtccacgtacgccacgaccatccgtgactccaagcgctgccgggagcgagacttcctgaagaaagtccacgagaccgtggagcgtggtgggaaggtgctgatacctgtgttcgcgctgggccgcgcccaggagctctgcatcctcctggagaccttctgggagcgcatgaacctgaaggtgcccatctacttctccacggggctgaccgagaaggccaaccactactacaagctgttcatcccctggaccaaccagaagatccgcaagactttcgtgcagaggaacatgtttgagttcaagcacatcaaggccttcgaccgggcttttgctgacaacccaggaccgatggttgtgtttgccacgccaggaatgctgcacgctgggcagtccctgcagatcttccggaaatgggccggaaacgaaaagaacatggtcatcatgcccggctactgcgtgcagggcaccgtcggccacaagatcctcagcgggcagcggaagctcgagatggaggggcggcaggtgctggaggtcaagatgcaggtggagtacatgtcattcagcgcacacgcggacgccaagggcatcatgcagctggtgggccaggcagagccggagagcgtgctgctggtgcatggcgaggccaagaagatggagttcctgaagcagaagatcgagcaggagctccgggtcaactgctacatgccggccaatggcgagacggtgacgctgcccacaagccccagcatccccgtaggcatctcgctggggctgctgaagcgggagatggcgcaggggctgctccctgaggccaagaagcctcggctcctgcacggcaccctgatcatgaaggacagcaacttccggctggtgtcctcagagcaagccctcaaagagctgggtctggctgagcaccagctgcgcttcacctgccgcgtgcacctgcatgacacacgcaaggagcaggagacggcattgcgcgtctacagccacctcaagagcgtcctgaaggaccactgtgtgcagcacctcccagacggctctgtgactgtggagtccgtcctcctccaggccgccgccccttctgaggacccaggcaccaaggtgctgctggtctcctggacctaccaggacgaggagctggggagcttcctcacatctctgctgaagaagggcctcccccaggcccccagctgaggccggcaactcacccagccgccacctctgccctctcccagctggacagaccctgggcctgcacttcaggactgtgggtgccctgggtgaacagaccctgcaggtcccatccctggggacagaggccttgtgtcacctgcctgcccaggcagctgtttgcagctgaagaaacaaactggtctccaggctgtcttgcctttattcctggttagggcaggtggtcctagacagcagtttccagtaaaagctgaacaaaaaaaaaaaaaagggggggcccgtttaaaagaatcaattttaacgcccgggggcggggaaggtaaaattttttttagggggccccaaaaattaattccggggcccgtggttaaacag

SEQ ID NO: 93587 - DNA, 450 bp, Homo sapiens
atgcattcgaactgagccagctgcagctttccgccgcttgggcgccttgtccggagctgcggccttaggcttcgcttcctacggggcgcacggcgcccaattcccagatgcctacgggaaggagctgtttgacaaggccaacaaacaccacttcttacacagcctggccctgttaggggtgccccattgcagaaagccactctgggctgggttattgctagcttccggaacgaccttattctgcaccagcttttactaccaggctctgagtggagaccccagcatccagactttggcccctgcgggagggaccctgctactcttgggctggcttgccttggctctttgagctcccttttgcttaattactgggttttctgggcagttttttttttaaagagttggagtaagaagaggattaaaaaggaaaggcaaataaaaaaaaaaaaa

SEQ ID NO: 93588 - DNA, 1184 bp, Homo sapiens
aagggcccccgcttgtgtgcccttcgccctgccggagccgggaaaatggaggctgtgattgagaaggaattgcagcgcgctcggaggcctcttccagaccatcatcagcgacatgaaggggagctatccagtttgggaagatttcataaacaaagcaggaaagctgcagtcccagcttcggacaacagtagtagcagcagctgccttcttggacgcctttcagaaagtggctgacatggccaccaacacacgtggtgggaccagggagattggatctgctctcaccaggatgtgcatgaggcacagaagcattgaagccaagctgaggcagttttcgagcgctttaattgattgtctgataaacccacttcaagaacagatggaagaatggaagaaagtggccaaccagctggataaagaccacgcaaaagaatataagaaagcccgccaagagataaaaaagaagtcctcggatacgctgaaactgcagaagaaagcaaaaaaagggagaggtgatatccagcctcagttggacagtgctctccaagatgtcaatgataagtatctcttattggaagaaacagaaaagcaggctgtccggaaggctttgattgaagaacgtggccgattctgtaccttcatctctatgctgcggccagtgattgaagaagaaatctcaatgctaggggaaataacccaccttcagaccatctcggaagatctaaaaagcctgaccatggaccctcacaaactgccctcctcaagtgaacaggtgattctggacttgaaaggttctgattacagctggtcgtatcagacgccaccctcttcccccagcaccaccatgtccagaaagtccagtgtctgcagcagcctgaacagtgtcaacagcagtgactcccggtccagcggctcccactcgcattcccccagctcacattaccgctaccgcagctccaacctggcccagcaggctcctgtgaggctgtccagcgtgtcctcccatgactcaggattcatatcccaggatgccttccagtccaagtcaccatcccccatgccgccagaggcccccaaccagcgccgcaaagagaagcgagaaccggaccccaacgggggaggacccactaccgccagcggcccacctgcagcagctgaggaggctcagagaccacggagcatga

SEQ ID NO: 93589 - DNA, 1828 bp, Homo sapiens
ttttttttttttcgttccatgttttttatttgtgcactgggaaagaagtcttccctcccatcacatgagccacgtggtgagtcctctggaggcttgaagattatccccctccctgggagtcttgggccatggagggtgggggcggtgaacggaaggggattttgtctctgccctcagcctggtgccctctccttccaggaatgtcccagcggaattgtcaatgaggagaacttcaagcagatttactcccagttctttcctcaaggaggtgaggggacaagggccaaggggaagcagttgtccttctctaggctgagggagggagggattccggaggagttgggaatgccaaggtgatggggggtatggggagctccttagagggaggaagtcctctcctgtgtggaagccaacttctccacactcaccctgcagactccagcacctatgccacttttctcttcaatgcctttgacaccaaccatgatggctcggtcagttttgaggtgagctgggcgaggtgggccagggaagcctgtttcctggagttcagggccaggatctccaggccaaacccagagaaggagttgggtgaagagtacccgaggacacagctccctcctgcctccttcccaggactttgtggctggtttgtccgtgattcttcggggaactgtagatgacaggcttaattgggccttcaacctgtatgaccttaacaaggacggctgcatcaccaaggaggaaatgcttgacatcatgaagtccatctatgacatgatgggcaagtacacgtaccctgcactccgggaggaggccccaagggaacacgtggagagcttcttccagaagatggacagaaacaaggatggtgtggtgaccattgaggaattcattgagtcttgtcaaaaggatgagaacatcatgaggtccatgcagctctttgacaatgtcatctagcccccaggagagggggtcagtgtttcctggggggaccatgctctaaccctagtccaggcggacctcacccttctcttcccaggtctatcctcatcctacgcctccctgggggctggagggatccaagagcttggggattcagtagtccagatctctggagctgaaggggccagagagtgggcagagtgcatctcggggggtgttcccaactcccaccagctctcacccccttcctgcctgacacccagtgttgagagtgcccctcctgtaggaattgagcggttccccacctcctacccctactctagaaacacactagacagatgtctcctgctatggtgcttcccccatccctgacctcataaacatttcccctaagactcccctctcagagagaatgctccattcttggcactggctggcttctcagaccagccattgagagccctgtgggagggggacaagaatgtatagggagaaatcttgggcctgagtcaatggataggtcctaggaggtggctggggttgagaatagaagggcctggacagattatgattgctcaggcataccaggttatagctccaagttccacaggtctgctaccacaggccatcaaaatataagtttccaggctttgcagaagaccttgtctccttagaaatgccccagaaattttccacaccctcctcggtatccatggagagcctggggccagaatatctgggctcatctctggcattgcttcctctcctttcctttcctgcatgtgttggtggtggttgtggtgggggaatgtggatgggggatgtcctgggctgatgcctgccaaaatttcatcccaccctccttgcttatcgtccctgtttt

SEQ ID NO: 93590 - DNA, 434 bp, Homo sapiens
tgcaaatatgcattacacaggcacacacagagagatatttaatatgtggaatatcactctttcatgagctttattccttgattaatttgataaagcctcacagaggattttaagcaatatttaaatgtgttgagggtatgtttcggatagccatggtgaatgtctgctttgtgagctctgggtcactgctcatctagcctctgacttatgagtatacgatgaatggacccatttcgcgtatatgaccatcgaccttctggagattcctatcacaggtagtcaccctgtggtcctcaatgccctgttttgcctggaggcaccctgtgatatctccaaacacagggtcttttgcatatcccgtatatcccaagtcacttatagcccatgattttgccgtggaggctaccatgccttatataaggctgtcatctact

SEQ ID NO: 93591 - DNA, 466 bp, Homo sapiens
ctggaaggctgaggcaggagaatggcatgaacctgggaggtggagcttgcagtgagccgaaattgcaccactgcactccagcctgggggacaaagcgagacttcgtctgaaaaaaataggtagaagtcgaacataccaaatttgggtgactgtggttgggagtcgctattcaacaggccaatcatggcgctcaagtttggcagtgacatgatacatacagttccaaaaagtctaatgctgaaacgttcaccttccatgctgatttatgcacactttctgataaggatagacctatcactatacaaactgcacttgctgagcttgtgaaacacaagcccaaggcaacatatgagcaactgatagctgttttggatgaattcggaactttttaaaaaagtggtggaaggcttacgataaggaaaacctgttttgcgaggaagggtaaaaactttgtgctgcaagtaac

SEQ ID NO: 93592 - DNA, 451 bp, Homo sapiens
ctcaaaacaaatgataaccatacacaacactaaaggacgaacctgatctcttatactagtatccttaatcatttttattgccacaactaacctcctcggactcctgccttactcatttacaccaaccacccaactatctataaacctagccatggccatccccttatgagcgggcgcagaggttatatgcttacaatttttttttaatattccctagcttcctagatccaaaggtgagaatcaccatgattatcgtcatgctctctatatatcgcatcatatcattttctgatctgtcaactattctcttcatatctgtagtattgttatcaatcactcgcgtatgtgtctatatttactcttctcctcacgttgtttttgtctataaatgtgttcgttgctcgattccatctacgagagggtatccattcttggtacgatctgatctcgg

SEQ ID NO: 93593 - DNA, 428 bp, Homo sapiens
gaaggcttcctggaactcctccgtacccggaaccattcaaacagccagctccagctgaccaccggcattggcctgttcctcaacgagggcctgaagctagtggataagtttttggaggatgtttaaaagtagtaccactcagaaaccttcactgtcaactttagcgacaccgaataggccatgaaacatatcaacgattacgtggagaagggtactcaagggaaaattgtggatttggtcaaggagcttgacagagacacagtttttgatctggcgaattacatcttctttaaaggcaaatgggatagaccctttgaagtcaatgacaccgaggaagaggacttccacgtggaccaggtgtccaccgtgaatgagcctattatgaagcttttaagcattgttaaacattcatccttgtttcaaacttt

SEQ ID NO: 93594 - DNA, 464 bp, Homo sapiens
aaaattaaaagcttttacgcttccaaagacaccattaaaagaatgagagttacagactggaagaaaatatttgcatattaaatatctgataaagagcttatattcacattaagaactcttaaaacttaataaaaataaggcaaacaacctaatttaaaaaatggacaagagatttgagtacctatttcaccacaagatatacaaatagctcataagcaacctggaaggatggtcgacatcattagtctctgaactggcaccatgtgaggctccagttcacacccgctcacagggctcaccatagcagggctgcaaggtttcggagaagctggacgcctcgtgcgaggccgatggggatgctgatgggacatcccttttgaaaatacatttgcagtttctttcaaagttacacataagtttaccatatgacccaacaactccactcctaggtacctgctcaagac

SEQ ID NO: 93595 - DNA, 438 bp, Homo sapiens
gtatgacattttgggtttggcttttttcactcagggtaattcccaggaagaggttcacacagttgtttttgtatcggtagtttagtctttttattgctgagtgttattccatagtatgtaccatgtatatttaaccattcactgcacaagggacgtccaggctgattccaagctctggctattacagataaagctactgtgaatattcatgtacaggttttagtgtgaacctaagttttcatttctctagataaatgcccaagtgtgcaattgccaggtcatgtttactgtgtataacaaaatgtcatactgtgtcaaagtggctgtgactagtaaccctgttgtaaatgcctctccttgtttttcagtttaccaatccttattagaattactcctgcgtgtttaattgtcttttgaatctcttctattatttttgcg

SEQ ID NO: 93596 - DNA, 726 bp, Homo sapiens
tcccgttgacgtcggtacgcacgcacgaccggaccggaattcccggggcgacgatttcgtggcttcctgcatttggcggggtctttgtttctcgctggcgctggcacaggaacttgggatttggctcctctttcgcctcctgcaccttgggagccctgggctactctttcacagcccctgttgccctgtgatctgtaggtccttggggacgcacagttaagatgacaggacatcctggaagctgggaaatggtgagtatacggggttcggcatcccgagaggggagagcaggctgtgaaaccggcaggaccggcctccccacggttagctccgagtctcccgcagcttggccctcagtcccctgtggctgcaagatggccgctgggccagcagcgaggacccccacatccggcctggcccatccggtcctgtccctgggcagcgccctgctctgcgcccacagccatgagtatttcccagattgttcagggaggcctggtgggtcatcagggaaaaaccgcgactgggtgtttgcgtgggaggagctgcggcccgtggggtccccagtctctcttgttaaaaattaacgggagtcctatgttaaaacgttaaccagtttatctggaacaaacagtgattggtgaaatggaaagcacccagccatgtatttctggtccaccagaggggtcataaaggaaaggctttcatgaagatgcatgagaaagc

SEQ ID NO: 93597 - DNA, 474 bp, Homo sapiens
agaattctgaacgaggaacatggcaaatatgaaggacttcacgaatgagaagtaaaatggcacctctatatcaaaagcccagcgttcaccgatctccatctgtgctaccagaaagacatgaatggcatctccacctcagcatcctccccagccgtaggcaccgtgggcatggatatggatgaagatgacgacttttctaaatggaacttctactacagccctcattcctatccagataaataactcaccatattcaaaactgagtcgagggtccgggaatctgatgaggtaactcagatcaaagttaattgggatgaagaggtgatttctggcttgctaacctctctgaaagacaacgtgctcaaggccacaggggtcctttatgattatgcctacaagttacctctgcgaacacactaggtctaccctgaaagaagagtctttaaagctagaaagaaatctgcagaaccacgg

SEQ ID NO: 93598 - DNA, 577 bp, Homo sapiens
cttcccagtgtagccctttcatttcaccagcatgcagcctcacagctctggaggaggaaacggaggctttgagagtgcacccacggctctgcctctcccccaacctggcccctagcagtggcccgcccaggcctcctgaacttgctccttgtcctcccagcagccaggctggtctaaggacatgtcactcttgggtcaaaggcctccatcagccactgcccgtggccagtgggatgaagtccacattctgcaacaagacctacacgtgcccgtatccaccccctcacccctctgccctaaccattccccaaatgcactgaccctccctgattccgtcacacacgctgtgccctttgagcctagtcaccctctgctcctccttcaagcaccgcctgaatcttgggaagcccttctctgcggtgcttccccttgcaatcacccccactcccacccagggatctgccccactcctccaggtctgtggcctgtttgtccttgtgcgccaagagcctggcagagagatgggacaaggcagacttagagtgggaggaggagaaagaaaaacaggtcccacccc

SEQ ID NO: 93599 - DNA, 453 bp, Homo sapiens
cagattatagcttgggttagaatatgccctactggtttgggggactcctaaagtataacattaagggggatttcctatatattactatatcgtactcctgctgagttatgctttacatcaggttacagagtacagcatgtatgtttctataatggctttcaatgcaaaggttagtgatccacttattgttggaacatacatgacccttttaaataccgtgtccaatctgataggaaactggccttctacagtatctctatggcttgtaaatcccctcacagtaaaagagtgtgtatgaacatcataccagaattgttgtacacctgatgctgctgagctttgcaaaaaactgggtggctcatgtgttacagccctggatggttattatgtggagtccattatttgtgtttccattgcatttgtatgtaggtctttcttgtacacaaatttaaa

SEQ ID NO: 93600 - DNA, 476 bp, Homo sapiens
  misc_feature (1)...(476): n = a,t,c or g
atcgaaatcctattgannacatnannnannaccacnactatnggaaanggncanaagtccaagaattcggcacgaggcaatctgggctcactgcaacctctgcctcccaggttcaagtgattctcctacttgggaggctgagatgggaggatcacctgatcacctgagcctggggaggttaacgctgcagtgagctctgattgtgacacggcactccaccctgggtgatagagtgacaccctgtctcaaaaaaaaaaaaaaaaaaaaaaaatttaaaaaccgggaaaaaaattttaaaccccggaaaacccaaaaaatttaaaacccattggcctttaacccaaattttcaggggttaaaaggttttgggtggggaaatggttttttcccttaaaaaattttttggaaaaaggaacctgtttggatctgacattaaaagggggggtacccccattttttatgggtaaaaaacccat

SEQ ID NO: 93601 - DNA, 457 bp, Homo sapiens
tagggctcggcgtggccccaggaggaccgcccagggcgggttgggcagagcccaaggccttactgcaggtgtgtggcctcctctgacacggtcctgccttcatgctccgcaggccgccagctgcacagccaggccagcgtgctccttggctagcgcctccttctcccgggccactcgccccagcgtctccacctgtcactgggcctcccaccgggcctgctccagctcctgctcccgcctgctcagctgccaggagagctggctcccacccagagactgagtagcactcccagcatcccccagcttgttcatcgtgcagcaccccaactctgggcctaacccagtcctggcagaaggcctgggttcgagcccagggtctgccctgatgtgctatatgtacttgggcaagtcatgaccttctctagatctgcaatgcacgtgtgtacaaaaaccaggg

SEQ ID NO: 93602 - DNA, 338 bp, Homo sapiens
ccaccttccttacttaggccccccacccccagtatctgcagatgccccctatgcttttaccgcctcgcacaggtcccggtcagttttcgcttccatcttccagacatggtggccatctggaagaaaggagcacgaaacgtctgtgactctgtgtggtggggagccccctccccagacacccccacgtgatccagacccagggccctgagccaggagggcgccttgtcccaggagacccacgtaggcccatcccagggctttgtcgagggcagcacctcaggagccacgtgccctggcagggccccgagctcgacacccaatttgccctgggagcctgc

SEQ ID NO: 93603 - DNA, 445 bp, Homo sapiens
gacaactaaacaataaaaagacaacccaattcagacaggggcaaaggacctaaaaagacatttctgcaaggaagatatgcaaatggccagtaatcacaccgaaaagatccttgacatcattagtcagcagggaaatgcacatcaaaaccactaggatggcgggaattaaaaagtcagataataataagcattggtgaggacgtggagagatcagaaccctctacgctgctggtgggactgtaaagtggtacagctgctctggaaaacagtctggcagttcctttaaggattatatcaatatatacctcatgacccggtaatttcacgactaggaatttctctaatattatatattgccttacgtacattttaagacattgatcccttataatgactaacattgcatatgacttcacgtgctttaatgtagtatctatgatattgg

SEQ ID NO: 93604 - DNA, 442 bp, Homo sapiens
aagatttgaaagttgaaattacattttgaactatgggctgcaaaatggatggtatgttaacaggcacgaaaacaacgtgaatctccttgtatatctgcatcagagctcttaggtgaccaggtgcattgtaaatggtcaataatattttgaaaggaaatctttttttccgagcagtgagtctcaacagttggcttaaaatattcagtacactgtgttgtgaacagatatgcagtcatccaggctttgttgttccatttatagagcataggcagagtacatttaacataattctgaaggatcttacgattttcagaatggtttgtgagcattgccttcaacttagtcaccagctgcattagcccctaacagtagagtctgcctgttctatgaagctttgaaaccacgcattgatttcatatctgtatctaggaaagtcctagat

SEQ ID NO: 93605 - DNA, 428 bp, Homo sapiens
  misc_feature (1)...(428): n = a,t,c or g
cacattcagtttattgcagtatttttcaagtctcctattttcttattgaaactgggtaactgaaacctccaaccatgattactgaattatccatttcttcctttaatcctgcaagtttttgcttcatggattttgggactctggtattagatgcttatatgtttataattgttaggtcttttatcatcataaaaatcttctttgtcttaaagtctatcttgtcttctattaatatgggtctctggccctcttttggttactgttgggtggtatcttcttacttttaacctctttgtatctttaatctaaagtgtgtctcttgtagacacaatagagttggatctgttttttttaaaaatccattctgttgatggngcatggtgctcatgtctgtaatcccagcattttgggaggccgatgtgccctgg

SEQ ID NO: 93606 - DNA, 447 bp, Homo sapiens
agctgactaaattaatgagtagttttttatgctacttagtatacttcagcattgtctccagaaacaggaatgttttatataaaacatgacaaagcagctggagtggggcagagacatggaagcattctcatgtccttccatttctcaggggtgctgcagttcactgaggagcagagtgtggaagttacagcatatctgagctatggggtgtgtgggttgtgttatacccaggttctcagggcctgcttttctaaaacgctgggtaactgcaggtgtttgttgtttgctaactgtgtgtagatatcatctgtgtatgcctggcaagaaaggagttaataaatgtcacgtctataatcccagcacttggggaggccaagatggaaggatctcttgagtccaggagttcaagaccagcctgggcagcataaggagaccctgtctctattt

SEQ ID NO: 93607 - DNA, 426 bp, Homo sapiens
  misc_feature (1)...(426): n = a,t,c or g
ggcatgagccaccatgcccggtccctaatcattaatcaactatttaaaaagtgttcaaccttatttgtcctcaggaaatgcaaattaaatcacttcttannnnnnnnnnnnnnnnnnnnnnnngcaacagtgtaagtggtcaaggatttgaaacagtggggactcactgcggacaaaagtgtaaattggtacaaccgtttttggaaagctgtttggtaatatctgttgaagttgaatgtatttatactcttcttgatatataacagaaatgcacacttagaagacacatgcgagaatgttgatagagcattatttgtaatagtgaaaaactggaaactatccaaatatccaccaggagtaaaatggagaattaaattgtggtatagtcattcagtggaatcgtctacagctgtgttacccaaagtg

SEQ ID NO: 93608 - DNA, 423 bp, Homo sapiens
gtattttgaaaccttccagccactcctcaggaggctgggctatcaaggcacattttttttcccccaagccctggtcatcttgtctaggtatagaatacaacagtggaccagacagctgtgcttaatttttcctccaaaaccaaatcaggctagtgaacagtgccaatattaggctgatggccatgacattgaaaactaatcaggtggccattgcacagttcctagagtgcaaggagtcagaccaacagttctgcatcggtgtcacccatgtaaaagcacgcactggctgggcgtgattttgatcagctcaaggctgtgaccttcttcagaacctgcaaaatgtcactcaagggccaagattccccttgttgtttgaggggacttcaatgcagaaccaacacaagaggcctagaaacactttcg

SEQ ID NO: 93609 - DNA, 443 bp, Homo sapiens
ctgcactagctgaaagtggactccggagactcggaagtaaggtatgtttttatactccagcacatcactctcctcatgtgctcagcttatatgaaccagctgctcaacatttttgtgcgcccatccttattagcagtagcattgcacatgacaccagggttcacgaaagaagatgtctacagttgctttcgcttcctacgtgatgtttttgcagatgagttcatcttccttccaggaaacacactataggactttgaagaaagctgttacctgctttgtaaaagtgaagccatacaagtgactacgaaagacatcctatttacagagaaaggaaatactgtgttataatttttagtaggactctttaaaccttttgtgaaagctatcatataatttgcaagtcccttttagatgaaaaataggccccctttattgaggaacca

SEQ ID NO: 93610 - DNA, 441 bp, Homo sapiens
agagagctgagttcttgtagagactaacaacttgaggatggggcaagttaccatgtgacctgaactccctgacatgcaccggatgcctggacgctgtcagattcaccaagccaaaaaatagggcatgcacagcagtaagtactccatcattaagtgtaagtggtatacagaagactgggctcaagcatgtcttgaagacacaagtaaatatgagcaagtgactcagatacccatggctcctaacgatgctaccctgcttcctctctcatcttgcatttactgcctcatgaggagctccctctgacagctgactaaggaacactttaggcctgatttgtgatggttcaacataaaccctctagcactaactgaaagcagacagttatagcattacaatctcatgcagggttgaacatgaaagaatgttgaggagcagaaaac

SEQ ID NO: 93611 - DNA, 1768 bp, Homo sapiens
tttcatgccacctgcttctggcgccccgctggaccctgcttcgaagggaccgtttggtcgccagagggcggttcctggagttacagccgcgtttgcgggacgtgtctgcgcggcagtcctggcctgttgagcttgtccagacgaagcctcgcagggatgggttggagcccgggccgggcttcgctcaggcagcgtttgaggcagacccagcagggtcctcctggggccttcctgcctttgaactgcggtggcgggcgggcgcacggtctcctgtacgccctagactaggggccgccatctccatggccacggccgtgagccggccctgcgccggcaggtcgcgggacatactgtggcgcgttttgggctggaggatagttgcaagtattgtttggtcagtgctatttctacccatctgcaccacagtatttataattttcagcaggattgatttgtttcatcctatgcagtggctgtctgattctttcagtgacctgtatagttcctatgtaatcttttacttcctgctgctgtcagtggtaataataataataagtattttcaatgtggagttctatgcagttgtgccttctattccttgctccagactagctctgatagggaagatcattcatcctcagcaactcatgcactcatttattcatgctgcaatgggaatggtgatggcctggtgtgctgcagtgataacccagggccagtacagctttcttgtggttccctgcactggtactaacagctttggtagccctgctgcgcaaacctgcttaaatgaatatcatctttttttcctactgactggagcatttatgggctatagctatagcctcctgtattttgttaacaacatgaactatcttccatttcccatcatacagcaatacaagttcttgcgttttaggagatctctgctcttattagttaaacacagttgtgtggaatcactgttcctggttagaaatttctgcattttatattattttcttggctatattcccaaagcttggattagcactgctatgaaccttcacatagatgagcaggttcataggccacttgacacagtgagtggcctcttaaatctctcgttactctaccatgtctggctgtgtggtgtctttctcctgacaacttggtatgtctcatggatactcttcaaaatctatgccacaaaagctcatgtgtttcctgttcaaccaccatttgcagaagggtcatgagtgccttccaaaagtgttaaatagcaatcctccccccatcataaagtatttagccttgcaggacctgatgttgctttctcaatattctccttcacgaagacaagaagttttcagcctcagccaaccaggtggacatccccacaattggacagccatttcaagggagtgtttgaatcttttaaatggtatgactcagaaactgattctctatcaagaagctgctgctacgaatgggagagtgtcttcatcttacccagtggaacctaagaaattaaattctccagaagaaactgcttttcagacaccaaaatctagccagatgcctcggccttcagtgccaccattagttaaaacatcactgttttcttcaaaattatctacacctgatgttgtgagcccatttgggaccccatttggctctagtgtaatgaatcggatggctggaatttttgatgtaaacacctgctatgggtcaccgcaaagtcctcagctaataagaagggggccaagattgtggacatcagcttctg

SEQ ID NO: 93612 - DNA, 430 bp, Homo sapiens
  misc_feature (1)...(430): n = a,t,c or g
gaaattactcctttttccatgggctgcagaataaatagtgtgttagcagacatgaaaatattaatctccctgtacatctctatcagagcttttgggtgacccaggtgcatcgtcattgagtagtaatattttgaaaggatcttttagcagtaagtcccaacaatgggcttaaaatattccgtaacccatactttcaacagatgtgctgtcatctaggcttttttctattcatagagaggctgaatagacttaatataattcttaagggccctaggatttttggaatggtaaagaacattggctttctcttaaaatcattgtctgcattagtccctaacaagagaatcagcctgtccttttaagctttgaaaccaggcatggacggacttttttaacctttgaaagccctaaatataatcttttacaaaan

SEQ ID NO: 93613 - DNA, 409 bp, Homo sapiens
aaaaatacaaaaattagctgggcgtagtggcgggcacctgtaatcccagctgctcggaaggatgaggtaggagaatcgtttgaacctgaggcagaggttgtagtgagccaagatcgcgccacttgattcaggcagtagtttgtggccttagaatggaagggttgagaggatgtgtaatctttataataatgacatgtattatctttgagtgtgttctttcgtgtgtctatgtttgctgtgttgtcagaatgtgttatcttgtttatggttttttcttcagtgtttttgttcttaatatgtgttttgtaattatgcgttctttatctagtttagtttgtatttattatatagttgtgttgtttacatgatatgttgtatttgttgattcttatttatttcttcattttgt

SEQ ID NO: 93614 - DNA, 612 bp, Homo sapiens
ttttttttttttcttattattaggtttgttgcatcaaattccagatgtgtctccaacgggaaaatatacaaccctcttgcctttgatgattattcttatgatttcaggcattaaagaggttatatacatcataaatgacatggcagacaaaatagttaaggaacacaaaactgttatgacaagattcatgggacacgtttaagtggaaagaggtgaatgtgggtgacactgtgaaggcctcgaatggggagctccttcctgcagacacagtcccgatgtgttcatatagcaacatctaatccggatagagagacaaatgtaagacacggcaggctttgccagaaacagcttctgtatcagtgcagggacatccttcctccaggcagcaagccttcaagcttcaagcctcagggcccaaccctaaggctgggggctctccctgcaggcaggactgggcctggagggcctcctcatacttctggagctgagaccagaagcccgggttcggttctgctaccgggcgagcgctcttcaccatctggaaggccttcgccaggctcagggccgcggtgccgcatgaggtacgcggtgcagacggcggccgagcggctg

SEQ ID NO: 93615 - DNA, 444 bp, Homo sapiens
gcaactcaatggaggccatcactggtgccagcctcagccgagaacgtgaacaaggccaggagctttgctgctggcattcatgcccttggagggaccaacatcaatgatgcaatgctgatggctgtgcaattgctggacagcattaaccaggatgagcttgtgacctaaggtagtgtcttactcatcatcctgttaaccgatggagagcccactgcgtgggagactaacctcatgagcatccagaataacgtgcgggaagctgtaagagggcggtacagcctcttctgcctgggcttaggtttcgacgtctgctatgccttcctggagaagctggcactggacaatggcggcctggcccggcgcatccatgaggactcagactctgccctgcatatgcaggacttctaccatggaagtggcccacccacttgtgacagcagtgac

SEQ ID NO: 93616 - DNA, 360 bp, Homo sapiens
caaagcacaatcaaagcaatggctaccaagaggtggaagtggtccagtcaaagaagagtggatgaggaaagtgcaaaggtaattgtaagagtttattgggaagctcaaggcattttgcttattgactttctgaagggccagagaaggacaatatatgcttattctgagaatattttgagaaagccagaactctagtagagaaatgcctgggggagcttcagcagagtccttcaccacgacagagctcctgctcatttctctcatcagacagggcaattggtgagagttctgatagaaaaccattaggcatccacattacaccctaatttaaatcctttggatgctttttgttttgtaatc

SEQ ID NO: 93617 - DNA, 427 bp, Homo sapiens
ctggaggaaaactgtgaaaggtcactttactgatcagtgtaggaagcataaagccatgcaggaaattaaatccactttctcgagtaccatattcacaaacattctattcaatatagcgggattcaagctactcaagagaaatttggtggtttgaaaactagttactgtagcaaagactaatacattactgtacttgatttgacactgaaaatctccaacaaagatgtatctaactagcatgaaaatcccatatcaatgtacaaaaatacccgacagtaatatatggcagcaaagttattaaggacagaaaacttaaagcataaatctgatgtcctcaaggaataaaaaattttaatactttgactatttttatgttctgctgaatactatgacttttttaaagctttggaggataattacggaaatc

SEQ ID NO: 93618 - DNA, 413 bp, Homo sapiens
tgggtgcactagacatcataagcaggctgcgtccacagtatgttgacattgtgatgtcctcctggcctcttccagatacacatgcatcctgccatattctgacagagatgatggacctcaggatcaactaaaaatgtcagtggacttcaggtctagaaggacgggctcctgtttccccagaacagttgggggcatatgggagtctgtggctggggaggggctggcagaaccctggatctcatacatcttaggattcccatgagagggctgaggtctgggggcttcctctgcaggaggaaattagttagtgagagttatggataggaaccaagtcccctttgaaagtgaaagggaggctggggctcagagccatccccaccacagtcccatcccagctctgcccgcctccttcc

SEQ ID NO: 93619 - DNA, 419 bp, Homo sapiens
  misc_feature (1)...(419): n = a,t,c or g
aaagatatccctgatcctgtttaagagcataaataatactctcaatgtaaattgttttgaaataagatcttaaaaatacaaaatgtagacaattaatattcaggtgcttacttttgagccaatatgtagcagagaaaaactaatttctctgtggcagtatttttatttttggcatttcccaggaattaactgaagactaaaactcatatgtgaagtgtaatgatactaatcaaagagtcagtaaaatttccatttggctaccatgtatgtgtgtatatatttatgtantgaatgaggtgttacatatttgagacagggtctcactctgttgccccaggctggagtgcagtggcatgatctcagcttactgcaaccttagtctcccaggcttaagcgatccttccaactcggcctcccga

SEQ ID NO: 93620 - DNA, 2338 bp, Homo sapiens
tttcgtgttgcagcccaggcggaggcgcgggatctcgagctgggatcgccctcttgggcttcggtgcgatcggcggcgggaggttccctgggaaccaggtggtcgaagggctgagctgtgtggccagacaagaggtccctgccctcccccagtgagccctgctgttcccgtgggagccatgaagctgaacgagaggagtgtagcccactatgcactcagcgactccccagcggaccacatgggcttcctgcgcacctgggggggcccagggaccccaccgacccccagtggcactggccgaagatgctggtttgtcctcaagggcaacctgctattctcctttgagagtcgcgagggccgggccccactgagcctggtggtgctggaaggctgcacagtggaactggccgaggctcccgtgcccgaggagtttgcctttgccatctgctttgatgcccctggagtgcgcccacacctgctggccgcagaagggccggcggcccaggaggcctgggtgaaggtgctgtcccgggcaagctttggctacatgcgcctggtggtacgcgagttggagagccagttgcaggacgcacgccagagcctggctttgcaacgccgctcatcctggaagtctgttgccagccgctgtaagccccaggctcctaaccaccgagctgcgggcctggagaatggccactgcctctccaaggacagcagccctgtgggcttggttgaagaagggggcagcaggtctgcagggtgggggttggctgagtgggagctgcagggccctgccagcctcctcctaggcaaggggcagagccctgtgtcccctgagacctcctgcttctctaccctgcatgactggtatggccaggagatcgtggagctgcggcagtgttggcagaagagggcccaggggagccactcaaaatgtgaggaacaggataggccctaagtctgggccctttgagtcaggaaaccagggccagttctttttcaggagttaaatgtttacgcatttccaaggttgcgttttgggaggggacatgggttctctccttcctgctatttaggcattctccaggttcgagatccacccgtgtgtctggaagggactgcgggaccattccttccatcctctttatttcctgaggtccagagaaggaaggagacttagcagccacagagcaagaccccaatctcctgactgcactggcctgactgccccctcccaggggatgttaatgaaatgaaggaagtggggaatgtcacccgagactgtcacaggcttgccatacctttggcctacacaccgggctctagagccataatttccaacctggggagtctcctgtgcacttaaatccgaggtaggctgcagtatcggcttgaagctctgacactgtcagagaaagtggatttattgtgtcataggagtttctgggacccagctcttcctgagaggggtgggaagattggggatgggatcctcactcagcagtctgggtagggccctttgaggcagagggtcttcggccagtgaagagagatttattctgcttctgctcagagtgctggggtcccatcctttctccctggctgccctgttaacagatggtgctggaccttgccccggaaggggcttgtagcttttttacgtcaacgaaatgccctcctgtactctgtcttcagcagccaactcctggagctgccaagtgaggggttaaagaagaggtggggaggcagtgtggctccctgggaaaagtctgttgctttggttctcagtcctgggtattctaggagcttggacacgggattgcgtttcctgtgctaaaattctctctcctggctgggctccggtaaactgaagctgctcgagaaatcacctgggaactctcatagccgtttgtcacccagggtgtacttgccaggacctctccttgctactcttcccaaagtcgggaggcaaagcggctgggtcaccagagcctgaccatactgacgctccagggggaagacgcagaggccgggaagagacaccccctcccaaacacataaaacttgccccttcctagcctcggctcccctcactggggccttgggcaggaccgacccgcatccaactaggcctaaggggtaggctctgagcctcttacccctaagaggcggagatgcgcccaaggcgggcgcccggcctgttccccagccctgcctggaagccccgcagccactgcattttgtttaaacacagatagcacgggcctttctcttattgctacagtgttttgtacacggttaaaacactagtaaagctttttcgttattaaaaaaaaaa

SEQ ID NO: 93621 - DNA, 408 bp, Homo sapiens
aaaatagctctgaaactaagaagcaattatagcaagatttcaggatacaggctaatatacaaaagttgatcatttttctatatactagcaatgagcaaatagaatttgaaattaaaaatacaataccatttacattagcaccccccaaaattaaatagttaggtacaaatctaacaaaatgtgatacaagagctatatgaaaaaatctataaaagtgtgatgaaaaacatcaaagaactaaataaatggagatcttcatatggtaagggtaagagcaaaataaaaattataaaaataaataaataaatggatattgcatgttcatggttaagaagacttaaaattgttaagatatcagttcttcataatttgatctatagattcaatatagtccctatcgaaataccg

SEQ ID NO: 93622 - DNA, 412 bp, Homo sapiens
cggggaattctttttcctagccaagggaagccatgagggacggcacctggaaaatcgggcaactcccactgcgcttttccacctaatactgcgcttttccaacggtcttagcaaacggcacaccaggagattatgtcctgtgcctggctcggggggttccacacccacggaacctcgctcattgctagcacagcagtctaagatggaactgcaaagcagcagcgaggctgggggaggggtgcccaccattgctgaggcttgagtaggtaaacaaagcagccctgaagctcaaaatgggtggagcccaccacagctcaaggagtcctgccggcctctgtagactccacctctgggggcagggcatagctgaacgaaaggcaggcaaaaacttctgcagacttaaatgtccctg

SEQ ID NO: 93623 - DNA, 437 bp, Homo sapiens
agagtgggtacagagccccgcttaggtctctgtctcagggagctccctccctcctgttcataaggggggacccagaagaaaccaggagccagggagtcaggctgatgaggtggttgctgcccttagggccccactttagaaggagcagctggaatctaggatcctttatcttttccctaacatttgtccatccttgctggtgaggccaggcattcataagcagggtggcagcatggccctgctctgaggcattggcgtgggcaaggagaacctggcagacaccggccctggaagaagcctgtctggctatgggggtgctgggcttggaaagggagggggcagttgagaggattgccccgaacgtcaaaggtgttttcatggcgtttggattcttggcgcctgccctgatctgggttgaaggccttggctctggcctg

SEQ ID NO: 93624 - DNA, 373 bp, Homo sapiens
  misc_feature (1)...(373): n = a,t,c or g
ggtaatctaagttttcttttatgttatccttataggagttttatagttttgtgttttacatttaggtctgtgacccattttgactttatttttgtgacggctgtaaggtctttgtttagattgannnnnnnnnnnnnaggggggctgtccaattgttccctcaccatttgttgaaaagactatcttttctccattgaatttcctttgtcaaagatcagttgtctatttgggggctctctgttctgtcccattggactatttgggtcatcttttgccagtaccacactttttccccccacaccttttatgagcactgttaccatactggtttaattactccagcttttggggtaagtcttgatgtcaggtaata

SEQ ID NO: 93625 - DNA, 425 bp, Homo sapiens
ctctaagacttactccataggtcattttacatatgagggcaaggggactatcacaagcctgtggggcaaggtgaatgtggaagatgctgtaggagaaaccctgggaaggctactggttgaatacccatggacccagaggttctttgacagctttggcaaactgtcctctgcctctgccatcatgggcaacccctttgttaaggcacatggcttgaaggggctgacttccttgggagatgccctacagcacctggatgatctcaagggcatcctttgcccaactgactgaactgcactgtgacaagctgcatgtggatcctgagaacttttttctcctgggataagtgctggtgaccgttttggcactccatttctgcggagattcacccctgattgcaggcttcctgcccaagatgggactgtat

SEQ ID NO: 93626 - DNA, 434 bp, Homo sapiens
caaaagaatgctaaaaagtgctcagacctgatcacaggttttccaatattttttcctttttttttttttttttggaaacggggtttggcttaatcccctaggcggaggggcaggttttggaaacggggcttggctttatccccaaggcgggggggcaggagcggggttaattataccctggacctcgggggttaaggccttcctaacccccccaggtgggagggcctacgggggggccccaaaaggccccacttatttttaaaatttttagaaaaaccgggggtctcatttgggggccaaaatgggtctaaacctcgggacctaaggggatctcccggtttgggccccccaaggggttaaaataccgggctggacccccttccccgggtgggtttggccttttttaaaaccccgggccagggagccttttattt

SEQ ID NO: 93627 - DNA, 426 bp, Homo sapiens
aaggtgccgctcagctcctgcccgtgtcattgccgtctgctcaaagggccatcgatttacagatattaacgactccttgggaaaactggacttcaatcgcctctctccaacataaaacgactattgggcgaagctggcttatcacaggtccaatctctgcaacatcctctactccaacgagctgcaccgtagcctctccccacgcggggtcacgtttaacgcagtgcatcctggaaatatgatgtactccaacattcatcgcatatgtgggtggtacacactgctgtttaccttggcgaggcctttcaccaagtccatgcaacagggagctgccaccaccgagtactgagctgctgtcccataactggaaggtctggcagggatgcactttaacaactgctgccgttgatgccctcacagaagctt

SEQ ID NO: 93628 - DNA, 464 bp, Homo sapiens
  misc_feature (1)...(464): n = a,t,c or g
aggtgggagaggagactgggtctgtgggctcatggtgcgggggtagggcgttgctcagcagtggggacccctgagaggcaagggggcctgatcaggatgagcttccaggactgttgatctggaggtgaggggttgtggtaggttggaccagggaaaagaggcacttctggtcattcaggtgagaagaaggggctcccaggtagaggagggatggacggaagccacagaaacagcccagggagggccgacaaggagaggctggaggtcacaaagggcaccgggtttggtggccataatgaagttgatgcctttccaggcagggactgctgctgggattacgggcgtgagccactgaggccggctggggctcgaatcttgagaggaaccctggtgagtgaagaaaagaatttgtcttcgatggccagtggtcagagctcagcttaatgtcacgaacttcatttaan

SEQ ID NO: 93629 - DNA, 408 bp, Homo sapiens
ggaacaacaagctttcagagtcactgcagggcaagagctggggaaggaagagctggctggtcagggaggatgcactggagagaaaaaccatcactcaattggctaggacattccaggacatcagggagaccacacaacagccagagtgtctcttctcctccaaatgaacgcaacacctctccagcaagggcacagaactgggctgaggctgagtattgctgacgcaataccgtttagaacataggcacggataaggatttcatgacataaacaccacaagcaattgcaaccaaagcacaaattgataaatggaatctaatcgaacctatgagcttctgcattacagagaaactatcatcggagtgacagaccgatacacaagggacaaaatttttgaatctggccggg

SEQ ID NO: 93630 - DNA, 427 bp, Homo sapiens
aaaatctaaaaatgaagagtagaacttcaaaagaaaatataggagaacatatttatgactttgacataggaaggtttgttaacacatagagtaaaccagaaaggaagagattaagttttaaaacttctgttcaagaaaagacaccatagttataagggaagcacaaatgaatgaagttggaaccatgtaccatatccgaaaattaactcaaaatggatcaaagacaatgtaagatctaaagctataaaactcttggaagaaaacaggtctgaatcttcaatttggcaaaggatgcttagataatgccaaaagcacaagctataaaagaaaaagtagataatttggacttcttcaaaattaaaaactgtgtttcaaaggacaccattaagaaagctttagacaggccttcggaaagggaaaaaatatg

SEQ ID NO: 93631 - DNA, 449 bp, Homo sapiens
  misc_feature (1)...(449): n = a,t,c or g
gtgttaagcattagtaaatgtgacaataattcgagatgcgcgaaattattgtggcttttcattctatacttatacgataccatggattaatcaaccttagaaagtttcaataaatggatcggcggtattccaaggaggtccaggacctgcttgaaacaatgaagctatttgcacgaattgtgggtccactgtaacatgacaaattcattgaaagccatgcattggaatttgaactcctaagggaaatcaagaggctccaagaatacaggacagcaggcattaccaatttttgtagtgccagaacctacgatcacctcaagaagacacggtaggaagagcgccttaaacgcactatgctctcagaagttctacagtatatccaggacagtaatgcttgccaacagtggcttcggcgggaaacttacacttgagtccggcccaaatccttn

SEQ ID NO: 93632 - DNA, 929 bp, Homo sapiens
ctcaggcagaggatgccacctcagggactccagccttgcccgtggccccctcgatatcctctgatagccctctcggttgtcctggggggcttgccctctcccaacagcccgagctggccgaagttggcttccctagctggttccagaggttcctcggctcccccaggtgtctggggcttagtggcaacaggggcttagcctctgcagagacctagtgcgccgcctccttgccccagacctgcccgggcagagagccgtgtatgtgtcccagtgcacaggcgctgctgggccctgccaaaaggccacaagcccactgtcaccgttcacattgcttctcgcttcccggcccagccccgcccacacaggcatctgccttgaaagaggtgcaggaggtacaggcaggtgggggctccagtgagctctgaggaacagcagtggccgccatgggtggagcctatctttgttgccagtttcagtgttaaacactcttgcacgtgtgacatcattgagtcctaaagaccactctgctcagtgcatgccattgtttccttcagttacagaggagggaaccagagcccagaacatttagcctttgcctaaagtcactgggccaggaagtggtagaggtggggttcagcaggatttgcctgggaaccccaatattgaccacagtgccatgctgccctgcacggctccctggctgtgagttgtcctggcctctggcaccaccggtctgtctgggttcctatgtccctatgtcccacctgcagaatgtgacatgcagctctttgggccctggggtgaaatcgtgagcccctcgctgagtccagccacgagtaatgcagggggctgccggctcttcattaatgtggctccgcacgcacggattgccatccatgccctggccaccaacatgggcgctgggaccg

SEQ ID NO: 93633 - DNA, 409 bp, Homo sapiens
cagcaagtcaccagatccaactcagcagccccttcggggcggctctctaacccacagtgccccagggccctccctgagccagcccctggcccagttgacgcctccagcatttggccccagtaccagcagtctgttcaacttgcaaaaatccagcctctctgcccgacacccacagaggaaaaggcgggggggtccctccgagcccacccctggctctcggccccaggatgcaactgtgcacccagcttgccagatttttccccattacacccccagtgtggcatatccttggtccccagaggcacaccccttgatctgtggacctccaggcctggacaagaggctgctaccagaaaccccaggcccctgttactcaaattcacagccagtgtggttgtgcctgactcct

SEQ ID NO: 93634 - DNA, 451 bp, Homo sapiens
ttttaccaatgacattattcacagaattagaataagctactctaagattcatatggaaccatataacaatccaaatagccaaagcaatcctaactaatcaaaaagaacaaagccagaggcatcacaaatatatgttaaggcaagtggcctagaggcagtcaggaccatatacttggctatgataagtacttgaatttaatatgcattatttatgaggcataaaacccaatattgtttgactcacaaaataaacacagcatttggttggtaggagtgtataaagtgaattgaaatctcgagacaaataaagaaaatttataataccattctgaaatatttgctgaatgctaggatggaatcaaaatgaatatatttgtgtaggctttgtatgtgcaaaaccttagctatctattgaaaaatctaggatgattctttctggataccccaaatt

SEQ ID NO: 93635 - DNA, 407 bp, Homo sapiens
ctcggcgtggataagaagcagtcgggcatccaggcatgactggagcggagcccagcctccgtgggcaccagggtgtgcatggcgggctgcagtgcggtcagtcctgtggacggtggggcaggaggcggtggctggacagtgcggtcagggtcgacccaagggctgacagcggccggagctcaggcgtgcttaggaagccctggactcccagggtggggaggcgagtttcagccccttaaaaaagatggacagctcaagccatccaaacagggactgaattgtctgtgagccaatgcgttccccatcactggaggtgtgcctggctcaggcacagctgaccggggagccctcaaagacccccacgctcaggttctgcctctgccccgattcccggtgtgtagggccag

SEQ ID NO: 93636 - DNA, 456 bp, Homo sapiens
  misc_feature (1)...(456): n = a,t,c or g
gctgagttgtccgagctgtatgaagagagcagtgacctgcagatggatgtgatgcctggcgagggtgaccttccgaaatggagaggaagccaccggaacccgagcagctatcccttgggtccctcccgcaacgggggcccaacagctcgaggaggaaggcccaatggaggaaggaggaggcccagccaatggcggcgccagaggggaaacggagccttgctaacgggcccaacgctggggagcagccaggccagnntggnnngggccgcagaacttcgagagccgaggacgaggnccgaggaatttgatgactgggaggacgactacgacttttccgcgagaggagccagttaagggtgcccgtttacggtttttaccgccttcttgaaaaacccccccaagtttttgggaaaacaggaacacccctttgtgggggggtttaaaaattttttataa

SEQ ID NO: 93637 - DNA, 446 bp, Homo sapiens
  misc_feature (1)...(446): n = a,t,c or g
ctgggaaaggcggtgttgggaaaagcacattggnnnnnggggttgcccatggnctagcagaggatgaaaacacacagattgctcttctagacatcgatatatgtgggccttgaatccccagaatatgggaatggaaaggaaaccaggtcccccaaagggcttaagctgggcttcaggggacctggaagacaacctgggggtgatgtcagtgggcttcctgctcagcagtcctgatgatgctgttatctggaggggacccaggaaaaccggcttgatcaagcagttcctccgaaatgggactggggagaaggtcgactacttcatgggggacacccaacttggaacgtcggatgaacacctttcgtcggtcgcgacctgggccaaggcacacttgggggagccaggagctttcacctttccccagagggtgtctctccgggaggccg

SEQ ID NO: 93638 - DNA, 432 bp, Homo sapiens
  misc_feature (1)...(432): n = a,t,c or g
gaagccaaagtggtaggatagcttgagcccaggagttccaaaccatcctgggcaacagagggagaccctgtctctaccaagaaaaaaaaaaaaaaaaaaggttaaaaaaacatttaatgggacctgggggggcacactcagaaggttgaggtaaaaggattctttaaacctggaaaactgaagctgcagggacccatgatcgtgcaatggaattccagtatggggaacaaaggggaaccttatttcaaaaaaaaaaaaaaaggggctttttcctgaaaaaacggagggaaatggggataatggtttaaacccttatttgaaaagggaacccaaagggggtaaaattaaaaatttggggaagggaaaatttaaagggaacttttgaaatgaaaataggaatgaccgttaacaagggtccggggactgtaaacn

SEQ ID NO: 93639 - DNA, 483 bp, Homo sapiens
gagaaaccctatcaatgcagtgattttgggaaagccttcaatatgaagacacaacatggtggtacatcaaggagttcacacaggaaataatccttatcaatgccgtgaatgtgggaaagcctttggtaggaaggaacagctcactgcacatctaatagctcatgcaagatagaagccctatggatgcagtgaatgtgggaaggctttcagcagcaagtcataccttgttatacataggagaacacacaccggagagagaccctatgaatgtagctcgtgtgacagagccttttgtggaaaatcacagctgattatacatcagataactcattcaactgaaaatcactatgaatgcaatgaatgtgaaaacacctaccctaggaaggcatcacttaagatacaccaaaaaattgatctcggaaagaaaccttttaatgcaatgaatggggaaaagccttattaaaaaggattttccctgaaaag

SEQ ID NO: 93640 - DNA, 470 bp, Homo sapiens
cgtgaatttctttggcaggaagggcacagagcttttgctaccgtggatgaggcaggggaagaggtcttgcagatacttgacttatatgctgacgtatatgaagaactcctggcaattcctgttgctaacggaacaaagactgacaaggataaattggcaggaggagactatacagctacgatagaagcatttatatgtgctagcggaagagctatccagggaggaacatcacatcttttagggcagaatttttccgcaatgtctgaaatcgttcttgaagatccagagataccaggagagaatcaatttgcctatgcaaactcctggggcctgacaactcgaactacttgggttatgaccataggtcatggggacaacatgggtttacattaacaccccgggtagcctgagtccagaggtgataatccctgggggcattccaaaggcttttctgaaaagacaaaaaaccg

SEQ ID NO: 93641 - DNA, 448 bp, Homo sapiens
ggctcaggaaggcagctgtcactgatcccctggaacagagcgagagtatcgtattgggcagcagtcagtgacaggtgtaacctctgtggatgacagcaacagttactggaggatacgggggaagagtgccacagtgtgtgagaggggaacccccatcaagtgaggccagcccatccggctgacacatgtaaacactggccgaaacctccatagtcaccacttcacttcacctctttatggaaaccagttgctctgtaaggtgatattgtgatcattttatagaggagaaaacaaaggctcaaaggatttacagaagaagggatcaagttgagattcaaggaagtgagtgcttttggtgacgaaggtgaaggtgattatctggatgactggacagtgctctgtaatggaccctactgggtgagagatggtgaggtgcggttcaacactt

SEQ ID NO: 93642 - DNA, 495 bp, Homo sapiens
aagcaatggaagtgaaagcattcgcggagacccacatcaggggcttcacactgaacgatgctgccaacagccgcctcatcataacgcaagttaggcggcattatttgaaagaggctgcgacaacactgaaaacagtattggatcaccagcataccccttctaggttagcagtgacccgtgtcatccaggcattggccatgaagggtgatgtatgacaacatataagtatttcataagatgttaaatggactcgaagactccattggactttcaaaaatggatttcatcaataacattgcattggctcaaatatagaatagtaacctagatgcctcagtataacacattgaaaatatgcttacttcatagaataacgtcattgaaccccaatacttcggctcggcatacttattcagacaagtactcgaggagcagttggaaccaaccgttgaaaagataagcatcatggcggagagattggccaaaccgttgcaa

SEQ ID NO: 93643 - DNA, 466 bp, Homo sapiens
atgctagccattttcaaatatctcatcaacaaccgactaatcaccacttaacaatgactgaaaaactaacctcataacaaatgataaccatacacaacactaaaggactaacctgatctcttatactattatccttaatcatttttattgccacaactaacctcctcggactcctgccttactcatttacaccaaccacccaactatctataaacctatccatggccatccccttatgaacggtcgcagagtttataggctttcgctctaagattaaaaatgccctatcccacttcttaccacaaggcacacctacaccccttatccccatactagttattatcgaaaccattagcctactcattcaacccatactcctggacgtactcctaaccgctaacattactgcaggccacctacttattcacctaaattgaagcccactctaccaaattaaccataacct

SEQ ID NO: 93644 - DNA, 428 bp, Homo sapiens
caggagagagggacgaaaaaggagatggaggacagaatgacgttagaggagaccaagtgaacaaattctgaagttggaggagaagctttaggctctacaggaagagaagcaccagcttttcctgcagctcaagaaagttttacatgaggaagaaagacggaggcgaaaggaacagagtgacctgaccaccctaacgtcagctgcataccagcagagcctgactgttcacacaggaactcatctcctcagcgtgcaggggagccctggaggacacaatcgcccaggcaccctcatggcagctgacagagccaaacaaatgtatggaccccaagtgcttacgacccggcgctacgtgggcatagcagctgcttttgcagggacaccagagcatggacaattccaaggcagacctggtggtgtctatggag

SEQ ID NO: 93645 - DNA, 454 bp, Homo sapiens
tgaggacggggacttggatgccttttccagtgacgaggggttgacaatggccatgtcctacttgaaggatgacatcttccgaatctacattaccgagacacaagagtgccgtcggtaccaccgaccaccgtgtgctcaggaggcgccctgcaacatggtgcaccccattgtgatctgctatggctgctatgggcctgaggtaggaacccgctacacgtgcagcgtctgcccagactacgacttgagtagcagttgcaagggaaagggcttgcaccgggggcacaccaagctcgcattccccagccccttcgggcacctgtctgagggcttttcgcacagccgctggctccggaatgtgaaacacggactacttaggtggtcatgatgggaaatgggtccaccaggaaactggagcccacgtacttcttgtgcagggaggcccgccttgggccaa

SEQ ID NO: 93646 - DNA, 435 bp, Homo sapiens
gggaattgaatacatctatctttaggtctagacccatagagggacttggccttaatacagttttaaccactgataattcaaatttggtcatataacagaatagggattgtgctcctctgtgacagaaaaggaatatactgatccatcatcagatggaacatatgcctggaagatcttttcccatgaaactattactaaagcacagattctaaagctatttctgtcctatgattatgctgtgaataatccatggcttgcatatcctcactataagtccccggagaaatgcccctctatcattctccatgatcgactttattacctcaatggcctataatgcgcagctagtgccatggtgatgattgccattgtaacttacaacgttgcactccttgcctatcaccgctggaacggtctcacatacatgattgatag

SEQ ID NO: 93647 - DNA, 577 bp, Homo sapiens
gaaataaaatgattaaatataaataaaaaatataattatattaaaagataagattattataaaattataatataataaaaaaatgaatattatataaataaataagtaatataataaagaataatataaataaaatatgaaaaaaataataaaataattaaatatattatagccaagtgtcaactccaactattgtaaaggtctcaagaaacctaggaaaagtgggcagcaaatgttgtaaacatcctgaagcaaaaagaatgccctgtgcagaagactatctatacgtggtcctgaaccagttatgagtgttgcatgagaaaacgccagtaaatgacagagtcaccaaatgctgaaaagaatccttggtgaacaggcgaccatgcttttcaactctagaagtcgataaaacatacgttaccaaaaagtttaatgctgaaacattcaccttccatgcagatatatgcacactttctgagaaggagagacaaatcaagaaacaaactgcacttgatgagctcgtgaaacacaagcccaaggcaacaaaagagcaactgaaagctgttatggatgattt

SEQ ID NO: 93648 - DNA, 409 bp, Homo sapiens
gaaatttgttcatttcctctgggttgtagaatatattgggataaaattatttctaatatttccttattgcttttttaatgtctgtggaatctgggggtaactctgttctttcattcctgaaatcagtaatttgtatattctctcttttttgatgattaatcatcctaatggtttattcgattttattatgtcagaggaacaacttttggctttgttaattttctctattcttattctattgtttattttttccttctacttatttttatttaacgtattccttttttagtttcatgagacggaagcttaaaacactgattttagatctttctttgttaatagaagcatttaaagttgtaaattttcctcttggcacacaaactgtttttcctctgtgctcacaacacaa

SEQ ID NO: 93649 - DNA, 393 bp, Homo sapiens
ggcaacgtgagctcctgtggggaccatccctgcgaaggctgattatgccctctcagataaagtcatgtcgtaaggcatctgagtccctgaagaggcctgcactcaatgcattggtgaagatggagtccaccaccagtttctggaatcctgggtcccggaccaccaaccctgtcacatctgcacgagcctaaatgggcggaaggacaactgcacaacgcagacctgccccacgggcaaagcttccacgtgcggcctgtgtgaattagcccgcctccgccagaatgcagaccaatgctgtcccgagaatgagtgtgtgtgtgacccagagagctgtgacctgcccccagtgcctaactgagaacgtggccttcagtccacactgaccaaccctgg

SEQ ID NO: 93650 - DNA, 431 bp, Homo sapiens
aggattgcatgaacccaggagttcaagaccagccctggcggtgtagtaagaacctgtctctgcaaaaaatgaaaaaaattagccaggcctggtggtgcatgtctgtaaacccagctactctggaggctgaagtgcttgatcctggaaggttgaggctgccttgagacaacttcacgccactgaacatggccctgcgcaacaaagacttactttatctttgtacagtactcgtttgcaatcttctctttaagtttgatcctgaaggatactttcttttcgactagagggtggatatctcgagacctattctttctgtatcaaaggtcaccttttcctattgtagtccattcaggagatcgagccttcttgttatctttggtagtttctataagggctatgcctaatggattgttcggccttttccaccaatg

SEQ ID NO: 93651 - DNA, 404 bp, Homo sapiens
gtgatttcataagaattttaggattgttgtttctatttctgtgaagaatgtcttaggtattttgatatggattgtgttgaagctatagattgcttttggtattattaatatttttacaatattcttccaatctatgaacaagggatgtctccccccggcccacactcttttttttttttttttttttttcagtttcctttccccagggtttaacggttccctttgaaagcctttttaataccctgggggaatttaatccctgggattttttttggaccctatggaaaggggattccctttttggtttttttcccccaacttggttttgggaaggtaaaaagcctccaaattaattttttcttaatttaattttattttttggaaaaaatacccccttcttgccc

SEQ ID NO: 93652 - DNA, 559 bp, Homo sapiens
  misc_feature (1)...(559): n = a,t,c or g
aagcacttatctgagttcctggcacttagacattaaataattacttccctcccttgtgtatgaaaggagactgcccaaatgatgcttggagcgcctctgccctctggcttatcagctgagtgataagataatcgaccatagatttcttaggaatgaccttatccctccttccgagatgattataaaacattgaattttctgctgattagagagaagccacatggtaagacattgctaattatgatttttacccacgcaggtcataagttacgttaagagagctcttgctgaaggtgcccaaatttgatgcggagagggagtggataagttgagcctccctgccaggaaccaggcaggctactttatgcttcccacggagataacagacattaaggatgaatcctgctgcatgacggaagagatatttggtccaatgacgtgtgacgtcccctttgatagtgaagaggatgtgattgaacgagccaacaacgttaagtatgggctggcggctaccgtgtggacagcaatgtggngcgcgtcactggtgctaataactgat

SEQ ID NO: 93653 - DNA, 533 bp, Homo sapiens
gaagctgattacagagtctgaatgttattactgagctaaatcgggtagactagctgataggttggagcatagccagagttctcagtctcggcactcgtgacattttgggccagattattctttgttgtgtatattataggatcgttcaatagcatcactggcctctacacactagatgccagtagcaatccttgcaaccctcagttgtgacaattaaaactgtctcctgacagatttcccctggcggcgacagttgcccactggggtagagcgattaggcaaaggggtgcattgaatactgagggactatgccaccggcatcaccatgatagatgtacaccgcccctgtgaatgctccttcttggtgcccctatggcccgtctggggaccccaccttggcctgatgtaccagattggcatgctctttcctaggctccatgtcagctccttcctagtccatactagtttttttaaggcttgttttctctggtgaagttgacatttcggatcttattctgtccttgtaaccttgg

SEQ ID NO: 93654 - DNA, 548 bp, Homo sapiens
  misc_feature (1)...(548): n = a,t,c or g
ggtgcagaagtacccacagcagaatagatcatgtgtcccaccagtggcagagtgggctgttcctcagtcatcaagactgaaatacaggcaattattcaatagtcatgacaaaactatgagtggacacttaacaggtccccaagcaagaactattcttatgcagtcaagtttaccacaggctcagctggcttcaatatggaatctttctgacattgatcaagatggaaaacttacagcagaggaatttatcctggcaatgcacctcattgatgtagctatgtctggccaaccactgccacctgtcctgcctccagaatacattccaccttcttttagagagttcgatcctgcagtggtatatctgtcataagctcaacatctgtagatcagaggctaccagaggaaccagtttttagagatgaacaacaacaattagaaaagaaattacctggaacgtttgaagataagaagcgggagaactnttgacgtggcaacctggaactggagaaacgaaggcaagctctcctggaacagcagcgccagggagc

SEQ ID NO: 93655 - DNA, 953 bp, Homo sapiens
  misc_feature (1)...(953): n = a,t,c or g
aatagaaaacactaaaataatagtggtttatgtaagatagaagtggatttgtccccattatttaaaaatagtccagcaggacttacaccacatcattaccattgctcaaaaaagaagttacaagaaaaatcaggaaatattttattttgaataataattaaaacaccacatatcacaatttgtgggatttaactaaagtagtcttcagcgggaaacttttgttttaaagaagtagatgagaatataggaaagataaaatcagtgatctctgcttttacattcagatgctagaaaaaggcaagttattaaacctaaagtaagtacaagaaaggaaataaataaaagcagaactcagtgaagtggaaaagaaacaatggagcgcccaaagctagaagataaatttttggtaaacattaataatattaacaacccttagtaattaaacctatagagaaaaaaagagggacatcactgtatattttatagacattaaaaggataataaagggtatatttatgccaataactttaacattttagatcaaatggacaaattctttgaaagatatgtcaccaaaatggacacaagaacagatagtaagtctaaatatccctatagctgataaatcaaatgcataattaaataatttttnnnnnnnnnnnnnnnnnnnnnnnnnnnnnnnnnnnnnnnnnnnnnnnnnnnnnnnnnnnnnnnnnnnnnnnnnnnnnnnnnnnnnnnnnnnnnnnnnnnnnnnnnnnnnnnnnnnnnnnnnnnnnnnnnnnnnnnnnnnnnnnnnnnnnnnnnnnnnnnnnnnnnnnnnnnnnnnnnnnnnnnnnnnnnnnnnnnnnnnnnnnnnnnnnnnnnnnnnnnnnnnnnnnnnnnnnnnnnnnnnnnnnnnnnnnnnnnnnnnnnnnnnnnnnnnnnnntnatcaattttcaatnnnnncggcact

SEQ ID NO: 93656 - DNA, 423 bp, Homo sapiens
atcttgttggatctaaacagtggtttttatcttaggggaaaggttacagcagattgagagcaggcagaattgaaaccatagagaaaaagagtacttaggaactctgtcgtctggctgtatggcctatgcctgctttaggttaatgggaatgaacccgagccactgtgaaagggcatcagccgtcacgaacacagaagacagccgcacaacggcttccggcccaaaaacaaaggcggtgccaaaaatcaataggcttccttggggatgaagacccccgaggccccggcccattctgataagccccggcgaaggcagcacgctgcatactcctcttaggccatgcccttcctgggtatttgcattagtttttctcagtgcaatcttttcctcctaaattaaatgtattactgattactcatttcg

SEQ ID NO: 93657 - DNA, 395 bp, Homo sapiens
  misc_feature (1)...(395): n = a,t,c or g
tttaagtctttaatccattgtgagttgagttttgtatttgttgtgagataggatgtaattgcatttttttgcatgtcagtatctagttctcccagcactacttattgaaattactgttcttttcacattgtgttcttggcatctttgtcaaaaatcaattgaccataaaatgggtagattgatttctgggttctttattctgttccattggtctgtgtttttttgctagtgtcatgcagttttggttattactgctttgttttttaaattntttattttgctaaaaaattttttttagaaatggtcttactctgtcacccagggctggagtgcagtgggcatgaccatgggctcactgtnagcctggggcacaagcgatcctctcacctcaggcc

SEQ ID NO: 93658 - DNA, 419 bp, Homo sapiens
  misc_feature (1)...(419): n = a,t,c or g
actggatggaaaaatagataaaaaattattggtgaagacggtgacactctttgtcagaaatggccaaatcccaaaggcagattttcagtaaagacctagtgaaactggacagcaccatcaatcaagtggacataattgacatctataaactacatcatccaacaatggacagtgtacacattcttctcaagccattaggggacattcagcaagatagaccacattctcttagataaaacataccctaacaacttataaagaacaggaattatgcaacatatgctctcagacatcaaagtatttaaactagaaatcagtaccagaaaggtaacagagaaatcctaacatacaatgagcttatgtaataaaactttggagcaccctagtggcaatgaggatgcctcagcttatttaaaaan

SEQ ID NO: 93659 - DNA, 423 bp, Homo sapiens
acacagttgtttatgagacttattaagctggttctaaaatttatatattacactaaaaggacaagaatagccaggtcacttctgaagaagaagagcaagaaggtaagattaaagaaaacttaaatagctggagagataccaggttcacggataggaaggcaatattgtaaggttgtcatttcttcccaaattgatctttatattcaatacagtcccaatcaaaatcagaacacagtttttcatgaaacttaataagccagttctaaaatttatatactagactaaaaggacaagaatagccaagtcactcctgaaaaagaagagcaggaaggtaagatttcccctacaaataggaggacttattatgaagcttacagcactttagaaagcataggagcctccatgcccagcctagacttgggt

SEQ ID NO: 93660 - DNA, 420 bp, Homo sapiens
attataggcgtgagccaccgttcccagcctgagaccttgatctttattatagtcacccttttaaactgattactcattctagaaagtcctccttctcttggcttctgaactgacgttcttctctttgatccattgcttttcagatcttcttctgcctgatccttaaatgttgatattccttagggctgggtatggtggtgcacgcctatcgtcccagctactcaggataatgaagcacgaggatcacttgagcccaggagtttgaggctatgaactatgatcttgctgctgcattctatcctgggtgacacagcacagggagaccctgtctcagagaagaaccacaacagaagaatcctgcagtcttcctgcaacatacatctaaagtgttttcattattctgcatctcttttggccatg

SEQ ID NO: 93661 - DNA, 1708 bp, Homo sapiens
  misc_feature (1)...(1708): n = a,t,c or g
ttttttttttttcatagggctagggctttattacaaatggagtggactgctaaagaggcccttctccaatctttcttctgtaccttcttccctcccaaagacatccctctagggcgcggtcagtaggccattagggtaggaggaaatctggagagtgaaaaggggccttgcttttgtcaaagtcctcttgaaacaaccactgagtctgaaggctggctccaagttgagaatcttctagtggaagaggtttagctctcatcttcaaggtccttcatttctacatcctggggggcttttgtcttcttttgccttttgagctgtggttcactagtcctggctggctttgaaggggcttccacttccatggctgtcttctctttctgggcaagccggatctgctggaggagttttctgcgcttcttccctgacagtgtaatgttggcacgtgcactggacgcccgcttcttgaggtggtgccgcgtgatcagcccttggtctatcacagccccgaccacccggtgcctcagacgccgctcccgattcaacacccgccggcgtttgaacagcttcttcttcagctcctgccggggagaaagatgcgaatcagatggagtgggctcgccgcgacccggggcccctccaccaggcagccccggcccctcactgatcccatctcgtgcgagataaaagggctcaggaacgcttgaggaaaacaagtcgcggccccccacacagtcaccgttcggggccggttgatctttccccccggagctcccatagtcgcgattccactccagttcacggtccgtacttccgctcagcgccggatccgcggggctccgccccggccttccgcgggccaatcgcaactcgggggcgggtcctcgggctccccgggcaacagcatcccatgtgcctttgtccagcagtagttggaaagagcctgaagaagccacagcccccaggttctgagcatcggcgtgcatgaagtggaggcttgaggcagggtgtccagggcatagaggtgtttggcctgggccaccctccaggaggctattcatgtgggccacagccacaggagaaaagtccacccccagccccttcactggggtgtggagatttggtgtagaggcctgtacataggctggaagtcccacagcccacatccagcactcgcagaggacttggcagcctgtgcctccttgcaccaatggcagtaggagcccctggacttcgtcgtatccaaagaaccagtcgaaggtggggacagtgcccaaacgaggctgggcatgccagccgatcccagagacagcggtccgccaggcaactatcagccagtgagcccgcaaaggggcggcacgtccccatcatcaggctcggcaagtggagcattcgacgcagcgcggccatctggagattcgggtaagttcgaccagagaagcttatgtgaagcgtccaccctactccagccggagaggcctgaggtccaggggaagatctgcaaattccgcgtagcgaaaggcggcgtacagcttccccgaactctgcagtcccggaaaaaagaacgcggacacagactatggtaggaacggcctttattggctgcagcgggaagtggaggagggtatacagcgtccgcagactagctcaccacgaattccaccacncggagtagggtcatcaatgnntcaaggnnnngccccctcct

SEQ ID NO: 93662 - DNA, 462 bp, Homo sapiens
caggaccacagaagcaaaagttctcactcaaacaagcgcccatccttggcatccagtttgagtgagaacttcttccagcgggccgccaagcctctgcaagtcaacaagtggaagaagctgtactcgaccccactgctggccatccctacctgcatgggtttcggtgttcaccaggacaaatacaggttcttggtgttacccagcctggggaggagccttcaatcggccctggatgtcagcccaaagcatgtgctgacaaaaaggtctgtgcttaaggtggcctgccggttgttgaatgccctgaaatcctccttgaaaatgagctgggtctatggaagggtcacctgaaaatatcttttgtgattctcaggaccacaaacaggggacttttgtgaagtatggggtttgcctttcgctatttgccccatggggacaacccggcccacctggaaaggggcaacg

SEQ ID NO: 93663 - DNA, 437 bp, Homo sapiens
aagtccctaggttgggtgtatcactgaaggaattccggagcaggacatggtacgaggcaagcacaaactgctgcgccaggaaaagacaaggctaattgggcccaactgccctggagtcatcaatcctggagaatgtaaaattggcatcatgcctggccatattcacaagaaaggaaggatcggcattgcgtccagatctggcaccctgacttatgaagcagttcaccaaacaacgcaagttggattggggcagtctttgtgcgttggcattggaggtgatccttttaatggaacagagtttattgactgcctcgaaatctttgtgaacgattctgccacagaaggcatcatattgattggcgaaaatggtgctatgcagaagataatgctgcagaatgtttgacccacgtattacacggacaattccgagccgggag

SEQ ID NO: 93664 - DNA, 435 bp, Homo sapiens
gagatcagcgattccaaagcacagctagctgccatggccttgatcattgacacttgggaaaggatgaactgcttcagtgaatagaatcatgaacctctgaggactcactgtgcccttgctgcatccaaacttctaaagaaacctgatcatggccgagctgcgagcacctgtgcacatctcttctggtctggcacaaacacggacaaaaatggggaggagcttcacggaggcaagagggtaatggagcgcctaaaaaaagctctaataatagcacatcagggcatggacccctctctacaagtgcgggtttttatagaaattctgaacagatatatctatttttatgaaaaggaaaatgatgcggtaacaattcaggttttaaaccagcttattcaaaagattcttgaagacctcccgaatcttgaatcgtggaaa

SEQ ID NO: 93665 - DNA, 366 bp, Homo sapiens
gatggaaggaaggaaggaagaaaggaaggaagaaaggaaggagagactactggctgagaatttcccgatttggtgaaagacatgaacttacacattcaagaagctcagtgcatcccaaacaagataaacttaaacaaattaatgaacagacacaggataatcaactgctaaatacaacgacaaagaaaagaatcttgaaagcagccaaacagaaatgaaacattaaacaggggatcaagtatttgtatgatgatggatttctcatcagaaattacagaggatagaagaaagtggcacagcatttaaaaaatactgaaaaaaaaacccaaaactgtctgcccagagttttctgtccagtgaaaatat

SEQ ID NO: 93666 - DNA, 445 bp, Homo sapiens
tatcacgagactggctgcttcctgatgggagccattgtggacatcaccctgactttcaacacctacgttcactttcaagggaagatgaaaggcttctccctgctggccgatccccaggagttctgggtggacaacagcacctcaatgtctgctcccatgctctctggcatgggcaccttccagcactggagtgacatccactgacaacttatcagtgactcatgtgcccttcactgatagcgcctgcctgctgctgatccagcctcactatgcctttgacctggacaaggtggaaggtctcactttccatcaaaactccctcaactggatgaagaaactatcttcccggaccatacacctgaccatgccccaactggcgctgcaaggatcttatgacctgtaggacctgctcgaccaagcttagctgtccgacattttgacaccg

SEQ ID NO: 93667 - DNA, 444 bp, Homo sapiens
aactggaagaattaattcacaacatccaagaaaaataattgagggggagtaggagagaggagggtatggagcagggcctgtggcttggcagtttcttgtgccctccactgcccccatgctccaatcaccgcctctgggctttgccattgatcacacaccaccggtccctgctccagcaaactaggccccatgtcctcttccatacgctgcctaacggacgacggggccgcaccacattgcccatctggacacaactttcggcacaggtgacaccccccatcccagcagcccagccagccctcccagcactccatggttgccggatgccttcccttgccccctgcctacttgggatgccccccttgcctgcagcccctcttgtcctcccttcccactccgcgtcttccctttctttgcttcctgctccttgcgccctacgcaccc

SEQ ID NO: 93668 - DNA, 353 bp, Homo sapiens
cacatacgtacagaactagattactacggcctgacagtggtgataatctactctgatacctgagaggcatacaactatatatatataatggtaacgtaaaatgtctataaaccccagctctgtaacattttcgatcgagctaccatgcactcccaagatgtacgacatcatctcttatgtatccgattgatgctcaagaacccaaaacatcatgccgtataggcttaaatggacactatgcatttgtatctagaattttaagcatgcgcttgtacagtatgtgcaagcctttcgcactcaccctgacgaacctctctatagcttctgtataggcctaacctttattcatatgg

SEQ ID NO: 93669 - DNA, 350 bp, Homo sapiens
ctctacttctatgctcttttatttctctcttccggggtgtagcatatgttgctaccagagacaactgctgcatcttagatgaaagattcggtagttattgtccaactacctgtggcattgcatatttcctgtctacttatcacatcaaagtagataaggatctacagactttggaagacatcttacatcaagttgaagacaaaacatcataattcaaacagctgataaaagcaatccaactcacttataatcctgatgactcattgaaaccaaatatgatagacgctgctactttgaagtccatgaaaatgttataataaattatgacatatgaagcatcgattttaacg

SEQ ID NO: 93670 - DNA, 387 bp, Homo sapiens
ggagaaagtgagaggagagtactctgcatcctccctccttgcttggcacccagttgcctttaaaccagattctaaccagcctatccccaggtacggggaccagcttctactcctgcctcatgcatacgtcccacaaatgcacgtgtcctgagcaccacacctagagggaagagtgtggcggaggcgcacagtgtgagcccgtccgcacatcgtggggtaacgtctgtaatcaaactgtggtccgcgaagaggctgcactgatacggggccataggtcagacctaatagcgagatgcacccctgggccagcaattcaattttggagatggacccaactgatgcgtgaatcgagtaacataaggtgaggttcatagctgttgtgaagcc

SEQ ID NO: 93671 - DNA, 376 bp, Homo sapiens
gaatcaatactccaagaagatataacagtccttaatgtgggtgcacctaacaacagagcttcaaaatacatgaggcaaatctggtggaactgcagagacaaatagatgaatccattattatatgtgaagacttcaacacccttatatcagaaatggacagcaccaggccaaaaatcagtaaggacatagttggactcaacggcaccatcaattaattggatataattgacatttatagactactttagccaacaacagcagaaaagacatttttctcaagctcacgtggagcattcacctagatggaccacattctgtgctatgaaacacacatttacaaatttaaattgcatgaatagagatcatacaatgtctg

SEQ ID NO: 93672 - DNA, 344 bp, Homo sapiens
gagattctgtactttgagctgatgctgtaatgggatgatgggggatcctggaaggtggtgagtatatttggcatgtgggaggggggaaatcactgagagccagcggtggcctgtggagccagccaccaaggcagcctgatgattctcgtcccctggtgctcgttcctgtgtgtcatctccttcctcactggataggaccaacagacctaggtcataaaagacaatggaggggcccggcgctgtggctcacgtctgtaatcccagcactttgggaggctgaggcgagtggatcacctgaggtcgggagtttgagaccagcctggccaacatggtgaaaccctgtc

SEQ ID NO: 93673 - DNA, 427 bp, Homo sapiens
caacaagcacaccttgcaggtcatcatagaattcatactggggagaaaccttagaaatgtgaagcatgtgataaagtttacaggggcaaatcaagcctcagaagacaggagaattcatactggagagaaggcttataaatgtgaagaatgtcacaaagtttacagtcgcacatcaaaccgtgaaagacaggagaattcacactggagagaaaccataaaaatgtaagagtttgtgacaaggcttttgggcatgattcgcacctggcacaacatgctagaattcacactggagagaaaccttaccagtgtaatgggtgtggcaaagcctttagtaggcagtcaacacttgtttaccgtcaggcaatccatggtgtagggaaactttactaaggtaatgattgtcacaaagtcttcagtaatgctacaa

SEQ ID NO: 93674 - DNA, 383 bp, Homo sapiens
caccaaggagatggcttgaggtttcacactcacccagtagctaaacatgacaggaactgtggaaagggcttgcactgttactcctagacatggacacaaagaagggcaaagctggtgagaagaataggctgggcactccttcctttcccaaggccaagcggcagcaagcctccaccctaaactcctcctgctctccctccctgcgtccctctcagtcctctccctggaccccccctcagcccccagccccagattctagggaagtaagtaaagattggacacaaatgagatcattcaaggaaaactaactgaccccatttccaaagagttatttctgccctccttcctgtgaaattttatttaagcaagactttttcaggctt

SEQ ID NO: 93675 - DNA, 376 bp, Homo sapiens
  misc_feature (1)...(376): n = a,t,c or g
ctgaaactccctgttaaacacccactcccgaggccctggagcgtcccattgtaccttctggctccatgagcgtgcctcctctagggacctcacaggagcagaatcctacgggatttgtcgtttgcgacggcttatttcactcagcatagtattctcaaagtccatccacggtctagcatgtatcagcattttatttttatttttatttttatttttattttttgtaaagacagggtcttggttatgttgcccaggctggcctcaagctccagagctcaggcagtcctccctcctcagcctcttgagtagctggaactacaggcgctagccaccacaccagctaatttttgtattttttttgtagaaatggtctccn

SEQ ID NO: 93676 - DNA, 342 bp, Homo sapiens
cgtaataaaaaatgaagatcattacataatgataaaatgtctaatttagcaagaagatcaaacaattttaaacttgcatagttttaataaaacaaacataaacatatacaagccacatatgacaaatctacaaaaagcagttgacaaaattaccatcactgtgtgaacatgcggtacatctctctcaattattgctgtgtgcagactgaaattagtgaaattagagaagatttaagcaacataatcaacaagcttgatttaatggcaatatatataaaaccttgcatctgaatattagagactatacattcttaaagcatacctggaatatttataaaaatg

SEQ ID NO: 93677 - DNA, 338 bp, Homo sapiens
tgcaatgagccaagatcacaccactgcactccagcctggagacagagcaagactccgtctaaaaaaaaaaaacaaaaaaaaaaactgaccacaagctgatcaaggcctcaatgaaatccagggtacaaggctagctaagggctgggctcaggtaatgggctaataagggggggttctttggctctttgtcaaaaggaatttttcaccctgagtattaacctgtctaaggaaggacactcacggagggtcccctgcctgggctgcctaaaaaaaaaaaaaaaaaaaaaaaaaaaaaaaaaaaaaaaaaaaaaaaaaaaaaaaaaaaaaaaatttttttt

SEQ ID NO: 93678 - DNA, 929 bp, Homo sapiens
  misc_feature (1)...(929): n = a,t,c or g
cagggtcggggccaggactgggggctgtggttatgccagaagaggcaggtgcccttgggaagccgtcagtggtagggggcaggcaacgctggagggagctgccaggtgcagggcaggggtgtccggcaaagctccctggggtacaacaggggagctgggggctaggactctccctctgtggggatgacttccagccaagtggctctgccgcctggccctggccctggccctgtaggtgggctggggcgggtgtttggccaggaagtcaggctgggggtggggctgagcctctgcccaggtccactgtccctgcaggagggctgtacagtggtgaggtgttggtgtgggacctgagccgtcttgaggacccgctgctgtggcgcacaggcctgacggatgacacccacacagaccctgtgtcccaggtcagggcaggggctgccgggcggggtgggccctgaggcagagctggggagagggcgcccactctcctaggaaggtcacccgggcgttggcagttggacagctgcctcctgcattctcggagctcccgcagcatgagtcacccccctcaggagccactcccagggccctgtggccattcccagcctcctctgcaggcaccgagtgagcagcgctgggattctgggactggagagggccctgggaaccctccaggcctgccccctggtgggtgagcctggttctggggcctcccggagaannnnnnnnnnnncctggaaaagagggaggttaggggtggagcgtaacacctgggcaggtgtcccttgactccatcctggccctgcatgctgttaactcagtgtggtgtggctgcccgagcctggccacacccacccgttccaggtcgtgagtgtggccactgaccggaaggagctactctggcagggcattgggggatgccaccc

SEQ ID NO: 93679 - DNA, 465 bp, Homo sapiens
caaggacgacgggagagcttgcccggaatagaggaggtaaccgccgtgtcgggcgtccctgaaatggagggaccagagagaggcccggaggccggaggaagcccttggcccagcgctggggttttcggaaacggagagacggacgggatccggggaagggcaacagtctctttttactcaccctggcggaggttttgatggtggatgaggtcgccagcaaagggagaacctaggagattctctgggtcttcggcaggttggggaaaggtgagaatggccaggagagcggtgatggggagggagagagaaaaagagtgagtcccggccagagtatatccccttccgggctttcggcaccagaatgtaagggcagccgagggaaggaagaatagacccaaagtcaggcgagtatctttgttgaaccagccgggctactcccccacactcaaaggaggtagcgccaag

SEQ ID NO: 93680 - DNA, 335 bp, Homo sapiens
aggtgaggcaggaggatcacttgaaactagaagtttgaggccacagtgagctatgattgcaccactgcactccagcctggatgacagagcaagaccctgtctcaaaaaaaaaaaaaaaaaaagggaaaaaaaaaattaattacccaaattttgataaaagggccaactttttgaggggcagggattatttcggcattttaatatttaaaaaatgggttaaatttaaaggctttgcccatttaaagcgttaaaaaattatcaaataaaggctgggggtgtggccaaaggcctgaaaccccagacttttgaaaggttgaggcaaacccttcaggagg

SEQ ID NO: 93681 - DNA, 333 bp, Homo sapiens
ctggacaatcgcttgaacctgggagtcagagattgcagtgggcagagatcacgccactgcactccagcctgggcgacagagtgagactccgtctcagaaaaaaaagaaaatgacaaccctcccaacacttggtctttctggtaaccagcccccatcctgatgctatctggaggccccaccctaagttaccttgctagcataaactcaggtgttatcaaaaggagcttgtggccgggcacggaggctcacacctgtaatcccagcactttgggaggccgaggcgggtggatcacctgaagtcaggggttctagactagcctggccaacgtggtg

SEQ ID NO: 93682 - DNA, 1164 bp, Homo sapiens
  misc_feature (1)...(1164): n = a,t,c or g
agctcaaggatccttaattaatttaatcccccccccccccccccccgattccgggctcgaaggctgtgcggtctgccaggagctgcggccccgtccggcccgggctggcatgggttggaattggagcctatcccccaacccgaaggctaacagcatcatgtggttactaactgttcctcattcaccggttgatgcctcccagaaaaaaacgccgccagccttcccagaaagccccgctgctgttccaccaacaaccactggagggccccaaacacagctgtgcatctacacagcttcccatcactcacactcgacaggtgcccagcaagcccattgaccacagcaccatcacttcctgggtatcacctgattttgatacagcagcaggaagcttgttcccagcctaccagaaacaccaaaaccgggcgagacactcaagtcgaaaacctaccacctccaagtttccacatctaacttttgagagtccgcaatcttccagttcagagacattggggatccccttaatccgagagtgccccagtgaatcagaaaaggatgtttccagaagacccttagttccagtgctcagtccccaaagctgtgggaacatgtcagtgcaggcacttcagagcttaccttatgtgttcattccacctgatatccagaccccagagtcatcgtctgtgaaggaagaactcattccccaagatcagaaggaaaacagccttctaagctgcactcttcacactggcactcctaatagcccagagcctggacctgttctggttaaagacacccccgaggacaagtatggaataaaggtcacatggaggagacgacagcacctgcttgcttacctcagggagagagggaagctgagcagaagccaattccttgtgaaaagctgactgccatcagtaatctcaatagaaaagagatatgttttctggagtcataaaggaattcaattcctagggtttttgnttttggttttgagatgtaatattgctctgttgcccaggctggnagtgcagtggtatgatctcaccntactgcaaccaccacttcctggggttcaaagcgattctcctgcctcaagcctccccaataagctgggattnnaaggcaccagccaccatgcctggctaaattttttgaaatttt

SEQ ID NO: 93683 - DNA, 363 bp, Homo sapiens
acgtcctatggccttgtcgtcctgctggccccagccttggcctcaactttcccttgtattcttggctccgtttgcaaacctttgcagccatcaggcctgggagtactggaaggaggctctgtctcccaaactgggttttcaccaggaactcacttccatttcattgactggtctgctttcctctagacacaacacttacctccaggaatgtacaggccatcgggagcccacgtatcagctcaacatccatgacatcaaactgctcttcctgcgcttcgccatggagcagtcgttcagcgcagacactggcggtggcggccgggagagcaacatccacctgatcccgtacatcattcacactgt

SEQ ID NO: 93684 - DNA, 353 bp, Homo sapiens
tgccttcatggagtgacctgagccaaggtatgtgggttttatttccgggggcaaagttgacataaagaaaacttggaaaacccaagggaggcttgaaaggactgtgtattacactggaatgtatttcatcaattgtcacagtacttaagaacactgactcatcatggggaacgtccccatgatgaattcaacaacatgctggcaaaagagacaataattatcagcttctagaaactacaaggcgcagttttccgaggcatacacaaaatgttattccaatccagactcaacccatgacgtgcgcaaggtgtaccaagactgccccctgctggccccgctgaacgacaccagcg

SEQ ID NO: 93685 - DNA, 355 bp, Homo sapiens
tagctaattatccccgagacctatgtaaggtcactgatgaaggtggctatactaaacaacagattttcaatgcagatcaaacagccctgtattggaagaagatgcccatctaggactttgatggagagagaggaaaagtcagtgtccggcgtccaggcttcaaaggacaggctgactctcttgttagggggtagtgtagctggtgatgttaaattaagccaatgctcatctaccattctgaaaatcctagaatttgctaaagctactctctgcctgtgctctgtaaatggaacaaaaaacctggatgacagcacatctgtttacaacatggtttactgaatgtttaaacccattg

SEQ ID NO: 93686 - DNA, 365 bp, Homo sapiens
  misc_feature (1)...(365): n = a,t,c or g
tcctcccaaccctcttctccctctgaatctgtctctgggactgccactgtcgccccgtcttccctcccttactcaccctgactatctctctctgaatgcctcttggtgagtatgtctctctcgatgtatctctctctgcctggctgcctgtctgtacccctctgcgtctctccccgcccccatccgtctgcgacgcacgcgcacccccatcgggcttctgctattgtcaattgcccctggggccctgcccccacctccgacacagtttccttctacaagcctcagtctccagctttgaaaactgggcaggcgttcccccatccgcacccccacccctttaccacgccgagccctatgcagactcn

SEQ ID NO: 93687 - DNA, 359 bp, Homo sapiens
agtgtgaggaaaccatggttagctattgccttattggaataaagactaaaatgtgaatatttgagaataaagtgtaactcacttaaatctggccataagttttatgtgacgtagttgaatttttttttttacttactaaattttatgcttttatttcatagatattatgccttaaaagtctcatatttcaaatcctctttggatcgcaaattgcttgagctgttgtggaataaatactgggtgaatacgttgagttcttctagcttgcttactgtaagtactatacttgtaaagaatgcatttgaattttatctaagcttcatagccgtttaatatctgaaacactgtttcacagaaag

SEQ ID NO: 93688 - DNA, 491 bp, Homo sapiens
tgcgtcgaccctcgcgtccgaacaatctttaaaaaggataaagttggaggcctcccacttttgaatttgtgtatttactacaaagctactgtaacctagacagtatgttactggcataaggataaacagatcaatgggacagaattaagagtctagaaataaacccatgcatttatggccaattgattttttttaattattattttttttcacaatgatgccaagacagttcaatggagggaaatagcctttttaacaaatggtgttcagacctctaacactatatacaagaattggctcaaagtggatcaagtacttaatgtaagagctaaaactatataggctaagtcttcatgatcctgaatttggcaatggtttcttagaaataacatcagaagtagaaataaccaaagaggaaataggtaaattggacttcagcaaaattaaaaacattttgcttctagggacactatcaaggaaatgaggccggg

SEQ ID NO: 93689 - DNA, 258 bp, Homo sapiens
ttgtatatgggctgagatagggaaccagattcattcttttacatgtggatattcagttgtcccagtaccatttgttgaaaagattattctttccccactaatttgtcttgacacccttgttgaaaattagtcgaccatttctggtttctcagttctattccattgaactagatgtctttgcttacaacatcttgattactgtagctttctttttttaaagttaaaaaatttataaagtagaagtggggctcaggctcg

SEQ ID NO: 93690 - DNA, 372 bp, Homo sapiens
tttagccttatcaaaatatcaatgatgttacttatgaaaatggaaaaataaaatctacaattcatatggaacccaggagactccaaatagccaaagcacgtttgaacaaaaagaacaaaactgaaggcatcacactacctgacttcaaaatttactacaaagctgtagtatggtactggcataaaaagagacacatagatcactggaacagattagagaactcaaatataaatcgacacatttgtagccaactcattttgacaaaggtgccaggagcaaacactaaggatcatccctttaatgaatggagctgggaaaactgtatgcacaaaaatgaaaccagaccccatctctcctcatacacaaaaaata

SEQ ID NO: 93691 - DNA, 371 bp, Homo sapiens
ctacaatacatatcatttatcacattaaggaggaatacttcatttttattgtattttatcaagatgttgaattttgtcataatgcattttcagcatctgtggagatgattatatggtttttctctttaggcttactaatttgattaattgtaataaaagtttccaatatagaaccaaactggattttgtagaataaactattgtcaggtttttttttaatatgttgttgtattttatttgctaatttttaaaggattttcttgtttcatgagatggtatatagttttcctttgtagcataattttagttgggctttgatctatcagtttactcccttcaaaaataatttggaatggttcccttttttcaat

SEQ ID NO: 93692 - DNA, 343 bp, Homo sapiens
gagttaaatatattagtatttcatgagattccacaaaaggcatcatgatttccagacttgctgcctgaagaatttgaaaaccattaaggtacgttcttctttaaaacactaacactcctgttggactctagaaatgctgatctaggccaggcaccagtggctcacgcctataatcccagcactttgggaagctgaggcagaaggatcacttgagcctaggagtttgagcacagcctgggcaacatagtgagacctcatctctaaaaaacaaaagtaaataaatgctggtccaacattttcaactattaaaagcctgaaacaaattagttgactaagtgccacg

SEQ ID NO: 93693 - DNA, 352 bp, Homo sapiens
cggcacgatagctgattttacacaatgttgccaagctgcggataaagctgcctgcctgttgccaaagctcgatgaacttccgcatgaacggaaggcttcgatctgccaaacacagactcaagtgtgccagtcttcaaaaatctggaaaaagaactttcagagcatggacatgagctggcctgatccacagatttcccatagctgagtttgcggaagtttccaacttaccgacagagcttaccacagtccacacggagtgctgccatggagatctgctagaatgtgctgatcacagggcggaccttgccaagtctatctgtgaaaaccacgattcgatctccagtaaactgag

SEQ ID NO: 93694 - DNA, 361 bp, Homo sapiens
ggtacgaggacagctagcaccatgagcttcaacaccctgtctaaaaagcataaaactccttaatcattccgcctctgttctctgcgcttcaattaataagacatggaaagaataagaaaagaggaaaaaaaaagatgaaaacatactgaagctttttaaatgccctgcgcaaaatattatcctattcgggggcctgaaccaaatatgtgcgttgcctgagaaaacgccagtaagtgacagaaaaaccaaatgctgcacagaatccttggtgaacaggcgaccatgcttttcagctctggaagtcgatgaaacatacgttcccaaagagcttaatgctgaaacattcaccttccatgcaaaa

SEQ ID NO: 93695 - DNA, 350 bp, Homo sapiens
gagagctagaaatgattatgcttagtgaggaagttatgttgaaagccaagatacgccaaaagctaggtctcttgagccagttagctaagttgtgaatgcaaaggaaaagttcttgaaggaaattaaaagtgctactccagtaaacacacaaatgataataaaacagccttattgctgatatgaagtggtctggatagatgatcaaacaagccacaatgttcccttaagccaaagcctaattcagagcaaccctaactctcttcagttctatgaaggctgagagaggtgaggaagctagagaagaaaagttggaaggtagcagaggttggttcacaagatttaaagaaaga

SEQ ID NO: 93696 - DNA, 340 bp, Homo sapiens
ctgcagtaaacatagaaatgcagctatctctttgatatattgattttatttcttttggatgtatatccagtagtggaactgctggatcatagttatatttttagttttctgagaagtttccatgttgtttttcacaataacgctactaatttacatttccaccaacagcgtacaggttccccttttcccacatattcaacagtgtccatcattattccctgtcatttatttatttatttatttatttatttatttatttatttatctatctattgagatgaggtctcattctgttgcccaggctggagtacagtggcacaatctgagctcactgctacct

SEQ ID NO: 93697 - DNA, 388 bp, Homo sapiens
  misc_feature (1)...(388): n = a,t,c or g
gttatgtcctgtgcctggctcggagggtcctacgctcacagagcctcactcattactagcacagcagtctgagatcaaactgcaaggcggcagcgaggctgcagcgggggcgcctgccattgccgaggcttgagtaggtaaacaacgcggccaggaagctccaactgggtggagcccactgcagctcaaggaggcctgcctgcccctgtagactccacctcgggggcagggcatagcgaatcaaaagtcagcagaaacctctgcagacttaaatgtccctgtctgtcagctttgaagagagtagtggttctcccagcacgcagcttgagatctgagaaccgacagactgcctcctcaagtggggccctgacccccgagtagcctaacn

SEQ ID NO: 93698 - DNA, 373 bp, Homo sapiens; identical to SEQ ID NO: 93624
  misc_feature (1)...(373): n = a,t,c or g

SEQ ID NO: 93699 - DNA, 344 bp, Homo sapiens
cagggtttcaccatgttagtcagactcttctcgaactcctgacctcaggtgatctgcccgcctgggcctcccagagtgctgggattacaggacaggcatgagccaccgcgcctggccaaagtattgcctgctttcaacagtgttgcctgcttttttctagtctttaagggagacagataataaatgatagccataattctgtgagaaagccataatcacatatgtattgttaaaaacaacagtaaatgtcagaaaacagaagcaccccataatcctagaatggaagagaaggggagagtgaaaggttttattaactttagtcttaggggcccccatttcttggg

SEQ ID NO: 93700 - DNA, 339 bp, Homo sapiens
gctcggcgtggtagtggggggcctgtaatcccagctactggagaggctaaggcaggaggtagaggttgcagtgagccaagctcacgccattgcactccagcctgggcaacaagagccagagtccatctcaaaatcaatcaatcaatcaaccaataataacaatagcaaatacttccgtaatacaatatgatagacatgatttaagtgctttacctatatcagcctgtttaagcctcatgtcaataggtactattattacacccacttatagatgaaaaaattgaagcacagagaaatcccctaaatttccatgaaagatagtagctggttttaagagaa

SEQ ID NO: 93701 - DNA, 361 bp, Homo sapiens
cggcacgagctggaagaattaataaagatcttttttttgggtttttttttttgaaaaaaaatcccttttgggcatcccggggggaaaaaaggggccccctttaaattaactggaacctttggctcccggccccaagggattttccggccttaaccccctggaaaacgggaattggggccctgggcccccatgccggggggattttgggtttttttaaaaaaaaaccccttttcccttttgggccagggggggttaaaacccccaaccccggggaaacctttggcctaaaccccccaaaggggtggggttcccgggggaaacccccggccccggcccgggggaaaacctttaccaatggaaa

SEQ ID NO: 93702 - DNA, 352 bp, Homo sapiens
ggcaccatgagcttcaatctggttgcatatatttctttttctttcatattttttagagaagggacctcgctatgttgcccaggctggactcaacctcttgggctccactggtcctctctcagcctccagagcagctgggactacaggcgcactacactgcacccagctttgaacatacctcctactgccaaaacatggcaaggctgtattctttcacagaaaccctccttttgcgtagcacccaccctttcccactaaaacatgtatatacgccaacctatgaactactcctggtttgggaccgagactcgctctcgcgaccacgctagcactgcagcggggcagtctaccg

SEQ ID NO: 93703 - DNA, 348 bp, Homo sapiens
gagagagctagcaccatagcttcaataccctggctctgcttaaaaaaaaaaaaaaaaagggtcaggcgtgggggggcccccctatagtcccagttactggggaggctgcgggggaaaaatcgactgacctgggattgggccagtcaactccagcctggatgccaaagggaccctgtttcaaaaataaataaataaataaatgaaagaattacatcttcacagggggtcacccaggaacagctttccaaacagggggaacagcacgtacaaaggccacaaggcggatggaatataatgaaccaaaaacggttggtgacccagggaacaaaaggcatgggcagcaaccct

SEQ ID NO: 93704 - DNA, 342 bp, Homo sapiens
ccaggatggtctcaatctcctgacctcgtgatccgcccgctttcgcctcccaaagggctgggattacaggtgtgagccaccgcgcccggccagtttattcttttttgttgctgagtaatgttccagtaatggatgtgccacaagatatttatccattccttgtggatggatatctgtctctacctttagtgtgctgtgtctgagtctgagtcttgctgtgttacccaacctggcctcctggacttaaacgatcctcctgcctcagcctccccagtagctgggactataggcatgagccactgaagccagcttgtgctgtgtgttattaagtagcggaacact

SEQ ID NO: 93705 - DNA, 384 bp, Homo sapiens
  misc_feature (1)...(384): n = a,t,c or g
ccaagttatccaggagatctaactgagataatggatgaaggtggctaccccaaccagcagattttcagtatagatgacacaactttctattggaagaagatgccatctaggactttcctaactacagagaagtcaatatctgcttctaggcttcaaagaacaagctcactttcttgttagaggcaaatgtagctggtgactttaagttgaagccagtgtttacttaccatgccttgagaaatcctaggacccttaaaaaatatgctacatctactctgcctgtgctctgtaaatggaacaacaaagcctaggtgacagccatgtgtttacaacatggtttactgaatattttaagctcagtgttgagacctgctgctcagaacn

SEQ ID NO: 93706 - DNA, 348 bp, Homo sapiens
gataaaacctacttgatcagattgcagtgaatttggttttgatgtgctgctggattcggtttgctaattttttttgaggatttttgcatttatgttcatcaaggatattggcttgtaggttccatttcttctaggttttctagtttatgtgcgtggaggtgttcataatagtcttttttttttttttggctttttgggggggtgggggtaaaggtaattttggcattttgggatttttttttggaattttttttttttttttataaccctacccgggggttttttgtggtggttgttgtggtggtgggggtttttaaaacggattttttttttgtcccccgggcggaa

SEQ ID NO: 93707 - DNA, 350 bp, Homo sapiens
actgaattgtgagagttctttatatattctgaatggaagttccgtgtatatgatttgcaaatattttctccaattcttcagatttttttactttcttgatggtattgtttggagcacaaagcttttaatttgatgaaatccaatttatcaattgtttcttttgccatttgtgcttttggtaatctaaaaagccattacctaacccaagctaacaaagatttacttctttgttttcttctaagagctgtatagctttaattgcgttaatttttgtatttggtgtgaagtagggttctaaattcattcctttgcatgtgaatatccagttgtgccagcatcatttgttgaaa

SEQ ID NO: 93708 - DNA, 341 bp, Homo sapiens
ataccctgcagagagcaattctctgaaaaatctggaataatcacaggtctctgttcatgagctccactgagactttctccttcctttagtctcttcacatgaagcctgacttactgaagtaggcggcagacagtagcacacactccctcaccaaaccagcatacttagaaaaacaaaatttttttttttttcaaatggaatattgccttattcccctggctgaagggccatggcccaatctcgcttaaatgcaacctccgcctaccgggttcaagcaatcctcctgccttagccttcctagcacctgggattaacgccctggtcaccacgcctggctaatt

SEQ ID NO: 93709 - DNA, 371 bp, Homo sapiens
ccaagttatccatgagatctaactgagataatggatgaagggggctaccccaaccagcagattttcagtatacatgacacaactttctattggaagaagatgccatctacgactttcctaactacagagaagtcaatatctgcttctaggcttcaaagaacaagctcactttcttgttataggcaaatgtagctggtgactttaagttgaagccagtgtttacttaccatgccttgagaaatcctaggacccttacaaaatatgctacatctactctgcctgtgctctgtaaatggaacaacaaagcctaggtgacagccatgtgtttacaacatggcttactgaatattttaagctcagtgttgagaccc

SEQ ID NO: 93710 - DNA, 368 bp, Homo sapiens
cattgtggtcagagaaaatgcttgatgttatttcagttttgttcagaatgttttaagacttgttttgtaacctaacaaatggtctgtctttgagaatggtccattggctgaggaaaagaatgtatattctgtagatactgtatgaaatactgtgtaaatacctattacgtccattgggtctatagtgcagtttgatgtttttttgttgattctatgtctggaagagctgtccaatgctgaaagtggggtaagtctccagctactattgtattggacctcttactgtattagtctgttctcatgctgctaataaagacatacctgagactggataatttataaagaaaaagaggctagccaggcgtggt

SEQ ID NO: 93711 - DNA, 254 bp, Homo sapiens
gaacaagatacatatgggaaaattaaatgaaaactgaaaacattttaggagaaaacataggtgaagtatttggtgtaggcaaagattccttagatatgtcaccaaaagcatgaaccataaaagaaaaaaatgataagttgttctttatcaaagttaaaaactttagctattcaaaacataccatttaaaaaattaagaaccaagccacagtatggcagaattacttactgtacataaatctgacagaatttatg

SEQ ID NO: 93712 - DNA, 305 bp, Homo sapiens
ctggaacaagacaaggatgcccactctcacctctttgattcaacacagtactggaaattctagtcagataaattagtcaaaataaataaataaataaaactgtctcactgcagatccaaggtcctacacatagaaaatcctaaaggctccataaaataagtgctagaactaatcaacgaattcagtcaagttgcaggatacaaaatcaacatgaaaaaactgtagcatttctatacactaacaattaattatctaaaaaagaaatcaagaaaacaatccaatttataatagcatcaaaaagaacg

SEQ ID NO: 93713 - DNA, 327 bp, Homo sapiens
caagtaatcttctgccttggcctcccaaagtgctgggattacaggcatgagccaccatgcccggcctaagaggtgcagattttttctctttaatttaaattctctgggaacacatgttttaggtaatgtgtattcttcctcatccctgtggagacttctgggctatgcttaacttttgagagagagagggaatgttttttttttaaagagatggaagtctcacaacgtttctcaggctgacctcaaactcccagattcaagcgattttctcgcctcaccctcctgagtagctgggaccacaggcatgcaccacctcacctggctaaa

SEQ ID NO: 93714 - DNA, 334 bp, Homo sapiens
ggaaataactgcttgagcacagaaaccattattcctagctttgaaggaaagaactatattttactagttgtaaatctttgagtttggtgtcctcaaggtaattacctgcttgagtgttagctcacatgaagtgggcaagttgtgtccattcttttttttttttaaaaatggggtctaattttgttgcccaggattgcaggggtacaatggtagctaactgtacccttgaactcctaaagcaatcttcctgcctaagcctttaatgtacccaggatcacaggtgcttgccaccatgcctggctaattttaatttaattaattcatccattcattc

SEQ ID NO: 93715 - DNA, 383 bp, Homo sapiens
  misc_feature (1)...(383): n = a,t,c or g
cagagcttcaataccctgactatagtaacaagttacttctaattccttccagaattagcactggttccaataggggaattcttcatggaatccccaaatttgtgcaaacggtatagaatcactaaactttagtattagaagccatatatatgtatatacatacacacacacacactctacaatagccctttttacaataatctttttttaatgtattttttaaagagatggggtctggctctgttatccaggctggagtgcagtggcatgatcatagctcactacagcctggataacaactcccaggctcaagagatcctcctgccttagccttcaagtagctgggactacaggtgtgtgctaatacctggctaacagtctan

SEQ ID NO: 93716 - DNA, 323 bp, Homo sapiens
  misc_feature (1)...(323): n = a,t,c or g
catagggctcggcgtggtggcttatgcctgtaagccaagcattctgggaggccaaggcaggggagatcacttgaggtcaggagttcaagaccagcctggccaacatggcgaaaccctgtatttttagtattctactaaaaatacaaaaattagtcaggcgtaggccaggcgcgatggctnacacctgtaatcccaacactttgggattacaggcatgagccaccgcacccctccagattgtttttgaattggttctcaatctcactaaggatgctgaataattgctgccctgatacttcatctgagagtccaaggaatcctcg

SEQ ID NO: 93717 - DNA, 363 bp, Homo sapiens
  misc_feature (1)...(363): n = a,t,c or g
agagaattgtcaaataaataacctaaggttccaccttaggaaaccaaaaaaagaagagtacactaaacctacagcaagcagaaggaaataaatagtaaatattagaatagaaagaaatggaatagagcagaaaaacaatagagaaaatcaatgaattgaaaagttggctctttgaaaacatcaacaaaattgactcacattcaggtaaatggatggtaggagaggagtagtgtgtgtttgtgtgtgtgtgtgtgagagagagacagagtgacagagaaagagagactagactcattaaaatttagaatgaaagaggagacatcactgctgatcttacagaaattaaataactattagggaaan

SEQ ID NO: 93718 - DNA, 330 bp, Homo sapiens
  misc_feature (1)...(330): n = a,t,c or g
ttatgttttccactctatcacactatcatattgtatatttttttactttaccctcctttttttttcttagtaaggggaactagctatgttgcccaggctgatcttgaactcctagctcatgcaatcctcctgctttcagcctccctagtaactgggactacagacacgccactgtacccagctcattattattattattatcattatcattattattatcgagatggagtttcactcttgtcgcccaggctgcaatgcaatggtgtgatcttggctcactggaacctcttgcctccgggtttcaggcgattctcctgcctcagcctcccn

SEQ ID NO: 93719 - DNA, 382 bp, Homo sapiens
ggactactctgtaatctccaggcgatgttaggaaccctttctacttagcacagctggcttagaattccaagtaagtatataatatgagtttcatgctagcgacggtggctcaagactgtcatcccagcactttgggaggccaaggtggaaggattacttgagcctagaagttgaaggccagcctgggcaacatagtgagaccccatctctctctctctctctctccttttttttttggagatggagtcttgctctattgcccaggctggagtggtgcagtggccctatctcggctcgctgcagcctctgcctcccaggttcaggcgattctaatgcctaagcctcccaaagtgctggaattacgggcatgaaccacagttgg

SEQ ID NO: 93720 - DNA, 747 bp, Homo sapiens
accagcctgagcaatatagcaagaccccatctcctcaaaaattttaaaaagctaggtgtggggacatgcctatagtcctagctactcgggaggctgaagagggaggattgcttgagcccaggagattgaggctgcagtaagctatgatgataccactgtactccaagtccaaagggagggcccagaacaaatctgtcttcaaccccattgccaattgtcagttatatcagaacatgcccgtggtccctgatctttttcaggaaattaaaaagctggtccttatagcaaacaggaactcagagctcttggcgaggcagtatgatgtcttagtgtatgggcagcatgcctgttttcttgctgattttgcaagtgctccagaaatgtagactggtttttttctttcttattttagtatttcatatcctgatttttaaatgttgggccaaaaaaatgacacatctggcttggacatggtggctcatgcctgtaatcccagaactttgggaggctaaggcgggcagatcacttgaggtcaagagttcaagaccagctttggccaacatgggtgaaacctcgtctctactaaaaatacaaaaattagcttggcatggcagtgcacgcctgtaattccagctactcgggaggctgaagcaggagaatcacttgaaccctgaaggcagaagttgtggtgagccgagattgtgctactgcactccagcctgggcgacagagcaagactctgtctcc

SEQ ID NO: 93721 - DNA, 369 bp, Homo sapiens
gttcatttgttttgcccattttctaattggtttgtttttggctttatcgttgaatttatatattctagatatgtggatatttgttagatacgtgctttgcagacattttctttcagtctgtagcttgtctataatttcctcacatgggctttcacagagaaaaaggtttttagacatctcatttgtcagtatttccttttatggattatacttttggtgtcaagtctgagaattctttgccttgctctagatttccaactttctcctgttttttttaagttataattttatattttatagttaagtccatgatccaatttgtgttaatttttactcaaagtgtgagatttaggttgaggttcttctttg

SEQ ID NO: 93722 - DNA, 359 bp, Homo sapiens
aaaccataagatcatcttaaaagatgcaaaaaaggcatttgacaaaatgtaacatcctttcacaatgaaaattctcaacaagtaaggtatagaacagtatgccacaacataataaaggctatgtgtgacaggcccacagctgacatcatacttaatggtgaaaagctgaaagcttttcctctgaggtcaggaagaagacccttgctacttccattaaatatggtaagttctagccagaacagttaggccaagaaaaagaaataaaggcagccaggagtggtggctcatggctctgattcccagcactttgggaggctgaggtgggcggatcacttgaggacaagagttggagaccagcc

SEQ ID NO: 93723 - DNA, 363 bp, Homo sapiens
gctggtctgaactcctgggctcaagtgatcctcctgccttggcctcccaaattgctgggattatagacatgaaacactatgcccagccaggaacagattttttacctctgtgtattttactctgcccacacagatcagattgtgagctctaaaaaggaaatttctccttgatttaaatgaatatttgccagcatttgacaatttgccaagtgttcatgtatgtccaggaattttctcccagcccagccttatcaccattggcattttccaaatgaggaaacagaggctcagggaaacttctcgctgctctgggcttgcccagggaggattggatcccaacagactagggctcttttgtctgtg

SEQ ID NO: 93724 - DNA, 398 bp, Homo sapiens
tgaacacgtgaaaatgctcaacgtcaatagtcatcagggaaatacaagttaaaaccagagagatatatcactatacacctactaaaatggctaagattaagaagcctgacaatgctaaatgttgtcagggtgtggagcaaccaaaacacttatacattgctggtaaaataactactttggaaatctggctgtttctcatgaaatttaacatatgcctaccttgtgacccagaaattgtacctttagatctttacctaagagaaatgaaaacatatatacatgaaaatacttatacaaaagtgtccatagcacctttattcaaaacagcccaaatcaccatcaacaggagaatcgataaattgtagtataattataccacgaatggaatgtattattga

SEQ ID NO: 93725 - DNA, 381 bp, Homo sapiens
gatgtgaggctgagagtccaccttcattcttttgcatgtgaatatcctgttgtccttgtgctatttgttgaaaaggctattctttccacattcatttgttttggcagccttgttggaaatcacttgccatgtatgtggaagtttatttctgggctctgtatgctattccattggtctatgtctatccctatgtcagtgccacactgtcttgattactgttgcattgtggtaagtttgaaatcaggaagtgagtcctccaactttggttttttgtttttttgtgtttttttgagatggagcctcactctgtcacccaggctggagtgagccgagatcacaccattgcactccagcctgggcgaccagagcaaaactccgtct

SEQ ID NO: 93726 - DNA, 393 bp, Homo sapiens
gcaatgtgggaaagccttcagagctgcctcagtccttcgaatgcatggtaggactcaccctgaagataaaccctatgagtgtaagcaatgagggaaagccttcagatctgcctcacacctttgaatgcatggtaggacacacaatcaagagaaaccatgaatgtaaagaatgtgggaaacccttcaggtctgcccagaaccttcgaattcagtaaaggacacaagcacacataagaatgcattctggatagctgaacaaaaggcagcagaaacttctgcagacttaaatgtccctgtctgacagctttgaagagagtagcagtcctcccagcatggagtttgagatctaagaatggacagtctgcctcctcaagtgggtccctgatctccaag

SEQ ID NO: 93727 - DNA, 395 bp, Homo sapiens
actggttttataagaacaaaaaagggggaaagaatatccaactagaaacccaaaaataggcttatacaaagagtaagtaagttgctcttttctttgaacagtctcatgcaaaaccaacatttctagtttgctaagcttctgtaacacaggatatttcagggagtctgggcttcaatgtgcagcataaaactcttttaagggcaatgtaagcaagggaacaagagaacataaaagcagtagcaaggcccagattgtgttgaggcattttgagcagaggaatggtaggagatgacttactctaaagaatcattttggccgggtgtggaggctcacgcctgtaatcccagcattttgggaggccaaggcaggcagatcacgaggtcaggagttcgaga

SEQ ID NO: 93728 - DNA, 384 bp, Homo sapiens
  misc_feature (1)...(384): n = a,t,c or g
aactggactttatcaaaatgaaaaactgctgctcttcaaaagaactgtgtggaaagtatgaaaagccataaactaggagaaaatgtttgcaaagcatatatcaaataaataatttatattcagaatatagaaatgactatcaaaactcactaagaaaaaataggcaaaagatttgaacagatactccctcaaagaagatatacagatggccaataagtgtatgaaaaatgctcaatataattagtcattagggaaaagcaaactaaaaatacaatgagatactattagaatggcttaagttaaagatcagccagactaagtgatagcaaggatggggaggaactggacctctcatacactgctggtgggaatatcccatgatan

SEQ ID NO: 93729 - DNA, 389 bp, Homo sapiens
ggtatatgaacttgctctggacattatttgagctttaaggacaaataatgctacatgtttagtttatgtatttatttatttattaattagagagggtctcactcttgctcagactaaagtgcagtggtgtgatcatagctcactgcagcctcaaactcctgggctcaagcactcctcctgcctcagcctctggagtggctacgactaccatcatgccaggctaattccttttttttttttgaaaaagggggccttgctgggttgcccatgctaggactacatgttaaatttggggagttttgtgcaaaatataaagggggccctagtctaccatattgaaataaaagttccgggttaaatctgaagtctgaaatgccccataacgggaa

SEQ ID NO: 93730 - DNA, 368 bp, Homo sapiens
gaaacaaaggattaattgtgttttctgaaagtgttggtacttttttttttttttttggaaaaaaagtttggttttgcccccgggctgaaggccagggggcccttttaagttaatggaaccctcggcctcggggtttaaggcagttccccggcctaagttccccggaaaaccgggaacaacgggggcccgccacaaacccgggaaaattttggaattttaagaaaaaacaaggttgcccaggagggcctgaacctttggacctgggaacccccccccttaaccctccaaaagggcgggaattataggcggaacccatgggcccaacccgggacccttaaaaaaaagggccgggaaatggcctggccctt

SEQ ID NO: 93731 - DNA, 363 bp, Homo sapiens
ggctcggcgtggttttcagaatagtccatgagcactgactgcaacttgaagtctccagcggcattaacccctaataagagtcagcctatcctttgaagctttgaagccttgaagccaggcactgacttctcctttctagtaatcaaagtcctagaaggctgtttcacctacattgaaaatctgtttagtgtagccatcttcatccatgatcttagctagatcttccggacaactgactacagtttctacatcagcacttggtgtttcacctagcacttttatgctatggaaatggcttccttccttaaacatcatgagccaatctcagctagttgcaaagttttcttctgtagctttctcacg

SEQ ID NO: 93732 - DNA, 375 bp, Homo sapiens
aaattttgcatttgattaaaagttctaatttaatataagttttgcaaagcatcatctctttgaagatctttttttatgctacatgttacccataatagaaaaataaaaaccagaatatctcacctccactggttcgttatactctcctatctcctctcctcctaccatttattatcaattctttctttttctttttcttttctttttttttttttgaaaaaagtctcgttttgaacccaaggttgcattccagggggggaacttaagctaattgaaccctcggcctaaggggtcaaaggaattctcttgcctaagcctccaaagtacctggattaccgggggacccccaccacactgggctgattttgatttttg

SEQ ID NO: 93733 - DNA, 400 bp, Homo sapiens
aaaagaaaaaaaactagccgaagactgggagaaaatagttgcaaatcatatacaactatatatggttgtatatatggttgtatatattttggttggtatccaaaatatataaagaacttttacaaatcaataataaagagacaaataaaaatgggcaaaagacttgaatagatgtttcttcaaataatatgtatatgaatggctaataactacatgaaaagatacacgacatagtcattagataaatgagaattaaaaccacagttacataccatgtcatgtccactaggatggttataatcaaagagacagaaaacaagtattggtgaggatatggagagacaaatcctcatatattgctggtgggaaaactttgaaaaacagtctggccatttcttaa

SEQ ID NO: 93734 - DNA, 358 bp, Homo sapiens
cggcacgagtcagaatggtaaatgaacattggcttcaacttaaagtcaccagctgcattagctcctaacaagagagtcagcctgtcccttgaaggcaagcagtgacttctctctagctatgaaagtcctaaacagcatcttccaatatcagaatgtttcatctgcattgaaaaatctgttgagtgtagccaccttcatcaatattcttagctagatcttctgataacttactgcaacttctccattggtagttgctgcttcaccttgcactattatgttacggagagggctttttttctttaaacctcggaaaccaacttctgctagcttcgtacttgtcttctgcggtgtgctcacg

SEQ ID NO: 93735 - DNA, 376 bp, Homo sapiens
gagctgtgatggggatgtacaagattaatgtggttttcgtgcctactaacacatctattctgcagcccatagattgaggagtaattttgactttcaggtcttattgattaataaatactattttgtaacactataggtgccataggcagtgattcttctgatggatctgggcaaagtaaactgaaaaccttctggaaaggattcaccattccaaagagtcattaagaacacttgtgatttatgggaggaggtaaaaatatcaacattaatgggagtttggaagaatgtgattccagctcttatagatctctttgagagattgaagactttactggaggaagtaacagcatatatggtgaacattggaagacgattg

SEQ ID NO: 93736 - DNA, 372 bp, Homo sapiens
gtaggagcagggggcagtgttgatggtgactctgcttggattatcttctagggatggaggattgccagctccattgaatggaaggactggtgatgcgcagccactcttgcatgtgcccgggcaaaagacagtgtgttggtggcaaatgcctaatgtgtctatggctgaccatgggccatctctgccattcaagacatcagctcctggcagagttgtattggtttgatagagctttagtcttcggagtcgcacagacctgagttcaaatccttctctgccatttactgtaatcccagcactttgggaggctgaggcaggtggatcacgaggtcaggagatcaagaccatcctggctaacacggtgaaactcct

SEQ ID NO: 93737 - DNA, 372 bp, Homo sapiens
actttgggagaccaaagtgggaggattgcttgagcccaggagttcaagagcagcctgggcaacatggccagacccactctctacaaaaaaaatatttaattagctgggcatggtgttgtgcaccaatggtcccagctactcaggaggctgaggtcgaggctgcagtgagccatgatcatgccactggactccagcctgggtgacagagtgagatactatctcaataaattataaacaaacaaataaaaaagtgttaaagaggaggaaggcatttcaggaaaaggaactactgagggcaaagagaaggaggcatgacttctgggttgtttagggaatagtaagagatcacaaaaaaaaaaaaaaaaaaaaaag

SEQ ID NO: 93738 - DNA, 388 bp, Homo sapiens
gtatattaaagaggattatacaccctgaccaagtgttctttatcccagcaatgcaaggttggttcaacatatgaaaatgaattaatactgtaataccatattattagaataaaggggaaaaaaccgcatgatcatctcactagacactgtaaaagcatttggtaaaatccagcagccatttatgattttaaaaactaggaataaaaggtaattttctcaatctaataaagggtacctatgaaaacccacagttggctgggcacagtggcttatgcctgtaatcccagtactttgggaggccaaggcgggtgatcagttgaggccaggagttcaagaccagcctaggcaacatgcaaaactccatctttactaatacaaaaactagccg

SEQ ID NO: 93739 - DNA, 360 bp, Homo sapiens
gtgatattatctgagaaagtaaatttcaaggccaccatacaacaggtgtccaaaaaggcctccaatatggaataattctatttattatctgagaagtattcttctttgctggtttcttctgggcattctatcactctagtctagccccaatgccagaattaggaggacactgaccccccaacaggcatttttcccctcaaacgcttagaagtacctttctgaatacatctgtattatttgcatcaggagtttcagttacttcggctcatcacagcctgatagaaggaaatcgaaagcaaataattctagcactatccatcacgattaccttaggtatttacttcaccctcctacaaatct

SEQ ID NO: 93740 - DNA, 390 bp, Homo sapiens
gaggttgcagcgagccaatattgcaccactgcactccagcctgggcaacaagagcgagactccatctcaagaaaaataaataaacaaaaattgaactggacagttcacttagggacatgatgcttgattaacgtcttagagcttctgatgagatggccatgacgtgtcattctactgcccctgatgaccctgccacccccaacttctagcagaaagggcttgtaaaatggccagcttttttcttgccaggccaaggacccttttcgaatttctttacaccaaggaccttgggaaggccctggcaacctattagacttggtttccaggtgagacccagagcttttctttcaggtgaaaccagaattgctgactaaagctttggatgtaatg

SEQ ID NO: 93741 - DNA, 501 bp, Homo sapiens
  misc_feature (1)...(501): n = a,t,c or g
accactgcactccagcttgggtgacagaccaacactccatccccaccaccccatctcccccaaaaaatatatattctaggaatgaagcccgaatggccaatggacatgcaaggaatggggaaagatccaaattaaccaatggggcacatttggcaataactactgagtcctgattttataagccggagggaaagagctttattctttaccaaattttaactagggatggctcatgcctgtaatcccagtgctttgagaggctgaggtgggagggattgcttgaggccaggagttagagaccagctggggtaacatatcgagatcttgtcttgacaaaaaattttaaaaaatagcctgggagtggtagtgtgtccctgtagtctcagccacacgggttgctgagggccgagnagggttcacttggggccccnggattttgaaggttacattgagcntttgattngtgccactgcattccaaccttgatgncatggtgggggg

SEQ ID NO: 93742 - DNA, 373 bp, Homo sapiens
gcgtcgacgtagaaaatgccttgaaaaatattcataaccaaaatgtagctgtgtcctagcggggcatggtggtgtgtgcctgtggtcccagctacttgggaggctgtggcatgagaattgcttgaacctaggaggagaaggttgcagactgtctcaaaaaaagatgtagctgtgtccaagtcatgttactaatgattgtgcatatatatggttcttgtgacaagtacacattagcttagtgacgaagctgtcacatgatttttgaggtcaaaagtttccaggccaggtgcggtggttcatgcctgtaatcccggcactttggagaggccgaggcgggtggatcacttgaggtcagaagtgtgaaaccagcctg

SEQ ID NO: 93743 - DNA, 359 bp, Homo sapiens
  misc_feature (1)...(359): n = a,t,c or g
tctgattgtagttttgatttgcatttccctaattattggtgatattgagcatctttttatgtgtttatcagccattcatgtatctccttcgtagaaatatcctttgcccatttttatcaggttgtttttgctttgagttttaagagttctctgtatattctggatgatagatgatctgtaaatattttctctcattccatattcctctggctccttttaagatttttctttatgtctgggttcaaggaatttgatttctgtgcgccctggtggaatataagctttcttttgagttttttgcttttgctggtaagcctttggaatttgtgggtttatacttttcatcagatttggaaccn

SEQ ID NO: 93744 - DNA, 459 bp, Homo sapiens
ggaaagggggctgaagtcacggagccacggggtctaggtcaactgatcccactcccacggagcccagcaagctaagatccactgactcgaaattcttgctgccatcacagcagtctgaagtcgacctgggacactctagcttggtggggggaggggcgtcccccattactgaggcttcagtaggcagttttcccctcacagtgtaaacaaagccaccaggaagctcaaactgggtggagctcaccacaattcagcaaagctactgcagccagactgcctctctagattcctcctctcttggcagggcatctctgaaagaaaggcagaagccccagtcaggggcttatagataaaactcccatctgcctgggacagagcacctgagggaaggggcagctgtggatgcatcttcagcagacttaaatgttcctgcctgctggctctgaagagagcagcaga

SEQ ID NO: 93745 - DNA, 492 bp, Homo sapiens
tttcggcacagaagagctagcacccaggaagcagaggttgcagtgagccgagatcgggccattgcactccagcctgggggacaaaagtgaaaacccccgcctcaacaaaaacaaaacaaaacaaaaaaaagaagtaaaggactgtatgtctcacaccttggcacaccctcctggtgtctggtgtgatggaggggattattcctcatctctcctgagttcagtcttctgtaatgtagcatgctggggcctctggagcacttcactgcacactaacgaatgtgaggatggaaaaggaaaatcttatcttagtgaaactgtggaaatagtttagacctcgggctcccctaacaggcccctagacgatgctttgggaaccgtggtggtagaactctctctcccagactcactctgccctgacccctcttattggtgagaaacaggcatgtgtaactcttctttttcctttgaggaataacccatatttgtacattt

SEQ ID NO: 93746 - DNA, 395 bp, Homo sapiens
ggcgggaagatcttttgagcccaggatttcaaggttgctgtgagctgtgattgtgccactgtattccagcctgggtgacaatgaaaccctgtctcaaaaaaaaaaaaaatatttaaccagggacccataagggaattggcccttgatttaatttgaatggtttttaaaaaaatctttttaaatacaaagaatcctttttcggcccaaatgcaattttccccttaaataactttgattaattgggaaaaataaagtatttgcacaaaaaatggaacattctgaattggggaattccttttggatattagttaaattccctccttaatcctgtgaattccctgaaaatggaaaggaaaaaagcttgtttaaattaaaaataaaatttttgggggaaa

SEQ ID NO: 93747 - DNA, 354 bp, Homo sapiens
gtcactcagacgggagtgcagcggcgtgatcctgactgagtgcggccttcacctctcagctactcgggaggctgaggcaggagaatggtgtgaacttgcagtgagccgagattgcaccactgcactccagcctgggcaacagagtgagactccgtctcaaaaaaaaaaaaaggaaaacctttttggatcccaaatcccttatcttccctttccccggcttttatttcaggccagggcccctgggagagtcaccttaaaaatcctggaagggccctccaggggggagggttccagcccttaatttgccccaggccggggaggacccacatgtcccttaaatccccttggaggccc

SEQ ID NO: 93748 - DNA, 340 bp, Homo sapiens
caaggcttgtgtccaccgtgggtggctgtgacattcagtagaggtgggtgggtaggcccttgcagagagccacttgagtggtattccacaaagcccaaaggggcatactgcttgctgagctgtaccccagtgggtcagctgggcacagcatcgaaccaaagacaattactcttttttttttgggaaacaaggtcttactctgttgcccaggctggagtgcagtggcatgatcatagtccactgtagcatcgaactcttggccccaagtgactcctttgcctcagccccccaagtagcagtgactccaggtatgcacgtccacacatggctaattttaaaa

SEQ ID NO: 93749 - DNA, 362 bp, Homo sapiens
ccacctttccccgctttctattccacaaaaccggcattgtcatcatggcccgttctcagtgagctgttgggcacacctcccagatggggtggtggctgggcagaggggctcctcacttcccagtaggggcggccaggcagaggcgccccctcacctcccagaagaggcggctggccgggcggggggctgaccccccacctcccttctggacggggcggctggccgggcagagggactcctcacttcccagtaggggcggccgggcagaggcgccccctcacctcccggaagaggcggctggccgggcggggggctgacccccccacctccctcccagacggggcggctggccgggcggaggg

SEQ ID NO: 93750 - DNA, 364 bp, Homo sapiens
aaacagatgtggtgacatctaggctttgctggcgccacttacagagcacaggcaaaatagatttagcataattcttaagggccttggtatttttggaataggtcaatgagcattggtttcaacttaaagttagcagctgactttagctcctaagaacagagtcaacctatcctttgaagatttgaagccaggcattgacttctgtctaactttgtaagtcctagatggcatcttcttccaatataaagctgatttgtctacggtggttggtggccgaatggccaagtgtggtcacacgacttccgtggatctcctgacctaccgtgactctatttcctaagccggctgaatggctaccattacc

SEQ ID NO: 93751 - DNA, 367 bp, Homo sapiens
cctcattgtacccattctaatcgcaatggcattcctaagacttaccgaacgaaaaattctaggctatatacaactacgcacaggccccaacgtctggacgccgcctactggtgctacgtacagactcctatcgcgtgacagccataataactgttcaccaaagagcccactagaacccgtcacatgtaccatcacgctctacatcaccgacccgaccttagctctaaccatcgctcttgtactatgaacccccctcccgatacccaatcccgtgggcaaccttaacctaggcctcctatttattctagccacctgtagcctagccgtttactcaatcctctgatcacggtgagcattaaagctcaac

SEQ ID NO: 93752 - DNA, 465 bp, Homo sapiens
ccgtaccgaccgagttcccgctcgcccacgcgtccggagagttgcacaaattttgaaattttccgaatgagggagaaacaggtacctgtggatgtggtcgagatgaaaggcaagttgtattttagtcactttgaggcgaatggggcctacgtgctgttttactcttggctttaacacttccatgcgaggggttgtctgagcagctgagtcaggactgtgagccctcaccatgaatagtcatctccaggtcacagaacgtgtttagagcttgggcaacatagtgagaccctctctgtacaaaaaacaaattaaaaaaattagccaggtgtggtggtgcgcaccgatagtcccagctgtttgagacgctgaagcgggaggatcacttgagcccaggagcagaggttgcatgtgaactgagattgcgcccctgcactccagcctgggtgacggagcaagaccctgtct

SEQ ID NO: 93753 - DNA, 381 bp, Homo sapiens
tttaattatagctccagcctaggcaacaagagcgaaactccacctcaaaaaaaaaaaaaaaaaaaaaaggggcgggggccgggggaaaacccgggaacccccacctttgggggggccaagggtgggggaaaccccggaatcaaaattttaaaaaccactgggccaaaagggggaaacccttgttttaaaaaaaaacccaaataaccccatcggggggggaggcccctggaaacccagtatatagggggggccccgggaaaaaaaatttttggcccccggggggggggggttcaaagggttaaaaatcccccattaaacccccccccgggggaaaaaagggggattttttttaaaaaaaagccatccatccaaaaaaaaaag

SEQ ID NO: 93754 - DNA, 389 bp, Homo sapiens
  misc_feature (1)...(389): n = a,t,c or g
ctgagtagctatgactacagttgtgcatcaccatgcctggttaattttttgtgtgtactttttgtagagagaggagcttgctttgttgccgaagctggtctggaactcctgggcttaagtgaccctcctgccttagcctcccaaaattttcggattacaggcacaagtggccatgctcagctagaaatttcctgcctgcctgcctgcctgcctgcctgcctccctccctcccttccttcttccctccctccctccctcctcttccccccgccagggtgtgactgtcatccaggttagagtgcagtggcgtgattatggctcactgcagccttaaccccccaaaaccaaacgatcgttcaccttagccttccaagatctaggaccacagn

SEQ ID NO: 93755 - DNA, 330 bp, Homo sapiens
gggcatggtggtggatacctgtagttccagagactagggtgggaggatcaactgagcctggaatgttggggctgtactgagccatgattgtacctctgcactccagcctgggtaagagagccagaccctgtctcaaaaacataaagacagaccttcatagctgggcccagtgactcacatctataatccgagctacttgggaggctgagatgggaggatcactcgagaccagcctggacaacatagtgaccccccgctacaaaaaaaaaatattaaaagttacatttttaaatataatacagggtgtggtggtgcgcatctgtagtccca

SEQ ID NO: 93756 - DNA, 397 bp, Homo sapiens
  misc_feature (1)...(397): n = a,t,c or g
atacagcaatgtgctccttggtatttacccaaaggaattgaaaactttagtccactggatgttcatttgtgtctgaaatacctgcatatggatgtttataacagctttattcttagcagcaatcatgatgctcttcagtaggtgaatgaataagnaaaacgtggtacatcccgacaatgaaatactattcagtgatgaaaagaaatgngatatcaagccatgaaaagacatggangagacttaaatgcatattaccaagtgaaagaagctgntgtgacaggctacagactgtgactccaactatatgatactctgggaaaagcacagctatggganacagtaaaaaggtcagcngttgtccaagggttttcaggntggggaggcgatagggcngggc

SEQ ID NO: 93757 - DNA, 485 bp, Homo sapiens
tcatgaaggatattgggccgcagctttgttttttctattgtctgtctggctttggtcagtaagtaatactagcttcataaaatgagttggtcagtgagtaatactagcttcataaaatgagttctcctgttttattttctgaaagaaattcttcaaacatttggtagaattttccaatgaaatcatcccaacctggagattgatttttgggagttttcacatttatgaattcaaattcgttaattgtcatagggccagtcaaatgatgtttctcatattgatgaattgtggtcgtttatgttttttgaaaagttggtccatttcttctaaattattaaattcatgggcatagtattcttttgatgtctgctaggtatgtcatgatatcccctgttttcattcctaatatttgtatttgtgttttccctcttttattgtcagtcttactagaattgttaattttatagatcttcccaaaaatcagc

SEQ ID NO: 93758 - DNA, 199 bp, Homo sapiens
ctggagaaagagggtggggggggtgatccacatagctgggctcaggaggaaagagggctgggagtctggaccgggggaacctcgggtcaagatgccacagtttctaactatggagggcctgggggcctggactcctgggtctgagggaggagggcctgggggtctggactcctgggtcggagggaggtcgacgcggccg

SEQ ID NO: 93759 - DNA, 359 bp, Homo sapiens
cccaggaggcataggttgcggggagctgagatagcaccactgcactccaacctgtgcgacagagcgagactccgtctgaataaaataatacattatattatcatgctagcatcaccaaatgaactaatacttccacttctgaacatatgcctggaaatattgtaagcaggacctctaacagctatttgtatatccatgttcatggcaactcttattcacaatagctcaaatggggaagcaacccaaatgtccatcgacaaatgaatggataaggaaaatgtggtatatacatataatggaatattacttacactttaaaatgaaataagccagctatgcaaaggcaaacactgtatgag

SEQ ID NO: 93760 - DNA, 344 bp, Homo sapiens
gccaggctggtctcaaactcctgacttcaggtgatccacctgcctcggcctcccaaagtgctgggattacaggcgtgagccactgtgccaggactgtttctttttcttaccgcgctctgctcccatttttgccttcccatttgtgcgccaccattattaaatgctttatattctctcttttgattgggttacacattcttttattcttcctattcttaatcctttgtgttttctctgttactttgtttttctaatttcctctctctttgttatctttttctgttttcttctccatgttcacttcctttttttattatctttcaactctcctccttttttcactc

SEQ ID NO: 93761 - DNA, 366 bp, Homo sapiens
tgtatatataccacattttctttatctactcattaattgggcaataagtaggatggatatttttgcaatagcaaattgtactgctataaacacaagtatgcatgagtctttttcataaatgacttcttttcctttgggtagatacccagtaaagggattactgaattgagaggtagttctttaaggaatctccatactgattattatagaggttgtactagtttacattttcaccagcagtgtaagagagacccgtttaccacatccacaccgatatctattattttttgactttttaatatggccattctttcaggagtaaggagatacctcaatgcggatataaattgcacgtccctgataaaa

SEQ ID NO: 93762 - DNA, 346 bp, Homo sapiens
tcgagactggcctgggcaacaaagccagaccccatctctaaaaagaatttaattagctgggcgtggtgttacctgcctatagtcccaactacttgcaagatagaggtggaaggatcgcttgagctcagcagtgagctccagcctaggtgacagagaaagaccctgtctctttaaagcaaaacaaaagcaaaacttaagttttgaagtttactatatacccacctagggatattttggagctgatactaatatattaacttacattttaaagttgatgcattatgaaaattacacttgagctgattaataatacatataaaaggcaaacagctatcttagtatattt

SEQ ID NO: 93763 - DNA, 401 bp, Homo sapiens
ctcgatctcctgatctgttgatccacccgcctcggcctcccagagtgctgggattacaggtgtgagtcatcatgcccggccacatatctgcctttctagcactccatcccattcctgtctcaactgaaagtccaagtccatcacagaagatatttccatcttttccctgagctttctaatttgccacttctatcaaagaatgtgtcctgaacctattagaagtcttttctctcaggccttctcttagagtcctgttttgttttgttctgttttgttttgtgacagggtttcactctgttcaggctagagtgcaatggggcaaccatggctcattgcagcctcaacctcccagtctcaagtgatccatccacctcagcctcccgagtagctaggactgcagg

SEQ ID NO: 93764 - DNA, 388 bp, Homo sapiens
ctcagatctccagctgcgtgctgggagaaccactgctctcttcaaagctgtcagacagggacatttaactctgcagaggttcctgctgtctttttgtttgactgtgccctgcccccagaggtggggcctacagaggcaggcaggcctccttgagctgtggtgggctccacccagggcgagcttaccggctgtcttgtttacctaagcaagcctgggcaatggtgggcgcccctaccccagcctcgctgtcgtcttgcagcttgatctcagactgctgtgctagcaatcaccgagactccgtgggcgtaggacccttcgagccatgtgcgggatgtaatctcacggagcaccgttttttaagcccgtcgggcgctgtggtttcatgtac

SEQ ID NO: 93765 - DNA, 332 bp, Homo sapiens
caagagcgaaacgccatctcaaaacaaaaataaacaaacaaacaaaccccaaaaaaaaccatacccatctatgaacatgggatatctttttatttatttatgtcttatttaatttcttttagcaatgtatagctttcactgtgcaaatctttcacctccttagttgcttattcctaaatattttattctttttggtgctattgtaagcaggattgtttttaaacttcctttttgggttgttcttattaatgtatagcaatgcaactggttttgtgtgttgattttgtatactgcaactttgttgaattagtttattagttctaacaattttt

SEQ ID NO: 93766 - DNA, 344 bp, Homo sapiens
cttgaagcccggagtttgagagcagcctgggcaacatagtgagaccttgtctctacaaaaaattagccaggcatggtggcgtgcacctatagtcccagcccagaaggtggaggctgcaataagccatgatcgcaccaccccactgcagcctgggcgacagagcaagaccctatcttcaaaaaaaaaaaagggggaattgctgggaattttttacccatcttaaaaaaaaaaagctccccgatgtgtgcaaaagtgctaccccaaaaaaaatccggcttttaagactttaaagatttccgggattctttcccttgggaaaattataggggctatttttctatatt

SEQ ID NO: 93767 - DNA, 304 bp, Homo sapiens
ctgacctgaggcgggctgcctgcctcatcctcccaaagtgctgggattataggcatgtgccaccacgcccggccgacaacagtggtttcttgcatcttatcatcatttgagtttgtcttcccttgctctgccatgcccagttagtttttatattttttatagagacaggattttgccacgttgcctgggctggtctcaaattcctgggctccagcagtccactcaccttggcctctcaaagtgctgggattacaggtgtgtgccactgcgcccagccctggaccaccatgtcttatgcacttca

SEQ ID NO: 93768 - DNA, 340 bp, Homo sapiens
gtctttcctcattagtcttggcatccttgttgaaaattagttgaccacagacacatgggtttattttgagattatcaattcaattccactgatttatatttctatcctcattccagtactgttttgcttacagtagcattgtagtaagctttggaattagggactctgttctttttcaaggttgttttgcctattccatgtgccttgaatttccatactaattttaagatcagcttgtccatttccacaaagccagcaggaattttgatagggattgtgttgaatctgtagatcaacgtggagaatattgccatcgtaaaaatattaagtctgttaatcc

SEQ ID NO: 93769 - DNA, 323 bp, Homo sapiens
ttcaacttcatatccaatcactggttcccatgcctttttgtgaccacaaaatgtcgtcgacgcagaaactaactcataacatattaataacgtaaatttaagacttaaaattataaaacttctagaagaaaacacagaaaaaaattgtcatgacctgggattggcaacagattattacatgtgacaccaaaagcatgagcaacaaccacaaaaatagataaattggaactcataaaaataaaaaacttttgcacatcaaaggatattacctagaaagtgaaaagacaacttataggagaaaatagttgcaaatcatttatgtg

SEQ ID NO: 93770 - DNA, 341 bp, Homo sapiens
gtggtatctcattatggttggaatttatatttccctaatgacttacgactttgggcatcttttcatgtgcttatttgccatttatattctttgatgaactttattcaaattgtttcccccttttcttatggggttggctttcaattcttgagtaacgcctctttatatcttctatatacacatcctctgtcggacccctttctgcaatattttctcccaaccatggtgtcctttctccttttcttaattatatctttcccatataaacgctttctttcctcatctttttttggttcacgctctcttcgctttttctttctcttccgttactgtctttttcc

SEQ ID NO: 93771 - DNA, 327 bp, Homo sapiens; identical to SEQ ID NO: 35730

SEQ ID NO: 93772 - DNA, 378 bp, Homo sapiens
cgacagtgctttgtagtttcattgtgtggggcttggacttctttggttaaattcatactatatactcataggtattttgttataagtggaattgtgttcataatttcctgttcagatttttcagtgcatatatatagtatctactgatttttgtgtattgatcttgaatcatgcatctttgcttaatttgttattagctcttgttgtttcttgtatattcttttggattttctatatgctgtatttttctttctggctatttttctttacttttatttttatatattatgcccttttatttttttcttatttttatttgtttattgttctttgtttatttatttttgttatttatttttttttttatctttctctttt

SEQ ID NO: 93773 - DNA, 365 bp, Homo sapiens
cctggccagtatggtgaagccatgtcggtgctaagaatacaaaattagccggacattgtggtgcacgtctgtcatcccagcaaggcaggcgaatcacttgaacccaggaagcagaggttgcagtgagccaggatcatgccattgcgctccagcctggtcaacggagcgagactccgcctcattaaaaaaaaaaaaaaaaaaaaattacccggccttggtggcgggcccatgtggtcccggttactagggaggctgaggcaggaaaatggtgtgaaccagggaggcggaccttgcattgacccgaaattgtgccattgcactccagcctggacagaaatgcttttcataatgcattttaattgcat

SEQ ID NO: 93774 - DNA, 352 bp, Homo sapiens
attttcaacttaggatatggtcaatttacaataagcctcttgggacataaccctatgtaaatcaagaagcatctgtacttactaactcattctatcaggccagttttagaagaaatcaaactacagacccatatctctcatgaacatagatgcaaaaatcctcaacaaaacccaacaaatcaaacttaacaaagtaaatgatagcaggcagactggggaagatcagattccaaagtactgtactgtatcagatggtagaatgatgagggattattttcctctattttccagctaatttaatgtcatattattcctatatttaaaaaattcatttaacttttgtgaaacggag

SEQ ID NO: 93775 - DNA, 383 bp, Homo sapiens
ctggtgaattgacccttttatgatataatttgctactctgtctcttgtgacagtttttatcttaaactctatgttgtctgatgtaagtacggccactctcttcagattccagttttctggaatatctttttccatccttttatttgtagcctttgtgcatctttggatctgaagcagatgtcttgtaaacaacctgtagttggatcttatttttttattccattggccaatctatgtcttttatttgggcacttaatcttttttttttttttgaaaccaaattcccttttttttcccaggtttaatatccattggcaaattttggtttattgaaaccttttcctatagtttaagggattctttatgcctaacctccccgatat

SEQ ID NO: 93776 - DNA, 330 bp, Homo sapiens
gggaaatgtaaattaaaaggacaatgagatgttattacacatcttttacaatggctaaaattaatttaaaaattaacaatatcaaatgctagcaaggttgagggacaactggaactcacatattgctaatggaaacacaaaatagttcagccattctcaaaaacagtttagcagtttcttatgagatcaaataaatatttaaggtataacccagcaattttactccttggtatttactcaaattaagtgaaaatttctgaaaaacttatatgcgaatgtttatagtgtttttaatcaccaaagactggaagcaaccaaattattcatcaa

SEQ ID NO: 93777 - DNA, 357 bp, Homo sapiens
ctggattctgcctaataagaaacattgattttcattgcaaaaaaaaaaaaaaaaaaaaggagaaaaaaaaaaagaaaaaaaaaaaaaggaggggggccaaaaaaaaggggaagggggttttaaagcctttgggggggggatttggaaggggggggggaaaaaaaggaaaggggggaaaacccggggggcccaaaaaaaccgggaaaaaaaaaaaaaaaggggggaaatttgggggcccggggttttttaaaaaaaggggacgcccccaaaaggagaaaccggggaaaaagggggaaaaagggggcccctagggggccggaatttaagggggagggggcaatggggttaaaaaaaaag

SEQ ID NO: 93778 - DNA, 332 bp, Homo sapiens
ggcctttgcatccagcagggctgggactggcaccaggcctgctgacttccattcttcattccatgtcttgattccactttgagctcttggggtatgagaacaactgataaaactgaggcactttagaaaagaaacacacaacctcttttagacagaaatgaaactattgaattttcagcatggcagtcccgagctatgatacttttgtacatttttttgtttgtttttgagacagaatctcactctgtcgcccagcctggagtgcagtgacgtgatctcggctccctgcaacctctgcttcagggttcaagcgattctcctgtctcagcctc

SEQ ID NO: 93779 - DNA, 327 bp, Homo sapiens
aaaagctggctcatcggtgacaatattccctcaagccaaagcctaatccagaaaaagggtgtaaacccctccttcaaatctatgaaggctgaccgtggtaaggaagctgcagaagaaaagtctgaagccagtagaagttggtttatgagggagaaggaaagaagtcatctccataatataagtaagtgcaaggtaaagcagcaagttatccagaagacctagctagtatcattgatgaaggtggctacactaaacaatagattttcaatgaagattacagtggaagaagatgtgatttaggtcttttctaactagagagaagttaag

SEQ ID NO: 93780 - DNA, 532 bp, Homo sapiens
ctatgctgtaaccttactggcctctttgttattcctcaaacatgccaagtaagttaacattttagggccttttcacttgttttttacctttgtccagaatgctctttccccaaatatttatatgactcatatgcttacttcactggggcctctgcatatgtcatctcttcaaacaggctttcccaaaccatcttatctaaagtttcaaccctctccacattctgtcccagtgggattcatcccgggatgcaaagatgattcagtatacacaaatcagtaaatgtgatatatcatgttatcagaatgaatgacataagccatatgataatctcaaaagatacataaaaagcatttgacaaaattcaacacattggatccctattccctgccctgtctttatagcatttgatatttggtattgtctggcttcttcattggaatgtagactccataaatacaggtacttttggctgggtgcattggctacaccttaatccaacactttggaggcatgctgtttgtccttaatcag

SEQ ID NO: 93781 - DNA, 321 bp, Homo sapiens
cagcaatctccatggattatctctacacatgcaaaattccactgagcaaaaaactcacctttgaagagccagaacagaaatctaccttattcacacacttctaggagtctacgcaggagaaacgaaaacaggtccatacacagattgcatgtgaatgttcacaacagcacctaccacattagtcaaaacgtggatataacccaaaagcctatcaattggtgaacggataaacaaattgtgatattaatctgtacatacatggaatactattcagcaataaaatcagttctgacacatttaacaacatgggtgaacccccat

SEQ ID NO: 93782 - DNA, 372 bp, Homo sapiens
cccacctcagcctcccaaagtgctgggattacaggcgtgagccactgcgcctggcctgagtttatttttcttaaaggtaatttctctgtcaggttacaaattcttctggagtcatttttgataatttacgtattcctgaaaaattacttcctcctgggcctcaaatttattaaaagtgagcaaagcatttttgtttgatttttgatttcttctatatctgttgttactgttccattttcatttattattttgtgtctgttctcccttatttcttgattcattataggttattctactttctcccccccaaaaccagctcttaacttaccaattctaatttcttgagttgttagatgcttaatttttttcttt

SEQ ID NO: 93783 - DNA, 340 bp, Homo sapiens
gatctgcccgcctcggcctcccaaagtgctggaattataggcctgagccaccgcacctggcctattttttttttaatcataatacagttttgttggaatcttggcaaatttatagattaacttgggaagaattgacacctttgtgagactgagtcttcccagccaagaacagactatgtctttcccttatttaggtcttcttttgggtccttttgggagcattttaaagttttcttcaccagtttatttcagtttctaatgctttcctaaccaatcagtatttaatagaatctttgacctactgccttttcttttgtgaggtttctcatataaaagcatg

SEQ ID NO: 93784 - DNA, 334 bp, Homo sapiens
ggggtccaccttctttcttttgcatgtggttatcacttgtcccagcatcatttgttgaagagactattttttctccattaaatggtcttggcacccttataagtgtttatttttgtactctcagttctattcctttggtccatatgtgtatctttatgctagtgccatgctgttttgattactgtagctttgtagtcagtgttgaaattgggaagcgtgagtctcccaactttgtttttcctttgcaatattcttctggctacacttgcaatttaatatgaatttcagaatcagcttttcaatttctacaaaaaaaaataggctattgaaattt

SEQ ID NO: 93785 - DNA, 312 bp, Homo sapiens
  misc_feature (1)...(312): n = a,t,c or g
cagtggttcactgtaggttttccatggatagcctttattagaataaggaaatttccttctattcctaacttgttgggaattttatcattaattaatannnnnnnnnnnnnnnnnnnnnnnnnnnnnnnnnnnnnnnnnnnnntcgatgttgcgtatttagtatgacaatatgataaaatacattgattgatttttgaatgttgaaccaactttgaatacctgggatagaggaaggtgaaaaaattctacaaatggatggtggagatggctgcacaacatcgcgttgtggatgtggtcactgagttgtacaat

SEQ ID NO: 93786 - DNA, 331 bp, Homo sapiens
tcttgccctgtcacccaagctggagtgcactggtgcaatcacagcttactgcagccttgaactcctgggctcaaatgatcctcccaccttggcctccaaagtgtttggattacaggcatgagccactgagcccagcctcaggttgtctttctcctgctttactatttcatttttttcttttcgtcttctagcgtactgtaaatttacatatattttaatgtctgtactagaatataagctcaacaagggtagggctctttgtgtgtagacattgctcagtacatagttggcacgaaataaaatcacgtcgacgcggccgcgaattccagat

SEQ ID NO: 93787 - DNA, 365 bp, Homo sapiens
acgccactgcactccagcatgggtgacaggtccagaccctgtctccaaaaaaaaaaaaaaaaaaaaaagtttttcctggggaacccaagtggggaaccttttgccttaaaaaacttaccaggaaaaaacccaaaggggcaaaaaatttttacccaggggaaaaaaaaaaaccctcccaagtgggaaattttttaaattggggtttggaaaaaaaaattttttttaatttggccaaaaaaaaaattttggagaaaaaaactggttttaaaaagcttttaacaaaattaaagggaatggaaaaaggtttccaaggcaaaaaatttttggtcaaccacaaaggttttaattaattcaatttttaaaat

SEQ ID NO: 93788 - DNA, 338 bp, Homo sapiens
ctcggccagagtgccgtggcaacagagcgagattccatctcaaagaacaataaacaaaactggacaggcacggtggctcacaattctttattcactgcttctttctatagagttctaaacacaagtccagttctctctcctcttgtcacatactctctaaaatcaagatttgcattcttttcctgtatacttttcttttctgacacagggttcacccaagatggagtgcagagatacaatcatagctcattgcagccttggactctgagattcaagggatcctctgcccttagcctctcaaagagctgggattataggcatgagccattgtgttgggg

SEQ ID NO: 93789 - DNA, 361 bp, Homo sapiens
ccgagatcgcacctgtctcagctgagagtgagactgtctcaaaaaaaaaaaaccaaaaaaccatcgggaaggggtttagggccattggttgggaaaaaaattttagggaaaaaccctcaaagtaccgtttaccaggggcaaagttaaccaatggaaattccttaaacttaaaagttttttgcccagaaaaaaaaaaaccgaaataaccttatgaaccctagggaaacactttaggaaatgggaaaaattttttgcaacctatccttccaccagggaataaatttcaaaaatatgcagggaccttaaccatttcaccggcaaaaaaataattatcccaattttccaaagggccaaaggattg

SEQ ID NO: 93790 - DNA, 358 bp, Homo sapiens
tgaaaataaaaccacaatgagataccactagattcccatcagaatggctgaaaactgagtgttggcagttggaactctatacaaccctggtgggaatataaaagggtatagcccctttggaaaacaaacagtttggcagttactttattaaacataaatctgccatgcaacccaaccattttactggtaggtatttacccaagagaaaggaaaacctatgtctacacagtggcttgtacacaaatgttcctaacagttttattcacagtagccccaaactggaaacaatcccaaggtccatcaacaggtgagtagaaaaacaaataatggcatattcacataatgggacactactcag

SEQ ID NO: 93791 - DNA, 357 bp, Homo sapiens
ttttgctttaaactaaataaaaatggaaaagataaataaaaaatggaaaagaaggtctgtgtttacctacacatttaccattttcagcattctttgtttctttgtgtagatctgggtgttcatctggtgtcattttcttttgcctgaaaaaacttcattttttcctggatttccacagtgtttggacatttcctgaaaaactttatttgttcattctgtcttgtttttttttaaagatagggtcttgctctgtcacccaggttggagtgcagtggcgcaatgatagttcaccgcagcctcggactccaggaatcctcctgtttcagcctgccaggtagctgggactacaagcgcatg

SEQ ID NO: 93792 - DNA, 375 bp, Homo sapiens
atacaccacccacgtgaccctgggacgcactggagatttcggcttagagccgcagaaaccatctgaaagacataagtcaggagacagagtcctgatacctttccctatttggccagttcatgatccagctagccctgggcaaactagtccatcttttggataaaataaacacctgcctcagaatcgcttgaacccgggaggcggaggttgcagtgagccaagattgcgccattgcactccagcctgggcaacaagggtgagacttagtctctaaataaataaataaatataaaaataaacacctgccttaagtcacaaggtgttttacaggcacctggtgtttctgccatgaaaaatgcatgcagcttcaagatt

SEQ ID NO: 93793 - DNA, 374 bp, Homo sapiens
cgaattcataagagcgggggaggttaggggtatggtcttggtgacaaaatatgttgtgtagagttcatgggagagtgcgtcatatgttgttcctaggaagattgtagtggtgagggtgtttattataataatgtttgtgtattcggctatgaacaatatggcgaaggggcctgcggcgtattctatgttgaagcctgagactagttcggactccccttcggtatggtcgaagggggttcggttggtctctgctagtggggagataaatcatattatggccaagggtccatgatggcaggagtaatcagaggtgttcttgtgttgtgattagggtggagaggttaaaggagcctcttattagtattgatgatagc

SEQ ID NO: 93794 - DNA, 400 bp, Homo sapiens
ctgatgcaggagaattgcctgaacccaggagggagaggctacagggagctgagatcgcgccaccgcattccagcccgggcaacaagagcgaaactctgtctccaaaacaacaacaacaacaacaacaacaacaacaacaaaacacatagccaggtcagagaactgtccactctatcattttcttgatcatatgtacttggcattattaaattatttccaacctatagttctttacaggaatcttagagcttggctttcaaaggtttcaccaattattcacatttcttcattttgctaacgtaagactttaaaagtagcataagacttgaggccaggcacggtggatcacgcctgtaatcccagcactttgggaggccaaggcgggcggatcacaaggtct

SEQ ID NO: 93795 - DNA, 377 bp, Homo sapiens
cttcagagctgtcctacagggacgttggagtctgcagaagtttctgctgccttttgttcagctatgccctgctcctaaaggtggagtctacatgtagaggcagaggtcttgctgagctgcggtgggctccgcccagttcgagcttcctggctgctgtgtttacctactcaagcctcagcaatggtgaacgcccctccccctgccaggctgctgcctccaaggtctatctcagactgctacactagcagtgagcaaggctctgtgagcatgggacctgctgagccaggtgtgggatatgatctcctggtgtgctgtttgctaagaccattggaaaagcacagtatttgggtgagagtgtcctgtttttccaggtacta

SEQ ID NO: 93796 - DNA, 325 bp, Homo sapiens
gcagaatggatgctgggttagcaggcatgaaaacaatactaatttcctcgggcatcttcatcaaagctctcggatgaccaggagcattgtcaatgagcagtagaactttaaaaggaatctttttttttctttgagcagtagggctcgacagtgggcttaaaacacccagtaggacatgctataaacagatgtgctgtcatctaggctttgttgttccatttatagttcacaggcagagtagatttagcataattcttaagggctctaggatttacagaatggtaaataagcattcgtatctgtttaaagttaccagttagtatta

SEQ ID NO: 93797 - DNA, 308 bp, Homo sapiens
ctctaatcctgtaatcaggaggctgaggcagaagaattgcttgaacctgggaggctgggtttgcggtgagctgagattgtgccactgcactccagcatgggtgacagagtgagactctgtctgcaaaaaaaaaaaaaagcctttccaatgggcccccgggggttaaccctttaacccccaccttttggggggcccgggttggccaaccccggggaacccttcctttaaaaaaaaagggcttccgggccctaaaattaatccccattccccaaggggaaaacccatcccaggggcccaccaacaaaaat

SEQ ID NO: 93798 - DNA, 373 bp, Homo sapiens
  misc_feature (1)...(373): n = a,t,c or g
ttataacccacgtctgtctcggagtgtcccatacccacggagcctcgctcattgctagcacagcagtctgagatcgaactgcaaggcggcagcgaggctggggaaggggcgcccaccattgctgaggcttgagtaggtaaacaaagcggccaggaagctcgaactgggtggagcccgctgcagctcaaggaggcctgcgtgcctctgcagacgccacctctgggggcagggcatagccaaacaaaaggcagcagaaacctctgcagacttaaatgtccctgtctgacagctttgaagaaaagtaggttctcctagccacgagtttgagatctcagaacggacagactacctcctcnaggggtccctaaccccc

SEQ ID NO: 93799 - DNA, 375 bp, Homo sapiens
aactagaaaacctaaaattccagataaattcctggaaacatacaacctcacaagactgaaccaggaagaaactgaaattctgaacagaccaatgacgagttccaaaatttaatcagtaataaaaaacctggccagggccatggctcatgcctacaatcccagcactttgggaggcaaaggcaggcggatcgcttgagccaggagttcaagaccaggctgggcaacatgacgaaaccttatctctcaaaaaaaaaaaaaaaaaaaaaaaaaaccccccgggggggggaaaaaaaccccggggggccctttttttggggggttaagggggggggaacccccggtttctgagaatcggggtttcacaatggacccccg

SEQ ID NO: 93800 - DNA, 339 bp, Homo sapiens
ggacaaccttataggggtattaaaaatcactgaattataaaatctaagaggattaattatatgtcatgtgaattatatttcaatataaacatagataatttttttttttttgaaacagtatttcgctctgtcatttaaactgaagtgctatggtgcattcatggttcattgcacccttaacctcccgggctcaaccaatctttccacttcagcctcccaagtatctggggctataaaccggggctacccgggccaattttcggattagaaaaataatttttggtaaagacagggttttgccatgtggcctaggctggtctggaacccctgggctcaggg

SEQ ID NO: 93801 - DNA, 313 bp, Homo sapiens
  misc_feature (1)...(313): n = a,t,c or g
ctgtaatcacagctacttacgaggcagaagcaggagaattgcttgaacccaggaggcggagtttgcagggccaagatggccactgactccagctgggtgacagagtgggactccatctaaaaaagcaacaacaacaacaaaaagacgatttgggatattgttttaatagggtgtttttaaaatttagtatcagtattaacattacgggcagtttcatgtactcttttgcagcctgttttattgcctgcatgnagtggagatggctatggtgggagtgggggctgcaacctgccagctggcttcgccttttttg

SEQ ID NO: 93802 - DNA, 350 bp, Homo sapiens
ggcaggcacctctatacgagactcagttaactacacagtttgtcctactagacaaagaattattttatacagctccctttccttattccctgagatgcttaatgcaaagcacttaaacattcttaacatgttggtgtcaacaataccagagaaagacattctttttacaaactttactaatttgccatggactaacacaatatatgtatctgtacacacagacacatagacacacacacacacacacacacacacacacacacactctatggatctggaaataaaagaatatatggttttaaaaatacccaatctcctaatatttaaatctgcattggaatagtaggggg

SEQ ID NO: 93803 - DNA, 357 bp, Homo sapiens
caggtagaccatacatcagaccgcaaagcaaatctcaatatgttttaaaagattaaagttatacaaactatgttctctgactacaatggagtaaaatcagaaaataacagaaggaaaactggaaaactcacaaatatacagaaattaaacagtacccctaaataagcaatgagacaaatgagaaaccacaagaaattagaaaatactttgaggtgaacataaatgagaacacaacatatcaagatttatgggatgaggtgagcatagtggctcaagcccataatcccagcactttggaggctgaggcaggaagattgcttgagcccaggagtttgagatcagcctggacaacagagt

SEQ ID NO: 93804 - DNA, 359 bp, Homo sapiens
aagtgtttcaatttagaaacctgctgtatagatagccaacataatacgaaagctgaaggaatcaaaaggagtcccattgctacaggcccaatttgaatgtcagaaattgctgtggtaggacattgtaaccaactctgcgctactaccacaaatgttctatggattctggttcttaaataataagagttgaaactacttgatcagtggcagcataatggatgttgtcttagcaggcatgaaaacattcatttctttctacatctccatcagagctcttgggtgaccagctaaattgtcaatgaacagtaatattttaaaaggagtcttttatttctgagcagtaggtctcaatggtgagg

SEQ ID NO: 93805 - DNA, 348 bp, Homo sapiens
  misc_feature (1)...(348): n = a,t,c or g
ctagttctagatcgcgagcggacggcctttttttttaccagtgtaaataacagacattgtattggtgacacttatggtacaaaacacaaaaagaaaaaaaaaaaacacaaatgaaagaaaaaaaacaaaggataaataaagctagaaggagataaacttcctgaatgtgaagcagtatgtgggaagcccaagaatccggcaaacccagtgcagcggatcctggttggacacctggatgccaaaggcagctttccctggcaggctaagatgggttcccaccataatctcaccacaggggccacgctgatcaatgaacaatggctgctgaccacgggtaaaaatctcttn

SEQ ID NO: 93806 - DNA, 347 bp, Homo sapiens
caacaacttgattttctcccacagttactttatcaagtttgtttttttttttgttttggccaattcggttttaacccccaatttttaaaagaacggcccgggggaaagtaaccccggggtgggaatatccggccaagggttggggggaacctttttagggaaccgggggctatttcccaaccccgggttttccgggccattcccaaaaaaacaggtatgggaaggggccctttgtgcccccggctaaaaggtttgcacccttaagttttaatttattcagtttggccattccgggaaacgggtccaaaaattttttcaccctttttgagggcccaagccccattttg

SEQ ID NO: 93807 - DNA, 397 bp, Homo sapiens
agggtgggcagggatactcagggacagggcatcatgggggaatttggcacaaaatggagcattaaaggtaacccctgccccctaaaaaaaaaaaaaaaaaaaaaaaaaaaaaaaaaaaaaaaaaaaaaaaaaaaaaaaaaaaaggggggccccctaaaaaaaaaccccgggggggccaaaatttaaagggggggggaaaagaaaaacctcccccacagaagggggtaaaaaaaaagaccctctccgggaggattataaaaaaagatggaagggaaaaacacacccggggggaactttggaaaaaaacctttatttggggggggaaaaaattggggaaaaaccccccaaaaaaatttaagatcatgaaggaaaaaaaaaggtcttgagggggaagggg

SEQ ID NO: 93808 - DNA, 401 bp, Homo sapiens
ctgactcgtgggccacactccacggaaacattatgaaatgatctgctgcagtgctctgagccctaggattggtgctttgggttcaccgtaagtggcccgactggcattgtattatcaaactcataactagacatcgaactacacgacacgtactacgttgtagctcacttccactatgtcctatcaataggagctgtatttgccatcataggaggcttaattcactgaattcccctattctcaggctacaccctagaccaaacctacgccaaaatccatttcactatcatattcatcggcgtaaatctaactttcttcccacaacactttctcgacctatccggaatgccccgacgttactcggactaccccgatgcatacaccacatgaaacatcctatc

SEQ ID NO: 93809 - DNA, 402 bp, Homo sapiens
caggctgttctcaaactcctgaccttatgatctgcttgccttggcctcccaaagtgctgggattacaggcgtgagccactgtacctggcctgattgatttctttttaagatgtttatgtcttccttttctggattgctttataagtttctttgtgcaggtttttaaccttgtcttggatctcattgagcttccttgtaatccatgttttaaattctttatctgttatttctgaatttccattttggttagtgaccactgctggagagctagtgcgatcctttggtgatgtcactaccttcagatttttcatggtgctggaattcttacactggttccttcttatctgaagacttctgatttttataattatttttgtgttggtaggattttttctgtacatt

SEQ ID NO: 93810 - DNA, 384 bp, Homo sapiens
  misc_feature (1)...(384): n = a,t,c or g
tcctccctaggcctcacctcaggtccagactgcgggaggaccctgaggggccaggggtagccatgaggcctagtctgggacggagcctcgggctggagtagcttcgggggcctgggctgccccctggctgtggtccgtgggaaagggccctgctcaggcggggcgggctggggaggcctccggggacagctgcactccagagctgcctccaggctggtcccgggcgccctgccttagtttattgcccatgcagcccacccccagcttcctctctccttctgtctgtctgtctgtctgtctgtctctctctctctctctctctctctctctctgtggctctctctctctctctttctctgtctctgcaccacncgaatttcaggg

SEQ ID NO: 93811 - DNA, 387 bp, Homo sapiens
aggatcacatgaggccaaaagttcggggctgcagtgagctgtgatcttgccattgcactccagcctgggcaacagagcgagagcttgtctcaaaaaaaaaaaaaaaaaaaaaaaaaaagaaaaaaaataggggaaaaaatttaaggggcattttttaaagtagccccccctttttttttttttaaaaaaaaaatgaacctaaaatcacccgtggggattgcaggggtggcaaaaaatacccgatggatattaaaacacagggggtaggttagcctttggaccgaaacccagaagggggaaaaaatctggacaattgccaaaagggctggattttttttggagaaaaaccacagtttaaaggggctctaggtgaaaacggcccttaag

SEQ ID NO: 93812 - DNA, 410 bp, Homo sapiens
agctacttccccgatcatagaagagcttatcacctgacatgatcacgccctcataaacattttgcttatgtgattcctagggctgcatgcccttttcgtagcactcacaacgacactaactaatactaacatctgacacgctgaagaaacacaaacctgatgaactatcctacccgccatcatcctagtcctcatacgcctcccatccttacgcatgcctttacatatcagacgaggtcaacgatccctccattaccatcgaatcaatgggccaccaatggtactgaacctacgagtacatccgactacagcggactaatcttgaactgctacatacttcccccattattcctagaaccaggcgacctgcgactccttgacggtgacgatcaagtagcactcccgattgg

SEQ ID NO: 93813 - DNA, 402 bp, Homo sapiens
  misc_feature (1)...(402): n = a,t,c or g
atcccttaaaatggttaaggtggtagatgggtattaaaaaaataggttgtttgctcttttattgttgaagttccttgtatattctagatgttaacctcttatcagatgcatgatttgcaaatattttctcccattctgtaggctgccttttttttttttttttaaaagccccggggtttttccttttgggggaacccaatttggttttaattttggtgcccgggcttttgggggtaaaccccaagtcccggttgcctccaaggaattttccccggggttttttttaaggagtaaaagtttaacttttaaaataaggttttggacctatttggggtaacctttggaatagggggggagggcccacttttttgcccaagggaaaccgggtttccccaccccctn

SEQ ID NO: 93814 - DNA, 385 bp, Homo sapiens
  misc_feature (1)...(385): n = a,t,c or g
tctaattatagctgtaccatactttacctccaaatatttggtatttcagattgttttaaatttttgctattgtaaatttgtatgaatataatttttataaatagctatactctttgaatngttttttctttttcccccttttttttttcccccgttttggtttctgttctttttctttcttttttggggtctctgggggtgggggtttttttcttttctttttttgcgttctttgttttttttcgttttttcgccctttttgttttgtgttttttgttccctgtgtgttactttttctttgtgtttatatgatataaaagtgggggcgttttaaatggtacccaggttgttctgttttatttgttatttgattgaaatttttttt

SEQ ID NO: 93815 - DNA, 387 bp, Homo sapiens
caccatccacccatgtatctataaacctagccatgggcattcccttatgagcggacgcagtgattataggctttcactctaagattaaagatgccctagcccacttcttaccacaaggcacacctacaccccttatccccatactagctattatcgaaaccatcagcctactcattcaaccaatagccctgtccgtacgcctaaccgctaacattactgcaggccacctactcatgcacctaattggaagcaccaccctaacagtatcaaccattaacctttcctctacacttatcatcttcacaattctaattctactgactatcctataaatcgctgtcgccttaatccaagcctacggtgtccacttctagtaggcgcgtaccc

SEQ ID NO: 93816 - DNA, 373 bp, Homo sapiens
gctactcactagacagtcccagcctcacacgattctttacctttcacttcatgctgccgttcattagtgcagccctagcagcactccacctcctattcttgcacgaaacgggatcaaacaaccccctaggaatcacctcccattccgataaaagcaccttccacccttactacacaatcagagacgccctcggcttacttctcttccttctctccttaatgacattaacactattctcaccagacctcctaggcgacccagacaattataccggtagtcgcaacgcacctgtaaaacaaccccgtccccacatcagagcccgaatgatatttcctattcgcctaacaattctcgatccgccctacaaactacg

SEQ ID NO: 93817 - DNA, 353 bp, Homo sapiens
cccacgcgtccggtcaaggtgggaggattgcttgagaccaggagcttgagaccagcctgtgcaccatagagagactgtttctttaaaaaaaaaaaaaaaaaaaaaaaaaaaaaaaaaaaaaaaaaaaaaaaaaaaaaaaaaaaaaaaaaaaaaaaaaaaaaaaaaaaaaaaaaaaaaggggggccctttaaaaaaaaaccccgggggggccaaaatttaaaggggggaaaaaaaaaaaaattttttcctaaaaggggggaataaaaaaaaaaaagccggggggggttttaaaaaaagtgggggggggaaaaattttttctgggggatttttggaaaaaaacttttttttgggg

SEQ ID NO: 93818 - DNA, 394 bp, Homo sapiens
cccagctactcaggaggctgaggcaggataattgcttgaacctgggaggcggaggatgcagtgagccgggaccacaccaccgcactccagcctgggcgacagagcgaaactctgtctctaaataaattaataaataactctaagagctctttctgtaaatgtaaaataaaaactctgggctgggcatggtggtttgtgcctatggtcccagcactttgggaggctgaggcaggaggactgcttgaggccaggagtttgagatcagcctgggcaacatagggagacttggtacaaaaaaattgttttaattaattaaaattaaaatttcaaaagaactctgtttcgaaacattgtgcatttcaggaaacacaggaaagcattgtgtggttaattg

SEQ ID NO: 93819 - DNA, 406 bp, Homo sapiens
  misc_feature (1)...(406): n = a,t,c or g
ctttatccctttttctgttagtggacatttaacttgttctcacagcttggctattgcaaataatgctgcaatgaatatctcataagtctcgtatatgtccatacaagatcatgaaaatggacatgtctctgggtattttgaattggtgggacaattttgcttaagggtaggcatagtgggtggctctacatttgagagttctaattcccattcctatatatatttcttttctttttatttatttattttttttgagatggggctctctgtcactcaggctggagtgcagtggcacaaacatggcttactgcagcctcaacctcctggggctcangtgatcctcccatctcagcctnccaagaagctgggaccacaggcntgtgtcaccatggcctgncttaatttt

SEQ ID NO: 93820 - DNA, 386 bp, Homo sapiens
aaaacagtcagacagtgttgtcttctgccaaggttagcgtctgttcacaggctgagtctgacttcttgctcccacctcctacctatctccccttttatactaataatcttataaaaaaaaaaaaaaaaaaaaaaaaaaaaaaaaaaaaaaaaaaggggggggccctttaaaagaaaccctgggggggcccaaattaaagggggggggggaaggaaaaacctttcccaaaagggggggggaaaaaaaaagggggcccggggccggggttaaaaaaggggggggggggaaaatcgccaatgggggatttttgggaaggaacctaatttggggggggggaaaaatgggggaaaattcccaaaaggaaattagcgcctttgggggaaaaa

SEQ ID NO: 93821 - DNA, 362 bp, Homo sapiens
tacatacgtactattcgtcataccatacgttgagacagacctagtacaatgagccggatgaagctactcaatggactactcaaacctcacacgattacagaccttgaacttgaacgtgcccttcaatatagcggccctagcaacacttcgcctactatacctgcacgaaacgggatcaaacaaccccataagaatcacctgccattccgatgaagtcaccttccacccttactacacaatcaaagacgccctaggctgacttactcttccttctctccttaatgacattaacactattctcaccagacctgctacgcgacccagacaattataccctagccaaccccttaaacacccctggc

SEQ ID NO: 93822 - DNA, 365 bp, Homo sapiens
atagaagaacgtaacaccaccagtcaacagcagtcaacacgatctaactgacatatacagaaatctctacctaatggcaacagaatatacattcttttcaaatgccatggaacatataccaagatagaccataacctgagccataaaagaaacctaaataaattttaaagattaaagttttaaagattaaaattaaactcaaagggtgttctatggcctaaatggaatcaaactacaaatcaataacagaaagataacaggaaactctccaaacacttaaaaactaaaaacacacttctaaataatccatagatcaaagaggaagtctcatgggaaattttaaaaatgtatttaagggaggggaa

SEQ ID NO: 93823 - DNA, 368 bp, Homo sapiens
caaaccgcatagttccaaatcatgatatcccgtatttctctctgtgtgtttgtgtgctttttttttttgacagagtctcccactctgtctctctgaggctggagtgcaggggcgggatctctgcttactgcagctcccacctcctgcgttcaagcgattctctgtctaagccttctgagtacctggaattacaggcgtaacccactgcgccctgcctatctgcttattttaaaagcagtaaatcctttacattatccctaagggtatactctgatattcacagaacctctgtagttgactaagttattagcctgacagggcagtggaagggttggttttaattgatgaggaaaaatcaagggttgggg

SEQ ID NO: 93824 - DNA, 338 bp, Homo sapiens
ctggaataaggcgtatctcattgggagtctaattcgcatttctctgctaatcactaatcaccagagaaatgcaaattagtgattagcattttttcatatgcctcttgtcagtttgggtgtcttcttttgaaaatgtctattgatctcctttgtccactttttaacacgattattagggggttttggttgaattacttgagttccatataaatcctggatgatctttccttgtcctattcatagttttgacagagctacggctagtgtgctagctcgctcgtgctttctatgcaattaggagttaccagtatctcggtgccgtaaaccaggtgacagtg

SEQ ID NO: 93825 - DNA, 350 bp, Homo sapiens
  misc_feature (1)...(350): n = a,t,c or g
gaaatacctaatgtaaattataagttgatgggtgcagcaaaaccaacatggcgcatgtatacctatgtaataaacctgcacgttgtgcacatgtaccctagaacttataataaaaataagagcaaacaaaattacttgaatcaatgagaaaacattagaaagaataatagatagccagggtcatcagatatttgaggaaaatataagagaaagagaaaaaataagtaaagagaccacagataggcaggcttctaatgaatatataatagaacagataagagattaaacttagaaatacagaggtaaatagaaagatcanaaagatttanaagttgttgcttttgggcagn

SEQ ID NO: 93826 - DNA, 317 bp, Homo sapiens
cgaccagaatgcatatttctgacaaaaagacttacaacactaatataaaaagaatctttagaattcatttaatgagacaaacaacccaattaaaaataggcaaaagatatgaacaaacactttataaaagtatatttgaatggacaataaacacatataaggaagtgaaacagctcaatagcaaaagaaaacccacaaatactgtgattaagaaatagtcaaaagacctgtacaaacatttctcagaagaagacatacagataaccactagatatattaaagaaatgctaagcatcactaatcatcaaagaaatgag

SEQ ID NO: 93827 - DNA, 345 bp, Homo sapiens
acaaccgatgccgcgctgctcgtcgagctcctttgcagcctgaagcccttcccaggttgatgacagctattataacaattcggcccttgctgagcccatactccttgctaagctcgatgagccgccatggctctggccgacatagcatatttatcaaaggacagccttgcgtgtacttctgtggatactacgtccggaatctacgatagtatatctgctgcgctcatcacaaaacgttgatcattagcattcatagtctggtcctcttgtgacccgcccagcttccggccataggcaatcgcctcctccaccagctcctggtaagcgggcatctgggctgcggcc

SEQ ID NO: 93828 - DNA, 380 bp, Homo sapiens
ctccttctccctcctcttccctccctccttctccctccttctccctcctcttgcctccctccttctccctcctcttccctccttctccctactcctccctccctccttcaccctcctcctccctccctccttctccctcatcttccctccctacttgaccctccgcctacatcccacttgctcccatctattccatgattagacatccctaacgctcctacacaactctagcaacccctcatgcccatgtaggccccgatccacagaatactttaaatgactacaattaacgcccatcattttattggaccaaaattcctcaacaaaaataattacaagggcttaatcataaaacctatgaccctatccgacacaaggtg

SEQ ID NO: 93829 - DNA, 98 bp, Homo sapiens
gcggtggctcacgcctataatcccagcactttgggaggctgatgtgggcagacagcttgaggtcaggagttcaagaccagcctgggtcgacgcggccg

SEQ ID NO: 93830 - DNA, 340 bp, Homo sapiens
ctaattctagttcccttgctgtttccaccacatctgcagtcacgcctcccacaatagtcttgaatccctcaaagtcatccatgagggtcagaatcaacttcttccacactcctgttaatgttgatattttgaccccttctcccatgagtcacaaatgttcttaatggcatccagaatggtgaatcctttctagaaggttttcaatttactgtgcccagttccatcaggggaatcactatctatggcagctatagcctcatgaaatatatttttaaataataaacgttgaaagtcgaaattgctccttgatccatgggctgcagaagggatgctgtgtccg

SEQ ID NO: 93831 - DNA, 339 bp, Homo sapiens
aaaggaaggactcaagaaagagagaaagaaagaataaagagaaaaggaaaggaaggaaggaaggaaggaagaaacctattcgaatgactgtccatttctcatccaaaaccatggtggccaaagacgaagacagtgaaaccccgtctttagaatgctggaagaataaaaaaactattccacccagaattttatattcagaaataatattctttgggagtgaaagccaaatcaagaaattttcaggcgatggaaacccaaagggttcatttccagaacttttctttttaagaattcctatggaagtttttaacctgaaggaagcttacttaaggaaaagtg

SEQ ID NO: 93832 - DNA, 339 bp, Homo sapiens
cgattctgctgcctcagctgctcgggaggctgaggcaggagaattgcttgaacagggtggggcggggggcggaggttgcagtgagccaagatcacgccacttcactccatcctgggcgaaaagcaaaactccgtctcataaataaataaaggaaattagctttttcactagagacagcatgaatttttgagactgggtttgagttcctgtgctatttcaccattagccttctccctttccacatttcagttcttagagcaaaattctgactgcttaaatgtgcttaggttatgagtataatagatgatatttcgcattaacttgtggtagaattgccct

SEQ ID NO: 93833 - DNA, 421 bp, Homo sapiens
gtataggttaaggagggtgatggtggctatgatggtggggatgatgaggctattgatttttgtgaattcttcgataatggcccatttgggcaaaaagccggttagcggaggcaggcctcctagggagaggagggtggatggaattaaggatggtagtcatgttatctcgtttcaggtgcgagatagtagtatggtaccgatgctggagttgaagttgagtactaggacgcattcagagttaggataatataaatagttaaattaagaatggttatgttatggttgtactgtagaactggattattcatcctatgtggtaattgatgagtatgctagaatttgcgtaactggtttggtataatccatactcaagtgcttgctatattggattatgatgttagaacttagtggatagcctatg

SEQ ID NO: 93834 - DNA, 244 bp, Homo sapiens
ggataattatgcttaaagctgggcaaatgactgtcttccccaatgaagatgtatggatggcatataagcatacggatcgatattcgacatcattagtcatgaatgaaatgcatgattaaaaccacaatgggataccactatgcacctattactgtggctaagctactgaactgaatacaagatattggccttgacgtggagtagcagagtcattcattgctggcggaaatgtcgatgcggacgt

SEQ ID NO: 93835 - DNA, 338 bp, Homo sapiens
  misc_feature (1)...(338): n = a,t,c or g
gttcctaataatggatcttcaaaaatatataaacccaaaaataaaagaacctcaaggagaaactaaccataagacagtctcatttatgaacataaatgcaaaaatcctgaacaaaatattagtaattcaaatctaataatttccaaagaaaaataatgtgtctaaatttgggttattccataattcaaggttgcttcaatatcaatcagtgttattcactagatgaaagaagaaaatatatgattatctcaaagaatatagaaaaagcattcaataaaatacaacattcatcattcatgattaaaacaaagaatagaaagaaacttcctgaactggan

SEQ ID NO: 93836 - DNA, 347 bp, Homo sapiens
gtctgaatgtaccacagtttatttatccattcatctactgaagaacatcttgttgcttctgagttctggcaattatgaataaagctgctataataaatatcagtgtgcaggtttttgtgtggacatgagttctcccttcatttgggtaaataccaaagaatgtgattggattgtacggtaagagtaagtttagctttgtaaacaactgccaaactgtctataacaaagggcttgtaccattttgcattcctaccagcaatgaaggagagttctgggtttccacatcctcaccagcatttgatgttgtcagtgttttggattttggtcattctgataggtgtatagtg

SEQ ID NO: 93837 - DNA, 337 bp, Homo sapiens
cttgaacccaggaggtggaagttgcagtgagctgagattgtaccactgcactccagcccgggtgacagagcgagactctgtcttaaaaaaaaaaagattacaattttatacttcaaaaacatagaacaacatagcaactctaagatgaaatttcaaacattaaagaattacattaaggccagtgtgatgactcacgcctatagtcctaacactttgggaggccgaggctggaggactgcttgagcctaggagtttgagaccagcccgggcaacataggaagaccctctctgtacaaataataaataaaataatttttttttaaagaaaagaattttg

SEQ ID NO: 93838 - DNA, 329 bp, Homo sapiens
caaaaacaaaaaagaacacatggatgtacaaacatctgttcgagtccctgcttttagttcttttgagtatattcttaaaagtaaaattactggatcatatggtaactccatggttcattttttgaggaatcaccatgctgtttttcacagtactgcatcattttatattcccaccagcaatgcacatgggcttcaatttctttacattctgctttttggtgacctccataattgtaaattatatgtatatgctgtttcttcttaattcttttattaatcacaaagacagcataattctttgcctctccagtgtgaaaaaatgggaattt

SEQ ID NO: 93839 - DNA, 356 bp, Homo sapiens
cgatatatggtttgcaaacattgtgtcctattctttgtgttgtctttcactctcttgatgttgtccttggaagcacaaaagtttttagtttcgataaattcatcaatttatctttttattttttttttggccgcttgggctcttggggtcatatctaataatccatggccaattctcaggtcatgaagacttaccctattattttattagcagttttatagttatagctcttatatttaggtttttgagttatgttgagtcaattttttcatttggtatatggttggttcccataattgtcttatgtgttttctagatctagttctttgttagtgctctttgctgtgtttgtgtct

SEQ ID NO: 93840 - DNA, 364 bp, Homo sapiens
cccggacttaaaatactaggggtataattataaagaaaaaccatatctgagcacattgaagtcaaatttttgaaaaccatatataaagagaaaaaccttttaaaagcaaccacataaaaacaatacgctacgacgaatacaacaggaatgacagctaactttatccaaccatatcaataatcaaattaagtataaatgaactagacactccaaaccaccaccaccaccaccaccaccaccaccatcatcatcaccaccaatagaagagactgccagaatagagctacaaaagtaagagccaagaacattatacttatgggatggacattacaggccccaagaatttaagaacaatacctttatg

SEQ ID NO: 93841 - DNA, 313 bp, Homo sapiens
gcaagaccccgcctctgggaagggtttaaaaattagcaatagggcatgcctctagtcccagccactccggaagctgaggcaagagtatctcttgagcccaggagtttgaggttacagggaccgattatcgcaccactgcactctagcatgggcaacatagcaagaccctgtctctaaaacaaaccaacaaaaatttgatgaaactataaactcacagatccaacaaggtcaaggaacccagagcaggattaacaaagaatatagaaatctttcatttccgaaagccatacattatcagaaaatcttactatac

SEQ ID NO: 93842 - DNA, 345 bp, Homo sapiens
acgacgttggcctggctggtcttgaactgctgacgtcaggtgatccacctgccttggcctcccagattgctgggattacaggtgtgagccaccactcctggcctttgttattcttttttttttttttttttttttttttgaaggggggtttttcttttttctcccggtctgaagtcaggggggagatttggggtcccgtgaaccttggccttatggtttcaagggaatttctcgccttaggttcccaaatgaggggaaaatagggccccaacctttggccccagatatgttttgcttttttgataaaacctggttatccactgtggtgccgggttggtttcatcg

SEQ ID NO: 93843 - DNA, 193 bp, Homo sapiens
ggcttacttcacttagcataatgtcctctagatgcatccatgtagtcacaaatgacagaatttccttcttgtttatggttgagtagtattccatcgtgcataaataccagcttttaaaaatccattaatccactgtgtgctgcatttactgaaacgttcatgcgtgttagcccacttagtgtcgacgcggccg

SEQ ID NO: 93844 - DNA, 326 bp, Homo sapiens
ctgagaggcttcaaaatcctgctcttttagttttacaatttagagggtgagattttcctctctaccctctagatggcgtttaaccttcttccatcagtgttctgtctcattgtaactgaggagtaacacaaaagtcagatgtattccagtcacattgcatttgaattctactttctaaattcataatacgatctcccatccaaatctctgtctgacggagatcattaatttggttaactattttttttttatctatttgagcttgggagttccataattttgtggaattcttttgccacttattgacaaattcagcagttttcaca

SEQ ID NO: 93845 - DNA, 312 bp, Homo sapiens
gttctctcctggcctgtaaggtttctgctgagaaatccattgttagtctgatgggtttcctttataagtgactagatgcttttcccttgctgtttttagaactctctctgtctttgacttttgacagtttgagtatagtttgtcatggagaaaaccttttttttttttgggttttgaaacaaagtctaattctgtcactcaccctggagtccaaaggttgcggggagccaagatcaaccctttgcactccaccctggccattaaaagcgaaactttgtctcaaaaaattgattaaggaagggaaatttttag

SEQ ID NO: 93846 - DNA, 308 bp, Homo sapiens
gagatggtggtggtggggaggaggaggaggaagaggttgattgtggtggtgaggtttagtttttttttttttgtttcttttttttttttttttgtttttatgttttttttttttatttgttttttttttgtttttttttttttatttttttttattttttgttttttttatttttgtttattttttttttttttttttttgttttttttatttttttttttttttttgattgtttttttttttttttttttttttttttttttttttttttttttttttttttttttttttttttttttgtttttttt

SEQ ID NO: 93847 - DNA, 186 bp, Homo sapiens
gtcaataaaaaattttagactgggcacggtggctcacgtctgtaatcctagtgctttgggaagctggggtgggatgattgcttgaggtcaggagttcaaggctgcagtgagacatgagcatgccactgtactccagcctgggcgacggaatgaaaccctgtctttaaaaaaacgtcgacgcggccg

SEQ ID NO: 93848 - DNA, 383 bp, Homo sapiens
ctcaagcgatcctcccacctcagtctcccaagaagctggaactacaggtgtatgccaccatgtccagctaatttttaaactttttttgtagagacagggtcccaccacattgcccaggctcatctcaaattatcctcctgcctcagcctcccaaagtgctgggattacaggcatgagtcactatgcccggccctagacagccctttcacaaacataaactcagcaaccatcataaccatcctacaagggaaatgctggcattattgctagtttatggctaaggaacctgaggcttagggaagtcatttgacttgctccgagtcacactacaaacaagacctgcaattgtttgagtcccagagcatatatgttcttatttactg

SEQ ID NO: 93849 - DNA, 387 bp, Homo sapiens
ttttaattgtgtggggtttttcgtgttgagttctgaagagttcttgatatattctggatataagccttttatcaggtatgtgatttacaaatcttttttccagcttgtggctttgtattttgatcctcttaacaatgtcttctaaaaaattctcatgatcagtagtgcaaaatgctgtgtttttgaagagaagttgtaaattttgattaatttactaatttgttactttgtggattgcatttttggtgtcatgtccaagaaatctttgcctgacccaaagtcccaacagttttcccctgtattttcttgtagacattttatagttttgggctttacattgagatctaggattcgcttggggttaatttttgctacttggagcaaggg

SEQ ID NO: 93850 - DNA, 396 bp, Homo sapiens
ctggagagcagtagcacaatctcagctcactgcaacctccacctcccatgtttattaatgattaagaattattaagtttagtgaggaaagcatgttaaaagctgagatgggctgaaagctaggactttttcaccaagcagttaataaatgcaattcactaacagttaatgaagttgtgaatgcaaagaaaaggttcttaaagaaaatgaaaagtgccactccagtgaaaacacatatgataagaaagtgatatggaaaaagttttagaggtctggatagatcaaatcagccacaacatttccttaagccaaagtctaatccagagaaaggtcctaattctctttagctctatgaagcctgcgagaggggaggaagctgtctaatgaaagtctgccg

SEQ ID NO: 93851 - DNA, 346 bp, Homo sapiens
gggaggcagaggttgcagtgagctgagatcgtgccattgcattccagcatgggtgacaagagcaaaactcagtctcaaaaaaaaaaaaaaaaaaaattccaaatttgggaactggggaacaagggacaatttatgggcccctgattaaggaaaggattcacatgttataaaaaaagaagccccctaattttttaagggcgttatttttaagcgggtattatcacagaaggctattccattttactataaaccgggctgccctgagggataggataaaaagaccagggaatttgatgactataaccccctctttaaaaaaaaaaaggattaccaatttttcgccggg

SEQ ID NO: 93852 - DNA, 331 bp, Homo sapiens
ctcaacttaaaaaaaaatactatgaggaattgtatgccaacaaattaggtaacccagatgaaatggacaaattcttagaaatatgcatactacaaaaactgactcaacacaaaaattaaaaattttttaaagactcaagaagaaagagcaaaatgaatagacctataacaaacagattaattcaataaccaaaagaacttccaaaaagaaaaactctaagaccagatggcttcactggtgagctttaccataaacattttttttttaaattaacaaaaccccttcataaattcttccaaaaataaaagaagaggagccatttcctaactca

SEQ ID NO: 93853 - DNA, 324 bp, Homo sapiens
tttggatgtcagtttggaagtgggatcaataggttagtattattggattggatcagtgggagaggaatcaagatctcctagattttttgcttgagcaactgggtggatgatggtgtcatcgttaagatagagaaaattctgggaagaggaacaggtgtaggagagaaaacgaagttctggaagagaagtaatttttttttttttttttttgaaagggagtttcattcctgtcgcccaggctggagtacaagggcatgatcccagttaattgcaacccctgcctcccgggttcaagggattctcctgcctcagtttcctgagtag

SEQ ID NO: 93854 - DNA, 311 bp, Homo sapiens
tccacagtgagccgagatcgcgccacggcactccagcctggccgacagagcgagactccatcccaaaaaaaaaaaaaaaaaaaaaaaaatttccctaagcccggtttggggggcaaataaaaggggaaaaaaaattttaaaaattccctgaaccggaaaagtaaaaattaagccctttggggaagggaaaccctaaaggaagggaggaaaaagggaaaaaaggggggaagggcccccttttggtcccccccctttttttccttcccttaaatttttcctttctttccagggggaaaagggaaaggggggaa

SEQ ID NO: 93855 - DNA, 323 bp, Homo sapiens
gtgagactcaacaaaagcgcaaaaaaatacagtagtaagtattgaacctggagaagttggaaccctcatacattgctggtacagcccctttagaaaacagtttggtggttcctcaaaatgttaaacagagttacgatatgacccagcaattgcacatcttgggatttaccgaagaaaaataagacatagacttgtacacaagtgaacataacagcattattcataatgactaaaatgtagaaataacctaaagatctattaacaatgaatgggtaaccaattgtggtatatgcatacaatggaatattgatcaaccataaacg

SEQ ID NO: 93856 - DNA, 293 bp, Homo sapiens
acggctcactgcagcctctggctcccaggttcaagtgattctcctgcctcagcctcctgaggcgggagaatggcatgaaccctggaggcggagcttgcagagatcgtgtcactgcactccatccagcctgggctacagagctggactccatctcaaaaaaaacaacaacaacaacaacaaaagtgaagtttcaagaatttgtactatcggtatatttttattatttatttatttatttatgaaacagaatctcactctgtcacctaggctggagtgcattggctggatttcag

SEQ ID NO: 93857 - DNA, 332 bp, Homo sapiens
ctcatctatcaataataaacttgaatgtaaaccaattaaattctccacttaaagcatacacactgcctgtatggatttaaaaaaaaaagtggcccaactatatgctgcctacaagaaattcactttgccagtaaaaacacatataaactgaaagtaaaggaattaaaaaaaaaatttcaagcaaatgaaaaagaaaaacatgcagataaaacaggctttaagtccaaaactgtaaagagaaaaaaatggccattatataatgataaagagatcagttcaaaaagagaatatatatatatatatgtttttaattgcagatccagatatatgcg

SEQ ID NO: 93858 - DNA, 327 bp, Homo sapiens
tgaaagtccttgaaagacatgatgtgctaaaactcacacaagtaaaatatgtaatctcaatatgcatacactaaagaaatggaatcaatagttaataatcttccaaagaagaaaacaccaggcctacacagtttcactggtgaattctaccaaacatttaagaatgaaatgatattaacatcctataatttctcccagaaatttgaagcagaggaaatacttaactcattttatgaggccagcattctcttaactaccaaaactagataaagacattataagaaaagaaaattgaagacaaatgcaaaaatcctcaacaaaatattg

SEQ ID NO: 93859 - DNA, 319 bp, Homo sapiens
gggcatttagcccatttacattcaaggttagttttatatatgtgtatttaatcctgtcattgtgttcttagctggttattatgctgtcttgtttgtgtggctgctttatagtatcgctggtctgcatatttaacactggtttgtgtttttgcatttgttggtagtgatctttcctttctactatattaatacatttagtgctcctttcaagatctcttgtaaggcaggtctggtggtaacgaactccttcaacatttgcttatctgaaaaaggttcctatttctcctttgcttaaagagcttagtttggctggatatgg

SEQ ID NO: 93860 - DNA, 319 bp, Homo sapiens
ctcaaactcctgacctcaggcaatctgcctgcctcggcctcccaaactgctgggattactggcataaaccaccgcgctcagccgcatttgagcttttctctgtaattgtggaatgagactttgtccctggtagatggtgaggtttttaagttcagagacaagttcttagtcatcacgtatccttggaaccctgcctggggcccagcctgctgtcagtattaatgtttatgggacagaattcagtagaatccaacatcagtgttaggtagaagagagttgtgggatttcttttattggctagcctcctacccaataaaag

SEQ ID NO: 93861 - DNA, 322 bp, Homo sapiens
ttctttatcaaaatgtagaaattctcctcttcttggtttgccaagagttttttaaaaaccatgagcaggcattaaatttcttaacatggattttctgcatcttttgagacagtcatgtgatttttctgttatgtgggaatttaactgtttttgtatgtttatttttgagatggggtcttgctccattacccatcccggagtgcagtggcaccatcataactcgctgtagccttgaactcctgggctaaagtgatcttaccacctcagcctctcaagtatatggaattatagacgcacgccactgcgccttgctttttttttg

SEQ ID NO: 93862 - DNA, 340 bp, Homo sapiens
cgcggccgcgtcgacccgagatcgtgtcactgcactccagcctggacaacagagcaagactctgtctcaaaaaaaaaaaaaaagggattggtaaaaatagaaaattttatgtcgggctttttaacaccattaaaaaaaatttaatattaaaaagggaaatggcagccctttttaaaaaaaccctttaaactgaacccccgtttttgggaaggttgaggcaggagaattgtttgaccccaggaggtaagggttgcagggacctgaaattgccccatggcctttaacttgggccaacaaagggaaaccttgtctaaaaaagggaaaagggaaaaaaaacccc

SEQ ID NO: 93863 - DNA, 328 bp, Homo sapiens
atttcctccacgcagaggagaatcaggatgcagctggtaattttggctgctgactccaggacaagagacagagagagagcgtgaaagcgagacagagcgtgagagtgagagagagagagaggcaggagaggctgagcgtgggagggagacagacggcatcgattcattaatatattcaaaactatattcaaaaactattcatttaaaaattctggaatatattgactacatactttaaaagacttttttataattgggaactttgaacataggcaaaaatagaataatagaaaagcccagcgtgcgacatcagtgtcaacagaggtcc

SEQ ID NO: 93864 - DNA, 322 bp, Homo sapiens
ctgaggcacaagaattgcttgaacccaggaagcggaggttgcagtgagctaagatcacaccattgcacttcagcctgggcaacaaaagcgaaactccgtttcaaaaagaaaaagaaaaaaaagtgtccaggtagatacttaggtaatatagtgttacaataatttaatataattgctaaatgtgacaaatatcacattgtaaagctgatttttttttctcatcagcttacacagcaagcattcaaaaactaattcaagtcagtagaacagttacgcatagaaagaacaaaaagacaagacagtatgtgtatatacttgatgc

SEQ ID NO: 93865 - DNA, 314 bp, Homo sapiens
ccagctactagtgagacgacagggaggaggatcacttgagcccagaaatttcaggctgcagtgaactgtgattgtcccactgcactccagcctgggtaacagagcaagaccctgtctctaaagtaagaaataagtgtggatcagcttttatgtcttaggaaactcaaaaaatattttacccataaaaagagtctttcacattattcacatacttgaatcactaaactaaaatacataaaacagagctgtaagattagaaaagaggaaaatattaaggactcaagtaatccaagaattagtctaaaacccattta

SEQ ID NO: 93866 - DNA, 254 bp, Homo sapiens
cagggacagatttagttcttcctttacaatttgcatgccttatattacctttcttgccttataatattgactgggagttacaatactatgttgaatgggagtcgtgagagtggacatccttgccttgttcctgatattagagagaaagcatttagtctgtcaacataaagtatgacattagctgtagattttttgtaaatattctttatctggttaaggaagctcccttctattccaaattgtcgacgcggccg

SEQ ID NO: 93867 - DNA, 186 bp, Homo sapiens
ttcttttaacattctttgcaaggcaggtctactagtaataaatttcttcaatctttgagaaagtctttatttctctttcactttgaaaggataatttttcagggtacaaaattctgtgttgggatttttctcttttagcactttaaatatttcactttactgtcttcttgcttgcatggtttctgg

SEQ ID NO: 93868 - DNA, 288 bp, Homo sapiens
taataagtacatagtcatatctcattgttgttttaatttacaattccctaatgacacatgatgttgaacatcttttcatatgcctacttgccatctatatggcttctttggtgaggtatctgttcggatcttttgccattttttaattgggttcctcgtctttttttttttttttttttttttgaaaacgggttgggtttttgcccccaggcccgaaggcaggggtttaaaaaattccttggaattttccccctccgggttaaagcctttcttcccccttaaccttcc

SEQ ID NO: 93869 - DNA, 330 bp, Homo sapiens
ggcttaaggaatcctcccgcctcagcctcctgtgtagctgggaccataggtttgcgctaccacccatgttgtctgggctggtctggaattcctgccctcaggtgatccttctgcttcagcctccttaagtattgggattacaggcatgagccaccacacctggctgtgatggctcttttttaagagacagggtctcaccctgtgactcaggctggaatgcagtggtatgatcctagcccactgcacccaacaaagaaaggtgtttatttgactcaaggttttggcggctgggaagtccaagtgcatggcggcagcttctggcaagggctt

SEQ ID NO: 93870 - DNA, 233 bp, Homo sapiens
gccgttttttgctgattttctaattgctctatccattattgaaaatgtggtattgaagtctccagctattattattgaatttatctattttctcccatcagtttggtcagttttcacttcatctattttgagcctctgttgtaaggtacacatatgtttgtaattgttataccttgttgatggattgacctttttatcattataaaatgctcttctttgtctttagtaatgat

SEQ ID NO: 93871 - DNA, 309 bp, Homo sapiens
caggcattcttcgtagacgatggggaaatgactgccagacataactcccagagatcatctctcaccaggtacaatggattttatccaagagacaggctgtagcaaatgctggcgaggttgtggtacccctgtatgctgttagtgggaatgtaaattataatagtgcaatcactatcgagaacagtttggaggttcctcaaaaaactaaaaattggtcaggtgcggtggctcatgcctgtaatctcagcactttgggacgtcgaggtgggaggatcacctgaggctaggagttcgagaccagcctggcca

SEQ ID NO: 93872 - DNA, 302 bp, Homo sapiens
tgcaaacggaacaacaaagcctggatgacggtacatctgtttacagcatggctatctgagtattttacgcccactgttgagacctactgctcataaaaaacgattcctttcacaatattatactcgatgacaatgcacctggtcaaccaggagttctggtggagatgcacaaggatatgaatgttgctttcaggcctgctaacacagcatccattctgcagcccatgaatcaaggagggatttcaacttttaactcttattatttaagaaatacatttcctaaggctatagttgccatagaa

SEQ ID NO: 93873 - DNA, 156 bp, Homo sapiens
  misc_feature (1)...(156): n = a,t,c or g
gtaatcccagctgcttgggggttcgaggcacgagaattgcctgaacctgggaggcggattttgtggtgaggcaagatcatgtcgctgtacttcagcctgggtgacagagcaagaccctgtctcagaaaaaaaaaaaaaaaaagcgacgcggncgna

SEQ ID NO: 93874 - DNA, 141 bp, Homo sapiens
tgggtataatactaagttcagatgggatcatttacaggggggggcgcttgtgaagaaggccttatttctcttggcctttcgtacagggaggaatttgaagtccatagaaaccgacctggattactccggtcgacgcggccg

SEQ ID NO: 93875 - DNA, 359 bp, Homo sapiens
ttttttttcttttttttctctgtggttttttggtgtttttctttttttttttttaaaaaaaaagggggggccccggggggggggggcccccccccccccaaaaaaaccccccttttttccccccaaaaaaaaaatttttttttacaaaaaaaacccccggggaaaggttttaaaggccccgggcttcccccaccaaattttggccccggggtaatgggggccctttaaaaccgggggacccccacccccctgattttacccccccccgttggctttttaaaccccccttttaaaaaaggggggaaccctttttccccccaccgggttttccaaaaaacctttttttaaaaaaagtgcct

SEQ ID NO: 93876 - DNA, 420 bp, Homo sapiens
  misc_feature (1)...(420): n = a,t,c or g
ggcacgagactgcatagggctcggcgtgggggctgtagggccagatggtagctggaggaacgggcaggtaccagctggcccaagaaagaaaataaaaaacaacacttttgcatgaaaaaaaaaaaaaaaaaaaaaaaaaaaaaaaaaaaaaaaaaaaaaaaaaaaaaaaattttttaaaaagggggcccaaattttttccttttaggggggggtaaatttaattggggccggggccggttttaaaaacggggggggggggaagacacncnccccctccccccccctntccccncccnccnntcntnctnncctcctcctctcttccctctctcncttttctttcccttcntcttccctcttttctcccctcttcgccttcnctcctctcctccttccctcnnctctcttttcctccctcc

SEQ ID NO: 93877 - DNA, 368 bp, Homo sapiens
  misc_feature (1)...(368): n = a,t,c or g
ggcacgaggaagaaattggcatttgaatcagcgtactgaataagaaagatctgccctgccccaatattgacaggcaccattcagtcagctgaggtcccagatacaacaaaaagggagaggagaaatgaattcatattctctttctctccccttctctctcttccttcctccctctccctctccttttccctctctccctcccttctagagctgagacattcatctgcttctgatcttgaacatcagaactccaggttcttggctggntgcggtggctcatgcctgtaatcccagcactttgggaggccgaggcaggcggatcacttgaggtcaggagtttgaaaccagcctggccaacatggtgagac

SEQ ID NO: 93878 - DNA, 409 bp, Homo sapiens
ggcacgagtagatttcttataattcaccttagtgagatagatgattgagaacatggaggagtctgctcgtactttttcacttattgaagacaagtatagttttaggtttttaaatgtcgtgtttactttggaattttgggtcaagagaattcttgtgttctagaccgtttttcagactagaaaccagtgatctctaatagatgaagactataattagaaagtaaagggaaataaggcagatttgataagaagcgcaaatggcagttaaaatgaaaaggtgttttatgtcaccagtatttagagaaatctttttgtttggagacagagtttcactcttgtttgccccagctggtgcattggcccgatcttggattactgcaacctatgcctcccggcatcgcgcgcttcc

SEQ ID NO: 93879 - DNA, 427 bp, Homo sapiens
ggcacgaggagacagggtcacctaggctggagtgcagtggcatgatcacggctcactgcagccttgacctccccaagctcaagtgatcttcccacctcagcctcgggagtagcatgtaccaccatgcttagctcattttttgtatttttagtagctatgttgtccaggctagtctccaattcctgggctcaagcaatctgcccatttgcctgccttggcctcttagaatctatcttttttttttttttttttttttggaacccggggtcaccttttgtccccgggctaaaggcccaggggccaaataaggccccctggctttttaacccccggggccaaggggaatcccccattttagccttcccaaaaattgggcccaagggggcccccccccaagcccggttaaattttttgaaaaacgggggtt

SEQ ID NO: 93880 - DNA, 380 bp, Homo sapiens
ggcacgagaactgggcatagtgggcatggtggcaggtacctgtagacgctggtactcaggaggctgaggtggaaggactgcttgagcccaggagtttaagggtacagtgagctgtgattgcactactacgccccagcctggggaagaaaggaagaccctgtctctaaaaaataaaatttaaaaatagagaatacctcactttcaccaaaactgtaaacccctagagtgattgtactcattttaggccaggcgtggtggctcacgcctgtaatcccagcactttgggaggcccaggtgggtggatcacaaggtcaggctggtctccagctcctcagcatggtgaaaccctgtctgtactaaagtaacataaaaattagccg

SEQ ID NO: 93881 - DNA, 398 bp, Homo sapiens
ggcacgaggtgccatatttcactttaaatcaacaactagaaatgattaagcttagtaaaggaggtttggtgaaagccaaaatgggctattagccaaattgtgaatgcaaaagaaaagttcttgaaggaaattaaaagtgttattccagtgaacacacgaatgataaagcagaacagccttattgcctgagacgcaggaagtttcactggtctggatagaagatcaaaccagccataacattcccttaagctaatacctaatccagagcaagttcctaactctattcaattctccgaaagctgatatgtgaagaagcttctcaatataatttgtaacttatcaagattggataaatatggcttacaatgaaataggctattatgctacatgaaatggag

SEQ ID NO: 93882 - DNA, 415 bp, Homo sapiens
ggcacgagatcaatacaaaaagagcacaaaaaaataagcaaaggacttgtacaggcacttcaaaaatgaggctatccaatggccagtaactacaagaaaggtgctcaatctcttaagtcatcaggaaaatagaaattaaaagctcaatgacatcttgttatacacatctacaaaatggctaaaattaaaaagtgacaatttcaagtgctgacaaaaatgtacagcaatgggaattatccttagctggtgggagtgtaatttggtacaatcactttggacatgggcagaatctactaatgctgaacacacataaaccctattaatcagcaattctacttctggcttatatccaacagagatgtacagaaatatagagcaagcaagtttaagaatgttctgggcttggcgtggtggt

SEQ ID NO: 93883 - DNA, 333 bp, Homo sapiens
tcgaactcctgaccttggccttggcctcccaaagtgctgggattacaggcgtgagtcacagcacccagcctataattaaaactttaaacgattataatttagatcaactgatttttggggaggaaggtgggatagagtagagaggggggatgtgggggaggttggtaggagtgggtgtgggtagtgtgtgggttggaagagtggggggtgagtggaggtgggggggggtggatatgtggtgggtgttagggaggagggggggtggtttggggatggtggtgtagggtgtgtggatgggtggtgaggagagaggttatttgggggttgggattg

SEQ ID NO: 93884 - DNA, 354 bp, Homo sapiens
ggcacgagggttgcagtgagccaagatcgcaccactgcactccagcctgggtgacagagcaccgctctgtctcaaaaaaaaaaaaaaaaaaaaaaaaaaaaagggaaagaaaaccctaaaggtaaaaaggcggaaaatggaaaaaattggaaaaactttaagcataaaccgggattaaaaaaggtaaaggggaaaaaaccgaattgggaaaacccaacttggggggcccaatgggaaaagaaaaaactttttttgggaagccctataaaaaaaaaagggtttaaaattttaaaattgtggggaaaaaaaaaatttttagggcccctgaaaattttaaaaacaaacgggccgggg

SEQ ID NO: 93885 - DNA, 346 bp, Homo sapiens
ggcacgagtatattttaaagttataagtagcaggatattctgatggagtttgactttggttttgggcccagggagtttcagatgcctttgagaaatgaatgaagtagagagaaaataaaagaaaaaccagccaggcacagtggctcacgcctgtaatcccagcgctttgggaggctaaggcaggcagatcacttgagaccagcttgggcaacatggcaaagccccatctctacaaaaaacacaaaaattagctgggcattgtggcgcacacctgtattcccatctagtcaggaagctgagatggaagaattaattgagcccacgagttcaaggctgcagtgagtcg

SEQ ID NO: 93886 - DNA, 330 bp, Homo sapiens
  misc_feature (1)...(330): n = a,t,c or g
ggcacgagctgcatagggctcggcgtgtgtgtgtgtgtgtgtgtgtgtgtgtgtgtgtgtgtgtgagntcaacaccaagcgctgaacatagaggagaggatctgtgcctgcacagacacccccgccccttgtgaaaacaagaaaactctatagagactccctctgcaccgagctaggtcgcacacgcctgcaatcccaacacttagacacacagacgcacacataacacctgatcacaagagttagacacgagcctgcacaacacgaaaccctgtctacactaaaaacacaaaaaatatctgtgtgtggacgcacgcacctgtagtcacg

SEQ ID NO: 93887 - DNA, 360 bp, Homo sapiens
ggcacgagactatgcttaggcgctatcaccactctgttcgcagcagtctgcgcccttacacaaaaggacctcacaaaaatcgtagacttctccacttaaagtcaactaggactcatactagttacaatcggcatcaaccaaccacacctatcattcctgcacatctgtacccacgccttattcaaagccatactatctatgtgctacatcaccatcatccacatccttaacaatgaccaagatagtcaaacaatacgacgactactcaacaccatgcatatcaattcaacctcccatcaccattgatagcctatcataactcgaaaacctttcctcaacgttactactaacaatactacg

SEQ ID NO: 93888 - DNA, 365 bp, Homo sapiens
ggcacgagggcagagactagcctggcaatcatggtgacaccctgtctctactaaaaatacagaaattagctgggagtggtggcgtgtgcctgtaagctcaggaagctgatgtgtgagaatcatttgaatccatgattttgacctcaacatttttagctacatatctgcagttctattcgtatatcttaatccctttatacctccgtttctatctacctatgtcaaattactacttacttaaacatttcccttttatcgattggattatcttcactcttatcactctatatttatatctctttatactcctcttaattctataggatgcactacttgtaataattctaactcttttatataatacg

SEQ ID NO: 93889 - DNA, 334 bp, Homo sapiens
ggcacgagcaattaccttcaaatgctcacagtctagcaaagaaaaagtagtgtgggaaaatgggatggtctagatcatgctgatggagccctacacaactacagcatttgactcttccctcctacatcaactcgctcctttctgctcttcctcccatcctctccctctctccctttctctccctccctcttcccctctctccttcctatctacttcatccctatactccttcccctcttcctctctcttccccgatcttctctcccttattccaccattccacccgctctcttcctctcctccctctctgcttcccccctctctccccaccccc

SEQ ID NO: 93890 - DNA, 355 bp, Homo sapiens
  misc_feature (1)...(355): n = a,t,c or g
ggcacgagcctaattccctgcaacattcccaacagtatataccattcgtctttaattttttttcaaccagctaggtgtaaagtattcatcttgtttttgtctgtaattccctgattattaatgatattgagcattttttcaagtgtttattgacagtttgtatagtctctgtatgattgcctgtcatttcctctattttttaattgaatttttttgtttgtattatttatttggtagaagtttttatatattctanatagcaattcattttctgttatagatactctttacttacacaaaagccttaaatttttatttgttagaaaatttaaaaaaatacactttgggaggccga

SEQ ID NO: 93891 - DNA, 364 bp, Homo sapiens
ggcacgaggggaatggtggcaggtgcttataatctcggcctcccaagtagctgggattacaggtgtgcctgccgccatgcctggctaatttttttgtatctttagtggagcgcggtttcaccaggttgaccaccctggtcttgctctcatgactttatgattcacccgcatcacgctccgaaaccgctgggatacccttgattcatacttcatgcattgtctactggtcactaagaaataatgctgatattgcaatactttgcaaggcccaagctgtataacacctgtagattgagatcgtgaacaccctggccagcatgacaatactccatatctactgataattccaaagttagccaggtgg

SEQ ID NO: 93892 - DNA, 359 bp, Homo sapiens
ggcacgagggcgtggccaaggagggtggatcacttgagcccaggagttcaggatcagcctaggcaacatgccgagacttcgtctctattttaaaaaaacttaaaaaaaatttttttttaaacttcacaccaacaggttgtaaaaacaaaaaactagaaacagcctaaccatccatcaattggggaaaaatatatagagtaaatgtacagcatatttaaaaagaagaaagagaaaaaaagaaagctacatatcatttggtggtacatacatacataagggcactggggggaaagcctaaaagaaaaaaaatgtggccaggcacagtggctcatgcctgtaatcccaccactttgggagaa

SEQ ID NO: 93893 - DNA, 353 bp, Homo sapiens
ggcacgagctagaactgaaaattagcatgcttgaaattaggagactgatggatagaattgacagaacaggcatagctgaagaaagaattgttgaatgaacacaaattagaaaaaaaaatccagaatgatgcagagagacaaaataataaaaatacaaaagttgagacatagatttagtaaaagatctaacagaggaaatttatgtcccaagagaggagagagaaaatgaaacataagcaatagtttaagagataattattggctgggcgtggtggctcatgcctgtaatctcagcactttgggaggcctaggcaggtggatcacaaggtcaggagaccgagaccatcctggct

SEQ ID NO: 93894 - DNA, 334 bp, Homo sapiens
ggcacgagctgggaggcggagcttgcagtgagcagagatcgtgccactgcactccagcctgggcgacagagcgagactccgtctcaaaaaaaaaaaaaaaaaaaagttcaaaaccacctgaaacaactggggaaacccttgtttttacaaaaaatccaaaatttacccaggcccgagggcccccgctaataatcccatttcttcaggaggttaagcctggaaatttgtttaaccccagggggcaaaggttgaagtgttttaaaatcgccccattgccttaaatttgggccaacaaaccgagactccttttaaaaaaaaaaaaaaaagagttttt

SEQ ID NO: 93895 - DNA, 340 bp, Homo sapiens
ggcacgaggagagcttgcaccattgcattccagcctgggcaacaagagggaaactccgtctcaaaaaaaaaaaagggcctttaaggccgaatgggggggctaatgcctgaaatccaagcactttggaaggccaaggcaggcaaataacttgaggcaaggagctggaaaccagcctggccaacacgccaaaaccccgtttctactaaaataacaaatattacctggcggcggggcaccccgtcacctcccccacctgcgcaccagtctcatcccatccaaagccacgcacccgacaccccaaacagccacgcatgctgcgcactacccaaccgccccctcg

SEQ ID NO: 93896 - DNA, 332 bp, Homo sapiens
ggcacgagcacacacacactgaaaaaaaatgtcaggctcacgggccagagcagagggtactcaggtttgtaagatcactaactttacacacacacacacacacacacacacaccacacacaccacacaacacacacacacacacacacacactgaaaaaaatgtcaagctcacgggccagagcagaggggactcaactaggtttgtgagatcactaactttacacacacacacacacaccacacaacacacacacacaccacacaacacacacacacacacacacacacacactgaaaaatatgtcacgctcacgcgccagaacagagggca

SEQ ID NO: 93897 - DNA, 333 bp, Homo sapiens
ggcacgagtatctttgctattatgaatagtgctgtgataaatatagagtgaaggtgtctttttgatataagaatttctttccctttgggtatatacccagtagtggaattgctgaatggaattatagttccatttttagttatttgagaaatcttattgtttttccattaagttgtactgaaagagatagagagcaacgtaataatactggaggacttcactccacttacatcactatatacatcatcgaggcagaaagtcaacaaagaaactctggacttaaattggacttcagaccaaattaacctaatagacgtttacagaacattctac

SEQ ID NO: 93898 - DNA, 352 bp, Homo sapiens
ggcacgagaaaaactaataattaaaaatgggcaaaggacctgagcagacatttctccaaagaagacataagaaatggccagtaggtatagatatgaaaaggtgttcagcatcattaatcataagaataatgtaaattagtatcactgtgagcatataacctaacgtgtattataatgggtacatagtagccatgggatattggtggttctcttagtaatatggtatatcttgggcagtatgatgtaaggtggagaatgatgggtatgatgatggtgctctatactcgcgtggtggatagtgacatttgtaggctaaaagtatttgtattgatagtagattgaggaatgggcg

SEQ ID NO: 93899 - DNA, 353 bp, Homo sapiens
ggcacgagcttaataacaataattgttactaatccacctcctgggcccaagtgatcctcccaccttagtctgctgagtagctgggactacaggcgtcagccaccatgcctgactaagttttgtaagtttttgtagaggcagagtgatatcatgttgtccaggctgggcgtgaactcctgggctcaggtgggtcgcttgaggtgagggagtgaggatagggctagccaataggggggagcggggggtgtgtactaaagaggggagcggggggggcgggggggggggggggggtaaggcgggggctgtggggggcgggagggcaggggggaggggggagagttgggaggagaggg

SEQ ID NO: 93900 - DNA, 405 bp, Homo sapiens
tttaaacccagtccatgacccctaacaggggccctcttaggcctcctaatgacctccggcctagccatgtgatttcacttgcactccataactgctactcatactatgttctactaaccaacacggctaaccatataccaatgatggcgcgatgtaacacgagaacgcacataccaaggtcatcacacaccacctgaccaaaaaggccttcgatacgggataatcctatttattacctcagaagtttttttcttcgcaggatatttctgagccttttaccactccagcctagcccctaccccccaattaggagggcactggcccccaacaggcatgaccccgctaaatcccctagaagtcctacttctaaacacatccgtaatactcgcatcctgagtatcaatc

SEQ ID NO: 93901 - DNA, 341 bp, Homo sapiens
ggcacgagattttggggagtaactttaaattcaaagatttacttaattattcaggcaatgcactagtatagggtggtggttaaaggtgtagaccttgcctccagtctgcttgactcaaatcctgcctctgccatttactgtctgtatgaacataggctagtcacctaacccttttgtgcttcggttttcccagatggaaaatcgtagtaaggccaggcacagtggtttatgctcgtaaatgccagcactttggaaggttgaggtgagaggattgcttgagctcacgagttcaagactagcctgggcaatgtatggagacctgtgtctctccaaaaaattca

SEQ ID NO: 93902 - DNA, 329 bp, Homo sapiens
ggcacgagtggtattgctgggtcatatgataatttttatttaacttttttgggtaactaccgaacttttccatagtggctgcaccattttacatccccaccagcagtgtgtgaaggctccaatttctttacatccttgccaacatttattttatttctttcttcatttttttattttttaaagccttgctgtcttgcctagtctggtcttgaactcctgagctcaagcaatcctcttgcttcagcctctcaagtagctggaactttgattgattgattgattgattgattgagatagagtctcactctgtcacccaggctagagtgcac

SEQ ID NO: 93903 - DNA, 343 bp, Homo sapiens
ggcacgagactcattttcacattttgggctattatgaataatgctactatgaacatttatatacaagtttttgtgtggtcatatgttttcatttctctcaggtataaatctaggagtggaattgttaactcttatattaactttatgaagaactgcccaaatgtattccaaagtgactgtaccatttaacatttctaccagctatgtatgaggcttccagtttttccacatcctaacacattagcttctgtttttttaaattatagccattttagtggttgtaaaggggtatgtcattctggttttgatttacatttctctaatgaccagtgatgttgagtgt

SEQ ID NO: 93904 - DNA, 321 bp, Homo sapiens
ggcacgagaattattagtgggctttgtttgtttattgtttagaaaagaaagaatttggccagccaccgcgcctggcctgtttttttttttgggacagggtctcactctgtcttccaggctggagggcagtgatgggatcatgggtcactgaagacccaaactcctggccttcaactgatcctcccacctgagcctgccaagtagctgggactacaggctcataccaccatgctcggctaaagactcaatttgtgagaaaaacagggtttcgactgtggacggcgccgacaaaaaggtgaggaggggaaaagagggtgatgg

SEQ ID NO: 93905 - DNA, 346 bp, Homo sapiens
ggcacgagcggcacgagttgccctgcaagttcaacaacatttggtattggcagactttaagggttttgtcaatctggggggtataaagtggtatggtgtggagctttttatttgcattttcatgattactaatgaggtttagcatcttttcacatgtatatgggccatttacttgtcctcttctatgaaaatactatctcatgccctttgcccatttttctggcatgatgtgtgtatttctcttaccgaagtgaagaatgcctttactgggcacatcacaagacgtttctcataattaatgatcttgatcatcagcttatagcaatcacccatactgaaacactaa

SEQ ID NO: 93906 - DNA, 324 bp, Homo sapiens
ggcacgagctctcgggtggcacagacagtgtcatcaaggaacaaaatgacagatgatattgtgttactttttttttttttgggaaacaaagtttcgttttgtcccccaggttgaattgcatgggcccattttgggttaactgcagtttaagtctcctgagtacttggaactacgggcttgtcccaggaacccaacctttttttggaatttttagtccaaagggggtttcattatgttgcccaggttggtttaaaactcttgacctcaggggatttgttgccctaaggttcgaaaggcgctggctttacaggcttgacccattgc

SEQ ID NO: 93907 - DNA, 341 bp, Homo sapiens
ggcacgagaaatactttggtatatgttttgcgaatattttctcccattctgtggtgtatcttaacagtggcttttgaagagcagaagttgttattttttttttctctgagacaggtcttgggctgtcgcccaagcttgagtgcagtggcgcaccctccacctcctgggttcaagcaattctctgcgtcagcctcctgagtagctgggattacaggtgcctgccaccacacctggctgatttttggatttttagtagagaccagcctgaccaacatagtggaacctcgtctctactaaaaaaaaaaaaaaaaagggaaattccgaatttacccgggctgggg

SEQ ID NO: 93908 - DNA, 342 bp, Homo sapiens
  misc_feature (1)...(342): n = a,t,c or g
ggcacgaggggactacaggcacatgccaccatacacgcagctaattagagacagggtcttgctttgttatccaggctggtctggaactccttgactcaagccatcctcctgcattgacctcccagtgttgggattgtacgtgcgaaccgcagagctggagcgccccttgcgtctcgatttaaccagcatgtaaaagtccggccgcgtgtgccttcttgagcttcatattacagatggtcaccgtactgcccagaggcactgttaatagagaaaggatgtcactgttgcccagactggtctcagactcctgtggtcatctctctcgggtcctccttagtgctn

SEQ ID NO: 93909 - DNA, 344 bp, Homo sapiens
ggcacgaggaaggttggtggtggtggggggccgggaaatggccagtaataatgaacaacacagattgacatgtagacaagtagtaggatcatgctgggattaacaggcgtgagcccggcctttttttaaaaaaagcaaaatatgataagaagtaatagttcccagctgggcatggtggctcacgcctgtaatccaagcactttgagactacctgtggtcccagctgctttgagaggctgaggtgggaggattgattgagcccagcagttcgagaccagcccgggcaacatggtgaaaccccatctctataaaaaatacaaaaatgagcttggcgtggtggcatg

SEQ ID NO: 93910 - DNA, 490 bp, Homo sapiens
tgcagacatatatattagacatgaagaaataaaaccatgtttattcacagaagatatgattgtctatgtagaaagtctggttaaatctgcaaaaaaagctactagaactaagtgactttagcaaagttttagcacatactgctagaaaaattgggtaaccatatttttttaaaaagcatagattcataccttgtaccatatacaaaaattgactcaaaatggatcatagacctaaatgtaaaacctaaaactataaaacttttaggaggaaacatgggagaaaacctttgtcatctcatgttaagcaaagactcctctgatgtaacacaaaaagcatgatccatagaaaaacaaattaataaatttaacagccatggtggcacacgcctgcggtcccagccactcaagagggcggaggtggggagggttcgcttgagcccaggaggtcgaagctacagtgacctatgagcacaccactgcaccccagcct

SEQ ID NO: 93911 - DNA, 345 bp, Homo sapiens
ggcacgaggatgcagtctcagctccctgcaacctccacctcccaggttcaagcaattgtcctgcctcagcctcccgagtagctgagatgacagtgcctgccaccatgcccagctaatttttttttttttttttttttggaaagggagtttggcttttgttgcccaggttgaaataaaagtaagttttccaaaaaaaaccaaaagggaaaaaaaaggggagaattgagggaaaaaaaggggtttgggggccaaaattgaaagagagagaaagaaaaaaaaggaaaaaggaaaggagaaaaagagggaaagaaaggaaggaagttaggacagagatgaacggagggg

SEQ ID NO: 93912 - DNA, 447 bp, Homo sapiens
ggcacgagtttttttttacctgtatgcaccactgactcacatctgcccccagccacctgccatggcagctgttgccaactgtattagtccactgtcacaccactataaagaactacctgagactgggcaatttataaagaaaagaggtttaattgactcacagttacgcatggatgatgaggcctcacaaaacttacgctgatgaggaaatctgcatcaatgtccttataaatggacgcaccttgccaagtatatgtgtgaaaaacaagattcaatctgctagatactgaaggaatgctatcaaaaacctctgttagaaaaatcccacttgattgcccaagttgaaaatgatgaaaagcctgctgactggctttattacgtggtgaatatgttgaatggaacgatggttggagaaaataagcttgatgcatacgatagtattcatgg

SEQ ID NO: 93913 - DNA, 328 bp, Homo sapiens
ggcacgagcgggaggaaggtagtcacgggctcaaggctggaggctggcgggctagggctgagtggagcgcctgcttagagaccttcgggagaacttctgccggaaccccgacggctcagaggcgccctggtgcttcacactgcggcccggcatgcgcgcggccttttgctaccagatccggcgttgtacagacgacgtgcggccccagggtgaggcccaagcttgggggctacagagccgggctggaagcctggaaccggagggccggggcgaggtctcggcctgatggctgcccgcacccgccacagactgctaccacggcgcaggg

SEQ ID NO: 93914 - DNA, 441 bp, Homo sapiens
ggcacgaggggcggggttggaggggctgggctggggctccttagggccctgggaggacccctggagaggttcaactccctgaactggctcttgctctgagaaccccagcaagtgtctccggtgttgatgctaccacttgttcatccgatgatagatggcagctgaaggtcgctcactgatgctgactggagcaccggtataggctacatacccgacggatagcgttatcctaaacacgcttgtgcttctgaaccctatgatcggctccctaattttttggatattcctctggatataaaacggtcattcgggtcgccttatttttcccctctgaaaacaatttgccctcctggcggggccaaactctgtgatctctatgcggtgatgccacaacatgttccagtctaaatctaaaccttgtaagatctattttttttttcg

SEQ ID NO: 93915 - DNA, 458 bp, Homo sapiens
  misc_feature (1)...(458): n = a,t,c or g
ggcacgagcaaggaccttaagaattatggtaaatctaaattatgctaaatctactctgcctgtgctctgtaaagggaaaaacaaagtctgggtgacagcacatctgtttacagcatcatttgcagaatattttaagcccgctgttgagacctactgcttagaaaaaatatttttcaaaatattacaactcattggtgatgcaccttgtcacccaagacctctgatggacatgcacaaggaggtgaatgttttcgtgcctgctaaaacatccatacagcagcccatggacagtttcacctttcaagtcttattattaagaaataacatttcaggctgggtgctgtggctcatgcctgtaatcccagcacttgggtagccaaggcaggtggatcacctgaagtccagagtttgagaccagcctgactaacatggagaaaccctgtccctactanaatacg

SEQ ID NO: 93916 - DNA, 431 bp, Homo sapiens
gcacgagaaaacatgcctggtcatctccatagatgcataatagaacaggattggaggattcacatgctgattccaaaacttaatacacaaatgattaagatagtataatactggtataaggacagatacgtagatactgagataataatattgagagtacagaagtaaacctttacatttgtggtgaattgattttcagcaggagtgccaagataattcaatggtgggggaaaagaatagtcttaaacaaatggtgctgggatgactgaatctccatgtaaaagtatgtaaatggactcctaccttacactatgcacaagaaataactccatggatcataaacccaactggaagagctaaaactatgagactcctaccaaaaaaacaggagtaagtttctgtgactttggaataatggggttttttttttg

SEQ ID NO: 93917 - DNA, 374 bp, Homo sapiens
ggcacgagggtttaattgactcacagttctgccttgctgggaaggcctcatgaaacttacaatcatgatggaaggcaatacgagaagcaggcaccttctgctttgccatctaagggtggcaggacagagtgagtgcatgcggtagaaatgcctaatgctaacaaaaccatataatatcatgagactcacttgaccttatgagatcagataatgggtgacacgttcccatgatcctattacgcttaaactggtaccgctgttcgcacatggggactcacacctgtaattccagcactttgggaggccgaggcgggtggatcacgaggtcaagagatggagaccatcctggctaacacggagaaaccccgtctgtc

SEQ ID NO: 93918 - DNA, 323 bp, Homo sapiens
ggcacgagcatctaggactttcatagttagaaaaactcaatgcctggcttcaaaggacaagctgactcttgtcaggggctagtgcagctgtgactttcagttaaagtcaatgctcattgactattctgaaaatcccagggcccttaagatatgctgtataaacgcaacaacaaagcctggatgacgttgggtctgtttacagcctggtctactgagtaagcccactgttgagacctactgctcacaataaatagattactttaaaaatatggttgtctacatgtagtaacaccgatatactcaggactttttcagacttgtcg

SEQ ID NO: 93919 - DNA, 350 bp, Homo sapiens
ggcacgagaaacaggatatgagtcattggcacccagtaacaacttaactttctctgtagtgtcttaagtaaaaatcaataagaagaaattgagctgggcgtggtggttcgtgcctgtaattccagtgacttgagaggccaaagcaggaggatcacttgaggccgggagttcaagaccagcctgggcaacataagaagactccgtctttaaaaaaatttttttttttaatttgctggccgggcacggtggctcacgcctgtggtcccggcactttggaaggccgaggcgggtggatcacctgaggtcaggagttcgagaccagcctgaccggcgtggagaaaccccatctc

SEQ ID NO: 93920 - DNA, 753 bp, Homo sapiens
gatcacataagccctgggaggttattggtggggctttggcttttactctgactcagatgggaactgcgggagggttctgagcagagaggcgacgtgatctgtctcccgatttaaaagcattctctggctgctgagttgagaaagactgtgggaagatgtgatagaagcatgggggccaagctttggcaacatccaggcgggagatgatggtggtcctgaccaaggtcgtggtggtgttgagagatggtcagaggggagaactaggggaggaggccagggagttgctgggtggggatctttagtagatgtcgaagacaatcaacaggatttcctgacagactggatatggggtgtgagagaaggcaggggtcaaggttgagtttgattgttactgaaattattaagtaattttaaaaaacactactgcctttcccaatcctaccaagtatgggatgctagattaaagaaatttcttcaggctcattgcagtgctcatgcctgtagtcccagctgtttggtaagcagaggtgcgagtatcttttaagggcaggtgttcgagaccagcctggacaacacagcaagatctgctctttacaaaaatatttttcaaaattaaataaatgtagctaggcatggtgatgtgtacttgtagtttcagctactcaggaggctgaagtgggcagatctcttgaggtcaggagtttgaggccagcttgggcaacatagcaagacccctcactctacaaaaaaaaa

SEQ ID NO: 93921 - DNA, 333 bp, Homo sapiens
ggcacgagtgaagagagccgtgatcatgccactgcactccagcctgggcaacagagtgagaccctgtctcaaaacaaaacaaaacaaaaacaaaacaacaactctatccagtgatacagatatgcctccatttatgatggggttatgtcctgataaacccataggtaagttgaaaatattgctgagcatggtggcttgtgtctgtagtcccagctactcaggaggctgaggcaggattgcatgagcacaagagttcagggtgttaatgctgtatgccgaacaggtgttcacagtaagtttggtatcagtatggtgacttcccaggagcaggga

SEQ ID NO: 93922 - DNA, 359 bp, Homo sapiens
ggcacgaggtcagtctggtgttgaactcctgacctcaggtgatccacctgcctcagcctcccaaagtgctgggattacaagcatgtgccaccacacccagccaacatatttatataacaaaaactttttttcatttcagatgggcaatatgccaacgtcctaacatggtttgagggaggcacatttcacacatgagcatgaagacctaatcatcactcttataaactacgaaaggatcaaacaataatttttatttatttattttttcgagatggagtcttactctgtcgcccaggctggagtgcagtgcacaatcttggctcactgcaatctctgcctcctgagttcaagtgatcctg

SEQ ID NO: 93923 - DNA, 330 bp, Homo sapiens
  misc_feature (1)...(330): n = a,t,c or g
ggcacgaggacgtggtttcaccattttggccaggttggtctcaaactcctgacctcaggtgatctgcctgccttggcctcccaaagtgctgggattatagacgtgagccaccgcatctggccttaaatgcatttttaacttagaatattttcaacttatgatgggtttatctggaagtaaccccatcataagaagcatttgtattaggtttttaggaaaaggaggttagttgctctttatttttatttttgtttggttcttgacgcagagtctcactcactctgtcacccaggctgnaatgcaatggcacgatctcgggtcactgcaacc

SEQ ID NO: 93924 - DNA, 330 bp, Homo sapiens
ggcacgaggtggcacacacctgtaatcccagctacttggaaggccgaggcaggagaatcacttgaacacaggaggcgaaggttgctctctgtgaagatcattctagtgtgcttctggcttggacatttacttcctgtctggttcagatgttcctatatcttttttcgtagtgtctcttggatttaatttttgctttagtttagttttggttggtttttattatgtttcttttgtgcttttatgttctgtttgttttattagtggtttgttatctgtcattttctgttcttcttctttttgttctatttttttgttatgtttttgtttttt

SEQ ID NO: 93925 - DNA, 348 bp, Homo sapiens
tggacgaggtctttaaatccaccattagcacccaatgcttaaatgctaaggggactattctctgctctttcatggtgaatcggatttggataccacccagatattgactcacccatcaacaaccgctatgtatttcgtacattactgccagtcaccatgaatattgtacggtaccatagatacttgaccacctgtaatacatagaaacccaatccacatcagaaccccctacccatgcttacaagcaagtacagcaatcaaccttcaactatcacacatgaactgcaactccaaagccacccctcattcactaggataccatcaaacctatccgcccttaacagtacg

SEQ ID NO: 93926 - DNA, 329 bp, Homo sapiens
ggcacgagcggcacgagcggcacgagtgacaggcatagcctgggcatatcacctcattggtaaagggctagagcctttcttttttatggcacttctttttttgagatagggtcttactctgtcaccctggctagagtacactggtacaatcacggctcaatgtaggcttaacctcctgggctcaggtgtatgtcactatgcccggctactttttgtattttttggtagagacggcttcgccacgttgcccaggctgcaagcgatatgcctaggctcaagcgatctgcccacctcaacttccggaagtgctgagattacaggtgtgagcc

SEQ ID NO: 93927 - DNA, 354 bp, Homo sapiens
ggcacgagaacgaccatgtgtcaaatatttatttggctgattaatgggggaacgagtagaatggtaaagaatgcaagaaactgatctatttgtctatctatctatctatctatctatctatctatctatctatctatcatctctgttgatatctgtctgcttgtctatctagttatctaactagctagctgtctattatctatctgtctgtctctctgtctctgtctgtctagctagctagctgcctgtgaatctccatctatctatctatccatctatctttctattctatcgatcgaatcctcgctcatcactgcgtaccgccaacctgctctctcccgcatgccacgcatg

SEQ ID NO: 93928 - DNA, 352 bp, Homo sapiens
ggcacgagtcggcgtgggcagattgcagattgcttgagtgtgtggcaaaacgctgtctccacaaaagatacaaaaaaaaaaaattaactgggcatgggggttcgcacctatagtcccagctactcgggaggctggggtgggaggattgcttcagcccgggacgttcactagcggacgtacctactcatgagcgtaccattggactagaccctggcaaacattgcggaaacctgacccaattcactaatacacggtcatggtgggtcacgcccgccatgccctccgtctggacccctaaggcaagtgcctggaatatgacgaggatctgcagaagcatcacgtcggcatcacg

SEQ ID NO: 93929 - DNA, 358 bp, Homo sapiens
ggcacgagcagaggccactttgttaagcatttttctaaaactcaagtccagggtcttgagctctcgcgaagttcccccgtgtttcggaggagctgtgagctgcgcaggccttttaggaggagataattactctttaggaggaagatgatgatttcggggctcagtatgcctgaaggggaagtatgctaatttggttcttggttagtcttttttttttttttttggaaacggattctcgttttgccccctaggctgaaatgcaggggcccaattttggctaattgaaccctccgcctccggggttaaggggattttttggcctaagcctcccaggtaccggggattacgggcccgtgcg

SEQ ID NO: 93930 - DNA, 306 bp, Homo sapiens
ggcacgagcgtggccttgtgtaaaactagcctattactataaaaataacatgaactcttctgttagtcacaaaaacttcaggtccctgagtgtagttatttcctcgtagcctacacttaagtaaacagtgtctctggcagaaagacaacacaatgaagaacctggtttcttcaactccaggttgttttgtttttgtttttgttttgagacagagtctcactccgtcgtccaggttggagtgcagtggcgaaatcatggctcgctgcatcctcaatttcccaggctaaggtgattctcccacctcag

SEQ ID NO: 93931 - DNA, 334 bp, Homo sapiens
ggcacgagaggttgtggtgagccaagatcgcgccactgtactctagcctgcgtaacagagcaagactccatcaaaaaaaaaaaaaaaaaaaaaaaaaaaaaaaacggggcccttttttttctaaaccggaatcttaacggccaagccttataagtcaaaccatataatttttggtggtgaatggaagggatcacaaaggcataaaaccaacctgctttgtggggcttttccagaaggctaagttgaaactttaattaacctcttaacctatggcattaaaccttgggccccacctttccaccaaaaaaccccttataaaagtggatcgggcccg

SEQ ID NO: 93932 - DNA, 317 bp, Homo sapiens
ggcacgagagtaggctaggctaagctatgatgttcagtaaggtggatgtattaagggcattttgacttaaaatattttcaatttatggtgagtttgttgggatataccccaccgtaagtcaaggacaatctgtatactattctatcctttggtcatctttctatttgaaacaaaaatttgctcttctttttcgttttaaaagggctgtatgggctgggcgcggtggctcacgcctgtaatcccagcactttgggaggccaaagtgggtggatcacctgaggtcatgagttaagaccagcctggccacatggtgaaat

SEQ ID NO: 93933 - DNA, 363 bp, Homo sapiens
  misc_feature (1)...(363): n = a,t,c or g
ggcacgagcggcacgagcaaactcctgggtttaagcgatcctcctgcctcagcctcccaaagttctaggattataggcttgagccactgcaccagccccatgttactttctgattctgtgtatctgtatgtgtgtgtgtgtgtgcatgcacacgagtgtgtgcacagtgtcattctgtgtatgtgtatgggtctttgtcacattctgtgaacctgcgttgcagcacgtgcttggggatgagattccttctaccagcgcatattattatctgcgtgaagcgattctgccttatgtgcggctctggcaattctgggtctctgtgcctctgaacgcgccaacgcgctgcgatcttttctatttttn

SEQ ID NO: 93934 - DNA, 358 bp, Homo sapiens
ggcacgaggttcatgcttgtaatctcagcactttgggaggccgaggtgggtggatggcttgaatccagaagttcgagaccagcctgggcaacatggcaaaaccctgtctctacaagatacaaaatattagctaggcatggtggccaactgttggcttcaggggaatgaatccagaagttcgagatcaacctggccaacatggcaaaaccctgcctctactcaatacaccatattagctaagcatgcttgccaatgcctatagactaacctacctgatcggatcatgcaccagcactcaccatgactacatatgacaccactctctcatgatatgatctccactacgctatccatctag

SEQ ID NO: 93935 - DNA, 346 bp, Homo sapiens
ggcacgaggcattgaatctgtatattgctttggttagtatggacattttaacgatattaggtgttccagtctatgaacatgggatatctttccattattgatgtgtcctcttcactttgtcttagcagtgatctatagatatcattgttgagatcttttactactttggataaacttattcctaggtctgatttggattgttattattttagggctccaatcaaaagcgaaatcgtactccgaaaagctttatggcatttgacgcccctggtcaataaagctccaacggatctgtttaagttcatgagctattacgtgtttttgaaaactcggcctgtctttaacg

SEQ ID NO: 93936 - DNA, 353 bp, Homo sapiens
  misc_feature (1)...(353): n = a,t,c or g
ggcacgaggtagaaggccacttggatttcctcatgcctctccccggggcctccctcccatacctcccccagcaggaagtctccttcccattgagcaaacgcagctgttcatgcagctgcggtacagtggccagggaagactggaggaccaggcatgatcaatcatagcaccagtttcagtaatggtgattaaagctgataaactgccaacagggctggcttcttcatatttaagaattcaataggccagtcgcggcggctcacacctgtaatcccagcactttgggaggccgaggcaggtgtggatcacaaggtcaggagattgagaccatcctggccaacatggtgaaactn

SEQ ID NO: 93937 - DNA, 338 bp, Homo sapiens
ggcacgaggggactattaagcccttttttcacatgaggaaacagagactctgagaagataagtgacttttctgaggacacacagtgatttggttggagagctggaggacctcacatctgtgccctggtttcaggctttttctattagttcagtcttcacagtgacacacccttgaccctgcctcccacgagggtcccacgttcctattctctttgctgtggagcagtgtttgaaatagctaacactaaaagtggcaactattgttttgttttgtttttgtttttgagacagggtcaccctctgtcacccaggctggagtgcagtgatgcaatctcagg

SEQ ID NO: 93938 - DNA, 326 bp, Homo sapiens
ggcacgagcacactgctgaggagtgatggctccttctcaggcaggagggtgggcccgctggtgtagccccattgaagtgacagcgcctaggtggggggcacagctgatcagggtgtctgtcccctgcaaggcgaagtagcagaaagggtttattattattattattattattattattattattattattataagaacagttggtttacttacctttaaaagtctttgcttaaactctactgtcaatgttttaggccaggcgtgatggcatgcgcctgtggtctcagctgggctgaggttgatactgccgtgtgggcacacagaga

SEQ ID NO: 93939 - DNA, 338 bp, Homo sapiens
ggcacgagatcgaagagcttatcacctttcatgatcgggccctcatagggaatatccttatctgctccctagtcctgtatgccctattcctaacactcacaacaaaactaactaacactaacatcctacacgctaaggaaatagacaccgtcagaactattctgcccgccatcatcctaatcctcatcgcacctcccatccctacgcatcctttacataacagacgagggcaacgatccctcccttaccatcaaatcaattgggcaccaatggtactgaacctacgaatacaccgactacggcggactaatcttcaactcctacatacttcccccatg

SEQ ID NO: 93940 - DNA, 394 bp, Homo sapiens
  misc_feature (1)...(394): n = a,t,c or g
ggcacgagattttttcaggcccattattataatcttatgggaccgcatcctatatgcagtttgtcattgaccaaaatgtccttatgcgatgcatgactatatttgcaaaggactagtatctagaatacatttaaaagtcttaaaatagtaacaaaacaaagaatgcaattagaacatgagcaaaagatacaaagcaacatttcactggagaagatatacagattgcaaataagcacatgaaaagatgtttgataccattagggaaacgcttctttaaaccaggagatatcaccacgtgttagaatcaacaaaataaggccaggcatggtggctcacacctgtaatcccaacactttgggaggctggggcaggcagatcacatgagatcaggaan

SEQ ID NO: 93941 - DNA, 369 bp, Homo sapiens
ggcacgagggaggatatctcctgctgggtgatgctgaacattaagaccaaggtcttacaccagcaactcagtgctattcattaccaaacagatcaaaaactgggtaacttttgtttcacttccatatctcctgtcccaaaaagtgaagtcaaattcagcattaaaaaaaagtgtttgcacaactgtaatttttgatggtgtggtgtagaaacaaataccgtgtctgtttggtttgctttaagacataatagaccaggtgcagtggctcacgcctgtaatcccaacactttgggaggccaagacaggaggatcacttgagctcaggatgtcaagaccagcctgggcaaaatagggaggccctatctctac

SEQ ID NO: 93942 - DNA, 389 bp, Homo sapiens
  misc_feature (1)...(389): n = a,t,c or g
ggcacgaggaaatatataggaacagtagaaaatgcttttgtttaatgttcttactgatggtcaactagcatgtcttagcaatctttcagttaactgtttagatacaagtttttatcctaccttctccttttttgaaggcaaagctggtcttttttagttaggagtgaactaaaataaagcttgatgtcatataaatatatttatttgtcaagttaggacaagttatgatttggtttcttgcatcctgatttttaagattaaaatgaaaaaaggtgccgggcatggtggctcatgtctgtaatcccagcactttgggaggctgaggcgggtgataacctgaggttggggaccagcctgaccaacgtggagaaatcctgtctctactaaan

SEQ ID NO: 93943 - DNA, 346 bp, Homo sapiens
ggcacgagaactggatattagaaattataattacctttgttaattttattatgtagaaaaagtccttgtttgcagatacatattagaaacaaagtgccctggccgggcgcggtggctcatgactggcaccccaacactttgccagcctgcggctggcgcgaccactgcaggccctccttgcgatcgcccgctcgctcccccccggccatcctagttctcgcctgcccccctccctcctggcgccgatcggagcgtgccgctctcgccctcggtcccgccctgatccctgcctcctcccgcgggcgcccctccgaggctcccccgccccgggactctccacgccgcg

SEQ ID NO: 93944 - DNA, 394 bp, Homo sapiens
  misc_feature (1)...(394): n = a,t,c or g
cggcacgagcagaattgaagctgaaaatattcttagaccaaacattttgtgagcacctgctatgtaccagaattcatagctgggactaatcagaggaagaggaatagaataagtgttcttgccaatgtgaaagacaaacaaataattctactccgtgtgaggacagctataacagagggctatagaaactatcatgtgttgttcctggtttttgtttgttttttttcccccccaaaacagggtcttgctctgctttccaggctggagtgtggtggcacaatcataactcactatagccttgaactcctgggctcaagttatcctctcacctcgacctgcaaagtagctgggactacaggcgtgtgccaccatgtccagctattttaaaaaatcn

SEQ ID NO: 93945 - DNA, 335 bp, Homo sapiens
ggcacgagaaacttcaaaagacaggctgactctcttgttaggggctaatgcaggtggtgacttttaagttgaagccagtgctcctttaccattctgaaaatcctaggccacttaagaattatgcttggtctactcgcctgtgctctagaaatggaacaaagcctagatgacagcatgtgtttacagaatggctcgctgaatattttaagcccactgttcagacctactgcttagaaaacataattctcaatactgctcattaacaatccacttagtcacccaagagctctgatggacaggttcaaggagacgataggagtcttgatgcctgctaa

SEQ ID NO: 93946 - DNA, 378 bp, Homo sapiens
  misc_feature (1)...(378): n = a,t,c or g
ggcacgagcttttattgactgttgtcagagaacatgctgtgtgatttcaagccttcaagatttgttacggcatggcatacagtctgttttgtgaatgttctcatacacttgaaaagaatgtgtattctgcagttactggataaagtgtcagttaggtcaagctctttgatagtactgttcaagtctatccagctataagtgggttcatcttgcttccttaaggtctgtcaatttaagctgtgtgtgtgtgtgtgtgtgtgtgtgtgtgtgtgtgtgtgtgtgtgtgtntttgntgtgtttggtttgtttgttgtggtgngtgggtttttttttttttttngtgttgtgtgggtgtggttgtgtttgtgtgtgtggggg

SEQ ID NO: 93947 - DNA, 335 bp, Homo sapiens
ggcacgaggactacatgtatgtaccacgtaccaccacgctcagctaatttttaattggttttggagagatggggtctccctatgttgcccaggctggtggcaaactccccgcctcaaacaatcctcctgcttcagcctcccacagtgctgcccaatcccgagcgtacctctgcactctacatcggccactcttagacctgtcaccgacctcactgtctcctcgcatcccgtcctctcctcttacctcctctctctctatcccagcacctccgcgctcacacttggcaccccctccaccccgccccccaccgcaccctcccatccgaccctccgcg

SEQ ID NO: 93948 - DNA, 369 bp, Homo sapiens
taaaacccagcccatgacccctaacaggggccctctcagccctcctaatgacctccggcctagccagtgtgatttggcttccactccataacgctcctcatactaggcctactaaccaacacactaaccatataccaatgatggcgcgatgtaacacgagaaagcacataccaaggccatcacacaccacctgtccaaaaaggccttcgatacgggataatcctatttattacctcagaagtttttttcttcgcaggatttttctgagccttttaccactccagtctagcccctacccctcaattatgaggtcacttgcctctaatagtcatcatcctgttaaattctctataatttcctactttatac

SEQ ID NO: 93949 - DNA, 652 bp, Homo sapiens
  misc_feature (1)...(652): n = a,t,c or g
gaacctgggaggcggaggttccagagagccaagatcgcaccactgcactccagcctgggcgacagaacggagaccctgtctccaaaggaaaaacaaaaaagaagaataaaataatttggatgcaaatcatgtttatttaaatagtaatgtcatgagactattaaagatgtgccagagtttcaatgaaaatcattaaagtaggacagctaagaaattaatattaatatcaaaattattgataatcttaaattattgattattccttaacgcactccattctccttttacattttatcatgtttcttttgaatatatgaattggcaaaggacttgatgaaactgagtactaagatttggtacagagtatgtcaggaagacaactcagattgccattttaaataaagttgtacatgaacaataattggaatcatcaggtaatttttttaaacaaaggttcttcatttactgttatgattggaaaaaaattagaaaataaagtaagtgccataggctaattaaaaaataaaaccttggccgggcgcggtggcttacgcctataatcccagcactttgggaggccgagacgggcagatcacgnggtcaggagattgagaccatcctggctaacacggtgaaaccccatctgtacttg

SEQ ID NO: 93950 - DNA, 335 bp, Homo sapiens
ggcacgaggcatctcttaagtcaaacttaggaagtttgactttttaagatttcatggatcagtaagatcatgaagcatttgtctttttgtgcctggcttattttacttaaccgtgtcttctaggttcctccaaattgttgcatattgcaggagttccttctttttgaggctggattttttattgtgtatatataccacttttcctttttttgagacagagtctcactctgtcacccaggctggagtacagtgacatcatggcttattttggccttgacttcttggactcaagcaatcctcctgcctcagcctcccgagcagctgggaccacaggc

SEQ ID NO: 93951 - DNA, 397 bp, Homo sapiens
ggcacgaggctagcaccatgacaataccctgtatctttaaaaaaatgaattggtagtttaaaaaaatcttcctgcaaagaaaactccaggcccagatggctttattgataaactctacaacacatttaggggagaaataacaacatctccacacatacttttccactaatttaaagaggtggcagtacttctcaactcattctctaaggtcagcaagcattactctgacaccaaaaccaaataaagacattatgagaaaagaaaactatagtccaatatcctcatacatatggaatcaatgttctttttttttggaacagatattccctctgtcattcaagctgaattgccccggcttgataatacctcactgaggccttggacttttggactcaag

SEQ ID NO: 93952 - DNA, 351 bp, Homo sapiens
ggcacgagccagtattttgggaggacaaggtgggtggattgcttgagctgaggagtttgagaccagcctggccaatgtggtgagaccctgtgtctacagagaatacaaaaattagccaggcgtggtggcatgcaccttgtgatctcagcctcctgagtagctgggactacaggctcacaccaatgcccccaaccattttgtcatagtctacttgttagaaggaagtcactgagtatagccattacccaaggaaagggaaattaggctccatcaaagggaggaatatcttaaaatttgtgggcaaattttaaaaccatcacagctggctctgggagtacttttctgaccaag

SEQ ID NO: 93953 - DNA, 330 bp, Homo sapiens
ggcacgagtggtggctcatgtctgtaatcccagcactttgcgaggctgaggtgggcagatcacgaggtcaggagtccaagaccagcctgctgggctcaagcattcctcctgcctcagcctgccaagcagtcacaaaccacacctggcttcatcctgccacttatagcttagcaggtaacttcatctgtatgaaggggatgatgtgatttattggcggaatgagtatagcgcttgatagaatcatggctcatgctagatgtctatgagccgtacgtcatggctcatgtctgaaatcacagcactttgagatgctgaagctgacatgatacg

SEQ ID NO: 93954 - DNA, 342 bp, Homo sapiens
ggcacgagatgagaagtgtgaccaggcatggagactcatgcctgtagtccagcgggttgtgatgctgaggcaggaggatcacttgagcccatgagtatgagggtacagtatgctatgattgtgccactgggctccagcctgggtgacagaactagaccctgactctaaaacaagaagactaggtgtgtatccttataaacgatatgaacagatcacttctctgcttacataaaactatccggaggctggccaggcacggtggctcacgcctgaaatcccagcactttgggaggccatggtgggcagatcactgaggtcatggaaatcgagaccatactggct

SEQ ID NO: 93955 - DNA, 339 bp, Homo sapiens
  misc_feature (1)...(339): n = a,t,c or g
ggcacgagatgagaagtgtgaccaggcatggtgactcatgcctgtaatccagcactttgggatgctgaggcaggaggatcacttgagcccaggagtttgaggttacagtaagctatgattgtgccactgggctccagcctgggtgacagaactagaccctgtctctaaaaaaagaagaagaggtgtgtatccttctaaatgataaaacagatcactcccctgcttacataaaactttccggtggctggccaggcacggtggctcacgcctgtaatcccagcactttgggaggccatggtgggcagatcacgaggtcaggaaatcgagaccatcctggcn

SEQ ID NO: 93956 - DNA, 337 bp, Homo sapiens
ggcacgagctggaattctcaaacactgacagaggaagtgtaaatcaatacgtaccactttggaataacgttgggtattatatactaaagctaaatataggtataacccatgacccagcaattcctttcttagttttatacccatcagaaatgcatacacatgcatactaaaagacaagtatgagaatgtgcataacaacactattcataatggctataaactaaaaattcaaatgctcataatcagaagaagagaaggcaaattttggtattttacataatgattactatacagcaatgagaatgaacatctgcagctacacacaacatggataaat

SEQ ID NO: 93957 - DNA, 349 bp, Homo sapiens
ggcacgagcaaagacaatcccctggaacaaggtttgggaaccacttccgaggaattagagtgcctttgggatccaagaaaatgaaatgccagctgggcgcggtggctcacacctttaatcccagcactttgggaggccgaggcgagtggatcacctgaggtcaggagttccagactagctgggtgacagagcgagactccatctaaaaaaaaaaaaaaaaaaaaaaaaggggaaaggccacctggggaaaaccccttttttactaaaaatccaaaaggtacccgggcgggggggttaacacctttaatcccagctttttgggaggccgaggcaaggggatcccctgggg

SEQ ID NO: 93958 - DNA, 350 bp, Homo sapiens
ggcacgagaaaaaagggggaaataacaggcattcaaaaaacagtggaaagtaacaagtgttgacaaggatatagagaaattggaacatttgcatgtcactggtgaaaatgtataatggtgcagtgctttggaggacagtatgacagttcctaaagagattaaacagagaattgccatatgacacaccattccacttctgggcatatacccaaaagaactgaaagcaagtgctcaaatagatatttgtacataagtgttcacagctgggcatggggcccacgcctgtaatcctagcactttgggaggctgaggtgggtggaccacctgagatcaggaatttgagaccagcc

SEQ ID NO: 93959 - DNA, 908 bp, Homo sapiens
  misc_feature (1)...(908): n = a,t,c or g
gaaagaaaaaagaaaatgagcacattactgtgattttacagcaattaaagtgattataagataataccacaaacataggtacaccagcaaattgaataaccaaatgaaatggcaaatctctagaaacacaaagcctaccaagactgaatcacaaacaaagaaaaaatatgggtaaaccagctgggcatggtggctcccgcctgtaatcccagcactttcggagtgcactccattgcactccagcctgggggacaagagcgagacttctcaaaaaantagaaagtaggggtaaacctataactagtaagaacattaaattactaattaaaatcctttcaacaaagaaatacccctgactggatggttttaccagtcagttctaccagacatttaacgaaaattaatgccagtcctttgcaaactctttcaaaaacttgaagaggaggaaatactttctaactcattctatgaggccagcattgccttgatgctagggccagacaaaggcactacatgaaaacaactgaccaatattacttatgaacattggttaaaaaattcttaagaaaacactgccaaactgactgggcacagtggctcatgctgggtaatcccagcactttgggaggttaaggcaggtggatcacttgagctcaagttcaagaccagctgggcgtggtggcccacgcttgtaatctcagcactttgggaggccgaggcggggtnggtcacgaggtcaggagattgagaccacggtgaaaccccgtctctactaaaaagtataaaaaaattagccgggcacggtggcagacacctgtagtcccagctactcaggaggctgaggcaggagaatggcatgaacccgggaggggcagtttgcagtgagccaagatcgtaccactgcactc

SEQ ID NO: 93960 - DNA, 331 bp, Homo sapiens
ggcacgagtcgagactagcctggtcaacatggagaaacccccatctctgctgggaatacaaaaattagctggacgtggcggcgcatgcctgtagttccaactactcgctagactgatgcacgtgattcgcttgatcccatatgactccacctgcctacagctctattctttctacttcacccgttacttgacttactattgttgactacccttctattctttactctcctcttaccttcttcaactctcatccctatttcacttctagttctcctcttctgcctccttattccttctctgctcttcatcgtccctactctcctcaccctcc

SEQ ID NO: 93961 - DNA, 384 bp, Homo sapiens
agatggtatctacccctgctgaggatgctgtgaatattgttgacatgacaacaaatattgagaatattccctaaacttagttgataaggcagtagcaggattggagaggattgactccaattttgaaataagttctactgtgggtaaaatgctaccaaacagtatcatatgctacaaagaaatttttcatgaaaggaagaatcaattgatgcagcaaaaatcactgttgccttattttaataaattgccacaatcaatccaacattcagcaatcactaccctgatcagtcggcagctatcaacaatatggcaatcactccaccaacaaaaaatttcaacttactgaaggctcagatgaccattagcatttattagcaataaaat

SEQ ID NO: 93962 - DNA, 349 bp, Homo sapiens
acgcttctaggtaacgaccacatctacaacgttatcgtcacagcccatgcatttgtagtaatcttttggatagtaatacccatcataatcggaggctctggcaactgactaattcccctaataatcggtgcccccgttatggcgtttgcccgtataaacaagctacgcttaagactcttacctacgtctagtcctactcctgcatagcatatgctatactggaggccggagcacgcactgggtgaacagtctaacctgccttaacaaggaactactagaaccctgaagcctacggacacctatccatgttctccttacacctaacaggtgtgtcctctatctcaagggc

SEQ ID NO: 93963 - DNA, 441 bp, Homo sapiens
ctgaatttgtaggtcactttggatagtatcgaaatgttaacattattaagtcttctaatccatgaacatgggatattgatccatttgttttctttcatctctttcagcaatgttttgaggttttcattatacaagtctttgcctcagtgattaatttctaagtattttattctttttgatgctattttaaatggaattttaaatttcttttccaattgttcattgttagtgtataaacacacaactgatttttgtgttgattttgtatcatgctactttgatgaacttgttgattacctctgtcaattttattgatactttgacctttccaatgtgaatgcctttttttctttttttgcctaattgctccagctagaatttctagtactacattgaatagaagtggcaaaaacctgcattctgatctcgatcctgaacttg

SEQ ID NO: 93964 - DNA, 201 bp, Homo sapiens
tcttatggatcaaaaaattggatataatccctattattcccagctgacttttttttaatactgaattggacaaactaatcctaaagctcatatggaaattcaggggacccaggaaacccaaaacagttttgaaaaacccatagtgggaggacttatactttcggatttcaaaacttactacaaggctacggtattaaagaa

SEQ ID NO: 93965 - DNA, 325 bp, Homo sapiens
ctgaagggtcagatcgcttgagtccaggagttcgagaccagcctgggcaacatggcaaaaccttgtctctacaaaaaaaatggccagtggtagtatgagcctttagtccgaggggctgtggttagaggatcactgagcccaggaggcggttgcagtgaaccatgtttgtgccactgcactccaggctgggctacacagtaagactctgtctcaaataaataaagatgtgggaagagtggagaggcagtgcagtggggagcccttgccagccacggcctgaaggacaaggagaggggggtgttctagaaacttgtcttagaacctg

SEQ ID NO: 93966 - DNA, 364 bp, Homo sapiens
tattaaagggtctttacgtagacttgtggatcttttattttacctactgctttcttccatgcccataatcttaattcctaatgataccaacataattactcattttgttttatttcacagtatgtctaccgtctttttttttttttttaaaccttttttaaaaaaaaggggttttggttttaacggcttaatttccaggggggaaacatgggttaatggaaccttaacccccttaaattaggcaattcttttgccttaaccctctgaattaccggattaccggggcccccccaggggggctaatttttaaatttttttgaaaaaaaaaggttttcaagttttcccaagcttgtctaaaattccg

SEQ ID NO: 93967 - DNA, 382 bp, Homo sapiens
ggcacgagcggcacgagctactctaccatctttgcaggcacactcatcacagcgctaagctcgcactgattttttacctgagtaggcctagaaataaacatgctagcttttattccagtgctacaccagaaatatactcgcataatatacacacgctgccatcatgcatttcctcacagacagcggggctatgtattactcattgagatactgttactttacagtaatagcttgggtgaatagagttccattatcgaacttcaactcatttcgatattcttaagcatgatgttggttatccctaataaattcggggcggcctattattcaattcatgctttgtgcttggatcgccctcagttactccatattctcctgatag

SEQ ID NO: 93968 - DNA, 323 bp, Homo sapiens
gttgttgacgaagctggtcttgaattcctgggctcaaacgatcctcccgccttggcctcctgaagtgctgggattacaggtgagataattttcaacatatgtgtctcaagaattttaataattgggctgcatattattttgtgtgtaaaatttgttgtgctgttgatcctcatggatgttccataaaagtatctttctttctttctttttttttttttttacaaagtctcgcactgtcccccaggctgaagtgcaggggggggatctcggttaactggaacctttacctccggggttaatgccattctccggcctaagcctcc

SEQ ID NO: 93969 - DNA, 318 bp, Homo sapiens
tttgaacccaggagacggagtttggaaagccaagatcgtgccactgcactccagcctgggcaacagaaggagactccgtctcaaaaaaaaaaaaaagagggcagctttataaaggataaaataaattacattctttttaaaatgcatgaggggcaaactttgtcacaaagtatttaaataacctttaacctggtttaaaaaatctttatgggacataaaaacagtttttggcacgggggctaacccctgaaatcctagcactttgggaggctgaggcagggggatcacctgaggtcaggagtttgaaaccaccctgcc

SEQ ID NO: 93970 - DNA, 323 bp, Homo sapiens
gtgaaaagacaacccacagaatgggagaaaatatttgcaaactctatccatctggcaaaggattaataacaagaatatacaaggggctcaaacaacttgaagggaaaaataatcgaataatttgatcttaaagtgggcaaaagaagacattcaaacggcaaacaggtatatgaaaaggtgctcaacatcattgatcatcagagaaataaatgcaaatcaaaactacaacgagatatcatctcaccccagttaaaatggctttcatcaaaagataagcaataatgaatgctagtgagggtatagtgaaaagaggactctcatac

SEQ ID NO: 93971 - DNA, 248 bp, Homo sapiens
cacccagcccttaatattaagatgtctaccacccagatccatctacagattcaattcaatccctatcaaaatccaagtgaactttttctggagaaaaagaaaaatctctcctgaaattcatacagaatctcaagggaccctgaataaccaaaactatcctgagaaagaagaaagttgacggaaaaacatttcctgatttcacaatgtactacaaagcaacagtaatcaaaacagtgagctggtatcag

SEQ ID NO: 93972 - DNA, 273 bp, Homo sapiens
atggtcccagctactcaggaggctgagatgggagaaacgcttaagcccaagaggtcaaggctgcagtaagtcatgatcgtaccacttcactatagcctgggcgaaagattgagtccctgtctcaaaaaaaaaaagaagggaaaaaaacaaaaagaaatagctaagggagggttatgctactgctggtcctactggatatccaggtttcttttttcttctttaccgcgtgtaaaagggcatactgaagggtaactttgggcttaattactagag

SEQ ID NO: 93973 - DNA, 314 bp, Homo sapiens
ctaaattgaaaatgtcattaatttaaaagaacatgttagccaggcagtggctcatgcctgtaatctcaacaggcatggaggccgaggcgggaggaccaaaaggtcaggaaatcgagaccttcctggctaacatagtgaaaccatctctactaaaaaaaaaaaaaaaaaattaggaggctgaaacaggaaaatggcatgaacccaggaggtggagcttgcagtgagccaaaactgggccattgcactccagcctgggcaacagagcaagactccgtctcaaaaaaaaaaaaaaaaaaaccccccgtaaaaattag

SEQ ID NO: 93974 - DNA, 849 bp, Homo sapiens
ttttttttttttaaacaaacaaaatttattaaactttcaaaatacaaaaacatcatcaaaaagtcatagcatttctatacattagtaactatctcaaaatgaaattcaaaaaaattccatctacctaactatagtttgaagtaaatttaaccaaaaagttgaaacaccttacattctactctaaagaacattatacaaattaagtaacacataaatggaataatattactcattcatgaactggcatttttaatagttaaatatttgtattacacaaaatgatctgcagatataatgcaacctctatcaaaataccagtgacatacttcatagacatttttaaaaagcatatctaaaattcatatggtaccacaaaacaccctaaatagccaaagcaatcaagacaaaagaaggtatccccctgactttgaaatacactacaaaactgtggtaaccaaaacagtatgtcacttgaataaaaacagagatataggccaatggagcagaagaaaaagagagcagaaatatatcagtgtatttacagctaactgattttaaatacaggtgacttttttttttaagggaaataacagtatcttcaataaatgatgtttagaaaactttatgtccacatgcagagaaaaaaaagtgagaccctcatctcacaccatatgtaaaaataaactcaaaataaattagccacttaaatgtaaggcctaaaactcttaaactactactaccaaaaaatagagtgaaagccccataacattggtctgggcagcaagttttttgatttaacctaaatatcccaggacacaaaaggaagaacaagtcagtcagatcacttca

SEQ ID NO: 93975 - DNA, 318 bp, Homo sapiens
cacttagagaaatgcaaaatgcactggaaagtctcagtaatagaactgaacaagtagaagaaacaacttcagagctcaaagacaaggcatttgaataaacccaactcaacaaagacaaataaaaaaagaatttaaaaaaatgaataaaggctccaagaagtttgggattgtgttaaatgaccagacctaagaataattggtgttcctgaagaagaagggaaatccaaatatctggaaaacatgtttgaggaaataatcgagcaaaacttccctggccttgctagagatctggacatccaaatacaagtagctcaaaga

SEQ ID NO: 93976 - DNA, 382 bp, Homo sapiens
ttcacacccactaggacggctgtagtaaaaaagataatgactggtgttggcgagggtgtggaagcattggaactctcagacactgctcgtgggaatgtaaaatggcacagctgctttgttaaacagtttgacgtttcctcgaaagatcagacagcctagtgatgtctgctgtgatatggtaattgggttaccctatgacccagcagttctcctcctaggtatctgcccaagagaaatgaaaacgtatgtccacacggcagacatgagtgtcattacatcagtgtcattagtcataatagtcagacagtgaaaataacctgaacgttccttctgctgatgaatggataaatgaaatgtggtatatccatacggtggactactt

SEQ ID NO: 93977 - DNA, 341 bp, Homo sapiens
cacaaactagaaaatctagagaatatagttaaattcttataaacacacacctcccaagattgaatcaggaaaaaattcaaaccttgaacagatcaataacgagttctaaaattaaatcactaataaaaaacacaccaaccaggaaagaaaaaaaaaaaaaaccctgggcccaaagggtttcccagggaatttttcccaagggcccaaaaaacagggggtcccaaccttagggaaccctttccaaaaattcagggaaaggggatccctccttaactatttttacaaacccggtttattccggatcccaaaattgggaaaaaacccacggggaaaaaaaaaaa

SEQ ID NO: 93978 - DNA, 385 bp, Homo sapiens
tgcctgtatacccagctgtacttgggagggtgaagtgggaagattgcttgagaccaggggttcgaggctgccgtgagccttgtttgcatcactgcattccagcctggatgacatagcaagaccctgtctccttaaaaaaaaaaactgaaaaaaaaaaattttttttaactgaaatcggttttaggtccctaggaggtttccaaggcctttaaatttcttagtttaggggtgaactttaagggctcctttcctaaaggttttgaccttgaaattgtttacaaaggaaaggttctaggccaggttcatgggttaatacctgtaaacccaaaacttggggaggcttagtggggaggattgtttgaccccggaggtttgaaacccccct

SEQ ID NO: 93979 - DNA, 335 bp, Homo sapiens
tacgtaaagtgaaatattagttggcggatggagcagatagtgaggaaagttgagccaataatgacgcgaagtccgtggaaacctgtggctactaattatgttgagccgtaaatgccgtcggaaatggtgaacggagactcgaattactctgaggcttggacgagggtaaaatagagacccagtaaaattgtaataagcagtgcttgaattattaggtttccgatgctctctattacactatggtgagctcaggtgattgatactcctgatgccagtaatactgatgtgtttatgagtggtgacttctaggggatttagcggtgtgatgcctgttg

SEQ ID NO: 93980 - DNA, 235 bp, Homo sapiens
ttaaacttctcttatgaatcatctatgtattttgccctttttactatagtattttgtggttttcctcaatttttaaaagttctttatgaactagatctatcatctatgctacgttttatagtattttctcctagtttgtcgtttgtcttttgacttggtttatggtgttttgtttttttttttttttttttttttttttttttttttttttttttttttgttttttttttagctt

SEQ ID NO: 93981 - DNA, 258 bp, Homo sapiens
agctgcgacaggttatttgcaaatcacttatctaacaaagaacttgtttctagaaaatacatatatatattttaaaaatctcaggattcaacaataagaaaacagactgataaaaaatgagcacaagagctgaacagacgcttcagcaccaaagatctacagatgggaaataagcacatgaagagatgctcaaccccactcgccatcaggaaatgcaaatcaaaaccatgctgagataccactgcatacctatcggag

SEQ ID NO: 93982 - DNA, 330 bp, Homo sapiens
cttggcttactgcaacctttgcctcccagggtcaagtgatcctcccacctcatcctcccgagtagctgggaattacaggggcacatcatgacagtgtcttttaaagagcagaagacattaatatgcatgaaatccaatttatcagttttttatttttaaatagagatgaggtctcactatgttgcacaggctggtcttgaactcctgggctcaagcgagcctcttgccttgacctcccaaagtgctggaattataggcatgagccactgtgtctagcctttttttttaatggatcatggtttcagtgtcaaatctaagacatctttgctg

SEQ ID NO: 93983 - DNA, 408 bp, Homo sapiens
gttagacgggctgatttagatatgcatgatgtatatagctagactattcgatgacgaagacaccccaccgagacctatcgagggacctaattaggagccgaattcgacgttcgagcctaccttaccagtgggagactaacaggaccaggagtacctttcctgacaggtttctactccaaagaccacatcatcggaaaccgcaaacatatcatacacaaacgcctgagccctatctattactctcatcgctacctccctgacaagcgcctatagcactcgaataattcttctgaccctaacagggcaacctcgcttccccacccttactaacattaacgaagataaccccaccctactaaaccccattaaacgcctggcagccggaagcctattcgcaggatttctcat

SEQ ID NO: 93984 - DNA, 166 bp, Homo sapiens
cggaattgctgggtcgaatggtagttctgtttttgttatcttaggacttaccacactgctttccacagtggttgaactaatttacaccaccagcagcagtgtataagagttcccttttctcagcaacctcgccagtgtctgttattttttaattttttatttcttt

SEQ ID NO: 93985 - DNA, 729 bp, Homo sapiens
gcatggtgatgggcgcctatagtcccagctacgcaggaggctgaggcaggagaatcgcttgaacccgggaggcagaggttgcagttgagccaagatcatgccactgcactgcagccattgggtgacaaagcaagactccatctaaaacaaacaaacaaacaaacaaaccaaataaaaagacagagaatggggaattgaggacatctagtcagttggatagatctggattctattcttagcaattctgtgatcttgggcaatttacattgtcttttaagttatcagctgttcttaggttataaaaagatccattttgtaaattgtgtcaagcagatgtcgaccatttataataaacttatcaagatatgaagttaatttctttgctgtcattcgaaagacaaactgatagggtcagcaaactaccttaaacatgttctcattaaaacaaaaattaaaaacacagctcctatagccagacgtggtggcagatgcctgtagtcccagctaattgggagactgaggtgggaggatcctttgagcccaggagtttgcagccatcttgggcaacatagtgagacccttatttgaaaaacaaacaaacaaacaaaccaaaaccctagcaaagcacattttctatagaagctactcagtggacataattaaaacaaatggtagtatcttgaaaaaattaagacatttagtgtgaaccacatgtctagaaaaaaaaaa

SEQ ID NO: 93986 - DNA, 319 bp, Homo sapiens
  misc_feature (1)...(319): n = a,t,c or g
atagggctcggcgtgggcttaaaacgttcaatgctgtgaaaagatgtcctgtcatccagactttgctgttccatttctagagcaccgatagatttagcataattcttaatggctctaggattttcaggtggtaagtgagcactggcttcaacttaaagccaccagctggattagcctgtactaagagaatcagcctgtcttttgaagctttcaagccaggcattgacttctcttctctagctaggaaagttctagatggcattttcttcaacagaagactgtttcatctacattgaaaatctgttgttttgagtcaggn

SEQ ID NO: 93987 - DNA, 328 bp, Homo sapiens
tgcatagggccgatgtgggagaatcgcttgatcttgggagggcgaggctgcagtgagctatgatcatgccactgtactccagcctgggcaacaaagtaagacactgtctcaaaaggaaaaaaaaaaataaaatatgagaaaggttatgatacaatgttaaatgcaaaaagtaaaatgtaaaatgatacctagtgtttaatctcaatcatgtaaagaaacgaaggaaaaatgaacaggaaaaagtatggcagtggccgttgtaataaccgctgttgtttaattgagcccctcccttcctggccagttctcaatgtgtggtaaatgcccg

SEQ ID NO: 93988 - DNA, 263 bp, Homo sapiens
gaacatggggtatcggcccattttttgtgtgtcttcaatttttttcaatattttatagttttcattgtagagatctttcacatccttggttaaatttatacctaagtattttatttctttttttttggcaggtattgtaaatgggattgctttcttgatttatttttcagatagtttgctattaatatttggtgtatagaaacactaatgatttttgtttgttgattttatatcctgcaacttgactgaattcatttattagt

SEQ ID NO: 93989 - DNA, 343 bp, Homo sapiens
ggcacgagcagaagaggcaatcaaaagttagagaggttagggaactgtctcaaggtctcaacatggataggaaaaggtggagccaggacttgaatccaggctgtaggactgtagcgctctctccctaccaccacaccaggctagccctgaattgccctggcaggcaatggtttgtaggagtgaatttcttttaaagaaaaaaaattttttttttttttaaattttgggacagggtcttgctctgtcacctaggatggagtgcagtggtgccatcatggcttactgcagccttgatctcctgggctcaagtgatccttccgcctcggcctcctaagtagctggg

SEQ ID NO: 93990 - DNA, 345 bp, Homo sapiens
ggcacgagaaaaaatactgacaataccaaatgcaggtgagtatgtgaagaaactggatatttcatacattgctggtgggggtataaaatggtatatccacttgggaaattagtttggcatttcctcaaaaaagtaagcattcacttaccatatggtacatcagcactcctcagccttatgatagagaaattaacatttacatccacacaaaaacctgtacacaaatgtccatgtagtattatttccaatagtcaagaaatggaaacaaccaaaatgtctcccagtaggggaactgctaaacaaactatggtatatatccatccatacaatatactcagcaataaa

SEQ ID NO: 93991 - DNA, 355 bp, Homo sapiens
ggcacgagcagaaaagttaatagtcgtgtgaacaaccatattccttttctttgtttatttttaaggttgtagctatctatctatttatttatttattttgagaccgggttataaggctggctaatttttgtatttttggtagagatagagtttcgccatgttgtccaagctgggcccgaactcccggactcaagcgatccaccagcctcagccttccaaagtgctgggatcacacctgagccactgcacctggccaagagccatattactgtatttctgggattacaggtgcctgtctccagatctggttaattttgcgtgtgagcatttctcagtcgagttggtggccttcttc

SEQ ID NO: 93992 - DNA, 354 bp, Homo sapiens
ggcacgagctatttgggaggctgagaggtgggaggatcacttgagctggtaggtcaaggctgcatgcagtaagccatgatcacaccactgcactccatcctgggtgaaagagcgagaccctttcttcaaaaaaaaaggaaaaccatttttgttatttcaaagaggatattttagatgcttacaagaccattggaaggctggaagagcatagatcagggaaacctcgttgcaggaatttcaagaaatggcttctgttaataatcttagctgccttaagcaccaaaacaggcagtttgcagaaaattagaaatggctgcaaaccacatgtctgccatctgtccgaggccacgcacg

SEQ ID NO: 93993 - DNA, 365 bp, Homo sapiens
ggcacgaggtctgaggttatctataagctcctactccagacgccatgggtcatttgacatatgaggactaggctactattacaagcctgtggtgcaaggtgaatgtggatgattctggatgataatacttggcctagtaacctgcagactaaccatataccaatgatggcgcgatgtaacacgagaaagcacataccaaggccaccatacaccacctgtccaaaaaggccttcgatacgggataatgctattattacctcgtaagttgttttcttatcctgtgtgatctgtggttttcttcttcatctgaacgatatgcctgcgtcaaagtgccgtggagtcttaaagctttaattcctttatcg

SEQ ID NO: 93994 - DNA, 367 bp, Homo sapiens
  misc_feature (1)...(367): n = a,t,c or g
ggcacgagcaaaccagtcacaacattcccttgagccaaagcccaatctagagcaagatcttaatgctcttaaattctatgaaggctgagagaggtgaggaagctgcagaagaaaagttggaagctagcagaggttggttcatgaggtttaagaaaagaagccatgtgcacagcataagtgcaaggtgaagcagcaaatgctgatgtggaagctacagcaagttatccagaagatctagtaaggaccattgatgaagatggtgacactaacaaacagattttcaaatgtaaacaaaacagccttctgttggaagaatatgccatctaggacttccacagctagagaggagaagcagtgcttgccttcn

SEQ ID NO: 93995 - DNA, 357 bp, Homo sapiens
ggcacgagcgctctgaccaattgtatgccaataattagacaacttagataaaaggagcaaattcctcagagggatacaaactacagaaactgactcaaaaagaaatacaaaatacaaacagacctacaacaagaattaaattagtaaaaaaaaaaaaaaaaaaaaaaaaaaaaaaaaaaaaaattttagccccggggggtttacgggggaaattcccccaacctttaaaggacaatttaaaaaaatttttaaaaaatttttcaaaaacctggggggggaaaaaaccctccccatttaaatttatggggcgggtaaaaacttttgcccaaaataaaaaaaacccttccaaaaaaaaaa

SEQ ID NO: 93996 - DNA, 363 bp, Homo sapiens
ggcacgagcaccaacatggtgaaaccctgtctctactaaaaatacaaaaataaattaactgggcatgatggcgtgcacctgtaatctcagctaagcgggaagctgaggcaggagtatcgcttgaatccgggaggtggaggttgttttgtggttgtagttgttgagtggtttcggttgttttgtttattgtgattttttttgatatatgagtgattatagagtttttggggtgttagggaatatttatattaggtattatatttatgttatatagatattttaggtttatgtatttaaatttgttattatttagaggagttttatgtggaaaagtattattttataattagattgtataattat

SEQ ID NO: 93997 - DNA, 361 bp, Homo sapiens
ggcacgaggttaggttgtgggattttgcatttgagagaaatgagggaggtggagagaatgaagagaaagtggactggctgaattacagaatgtggtttcatctgatcttttaggctgagtgctactccatttgtagactccatgcatattactcatgcatcctgggtcctgtcctactgctgctttttgttctgatcatcttgttattttgctgtctctattctttgattattttgtttcatgtttttcatttttttttattctttcttctttcttttattttctttgtttttttctctctttttatttttatttttctttatttttttatttttttttttttctttattttttttttttt

SEQ ID NO: 93998 - DNA, 388 bp, Homo sapiens
cggacgcgtggggccaaagtgggaggattgcttgagcccaggagttccaaaccatcctgggcaacagagggagaccctgtctctaccaagaaaaaaaaaaaaaaaaaaaggttaaaaaaccatttacctgaacctgggggggcacactcagtaggctgagggaaagggattcctttaaccgggaaaactgaacctgcagggacccttgatcgggccattgaactccagtcggggggacaaaggggaaccttatttcaaaaaaaaaaaaaaagggtttccctcccaaaatacggggggaaaatggggataataattaaaacccttatgggaaaaaggacccctaagggggtttttttaaaaccttggggaaggggaactttaaaagggc

SEQ ID NO: 93999 - DNA, 386 bp, Homo sapiens
gtttttaatgcagaagaaagtgcctattctgggaaataatgccacaaaggaaatttattagaaagagaagcaagcaccatgatttaggcaggaaaggataagctaatactgtgcaaatgcagttgtgtttacgatcaggactacacatatctgtaaacctgctaacccccaagccttgaagaagaagaagaaaaaaaaacaccagctgacagtcttttggttgtataccaagaagtcctagacaatgagaaccctttttctggattggttctgtcaatgctttgtccctaaagtcaggaagtaccttgctagtaagacactacctttgaaagttcttttgatactggacaatgcccctggccacctaaaaccccatatattcaacg

SEQ ID NO: 94000 - DNA, 418 bp, Homo sapiens
  misc_feature (1)...(418): n = a,t,c or g
agcacaccatatattcacagcacgaatagacgtagacgcactagcatatttcacctacgttaccataatcatcgatatccccaccggcgacgaaccatttagctgactcgccacactccgctgaatcaatatgaaatgatctggtgcagtgctctgagccctaagactcatctttcttttcaccgtacgtggcctgactggcattgcattaccagacttatgactagacatcgtactacacgacacgtactacgtcggagctcacttccactatggcctatcagtaggagctgtatttgccatcctaggaggcttcattgactgatggcccctattctgcatgctacaccctagaccgancctacgccaaaatccatttcactatcatattcatcggcgagatctagctttcttcccc

SEQ ID NO: 94001 - DNA, 398 bp, Homo sapiens
tcagccaggctggtctcgaactcctgacctcaagtgactcgcccgcctcagctgcccaaagttctaggattacaggcatgagccactgtgcctggccactgccactaattttacattatggtgagttgtatgattatttcaatatacaactacagtataataataatagaaataaagtgcacaatacatgtgatgctcttggccaggcgcggtggctcatgcctgtagtcccagcactttgttaggccgtggaggactggatttgtgtgttcgatacgggtgtgttgcatgactatatgttgtgatctctgtattcttggttcctatggtaaggtggtgttgcgcttcttttttaattctgttgatggttgattgccccttccgtatttttttttttg

SEQ ID NO: 94002 - DNA, 437 bp, Homo sapiens
cacacaccaggcaggcagacgacatcgcaaaccacaatcacacttactctgccccagagacagacacacagacacaattcagagtccaggagcgggcccacgcatatacacattacacccacacccacacactcacccagaaccactcccacccatccacacagccatccacgcacacacacacagtctcacacacacagattcatccaggaagagccctgactcagggcaccaacacacacaattttgtgggacaccatcagttgcagcctgacacagatttgtggacacagacacgtgaacagatgctcacataaacttcatgtgcatgacttgaaacacacagacacacacacacacacacacacacaggacttgctcttcctcccattaccagaagctggaatcaaatttcctataaggctcccgaagcctgg

SEQ ID NO: 94003 - DNA, 393 bp, Homo sapiens
  misc_feature (1)...(393): n = a,t,c or g
ccaccttcagttcatttttttctggattctgaagatttttcattatttgtcctatggttttggttttatttgacttcgatggcattattttatttgcaataacagaaaaggaattgcatgtatgaagttttcaatcgtgggcttttctttgttgtggggagggggtcggnggatngtnngntnnnnnnnnnnnnnnnnngnnnngnnnnnnnnnngnnnggggggggggggnggttggggggggggggttggggtttgtgtgttttttgttgttgttttggggtttttggtttgtttttttgttttgttggtttttggtttgtgtggggtgggtttggtgtgtttggtgggttttttttttgttgggggtgtttgttggtgtttttttttttt

SEQ ID NO: 94004 - DNA, 375 bp, Homo sapiens
caaaactattccttgatccatgggctatggaatggatgtgttagcaggcattaaaaaaattcaactccttgtacatctccattggagttcttgggtgaccaggtacattgttaatgatcagtagcatttcaaaagaaatcttttactgaatggtggacttaacgtcttcagtaaaccatgattttaaaagatgtgctgtcatccaggcatagtttttctatctatagagtctatagagcacaggcagagtacatttagcaaaattcttaaggaccctaggatttttggaattgtaaatgagcattggcttcaactttaagtcaccagctgcagtacccctaacaagatagcctgtcctttgaagcttggaagcca

SEQ ID NO: 94005 - DNA, 407 bp, Homo sapiens
ctgcattccaccctgggtgacagagcgagactctgtctcaaaaaaaaaaaaaataaaaaaaaagggccggggggggggggtaaacccccttgtttacccccaaattttaaaagggcttaggggaattaaataaaggctcggattataaaaacccccctggcaaaaaagacaaaaccctttttttaaaaaaaaaaaaaaaaatattgggccggggggggggggccataaaaccccctcccctggggggggtggggaaaaaaaatccttttaacaaaggggcaaaaggtttaaggaaaccaaaaccccccttttgccctcccccttggggaaaaaaaaaaaaatttttctaaaaaaaaaaaaaaaaaccagcgccccggcgaatttttttttttttatgggaaaaaaaa

SEQ ID NO: 94006 - DNA, 425 bp, Homo sapiens
cccacgcgtccggactagttctagatcgcgagcggccttggaactgatttttttttttttttttgtcccacccaaattaccagggtttaaagggcccctaggaaaaaccaaacctggggttggggaacttgatacttggggcaccccaatcctgtggggggggcagggggggcttctttatgggaaaggcgggccccacccttggggccccttggggaggggggggggaccttgaggcacccaccccttggcgggggcaattggccccccgaaggcagccttccattcggaaagggccaggagggcccccttttgggggagttttgggtaagctttaacgttttttttccccccccgggccaaggggaaaaaaaaggaccctgggggcggagcttaaaattttgccaaaaagccaacagttccct

SEQ ID NO: 94007 - DNA, 348 bp, Homo sapiens
ctactaccagaccgcaacctcaacaccaccttcttcgactcccgccggaggaggagacctcattctataccggcacctattctgaattttcggacaccctgaaggttatatgcttatgctaccaggctttggaataatattgcatattgtaacttactactccggaaaaaaagaaccatttggatacataggtatggtctgagctatgatatcaattggcttcctagggtttatcgtgtgagcacaccatatatttacagtatgaatagacgtatacacacgagcatatttcacctccgctaccataatcatcgctatccccaccggcgtcaaagtatttagctgacg

SEQ ID NO: 94008 - DNA, 382 bp, Homo sapiens
actattctctacaaaccacacagacattggaacactatacctattattcggcgcatgagctggagtcctaggggcagctctaagcctgcttattcgagccgagctgggccagcctggcaaccttctaggtaacgaccacatctacaacgttatcggcacagcccatgcatttgtaataaacttcttcatagtaatacccatcataattcggaggctctggcaactgactacttcccctaataatcggtgcccccgatatggcgatcgcccgcataaacaacataagcttcagactcttacctccctctctcctactcctgctcgcatctgctatagtggaggtctaatcaagaacaggttgaataatctactcatccttagc

SEQ ID NO: 94009 - DNA, 380 bp, Homo sapiens
cccacgcgtccgcccacgcgtccggaaaaataaagtgaattaagcgtgaaaaaaaaaaaaaaaaaaaaaaaaaaaaaaaaaaaaaaaaaaaaaaaaaaaaaaaaaaaaaaaaaaaaaaaaaaaaaaaaaaaaaaaaaaaaaaaaaaaaaaaaaaaaaaaaaaaaaaaaaaaaaagggtattatataaaaaaaaaaaggaagggttaaatatttttttgaggtgaaaaaaatatatttttttattaaaaaatattttataaaaaaaaaatttttttttttttttaaaaaaaattttttttttggggggaaaaaatattaaaaaaaatttttaaaaaaaatttaatttttaaaaaaaaaaaaaattttttaaaaggatggaa

SEQ ID NO: 94010 - DNA, 541 bp, Homo sapiens
  misc_feature (1)...(541): n = a,t,c or g
aagaccatctagtataacattcgatgacataatcggtactctacctactgcagtccgacagcaagtcacgaggtaatgagctactacctcctccccatcgcaagccgtctggaacgncnntnaaaacctgcggcgacccacgcgtgcgcaacaatattcatgtgcctagaccaagaagctattatctcgaactgacactgagccacaacccaaacaaccgaggtctccctagagcttcaaactagactacttctccataatattcatccctgtggcattgttcgttacatggtccatcatagaattctcactgtgatatataaactcagacccaaacattaatcagttcttcaaatatctactcatcttcctaattaccatactaatcttagttaccgctaacaacctattccaactgttcatcggctgagacttagaagaaaaccccacaaaccccattactaaacccacactcaacagaaacaaagcatacatcattattctcgcacggactacaaccacgaccaatgatatgaaaaan

SEQ ID NO: 94011 - DNA, 356 bp, Homo sapiens
attatagccagtcttcagttataaccactccaccctcctcactttctctctctctctctctttttttttttttttttttgccccggggaaaaaaggggaaaaaaatggaaaaccgggcccttttcgggggggtttttttcctaagaaaataaaaaaaccctttcccccccccggggtccaaaaaagccccccgggcccgggtttccccaaaaaccccattttccctttaaaggggggccctggccttccaaaacccttttcggccgggggggaaaacccaattttggtggtccccaaaaacccccattagtttaaaaccccccctcccaagggcccctggcccttctggggggggc

SEQ ID NO: 94012 - DNA, 357 bp, Homo sapiens
  misc_feature (1)...(357): n = a,t,c or g
cccacgcgtccgcccacgcgtccggtaaaaacctcatgggtatattgacagagattgtattgaatctgtatattgctttgggtaatatggtcttctaattcataagcatgagttgtctttttagttgctgtcatcttcaatttttttcatcaatgttttgtagtttttcttggagagctttttcactttcttggttaaatctattcctagggntttttttttttggttttttttttggaccctaaaaaaaagaaaatgcctttttggggtttttttcccccaggccatttttaaaaaggccaggggttttttatccccgaaactttaccggattgggttatttgatttaaaaagggt

SEQ ID NO: 94013 - DNA, 338 bp, Homo sapiens
cccaagcgtccgattaggagggcactggccccgatcaggcatcaccccgctaaatcccgtagaaggggcctcctaaacacgatccgattactcgcatcaggagtatcaatcaccggagctcaccataggctaatagaatgcaaccgacaccaaatcattcaagcactgcttattacaattttactgggtctctatacttaccctcctacaagcctcatagtacttccaggctcccttcaccatttccgacggcatctacggctgaacattttttggatctacaggcttccagggacttcacgtcattattggctcaactttcctcactatctgcttca

SEQ ID NO: 94014 - DNA, 342 bp, Homo sapiens
cccacgcgtccgcccacgcgtccgcccacgcgtccggggtaattcagcttctgaggccctttcactccttggagtctttgctgaggcgacttacaaaggtgaccactgccgtgaaatttttcttaaaaaaaaaaaaaaaaaaaaaaaagggaaacccaattaggaactaaagggacatttccagctaatttttgaaaaacctggaaacagcagtcagaaatttttggacttttttttcttatttcaaatccaaaaaattaatccaaaaatcggatcaccccctgaaaaatgtaaaaaaaattttacagaatgacaaacggtatttaaaactggactggggcc

SEQ ID NO: 94015 - DNA, 367 bp, Homo sapiens
cgaccgcagacgattctgtacgtaccacaaagacatcggagcgctatacctattattgggcgcatgagctggagtggtatgcacagctgtaagcctccttattcgagccgagctgggccagccaggcaacacttctaggtaacgaccacgtctacaacgttatcgtctcagcccatgcatttgtaataatgttcttcataggaatacccgatcataaacggaggctttggcaactgactagttcccctaataagcggtgcccccgatatggagtgttcaggcataaacaacataagcttctggctcttacctccctatgtcctactcctgctcgcatctgctatagtggaggccggatcaagaacag

SEQ ID NO: 94016 - DNA, 357 bp, Homo sapiens
caacatttgaacagatatatgggaattctgtacaatctatgtgtatatatgtgtatagtgaatgtatgtgcttagtggtatgagttactgtcaaggagaagggctacctagatgctaacacacacacacacacacacacacacacacacacacacacacacgtatgcgcttagtggtatgagttactgtctgggataagggctacctacatgctcacacacacacacacacacacacacacacacacacacacacactctctttgtgtggaggtaagttagagaacacatgttgcgcaagagaactctatgggggcacccatatatgggggtttgcgcgtgtaatccgcacatatag

SEQ ID NO: 94017 - DNA, 362 bp, Homo sapiens
  misc_feature (1)...(362): n = a,t,c or g
cggacgcgtgggcggacgcgtgggctgaaatctggctttatttgccactgaaattacccccaactatcagagatttgataataagtttcataacttcattatttttttcttttttgtttttctattttttttagctggtgtctcgctttgtggctaggctagagtgcagtggcgcatggcatgatcatagctcactgcagccttgacctcctaggctcaagtgatcctcccctgcctcagcctccctagtagctgggactacaggcatgtgccaccagaaccagataatttttttatttaaaaaagtttttgtaggtcgggtgcagtggctcacatctgtaatcccagcaacttgggaggcn

SEQ ID NO: 94018 - DNA, 361 bp, Homo sapiens
cccacgcgtccgcggacgcgtgggttagtgctttgcaagataatgttagctataccatctatggtttatgtctgtaggtaagtcctttttcctgtcttcactgatccaggctttttttttttttttttttttttaaaacaaattttggttttgtacccaaggttggagtcaaagggccttttttgggctaatggaaccttttgcttttagggttaaataattctctggcttaacccacccgaggacctggaattacaggaatgtcccacattgcccagtaaatttggaattttaagtaaaaacgggttttaaccttgttgataaggctggtccaaaactcttgacctaaaaggatttcccc

SEQ ID NO: 94019 - DNA, 379 bp, Homo sapiens
catgcctatcatatagtaaaacccagcccatgacccctaacaggggccctctcagccctcctaatgacctgcggcctagccatgtgataacgcttgcactcgataacgctgctcatactatgcctactaaccaacacactatgccatataccaatgatggcgcgatgtatcacgagaaagcacataccaaggccaccacacaccacctgtccaaaaaggcctttgatactggatagtcctatttattacctcagaaggggttttcttcgcaggaattttctgagccttttaccactcgagcctagcccctaccccccaattaggagggcactggcccacaacaggcatcaccccgctaaatgccctagaaggcccactc

SEQ ID NO: 94020 - DNA, 395 bp, Homo sapiens
aaaaaagtgaagaaatggaaaaatttaattttcatgattggaagacttaataacgttaatatgtcagtactacacaaagtgatttacaaattccgtgcaatttgtttgagaaattccatttccatagaaaaaaaaaaaatctaacatgggcatgaaagcacaaaaaagctctaatacccaaaacaatcttgaagaaaaatggcaaatctgggggcatcacactttctgattacaaaatgtagtacaaaactacaataaccacaacaatccggttttggtggaaatttatataaacaagtacaataaaataactactcatgagatatactttcacatatatggccaaatgtatttcttcaaaattgccaagacctttcaagggataaaataatgcg

SEQ ID NO: 94021 - DNA, 392 bp, Homo sapiens
acgcggacgcgtggtcggactcagtgggattaaacttaacttagaccgatctgaccaaaaaaaaaaaaaaaaaaaaaaaagggaaaaaaaggaaaaaaaaaaagggggttttttttttttatttttttttgggtttttaattttttttgtgggtctttttttttttttttttttttttgggtttttttttttttttttggttttttttttttttttttttttttttttttttttgggggattttttttttctttttcctcttaataatttataactttttctgtaaattttaattttttttttttttttttggttttcctaactttttttttttttttttttggttttttttttttctggatttttttttttatttttttttccctcgtgtt

SEQ ID NO: 94022 - DNA, 382 bp, Homo sapiens
gtgtttttacttctgcctgcgtttgctctctagccaataaaccgtccttgtgtgcgaaaaaaaaaaaaaggaaaaaaaaaaagggaaaaaaaaaaaaggggggggggtttttaaaaaaaaaaaaaggggggcccggtttttttgggtttttcggggggccccccttcccccttgggggggggaaaaaattcccttttttttgtgggggggggattttctcttctttggggggggtgtgagaaaccccccctttttttgggggggtttacttttttccccccccttttatgttttttggggctgctgggggaaaaaaacctttctttgggggggggggggagacttttcttttttgtttttggttttgaaactttcctcccct

SEQ ID NO: 94023 - DNA, 373 bp, Homo sapiens
  misc_feature (1)...(373): n = a,t,c or g
aaaatattttctcccattctgtagcttgtcttttcattcacttgacagtggcatttgcagagcagaaattagtttgaatgaagtatagcttatcaattctgttttggattgtgcctcgggtagtgtagtcaaaaagtcattgccaaacccaaggcgatctagattttcttctatgttattttcaaggagtgttataattctgcattttaaatttaagcctgtgattcattttgagttaatttttgtgaagggtatagatccagtgatttgtgtgtggatgtccatttgttccagaaccattctttgagaagacaatctttgcttcattttattgcctttgctgttttatcaaagattagttggctatatttan

SEQ ID NO: 94024 - DNA, 459 bp, Homo sapiens
cccacgcgtccgcccacgcgtccgtccacgcgtacgttggggttcaccatgttggccaagctgggatctaacgcgagaccttatgctatccatcttactctgcctcccatagtgctgggattacctgtgtgaagcactgtgcccgggcagtcattcatgattttaatggtgtccataggcctcttttaatttggtaagaattcctggttgaaatttcttttatttttgatttttttttggaaacaaaccctggttttataaccaagggtgaattgcaggggcacaatttgggttcactgcaagtttcccccccgggtttaaccctattttcctgcttaagcctccaaaaaagcgggttttacgggcccttgcaaaatacctggttaaattttttttggaatttttagcaaacgcggtttttaagggggttacccaggaggtgctcaatctcctcccccg

SEQ ID NO: 94025 - DNA, 382 bp, Homo sapiens
agttatcaaatgaatggctcgaaacacttctcaaaaggatatacgtattgaccccaacaataaatgtttgtggctagtgaaaaaaaaaaaaaaaaaaaaaaaaaaaaaaaaaaaaaaaaaaaaaaaaaaaaaaaaaaaaaaaaaaaaaaaaaaaaaaaaaaaaaaaaaaaaaaaaaaaaaaaaaaaaaaaaaaaaaagaaaaaattatttccatgttataactaaagaataaagccgtcaacaatggatccactataacaagcaccaatgtcatgtcaccaggacttcacataagactaattattatactgtccttaatgatctataaaaagtcaacaactgaatgagttgaaaaacaaacttgttattatattctaatgag

SEQ ID NO: 94026 - DNA, 359 bp, Homo sapiens
caactcctgggctcaagtgatccccctgccttggcctcccaaagtgctgggattacaggcgcgagccgctgtgcctggactatgagatattctggctatttttttccaccatatcttgagtgaatcatgtctttttttactagttttcattcattgttttaatgccaatctttttttgagatggagctcatgatctgtagaccaggctggacgtcatggggaaaccccgtctttactaataatactcaacttatgagctcgtgtgatcgtactccctaggtttctgatactcatgaggctatggcgcagataatagtttgatcctgcctggctaatgttgcgatgacctttgataatac

SEQ ID NO: 94027 - DNA, 421 bp, Homo sapiens
gatagaatcgccctaggtaccgtcgacgaccttccgggtcgacccacgcgtccgagcacatccaataatccttaaagtttcgttggcagatagggatgccatttgaaatctttggcagatacctatagttgcctcatagtacatacccttaggattttgagcaaagccatgccatgctctgtggatatctactcctcttttgaaaaaaaaaaaaaaacggttttttttgacagggggcaggggcccacccctgaaatccaagtattggggaaggctgagggggtcaaaccatttgagcccaggggttcaaaaccatcctggcgcattatggcaaaacccaaattttacaaaaggtttaaactttagcagggcatggggccatgggcttgaaccccaagattctttgggacctaaggttggg

SEQ ID NO: 94028 - DNA, 362 bp, Homo sapiens
ttttatttttttgaagggttaaacaggggttattggaccacccaatttgcccaggtttgggaaaaccaacccctgggccaaagggcctaaaacctggcaaaagcccaagggaaaagcttgggggggggggccgggcctggaaaggttgccttttggcccagggcctaaaattccggaaaagcccaggggtaacaaaattttttttttgggccaaaaagccctgaaagggggcttgaaatttaaccatgccttaacctttcccttttaacccaaaaaaaacccgggtttccttgcccaaaggccctgcgttacccttcatttcgggaatcattccttaacccaaaatttagggaggggctctt

SEQ ID NO: 94029 - DNA, 333 bp, Homo sapiens
cacaaactagaaaatctagagaatatagttaaattcttatagacacacaccttccaagattgaatcaggaaaaaattcaaaccttgaacagatcaataacgagttctaaaattaaatcactagtaaaaaacacaccaaccaggaaagaaaaatgaaaaaaccccttgtgccaaagggtttcacaattgaattttcccaattgtgcaaaaaactcagggtgccagtctttatgaaacctttccaaaaatacggggaaaggggtctcttcctaaacggattttacgaacccggtttaaccttgatcccaaagtttggcaaaaacccaggggggaa

SEQ ID NO: 94030 - DNA, 318 bp, Homo sapiens
ttttttttttgccagtttttttatatggcaaatctcagctggggacttttcagtcaaagaaaagtatcttttaatgaataaaagttcacgattttaatattttcttttatacaatgtatattttggaccacctttaaataaccctttctctactccaaagatcatcaagtattatcctatttggccttctaaaggtttttaaattttgcctttcacatttaagtccttgatccatttggaatttatttttgggtgggcacaataaaaacggccttccttttttttcctatggggacagccaattattgattccccaaa

SEQ ID NO: 94031 - DNA, 391 bp, Homo sapiens
ggtttgagaaagaattctacgccatgaccaagtagggattattccagggatgaaggttgggtccgtatttgagaatcagtcgatgagatccacacgttaccagctaccgaagataactcacacgatcacatctgtcagtgttgggaaggcccgtgacaagtttaacatctattcatgatttaaacttggaaaaacagagaaggagaggaacttcctccactggataaagagcatctgtacaagccctgcagccagcattctcctcgagggcaaggaatcacccttcaccattcagatccggaacaagaaaggacgtctgctctaaccatcggatccggcatggtgctggaagcgctgggcactgcagaacgcaggacaaggaaagaaaagg

SEQ ID NO: 94032 - DNA, 363 bp, Homo sapiens
ggcacgaggcaaggttcaagatcctgaagttttcttgcagtgtggatgggagggacagtctttctctgatgttctcagaagatccaatcttcgggttctacattgtgaaggggttgactattctcagtgaaacatgaaaagctttctttacctgatgaaaatgcaggacagtataataatcgactgttataacatcagccctcttgcatgggagagcttttatacaaccagaaaatatgcactaaaagtgacaattgagagctgggcacggtagctcatgcctgtaatctcagcactttgggaggccaagttggacggatcacctgaggtcaggagttcgagacaagcctgaccaacatggtg

SEQ ID NO: 94033 - DNA, 900 bp, Homo sapiens
gattcttctgctgggattacagcatatgccaccatgcccagattatttttttgtatttgtagtagagacggggtttcaccatgttggccaggctggtcttgaactcctgacctcaggtgatccacccgcctcagcctcccacactggtggggattacaggcatgagccaccgctcctggcctctctttcttttttaaacaaagaactttgcacttggccagagaggaggagaaagcccattttctcccttcctaagctagatccaaataaaagaaagttcagttttcccccataactattcttgggtcatgaactttgatctggagtttgttttgtttcaggaatgtgtgcacccagcttgctgatccaacaaagtctattgcttaccagtctagcttgatgaagccttttggccagaagtcaatttgttttggatcagagaaatttcctgacaaggtatatttgttttctagtgacagaaaggcaaaggaacaagtcctagttgttgttgttgttgttgaatactaaatttaagatatgtcagcttgctttcaatgagccttgggcttctgttattgcttgagcatttggaactcgagcttccagagaaatttgaggtcctcgcttgttctctgccttcaagaaacaatgacctgattctgtctttaaaaaaaaaatctcagaattctttttttgtttgtgttttttttttttttaaaacaaagtctaattttgttccccaggctgaaggccaggggccccttttcggttaattgaagcttccgcttccgggtttcaggaatatttcttgcctaaacctcccgggtagttgccataacaggggctgtcccaccacccccggtaaattttggatttttaaaaaaaaacagggtttcccca

SEQ ID NO: 94034 - DNA, 346 bp, Homo sapiens
agcaaatcggaaaggtgaaaaaactcaataagtaggtgcctcatgagccaagcaaaaataaattgttgtttggaagcatcttctcttattctgtgcaacaacaatgaaccatttctcagtcggattgtgacgtgggacgaaaattggattttatatgacaaccactgacaaccagctcagctgttggactgagaagctccaaagccaaacttgcaccaaaaaaaaaaaaaaaaaaaaaagggtttggcccctttttggggggctttttcccggggaaacccattttatttttttaatccccagcaaaaacttcatttttaaaaattttcctcacaaaaacgaggaa

SEQ ID NO: 94035 - DNA, 246 bp, Homo sapiens
gtttaaatgtgggaagaccagagccctcatgcattgctggtgggaaggtaaaatgctgaggcagctgcaggaaagtctggcagctcctggcgatgctcaacatggagttaccacgtgagccagcagcgccactcctcagtatatccccgagagaaaggaagacacgactgcgaaaacgtgtgcatgaatgtgcatagcaacagtctgcataactgtcaaaaagtggaaacaccgtctactcggccg

SEQ ID NO: 94036 - DNA, 393 bp, Homo sapiens
ggcacgagcgttactttgggaattatcttcaacctgagtgattctacatagacaaggtctctctctggcacccaggctgaagtgcagtggtacgattacaactctctataaccttgaactcctgggctcaagcaatcctcctgcctcagcttcctgaagagctactgccatggctagctgtttgttgttgttgttgtttttaaatggatggagtttcactatgttgcccgggctgatcctgaactcctggcctcaagcaatcctcccgccgtggacgcccaaattgctgggattagagggtttcactcattggccaggctggagtgcaatggcacgatctcagctcactgcaacctctgcctcctgggttcaagcaattctcccacctcagcc

SEQ ID NO: 94037 - DNA, 540 bp, Homo sapiens
  misc_feature (1)...(540): n = a,t,c or g
tgactgctcagaggtatgccacgttgaagacccaaggagcacaatcgcaggtncgaatcccgttcgagcacgcgtccggctttcttcaatccagccaccagaagccgcattgtttacttcatcctctctcgggtcaagtatcaagtgatggacaatgttaggaagtttgggatcagcagacttggaaactctgggatctacaaggcagctttcccactccatgattgcaaattccgccgtcagtcagaggatcccagctgccctaatgaacggtaccttctgtacagagaatgggctcatcctcgaagcatatactaaaagcagcccttggatcttatcatgaaatactatggagagaagattggaatctactttgcttggctgggctattacactcagatgcttctcctggccgcagttgtaggagtggcttgctttctctatggatatcttaatcaagataactgtacatggagcatagaagtttgtcatcctgatattggtggcatgatcataatgagtgctcagcgagataggctt

SEQ ID NO: 94038 - DNA, 523 bp, Homo sapiens
ttttttttttttgaggcagagtcttgttctgttgcctgggctggagtgcagtggcgtgatcttggctcactgcaacccccgccccccgggttcaagtgattctcctgcctcagcctcccgagtagctggaattacaggcatgcgccagcacgcccggctaatttttttttgtatttttagtagagacagggtgtcaccatgttaaccaggatggtcttgatctcctgacctcgtgatctgccctcctcggcctcccaaagtgctgggattacaggtgtgagccaccacgcctgggccaaaatttctttgtgattgaattataatggcaaagtgagtaaatgagtttgcgtgtgtgttttaacttatttgactaaaaggctgtcaaacctgtatcacaatttaaaatttttttcctgggaatcatgagatttctaaaacacaaatgattttagaaaattgaattagaagaaatgatcttacttagatgggcttcataagtaccttaaaagttatacaaattaca

SEQ ID NO: 94039 - DNA, 466 bp, Homo sapiens
taaacagaagattttcagtgtagatgaaacagccttctattggaagaagatgccatctaagacttttcatagctagagagaaggcactgcttcaaagcttcacacagctggctgaatcttgttagggcccaatgcagctggtgacttgaagttgaaaccagtgttcggtgatgattctggaaatcttagggcccttaagaattatgctgaatctcctctgcctgtgctctataaatggaacaacaaagcctggatgacagcacatctgtttacagcatggtttactgaatattttaagccctctttgaggtctgttcagaaaaatttcttggaaaatatgattgttcatggacaacggacctcatcacccaagagctctaatggagatgtgcaaggagatgctgttttcatgcctgcgaacacaacatccattctgcagcccatggataaaggagtcattttgatt

SEQ ID NO: 94040 - DNA, 671 bp, Homo sapiens
  misc_feature (1)...(671): n = a,t,c or g
tttgctgagagttttcagatgactgagggttggattttgtaaagtacttctgcattaattaatatcgtcatatgatttctcttctttagcctgttcgtgtagcaagtggcattggttggtgtttgaatgttaacccagcctaacacaactagaataaatcccaattgttcatggcgtataaatctttttatactctgctggattgcatttgctaatatattgctgagaatttctgcatctgtgaagaatattgacttgtaatgattgtttgtttttttttgtttgttttttcttgggggatggaattgtgtttgtccgattctggtatcaagagccttatgnnnnnnnnnnnnnnnnnnnnnnnnnnnngggggggcccttttaaaagaacccctggggggcccaaatttaaccggggatggcaaggtaaaactttttcccttaaggggggccttttaaaaacccacttgggaatttttggaaagaaccttttttttggggggggaaaaaattgggaaaacttccctacaaaatttaaaccttttaggggaaaaaaaaatttttaaagggaaaagggggaaaaaaaaccttaaaaaccttggttttaaaaaatttttcttccgggataaattttaaaaaaattttttccccggggagggctntgttttttt

SEQ ID NO: 94041 - DNA, 406 bp, Homo sapiens
  misc_feature (1)...(406): n = a,t,c or g
tgcttatgagaagttgtgtgtgtgtgtttgtgtgtgtgtgtgtgtaccatttcttttcagataagtggatattcaatatgatagaattgaaatgctaaagaactataaggaaggcctttttcagtctcactcaaaccttttttcagtgtggttaccggttcttgcacccaccctggttgcttaccatattgcagctttgttacttgaatagtatttcagtttttaacacatttgtttttgtgttggttctgtttcctagtatggctgtttttttgttttgttttgagatggtgagatggggtattactctgtcatccaggctggagtgcagaggcatagtcatggctcactgcagccttgaactcctgggcccaagtgattctcccatctcaaacttatgagtggn

SEQ ID NO: 94042 - DNA, 396 bp, Homo sapiens
ttggttcctgtggtttagggaaagaagccatctccatgagtgcagaatgaagcagcaagtgctgatgtagaagctgctgcaagttacccagaagatctagctaagatcattgatgcaggtgactaaacagattgtcagtgtagaggaaacagccttccattggaagaaggtgccgtctaggactttcataactagagagaagacaacatctgctttgaaaggacatgctaactctcattagtggataatgcagctggtcacttttaagtggaagctagtgctcatttatcattctgataatcctaggacccttagaatttgctgaatctactctgcctgtgctttataaatggaacaacaaagcctggatgacagcatgtctgtttacatcatagt

SEQ ID NO: 94043 - DNA, 424 bp, Homo sapiens
ggaagaatgaataagagatacaaggtctcaccttcatctactgtgaagtgatgagaacaggacttgatagtggtgtattaacttatttatgtgctgctggatacagtttgctaatattttgttgagaatttttgcaaatatgttcattgggaatattggcctgaaattttcttttccactgtgtctctgccagaatgtttgtatcaggctgatgctggcttcatagaatgagttaggcaggagcccttcctccttgattttttggcatagtttcagcaggattggtaccagttattctttctgcatcttgtagaattcagctatgaatccatctggtctagggcttttgtgttggttggtaagttttttattactaattcaacttcagcgcttgatattggtctaggaggggttctgtctcttc

SEQ ID NO: 94044 - DNA, 418 bp, Homo sapiens
cccacgcgtccggtctcaaactcccgggcacaagagatccacctgcctcggcctcccaaaatgctgggactataggcatgagccactgcacccagccactgcttcattcctggtggctgctgtgcctggcatgttgcagatcctccatgaatatgcatttgaatgaatgaatgaatgaatgaatgaatggagatgacgcctcagagattctttcttttgagatgaggtctcattctgtcacccagactggagggcagtggtgcagtcacagctcaccacagcctcaacctcctgggcctcccaagtagctgcgatcgcgggtgtgcaccaacatagacccctatctctacaaaaaatttgaaatatgaaaaattagccaggtgtagtggtgtgcgcctgtggtaccagctactcaaag

SEQ ID NO: 94045 - DNA, 441 bp, Homo sapiens
cggacgcgtggggactagttctagatcgcgagcggcctttttttattttttttttttttttttttttgggaaacgggggctacttccggggcccaggtgggaggccagggggggaaggcccccccatggaaacctcggtttccccagttaaaaaaattctccgggggcccggccagggggggggcaaagcccggaaaccccaccctttgggaggcccaagggggccgaatcacaaaaccgggggttaaaaacgggcttacccaactggggaaaacccggttttaacggaaaaaccaaaatttaccgggcccgggggaaacggaccggaaaccccagttattgggaaggctggggcgggaaaacccctgaacccgggaattgggaggttccaggaacccaaaatgggcccattgtccctaaaccgggggaaaaaagggaaaa

SEQ ID NO: 94046 - DNA, 430 bp, Homo sapiens
cccacgcgtccgaatcacttgggcctgggagacagaggttgcagggagcccagatcaagccactgcactccagcctgggcaacagagcgagactgggtttcaaaaaagaaaacaaaaggaaaaaattttaaaaaggtagaacaaaatagatgagttaggtagaacaaggtgggagtgggggaaagggaatatttacattagcaatctctaacagtccccttccttttttttaatttaaaaaagttacacctgtctttttctcaataaattttgtaagaaaaaagaaattttaagagatggggtcttactatgttgcctaggctggtcaagaactcctgggctcacgtgatcgtgaccctcccatctcaaccacccaaagtgaggggattacaggcagaagccaccatgcccagcccctcttccttgagtg

SEQ ID NO: 94047 - DNA, 471 bp, Homo sapiens
  misc_feature (1)...(471): n = a,t,c or g
agtggttatgcttggaaactatcgnananncngggnnganccacgcgtncggcttcttttctctggggaaaaagatatggatgattggtttgactgcccatgaaagtacaggtgaggctactgtgatttcagtcctaaaaatgacgatttttgggttttctttttttttttttttttttggggggggggcccttttttttttcccccgtttttgttttttggtggccttggaatataataaaaaatggggctttttaaaaggggacttttttcttaaaaatttttgtttggggggggttttcaaagttttttttttttaaaaaaaattttttggcctttcccggggggggggaaaatttattttccccacccattcccccgggggattttttaggggtaaaggggatttttttaattggggaattcttttttaatttgaataggacccagtttttgggttcgcccccccct

SEQ ID NO: 94048 - DNA, 393 bp, Homo sapiens
tgatagaccaatagaacagtggaacaaaagagagaggccaagaataaacctttacatagatggtcaaatgattttctcaaagggcacgacagcatttgaatgaagtaaaatctctgtaataagtatgtctggaatgcatggatatgcatatagaagaaaaaacccatacctcacatcatccagaaaaatcaacttgagataaattatagacataaaagtaaagctaaagcaataaagctaccagagcaaaacataagatgttctctttaagttcttggtgtaggcagagacttcttagaaaacatgaactatacaagaaaaaaaaattggtaagttggacttcattaaaatttctcagctgggcatggtggctgacacctccaatcccatcac

SEQ ID NO: 94049 - DNA, 412 bp, Homo sapiens
  misc_feature (1)...(412): n = a,t,c or g
tgtcactagggatggtttagaaaataaacttacactgcacatgcctcagtccacttcaaaactactggcaaatgcctgtagtcccagctactcagaaggctaagatgggaggattgcttgagcccaagaggtcgaggctgcaatgtgctatgatggcaccactgcactccagtctgggtgacaaagtgagaccccatctctaaaaataaaaataaataaataaaagacgcgagttccttgtgaatatcaaaagtctaatctgctgttataaatatgaggaacaaagcaaagggaagaaataggaaaaaagaaagacttctctattttctcatctccctaacattccttctatctctaaaattccagacttttctacattttcctcttccatggnacccgccccccaacctcc

SEQ ID NO: 94050 - DNA, 436 bp, Homo sapiens
  misc_feature (1)...(436): n = a,t,c or g
cccacgcgtccggtggcacccctgtgcctgaagtcttagctacctgcgtgactgaggcagggaaaagactacttaagccaaggaggttgaggctagtctgagcaccttggcaagacccatctcaatacaacaacaacaacaacaacaacaaaacgaaaagaaaaataaaaattagcccagaatagccaaagctatttctaagctgaaagggagaaataactttacctgacttcagttatgctacagagctatgataaccaaaacagcatggtactagcataaaaatagacacatagaccagtggaacaggagagagaacccagaaacaaatccacacacctacagtgaacttatttttgacaaaggtcccaagagcataaagtctcttcaataaatagtgctgggaatactggatattcatatgcanaagaaaaac

SEQ ID NO: 94051 - DNA, 157 bp, Homo sapiens
ttttgctttgtcacctagtctggagtacagtggtgcaatcatgactcactgcaacctttttctcctgggttcaaatgattctcctgagtagctgggactgtaagcatgcaccaccacatctggctagtttttgtatttttaggtcgacgcggccgtt

SEQ ID NO: 94052 - DNA, 364 bp, Homo sapiens
  misc_feature (1)...(364): n = a,t,c or g
ctctgtcgccgaggctggagtgcagtggcgcgatctcggctcactgcaagctccgcctcccaggagaatcgcttgagctcgggaggcgggggttgcggtgagccatcatgccactgcactctagcctggcaacagagtgagacctcatctcaagaaaaaaaaaaggaaaaataaatgagatgaggacattacagggaaataaaatatatttatggatatataaagcagtggcttgtccctgtagtcccaactactggaggctgaggcaggaggattgcctgagcctgggaggttgaggctgcagtgagctatgatggcaacactgcactccagcctgggccacagagggagacaccttctcttn

SEQ ID NO: 94053 - DNA, 396 bp, Homo sapiens
tgctcaaggagatagcagagaaggtgaaaaaaataataaaatttaaaaaacaactcaggttatgaatgaaaaaaattataaatagatatcttaaagaaaatccaatcaacttctggaaatcaaaggcacacttagagaattacaaaacgcagtggaaagtttcaacaatagactataacaaatagaagaaggaatttcaaagcttgaagacaaggctttttaatggactgaatcaggaaaaataagaaaaataaataaataaacaaaataaactgattatataaaagagccaaaccttagaataattgatgttcctgggggagaagagaaagcaaaaagtttgaaaaacttatttgaggtaataattgaggaaaacttccctggccttgctagaga

SEQ ID NO: 94054 - DNA, 399 bp, Homo sapiens
  misc_feature (1)...(399): n = a,t,c or g
agatagtacacacctgtagtcctaactgctcaggaggctgaggtgggaggatcacttaagcccaggtgttcgaggcggcagtgagctgtgatcacatgaccgcattccatcctgggtgacagagcgagaccctgtctcanaaaaaaaaaaaaaaggataaaaggataaaaaccacctttaacccccagggactggaaaaaggttatgggcataaagggggcacttgaaaagggaacctggttggggaaaaatcctgctaattttaaatgggaatatgtggtattgaaagttagggaaaaaaacaagtggagtttttaagggttggccaaacacccacccggggcccaggatgaggaaaaaaaaaaaaaaggggggcccgtttaaaagaacccctggggg

SEQ ID NO: 94055 - DNA, 413 bp, Homo sapiens
  misc_feature (1)...(413): n = a,t,c or g
tgtttatttgccatctgtatatattctttggcgaagtatctgttaaagccctttgaccattttaaacagagatttacttgtttgttttctcatttttgagttttaagagctcttcatatattttggataacagccctttatcagatgtgtcttttgcaactattttctcccagcctgtggcttgtcttctcttaacattttctttttctttttccttcatattcaggggaccagcatctgtggaacccaccctgcggggattgaagatatttgttgtttaaaatggatggatacatctctactagatatgtgcagtccttttatttgtcattattctctagacggtacaggataacaactattgacatagcgtttatattgtatgtattaggtattggaagtaatttacanan

SEQ ID NO: 94056 - DNA, 436 bp, Homo sapiens
tagaggggaactccctcaacttgataaatacttaaaaaaaactacagccatcatacttaatggtgaagaactcagcttgcccactaagatcaagaacaaggcaaggatgttccctctcaccactgctttaaaaaaaatttttcccacccaaatctcatattgaatcattactgttttttaacatcatactggaagtcctatatagtgcagtaagacaagaaaatgaaataaaaattgtagagattgggaaggaagaaatgaaaatgtatttgttcacagatggcaatcatttatgtaaaaactctgaaagaataagaaactaagcaaagttgcaggatacaaggttaatgtataaacatgaatcacttttctgtataccagccgtgaacaagtagaatttgaaattaaaaagacattaagtatgaacaggtttttt

SEQ ID NO: 94057 - DNA, 421 bp, Homo sapiens
  misc_feature (1)...(421): n = a,t,c or g
ctctcctagtcaaagaaaggggtgacggacgcacctggaaaatcgggtcactcccaaccgaatattagcgcttttcagaccggcttaaaagaccacgaaccacgagattatatcccacacctgcctcggagggtcctacacccacggaatctggctgactgctagcacagcggtctgagatcaaactgcaaggcagcagcgaggctgagggaggggcgccagccattgcccaggcttgcttaggtaaacaaagcaggcaggaagcttgaactgcctggagcccacaacggctcatggaggcctgcctagcctatgtaggcttcacctctggcggcagggcacagactaacaaaaagacagcagtaacctctgcagacttaagcgtccctgtctgacagcttagaagagagcagtggttctn

SEQ ID NO: 94058 - DNA, 416 bp, Homo sapiens
cccagcccatgacctctaacaggggccctgtcagcccttctaaagacctgcggcctagccatgtgatttcacttccactccataacgctcggcatactatgcctactaaccaacacactaaccatataccaatgatggcgcgatgtaacacgagaaagcacataccaaggccaccacacaccaggctgtccaaaaaggcgcttcgatacgggataatactatttattacctcagaaggctctttcttcgcaggacttgtctgagccttttacgactccagactaccccctacactccaattaagagggcactggccctcaacaggcatcaccccgctcaatctacctacaagtagcagtcctaggcgaacccgtattactcgcatcatgagtatcaatcacctgagctgaccatag

SEQ ID NO: 94059 - DNA, 400 bp, Homo sapiens
agaatcgtttgaacccggtaggcggaggttgcagtgagccgagatcatgccactgcactccagcctgggcgacaagagtgaaactccgtctcaaaaaaaaaaaaaaaatgggggggcagtattaaatcttcccaaaaaaaaaattgccttgaccagggttttgcgtaaaaaacaaagggaagggggggtctttaaacccttgttttttaaatttttttttttccaaaaatggggggagggctatctataattttatgttggaggcggaagaggcacccccagaaactaaagggggagattcctttgttttttagggcctaaaattttttttttggccgggcccgggggttcacacctgtattcccaccatttggggaggccgaggcaggttgattacttg

SEQ ID NO: 94060 - DNA, 424 bp, Homo sapiens
attttgaatcatccataaccatactataatgattaaaattacaaaaactgatacaacttaaactctcatgcattgttggtggaaatggaaaatggtgcatctactctggaaaacagttttgaacttgcttataaagataaatccacacttaatcatacataaccatgcaacccagcaattccactcctaggtgtttccctaagagaaatgataacatatgtccacaaaaagccttgtccatgaatgtttatagtggcattgttcatggtcaccaaaaactcaaaacatctcaaatgttcattaacttgcaaatggataaacaaattgtgttctctatatacaatgaaatattatttagcaacaaaaaggaaggaactactgaaccacaacagaagttgtaggaactacagctcagatatgagta

SEQ ID NO: 94061 - DNA, 430 bp, Homo sapiens
  misc_feature (1)...(430): n = a,t,c or g
cccacgcgtccgggatcatttgagcctgggaggcagagattgcagtaaactgagattgcaccactgcactccagcctgggcgacagagtgagaccctgtctcaaaaaaaaaaaaaaaatgggaaccctggaataaaacatttggctagtggtggccatattgtctcccatgataccaattggtcctcccaataacagtaaatgaaagtccttgtttcccaacagcaaggcaattaaaaaaggttactcatttttaaaaaatttagcgggggtattttattgttttttgaaggaaataaaaaacctttccctgggtaaattgggctgtttttatataaactcatgggaggctctggagggctgaaaggggccagggggtaatagggtttgttttcttcctgctctacaaaggggagcctgaggcccaaagn

SEQ ID NO: 94062 - DNA, 423 bp, Homo sapiens
  misc_feature (1)...(423): n = a,t,c or g
aagaatttgaagagatatttctccaaagaaaatgtgcaaatggccaaataaacacatgaaataaacacatgaaaaggtgttgaaatcattattcattagggaaatgcaaataaaaatcacagtgaggccaggtgtagtggctcattgcctataatcccagcactttgagagactgagtcaggaagatcacttgagcccagaagttagagaccagcctgggcaacatagggagataggcgtggtggtttgtgcctgtagttccagctagtcgagaagctgaggtgggaggatctgcttgagcctgtgccgtcgaggctgcagtgagcagtgatggtgccactgcactccagcctgggcggcagagcaagaccctgtctctaaaataataaatgataataataataataatagagataccaattn

SEQ ID NO: 94063 - DNA, 413 bp, Homo sapiens
  misc_feature (1)...(413): n = a,t,c or g
gatgaaccatttggtgttggttaaagacttttactgacacatttttaataatctttttaacttttattttcaggagaatggcatgaacccgggaggcggagcttgcagtgagccaagatcatgccactgcactccagcctgggcaacagagcggagactccatctcanannaaaaaaaaaaaaaaaaattttacccgggttggggggccccccttgggggccccttttatttagggggtgggggcagaaaatttgttggcccccagaatttgggggttgcagggacttataatatgcccatggccttttacctgggggaaaaaaacaaaaccttgtttttaaaaaaaaaaatttgttttttcccccgggcccattggcttgggtctgggggaaaaattttaaaaaatggtttt

SEQ ID NO: 94064 - DNA, 413 bp, Homo sapiens
cacctgtccagaaaggccttcgatacgggatatatcctatgtattacctcagaagttcattttcttcgcaggatttttctgagccttttaccactccagcctagcccctaccccccaactaggagggcactggcccccaacaagcatcaccccgctagatcccctagaaggcccactcctaatcacatccgtattactcgcatcaggagtatcaatcacctgagctcaccatagtctaatagaaaacagaccgagaccaaataattcaagcactgcttattacaattttactgggtctctatttgaccctcctacaagcctgagagtacttcgagtctcccttcaccatttccgacggcatgtacggctcatcattttttgtagccacaggcttccacggacttcacgtcatt

SEQ ID NO: 94065 - DNA, 440 bp, Homo sapiens
atcactctaactgaccgggagctatcttactactgagccaacaggttactatgactagcttacacaataacttttatagtatagatacctctttacggactccacttatgactccgctaaagcccatgtcgaagcccccatcgctggatcaatagtacttgccgcagtactcttaaaactaggcggctttggtgtaatacgcctcacactcattctcaacccgctgacaaaacacatagcctaccccttgcttgtactatccctatgaggcataattataacaagctccatctgcctacgacacaaagacctaaaatcgctcattgcatactcttcaatcagccacatagccctcgtagtaacagccattctcatccaaaccccctgaagcttcaccggcgcagtcattctcataatcgcccacggacttacatcctcat

SEQ ID NO: 94066 - DNA, 397 bp, Homo sapiens
actattcgtctacaaccacatagacgttggagcactatacctattattcggcgcatgaactggagtcctaggcacaggtctaagcctacttattcgagccgagctgggccatccaggcaaccttctaggtaacgaccacatctacaacgttatcgtcacagcccatgcatttgtaataatcctcttcatagaaatacccattataatcggaggctttggcacactgactagttcccctaataatcggggccaccgatatggcgtggccacgcataaacaacataagcttatgactgttacctccctatctactactactgctcgcatctgctatagcggaggacggagcaggaacaggtggaacagactaccctcccttaacagggaactactccca

SEQ ID NO: 94067 - DNA, 443 bp, Homo sapiens
  misc_feature (1)...(443): n = a,t,c or g
atagcacataaagccatttaccgtacatagcacattacagtcaaatcccttctcgtccccatggatgaccccttaaaaaaaaaaaaaaaaaaaaaaaaaaaaaaaaaaaaaaaaaaaaaaaaaatgggggggggcttttaaaaaaaaccttggggggggcaaaatttaacggggggggaaaaaaaaaaatttttttttttaagggggggaaaaaaaaaaacccgggggaatttttaaaaaaaaaatttttttttggggggggaaaatttgggaaaaaccccccaaaaaaaaaaaaagggttaaaaaaaaaaaaaaatttttaaggggaaaggggggaaaaaaaccccttatttccgggggggaaaaaaatttttttctcggggtttttttaaaaaaaaatttcccccgggggggggtaaatnnnnnnnnnnnnnncccncnnc

SEQ ID NO: 94068 - DNA, 440 bp, Homo sapiens
  misc_feature (1)...(440): n = a,t,c or g
cccacgcgttcgcccacgcgtccgctagttctagatcgcgagcggccgcccttttttttttttttttttaaaaaagggcccccctctgtccccccggcggggggggggggagccaacctgggttaagggaacccccccccccttgagttaaaaaattttttgggcctaagcccccaaaaattggggaataacggccctggcccccccccccgggccaaccagaatgttctttttttttaaaaaaaaacgggctcccccatggtgggcaggggcgataaaatctccccgcctcgccccaccccctttttttttttttctgaaaccatcaggggctctaacaaaaaaacccccgtagaaggcggtgccccggccnncctcgtttcaccgcgctcgcaaaattgggcaaaaaaaaaaaaaaacggggccctaaaaaaaaacct

SEQ ID NO: 94069 - DNA, 421 bp, Homo sapiens
  misc_feature (1)...(421): n = a,t,c or g
cccacgcgtccgtagttctagatcgcgagcggcctccatgactttttcaaaaaaaaaaaaaaaaaaaaaaaaaaaaaanggggggggccctttaaaaaaacccctgggggggccaaattttaccggggccggaaaaaaaaaattttttccctttagggggggctttataaaaccccccggggaatttttggaaaaaaaccttttttttggggggggacaatttgggcccacccccccaaaaaatttaaaggccttagggaaaaaaaaaaattttaagggggaaagggggaaaaaaaaacctaatattttttttttttaaaatttttcttttcggggttttttttaaaaaaattttttccccggggcccggattttnncnnnnngngcnnnngatacgcaagactcctttcagagataaaaa

SEQ ID NO: 94070 - DNA, 389 bp, Homo sapiens
  misc_feature (1)...(389): n = a,t,c or g
tccctctggcatgcatgctcagaatcatatttgctgagtcttatattatttgcatgctgagttttaaaagaaactgccaccagagtggttgtaccagagactgtcaatccagtttctctgcatccttgccagcatttggggctgtcaatattttttattttagctattcaagtgnnnnnnnnnnnnnnnnnnnnnnnnnnnnnnnnnnnnnnaatagttaatgatgttgaacactttttgatctatttatttactgacnnnnnnnnnnnnnnnnnnnnnnnnnnnnnnnnnnnnnnnnnnnnnnnnnnnnnnnnnnnnnnnnnggagctttttttactgttgagttttgagaatttattctatattttattctaggaaatagtcctttg

SEQ ID NO: 94071 - DNA, 378 bp, Homo sapiens
  misc_feature (1)...(378): n = a,t,c or g
cccacgcgtccgggaaagacagacacacagatcaacggaatagaataaagaacccagaaacagacacataaatatactcaactttttgacaaaagtgccactcatttaatggaggaaggatagtcttgtcaataaatggtgctaaagtaattgggcattcaccaatgaaaaaaataaaacttgatttaagtnnnnnnnnnnnnnnnnnnnnnnnnnnnnnnnnnnnnnnnnnnnnngtgtaaaatgtaaaacttttgggaaataatgtaggaggaaatcttcagtatcgagggctaagagttcatacagtagatgtcaaagcacaacacatannannnnnnnnnnnnnnnnnnnnnnnnnnnnngggggggccctttg

SEQ ID NO: 94072 - DNA, 419 bp, Homo sapiens
cttttatttagtgaagtatgccctgccacttacatggaagctaccagctctcccctcagggagaggcctgccggaaaacagatcactgatacagaaacacacacgcccacctcagcccagactaaccaatggagggctttgttcctacctatgagtgaatgtcagagctcgctaaacaggaggaaaggccacagaagcatggaggaaaaggaccgggtaggcctggtggctcactttgggaggctgaggcaggtggagctcttgagcccaggagttcaagaccagcctggccaacagggtgaaaccttgtctctactaaaaatacaaaaaaaaaaaaaaaaaaatttaggcaagtttgggggcccatgtttggggccccacctactcggggggttgaggggggaaaatcatctgacccc

SEQ ID NO: 94073 - DNA, 401 bp, Homo sapiens
ttttgtgcaaatgcagtcaggtctatgatcaagactgtccttattgataaagctactaaaccccagcctggaagggaaattataaataccatctgccggtttttaattgcaaaacagggaggaccgaatagtgggaaccctctgaattggttttatcagtgctttgtccctgaaattaggaagtaccttgccagggtaggactgccttttaacgtttttttgatattggataatgcccctggccacccagaaccccatgaattcaatactgaaggcttcagagtggtcttcttgaccccagacatgcctctaattcaacctctagagcagggggtcctaaggacccttacggcttagtatgcacagtatgctatgtaaagcatttaatgctgtagaataga

SEQ ID NO: 94074 - DNA, 407 bp, Homo sapiens
caccaaaggatcaggactagtcttgtatcttactaggttggaaaaagctggcagaggagcccccaggcagctagagctcaggcaagcagcagcagtcccagactggccgactgagggaatggggggtggttcagcctcagctccctgggaccttatgcaaggtagttcatcttctggggctcagtgtcctcatctgcagagggtggggggtggtcagtggtttcatccctgcccagggttactgtgaggccagatgagacggtggatgtgacaattcaccttctaaaggagtaatgcaggccgggagcggtggctcacgcctgtaatcccagcactttgggaggccgaggcgggcggatcacttgaggtcaggggttcaagaccaacctagccaacatggtgaagcc

SEQ ID NO: 94075 - DNA, 430 bp, Homo sapiens
agatcatctagaagaaaaagattaaagaattagttaagctttttttttttttttttttggaaaaaaatttcctttttggtgccccggggggaattcagggggttgattttgggttacccaaacctttggttttttctggcttaaccccccggggggcttggaattatggcccccgcccccctgcccgggaaattttggtgggaattttaaaaaaaaggggggttttcctttgtggcccgggggggttcaaacccccggccctaggggaataaccccccctggccccccaaggggggggaaataacggggggggcccccctcccgggccctggttttttaggaaaaccaaaagggggtggcccaggaattggttttcaaaaggccatcctttttatttaatatttttgggggaaaacttaataaggggggg

SEQ ID NO: 94076 - DNA, 427 bp, Homo sapiens
cccacgcgtccggtcatattgcataacttcttttatacattgctaaattctatttgctaacatattgttaaagaattttgtatctgtgttattgaggtatattggtttatagtttgttttttttttttttttttttggcccggccttgggtttaaaaaccaaaaaaacccttcctttaaaaaaggaatggaaagggttcccccctcttcggtttttaaaaaaacagggggaaaaatggggcctagtccttttttccccctttggaaaaattcccccagaaaaatttcggccccgggaaaacccccttttgggagtttaaaaaaaacaaatttgcccggccctgggggcccccccctaaaaccccacccttttggaagcccgggggcgggggatccctatttaggggttttaacaccccccggttact

SEQ ID NO: 94077 - DNA, 419 bp, Homo sapiens
cccacgcgtccgcccacgcgtccgcccacgcgtccggcacctccttgctggatatgccaagaacacaaggtcctgaccgtttttttgagatagagttccactcttgtaacccaggccgagattgcgccattgcaatccagcctgggcgacagagcaagactccatctcaaaaaaaaaaaaaaaaaaaaaaaaagggttttaaaggggttttttctttacccatccccggggggtttcccccatggcccaaattaaaatttttttttttttgggggttttgggccctcaaaaaaaattcccacccgaggcttttaacttggatcctttgggttcctgggggggaaacttttgcccaaaaaaatttttgggttaaaatataaccccccttttttttcccgggggggggggggggggggggg

SEQ ID NO: 94078 - DNA, 630 bp, Homo sapiens
  misc_feature (1)...(630): n = a,t,c or g
aaacaagcttttttacttcttccttccctttctgatagaacatttacatttttggttataattttattttagattttattttaattagacaacnnnnnnnnnnnnnnnnnnnnnnnnnnnnnnnnnnnnnnnnnnnnnnnnnnnnnnnnnnnnnnnnnnnnnnnnnnnnnnnnnnnnnnnnnnnnnnnnnnnnnnnnnnnnnnnnnnnnnnnnnnnnnnnnngttaatccttactttgtaaatgttttaaaaattgaggggaaaagattagaaatcctatagaaaagtgggcaaaagtcatgcacagactctttaccaaaagatgtataaacatatgaaaagatgttcgttcaacttcactcatggtaagagaaacgtaaattacaactacactgagataccatttctcacccatcagattgtcaaaaacttaaaagcttaaccgtactctctacggataagactgtggagaaacaggcattttcatacattgttggtgggaatgcaaaatgttttaagtcctatagagggaagttggcagtatttaattaaattattatacacatacctgttgacacagcaagcaagcgcagggataaataagaatttatcccttaagagtcacctcca

SEQ ID NO: 94079 - DNA, 351 bp, Homo sapiens
aaagaatagaccagaaatggatccaggtatgtaaggatattgagtaaatgatgaaggtgacaccacatatcaacagggaaatgaagaacttagaagttgtgctgggatgataaccgtttggcaaaggtaaaactggatttgtatttcccaccacacatcacaatagagataaattctaaatggatctgagatctaaatataaaaaatccacctatacatgtattagaagaaaacatgaataataattctaacacgtgggaatagggaaacattatctaaccatatgactcaaaatctaaaacccataaaaataataaatctggctacatgaaaataaaatgtattgcttgt

SEQ ID NO: 94080 - DNA, 508 bp, Homo sapiens
actctctgatttcatcattaagtatattagctgtaggtgttttgtgtatgccctttaaaaattattttattttttgtagagaagggtcttgctatgttgcccacactggtcttgaactcctgggctcaggcgatcccgccctttttgtcctcccaaggtctgggattataggcatgagctactgctcctggcctatggatgccctttatcagtttcaggaattcccttctattcctaattggctgagaggtttattttcctttcatgaataggtattaaattttgtcaaatgctttttctgcatctattgagatggtgatatgggttttgtcttatagcctgttagtatagtaaattatattgattgattttaaaatattaagccaaccttgtattcctgggatgaaactaacttggtcatggtgcattattgtttgtatttactactgtattcattttgctaaattttaaaaggatttttgaaaaaaataaagaggattttgtgtct

SEQ ID NO: 94081 - DNA, 417 bp, Homo sapiens
  misc_feature (1)...(417): n = a,t,c or g
aagaagaggaagagtgaagagaagggaaaaaaagcagagttcaccatttcaatatcaaacaaggtagagttatgtccacaaagcattaaaagacacaattattcatagtaatgcacacagtaacaaagcacaaatatccaaaagccaaccccatggcctccatgactttttcaaaaaaaaaaaaaaaaaaaaaaaaaaaaaaaaaaaaaaaaaaaaaaggggggaaaaaaaaaaaaaaaaaaaaagggggaaaaaaaaaaaaaaaaaaaaaaagngggggggggggcccccttaaaagggggttcgggaggcccttttttgttttttttggagaaaaaaatttttttttgtgggggggggggggggaaaaacccccctcgggtgtttacaggccgacactcctttgtggggggcgaa

SEQ ID NO: 94082 - DNA, 412 bp, Homo sapiens
ctctactattttttaaccaaatcaacaacaacctatttagctgttccccaaccttttcctcccaccccctctaccccctctagagccaaaaaaaaaaaaaaaaaaaaaaaaaaaaaaaaaaaaaaaaaaaaaaaaaaaaaaaaaaaaaaaaaaaaaaaaaaaaaaaaaaaaaaaaaaaaaaaaaaaaagggggggggggggaaaaaaaaaaaaaaaaaggggggggggggggggaaaaaaaaaagagggggggggggggaaaaaaaagggggggggggggggggaatttggttttttaaggaggagaaaaaaaaaaaaaggggggggggaaaaaaaaaaaaaaaaatttgggggggggggaaataaatgagggaagaaaaaggggagagggggggggggggaagaaaaaaaa

SEQ ID NO: 94083 - DNA, 413 bp, Homo sapiens
  misc_feature (1)...(413): n = a,t,c or g
cccacgcgtccgcccacgcgtccgcccacgcgtccgcccacgcgtccggttctagatcgcgagcattccccctcaaacctannaaaaaaaaaaaaaaaaaaaaaaaaaaaaaaaaaaaaaaaaaaaaaaaaaaaaaaagggggggggcctttaaaaaaaaaacctgggggggcaaaaaaaaaagggggaaaaaaaaaaaaaaatttttttaaaaaaaaggggaaaaaaaaaaacccccggggaaatttggaaaaaaaaaaaaaatttgggggggggaaaaaagggcaaaaaccccccaaaaaaaaaaaaccccctagggaaaaaaaaaaattttaaagggggaaggggggaaaaaaaaccccaaaccccgggggggaaaaaaatttttttccggggaaaaaaaaaaaaaaaaa

SEQ ID NO: 94084 - DNA, 285 bp, Homo sapiens
atatgccctgtttctggtattagtaatttgggtcttctcttttattagcttggctagaggcttactgatcttctcagaaataactcttggtttcattgattttctctatttatttcctgttttcaatttcattgatttctgctccaatttttatttctcttcttctgcttactttggatttaattattttctaattttcttatgtggaagcttagaatactgattttagatctttctactttcttcatgtatgcacagtcaatcctataaatttaagcaccttaa

SEQ ID NO: 94085 - DNA, 413 bp, Homo sapiens
ggaggcagaggttgcagagagccgagattgtgccactacactccaacctggacgacagagtgagactctgtgtttaaaaaaaaaaattaaagtagggagaaaataaaggatcctaaatggaagtaaggttccagtaggtcactcaaagtagtaaaacatagctgggtgtggcggtgtgcatctgtagtcccagctactcaggaggctgaagacggcaggatcacttgagcccagagtttgagaccagcctgagcaacacagtgagaccccatctctagaggaaaaaacagtagtagaacattgataccagtttgttgtatgtatattggaatacctagagcaaccactaagaaaactatacagagcaatatactcaaaagcttttttttaatacaaatagaattctaagaaag

SEQ ID NO: 94086 - DNA, 444 bp, Homo sapiens
gcgatactaactacctgactcctacccctcacaatcatggcaagccaacgccacttatccagtgaaccactatgacgaaaaaaactctacggtcctgaaaaaagaaaagaaggaaaaaaaaaagaaaaaaaaaatagaggaaagaggacaaaaaaaggggggggggggttaaaaaaaaaccggggggggggcaaaatgggggggggggggaaaagaaaattttttttccttaggggggggggaaaaaaaaaccggggggggttttgggggaaaaaaactttttgggggggggggggttttggggcaaaccccccccaagaggggggggggggggggggaaaaaaaaaattttggggggggggggggggaaaaaaaaccttattgggggggggggggggagggggcccccggggggttaaaaaaaaaaaaattaaaacgcggggg

SEQ ID NO: 94087 - DNA, 429 bp, Homo sapiens
cagacgatgggaaatgtatataaattaaggcaagaagcaaaaagtaaaatcatcattacagacttgtattccagcattttcaagagacaataaatccttctatctaccaaggaggaggggaaaggggaaaatttgggttaaagtaaaagcacaacctccggggtaaaaccatttttctggcctaaacctccaaagagggggggacaacggggcccccccccggggcggggaaaaggttggaattttaagaaaaaagggggtttcccggcttaacccgggagggtctccctttcgggacctaaggaacaaccggctttgacccccaaagggggggggataacgggggggaccccccccccccacccccaccttttttttaacgaccaaatttaaccgtttcacatgcgggttggttttggggggggcgaa

SEQ ID NO: 94088 - DNA, 426 bp, Homo sapiens
tatacatgccctttacctactttgtaatgggattattttttctcttataaacttgtttaaggtccttatagaggctggatattaggcctttgtcagatgcgtagtttgcaaaaattttctcccattctggaggttgtctgtttactctgttgacaagtatttttttgttttttttttcgcggggcaaaaccttttaagggaaattaaataccatttgccagttttggtttttacaaagatggttgttgggggctttgtcatccaaacttgacataaaaaattctccctttgttgcggcatttgaagaaacctgttcctaggtataatatcccctagaaccctagctggggtgactaattttttttaaaggaaccacaccatatgtcgataagggtttatctagccagttaaaattatcctaccttt

SEQ ID NO: 94089 - DNA, 436 bp, Homo sapiens
  misc_feature (1)...(436): n = a,t,c or g
ccttgctatgttgcccagggtggtctcaaactcctagccgcaagcagtgtttctgccttagactctcaagttgctgagactacaggcatgagccactgtgcctaggttgtcttttttcatgcagcataattccctgagatctgagtttttatgtgtatcaatagttcattccttttatttattccatggtatgaatataccacagtttggccagttacctgtagaaggacatctggactaattccagtttctggctattacaaataaagctgctatgaacattcacgtccccnnnanannnnnnnannnnaaaaaaaaaaaaaaaaaaaaaaaaaaaannaaaanaaaaaaaaaaaaaannnnaaggggnnnnnnnnngggggggggggaaaaaaaaaaaannggggggggggaaaaananggggggggaagaaaa

SEQ ID NO: 94090 - DNA, 377 bp, Homo sapiens
ctcgggaggctgaggcgggggaatggcttgaacttgggaggcagaggttgcagtgagccgagatggcgccactatactcctgtgtggacgacagagcaagattccgtctcaaaaaaataaatataaataaataaataaaaattatggtatagttataaaactacagtattataattgtttatttacatgtgtgttttcactggacttcatttatctcatgggttattaatcttttttttttctggagacagggcctcactctatagtgcaggggtatgatcttggctcacttgcaacttctgcctcccaggctgaggtgggaggattgcttgaactcgggaggtcaggtctgccgtgaactgagattataccactgg

SEQ ID NO: 94091 - DNA, 400 bp, Homo sapiens
caaacgagcgctcttttcttttctttctttttctttttcattttctttttttttttttttggaaaggggcccttcttttggtgccccgggcgggggggacccatccccccctcttggaaccccaaaggccgggggttaagggaaccttcccatttaaccccccggggtggttgggactacggggggggcccttcccccccacttttttttttttggaaaatttggaaatttaaaatcttttccggggaccgggccgggattcccaaatttatgattggaaaatccggaaaacccccgggggttcctttaaagggggcttggggccccatctaaatttttttatttaaaacacggttgggcctttttttaggaaccaaacccccttaagagttaaacctgg

SEQ ID NO: 94092 - DNA, 406 bp, Homo sapiens
  misc_feature (1)...(406): n = a,t,c or g
cgcggccgcgtcgacccctnaaaaaggaagaaattatttatgggaaaaaaaaaaaaaaaatatgttggtgaggggaaaaataggtggggggccccccccccgaattccaaaattttaaaaggtgatttttaaaaccccccccgggccccctttttttttttttggccccccccttaatttttttttttttaaaaccgacgcccccctttttttttaaaaccacccccccaaaagtaaaatttgggcccttgcccccccgaaaaaaaaaatttttttaaacccaaaaaaaccccccccttttttttttcccccccatttttttaaaaaaaattttccacgggcttttttcaaaaattttggctttttccccaagaggtggggccccncccnnnnnccccccaggcag

SEQ ID NO: 94093 - DNA, 416 bp, Homo sapiens
  misc_feature (1)...(416): n = a,t,c or g
cccacgcgtccgggctagttctagatcgcgagcggccgccctttttttttttttttaattggaaaattaaaaaaacttttattttaggttcaggggaccatgcccgggtttgttatataggaaagtggcaggccataaaaattgggttaacaaataatttggccccccaggaaaaaaccaaagacccccatagggagtttttggaccctcaccctcctttaatcctttcccggcccggcncccctttnaaaaaaaaaaaaaaaaaaaaaaaaaaaaaaaaggggggggggcctttaaaaaaatccctgggggggcccaaattaaccgggggggggaaaaaaaaattttttccctttagggggggggaaaaaaaacccccgggggggttttgggagaaaacccccactttggggggc

SEQ ID NO: 94094 - DNA, 427 bp, Homo sapiens
  misc_feature (1)...(427): n = a,t,c or g
cttttaggttcaggggtacatgtgaggatgtacaggtttgttacatagctaaatgtatgccaaggtggtttgctgcacagatcatcccataacctaggtattaagcccagcatttattagcaggattagctattctcctacccacccccaactaattttatttttttaaattttttttctatttttagtagagaccgagtcttgccatattgcccaggctggtctcaaaccccagcctcaagcagtctgcctgtctgggcctcccaaagtgcatgagctactgcacctggcctcacttctttctaatgatcagagggtacatgttagaactcacttaatctgtcatggcatctcatcacacanatgaggaaagggtggctcagacctaaggttacactgatanaataggtttgatcactcttgtctc

SEQ ID NO: 94095 - DNA, 450 bp, Homo sapiens
  misc_feature (1)...(450): n = a,t,c or g
ggtgagccaagatcgcgccattgcactccagcctgggcaacaaaagcaaaactccgtctcnnaaaaaaaaaaaaaaaaaaaaaaaaaaaaaaaaaaaaaaaaaaaaaaaatttttccccaagggccatttccaccttaaaaacccaccggggccttttttctttaaacccaccaaaaaaggcccttttttaaggggggtttttttttttaaatttcaaattttaaaaattttgggtatttgaaaatcaaagaaatttggctggggggggggggttaatccttaaacccccacccctttggaaggttggggcggccgattcttttaagtttggaatttaaaaacccccctgcccaaattggaaaaacttcttttttataaaaaaaaaaaaaataacccggcgggggggggggccccccgaatccccatttattaggggggttaggggggaa

SEQ ID NO: 94096 - DNA, 453 bp, Homo sapiens
acgcgcctctgcccagctgccaccccgtctgggatgtgaggagtgcctctgtctggctgccccatctgggaagtggggagcgcctctacctggctgccccatctgggaaatgggaagcacctctgcccggccaccccatctgggaagtgaggagcgcctctgcccagctgacaccccatctgggatgtgaggagcacctctgcccggccgccccgtctgggaagtgaggagcgcctctgcccggccgccccgtctgggaagagaggagcgcctctgcccggccgcccatcgtctgggaagtgaggagtgtctctgcccggccaccccgtctgggaagtgaggagcgcctctgcccggctgccccgtctgggaggtgaggagcgtttctgccccgccgcccatcatattggaaagggggagccccttctgcccggctgccccgtcttggaagtg

SEQ ID NO: 94097 - DNA, 389 bp, Homo sapiens
tcgagaccagcctaggcaacatagcaagatcctgcctcaaaaaaaaaaaaaaaaatttttaactttttggttttccccccccaaaaaagtgggtttttttttttaaaaaaggggggggggggggggttcccccttgaattttaactttttgggggggccagggggggggattccctgggggcagggatttcaaaacaacctgggcaaattgggggggccccctttttttttaagggtaaaaattttattgggggagggggggggccccttgggtccccattttttaggggggtgggggcagaaaattcttttaaatttgggggcgggggtttcaagaaacttaaaagggcccttttcctttccaccttgacttagggggcgggattctt

SEQ ID NO: 94098 - DNA, 283 bp, Homo sapiens
ttggcagtttctcacaaaactaaacatactcccatatgaaccagtaatcatgctttgtatttacccaaatgagtcaaaaacttagatctacacaaaaacctatgcatgaattttattagcagctttattcataatggccaaaacttggaagcaaggtgttcttaagaaagtgagcagataaagtgtggcatatccatatgacggaatattaagaactatcaagtcacagaaaagtcatgaaggaatctttaatgcttattactaagtgaaagaagccaatctg

SEQ ID NO: 94099 - DNA, 400 bp, Homo sapiens
ttgatggccaaaattaaaaagttaattactgttctcttaaagctacttttaatcaaacaaaaacatttctgccacttccactgtagcatgtaaaattcaacttacttcactcctaaaacctaaatctgaccaaaaaacaaacaggccagacatggtggctcacaccaataatcccagcacttgaggaggcctttgggaaaccagcccagccaatatagcaagactgcatctctacaataaataaaaattaaaaaaaaaaattatccaggcatggtggtacgcacctatagtcccagctactcaggatgctgaggtgggaggattgcttgagcctaggagtttgaggctgaagtaagctgtgatcatgccattgcactccagcctgagtgacagacaaaag

SEQ ID NO: 94100 - DNA, 376 bp, Homo sapiens
  misc_feature (1)...(376): n = a,t,c or g
ataaaagataggaaaatatctgtcatgtaatctgcaactattagaaagctaggtatactaatatcagacaaaatatactttaaaacnnnnnnnnnncagttactaaagaaaaagaaggacattttataaggataaaatgattaatccatcaggaagatacaacaactataaacataggtgtacctaataatagaacactcaaatgcatgaagcaaaaactgacagaattgaagaaagaaatagacaaacaataatttctggaggcttaaatatccccacttaaaataataataaaagaactaggcagaaatcaacaaagcaggaggagacatagacatcactatgaaccaactagacctaacagacatctataaaa

SEQ ID NO: 94101 - DNA, 374 bp, Homo sapiens
ctgacaatagattcctgccactttctggaatatctttctgggtagtgtctgttcaaatcatatatctctttttttaaaaaaattggattgataatactgagcgttcttactaatatttcattaaaaaaatttttttaatccctctgggggaaacgaattttttttttttttggggcagatcctcactttgtcccccaggctggaggagctttggggcaatcacggttaattgcagcctacacctgttgggttaaagaaatcctcccttttaaccttccctatttcttggtactataggcttggtacaccacccccagctaattttaaaattttttgcaaaaacggggttaaaccttgttgtccagcctgttttg

SEQ ID NO: 94102 - DNA, 402 bp, Homo sapiens
ccaacaccactgcactccagcctgggcgacagaatgagactctgcctcaaaaaataaaataaaataaaataaaaccccataataaacatttccacttttttcatgataatacattcagatcaaccaaaatattttaccctgtttcattcttcttctgctttttggtttatgctttcagttttgttttgttcttttttaaacacacatacacaaaattctcctgcaggagctagattttatgcaaaaaaaggaaaaaaaatgaaaataaaaaaacccatatatacatatttccctttcatttacaaaaagagcatacacagggccgggagcggtgactcacgcctgtaatcccagcacttcgggaggcggaggcaggtggatcacgaggtcaggagttcaaaa

SEQ ID NO: 94103 - DNA, 386 bp, Homo sapiens
  misc_feature (1)...(386): n = a,t,c or g
catnatttttttgtgttcagcacccatatcacactccttttcctttttcttttttttttttttttattcccgcggcccccgggcttttttttggcgggaaaaaaaaatactcccccagcgcccccggaaaaacccccccccccggccccccaaaaaaaaaagggggccccctttttttttttttggccccccccaaaaaaaaccccccaactccccccggggggggcggggccccccccccccgagacctccccgcaaaatggaaaagggggggcccccccccccccgggaaatcccccccccccctttttttttttagcccccaaaaacccccccccccccccccggggggggggggggggggaaaaaaacccccccaaaaagag

SEQ ID NO: 94104 - DNA, 368 bp, Homo sapiens
cggtaagccaaaattgcaccactgcactccagcctgggtgacagagcaggactccatctcaaaaaaaaaaaaattcaaccccttcagggggggggggggaaaaaagggaaaaaccttgggaaagcttaaatccagggaaaaaattttggaaagtcaaaaaaagaaaggaacctccaggctttttaaagaaaagttaaacttttaagaatttttaagaaacccttagaacagggagggccacagttttttgttagggggccagggaaaaaaccttttaaaggccaaatccctttaacaaaggcctttttaaaagggggaaaataaaaaactgttttattcgggaagcaccacttgaaaaaaaacaaaag

SEQ ID NO: 94105 - DNA, 385 bp, Homo sapiens
  misc_feature (1)...(385): n = a,t,c or g
aatactcgggaaaaattatctgggggtggtggcacgcaactgtcctgatactcggaaggccaaggcaaaagaatcacttgaacctaggaggtggaggctgcagtgagccgagatcgtcactgcattccagcctggatgacagagtgagaccctgtctctaaataatataatattatgggaccaccatcatatatgcagaccatcactgggcataatgttgatatgcatgactagacacagatgctgaacaactaacctaatgaatactacattatatagtatgttagaggagcaagtgctatggtggggtgagggataggttagcagttctaaacaataaagatctactggccaggcacaatggctcatgcctgggagtaacttn

SEQ ID NO: 94106 - DNA, 391 bp, Homo sapiens
  misc_feature (1)...(391): n = a,t,c or g
cattcctactgcctcgggcccctaacgttaagattacatgtgtgagccaccacacccagctatttttagttttttgagaactctcaatactgttttccacagtggttgcattatactagcctacatccccatacaatgtataagagttcccttttctccacatcctcaccagcataagttcggtggactctggtcctgggcttttttgttgttgttgggggactttttattactgtctcaattatggagcttgatattggtgtgctcaaggtttctatttcttcctggttcaatctagataagttgaacgtatctaaaaaattatctattttttctctgngatttacagacccttaatgcatagatgtttgtaatagaccctaacgattct

SEQ ID NO: 94107 - DNA, 312 bp, Homo sapiens
  misc_feature (1)...(312): n = a,t,c or g
attgcggnacattgataggttcgggttttaacacaaccccgggtaagaatacactggtctaatactgagactatatatagaacatttaccactcagcattaaaaacagaaagcattgaatcaagctaagtagttggcaaaaggtttaaacaaacatttcataaaaagaggttgtatgaatgacccaaagcatatgaaaaaatcatcagcctcactagccattaggaaaatgtgaattaaaactatgatgagatgccattacattctgacataaatggccaaaatagaaaacaaaacagagtcgacgcggccg

SEQ ID NO: 94108 - DNA, 363 bp, Homo sapiens
tggtgatgtacgtggaggaggtgacgatggtggtgatgaaggtggaggaggtgatggcgataacagaggtggatgagatgatgatggtggtgatggaggtggaggaggtgatggtgataatgaaggtggaggaggtgattatggtggtggaggaggtgtgtggtggttttttgtttatgtatgtttttgaggttattaatttggattgatgttgattagattgatgtggttgtgttgtaaaaggggggggttttttgtgttaaacaagcctgtactttttattattttttttttattgtttgtttatggggttttgttatattggggaagtttcttggaaaaattagatgtttttttattttt

SEQ ID NO: 94109 - DNA, 368 bp, Homo sapiens
cttaaaactcaacaagaagcaaacaaccttattttaaaatgggcaaaagacctgaacagatacctcatccaaaaaggtatagaaatgtcaaacatacaaaaagatgcccaacatcatagagaactgcaaattaaaacaagatactactacatatctattagataacgagtaaaatacaaaaaaagagacaatacgaaatgctagtgaggacgtgaaacaacgggaactcttgttattcattactcgtaggaatacaaaatggtatagccactttgggaaacagtttgacaatttcttaccaaattaaatagtcttatcataagatccagcaatcacactcctgggtatttactcaaaagagctgaaaa

SEQ ID NO: 94110 - DNA, 280 bp, Homo sapiens
gggaaaaaaaattccaatgctatattttgcagaaatagaaaaatgcatcttaaaattcgtataaaagatcttgaaaagcaaaataaattctgccaaagaacaacaaagctggaggactcaaatttcctgatttcaaaacttactacaaagctgcagcatcaaaacatcaagtcggtggcctgtggaaggaactgaggagcaccctccaagcccagcagacctgggtccccagggaggagctgaggagcacctctccatcctagcagacccaggtccagct

SEQ ID NO: 94111 - DNA, 408 bp, Homo sapiens
  misc_feature (1)...(408): n = a,t,c or g
cttgaaaagatgtcaacatcattagccattctgtaatgcaaagtaaaaccacaatgaaatgtcactatattcctatcagaaaggctaaaatataaaacaatgataacatcaaatgctggcaatgatgcagagaaactggaccactcatatattgctgctgagaatgtacatggtacagccactctgaaaaacagtttgacagtttcttataaaagtaaacatgtgacccagcatttgtactcatatttataccaaaaaaatgaaaacatatgttcacacacaaaaaaaactgtaaacatacattcagagcagctttatttgtaatggccaacactagaatcatcccaaatatctttcagtttgttgagtggttaaacaaactgtcctacaaacacatcgtggactatn

SEQ ID NO: 94112 - DNA, 318 bp, Homo sapiens
aaaacatgctaggtaaaagaagacagttgcagaggaccatgtactgtatgattctggacatttcgtatatgtgtaatcatatagtatgtggtcttttgcggctggatgctttatttagcataatgtttttggggttcatccatgttgtagcatgaatcagtacttcattccttttcatttctgaataatatgcgtttgaatggatatatgacgttttattcatcggttggtggatatttgggttgtttctgttttttggttattgtgagcatcactctgtaaacattcttggacaagtttttatgtagatgtatgttt

SEQ ID NO: 94113 - DNA, 425 bp, Homo sapiens
  misc_feature (1)...(425): n = a,t,c or g
cggngaggtatggagggagaggcgtgtgcgggaacctgggttgctcgcgggccagcaccagttctgggtgggcaggggctcagcgggccctgcactcggagcggccggctggtgcctctggccccaggcagtgaggggcttagcacctgggccagcagctgcagagggggcaccgggtcccccagtactgctggcctgccggcgctcaccacacttgaattgtcgccaggcctcagtcacctccccgcggggcagggctcaggacttgcagcctgccatgcccaagcctccctacggtgggctccctgcgaggcctgagcctcccggatgggtgcctcccactgctccacggcacctggtcccgtccactgcccaagggctgaggagtacaggtgcctggtgtgggactagcaggcagctctgcc

SEQ ID NO: 94114 - DNA, 461 bp, Homo sapiens
ctaggttaataaatatgtatatggaggaaaatgaatattcttttaccatatacaaaactgaattcaagatggattgcagatctatacgtgaaaggtacaacaataatgtttttagaagtaagcgtaagagaacatcttcatgactcacagaaaaagattttttaataagatgcaaaattaatgaaccaaaaggaataactggatatattggactctattaacattaaaagctttgtccattaaaaggcaccattaagagagaacaaaggcaagcttcagagtgcaatacatatatatgaaaaaggtcttgtatccagaatatatgaagaactcctacagaacatataaagaaaccttaaaagccaataagaaaaaaatagataacccaatagaaaaatgggcaaaaaacttgaacaggcacttcacaagaggatgtccaagtatttataaacatgtgaaaa

SEQ ID NO: 94115 - DNA, 571 bp, Homo sapiens
  misc_feature (1)...(571): n = a,t,c or g
cgccatcgaaccgntcgnattgaacggtccatcacgcgtccggngagactctgtctgagggaaaaatggaaagaatacttaagtgagagttagtatactagatggggctgtcttttaatgcacttctcgttttatgtcattaaaaaaattaaaatataaagtaggaaataaatactatagttaaggaagacaacataaaaataccagttgcttaatatataaatttagtgcagtttcaatcagaatctcaagaaggttttttaattttgcaagtcccccttttttaagcgacaggatctctgtgttgtccaggctggagtatagtagctattcacgggttcaatcacagtgcactatagcttctaactcctgggctcaagcatcctcctgcctcagcctcacaagtagctgggactgcaggcatgagtgactgcacccagctatgtaagattaatttttttgtttttgtttttnttggaggcagagtcttgctgtcacccaggctgaagtgcagtgagctgagaatgagccactgtactgtagcctgggcgacagagcaaggctctgtctc

SEQ ID NO: 94116 - DNA, 438 bp, Homo sapiens
ctgcagtgagccatgattgcaccactggactccagcctgggtgacagagggagatcctgtatcaaaggaaaaaaaagggaaccttttctcccctgccccccccttccccgggtattggggggaaacccgctttacccttttggggccccaagacctggcccccccccggaatccccccctttcttttttcccccccccccccttcccaaagcggaggggggccccggcctttggaaactttggcgggaagtttttcccaaaacccttggaacttaagggacggggcccctcccccccccggggggggtttttttggggccccccttttggaccacccgggggtttgggtctcccggggccccaccccctcccctaaaaaattttcccaaaaaaaaaggcggggggggggggtttctttttcccccccaggccaaggga

SEQ ID NO: 94117 - DNA, 617 bp, Homo sapiens
taatttaataattggcaacttcatagcatatccagaaaaaaaccatgaatggtccaattcaggtgaaagtatcaattggtccaagatggctaacatgggtaagcctagaatgtcaaatattggtttcagaaggttgggtttttttgctggtgggagttgatgctgcacacatttgttttgtagggggtgagtggtgcactgacagtgcttatgaaggacgcaatcaagcccaatctcatgcagacactggaggtgagcagagtgactcctgccttcttgaattggttttggacagtcagagcagagtggttataaagcacacttgcaaggcgcggtggctcacatctgtaatcccagcactttgggaggccaaggcgggcagatgacgaggtcaggagatcgagaccatcctggctaacacggtgaaaccccgtctctactaaaaatacaaaaaaaaattagccgggcgtggtggcgggcgtctgtagtcccaggtactctggaggctgaggcaagagaatggcgtgaacccgggaggcggagcttgcagtgagccgagatcgcgccactgcactccagactgggcgacagagcgccactccgtgtcaaaaaaaaaa

SEQ ID NO: 94118 - DNA, 486 bp, Homo sapiens
  misc_feature (1)...(486): n = a,t,c or g
gggtgaaaattgagnacgccattcgagnnncgctntgaagggncgacccacgcgtncggcactccagcctgggcaacaagagcgaaactcagtctcaaatgaaaaagaaaaagagagaaaagaagaaaggaaaagaaatatcatttgatccagcaatctcactgagtatctaaccaaaggaaaataaatcactataccaaaaagatactgcatttgtatgtttatcacagcactattcataatagcaaagacacagaatcaacctaagtgtccatcaacggatgagtgaataaataaaagggtatatttatatatatatatatatatatatatatataatgaaacactattcacccataaaaaagaatgaaattatgtctttgcagcaacatggatggaattggaggccattatcataagcgaaacaatgcagaaacagaaagncaaatactgcctgttctcatgtataagtaggagctaaataat

SEQ ID NO: 94119 - DNA, 456 bp, Homo sapiens
  misc_feature (1)...(456): n = a,t,c or g
cggacgcgtgggcggacgcgtgggcggacgcgtgggtggttcctaataaaaagcctttaaattaaaaaaaaaaaaaaaaaaaaaaaaaaaaaaaaaaaaaaaaaaaaaaaaaaaaaaaaaaaaaaaaaaaaaaaaaaaaaaaaaaaaaaaaaaaaaaaaaaaaaaaaaaaaaaaaaaaaaaaaaaaaaaaaaaaaaaaaaaaaaaaaaaaaaaaaaaaaaaaannnnnnnnnttttttttttttttttttttnttnntatccccccccccccccttaaaaaaaaaaaanttattttttatatttaaaaaatttaaaaaaannnnttttttttttccccccccccctccttttgggggggggggggggttttcccaaaaaaaaaaaaaaaaaaaaaaaaaacnggggggnnnnnnnnnnnnnnnnnnnnnnnnnnnncnncccaaaaaacttcctgg

SEQ ID NO: 94120 - DNA, 492 bp, Homo sapiens
  misc_feature (1)...(492): n = a,t,c or g
ngagccggnnnnnnnnaactgaatgcttgctnacgntcggaannccggncngaccacgcgtccgaaaaaaatgaaaacaaacaactctcaaaatgtatcaaagacctaaatttaagaactaaaatacaaaatttgtagaagaaacataagtgaaaatcttcatgaatcttggattaggcaatgatttcttaagtatgacaccaaaagcataaagatagataaatcagacttcatgaaaattaagaactttgttcatcaaaggacatattaaggaagtgaaaaggcagcacacagaatgggtcaaaatatttacaagttatatatttgataagggatcaacatccagaacatgtaaagaacttcaaaacaacaacaaaacaaaccaattcaaaaatgctcaaaagttttgaatagatttttcttcagagaagatatacagctgtccaataagctcatgaaaggatgctcaacatcattaaatcattaaggaan

SEQ ID NO: 94121 - DNA, 510 bp, Homo sapiens
  misc_feature (1)...(510): n = a,t,c or g
cacactaccgtactcgtaaacgtattgagtagtaagacaaatctttgactccaaagacaaagaannnnnnnaatgagccatgaagcntcggaccgcccgaaacccgncgaccaccgccgacgctctcgcccatccctggccacttctccttcccaggctggagccccatccttccctgcctaaccacagtggcctgcccattctttcctccctgccttggggagcagtggcactggcccctacccacttctctgctttggcttggccttgacggccattgccttgcaactcccagggggagaaattttttttttggtttgggttttttggaaagggagtctcactctgccacccaggctggagtcctggggcatgatctcggctcactgaaacctccaccttgggggtcaaagggattcttttgccccagctactcgggaggctgaaccaaaaaaaccacttgagcccaggaggcggaagttgcattgacctccagtcaacgccagggcg

SEQ ID NO: 94122 - DNA, 399 bp, Homo sapiens
catgtatattcattcttattgccaaataatattccattgtgtggatatacatgtgtacatcttactgattttttggttgatgaatatttgggttgttttcactttttggctactgtattatgaaaaatgctgctatgaaaatttgtgtacaaaattttggaggttttttttccattctccagagtatatatatacctgagagtagaattactgtaccatatggtaactttatgaggaactgccaaactattttccaaaatggtcccattatttacgttttcaacagtagtgtatgagaacttagattgtccacatccttgtcaatacttcttgactgactttgattatagccatcctgctggatatgaaggggtttgatttgcatttccctgatgacta

SEQ ID NO: 94123 - DNA, 419 bp, Homo sapiens
ggggtcatactcattctgctgttccattttgttgctgagccaaattccattgtattaccaatcttcaatttgttatcgattcatttactataaacatttgggttgctttccattttgttctataaatgaaactgccatgaacattcacatacaagtctttgtaaagacatgttttcatttcccttggataaatgccttaaagtagaattactgggttgaatggtaggtttatgtttgatttaataagaaactaccaaatttttcatgatcatgccattttacactcccaccagcaatgtatgagtgttccagttgctccgtgtcttttccagtacttggtattatgggacttttcaagttttagccactctagtgtatctgggtgggattttaatttacatttgcctgatggctaatga

SEQ ID NO: 94124 - DNA, 412 bp, Homo sapiens
tttgagaccagcctgaccaacatagtgaaactccgtctttactaaaaataccaaaaaaaaaaaaaaaaaaaaatttccccggcggggggggcccccccttttatccccattttttttgggggttaaaaaggaaaatttttttaaccccgggggggggggttttaaggggccaaaaattttccctttgctttcaacctgggggaacaggggggttttttttaaaaaaaaaaaaaaaaaaggaaaaaaaaaaaaaaattttttttaaccttttttggcccttccccaaaaatgccccctttttataatttggggggaaaattggaaagggggaccccccatttaaggtttttccgggggggaaaaaaaaaaaattgggggccacaattaatataaccccgggccaaaaaatttt

SEQ ID NO: 94125 - DNA, 436 bp, Homo sapiens
  misc_feature (1)...(436): n = a,t,c or g
gaaccagaaggcgaaggttgtattgagctaagatcgtgccactgcactccagcttgggtagaaaagcgaaacttcttctcanaaaaaaaaaaaaaaaaaaaaaaaaaaaaaaaaaaangggggggcccccctaaaaaaaaaccccgggggggccaaaaaaaaaccgggggaaaaaaaaaaaaatttttccccaaaaagggggggaaaaaaaaaccccccggggaattttgaaaaaaaaaccaattttgggggggggaaaaatggggcaaaacccccccaaaaaaaaaaaacccctgggggaaaaaaaaaaatttaaaggggaaaagggggaaaaaaaacccaaaaaccctgggggcgaaaaaatttcccccccggggttaaaaaaaaaaaaaaaaaccccccgcggcgcgccctggaaaaannnnnnnnnnnnnnc

SEQ ID NO: 94126 - DNA, 422 bp, Homo sapiens
atcagtgagaacatacggtgtttggttttccattcctgagttacttcacttataataatagtttccaatctcatctaggtcacggcaaatgccattaattcattcctttttatggctgagtggtattccatcatacacacacacacacacacacacacacacacacacacacacaccacagtttttttatccactcattgagtgaggggcatttgggttggctccatgattttgcaattgcaaactgcgctgagattacaggtgagagccactgcacctggccagaagatacagtattcttaagaggataattcttccccatttgatgtgtagatttaatatattctcacacagaatcttaacattttttaaagaaagtgacacgctgactctactattttcatggaaacacaaataattta

SEQ ID NO: 94127 - DNA, 523 bp, Homo sapiens
cgaccactgccttcaacttaacccatttatggctgaggttgcaatttttcgaatttttgcaatcagatcttggcagtgaccttaagcagaatataaacttgcacatgcttagcgttccaataatggaacactaggcatagatgggttttaaagtcacggcaaagagtcagactgtcttttgaagctctgaagccaggcattgacttctccctacctatgaaaggcctgcatggtgtcttcttccagttcaaggttgcttccgctacactgaagatctgtggttgagtgcggccacctccattgtgaccgtagcaggatcttctggagagcctgctgcctcacctcacactcatattacggagacggcttctttccttaagccttgtgggccaacctctgctagcttcaaacttatgttcacagcttcctcacatcattcagccttcacagaattgaagagagttgggacctcgctctgtattaggctttggcttaagggaatgttgtggctggtttgatctgt

SEQ ID NO: 94128 - DNA, 413 bp, Homo sapiens
cccacgcgtccgcccacgcgtccgcccacgcgtccgatcgcttgaacccaggaggcagaagttgcagtgagctgagattgtgccattgcactccagtctgggcaacaaaagtgaaactccatttcaaaaaaaaaatcagtgtgtcaggagttcaaagttgaaatttattgccatgtgcatactgtatggttggaaaggaaggttttattgagtctggtcttggaaattggaacatctgcatgagagggggccagatttaaatatagaaacatgacgatgaactcaaagtaagaatgggccgggcgcaggggctcatgcctgtagtcctagcattttgggaggcaaaggcgggtggatcacttgagctcaggagtttgagaccagcttctacaacatggctaaactttgtctct

SEQ ID NO: 94129 - DNA, 422 bp, Homo sapiens
tccattcttcagctgatggacatttatttccacttttcggctattaccaataatgctgctatgaacgttcatgtacctatttttgtgtgaacatgttttcaattctgtgtatatacctagcaatggaattgctggagtacatggtaactgtacatacattttacctcttgaggaatgccaaactattttttccaaagcagctgcatcattttacaatcccaccaacaatttatgagtgtatttcaacatccatgccaacattcattattgtctttttgactttagccatcctagtgggtataacgtggtattgtgtggttttaatttgcacttccctgatggctaattgtcgagccatgtttttatgtgcttactggccatttaatacattctttggaaaatgttctgaaaagttataaact

SEQ ID NO: 94130 - DNA, 428 bp, Homo sapiens
cggacgcgtgggcggacgcgtgggactagttctagatcgctagcggccgccctttttttttttttttaaaaaaaggcccctttggaaaaaaaaacaagggtttcctccccccgcgtaaaggggggaaattccgtccgctaaaaaaacccccattggggcccgtgtccgggcccgggaaccccccgggcccgtgaaaaccacccaaaaccccccacccttggggggttccccttttggaaaaaaacccccgttggatattcccttccccgggggcccaatcaaggggaaaaagtggggggggccccctttggcggggggagccacaaccaaaaatcccctccgggtggaaatttttggaaggggggaaaagctccccccttcccctctcaaaaattttaaaatttcttttccctcccttggccaaaccg

SEQ ID NO: 94131 - DNA, 371 bp, Homo sapiens
  misc_feature (1)...(371): n = a,t,c or g
gttgataactaatgtataattcggaatcggattttaccagttgtattaataaagctctttttcttcttttattaatttttttccttttttcttttttttttttaactttttgagacggagtttggctctgtcatccaggctggaaggcaggggcatgaacatggctcactgcagccttaacctccgggactaaagggatccttctgcctcagttactcgggggactgaaggggggggatcacttgaccccaggaggggggggctgcaaggagctgggattgcaccattgccctccacccgggggaacagcgagacctttgttctnaaaaaaaaatacaagagggaaaaaattcttttgaaaaaaaggagag

SEQ ID NO: 94132 - DNA, 371 bp, Homo sapiens
  misc_feature (1)...(371): n = a,t,c or g
tttttattgagacacatcttgctgtgtcacccagggttttgctctgttgccacagcttactgcagccgtgacccaggctcaagtgatccctcccacctcaggcccctctccccgaccagtagccgagactacaggcaggcacagactggcaccaccacactcggctaattttttttagtagagacagggtttcactgtgttagccaggatggtctcaatctcccaaccttgtgatccaccccactgggcctcccaaagngctgnnannanaaaaannaanaannannaaaaaaaaaaaaanaannnnanaaaaaanaaaaaaaaaaaaaaannaaaanaaaaaacaaaaaaaaaaaaaaaaaaanaaacac

SEQ ID NO: 94133 - DNA, 395 bp, Homo sapiens
  misc_feature (1)...(395): n = a,t,c or g
ccgtttcctctgggatctgagaagtcccaattctttcttccaactctgaatcccaggcttaactagacaatggcttttggatccttgtgccagcccttccacccccccatacacacataagtccagccaagcacccctcagaattcaagcccctcccctaagactcacaatcagaagggactgcctatgcctctgagccccaccccaaaaccaagcacggcctggaagaaagccatcctggagcatgnnnnnnnnnnnnnnnnnnnnnnnnnnnnnnnnnnnacgtgcagaaacaggaatggttacacatacacggtcccggagcacagacctgcccgtggacacacagccagccagactcgcaaacaggtccttgcagctacacacaaaccatc

SEQ ID NO: 94134 - DNA, 370 bp, Homo sapiens
ctgtgttctgtcacccaggctggagtgcagaggcgcaagctcaactcagtgcaacctccgcctcccaggttcaagcaagtctcctgcctcagcctccttttttttttttttttttaaaaaagggttttcactttgttccccaggctggagggcagggggcccattatatttaacggaagcccaaccctccggggctaaggggaccccccggtttaagcctctaaagaacttaggactaagggggggccccaccagggccagttaattaatttatttttttgggagcgacggggcctacttatggggcccagggtgggtttaaatccccgggcctaaggcgatgggccccccttggccccccaagggcggg

SEQ ID NO: 94135 - DNA, 365 bp, Homo sapiens
gctgcagcgagctgagatcctgccactgcactccagcctcagtgacagaggaaaactctgtctcaaaaaagaaaaaaataaagcactcacaaatgtaggaatagaaatgaactttcttaacacaataaagggaattttaaaaaaagaaaatatagattccagactatataagtgtgatataaaaaaactgatgcaacaaaaacaaaaatggacaaatgagatagcatcaaactaaaaagcttctccacagtcaaggaaacaattaacaaagggaacagaccaacccacagagtgggagaaaatatttgcaagccatacatctgatatgggaataatatcccaaatatgtaaggaactcaaacaat

SEQ ID NO: 94136 - DNA, 236 bp, Homo sapiens
gcagtcttaaaaaggaacaacaaagttggtagtcaaactttctgatttcaaatcttatttcaaagctatagtaattaaaacagtgaggaactgcataaatacaaaccatatagatcaatggaacagaatacagaatccagaaataaaccctcacatatatggtcaaatgattttcaagaaacgtgccaagaacaaacaatggaaaaaggacggtcttcacaagaaaagatgatggg

SEQ ID NO: 94137 - DNA, 382 bp, Homo sapiens
  misc_feature (1)...(382): n = a,t,c or g
gccctaccttcatcaacatgtctcaggagaatggcatgaacctgggaggcggagcttgcagtgagccgagattgcgccactgcactgcagcccgggtgacaaagcgagactccgtctcanaaaaaaaaaaaaaaaaaaaaaagggggggggggtaccccttaaacccccccctttaaaaaaaaaaaccccggggaagggcccttccggaattttggctttaaaaaagggggggaaacccgggtttggaaaaaccccccctgggttttccaggggtttttttttgggggtttaaggccaagttttttcctcctgaaaaaaacaaaaccttttccgccccaaattttttttttttatttattcccctccctccctacctattcc

SEQ ID NO: 94138 - DNA, 373 bp, Homo sapiens
tgttttctcatatgtaggcatacctcacatatgtggcggatttggtttcagactactgcaataaaccaaatatggcaataaaaggagtcacagaaagtggtttcccagtgtatatatataaaagttacatttactctatgaagtgcaataacattttgtctaaaaatacacacagtaattgttgctagaaaatgctgacacaaagtgagcacatgctgttggaaaaatggtgctgatagacttgctgaaagcagcgttgtcactaatcttcaatttgtaaaaaaacaagtaaaatttaaaaaattggccaggtatggtggctcacgcctgtaatcccagcactttgggaggccaaggtgggtggctcacgagc

SEQ ID NO: 94139 - DNA, 449 bp, Homo sapiens
  misc_feature (1)...(449): n = a,t,c or g
atgcatgcctgtggtcccagctactcaggaggctgaggtggaaggatcatctgagtctgggaaattggggctgcagtgagccatgatcgctccactgcaccccaacctgggtgacagagggagaccctgtctcaaaaaaaaaaaaaaaaaaagggtcaaaaacagagcatgaactttttgggagggggtgcaaaaaaaaagctggaaaaaaaaactgaaagggaagggtctgaaaagattccactgattttgccagataaatgttggggactattgttaaggggatttcagggaggggttaggaataggatttaaattccaaaataggctgggcgcgggggttcgcgcctgtggccccagcactttggagggcccagggggggggatcgggaggtcggaaaaatagaaaccatcttgcctaaaaccgtaggggccttgtctatattaan

SEQ ID NO: 94140 - DNA, 415 bp, Homo sapiens
  misc_feature (1)...(415): n = a,t,c or g
cctatctctgcngaaaagtatctaaaaaaaaggattattgtttccccgggggggggaaccacggccggggtcccccttttttatgggggggggggggaaaaaaatcctttttaaaaaagaagctttagggggcgggaaatacccctggggctccccgccgggggaaaaaaaaaaaaccttttttaaaaaaaaaaaaaaaaattgggaaaggccctcctttttaaaaaagccccccccccaaaaatttaaaaaccccgggaattattttcccccggggggggaaaaggtttttggggggaccttttataaggcgggaaaaaaaaaattgggggggcccattaaaagggggaaaaactccctctccctttttgggaaaaaatatcggcggttaaagggcctttcccccccccccccg

SEQ ID NO: 94141 - DNA, 170 bp, Homo sapiens
agcaacctcacttacaagattgtctgtaacagcaaaatccagtagcagttgggtaggctttttcttctcatccacgagactcattaaataacccatggtaggccgggtgcagtggctcacgcctgtaatcccagcactttgggaggccgaggtgggcggatcatttgagg

SEQ ID NO: 94142 - DNA, 413 bp, Homo sapiens
gcacactcatcacagcgctaagctcgcactgattttttacctgagtaggcctagaaataaacatgctagcttttattccagttctaaccaaaaaaataaaccctcgttccacagaagctgccatcaagtatttcctcacgcaagcaaccgcatccataatccttctaatagctatcctcttcaacaatatactctccggacaatgaaccataaccaatactaccaatcaatactcatcattaataatcataatggctatagcaataaaactaggaatagccccctttcacttctgagtcccagaggttacccaaggcacccctctgacatccggcctgcttcttctcacatgacaaaaactaggcccccatttcattcatataccaaatctctccctcactaaaaaaaaaaag

SEQ ID NO: 94143 - DNA, 442 bp, Homo sapiens
  misc_feature (1)...(442): n = a,t,c or g
cgaacccatccctgagaatccaaaattttccgtgccacctatcacaccccatcctaaaaaaaaaaaaaaaaaaaaaaaaaaaaaaaaaaaaaaaaaaaaaaaaaaaaaaaaaaaaaaaaaaaagggggggggggcttttaaaaaaaattctgggggggccaaattttacgggggggggaaaaaaaaattttttttttttttgggggggtttataaaaaaccctgggggtttttttgggaaaaaacttttttttgggggggggcctttttggccccccccccccccaaaaataaaagcttttggggaaaaaaaaaatttttaggggggtggggggggaaaaacctcgttttttttgttgtgttgggaaatttcttctcccgggtttttttaaaaaaaaatttccccccgggcctgggggggtnnnnnnccccncgcttgtact

SEQ ID NO: 94144 - DNA, 455 bp, Homo sapiens
agaataccaacagtagtatgtatgtatgcatttatgtatttattttgagacagagtcttgctctgtcacgcaggctggagtgcagtggcgcgatctcagctcactgcagcctctgcctcctgagtagctgggaccacaggcacctggcccaacagtagtatttatttaacgtcttactacttgaggtctcttgtctatgaaagggggacaataatggttcctatcctgtaagattgcaatgtgaattgtagagtatttggtacacgttcattaagtgtttactgtgtgatgggtatattctacagatgtatatagaatccatgttatgtgacaggtgctttattttttttgatatagggtctcactctgtcacccaggctggagtgcactggtgcaatcttggcttaagtgaagcctttgcctcccgggtaaaggaatttttccggccttaaccg

SEQ ID NO: 94145 - DNA, 366 bp, Homo sapiens
aggaggatgaggcaggagaatcgctggaatccaggaggcacaggctgcagtgagccgagatcacaccactgcactctagcctgggcaacagagcatgactccgtctccaaaaaaaaaaaaaaaatccgaagttccttggggaaaaaaacttagttttaccacaatattctaaaggccatggggtcattacgggcattcataaagggcccgagggagcatggcaaagggaggggcactttaccccacctcagggacctaaaaaagctccacagaggggacagacctaccctgacccttgaaaaaaaggagtcaggaggggatgagaagaggatgcttaccaaacaaaccaccacgctgtggccgaga

SEQ ID NO: 94146 - DNA, 391 bp, Homo sapiens
gtcccgtgtggtggaattcgtttgaagctagcagtggttggctcatagggtttaagaaaagaagctgtatctgtaatataaaagtgcaaggtgaaacagcaagtgctagtgtagaagcaggagtgagttatccagaagatctagctaagataactgatgaagatggctacattaagcaacagattttcaatgtagacaaaacaacctatattgaaagaagatatcatctaggactttcatagtaagagagaagtcaatgtctggtttcaaagcttcagaggacaggctgatgtgattcttaggggctaatgcagctagtaacttctaattgaagccaatacttatttgccattccaaaatccctatgacctttaagagtcgtgcaaaatct

SEQ ID NO: 94147 - DNA, 359 bp, Homo sapiens
gattgcaccactgcactctagctgggctgacagagtgagactgtctcaaaaaaaaaaaaaaaaccccttctaaaacttgggaaaaaacccaaaaagggtttaaagggaaggaattttggaaaaaaaaaaaaaaaccccaaaaaaaaccaaagggccttttttttgaaaagttaaaaaataaaaacccccaaaaaggccccagggcggggggaaagccccccacaaaaacggggggaagggggaaaattttcctttccccaaaaggggaaaccgaaccaaggggcggtaaaaaaacttggtggaaaaaccccccaaaaaagggggaaacctggttcaaacactctgctttgtttttcccc

SEQ ID NO: 94148 - DNA, 420 bp, Homo sapiens
ataggatctctgaataaagcttttctccactatttaaatgcttagatagatgcctttgcaataggggccaccctaggaatagctcaaaaattattaacttaatactggttacttaaattccacctctgttgcttggagttgggctttttttttttttttttattcgaaaaaaaagaggggttttttcccccaggtggaggggagggggttccaatttcggtctccttgaaaccccccctttggggattgaccctttttccgggctaacccctccaaaaagttgggaattaagggccccccccccccccccaataaaattctaaaaattttttttaaaaaaaaacgggttttaatgggtttccccgggggggctagaaatttcggcccttcttgtctttcctgccaggcttcacaaagagg

SEQ ID NO: 94149 - DNA, 345 bp, Homo sapiens
  misc_feature (1)...(345): n = a,t,c or g
tggtagtaatatttttagttttttgaggaacctccaaactgctcttcatagtggttgtactgatttacattcccaccaacggtgttcccttctcaccacatctttgcaaaacattcattattacctgtcttagataaaagccattttaactggactggcaggatatctcaaagtagttttgattagcatttctctaatgatcactggtgttgattgagcaccttttcatttgcctgtttgccatttgtatttcttctgagaaatgtctgtttggattttttgcccattttttaatcaggtaattagattttttcctacagagttgtttgagctccttatatattn

SEQ ID NO: 94150 - DNA, 376 bp, Homo sapiens
ctttggggttttctacatatgaagttgtattgtcttcagagataattttacttcctcctttccaatttgggtacctttttttttttaatggacaaatggctctgactaaaacttccaatacggggtggaataaaagtagcaaaagcgggcatagtctggtcccggatcttacaggaaagctttcagcctccccatggaaaatataagcggggggcttttctcacagggcccttattatgtgggggaaattccctttaatgcccactttgttgagggctttatggggaaggggaatggaattttgtaaaaggctttttctgcgccagttcaaataatcataaaaattttttctccattctgtaaaggggggggaatg

SEQ ID NO: 94151 - DNA, 389 bp, Homo sapiens
cactgcactccagcttgggcaagagcaaaactgtctcagaaaaaaaaaaaaaaaaaaaaaaaggggggggttttttcctttagggggggggaaccccccctttttccccctaaaaaggcctttgtgatttttcccccggcaagggaaaccccacccccttttctccctggggggggaaaaaacccccccctttgggcccttttaaaaaaaaaaaaaaaaaagggttcccctgccctttttggggaaaaatttttgggggggggccccaattaggggttaagggaattttccctcccccccttccaaaaaaaaaagggggtttccggggaggggtggggagcccctcaaaaaagggggatattttttttttcccttggacccggaagccc

SEQ ID NO: 94152 - DNA, 384 bp, Homo sapiens
gctgaggcagagaattgcttgaacccgggaggcagaggttgcagtgagtcaagattgcactccagcctgggtgaccgagcgagactccatctcaaaaaaaaaaaaaaaaaaattttaaaaaatttcccacaaaatgtcaggtatccaggttctttggaaaaaggggttaacattcctgcctggcaacactgatagggaagcacccatgctcctcctgctttgaaggggcacaaactgagggcaaaccctaagggggttggaataatgtcataaaaaggcaaagatgtgacaaaaacatttgggctaaggccacacatgataactaagttggcacaataaaattcgttttggaaggccgagggggtggacacctgagtcggagat

SEQ ID NO: 94153 - DNA, 523 bp, Homo sapiens
  misc_feature (1)...(523): n = a,t,c or g
gtttcactctttntacccangctggagtgcaatggcacgatctcagcccactacaacctccacctcctgggttcaagcgattgtcctgcctcagcctccctagtagctgggatcacaggcatgtgcaacctctgcctcccaagctcaatagatccttccacctcagcctcctgagtagccatagatttgaggaaataatgaggagccagaggaaactgtcccgtctcagactagaaaaggggtggcctgaagcggagatggggaggggagagagcgcgagctggtgggacccaaggctgggccgacctggagttgccaagagaatctgcaggagacactgctgcccagtacagcaaccacaggtgagcatggagccctcgggaccggccagtccaaactgaaatgggctntgaatctacgacttactgcaaacgacaggatgtcaactatctcattgataacacaatgagtacctattggactgaangactntgtgtgtgtgtgtgtgtgtgtgtgtgtgtgt

SEQ ID NO: 94154 - DNA, 265 bp, Homo sapiens
gctggaagacttatatcacccaatttcaaaacttgattactgtaggtttatagtaggttttagtactgataaaaggataggcatatagatcaatggaatagaattgagagtccacaaataaagtctatgactatacatctatggtcatttgatttttttttacaagggtactgagaccaatggagaaagaagactctctccagcaaatggttctgtgacaattggatattcaaatgcaaacagggctgggcatgctggctgaagc

SEQ ID NO: 94155 - DNA, 414 bp, Homo sapiens
  misc_feature (1)...(414): n = a,t,c or g
ccaaggggccagggagaggtttgcggagttgaccgccccctctcttctctgcagcacatactggaaatccaagaggcttaagaagagccttttcttagaataggaggcctggacggtagtcacgatatcctggggagagaaaccaaatttgctgtgagccagggctcttcccgaagcagagagcaaccctcctagctcagggcccctgattctttccactgagggactggagaggcaaggatgacacgggaaccaggcttagctactgctcttctgaaaaccgaggaaagttccccagcacctgtggctttggggttaggacctgagaagncactttctttttcttttcttttctttttttggttttgagacagtctcactctgttgcccaggctggagggcagtggcacgatn

SEQ ID NO: 94156 - DNA, 396 bp, Homo sapiens
gtcccagctggttaggaggctgaggcaggagaatcgcttgggcccgggaggcggaggttgcggcaagccgagactgcgccactgcagtccagcctgggcgacagggcaagcctctgtctcaaaagaaaaaaaaatctacacatccctcaccacactgtacataggacagctgggtgtaaattacatctccatttaaatgcctgtcatagttttatacaactataaaatatatacgtgccaaaataaatttgataggaacattggaaccaggtaaggtgacgcatacctgtagcacttcgggaggatcctttgagcccaggaagtcgaggcttcagtgagccatgactgcaccactgcactctggcccaggcaacagtgagatcctgtcctagaaag

SEQ ID NO: 94157 - DNA, 436 bp, Homo sapiens
cggacgcgtgggcggacgcgtgggcggacgcgtgtggcgttgtcaatgagccagttgtattatgataggtgtaggtcttaatggtaggcttaaaatactcagtcaacaatgctgtcatcagatgtactgtcatccatgctttgttgttccatttatggaggacaggtagaggagatgtagcgtaattcttaagggccctgggatttttgaaatggcaagtgagcattgacttcagctgaaagtcaccagccgcattcgcccctaacaagagtcagcctgtcccttgaagtttcgaaggcatggatgtctcctttctagctaggaaagtactagacagcatattcttccaatataaggctgtttgtttgcattcaaaacctgttgtttagagtaaccatcttcaccaatgagcttagctggatcttctgagaacttg

SEQ ID NO: 94158 - DNA, 235 bp, Homo sapiens
  misc_feature (1)...(235): n = a,t,c or g
ccctaaaaaaaacccccgggggggccaaaaaaaaaggggggaaacggaaataagttttttcttaaaaaggggggnnnnnnnnnnnccccgggggaatttttggaaaaaaaccttttttgggggggggaaaaaaaggggaaaaaccccccnnnnnnnnnnnnccccttgggggnnnnnnnnnnttttaaaggggaaagggggaaaaaaaaaccgaaaaagccggggggggaaaaaa

SEQ ID NO: 94159 - DNA, 396 bp, Homo sapiens
attttcctgagccttttaccacttcggcctagcccttaccccccaattaggaggggactggtcccctgcagggatcacccaggtaaaatccctacaagtcccagtcgtaaacacatacggggttactcgcatcaggagaagaaatcacctgagctgaccataatgtaatacaaaacaaccgaaaccgaagaattcaggcgctgcttattactgttttactgggactatattttaccctcctacaagcctcagagaacttcaagattcccttcaccatttccgacggcatctacggctcaacattttttgaatgcgcaggcttgcacggacttcacgtcattattggctcagctttgctcactatctgcttcatcccgcaactaacatttgactgta

SEQ ID NO: 94160 - DNA, 403 bp, Homo sapiens
cccacgcgtccggcctcccgagtagctgggactacaggcgcccaccaccacgcccagctaatttttttgtatttttagtagagatggggtttcaccatcttaacaaagctatcattaaatcatttgcttgtaatgaaattcaaccgttgtcagctgtgagcgttgcggggctggtggggtgtgtttgagtatgtaagtgtctatttcctgtgctctaacagtgactatttcagttctaacccttcaattgctaattggatgagggaatggcctcttagattgtccttgttttgacttatctgctaaggcgagagaatgtctgggtttgccacacagtcccgcagggacccctgctctttgccaggatttttatatcaagtacttagtttggccaaatttagag

SEQ ID NO: 94161 - DNA, 371 bp, Homo sapiens
cccaggagttcaagactgctgtgaactataatcgcatcactgcaccccaactctggacaacagaacaagaccccatctcaaaaaaatatttttttttgatataaatccaatgatttttatgtttatggaatactgcacttccttaccacaatccttttttttttttttttttaaaaaaaaaaagtttccccctgttttccaggttggagggcaggggggcaatctaagttaattgaaccctttgtttctggggttaaagggattttcctgcctaaaactgcccagaagttggaataacaggggggcccccccccccccacctaattttggtttttttagtaaaaacggggtttcaccgtgtaacccaggag

SEQ ID NO: 94162 - DNA, 372 bp, Homo sapiens
  misc_feature (1)...(372): n = a,t,c or g
gttttctattagactatggtgagctcaggtgattgatactcctgatgcgagtaatacggatgtgtttaggagtgggacttctaggggatttagcggggtgatgcctgttgggggccagtgccctcctaattggggggtaggggctaggctggagtggtaaaaggctcagaaaaatcctgcgaagaaaaaaacttctgaggtaataaataggattatcccgtatcgaaggcctttttggacaggtgtgtgnnnnnncnaccannnnnctcacncncnctttctctctcnttcttttnttccccttttttggtttttttcttttctttcttcctttcggcctttctctttccctttcccttttctcttcctttt

SEQ ID NO: 94163 - DNA, 354 bp, Homo sapiens
  misc_feature (1)...(354): n = a,t,c or g
ggaagaaaccggggtacagtctgctgggtagacagcaacactgttaacaatgccacaaatgtttctggctatttttttcaaggggagcatgaaatgaatctagtctccagctctactaaagtagaataagagtgggttcaccagctgagcaaggtggctcacgcctgtaatccctgcactttgggaggccaggctctgagaccagcctgggcaacaagcaagaccccatctctacaaaaaaaaacaaaaaatcgaacattagctgggcatggaaacttgtgcctgtagatccagctactcaggaggctgaggtgggaggattagttgagcccangaggttgaagttgcagtgaa

SEQ ID NO: 94164 - DNA, 740 bp, Homo sapiens
ttttgtataaaaaagataatagggtttattcctggaaagtaaggttgttttaacattagtcaaccagtgtaatcactcacgaacagaataaaggagaaaatccacatctcgatgactgcagaaccaatcatctcaattattaccgaaaaagtgtttgacaaaattcagcaccccctcatactacaaaaacctttcgggcaaaagtaggaatataaattcctcaatctgataaaaggcatctgtgagaaaaatctatacctaacatcatatataatggtgaaatattaaagcaaggatgtctgctctcaccatttctgttcaacattgttctagaagacatagtcatacaatcagtcaagataaaagaaggcataaacattgaaacacaagagttaagatagtcattagttggccagacatcccaacactttgtgagactgagctgggaggatcgtttgaggccaggagttcaagatcagccttggcaacaagcttgttgtaaacattaagagaaatgaaatgtcttgtacagcatcggcacataggagccttctaatgaggagcctatccctgaaaaagtgaaagatatatcatttttctaatccttcgaataggataaactaagtttttgatctctctgagttattcaaaaggctcagggatttatttcccatcacaacactacaaggtagtttagaaaatatacatacttgagcaacatggtggagtaggcacattga

SEQ ID NO: 94165 - DNA, 267 bp, Homo sapiens
  misc_feature (1)...(267): n = a,t,c or g
ccggcacaagtaacacttgtttaaaaaagggggtgggggggggggggacccccaantcccccattttttttttttattaaaaataaaaaaaaaacaccttgccaccttttttttcccacctcccggttgtaaaacctaaccctacccctaaatttgtatatttccccaaccccccccttccccccagatttacctttttaaaactacttaccaaatcccaaattgacttcccccgcccccaatttccaaatttatgatttccaaatc

SEQ ID NO: 94166 - DNA, 365 bp, Homo sapiens
tatatcgcggtcgtttttatgtttgggtttatttgttcctggggggctcttgaaggtaatagtttgcttttttgcttttttgttttttggaccaccccgttaaaaaaaaaaaaaaggggggggggggggggaaaccagggggggagttcttcggggggggggggggggggtttgccctgcgacagaaaggccactgtaagggggggggttggtgtctttcccacgccgagaaaaaaaaagcggcggctagggggggaataatagagtggccccccacgaaaaagaaagggggggggggggaaaaaaaaaaggggggggggggggggggggctctttcaaaaaaagaacactgaggggtggggggg

SEQ ID NO: 94167 - DNA, 350 bp, Homo sapiens
agttggatcttgggagcctgatgaaaaagtaagtcaccgtgaactactactttctttcttattttatccctttttttcccacatttcctcctaggagacactgattgactttgccttaacttccacggatatctgggccctgtggcatgatgctgagaaccaaacagtagtgaaatacatcaactttgaacagtatgggtcacttaattctgtcatcctacctcaccccaagcaatttcatgctaagaagacgagaggccgggcgccgtgtctcatgcctgtaatcctaacactttgagaggccgaggcaggcaaatcacttaagctcaggagttcgagaccaggctggg

SEQ ID NO: 94168 - DNA, 367 bp, Homo sapiens
gaccaatctgggcaacatagtgagaccaccatttctacaaaagaaagtcataattttttttttaaattatccaggcgtgggccgggcgcggtggctcacacctgtaatcccagcactttgggaggctgaggcaggcagatcacaaggtcaggagatcaagaccaggagatcaacacggtgaaaccccgtctctactttgaaaaaaaaaaaaaaaaaaaaggccccaaaaatttttccgggggggggggggggagcctttattcccaattattaagggggttggggcaggaggtcaacccgccccgaaattccaaatttatgaatggaaaatccggaaaaccccccagggttccttttaagtgggctt

SEQ ID NO: 94169 - DNA, 395 bp, Homo sapiens
  misc_feature (1)...(395): n = a,t,c or g
ccaaggaaaaaaacaagtctcagggctccattggttttcctgggtggggggccctgaccccctgttctagcccggcccaagaaccctccaccacaccccggcctgctgaaaggtgccctgtctacctgagcagagcctccctctccaaggctctgtcgctgtcgctccacaactccctcaccctctccctttctctacttccccctccacctctcgctctactgtggagctctctcttcccccctctctctctcctccccccttttctgactctctctctctctctatcgctggctctctctctccctctggntctatttctccatccctctctcccttgctctccttctgcagcaggaagagctgcagacaaaaccccttagacaccgagttga

SEQ ID NO: 94170 - DNA, 414 bp, Homo sapiens
ggcacgagaactggaacagcacctgaggtcatatattaaatcgccttatatcctgagatctttttctggattctgtgttctggtccactaatctatttgtttggtcctatagcaacaccatattgattggctaaaagtagtgttataggatcttctgatatgtggtgaggcaaatgccctcccaagcatcactgttttttttttaatacttctttggctattcttcagcatttattctactaaacaaagctgagatttcatccaattaaaaaaaaactttaatgcaattctaattggaaatgaaattagtatgttaattgttagaacacgacatatctttccatttgttcagaacttgctttataaccttcagtaagaccttctaaacttctccataaaggtcctgcccctttc

SEQ ID NO: 94171 - DNA, 404 bp, Homo sapiens
agcacgaggacctgtgatgcattccgagttgatttttgtataaagggttaagtttaggatcattttctcctacatacagaatttccaattctaacatcatttgctgtgtactctcctttgtttatcgaatggctttggcacctttgtcaagaattaatttgctatatttatgcagatttatttccgggttattgattctgtcacattgatcaatgtggcattccctctgccaataccacactgtcttgattactagaaaattgcgccgtgtgaatcttcttatcttttttttttcaatattgatcgacctttgcagaaacattttaaaatcagcttgttaatatctatgaaaaatttggccgggatttccattataatcacattaaattgagaaaagcaatttg

SEQ ID NO: 94172 - DNA, 403 bp, Homo sapiens
  misc_feature (1)...(403): n = a,t,c or g
ggcacgagagagttgattccaatactcacgaatgactttgaggggtttaagacttcagtggaggaagtaactgctgatgtggtgggaattgcaaatgaactagaatcagatgtggagcctaagatggcatggtcttccaatagaaggctgtttcatctacattgaaaatctgttgtgtagtgtagccacttcatcagtggtcttacctcagtcttgtggagaacttgctgcagcttctacaccagcacttgttgcttcaacttgcacttttatgttatggagatgatttctttcctaaaacctcatgaaccaacctctgctagcttcaacctttccttctgcagcttcctcagccttcatagaattgaagagagttagggccttgctatggattangctttgg

SEQ ID NO: 94173 - DNA, 517 bp, Homo sapiens
ggcacgagggagtagaaaggctcaatcatggaagtgacattttgagcttactcttaaggaattaatgttttgtgaaacagagaaaagggggcattttatatggaaaggaagctcaaaggcatgtgcttggagcatagtacttgggtgcagttgaggcatagtgggaaataaagttgaaatggtggattggggccatttcagaaggcttactacttaatttgaatttgactctatggacagtgggaagccattgaatatatatatttggttttatttttagaggtagagtcttgctgtcactcacccaagctagagtgtagtgttgcagtcatagctcactgcagctttaaacttctgggctcaagtgagcctcccagtagctgggactataggtgcacaccaccatgcctagctttttttttttttttttgtagaaaagggggttcaaccttgtgtcccaggctggttggaaactccaaccctctaaagtttccccctttgggcaccccatgttttt

SEQ ID NO: 94174 - DNA, 415 bp, Homo sapiens
ggcacgagatcgcttgagcccagaaggccgcagtgaggtgagatcgcgccattgcactgcagcccccggcggcagagccggagccccgtctcgaaacaaacaaacaaaaaccaaccaaccaaccaacaaacaaacacagaccaagaaagaaagagcccaggcgacctagtgaaaacctgttcgggctgggacgtacctgtaccccagctgttccggaggctgaggccaggaggatgggtggacgctgggaggtggatgctgcagtgagcagtgattgcaccactgcactccagcctgggtgacagagccagaccccgtcccaaataaataaacataaaaataaaggaaccagtttgtagaaagcgggagagggtcccattgaacttcaagccttcgagcaacagctgtggctgga

SEQ ID NO: 94175 - DNA, 390 bp, Homo sapiens
ggcacgagttcttaaaagcttagagcataacacaaatatttatttgattgcgccatctaacaaatctgaataaatacatttcacgtctaggcattgcgttttgtatttctctaaaccagtgtgggcgtgtgtgtatgtgtgtatcactttacccagccacagcaagtgattatggatgaaatggctacagcaaagctaaaactatgatatgcctttgagaaaaaagttctgagctgagtgcattgtctcatggctgtaatcccagcactttgggtggcaaaccatgggaggattgcttgaggccaggagttcgagaccagcctgggaaatatagctagatcctgtctctgttggccaggcacggtggctcacacctgtaatcccagcact

SEQ ID NO: 94176 - DNA, 394 bp, Homo sapiens
ggcacgaggacgggataaacctatttattacctcagaagtttttttcttcgcaggaattttctgagccttttaccactccagcctagcccctaccccccaattaggagggcactggcccccaacaggcatcaccccgatagagcccctagaaggcccactcctaaacacatccccattactcgcatcaggagtattaatcacctgagctcaccctagtctaatagaaaacaaccgaaaccaaggaattcaagcactgcttattaccattgtactgggtctctattttaccctcctacaagcctcagaggacttcgaggatcccttcaccatttgcgacggcatctacggctgaacattttttgtagtcacaggcttgcacggacttcacgtaat

SEQ ID NO: 94177 - DNA, 390 bp, Homo sapiens
ggcacgagggtggtgcgtgcctgtggtcccagctactcaagaggctgaggtgagaggatcacttgagcccgggaggtcgaggctgcaatgagccatagtcgccaccgcattccagcctcggtgacagagtgagaccttgcctttaaaaaaaaaaaaattccccccggaatttttagatttattccatcctagctgattgcttgcctccatatgaggggcactattttagcatcctccttcacatcctccttcatttgacattttgacttccaaatttttgcacctaaaaagggaaacccagagagagatgagaaattatttttttacctccccaaggccttttgagtttagtattccaaggattcctaggattgctgagaatgaaatgaa

SEQ ID NO: 94178 - DNA, 387 bp, Homo sapiens
ggcacgagggctcggcgtggaagcatatacttttagtcccagcttcttgggaggctgaggtaggaggatcatttgagcccaggagttcaaggtcacagtgagccatgattgtgccactgcactccagcctaggtgacagagaccctatctctttaaacaaagaaaaggggtcgggtcgggggggtagtgtggataaaaatactaggaataaacttaaccaaggagataaaagacttgtactctgaaaactacaaaacatcgcttaaagaaatcaaagagagaatacaaataaatggaaaaacattccgtgtttttaaactgaaagagttaatactgttaaaatgtccatactacctaaagcaatctatagattcaatgtaatccctg

SEQ ID NO: 94179 - DNA, 892 bp, Homo sapiens
  misc_feature (1)...(892): n = a,t,c or g
ttggctgcgtccccacccaaatctcatcttgagttgtagctcccacaattcccacatgttgtgggagggacctggtgggaggtaattggggacgggtctttcctgtgctgttctcgtgatagtgagtaaatctcacaagatctgatggttttataaaggggtgtttccctgcacaagctctcttctcttgtcttctgccatgtgagacatgcccctcaccttctgccacggttgtgaggcctccccagccacgtggaactgtaagttcattaaacctccttcttttgtagaaaaaaaaaaaaaaaaaaaaaaaaaaaaaaaaaggttttttttttaaggggccccaacttttttcctttttgggggggttattttttttttggccctggcccgttttttaacaccggggggggggaaaaaacaatttttccccccccccctttttttttttttttntnngntttaatttttttttttcccccccccccacaacaaaaaccccaaaaaaaaaaaaaaacccccctccccctcctcccccttcccccacccttctcccacataccataacaattcctttctcccccaccccaacatcatcacttcatccatcaccctccccctcaaccacctttccaccctttctattataacccctttaaatttttttttttttaaaatattaatatnnnanntnnannataaaaataaatatattttttttaaantaaattttttttttttattnnaaatatattttttttttttnaaaaaaaaaatttttttatcccccccccccaaaaaatttccccctnttttaaccaatttatccctccccatacttattaaaaatnttctttnaaaaccacccccaccacaaatttccgcccattac

SEQ ID NO: 94180 - DNA, 496 bp, Homo sapiens
ggcacgagagcctatcaaatagtaaaacccaccccatgacccctaacaggggccctctcagccctcctaatgacctccggcctacccatgcgagttcacttccactccataacgctgctcatactaaggctactaaccaacacactaaccatataccaaagatggcgcgatgtatcacgagaaagcacataccaaggccaccacacaccacctggccaaaaaggcctgccatacgggataatgctatttattacctcaaaaggttttttcttcgcacgatttttgtgagccttttaccacgtccagcctaacccctaccccccaattaggagggcactggcccccaacaggcatgaccccgctcaataccctgaaagacccactcctaaacacatgcgtattactcgcgtcaggagatcaatcacctgagctcaccatagtctaatagaaaacaaccgaaaccgaatcattgaagcgctgcttatgacaattgtac

SEQ ID NO: 94181 - DNA, 173 bp, Homo sapiens
ctttactaaaaatacaaaaattagccaccatgcctggctaattgggaggctgaggcgcgagaatcgcttgaaccctggagatggaggttgcagtgagcaaagatcgcaccactgcactccagcctgggcaagagtgagactgtgtctcaaaaggaaaaaaaaaaaaaaggggg

SEQ ID NO: 94182 - DNA, 733 bp, Homo sapiens
  misc_feature (1)...(733): n = a,t,c or g
ttttttttttttctacttagaatatttatttattctctgacatgacaagacacaaaaagttacaacttcttaaaactcttcaaaagaaaaaaatataattctgtaagcagcagcagcagcttccaaggttctgatgtgacgggaggggcagctcccaggagcaaccgtgaactgggggggtccaggcctgagccccaggtagtgtcgctgggaaggggcctctgtggagggccccggttttggggacacagcaccagcacatcagggtctgtcaccaacacgatcacatggccagggcggggcagggagagcttcggctcacagcagggatcgcccggtggcaggggggatggggcttctgaagtgtggtcaggggccttatgcccggaggcgggaaggatggggcttctgccagtgtacccagggggcnttatgcagaggctgaaaaaggagggtgggccctgagaggacttgggggtgtggcagctcctggccctccctccagagcagggcaggcaccctcaggctccacactggtcccaatgcccgccctgctccctggccaatcccaggccagggtggaggactcaggagagaccaagctgggtaagttagttcctggacggggtcaacagagcctggggcacacacagcacacagagcgcctggccacggcgggaaggggggcagtccccagcagccccatccccaagggccaggccagatccccaca

SEQ ID NO: 94183 - DNA, 435 bp, Homo sapiens
caatggtaatttaagtggctcttaaaaagtcatgcaatatgtttctggacacgttcctgatcctattgcgataatgtatgtgtgccctccctgtgggcacaccacctgggcattaggactgaaattcctgagttcttcctctcaaaatttctgtgcaccagtattattcctcattttacatacaggaggcaactaagactcatacagggctcaactgaataagaggcttaagaggataaactggagcagaaataagccttaggtgctgcccagtttacacttcctgggatggatgtttttgtttgttttgttttttgttttttttgtttgagatggagtctcactctgtcacctaggctagagtgcagtggtgtgatctcggttcactgcaacctctgcctcttgggttcaagcaattctcatgccttggcctcg

SEQ ID NO: 94184 - DNA, 436 bp, Homo sapiens
ggaacgtgttcctttccccattgcttgcttgtaccagctttgcttaagatctattggctgtaggtgtgcagctttatttctgtgttctctattgtgttccattggtctacgtgtctgttattgtaccagtgccgtgctgttttggttactgtggtcttatagtttgaagccacatctgtgtgatgctgctggctttgttctttctgctttgggttgctttggctattcaggctctttctttggttccatctgaattttagaatagttgttttctaattctgtgaaaaagttccaacctctgtgaaaaatgaggttggtagtttgataggacagcattgattctgtaaattgctttgggcagtatggccatttttaaactatattggttctttcaatccatgaacatggaatggttttccattttttgggttcatcc

SEQ ID NO: 94185 - DNA, 499 bp, Homo sapiens
  misc_feature (1)...(499): n = a,t,c or g
aggagtgccnnnnnaggggngaaaggaaaccttcgacngannacatccgaaaancanacgccagcttggacgagggtcgagataacactactggattccagcttgggtgacagagtgagactccacctcaaaaaagggaaaaaaaagggaaacccggggggaaaaaaggaaaactgggaaaaaaccccaaaatttaaaggggggttttggggggggattttttgaaaaggggggggaaagggaaaaaaaaaatttttttaaaaaaaaaaaaaaaaatgggggggggggccttggaaaaaagggggttaaaggggggggggggggaaaaaaaaaaaaaatttttgggaaaagaagggggtcttttaaaaaaagtttgggggggtttttttttttaaaaagggggccgaaaaaaattttaaaaaaaaaaattggaaaagggggggggggaaaaaaaaaaaggtgtgttgggggtttggttttgcccaaaaaaggaaaaaag

SEQ ID NO: 94186 - DNA, 390 bp, Homo sapiens
  misc_feature (1)...(390): n = a,t,c or g
aggagagtgagttctgagtcccggtggcgcagcttggagagccgggggcgcagcttggagatccaggggcgcatggagaggccacggtgccagaggttcagggagaacagctgcgttgctcccaggcactgcaaaggcccgggggggaagggtctccaggctttattcctcccaggcactgcagaggcaccggtgaggaagggtctccaggcttcactcagggtagagaaacaagcaaagcccagcagcgcacagggtgcttgttatcctgcagagggtgcctctgcctctctgtgtcaggggacagctnnnnnnnnnnnnnnnnnnnnnnnnnnnnnnnnnnnnnnnnnnnnnnnnnnnnnnnnncccgagctccttagacactcctcg

SEQ ID NO: 94187 - DNA, 436 bp, Homo sapiens
ctttctaagaaactgccaaactgctttccatgatggctgcaccattttttcatttttaccagcagtgtatgaaggttcagattttttcaaatttttttgccagtacctatctgtctttttaataaagccatcctagtgggtatgaattggtatttcttgtgattttgagtaaatgtctctgatgactaatgacattgagcatcctttcatgtgattactagacagtagtattaatatatctttggagaaatgcctattcaaggcttttgtgaactttttatgatgaaaaaatcttaaaaattatatatttatcatgtacaacatgttgttttgaaatatgtataccttggcttaattggagctaataaatatatgcattaactttttttggggagaacgcttaaaatctgttttcttagtgattttcaagaatgta

SEQ ID NO: 94188 - DNA, 386 bp, Homo sapiens
  misc_feature (1)...(386): n = a,t,c or g
ctcacacgtggccccctcctccacgcagccccaccgcgcctcctgcacgtacgcagccccccagtttgcagtctgcccttcccgccccccagccaggaaaaaaaaaaaaagctttgagaaatgaaaaagggtgaaatggttcaaaaaaggggctgggcagccacggccgccacccctaaggggccccaatggccgaacccgatctcctgctggaatctgtaagggaggaggtgggttttgcccgggagtttcaaaagcacagggggcaccccgcccagggggaagggaaactgttgttccaggtttttttggccggcgcccgccccttccaaggggcccaggtccaccaggagtgctttggacttccaggcactgccctcttcgtn

SEQ ID NO: 94189 - DNA, 417 bp, Homo sapiens
  misc_feature (1)...(417): n = a,t,c or g
gatcgcgccaccgcactccagcctgggcaacagagcgagacttcgtctcanaaaaaaaaaaaaaaaaaaaaaaaaaaaaagggggggggcccggggggctaaccccttaaatccaaacctttggggggggcgggggggggggaacccccgccggggggagttgggaaaaaaccgggcaaaaaggggaaaacccttttttttttaaaaaaaaaaaaaaattaaaaggggggggggggagcccccttaaacccccccaaccgggggggggggggggaaaaaaaattttaaccccgggggggggaaaatggggggaccaaaaaagggccctttgccctccaacccaccgggggaaaaaaaaaaaaaacccctcttaaaaaaaaaaaaaaaaaaaacccgggggggccccctgcccggggg

SEQ ID NO: 94190 - DNA, 392 bp, Homo sapiens
cgtaaatctaactttcttcccacaacactttctcgggctatccggaatgccccgatgtttcatgtggtgtatgcatcggggtagtccgagtaacgtcggggcattccggataggccgagataggttttcggtaatacagaccgaaaaactgggattattgtgcgcaggaaatgtcttggggctatgaggagtgtcaacgatgtagcccggggagtatgggatcgcagagaatgaggccgcgtatggaggttaagaaggggccttaaaagaggatttggaggaaaaggggagctactccgaacaacttgacgtggacaaaggtttttgcgaaatagtaattgtgggggggaggaattttattttctgacacacaccctttgggggggcttacg

SEQ ID NO: 94191 - DNA, 155 bp, Homo sapiens
  misc_feature (1)...(155): n = a,t,c or g
ttttgctttgtcacctagtctggagtacagtggngcaatcatgactcactgcagcctctttctcctgggttcaaatgattctcctgagtagctgggactgtaggcatgcaccaccacatctggctagtttttgtatttttaggtcgacgcggccg

SEQ ID NO: 94192 - DNA, 455 bp, Homo sapiens
ggaaactaaaatattacagaataacagaagatttttaagtactaaaaatctaggaccccatgggacttgggatatgaagaacacacgatgaatctgaacaagtctagatgaagttttctcaggtttggggaagagaagaaacagtcaaaggagaaaggaagatatctaaaaacccaatgcgtccctcaagagggtcctcatactttgtatacaacttcagagttctagacaacaaaagaacaacccaaccgaaaaaagtgggcaaaagacttgaatattcttttctctacagaagatctataaacggtcaacagatacataaaaaaatacttaacatcattagtaatcaagaaataccacttcatacccactaggctgtctaaaatgaaaaagacagaacatagcaaatgctgggaaagttgtggagaaattgaaactcttacatgtagctggtg

SEQ ID NO: 94193 - DNA, 449 bp, Homo sapiens
agacactgctcagcaacctagaagaagccaagaagaagaaagaggatgccctaaatgagaccagggaatcatagacaaagctgaaggagctcccaggagtgtgcaatgagaccatgatggccctctgggaagagtgtaagccctgcctgaaacagacctgcatgaagatctacgcacgcgtctgcataagtggctcaggcctggttggccgccagcttgaggagttcctgaaccagagctcgcccttctacttctggatgaatggagaccgcatcgactccctgctggagaacgaccggcagcagacgcacatgctggatgtcatgcaggaccacttcagccgcgcgttcagcatcatagacgagctttttccaggacaggttcttcacccgggagccccaggatacctaccactacctgcccttcagcctgccccaccggaggcctca

SEQ ID NO: 94194 - DNA, 436 bp, Homo sapiens
  misc_feature (1)...(436): n = a,t,c or g
tgattgtctggttttttttaggcagaatcctttcactttaagaccacaggacaggggcaagtttagcctctggtactaatttaaattaaaataattttagagcctgttaacaacacatccaactcaatgtatactgagtacctatgataaacatgctaaatcagttaaaagtatgaaaatacaaagataaatagaagagggctcctaactaaataagcttatcacctgaaaaaaaaaaaaaaaaaaaaaaaaaaaaaaaaaaaaaaaaaaaaaaaaaaaaaaaaaaaaaaaaannnannnnnnnnnnnaaaannnnnnnannnnnnnnnngggggggggcggggaaaaaaaaacttcgcgggcgccccttttaagtgggttagaaatatttttttttttttttggggggtgtattcaaacgcccctgcgcaattag

SEQ ID NO: 94195 - DNA, 454 bp, Homo sapiens
  misc_feature (1)...(454): n = a,t,c or g
ccctaacgtttacataaagaagctctagttcttatagaaataacaaagcaaataaaagttcttaacagtaaaaaaaaaaaaaaaaaaaaaaaaaggggaaaaaaaaaaaaaaaaaaaaaaaaaaaaaaaaaaaaaaaaggggggggggcttaaaaaaaaacccgggggggggaaaaaaaaaagggggggggaaaaaaaaaattttttttttaaaggggggggaaaaaaaaaaccccggggggattttggaaaaaaaaccttttttgggggggggggaaaatggggaaaaaccccccaaaaaaaaaaaaggcttgggggaaaaaaaaaaattttaagggggaaaggggggaaaaaaaacctaaattgtgggggggggaaaaaattttttaagggggttttttttaaaaaaaattttcccccggggggggggggggcnanncnnnccaacattatg

SEQ ID NO: 94196 - DNA, 408 bp, Homo sapiens
cggacgcgtgggcggactcgtgggcggacgcgtgggcaagcttgagatattatactatctcccttggtattttttgtgtgcaaagtcttaaaattggatttataacattgataataaaaatataaaacgtttttcctcgggagttaagatggtaaaaagaaaaaaatagaatgaatatgatcatttctccatcataaaggaaagaagagacttcattgtgtgtgtgtttttttttattttttcgagatagagtttcactgttgtcacccaggctggtctcagctcactgcaacctccacttcctgggtacaagcgattctcctgcctcagcttcctgtgtagctgggattacaggtggtgcacccacaaggctcggctaatttttttgtatttttagtagagatgggg

SEQ ID NO: 94197 - DNA, 448 bp, Homo sapiens
ctcccttcatcctgttatttattcggaagggatcaaatcacgacagagtccatgttggaggtgataaaaaactgttaaaaaaaaaaaaaaaaaaaacccaaaccaaaaaccaaaaaaaaaaaaaaacccccaaaaaaccccttgggggggggtaaaaaatttttttaaccggaaaaaaagcccgggcccgggaaaaaaattttaaaagaaaaggggaaaaaaatttgccctttccccccccaaaaaaaaaatttcaaaattttaaaaaaaaaaaaaaaaggcgccccccttaaaaaaaacccttgaggggcccaaaatttcccggggatgaaaaaaataaattttttcccataaagggaggttaaaaaaaaccccattggaatttttaaaaaaaaacccttattttggggggggcccattggggccaacccccccccagaaaatttag

SEQ ID NO: 94198 - DNA, 442 bp, Homo sapiens
  misc_feature (1)...(442): n = a,t,c or g
cccacgcgtccgcaacctgggaaattcattttttcttttcttttcttcttggttttttttttttttggaaacaaggggcccttttgccccccgggggggggggcccggggggaatctgggctccccctcccctttgggggtaaagggaattttatggcctaaccccccggagagccgggattaacggggggggccccccccccccagttaattttggttttttaaaaaaaaacagggtttaaccaggtggcccgggggggtttaaacctcgggggctaagggaacccccccccttagacctccaaattgggggggatcccgggctggaaacctggcccccccccacccgggaaaccccttttaaatttttggggcgcttttaatcccctttaaaaaantcccacccagaaacccacttattggggggaaaaataacttgttt

SEQ ID NO: 94199 - DNA, 445 bp, Homo sapiens
tctgtgccttgccccttgggtttggcttaggggcaacagtgggttcaagaggactggggcccacaacctgcccccaggcttcctccagcaaaaggctcttgtcagaaagaagaaagcagtttgctatctttttttttttttggaaagggggttcccttttggtgccccgggggggagggaaggggccaaatctgggttaatggaaccctgggcctcgggggtaaagggaattccccgccctaacccccccaggggccaggaataccgggctgggcccccccccccgggttattttggttttttaagaaaaaaggggggttttttatgggggggggggggggcccaaacccccggccccgggggaatcatcccgtttgggctccccaaggggtgggaataacggtggggaccccccccccccacccgtgtttttttttaaccagag

SEQ ID NO: 94200 - DNA, 438 bp, Homo sapiens
  misc_feature (1)...(438): n = a,t,c or g
tcagcttggattttgatagggattatatttaatctgtagctctgtttgtgggaagtatagccatcttaaccacacaaagtcttctgacctatgaatatgagatgtctttccatttatttagggtggcttttatttcatcaacattttgaaattttcactgaacatgtcttgaacttttttttttttttaaaaagggggttttgaaaggggccccaggttgaactgaacttccggggttaaaaaaattcccctttttcaccctcttgaaaccttgggattttgggccctggcccccatccccagtttttggcctttttttggtaaaaatcctcccaatttaattcttttgggggctaaaaaaaagggaagggcctaataaattcctttttgaaatgggcattggcaagggaaaaaacaaaaaagggaggggggagggan

SEQ ID NO: 94201 - DNA, 456 bp, Homo sapiens
tcagcttggattttgatagggattatatttaatctgtagctctgtttgtggtaagtatagccatcttaaccacacaaagtcttctgacctatgaatatgagatgtctttccatttatttaggttttcttttatttcatcaacattttgaaattttcactgaacatgtcttgtacttttttttttttttaaaaagggggtttggaaatgttgccaaggctgaatttaacctccgggcttaaaaaaattctccattttcaccctcctgagaacttaggattataggcaaaggccaccttcccaagtttttggcctttttttggaaaaaatcctccctatttaattcttttgggggctaataaaaagggaagggcctaataaattcctttttaaaatggcccatggcaagggaaaaaacaaaaaatggaggttggagtgtaaaaataaaaagaactttg

SEQ ID NO: 94202 - DNA, 454 bp, Homo sapiens
  misc_feature (1)...(454): n = a,t,c or g
caccttactaccagacaaccttagccaaaccatttacccaaataaagtataggcgatagaaattgaaacctganaaaaaaaaaaaaaaaaaaaaaaaaaaaaaaaaaaaaaaaaaaaaaaagggggggggcctttaaaaaaaaacccggggggggccaaaaataacgggggggggaaaaaaaaattttttttttttaaggggggggaaaaaaaaaaccccgggggaatttttgaaaaaaaacttttttttgggggggggaaaattgggccaaacccccccaaaaaaaataaaggtttaagggaaaaaaaaaaattttaagggggaaggggggaaaaaaaccccccaattccctggggggaaaaagttttttttctggggtttttttaaaaaaaaattttcccccgggggcggggttttnnnnnnnnnnnnnnnnnnnnctntttaaattatttt

SEQ ID NO: 94203 - DNA, 1235 bp, Homo sapiens
  misc_feature (1)...(1235): n = a,t,c or g
aactttctttctagcatgcaattgtatttttattttattttaaaatctttttattaaactataatgtatacagaaaatgcatatatcataaacatacagctcagtgcattctcaaaaactgaacatactcagatcaagaaacagaacatgaccagcaccccagaagccttccccactttcccttccaggcaagcccccaagggtatacattatcctggcttctcacagcatagattcattttgcctgttttgtattttatataaattgagtcaattatatatcatataattgagccatatactctttagcatctgtcttctgtcattcacattatgtatgtgagagtcatccatatgttgcatatagttgtagataattcattttcattgtcatgttgtatcccattctgtgaatatgctgcaatataatttatccattctactgtttgtagacatttgggttgtttgcagcttgggctattaggaattgtgttgctgtgtattggtgaacatatgtatgtattcctgttaggtatgtacctaagtgtatccatatgttcagctatatgttataaaaccagttttcaagnnnnnnnnnnnnnnnnnnnnnnnnnnnnnccagtatgcgagttctagtgctccacatacttgccaacatttggcattttccatcttttttactatagccattagtggtgggcatatagtgatatgtcagttttagttttcggttttattttcttgtcctccaaaccattgtagtatctccccaggatagatgagtgatggctgagacctgagacctaggcctgttcctcacatgactgcaccattttacattctatcaatgtatgaggtttccggtttctccacatccttaccaactcttattattattagtcttttttattatagctatcctagtacatgtgaagttatattgtgatattaatttacactgccctaatgattaataatattgatcatcttttattgaggaatctttgatgaagtgtctgtttaaatcttttgcccattatcagttggggntatttggggnttttttattgttgagcactgatagnttttaaaatatattcnggggggtaactncactatcagncccatatccntggcaagggtttctcccgtcntcgggntgtcntttcatcncctangggtgtccttgngggacgggaccgcttattttggnggaggccgttcctnccattggt

SEQ ID NO: 94204 - DNA, 327 bp, Homo sapiens
aggcgttcacggctgtgaattcggcacgagcccccgaaacgctacgtgagctgggccctgggccagaggcagaaaacggacggaagaaaaggtctggccggagatgggtctcactctgtcacccagactggagtgcagtgagtggtgcgatcatagcttactgcagcctgaaactcctgggctcaagtgatcttctcgcctcagcctcctgagtagctggagctacaggtgtgagctacccagcatggctcatttgagatttctgagtagagaagtaacatgattaaacttgggtattgagattattaataaagaagaagaaaaaaa

SEQ ID NO: 94205 - DNA, 446 bp, Homo sapiens
  misc_feature (1)...(446): n = a,t,c or g
aaggtagtgagttatctcaattgattgttcacagtcagttacagatcgaactccttgttctactctttccccccttctcactactgcacttgactagtctaaaaaaaaaaaaaaaaaaaaaaaaaaaaaaaaaaaaaaaaaaaaaaaaaaaaaaaaaaaaaaaaaaaaaaaaaaaaaaanggggggggggccttaaaaaaaaaccctgggggggcccaaaaaaaccggggggaaaaaaaaaaatttttttttttttaagggggggaaaaaaaaaacccccgggggtttttggaaaaaaaacccttttttggggggggggaattttgcgccccccccccccaaaaaaaaaaagccgttggagaaaaaaaaaaatttttaggggggaaggggggaaaaaccctctcctcttccttgtgggaaggaaaaattttctcacaaaaaaaaaa

SEQ ID NO: 94206 - DNA, 429 bp, Homo sapiens
  misc_feature (1)...(429): n = a,t,c or g
aaggattgctgtccatcatatataaagagctccttcaaataaataagataagcaacttagtaggaaaatggacaaaggataagaaaagcaattcttaaaaaaagaaatccacaggctagctaaataatatgaaaagatattcaacctccttagtaactatagagatgtaacttaaaacaagatactattttcaccctttgaacaaaattaagcatgataataatattcattgctgataaggatataaggaagtaggaattcttcatatactgttggaagcatgaattgggaaacccttttggaaggcaataacagtcacagttttaaatgcacctgttttttgtctttgattttgttttgagatggagtttcactcttgttgcccaagcttgaagtgcagggcaccaacttcgtttatcggggcctccn

SEQ ID NO: 94207 - DNA, 448 bp, Homo sapiens
  misc_feature (1)...(448): n = a,t,c or g
tattaacatgagattgagattttttgctcaatatcactagttatactattaataaaaacacaattttctactaaaaaaaaaaaaaaaaaaaaaaaaaaaaaaaaaaaaaaaaaaaaaaaaaaaaaaaaaaaaaaaaaaaaaaaaaaaaaaaaaaaaaaaaaaaaagggggggggggggggggaaaaaaaaaaaaggggggggggggggggggggggggagggggaaaaaagaagcacacaaaaagggggggggggggggggggggggggggggcccttaagggggaggaaaatttttggggggggggggtgttaaaaaaaaaaaaacccgctaagaaaaaagagcctgtaaaaaaaaaaaagggaaataggagggggggggggggaaaaaaaaaaaaaataggggggggggggggaggtcccccccaaannnnnttttggtagccttg

SEQ ID NO: 94208 - DNA, 440 bp, Homo sapiens
  misc_feature (1)...(440): n = a,t,c or g
aaattgaaacctggcgcaatagatatagtaccgcaagggaaagatgaaaaattataaccaagcataatatagcaaggactaacccataaacaccaaaaaaaaaaaaaaaaaaaaaaaaaaaaaaaaaaaaagggggggggcctttaaaaaaaaacctggggggggcaaaaataaaggggggaagaaaaaaaaaaattttttttaaaaaggggggggaaaaaaaaaccctcgggggaattttggaaaaaaaactttatttgggggggggaaaaaaggggaaaaacccccccaaaaaaaaaaaagccttgagggaaaaaaaaaaatttaaaggggaaaagggggaaaaaaaacctaaaatccctggggggaaaaaaattttctttcgggggttttttttaaaaaaaatttccccccgggggcgggggtaaatatgnnnnncn

SEQ ID NO: 94209 - DNA, 453 bp, Homo sapiens
ttgcggtgagccgggatcgcgccattgcactccagcctgggcaagaagagcgagactcagtctcaaaaaaaaaaaaaaaaaagttttagggcccgggccggggggtttccccctgtatccccgcctttttggggggccggggcgggggtttcccagggccgggaaaaaaaaaccttctgggttaaccggggaaaccccctttttttttaaaattccaaaaaaaaaaaaattttcccccccgggggggggggcccctggggccccccttttttgggggggtgggggcggaaaatggttttaccctggggggggggcttttgcggggacttaaaaccccccctttgctttcacccgggaaaaaaaaagggaattcctttttaaaaaaaaaaaaaggggggggccttttataagtttccttgggggggcccaaatttttcgggggttgggaaattt

SEQ ID NO: 94210 - DNA, 433 bp, Homo sapiens
  misc_feature (1)...(433): n = a,t,c or g
actagttctagatcgcgccactgcactccagcctggataacagagccagacccggtcnaaaaaaaaaaaaaaaaaaaaaaaaaaagggggggcccctttaaaaaaaatccctgggggggcaaaaatttacccggataaaaaaaaaaaatttttttttttttatggggggcaaaaaaaaaccccccgggggatttttggaaaaaaaccttttttttggggggggaaaatttgggcaaacctccccaaaaaaattaaagcccttggggaaaaaaaaaaatttttagggggaaagggggtaaaaaaaccctatatttctttgcggtgagaaatttttcttctggggttttttttaaaaaaaatttttccccgggcgctgggtgtaaaannnnnnnnaaaaacgcttcannannctccngttacactgttctccccg

SEQ ID NO: 94211 - DNA, 420 bp, Homo sapiens
cggacgcgtgggcggacgcgtgggtcgcgagcggccgcccttttttttttttttttttttttggtttggtttttttttttgtttttttttttttttttttttttttttttttttttttttttttttttttttttttttttttggggggggggggggccccccgataaaaaaaaaaaaaaaaatttttcccccccccaaaaggagggggggggggggggcaaaaaaaacccaaaaaaaaaacacgccagggggggggggggggggtttttccccccccccccccccccaatttttttttttgggggggggggattttaaaggggggcggggggggggggtttttttcccccgcccctgctttttattatttcggggggggaagccccccccgggggggggggagggggggccccccccccg

SEQ ID NO: 94212 - DNA, 401 bp, Homo sapiens
tttcttcactctctccatctctctctcagattgttgtatctgccagtcgaagtcctgcgtctgtcttccctgcttttcagtcgtcgggcttagagaagcctgacagagctgcatcttgaatttagactaaaagagccagtttttaaataatggggcattgttttgactcccataaaaattttcaatgtttattatactgtggaaagcatactatacattgtgtgtgtgtgtgtgtgtgtgtgtgtgtgtgtgtgtgtgtgtgtgtgttataatgtatcttttcattagctcgcaacaaggctttgttttcttggggagggaaagatctgttccatttcacttactgttctgaggaggggttcaagggtctgtgtttaaagtcaagatttacctgtgtgtaa

SEQ ID NO: 94213 - DNA, 400 bp, Homo sapiens
cactcatctggcctggataatctcactgccctggcacattcccatttgtgctgtggtgtatcctgtgtttccttgtcctggtttgtgtgtgtgtgtgtgtgtgtgtgtgtgtgtgtttgtgtgtgtgtgtctgtctattttgtatcctggaccacaagttcctaagtagagcaagaattcatcaaccagctgcctcttgtttcatttcacctcagcacgtaccatctgtccttttgttggtggtgttttgtttttgtttttttgcttttaccaaacatgtctgtaaatcttaacctcctgcctaggatttgtacagcatctggtgtgtgcttataagccaataaatattcaatgtgagtttcaaaaaaaaaaaaaaaaaaagggccggcctttttaaaga

SEQ ID NO: 94214 - DNA, 400 bp, Homo sapiens
ccacactcggttaatattttgtagagatggggtcttgctatgttgcccaggctggcttcaaactcctgaacttaaaagcctcctgtttagttttggttttttatcacttttttttttttttttggaaagggaccctggctcccatgggccaggttggagggggggggcccaacctgggttaatggaagttttggcctttggggtaaaagcaattctcttttctaaccctttggagaagggggaatacccagggggccccccccccccccccccgggttagttttttggttttaaaaaaaaacggggttttgttttgtggcccaggcgggtctggaacaacggccctttggggaccaaccggtctgggcctcccaaggggctgggataacaggcgtacccc

SEQ ID NO: 94215 - DNA, 394 bp, Homo sapiens
  misc_feature (1)...(394): n = a,t,c or g
cccacgcgtccgctggggagggtcaggtgggaagattagttgagcccaggagttcaaggtcactatgatcacaccactgcattccagcctggatgacagagcaagaccctgtctttaaatagaatagaaaaaaaaaaaaaaaaaaaaaagaagggggggggttcaaacgcccaaaaatttagtttttagggggaaaaaagggggagtttgatcctggaaaaaaactaaaaaaaaatctgcagggggggggaggacaaaaacaggcaaaaagcccagggccttgggttaagggcaacctgaaaaaaacccnnncccntactggcttgtaaatcttaaaaccagacttgggtaaatttaaaatataaaatcccttgatgcccttttggggtaaaaa

SEQ ID NO: 94216 - DNA, 392 bp, Homo sapiens
cttccaactccctactctctctctggctctcacttattctttatcatggaaaatttgaaacataaaaaaaaggtagaaagaattaaaaatataataaagccccatgagttcttcttctttttttttttttttgaaaaaaaatttccttttttttccccagggttgaaggccaggggggaaatttggtttaatggaacccccccctccctgggtaaagggaattttctgccctaaccccctggaaaactgggaataacgggatgccccccccccccggggaaaatttttggattttaaaaaaaaaacggggtttcccaatatgggtagggggggtttgaacccctggccctagggggacccccttccttggcccccccaagggggggggggtt

SEQ ID NO: 94217 - DNA, 376 bp, Homo sapiens
  misc_feature (1)...(376): n = a,t,c or g
cttgaaagttaccattgtgagctttttttttttgaaatgaagtcttgctcttgccccccaggctggagggcaggggcccccttttggctcattgggagcgttttaaagggaacaattcaggggtatatagtacagtcacagggttgggcaaccactgccttcatttgatttcaaaactttaattttttaattaattttaatttttaaaacaatttttaattttttaattttaaattttaatttttaatctggcggggccacccaggctggagggcaagggcgcaatctgggttaactgcaacctccacctccttggttaaagcgattctcctgcctcaacctcctgagtagctgggaattacaggggctggccttn

SEQ ID NO: 94218 - DNA, 383 bp, Homo sapiens
accaccattgtcaaattaggctcttcattcttttaataactgcttctgaggttttattttgttttgttttgtttttcttcgagacaggcccttgctctgtcaccgaggctggagtgcagtgatgcaatctctgcaacctctgtctcctgggctcccacctcagccgcctgagtagcttggactgcagatgtgcatcaccatgcctggctttttgtttgtttgcttatttaagatgggtcttggtctgtcacccaggctggagtgcagtgacgtgatcctagctcagtgcagcctccaacacccgggctcaaatgagcctcctgcctcagccttccaaaagtgcttagattacaggtgtgagtcactgcacctggcctgaggat

SEQ ID NO: 94219 - DNA, 394 bp, Homo sapiens
gcttctttccttaaacgtcgtgaatcaaccactgatagcatcaaacttttcctatgcggcttcctcacctctctaaggcttcataaaattgaagagtttgggcattactctggattatactttggcttaaggggatgttgaaattggttgggcccttatccacacactaaaatgtcctccatatcagcactaaggctgttttgcattcttatcatttgcgtgttcagaggaagagcacttctaatttccttcaataaactttcctttgcattcacaacttgctgtggggccaagaggcttagtttctgacctatgttggctttcaacatgccttcctcactaaggttagacatttctagcttttttttttttagcacattctcaatcctacaaa

SEQ ID NO: 94220 - DNA, 392 bp, Homo sapiens
  misc_feature (1)...(392): n = a,t,c or g
ttatttcagattttacatggcattcccctcatacactgcgttatgncttcattccttttttttcttgtttttgggaaaaaaaatttttacccccgggggggggggggggggacaaaaaccctttttttgaaaccccccccccccaggttaaagaaattttttttttttgcccccctaaaaaacttggtttatggggcctgcccccccaccccggaaaatttttggttttttaaaaaaaaaagggttccccctagggggaaacctttaattggaacccccccccctaggggaacccccccccctctccccccaaggggggggtgttacggggggggacccccccccccaccctttatttttttttttaggacgttcaaaaacttttcaaacgg

SEQ ID NO: 94221 - DNA, 383 bp, Homo sapiens
  misc_feature (1)...(383): n = a,t,c or g
tctcatttatggtgcagaacactggggtactgggaagccaccaagctgaatacggataggtaccatgactttttcncaaaaaaaaaaaaaaaaaaaaaaaaaaaaaaaaaaaaaaaaaaaatnnggggggggggattgaaaaaaatgttttggggggggcaaaaatttaaggggggaaaaaaaaaaatttttttttttaagggggggagaaaaaaaaaacctgggggggaattgggaaaaaaaaattttttttgggggggggaaaattggggcaacccccccccaaaaaaaaaaacgcccaaagaaaaaaaaaaaatttttaaagaaaaagggggaaaaaaaaagttaaatttgtgggggggaaaaaatttttaaaaaaaaag

SEQ ID NO: 94222 - DNA, 375 bp, Homo sapiens
tctagacaagcctgggaaacatagcaagatctcatccttacaaaaaataataatggtgtgtgcctgcagtcctagctacttgggtggttgaggcaggaggattgtttgagtgagggaagttgaggctgcagtgaactatgattttaccactgcactccagcttgggcaacaaaatgagaccctgtctcaaaaaaaaaaaaaggttttttaaaataaccgggatgattgtttattttgaaaagggaccgggaacctaaagggcttttaaaaacctctgttttctttggaacttgtggaagggaaaacctgcttatccccttgagttggtttggtttttaatacaaactggaatgggcctttggaggggttcccaat

SEQ ID NO: 94223 - DNA, 401 bp, Homo sapiens
gcaggagaatggcatgaacccgggaggcagagcttgcagttagccaagattgcgctactgcacttcatcctgggcgacagagcgagactccgtctcaaaaaaaaacgaaaaaacaagaccaccctccttagggagatttgacattttgttgggggccctaacgggaagaaaggcctcctgaaaactgtcaaggggggtctcacctgagtgaagagcgggtttcatttacttggttcagggggggcctgaagaactgggagatcatgttagcatagctgctataaaccctggggtttcttgtctgcaaagcacattcaagtccattatcttactaaatcctaccaacaaccctgtgaatggcaggacagattttacgggttaactgtgaactttttggagag

SEQ ID NO: 94224 - DNA, 205 bp, Homo sapiens
gttaaaaaccaccctaaaaaactggggaaacccttgtttttacaaaaaatccaaaatttacccaggcccgagggcccccgctaataatcccatttcttcaggaggttaagcctggaaatttgtttaaccccagggggcaaaggttgaagtgttttaaaatcgccccattgccttaaatttgggccaacaaaccgagactcctttt

SEQ ID NO: 94225 - DNA, 400 bp, Homo sapiens
  misc_feature (1)...(400): n = a,t,c or g
ctcaggtccagcagacccctgcctcatgccccttggacagcgacctctctgaggatgaggacctgcagctggccatggcctccatgactttttcnaaaaaaaaaaaaaaaaaaaaaaaaaaaaaaaaaaaaaaaagggggggggccccttaaaaaaaaacccgggggggcccaaaaaaaaccggggaaaaaaaaaaaaaatttttttcaaaaaaggggggcaaaaaaaaacccccgggggaattttgaaaaaaaaacctttttttggggggggaaaaatggggcaaaccccccccaaaaaaaaaaaacccctaaaaaaaaaaaaaaaattttaaagggaaaagggggaaaaaaaaccccaaaaccccggcgggaaaaaaatttcccaaaaaaaaaaaaaa

SEQ ID NO: 94226 - DNA, 373 bp, Homo sapiens
caaggttctaaggtgataaaaatacaagtcccaccccatgctctgagatagtttatatgtacaaagttaatacaaggcagcagattctggatgctgtaagagatgggtcaacaggacataggtcagtaatatcctctggacacaaagccttctatttttttttttttttttaaaagggagttccctttttgtgccccagcctggagggcaagggcttgatttgggttaaactaaatttccccctcgggggttaaaggaattttcctgcctaaccctccggataagtggaaattacgggttggcccccccccccccggttaattttgtttttttattaaaaagggggtttttccttgttgtccaggttggtttt

SEQ ID NO: 94227 - DNA, 391 bp, Homo sapiens
  misc_feature (1)...(391): n = a,t,c or g
gaggctgaggctgcaatgagctataattattgcaccactgaactccagcctgggccacatagcaagaccctgtctccaaaaaaaaaaagaattaaaagacgaaaaatagggaaaaaaacttctctcatatcattaattgggcccttcagtatttcggataacttagtcaaatttggcacaaaatcaactggattagcccattcttgcaaagaaaaacctgaaactgggaaattaataaaaaaaaaaggttggatgggctcacggttttgcaggctgcacaggaagcatggcagcatttgcttttggggagacctcggggagcttttgctcatggggaaaggcaaagggggaccagccgtcttgcggcaggaaaaggaccangagaggagat

SEQ ID NO: 94228 - DNA, 393 bp, Homo sapiens
  misc_feature (1)...(393): n = a,t,c or g
cccacgcgtccgggaatcgaaccccccaaagctggtttcaagccaaccccatggcctccatgactttttcaaaaaaaaaaaaaggggggccctttggggggcccctttagggggcccctggtgggccccaggtttacgcgggaaagcaatttcctttattgggcccctataaagagccgctttgggagttttgtggggagatccttaatggacccggggtttgggggggggacaaattggcccaagatttttacggttttggggggctttagggtttttaaggggttttggggggaaaagggggtaaaacccctgccttttgcaggcttcttgaaagggtggtttcctgagaaaagtttttcccccgggttttcctgggccnnngggtncccn

SEQ ID NO: 94229 - DNA, 391 bp, Homo sapiens
  misc_feature (1)...(391): n = a,t,c or g
ttagatcttctggataactttctgcagcttctctatcagcacttgctgcttctttccttaaccttcatgaaaagttaataaacttttcttctgcagcttcctcacctctctcagccttcttggaactgaagagagttaggacattgctctggattaggcattgcttaaaggatattggggctggtttgatcttatatctagaccactaaaattttctccttatcagcaatgaagctgtttcacttccttatcatttgtatgttcactggaataacacttttaatttccttcaagaatgtttcctttgcatttataacttggctgtttggcacaagggtcctagcttttggcctgcctcagctgttgacatgccttcctcactaaagctaan

SEQ ID NO: 94230 - DNA, 367 bp, Homo sapiens
cggacgcgtggggtgaactgagatcacaccactgcactccaacctgggcaacagagtgagagtctgtctcaaaaaaaaaaaaaaaaaaaataggtttaaaaccacccccccaaaatttttaaaccaccgggcattaaaaaaaaaaaaaaaaggggcctttttttcaagggaaaaaaaaaaacccggttaaaaaatttttcctttttttttttttaaaaaaaggggtttttttttttccccccggtggggggggggggggccaaaaagggttttttggaccttaattttcgggggcaaaaaggacccctcccccaaaaaccccggggggggggaaaaggggggggggaccccataccccccttttttt

SEQ ID NO: 94231 - DNA, 414 bp, Homo sapiens
  misc_feature (1)...(414): n = a,t,c or g
aagaaatgtctaagggtcacgaagattttctcccatgttttccactaaagttttccaggtctcgcttttaggcatctggtccatttcaagttcacgtttgttgtggtatgagcggggtccaggctcaggttttgtgtgtctctctctagttgtcccagcaccacttgttgaaaagactgtcctttccgtattgaaatcctgtgacacctttgtcaaagatcaatgtattgtgtgtgtgtgtctgtttccagactctctattctgttccgttgatctttttgtcattctttcnccccnaaagaaaaaaaaaaaaaaaaaaaaaaaaaaaaaaaaaaangggggggggctttttttaaaattctttggggggggccaaattttcccgggggggggaaaatattttttttttttttn

SEQ ID NO: 94232 - DNA, 437 bp, Homo sapiens
  misc_feature (1)...(437): n = a,t,c or g
aggacgcgtggagtcaataaacctgcctttgggctgtcgcctttttaaaaaaagagacaacatcaaatgtggacaagagataaagagcaggtggaagtctgatacactgctggtaggagtgtaagtagttcagccgctttggaaaagaattcagcagtttcttataaagttaaacatacacttgccaagggattcaacaatcctactcctagatattgaccttgatgggcacccaaaaacctctgctttattcatcatcacccataactgctgctttattcataatcacccataactggaacaacccaaatgtccttccacagatgtgtggatgcacaaaccatggcccatccactcaatggaacactactctgcaataaaatccgnggcagtatgggataatttcaaaggaatcctgctgatgaaagcagctagct

SEQ ID NO: 94233 - DNA, 446 bp, Homo sapiens
ctgtgggattcagtatagtaatattgctatataggtgtgtatcccttaatttcataaaagaaagaagctttacatgaatgagaaaagcataatctgacaataaagatcactttattagtggttctcagccttggctgcacattgaaatcacctgggtaggttagatttttaaaaaatactacccaaaatcagactctggagatatagcctgggcatctgtgcattttagaaggtcttcagatgactttaatatgtggtcagagttgagaacttctgtgtagctgtgtagcttagcaaaaaacgacagatgtaatcctgcttatggcttgaccacagactttattttgtagttattaaaagttaaaggccgggcgcggtggctcactcctgtaatcccaacactttgggaggccaaggcaggcggatcacgaggtcaggagatcgag

SEQ ID NO: 94234 - DNA, 363 bp, Homo sapiens
ctggaagatcacttgaacccaggtgaccagcctgggcaacatagtgagatcctgtctctaaaaaaaaaaaaaaaaaaaaaaatgccgggccttgggggaacccccttatagccctaaatattcaggaggctgagtggccaccattttttgaccccagttgttcaagtttacagggagctatgaaaacacccttgcattccacccgggggaacaaagtgaaatcctgtctcaaaaaatttaaaaaaacaaaatttatttaatgggggggccactagggggacccacatagctatttttacatttcctagggaccccttttcaaaagataaaagaagagccataaaatgatttttaatatcatgt

SEQ ID NO: 94235 - DNA, 348 bp, Homo sapiens
ctcaattttcttccttctttgttcttatttactttactctaccttttatggtgtcattttgcttttgtgtttttctaatttagtcctcttttgtgaaattatttttttcttaattttttactgattattcacttgttctgagctttttctattgcttgttggtgctgtttttgtcaaagctttcattcttctctaatacttaaatattacagttttcatctgttccatgacctcatttttctgacgaattctctctgtcttaattttattaagacctcattcaactttttattgtaataatttggtatggtgctagaaagttgttttttttttttttttttttggccc

SEQ ID NO: 94236 - DNA, 656 bp, Homo sapiens
ggctattctaataccagacaaaatagacttaaaaaaatgttactggagataaagagtaaaatgttacaatgataaaagggtcaatacatcaggaagatgtaacaactataaatatatatgcatctaacagtagagcccaaaatacatgaagcaaaaactgaaaggaaaggagaaacagataagtccataaaaagagttggaatattcaatacccctttttcaataatagagcacctagacagaagataaaccaggaaatagaagacttgaacaacattataaggcaaattgacctaaaagacatctatagaactttccacccaacatcagaatacatattcttctcgagtgcatatgaaacatctccaaaataggtcataagttaaagcataaaacaagccttaataaatataagtagactgaaatcatgcaaagcatgccctctgaccacatgggatgaagttagaaaacaatgaaaagttgggaaactcacaaatatgtggaaatcagacacacttgtaagtgactggctgggtgcagtagctcacgcctgaaatctcagcactttggtaggccgaagtgggaggattccttggatcccttgagaccaggaattcaagaccagcctgggcaacacagcaagaccctgtcattac

SEQ ID NO: 94237 - DNA, 388 bp, Homo sapiens
gcgaagatattgaagcatttatagcctggctcccatccgtcactggctgaggactggtcccagggcatcaactctctggcttttcttttttcttttcttttttttttttttttttttgggaaaaaaaattttgtttttgtttcccggggggaccggaaggggaaaaatttggtttattggaaccccccccccccggggttaagggattttccctttttaaccccccaagggggggggattaccggcccccaccccgggcccaaagtaatttttggttttttaaaaaaaaaggggttttccccttggggcccggggggtttcaaacccccgccccttggggaaccgccccccttggtttcccaaaggggggggattaccgggggggccc

SEQ ID NO: 94238 - DNA, 386 bp, Homo sapiens
gagaagggagggagagaattttattaaatgtgacgaactgccccccccccccccccggggggaagggggaaaatttttgccaatttttggggggggtttccttggcccgcccggaaaaaaacccctgggtttttttgcaaaaaaaaaaaaaaaagggggggcccttttaaaaaatccctgggggggcccaaattttccggggggggggaaaaaaaaatttttttctttttggggggggaaaaaaaaacccccgggggatttttgggaaagaacccttttttggggggggggccatttgggccccccccccccccagaatttaaggccctggggggaaaaaaaaatttttaagggggaaggggggaaaacccccccgcattcccggg

SEQ ID NO: 94239 - DNA, 1040 bp, Homo sapiens
  misc_feature (1)...(1040): n = a,t,c or g
tttttttttccttaaatgtttggtattattcactttgtgaaaacatcttgangtcttgtgctttccgttttggaagagtattaattatggattccatttcttttaattgatgtaggcccacccagattatatttctccttgtttgagttttggtagatagcgtttttcaagaaactggccaatgttatctaagttaccaagtttatgggtgtagggctgttcatggatattccttttaatctttttattagccatgttaccagtagtgatgcccctcctttatttctgatgtttgggaatttgtgtctcttttcttttcctcttgtttagccgggctaaagttttaattgattttattgatttttttttttcaaagaaccagcttttggatgtttaaaattttctctgatttcctgttttcaatttcattaatttctgttctaatgttgattattaattttttgttacgtttcctaatgttgaagcttgtagattttggatctttcttcttttctaatctatgtagtcaatactataaatttccctctaagcactgcttttcctgcatcccacaagatttgataagttatattttttgtttagcttaaaatatttttatgcctcttgagacttctttggttcatgtgttatttagtagtgttttgtttaatctccaaatattttgggattttccagttaactttgttatttatttatttctagtttaaattcctactgtggtctgaaaagaagtacttggtatgatttcctattcctttgaaaaggtgctaaggtgtattttatggcccagaatgtgatctgtcatggcaaatgttccatgtgaacttgagaagaatgtgtggtctgctattgttgaatgaagtattttataaattgtcaggcctttgagcccaagctaagcctgtgacctgcacatatacacccagatggcctggagcaactgaagaaccacaaaagatgacattccacctttgtgatttgttcctgcctcaccccaactaatcaatcaaccttgtgac

SEQ ID NO: 94240 - DNA, 355 bp, Homo sapiens
ggaaaatcacttgagcccaggaggctgcaatgaaccctgattatgccactgcgctccagtttgggcgacagaaacctgaccctgtctcaaaaaaaggaaaaaaaaaaaaaaaaaaaaaaaaaaaaaaaaaaaaaaaaggtccccccggcccgaaattccaaaattttaaatgggaaaatttgaaaaacccccgggggtccttttaattgggggtggggccccaatcaaattttttttttttaaaacacggttggccttttttttaggaaaaaaaccccctaaaatttaaaattgggcccgggaccccttggtttaaaaaattttttaaaaggaaaaaaaaaaggccccatttttt

SEQ ID NO: 94241 - DNA, 234 bp, Homo sapiens
gataactctatgcccacaaatttaataatttagatgaaatggaccaattccttcaaagacataatacgccaaaactcatacaagaagaaacagacttactgttattaaataaattaaatcaatagttattaaccttccaaaacagaaagcatgaggtccagatggattcagtggtgaaatgtaccaactattaaaggaagaaattatctataatgtattttagaggacagatgt

SEQ ID NO: 94242 - DNA, 341 bp, Homo sapiens
  misc_feature (1)...(341): n = a,t,c or g
ctaataatttgtggggcaactagggaatggcacaagccttttggtaagccctgtaaaaatgaaacaaggcaggaagcaatgggaaggacattgaatttnnnntntnnnnnnnnnnnttnnnttnttttttntttttttttttttnnttttttttttttntttttttttntnnnnttttttttttnttttnttttttttntttntttttttttttttnnttntttttttttttttttttttttttttnttntttttttttttttttttttttttttttttnttttttnttttaattttttttntnttttttttatttttttttttttttttattttttgntn

SEQ ID NO: 94243 - DNA, 238 bp, Homo sapiens
cgtgtgtgtgtgtgggagggcgcgtgtgtgggagagaaagagagcgatatctagagcgtgtgtttgtatgggactacctactaacaagaattttatggaaaacgggacgcgggcgggggatagggtcaaagccgcactcttcaggcgtggatttttctatgtacccgttgacttgtggcagtcaaaatgtagtacttattattactaacgctaggagggtggtcgacgcggccgccat

SEQ ID NO: 94244 - DNA, 331 bp, Homo sapiens
  misc_feature (1)...(331): n = a,t,c or g
tgaacacttgtgtacatgtttttatgtgaacatgttttcaattctctttggtatattcctaggagtaaaattgccgatcatatggtaatcttgtgtgtggttttgaagaatggtcaaactgtcttccacactgggtgcagcattttgtggtttggatttgcatttccctaagacctaatgatgctgagcatatttatatgtgcttttcggccacttgtatgttttctctggagaagtgtctattcaaatcctttgcccattttaaattagggttatttgtctttttagccctgagctaaaaaacgttctttttatgttctgaacactagan

SEQ ID NO: 94245 - DNA, 1656 bp, Homo sapiens
  misc_feature (1)...(1656): n = a,t,c or g
tttaatttttagtagagatagggtttcaccatgttggccaggctggtctcaaactcctgacctcagatgatctgcctgccctggcctcccaaagtgctgagattacaggcgtgagccacctcgcctggccttattctcaacataattgctggtgaaatactaaccacttacccttttgggttctgttttcatgggaaaaaactttgtttccgatgtgaatgtttttcttcttaatatttttctgtagtgtgtaattttttatagtgatacatttcttttataagaaaaataaagctaaaagaaacaatgttaaataaaaaaaaaaaatccagggttggaaagagaagagacttggaatgaggctggtggcttatgtttggatctccttcccatcttgggcctttatgtaaacaggtttcaaaactctctgagagagaagcgcctagttaaaacaccacacaacacaccctgcctatttcctttactcagcaccatttaatgtattaaaaaacagctttaaaaacaaaacaaaacaaaaaaaacttgaaataggaacttcaccgtctcttaagagcgatatatttaatacattcacaagattcgaaatgaaaaacaaacattattcatgctacaggtttttaattttccttggacaacaccaaaaacacagtactcaaacggcatgttttttttttgtttttttggtttctttttgagatggaatttcactcttgttgcccaggctggagtgcaatgggtgtgatcttgggctcactgcaacctccgcctcccgggttcaagagattccgcctgcctcacaggcgcccaccgccacacctggataatttttgttttttgtttttttttttgaggacnggtgtctcactctggtcgcccggggtaggagtgcagtgggncccatctcagctcactgcaagctccaccttccaggttcatgccattctcctgcctcaggctctcgagtagctgggactacaggcgctcaccaccacgcccgcctaattttttctattttttaatagagacggggtttcacccgtgttagccagggatggtctcgatttcccgacctcgtgatccacccgcctaggcctcccaaagtgctgggattacagggcatgagccgccgcggccggcaatttttgtattttaagtgggagatgaggtttcaccatgttaggccaggggtgggttttgagctcctgacctcaggtgatccatccgccttggtctcccaaaatgctgggaccacaggcatgagccaactgtgctcggcctgcaggttttaacaagaggagcatgaactatcattttgacacaaagacagcttaaaaaaaataataaagctggctggacgcggtggctcacacctgtaatcccaccactttgggaggctgaggtgggtggatcacaaggtcaggagatcaagaccatcctggacaacatggtgaaaccccgtctccactaaaaacacaaaattagccaggcatggtggcaggcgcctgtaatcccagctcaggagggtgagccaggagaatcacttgaactcgggaggcagagcttgtagtgagcagagatcgcacctctgcactccagcctgggcaacagagggagactccatccccaaaaaaaaaa

SEQ ID NO: 94246 - DNA, 519 bp, Homo sapiens
  misc_feature (1)...(519): n = a,t,c or g
tgactgccnannnagggaggaatactgagaccctctacttgagnacgtcggaaagnncnnnaannnnnggggngagccangcgtgcgatgtaattaacacatagtgctacccatctttagaaggatgattgggaacaaaatccaaaattccggccgatcctgagtttgtcattccctaggagaaaaacagaaaaggcttgggaggcacagaaggcatccatatgccttcatgctttgggagaagtaaaacgaaagtgatttattcttcatggaggatgttctgttttgtggggcaagcttggatgtgtatcatgttcttgttcagctggcctttaaaaatctttagcaaatccgcttaaatgtccctgtctgacagctttgaagagagtagtggttatcccagcatgcagcttgagatctgagaacgggaagactgcctcctcaagtgggtccctgacccccgagtagcctaaatgggaggcaccccccatttggggcggactgacacctcacacggct

SEQ ID NO: 94247 - DNA, 384 bp, Homo sapiens
ataagggatatttgacctatatctaattatataataagaaaaatgtattttcttttttttttttttggaaagggggttcacttttgggggccccccgggtggaagggcccaattttggtttaataaaacccccccccccctaagaaaagggaattccctgccctaccccccccgggaggggggaataacgggctgggcccccctgcccgggaaaatttggttttttaaaaaaaaagggggttcccccttgggggcaaaaggggcttgaacccccgaccccaggggaacccccccccctaacctcccaaagggggtggaataacggggggggccccccgccccggcaaaaaaaggtctttttctctacaaaaaatcttataaaaa

SEQ ID NO: 94248 - DNA, 407 bp, Homo sapiens
attttaaccttaatgccagtaaattttaagacaagtttttggcccaaatgctctgatctattaatactttttttttctttcttttttttttttttaaaaacccccgggcaaaaaaagggaaaccccctcccaaaaaaaaaaaaaaaaaaaaaaaaaaaaaaaaaaaaacctttttttcccccccgggggggaaaaaaaaacccttttaaaaaaaaaagggggggttaaaaaaacccccccccccggggggggggcaagggaaattttccccccgtaatgggttaaaggggtaaaaacctccccccccccaggaaaccccttttcccccccccccaaggggggggaaaaaattaaaaaaaggggcttaaaaaaactccccccaaaattttttttaaattaaaagggcc

SEQ ID NO: 94249 - DNA, 568 bp, Homo sapiens
  misc_feature (1)...(568): n = a,t,c or g
tggaagaagcttaatgaatacatataatcttgatggctgggcacggtaatcccagccctttgngatgccaaggtgggcggatcacttgaggctgagagtttgagacctgcctggccaacatggtgaaactgtctctactaanaatacaaaaattaactgggcatggtggtgcatgtcagtaatccctgctactcaggaggtggaggcacgagaatcacttgaacccaggaggtggaggttgcagtgagctaagattgtgccactgcactccaatctgggtgacagtgagactgtctctcaaaataataataatcatcatcatcatcttgagacctatgttaatcacagaaaagccctaacaaattctgtcatctctgctagtgagttcatgctattgatttgcttccaatgatctgttctacagtttctctatgaattttgtttggatattgctggatattgctggagaaatatgagttctcgtcttcctcttttacaattctatgaggattatttttatatttcttacatttatcactttgaaattatttattttcattccagtggt

SEQ ID NO: 94250 - DNA, 471 bp, Homo sapiens
  misc_feature (1)...(471): n = a,t,c or g
tgcggtgcgaattccttgattccggacaacgttttctagtctatgtttaatcagacctcaggacatgacttggcaaattgtaggaactcaacacttacttgttgattgtgtgtattaatacatgaacaaatgccctattggagatgaaaaaccaattttctgtttaaattttaggattgagaaaagttaacattttcattcnnnnnnnnnnnnnnnnnnnnnnnnnnnnnnngttattaattattactaattggacttttactttgtaggtggcacatttttataattctattgatcaacaaatgattcaaagtcagaggccaatgatgttacaatctgccttagcatttgaacagataattaaggtaaatgggcttttaattttattataattagattttacatgtgaagtgtttaattcttaattttccggtgttcccttcagcttaatatatcaaatgatctagattt

SEQ ID NO: 94251 - DNA, 243 bp, Homo sapiens
aaacatttgagcatggatgacaaatgacactagggtggcctggctcaggagttggaggctcagctgctccataggggattggcctggcctacctggtcttcctgcaccacctgccccatccccaggacttgggattgggatggaggtggaggtggggaacaagacttccctgctggctccctccacagagcatgtgctttctgaggaacaggatggcagggtggaggcttagatggggctgtg

SEQ ID NO: 94252 - DNA, 352 bp, Homo sapiens
acaggatgttgagtcaggttgcagtgagccatgatcacaccactgcactccagcttgggtgacagagcgagactccatctcagtttaaaaaaaaaacacaaatagaactactgtatgagccagctgtctccttactgggtatttatcaaaaggaaaggaagtcagtattgaagaaacattacacacccatgtttactgcagcactgttcacaatagatatgggatcaacctagatgcctaaatacatgaagaggtaaaatgtgatgtatatgtatatacacacacacacacaatggaatactattcagccaccgaaaagaatgaaatcctgttttcttgcaacaacatggaa

SEQ ID NO: 94253 - DNA, 358 bp, Homo sapiens
  misc_feature (1)...(358): n = a,t,c or g
ttttttttgagacagggtctcgctctgctgctcaggctggagtgcagtggtgcaatcacagctcgcagcgggctccgcctctcgggctcgggcgatcctcccatctcagcctccctggctggatggagtgcagtggcgtgatctcggctcgctgcaacctccaccttccgggttcaagtgattctcctatctcagcctcctgagtagctgggattacagtcttgctctatcacccaggttggagtgcagcagtggcgtgatcttggctccctgcaacctcctcttcctgggttcaagcggntctcctgcctcagcctccccagtaactgagactataagcgccttgcaccaccgccaa

SEQ ID NO: 94254 - DNA, 373 bp, Homo sapiens
caataatgaggaatgaatgaaagagggaacatcactaaagaaataaaaaagataatatgggaatactatgaataactgggcaccagccagttagacaccctagactaaacaaattcccagaaagatacaaactaccagaaccaactcacaaagtatagaaaatatgaatagaactataacaagtgattatatcagtaactttaaacgtctcccaaagaaaagcccaggcctagatggtttcactggtgaattcatttaacaaactgaccctagccaggcagtgcagtgcaagcctatagtctcagctattcaggaggctgagttcggaggactgcttgagcccaggcgttcaagaccagcctgagcaacacag

SEQ ID NO: 94255 - DNA, 360 bp, Homo sapiens
ccaaagttgacactaatattaggttctaagaacccactactatcgagccagctttttttttttttttttgaaaaaaaggtggggttttgcccccagggttaccctgggggaccggggaggcagccccggttaagggagccttaaccccggggggctaaggggatcccccaccctaaccccccgaaaaagggggaaaaaaggggggcccattggtggtttaaaggggggggcctaattggggggccagggggggtttaaaactcggggtttaaggaagccttcgggcctaatttcccaaaggggtgggaataaaaaaggggaccccgggggcggggcggaattaaaaatttttttattttc

SEQ ID NO: 94256 - DNA, 362 bp, Homo sapiens
ggacttgatacattgttccatttattttgctctcctttcacttctcttagagatattttgtacttatcagtataaaggtttaaaacatccttctttaaaatttctccaaagtattttgttatttgtggttataaaggatgtttttctaatttacttttcaagtatttttttctggcatatagagatataattgatattttgataattgagtttgtattctgtgaccttcataaattcactgttctgccaaatctggtggattttttttttttgaaaattttttttcttattttctgggcactcataattttctgcaaagagattttacttctttcttattttcccatttttttctgaataat

SEQ ID NO: 94257 - DNA, 635 bp, Homo sapiens
  misc_feature (1)...(635): n = a,t,c or g
ttgcagtgtgctggaattccataagtgctgctctaccaactaatagttgtgtaatcttaagcaagtcactttcatctgtgatttaaaataaaagnnnnnnnnnnnnnnnnnnnnnnnnnnnnnnnnnnnnnnnnnnnnnnnnnnnnnnnnnnnnnnnnnnnnnnnnnnnnnnnnnnnnnnnnnnnnnnnnnnnnnnnnnnnnnnnnnnnnnnnnnnnnnnnnnnnnnnnnnnnnnnnnnnnnnnnnnnnnnnnnnnnnnnnnnnnnnnnnnnnnnnnnnnnnnnnnnnnnnnnnnnnnnnnnnnnnnnnnnnnnnnnnnnnnnnnnnnnnnnnnnnnnnnnnnnnnnnnnnnnnnnnnnnnnnnnnnnnnnnnnnnnnnnnnnnnnnnnnnnnnnnnnnnnttcattcattgccagtgggaatgcaaaacagaacaaatactttggaagacagtttggtggtttttcacaaaattaaacatattgttaccaggcgactcagcaattatgctccttggtatttacccaaaggaactgaaaatgtacatccacacagaaacctgcacaccaattttatagcagctttattcacaattgctaaaacttagacgctacaaggatgaccctcagtagatg

SEQ ID NO: 94258 - DNA, 354 bp, Homo sapiens
gcagtgagctgagatcgcaccactgcactccagcctgggcaacagagaaagactctgttataaaaaaaaaaaaaagagagagagaaaaaagggggggaagggaaaaaggagggaaggaaatttgcatgagctccatgacgtaaatttataattttgcccatttttcaaatgagggaaatgggggcacaaacatcagggactctaacatcaataattattaaagggcttattccatgctaaacattacactaagggctttgcacaaccatgggctccctgagtccttttgacagctctgcaggggagaaacgcggatcatccacagtttatagctgaggaagaaacggaaattcg

SEQ ID NO: 94259 - DNA, 363 bp, Homo sapiens
aaattttgggcaagaagaaaattctgaaatgaatagtttatgctcttacctccataacctagaaaaaggagaacaaactagacccaaggcaagcagaaggaaggagataataaaaatctaagcagaaatttaaaaagatacagagaagtaatagagaaaataaatgaaagaagtggttctttgaaaagatcaataaaattgacaaacctctagcaagactaacaaaaaaatggaggacatagattactattgttaggaaggaaacaggcaccatcactaaagaccctgcagacaccaaaagaataatgaaggaatacacaaactactctacatgcatagtttttaaaacttaggttaaataga

SEQ ID NO: 94260 - DNA, 355 bp, Homo sapiens
ggtaggctgagacaggagaatagcttgaacctgggaggcagaggttgcagtgagccgagattgcaccactgcactccagactgggcaatacagtgagactccgtctcaaaaaaacaaaaaaaatcctaccacatgtgctccaccaagctctgtctccaaggtggccttggaagccacatggggaaggtggcagagactctaggagcctgagcagaaacccagatgattatgaaaaatgcagacctacccatccttattcacctgggaccaccgcgaactatatcataagaaataaacccctattgtacatacatgcaccattcgagttgggtctatttgttacagcagtttagcc

SEQ ID NO: 94261 - DNA, 374 bp, Homo sapiens
catcaatctaagttatctcctaggcctaactaccaatttctaagaaatatagcgggaagaggagcacatgacacttctatggagatgctataaccaaaattcagaccacaggaaactacagaacaaacaagccagtttcttcaacaaataaattgcaaaggaagaaaaagacaagggaagagaacctacaggttaggagagatacaaaagcaatcccaaccgatggcaacattcgaactttatttggatcctgattttaactagctaaagaaaccctttagctgggcgcggtggctcacacctgtaatcccagcactttgggaggccaagccgggtggatcacaaggtcaggagttcaagaccagcctggccaa

SEQ ID NO: 94262 - DNA, 348 bp, Homo sapiens
ggtgtgtagttttcttgttaatgtctgcatttagttttgctgcctagacaacactgccctcataagaatgacttaagtagaatttctttcttttcaaattcctaggtgagttttgagaaatgggattatttcttccttaaatgtttggtagaatttatgagtgaagcaatctggtctttttttctttggcaagatattttactactatttcaactttttttttttgaaaacattagggctatttaggctaagtattttttcttgtgaaagctggggaagttggggtcttccaggcaattggcccattttccattacattaaagtggccaattaataaaaccaaaattg

SEQ ID NO: 94263 - DNA, 438 bp, Homo sapiens
  misc_feature (1)...(438): n = a,t,c or g
cagccagtacgtagcagacttcaacaacactaacagctaacttgacctgattaacattttataaaatactccacccaacaacagaagacattcttttcaagtacacatagagtatttgccaaattaggccataacctggtttatgaaagcaaatctaaataagtttaagtggcttcaagttatatccaatatgttcttagaccgtgatagaattgcattaaaaatcaataacaagaagnnnnnnnnnntctcaagtatttacaaactcacttacttctaaatgacccacgaatcaaagaaggtagcaaaagagaaattataaaggattttgcactgaatgacaatgcaacatattagaatttgtggtgcctataaaacgggactttaagaaaagtttataccactaaatgtctattcagaaaagaagggcctcaaatg

SEQ ID NO: 94264 - DNA, 350 bp, Homo sapiens
  misc_feature (1)...(350): n = a,t,c or g
tgacaatacaattaacagcaaacatttgttgggnttttnnnacagagagttctcccagtaggttaatagtggggggtaaggcgaggttagcgaggcttgctagaagttttctaaaagtttttatggcaaatcctgtttgaagtccttgagagaggattatgatgcgactgtgagtgcgttcgtagtttgagtttgctaggcagaatactaatgaggatgtaagcccgtgggcgattttaaaaaaagctgggccgttaaacctctcagggttttgtttgaaattggtattttttccaccgctagtgggggatttcaagaagagggcctgacgcttttgcgatctttttgtg

SEQ ID NO: 94265 - DNA, 345 bp, Homo sapiens
cttttttgtctggcttcttttacttagtgtaatgttacatgatgtagcatgtgtcagcagttcattcctttttattgctgaatagtaatctattatatgggtttaccacttttttttgtattcattcatcagttgttgggttgtttccactttgttttttttttttggccattgggaaaaaggctgctgggaacgcccatgtgcaagtttttatgtgaacattggtttccatttcttttgggaatatggggatgaaaaagggaaaaattgctgagccatggggaacctctgttaaaccatttgagtaacttccacactatgtttcaaagcagctttaccattttg

SEQ ID NO: 94266 - DNA, 358 bp, Homo sapiens
  misc_feature (1)...(358): n = a,t,c or g
tcttaataagagttgaaagttgaaattacttcttgatccatagggtgcagagtgcatgttgtattagatggcttgaaaacaacattaatttccttgtacatctcagtcagagctcttgggtgaccagatgctttcatcaatcaggtaatatttgaaaggaatcttttttctgagaaataggtctcaagcttgggcttacaggctcagtaaaccatgctgtaaacagacatgctgtcatccaggctttgtggttacatttatagagcacaagcagagtagactttagcataattcataagggcataggtttttggaaacagtaaatgaacattggcttcaactcanagtcaccagctgc

SEQ ID NO: 94267 - DNA, 401 bp, Homo sapiens
aattataataaaaacatccaaaattgataatcacacttcaccataacagatagaataataatgaaaaagttggaaatagcacaaaaattaccagacacagaggcagaaagtgaatatatgctgttgcgaaaagtggcaccaataggcttggtcaactcagagctgccacaaacctttgatttgttaaaaaaaatacaaataaagataagggctgggcacagtggctcacacctgtaatcccagcactttgagaggccgaggcgggtagatcacctgaggtcaggagtttgtgcctgtaatcccaggaggctgaggcaggagaatcactcgaacccgggaggcggagcttgcagtgagctgagatcacgccactgcactacagcctgggcaacagagtaata

SEQ ID NO: 94268 - DNA, 397 bp, Homo sapiens
ttatttcctccagtgaagccttaaacacctcaaaattattaatgagggttggaatcaacttctcccaaactcctgttaatattggtattttgacccccctcataaatcatcaatgttcttaatgacatcttaaatggtgaatcctttccagaaggtttccagtttactttgcccaaatccatcaaaggaatcactgtgacagctatagccttgcaaaaaacattcttgcataataagacttgaaagtcaaaactattccttgatccatgggctatggaatggatgtgttagcaggcattaaaaaaattcaactccttgtacatctccattggagttcttgggtgaccaggtacattggtaatgatcagtagcatttcaaaagaaatcttttactgaa

SEQ ID NO: 94269 - DNA, 398 bp, Homo sapiens
cagcatggtgaaacctcatctttacaaacagtgcaagaagtcggccggcgtggtggcgtgcgcctgtgttccccgctggtcggtaggctggggtgggatgatcgcctgagtccgggagatcaaggctccagtgagccatgattgtgccactgaactccagcctgggtgacagacttcatgccaaatatataggtgtgtgcgtgtgtgcgcatatctgtgtgaatatatatatgaatagattatgtatttaaggctagggatgcttgcctaggccattagaaagcttttttttcttaactgcacttaaatttgttgccctttttattactgccccgccccccccaaaaaatttctggggtgtgtataggataatttctgaacattctatcctggacctt

SEQ ID NO: 94270 - DNA, 507 bp, Homo sapiens
  misc_feature (1)...(507): n = a,t,c or g
tcacttaatttctattttcttcttattcccatattctgttatagtcttatttatttctctttcattttcatttcgtttcatacatttattatttcttnnnnncctgaagcttcccggtgtagtgctagttgtagaagtgtttgttgttaacattactcttgctttccacctggaaaggattatttctccatactgagtcctgttaggattcttcctccatgttctgaattgccaaggcctaggttaggttattcaggatcacttgtttaggcttctctggtttggggaagattttccggtcttcacaagaagtcaaatatgggacctgagggtctgtctaaccagttaacttgataagaaactgccaaccctttgtccaaagtggttgtgccagttacactctcaccaagagtgagtatatgtgtagtccacatcctcgccattatttggtggcgtcagtcattttcattttagccattctttttttttttttgagacggagtctcg

SEQ ID NO: 94271 - DNA, 390 bp, Homo sapiens
atataaatgcttatcactggagaaacatttttaaagttctcagctcagaactatagtcctccccacaaaaaaacaactgaaatttaatattaagattatggatttcttttttcctctaccctgatcaccacagtaaaagggctccactttagtaacagtgaacttcagcagaaagagcccaaattgccaaactctttccaagaagaattatctaggaaagtcaagacagtagcaagcacaagaataccagaggaatctgacacctctgacatagatagatagatagatagatagatagatagatagatagataatagacaaatacataataaatgataggcagaggatagatgatatggatagacagatatatctaataggtagatgatg

SEQ ID NO: 94272 - DNA, 395 bp, Homo sapiens
  misc_feature (1)...(395): n = a,t,c or g
agcttctctaaaaaaaaatagccctaaaatttcagcagcttaacctaatttaaagttttatctggactcatagaatgagttagcaagaatctcttccttcttgatttttttggaatagtccgagaactggggttagctcttctttatcaatatgttaaaatccaacagaaaagccacccagaactgggcttctctttattgggagactttttattatcagtgcaatctcatgatttgctatgaatctgatgagggtttctacttcttcctaattcaatcttggtaggttgtatgttttcaggaatttatccattttctataggttttccagtttgttagtatggcgctggtcataatagtcagagatgatcctttgtatttctgtgggatcagcn

SEQ ID NO: 94273 - DNA, 396 bp, Homo sapiens
  misc_feature (1)...(396): n = a,t,c or g
gaagaaactctacccctatttgcagatgacatgatcctttatattattaaaaaaaaacaaaaaacaaaaaaaaccactaaggaatctactaaaagatattagaactaataaatgagacgtgtttggaaaggttgcgggatacaaagtcaacacacaaaaatctataaattagcaatatacaatctaaaaagtgaaactaannnnnnnnnnnnnnnnnnnnccaaaagaacaaaataggaataaatttaacaaaagaaatacaaaatgtatactctgaaaactacaaaacattgaaagaaattaaagatctaaataaataggaaagcataccatgctcacagatcagaagatttaacattgttaagatgacagtgctccttaaattaatctatagat

SEQ ID NO: 94274 - DNA, 345 bp, Homo sapiens
  misc_feature (1)...(345): n = a,t,c or g
cgcgtattttatttaccctaaagatcttgagctccatccgcggcatcagaaatgacataattcttttttttttaaaggctgaatagtattccattgtgtgtatataccacattttctttattcattcatctatagatgacctagttggaagggtataggaacgtggctattgcaaacagtgctgcagataacatgggagggcagacgtctgttaaacttactgatgacaaaggtttttgagatggttcccataagtgcgtattgcttgattccacacagttttaattaccgtagctttgtaaataagttttgaaataaggaagtgtgagacctccaactttgttn

SEQ ID NO: 94275 - DNA, 325 bp, Homo sapiens
atttgacatagtggctcatttactagtcttacttgagaacacctccttttgacattgcttctgtgatagaattagagctgctttctgtttttatatattggattgtccctttttcatcagcatcactcataagttaatctgaatttttttttttttttttttggaaagggagtctatttttgtccccggggttggagggggggggcccaatttcgggtcactgaaccctttgcctcccaggttaaggcggttttcctgcctcaccctcccaaggggtggggactacgggcttgggcccccttgcccaactatttttgtgtttttg

SEQ ID NO: 94276 - DNA, 208 bp, Homo sapiens
aaacaaaaataataaggaatttttgtttttaaatttaaaacatttttttttgtagagagggtttcgccatgttggccaggctcgtctcgaactcctgaaattggccaggcaaggtgactcacattcataatccctcactttgggaggcctaggtgggaggatcactcaaacccaggagtttgagaccagcctggtcgacgcgggcgca

SEQ ID NO: 94277 - DNA, 341 bp, Homo sapiens
ttttttttgggtattattttctctattttaccattaggggaactgaagctcagggagggtatttgttttgttttgtttttttgagacagggtctcactcaggttgtttaggcttgcgtacagtggcgggatctcagcttattgcagctgccatcttctgagctcaggtgattctcccatctcagccacccgagcactacaggcatgtgctgctctgcccagctaggtttttgtgtgtgtgtgtgtgtgtgttttattttgttttttaagtaaagatagggttttgccatgttgcccaggctggtcttgaacttctggactcaagcaatcctcccacctcgg

SEQ ID NO: 94278 - DNA, 228 bp, Homo sapiens
gcaggagaatcacttgaacctgagaggcagaggttgcagtgagccgggagcacaccactgcactccagcctgggtgacagagtgagaccccatctcaaaaacaacaaacaaaaacaaaaacaaaaaaatggctgggcacggtggctcacacctgtaatcccagcactttgggaggccagtctggccttgaactcctgacaggcgatctgcctaccgtcgacgcggccg

SEQ ID NO: 94279 - DNA, 337 bp, Homo sapiens
gcccgaggagagagagagagagagagagagagagagagagagagagagagagagcctttttttttttttttttttttttttttgggaaaaaaacccgctttttttttttttggcccccttttttcccccccccggggggaaaaaattaattaaccccctttcccactttttctttttttttttaaaaaaaaaaagggggggggggctccccccctttttttttccccctttcccccggggggggggggggggaaaacttctttccccccccccgggggcccccgggggaaccggcccccttctggtttggtggggccccctgggggcccttttttgg

SEQ ID NO: 94280 - DNA, 373 bp, Homo sapiens
  misc_feature (1)...(373): n = a,t,c or g
caatcctcctgcctcggccccctcatgttaagattacatgtgtgagccaccacacccagctatttttagttttttgagaactctcaatactgttttccacagtggttgcattatactagtttacatccccatacaatgtataagagttcccttttctccacatcctcaccagcataagtttggtggactctggtcctgggcttttttgttgttgttgggggactttttattactgtttcaattttgttgcttgttattggtgtgttcaggttttctatttcttcctggttcaatctagataagttgtatgtatctaagaatttatctattttttctctgggttttacagtttcttaatgtatagntgnttgta

SEQ ID NO: 94281 - DNA, 338 bp, Homo sapiens
  misc_feature (1)...(338): n = a,t,c or g
caggtgttgccatggtgatggtaaactggcatgatgcgttggtgggcgtgtcttatggaaggctgcttcctccctgaccctgttttatctagtcctcaatttggtcttgtgtctgagccccacttctggagtcaagttctgcctcttatctccatttctccaactaagatctacaaatggcccatagcacacaaaaagatgctcaacatcattagcctttagggaaatgtaaatcaaaaccacaagaaggcaccacttcacacccacaaagatggctacatccaaaagacacacgtaaaannncnctnntnncnnnnntnntnctnnnnnnncncncn

SEQ ID NO: 94282 - DNA, 323 bp, Homo sapiens
gtgccttccaccatgattgtaagttgcctgaggcctcctcagccatgaggaactgtgagtcaattaaatatcttttctttataaattacccagtctctagtatttcttcatagcagcatgagaacagactaattcatggtccattgattttttttttcaaaggtgccacagcaatgcaatgggagaaaagaactgccttttcaacaagtggtgatgggacaattatgtagccattggcaaagaaaatgaagttatctttattcaaaccatacataaaaactaattctaaatgattaaagatctaaatataagagctaaaacta

SEQ ID NO: 94283 - DNA, 343 bp, Homo sapiens
gcacaggcctgtagtcacagctacttgggaggctgaggtgagaggattgcctgagcccaagagttcaaggttacaatgaactatgatcctaccactggactccaccctaggtgacagagtaagacccagcctcttaaaaaaaaaatttctttgagggctttttcattcttcacctcttttagtcttttttcctttcttctttcttggcgttgcagctgccatattatggcagtggaaatgtttgaatgaataaggaggggatggacatctgagtttccctgttgtgtagcataatattcatttaaatgtctgaaatgagatctttagagaaaattgagggagt

SEQ ID NO: 94284 - DNA, 343 bp, Homo sapiens
caagtttgtgccactgcactctggcctgggcaacaggtcacagaagcagactctgtctcagaggaaaaaaaaaaagggcggggtttttgttgcctgggccaaagtgcagtggcacaatcatggttaacaggggccttgaactgggctaaggcagtcctcctgcctcagcctttaaggggggtgggttaaattacgggggggcgccatcacgcctgggggtttcaccatgttaagaaggtgggtctcgaactcctgacctcagatgatgcaccctcctcggcctcccaaaaggctgggattacaggcatgagccacactgcgcctggccccaaaaacttggttt

SEQ ID NO: 94285 - DNA, 335 bp, Homo sapiens
gccgcgtcgacgtgctccaatgttagatgcatatatatttaggataattttttcttgttgaattaaaccctttatcattaagtaatgcccttccttggcctttttttttttttttttttttttaaaggggggggggaaaaaagcgggtttgggggaaaaaaaaagggccccgggctttttttggttttggggggggggaaaaaattttttaacaaccttttttttgggcccgggggggggaataacagggaaaaggggcccccgaaaaacagaaaagggaaaatttttttttttttaataaaattggaaatttggggcttttaacggggggaatt

SEQ ID NO: 94286 - DNA, 374 bp, Homo sapiens
ggcacgagtacatttccatcagagttcttgggtgcctaggtgcatagtcagtgagcagtaatattttggaaggaatctttttttctgagcagtaagtctcaacagtggggttcaaaaaattcagtaaaacattctgtaaacagatgggatgtcatccaggcttttgttgttcgttgatagagcacagacagagtagatttagcataattcttaagggccctagtattttcagaatggtaaacgagcactggcttcaacttaaagttaccagctcctaacaagaaagtcagcctgtcctttgaagctttgaatctaggcattgacttctctctagctatgaaagtcctagataccattttcttctaatagaaggc

SEQ ID NO: 94287 - DNA, 361 bp, Homo sapiens
ggcacgaggcgtggtagtacgtggctgtaatcccagctacttgggagggtgagaggcaagaggcttgcttgagccggggaggttgaggctgcagtaagtcatgttcttgcccctgcactccagcctgagcaacaaagcgagaccctgtcacaaaaaaaaaaaaccttaaacctgatttggaataattcccatccaaaatatttaaagaactttctttattcaaaaaaaaaaaaacccccctttctttaaaaaaagggggaaaaagaaataaacgggcttttacagtacagaaaaaacagtgggtttataactataaaaaaattatgccctgttacctgggggggggggggcacatctgtgg

SEQ ID NO: 94288 - DNA, 363 bp, Homo sapiens
ggcacgagcacacaaagacacagcacacacatacacacacacacacacacaatcattttattatatacagttgaaaagactgtgcttatggaatttgttccaagaaacagaagggattttgcttgacacaaactggagcttggcagcaatatgaagaaatttgaggacttgagactggttctcaagaagcgtacattcaatggggcaaagaagatactgggattacaggcatgcgctaacacacccagctaattttgtatttttagtagagacgaggtttctccatgttcgacaggctggtatcgaactcccaccttatcctcccaaagtggtgggattacaggtgtgagccagtgcgaacag

SEQ ID NO: 94289 - DNA, 278 bp, Homo sapiens
tttttttttatacactagcaatgaacaatctgaaaagaaaattaagaaacaaactggtttataataacatcaaaataataaaatagaaatgtaaataaggaaatataagacttgtacaatgaaaactccaaaacatttctgaaagaaattaaagaagacctaaataaatggaaaggcatcttgtcttcatgaactgaaaaactgaatattattaagctactgccatatagtgattcaatgcaatccttatcaaaaaccaatggtttttgataaggctc

SEQ ID NO: 94290 - DNA, 407 bp, Homo sapiens
ggcacgaggaaacatttctccaaggaagataggcagtatcataaatcactaaggaaacaaatcaaaaccaagtaagctactgtttcacacccaccaagctaactacagtaggcaagacagccaatagcaagtgtgggcaggatgcaaagtgattggaaccctcattcattgccagtgagaatgtgaaatggtgtggctgctctggacccagttcaacagttcctcaaaatgtcaaactatatgaaacagcaatttcactcctaggaatatgcacaagagaaataaaaacaccactccatattattatccataatagccaaaaagtggcaacagctcagatgtctatcaactgatgaatggataaacaacatgtgatacattcatacaatggaatattattcagcaat

SEQ ID NO: 94291 - DNA, 372 bp, Homo sapiens
ggcacgagaaacgcaagctaaccctgtgcagtggcacacgcctgtagtcccagctactccggaggctgaggcaggaggatctctggagctcaagagttcgaggctggagtgagccatgaccgtgccacagcaccccagcctggccaatcagcagggcgaggccctgcctctaataaaagaaaaagctaagccgtctgttcaatgactaaatgtagtaacccctttgaaaattcatttgttcagatcatcagttggtttagttcttaaacacttggtatctatccatcggtaataccttagtgtaaattattttaatcagtttgacatcacagtatcacagactggcctgatttaagctaagatcagacttca

SEQ ID NO: 94292 - DNA, 370 bp, Homo sapiens
ggcacgagcggcacgagctcggcgtggtggctcatgcctgtaatcccagcactttgggaggccaaagcgggcagatcacaaggtcgagagatcgagaccatcctgggaaagtattttgtagatgtgattaacattctatatcagttgattttacataaaagagagtatcctagacaacctgggtgggaccgatccaattggttgaaaggccttaagaacagaactggtggccagcccaggtggctcacacctgtagtcccagcactttgggggcccaacgcgggcaaagcgcttgagcccagtagttcaagaccagcctgggcaacatggcaagacctcatctctacaaaaacaacaaaaattagctggg

SEQ ID NO: 94293 - DNA, 620 bp, Homo sapiens
  misc_feature (1)...(620): n = a,t,c or g
tagctggccgtggtggcatgctcctgtagtcccagctactcaggaggctgaggcaggaaaatcacttgaacccaggaggtggaggttgcagtgaactgagaccgtgccactgcactccagcctgggtggcagagcgagantttgtttcaaaaaaaaaagaaagttgtgaatttgatgtaagcttaggaaatgaataaaatttataggcatctgtataatgtacaacttgacacggactttcttttatccttagtttctttcacggactctagaacttttatcagaatatactggtaaaacattgggggagggatcctgagtaggtgattggtcaaaaagatgccttcagttttgtcagtgtctaaaagttaagtctgtttaggccaagcatggtggctcacgcctgaaatcccggcactttgggaggccgaggcaagtggatcacaaggtcaggagatgagaccatcttggccagcatggtgaaaccccgtctctactaaaatacggaaaaattggccgggcgtggtggtgcgtgcctgtagtcccagctacttgggaggctgacgcgggggactcgacttgcaaccacgggaggcagaggtcacgccacttgcactcca

SEQ ID NO: 94294 - DNA, 367 bp, Homo sapiens
tggcacgagtaacttactactccggaaaaaaagaaccatttggatacttaggtatggcctgagctatgatatcaattgggttcctaggggttatcgtgtgagcccaccatatttttactgtaggaatagacgccgacacacgagcatatttcacctccgctaccataatcatggctatccccaccggggtcaaaatatttagctgacttgccacactccacggaagcaatatgaaatgatctgctgcagtgctctgagccctacgattcatctttcttttcaccgtaggcggcctgactggcatttgtttatccaactcatcactagacatcgtactacacacacgtactacgttggagctcacttc

SEQ ID NO: 94295 - DNA, 357 bp, Homo sapiens
ggcacgagcagagagtggatatgaccctcagagtccaagggctcttaattggcactcttggcctttggggccagaagattctctagtgaggatgcagtctgtttcgcagtgctcctgcctctcctgggtagatgccagtagcagccttcacttgtgacaagcagatgtttatccagacattgctaagggccctggggaacaaaattgtccctggcaaaaaccagtgggctaaaatatttcctgtctggggccagatgcggtggctcacgcttgtaatcccagcactttgggaggcggaggcgggcagatcacgaggtcaggagtttgagaccagcctgaccaacgtggtgaaacccc

SEQ ID NO: 94296 - DNA, 356 bp, Homo sapiens
agataacgcttttgccatgttgcctaggctggtcttgaactcctggcctcaagtgatcatcttactcagcctcccaaagtggtgggattacaggtgtgagccactgaacctggctctgtgatctattttgagttagtttttgtgaagagtgtgagggctgagtctagactggttttttgcatatggatgtttagttgttccagcactctttgttgaatagactgtctttgctccattgtattggctttgttactttgtcagagatcagttttctatgtacagatgtattctgggctattttgttccactgatctatttgttctttcactaataccatattgtgcttgataactggg

SEQ ID NO: 94297 - DNA, 363 bp, Homo sapiens
ggcacgagcggcacgagctggaagaataattaaagaacggtgtttttttttttttttttttttttttttttttttcccaaaaaaaccccctttttttttcctggcccccgggggggttaaatcccgccccccgaaaaaaaaattttcccccccgtttttagggggaaatttaaaaaacccccccacttggacccgggggggggaaatttcccccggaaacccccttttttttttttgggccccatgttttttttttttgggaaaaacccttggggggggggggtggatacctttcccccccccttggcctaatctttttttcaaaaaaatcttttggggggcaggggggccttccccattttt

SEQ ID NO: 94298 - DNA, 380 bp, Homo sapiens
  misc_feature (1)...(380): n = a,t,c or g
tccacatgcaaaagaatgacgttggactcctatttcacaccatatacaaaaattaactcaaaatggaacaaagatctaactgtaagaggtagaactataaaactcatagaagaaaacataggggtaaatcttcatgaccttggatttggcagtggtttctcagatatgacaccaaaggcacaagcaaagagaaaaataaattggacttcatcaaatatttaaaattttgtgcttaagaggactctatcgagagggttaaaaagatccacagaatgggagaaaatatttgcaaatcatatccaataagggaattagaatatacaaagaattcttaaactcagtaagttgtaagcccgattaaaatgggcagaggatctgan

SEQ ID NO: 94299 - DNA, 382 bp, Homo sapiens
tggtgctcgcctgtggtcccggatactcaggaggctggggtgaaaggaccaggaggagagagactgaaggtccctaggaagaattctgccaaggcggtttcaggatgagatgctgggaaatgtgggaaaaggaatacaaatccctgagacggaaaagcgctgagtgagagagacggattcgtggagataatagggatgccggagcgggtgttaaaagaaacaaatctggccgggtgctgtggctcctaatcccagcactttgggagactgaggcaggcagattgagctcaggagttccagaccagccaacatattgaaatcttggctctaccaaaaatacaaaagttaaccgggtgtggtggtgcacgcctgtggtccccgg

SEQ ID NO: 94300 - DNA, 378 bp, Homo sapiens
ttactagtgatttgtggaatgcaaatgaaaattacagtgagatgtaactaaacacttaataaaatagctataattgaaaaaaaaactgccaagtgttgctgacactatggaggacttaaaactctcatacaccagtggtgcaaaagtaatatggtacaaccactctgcaagacagtttagcaattttagaaaaagttaaacatacaactactgtatttattaaaataaaagaaagcatatatccatcccagtaattgtacacaaatgttcatagcactttattttctgtattagccccaaactggaaacaatccgcttatttctcagcagatgaatgtataaacacactattagaatatccaaacaatgtaaatattg

SEQ ID NO: 94301 - DNA, 390 bp, Homo sapiens
ttaaaatacaaaattatgctgggcatggcggcatgggcctgtaatcccaactactcgggaggccctggcaatataaccgcctgaacctggtaggcgtatatggcattgaccaggcttgaacctgggaggggagatcacaccgctgcactccaacctgggcgacagagcacgactccattttgaaaaaaaaaggctgtgcctttcagagctgtcctgtaaaaatgagggagagggagatataaaaacctttctctcctgaagaggacctattcatgtgcacaggagggccctgggagaacctttgggagcgcccaggacctggaggctgccggcggtcggggacatcaccgaatgggtgcagtttggcaggagcctcatagactcctcggg

SEQ ID NO: 94302 - DNA, 393 bp, Homo sapiens
aaaagtgagaagacaaataataaatgttgacactgctacagattctattggtattaagtggataatatggaagcattatgtataactttatgccaataaattcaactatttagctgaaatggacacatatgttgaaagatacaaattaccaagaagaaatagatgtcatgaatagccttgtacctgctaaagaaattatagttgtggttaagatccttctgacaaagacaccagacccacatattttcaccaacgaagtctaccaaacatttaaggaatattatcagttctatacaaattattccagaaaattgaagatgagagaacatttctcagttcattctgtgaggcaggtattaacttgatatcaatatgcaagagattttttttttt

SEQ ID NO: 94303 - DNA, 933 bp, Homo sapiens
tgtgcctgggcctcttagtaatttttgtatgtaattttcaaagtatccgggattacaggcgcccgccactacactagctaattttttttgtatttttagtagagatggggttttactatgttggctaggctggtctcgagctcctgacctcgtgatccgtccaccttggcctcccaaagtgctgggattacaggcgtgagccaccgcgcccggcctaggtcatttgtttttgggtttggatggcaagatcatggataagacagcaggctttgattatagagctctgagttcaaatcctggctctaccacttgtcagtggtgtaacttggaggaagatgcttagcctgagcctgttttatgttttgaagattgggtaattgtccttccttcagtgttcctgggtgaggagtaagtgaagtcatgtctataagagatgtagcacagtctccggcatgtataaatggacagtaactcctagtgtgtagctagcctctgatgagatggtaaactcaggaggctggcaccacggctgtgctactcacggtcatgctggagggatgcagaaactaaatgaatccacagctacttactcatcttgcctctggcaggttcaccttaaaattgttgctaccaagcttcctgtggtcaaagagcccttgaggaagcaagctccacggccaccatagataacccattcctgaaagtttttcataaacccccacttgttgcttttaaaattttataagcagcttacacatgtagaaaatgatcctccagcccaccaccacatagtaatcactgacactgtgaggtgtctcagctggggttctgctgtgtgtgtgtgtattttacaaaatatgtatggtttctgttcagctcttttcagttaacagatgaacttttgtatcattaaatatttttgaaaacatgaaa

SEQ ID NO: 94304 - DNA, 381 bp, Homo sapiens
cataatttgagattcttggcatgttaacttttcattatggaatattgaataatttcaatattattcatacatttcttgatgttcaaacatacacaaaaatagaataatgaaactctacccatcacccagctgcaacaaatatcaatactttaccggtcttaatacatctaaccccttactttttgtttgtttcttttggggaagtatttaattgtaattttttttttaaaagacaggatctcactctgtcacccaggccaaagtacaggggtacgatcacagctccttgtaacctcgaactcctgggctcaagtgatcctcctgcctcagccgcttgaatagctgggactacgtgcatacacccccacctcctgcaataat

SEQ ID NO: 94305 - DNA, 417 bp, Homo sapiens
gctcaacttgtaattctgtttttctgaagtcctgtttctcacaaaatcacccatgaggggtaaaataacttctttcaaacttctgttaatgttggcattttgacctgccctgaatcacaaatgttctgaatggcatataaaacggtgaatcctttccacaaagcttttaatttactttgcccagattcctaagaggaattactatttatgactgctatacacttataaaatgtttcttaaataagacttgaaattcagaattatcccttgatccatgagctgtacaaaggatcttgtgttaacaggcacgaaaacaacattattcttcttgtacatatccatcagaactatttggcgaccagatgcattgtcagtgagcagtaatattttgtttgtggcaccccaacagcaataaca

SEQ ID NO: 94306 - DNA, 407 bp, Homo sapiens
gaaacattgtaagcttgattgcctgttcctgaagtgacttgcaatgaacccctcaatatcagggatcagagtgcctctcttcatgggtagtgagaaaggcagtgccctattctgcagcctaggctgctgggcaaaggggagaatttggtggtggtgaagggaatcaaggagggtttctgtcataagaaaccagtgtggtttacctttgccaggcgtctgagttcctgatgatgttcctgcaagaatccttttccttatgatttaaaagtctttagcagctgagcacggtggctcacccctgtaatcccaacactttggaaggctgagggaggaagatagcttgagctcaggagttcaggaccagcctagacaacatagcgagactgcatctctactaaacatttaag

SEQ ID NO: 94307 - DNA, 566 bp, Homo sapiens
tttgtataagatgtgaagcttaggttaaggttcatgtttttgcctatggttgttcaattgctctaatagcatttattgaaaaggttaatgatttatttgtacttctgccaaaattaattgatcatactcatgtggtcatacttccgctttctctgttttataccacttagctttgtctatcttgctatcaataccacactgtcttgattactgtagctatatattactgtagctatatagtaaactttaataaaaggaagatgaactttcttcttcttttttcaaaatcggtttggctgtttaaggtctttttcttttggtatacattttagagtaaaagtacatacttctatgaaataccttactaagcttctgataggaaatacgataacactgtagaacagtttagggaggactggtatctttactaaatcttctaacccataaacatgatatttaggtcttcttgtctttcaccaacattttgtaattttcaacatgtagattctatacaattttgttgagattatgtcatctgtgaataaagactgttttatttcttttcc

SEQ ID NO: 94308 - DNA, 349 bp, Homo sapiens
cagttaacctttggattcgtgtctttctcttagatgaaaaatgataactccatgtagttataatatgcattgctttcattatgaatcggggtgagcatcttttcatgtgcctaaaggctatttgtattcctttttctgtgagctatctgttcataccctttgcacatttttcttttggattgctttttcttactaatttctataagtgtataaattagagagattagccctttgttaggttgcagtttccctcaacttgtcacttgtttttaaaaatgactttcatgtattttggtataaagaaggcttaaatatggctttctttacattttatgtacttaacattaat

SEQ ID NO: 94309 - DNA, 382 bp, Homo sapiens
  misc_feature (1)...(382): n = a,t,c or g
cggacgcgtgggataacgggtggtcatagtattctcttatgatccttttttttctgtaaaattggtagtaatgaccctgttttcatatctgagttttgtaatgggaaccttttctctcactctcttttttttttgaagttaatctagtttaaaagttggcctattttgtggatctttaaaaaaaaacaactttggttatcagttttccttatgggggttaattctctaataatcttggctcgaattattaattacttctgccctgctagctttgcacaaagttaactcctctcttttagttccttaaggtataaagttaggttattgattggaagntttatttcctttataatatattcatttacagctataaatttctggg

SEQ ID NO: 94310 - DNA, 381 bp, Homo sapiens
ctatataccgagaatggcgcgatttaacacgagatggcacataccaaggccaccacgcaccacctggggaaaaaggcgctgtcgatacgggataatcctatttattacctccgaaggttttttcttcgcaggatttttctgaccctttaaccactgcagcctagcccctaccccccaattaggagggccctggcccccaacaggcatcaccccgctaaatcccctaaaagtcccactcctagacacatccgtattactcgcatcaggagaatcaatcacctgagctcaccatagtgctaatagaaaacaaccgaaaccaattaattcaagcactgctcattacaattttactgggtctctattttaccctcctacaagcct

SEQ ID NO: 94311 - DNA, 455 bp, Homo sapiens
  misc_feature (1)...(455): n = a,t,c or g
gggggaatacgaacgtcgggannacagatggtctcgcgggngccncangcgtncgaaaacaattatcaatataaaaccccctgccataatccaataccaaacgcccctcttcgtctgatcggtcctaatcacagcagaggctagttctcctatctttgccaggcctagctgttggcatcactatactactaacagaccgcaacctcaacaccaccttcttggaccccgccggaggaggagaccccattctataccaacacctattctgatttttcggccaccctgaagtttatattcttatcctaccaggcttcggaataatctcccatattgtagcttactactccggaaaaaaagaaccatttggatacataggtatggtctgagctatgatatcaattggcttcctagggtttatcgggtgagcacaccatatatttacagggggaatagcg

SEQ ID NO: 94312 - DNA, 396 bp, Homo sapiens
gggcaacaatggcatcatcagtggtggaattcttccaaactttgatgatgttctctttgttagagatctcttgcatgggcctgatggatctttgcatagagtactgtgggtaatgagcctataggtccttatgactccctgatctaaaaactaaattagagacattgtgtttgggggcaaatatatcacttcgatgcctttagaattgaactcatggagttctgggtggggggtcaggggcattgtccaacattaaaacaactttaaaaggcagacctttactggcagggtacttgctgacttcaaagaccaaacattaatggagccaatccacaaaaaggggtcttgtcgtccatgccttcttgttatactgccagaagactggcagctggtgtt

SEQ ID NO: 94313 - DNA, 348 bp, Homo sapiens
ggggcttgagctcaggaggcagaggttgcagtgagctgagagggcgccagtgcgctccaggctgggtgacagcgagattgtgccttaaaaaaaaaaaaaaaaaaaaaaaaaaagggggggggggaaaaaaaaaattttttttttgaggtttggggttaaactttggaaaggggaaaatttggaaaggctttatttcccaaaaacttttggttttaatttaaggggaaaaaaaagacttttggttaaaaaccaagggggggggggacttgggaactttaaaaaaaaaaggttggggatgtttaaaaaaaaagggggggtttacaaaaaattccctttttttaaaaaaaa

SEQ ID NO: 94314 - DNA, 372 bp, Homo sapiens
ggctcccaggtgcaagcgattctcctgcctcagcctcccaagtggctgggattaccggtgcatgccaccacgcccagttaacttttttgtatttttagtagagcggggggtctcgagtcctgacctccgatgatcccacccgcctgagcctcccaaagtgtgggattacaggcatgagccactgcacccggtgatctgtcagccactttccttgtcctctacagctaatcacccagttctgtgcctgtgttttacacacaaaaacctgcacatatttatagcagctttatttataattgccaaaagttggaagcaaccatgatgtacctcagttgatgaatggatttggctgggcctggctcccctctatct

SEQ ID NO: 94315 - DNA, 429 bp, Homo sapiens
ggggagcttttcatttttaggaattttctttgatttctctatgtccatgtgctgtcaatattgatagaagctgaaatttgggaacttttatgactacttttcttttttttttttttttggaaacggggtccccttttttcccccggcccgggggggacggggcaaaaaaatacttacgggggggttaaaccccgggggccaaggctaagccaattttcctcccccaccctctggggtgggtggcattaaaaaaggccccaccccccccgggggtttttttgaaaaaggggggcccccctttgggcccagggggggttaaaaccccgggccccaaggggaccccccggcccaacccggggtagggataacgggacatctttttgtgcccccccattttaggcccttttccaaaagggattttttttgggc

SEQ ID NO: 94316 - DNA, 426 bp, Homo sapiens
gggtgagccgatatcacgccactgcagtccagcctgggtgacaaagtgagactccatctcaaaaaaaaaaaaaaaaaaaaataactgggcctgggggccctccctttttaccccaccctcttgagaaacctgggggggaagaattttttaaccctggccaacaagggttgaagggaccttaatttgggcccttgtcctcaacccggggaaaaaaaaaaaaaccttttttttaaaaaaaaaaaaaaaccccccggggggggggctccccccttttacccccacctttttggggggttagggggggggttttttaaacccggaaaaaaaaaaccttcttgttaaaatgggaaaacccccttttttataaaaaaaaaaaaaaaaaatgggggggggggggcccccccctaaatccaaaatggcgggggg

SEQ ID NO: 94317 - DNA, 368 bp, Homo sapiens
gccacatacctgggtctccagcccactcccgtcatcttcagggctcctgccctgacctaggcttctccatgcccaaaagatatagactgtcctttaaaagccacacaaaaatgcaaaatgtcccattagggtggctattgtggcagacatggagaataacaagtattggtgaggatatggagaaatgggaaccctgtgcattactgatgggaaggtaacatagagcaaccctgggagaggatggcagctcctggaaaagttaaacacagaattaccatgtgatccagcaactccactcctaggaatataccccaaaacacttgaaagcagggactcaaacagattctttattttttttttttcttttg

SEQ ID NO: 94318 - DNA, 405 bp, Homo sapiens
  misc_feature (1)...(405): n = a,t,c or g
cattgtaccccagccagccagttacacacacacacacgcacacacacagcacggaagggggtcagacacatactcactgcaacccaggcagcctgacacacacacacacacacacacaacaccccaggtgggcggacacacacacacacagtaccacaggtgggcggacacacacacacactgctctctatacagacacatacacacacacagtaccccagtcaggtggaaacacacacacacacagctctctatacagacatatacacacagagtaccccagacagccagacacacacacacacacacacaatatatacacacacaggggcgtgtgtgcaagaagaaaagaatctcagttgccaagcagatagatatcacacagacttagagcagaggtgtggn

SEQ ID NO: 94319 - DNA, 432 bp, Homo sapiens
  misc_feature (1)...(432): n = a,t,c or g
cccacgcgtncggctcacacttgtactcccagcattttgggaggctgaggcaggaggattacttgagcccacgagtgcgaactgcatgagctatgatcacgccactgcactccagcctgggcaatacagggagaccctgtctcttttaaaaaaaaaaaaaaaaaaaactatgggggggggcgcatttaaatgacccctgggggggccaagtttaacggggggaggaaaagaatttgttttttccttataagggggcgaaaaaaacatcaccgggggacttttggaaaaaaaccttctttcgggggggggaaaaatgggcccacccccccacaagaattatagcgccttgggggaaattaaacattttgaggggtaaatggggaaaaacaacctccctttcctggcggctggaaaatttggtttatggaaaaa

SEQ ID NO: 94320 - DNA, 405 bp, Homo sapiens
  misc_feature (1)...(405): n = a,t,c or g
actctagtatgggtgacagagcaaggccctgtcttaaaaaaagaaaacctaccaaaaaaaaaaaaggggggggccttttaaaagaacccttggggggcccaaaattaacggggaaaaaaaaaaaaaaatttttttccttaaggggggccatttaaaaaacaccttgggaatttttgaaaaaaaactttttttgggggggggaaaatttggggcaaacccccccaaaaaaattaagctcttaagggaaaaaaaaaaattttaaggggaaaagggggaaaaaaaaccggctaatgcttcgtgttaaaaatttttctttccgggttttgttttaaaaaaatttttcccccggggctttggaaaannnnnnnnnnnnnnnnnnnnnnnnnnnncnncccncnncccccc

SEQ ID NO: 94321 - DNA, 425 bp, Homo sapiens
gcgcccacgcgtccgcccacctatcccaagtagcttgtaatacagacatgagccataacacctgactaatttttaagattttgtgtagagacggccataaataaaatagccataatcctggctaatttttaaaattttttgtagagatgggggtctcactatgtttcccaggctagtctctaaactttaggactcaagcgatcctcccacctcagtctcccaaagtgttgggattacagttgttagccaccatgcccgactgaactttttttactaccaaaatagcagaagatgaaagataaacggaagaagaggtctgaaactaaagtcttgccatgtgtgggatttgtgagtggggagcagtattagtttatctgttagtagaaataagtattggaaatatgtgaagtgtcttgcctagactt

SEQ ID NO: 94322 - DNA, 356 bp, Homo sapiens
  misc_feature (1)...(356): n = a,t,c or g
tttttattgagacacatcttgctgtgtcacccagggttttgctctgttgccacagcttactgcagccgtgacccaggctcaagtgatccctcccacctcaggcccctctccccgaccagtagccgagactacaggcaggcacagactggcaccaccacactcggctaattttttttagtagagacagggtttcactgtgttagccaggatggtctcaatctcccaaccttgtgatccaccccactcgggctnncaaagngctgnnnaaaaaaanaaaaaaaaanannnaaaaaaaaacacaaaannnnaaaaananaaaaaaaaaaaaaannaaaaaaaaaaanaaaagaaggggg

SEQ ID NO: 94323 - DNA, 395 bp, Homo sapiens; identical to SEQ ID NO: 94133
  misc_feature (1)...(395): n = a,t,c or g

SEQ ID NO: 94324 - DNA, 452 bp, Homo sapiens
  misc_feature (1)...(452): n = a,t,c or g
agtgaggcnngnnnnnnnnnnnaactganatccctactccagtgtcgtggaattcgttcaagtgatcctcccaagtagctggggctacaggcacatgctaccatgcctggcttatttttgtattttctgtagagatggacttttataccccgtggcctaggcctctcaaagtgctcagctgtgccagtactttatgatttttttgaggcagggggtctcactctgtcccccaggctggagtgcagtggcatggtctaagctcaccacagcctctgcctcccaggtagctgggaccacagatgcgcactagcacacccagctaattttttgtatttttggtggagacctcctgcctccctaagtgctgggattacaggcatgagccactatgcccggctgatgccagcactttaaaactagaagtcataatacaagatcaaccttgtattcct

SEQ ID NO: 94325 - DNA, 478 bp, Homo sapiens
  misc_feature (1)...(478): n = a,t,c or g
gtcaaggccagaccgggggaaattgagaatgagtaccctagcccagngcggnggaattcgggggagcaggtaattgaaaaaggttgctttacgaggaagtttgaaagtagaagccaaataattgaacatactgacatatcctttgaaaataaatgtagaactcttatctaacagtcccatacaagggaaggcttgttatctttagactttttcataatagccaacctaacaggtgtgaggtgacatctcattgtggttttgatttgcatttccttgatgattagtgacgttgagcacctttttatatacctgttgaccatctgtacatttctagggaggcaggaaggaggctttggaaaaatctctgttcaggctctgtcctcatttttaaattgggttactcacttttttgctattgaggtgaatgagttccttatatattttggatattaaccttttatttgatacatggcttggn

SEQ ID NO: 94326 - DNA, 2370 bp, Homo sapiens
cagctgctggagggcctacagcacaatcccccgctcagctggctggtagggcccttcgccttgcccgctggcgggcagtagctgtaggagcctgcaggcccggcgcggggtcgccctgctctgtccagggaggagctgcctcagaactttctccccgcccccaaacctggatcggttccctaaagccctagacctttggggctgcagctggctgagcgcatagaggctgcggaggcagtgcccttcttaactgagccaccccacgccctgctccgggcctgcctgcatctcccacctcctcccaagcgctgcctgcccctctcggagcctggggtcactcagaccaccagccaagagccttcccttgaagtccccaagcaagcactgcaattaggaaagagaaaaagcagcgtgcccagcctggaagggcatctgtttgccccgctagcaacccttttatatctagcagggctcttccagtcctgcagcacgggcccccagctatcagcggtgcaggcagtgctgtggcatcccaggctccgggcagctccgttctcatgctgaaagtgggtctccggccttagcacacacaccttgagggtcttaagaaccacattccctcatagtagaaagtactagaaaaagcgacactgccatcatcatcccaaggcaggctgctactgcctttgctgacccccggggtggcctcacggtggggacaaagctgccaggagccacagcagccacagctggggctttgcaccagcctggcttgagactgagcagtttgcagggggtggggggtgcaaaaaacaagcaaacaggctgctgctgcctccagctgcccaccacaggcctgccccaggcacctggggctctgaggcccctggggaggctgggcccagcagctgcccctggagaacacagacaaaggacttccccgcagggaactgtgccctatggagggatcagacagggctgggaacagccacagaggctgcgtgcctatggcacagcccttcctccgccgcacactccccctgggtcctcaggcccacccaagcgccgggctgcagaggaagcggggctggggaggctgcaggcatcagagacactggtggtggcggacccggccgccgggccccgtgctctcaggctagcccaggtcgtggaggctggcaggctcaggtcgggtgtgagacgtgccgtggctgcgctcagtccagcggggaggagccgttcagcccggcctccccaggaagccatatccccactcacccggtaagagaaccttgtcgtcccctttccatgctctcctaggacacgagcccaggaaccccagacccagggggaggaagggtggaggggccccaggggtcaccatgtgcaccaggggccgtgaggggccggggcattcagctcagctctgaaccggggaagctggcacggcaaggactgcctcaggtgacgggccgtgagaggggacgggtcaggagccttcccaagccttctcctcagcccgacacccatggccatcggaggctaggatgccagacacagccatttgcagaaatcaggcacagtgactgcagctcacgtccagccaaccaagcatggggccgcagctcaggaagtcccttcccgccacaccacagcctaattcttactgggacggaggcaactcggctacgctgggcaggacgacaaacacgagacgccactgtggaatgagcaacttcggagcacggggtgacttgcttgggaccgtgcccacgtgacagccccttatgcagaggaggaaagagaagccccgagtgggaggggaacctgtccaaagtcacacggtgtgtgggtgacacagctggggtgagtcgaggctggcccctgaggcccatgctccctgaacgctggagaccactgtcggctagcagcggctctcagggaaggcctggtctccaccctcccagcctagcctcgcggaccctcgtcctccccacatcggacctgctcacctgcctggaccctgggctgccagatgcaggaagcatcaaaccccccagcctcgtgggtgcggggcagggcgcaggcagcacagcttagatgccctggtttgtccctcttgtctcctgggaagagcttgctcccgcccagctctcctgccactggcctttcagggttgggctgggcccagagtgccttttagtcgcttctcacggtggcctgatggctcaacccagtcccaaacgggcccagtgacactgccgactgcaccccagctcaggcccccactgcaccagcaatgctagaaaaccaagccaataaaagtgatttcttttttcattaaaaaaccatttatagtcaaaaaaaaaa

SEQ ID NO: 94327 - DNA, 451 bp, Homo sapiens
  misc_feature (1)...(451): n = a,t,c or g
gaaaaggagagctgttccagaacacagaactgatctcaggtttttgaaaaaaaaaaaaaaaaaaaaaaaaaaaaaaaaaaaaaaaaaaaaaaanggggccccctttttttaaaggggcccttaaaaacccgggtaaaaccccggggggggtttttttttgccccccccttttgtgggggccccccccccccccttttttttgccggggggggggccccccccctttttttttttaaaaaaaaaaaaaaaaacccccccctttgggggggggggggtttttttttttgggggncnnnnngaaaaaaaaacacccctggtatgttttttaggggtcttttatatatttttgttacaaaaaaaaaaaaagagggcgggctggcttggaactccttggggggggccattttttttggttttaatttacggcgcacaaaattcctctttttttttt

SEQ ID NO: 94328 - DNA, 427 bp, Homo sapiens
gcaggaattcgtgttggggagcgctcctgggtgtggctgctgggtaggaggggaaggcagggtcagcagcccctggggcgaccgtaaagtgggtggcccttcaaattcaaggcactggaacaagggggctgggccctcctgcccaccaggcccgtcattggctgcaggcctcccgggacggcgagctggctcctgggcccctgtcctttggaccagggccgccctgagggctggcacagctaccttctccactgtggccccatccccgccacaggagagagagccgcctttacccgacatgagcaggagttcgaggaacatctggacgagcaaaggccaccaggaggtagcacagcaaaaaaggccaagagcctgttttctttaccgatggctggcggcaaatattccgaaagaaacgtgtcaggca

SEQ ID NO: 94329 - DNA, 392 bp, Homo sapiens
aacgcgggtggattgcttgagcccaggagttcaagagcagcctgggcaatatggaaagacctcttccctaccaaaaaaaaaaaaaaaaaaaaaggcccgggggcggggcccccccttggaaacccaaccttttggggggcccggggggggggaaaaaaagggcgggaaaaaaaaaacctcccggccaaaaggggaaaacccccttttttgtaaaaaaaaaaaaattggtttagcatggggggggggccccgccctttaaccccaattttttgggggggtgggggaaaaaaaaacttttaacccaggggggggggggttggggaaacccaagccccccccttttaccccaacccggggaaaaaaccaaaccccccaaaaaaaaaaaaaaaaag

SEQ ID NO: 94330 - DNA, 408 bp, Homo sapiens
cccagctctcagggaggctaagaggcgggaggatagcttgagcccaggagttcgagacctgcctgggcaatatagcgagaccccgttctccagaaaaaggaaaaaaaaaaaaaaaaaaaaaaaaaaaaaaaaaaaaaaaaaaagggggggggggctttaaaaaaacccctgggggggccaaaattaaaggggggggggaaaaaaaaaattttttttttaaagggggggaaaaaaaaaaccttgggggaattttggaaaaaaaacttttttttgggggggggaaaaatggggaaaaaccccccaaaaaaaaaaaaggccttagggaaaaaaaaaaattttaaaggggaaaagggggaaaaaaagccgaaaatcctggggggaaaaaaatttttcaaaaaaaaaaaaaat

SEQ ID NO: 94331 - DNA, 393 bp, Homo sapiens
gcttaaaaaacggcgcaccacaagattatatccttcacctggctcggagggtcctagcccacggagtctcactgattgctagcacagcagtctgagatcaaactgcaaggcggcagttaggctggggaaggggcgcctgccatttccgaggcttgcttaggtaaacaaagcagcaggtaagctcgaactgggtggaacccaccacggttcaaggaggcctgcctgcttctgtaggctccacctctgggggcagggcacagacaaacaaaaagacgcagtaacctctgcagacttaaatgtccctgtctgacagctttgaagagagcagtggttctcccagcacgcagctggagatctgagaacgggcagactgcctcctcaagtgggtccctg

SEQ ID NO: 94332 - DNA, 382 bp, Homo sapiens
  misc_feature (1)...(382): n = a,t,c or g
gcacacacctgtagtcccagctactcgggagcccaacgcacgagaaccgcttgtacccaggagggggaggttgcagtgagccgaagttgcaccattgcactccaccctgggcgacagagcaagattctatcaaaaaaaaaagggcgggggcaggtaagttataaaaaaaaaatgctgctaaaaggaataaagcgttgaagaaaacgcgggctcatcctttaagcttgaaaaagggagacaaaaatccattggttaaaattcacatctcagggggggaaaacccggcctgggtgggggggttgccaatttcctaaaacggaagggggggggtataaaaaaaggaaggaataaccgttgtttttcaaatagggccctgtgaagn

SEQ ID NO: 94333 - DNA, 411 bp, Homo sapiens
caccccgctaaatcccctagaagtcccactcctaaacacatccgtattactcgcatcaggagtatcaatggcctgagctgaccatagtctaatagaaaacaaccgaaaccaaataattcaagcactggttattacaattttactgggtctctattttaccctcctacaagcctcagagtacttcgagtctcccttcaccatttccgacgggatctacggatcaacattttttgtagccacaggcttccacggacttcacgtgattattggctcaactttcctcactatctgcttcatccgccaactaatatttcactttacatccaaacatcactttggcttcgaagccgccgtctgatactggcattttgtaaatggcggggactatttctgtatggctccatctattgg

SEQ ID NO: 94334 - DNA, 391 bp, Homo sapiens
agaggtttcggtgagccgagatggcgccactgcactccagtctgggcgacagactgagacacggtctcaaaaaaaaaaaaaaaaaaaaaggggggaaaagttttttcctttcccctggcttggggacccaaaaaaattgggatttttttgattttaaaggggaccaaaggccgggaaaaggggtcccccctttaaatttaaaaattttggggggaaaagggggggggaccccctaaacctaggatttgaaaccccccgggccaaaaggggaaaaccctttttttaaaaaaaaaaaaaaaattacccgggggggggggtttccctttggggcccccttttctggaaaatgggggggggggggaacccctaccccggggggggggggggggga

SEQ ID NO: 94335 - DNA, 290 bp, Homo sapiens
taaaaatctctgtagagaaaactataaatatgaatgaaagaaattgaagacaatgaaagatctctgcaaagaatactacaaagtatgaatgaaaaaaattaaagagaacatgtgaaaagataagctcatgaattttaaaaagtaatattaaaatctctacactaatcaaagtaatatacaaattcaatgcaatccctatcaaaataccaatgacattctttgcggaatttaaaataaattctaaaatgtgtgtagaactacaaaagaccctgaatagtgaaagcaatcct

SEQ ID NO: 94336 - DNA, 366 bp, Homo sapiens
cggacgcgtgggcggacgcgtgggtggctcctctgtcccttcaacacactccaattaatgtaggtttttttttttttttggcctgggggggggggggggggggggggggggggggcccccacccttttttggggcccccccgccctgggaaaaaaaatggggggaaatttggcacccccccccccaaaaggggggggggggttataaaggggggccccccagggggggggttcccctaaaaaggggcccttttttttttttggggcaaaccctggccccctgaaaaaaaaaccccaatttgggatttttttgggggggtttgggggatttttttaaaaaaaagggggggccctttaaaaaaaaaaa

SEQ ID NO: 94337 - DNA, 372 bp, Homo sapiens
  misc_feature (1)...(372): n = a,t,c or g
atcctcttgcctcgacctcccaaagtgctgggattacaggcatgaactactgcacctggcccactggctagttttggggatttttttgttgttgttgttttgttttgttttgagatggagtcttgctctgttgtccagactggagtatagtggtncgacctcacctctctgcaatccctgctgcctgggagagaactagcctctttcttaaaacagcaccatttgtagaatcgggttctttcctggctggaggctgtgaacatgcccgccggaccagactatcaaacngncatctggggtgtgaacaacccctgatttcccttttttttttgagcttttttcccctggtgaaactccccacaaaaataaccc

SEQ ID NO: 94338 - DNA, 338 bp, Homo sapiens
aagaatgttgcttaatctacattgaaaatgtattatttaggggagccaccttcatcagggatcttagctggatcttctgcacaagttgctgcagcttctccatcagcacttgctgcttcaccttacacgtcatgttatagagttggcttatttcctgaaacctcatgaaccaacctgtgctagctccaaacttttcttctggaccttcctaatctctctcagctttcatagaattgaaaagagttaggactttgctctagattcagttttggtttaaggaaatgtggttggttttatgttctgtctagaatgctcacactttctccatatcagcaata

SEQ ID NO: 94339 - DNA, 249 bp, Homo sapiens
  misc_feature (1)...(249): n = a,t,c or g
ggggggggccgttttaaaggacccttgggggggcccaaatttaacgggggagggacaagtaaaatttttttccttaaggggggggaaaaaaaaacccccggggggtttttgggaaaaaaccctttttttgggggggggacaaatggggcccaccctccctccggaaatttaaggctctggggnnnnnnnnnnnttttaaagggggaaagggggaaaactaaccggaaatgctggcggtttgaagatttt

SEQ ID NO: 94340 - DNA, 341 bp, Homo sapiens
gttgtaaatcacatgactgatgagggacttgtatcccgaatctattaacaacccttacaactcaataagaaagacagaaaacccagttcaaaaatggacaaagtgtccgaatagacgtttctccgaagaagatgaacaaatggccaggaagcacaagcaaggatggccagcatcacgggccattagaggaacacaaagcaaaatcatcatgagatgccacttcacacacactaggatggctagaatcaaaaaagaaaaggaggccgggcctggtggctcatgcctgtaatcccagcactttgggaggccgaggcgggaggatcgcttgagctcaggagttt

SEQ ID NO: 94341 - DNA, 493 bp, Homo sapiens
gctgcacatggtgacttccttccagagagcacagagtgggaggtaggcaaggcgtctccacagtggagagcccgacccactgtctcagcccagaggtcaaggctggcaccatcaccgagaggtcacacgggcagatgtgacagggcgcttcaccactgggctcttcctcccagacccataacccttgtcttagtattagaaaaacactggcagaccgggcgcagtggcttacacctgtaatcgcagcattttgggaggccgaggtgggaagattgttcaagagcagtctgggcaacatagtgagaccccatctctacaaaaaaaattttttttttaattagccagggcgtgatggcacatgcctgtggtcctagccactagaggctgaggtgggaggatcactggagcccagggaggtcaaggctgcagtgagcttttgatccacaccacttgcacttccagcctttggggaccaaaccaagaccctgtctcg

SEQ ID NO: 94342 - DNA, 533 bp, Homo sapiens
tatctgtcacccaggctagagtgcagtggcgggattactgctcactgcaacctcgacctcctgggctcaagtgatcctcccagctcagccttcaagagtagctgggactgcagacctgcaccaccacgtccagctgcccggttaatttttttctgtcggtttgaagaggggagaaggtctcactatgttgcccaggcttgtctcaaactcccgggctcatagcaatcctcccactgtggcgtcccaaagtgctggggttacaggtgtgagccaccacacactgggctctgctctgcctttctgagtttggtttctgcttatggtggggagcttgttcccgttcttcccacaagaacccaggatgtggcacagcttccctgccgtcttccttcactcagttggctacgcctcccatcctagctccacttccagaactgccttcaccctaggctgggtccttgtttttgtttttagagacaagggtctcactgtgttctcccaggctgggagtacagtgggcgtgatcttgggtt

SEQ ID NO: 94343 - DNA, 346 bp, Homo sapiens
gaattatctaaatctaccctgcctgcgctctgtggagggaatgacaaagcctggatgacagcacatcggtttatagcatggtttactgactatttgaagcccactgttgagaactattggtgagagaaaaagattcgtttgaaagtattactgctcattgacaatgcacctggtcacccaaaagctctgctggagatgtacacggaaattcatgttgttttcatgcctgctgacacaacatccattctgtagcccacgcatcaaggagtaatttcaactctcaagttttgttatttataaaacacatttcataaggttcagctgctatatagatagtgattcctct

SEQ ID NO: 94344 - DNA, 323 bp, Homo sapiens
gaagatcaaaccagccacaacgttctgttaagcctaaacctaatccagagcaaggccctaatgctcttcaattctatggaggctgagagttgaggaagctgtggaagaaaagtttgaagctagcagagaataattcatgaggttgaaagaaagaagctgtctccagaacataaaagtgcaaggtgaagaagcaagtgctgatggagaacctccagcatgtgatccagaagacctagctgaaataactgatgagggtgactgcattaaataacaaattttcattgtagacaaaacagccttctattcaaagaagatgccatcta

SEQ ID NO: 94345 - DNA, 345 bp, Homo sapiens
  misc_feature (1)...(345): n = a,t,c or g
gcccgacagcagcctggagatcctgcccgaggaggaggacgagggcgccgactcctaaccccgccaggcagcctcgttctgcacaggcactttagcccgagccaggcacacctgcgagggggcaggtgtgctccgccgccctgctgataagctggcttcattaaactgacacttctcanaaaaaaaaaaaaaaaaaaaaaaaaaaaaaaaaaaaaaaaaaaaaaaaaaaaaaannnnnnnnnnnnnnnnnaaaaaaaaaaaaaannnnnnnnannnnnnnnnnnnnnnnnggggggggnnnnnnnnnnnnnnnnnnnnnnnnnnacccccccccccccccccccc

SEQ ID NO: 94346 - DNA, 318 bp, Homo sapiens
ggcgcctgtaatcccacctactcgggctgaagtgagaatggcttgaacccaggaagtggagatttcagtgagctgagattccgccactgcagtccagcctgagcgacaagagtgagaagagtgagacttcatctcaaaaaaaaaaagggtccttctacccatgggaatttttttacccttaaaaaagggaaatacctgttttacaacaccatggatggacctgggggacactttgctagggaaataagccttgatctcactgggatatggaatcacaaaattgacctcccaaccaaagggtaaaaggggggtttcatg

SEQ ID NO: 94347 - DNA, 364 bp, Homo sapiens
ctgtattttggctattgtgaaaagtgctataaacagaattgcaaatgtttcttcattctgattttatttgttttggatatatatccagtagtgcaattgctgttatgacatggtagtttaagttttttgagaaatctctattttgtttttcataatggctgtcttcatttacattccaaaccaacagtgtgcaagccttcccttttcttcacatctttaccaacgctttttctttttaataagagtcattctaacaggaatgagttgatatctcctagttttgttttttcttttttggcttgcctttttgtgataattgacattgagcatttttaaatatatcagttggccattatgtatgtat

SEQ ID NO: 94348 - DNA, 356 bp, Homo sapiens
caagattgcgctactgcactccagcctgggcgacagagcaagactccgcctcaaaaaaaaaaaaaaaaaaaaaaaaaaaaaaaaccaaaattttttgggggggccccggggggggggtcaaccccttaaaacccaattttttaaagggccagggggggggaaaccccggggggaaaaaataaaaaaaccccccccccaaaggggaaaacccccttttttttttaaaaaaaaaaaaaacacaattttcccccgggggggggggggccccttttaaccccattttttgggaaaaggggggggaaaaatttttttaaccctgggggaaaaggttggggggaaacaaaaatcggcctttt

SEQ ID NO: 94349 - DNA, 314 bp, Homo sapiens
ggagggtgtttgtgtccagtaatttatctacttcttctagctttttcagtttatgtgcatacaggtgtttatagtattttctgatggtttgtatttctgtggggtcagtggtgatatcctctttatgattttgtattgggtctatttcttcttctctcttttgttctccattactctagttagtgttctattttattaatgttttcaaaaaaaatagctcctggatttattggttttttgaaggggtttttggggctctatctctttcagtttcacttggattcttcttatgtcttggcttctggtagctttgg

SEQ ID NO: 94350 - DNA, 322 bp, Homo sapiens
  misc_feature (1)...(322): n = a,t,c or g
ctttccccctgggactgtggggcagtttgggagcaaaaccagaaggacaggcccccctctacccgcctaccctgagcaagcgagttgttcctctttgtacaagggcaggtctgcggttactttcaacactgtttattccagcggaagcagccgggtggttttcccacccccgtgtatgtagatatatcgactttgtattaaaggaagatcgtctgaccccgaanaaaaaaaaaaaaaaaaaaaaaaaaaaaaaaaaaaaaaaaaaaaaannnnnaaaaaaaaaaaaannnnaaaaaannnnnnnnnnccaaagacttttttt

SEQ ID NO: 94351 - DNA, 314 bp, Homo sapiens
ggagattttttattactaattcaatcaccttacttattggtttttttcagatgatctttttttttttataattctgccttggaaggtggaaaggttgtaggaattaatccattttttctaggttatccaatatttgggcttataatggttcacagaagcctcttatgaccctttgtatttctgtagaaccagtggaaaggccccctctttcattttggattttattaattggagttttctctattttttttagttagcccatctcaagattggcccattttgtttatcttttcaaaacccacctctcagttttg

SEQ ID NO: 94352 - DNA, 331 bp, Homo sapiens
attgcttgaacccgggaggcggaggttgcggtgagccgagatcatgccattgcactacagcctgggcaacaaaggtgaaacttcgactcaaaaaaaaaaaatatatatatatatatattggaaggcactggttgggaatttaaagcacgggtgttggcccaagacccatgggtagacagcattctaaagaataaattaaggccaggtgggggggctcacctctgaaatcccaccactttggaaggccaaggcggacggatctccaaaggtccggagtttgaaaccagcctggccaacatggagaaacctcgtctctactaaaaataaaaaa

SEQ ID NO: 94353 - DNA, 336 bp, Homo sapiens
  misc_feature (1)...(336): n = a,t,c or g
caggagggtcacttgagcccaggagtttgaggctgcagtgagctatgatcctgccagtgtactccagcctgggtgaaacagcaagaccctatctcttcaaaacaaaacaaaagaggggaagggtgttggggattatggatatttgatctaatattttaatgtttgtgagagtagggttgagtgaggccacacgcatgggcataagaaggctggagtgtcagggtgactttgacagttcagtcctaggagacaccaggaacatggaaggggccctgggaagggtcaggttcatgacctgaaatgagtcagntctctcttggctttgttttgttctcg

SEQ ID NO: 94354 - DNA, 311 bp, Homo sapiens
gtatagaaatagaatgcctttgttcttaaattctacctttgactttacttttaaaatataatttctttggtacgatttagctcatgcctataatcctagcattttgggaggccaaagagggagaattgcttgagcccatgagtttgagaccagactctacacacacacacacacacacacacacacacacacacacacacacactcacgaagcgagaatggtggcatgcgactgacaccccatatacctgagagggtgaggtgggaggatcatttgcacccacgaggtggaggctgcagtgatccatgatc

SEQ ID NO: 94355 - DNA, 315 bp, Homo sapiens
gccatcgcgccactgcactctagcctgggtgacagagcaagactctgtctcaaaaaaaaaaaaaaaaaaaaaaaaaaatttttgtgtttttttaaggggttagggaccccttcccttaattaagggttttggcccctaaaagccaatgggggggggggggaaacccgtgggggccttttttcctcccaggggggggggggaaaaccttggggtttccattgcccaatttttttccccttcttttttttttgggaaaaaaccaaaaaggaaagggtgggggttttggataaaaatccgtggggggttgggaaaaat

SEQ ID NO: 94356 - DNA, 309 bp, Homo sapiens
aaagaaccttataagctaacggagctacataacgagattagagtggcatgtggtcatttgagtaaaaaaaaaaaaattacatgggtatcggattcataggcatcctgtccatctaagacaaggggtaattttattggcccatcagctggatcccgtgccccatcagaaaaactggaagctcactttcatggctgtggttcagtcaaccgtgttcacttaacattaagtgacataaacggcggcctctgggtgttgcccatttagaggtctcagaccaaaagtcagggaggacttccttggccttagatg

SEQ ID NO: 94357 - DNA, 298 bp, Homo sapiens
  misc_feature (1)...(298): n = a,t,c or g
gcacgagccgacatgctgcgtgatggtgtggcttcctcgcccctctctggggtgggtgtgggggtggagtggccttncccacgcctctcacctctgccttcatttgtgctgccaccctgcccctccctcgtcctcctctcccacttcctcctctctgtgtgcctcagtctcctgccggaagaaatgggttgagcccgaaaggaggctgtctgaggaagggagagggagggcctggggtnnntnnnnnnnnnnnnnnnnnnnnnnantntntnntnnntnntttttttttttttatttt

SEQ ID NO: 94358 - DNA, 316 bp, Homo sapiens
ggacgagctcctcctcctcctcctcctcctccgccaactcctcgggtgcacaccagctctaaaagcgagagtgaaccagagagggagggagagagtgagagccaacgagatctttggagagacttttttttttgcctcctacttctgtcttgaagccagacaatcgacttcagctctccctcccctccctctttctccacgttctggtcccactcgttttgctgtgcccttcccctcccctcccgggggaaagacccccgaatccaacaaagctgagccgagagaaacaaacaaaacaaacacaccgggccagaca

SEQ ID NO: 94359 - DNA, 366 bp, Homo sapiens
ggcacgagaaataatcattctaaccttttaacaaatgataacctttctcaacactaaaggacgaacctgatctcttatactagcatccttaatcatttttattgccacaactaacactactcggactcctgccttactcatttacaccaaccacccaactatttataaacctaaccatggccatccccttatgagccggcgcagtggttataggctttcgctctaaaattaaaaatgccctaggccactttttaccacaagggacacctactccccttaaacccatactacctattatagaaaccattattctactcattcaaccaatagccctggccgtacgcctaaccgctaacattactgcag

SEQ ID NO: 94360 - DNA, 365 bp, Homo sapiens
ggcacgagctttcttcctttctttctttctttgtgataaaattattccccaatgttttattcctgtggatcctaaatggttttaacttcattttcaaactgtgtattccacacgtatacaactatatttgatttttgtatgttgatcttacatactgcaattctgctgaacttatatattacatccagtcgtttctgaacagattccttaggactctctatttataacatggcatctttaaataagaatatttcttcttcctttccaatctgaaggccattcgttcctttttttgcctacaccgttgaataaagtgggaaagtggatattctgtccatgctcctgatattacggggaaagcgttc

SEQ ID NO: 94361 - DNA, 377 bp, Homo sapiens
ggcacgagcccctgggcaaactcaaactaagccttctatttattctagccacctatagcctaaccgtttactcaatcctgtgatcggggtgagcaacaaactcaaactacgccctgatcggcgcactgcgagcagtagcccaaacaatctcatatgaagtcaccctagccatcattctactatcaacattactaagaagggggtgctttaacctctccacccttatgacaacacaagaacacctctgattactcctgccatcatgacccttggccataatatgatttatctgcacactagcagagaccaaccgaaccccctttgaccttgccgaaagggagtccgaactactctcatgcttaacatcgaatacgccg

SEQ ID NO: 94362 - DNA, 356 bp, Homo sapiens
ggcacgagtttttctttttcatccttaagatgtatcttggccaggcacagtattttatttgttttttgtttttttttttgggttttcatttgaaacaaagtcttgctctgtcacccaggctaaagtgcaaaggcgccatctcggatcaatgcaacctccacctccggggttcatgcaattctcagtagctgaaattaaagacgtgcaccaccatgcccagctaattttttatatttttagaatttttattttttaatttattttttgagacacagtctcgctcttgttgcccaggatggagtgcaatggcgtgatctcggcacactgcaacctctgcctcctcctgggtgacaaag

SEQ ID NO: 94363 - DNA, 359 bp, Homo sapiens
ggcacgagatatgctgcaatgctctcagccctaggattcatctttcttttcaccgcacgcggcctgactggcattgtattagcaaactcatcactagacatcgtactacacgacacggactacgttggagctcacttccactatgtcctatcaataggagctgtatttgccctcataccgaggcttcattcactgatttcccctattctcaggctacaccctagaccaaacctacgccaaaatccattctcactatcatattcatcggcgccaatctaactttattgccacaacactttttcggactatccggaatgccccgacagtactcggactaccccgatgcatacaccacatgg

SEQ ID NO: 94364 - DNA, 369 bp, Homo sapiens
ggcacgaggctccatctgcctacgacaaacagagctaaaaacggtcattgcatactcttcaatcaggcacataggcctcgtagtaacagccattctcatccaaaccccctgaagcttgaccggcgcagtcattctcataatcgcccacggacttacatactcattactatgctgcctagcaaactcaaactacgaacgcactcacagtgcgcatcataatcctctctcaaggacttgaaactctactcccactaataactttttgatgacttctagcaaggctggctaacctcgccttaccccctactattaacctactgggagaactctctgtgctagtaaccacgttctcctgagcaaatatcactg

SEQ ID NO: 94365 - DNA, 353 bp, Homo sapiens
ggcacgaggcaccggggcctgagtagatagctgactcaccacgctccacgggagcaatatgaaatgatgtgctgcatatgctctgagaccctacgatgcaaaattcttttcaccgtacggggcctgactggcatggcaataacaaactcaacactagacattgcactacacgacacgtactacgttgtagctcacttccactatgtcctatcaataggagctggatttgccatcataagaggcttcattcactgatttcccctattctcaggctacaccctagaccaaacctacgccaaaatccatttcactatcatattcatcggcgtaaagataactttcttcccacaaca

SEQ ID NO: 94366 - DNA, 353 bp, Homo sapiens
ggcacgagggactccacttatgactacctaaagcccatgtcgaaacccccatggatgggtgaatagcacttgacgcaggactattaagactaaggggctatggtattatacacgtgacactcattctgaaccccctgagaaaacacatactccaccccttccttgtactatccatatgaggcataattataacaagctccatctgcctacgacaaaccgacctaaaatcgctcattgcatactcttcaatcagccacatataccctcgaagtaacagccattctcatccgaactcccctgaagctttaccggcgcagacattctcataatctcacacggacttacatgctcat

SEQ ID NO: 94367 - DNA, 376 bp, Homo sapiens
ggcacgagaagtaagctctatggaatataccaacattaatttctttctttttttttttttggaaaaggtttggtttggccccccacccgggagggcagggggggaatttgggttaatggaacccttggcctccggggttaaggcaattttccaccctaaccctttaaggggggggaaaaaaagggcaggccccccccccaaatttggatttttagggggagggggggtttaaccagggggcccagccgggtttaaaaccccggccccggggggaccaatccccctaaccctccaaaggggttaggataaagggcaggaccaacggcccccacccccataaatttttggtttggaaaatggggcaaaactaaccaaa

SEQ ID NO: 94368 - DNA, 433 bp, Homo sapiens
ggcacgagttttttattctccttttaaagaaaataagttgcttatatttgaaaaattttagaatgtcacatgatgttttaacaggcttaaaagggtgtgaaattaggctgggtatagggctcatgcctgtagtcccacactttgacatttgtagtcctgggctacttgggaggctgaggtaaaaaatcacttgggtccaggagttgcaggctgcagtgagctataattgcatcactgcactccagcctgagccacagaatgacacaaacacacacacacgtacacacgtgtatgaacttagtgcagtggctcgtgctgccatgagctataattgcatcactgcactccaacctggagccacagaattgacacacacacacacacacacatgcggggcacacacacgaacttagccagtgcagtggctcatgcg

SEQ ID NO: 94369 - DNA, 466 bp, Homo sapiens
ggcacgagcattaaccctagttggttggaattagttatttttgatttgccttcagtattttccttccagaattaagacctcagtacccatgtaggaagtatactgtcaattccaagagatggctttaattgactgagacttaagtaagcagatctctaatttaaaaatgtatccatttgctttctttgaaagggagtcagaaaccttgctaagatgatattctgcctgtttggaattacagtatttcttttctttttttttttgaaaacagggccttttttttgccccccggttggggggcggggacccaattataactccctgcagcctccaactaggggcctaagggaccctcccgcctcacccttttatagtggggacaacaggcatgggccaccttgccggataattttatttttttacaaaaaaaaaatcttactttgttgccaaggctggccttgaactc

SEQ ID NO: 94370 - DNA, 373 bp, Homo sapiens
ggcacgagatccagagaaaattctgacttgtgtataaaagaagactcattcaataatgtttatttcaaatgaacaaaaaagcagctgaaaaaaatcatgatatattcattgtatagcagtaagaatgaatgaagtaaacctgtatgtagtaacataggtaagtctttttttttttttttttaaaaaaagagtttcatttttttccccaggctggggggcaaaaccaggaaatgggttaactgcaccctttgcctccgggggcaggggattttaatgtttaacccccccccatagttgggataacggggaggggcccccgcgcccacctaatttttgtttttttaggggaaacaaagtttccccttgtgggccg

SEQ ID NO: 94371 - DNA, 387 bp, Homo sapiens
ggcacgagtttctctggtgagttgtctgttcaggacttttgaccatttttaagtaagtcttcatgtttccgtattgttgagttttaagagttcttcgtatattttgggtagcaatcctttattggataggtcttttacagatattttcttccagtttgtggctggtcctcttcttttcacattgtcttttgcaaagcatacatttttaattttaatgaagtccagcttctttctttcatggattgtacctttggtattgtatctaaaaagtcatcaccaaattcaaggtcatctacacttgctcctaggttgccttctaggagtttattgttttgtgttttacattaggtctggaattcactctacattagtttttggggaaaggtg

SEQ ID NO: 94372 - DNA, 388 bp, Homo sapiens
ggcacgagcccatgacccctgacaggggccctctcatacctcctaatgacctgcggcctagccatgtgatgacacttccactccataacgcttctgatactaggcctactagccaacacactaaccatataccctggaaggggcgatgtatcacgacaaagcgcataccaaggtcaccacacaccacctgtccaaaaaggccttctataccggataatcctatttattacctcagaagcttttttcttcgcaggatttttctgatcctttataccactccagcctatcccctaccccccagttaggagggcactggtccccaacaggcattgccccgcttaattccctataagtgccacttctaaacacatggcgattactctgatga

SEQ ID NO: 94373 - DNA, 389 bp, Homo sapiens
ggcacgagcatcgttattcccaccggcgtcaaagtatttaactgactcgccacactccacggaagcaatatgaaatgatctgctgcagagctctgagccctaggattcatctttcttttcaccggaagtggcctgactggcattgtattagcaaactcatcactaaacatcgtactacacgacacgtactacggggaagctcacttccactatgtcctatcaataggagctgtatttgccatcataggaggcttcattcactgatttcccctattctcaggctacaccctagaccagacctacgccaaaatccatttgacatatcatattcatcggcgtaaatctaactttctttccacaacactttctcggcctatccggaaatgccc

SEQ ID NO: 94374 - DNA, 372 bp, Homo sapiens
ggcacgagaatgactatgtaggccttttgcccattttttgatcaagttatttgtttgttattgagtgcttgagttctttatatttgggaattaaccctttatcatttgtgtaggttgaaaaagtgttctcccagtctatgactggcatccttgctctgttgattgttacctttactatgcacaagatttttagttagatacaattccatttgtctatacccggtaaatatcctgtatctgaaatgcttacaaccaaagtgttttggatctgggattttatcaagatctggaatatctgcattatacttagcggttgagcattccaaatcaaattttgaagattcataacgttccaataagcatttagttcga

SEQ ID NO: 94375 - DNA, 363 bp, Homo sapiens
ggcacgaggttataccatgctaacactaattaaaagaaacttagagtagctatattaatttcagaaaaaaacagacttcacagtaaagaaaattaggaataaagaagggcattacataatgataaagagatccattctctaagaaggcataacaatcctttatgtgggtacaccatccaatagagtggtaaactacatcaggcaaaaactgataaaactaccaggagaaatagatgaatccactattatactaagagacttcaacacccctctgtcagtaattgatgcatctaccaggaagaaaatcagtaaaaatatagttgaatcaaataacatcatcagtcaactagatctaattgacat

SEQ ID NO: 94376 - DNA, 361 bp, Homo sapiens
ggcactttgttttcaagtgaaaggaagaatcccacgtgggtgagtttaaatcaaaagctagaaatgattaagcttattgaggaaggcatgttgaaagctgagacaggtcataagctaaggctcttgcaacagacagccaagttgtgaatgcaaaagaaaagttcttgaaggaaatcaaaagtgctactccagtgaacacaagaaagacaagaaagtaagacagccttcttgccgatacgggaaaagttttagtggcctgcatagaagattaaaccagccacaacgttctcttcagctaaagcctaatccagagcaaggccctaactctcttgaattgtatgaaacctgagagaggtgagga

SEQ ID NO: 94377 - DNA, 352 bp, Homo sapiens
ggcacgagaaattatgctaaatctactaagtctaagctctatagatggaactataaagcctggatgacagcatacctgtttacagcatggtgtactgaatattttaagcccactgttgagacctactgctcagaaggactcctcttaaaatattactgcttattgacaatgcatctagtcactgaagagctctgatggagatgtacaaacagattaatgttgttttcatgcttgataacagaatatcccttctacagcctgtggatcaatgagtaattctgactttcaagtcttatttaagaaatacatttcataaggctctagctgccagagataatgattcttctgatgg

SEQ ID NO: 94378 - DNA, 363 bp, Homo sapiens
ggcacgagggtggaaggagactaacatttttttgaggggcagacacagtgataaaagacttcctattactgtattcaatgctgacagtaaccctaacccatgaggtgtaagtattcggattctcattatgcagaatgggaaatagaaacacgtcttggtgcttttgttttggtttggtttttgagacagtctcactctatcacccaggctggagtgcagtggcgcaacctctgcctcctgggtgcaagagattctcgtgcctcagcctcccaagtagctgggagtacaggtgcgcaccattacgcctggctaatttttggatttttaggagaagcggggtttcaccatgttggtcaagcgggt

SEQ ID NO: 94379 - DNA, 365 bp, Homo sapiens
ggcacgagcagatgcattatcatttatatacatagagagacagagagagagagagagagagagagagaggtggagtctcattctgtcactcaggctggagtacagtgagtggcatgatctcagctcactgcaatctctgcctcccagactcaattcttctgcctcagcctcctgagtagctggaattacagggtgagccaccccgcccgaccatcatttacaatcttgaaaacagtcaaattaggttgatataatcaaccccattgtatagaggagaaaaccaaaggtcggagagataaagtcacttgcccaaggccacacagctgataagtggtagacctggaattttaacccgaggatatgcc

SEQ ID NO: 94380 - DNA, 364 bp, Homo sapiens
tttaattcggctttagccttgcacttttatgtgggggaaagacagaatttttccttaagccgcatgacccaacctctggtagcttcaaacttttattctacagctcccttacctctatcagttttcatagctttaaaaaaaatcagcgccttgctctgggttaggctttagcttaagggaatgagatgactggtttgatcttccttctagaccactcagactgtttccataatcaagttatagaggctgtttaggtttcgtatcattcatatggccactggagtagcacttttctaaaaggtccttccagaacttttccttcgcatgaacaaattagctaactgtttggtgcaagatggctaac

SEQ ID NO: 94381 - DNA, 363 bp, Homo sapiens
ggcactagccttgaatttttatgttacacatagacagcttttttccttatactgcatgaaccaacctctgctagcttcatactttcattctacagctcccttacctctaacaggtttcatagctctaaagagatttaccgccttgctctgggttaggctttaccttatgggaatgagaggactggtttgatcttccttctagaccactcagactgtttccatatcagaaataagagctggtgcgatttcttatcattcatatgtccactggagtagcacttttctaaaagttccttccagaacttttcctttgcatttacaaatttgctaactgtttggtgcaagaggcctagcttttggcct

SEQ ID NO: 94382 - DNA, 360 bp, Homo sapiens
ggcacgagctggaagtactatggcctttaagaattatgcaaaatctaccctgcctgtgctctacaaatggaacaagaaagcctagatgacagcacatctttttgcagcacgggttactaaatatgttaaatccactgcttaaacaaaaagattcctttcaaaatataagtattcattgacattgtacctagtcatccaagagctctgattgggatatacaaggagataatgttttcatgcctgctaatacaacatccactcttcaccctacagatcaagaagtaatttcaacattcaaatgttattattttaaaaatagatttcgtaaggctatacagttgccatatagtaattcctatt

SEQ ID NO: 94383 - DNA, 359 bp, Homo sapiens
ggcacgagaaaaactctacctctctatactaacccccctacaaaggtccttagttatagcattcgcagccacagaactaaccagatattatatcttgttcgaaaccacacttatccccagcttggctatcagcacccgatgaggcgaccacgccagaacgcctgaacgcaggcacatacttgctattctacaccctagtaggctcccttcccctactcatcgcactaatttacactcacaacaccctaggctcactaggcattctactactcactctcactggccaagaactatcaaactcctgagccaacaacttaatatgactagcttacacaatagcttttatagtaaagatacct

SEQ ID NO: 94384 - DNA, 365 bp, Homo sapiens
ggcacgaggaaaggggaaagatctaaagctgctgaatttaatgccagcaaaggatggtttaataactttagaaagaggtttggcttaaaaattctttacaggaaaggcagcttctgccaacgaagaggcaacaaacaagttcccaggcatcattaaggtataattgaagagaagggatatctgcctgaacagatttttaatgccaagtgcagtggtatgatctcagctcactgcagcccccgcctccccggttcaagctattctacctcagcgacccaagtacctgggattacatacttgcgccaccacacctagctaataatttgtattttttgtagagatggggtttcgccaaactcctgagc

SEQ ID NO: 94385 - DNA, 372 bp, Homo sapiens
ggcacgagcacagttgataaatgtaggcctgtttaatgactcacaatttaagtgtaggtgtcaaagttttaaaaataatttgtaatcaaaatttggatttgtccttccttggcctataaagaatttcacatgggaactgaaaaaaaagcgtcttctgatataggctgaaaatccaagtctttggattttacatttctttagacaggttagcccttccctataaattttttttatttttatttttatttatttatttacagagtggagacagagcttcgctcttgttgccccaggctggagtgcaatggcgcaatctcgggtcactgtgacctacacatccacctcccagggtcaagcgattgtcctgtctcc

SEQ ID NO: 94386 - DNA, 481 bp, Homo sapiens
ggcacgaggtgcacctgtagacccagctacttgggaggctgaggtggaagaatcacttgagctgatgttgcagtgagcagagatcacactgctgtactctagcctgggtgacagagcaagacccatctcaaaaaaaaaaaaaaatggaaaaggaatggcccgggggggaggaaaaaattgatagagtgggggtcctaaaagcaaaaggaaaagtaggtttcaggggggagggggggatcccctaccataaaaaggggggatgggccaaaaacgggggggacggaaaattgactttactttccgggaagctcaacatataatcttttaaaaaaaactctttaggtaaaaaacgggcttttgcacttacgggggggcctaacaaaaacccttaagctttttaaatactggaaaagggggggacgggaaatccttgtgatctttagcctcagggaagaggaaaaaaaaaaaaaaaaaagaattc

SEQ ID NO: 94387 - DNA, 416 bp, Homo sapiens
ggcacgaggttgaaagctgctgtcccagggtgttgcttcactacttctaggctcctgcagagtcctgcctcataggccgcactggtgagtgaggccagcaaacccatcagggagactacatgaatccaaacctaagtctgtctgacagcaaagcctgttctctccatctctccaggttcctaagccaggtgagcgttgaacctttcttgaatcaagggtccaattccaaggtaggaaagcacagtcagtcagggaaatatttacactgagaccacgcaccccagccctttcccaacctgctcttgtgtgatccttttgagggtttttgtttgttttgagatagagtctcactctgtcgcccaggctggactgcagtggtatgatctcagctcactgcaacctccgcctcccaggtt

SEQ ID NO: 94388 - DNA, 402 bp, Homo sapiens
ggcacgagctggagaattgaggtccatgtaattttgagtttcagtagttttttgctcacattagtctcatttttggttttcctcttggagctgccatttatcaaatcgaaattatttcctcagagaaaaaggtttaggtatcctaagactttaaaatctcagtacgtttttttttaaagtatgttggctcattctattgagaagttatacaacatacaggcttctaggtctagccaggccatctagtttagtcaagacagctgtgtaacaaacgtagccttgaggcctggcacggtggctcatgcctgtaatcccagcacttttgaggctgaggcgggcggattgcctgaagtcaggagttatagaccagcctgtccaacgtggtgaaaccccgtctgtact

SEQ ID NO: 94389 - DNA, 321 bp, Homo sapiens
ggcacgaggatagagcaccttctctgcggataagaccatgctgtcgtagcctgagatttggtcccatggtgacctatggccttggagcaccatggctgcgggatgtgcttagatttcttgccgacctttgggaaatcccattgttttgtgttgcgatgtgctgaaatggagactcgctctttcctccccagctggagcgcaggggcgtgatatctgcttactgcaaccgccgcctccccgattctcctgactcaggctcccaagtagatgggattacaggcacctgctaccgtgcccggctaattaacttttaatatagag

SEQ ID NO: 94390 - DNA, 401 bp, Homo sapiens
ggcacgagcggcacgagtggtttccttctgaaaattttataatatttttgatggaattatattgccctgttttgtatatattgtaatctttaattgagatttggacattaaaaaaatctacctgtcacaatctttataatgtagttctgtcctgacatagtctaaaagcaatcgttttggctagacattctgggagtctctcacacatgttcttaaaatgtgtcttgtctaaaattttgtgtttgcttttagttaaaggagtttgtgtttcttcttaaaaatcagtaggccagttgtggtggctcatgtctgtaatcccagcactttgagaggctgaggtggacatatcacaaggtcaagagatcgagaccatcctagtcaacatggtgaaatcccatctc

SEQ ID NO: 94391 - DNA, 354 bp, Homo sapiens
  misc_feature (1)...(354): n = a,t,c or g
ggttgcgccactacactccagcctgggtgacagagtgagactctgcctctnaaaaaaaaaaaaaaaaaaaaaaaaaaaaaaaaaaaantttcttttttcccccccccaaaatttttaaaaaaaaaaaaaggcctttttaaaaacccttttaaaaaaaaggggaaaattttttttaacccccccccccccaaaaaaaaagggttttttttaattgtaaacccccccccaaaaaaaaaaaaccccccccccttagggggggggggcccccccaaaaaaatttatttttaaaaaacctttttttttgcccccccacccaaatttgaaaatccttttttttttttttccccaagattt

SEQ ID NO: 94392 - DNA, 830 bp, Homo sapiens
gtagagacagggtttctccatgttcgtcaggctggtctcaaactcctgacctcaggcgatctgcccaccctggcctaccaaagtgctgggattacaggtgtgagccactgcgcctggctctttttttttttttaatagtgtcttgctgttactcagactgaagtggcgccatcatagctcactatagcctctaactcctgggctcaagctatcctccttcttcaccctcccccaccatgctcggctaatttttaaaatttttagtagaaatgaggtcttgctgttttccaggctcgtctcaaactcccaatctcatgcaatcctcctgcctcagcctcccaaagtgctgggattacaggtgtgagccactgtacccagctgagagcttaagtttcttgcataaaactcagctgtatgctgaagtgtttagaagtgaaatgtaatgatgtctgcaacttactttgaaatacattaataaaatggataaatgaatggatagagggatggataggcagattgacatgtgtaaaacaaatagagaaaaatgttatttgtagaatctaggtgatgctaaaggccacacagccagtggggactgagccaagctaggaatccaggtccaccaattcaggagaggctatgtggtgaagtaaagataacaccccgttcccagtttttgtatctgtttttgttttgagacagagtcctgctttgtagcccaggctggagtgcaatggagccatctcagctcactgcaacctctgtctcccaggctcaagtgatcctcttgccttagcctcctgagtagctgggacttacgagcacgtgcc

SEQ ID NO: 94393 - DNA, 389 bp, Homo sapiens
ccaacatggagaaacctcgtctctactaaaaacacaaaaaattagccgggcgtggtggcgcatgcctgtaatcccagctacttgggaggctgaggcaggagaatcgcttgaacctaggaggcagaggttgcagtgagctgagatcgcaccactgcaccccagcctgggcaataagagtgaaactccatctcaaaaaaaaaaaaaaaggggccctggaaccttttgagccaaagggggaaggccccttttttttttttttttcaaaagggaattttggggcccaattggttttttttccttccaaaaccttttttagggcatttatggccctttatccacataaaaacaaaaaaggagttttccggagctcccttaaagggccatatgaa

SEQ ID NO: 94394 - DNA, 161 bp, Homo sapiens
  misc_feature (1)...(161): n = a,t,c or g
tatggggattnttaannnttttgagacagaatctcactctctcgcccaggctggagtgcaacggtacgatcttggctcagtgcaacctccgcctcctgggttcaagcgattctcgtgcctcagccttcccgaaactgggattgcaggcacccgccaccacg

SEQ ID NO: 94395 - DNA, 403 bp, Homo sapiens
aaaaaaaattattctttaggtaatttcacttggacatattcatgtatatggagtttgtcagctgactcaggcatttaccctaaagatcaaatctgttttcaaaaatcggcattggccaggcacggtgacccacacctgtaatcccagcactttgggaggccgaggcgggcggatcacgaggtcaggggttcaagaccagcctggccagcatagtgaaaccccgtctctactaaaaatacaaaaaattagctgggcatggtggtgggcgcctgtaatcccagctacttgagaggctcaggcaggagaatcgcttgaacctgggagtggaggttgcggtgagccgagattgcaccattgtattccaccccgggtgacagtgcaagagtccatctcaaaaaaaaaa

SEQ ID NO: 94396 - DNA, 2416 bp, Homo sapiens
gggacctgccgtcgcccccgttcgaggttgaagccccgggcctaggactcgacccccagcatcccacggggcctctttcctttcccggctcattccgctgtcattttgacctggggttcccctccagcccctcgcctcgttcccttcccagcatcccagggccgaggtgagggaggggcgtgtgagaagtcgggccgaggcccgagggactgtttaggagccggttcccgtcggaatctggggttttaggagccctcgatcgccatggcgtcccagaagttagccaccaggactcagccatttccacctgaaaccagttttgcacctattgttttgattttgaactgtctttcgaggggaggagggagcccggcgtactggggagaatatgtagtgggaggtgggatgtgaggaggagctggctgggcttggtctcggcctcaggatgccccctgttaacccctgtaggataggggaaagaggtgcagcgagttgcaccttccctaaagggccagagattcgtttatagcttgcgaatctctgctttttcagcctcggtaaaggggtatcatttgtggttggtttggttcgtcccttaacaacattcttggtgaggaatccccaggtgaatctgccacggagtgaagcagcccacttgagctgttggctacccccggcccccgcaacgcccgttggcttttgtgacacgttacacgttagtgttggtagagcctagccgtcagaggtacctgtaccataagcatctctacgaaaggtattaatctctggagaagacacatccacagttagcactttcttcagatgctgacgctcggtgaacagttgcctttggtcacaagatttagaagacacagtgtccatcctcccagattggatctctttttcatatggatcttctgtttctatgtctttttaaaaaataactttttgggaaaccttttggattacaactgttcatcctcacctatgcaaagaaagggaagctattgctgggattttgaggagatggtcctagaacaattggagattcatacgcacacaaagaacctcaacccttacctcacaccagacacaaaagctaccttcaaataaatcataggcctaacttgaagagctaaaaccatgcaactccagaaagtttttgtcagaaagaaaatacaggagaaaatcttagtgaccttggggtaggcaaagatttcttaagacacaaaaagcatggaagtataaagggggaaaaaatcgctaaattggatttcatccaagttaaaaacttttaatctttgaaagatacctttaagaaaatgaaaaagtacgccttgggctgggagaaaatatttgcagaacgtgtgtctgacagaggatgtgtatctagaagatataaagaattgtaactcaagaattgaaagacaaccccataagaaaagggggaaacaatttgaataaagttcatcaaagaatataaatggcaaataagcacatgaaaagatgcccaaagtcgtaagtcattagggaaatataaatttaaaccataatgagataccactgcatactccctagaatggctgtaatgaataggattagtcacatggtgacaagaatggaggatcatctggaactctcatacactgaccgataggaatgtgaaatggatcaactactttggaagacaattgggcagtttctttcaaagtaaatgtgaagatgccataccgattcatccattccatttctaattattcaagagaaatgaaactgtatatccacaaaaaagacttgtacacaaacattcacagcagctattatttattggtaatagctaaaaactgtaaacagctcccatatccatcaagtgtatggataaacaaatttggtgtatttataccaatggaatactactcggcaataaaaagaacagttgatactctcaacaacctagatggacctcaaaataattcggtttaatgaatgaagccaaacttaagaagagtacattgtatgtacttggagaactaactttcttgcaatagatttttaagccactattaggagcatatgacttaaacagtttttaaaagtcagggagtaaagtatgctttaaataaaataccattctgtgaaacaaattctctgaattattatcacttccactggacactctaacttgaccatatttctgactttaaatgtaactcactcttattcccgtagtcacatgtttgcttgctcattggttcacattacatttattcagcatctgcttgagccaaggcactgtaactacatgtttttttttagttacctacttttgtaaggtcctgtttctttggctacatctgattacagtaaacataggaagtttaataaaacaatctttcatgaccgaaaaaaaaaaaaa

SEQ ID NO: 94397 - DNA, 413 bp, Homo sapiens
ctacgttcatcaatgatcttagctagatcttctggataacctgctgcagcttctccatcagcacttactgcttcaccttgtacttttatgttatggagatggcttttttccttaagcctggtgaactaacctctgctatcttccaagttttcttctgcagctttctcacctgtctcagccttcattgaggagagttagaaccctgctctggattaagctttggcttaagggaatgctgtggctggtttaatattctatccagataacttaaacttgctccgtatcagcagtgaggctggtttgctttcttatcattcgggtttagaggagcagcgcttttagcttccttcaagaacttttcctttgcattcacaacttgcctgactggcacaaaaagcttagcttttggctta

SEQ ID NO: 94398 - DNA, 411 bp, Homo sapiens
cggacgcgtgggtggaggatgtatcaaaagtaacctccaaaactaaaaataaagtaaaaaaaagattgaggaaaatagaaaagaacactaaagaactgtgaggtaactacaaaaggtataacatatgtataaacatgtgtttaataagagccacaggaagataagaaaaatgaaagaaagaaagaaagaaaaagtgaagcaatatttgaaaggctagggactgaaatttccccaaactaacattagacatcaaaccacagatcccaaataaactcaggaacgccccggtgaaaaaaaaaaaaaaaaaaaaattaaaaattatagaaaaaaaaaaagaaaaagccaaaaatttccttttgcgggtttattaaagggctggtttcttgggggggggcctgtttatttaatttt

SEQ ID NO: 94399 - DNA, 392 bp, Homo sapiens
atcctgctcgcaggtgctatagaggacgccgaaccaggatcaggatgaacaggctaccctacgttaacggggagctactcccaccctggagcctacgtatacctaaccatcttgtccttacacctagcgggtgactcctctatcttacgggccatcaattgcatcagcaacacttatcaatataaaaccccctgccgtagcccgatacctaacgcccctcttcgtctgacccgtcctagatacagcaatgctacttatcctatctctcccagtcctagctgatggcgtgactatactactaacagaccggaacctctacagcaccttcttcgaccccgccggaagaggagaccccattctataccaacacctactctgattattacgtcacg

SEQ ID NO: 94400 - DNA, 412 bp, Homo sapiens
  misc_feature (1)...(412): n = a,t,c or g
atcctggctaacacggtgaaaccccgtctctactattaaaaaaaatcccaaaaaaaaaaaatccccgggctttgggggggccccctttacccccccttcctgggggggttgaaacaaaaaaagggcggaaccttgggggggggaccttgcagggacctaaaattgccccccccccttccacccggggaaacaaggggaaactttttttaaaaaaaaaaaaaaaaattgccttttttttgggggcccgggttttttttaaacccggggcctaaaaaaattttctggcttgggttcccccaagggggggaaaaacgggatagaccctgggccccggcccgggtttcccgttaaaaaaaaaaaccaaatctttgctttttccccttcaaaaggactggaaaaattaagggcgccn

SEQ ID NO: 94401 - DNA, 393 bp, Homo sapiens
atcacttgaggctgcagtgagtgtgattgtgccactgcactgtagcctgggtggcagagtgagaccctgtcaaaaaaaaaaaaaaaaaggagtggggtgggggcccaaagaacaaagggctttataaccttaaaattggaactcctttttaaagccgggggaatttttggttttaaaacgggccccgggttaagcagggttggttttaaaatgaataacttgggaaccaaaaaaaactataatttggggggggaaaaaacggaaaaaaggaaccttattttttggaaccttttaaagggaaacccagaatattggggggggaaaaacaaaaggggggacaattccgaaaagtttttttaaggaaaaatggggggaattggggaacggaaaggg

SEQ ID NO: 94402 - DNA, 689 bp, Homo sapiens
  misc_feature (1)...(689): n = a,t,c or g
gccatcactccagccccagcaccttaaaaaggttcctggcacataataagtacacagtaaatatttttgagtgcataaatatggaatccaaaaagtaacattttcagtctcttgctagttaggcattatctcagtcagttcagggtgctataatggaatatcatagattgggtggcttaaacaacagaatagtttgtttttagtgtatagaaatgcaactaatttttcatatgttggttttgtatcctgcaactctctggatttattagttcgaagagtttttttatggcatttttaaaggattttctatacataagatgttgctcacaaagagggacaactttacttcttccttttcgatgtggatatttcttatttctttttcttgccacgttgctctggctaggacttctagtactttgttgaattgaagtggtgaaagtgggcatatttgccttgttcctgatcttagagaaaaagctttcagttttccactgatgaatatgatgttagctgttggcttttcatatatatactttattatgttgaggtacttcacttctcttccctttttaaaattttttaaaaatcccaaattgtagtagagagagtctgtgggnnnnnnnnnnnnaatcacagagggaggtggaatctcataaaatgcttttttggcatcaatagaaatgata

SEQ ID NO: 94403 - DNA, 377 bp, Homo sapiens
  misc_feature (1)...(377): n = a,t,c or g
accactcttccatggcatttacatattttgactttttggcttagcgaggtcctacataactgaggggggaagactccctgagaaccccacaatcccacatggataacgggagttctgggaattatgtaacaagtgtgattacgatgagaccaaaaccttcccttcactgtagccgctgcggccactgtgtgacgagaatggatcatcactgtccatggattaacaattgtgttggtgaagataagcattgactctttctgcagttgtgcttctacactgaacttcttacttgctacgcactgatgatttctttctgccactattactattttcttccactaaaaaagcgtactttggtaagaaatgtttatattgtn

SEQ ID NO: 94404 - DNA, 424 bp, Homo sapiens
cccacgcgtccgcccacgcgtccgccaataggaaggcaaaatcctaaggctgtaatgttttttttaaaagctggctgggtgcaatggctaacatatgtaatcccagtgctttaaaaggccaaggcagcgggactgcttcaggccaggagttcaagaccagcttgggtaacaaagcaagatcccatctctttaaaaaaaaaaaaaaaaaaaaagggggggccgttttaaagaatccttggggggcccaaagtttacccgggctggcaaggtattatttttttccttatagggagccgtataaaaacctacttgggaatttttggaaagaacctttattttgggggggggacatattggcccaacctccctacaaaaattaaagcctttgggaaatataaaaattttaaaggggtaaagggggtaa

SEQ ID NO: 94405 - DNA, 403 bp, Homo sapiens
  misc_feature (1)...(403): n = a,t,c or g
aaagggatgaaaagaaagatctgtgtgaggatgctgaaatggaagtgtgttcaagactgagcagttgtgggaggagctaccatcaaaccgctgtgtgtgctgaaaaaaggggctttgaccttacatgaagctttgcagtaacaagccataggctgcactaaagcaggcccaaattatcaagctaataaaatatcattcagcccccgnnnnnnnnnnnnnnnnnnnnnnnnnnnnnnnnnnnnnnnnngggggggggcccttttaaaaaatccctgggggggcccaaatttaccgggggggggaaaataaaaattttttcttttaaggggggggttataaaaccccccgggggatttttgggaaaaaacctttttttgggggggggaaaaaatgggccaaactc

SEQ ID NO: 94406 - DNA, 410 bp, Homo sapiens
aggatgctgaggtgggaggatcacttgagcctgggagatggaggttgcagtgagccgtgatcatgccattgcactccagcctgggtgacagggtaagaaactgtctcaaaaaaaaaaaaaaaaaaaaaaaaagggtttttccccccctttttttttaaaagggggcccttttttagggaaattgaaaaaaaatttgggaaaaaatttttttcaaaaaaaaaaaaaaaaaaaaaaaaaaaaaaaaggggggggccttttaaaaaaaatttttgggggggcaaaaatttacgggggggaaaaaaaaaattttttttttttttagggggggaaaaaaaaaaacctcgggggttttttgaaaaaaaaacttttttttggggggggaaaaattgggccaccaccacccaaaaaat

SEQ ID NO: 94407 - DNA, 405 bp, Homo sapiens
  misc_feature (1)...(405): n = a,t,c or g
atcccaataaattcactaacaagtaaaataaacaaattacttaaaaggcacaaactaccaatctcaatcaagaagaaatagataacttgactagaactatacctatttaaaatataaatttctagatatataaacaaaatactggtccagatggttctattagtaaattttactaaacaataaggaaaacataacagtaattttacacaagcttccaaaaaattaaaaatgaggaagtacttcctaactcattctatgaagccagcactcctctggcccnnnnaaaaaaaaaaaaaaaaaaaaaaaaaaaaaaaaaaaaaaaaaaannggggggggggctttttaaaaaattttgggggggggccaatttttgggggggggggaaaaatttttttttttttttag

SEQ ID NO: 94408 - DNA, 421 bp, Homo sapiens
  misc_feature (1)...(421): n = a,t,c or g
ctgtagtcccagcactttgggaggctgaggggttaagatagtttaagcccaggagtttgagaccaggctaggcaacatagtgagactttgtctctattaaaactaaaaaaaaaaaaaaaaaaaaaaaaaaaaatttaccctggcatgctcgggggggcctggggacccacctactcaggaggctggggggggaggaacacttgaccctgcaagggtgaggctgcagggacccatgatcaccccaccctgccccnaaaaaaaaaaaaaaaaaaaaaaaaaaaaagggggggcccctttaaaaaaacccctgggggggccaaattttaccggggggggaaaaaatattcttttttccttaagagggggcgaaaaaaaaccccctggggggttttggagaaaaacaccttcttttgggggggag

SEQ ID NO: 94409 - DNA, 418 bp, Homo sapiens
gaaggcagagtggtggaacacaaagttttaagccttttcttgttatgatgaaatatggacgggggcattctgttataccatagattctgacatgtcataatgcaagactgggggaaaaaagtcaaatagtgacaatgcaagcatcccaaaataatcccaagcttgtgaacatctgtgaggtttttttggttttttttttttggaaaccgattttctttggaacccaggtgggggggcagtattttaatttaagctctttgtaggttcgccttccggggtatacccattttttttgcttaactcttccaaaaagttgggattacaggccaatccccccatcccacaatttttttttgtttttttaataaaaaaggggtttcacctggttacccaggagggtgtaatattcttgtttttt

SEQ ID NO: 94410 - DNA, 412 bp, Homo sapiens
aaaaaaaaacttttccgacatctgttcttggtcttttgtgacgcaggttgaagggggaggaatagaaaaagacaaactgccttggaggagataaaccaattttatgtctatcatgttatacaaaaatctagaaataatagatttgtacagaaaaaaatgataataaatgagaacacaaaacataaaaaaaaaaaaaaaaaaaaaaaaaaaaaaaaaaaaaaaaaaaaaaggggggggcccttttaaaaaattccttggggggcccaaattttccggggggggggaaaattaattttttttttttttggggggggaataaaaacccccctggggatttttggaaaaaaaccttttttttgggggggggaattttgggcccacccccccccaaaaattaaaagcttttagggaa

SEQ ID NO: 94411 - DNA, 416 bp, Homo sapiens
gccaacatagtgaaactctgtctccaaacaaacaaacaaaaccaaatatgtttatattctgtgtgcattctaaaggatctgttttcatatctcttctctagactttcttggcacccagttttccaattttattcttttcaggacctgaacagctggccaacccaccatctattgcctatgattcaatgtagatttatacctcaggctatctctccttccagatgaagtggtgaacgtagtacaacattaagttctccccagtggggggcttttctttcactgctgtctttcagggttatcattgattgtggtcgtagtactacagcagtgtaattttggctggcgccagcatattttacataatcattttttctcttcccagaccaaatttttttttcctcagttaacttagttat

SEQ ID NO: 94412 - DNA, 409 bp, Homo sapiens
ttagatctttgattcctccttaacaaccttatgagatttatttaataagtcccactttctagttgaagaaactgaggcccagtgacattaagcctttttttttttttttttttttttttttttttttggggggggggtttttttttttgaccccgggggggttggggggggggggattttggtttattgaaatttcccccttggggggggaaaaatttttttggcctccccctttggggggggggggattagggggcccccccccccccccgggttttttttttttttttttaaaaaaagggggtttccccttgggggggggggggggttaaaactttgggccttgggaaccccccccgggggcttttttttttttttaaaaaaaaaaaaaaagaaagggagggggggg

SEQ ID NO: 94413 - DNA, 408 bp, Homo sapiens
attttttcagaacacaatggaataaagctgtaaattaataccaagaggaattttagaaactgtacaaatatatgggaattaagcaacatgctcctcaataaccatttgagtcaacaaagaaaattaaaacaaaaagtttattaaaacaaatgaaaaaaaaacataacatgtcaaaacctgtgagatacaacaaaagtagtactgagggaaatttatagcaaaaaatgtctacttcaaaaaaaaaaaaaaaaaaaaaaaaaaaaaaaaaaaaaaaaaggggggggggctttaaaaaattatctgggggggggccaattttatgggggtgagggaaattttattttttttttttgggggggagctaaaaaaccctgtgggtggatttttaggaggagacctttcttttgg

SEQ ID NO: 94414 - DNA, 416 bp, Homo sapiens
cggacgcgtgggctataaactggagaaaatgaaaaaagcatctgggaaaaaataaaaactagactgacagttatgcaagatacttgacatttccattttaaatcctcaatctcatgttcaaaagctgcacagttaaaaaataattgcaggattttaaaaaactacttcaatcaagtaataacgaatgatcttataaaaattgtaaatatgttgacattgtagtaataaaaattttcttatgtaggtatttatttatagtatctcctgttgtatagaagatattcagcttaaatccctctactggatattatttaaagaaaaggaaattgttatatcaaagggatacctatacccccatgtttattgcagcactattcacaatagccaagatgtggagtcgaccttagagtccatta

SEQ ID NO: 94415 - DNA, 425 bp, Homo sapiens
aacatagcaaggactaacccctataccttctgcataatgaattaactagaaataactttgcaaggagagccaaagctaagacccccgaaaccagacgagctaccaaaaaaaaaaaaaaaaaaaaaaaaaaaaaaaaaaaaaaaaaaaagggggggggggtttaaaaaaaaacccgggggggggaaaaattaaaggggggggggaaaaaaaaattttttcttttaaggggggggaaaaaaaaaaaccgggggggattttggaaaaaaaaccttttttggggggggggaaaatggggaaaaacccccccaaaaaaaaaaaggggggggggggaaaaaaaaaattttgggggggaaagggggaaaaaaaattctttttggggggggggggaaaaagttcccccacgggattttggagaaaaaaaatta

SEQ ID NO: 94416 - DNA, 402 bp, Homo sapiens
ttttaaaagattaaataaaatccttaggaaagaacataggaataaatcttggtgaccttgtgttaaacaatggtttttaatatacactaccaaaagcacaggcaacaaaagaaaaaatagataattggacttggccaaagctaaaaacatttgtgcgtgaaaagacaccatcaaggaagtggaaagacaacccaagaaatgacagcaaacatttgtgaatcatctatttgataagggactagtatctaaacatgtaaagaactctaacttatcaacaagaagacaaaccacctacctttaatgatgggcaaaggattagaatagagcttgctccaaagaggatgtacatatgaccgataagctcatgaaagatgtcccatcattagtcatcagggaaatcaa

SEQ ID NO: 94417 - DNA, 419 bp, Homo sapiens
gctgaggcaggagaattgcttgaacctgggaggcggaggttgcagtgagccaagactgcgccattgcactccaacctgggcgacagagtgagactccatctcaaaagagaaaaaaagaagaagagtaaagacttctcttgctcctgtatttatgaggggcttcaactgcagagggggccagacaggccctctccctgtggcagggtggctgccaggtaccaggtgcaggtgagaccctcctcgggctgtcccgtcacccctggtgttggccccaaggctcctggccaggcaatgggcatttgtgagtcaggaactctgtggtggtaaggaggaagccctggttccggcagattgccttgagcgctctgtgcccactgaaccctcccttacagcctggagggcaggtatgagcatccttg

SEQ ID NO: 94418 - DNA, 384 bp, Homo sapiens
ataaaaataaaaaacttagccaggcatggtgactcatgcctgtagtctccgctacttcttgagatgctgaggctggaggaaaacttgagcccaggaagtcgaggctgcagtgagctctccagcctgcacggcagggtgagaccctgtctcaaacaaacaaacaaacaaacaaaaaaccccaccaggtacaattgccatgttttgagatcattaactttaaagagtttatcacttgtctagtgctcaggctacctggaaactcttggtaaatttagtaattatctgacaccctccaataccatatgaagtagcgaatggagtggtggatagaaaagaggaaggtgaagttcatcgtgccttcttttcctctgttgttggggtcag

SEQ ID NO: 94419 - DNA, 433 bp, Homo sapiens
  misc_feature (1)...(433): n = a,t,c or g
ttaatgttgtgttaacaggcatgaaaacattactctcctcttacctgtccatcacagctcttgggagaccaggtgcattgtcaatgagcagtagtattttaagcagtaggtgtcaacagtgggcttaaaatattgaataaatcatactgtaaacagatatgctgtcatccaggcctgttccatttacaagcacaggcagagtacatcttgcttaattgttaagttccctaggagttttagaagggtcaacgagcattggcttcagcttaaagtcaccagctaccttagcccctaacaagagaatcagtctgtcctttgaagctttgaagccaagcattgacttctcctctctagctatggaagtcctagatggtatcttctttcaatagaaggctgtttggtctacatcgaanacctgttgattattgtagcc

SEQ ID NO: 94420 - DNA, 234 bp, Homo sapiens
aaaaagctccaaattaaatacttaggtataaatctaatgaaatacacaatacatgtagtatctatatgccaaaaactgctgatgaaagaaatcaatgaagacctgaataagtggagagatgtactgtgcttatggatatgaagactcaataacatgtcaattctccacaagttaataaatgtataaatttacttcaattgaggattttttattagacatagacatgctgatttt

SEQ ID NO: 94421 - DNA, 478 bp, Homo sapiens
  misc_feature (1)...(478): n = a,t,c or g
nattgatccccttcggnaccggcccggaattcccggncgaccatgattgcgtcgagggatcttccatctatacctaatttggtgagagttgttattggaaatgatatttaattttatcaaatactttttctgtgcctattgagataatcattggggttttggtcttcattttggttatgagatggatcaaatttattcatttgcgtatgttgaatcatcctttcatctctgggataaatataaacttttggatgtgctgttggatttggtttggtagtattttgttgaggatttttgcatctatgctcatcagagatattggcctatagcttaaattttttggttctgtccttgtctgattttggcatcatggcaatgctggcatcatataatgagttaggaataatgccctcccctttaattttttggaatattttcagaagcatttgtgttaggtcttctttgcaagtttggtaca

SEQ ID NO: 94422 - DNA, 402 bp, Homo sapiens
cccgataccaaacgcccctcttagtatgcaaccgtcttaataacaacagccctacttgggctatctctcccagtcctaactggggggatcactataccactaacagaccggaggctcgacaccaccttcttcgaccccgccggaggaggagaccccattctataccatcacctattctgatttttcgggcgccccgaagcccatattcttatcctaccaggctggggaataatctcccatattggaacttactactccggaaaaaaagaaccattcggatacacaggtatgaggtgagctataatatcaatcgccttcctaagggttatcgtgtgagcacaccatatatatacagtatgaatagaccgagacacacgagcatatttaccttcgctccataat

SEQ ID NO: 94423 - DNA, 397 bp, Homo sapiens
  misc_feature (1)...(397): n = a,t,c or g
cactgagacccccagagggtttcttgcatggcacttagttctaactctttttttttttttttttgggagagaaagtctctttttttccccgggcgggagggaaggggccaaatttgggttaatggaaccccccccctccagggtaaaaggaattctccggcctcaccccccggggggggggggataacaaaaaaggccccaaagcttcaccccccaaaaaaaggttgggggggaggacttgaaaaacccccttaaaaccaaaggggggggtttgggatttaatcccctgggggcaaaaagggttttgctgggggttaaaaacagggccaaaaaagcaaagggggtgggaaaaaaaaagggcgggcggaatccttaggcttacatccccttaaaaaan

SEQ ID NO: 94424 - DNA, 466 bp, Homo sapiens
  misc_feature (1)...(466): n = a,t,c or g
aattgatacccttgcggaacccctgaggaccttccgggncgacccacgcgtccgcaaaaaggaaagagaaaatctgtatagatctgtatctattaaagaaattgaatctgtaatttaaaactttcctacaaagaaaatttaaggcctagatggcatcaccagtgaatttatccaaattttaccaaaaaaaaaacctaaaaataaaaaaagagagaacattttccaatccatttgataaaaccaacataaccttgatatgaaacctgaaacgacatttacaaaaaaggaaaatgcaggcctgtgtctctcatgaatatagttgcaaaatcctactgaaagtattagcaaactgtaccttgctatatataaagggaaatacatcatgactcaaaaattttattccagcaatacaaatttcatttaacatacaaaaaaccaactgatgaacttatcacaattcagaaaa

SEQ ID NO: 94425 - DNA, 415 bp, Homo sapiens
cacacgcctattatatagtaaaacccagcccatgattcctaaaggggccctctcagccctcctaaagacctacggcctaaccatgtgaatgcaattccagtccataaaggacctcagactagggctactaaccaacacactaaccatataccaatgatggcgcgatgtgacacgaaaaagcacataccaggggcgccacacaccacctgtccaaaaaggcctttgatacgggataatcctatttattacctcagaagtttttttcttcgcaggaattttctgagccttttaccaatccagcctagcccctaccccacaactaggagggcactggcccccaacaggcaataccccgctaaatcccctagaagacccaatcctaaacacatccggattactcggaataggagtatcc

SEQ ID NO: 94426 - DNA, 379 bp, Homo sapiens
  misc_feature (1)...(379): n = a,t,c or g
ttctagatcgcgagcggcctccatgactttttcctttaaataaaaaaacaaaaaaaaaannggggggggccctttaaaaaaacccctgggggggccccattttaccgggggaggaaaaaaattttttttttctttttgggggggcctttttttcccgggggggggattttgggaaaaaaccccttttttgggggggggcccttgggggcccccccccccccaaaaattaaaggctttggggaaaaaaaaaaattttaagggggaaaggggggaaaaaaaagcccatttcccgggggctaaaaaattttccttcccgggatttttttaaaaaaattttccccccggggccttttggtnnnncnnnntatntcccccacct

SEQ ID NO: 94427 - DNA, 381 bp, Homo sapiens
cttttaagttaaagattaagagaaccagcacctctttacagtgaccaaaaaaaaaaaaaaaaaaaaaaaaaaaaaaaaaaaaaaaaaaaggggggggggcccttttaaaaaatccctgggggggcccaaatttcccccgggggggaaaatttttttttttttttttttggggggcaatttaaaacccccggggggttttttggaaaaaccccttttttttgggggggggccttttgggcccccccccccccaaaaaaaaaacgccttgggggaaaaaaaaattttttaggggggagggggggaaaaacttggccttttcgccggggggagaaagttttttctcccggggtttttttaaaaaaattttttcccccgggcccc

SEQ ID NO: 94428 - DNA, 418 bp, Homo sapiens
  misc_feature (1)...(418): n = a,t,c or g
atttctgttgtttaaatattacccaatatgtggcattttgttgtagcagcacaaatgaactaagatatcatcaaaggaccaaaaacaatataaccaccccaggttggtagatggcagaaattagtactacttttgaggatgcagagataatagatgctctcatatttccatttaatttgccaatttggctccacaagaaaccagattgctcctggaaagtgtcagtttactgcaaacttaaataagttgtttccctaatttcagccacaggactagatataattaatacctttgctagaggagatgaaaagggtttcaggtacatggtacatagccactgacttggcaaaaacattcttttatattctgatcagaaagagtttgcattctcatggtatgggtaaaaagacatatttan

SEQ ID NO: 94429 - DNA, 335 bp, Homo sapiens
ataaattaggcatctattttaaatcaacaaatttgaaaatttagacaaaatggatacaacttaaaaattgacatacgaaggaatagaaagtctgaatccataatttaaaactttctgtagtgaaatctctaggctcaggtagcttcaccagtgaattttattcattatttaaggaagaaataacagccatatacaagcctatctggagagtggaaaaaggaggaatacattccaacatgttttgctaccagaataaccttgataccaaaacctgagacgtgtattatgagaaagaaaaattgcgggccagttctatttatgaatggacatttctt

SEQ ID NO: 94430 - DNA, 380 bp, Homo sapiens
  misc_feature (1)...(380): n = a,t,c or g
agaagattgaaactagaagaccatctctcactatattaaaaaatcaactcaaaatggattagagaattaaatatcagactgaaactataaaactagtaaaaaaagataaaggaaatgttgcaggacactgatccaggcaaagactttatggttaagaccacaaaaacaaaaatagacaaatcagactatataaaactacaaagcttctacacagcaaatgaaacagtcaacagagttaagttacagcctatagaatgagggaagatatttaaaaactattcatctggtaagggactactatccatgatatataatgaactcaaacaacagcacagaaacaataatctaatttaaaaatgagtgatttatctggacatcgn

SEQ ID NO: 94431 - DNA, 424 bp, Homo sapiens
cggacgcgtgggcagcattcccttaagccaaagcctaattcagagtaaggccctaaccctcttcagttttatgaaggctgagacaggccaggaagctgcagaaaaaaaggtggaagcaaacagaggttggttcacaaggtttaaggaaagaagcggtctctgtaacataaaagtgcaagagctggtggagacactgcagcaagctctccagcagatccagctaagatcaatgatgaagggggccacagtaacaacagatcttcagcggaaatgaaacagccttctactgaaagaagatgtcatctgggacttccatagctagagaggagaagtcaatgcctatcttcaaagcttcaaaggacagggtgactctcttgataggggctaatgcagctggtaacttttaagttaaagccaatgccca

SEQ ID NO: 94432 - DNA, 433 bp, Homo sapiens
  misc_feature (1)...(433): n = a,t,c or g
ataaaattatacccatgaaataagaacaagatgctaatcaaaaagaatatttagaaaataaattacagttattaaaaattaaaacgttgaattaaaatgttgatagtggtaacgagaaactcaaaagaagggctggaaggcaaatgtgacaaagcttcctgaaaaagagagcagcaaagaaatagaaaacagtagagggaaaaaaatggagaaccaatatccgaaaaacagaaatgttttaaaaaaaaaaaaaaaaaaaaaaaaaaaaaaaaaaaaaaatannnnnnnnnnnttnnnnnnnttntttttannnnnnnnnnnanannnnnnannnaanntaaaannnttgggggggctcttttttatttttttggggggggccccccttttgggggggggggaatttttttttttttttttttgaagaaaaaaa

SEQ ID NO: 94433 - DNA, 407 bp, Homo sapiens
atactaaatgaattaaaacaaacaaacaaactttcaaacttagagttaatccaagatttggcaggaaaagagaaaagatgggatagagaacaaatggaatagagaagaaatagcaagatggtaaacttaaactcaaccacataaataattacattaagtgtaaagaagctgagtaatccatttaaaagacacatttttagatggaaaaagaaagacccaacaatatgctgtctacaggaaatgcccttttttttatttttttttgagacagaatctttctgttgcccaggctggagtgcagtggtgcaattatggctcactgcagcctcaacctcttaggctcaagtgatcttttcacctcagcctcctgagtaccggagaccacgggcaagtgccaccacacctgg

SEQ ID NO: 94434 - DNA, 451 bp, Homo sapiens
gggaggcctcaggaggctttcaaccatggcaaaaggaaagggggagtagacatgtcacatgaaaaaatcaggagcaagaaagtgaggagacacttccaaacttattctacaaggccagtattacactgataccaaaactggacacacaaaaataaaagaaaagaaaggaaaagaaaagaaagaaaaagaaaagaaaactagaagccaataacacatagaaatatttatgcaaaaatactcaacaaaatactggcacaccaaattcaacaatacattggaaagatcattcatcatgaccaagtaggatgtatcccagagcatttgataaaattcaatatcgctgcatgataagaaccttcaaaaaatggggatagaaggaacacacctcaatataataaaagccatatacatcagacccacagatagtatcatagagaatagagaaaaaccg

SEQ ID NO: 94435 - DNA, 460 bp, Homo sapiens
  misc_feature (1)...(460): n = a,t,c or g
aactgacgacgtttgacggcntcgaaannngcgnnganccacgcgtgcgcccacgcgtncgcaacaacgaaccatttctcgatcagattgtgacatacttcgaaaagtggattttatatgacaatcggtgatgacaactcagtggttggatggggaagaaggtccaaagcacctcccaaagccaaacttgcaccaaaaaaagtcgtggtcactgtttggtggtctgccagtctgacccactacagctttctgaatcccagaaaccattacatctgagaactattctcaggaaatcgatgaaatgcactgaaaactgcaaagcctgcagctggcatcagttaacagaaagggccaaattcctctccatgacaacccccgactgcaggttgcacaaccagtgcttcaaaagataaacgaattgggctttgaagtattgcctcatccaccatattcacctgag

SEQ ID NO: 94436 - DNA, 403 bp, Homo sapiens
  misc_feature (1)...(403): n = a,t,c or g
cggacgcgtgggttttcatatcattggtcgtggttgtagtccgtgcgagaataccaaaaaaaaaaaaagggggggggcctttaaaaaaacccttggggggcccaaatttaaccggggggggggaggaaaaacctttccccttaaggggggggaaattaaacccccctggggaattttggaaaaaaaccctttttttggggggggaaaaaatgggcccaccctccccaaaaaatttaaaggtttcagggaaaaaaaaaatttttaaggggtaaagggggaaaaataaccggtatatcctttttgtaaaaaggtttcccccccggggtggaattttaaaaaattttacccccgggcccttgtgttttntnnncgcgggggcttgcccccccaccctttttgggaa

SEQ ID NO: 94437 - DNA, 438 bp, Homo sapiens
aaatttaactgttagtgcaaagaggaacagctctttggacactaggaaaaaaccttgtagagagaggaaaaaatttaacacccatagtaggcctaaaagcagccaccaattaagaaagcgttcaagctcaacacccactacctaaaaaatcccaaacatataactgagctcctctcaaggaaaaattaatgctgttaaaacaaaaaaaaaaaatgggggggggggttttaatagggtccccgggggggggcactattcgcgcgtgggggaaaaaaaaaaccttctctatttggggggggtttttataaacccccgaggggttttgggaaaaacccctattttggggggggggacttttgtggccacacccccccacaattataagagcccggagggaagaaaatatttttacttgggggaggggccgcaaccctcctc

SEQ ID NO: 94438 - DNA, 470 bp, Homo sapiens
  misc_feature (1)...(470): n = a,t,c or g
ntttgatacgccttcggtaccgcctcgaaatccctcgggacgacccacgcgtccgcccacgcgtccggaccaactctaatggcctctttgtaactgaatcactttctttctttctttctttctttctttctttctttctttctttcttctggctctctctctctctctctttctttcttttttttttggaaagggagcccccccccaccctaggggacaaagcgaaaccctgtctcaaaaaaaaaaaaaaaaaaaaaggggggggggggggccaaaatttttttacccccccgggggggaaaaaaaacccccccccccaaggggggggagggggggggtctccggcccaaaaaaaaaaacccggggggggggccccccgggttcaaaaaaaaaaaacccgggggggggttttaaaaaaaaaaaaccccccaaaaaacccagggggggggggggaaaaccctttttccccc

SEQ ID NO: 94439 - DNA, 404 bp, Homo sapiens
  misc_feature (1)...(404): n = a,t,c or g
attttttaaaaaagaaaatatacaaatggctaataaacatgtaaaaacctacactacattattagttattagagaaatgaagattccaacctccatgagataccatttcacatctattagagtggctaaaattttaaaaactgacaataccagatgttgacaagaaggtagaacaatcagaattctcatgctttgctgactgcagaataaaatggtactactactttgaaaaactggcagtttcttacaaagataaaaatatttctgttcttatgacccaacgatttcactcctaggtatttacccaagagaaatgaaaacatatgtccacagcagctttattcatggcaacagcaaaaacaacagaactggtaataatctaaatgtccataattagaaaaatn

SEQ ID NO: 94440 - DNA, 372 bp, Homo sapiens
  misc_feature (1)...(372): n = a,t,c or g
cgcggccgcgtcgacctcaaactccccaggctcatgagatcctcccatctcagccttctgagtagctgaggcaggagaatcacttgaagccgggaggcggaggttgtggtgagctgagatactgccaccgcactccagcctgggtgacagagcaagactctgtccataaaaaaaaaagagggaacggaaaaggaaaatgccccccggggggaataaattttttttttggaaaaattaaaaggcttatccctttccccgggccccccttataattaacggcattttctcccccaaaggaggagatggggttggtaatcccacctcctaaaatagggggggtttttctaaaatatcactggcccctttcgaagn

SEQ ID NO: 94441 - DNA, 368 bp, Homo sapiens
taaatgtacagttcagtggcacttagttctttcacaatctagttccaaaatattttctctggcttacattttttcttcttctctattttatctttctttttcttttctttttttttttttggggaagggggtttggttttgggggcccgggggggggggcaggggccaaatttaggttaagggaaccctccccctcgggggctaaggaatttttcgggttttacccccggggggggggggaattacgggcccccccaccctttttgtgaaagaaaccaaaatttgcccccccgggggggggcccccggggatccccgcttactgggggggccgggcccggaggggcttttgatcttgggggggggggg

SEQ ID NO: 94442 - DNA, 378 bp, Homo sapiens
gctatgttggccacgctcatctcgaactcctgacctcaggtgatccacctgccttggcccctcaaagtgctgggattacagggatgagcccctgcgcccggcctacctcatgctccttttacccctaaatactcctaacagtaaggacattcatcaaaatcaggaattttttttttttttttgatacaggatctaattttgttgcccaacctggaggggaggggcatgatcacggttaataataacctcaacctccggggcccaataaatcttttaacctaagcctcccaagtaggtgggactacgggggagcccccccttgcccagttattttatgtattttttgtaaagatgaggtttcatcatgtggctcaggcg

SEQ ID NO: 94443 - DNA, 383 bp, Homo sapiens
gggaggctgaggtgagaggatggctggagcctgggaagttgaggctgtggtaagccatgatctcgccactgtactccacttgagacagagcaagaccctgtctcaaaaaacaaaacacacaaaattatatttaaactctgcatatgcatttttgacatcagcactggaaagtcatctccatttcacaatgcttttcaaaaatccattacagagcaatcataatggtgcagttttgtaacatcaaatctatttgcgttatcaggagaggtggttttctcttatctttctatgtaaattatgatctctaggctgggtgtggtggctcatgcctgtaatcccagcactttgggaggccaaagcaggcggatcacaaggtcaggagt

SEQ ID NO: 94444 - DNA, 380 bp, Homo sapiens
aaagtaatcatgacagggtatgaataataaacaaggctgctttaatgctacctcccattatcaagtaaaaagaaaagaagaataaaaaggtatactaaattctaacagaataatttagggagaattgttcctacagccacaggtaccccaaagaaacaagttattccttttctgatcatccagagataggacagtcaggtggatgtcagcaggtacaccagaagtgacatttccaatagtctctgaatgtcctgtgaaatagcaactagacctcttgcttttttggttgtattttggtttgagacagagtctcactgtgtcgcccaggctggagtgcagtggcacaatctcagctcactgcagcctctacctcctgggtt

SEQ ID NO: 94445 - DNA, 373 bp, Homo sapiens
gaaaatcttgccttgtttttaatcttagaggggaagcattcagtcctgatataatagtagctgtggtgctttttgttgtagatgctctttatgaagttgataaaagttccttctattcctagtttgataacaggttttaccaagaatagatgttggattttgtcaaatattttttctgtgtctattgagatgagcatttgacttttttttttctttttagttctaactattggccattttattgatggagctttctaatgataaatcaagcctgcatttctggaataaactccacttggctatgtattatcttttaccgttattatgggattagatttgctaaaccttttttgttaagaatttttatgcgtag

SEQ ID NO: 94446 - DNA, 369 bp, Homo sapiens
cacaggtgcctgccaccacacccggctaattttttgtatttttagcagagatggtattgcatatatatatagtaagttttaaaatcaggaagtatgtatccatctttgttctttttcaagattattttggctatttggggcctcttaaattttcatatgaattttaagatcagcttatcaatttctccaaagcagttagctgggattttgatagggatttttactttgtattgtatctgtggatcaacttgaacataattatattagcaatattaagttttctgaatcttgtacataaactatccatttatttaggtctactttaattttattcaacaattttttttcaaagtacagattttgcacttt

SEQ ID NO: 94447 - DNA, 349 bp, Homo sapiens
  misc_feature (1)...(349): n = a,t,c or g
caatggcatgctcctgcctcaccgcacgacctccgccccccaggttcaagtgattctcctgcctcagcctcccaaatagctgggattacaggcatgcgccaccacgcctggctaattttgttttgttttgttttgtagggtgaggggggatatanctaacnnnctnnnttatctnnttttccttttttcttacaaaaatgacaacatcttcctttaatcttatttgtaatcatcacttgaacccaacaagtcttagttgtattaagccgtgattgcagtactgcactccaacctgacctatggagagattccccgaactgccgcgaggtgtaaagggcgaacgcgatag

SEQ ID NO: 94448 - DNA, 367 bp, Homo sapiens
tgcacatctcctactttcaatcaaaagctagaaatgattaagcttaggaaggtatgttgaaagctgagacaggctaaaagctatgcctcttgtgccaaaaagttaggttgtgaatgcaaaggaaatgttcttgaaggaaatttaaagtgctagtctagtgaacacaacaatgataagtgaaacagagcttcactgctgatatggagaaagtttgagtggtttgaatagaatatcaaactagccacaacattcccttaagccaaagcctaatccagagcaaggccctaactctatacagttctatgaaggctgagagaggtgaggaagctgcaaaagagaagctgaagctagcagaagtttatgaggg

SEQ ID NO: 94449 - DNA, 367 bp, Homo sapiens
  misc_feature (1)...(367): n = a,t,c or g
cgatcatataaccatcaacccttgggctcaggcgagcctcctgcctcagcctcctaagcaggtgggactagagacacatgccaccacacccagctaattaaaaaaattttttttgtagagatggtgtctcactatgttgctcaggctagtcttggaactcctggcctcaagcaattcactcaccttgtcctccccaagggaaatggctgtttttgatagaatttaagtctagtgccctcattttattatactgggttggttctagggctaggacctcaccaaactaactcatgtaattcaagctctttgtgaagtagtgatagagcagaaagattttgtcataccatgggaangccttttaccaagn

SEQ ID NO: 94450 - DNA, 424 bp, Homo sapiens
caggaattgggtgtttccttacccctacgtggttaggctctggtaaaatagttttccttgaggaaagccctttgttaaggataacagaatgctctggtcatgcctttttctttctttctttcttttttttttttttttttgggaaaaaccctgggccccttttttttttgggggggaaactgggggggcggggcccccttatgaattattggagccttaaccctcgggggtaaaaagaaccccccatttaacccccctggggaagggggcccaaagggcccttggggggcccaaatttttggggggggggggggggggggggggtttttgagaaaaaaaaggggttaaccttttttcccagggtggtttaaaaattcggggctaaagaaaaactggccgtttggccctccaaaggccggggatt

SEQ ID NO: 94451 - DNA, 328 bp, Homo sapiens
ctgagaacaagcaggccggatgttagaggggagccttgggttacctctgggactcaaaagtgaaagggggccattcctacttttattgctatagccattatgattattaacgatgagtattgattggtagtattggttatggatcattgctctgaaagtctattgttaaacaggatagctcttataaggattatggatcccgtggcttgcgtgaggaaatacttgatggcatcttctgcggaacgagggcagatttttttggtttgatctggagccatggctcacatggatatttctcggcctgactgcagcaaaaaaacaatgcgag

SEQ ID NO: 94452 - DNA, 341 bp, Homo sapiens
  misc_feature (1)...(341): n = a,t,c or g
tacgatagaaataaatggaaagatattccaggctcatagattgaaagacttaacattgtcaaactgtccatgctacccacagtgatctacagattcaatgtaattcttatcaaaataccaatgacattttttgcagaaacagaaaaaagcatcgtaaaattctcaagggactatgaatagccaaaacaatcttgaaaagaacaaaattggaagactcatactccctgatttcaacattcttcacagcaacagtaattaagatggtatggtactagaataaagacagatatatatacaccaatggaacagaatttagagcctaggaataaacccttgtatan

SEQ ID NO: 94453 - DNA, 336 bp, Homo sapiens
ctcagtattgattagtgggatagctggctgactggtttggccttttttttttttttttttttttttttgaaaaaaaaaatttttttttttccccccgttttaaaggaaggggaaaaatttttttttttttaccccccccccccccgggttaaacctttttttttccctcaccccttgaaaaaatgggaaaaaagggcccccccccccccccccaattaattttttttttttttaaaaaaaacgggtttttttttttttacccaaaaagggctaaatttcccacccttggaaaccccccccctaacccccccaaagggtttaaattaagggggggcg

SEQ ID NO: 94454 - DNA, 350 bp, Homo sapiens
  misc_feature (1)...(350): n = a,t,c or g
ccgagatcgcgccactgcactccagcctgggcgacagagcgagactccgtctcanaaaaaaaaaaaaaaaaaaaaggaaaaccttctttttaaaggggccaagggtttttaaaaaaaataaagggggggaaaaaaaaaaagagtttttaaaatccaaaaaaccaaagggggtttttgaaacaaaaaaaagggttttaaagggcccccaaaaaaatttttccccaggggacggttttcgggggtgaaaaaattttaagggggaacaaaatttaatttgtttttttggaaaaaaaacttaagggttttaaaaccatttaaaaaccccaaaagggccttgggtttttaaccct

SEQ ID NO: 94455 - DNA, 341 bp, Homo sapiens
ccaataaccagctcctcgctgatgaagcaatcaggaaatggctcgagttgagctaaggagaatttggatccttcctttggttctcagtaggcagggtaggggccaggcatggtggctcatacctgtaatccttgcactgtggggggccaaggtgagaggattgcttgaggccaggagctcaagaccagcctggacaacatagcaagacctgggtggcatacacctgtggtccctactacttggtaggatgaggtgggaggattgatcacttgatcccaggagtttcaggctgcagtgagccatgatcacaccactgcacttcagcctgggtgacagagcca

SEQ ID NO: 94456 - DNA, 355 bp, Homo sapiens
gtaaaacccagcccatgacccctaacaggggccctctcagccctcctaatgaccttcggcctaaccatgtgaattcacttccactccataacgctcctcatactaggcctactatccaacacactaaccatatacacaatgatggctgcgatgtaacaccagaaagcacataccatggccaccacacaccacctgtccaaaaaggccttcgatacgggataatcctatttattacctcagaaggggttttctgggcagggagtgtctgaaccttttaccgctccagcctaagccctaccccccaattaggagggcactgtcccccaacaggcatcaccccgcttaattccgtaga

SEQ ID NO: 94457 - DNA, 348 bp, Homo sapiens
cccaaattaagaaccctgataatattagttgttgataagatgtggagcaactggaatgttcttacactgctgttgggaatgtaaattgctgcagccactttggaaaacaacatgacatcagtaaagtagaagataagcagttccactgtcgggtatgttccctaaagatactcgtccacatgcacaccagcatccatataaaaaacatttctatcagcattgttcatgatgaccccactggtctatctagagtagaatggataaaataatcatggtgtaatcagaaattgtaatattaatcagtaatgaaaaggagtgaggaattttcacttaaaaatgcttaatttt

SEQ ID NO: 94458 - DNA, 347 bp, Homo sapiens
ggcagccggtgtttatcttttcccttcaaggattggaggtcagcagctttatagagaagggcagtgctgatcataaacctggacatatttgcacaaaacagtagagttagcctgtcctttcctacctcagatctggggcttgcttctctttttgctaataaatgtcctttgtggcagctttttcccctagaatacagcacttgcgcctgcattaaaaacccgttcaggcagataccctttctcctcagtgattttcttaatggtgcctaggaactaactcatctactttggttgacagaagctcctttcctgttatcttgacattttttaagccagcctgtttctaa

SEQ ID NO: 94459 - DNA, 339 bp, Homo sapiens
gggtatgtggacgttcgcttcatagtattctttcagcacatcaatagatttgatttttttttttccaaaatataactttggaaagcgggcatggcagaatgttaacggttgacgaatctaggtgacgggtatgtggacgttcgcttcataatattctttcagcacatcagtagatttgattttttttttccaaaatacaacgttggaaccaggcggggaggctcacacctgtgatctcagcactttgggagactgaggcaagaggatcacttgagcccaggagctcgagaccagcctaggcaacatagggagaccctatctctacaaaacgaacaaaac

SEQ ID NO: 94460 - DNA, 329 bp, Homo sapiens
gggatcacaggcgtgagccgccgtgcctggctataatctgtcattttgaggatgttgcataaatggaattatacagtatgtgatcttttgaggttggctttttcacagagcataatgtccttgagatccatccaagtagtgtacttcaatggtttgttcctttttattgctgagtaataatattccatggtgtggatgtcccacagtttaactaactatctatcataggacatctgagtaatttccaatttggggttattacaaataaagctgctatggacgatggcgtacatatttttgtgttgacataaatttcatttatatgtgat

SEQ ID NO: 94461 - DNA, 354 bp, Homo sapiens
aacattttgaaaaaaagaggggagaggggaaaaaaaaaggggaaaaaaaaaaaaaaaaaaaaaaaaaaaaaaaggggggggcgcccccccccccccttcttggggggggggggggaaactttgggggaaaagaaaaaaaaaaaagggggggggaaaaccccccctttttttttttaaaaaaagaaaaaacctctttaaaaagggggggggggagaccccccctaaaggaaaaaagcggggggggttttttggggggggaaaaacaaaaaaaaaatctccaaaaaaaaattgggagaggctggggggggggaaaaaaaaaaaaaaaaaaggggggggggcctaaaaaaaaagaaa

SEQ ID NO: 94462 - DNA, 269 bp, Homo sapiens
gggatttcaccatgttggcccggctggtctcgaactcctgacctcgtgatccacccgcctcagcctcccaaagtgctgggatcacaggtgtgagccaccacacccggcctgagttcagtttttaaaagcattttacttttgactgacttttatatttttagaaggatcgtgtttgacaaacccaagagaaagtaattgtcctcattagtcctaccactattctgtatttgcatgtatttttatatatagatagaaagtcgacgcggccg

SEQ ID NO: 94463 - DNA, 347 bp, Homo sapiens
caggcagactgggaggccaaggcaggcagattgctttgagacctgcctgggtaacatggagaaatcctgtctctacagaaaaatacaaaaattagccaagcatggagaaacctcgtctctatagaaagacacaaaaactagccatgcatgcctgtggtccagctactcgaaaggctgagatgggaggattgcttgatcctgagaggtcaaggctgaagtgagccatggtgtggcactgcactccagccagggtgacagactaaaaccttgtctcaaaataaataaacacatttaaaataaataaatacaattaaaaaaaaaaaaaaaaaaaaaaaaggtcgccgcgg

SEQ ID NO: 94464 - DNA, 339 bp, Homo sapiens
aaactcctgagctcaggcagtccacctgcctcagcctcccaaagtgctgggattacaggcgtgagccaccgcgcccggcctggacttcttaactttttctgttaatgtgctttttctgttccaggaccctgtttgggatatcctgataccttcactcatcatgtccccctagtttccaccaatctgtgatagcttctctggacttttcttgcctttcatgactttagatgttttgaagagtagtggtcaggtgttttgtagaatgcccttaacttgggtttatctgatggtttctcataaacattctgaggctgtggattttggagaagaacaccacag

SEQ ID NO: 94465 - DNA, 349 bp, Homo sapiens
aaaaaaggggctgtgagcctaggcaatatagcggggcgctgtctctaccaaaaatacaaaaaaaaaaaaaaaccccgggctggggggggggaccccggggcccaagttattggggagggggagggggaaaaaccccttaaccctggggggaaaaggtggggggggcctaaaagggccccatttccctccatccggggggaaaaagcaaaaccctgtctaaaaaaaaaaaaggggcgggggtaatggggggaaaaaaatgcggtaggcacccagggccaaaaacaaaaaaagcagggatctttggtttaaccccatgaaaaaaagaatagttgttgaaacaaaaaagcag

SEQ ID NO: 94466 - DNA, 345 bp, Homo sapiens
gggtttcactatgctggccaggctagtctcgaagtgctgacctcgtgatccacctgcctcagtctcccaaagagctgggactacaggcgtgggccaccgtgcctggcctatcttattttctttatccttccttgcggtcatgatttatttgcgcaatgagtatacatattcctttcattaaaaaaaaaaaagcaagcgactaacaggaatcaaaaggcctgaacatcggggagggctcttccctttttagactggatctgggaaaatacaagcaatgagcgtcttgtatttgcccacctgtgagactatctgtagaaaaaatttctggagaggaactgctatgta

SEQ ID NO: 94467 - DNA, 342 bp, Homo sapiens
ctgtggtctcagctgctcaggagtctgaggcaggggttgtagtgagctgagactgcgcgccactgcactccagcctgggagacagtgagactcagtctcaaaaaaaaaaattatatgaatgtaatgggttcatcattttaaaatgaagtatcttcaaaatttgtttcaagttctcatggaatcgatattgataaatatatcttggtattcttcagtttttaaggttgtaaaaataaatacttttttggagatagggtctctctcacccaggctggggtgcagtggtgcgatcttggctcactgcaacccctgcctcctgggcttggacagtcctcccactct

SEQ ID NO: 94468 - DNA, 359 bp, Homo sapiens
cagagacatcacaaaaggggatatgcaaatggaaactaagcacatgtaaagtttttcgacatcattaacatcagggatcctataactcacctattcgaccaagtaaaatgaaaaatattgatagtaccaggtactggagaggatgtagagcaattagagctctcatacattgttgttggagatgctaaatggtacagccatttggagaatgaattagcagtttctctaaaaagttaaacatgtacttatcatatgacgaacgtcctacttttaggtatgagaaatgaaaacgtaagttcacccaaaaatctgtgtatgaatgtttatggcagctttctttctaattagccccaactgga

SEQ ID NO: 94469 - DNA, 342 bp, Homo sapiens
  misc_feature (1)...(342): n = a,t,c or g
cttgaatccgggaggcggaggccgcggcgagccgagatcgcgccactgcactccagcctgggcaacaagagcgaaactccatctcanaaaaaaaaaaaaaaaaaaaaaaaaaaaaaaaagggggcggcgcgcggttnttcctcctgtattactgattctacgtaggggggctcttataaaccttcagtgactcctctgaaaaatcagacatatttagctatactctcactaactttaaaaagaaacggtacggagggtccgcggctctcccagtttttgagaagccaagcaaggtgataccctctttattatgttaagacaacctttctagaaggaaaaaga

SEQ ID NO: 94470 - DNA, 150 bp, Homo sapiens
caaaatacttaagttagcctggtgtggtggtgtgcacctgtaatcccacattcttgggaagctgaggtgggaggatcacttgagccagggagatggaggtttgagtgagccgggattgcgccagggcactccgtcgacgcgggcgcgaca

SEQ ID NO: 94471 - DNA, 344 bp, Homo sapiens
gtgaagtggtatctaattgtggttttgatttacatttccctaatgattagtgatgttgaacatcttttcatgtgtttcttggccatctgtacatcttctctggagaaatttctatttaagtcctttgctcactatttttttttttttttttttttttttttgaaaaaaaattctttttttttcccccaggtgggggaaaaacctttttctttttttaaggggattttttttttaacaaaaaatttttaaaaattcccccgggggggggaatttttaaaaatttttttcttttttaaggacaaaaaagtgcccttttttctgttttccagggttggtttcctttg

SEQ ID NO: 94472 - DNA, 355 bp, Homo sapiens
cgaccgactgctattctctgcaagccacctagacctgggaacactatacctattatttggcgcatgatcaggagtcctagggacatcttttatgcctccttattcgagccgagctgggccagtgcaggctgccttctatgaaacgaccacatttacaacggtatcgaaacagcgcacgcctttgttatggacctcttcattgtaagacccatcataatcgggggctttggcaactgactaggattccctaataaaaaaggggccgatatggcgtttccccgcataaacaacataagcttctgactcttacctccctctctcctactcctgctcgcatctgctatagtggaggccg

SEQ ID NO: 94473 - DNA, 340 bp, Homo sapiens
  misc_feature (1)...(340): n = a,t,c or g
tgctgggattacaggcatgagccactgtgcccagcctaacatcttaaagttattaaatcttctagtccatgagtacatatataatgttttttcatttatttgtgtctttgatttccttcagcagtgttttatattttatagtttcagtgtacaagtctttcgcctcctgggctaagtttattcctacaaattttattcattttgattctgttgtaaattgaattgttttcttaatttccctttcagattgttcacatgtgggnnnnnnnnnnnnnnnnnnnnngnnnnnnnncnnnnnnnnnncnnnnnnnccncnnnnnncccacccccccccccncnc

SEQ ID NO: 94474 - DNA, 318 bp, Homo sapiens
ccgccgccgggttgaatcctccgggcggactgcgcggacctttttttttttttttttttgggtgggaaaaaggggttttgttttccaaggttgaagggaaggggggaaaccttgcttaattgaaccttgattttcaggggttaagggaaacttttaacccaagcttccaaaaatttgggttttaagggatggccttaccacttggggaaaattttgttttttttttgaaaaaagggggtttaacattgctgccagggttggttttgaactcttaaattaaggaattcttccacctttggcctccaaagggggtggctt

SEQ ID NO: 94475 - DNA, 326 bp, Homo sapiens
  misc_feature (1)...(326): n = a,t,c or g
gtcgacgcggactttggttttttttgggggcttttgtgtggttccttgcaccataacacctggttttttttttttttctggaaaaaaaccctttttttggggggggggggggagcccccctggccttctacccttggggggggggggggggaaaatgaggctctcccggagggtattatgggtcttaaaaaaaaaaagggcgcctggttactccgtgggggataaaaaaaaaaagagtcctgaagaaaaaatatatacctgtggggccttctattctcttcatcttggatgagannaaaaaggagaaccccccggggggtctcttc

SEQ ID NO: 94476 - DNA, 353 bp, Homo sapiens
tgcaccccagcctgggcaatagagcaacactctgtctcgaagaaaaaaaaaaaaaaaaaaaaaaaaaaaaaaaagggggggggggaaaaaaaaaaaaggggaaaaagggcggggggggtttgggggaaattaaaaaaaaaaaaaggggatgggaaattcctttttggggggcccccttttaaaaaaggggggaaaaaattttaaattaggttaaaccccttaaaaaaaaacccaaaaggtggggggggcaaacttggaagaaaaaaaaatttttggtgggcaaaaaaaaaaaaccccttaaaaagccaaagggctttcccaaaaagggtttttaaaaacccccaaaaggggaa

SEQ ID NO: 94477 - DNA, 341 bp, Homo sapiens
aaaaagtatagtcaatagtgaataccctgcacttgtctaaagctccatggcaaggtacacgaccatgatcaaagccagttatggtggcccaaaccacaagaagagatgagaactttggaaaataatctagcagttcttcaaagtattcttcaatggctagatatagaattaccatatgaccgagcaattatatgtgcaagagaaataaaaacatatgtacacacaaaactgtacataaacattcatgttagcattatgtataacagccaaaaagtggaacaacttaaatgcccatcaactgatgaatgggtaagtagaatgtggtatacatgtacaaggga

SEQ ID NO: 94478 - DNA, 338 bp, Homo sapiens
  misc_feature (1)...(338): n = a,t,c or g
gtcagaagtccactatatcagaaaacgtgaattataatatattttagtaagaaagaagccagctgcagtggctcatgcctataatcccatcacttttttttttttttgaaacacagtttcttttttgttgcccaggtggaagggcatgggccatatttaaaatttttgagtttttggcttcccaaatgaaagcaattttcctgtttaaccctccaaacaatttaggtttacgggcttaacccccccccccggaagaattttgtatttttaaaagaaagggggttattccatgttggacaatcgggtcgggacctcccaccctcaggtgatccgccccn

SEQ ID NO: 94479 - DNA, 343 bp, Homo sapiens
gggaggctgaggccagagaatcacttgaacccaggaggcagaggctgcggtgagctgagattgtgctactgtactccagcctgggtgacagagcgagacaccatctcacacacacacacacataaaattatttttattgagggtccatatagcaattagccaactcatgctgttgtaacatgctaaacaaattcaatgttatttgtattctaagatggtgttaatctagttgatcaccttctaatgaatatataggttgaaatatgaagatgccaatttcaagaatgggaaattctttgcttgttccaaaagaaaaaaattaaaagacaactgtgaaaaacgg

SEQ ID NO: 94480 - DNA, 360 bp, Homo sapiens
  misc_feature (1)...(360): n = a,t,c or g
ccttcgtttcatgctctgaaattcctatcctcgattgtgcctgttttcaaatgaaatctcttgcatattatttttatttatatatcaataaacatactttgttgatatatattttattaaacatatatatttaacatttacttattataaagccaatcactgaataaaggggctgctctgatgaacagaaacacatgaaaacagggccacactgtgcatctcatgttaatctaatcatccaattaacttctgaatttgttttgcttttttaaaattaattttttttgagacagagtcttggtctgttgcccaggctggagtacagtggcataatctagagtcactgcagcctttgcctcn

SEQ ID NO: 94481 - DNA, 341 bp, Homo sapiens
  misc_feature (1)...(341): n = a,t,c or g
attttctatctactagttctatctattactaaaagatgagtgtagagtctccaacaataattgtagatttgaccttctctccttttagttctatcaaagtttgcttcatgtattttgaaggtctgttgctggatgtgtacacatttagaactattatgccttcttgatgaattgactcatttatgataataccactgaaaggctcnggnnnnnnnnnnnnnnnnnnnnnnnncnncnnnnnnnnnnttnnccntnncnnnnnnnccnnncccnnncnnnaatttttcactacnttttcccttctttaantaccaatactccctaatattcaaccctccccc

SEQ ID NO: 94482 - DNA, 333 bp, Homo sapiens
gtaaagtagccagttggtcaacatgcagatgactagaaatactttgaatgtagactactttcaggaatgtgttaaatgttattaagtgatgagggtttcttgttgttgtttaaaagattaaatctcgctctgtcacccaacttggagtgcagtggtgcaatcatagctcactgtagcctcgaactcctgggcttaagcaatcctccttcctcggcctcccagcactttgggaggctgagttgggaggttcacttgaagtcaggagtttgagaccagtctgggcaacatagaccccatctctgcaaaaacaaaaaattagcaggacatggtggc

SEQ ID NO: 94483 - DNA, 336 bp, Homo sapiens
tttttttttttggccgccccctcaaacttttttaaaaaaccccgggggaccggggccaaaaagggaagaagggcctgggggaagccccagggggcaaaaacaagggcccccggggctccacttaacgggatttggggggcaacccgggggctaaaaaaacccagaacctggcccgggggggcgggccccgaagggggaaacccggggggaagggggggggccaacccgcccgcaaatcccaaattaataaacggaaaatccggaaaacccccgaaggttactttaaacggggcatggggcacaatcaaaatttttttaattaaaacaccggttggc

SEQ ID NO: 94484 - DNA, 215 bp, Homo sapiens
gcgagagagagcttagcttccttccttcctccatccctccctcccttccttctgggacttaggttccttccttccttccttcctttctacttttctttccttccttccttccttggctttggttccttccttccttctaccttccttccttccttctttccttccttcctgggcttaggttccttccttccttggcttagatgtcgacgcggccg

SEQ ID NO: 94485 - DNA, 352 bp, Homo sapiens
  misc_feature (1)...(352): n = a,t,c or g
cttctcctcactctctcaatcttatccatcatagcaggcagttgaggtggattaaaccaaacccagctacgcaaaatcttagcatactcctcaattacccacataggatgaatantngcnnnnntaccgnacactccatgaatccgactctgaaagtgtacctcgagactttaaaatatcagatgctttggcggtcgaagacgatcagaggagccctggtacattgaatgccgcggaactttccgtagtgttagggaaagaaaaaagaaggaaaagagcctgagcctgggctttgagaccagtccatcaaagaaagtgactcctatatggtctctggcggaagaatacaacg

SEQ ID NO: 94486 - DNA, 184 bp, Homo sapiens
cttgctctgtcgccccggccggagtgcagtgccacgatctcacttcactacaatctccgcctccctagttcaagcaatcctcccacttcaagcaatcctcccacttcagccttctgagtagctgggactacaggcatgtgccaccacgcctggctaatttttgtatttttagtcgacgcggccg

SEQ ID NO: 94487 - DNA, 326 bp, Homo sapiens
  misc_feature (1)...(326): n = a,t,c or g
gagccgccgtgcctggccaggtaataaaagagccacctggctcttttatttatagtttgtgaagagttttaatcatgatattatgatattaaattttctcaaatatttttactgcatatattaagggaatcatatgttttctcccttattttattaatttgtggtatatattgattgctgtttaaatgataaattgccctcacattctcatagtaaacctaatttggtttgatgtatcatctttttaatatanatgtaaatctgacttgctgatattagttattagaacttttgcatctaaattcatgagagagactgccctattc

SEQ ID NO: 94488 - DNA, 313 bp, Homo sapiens
  misc_feature (1)...(313): n = a,t,c or g
caacaaaggcagcttcccactcacaagagagccaatttgcagttcctggtgggccgtattcactgacacctgaaatctaggacaatcagtcctggacgtgtgggcgcgactgccgctgtgaatagcacagccatcctggagtacctcaccgcagaggtacttgaactggcaagaaatgcgtcaaaagacttcacagtaaagcatactacccctcattacttgcaacttgccattcgtggagataaagaattgggctctctcttcaagtctacaattgctggtaaaggtgtcattccacacatccacaaatctn

SEQ ID NO: 94489 - DNA, 339 bp, Homo sapiens
cacaaacattattataataaacaccctcaccactacaatcttcctaggaacaaaatatgttgtgttgagttcaggggagagtgcgacatatgtcggtcctaggaagattgtaacggtgagggtgtttattataataatgtttgggtattcggctatgaagaatagggcgaaggggcctgcggcgtattctatgttgaagcctgagactagttcggactccacttttgccatgtcgaagggggccttggtgtgctctgctatggtggagataaatcatattatggccagagggcatgatgtctggagaaatataggtgttctttgtgtggacaaaggtgg

SEQ ID NO: 94490 - DNA, 253 bp, Homo sapiens
  misc_feature (1)...(253): n = a,t,c or g
gtgtggaangngnggaanggaggggggcatccatatagtcactccaggtttatggaggggtcttctactattaagacttttcgcttcgaagcgaaggcttctcaaatcatgaaaattattaatattactgctggtagagaaaaggatggcctacagatgataggatgtttcatgtggcgtatgcatcggggtagtccgagtaacgtcggggcattccggataggccgagaaggtgttgtgggaagaaagttaa

SEQ ID NO: 94491 - DNA, 348 bp, Homo sapiens
  misc_feature (1)...(348): n = a,t,c or g
tgccactgcactccagcctaggtgacagagcaagactccgtctcanaaaaaaaaaaaaaaaaaaaaaangggggggtggggaattgaacccccaataccttaaaaaaaggggggggtatttttttaaaaaaaaggaattttcccttagaaaggggggaaaacaatttgggaaacccctccaaaaaaaaattggggaaaatccaaaattaaggggcctattaaaattttttaaaaggggccaaccggcccgaaattccaaaattaaaaaagggaaaatcggaaaaaccccggggggttcttttaaggggggagggggccccaatcaaattttttttaattaaaacaggg

SEQ ID NO: 94492 - DNA, 353 bp, Homo sapiens
ttttttgtttttttgtttttcccgggaaaaacctttccctcgaaattttttttccaaaaaaaaaaccccaaaaggttggggcgaaaccaaaacccccggcctttggcggattcggggggcttcaaattgggcccttggccaaaaaccgtttaaggcaaaaaccctttttttggacccttttaaaaaattaaacggcctccttaactaattaaaagttgggcccctggaaaccccaaaaattctttaacaaaatggattccacatggtgggacattcccttggcctccttgggaaaggccaccttttttttgggttccttttcaaccacaggaccaaaccgggaaaattccttt

SEQ ID NO: 94493 - DNA, 325 bp, Homo sapiens
gggcatttgtgagaaccagtatgtttccttgctgggcttcttgtagggttttccataattgggatgtaccaaatccatatcttcaggatcttttggaaccatacaatatctgaactgtgagtcatggttattgcaccaatacctatttttcaaggtgttgatccatcccatacggctatttccggcactttagacaggcatcacactgaacccatgtctgatcaggacgcttttgtatatcttcaactggcaaatttagaggatattctgtatttttcttcactttcatttcattccagtaatcattcagcttttcttctaggcg

SEQ ID NO: 94494 - DNA, 329 bp, Homo sapiens
attggccttgccatccatggagctgaacgaattgtacgtgggcagaccgcaaagagtttggctgtgcataacagtttgtgaacaaaaaaaaataaaaaaaaaaaagggggggccggggcgggaattccaaaatttaaaatgggaaaatccgaaaaaccccggggggtccttttaaagggggctggggccccaatcaaattttttttatttaaaacagggttgggcttttttttttgaaaaaaaccccctaaaatttaaattttggccatggaacccccgaataaaaaaattttttaaaagaacaaaaataaagcccattttttttttgg

SEQ ID NO: 94495 - DNA, 361 bp, Homo sapiens
gcgtattctcatgttggcctcaagtgtattgaactcggacattgttcctccgtagggctgccctgattgtaccttcaatcatgtaactcccatactctggtcttcaaagggtaggaaggctacggaggagaaataacttatctacatcttattcttttgctatagactgctcgctttttaagtttttaaagctgctttataagtgtagaaaccattaggggtctaagaagctaacaaggccttctcaggtctcacagttattacttttccatagctattcaactacataagggtcaacaagtattgggtccaaaatgtttttttttcttttgagacagagtctcgctctgtcacccaggct

SEQ ID NO: 94496 - DNA, 382 bp, Homo sapiens
cgcgattgtagtcccagctattggggaggctgaggcaagagaatgacttgagcctgggaggtcgacactgcagtaagccatgatcacactccagcctgggtgacagagcgagactcttgtctcagaaaaagactaattttaagaaagggggctccgggggggggcaaacttggaaatcccaccctttgggggagacaattttgtaaaaaactttagggaatgggcatctaagacccgggcctaaaacggggaaaacccttttttaccccggccttatgggggggctcccgacttcttagccacaggggggcgtggcgggaaaaacctttgaacccgggggggggggggttggggggcccaaaaatactccttttgctttccc

SEQ ID NO: 94497 - DNA, 297 bp, Homo sapiens
atacaaaaattaaatcattatagatcaaccacctcataagagctaaaactgtaaaactcttggaagaaaacatgggtataaatcttcatgaccttagctcaggtaggcagcagccttttagatatgatacctttcaaatatgataaacacagcaataaaagaaaaaataatgaaattgtcctttgtcaaaatgggaagctttatttctcaaaggacaccattaagaaaggaaagacaacttacaaaatgagagaaaatatttgcagatgtatatttgataataggtcgacgcggccg

SEQ ID NO: 94498 - DNA, 375 bp, Homo sapiens
  misc_feature (1)...(375): n = a,t,c or g
caagactcgtctcaaaaaacaaaaacaaaaacaaatcataacaaaacaccctagcaaaatgaaaagcttcttctccagaggagagtaagtatatgcagaggatggcagaaatttgcttcaaaatactaagcatctgaattttgattctccaattagggccaaccataggcttcaaacatactatctgccacggacatttcaaacacttttggacccccggggtcacagggttttagtggcagagaagcttacgtggaagctgggacatattacacaaacttctcttgtctgggacaagtcaaagtttttgggtcactcataaaagtcagagtagcacaatcgaaacaataagttgcatccaatatcaaaaatggn

SEQ ID NO: 94499 - DNA, 369 bp, Homo sapiens
  misc_feature (1)...(369): n = a,t,c or g
ctgcgtactgaaaatacaaanaaataatacgttgggtgtgtggntgcgcacctgtggttctcagctactcatggaggcgtgaggtgggagctattgttctgagtccaggggaggtagtgagctgtgattgcgccactgcactccagcctgggtgacaaagcgagaccctgtctcaaaataaaaataaaaaggaaacccgggcccctttttcctggcccacaaaaaggaaaattctcccttaattaaaataatgggggcctaattagggtttggggcatagcatttaatgggcccacaaaaaaaattccttgtggaaaaattttatttttgggaaaccggaacttttttaacttctttaaccttatctag

SEQ ID NO: 94500 - DNA, 340 bp, Homo sapiens
gaactcctgggctcaagagtaggctgggattacaggctcatgccaccacacccaactcactttggagttttaagcccatgataggcagatgatgttttttcttttttttttgaaaacgaattttactttttgtcccccagcttgaaggccatggccggggcttgggttaacggaaacctttgcttccggggttaaagcattttttttcctaaccctcccgagtaattgggataaagggcacttgccccccccccttaccaaattttggttttttaagaaaaaacggggcctcactgatttcaggggacccccgcctgggcctcccaaagggctgggatta

SEQ ID NO: 94501 - DNA, 381 bp, Homo sapiens
ttcttaatttctgtgatactcacccattaacccctaggccagtcagtatccagagacaatgtctccctctggtggaggctggaatacggtggcgtgctctcatctcaccgcagcttcatccccctaccatagcctcctgagtagctgggactataagcacgcagcaccacacccagctaatttttttttttttttttttaaaaaagggagtctaaccatgtttcccaggccgggcggttcttaaatttttatttatttacttatttatttggaaagggagtcttacgggttgcccaggctggagggcaggggcccaatttcaactcagggcaacctttgtctcccaggtttaagcaattctcctacctcagcctcctgagg

SEQ ID NO: 94502 - DNA, 394 bp, Homo sapiens
ctgcagcttctccatcagcatttgctgcctcatcttacactttcatgttctggagacggcttctttccttaaacctcatgaaataatctcttctagcttcaaacttctatagcttcctcacctctctcagtcatcatagaatagaagagaatcagggccttgctttggattcggttttgggtttaggggatgctgtagccggttttattttctatccaaaccactaaaattttctccaaatcggcaataaactgtttcgctttcatatcattcatgtgttcattagagtaaaatgtttaatttccttcagtaacttttcctttgcattcacaaactggctaactttttgggcaaactttcagcctagctttcagcctatcttgccttttgacat

SEQ ID NO: 94503 - DNA, 333 bp, Homo sapiens
ttttaagataacagtttctaaacactctccatatattatgtttactgatccttttcatatgcattataaatatattttttaatgattttatttattggttttatgccatacaagacatttgcagtttttatgtagaaaattgtgtcttggttaagacctcttctgtctctatattttgtaaatgtggtttccaacattttcttgcaagatttttattctgtgtgttaatttttatgtctttaatccatctggaatttatttttgtatgtggcatgagaaagcagttcgattttactttcttccagatggataaccagttgtgctactcctatt

SEQ ID NO: 94504 - DNA, 334 bp, Homo sapiens
cactagttgtaagagtcaaaggacctaagttcaaattctggctccatcaccaactaggtttatactgttaggtaatcagtttcttcataaataaaatgaaagaatatgttctaattcacagaatcaaataggaccataaaaacattttttaaatgggttataaaaaattataaaatgttaatatatggtaactggtcttgtttggcttttcatctaaaaatcacttaggtcaggcgcagtggctcacacctttaatcccagcactttgggagaccgaggcaggcggatcactcaaggtcaggagttccagatcagcctgaccaacatggtgaaa

SEQ ID NO: 94505 - DNA, 337 bp, Homo sapiens
atagaatcaataataccaaaaacttccccaaaagaaaagcccagagccaaatgccttcactgataaattctataaaatatttaaataattaacagcaattcttcagtaactcttccagaaaataagaggagacaccactacctaaataatccaatgaaagcagtaatgcactgatatgaaaaccagacaaagacatcacatgaaaaactacaaacctatttctgttagtaatatacatgcaaaaatcctcaacaaaatataaggataccaagtgcaacaaaaacagttatattccaaatgatttttttaaggctcaaaaacaattcaacgggcagaa

SEQ ID NO: 94506 - DNA, 339 bp, Homo sapiens
gctcactgcaacctcaatcttgcaggcttaagtgttcctcctgcctcagcctctcgagttgctgggactacaaacacaagccaccatgcctggctattttttttttttttttaagaaaaaggaatctgtactgttaaaaattaaaatggggattaccctttggggaggcgggtaactaaaagggaccatgaaaggggcttttgaaatgctggcaaggtcctgttggttggttggttggttttgaaacacagtctcgttttgtcccccaggctggagggcaggggcgcaatctcggttcgttgcaggctttgtttcccgggttaatgccattctcctgcc

SEQ ID NO: 94507 - DNA, 322 bp, Homo sapiens
tgtttttacaaagtggctgtaccatttttgtattcccactggcagtgtatgagcattccaactgctccatatcctcaccagcacttggtatttttgtcagtctttaattttagtcatcctagtgggtgtattagtgttatctcattgtggattttagttttaatttccctgataactagtgatgctgagcatcttttcatgtgcttgcaggccatttgtacatattcctttgtgaagtttctgttcaaatctatttttttttattgagctgtctgtcatctttggttgcgacagttctttatatatcccagatataattcct

SEQ ID NO: 94508 - DNA, 326 bp, Homo sapiens
tttacatttaatctaattatttatttttaaggcttaagcgtcccatttagttttttgttttttgtttgttctctctagtcttcatttctcttaactgtgggttatttcaacattttttagaattccatctttgcttatctgcagttaatttgaatatatctctttttttattaattaaaacctatttttttgaaattttttagagatagggtctcactctgtcacccaggctggagcacagtggcttgatcatagctcattgaagcctcaaagtattgggctccagtgatcctcccacctcagcctcctgagcagctaagactatg

SEQ ID NO: 94509 - DNA, 291 bp, Homo sapiens
  misc_feature (1)...(291): n = a,t,c or g
gtaatcccagcactttgagaggccgaggcaggcagattgcttaagcctaagagttcaagactagcctgggtaacatggcaaaatggtgtctcaaccaaaaacaataaaaaataagctaggcatggcgacatacacctgtagtgccagttacttggcagaattgcttgagcccaggatgcggaggttgcagtgagccaagatcatgctactgcactgcagacaggatgagactgtctcaaagaaaaaaaaaaaaaaaaaaaaacgggccgcgtnaacntcaacccgggccga

SEQ ID NO: 94510 - DNA, 243 bp, Homo sapiens
atgcctgtaatcccagtactttgggaggccaagcgggggattgcttgagcccaggagttcaccagccctggcaacatatcgataccctgtctctgaggcaggaggattgcttgagcctgggagtttgaggctacagtgagctgtggtcatgctactgcacttcagcctgagtggcagagcgagaccctgtctcaaaaaattgaataaaataaaatatttcaacaggcgtcgacgcggccgcgg

SEQ ID NO: 94511 - DNA, 319 bp, Homo sapiens
ggattatttcacttagcatgatgttttcaaggtacattcatattttagcatatatgagaacttcattcctttttatggctgaataatttcccattgcatgtctatgccacattttgtttatctcttcatctgtcgatagacatgtgggttgtgtctggttgtgtctgcctttcagctattataaataatgctgctatgaacattagtgtaccacagagagttttttttaaagcacaaaataaggcctagacatgaaggaatttataattaggttgttgagagaagaaactcttggaaaattaaccacagaggcaaaaag

SEQ ID NO: 94512 - DNA, 417 bp, Homo sapiens
cttgaacctgggaagcggaggttgcagtgagccgagattgcgccatcgcactccagactgggggacaagcgtgagactccatctcaaaaaaaaaagttagaaataaaagtacaaggagctcaattatgtatttgtttttctgagtttcctattaaatccttattcctagaagtacagtaattaaaattagaaacatttaaaaaacttactatggaaagattatatgaagtaaataggggtgtgattaacacccatatacccattgcactccagcctggcaaaaagagtgaaactttgtctcaaaaaaaaaaaaggtcccaggtttcctttggttttttttatttaaccctttcggcctttaggagcattttaattcccccagttttttttggggcctactttataaaaaccctaacc

SEQ ID NO: 94513 - DNA, 358 bp, Homo sapiens
  misc_feature (1)...(358): n = a,t,c or g
tttnttttttttgttccctgctggggcacgggggggaaaccccgaacaacagcccattaccccacccttggctttaggaaacaaaatccccccccaagcccccccaccctcttaaaaaaaaaaaacattccctcttttttaaaatttttattttaaaaaaaaaaaaaaacgggccccccttttttccccccgcggggcctaaccccaggggttaaaaccctccccccccccaacccccccaaaggggccccccccccccaaagaaaaaataaacccccccccccccccccaaggaaaaaattttcctaagggaaaaagaccccccctgggccctttccccaaaaagggggggggatat

SEQ ID NO: 94514 - DNA, 359 bp, Homo sapiens
ggggtttccccatgttgcccatgctagtttctaacgcttgagatcaagtggttcctgcaccttggcctcccaaattgctgggattccaggcatgagccaccatgcgcccagcccttggcaagcattttttttttttctgattccctatttggtttttggggtttttcctttatggaaatataatttacctgcaggaatctcttttttccctgcagaaaatcttaaatgggcagttagatctattttgacaaatgcatacatgtgttaccattggtcaaatcaagataaaagaaattccctttttccaaaaaaattcttcatgctccttatatagccagcccccgccccacgaccggtga

SEQ ID NO: 94515 - DNA, 340 bp, Homo sapiens
ggggtttcaccatattggccaggctggtctcgaactcctgacctcaggtgatccactcgccttggcctcctaaattgctggaattacaggagtgagccactgtgcccggcctagaaattgcttttaatagctgtttttgctttcctaatgtgaagcaggatccatgttccaaaaatgacattcggctgctgctgtagcatgtggttctagcacatcctgtgtcagcattccatttccacagcgaatatgggaacatgcacatgatggaaactgtagtggctcatgacctgtaacctttgcaagttcctgtcctcatctataaatgaggccagctaaaaat

SEQ ID NO: 94516 - DNA, 337 bp, Homo sapiens
  misc_feature (1)...(337): n = a,t,c or g
taaaaatacaaaacttagccgggcgtgatggtgggcacctgtaatcccagctattcgggaggcagaggttgcaagtcatgccactgcaccccagcctaggcgacagagcaagactccattaaaaaaaaaaaaaaaaaaggctaaatttttaatatcaccttttttcaaattaaaacctccttttgaaaacagcagttacttagttccctacccttttcaataggacatataaagccttgttttttaaaaaaatgccatgaaaaaaaaatctggcgggggggctcacccctataatcccaccattttgggaggggggggcaggcaaataacctgaggn

SEQ ID NO: 94517 - DNA, 417 bp, Homo sapiens
  misc_feature (1)...(417): n = a,t,c or g
ggacttgtgtcaccatcaccacaaagggtacagaacaattccactgcaccaacaaattccacctgtgctgcttttttttaagagtggctccccaccccgcattgagtataaaggctttgattttcatcagtgttgggtcatttattcatttttattgctgagtagttttccatgttaggtaccacaatattcttagccattaacccactgaagcacatttaggttgtttataatttttagtgattatgaataaaactattagaaacattaggtttttgtatgaacataaatattcatctctgtagggtaaatattggagtgaaatggttaggtcatatggtgagtgtatgtttacctttgtaacacagggccaaccttttccagaatgattaattttgttttcccaccagcaacgtn

SEQ ID NO: 94518 - DNA, 407 bp, Homo sapiens
ggaaaattcaaggcctctccatattaaaaactctcaaaaatctgggtattgaggaaacatagctcaaagtgaagagctgtttttgtaccaccatcaagctgttttggttgctgtatccctgtactatactttgaagttggggaacatgatgccttcagctttgttctttttgctggggattgcttggatattagggctcttttttttttggggtccattaaaattttgaagcggcgggctttaatttctgaaggagagcccttgcgtattatgagtggggaggcctcccaccctgaaataatttggtcgggttttgcctttataagaagaggtgatctcttatatcaggagcggggaagagatttccagttggcggggccatcctatgctgattatgagaagagggt

SEQ ID NO: 94519 - DNA, 377 bp, Homo sapiens
ggattcaaactttgtgcccattttcttattgagttgattactttactattgagttaaaatagttctttacatattctggatataagtcctctgtctgatgtatgtgtttggacataatttctcctagtctatggcttctttttcattttcctactgctggctttcaatgaacaaagcaaaaacttttaattttgatgaagtccagtttaccaattttttcttttatgggttttactttttgtggtctatcacaaatatttttctcctatgttttattccagaaattttatagttttgggttttacatttaggtctatgaaccattttagataatttttgtgtatggtatgaaccgagggtcaattttttttccatgt

SEQ ID NO: 94520 - DNA, 482 bp, Homo sapiens
  misc_feature (1)...(482): n = a,t,c or g
ggcaggagtggtattactgggtactgggtcagaggatattgactttttttttctttttgagacagagcgagactccgtctcaaaaaataaataaataaaataaatttcccggggggggggggaccttgttttccccctttcctagggaaattttttgcgcgggaccaaaaagggggggggggggagacccccctcaggggttttcctttttccccgcataaaaacccaaaaaattttttgaaaaacctttttgggggggggggggggggagaaacccaccccctttttacccccttctcaaatcctttttcctttttcccctttcaccccttttaaaaagggttaaccccttcccctttttacaaagacccaaaaaaaccttcaaaaccggggggggccacaccccccggcaaacccttggggggggggggggggaaaaaaccacccctttttaaccccctccctaaaccctttctgctttn

SEQ ID NO: 94521 - DNA, 441 bp, Homo sapiens
  misc_feature (1)...(441): n = a,t,c or g
gacagttccgtttaggacctctnataaacccttgaaccacatacgccagcttggacgaggcccagctaccgagggccaaattcaacgcttttttgaccactttttaacatattataaaaaacgggcccattcttggaaagattgggcggaaatacatgatagcggaccaagtgccaccgaatgaaaaatcaccactgcaagctgactcaggtcttgaacactcactatgtgggccccaaaaggatcctcttgactgggaccccgctgcagaataagctccctgaactctgggccctccttaacttcctcctcccaacaatttttaagagctgcagcacatttgaacaatggttcaatgctccatttgccatgactggtgaaagggtgcacttatatgaagaagaaactatattgatcatcaggcgggtacataaggtgttn

SEQ ID NO: 94522 - DNA, 398 bp, Homo sapiens
ggtttgatgtcttcaaggcaaagaggaaactttaactacaaattggcatttaaggtattttcttcctttttttttttttttttggcccaaaaaaggggctcggaaaaacgggggccgccccccgggggggtcccccaaaaaccaaagggccccttgccctaaaccctttgaaaaccccggggaaaaaacaccccaaaaaaggggtttttttcccccaaaaccatgcccgggccccggcccagggccaacaggggggcaagggaaacccccgctccccaaaggccccaaattttgccttttgtgccccaggcgggaccccaggggcgcaaggggggttaatggaaccccccccccccggggtaaaagggattccccgcccccacccccccgagaatggg

SEQ ID NO: 94523 - DNA, 442 bp, Homo sapiens
  misc_feature (1)...(442): n = a,t,c or g
actaggagtcacccaagagctctgaaggaggtgtacacggagattaatattgttttcatgcctgctaacgcaacatccattctacagcccatggattaaggagtaattctgactttgaaggcatattatttaaggagtacattttgtaaggctatagctgctgtacctagtgattcctctctgatggatctgggcaaagtcaattgaaaaccttcttgaaaggattcctcattctagatgccatttaaaacattggtgattcatgggaggaggttaagatatccacgttaacagaaatgtggaaaaagttgaatccaatcttcatgaatgactttgaggggttcaaaacttctgtggaggaagtaactgcagatgtggtaaagataacagaagaagtanaagtggagtctgaagatgggactgaattcctgcaatctcatgg

SEQ ID NO: 94524 - DNA, 384 bp, Homo sapiens
gggggctccttgattcatgggttgcagaatggatgttgtggtatgggcatatagacaatggtcatctgctttcatatctccctcaaagctcttgggtgactaggtacactgtcaatcagcagtaatattttgaaaaaaatatttttttactgagcagtaagtctccacatagggcttcagtaaaccatgccgtaaacagatgtgctgtcatccaggctttattgttccatttatagagcacagatagaatggatttagcataattcttgagtaccctaggattttcagaatgataaatgagcactggcttcaacttaaagttaccagctgcattattccctgacgagaaagtaagcctgtcttttgaagctttgaagccaggcg

SEQ ID NO: 94525 - DNA, 416 bp, Homo sapiens
ggcacaattacattttcatcacccccaaagaaatcgcaaacctctgagcttacacacacacacacacacacgcgccccccgccccaaaagggtggtggtggtgagaaaaaataaactgggtttgtctctggcgggggggctatttggacttgaacgggaatggagccatacaaaacggaaacgggggggggtgacttcatccacttatggggaggtttttaggggtcatacatgctggagcccatgtgagagcttcgtttttttttatggattaaaaaacatatatgggggggcacccacagggggtctctcctgtaatcccaacactgggagggcgggggaggcggatcatgaggtcaggagatggagaaaagcctggcccacatggggaaacctcgtctctactaaaaaaacaa

SEQ ID NO: 94526 - DNA, 412 bp, Homo sapiens
gggtgtgtagctttatttctgtctgttccattccattggtctatgggtctgtttttatatctgtaccatgctgttttggttactgtagcttccttatagtatagtttaactcaggtaatgtgatacctcagctttgttttatttgcttaggattgattttttggttccatatgaattttagaatggattttttcttttttttttttttgaaaagggatttttgttgggtcccccagcttttgggggcggtggggaattttaagttaattgaacccttggcttctggagtaaaaccatttttctggcctaaccccccaaaaaagggggaataaagggacccccccacccttccccccttattttttgtatttttaaaaaaaggggggtttatttttttaacccgggttggttt

SEQ ID NO: 94527 - DNA, 417 bp, Homo sapiens
  misc_feature (1)...(417): n = a,t,c or g
aagaacagacacatagatcaatgcagtggaatagaaaggccagaaatagattcacacaaatacagtcaactcatctttgacaaaggagcaaaggtaatttaatgaagaaatgataaccttttcaacaaatggtactttaacaattggatgtccacatgcaagaaagataaatctagatacagatctaacttatctctttcaaaatggatcacagacttaaccataaaacataaaacttctagaaaatagcatgggaggaaatctaggtgaccttgaatgtcacaatgaatnnnnnnnnnnnnnnnnnnnngtaggatccatgacaaaaaattagtcagttggactttattaaaattgaaaacatttgctctgagaagggcataattaagagaatgaagagtcaaaccacagactaag

SEQ ID NO: 94528 - DNA, 443 bp, Homo sapiens
  misc_feature (1)...(443): n = a,t,c or g
ntagatttcgattacaaccatgaccacgactacgccgagcttgggacgaggcccgggtctgtgggccagggctcccctgacccccagtttacccccagcaggatgggtagggaaggggaagggactcatagcatcctgtgatgctcctccctcggcatgggtgtcatcgcagacctgagcacagaccccactgagctggaaaagagggctctggaggtggctgggcccgatgggcaggccagtgccatatcacctgcctctcccaggaggaaggccggtgatggaggccacaggagggccttgccaggctgcacctcgctcactggggaaaccacaggaaaaagtggggaggcagggcaggatggcaagccccccggcgatgtcctattgggccctacagccttcctggctctggacctgggagcggagagtccatgatgggg

SEQ ID NO: 94529 - DNA, 404 bp, Homo sapiens
ggcttttcatgttcttggaattttttttttaaaagccacggtcctgctgagtctcccaggctggaatgcagggttgctatctcaaggcactgcaagctccgcctcccaggttcacaccaccctactgagtagctgagactactggagcctgcctccacccctggctaattttttgtatttttaagaaacaaggggattcaccgggttaaccaggatgatctcaatcccccaacctacagagatgcccggcttggcctcccaaacggcaaaattgatttttttttaaaaaccagggtcctggtggaatcccaggctgaagtgcacgggctgttcacaggggggatcttcacatactggagccctgaactcctgggctcaaatgatactccctgtatcagcctcct

SEQ ID NO: 94530 - DNA, 397 bp, Homo sapiens
aaatctggtgtttagtgtttactgcatccatcttatctagatcttctggataacttacagcttcatcttgcacttttatgttatggagatggcttctttccttaaacctcatgagccaacctttgctaccttcccactgcaggttcccactgcagtttccctctgcggtttctctcagccttcgtacaatcgaagagagttagggcccgctctggattacgctttggcttaagggaatgctgtaactgggttgatcttttatccagaccatttaaacttactccatatctgctgcaaaggtgttttgctttcttattcctgagagcactggagtagtactttcagcttcttttaagaactttttctttgcattcgcaacttggctgtttggcacaaa

SEQ ID NO: 94531 - DNA, 452 bp, Homo sapiens
  misc_feature (1)...(452): n = a,t,c or g
gatagcctgataccgttgganctgattaaagtcttgacctcattacgccaagcttggcacgaggcctcgtgccaggcagaggaatggatagagtggatggtgggaatggtctgaggccacgaattggcttgaggggtttaggaaaatgctatcactgcaggaggctgggctgtggaaagggtggcttccaattccttaatcctgagccttggaatggaaagggaaggccggccatagacaacatagggataaatggtcccagtgcaagaggaggagctgaatggagtggaatggcgctgtgggcgtggtcagactggggacatggagagaggatgtgtccaggggaaggccaaggctgacactgaccaaacagagggcacctcttgcctcttctgaggaaggtgggaacgtggaccgtatgcttacagagagtcacgcttcaattaaatccc

SEQ ID NO: 94532 - DNA, 397 bp, Homo sapiens
ggcaagagatgccgccccagagcccggcgaacatctactacaaggtctgagtgcccggcacggcctcaggcccccgagggacagtcggcctggaccggacctctcctttcgcccccacaccccctccccttgccagctgtgcccacctttgtatttagttttggagattcttggcttttataatccccctttttccctgccccctgggcttcggaggggggtgcttgtgcccctaacccccatgctcttgtgccttccccctctggccaggcctctgggctccgtgggggcgccccttcttggaaggcagggctggacactgatggacagcaggcagggagacagtcccctggccctgcccctccctcgccccccttgccaccttcccaggactgct

SEQ ID NO: 94533 - DNA, 450 bp, Homo sapiens
gactacgccaagtttggcacgagggggaaatgccaaataaaactacattgatatatcactacacacctatttgaattaccaacataaaaaatactgataacaccaaaagtttgtggggatgtgcagaggccagatcattcacacactgttgatgagaattaaaatggtaaagccactctgggaaacagtgcagtagtatcttatataatagaaattacaacttccattcaacccagcagttgcactctggtagcatttgtcccagaaaagtgaaaacttacgtcaccgaaaaaataaaacccgtagttgaatgttcatagtcgtttatttgtaacagcccaaactaaaaacaactgaaatgtccttcagcaggtaaatgcttaagcaagcctggatatccatgccatggaatacctacttagcaataaaaaggaagaaggtgttgataag

SEQ ID NO: 94534 - DNA, 390 bp, Homo sapiens
aaaacttaaaagttccccaggtgttgaacgaaaagatgacccgagtcagtgcaatagaactatgccagtagttaaaaattagaaaacacaaagaagtgctgggactacaggcatgagccaccacgcccggcctgcttttttatttttagtcacatttttgtctttcgtcttttatttctcatcatgttgatgatttattcttttttcttttttctttttttttttggaaacacagtttggttttgtcgcccaggctggagggcaatggcaccattttggttcactgaaacttcacctccggggttcaagcgatcctcccatgttcaagcaatcctcccacctcggcctcctgagtagccgggaccgcaggagcacgctacagcacctggt

SEQ ID NO: 94535 - DNA, 331 bp, Homo sapiens
tgtgggcaaagattttttaagttgcacccctcaagtatgggccttcaaaggaaacaatcaacaaagtgtaagacaatccacagaatgcaagaaaatatttgcatactacccatctgacacgggattaataaccagaatatatgaggagctctgacgactcaatagaaaagaaaaattaaatagttcagtttacaagtatgcaaaagatctgatttgacctttttcgaaagaagacacacaaatggcaaacaggcgtattaaaaaaagtgctcaacgtcattgattatcagagaaatgcgattcaaaactacaatgagggtcgacgcggtcg

SEQ ID NO: 94536 - DNA, 364 bp, Homo sapiens
gttttatatacctcattctgacacctgcatatagtgtgggaaattgctctgcatttgacttaatcaaaaaaaaaaaaaaaaaccgggaacccatttccttagaaacctggggcagaaaaattgtttaaccccaggaggcaaaggttgcagggacccaaaaccttcccattgccctccacccggggcaacaaaccccttttaaaaaaaaaaaaaaaaaaaaaacccggggggttttttttttttgggcccccttttttttttttgcggaaaactgggaccggtttttttttttgcccaaatttttccaatctttaaaaacccccccaaaaaaaaaaaaaaaaaaaaccaaaaggggccccccccc

SEQ ID NO: 94537 - DNA, 357 bp, Homo sapiens
ggaaaacactgtacattcatgacaatgagaatgaatactgtgaataacttcttgatatcattatgaaaataatttgatctcataggtcttacaaacctctaagacacccttgatctagtccaatctcttacttctcacatgttattaaggtgcaaactagggtcaatagagatgcaatgtcttgcctaaaaaagcaatagctggccgggtacagtagctaatcctgtaatcccagcactttgggaggctaaagagggaagactgcttgaggttaggagtacgagacaagcctgggctacagagcaaggcaggagaatggtgtgaacccgggaggcggagctcgcagtgagccgagat

SEQ ID NO: 94538 - DNA, 353 bp, Homo sapiens
aatatatatgcctaggagtggaattgttgggtcataggattgattatatatctttaaactgacttggtttcaccaaatccttgccacaatttggtatatatctgattttttctcctttttctaggctaatgaattcacagtagtatcttttgatttgcatactcctgattggtggagaggccaacagtttttcatgtttcttaaccatttgtatttcttctgagaaacatctgttcacctcatttgcccattttctgtttatcatcttgtttcttatacatttatgatggttgtcttctcgttactttatgttagctgaggaaaagttccctccacccaaattctcttgcctt

SEQ ID NO: 94539 - DNA, 935 bp, Homo sapiens
gaagtttgaaaatagtttattccatactctttgttgtctgcatatttgtcaatggtttcttttggtgtgcagaagttttttagtttaattaggtgttaatttttcacttttatttttgttgcattcacttttatggtgttagtcataaatcctttccagaggccagtgactagaacagtacttttttgatgttctacgatttttatagctttaagtttcacagttaagtttttaatctattttgaattacattttttatatggtgagaggtacagtttcaattttctccttctacatatgattaaccagctttcccagtaccatttgttggatagacaatttttccttgtttacttctgttgactttgtcagaaaaaagttgggtgtagaaatgtaaacttatttcagggctttctcttctttctattggtctacatgtgtatttttgtagcaagccatgtaatatggattactgtagctttgtagtacaagccaggtaatgtgaggcctccaggattgctttgttgttaatgttgctttggctaaatgggctgttttattcttccatatgacttttagaatggttttctttttctaattccataaaaagttgcatttatagtttgagagaaatagcacttaatctgtaagttgctttaggcagcacggacattttaattatattgattctttaaattcatgagcatggagtgcctttttacttatttgcgttgtctctattttttttcagcagttttgtagttcttgttgtagagatattttacctccttgatttaatgtattactaggtacatatttttttgtttgtagctattgtaaatagaaccatgttctttttttctcagcttgaatattattggtgcacagaaatgctactcatttgtgtatgttgattttgtatggtgagactttgc

SEQ ID NO: 94540 - DNA, 244 bp, Homo sapiens
gccctttgtgactatcctttttacttagcatactgttttcaaggttcatccatgttgtacgtatcagtacatcattcctttttgtgactgaataatattccattgtgtggatataccacattgtttattcattcaactgatgagcatttggattgtttctcccttttgactgttatgactagtgctgctattaacattcatgtacaagtttttgtttggacacctgttttcgtcgacgcggccg

SEQ ID NO: 94541 - DNA, 255 bp, Homo sapiens
gcaaggttgtggagaaaaaggaacgtttttacactgttggtgggagtatcaaccattatggaagacagtgtggtgattcctcaaagacccagagacagacataccttttgaccaggcaatcccattactgggtatatacccaaaggagtatcaatcactctattataaagacactagcaaagacatggaatcagcctaaatgccaattaatggtagatgggataaagaaaatgtggtacatagtcgacgcggccg

SEQ ID NO: 94542 - DNA, 342 bp, Homo sapiens
gttgaatcagtctagtatgcctggaataaatcctactttgttggattcagtttgctaatattttgttaaggagttttgcatctatgctcatgagagatatgtttgtcgttttcctttcttctagtacatttttctggttttggtattaggataatgctggcttcatcacgtgaattagtaagtgttccttttgcttctgttttctggaagagattgtagagaattggtatttcattctcaaatgtttagtagaattcaccctagagcccatctgtgcatgatgctttttatttttgaagattattaacttttggttccatttctttagtatatatggatcca

SEQ ID NO: 94543 - DNA, 349 bp, Homo sapiens
gcccaacctccattcatactctttattctgcatcccagtttactgtattttctcttcctaaagtcagttaacagaagacactaaaaacaacttagtttcagggattcattttttgcttcttttttttttttaagcggcaaaatcttgctccaggatcaagggcaggggcccaatcatagctaagggtacccctgaactcccgggcttaagggatcctcccacctcacccacctgagtagctgggactaagggggggggcccccatacccagctaaaattcatttttatagccaaataattttatattagtttttaacacaatggcaaattttgcagtcgacgcggccgc

SEQ ID NO: 94544 - DNA, 352 bp, Homo sapiens
gggccttaagaattatgctaaatctactttgcctgtgctctataaatggaacaactaaagcctgaatgacaacacatctatttacagcaatgtctactgaataatttaagcccactgttgagacctactgctcaggaaaaagattcctttcaaaatattacagctcatggacaacgcacctagtcacccaagagctctgatggagatgtacaaggagattaatgctgttttcatgcctgttaacacaatatctattctgcaacccatggatcaaggagtcatttcaactttcaaatcttattatttaagaatacattttgtaaggctataggtgctatagatagtgattcct

SEQ ID NO: 94545 - DNA, 334 bp, Homo sapiens
  misc_feature (1)...(334): n = a,t,c or g
gtattattagattgatctgtttttcttatgttgaaccatctttggaataaatcccactaagtcatggtgtgtattccttttaatatgcagtcgaacttggtttgttaatattttgttaaggattttgcatcagtgttcattagaatattggcctatagnnnnnnnnnnnnnnnnnnnnnnnnnnnnnnnnnnnnnnnnnnnnnnnnnnnnnnnnnnnnnnnnnaaagtattctcttgaggtttttagaaaagtttgaggaggtattagttctttaaatgtttggtagaattaaccagtggaagccatcaggttcaaagttttcctttgttggga

SEQ ID NO: 94546 - DNA, 382 bp, Homo sapiens
  misc_feature (1)...(382): n = a,t,c or g
cttgtcttgagatccttggtgaccctaccacagtactcacattccaatgaggccctatcaaaaaccagccttaggctgtgcacggtggctcaaacctgtaatcccagcactttgggggtgggaggatcgtctgagcccaggagtttgagaccagccagggcaacatagtgagatcccatctctacagaanaaaaaaaaaaaaaaaaaaaaaaaggccccccccctcctttaacagaaaaaaaattttccaagtaagaatttgggccagaaaaacttggggagctgcttttaaccccccggaaaaaaaaaaaattcggcagggggcccccggccccccggtaaaaggagttttttcaccaccctttttttttaaccataaggn

SEQ ID NO: 94547 - DNA, 294 bp, Homo sapiens
  misc_feature (1)...(294): n = a,t,c or g
ttggaggactcacatcaccccatgtcaagacttactatcaagctacagtgatcaagacagcatggaatgggtgaagaggtgtatgtatggatcaataaacaaaacagagaatccagaaacagatccatgcaaatatagtcaactgatgttttcagaagttacaaaggcaattcagtgaagaaaggatagtcttgtcaacatagagaactggaacaactgaatgtccatacacaaaaagnnnnnnnnnngaaagcatctcaaccaatacctcacgccttatacaaaattaatttg

SEQ ID NO: 94548 - DNA, 353 bp, Homo sapiens
  misc_feature (1)...(353): n = a,t,c or g
atttgataaaggcattcttgatctctgaatgtgaaaaggaagtagaacagccgggcgcggtggctcacgcctgtaatcccaaagtgctgagattacaagtgtgagccaccaccacacccgcccagccgatantantaataattgaaaataaaaacaactttcttttaggtcgggcgtggttgctcacccctgtaatcccaacactttgtgagcctgaggtggtcatattacgacgtcaggagttctataccagcctggccaacatgatgaagccccatctctatttataaaaaaaaaaaaaaaaagagggtaggcgagcggaaaacaagactttgccctttttttttgtttta

SEQ ID NO: 94549 - DNA, 347 bp, Homo sapiens
agggatcctgttgattttttggggcttttttttgttggggggcccaagagccaactgtttctttcataagggggttttttcaccctccctggctgcttttgaaaaacacgggggaaaaaattttttttaaaaggggggggggggttttttttttttccaaaaaaagggcagggggctttttaccaaaaattgttttttgtgaaccccccagggggaaccgaaaaaaaaggggggtttggggccccctttttttttggggggaaaacatttggtaaaaaaaagggggggggggttttccccaagggggggaaaagggaaaaaaaacaaggggggtggaaatcccccgg

SEQ ID NO: 94550 - DNA, 379 bp, Homo sapiens
  misc_feature (1)...(379): n = a,t,c or g
gctgagctcatttccagtgtctggtttgagttctgaccctaaaaatgctatttaataaaatgctcttattttggatacatcttatgcatattttaaaaaacactctttatgaaaaacatctttgcatcttaagtttatttgctttgaaagctttaagncttttttttttttttttttttttaaaaaaggaagtccccttttttcccccaactggggggccaaagggggaccctggtttaagggcccctcccccccccgggtttaaggaatttttctgccttaccccccggaggaggggggcttaaaaaaggcggcccccctgccccactaatttttgggggttttttaaaaaaaaagggggttccccctgggggcctgg

SEQ ID NO: 94551 - DNA, 331 bp, Homo sapiens
agacgttgcagtgagccgagatggcaccactgcactccagcctgggtgacaagagctagactccgtctcagaaaaaaaaaaaaaaaaaaaaaaaattttctctgggggaaaaaaaagttcctttgggaaaaaattttttggaaaaaaaaaaaaaaggaaaaatcttttttggggaaaaaaaggtttaaaaacttttataaccccctttttggaaaaaaattaaatcggaaaaaaccttttgtaaaaaaaaaaaaaaaccttgtggaaaaaaataacttgtccccaaaaaaggtcaaccgatttaaaacaattttttatatataaaaaggcc

SEQ ID NO: 94552 - DNA, 328 bp, Homo sapiens
gccaggctggtcttgaaatcctgacctcaggtgatctgcctgcctcggcctccgaaagttctgggattacaggtgtgagccactgtgcctcggcctctcaaagtgctgggattacaggcatgagccaccacatccggcccaagtggatttctttatacttaggtttttggtctttcaataagaatgttttacacttcttttgtgcctcctctctggagggggagtctatgaacaatgagttactgagtaaaaaaaattgggaatttttggataaaaagttacatggaagtacaaagttgggggggaatcatgtatgtgttaacttcat

SEQ ID NO: 94553 - DNA, 335 bp, Homo sapiens
tgccttttacatttttaatggcatcttttgtcatgccacatttaaaattatttatgtctttcagatgtcttttttttttttttttggaaaaaaattttctttttttttccccaggtgggggggcaggggggcaatttgggttcattgaagcccccccctcgggggtaaaagaaattttcccccctaacccccccgaggggcgggaataacgggtttggcccccctgcccgggttatttggttttttaagaaaaaacggggttcctcattgtggggggggggggtttaaaactccggccctaggggaacccccccgactcgccctcccaaggggtg

SEQ ID NO: 94554 - DNA, 360 bp, Homo sapiens
ccctaacttgaatgctgtgcaatctatgcatgcaacaaaattgcaaatgaaccccataaatttgtacaaataaaaaaaggcattagtactaatccttcacaaactctttccaaaaattagtccactttcactaagggacagaacaattaggcaaaagagtaatgaaggatacattaagacaacattttgaaccaactatacttaacaaaaatctatgtcacttcaccaacaatagcaggatatacattcttctcaagcacacaaaaacagctcttggaccaggagcggtggctcacacctgtaatcccagcactttgggaggccaaggcatgcagattacgaggtcaggagatcaagact

SEQ ID NO: 94555 - DNA, 333 bp, Homo sapiens
  misc_feature (1)...(333): n = a,t,c or g
ggagaatcgcttgaagccaggaggcagaggttcatctaaacccgagacagcgccactgcactcaagcctgggcgacacagcgagactcanaaaaaaaaaaaaaaaaaaaaaaaaaaaaaaaaaaaaaaaaaaaaaaangggggggggggggggggaaacccaaatttttgggggggaaaaaggaaaaacccccggggggttttttttgggggggggggggccccctaaaattttttttttttaaaaaaagggggggcctttttttaaaaaaaaaccccccccaaaaggaaaaggggggggcggggcccctggtgaaaaaaaattttataaaaa

SEQ ID NO: 94556 - DNA, 327 bp, Homo sapiens
agaaaatgtgcaaaagacttgaacagacactctaccaaagaagatatatggataagtacagaatgtatttaacattgttagtcattaagaaaatctacattaaaaccacgagatatgccacatatctattaaaatgactaactttataaaaagaatgacgatatcaagtgttggtgaggatatggagtaacaggagctgtttttcacttccattgggtatctagaatggtacaaccacttttgaacaattggacagttcctagaaacgttaaatttacacttaggctaggcatggtggttcacacatgtgatcctagcactttggga

SEQ ID NO: 94557 - DNA, 339 bp, Homo sapiens
tggaaaactaatgagccaccgtgcctgtccttggactatatatttttaattctgcttttgcccagtcacttgagtatgcttttaatcagcagccaatacatttcttatcagaatgttctgataggggctagaggtcatagcaacaaattcaaagtgcctatcctttagtaaccttaagtggattaatgttttagaaaagatagtcaagactgggcacagtggctcacaagccctgtaatcccagcactttgggaggctgaggcaggtggactgcttgggccggggagttcgggaccagcctgggcaacatggagaaaccccatctctacaaaaaaaaaa

SEQ ID NO: 94558 - DNA, 343 bp, Homo sapiens
cccacttaagcctataagagtaggatcacctattatcagtagaaaccttggatctactaaaaattaaaattaaaaaaataggcatggttgggtgtgcctccactctcagctactcagaaggctaaggtgagaagatgacctgagcccaggaagtataggctgcagtgaaatacgatagcatcactgcactccagcctgggtgacagagtgaggccttgtcctctaaaaaaaaagggattattaaaaagggggggggggggcgggaaatacgattttttaaattggaaaaccggaaaaaccccggggggtttttttaattgggggtgggggccctttttaattt

SEQ ID NO: 94559 - DNA, 413 bp, Homo sapiens
ctagcagatcgcgagcgcacacacgtgcacacatgtacacacggatacacacacacacacacacacacacactgcatatgtgagcgcgcccctcgcactgggtctcaccttgcaccttgttcaggattttatatgcgaagagactgttatatagattgttttcctttttttccaaaacactttattctttaaaaaaaaaaaaaaagagaaatgcgggggggcggggaggcacaaacccgggaccccttttttgtcggcccaccttttggtgggatttatgagcggggggccctgccccaaaggtctggggggggcccagtccatgaccgtgggggggtgtatataagggggagagggggaagcctgcgacattttttctgccctacctcataaaaacatttcgtgccccattg

SEQ ID NO: 94560 - DNA, 428 bp, Homo sapiens
  misc_feature (1)...(428): n = a,t,c or g
attttgtttttgttgttgaaataaagttttgctagatagaggattcttgattgacaggtctttagagttttcttttcagcattttaaatatgccatcccactgctttttagcccccatatggacctgtgcatgttatcctagttggagttcacagagctttttggatgtgtagattaatgtttttcatcaaatgtgggaagtttgcagccattttttttttaatggtttttctctttctttttctttctcctcaccttctgggcattccattataccaatgttggtatacccaaaagtgtcccaggtttctctgagactctttatttctcgccattctatttttactctccttttcagattatattatcttttcattatcttcaagntcactgattcttttttcttgtagttcaaactgactgttgag

SEQ ID NO: 94561 - DNA, 388 bp, Homo sapiens
tcagagcagactcttcttaaataagggaaagggcactttctaagaggggcagctgatactcaacttcagcttagtgttgtcaacgcctctggttttgtaagggaaggcagaagtttggatatttattgaaacccttcaatgtttatgtatcagcaactaatttttttttaaatgtaaacaccacaggggcatggtggctcacgcctgtaatcccaccactttgggaagcaaggcagaagaattgcttgagcccaacatggcaaaacctcatctctactaaaaatacaaaaaattagccaggtgtggtggcacacacctgtagtcccagctactcaagaggctgaggtgggaagataacatgagcctgggagttcaaggctgcagtgag

SEQ ID NO: 94562 - DNA, 419 bp, Homo sapiens
tggacatttcaaacaggtatatccaagataaggagtatggttggagtctaaggcctaacaaattagcttagtttaacgccatattcctattctagaacatgagttgatgataatttttgaaatgggtaagttagcttttaatgatgttttcaaggctatattgcagtaagtttcttttcttttcttttttttttttttggaaaggcagttttattttttttccccaggtgggggggaagggggggaatttgggttaattgaaccttttccttccgggtttcgggaatttttcttgcttaaccctctggggaggtgggattaaggggcccccccccccctccccgcttattttggttttttaataaaaaacggggtttccccttgtgggccgggggggcttggacctccggccctcaaga

SEQ ID NO: 94563 - DNA, 401 bp, Homo sapiens
cggggtttcaccatgttggccaggatgatctcaatcttctgatctcgtgatccgcccacctcggcctcccaaagtgctgggattacaggcgtgagccaccacgcctggcctcacctgggactcttaagtgatctattcagggacaaaatcaggatggtagtgcacagacaggatcttgacattgatctggaataacgaatcatgctattttgttatccagaattctttgacaatttttgtcttgccctttccctttcaacccttcctttaaaaaaagaaaacgaaagtagaaactattctgatctttattaaatggttaatagactataatgacagtcagcaagaaaaatttttctattccttctaggagggcttagaaagttcatgttgcaacttagctt

SEQ ID NO: 94564 - DNA, 356 bp, Homo sapiens
tttctttaagtttataaagaaggataagtgtttgagactagcttgttcaggaacaaaaaagaaatagtgaaggggacttctttaccagatttcagaacctattttaaacctcttataattgaatcaatatagtgtctgcatgggattggacagaacaatgcatggaacagagtagggaatttacaaatagatgcaagtgtgctgaaaatttaatatatgagaaaggtggtatttcaattcagtgggtttatttaataaataatgctggagtataactatccataaggaagaaaagaaaattagaccattgcattgtataaaaataaaggggactaaagactttaagaaactttcag

SEQ ID NO: 94565 - DNA, 348 bp, Homo sapiens
attccagctactcaggatactggggcaggaaaatcacttgaaccaaagaatcgcaggttgcagtgaaccgaaatcacgccattgtattccagcctggctacagagcgagactccttctgagaaaaaaggagaaaacatctgtgaatttaacctttttaaagaacgccctaagaaagtggggtggcttttgacgtcaagaaaaaatgaaaaaaaatctccagctggggtgggggggctaacccctgtaaccccgcatctttgggaggctcaaaagggtggattttttcatcccagggggttcaaacctgccggggcacaacagggagaccttttctttacaaaacaacc

SEQ ID NO: 94566 - DNA, 350 bp, Homo sapiens
tagccactgcactccagcctgggtaacatagtgagaccccatctattaaataacagtaataaaaatgacaccaccaaatgctggtgagggtgtgaaaaacctggatttctcatacattgcatctgggaatatatgatggtatagctactctggaaaacagattggcagtttcttataaaaccgaacattcacttaccatatgactcagcagttgcacacttaggcatttatcccagataaatgaaaacttttctacaaaaactttcccatgaatgttcatagcagctgtattcctaatagccaaaaacggaaaacaactcagatgtccttcagtgagtaaataaaccatg

SEQ ID NO: 94567 - DNA, 425 bp, Homo sapiens
  misc_feature (1)...(425): n = a,t,c or g
gatccngnnaattcgcggcgcgnncgtgcgactctttgcctggcnnttcagcncctcccagaaagtgcnntgggaattanccaggcnnatgtagcctctnnngcacccggcgtggggcttttggcgcannttctaatnnaggtatgtgagtggagaatcttgtgtttaaaatttgcagttcccttaataaccatgagcggntagagtgatctttcctatgcgttactctgcgcatctgtaaatcntttagtggaggtgtgctgttcaagtctntttgcccattttaaaacaggcaacttgtttgggtgatttctttttgttgagttttaagagttctttgtgtattttggataacagctctttatcagatataccttttgcaaatattttctcccagtctgtggcttgtcttctcattctcttga

SEQ ID NO: 94568 - DNA, 360 bp, Homo sapiens
gtggaattttccagaggctactgaacgtgtgataatgttatcactctgatggctaatggaatgtgtacttgtgattaggttttacaattttttcaatttatcctataacttaacaacaacaacaaaacaattaaattaagaaattggcagaggactcgaatagagatttttctaacaagatatacaaatggccaataagtaaagatgctcaacatcattagtcattatggaaatgcaagtcaaagtcacagtgagatactactacctcacactcattagtattgctattataaaacaaaaaaaaaaacaaaaccccaaaaaataataagtagtggcaaggaagtgaaaagattggagcct

SEQ ID NO: 94569 - DNA, 360 bp, Homo sapiens
attgtttgaacatgggaggtggaggttacagtgagccgagatcacgccaactgcactccagcctgggcaacagagcgaaactctgcctcaaaaaaaaaaaaaaaaaaaaaaaaaaggggggggtttaaaaaacccctttttttaaaaaaaaaaaaacaggggttttttggaaaaaaaattttttcccggatttaaataggggggggggaaaaagggtttaaaacccttttgtgggccaaaaaaaaagggagggttttaggaagggggggaaattttttaaaggaaaaaggacccctttgggggggggcccccttggttaaatttaaaaccggtggggccttaaaaaaagggaccccccaa

SEQ ID NO: 94570 - DNA, 377 bp, Homo sapiens
acaaatggcaaataagcacatgaaaagcttttcaacatcaagtgcctttatgaaaatgtagattaagaacaaaatgagatctcatgacacatgtattagaatggctaacataaataccaacgatactatgttggtgaggatgcagatcaaataaaattctcatgcactcttggtggaatgcaaaatggtacaactactctagacaatggtctagaagtttcttattaaatatacacttaccatgacccagcaatctctctcctaggcagcataaaaaagaaatcaaaattttgtacttgaaatgaaaatactgtacttgaatgttctattcataatgaacccaaactggaaacaatctaactggtattccatgggtg

SEQ ID NO: 94571 - DNA, 457 bp, Homo sapiens
  misc_feature (1)...(457): n = a,t,c or g
ataaatgaaatagaggccaggaatacaacagaaaagttcaacaaaacagagttggnnnnnnnnnnnnnnnnnnnnnnnnnnnnnnctttagttggactaaccaagagaaaaaaaagtcaaaatacatgaaggagacattacaactgataccatagaaataataagatcataaaagactactctgagtaaatatatgccaaaaaattgaacaaannnnnnnnnnnnnnnnnnnnnnnaaaacatacaacctatcaggaccacatcatgaaggaacagaaagtctgaacagacctataatgagtgaggagattgaatcactaagtcaaaacctcccaacaaatagaagcccaagagcagacagcttcacgggcaaattcctctgaacatctaaagacgaattaccaccaacccttctcaaacttccaaaaaactgagcaggagagaacacttcccagat

SEQ ID NO: 94572 - DNA, 360 bp, Homo sapiens
gaggctgcagtcgagatcgcaccactgcactctagcctgggcaacagagcaagactgtgacttcaaaaaaaaaaaaaaaaaggaagggtttttgctccccccaacctaaaagggaaggaggggggccttgttgggaactttttacctgcagaaaaaacctggaaaaggggggggggatttgggggggcaatgaacagtggggctggggaaagcaaaaaaagtgaaaaaaaggaggggggggggggagggccaccacagaaaaaggggcccgggccacctttgacccatactgggggaaaaggacctgcatttggccggcctttggggtttatgtctgtaatcccaccccttggggaggcg

SEQ ID NO: 94573 - DNA, 363 bp, Homo sapiens
cttgaagtcaagagttcaagactagcctggccaacatggtgaaaccccctctctactaaaaaaaaaaaaaaaaaaaaaaaggggggccggggccggaaatcccaaattaaaaaatggaaaaaccggaaaacccccgaaggttactttaaagggggcagggggccccaccaaaatttttttatttaaaacacggttgggccttttttaaggaaaaaaaaccccttaaagttaaaatttgggccgggaaccctgggattaaaaaaatttttaaaaggacaaaaaaaagggcccatttttttttgggaccaaaatttttaagaaaaaaaaataagggggggtaattaaaaagcttggaactttttc

SEQ ID NO: 94574 - DNA, 188 bp, Homo sapiens
ggagtgcagtggtgcaattataactcactgtagcctcgatttcctgggctcaggtgattttcccacttcagcctttcaagtagctgggattacaggcgtgcaccaccatactcggctgtttttttttttcgttgggtttttttttaatttttaatttttaaagaacaaatgaggtcaacccggccgca

SEQ ID NO: 94575 - DNA, 301 bp, Homo sapiens
  misc_feature (1)...(301): n = a,t,c or g
cggaggagtcagagctgcttgggaggctggggcgggaagatgacttgaacccaggagttcaaggctacagtgaaccatgatcaagccactgcattccagcctggatgacagaacaagatattgtctagatgagtgcgtgtgtgtatatatagatgtgtgtgtgatacatctctatctctgtctctgtctctctctctctctctctctctatatatatatagnagctagtattattattcttgatgccaaagcagtggaagtatatataccagggtatataagagcttggtcgacgcggccg

SEQ ID NO: 94576 - DNA, 375 bp, Homo sapiens
tgggactgatgaatatatactcattgccttgattgtggtgatggtttcatgggtgtgccttttttttttttttgaaaaaaaagcccccttttgtcccccagctggaaaaacgggggccaattttgggttaagggcaccccccccccccggaataaaggaaattttttggccgccctaaccctctgaagaagggggaaccacggggccccaaccccagccggggtaatttttggttttttaaaaaaagggggggttcccccttgtgacccaggctgtttggaacccccggccctaggggaatcgcccgccctaaccccccaaaggggtgggaataacaaaggggaccccccccccccaccggggggtatttttttt

SEQ ID NO: 94577 - DNA, 336 bp, Homo sapiens
cttggcctttctgtgcaggatttcttcctctaacatatggggtatgaccttctctggaatgaggatcttgtgacccatcatcataaaggcggggaaagattagagtcctgccttgggcaggtaaaaggagggcaggagaaagtcagagacagagattctgttttctgaggcctgctcctgaggcctaaagtgctccaacattataacaaaagactgttaactccaaaaggctatgacagttaggagccaggaacctgagacgaaaacatctatatatatgtgtcaatatcacaacagtaaagagaaacttctgtctcctttttaataatttacatg

SEQ ID NO: 94578 - DNA, 371 bp, Homo sapiens
ccaggctggtctcaaactcctgaccttttgatccgccctccttggcctcccaaagtgttgggattacaggcatgagccactgtgcccggccttcctttctttttaataagggtatggatctcaaagccattgccttctctaaaaatctggttctctgttctggaagaacctataaactttgccttcagttggttttctttttcaaaagggaccaccaggggtaaaggataaactctaattaatttttaaaattaaattgggatctatagtcaggatctgagattaataggatgaattttggttacaaggaacagtgagttaaaaagtagggggcctatgttctatgtatcatcacatgtttgtgataatca

SEQ ID NO: 94579 - DNA, 337 bp, Homo sapiens
aaagaaaatcagcatgaaccttgaacactttatgctaagtgaaagaagccagtcataaaagactacatattatatgatcatatttacatgaaagctccagaataggcaaatctataaagacagaaaggatatatatatatatatatatatatatatatatatatctttttttttttttttttttagagaggaagtttttgtttttgttccccaggggggaggggggggggcccttttaagttaaggggacccttggcctcgggggttaaagaaattttctttttttattttcccaagtgggtgggataacgggtttacccccctttgccggggtatt

SEQ ID NO: 94580 - DNA, 464 bp, Homo sapiens
  misc_feature (1)...(464): n = a,t,c or g
tgatctacctgccttggcttcccaaagtgctaggattacaggtgtgagccaccgaacccatctttactcaccgataatatggtcaagtttcaaaaaatattttagccattctaataaatgaggagtggtatcccattgcagttttaatttgcatttttctgatgaatgaatgcaataatcttttcatagatttgccatcagtgtatctttttgatgaagtatgtgatcaatctgcccatttaaaaaaatggaaggctgggtgcaatggctcatgcgtgtatcgcagcactttgggaggctgaggacggtgaatcatttggggttaggagttcgagaccagcctgaccaacatggcgaaaccccctctctacttaaaanaaaaaangagttagccaggtgtggtgacatgtgcctgtaataccagctactaggganggctgangcaggataattgcctgaaaccc

SEQ ID NO: 94581 - DNA, 365 bp, Homo sapiens
tatgtatgtaggtatatatatacatgtgtgtatgtatattatgaagtagtataataaaactaaacataccctgcaacttgagaaatatgtcaccagttatataggagcttcctgtgttcccttttctgtgccatccctctaacaaatctcattgagatactatgaattgtgttcattttatcattcgcctacttaatttttctttttttttttttgaaaaaaagtttcgttttgtcccccaggttgaagggcaggggagcaatttgggttaattgaaagttttgcccccaaggttaaaacctttttcttgcttaaccctccgaagaagctggggctacaggggcccgccaccacccccagttaat

SEQ ID NO: 94582 - DNA, 353 bp, Homo sapiens
  misc_feature (1)...(353): n = a,t,c or g
ctgggctcaagcaatcctcctgccttggcctcccaaagtgctgggattacaggcataagccaccatgccccacccatattatctttaatacacactaaattattaaagtattaaatgtgagtttttctttctgcattctctgtgctggtctattgctttgtctgaccatgtgcagctgtttaattgtataatatgctggttggnagcttcttattattactcttattttttgaaatagaggtggttattcttgcatgtttattttgtccagtgggctcccccattctgttttttttttaatatatattaactttttagatttatataatgagatttgacatttttatgagaat

SEQ ID NO: 94583 - DNA, 348 bp, Homo sapiens
agaaaatccaacaaaacaaaaaccaagatacattttctcatacattcatattagaatgtagaacttccaagggttgatccttctctcttaaaacacaagccacataactacaaaatcataccttttaaaaatacctcagagagccaagaatgcagatacacccttggaagttctacattctaatatgaatgtatgagaaaatgtatcttggtttttgttttgttggatttttgagacagggtcttactctgttgcccaggcaggagtacagtggtgagatcacggttcactgcagcattgacctccctgggctcaggtgttgctcccacctcagtcttctgaatagct

SEQ ID NO: 94584 - DNA, 219 bp, Homo sapiens
ttcttttccacctgtgagtggaatcgcccggtcctatggtaactctgtgtttaacattttgaggaattgtttgttttccacagtggctgcaccattctgcgttcccacttctccacatccttgctaacatttattattatctttgattacaggcattctagtgggtgtgaagtgatggttttttgcttttgttttttgaatcagaggtcgacgcggccg

SEQ ID NO: 94585 - DNA, 499 bp, Homo sapiens
  misc_feature (1)...(499): n = a,t,c or g
cggagggccgggggggnttttnngtttgatngcgctcgatanacncctanntngcagcgtananncacncnaagncannancgnannggccgggcagggagncctggctgctggggcagnggnggggagggcgnggagaancaggganggncnggccatgggtgctggngcctgacgngcaggnggcagctgcacctagggcgctggcacgggctggtaggtcttctcttttggatgctgtccaggtggcccattgtgccgtggccaagcccgagggtccactacaccttagcccgcactaggagtccaggggccacaggcgtgggtactgctggccaaccagaaggggatcagcagccagttcagctttcctgcctctgcagggcctggttgacagcggtggcagtgtctggtgccagagtccgcagttagggtcctggttgggggaaggggtgggcagatggtggttgcctggccactgcagcccaagggagacatg

SEQ ID NO: 94586 - DNA, 420 bp, Homo sapiens
  misc_feature (1)...(420): n = a,t,c or g
cccaggtgcattgtgagtgagcaggagtcttttttttctgggcagttggtcacaacagtgaccttaaaatattaaaccatgctataaacagatgttctgtccaggctttgttctagttacggaaacacagagtagacttagcataattcttatgggctctagaatttttagaatggtaagtgagcattggcttcaacttaaagtcatcagctgcattagcccctaacaagagagtcagcttgtcctttgaggttttgaagccaggctttgactttccctctctagctatggaagtcctagatggtgtcttcttccagtataaggctgttttgtctacattgaaaatctgttgtttagtgtagctactttcatcatttgtctagattgtctggataacttgctgcagcttctgtgtcagcn

SEQ ID NO: 94587 - DNA, 406 bp, Homo sapiens
cccgcctgtgcagaaaatacaaaaattagctgggcatggtggctgtggtcccagctacctgggaggctgaggtgggaggatcgcctgggccgggaggttgaggctgcagagagctattgcgccactgcactccagcctgggtgacggagtgagactgtctcaaaaaggaaaaaaaaaaaaaagggggggcgggttaaaggtaccccttggggggcccaatgttagcgggcatggaagcgggaaaaccctttcctttaagggaggcacttatgaacctgcctgggaactttggagaggaaaccttacttggggggggggccgtatgtggcaaccctccatccataatttgagggcttaagggcaaaaaaaaaattttgaagcgcttagggggaaaaactaccccgtt

SEQ ID NO: 94588 - DNA, 423 bp, Homo sapiens
tggattttacatgacacctgcgacaaccagctcagtggttagaccaagaagccgctccaaagcacttcccaaagccaaactcgcaccaaaaaaggtcatggtcactgtttgctggtcagctgctggactgatccactacagctttctgaatcccggtgaaaccagcacactggagaagtatgtgcagcaaatcgatgagatgcactgaaaactccaatgcctgcagccagcactgatcaacagaaggggcccaattcttccccaggacaatgcccgaccacgagtcacacaaccaatgcttcaaaggttgaacaaattgggctgcgatgtgttgcctcatccaccatattcacctgacttcttgccaaccgactaccacttcttcaagcactttgacaactttttgcagggaaagcacttccc

SEQ ID NO: 94589 - DNA, 406 bp, Homo sapiens
cagcgacctcttccgtgccatctaggagaccaccagtgtcattgtgtatgatgtctccatggactacctggagatcgactctgagatgatccgggacctgctgaacacctttcctgttctacctggagctgcagcaggactcttctggggtgatccaaggggccggcatcaccgaagcctccaccatcaatgccaaggagatcatgcacctgctgatgaaggggaaccggcagaggacccaggagcccacggccgccaaccagacgtcctcccgctcccacgcggtactgcaggtgaccgtgcgccagcgcagccgggtcaagaacatcttgcaggaggtgcggcagggccgcctgttcatgatcgacctggctggctcagagcgcgcctcgcagacacagaatcg

SEQ ID NO: 94590 - DNA, 394 bp, Homo sapiens
  misc_feature (1)...(394): n = a,t,c or g
atccggttcctgaggcacgagagtcgcttgaacccgggaggtggaggttacagtaagctgagatcttcccactgcactccagcctgagcgacagagtgagactccatctcttaaaaatataaaaattagctgggcatggtggcaggtgccacctactcaggtggctgaggtgggaggatcatttgagcccaggagtttgaggctgcagtgagctatgactgagcctgagcaacagaatgagaccctgtctctcaaaaaatgtgggactgtctctggcagttgggtcacctaattgtgcctggccccaagaaggaggggtgggtacttgaggatgataaagaacctccccccccccnnnnnnnnnnnnnnnnnnnnnnnnnnnaaaaaaaagggg

SEQ ID NO: 94591 - DNA, 408 bp, Homo sapiens
aaacaataaagattagagcaaaaataaatgaaatagaaaatataaaaataagagaaaaaatcaatgaaattggttttttgaaatgattaacatcattggcaaacctttagttactaacaaaaaaggaagaagactcaaataaataaaaaaaaaaatcaaaagagaaatttaaaaataccttgatataagtaaaaacaaaacacctaccaaaacttatggaatgcaacaaaagcagtattatgagggaagtttatagggataaatgtctacatttttaaaaacagaaagaattaaaataaatagtttaattctacctcagggaaactcaagaaactagaaaaaaaagagcaaactaaactcaaaattagtagaaaggaaacaataaagattagagcaaaaataaatgaa

SEQ ID NO: 94592 - DNA, 409 bp, Homo sapiens
acttgttatggttctgtttcctttgaagcagaaggccggaacaagcgcagcaataaacttgctggacttggagagaaggctaagacaaactcgccgcactgccttcatcttggactttacatccgggttctcctctcggcgtgacccgcgcgccgccaccgccgccgccgccgccgccgccgcctccgccgccgagggttctcgaaccggtgccgcgatccctttatccgggtctcgccgttcccgtcgtgcctcgcgcactacactagccccctcatccgggttctctcccggcgtgccccgcgccgggtttgttggggggtactcggcagtgcagccatgactatactccccaaaaagaagccgccgcctctcgacgccgaccccgccaacgagccgccgccgcccg

SEQ ID NO: 94593 - DNA, 413 bp, Homo sapiens
aagatctcatccttacaaaaaataataatggtgtgtgcctgcagtcctagctacttgggtggttgaggcaggaggattgtttgagtgagggaagttgacgctgcagtgaactatgattttaccactgcactccagcttgggcaacaaaatgagaccctgtctcaaaaaaaaaaaaggttttttaaattaaccaggtggatggtttatttggaaaagggcccgggaaccttgagggcgttaaaaaacctctggtttctttttaaaaagtggaagggataacctgcgattccccaggagttggttttgttttgaatacagacttgagtgggaacttggaggggttcccaaatggagacgaggtttttctgatcaaaatgaacagcatttttttcctaaccctatgtttgccactt

SEQ ID NO: 94594 - DNA, 421 bp, Homo sapiens
tttcgtctctctactactgctgataacatctgctatagtggcggccggagcaccaacgggccgaacagtttaccctcccttatcagggaactacttccaccctggagctttcgtacacctaaccattttctgcttacacctagaaggtgtttcctctattttaagggccattaatttcatcgcatcaattatcagtataataccccctgccataacccaataccaaacgcccctcttcggctgatccggcctaatcacagcaggcctacttctcctatctgtcccagtcctagctgctggcatcactatacatactaacagagccgagcctcttcaccaccttctttgaccccggcggaggaggagaccccattctataccaacacctattctgatttttcggtcaccctgaagtttatat

SEQ ID NO: 94595 - DNA, 428 bp, Homo sapiens
gacatacattatgggtgaatcatacggtaccttcacgccgatggcgcctcaatattttgtatctgcctattactacacatcggacgaggcctatattacggatcatttctctactcagaaacctgaagcatgggcattatcctcctgctagcaactatagccacagccatcataggctatgtactcccgtgaggccaaatatcattctgaggggccacagaaattacatacttactatccgccataccatacattgggacagacctagttcaatgaatctgaggaggctactcagtagacagccccaccctgacacgatgcttcacctgttacttcatcttacccgtcattattgcgaggctaccagcactgcacctctctattcttgctcgagacgggatcaaacaagcccataggactcgcctccc

SEQ ID NO: 94596 - DNA, 419 bp, Homo sapiens
tcgcctattgtacccattgtaatggcaatggcatgcctaatgcttaccgaacgaataattttagggtatatacaactacgcccagggcccaacgttggaggcccctacaggctactacaacccttcgctgacgccataaaattcttaagcaaagagcccactaaaacccgccacatctaccatcaccctttacatcagcggcccgaccttaactctcaccatcggtcttgtactatgaacccccctccccatacccaaccccctggtcaacctcaacctaggcctactatttattctagccacctctagcctagccgggtactcaatcctgtgatcagggtgagcatcaaactcaaactacaccctgatcggcgcactgcgagcagtagcccaaacaatctcatatgaagtcaccctag

SEQ ID NO: 94597 - DNA, 414 bp, Homo sapiens
tttcgtccaatcgtcattgctgtcagcggtggcacagaggcacacagagggtagtgcaggaacgcccaggctgggtggccatagggcctgggtttggatcccagtttcctcctttatgagctacgtaatgctggacaagtgacttcacctctctgggcctcagtttcctcagctgtgatagtctctcttttttttttcttcccccaaagacggggtcttattttgtcacccaggctggagggcaggggggtaatcacaactcactgcagcctcaaattcctaggcttaggcgagcctcctacctcagtctccttagaagctgaaattacgtggatgcgtcaccacccccagctaattaaaataaaaaatacttaggggagatggggttttgcggtgttgcccaggctggcctca

SEQ ID NO: 94598 - DNA, 466 bp, Homo sapiens
  misc_feature (1)...(466): n = a,t,c or g
agcattctgaaangcnnnnnatgtctctcggtggccagcaggactctgcccagaccacacgtagcccccagtttgctggattttttggacagcgaagtatccccgacaggacgggcttgggcttccatttgtgtgtgtgcaagtgtgtatgtgcgtgtgtgcaagtgtctgtgtgcaagtgtgtgcacatgtgtgcgtgtgcgtgcatgtgcactcgcacgcccatgtgtgagtgtgtgcaagtatgtgagtgtgtccaagtgtgtgtgcgtgtgtccatgtgtgtgcaagtgtgtgcatgtgtgcgagtgtgtgcatgtgtgtgctcaggggcgtgtggctcacgtgtgtgacttagatgtctctggcgtgtgggtaggtgacggcagcgtaatcttttcggcagaaaggaactgcctgggctcccttgtgcgtgggtgaagcctgtgctgggtttttcttcggt

SEQ ID NO: 94599 - DNA, 413 bp, Homo sapiens
tttcgtttgaaagaggaaggggcgcctgtataggagttcaaaggggttaatgcctgtggggctttggggtgctgcccagagccacgcgagggcaaagggaagtaaggttacccacgattggcgcgtcttgagagccaatttgattaggtgttgtttgacaaggctgttggcgcgttccacttttccagaagactgcggatggtatggagtgtgtaacttccagttaacgtcaagtgtggttgtcacctgtttgactattttggagataaaagcaggccaaatcttgggattatctgttcgatgagggttgaagctactacctctgctgttttatgagtggtagggcaggctttaacctaacctgagaaagtgtttactaaagtaagaagataagttgatgtatttgctttatg

SEQ ID NO: 94600 - DNA, 410 bp, Homo sapiens
tttcgtgctgtggcaggtgcctcccgccaggagaacggcgccagctgtgatcctccgtgacattgcgagagccagagagaacatccataaatccctggctggaagctcaggccccggggcctccagcggcaccagcggagaccacggggagctcgtcgtccggattgccagtctggaagtggagaaccagagtctgcgtggcgtggtacaggagctggagcaggccatctccaagctggaggcccggctgaacgagctggagaatagctcgcctgtacaccggtccacggccccacatacccagcaagtatctcccatagcgcctgtggagcccccagccgagaagccagccacaccaacttaggatgacgtggatgatgacattgacctgtttggcagggacaatgacg

SEQ ID NO: 94601 - DNA, 410 bp, Homo sapiens
gctgcgagaagacgacagaagggcttggctaatattcattattgtctgtcttttttattgtcgccatcctagcgggagtaaagtagtatctcattgtggttttaatttgcatttctctaatgactaatagtgttggacatcttttcatgggctttttagccattcatatatctttggtgaaatttctattcaaatattgtgcccgttttgaaattgatagttttcttattattgagttgtaacaattctttatatattctggatatgttttatgttttattttattttttaatcagaaatgtgatttggccaggcatagtggctcacgcccataatcccagtactttgggaggctgaggccagcggatcacttgacccagaagtatgagaccagcctgggcaacatggcg

SEQ ID NO: 94602 - DNA, 443 bp, Homo sapiens
ccggatcgacgatttcgtgacgaattcggaaaaaaaactcatacccccattatgtaaaatccattgtcgcatacacctttattatcaggctcttccccacaacaatattcatgtgcctagaccaagaagttattatctcgaactgacactgagccacaaccgaaacaacccagctctccctaagcttcaaactagactacttatccataatattgatccctgtagcattggtcgctacatgggccatcatacagttctcactgtgatatatgaaactcagacccaaacattaaacagtgcttgaaagatctactcatgttcctaatgaccatactagtcttaagtaccgctaacaacctatgccaactgctcatcggctgagagggcgcatgaatgatatccttcttgctcatcagctgatgatacgcccgagcagatgccag

SEQ ID NO: 94603 - DNA, 428 bp, Homo sapiens
  misc_feature (1)...(428): n = a,t,c or g
tcctctagagcggccgcaatacatggtggcgcatgcctatggctccagatcctccataggctgagatgggagggttgactgagtgtgggaggtcaaggctgtagtaagccataattacaccactgaactctagcctgggcaacagagcgagactttgtctcanaaaaaaaaaaaaaaaaaccccaaaaggcaaaccccccacctggaaacttcctgcaaaaaaaagaaaaaaaagcccatgcttgggcccccaaaatcccaaagaaaagaaggcccgaaagccccgcagggaaggaccctatggccttaaaaacagcgggggacaggcctccccaggggaggggaaattccaccaaatttcgggaggacaaaaaagccggaaaagctaaaagggtggaaccaaaacaaaaacgaaacgcgcaacccga

SEQ ID NO: 94604 - DNA, 397 bp, Homo sapiens
gcgaaaaaaatcaaattttaaaatggacgatggatctgagtagacacttctcaaaaaaaatacatgcaagtgggcaataggcatatgaagaaatgctaaacatcactaattatcagggaaatacaaatcaaaactacaatgaaatatcatttcaccccagttaaaatggctattatctggccaggcgctgggattacaggcatgagccaccgcacccagccttcgcccacattacttttaacacacgttgtggcttaggtatttttgttatttatgaacatcataacataaaaataaccccttcatactgaagattcagagtcaacataacttttgtggttggatactattctactgcatatattctataatttagttaaccattccaatattttag

SEQ ID NO: 94605 - DNA, 397 bp, Homo sapiens
cccacgcgtccgcccacgcgtccgactagttctagatcgcgagcggcggccctttttttttttttttttggttttttgggttttttttttggtgtattgggggtttttttttttttttttttttatttttttttttattttttttttgggggggggggcgggttttaaaaaaaaaaaaagggggggggggggggggaaaaaaaaaaaaaaaaaaaaaaaaggggggggaaagggggggggcccccccccccgggggaaaaaaaaaaaaaaaaaaaggtttttcacaaaaaaaaaaaaaaaaaggggggggggggaaaaaaaaaaaaggggggggggcaaaaaaacgcggggggggaaaaaaaaaaaacccccacttgggggggggggagaaaaaaag

SEQ ID NO: 94606 - DNA, 396 bp, Homo sapiens
ggaaaaagaaaggagagaatgaaaaagagaagaatgaaaagaaagaaaaaaggaaggaaggagaaagagagggagggagggagagagagagagaaagaaagaaaaaaagaaaaagagaaagaaaaaaagacagatgtatgttcattgttcatttcagggaataaatgctaattacatcaatctcattgtcttacataatatgccagatttcaatgaaatattataagatggccaaagcagcaagaaaaaaaaatactctgtcaagagacaaagcaatcaaaagaatcaaattcagatataacacagttgttggaaataccagagaagaaatttaataatgctaaagtctctagtgaagaaggtagaaagcatgcctgttcagatggcgaattcagc

SEQ ID NO: 94607 - DNA, 407 bp, Homo sapiens
  misc_feature (1)...(407): n = a,t,c or g
aattcatcccctcccaaaaacaaaaactaaaacaaataaaaacaacacacatgataggaaaaaaattttgcaaattatatatctgatatagaacttgtattcagaacatataatgaactcttacaactcaataagactggtaacccaattaaaaattctttttaaaaaaaccaatttaaaaataaaggcaaataacctaatttttatataactcaaagtttttaaagaaacaaaccaatttaaaagttccaaaggatttgaataaacgtttttccaaagaagatatgtaaatagccaataaacgcataaaaacgtgcataacaccattagctattaggaaaaggcaaatcaaaaccacagtaaaaagcagcttcaaagccactacatggttgtggtcaaagagaccn

SEQ ID NO: 94608 - DNA, 373 bp, Homo sapiens
ggaggtggaggttgtggtcagccaagattgcaccattgcactccagcctgggcaacaagagcaaaactctgtctcaaaaaaaaaaaaaaaatttaaaaccttttttttatccaccaaagctgaaaaagtgggagttgtttttggtatactgggaaagctggttttttaaagggctgttttgaggactgtggggaaaaccactggattcgccttccctttgctgaagtaagggcccgggcctttaacacgggggttctgaagaaacaaacaaagccagcccaaaaatagtggctcaacaatctaattgttacagggcccaaaaaggagcccatataacctttattttcggctaccaaaagagggtcccaaagaa

SEQ ID NO: 94609 - DNA, 382 bp, Homo sapiens
cccacgcgtccgattacttgaacccaggaggcagaggttgcagtgagccaagattgcactgctgcactccagcctaggtgacagagtaagtcacacacacatacacacacacaaaagaagtaatgagattgaattagtaataaaaagttccccaaaaaagaaaagttcgggactgaatggctttcctattgaattctattgctcctttaaataagaattaataccaatttttctcaagttattccagcaatgttgaagcagtgggaattcttcctaatttattctaggaggtcagcataaccctgataccaaaactaggcaagaacagaacagcaacaaaacaatctacaggccaatatccctgatgaacataggtggaaaa

SEQ ID NO: 94610 - DNA, 370 bp, Homo sapiens
ggtgtggtagttagcacatgtagtcccagctacttgggaggctgaagcaagaggattgcttgagcctgggaaatcgaggctggagtgagccatgattgccattgcactccagcctgggagatagagcggaaccctgtttcaaaaataataataataatttcatcttttaaacatgattgtgagaaaccaaataaggtaccgttttctctgttgttgtgaaatgtctttcccatttcctcctgtgtcctctgtcttctttctttactttgtcatatgaacttattgcttctgcaggatgagtgaggggaaatgggaacactctggaataaagatggcggtactttgtacttgcctgaaaatccctgagcat

SEQ ID NO: 94611 - DNA, 396 bp, Homo sapiens
gcaggagaatcgcttgaacccaggaggcggaggttgtggtgagcgaagatcgtgccattgcactccagcctgggcaacaagagcaaaactctgtctcaaaaaaaaaaaaaaatttaatccccattaattaattgggccattccaaatgttacccaggcgggggggcacatccccatagtcgaatttattttggaggcaaaggcagaaggatcatttgaccccataaatttgaggcaccagggacctataattggcccactgtcctccaccctgggggacaaagggaaaccccttttttaaataaataggccaaccctttaaaaatttttaattttttaaaaaatggaaaaaataatttttctcaaattaattggacctttttaaaaaaagcatttg

SEQ ID NO: 94612 - DNA, 408 bp, Homo sapiens
ggactcacctgactcaaagatgactaatatacaaacaccccccgggtgtgaacagggaccctgtcaacggtgctaatgaacttctacctatggatgtgatttcacttccaatccataacgctgttcatactacgactactaaccaccaaactaaccatgtaccaaggatggctcgatgtaacacaacaacgctcataccaaggacaccacacaccacctgtgcaaaaaggccttcgatacaggatcatcctatttattaccataaacacttttttcttggaaggattgttttgagccttgtaccactccagcctattccctaccctgcactgaagaggggactggacaccacaggcatcatcccgctaaaacccctagaagatccactcctaaacacattcgaataag

SEQ ID NO: 94613 - DNA, 426 bp, Homo sapiens
  misc_feature (1)...(426): n = a,t,c or g
cttctaacctcaggaaggaaagcccaggggcccctgggatgtcctgccaaactgggaagacaaagattgtgactgagaaggtgggggcagggcaggagaagggggaagaagggagaatggatcaaccccaggccggggaaagagatgaatgaaggtccacgccagagtgacatgctctaagtaggggaaatcttcctaactagagttcccatgactttggcaacatttgngnngnaannnnnnnnnnaaaggggaaaaaaggggaaaggaataaaacnnnnggggggggggccttttaaaaatgttttgtggggggccaattttttccggggggggggaaaataattttttttttttttgggggggttttttaaaactcccgggggggaattttgggaaaacccctttttttttggggggggagaa

SEQ ID NO: 94614 - DNA, 429 bp, Homo sapiens
caaccacctgggctgtaggtggtgtgatggtgaactttcactctgatctccaacgaccattcctattaaaacacacacacaacattgcagaattagcaataagcacaagaaagaggtgatttgccactgaggtacagaagttgggaaagaggggtgcataaaaagaaaaaaaaaaaaaaaaaaaaaaaaaaaaaaaaaaaaaaaaaaggggggggggcgttttaaaaggtccctggggggggcaaaatttaccggggggggggaagatatttttttttttttttggggggggttattaaaacccctctggggatttttggaaaaaaacctttttttgggggggggaaattttgggcacacccccccccaaaaatttaagggcttaggggaaaaaaaaaatttttaggggggaaggggggaaaacccccg

SEQ ID NO: 94615 - DNA, 494 bp, Homo sapiens
  misc_feature (1)...(494): n = a,t,c or g
aggtcgcgngnnnnnatttaccttgatgccctcgtanngactgatnatcatccgnaganncacgcgnncgntgncgnttgcaacatgcagagttccgcctccagtattcctaatagaattaaagttggaggaatcagtaaaaagtcatggcttttaatatatagaaatagatatatgtatgtgtgtatgtatgtattatctagctctgtctgctaagaggtcctagaagcaattatatcaaagtagttatgagtacacttagcacctggatcttgatttctttttttttttttttttttggaaagggatttttgttgccccccgggctggagggcgggggcgcaatttgggttaattgaaacccccccccctggggtgggcccctttttctggcctaacccccccaaaaagttggaactaaggggccccccctccccccccatttaattttttgttttttaaaggaaaacgggttttccccggttaacccgggg

SEQ ID NO: 94616 - DNA, 605 bp, Homo sapiens
  misc_feature (1)...(605): n = a,t,c or g
gagaatcctcgggcagctatgggcccaatgctccccgcactcactgggcttatggctctccccctgggagcaggcccttcactgctcatccctttatgctttgcagatgaatgggacccggccaggcatggcctccaccaagctcagcccttgggacaagagcagccactctgcccaccgcgtcgacctgtcagccgtgtgagccgggaggctgccaaccaggccaggctgcgctcagaacacaccccccccaaacagaatgaaatgccccacctttgcccatggaccctctccttgctgcttgaganntttgggnnnnnnnggcccccggacaggnggcctcccctgtgactctggctgtcggagcacactgtctcagcccagcaacctgatgccccaggccagcgtgggcccctcctgccttgcattccacccgggggcctgagtggactttccttcggggggattcccccagggaacacagtgggccctgactggggaatgggtgcccctttggagcccttccctttcaatcaacttcaaccattcaaaacccccagccgaaggccccagggacaactttggggggcccgggtccccccgca

SEQ ID NO: 94617 - DNA, 435 bp, Homo sapiens
cagaggttgcagtgagccgagatcacgccaccgcactccagcctgggcaacagagtgagtctccatctcaaaaaaaaaaaaagggagggggggataattgggggccgggggttcccccttgaattccccccctttgggaaaacggggggggccaattccttggggcccgggatttcaaacccacctgggccacatggaaaaaccccacctttttttaaaaaaccaaaaggagccggggggtttaaggccttccttgaatccccacctcttaggggggttgggccccaaaattttttgaaccccaggggggggaattggcggggacttaaaaccccccctttccctttaattatccgggcaacaaaattgaaattttgtttccaaaaaaaaaaaaagggggcggcccttttaagaaccccttggggggccccacct

SEQ ID NO: 94618 - DNA, 437 bp, Homo sapiens
  misc_feature (1)...(437): n = a,t,c or g
cttggtccaggcatacttagaacacatcaagaacgtaggatacctggagggtactctcctcaagaccttcccttcactcaaaaaaatgtaaggttgctccttgaccaggtacatcatgccccatacctcgtggggtatggaaaaggagagtaataatcagactgataaaaaaaaaaaccggcnnaaaaaaaaaaaaaaaaaaaaaaaaaaaaaaaaaaaaaaaaaaaaaaaanggggggggggcctttttaaaaaattttgggggggccccaattttccgggggggggggaaaaatttttttttttttttaggggggggaaaaaaaaaccccgggggggttttgggaaaaaaaacttttttttgggggggggaaatttgggcccccccccccccaaaaaatttatggcttgggggaaaaaataatttttttgggggg

SEQ ID NO: 94619 - DNA, 367 bp, Homo sapiens
tcacagtactttgggaggctgaggtaggaggatcacttgagtccaggaggctggggctgtaatgagctatgattgtgccactgcactccagcctgagagacagaacaagaccctgtctccaaaagaaaaagaccataagcatctggagcacctgcaagagcctgtgcatgggctcggcgtgactgagagtcctccgccttgcccgagcatcaggcaggccctcccaagacccctcaagatgctagaatgggactttctgcaaagtttaaacatctgtacaggatttagcttctttggtggcgaacttggattgtgatgccctcaggaagtctggtttcactctttctgtcactgtacgtcagcattc

SEQ ID NO: 94620 - DNA, 460 bp, Homo sapiens
cattcgattgctccgcgctgcaggaattcggcacgagactatattgccctagctggtctcagattcctgagctcaagcgatgtactcacctcagcctcccaaaatgttgggattacaggcatgagccaccacacctggccttagaatagttttagagttgcagaaaaaattgagaagatagtgcagagagctgctgtataccccacgctcagttactcctaatattaatgacatctgacattggggtggtacgtttgtcacaattaatgaaataatatcgatccattagtattaactaaagtctatagtttattcagattgccttagttttgcctaatgtattttactgttccaggatctcatatgacattatgttatcaaatttgataacattctggctccagacatttatattgacaagtaaggagttgtcgtgtctccttaggttcctcttggctag

SEQ ID NO: 94621 - DNA, 361 bp, Homo sapiens
  misc_feature (1)...(361): n = a,t,c or g
nattgacccgctctgaggccttcggcacgagggcaacagtattatgatgagactaaaaacaaaactctatgcagaaacgcccagaacgactcctatttaccagatccaaaccctttctctcggttctctactctagccactcttggcatcagctagaggctccagatgcttagaaagcaccctttggcctatattggaactgtggagcacgggtgtgtcggcacaggcatatcagctaaatagacagaggcgtgtgggttaggaacaatcaagccatccttctttctaattcctctaaagcaaggggaactcttaggatatccagcttataatgaaaatttaaaaaaaaaaaaaaaaaaaa

SEQ ID NO: 94622 - DNA, 470 bp, Homo sapiens
cgcgcccttgacttcgatccgcgctgcaggaattcggcacgagattattccttgatacatgggctacaggatggatgttgttagcagacatgaaaacattcatctccttgtacagttcttgggtgaccaggtgcgttgtcagcagtaataatttgaatctcaatagggggcttaaaatattcagtaaactatgctgtaaacagatgtgctgccaccaaggctttgttgttctatttctagggcacaagcagagtagatttagcctcattcttaggggtcctaggatttttagaatggtaaatgagcattgccttcagcaaagttaccagttgtattagctcctaagagtcagccttcctttgaagctctgaagccaaacattgacttttccgcgttagctataaaagtcctagatgacatcttcttatagaaggctgttcgatcaacattgagcatctgttgcttggtgg

SEQ ID NO: 94623 - DNA, 489 bp, Homo sapiens
  misc_feature (1)...(489): n = a,t,c or g
naatgagncccctgggnnnnnccntanggtagatcctagcacagngcggnggaattcattctatgaagacttagagtggtgaggcagctgcagaatgaaagtctgaagctagaagttcttgtttcttgaggtttaaggaaaaaagtcatctccataacataaaagcgcaagataaagcagcaagtactgatggaaaagctgcagaaagctatctagaagataactgattaagatggcaacactaaatagatttgcaatggagacaaaacagccttctactagaaggagatgccatctaggatgttcccagctagagaggagttgatgcctggctttaaggcttcaaaggacatgctgactcttttgttaagggctaatgcagttggtgatgttaacttgaaaccaatgatgatttactatactgaaaatccaagggccctgaagaattatgataaaacacagctctgtctgtactctacaaatgggaac

SEQ ID NO: 94624 - DNA, 491 bp, Homo sapiens
  misc_feature (1)...(491): n = a,t,c or g
natcgaaatcgatgaccactagtccangtggtggaattcgaggaagcggtgagtgaatgtgaatgtgaaggcctgggacactttataaacgctatacacttaggctacactaaaattattttaaaaattttaccttcagtaataaactaaccttagcttactgtaactttttttgctttaaaaactttttaatttttaaactttttgactcttatgtaataacacttagcttgaaacacaaacacattgtacagctgtacaaaaatattttctttctttatattcttattttataaacattttttgaaatttatttattttttttactttttagacttcattatttaaggggcctattgaagtctctgttattattaggttgtctatttctcctgtcaattctgccaggttttgtttcatgtattttgggggctctgttgtcatgtgcttgtacgtttattatatttccagacagatgagcccttttatcg

SEQ ID NO: 94625 - DNA, 496 bp, Homo sapiens
  misc_feature (1)...(496): n = a,t,c or g
ccccccccccccccccttgaggcccnatgatgacctctggcagngcggnggaattcacaggtgtgagccaccacatctggcctacagcatatatttaatgcaatacagcttaacttctaagagcaattttaacatatcttaaatataaaattagtgctatgaacttagtttctgcataatttatatacctccatcttacttatcattgtgtcttcaccacccagtacaaggcaggtagttgctgaacaagtgaataaatgaattattttgttatcgaagttttgggttttagtgggtattctcttattctcatttgtcagaagattaagctttggaagaaaaatacttgagggagcgttcaagatgggttaaaacttaaatgtcacatctgaaacagtaaaaatcctagaagaaatcctaggaaaaactcttctggacattggcctaggcaaagaatttatgatgaagacctcacaagcaaacataacaaaaccaa

SEQ ID NO: 94626 - DNA, 443 bp, Homo sapiens
  misc_feature (1)...(443): n = a,t,c or g
nttgaggaccatagnnattgatgacccttagtccgtctggnggaattctatgctttttatccttctttgtttaatgtgatgtatcacattttattgatttacatgtattagactatccttacctccccgggtaaataccacttgattatggcgaataatctttttaatgtgcttttgaattatcattgctagaactgctggttttgaatgtttgcctctatgtttatcaatgatattggcctggagtttacaaagagttccctccttttcatttttttgaaatagtttgtaaataatttgtataagtttttaaaatgttttgtagaatttgtcagcaaaaaccaccaagtcatgaatttttctttcttcctctatttttttagagacagggtctcactctatcactgaggctggcatacagtggtgcagtcatagctgactgn

SEQ ID NO: 94627 - DNA, 395 bp, Homo sapiens
ctatctcttaatattataaataattatatagtaaacatcttattagctatatctttataagtattcatagttgttttttagaagaaatttctagaagtggaatttttaggtccaaaggtatgcaacaatctaaagcttttgtgacaaattcacaaattgcatttcagaaagtttgtgccaatttattctcccacttacattattaagatatttgttttgtttaagataaggtctggttctatcactcagcctggagtacagtggcatgatcatagctcaccacagccttgaactcactcctgggctcaaaccatcttcctgctcagctctcaagtagttggtactaaaggcatgtgccatcatacctggctaatttcttatttttgtttgttttt

SEQ ID NO: 94628 - DNA, 483 bp, Homo sapiens
  misc_feature (1)...(483): n = a,t,c or g
cgcccccccccccccatcgagnaccnnattgtcgatccctagtccatgtggtggaattcttaggctttggtttgcctgagtaacggccagtgagggcaaaagcttcaccaactcgaatcgtgagcttatctctgaagtcgaggtgaagcgttgggggtgctaaaatttgtaattataaaggcaagtcatttttattgatgtcttattacaaatctacaaatgtgcaagtttcagaagtataaattgtagtagacacatacccagctcatccttgcaagtaattggtttggtgcaaaatgatggtttgccttgtccaacaatgttgacagcactgacacggtactcataggtatcaccttcttttaagcctttaacagtgtattttctgctaagcaagttgtcatttgtaactttgtggaacttctcagtcccaatgagccgactttctaggacatagttaataatttctgacccaccatcata

SEQ ID NO: 94629 - DNA, 462 bp, Homo sapiens
  misc_feature (1)...(462): n = a,t,c or g
cggggaannattgnattcgattaccattagtccangcggtggaattcgagaattcaaataaaaaaaacaaaaacaaaaacaaagaaacaaaccaaaactaaaatcagagcatcaatgagtcgtggaaaaatccgatcagtctaataaacacataactgaagcaacagtggccaaaaattttccaaattggattatggctataaacacacagatccaaaagaacctcaatgaatcccaagcacgagaaacatgaagaaaaccagactaaggcagaatcaaactttccagaagcaatgacaaagagaacatcttaaaataatagaaagaagacacattgtgcacagaggaacagtagtaaagatgacagcagatgtctcatcagaaataatgcaagtgaggagacagtggagaaacatgtttaaaatactgagaggctgtccacatagagcctatgcggactga

SEQ ID NO: 94630 - DNA, 567 bp, Homo sapiens
aaacccctgttttccagctactcaggaggctgaggcaggggaatcgcttgaacccaggaggcagaggttgcagtgagctgagattgcaccgttgtgctccagcctggtgacagagtgagactccgtgtcaaaaaaacaaaaacaaaaacaaaaaggccaggcatggtggctcgcgcctgtagtcccagcactttgggaggccaaggagggtggatcacgaggtcaggagatcgagaccatcctggctagcacgatgaaaccccgtctctactgaaaatacaaaaaattagccgggcgtggtgatgggcgcctggagtcccagctactcgggaggctgagggaggagaatggcgtgaacccgggaggcggagtttgcagtgagccgaggtggtgccactgcactccagcctgggcgacagagcgagactccgtcaaaaaagaaaagaaaagaaaagaaagatttttaagaattcagcaaaaactcagccagctctttctatggggcagttgctaatttagttctaggcaaacgtggacacattaaattctcctacaaaccctcaaaaa

SEQ ID NO: 94631 - DNA, 559 bp, Homo sapiens
  misc_feature (1)...(559): n = a,t,c or g
gctttaattgtataggcctaacatacttttttgttctgtttagtctatttcatatttttatgctaccgtaaatagtattttttaaaatttcaatgtccaggtgttttttgctagtaatatattttttatgttgatcttgtatctttcaaccttattatactcatttattagttccagcagcttttttgcaaattccatcagatttttaacttagatgaacannnnnnnnnnngcaaataaaggcaacttttcttctttatatcaaatctgaattttttttatttccttttcttggctgattatatgggctaaaatctccaatacaatgttgaatagaaggggggagagtagacagacctgtcttgttcatgatcttaggggaaaaacattaatgaaccctaaggttcattatagggttttgtttggtagatgccttttattaggaaagaagattcccttctattcctggcttgcttaannnnnnnnnnaacaatcaggaacgaatcttggattttgccaaatgttttttctgcctttaatgaaaggatcggatcatttt

SEQ ID NO: 94632 - DNA, 457 bp, Homo sapiens
  misc_feature (1)...(457): n = a,t,c or g
nagcgcgcgtttttcccggaagtccagaangcgngncattnatttantcacaaagtatcaattggccaataagaacatgaaaatatgctctacattgccaattattagggaaagcaaatcaggccgcatgagatatcgctcacgcccatcatgatggcactatcagaagaacaaaaaaataacaagtattggggaggatgcagagaagttgaaacccttgtgcactgttggtggtaatgtaaaacggtgcagtcattacggaaaacagtacacaggtttcccaaataactgaaaacagaattaccataagaattaccaccaaagcgggatctcaaagagatatttgtacacccatgttcatagcagcattattcacaatagccaagaggttctggaagcatcccaaatgtccatcaacagatgaatagataaaggaaatgtggtatatacagtcaat

SEQ ID NO: 94633 - DNA, 470 bp, Homo sapiens
  misc_feature (1)...(470): n = a,t,c or g
tggggctnnaatcgatagcattccatcagngcggngcaattcgggaggattgcttgagtcggggaggctgagccttcagtgagccatgatggagccactgcgctccagcctgagcaacagagtgagaccctgtctctcaaaagcaaaacaaaatgaaagagtaagaccttattttctaggcaagatggccagccattgacagtttttaaacgaaggactggtagataaaaattgcactgtagtattttggtggctagaagcctgactaaaagagaggcttgttttgatagtagaattactttcacccaaaattaactgtacagaatagcacaatggttggtgttaagtatttaatttttagtcaggttggggtcttctgtagtgttttaaagaataaattagccgggcacagtggctcatgcctgtaatcccggcactttgggaggccaagacaggaggactgcttgagt

SEQ ID NO: 94634 - DNA, 200 bp, Homo sapiens; identical to SEQ ID NO: 6573

SEQ ID NO: 94635 - DNA, 473 bp, Homo sapiens
ccccccccccccccccccaatagtagaccactattgcatgcggtggaattccttctgtctatccattgtttagaatagggtattgtgtcttccactgttattttagaacagtgtatttcttccttcatttctgtcagcttatttcatattttgaggttttaactgtttgttgcacatatgtttataataattatacattattaatgaattgacccttttatcaatatataatttcattctttgtttcttgtaacagtttgttttgtttgatacatatactgccacccagctatcttttggttactatttgcatggaatgctttttctccatccttttatgttcaacctatttgtgtctttgaatataaagcgagactgttgtagacagacaacatatagttggatcatgttttctaactatcctgccaatttctgccttttgattggatgatttaatcaatttacatttaaag

SEQ ID NO: 94636 - DNA, 327 bp, Homo sapiens
  misc_feature (1)...(327): n = a,t,c or g
gagcggnnnnnnaatcgagatctctagnatttgacggcgaattcgccgtgttggtcaggctggtctcgaactcctgacctcaggtgatccgcctgcctcggcctcccaaagtgctgggattacaggagtgagccactgtgcctggcctatcccacttggtttttgactgaaggggaagtgtagaaatatattgatttgtgatttctggtgtcacctgtgttaccaaaaatcaaaacaaatcttttttattttttattattattattatttttgagacagagtctcgctctgtctcaaaaataataataataataaaaaaaaaaaaaa

SEQ ID NO: 94637 - DNA, 469 bp, Homo sapiens
  misc_feature (1)...(469): n = a,t,c or g
nttgtagactttgnccgtgcgtagactatgtccgtgcggtggaattccttgagcccaggaggcgaaggttgcagtgagccctgattgtgccactgcattccagcctgggcgacagagtgagaccatgtctccaaaacatacatatatataaaatatatttaaagacctcttggagttcaggcagaagtgaagatagcactatgaagtagtttccacattaacaatagcaatgacttgaacgatgtgttccccctttcttctgatattaatatctgttcattttgcaaacattgaaagattatgaaagctatgacccagaatcacaattatataatttggatacatacccaaatggcataatttctgtcataagcctgtaggaaaagcttgagttcttcacttctcagattctcagagccagcttgctcttgggagaggggcctggtataggggctgcccaggttcgtaa

SEQ ID NO: 94638 - DNA, 457 bp, Homo sapiens
agagaaaaaatttcgagactctagtacatgtggtggaattctcaccattcatgtatgtttactcttttgtttgattcttcatttcctcctccatctctgtgcttcattctgaggtcacttttccttttgtatgcagaactccctttagcatttcttttagtgaaggactcatttattttgtttgtatgaataatgtctgtatttcaccttattttaaaattgcagtaaaatatacataacatatactttaccattttaaccatttttaagtgtacagttcagtggcattaagtatattcacatttttctgtagccaaaactgccacctatctccagaacttgtctaatcccaagtagctgggactataggcacatgccactgtgcctggctaatttttttttgtagagacagggtttagctttgttgcccaggctggtcttgacctcctggcttcaa

SEQ ID NO: 94639 - DNA, 479 bp, Homo sapiens
  misc_feature (1)...(479): n = a,t,c or g
cgcacgaccccnatttgagccttattgtagacattagaccangcggtggaattcgctggtgggggtatgaattggtacagtcgctttggaaagctactgagcagtatgtactaaagccagacatatgcgtatttctgaaccaggagtttcactcctaggtatgtactcaaaagaactgtgtacactatgttcaccaaaaaacaagaatgtttatagcaaccctctttgcattagtcaaaagctagtaattacccaaaagttcctgaatggtagaatgaattactaaattgtagtattttcatacaatggaatactatacagcaatgagaatgaataaattacaatataaacaacaatatggatgaacattacataattttgaatgaaaggagccagacacaaaaaaaggatatactgtacaattccatttatacgaagcataaaatcaggcaaaaatctataaatctgtcctgccagan

SEQ ID NO: 94640 - DNA, 466 bp, Homo sapiens
  misc_feature (1)...(466): n = a,t,c or g
catcgaccccctattgatgaccatctagaccangcggnggaattccttcaagtccccagctgcactggcccttaacaagagggttagcctgtcctttgatgctttggaaacagacattgacttctctttagctgcgaaagtcctagatgatatcttccaacagcaggctgtttcatctacactgaaaatctgttgtttagtgtggctaccctcatcagtgatagctggatcttctggataactaacttcctgcagtttctccatcagcagttgctgcttcaccttccacttttatgttatggagatggcttctttgcttaaacctcatgaactaatcactactagcttcacacgtcttctgcagcttcctcacctctctcagccttcacagaattgaagaaggtagggcctttgtctggntaaagctttgtttaaaggaataggtttgctgggttgatctataccg

SEQ ID NO: 94641 - DNA, 447 bp, Homo sapiens
  misc_feature (1)...(447): n = a,t,c or g
cctagaacatagtagancattagcgccagagcggtggaattcctctgattgttgttcatatttccatgggatcagtgatgatatctcccttattatttctaattgtgtttggttctcctttcttttcttatttatttgcctagctagtgttccatctagtttattaatttttttcataaaaacagctcctggatttgttgacttttttttttggaaaagttttcagggtctctatctccctcagctctactttgatcttggttatttcttgttttctgctacctttctggttagttttcacttggttttctagttcttttcatcaagatgttaggctgttaattttagatcttctagtttctcttttttttcttcttggggcaaagtctcactctgtcacccaggctggagtacaggggcatgatctccgctcactgcaaccttcat

SEQ ID NO: 94642 - DNA, 488 bp, Homo sapiens
  misc_feature (1)...(488): n = a,t,c or g
ggtgccnnaatgaaacctcganaacctacgccangncgnggaattcgacactctagcacatgcctttgcctttgttgttgtaaagcttatttacattttcaacagcttttttatattcatgaaaatataatatacaaataagttatgattctaagatttctgttgaattttctattttagtcttctcggttttaattatctgatgtgccgtctgctatacccagataagtctaactgaatgggtagatctataatctttggatccagggtttgagactgtctcacacttatttgaccgtgtgaatcaaccttaggattgcagaagggtgactgatatgctcatggtcttctaaaacctacattttgttattttgttttttttgttttggtttgttttgtttttgttttgagacagagtttccctgttgttacccaggctggagtgcagtggcgcgatcttggctcactgcaacctttacctcctgggt

SEQ ID NO: 94643 - DNA, 498 bp, Homo sapiens
ttgttcagttctagctgttctttgtatatgacgcatatcagcctcttttcagatatatgctttgcaaatattgttcctaatccatgggttatcttttcactcagttcacagtgttttttgctgcacaaaagtgtctgtcatttagatgtaatccaaggaatctaattttcttttgttgcctatgcttttggtgtcatatcccagaaagcattgcccaatctgatgtcatgaaagtgtggccaatgttttctttgaggcatattatactttcagcactcggggttaggtctttgatccagtttgtgttaatttttgtacctggtgtgacatagggtccaccttcattcttatgcatgtggaaatcaagtttctccaacacgatttgttgaaaagtatgcttttccaccaatgaactttcttggcacctattttaaaaatcattgggacatatgtgtgggaagttattcctgggctcaaaaacaaacaaacaacaacaga

SEQ ID NO: 94644 - DNA, 210 bp, Homo sapiens
  misc_feature (1)...(210): n = a,t,c or g
nnaactagaccatcgtccgtngggnggatcgatgggcggtctcggggactgtggtggtgatgtggtcctagccagtcagctactttgggaggctgaagcaggaggatcccttgagcccaagagtttgaggctgcagtgagctatgatcatggcactgcaccccaccctgggtgagatagtgaaaacctatctcttaaaaaaaaaaaaaaa

SEQ ID NO: 94645 - DNA, 479 bp, Homo sapiens
  misc_feature (1)...(479): n = a,t,c or g
ggggtncccggggccnnnnncattgagnaaactgagatcctacgacanngcgnggaattccctggaactgaaggagggtgggaaggttttaattattttaaaaatagagatggggactcactatgttgcccaggctggtctcaaactactgggctcaagtgaacctccttcctcggctcccaaagtgctgggattacaagcgtgagccactgtcccagcagggaggtgttttttttaaagctgattcactggaggcagggtgggcaagtggcactgctggtggccacccctcacagtccctgctgcccccagtaccgcctggcacccatcccccgggcccgccacgactttgcctgcgccagcctgatcttcgtctgcatcctgctcgtccatgtcctgctcatgcccaggtcagttgcagggaggggtgtggggtccggcctgctgggatccaggctggaaggtgactatgaacctgc

SEQ ID NO: 94646 - DNA, 1548 bp, Homo sapiens
  misc_feature (1)...(1548): n = a,t,c or g
agagttattcccctggcacttccagccaagcagagcagcctctctggttgtggcaaaagccattagagacaaagttcctggcaccagaagatggccagtgcccactgatgggaggcctgagggatttgccctttctgagcctcatcacagttgcctccatggacgacaccaaggcccagagaggtgtagacacatggcagccagcccatgagaagcaggaaacaagtgacctaaagacaaagatggccaccctggagagagaactgaaacagcagcgggagtccacacaggctgtggaggcaaaggcccagcagctgcaggaggaaggtgagcgcagggcggcagcggagaggcaggtgcagcagctggaggagcaggtgcagcagttggaggcgcaggtgcagctgttggtgggtcggctggagggcgctggccagcaggtctgctgggccagcacggagctggataaggagaaggcccgtgtcgacagcatggtccgccaccaggagtctctgcaggccaagcagcgagccctgctaaagcagctggacagcctggaccaggaacgtgaggagctgcggggcagcctggacgaggctgaggcccagcgggcccgcgtggaggagcagctgcagagcgagcgggagcaggggcaatgccagctcagggcccagcaggagctgctgcagagcctgcagagggagaagcaaggcctggagcaggcgactacggacctgcggctaaccatcctggagctagaacgggagctggaggagctgaaggagcgggagcggctgctggtggccttcccagacctgcacaggcccaccgagacccagatccatggtcctgtcccattgggcacaggaggcagatccagcagcgtggaatcccagataacatgtcccacagactctggcaacgtcacagatcacatggagaggcaagtgcaggccaacgacatccgcatccgggtcctacaggaggagaacgggcggctccaatcaatgctgtccaaaatccgggaagtggcccagcagggtggcctcaaggtgggcctgagagggcgggcccttggggaccaggaggaagcccctatccagcagcaggtcttcagactctgccccgggaacttgtggagagcccacctcatcacatgaggccttaggctgtgcttttgtgaaacatttttcacatttccagaaggcgtgaggatgttatggatccgatgccttccagtcccatatgccctctatagctgtcattcctttaagtgcagcaagaagcctcgnnnnnnnnnnnnnnnnnnnnnnnnnnnnnnnnnnnnnnnnnnnnnnnnnnnnnnnnnnnnnnnnnnnnnnnnnnnnnnnnnnnnnnnnnnnnnnnnnnnnnnnnnnnnnnnnnnnnnnnnntgaaggacaatctccaaaaacttgctgaggccttctcagggcgcacgctcccaaatgcctgaagcattttcccttggtgaaggaattccaccacatggatatggatctcgaatnnnanggnctcaatccccccgcc

SEQ ID NO: 94647 - DNA, 437 bp, Homo sapiens
tgaaagatcagtgaggaccgcgtgctgtaaacagagtagagggctcagctccctgctctgccccccacctgctcccagactcagctgaactggtagtcctgttacaggctcctctgccttagaacccaggagtccacacccacagcccctcctccctcagacccaggagtccaggcccccagccccttcatcctttaggacccaggagtcctagccccagtcctgaacaaaccgtcccctctcacccagccaggctgccctctctgtccccagagaggactcagggagccaaaggcccagtgatctcagctcccgcctcctagtctggccctggcacagccagccccagctgttggggggagagaggaggtagccagccctgcctgtccctcctggaaggacaaaagccgattaagggcagtgccaggctcagctag

SEQ ID NO: 94648 - DNA, 478 bp, Homo sapiens
  misc_feature (1)...(478): n = a,t,c or g
gagcggccccactgataccctaattgatgtgcngtaattcgaatgaactagatgctacggtacattgctacgcttagacgcaccaggaaagctctggacgaggaagatgtaggttgttgccagcacctatgcacggacagacagaaagtcctctgcttccttcaggcccttgcttccacttccccggggcttccagctgagcctgcatttttctttgacttccccctcttgcctggcgttttcagcaaacacacacagaggattacggggagaaaactatcatattaccaagtggacatggctcctaaggtgccaactgaacacaggctgtagtgcagtggcatgattttggctcgccgcggcctccgcctcctgggttcgggcgatcctcctgcctcggcctcccgagcggctgggattacagtcctttgtggcatcatgaacagatcctgtaactttctggccacttcccaatatt

SEQ ID NO: 94649 - DNA, 483 bp, Homo sapiens
  misc_feature (1)...(483): n = a,t,c or g
tgggcccggnaatcgagaccattggacagtctggtggaattcccagcctgggcgacagagtgagattctgtctttaaaaaaagaaaaagaaagaaagaaaagaaaagaaaaattgaaggggaagagagagaggaactgagatgaaaacactgagtgaggccaggcccagtggttgtaacatctgcagtcctagcacactgggaggctgaggcaggaagattgcttgaagcaagaaggttcaagaccaggacggggcaacaaagccagatgcccatctctataaaaaatttaaaaattagtggtggtgtgcacttacactctcagctgctctggaggccggggtgggaagatctcttgaggttgggagttttagactagcagggcaacttggggagaccccatctctacaaagggaaaataattggctgggcgtgttggctcacgcctgtggtcccagtattttgggaggccgaggtgggaaaa

SEQ ID NO: 94650 - DNA, 495 bp, Homo sapiens
  misc_feature (1)...(495): n = a,t,c or g
gggtcgccgggacaccccgtgtgtggcaggcggcgaagcgctctggagaatcccggacagccctgctccctgcagccaggtgtagtttcgggagccactggggccattgtgagagtccagcggacttccagcgcttgggccacggcggcggccatgggagcatatgtggagctacccgatttcgctatacatgaaaggctggggttgggtgtgaccgcttatggggtgcctggcttaaagccgatgggctcggagaaaccaaggctgaacataccctgcatgacgggctccggaggatgctctatatggtctgattgagggagatgacaccaactttaccattcagggagaagttgttcactgctggtatacaggaacactaccagatgggactgtgtttgatactaatattcaaacaagtgctnagaagatgatgatgccaagcctttaagttttaaggtcgaataggcaaagtatcanacgatgggatgaacg

SEQ ID NO: 94651 - DNA, 396 bp, Homo sapiens
attcggaccctagtccgtgtggtggaattcgttttgatgagatggaaaaattcctagaaaattataacttaccaaaactgaaagaagaaagataaatgaccccacatttgttaaataaattggatctgtcatgaaaatatttcacacagtggaacctctagtcacaaatgcttcaccagtgaattctactaaacatttaaggaataaatagcacccatctcacacaaactcttctagagccgaggcataatgggaacagcaactccacctgtcatgtttcacctccaggaaaacgtgatacccaaactcaacagagaaaaaataaacttacagaccagtctcactcatgaacataaacagaaatcctcaacaagatattaacatataagacctggc

SEQ ID NO: 94652 - DNA, 400 bp, Homo sapiens
gattgagccactgcactccaacctgggcaacagagcaagactccatctcaaaaaaaaaaaaaggatttttacaaagtttattctttgaggtttgaccctttttaaaaaggaaaatatcaaatttttaggcaaaggtggtaaatattcaaatttttaaatttaaacccaacgtggctggataaaaatactcaaaagttttagcaccttagggacaaaagtccttattttttggggagcccttaaaactgggcaaatttaaaagatttaatcaacctcccttgtccttggaaaaaggggccttaacatatagagttcagccttgatacttccaacagcccacacttcagggggagaactataaacggaaaatctcagaaaaccttcgggggacaataccaag

SEQ ID NO: 94653 - DNA, 492 bp, Homo sapiens
  misc_feature (1)...(492): n = a,t,c or g
agatggccnnnnnnnagccgggccttagagnacccttcgactgagcaccnctaggaagagccgnggaattcggcagaggctgcggcgagccaaaattgcgccaatgcactccagcctgggtgacagaagaagaccctgtttcagggggaaaaaaaagaaaaagaaaggaaagggaaaaaacatgaagagagcccagtgtatccagacccgagtctcatcaccttctcaggaagccttttgggttgtccaggccttaagtaggcctgtgcttccaaacttcatttctgggaggagtgccagtgggctggggaagtcggaggctataaaaagcctgttcttgtaccttgcagtctgttccaccaccgaggaacaggcctgacccgagtggcctgcagtaaagctccgagtcagggagcatggtataatcacctgacactggtgttacaggtaaatcacaatctctccccatagacaacatgatcttcctcatga

SEQ ID NO: 94654 - DNA, 438 bp, Homo sapiens
  misc_feature (1)...(438): n = a,t,c or g
aatgaacctcncganatcgaggcaattgaggcacggnggngcacgcctatagtcccagttactgaggaggctgaggtggctttatcacttgggcccttgtggcagaggttgcagggagccaagatagtgccattgtactccagcctgagtgagagaacaagaaagaccctgtctcaaaaaaaagattttattgctgtcacaggacatacaactcttctagcaaaagcctgtcaccctcaggagaagtctccctcctgggccctactttgctttggctcaagttaacagactgcctgcaagggaagtagggcccaatccagccctaatggatggagcaaagcaggaatctaatttccatatactgctgtggcacttagaaaggaactgaggcggatttgaatgttctcattttcacatgatgcagctaaagtttaagag

SEQ ID NO: 94655 - DNA, 444 bp, Homo sapiens
  misc_feature (1)...(444): n = a,t,c or g
nattgacncccctttgtagacccctagtcagtgcggtggaattccttgagaaacacatctcactacgttgcccaggctggtctcaaacttctggcctcaagcaatcctcctgagtagctaggattacaggggcacaccactgcacctggcccgtttttttctaagagttttatagttttagcttttacatgtaggtctctgatccattttgagttagttttttgtatatggtatgatgtaagggtccagctttattcttttgcttgtggatatccagttgtctcagcaccaaatgttgaagagactattttttccccattgaatcgtctttgcaaaaaagtccctggcaatagatgtatgggtttactgggtacatttttatgaggcaagttcgtttctgtcaggggatttattttactgtcaagccttttgaaggagggagtg

SEQ ID NO: 94656 - DNA, 419 bp, Homo sapiens
  misc_feature (1)...(419): n = a,t,c or g
ggacttcggaaaggagttggctgctacaggatgcagaatttctttatggggtgatcatctcaaattgactgtgatgatggttgggcaactctgtggatgtactaaaagccacagaatcagagccgggcgtggtggctcacgcctgtaatcccagcactttgggaagccgcggcgggtagatcacaaggtcaggagtttaagaccatcctggccaacatggtgaaacgctgtctctactaaaaatacaaaattagccacatgtggtggcctgcacctgtaatcccagctacgcaggagacttaggcaggagaatcgcttgaacctgggaggtggaggttgcagtgagccaagatcacacctttgcactccagcctgggcgacagagcgagactctgtctcnaaaaaaaaaaaacccacaa

SEQ ID NO: 94657 - DNA, 441 bp, Homo sapiens
aaaatacttagaaataaatttaagaagtgtaaaacttgtactctgaaaactataaaatgttgttgaaagaaatgagaggagatctaaataaatggaaaagtatcccatgatcatgatttgaaggcttaacattgttaagatggcagtcctccctaaactgatttacagatttaacttgatccctatcagaatcccagatgagttctttgtgaaatctacaagctgactctcaaattcatatggaattgcaagagactaagaatagccaaaacaatcttttgaaaatgaagaacaaagtaggagacctcatattaactgattttaaaacttactacaagacaatggtaataaggacaatataatactgacagaaggatagatgtatagactagtgggatagaattgagagtcagaaatgaacccatacatatatgatcaact

SEQ ID NO: 94658 - DNA, 442 bp, Homo sapiens
  misc_feature (1)...(442): n = a,t,c or g
attgatcgacgtcactagnccgngcggtggaattcgtgtggccttctctttagaaaagcaggatcatggggtacgttttaagaatatgggataggtcaggcttggtggcttatgcctttaattccagcactttaggggaggctgaggtgggaggatcatttgaagccaggagttggagaccagcctgggcaacaaagcaagaacacccaccccatccctctttccctcaattaaaaaaataaaaaaaaattagtggagtgtgatggcttgcacctatagtcctagatactccagaggctgaggtggaaggttgcttcagcccaggagttcgaggttacagtgagctatgattgtgccgctgtgctccagtctgtctcttcaaaaaaaaaaaaaaaaaaaaccttggggttttggaggatggggttgaaacctggtttctgag

SEQ ID NO: 94659 - DNA, 404 bp, Homo sapiens
gaacgtaactcgagttcgtgtaccctagtccgtgtggtggaattctatcttttcacatttttaatgtctgtaggatatgtagtgatatcccttattttattcataaagatgacaatttgtgttttctttgttatggattagttgctaggagtttatcaattttattattcctctcaaaaaatcaattcttgtctttgtggattttttccagcatagatttatttttgatatcattgatttttgcttttttcttattattttctttcctctcctttcttttgagtttatttttctatcccacaatgcttagagaacatgtcctgtttgatttcaatcccttgaaatttgtgaagacttgtttgtggcccaaaacatggtctacttggataaatgttctgtgtgta

SEQ ID NO: 94660 - DNA, 470 bp, Homo sapiens
  misc_feature (1)...(470): n = a,t,c or g
gggaaggccatagaacncctnntnggnnattgaggncgatcgcaggcaccgctggnttcatagaataagtagaaagcattcccttctcttctttaggaagactttgagaaggattgatgttaattatttatatgtttggtataattcatcagtgaagccatctggtcctggagttttctttgttgggagttttattattattattattattgatataatctctctgtctctctctctctctttttttttttttggacaaagccctcttttgccccccaccctgaagggcaggggggcattttgggttaattgcaccccttgcttcttaggttaaagcaatcttcttgcctaaccctcttgagcagtgggaactacgggagcttgcccccttgctgagttatttttttgaaaaagcggggtttccccttgttgcccaaaggggcctaaagttttctttttgcctaaccctc

SEQ ID NO: 94661 - DNA, 472 bp, Homo sapiens
  misc_feature (1)...(472): n = a,t,c or g
ggtncgggccaatgagncccttaactgatgatctaggacagngcggnggaattccagattataaaaaagtgaaacagcttttttgctgacacagagaaagctttagtttggatagaaaatcaaaacagccacaacatgcccttaagccaaagcctaatccagagcaaggccctaactctgttcaattctatgaatgctgaaagagttggtaaagatgcagaagaaaagttggaagctagcagaggtttttggttcatgaggtttaagaagccatctccgtaacataaagtgcaaggtgaagcagcaaatcttgatgtagaagctacagcaagttatccagaagatctacctgagatcattgatgaaggtggccacggtaaacagagattttcaatatggatgaaatagtcttctattggaagatgccatccaggactttcccagctagagaggagaggtcaatgcctggctt

SEQ ID NO: 94662 - DNA, 420 bp, Homo sapiens
aaaaagtatttattaagcccatctaaaaagctaatgcaaattcccaaaaaaggagcacatacagatagaggaggaggccgaagtggtggctcatacctgttaattccagcactttgggaggccaagacaggaggatcactttaggcccagagttggagaccaacctgggcaacatagcaagaccctgtctcttaaaaaaaaaaaaaaaagacgggaaaagctccaaaaaaaaaactaaaactttagagcgggagtaaaccttaaagcatgtaaagccctttttggagatgaggaacagacccaggaagatgacctggtttccctgaatcccacggttagttagggcaaacttttaagccataacccagcttttttaattcccaaatacttttttttttactggcacataaagaggggggg

SEQ ID NO: 94663 - DNA, 407 bp, Homo sapiens
cttgaagatgggtttttcaaaataacccaatcagacaaaaaagaaaaaaaaagaataataaaaatgtaaataaaaccttcaagaggtgtgggaattatgtaaaacattcaaatctacaagtcatagaaattcctgagtaagaagtaaagtgtttagaaaacctatttgaggaagtaattgaggcaaacattctcatcttgctagttatttagacatccagatacaagcggtacagagaactcaaagaggatacattgcaagacagacttcaccaaaacatatagtcgtcagactatctaaagttaacatgcaggaaaaaatactaaatttaccaaaggagaagcatctaatcacctataaaggaaattcaatcagactaacagctaaacctagccccaaacccactc

SEQ ID NO: 94664 - DNA, 399 bp, Homo sapiens
  misc_feature (1)...(399): n = a,t,c or g
aattacatgcctatcatatagtaaaactgagcccatgacccctaacaggggccctttcagagcgtcctaatgacctccggcctaaccatgtgatttcactttcactccataacgctcctcatactaagcctactaaccaacacactaaccatataccaatgatggcgcgatgtaacacgagaaagcacataccaaggccaccacacaccacctgtgcaaaaaggccttcgatacgggataatcctatttattacctcagaagtttttttgttcgcaggatttttctgagccttttaccactccagcctagcccctacccccaaactaggagggcactggcccccaacaggcatcaccccgcttaatcccctagaagttccactcctaaacacatccggn

SEQ ID NO: 94665 - DNA, 400 bp, Homo sapiens
cggacgcgtgggcggtgtttggttttttggccttgttataggctactgagaatgacgatttccaaaggcacttcctatgttttcttctaggatttttatagttagagctcttacattaaaacctgcaatccatcttgaattgacttttgtttatggcaaaagggagatgtccaggtccactcttcctgcatagtaagttctaaagccaataacagctaaatgtgcaaaatgcgttctgacaggctgctacctatgtaatgatcataagaattttttataattaaaagttttttaatgtgctgaaataagattcatgatggcacgaattgtgattcgcttactttttcatgttttgatcctttgtacctaatgacttgcatagcatctaataggagaatat

SEQ ID NO: 94666 - DNA, 394 bp, Homo sapiens
acccctaacaggggccctctcaaacctgctattgaactccggcctagccatgcgagatgacttgcactccataacgctcctcatactagggctactaaccagcacactaaccatataccaaggatgcgcgcgaggtaacacaagaaagcacataccaaggccaccacacaccacctggccaagaaggccttcgatacgggacaatgctatttattacctcagaagggtttctctacacgggatttttttgagccttttaccactccagcctagcccctaccacccaactaggagggcactggcccccatcaggcatcaccccgctctatcccgtagaaagcccactcctaaacacatccgcattactcgcatgaggagtatcaatcacctgagg

SEQ ID NO: 94667 - DNA, 519 bp, Homo sapiens
  misc_feature (1)...(519): n = a,t,c or g
cttacatgtaattggagtctcagaaggagaagagaatgagaatgaaacagaacaaaatatttgaagaaataatgggcccaaattttcaaatttggtgaaatacataaatgcatagatcaagaaatgcagtgaaccccaaatgggatacatttgaagaaaactgtgcataggtacatcatattccaactggtgaggaccaacaataaagagagaatcttgatagtagccagagaaaaatggcacggtatctttggtggaacaatgctttaaatgaacgatgacttctcatcagaatttataaaggccagaaaaattgaaatgatgtttttaaagtacaaacgaggggtnnnnnnnnnngcaaaacactgttaatccagaattctatgtgtagcanaaatatcctttgtgagtaaaggcaaattactacattttcagataaaaggaaactaagagcatttattatcagcagacctgcccacagaaatgctaagggaaagatngtcacgctataaagtgaaa

SEQ ID NO: 94668 - DNA, 420 bp, Homo sapiens
  misc_feature (1)...(420): n = a,t,c or g
tgaagttgagcatcttttcatgtgtttattggccatttttatatctttcttggagaaatgtctgttcaaatactttgtccatttttaaatgtccattttttgttattgagttgtaagaattctttatctatttggatacaagtcccttgtcagatgcatgatttgcaaatattttttcccattctgagttgtcttttcactttctttttttttgagacagagtttcgttcttgttgcccaggctggagcgcaatggtgcggtgttggctcactgcaacctccagctcccaggagaattgcttgaacttggaggcagaggttgcaatgagccgagattgcgccatcgcactatagcctgggcagcaagagcaaaactccatctcanaaacaaaaaaaaagaaacatacagtatgcccatca

SEQ ID NO: 94669 - DNA, 469 bp, Homo sapiens
  misc_feature (1)...(469): n = a,t,c or g
cccacgcgtccgcccacgcgttcgcccacgcgtccgcccacgcgttcggaggaaaaaaaaaaaaaaaaaaaaaaaaaaaaaaaaaaaaaaaaaaaaaaaaaaaaaaaaaaaaaaaagggggggggggcttttaaaaaaaaacttggggggggcaaaaatttagggggggaaaaaaaaaatttttttttttttttaggggggggaaaaaaaaaaccccttggggttttttaaaaaaaaatttttttttgggggggggaaaattgggaaaaacccccccaaaaaaattaaggggttgggggaaaaaaaaaatttttaagggggagggggggaaaaaaaacctttttttgttgggggaaaaaaaannntgggncnnnnccccccgccccccgtggtggggggagtttttgggctcacccccttgttataaattttgggcttaaaaaaaatttgtttttaacgggaaagggga

SEQ ID NO: 94670 - DNA, 465 bp, Homo sapiens
  misc_feature (1)...(465): n = a,t,c or g
ttttgtatatggtgtaagataatggtctaactttattattttgcatatggatatccagttttcccagcactatttgttgaaaagacgttccttattgaatggttttggcatcctattaaaaattaacttatgatgttggctgtaggttaaatactaaaagaaggtaaaaaactaaactaaaaaaagaaaaagaaaaattgatcatatttgtaaggctttatttttagactctcggtttatttcattcgtctctatgtctatccttatgctagnaccacactgttttggttactgtaagttttgaaatcaggaagtgtgaatccttcaactttgttctatttcaagacagttttggctatttggggttccttgagattcataagaattttagaatgcaattttctatttttttaaaaaactactattggattttgatagggattgcgttgaatttgtaggttggtt

SEQ ID NO: 94671 - DNA, 420 bp, Homo sapiens
ggaggctgaagtgagaggatcacttgtgcccaggagtttgaggctgcactgtgccagggtcgtgccactgcacccctggcatgggcaacaaagtgagaccctgtctaaaaaaaaaaaaagtttccgccagatgagcactccatgagggggcttactatttctattttacaaaggaaactgcggtttaataagccccctgcccaaagttacagcttgatattatttaacaggctgagcacaggggcttcacacctgaaatcccaacactttgggaggtcaaaatggggaggatcgtttgaggcccggagtttaaaactaacctgggcaacatagggaaactccatttttatttttaacaaaagatttgtggggggggggttgttttaattacccaggctttgggggtgtatacctgaaacg

SEQ ID NO: 94672 - DNA, 436 bp, Homo sapiens
ttcagaccggagtaatccaggtcggtttctatctacttcaaattcctccctgtacgaaaggacaagagaaataaggcctacttcacaaagcgccttcccccgtaaatgatatcatctcaacttagtattatacccacacccacccaagaacagggtttaaaaaaaaaaaaaaaaaaaaaaaaaaaaaaaaaaaaggggggggccttttaaaaaaaccctggggggggccaattttaaggggggtgggaaagaaaaattttttttctttaggggggggtatataaaacccccccggggatttttgggaaagaacctttttttggggggggggaaatttgggcccaccccccccccaaaatttaaggccttgggggaaaaaaaaaatttttaggggggagggggggaaaaccccccccaattggttggggggtggaaa

SEQ ID NO: 94673 - DNA, 448 bp, Homo sapiens
  misc_feature (1)...(448): n = a,t,c or g
ccacgcgtccgcccacgcgtccgcccacgcgtacgactagtcctacttcacaaagcgccttccaaaaaaaaaaaaaaaaaaaaaaaaaaaaaaaaaaaaaaaaaagggggggggccgttttaaaaaaaccccgggggggcccaaattttcccggggggggaaaaaaaaatttttcttctttttgggggggggttaaaaaaccccgcggggttttttgaaaaaaaaacctttttttggggggggaaaaaattggaaaacccccccccaaaaaataaaccccctaagggaaaaaaaaaatttttaaggggaaaggggggaaaaaaccccctttttgggggggccaaaaaaaaaaacttgcnnnnnnaaacaacacaacactctgtgtgcaaaaaaaagtgcccgaccccccccatattctaaaggtttacatatactgactctttatgaa

SEQ ID NO: 94674 - DNA, 438 bp, Homo sapiens
actttgggaggctgaagtgggaggatagcttaagcccaggagttcaggaccagcctatgcgatgtggtgagaccctgtctttacaaaaaaaaagaacagaaaaaaaaaaaaattttccccggggtggggggggggttttttttgccccaattttttggggggttaaaaaaaaggggttttccaacccgggaaaaaaaaatggggaagggcccttggggcacccctttatttccccccgggggaaaagggccaaaaccctttgtttaaaaaaaaaaaaaaaaaaaaaatcttgaaggggggtttttaaaccaaaaatttgggttttttaaaaaaaaaaaaaaaacttttttaaagttgccccctaataaaaattcccccccctccaaaagggggggaaaattttttaaaaggggaaaaacccttcgggtggttttttgc

SEQ ID NO: 94675 - DNA, 446 bp, Homo sapiens
acaaaagtaaaacaattaaacataaattactgtacatcataaattaaacataaattagaatacatcaaaattaaaaacttttgtgcatcaaacagtaacagaatgaaaggcagcctatggaatgggagaaaaatgtttgcaaatcttatatctgataagggattaatacccagaatacacaaacaactcctataactcaacaaaaacaacaaaatagcccaatttaaaaatgggtaaaggaccagttgcagtggccatacctgtaatcccagcattttgggagacctaggtgggagggtcacttaaacgccaggagttcaagaccagtctgggcaacatagcgataccctgtctctaaaaactttttaaaaactgggcaaagggcttgaaatttctccaaagaagatataaaaatggacaacaagcatatgaaaagatgttcaaca

SEQ ID NO: 94676 - DNA, 413 bp, Homo sapiens
  misc_feature (1)...(413): n = a,t,c or g
ctagttctagatcgcgagcggcctccatgactttttcaataaaaaaaaaaaaaaaaaaaaaaaaaaagggggggggcctttaaaaaaaaccccgggggggcccaaatttaaccggggggggaaaaaaaaaattttttcttttaaggggggggaaaaaaaaacccccgggggatttttggaaaaaaacccttttttgggggggggaaaaatggggcaaaacccccccaaaaaaaaaaaaccttttggggaaaaaaaaaatttttaaggggaaaggggggaaaaaaaacccaaatttcctgggggtaaaaaaatgggncncnnnccgcaagaaaaaaagcccccagggacgacccccgtccccccgaaaattaagacttacaacccaaggcggtttacaaaacctgggcagatgg

SEQ ID NO: 94677 - DNA, 292 bp, Homo sapiens
gcgcagtcttcccgcgtccgccgattcctcctccttggtcgccgcgtccttggctggcgttagagacagggtttcaacgtgttggccaggatggtctcggtctccagaccctgtgatccgcccgcctcggcctcccaaagtgttgggattacaggtgtgagccaccgtgcctggccgaggctccttcttttatgaggagcgggaaggcctcctgcaccctggagaccgtgtgggaagacaagcacaagtatgaggaggccgagcggcgcttctacgaacacgaggccacaca

SEQ ID NO: 94678 - DNA, 376 bp, Homo sapiens
gagatttgggtggggacacagaaaaaaccataccacctgtctttatgccaggaccacactgtctgaataactgtagctttgtaataagtcttgaaattgggaagtgcaagccttccaactttgttgggtttcaagattgtattggctgtttgggatctgttgcatttccctgtgatttttaagatcatcctttcagtttctataaataaaccagataggatttgatagcaattgtgttgaatccgtagatcaatttgagaagtattgcctttttaacagtattaagtctttcaatccatgaacacaaaatatctatttaggaccctttgatttctttcaacaatgttttgcaacttgcaatatatagtcctatatg

SEQ ID NO: 94679 - DNA, 408 bp, Homo sapiens
  misc_feature (1)...(408): n = a,t,c or g
aaacaggataatcataaagaaaaccagcaccaggatacatcataatcaaattgctgaaaataactgataaagagaaaaatcttaaattcaggtagattaaaaaataggcctattaaagaggaataaaggtatgcttatcaagacatatcagaaactataaaagtcagaagataagagaatgacatctttaaagtgttgagaggaaaaaaaaagctgtcaacctagattactatatccattgaaaatatcataaatagaggtgaaatacttttttgacaaatcaaagctgaaagaagtcatcacaaacagatcaccagtatgagaaatgttaaacattgttcttcagaaaactacgatagcccttatgaanctnnnnnnnannnnnnnngnnnnnntnntnnnnnnnnn

SEQ ID NO: 94680 - DNA, 420 bp, Homo sapiens
tagggtttcaccgtgttggccagactggtctcaaactcctgaccttaggtgatctgcccacctcggcctcccagggtgctgggcttacaggcatgagccactgtgcttggcctacattttttattcttgtttgcatattagaaaaagaactttaataattaaagaaggaacagttttacaaagacttttcatttcaagctcattatcctttaaaagagaagacgattatattttcttctttttttttttttttggggaaaaccttatttccttttcaactttggccaccggaaccttagggttaaaacccaaatattggtttccattgggaagggagggtggaatttttggaataaaaaaaggaattggttaatttttgttttcggggtttaacccttaaaaagaacccccgggtgtcct

SEQ ID NO: 94681 - DNA, 417 bp, Homo sapiens
  misc_feature (1)...(417): n = a,t,c or g
ttacatctacattgaaaatctgttactgagtatagccacctttaacaatggtcttagctggatctggataaactcctgcagcttctacatcagcactttctgcttcaccttgcacttttatttatggagatgacttctttctttaaacctcataaaccaacctctactagcttcaaacttctgtagcttccttacctctcagtcttcatagaattgaatttagaaccttgctctggattaggctttggcctaagggaatgttgtggctggtttgattttctatccagaccactaaaactttttctccgtatcagcaataaggttttcttaggtgtttactggagtaacacttctaatttccttcaagaattaatgggtnggcacaagaccctagctntattagactgtcgtggcttt

SEQ ID NO: 94682 - DNA, 507 bp, Homo sapiens
  misc_feature (1)...(507): n = a,t,c or g
agagaaaaaaaaannagnaaaatttggaccggctgtangaatttttcgaccgcctgcggtactgtcttagtttgctgaggataatggcctctagctccatccgtgttcctgcaaaagacatgatctcgctgttttttatggttgcacatcttttgttctaacgtttggtctttgaccctggttcctgacacagagctcctaaatcccttggaattttctgggtgataggagtgtcctttgttctcatgaggtgactcttggtgggctccttatttggagactggtcatcaaaaaacctcactatgggtggaagcgttgtgctgtcagccccattccccatcctctggggtaggaaatggagctggagctcaatcatacctacgtgataaagcctccagaaaactccttgaaagacaggacttggagagcttccgggttggcgaacacatccatgttccaggagagtggtgcaccccaactccacaaggacccttccagacctcaccc

SEQ ID NO: 94683 - DNA, 403 bp, Homo sapiens
cacgattctcctgcctgccgagtagctgggactacaggcgcccgccaccacgcacggctaattttttgtatttttagtaaagacagggcttcaccgtgctagccaggatggtcttgatctgatctaggcaaagattttatggctaagacctcgaaagcacaggcagcgaaaacaaaaaatatacacatgggactatattaaactaagaagcttcttttctgcacagtgaacgaaacaatccacagagtgaaggagacaatcaacagagtgaaagagaaaatatttgccgactattcatccaacagaggactaatatccagcagacaagaaactcagactactcaatggttgaaaaaaataaataaaaatgctctgtgtacattataggtcctgttaaaacccc

SEQ ID NO: 94684 - DNA, 417 bp, Homo sapiens
gtttatttctttctcttgcctcattgctcagggttaggtcttcactgctatgctgaataggaggggtcaaagtaggcatccttgtcttattccagttcttagaggaaaggctttcagcttttccctgtttaggatggcgttagttgtgtgttcatgcaacatttatcatgttgagttatgtccccttcatgcgtagttcctgtggacaggtttttttttttttaaatcatgaagggatgttgaatgttattaaaagactttcatcccatttgaatgtgaggggccacattaattgatttgcctatgtggaaacctccttgcatccctgggataaaccacacttgatcggggcaaaatatctttttgatgggtcgaggaataggcgggctaccatttggccggggatttttgcatctg

SEQ ID NO: 94685 - DNA, 464 bp, Homo sapiens
  misc_feature (1)...(464): n = a,t,c or g
cttgagnactgagacattacgccagngcggnggaattcgtcaaaaaaagaaaaaagaaaaattcctcatgacctggggttaaggttcctagacatgacaccaaaaacatgatccaccaatggcatgatggataagacttcatcaaaattaagtctgtgcttcaaaagacactatcaacaaagtaaagagagaataggagaaattacaaatcatatacctggtaagagacttgtacccagaatatataaagactcttactacccaataagacaactaaaaaaatgggtaaataatttgaataaacactgctttaaggaagatacacaaatagccaataagcacaagaaagaatgctcaacatagtatcagagaatagcaaaccaaaactagatagagatcccatttcatatccactagagtgactaaaatcaaaatgtcaggtaaacaagtattggcaaggatgc

SEQ ID NO: 94686 - DNA, 460 bp, Homo sapiens
  misc_feature (1)...(460): n = a,t,c or g
aatcgagtagcgttcactaggccanngggtggaattctctttttataaatacctagattcaatttgctaatattttgatgagaacttttgcatctaagttcatgaaggatactacactgtagttttcttttttgtgctgccgttgtctccttatggtatcagagtaattctaaccttataaaatgagttggagcgtatactttccattttctggaacaggttttgtaaaattggtgctaattcttcttcacatgtttggtagaattctccagtgaaggcatctgggcctgatgatttggaaacttttagattatgaattcaatttctttaatgattataagactactcaaactatctgtttcatcttggccacctggactttttgaagaattggttcatttcttctaagctgtcaaagttatgagtgcacattttcaaatctacctttatgatccttcaa

SEQ ID NO: 94687 - DNA, 567 bp, Homo sapiens
aacgatgtcttgaaggaaacctaggtacaaatctttgtgattttggattagacattttttaagtaggcacaaacaacggaaaaatagataaatggacttcattaaaataaaaaacttgtatgcttcaaaggacactgtcaaggaagtgaaaagataatccacataatgggagaactatttccaaattgtatgtttgacacaggtctagtacctagagtatataaggaattcatataactgagcaataaacgacaaccacatttaacaatggggaaaaaaagctgtgagtagaggtttctctaaaggaaacacacaaatggccaagaagcacatgcaaagatgttcaatgtttttcgtcattaggaaaatgtaaatttaaacccaaaatgagataccacttcacacccagcagtatgacttaagaaaaaaataaagacaacacatgtttcaaaagtgatggagaatatggaattctcatatattactattggggaatctaaaatgatgtagctactgaagttagtaaacagtgtgtgagttcctcaaaaagtgaaacataaagtgaca

SEQ ID NO: 94688 - DNA, 485 bp, Homo sapiens
  misc_feature (1)...(485): n = a,t,c or g
tggatggggnnnnnaatgagaccctatccatttgagtggcattccccggcacgagaattgctcgaacccaggcggcagagcttgcagtgagcggagatcacatgactgcactccagcctgggcaacagagcaagaaaccatctcaaaaaaaaaaaaagggcggggggggggggttcccccctgaatccccaccttttgggggggttggggcggggggatcacagggccgggaaatgaaaattttcttgtttaaccggggacccccccccttttattaaaaacccaaaattttacccggggtggggggggggcccttgtacccccactttttgggggggttggggcagaaaatgggtgtaaccccgggggggggatttggcgggggggcggattttgcaccaacccaaaaaaggcccattgcggggggcccgggcccaaaaagggaaactccttttaaaaaaaaaaaaaaaaaagggggcccttcg

SEQ ID NO: 94689 - DNA, 466 bp, Homo sapiens
  misc_feature (1)...(466): n = a,t,c or g
atcgaaaaccccttttgagacattaggacanngcgnggaantcgactgtataacaagaaggcctagacaagaaatcttttcccggactggttccatctattcttcaggttcaggaagcccatgccagtaagggactgctttttattttgatattggacagtgcccttggccacccagaaccccatgagttcaacaccaaaggcatagaagtggtctacttgcccctaaacacaatgtatataattcagcctctagatcagtgaccataggaaccttaaagtttcattatacatggcactctatggaaaaaattgccagtgctatggaagagaatctcaacagagaaaacatgaaagtctggatggattacaccattgaatatatcattgttatagaaaaagctatgaaagtcatcaaacccaaaacaataaattcctgctggaaaaaaactgtgttcagatgttgt

SEQ ID NO: 94690 - DNA, 461 bp, Homo sapiens
  misc_feature (1)...(461): n = a,t,c or g
cattgacatagatgggcactcgcccagngcggnggaantcagcattaatatataaaaaattgataaattgggcttgatcaagtttaaacatttctgttcatcaaaagacacattaagaaaatgaagaggcagggcaaacctgtgaaaaaacacttaagacacctctaacccaggactcatatccagaatacataaagaactcctgcaaataaacaatagaaagataacccaacaaataagggagggcaaacacatctactttaggacccagcagctcctcttctagttacttacacaagagaaattttgaatgtacataacaaaaaggtatacagcagccttattcataaaaaccaaaaactggaaaagcacccaaatgtccatcaaaaggtgaatagataaataaattgtggtatatttgtaccatggaatactgctcggccataaaaaatgaataaatt

SEQ ID NO: 94691 - DNA, 457 bp, Homo sapiens
  misc_feature (1)...(457): n = a,t,c or g
gtgtgnnnnaatgacatcagagctaggacgngcggggaantctaagaccagactgggcaacagagcaagaccttgtctctactaataatttatttattatcgcgcacgcgcgcacacacacacacacacacacacacacacacacacagggagggttcaaaaaacaaaaaccagactgggcaacagagcaagaccttgtctctactaataatttaaaaattagcgcgcacacacacacacacacacacacacacacacacacagagccagagttctaaaaacaaaaatctatattgggggcctgtgaatagatatctctgtttcttcagtctctgtaaaaaattattatatactaagattctcaggatatctgctctcaatctctatggagaacactccactctgacgtgcacacttattttcccagagatgtatgtgctctacagataaaagaaag

SEQ ID NO: 94692 - DNA, 464 bp, Homo sapiens
  misc_feature (1)...(464): n = a,t,c or g
cgtgtatnnacctgactgcatagcatacgacagngcggnggaannnattaggataaagagggaatgcatgtgggccttaatacctgggtgatgggtttatattgcagcaaaccacagtggcacacatttaggtatgtaacaaacctgagtgtggtgcacatgtaccctgtaacttaaaacaacactaactttacctgccaagttttttaaattattaatgactgttaacatttatcaaacgcttcttctgactcaattaagatgatcatgatttttttctcttactagttaatgtggataattataattttcaaatgttaaaccaacctcgcagtcctagagtaaaccccatttggtaattgtgtagcatcctttaatatctatatctatattgctgttttcttgcatatattttcatgagagagattggcctgtagtcttgaaatgtctttgtcatgttttga

SEQ ID NO: 94693 - DNA, 469 bp, Homo sapiens
  misc_feature (1)...(469): n = a,t,c or g
aggaagttacacggngtnnnnnnnaactgatgacnactgatagcgctgcggaantcatgacatgcagcaggatgcagcaaacattaaacttctgagatataagtctgagaagctgtaagaggaaaactctacctcaagaaatgaaattaccatcctaagtgaagaagacagctttactaacgtgaaactagaaaattaaatgaagactgtgaaacagaaaaaaaaaacttcaaagaaaactggagtttataagatggctattaagaagcagatttcagaattcaaagggaaaacctctaatttttactaagagcagatcaatacttaggaaaaaaaaaaccttttttttaatttaggggaccaaagttttatttttttttgggggatggggggatttttttttgcgaaagtttatttttggaaaaaacttacaaaaatttcctttttaattacggccagttggttcacn

SEQ ID NO: 94694 - DNA, 378 bp, Homo sapiens
ttatgtagaccctaggcagtgtggtggaattctgaaaggagtactcaaaggtgagtttactatctctaatgaaaaagctaatcctggcaggggcagtccctccagtgtcagcaaggaccctgatgtcaaaacatcaaaactatagaaagtaaaaagacatgcttaatacagaagttaataaaggttaaagcagaaatatatgaaagagagagcagaaaaacaatggaggaaatcaatgaaaccaaaagcagttctttgaaaagataaaaaaattgactaactttagctagactgaccaagaaaaaaaagaagactcaagttctgaaatcagaaaagagggaatattaccaccaaccatacagaaataaaaagggttga

SEQ ID NO: 94695 - DNA, 443 bp, Homo sapiens
caccacaaaaagtaatttattggagccaggtgcagtggtacatgcctgtagtcccagctacttgggaggctgaggcaggaggattgcttgagcccaggagtttgaggccagcctggaagcacagcaagacattgtctctaattttctttaaaactcacttttaatttaaaaactttaaaaaagtaatttcaaaaaaataaagacgtttaaaaatgtattggtcatcacatgactttattcttatttgtcctttgcaagaatccagattatatgacacatatatacttactcatgcacaaggcaaactgactgaccacatcactcctatgtagaggagaaggtacaggttttttgtctgtctctttgtttgttttgtagagagacagggtctctctatgtagcccaggctggtctcaaactcctgacctcacgtgatcctccag

SEQ ID NO: 94696 - DNA, 480 bp, Homo sapiens
  misc_feature (1)...(480): n = a,t,c or g
ganaaaagnagggagggatttgagacatagaccacgtgtgggaattcgagacggtcttttaccatgttggccaggctggtctcaaactcctgacttcagatgatccaaccgccttggcctcccaaagtgctgggattacaggcgtgagtcaccgcaccaggccatcttcaggtcattttaacaatacccctgagccacctgaagcttcctccctgtcctctcaccccaaacttcataaatcccctgtgacttaaaatggagctggactcatgggtccagcaagctcctcagctgtgtgttgaatggtcccatttctttggtccattcaacactcaggctcaggaagggtggtccacagggaaatataagtcaaataagccttatggccccaccctgaccgcttgagggccacggttagggttgagctctttgtatattatgccagggaatgcggtagctggacctgtgcacaatgccagg

SEQ ID NO: 94697 - DNA, 445 bp, Homo sapiens
  misc_feature (1)...(445): n = a,t,c or g
ggcagcnnnnnnncctgactgcctaccatagcccagtctggtggaattccaatcgctgtctaagcacagttaacgcccacacagccccagggaagggcagctctgcacaaagggcatgtctgaaggaaaacagcaccaacatgtttgtttatggcagagaaaaaccaagctgcttctttcttcctcttccccttcccctcaatctgtattaataaagagactttaaaaaaaaaaaaaaaaaaaaaaaaaaaaaaaaaaaaaaaaaaaaaaaaanacgccaaaaaaaaaaaaaggggccggaaaaaccccgaaaacaacccggggggggccttttaatatccaaaattttggtggtggccccccccccaggcttttttttaacgagggaggggccccccccaatttttttttaaaaaaaaaaagagaagttgcggtccccagagcg

SEQ ID NO: 94698 - DNA, 476 bp, Homo sapiens
  misc_feature (1)...(476): n = a,t,c or g
ngtagttncccaggntgnnccaanccaggganncctagnnagctnngcannnnccacgaacccgggaggcagaggttgcagtgagccgagaccacgccactgcactccagcctgggcgacagagcgagactccgtctcaaaaaaacaaaaaaaaaagagagatgcagggcctgggtgtgatcgggcccctggccccagcccctggctccagctgcctccttgcaggaaacccactggacaagggaggaggtgttgatctgtgaggggcagccagcaaccactctcactgtggggaacttggcaaaggacagccccaggtattcaccaaatcaactgtaaggaaaagaaagggatggcgtggaagctgtaggggaaagagatttaaaagacacatcagataaaaaagtggctcaaactaagctgtcatgtttaaagatagagatattaaataatttgacctaaatgaaagtgtagaa

SEQ ID NO: 94699 - DNA, 477 bp, Homo sapiens
  misc_feature (1)...(477): n = a,t,c or g
gggagttcccnaggaagnnccaaactgagannaccttagcnangtnagcaagngcggnggaantnaatactgntagaagaatggaaaaaactatatagatggagagaaaatattagtaatctgatatctgataaagaactcatatgctgaataaataccaaacatttaacattcaacctttgaaaacaaagaatccaactaaagatgtaaatgatttgaagacattcaccaatgaagacacgcagaaatacacatacattcaccaatgaagatacacacatgaaaagatgatcaccataattattcattaataatgcaaatgtcaacagcactaagattcctctacccacctattacaatggatagaattcaaatacctgagaatatcaaattctggagaggatgtgggattctcattcatagctggtagacaagaaaaatgtttcattcactctagaaggccttttggccctttcn

SEQ ID NO: 94700 - DNA, 1390 bp, Homo sapiens
  misc_feature (1)...(1390): n = a,t,c or g
ctttttaaaattttatttgcagattgttcattgttagtttatggaaatgcaactgacttgtgtgtgttactgtatcctgaaactttgttgaatttcattattttaccaatattttgggaatttcaggatttttacccattacatcctgttgtctgtgaacaaaattttgtactttttcctttccaatttgcatcctttttattactttctcttgactaattattctgagtagaaattccagtactgtgatgaatagaagtggcaggaagagatgttgctatcttattcctgatcctagaggaaaagattttagtttttcaccattcagtatgatgttagctgtgagcttttcatgtataatctttatttactgaggagtttccatatattactaattctttgagtgtttttattacaaaaggtgttcatctggctctggaaccagataaatgttgacctgatagaatggattggaatgtccccttctggtttttgtacatttttggaatattttgcaaagggctggcattaattcttcttgaaatgtttggtaaaattctccagtgaagttatctggacctggaattttcttttttggggnnnnnnnnnnnnnnnnnnnnnnnnnnnnnnnnnnnnnnnnnnnnnnnnnnnnnnnnnnnnnnnnnnnnnnnnnnnnnnnnnnnnnnnnnnnnnnnnnnnnnnnnnnnnnnnnnnnnnnnnnnnnnnnnnnnnnnnntggttgctcacattagtctcttgtaatctttttcatttctgtggcatctgttgtactgtcacctcttttatttatgattttagtatttgagatttctctttttttcttaatatagctgtgagttttaaaatttttattgatctttaaaaaaacaaactcattgtttttttcctttttttttctgggtcttattctgcttatctctgctctaatctgttattttcttccttttgcttggtttgtcattagttttttttccccccttcaggtgtaatgttaggttattgatttgagatctttcttctttttaatttaagcacctgcagctataagcttccctttagcaagggtttcagatctttcttctttttagtttaagcatctgcagctgtaagcttccctttagcatgggtttgagatctttcttctttttaatttaagcatctggagctgtaagcttccctttagcactgcctttgttgcctcctcctgagtttgggtatgtcatggtttcgttttcatttgcttaaacatttttttgtcctattgtaatataattgtgttgtttttaatagaggtaattaatgaaacacataatgaattgtgcttctgtttttataatattttaaggcattcttaactcaggaaatgtaa

SEQ ID NO: 94701 - DNA, 466 bp, Homo sapiens
cgcccccaatggaggccctcgaactgagcacattaggacagagcggcggaattccccacagagaacccactagaactaataagtaaagctagcaaggttgaagaattcaatgtcagtatacaaagaccaattgtatttctgtgtattagcaataaacaattggaaaatgaaattttaaaaattcaatttcattagcaatttcagtagcatctaaaaactcgaaatatggaggaataaatttaagaaaatatttgtaggacatgcacattgataacaagccctaaataaaaatagaggtggactttgctcatggagtgctacatcagttctcccaaaactaattgataatttcagtgcaatctctggtaattatagcagattttttttttttggggaaattgagaagctgaatctaaaaccgatatggaaatacaaatgagtaagagtagccaaaacagtaagttac

SEQ ID NO: 94702 - DNA, 436 bp, Homo sapiens
  misc_feature (1)...(436): n = a,t,c or g
aatcgtagaccactattgagagccgtggaanncctggactcaactaatgatgctggaaaaaccgcatatccacatgcaaaagaatgaagttggaccctaacctagcaccatatacaaaaattacctcaaaatggattcaggacataaacataagacctgtaactataaaaatcctgaaagaaaacagggggaaaggtctacaacattagatgtggcaatgatttttttagatatgaccccaaaagcaagaatagacaaataggaccaagtcagactttataaaaactgcacagcaaaggaaacaacagaatgaaaggcaatctgtggaatgggagaaaatattgcaaatcagatatctaataaggaattgctatccaaaataaaatttagactcctaccactcgacaacaacaaacaactcacttagaaatgggca

SEQ ID NO: 94703 - DNA, 392 bp, Homo sapiens
tttaaattgaggataagtccacacagcattaattcattatataaaatgattaattgagtgcatttaatgcattcagaatgttgtgcaactcccacctctttctagtttctgggttgtttccacttttagttattatgaataatgcttctgtgaacatttgtatgcaaacatttctcttgtgtgtattcctagaattggaattagtgggttttatggtaattcagtgtttcttttttttttttcaaggaactgcaatactattttccacaatggctaaaacattttacattcctaccaacaattgcccaggtttcctatgcctccgcttcattgccaacacttgtaattttttggtttccttctttatagccatcctactatgtgtgaggggg

SEQ ID NO: 94704 - DNA, 458 bp, Homo sapiens
cgatcagggacccacttgaggaggcagtctgtccgttcgccgatctcaaactccatgctgggagaactactactctctttagagctgtcagacagggacctttaagtctgtagaagttactgctgccttttgttcagctatcccatgtccccagaggtggagtctacagaggcagtcaggcctccttgagctgtggtggactccacccagttcaagcttcctagctgctttgtttacccactcaagcctcagcaatggcagatgcccccgcctccagcctctttgccgccttgcagttcgatctcagactgctgtgctagcagtgagcgaggttccgttggcatgggaccctctgagccaggcatgggatataatctcctggtgtgccgtttgctaagaccattggaaaagcccagtattagggtgggagtctccctattttccaggtaccatatgtg

SEQ ID NO: 94705 - DNA, 461 bp, Homo sapiens
  misc_feature (1)...(461): n = a,t,c or g
ggcgatnnnnnnttcgagaccactagtccgtgcggtggaattccttgattctcgagtgagaattgcttgaatctgggaggtggaggttgcagtgacccaggattgcgccactccactccagcctgaatgacagaaagagactctgtctcaaaaattaaaaaaagagacctaatatccacctactatctgtcttcatttttggttactgcccaccacagcttctttctattgcccagacatccctcctattcacctctgatccttcattcacatcctcccatcatctctcaaaaactacttgtatatatgcatatgtatatatgtgtgtgcatgtatctatgtttatcttcacacggctaagttgaggaaaaatttcccccattttctttttgtgtctctttttgtcctttctttcttatcccaccaaaaataaacagagaaatacaacacaacatgattga

SEQ ID NO: 94706 - DNA, 454 bp, Homo sapiens
  misc_feature (1)...(454): n = a,t,c or g
agccaaaccttttgaanccccnnnnnattgtagatccatatcagtgtggtggaattcctcacatccaaactatatgggactcttacaagtcaatataataagaagacaaacattctgattaaataaatggggaaaagatttaatgcacattttacttaagaaggtatatgaatagttaataagcacatgaaaaggctcccaacttcatcagtcattagggaaatgcaaactaaaaccacagtgggattccgcagtgtactcactagagaggctggaattaagcagacagacagtaccaagcgtgggtgagaaagtggagcaactctaccctcctgtgttgctggtggaaacacagagtgctacaacccacttggaaccacagcttggcagttgcttatttacaaaatgatctggcaacttcacttttatgcacaaaaagatatttatgtgaatg

SEQ ID NO: 94707 - DNA, 452 bp, Homo sapiens
  misc_feature (1)...(452): n = a,t,c or g
aggcgggggnnnnnnnnnattgaatagcatgacctctagnccgngcggtggaattccagcattttgagaggccaaggcaagaggaatgcttgagggcaggagttcgagaccagcctgggcaacatagcaggactcaatctctaccaaaaaaaaaaaaattttttttttaagtcaaaacctttttaagagcgtcacctaaaaaaaacactattcctttgggaaagaataccagaaaagagagctgggatctgaaaagaaaaaggccacccacgggggaggcttccttctaaaggctggggacggcctgacaaacttgctaaagcaaaaaagggcttattagttctctgtagaggaagaattttaaaaagcattagcaccattcgggtaccagcagaccaatcgggttctcccaaaatttattatttgcagttgaaactgtgataagtaattac

SEQ ID NO: 94708 - DNA, 448 bp, Homo sapiens
  misc_feature (1)...(448): n = a,t,c or g
gggatagaagaccctagaacannncntttgatgactcttatacagngcggnggaattcgagccactgtgcccagctgcctgactttcgtattttttgcagagatggggttttgccgtgttgtcaagggtggtctcaaattcctggtcaagtgagttgcccacccacactggcctcccaaattcctgggattacaggtatgagcctggcctagattcttctatttttaaaagagtttcctatagaccccacacttccatttaaccaccaccccatctctgctactcttcacacatataaaagtttttttttttaattttattttctttttttttttgaaaacaaattttaatttttttgcccaggttggagggcataaccgcaatttgggttaattgaaacttccacttccgggtttaaagcaattttcctgcctaaccctccggggag

SEQ ID NO: 94709 - DNA, 518 bp, Homo sapiens
  misc_feature (1)...(518): n = a,t,c or g
gttnagtagggcgggngcccccnnnnaattgaaaaactgagnancactgcgaagngncgnggaanncggcaaatagatcagtggacaagaattgagagctgagaaacagacccacgtgaatatagtcaactaatctttgacaaaggagcaaatccaattcagtggagaaaggcttttcaataaatgtttctggcataactggacatccacatgcaaacaaataaaaaagaacctagacatagtccttgcatcttttacaaaaactagcacaagccacagactacgtgaaaatctttacaggatacatatctaataaaagactggtatccaaagtatacaaataattcttaaaactcaacagtaagaaaactcaattttaaaatgtgcagccaggtacagtggctcgcacctgtaatcctagtactttgagaggtcaagatgggaggaaaacttcaggccaggagttcaagaccagcctgagcaacatagggagacccccatctttactaaaaataaaa

SEQ ID NO: 94710 - DNA, 490 bp, Homo sapiens
  misc_feature (1)...(490): n = a,t,c or g
catcgagaactgaaggccgtgncgnnggaacccaactacacagtagggaaaaaaagaacagtccctttaacaaatagtattgggaaaactgaatattgacatgcaaaagaatgaagctggactcttactttatagcatatacaaaaattaactcaaaatggattaaagacctaaatgtatcacttctcggccttttggctaagatcaagtgaagtcctaaatgtaagatccaaaactattaaacttctagaagaaaatagaagggaaaggatttaggacagtaatttcttggctatgacaccaaatgcaaggcgacagaataaaaaaacaaacaaacaaatgggactacatcaaacttaaaaacttctgcatagccatacaaaacaatcaacagaatgaaaaggcaaccaacagtatgggaagaaataattgcaaatattatatctgataaggtattaatatccagaatatgtaaaaaaacaaatagatn

SEQ ID NO: 94711 - DNA, 489 bp, Homo sapiens
  misc_feature (1)...(489): n = a,t,c or g
aggagccgggnttnnctnnnaatcgacttgcctacgtcgtgtcgnggaattctctaagaagcgtcagcctgtcctttgaaactttgaaatgaggcattgatttctctctagcattttcttctgatgtaaggctattttgtctgaattgaaaatctgttgtttagccattttcatcaattatctcagctagatcttcttgataacttgctgtagcttcttcatcagcacttgctgcttcaccttgcacttttatgttgtaaagatgacttctttcctttcacctcatgaaccaacctttgctggcttccagctttcttctgtggcttcctcacctctctcagcctatatagaattgaagagagttagggccttgctctggattagactttggtttgaggggaattacagctggtttgatcttctgttcagatcactaaaactttccctatatcaacagtaagcgtgtctctcttattattcgtgtgttca

SEQ ID NO: 94712 - DNA, 341 bp, Homo sapiens
catctatggtcaactgattttcaacaagggtgtcaagaccattcaatagagaaagaatagtgttttcaatagatgctactgggacaactgaatatccatatggaaaagaatgtggtttggacccctacctcacaccacatacaaaaattaattccaaatggatcaaagacctaaatataagaactaaaactttgatctgcagtagctggaggaaaaaaaaaagagagaattttttaaagaaaaagagaaaaaaactataaaactcttaaaaggaaatgtagttggaaatcttactgaccttgcattgggcagtagtttcttaaatatgacaccaacagcac

SEQ ID NO: 94713 - DNA, 354 bp, Homo sapiens
gaaaatgtatgcgtttgatctagaaatcccagctgtaggaagttcgctaaaaaaggccaggtgccgggaggcagaggttgcagtgagctgaaataatgccactgcactccagcctgggtgacagagcaagactctgtctcaaataaataaataaataaataaataaataaatgaataaataaatacaaaaaaaaatagagcatcagtagagcaaaaagaaaagcaagaaatgataaggaagtgtggtaacgaggagtataatatgcaatagcaggttttgacagccaaaatatcaataatctcgatggaattgaattggggcccgttgagatggctcatgcctgtaatcccagc

SEQ ID NO: 94714 - DNA, 351 bp, Homo sapiens
gtcgacgcggccgcggtttcaccatattggtctgggctcaaactcctgacctcatgatccacctgccttggcctcccaaagtgctgggattacaggtgtgagccactgtgcccggcccatatgtttgttttttaaaagacagggtttcactctgttgcccaggctagagtgcagtggtgggatcatggttcactgcagcttcaacctcttactctgaggtgatactaccacctcagtctcctgggactacaggcgcatgctgcaatgcttgggttttttgtattttatgcctacccagggatcacccttttgccccgctggccttggatttctggtctgaatgaactaccg

SEQ ID NO: 94715 - DNA, 350 bp, Homo sapiens
  misc_feature (1)...(350): n = a,t,c or g
ctctacaaaccacaaagacattggaacactatacctattattcggggcatgagctggagtcctaggcacagacctaagcctgcttattcgagccgagctgggccagccaggcaaccttctaggtaacgaccacacctacaacgttatcgtcacagcccatgcatttgtaataatcttcttcatagtgatacccatcataatcggaggccttgagcatatggattctgcctaataaaaaacatttattttcacttgcanggaaaaaaaaaaaaaaaaaaaaagggaaaaaaaaaaaaaaaanggccccccgggcccgaaattcggggcctttaaaaaaaataccggaaaag

SEQ ID NO: 94716 - DNA, 362 bp, Homo sapiens
gtgaaccaagatcacatcactgcactcccagcctgggcaacagagtgagactgtctaaaaaacaaacaaacaaaaaattaattttaaaaactttaaaaaaaggttgatagttgatctcaaaataaatgtgccccaatatagtgtacctatggtggaatctcaataaacattgtttagtaaatattgtttcaaaacagagtagtaacatattcaaaatttttactatcctcagttatgaaactagttaagtaggctgggtgcggtggctcacacctgtaatctcagcactttgggagactgaggcaggaagatagcttgagctcaggggtttgagaccagcctgggcaatgtagcgagaccct

SEQ ID NO: 94717 - DNA, 350 bp, Homo sapiens
  misc_feature (1)...(350): n = a,t,c or g
atttattttttaacaaggtctcactctgtttcccgggctggagtacagtggcacagtagtggttcactgcagccttgacctcccaggttcaagcgatcctccccacctctcagcctcctgagtagctgggaccacagaacatgggggncatgnntnncnnnnnnnnnnnntnnnnnnnnnnttnntnttgnggggngggtgggggggaaaaggagtgttgtggagtgtttgttttttattattttgaaaaatttttttggttttgagtgaaaaggttataggtgaaagaaaaaaaaaaaaaaaattgggaaggntttatagaaattgaattttctctacaaaaaaaaaga

SEQ ID NO: 94718 - DNA, 367 bp, Homo sapiens
cgggcttgataattcaatacttaatttttataataaggactcaacactaattttttaataaaaataacaaatgcggaaaaaaaaaaaaaaccaacccaacccaccccataatttccctgcaaaggtggggaaaggggacccttttaaactaagaaaactcccagggggcggctttttttaatggccaaggaaaggggcaagaaacaaaagggataaagggtttcggaatttttacccccctcaggacaaacaaaagttaatttgaaagggccatgaaatatatttattatgataaaacctttccgttaaaaagggtataccaaggttttttggtaacccccttacagggataaaagacacaatttat

SEQ ID NO: 94719 - DNA, 299 bp, Homo sapiens
tttttgggtataatggaattgttctatatcttgattgtggtgatgatgtatcaatgttaaattccccgagttgataactactgtggttatgttagagaacatcttttttcttttctttttttttttaaacggagtctcgtttggtcacccaggctggagcgtaatggcgcgatctcagtttactgcaacctttgcctcctggattcaagcaattttgcctgctttaatttgctaaaaaaccactgttacagggacgtgcccctactcctaaataccttatgtattatttttaaaaccta

SEQ ID NO: 94720 - DNA, 279 bp, Homo sapiens
  misc_feature (1)...(279): n = a,t,c or g
ttttttcttcttcttagtcttctccttcttcctgctccgtctttttcttcttccttctccttcctctcctcctccttcggtctttttctttcttccttcttccttctccttggtcttgttagcagagacttacttactctgtcacagactaaagtgcagtggcgtgatctcggctcactacaacctttgccttctagattcaagcgattttcctgcctcagcctcccgagtagctgagattacgggcgcacacctctatgggnggnngannngnncgnn

SEQ ID NO: 94721 - DNA, 383 bp, Homo sapiens
cgaattttatttctttttttagccaggcgtggtggtgcatgcctgttgtcccaggtactcgggaatctgaggcaggagaatgactcgaacccaggaggtggaggttgaggcaagataatcacttgaacccaagaggcatagggcgcaataagccgagatcacgccagtgtactccagcctgggcaatagagggagactccatctgagatgattaaaaaaaaaagggggttacccctggtggctgaggggggcccaaaccttttgactataaaaaaacccttttgcttggccccttgagctttccggggtccaagaaagcctcccctgacccgatatggcatggcctttttaattttgaaaaaaaatatttatttgggaatggg

SEQ ID NO: 94722 - DNA, 375 bp, Homo sapiens
  misc_feature (1)...(375): n = a,t,c or g
cccatctctactaaaaaaattagccaggcatagtggcaggtgcctgtaatctcaactactcaggaatctgaggaacgagaatcgcttgtaccagcctgggtgacaaaagtgaaactccacctcnnaaaaaaaaaaaaaaaaaccccccccccaaggggccgggggcccaaacttttgaaaccccaggctttgggaagcctaaaggtaaaattaaagtttaaaatttttttcaaaaaaaaaggcaggaaggccccctttttgcctttcaattttaaaactaacctccctaaaaaggcaatttttttggatacccccccccccctggcctatttcaaataccttattcccccttggttaaccggctccattttaatt

SEQ ID NO: 94723 - DNA, 386 bp, Homo sapiens
gtaaagcaggggctgggtgtggtggctcatgcctgtaatcccaacactttgggaggccaagacaggaggatcacttgagcccaggagttcgagagatcagcctggacaacaaaatgaaaccccatctttacacctaaaaaaaaaaaaaaaaaaaaccgtgagccctttttccgggggggggggtttcggacttaaaccccttcttataggggggcccagggggggggattgtttgcccctttctcccccgccccgagattccaaatttttaaattggaaaatccgaaaaaccccggagggttcttttaatgggggagggggcccccttcaaaatttttttttttaaaccacggttggcccttttttagggacacaaaccccctaaa

SEQ ID NO: 94724 - DNA, 392 bp, Homo sapiens
  misc_feature (1)...(392): n = a,t,c or g
ctgcagtgaacacacaaatgatgagaaagtgaaagagccttattgctgatgtggaggaagtttgagtggtctggatagaagatcaaactagccacaacattcccttgagacaaagcctagtccagagcaaagccctaaatgaagagcaaagccttctatgaaggctgagagaggcaaggaagcagcaaaaggaaagttggaagctagcagaggttgattcatgaggtttaaggaaaacaatctgtctccataacataaaagtgcaaggagacacagcaagtgctgatgtcgaagctgcagcaagttattcataagaccaagctaagatcactggtggatgtggctacactaagcagcagattttcaatacagatgaaacagccttctattgn

SEQ ID NO: 94725 - DNA, 350 bp, Homo sapiens
aaataatggctgcttccttcttttctaccaacaatcagcataggctttattttcattgtatcatcaacagattttgtgttttaaaaaacatgtagtatatttttaaacatatagtatagtggccattgtaatgagattttatttctttattattttttattttttgagatggagtcttgctgttgtcatccaggcctgctgttgtcacccaggcaattggcacgatggctcactgcaacctctgcctcctgggttccataaattctcctgcctcagcctcctgagtagctgaggttacaggtgcccgccaccatgccaggctaatttttatatttttagtagagatgggg

SEQ ID NO: 94726 - DNA, 297 bp, Homo sapiens
catcaaagaaaactatggaccatatccttgatgaacattgatgcattataccaacagagttaaggaaaaaaacataatcatttcaattgaagctgaaaaagcatttgatagaattcaacatccccacatgataaatatctcaacacaataaaagccgtatataacagacccactgctagtatcatactgagtgggtaaaacctgaaagcctttcctctaaaatctgtaacacaacaaggatgcccactttcaccactgttattcaacataatactggaagtcctgtcgacgcggccg

SEQ ID NO: 94727 - DNA, 377 bp, Homo sapiens
ctcaggagcatgttcagatcttttgcccatttgtaaattgggttgttctttttcatattgttgacttcagctttttcatacactttgaataacagtctttaatcatgtctcctgcaaatattttcttcctatctgtggcttattttctcattctgatgacagtatcattctcagagcaaaagctttcatgatttcaacaaagtgcaacatttatcaatatttttttcatggctcatgcctttggtgttggatctaaaatatcataatcatgcccaaggttatctagattttctcctatgatatcttctagaagttttatagttttgtgttttatatttaggtctatgatccattttaggttaattttagtgaaaggt

SEQ ID NO: 94728 - DNA, 361 bp, Homo sapiens
gggaaaccaaaaaaataatgtgacttgctttattgtgacattcgctttattatgatggtctggaacccaatccacattatctctcaggtatgtctgtagggtccagaaatataccaacatgtatatggtcaaatgaccaaacaaagatgtcaaggtaattcaatgtggcaaaagacagtcttttcaacaaatggtgctagaacaaatggattttcttttggaatataaaacctcaactcctacctcacaccatatagaaaaattaaatagaaatggatcagagatcaaaatataacagttactactaaacttttagaagaaaacatgagattttcttttgcatttggtataggcaaagatt

SEQ ID NO: 94729 - DNA, 341 bp, Homo sapiens
  misc_feature (1)...(341): n = a,t,c or g
catgctcctgacaccatgcccagctgattgttgtatttttagtataaacgaggtttcaccatgctgtctaggctggtctcaaattcccgacctcaggcgatccgcccacctcagcctcccatactgctgggatcgcagatgggagccaccatgcccggctcttgttttttttggaaaaaagaannggcttttgggcccccagccggaaggaaaggggccaatttcgggtaaagggaaccttccccccccggattccggggaatcccccccccccccccccagggaattgggactaacggggggccccccccccccaaacccaattttggcttttttaagag

SEQ ID NO: 94730 - DNA, 130 bp, Homo sapiens
cgcgatgtgatttctgcccagtgctctgaatgtcaaagtgaagaaattcaatgaagcgcgggtaaacggcgggagtaactatgactctcttaaggtagccaaatgcctcgtcatctagtcgacgcggccg

SEQ ID NO: 94731 - DNA, 493 bp, Homo sapiens
  misc_feature (1)...(493): n = a,t,c or g
agacactgattcccctcggaannctcgatatccctacgcagngngcnggaattcctgaggcaagagaatctcttgaactcaggagacagaggttgcagtgagccaagatcacaccactgcgttccagcctgggcaatagagtgagactccgtctcaaaacaaacaaacaaacaaacacctctttgttttagcactcacttgaacccgggaggcagaggttgcagtgagctgagatcacgccactgctgcactccagcctgggcaacagagtgagactctgtctcaaaaaataaacaaaaaaaaaaagcctccaagctgaaaagcctcctgaactgagtaaaaccccaaattcaataaaatttccaaacttggatggactcccttccaaactcagtaaacccacccaaactcaaaagagatgcccaaactcagtaaagttctcaaacttaagggaagttctgtgcttccgagtccacaaaaggccccccaactt

SEQ ID NO: 94732 - DNA, 370 bp, Homo sapiens
gatatttggatattggaccagccttgcattcctggggtaaacctaacttggtcatggtatatactgttggattccatttgctaatattctattgataatttttgcctctattcctgatggttttagtctgtagcttttgtttgcttgtctttttctggttttggtatctgggcaatactggccttataaacttgaaagcattccttccttttctgttttctggaagagattgcatacagtttgtattatttcttttttgaaatgtcaggtagagtatgccagtgaaaccatctgggccaaattatttttggaaggtttttaactataaaatcaatttctttgatagaaattggttatctattcatcttaa

SEQ ID NO: 94733 - DNA, 482 bp, Homo sapiens
  misc_feature (1)...(482): n = a,t,c or g
tgggtttcccnnagggtgtccccaaactgagaccaattcagntgnctgcgaaancacaatgaagacactgttatattggcaaaagaatggataagtagatcaatggaatggaattgagagtccagaaatagacccatataaattatattcaactggtctttgatagaaaagcaaagacatgcaatgtggtaaagatagtcttgtcaacaagtggtgcacatatgcaaaaaaaaaaaaaaccttaaacttattttttaccccttttacaaaaatcacctcaaaaacttatttgaaaaattggaacttgtaaattttttaaacacccccttaggaaaaaccttaggggatttggggtttcccagggattttaaatttttaaacacccccaaggccaaatcccttgaaaaacattggataccctaaatttctttaaaggaaaaatttgttcttgaaaaaacatggtcaaaaaaaacaaaaagacg

SEQ ID NO: 94734 - DNA, 483 bp, Homo sapiens
  misc_feature (1)...(483): n = a,t,c or g
nagagttcccgncnaggnnnancctgcnaccttcgnngctgnngagctagcanggncgnggaannnaaagaaanganaangaactggtgagagggaggnttaggaattatgggctggcattatgactgaagcgagaaatagggttttgggccaagggcagtgccttatgcctgtaatcccagcaatttgggaggccaaggtgggaggatcacttgagcccacgagtttgaggctgcgataagctatgatcacaccactgcactccagccttggggacagagcaagaccctgtctctattaaaaacaacaagaaagggaaatagtcccttgggggagagatttaggattgccagtagccctgagggctcgcttagggtccgttatcagccagggtccagtcaaaagacaacacattatagtttttaactgagagaatttaatataaaggattgttaactaggtataaagatgtgtttaggccac

SEQ ID NO: 94735 - DNA, 486 bp, Homo sapiens
  misc_feature (1)...(486): n = a,t,c or g
agcgggccggcnncaatgatgacctgcatcactagcnnagngcggtggaattcgaggattgcttgagcacaggagtttgagactgcagtgagctatgatcatactactgcactccagcctgggtgacagagcaagaccctgtttctggggaaaacaaagaaacaaactataaaagaaagcaaagaaaatctttgtgatttggggtcagagataggactccaaaaacataagaaaaaaactggtaaactgaataaattgataaactggacttcacaaaaattaaatacatttactatgaaaaaaacagtgctaaaagaagaaagatagtctacacactgggaaaaaatatttaccagtcaccatagtggcacataaagaactctcaagattgaacagtaacagatgggcatggtggctcatgcctgtaatcctagcactttgggttttgccatgttggccaggctggtctcgaactcctgacctcag

SEQ ID NO: 94736 - DNA, 426 bp, Homo sapiens
cataatgttttaagacagtttatgaatttgtgaatttgtgctggactgcattcaaaactatcctgggccgtgggttggacaagcttaatataatctataaggtgattggaagaaattttatatttataagcattcagaaagtaaatcaccacttatcctttttgaaaaaaaaaagggggtattagaagagtattccagttttgacatatgataagcaatcaaggtaatataccatattagtagaaaaaggaaaaacaaaccaactggccaatttaacagatgcagaaaaagcacttaacaaaatctagcaccctttcatgagaaaaaccactcaacaatttagtaatagaagctttctccacttgagaaagggcatctacaagaaacccacagctaacatgattataaaagaacaaattatttttc

SEQ ID NO: 94737 - DNA, 476 bp, Homo sapiens
  misc_feature (1)...(476): n = a,t,c or g
agagggcncnccccaatcgagaccataggtagagcggcggaattcgaccagaattactctgatatcgaaaccaactggacacatcttggagaatgttccatgtgtaccagcaaagtatgtgtattttgctgccattggatggaaagttctgtatatatctgttaggtctgttttgttctaagtgaagttcaattctggtagttccttattaatgttgaaagtgggatactgaagtctcctagtagtattgtattactatttacttctctattcgcgcccattaatatttgctctatatatttaggcgctccgatgttgggtgcatatatggtcattttctacattgtgccattttggtcaaccacggaccgcatatacaatggtagtcccatgaaattatagtaccatttctttgctgtaccttttctatgtttacatatctttagacacacaaatactcatcattatgttacaan

SEQ ID NO: 94738 - DNA, 508 bp, Homo sapiens
  misc_feature (1)...(508): n = a,t,c or g
agtgccnnnangtnctcccccctgggnccgactanagagantcntgcggagngngcnggaattcctagacaggaagtttattggcatgagatttcagaattaagtgggaaaacttttctttaagtttgtacagaaaagtgacctgaaatgtttttgggtgatgaacttacagactttttttttttttttttttttnggggggggggtttttttttttttttttgccctccgggggggggggggggccaaatttttgttttttttgggcttggttaaaaacttttttccggtttaaccttccaagggggggggttttttggccctttccccctttgtttttttttgggaaaagggggattttttttttttgcccagggtggttttaaatttcggggtttaagggatcttccccccttggccttttaaaggggtgggattaaggggggaattttttggggcccccctggaatttttttttataataaggggggggggccgggggcccttt

SEQ ID NO: 94739 - DNA, 436 bp, Homo sapiens
  misc_feature (1)...(436): n = a,t,c or g
catcgaaagcagtccactggccgngcggnggaattcgatagatgagagatagaatagacaatacatacatagatatagatagataatggtgatgatagacagatagatatatagataatagagagagatagaaaagatacatacgtaaattagatagatacatacatacatagattagatagatacatacatacatggataaatagattagatagatagatatatagatgcatagattaaatagatgatagattagagagatacatagatagatgagagatagatagataggatagatagatacacacatacatatagatagataatggtgatgatagagagatagatcaatcagatagatagatacatagatagaatagatacatacatatgtacgtacataaattagatacatatatacatacatacatagatt

SEQ ID NO: 94740 - DNA, 658 bp, Homo sapiens
  misc_feature (1)...(658): n = a,t,c or g
agcaagattgcaaaatacaaaatgaacataaaatacaaaatacactatttctatatactagaaatgcacacataaaaataaaattccatttacactcaaaaaaaatacttgctgtaaatctaacaaaacatgtatagaacttctatgctgaaaactatacaacactgatgaaagaaaagatctaaatagagagaaacaaagatctacatagaaaacaaagatctaaatccatgtatatggattgtaaaactcaacatagtaaagataccagttatcctcacatagataaagaagtctaacaattcctatcataatcccagccaagattttttggagacaaagaaaagattattctaaaatttatatggaaaggtaagggaatcagatagctaagattttgaaaaataagaataaagggaggactgaatctacccaattgtaagacttactgtagttacggtaatcaagattgtgtagtattggtggaaggaaagagatagatacctaaatcaataggaataagatagagaactcaggaaattaaagccacgcaaatatgtccaacttatttcctttgtttttgacacaggnggttctattaacttttaattaattcaactgaactgatggggtacactttatttaaagcttttaaagg

SEQ ID NO: 94741 - DNA, 498 bp, Homo sapiens
  misc_feature (1)...(498): n = a,t,c or g
cgggcccattganattgantacntattcagagtggcggaattctgaaaaaatggtgttatagatttattcgacatgacattgccacaggacttctacttgtgaaaaatatctgtaaagtgagatgaagcaaagtgaagtaacatgaggtatgtctgtagctgttgctgtagtggtttccaaatggaggntttcttttccttttttttttttttttcttttagggccggattgggggttttttttttttccttagggggggggggggggggcaaaaacaatccctaattttacctttaccttctggggttaaagcaatcttcccccttaatttttttaatacctgggacccacgggccttttttaccccccccttttattttttttttttttaaacccggggtttatttatttgccccaaattggtttaaactttttgggttaaaaaattcttcttgcttaaccttccaaaagggccggatttacgggtggaacccccc

SEQ ID NO: 94742 - DNA, 479 bp, Homo sapiens
  misc_feature (1)...(479): n = a,t,c or g
atgggaaattcgagactgagattctcgcaangcgnggaannccagtttacttcccaccaacagtgcaaggattccaatttctccacatccgtgccaacactattttctttttgtcgctgttgtcattgtttgtctggaaaatagccatgctgaggggtgagaggtggtttctggttatgaatttgatttgcgtttccctgatggccagtgatggggcatcttcccctgtgcttggtggctcttcacactcttcctcccacgcacacaagactcctggactctggaccctccaggacagaagggtgggtaccagacgcccagcagggccagccttgctctctgccctcagacaggggctcccctcaaggagaagctcttatccctcgccacacgccacactgtgttaagtntcctttccgccactccaccttccgcccactctaccttctctggcatcttcctggataatcctctgtccn

SEQ ID NO: 94743 - DNA, 477 bp, Homo sapiens
gaggccgccctttgacactgataacgtctgacctgcactacgccagcttggcacgaggaagggataaataataattatgctcttgccttttaatttacaggtacctattttaaaaaataatttgagtcagacatggaggctcacgcctgtagtcccagcactttgggaggctgaggcgggcaaatcatctgaggtcaggatcatctgaggtcacttgcagggagcccaaatcatgccattgcactccagcctgggggacaagagtgaaactctgtctcaaaaaatagtaataataatctgagctattttatcataaaagtaaatttcatatagccgtatggaataaacatacaaaagatcagaaaccatataaagattagataactattatggattaaatactggaattgaatactatttcaatcatgctctgtgatggcctaacaaaagagaacaacacaacttgtttcccttctt

SEQ ID NO: 94744 - DNA, 842 bp, Homo sapiens
agcctgattatcagactgcccggaggagacaggctccagcagatagatgccagccaggcccagctgccacgatttgtcccaggtgaccaaaggcacgcagctccagcatgaatcgttctaacccaacagtgacaagaactgctgggccttaaccgtcatggaagactggggccgcttccaagtcacagacaggagacggggacaggaaagaactcattccacccaatcggacacctaataattgagtgtctacagcagcaatcaagtgacaagtgaggccctacctgacccagaaggtgcctgccggctaaacattctgcccccaccagaaactccagggggtccgcccgttatgccgtggcccacccacgcccctttggatcaccagcagtcacagacaacaggcaggcgaaactgaagaccccaactcagccccagcggaccctccagagcaaaagaggcccccggcgaggccacctgtcggcaggcatgccgaggtcaaacagccggggccaccgttcccagctgggccacgacctgcaccgtccacagatgggctttgagatggatttgtatcagggtggggggtgtggtttggccaaaatgcaatggaccccgacccctcctcgtaaaaggatgttgggtttccctctggtgacacatgggatgcgtcataaaccctcccccaaagtcctggtcagcagcccatccttccaacgatgagttttgcggtttttcagaacagaaatgatcactacgattgacgacggtcgtgatgttaagacgtcgtctccatgagctttggggggacttttatgtggaataaagaaactatcactgag

SEQ ID NO: 94745 - DNA, 418 bp, Homo sapiens
gggccttttgtcatggtgctggcaaactcctaagcatatttataatcgctacctgctctgtgctagacactgtcttgtgagacgcagcctggccagcatggtgaggccccgtctctaccaagaatgcttaaattgccctgccgttatcctgggcgcgacccctatacttccctgccccagcccggtttactgcccggggtgggccagtcttcacttccaaacgggtgccatctcccccgaaccgaagaggatggaggccccctccttcaattttgccatgcttggaacccttcccccaagtttttggctcccaagatacctcccacagccctttgccaccaaataaagaaccttcgaaagagaacgtgaatccagggctctctgtcccttgggtgcccgagttttcatatgacgaacc

SEQ ID NO: 94746 - DNA, 474 bp, Homo sapiens
catcgacaatcgatagatctctgcacctgactacgccaagcttggcacgaggcttgggtcactcaagctccgcctcccgggttcacgccattctcctacttgggaggccaaggcaggagaatcgcttgaacccgggaggtggaggttgcagtgagccaagattgcactactgcactccagcctgggcagctgggtgagactgcgtttcaaaacaaaacagtgtctccgaagataatgtaataagaagaaaaatacatgataggccgggtgtggaggctcacacctgtaattccagcactttgggaggccaaggtggaaggatcgcttgagcctaggagtttgagaccagcctgggcaacttagtgagaccctgtctctatagaaagaaaaatacatgatagatttttgttagaaagcaggatataacatttatacagtctggttaccacatggttaaaaatactagaaggaaag

SEQ ID NO: 94747 - DNA, 939 bp, Homo sapiens
  misc_feature (1)...(939): n = a,t,c or g
aaatcaccagccccactgtctaattttagagctttgcaattaatccagccagtgatcaattcctcttctataaaatggtgataaggatggctaccataattgtgccctgattatattgtcagggttatgtgaggaaatgctcataagcatctcagcaaagccaggggtacagggctcacctgacataagagatatccttgggtttgtcctaatagcgagaaaccgggcctcttttgcctctttttttccctcttgctgatgtgggagaggagagaacattcaagaggtgatcagcagacatccttaattttgataaaggcagctgagcggggaaatataaggtcggttctgtgtagatagacaggtggaacccagcaatcagnnnnnnnnnnnnnnnnnnnnnnnnnnnnnnnnnnnnnnnnnnnnnnnnnnnactctagagtgtcacgctctataagtacacacattctatttagtcattccattctagaccgatagcttttatttttagtttggaactattacaaattgtgctgctctggacattctcgaacatgggttttgggacacacatgtacacttttctgttgcttatacctaggaataagattgttggattataggtgatgcacatactcagttttaagatatgttgtcagacatttttccaaagcaattgtgccaatgcccgtgcctaccagtaatgtgtgaatattccatttccttcacatcttcagcaacacttaatgatgccagtcagaatttgcatttccctgatagctaacgaggttgggcatttttacatgcttgctagctgttaggatatctttctttatgtaatatcccttcagatgtttgcatattgattaatccgactgtctttttccagttaatttttcctttgttgaataaatatgttgcaaatataaaaaaaaaaaa

SEQ ID NO: 94748 - DNA, 497 bp, Homo sapiens
  misc_feature (1)...(497): n = a,t,c or g
gcggtggaattcgtcaatggctgcgtgggcattgaacgtgtacatgattcctgcagctttcttgttgttctggaccatgttcatcaatgctttttggtacattaattctacatcttcttcggtgaccacagtttatgtttatttcatttttcaggaatatccagccactggtgcacagccattgccacttgtgcccccaggggatcttgtcaactccagtatgtccccccagcactgtgttatctggcataataaatgtagttgggctgtagttgtagtgactcctcccaaaacaacccaggagtttaatactggttggccaccggttacagacattgctgccccttccgctgcggctttaaaagcctatctaatcggctgccnnnnnnnnnnnnnnnnnnnnnnnnnnnnnnnnnnnnnnnnnnnnnnnnnnnnnnnnnnnnnnnnnnnnnnnnnnnnnnnnnnnnngcgggggaaacccggcctactgaaataca

SEQ ID NO: 94749 - DNA, 472 bp, Homo sapiens
  misc_feature (1)...(472): n = a,t,c or g
ggagcgtcnnnnnaactgagnccttgttaacntcggaggaanctggcaggctgaggcagagaattgcttgaacccgggaggcagaggttgcagtgagtcatgattgcactccagcctgggtgaccgagcgagactccatctcaaaaaaaaaaaaaaaaaaattttaaaaattttcccccaaatggtggggtttccaggtttttgggaaaaaggggttaactttcttgccgggcaacattgatggggaacaacccttgctcctcttgttttgaagggccccaaacgggggccaaaccttaagggggttggattcttgtttaaaaggggcaaagaggggacaaaacctttggggttagggccacacataaaaactaagtggccaaaaaaaaatttttttggggaggccgggggggggggatcacctgagcgggaaaataaaaaccttcttgtttaacagggggaacccttttct

SEQ ID NO: 94750 - DNA, 468 bp, Homo sapiens
  misc_feature (1)...(468): n = a,t,c or g
ntttgaaaactggatgacctcggaagagncnnnnnnntctttgaaatgactccnnnnncccgggctacagaatggatgttgtattagtggccgtgttaacaacattaatctcctcatacatctccatcagagctcctggatgacaaggtacgttgtcaatgaccagtaatattttgaaaggaatcttttttcctgagcagtaggtctcaacagggggctgtaaacagaagtgcttcatccaggctttgtttttagagcactggcagagtagatttaggataattcttaagagccctaggattttctgagtgataaatgagcattgacctcaacttaaagtcaccagcccgtcctttgaaggtttgaagccagacattgacttctctctagccatgaaagtcctagatggcatctttcagtagaaggctgttttgtctacagggaaaatctgttggttggtgtagccac

SEQ ID NO: 94751 - DNA, 465 bp, Homo sapiens
  misc_feature (1)...(465): n = a,t,c or g
ngggaaaggnngncccnnnnnnntttgaaaactgaagatcatagtacagtgcggtggaattcgagtcttgctctgttgcccagcctggagtgcggtggtaagccaccgtgcttggcctgtattttatctaggttatggttctttgttacaaaactctgtaggagctgcagagagcataggttgaggtgaaaaaatgcgcagattcctaaatgtgatcatcagagggcccaggttcccctggagagttaccttatggagctcaggaattcgttatgaaagctccccaagggattctggtgattaggtagacataattttttgagacagagtctcactctgttgccgaggctggagtgcagtggtgcgatctcagcttactgcaacttccacctctgaggttcaatcaattctgtctcagcctcccgagactgggattataggcgcccagagcgacacccagctaat

SEQ ID NO: 94752 - DNA, 445 bp, Homo sapiens
  misc_feature (1)...(445): n = a,t,c or g
catcgaattgccgtaccactagnccagngcggtggaattcggaggggacagctgttcaccccagcaccctttgaacccacccttagggagtccccaacactccccccctcctttgatcggaatatgtactgtgaagagtaggggtggggaggtggtctgccggtgccctgccccccagcactgccctacccctccactccgagctgggggggaatctgtgtctgctatgggagggggggggtagcaccacctccctgacaccctcccctgacctgactagggggaggatccaccccaacctctgccctgcccgccccaggggcaccccgacatccaggccaccccctcatggtgctacagaccctgccctggggcccacacactcctgccaggaagccctacatcaataaagttctgtcttgtgtagatttctaaaaaaaaaaaa

SEQ ID NO: 94753 - DNA, 485 bp, Homo sapiens
  misc_feature (1)...(485): n = a,t,c or g
ggggttgnggggctcgagaccactcgaagtgcgctggaattcggctgaggcaggagaatcgcttgaaccagggaggcggaggctgcagtgagccaagatcttgtccctgcactccagcctgggcgacagatcgagactctgcctcaagaaaaagaaaaaaagaaagaaatataaatggtctaaacacaccaactaaaaggaagagatgctcaggttggattaaaaaaacaagaagaccccacttacatagtgtctacacaaatgccactttaaatataatgttctaagtaggttaaaaggaaaaaagtgagaaaaaaatataccatgcaaacactagtcaaaagaaagctggtgtgggtatattaatttcagacaaagtaaacttcagaaaaaggagtatgttcaggaaaaaaggacaacgcagggccgggcgcggtggctcacgcctataatcccagcactttgggaggccaaggcaggtggan

SEQ ID NO: 94754 - DNA, 466 bp, Homo sapiens
ggcggggattgtactctgtagaggccatgagaacccgcttttaatttattttgttggatagctctgactaggacttctagaattatgttgtataggagtgtttgactggatattcttgtcttatttttattctaacgttctgatttgcttatgaactcagattgctcgtatttcatggaggatttttgtttcaatgtttaccaaaaatattggcctgcagtttcctttttttgttgtgccttcactatattttggaattaagataatattgatattatgagttagggtggaatcccacctggatttcttggagtatattcagtagtagtacaagcccatctttgtatatgtggtaaaatttggctgtgattttacataatccagggcttttacagttggtaggtttgttactaatttaatttcatcatatgttttatacatttttgcccattctagacttctgttt

SEQ ID NO: 94755 - DNA, 453 bp, Homo sapiens
  misc_feature (1)...(453): n = a,t,c or g
cattgacgactgatagcatctggccgngcggnggaattcagataacttgctacagcttctacatcagcgcttgctgctttacttgcacttttatgtttatggggatggcttttttccttaaaccccatgaatcaacctctactagcttcaaacttttcttctccagcttcctcacctctctcagtcttcatagaattgaagagagttagggccctgctctggattaagctttgggttaagggaatgttgttgctggtttgatcttgtattcaggccactttctccttatcagcagtaagattgtttcactttcgtatcattcatatgttcactggagtgtcactcttaatttccttcaagaacttttccaagttgcattcaccacttggttaactgtttggtgcaagaggcctgacttgcaacctctcttggctttcaatacgccttcctcag

SEQ ID NO: 94756 - DNA, 419 bp, Homo sapiens
  misc_feature (1)...(419): n = a,t,c or g
aaaaattttaatgaacaaagtctgaaaaatatgggattatgtaaagcaaacaaatttataaattactggcattcctgagagaggaggagaaaaagtaaacaatctggaaaacatatttgaagcaatagtacaaagagtgtccctagtatttttaaagaggtagacacccaggaacaagaaatccagagaannnnnnnnnnnnnnnnnnnnntaaaggaaaaaatgaaaaaaagnnnnnnnnnnnnnnnnnnnnngaaaaaaaaatttaaagggggggggccctttaaagaacctcctgggggggcccaagtttacccccgggaacaaaaaannnnnnnnnnnctttttgggggccctttttaaaacccgggggggatttttggaaaaaaccctttttttggggggggaaaaaaaagaaa

SEQ ID NO: 94757 - DNA, 462 bp, Homo sapiens
  misc_feature (1)...(462): n = a,t,c or g
gaccaggcaggcacatttgantgcattccttngccagngcgnggaattcaataaataaagtgaaaatggtgtaaaggaaacagttacatatcaaaggatcttaaggaattaaaatacttaggagtgaattaaaataagtgcaaacctgtaatctgaaaactatcaaatattgttgaaagaaattaaagaagatctaaataaatggaaagacatcccatgttcatgaattagaagacttaacattaagatggtaatattttccaaattaatctacagattcaatgctattccaatcaaaatcctagctgccnnnnnnnnnnnnnnnnnnnnnnnnnnnnnnnnnnnnnnnnnnnnnnnnnnnnnnnnnnnnnnnnnnnnnnnnnnnnnnnnnnnnnnnnnnnnnnnnnnnnnnnnnnnnnnnnnnnnnnnnnnnnnnnnnnnnagaatccagctaccttttga

SEQ ID NO: 94758 - DNA, 465 bp, Homo sapiens
  misc_feature (1)...(465): n = a,t,c or g
ntctgagactctagtcactgtggtggaattcctaaaagacaaacaaaacaaaacaacaacaacaacaacaaaaccaacttaaccactcttttaagttaatttgaatttctctgatgaccagttttattgagtatattttcatttgccattcatatatcttcatatatcttctttatgaagtatctgttcacatctttttctcacttttaaagtgagttgtttgtctttttattaagttgctgaaagttctttatatattctggatgtaagtcttttgtgaaatatgtgttttacaagtgtattctcccagaacataacttgctttttcactttattgattgattgattgattatttattgattgattgctctgttgcccaggctggagtgcagtgacatgatctcagctcactgcaacctctgcctcctgggttcaagcgattctgctgcttcagcctnctgagn

SEQ ID NO: 94759 - DNA, 487 bp, Homo sapiens
  misc_feature (1)...(487): n = a,t,c or g
nattgacacctgaaggcaatgggcaaggaaccccgggncgacccacgcgtccgcccacgcgtccgcaatccctgagtctgccagttactcagtttggttttgagccaggcactggacttctctgagccccatctataaaacgtaaaatacaccacctatctcatgcattgttggaaggaacaaagattgtatattaagtccctaaatcttcagagtcaatgtcagctaacagttttggaattcggccagccagttaaaaattctaagactagagaaaagtttgtgctaaggctcactcccacaccacacccccaaaagataaccatttttgtttttgtttttgagacagggtctcgctctgtcacctaggctggagtgcagtggcacaatcacggttcattacagccttgacctcctgggctcaagagatcctctcacctcagcctcccagtgctaatttttttattttctgtagagatgggggtct

SEQ ID NO: 94760 - DNA, 413 bp, Homo sapiens
  misc_feature (1)...(413): n = a,t,c or g
agggaaagtatttatctgattctccacactccacgttgcaatatgaaatgatctaggtcgcctgctctgagccctacgattcatctttcttttcaccgcacgcggcctgactggcattgtattagcaaactcatcactacacattacactacacgacacgtactacatgggaactcacttccactatgtactatacataggagctgaatttgccatcataggaggcttcattcactgacttcccctattctcaggctacaccctagaccaaacctactccaaaatacattacactatcatattaatcgacataaatctaactttcttcccacatcactctctaggcctatccggaaggccccgacgatactaggactaccccgatgcatacaccacaagatacatcctatcan

SEQ ID NO: 94761 - DNA, 418 bp, Homo sapiens
  misc_feature (1)...(418): n = a,t,c or g
cggacgcggggttaaggctgcagtgagccatgattgcaccactgcactccagccggggtaacaaagtcagaccgtgtctctaaaaataaataaataaataaaaataaaataaatttgacacccaccagaaaagaacaaaacaacaacaaaaaaaaaaaaaaaaaaaaagggggggcccttaaaaaaaatgtgggggggggcccaaaacaagggggggggcaaaaatatatttttttttttttagggagggggaaaaaaaaccgacgggggatttgtgaaaaaaaacccttttttggggggggggaaaatgcgcgaccaccccccaaaaaaaacttaccggttgaggagaaaaaaaaatttttctggagtttggggggnaaaaccccgcttttttgtgcggttgagaaaagacattaaa

SEQ ID NO: 94762 - DNA, 406 bp, Homo sapiens
  misc_feature (1)...(406): n = a,t,c or g
atacataaaatctagacaaaaaaggaaggaatcgaaccccccaaagctggtttcaagccaaccccatggcctccatgactttttcaaaaaaaaaaaaaaaaaaaaaaaaaaaaaaaaaaggggggggggccctaaaaaaaaaaccctggggggcccaaaaaaaaccggggaagaaaaaaaaaaatttttttcttaaaggggggggaaaaaaaaaccccccggggaattttggaaaaaaaacctttttttgggggggggaaaaaggggcccaacccccccaaaaaaaaaaaacccctcagggaaaaaaaaaaattttaaggggaaaagggggaaaaaaaaccttaaaaatttttttttaaaaaaaaattttnncncnngccnaaaaaaacccngncgggggaaccaa

SEQ ID NO: 94763 - DNA, 411 bp, Homo sapiens
  misc_feature (1)...(411): n = a,t,c or g
caccccttgctcagcctatataccgccatcttcagcaaaccctgatgaaggctacaaaaaaaaatcagaaaaaaaataaataagaaaaaatataaaaaaaaaaaggggggggggccttttaaaaattcccgggggggcccaaacttacccggggggttgcaaagactattttttttcctttttggggggatttttataaacgcttcggggatttttgaaaaaaaccttttttttggggggggaaaaaaagggcaccacccccccaaaaaatttaaaccctctggggaaaaaaaaaatttttaggggggaaaaggggaaaaacacccccaaaaggggggggggtaaaaaaatttggggannnnnnnnnnaacaaccccctcttgtgggggggggatagtaggaaaacctccc

SEQ ID NO: 94764 - DNA, 416 bp, Homo sapiens
  misc_feature (1)...(416): n = a,t,c or g
caccccttgctcagcctatataccgccatcttcagcaaaccctgatgaaggctacaaaaaaaaaccagaaaaaaaaaaaaaaagaaaaaatataaaaaaaaaaaagggggggggcctttaaaaaattcccggggggggccaaagttaccggcgccgttgcgaagactatttttttcctttttggggggacctttaaaaacgcttcgggaatttttgaaaaaaaccttttttttggggggggaaaaaattggaaaaacccccccccaaaaattaaaccccttggggaaaaaaaaaaattttaagggggaaaggggggaaaaacccccgaatgggggggggggtaaaaagttttggggnnnnnnnnnnaaaacaactttctttttggggggggggatttggaacaacccctcccaaaa

SEQ ID NO: 94765 - DNA, 453 bp, Homo sapiens
cccacgcgtccgcccacgcgtccggcactccagactgagaaacagagcgagactccatctcaaaaaaaaaaaaaaaggggggggggggggggttaacccctgaacccccaccacttggggggggtgggggggggggcccacaaaatcaaaaaatggaaccctttcggccccggggggggaccccccttttttattaaaaaaacaaaatttccccggcctgggcggcccccccctgggttcccacctcctggggggcctgaggcagaaaaattttttcaccccctgccctccaccctaaaaacagaccgggcctccttttaaaaaaaaaaaaaaaaaaaggggggttttttttaaaaaaacccgggccttaaaaaattccgggaaaaaattttttaatgggtttttttttaaaaaaaaaagttctctttctcttggggccgggggagaaaaaaa

SEQ ID NO: 94766 - DNA, 425 bp, Homo sapiens
cccacgcgtccgcttacatgtagagattcctggggagagcggcctgcatcattctggcacttaatttgggcgatcgattttgctgtagagctctttgcagtacagcatagcctcttatcggccttggcaacagtgaactctgcttttgacggggtggattgcatgcataactgcagagaggagggctcacgactgtggtcactatatttggtcagaggtatcctatttgaaaaccatttgagcccaaaatacaagagtaccctttccacttctggctcacgcacccgagagccgactagacgtaacagtaacacttactgatgctggacgcgtaggctcatgcctataatcccagcactttgggaggccaaagctggcagatcacctgagggcacgagctggagaccagactgagctgcttgacg

SEQ ID NO: 94767 - DNA, 808 bp, Homo sapiens
ggaaaggagtgtttcccagacagcccagcacctgcaggggatggagggcacataagtttgaatataaagtttaacaaatcaggggcagggcagaggaaccaagtccaagctcttgggttcaactataaagtaccatggaagtttgaaaactgaaagagatcaaaaagctgttagaagaaaacgcaggcatcaatctttatgaccttcgattaggcagtggtttcttagatatgacaccaaaagcaaagcaacaaaagaaagaaaacttaaagtgggatgtcatcagaatgaaaaactcttgtgcttcaaaggataccatcacattttataattcatagatctgataaaggacttgtattaagaaatacaaagaactcaactcaataacagaaagacaacccaatttttaaaaggatttgaacaaagacttctcaaaagacaaatggccaaaagcacatgaaaaactactgagcgtcttttcataagggaaatgaaaaccaaaaccacaaggagaccatttcctatctactaggatggctaaaatttaaaaagacagtaataggcattatgtagaaaaactggaaccctcatacactgctggtaggggacagcccctgcaaaccttttgaagaactgccagcccctgttccccttttgaggaacagtctggcagttcctcaaaaggttaaacctagagttaccagatgacccagcaattccacccctagttatctgcccaaaagaaatgaaaacctgtctacacagaaatttgtacacaaatgttcacagcagcatgaatcataatagc

SEQ ID NO: 94768 - DNA, 399 bp, Homo sapiens
tctagatcgcgccactgcactccagcctgggtgagagtgactctggtcttaaaaaaaaaagaaaaagaaaaagaaaaagaggaaaaaaaaagatgcccatgttacattgttagtcatcagtcactgtaaaaacctgcctggcagttcctcaaaatgttaaacagagttaccatatgatccagcaattcactcttaggtaaatgcctaaaagaaatttaaaaatatgcctacacaaagacttgtatgtgaatgttcatagcattattcataatagccaaaaagtataaacaactcaaacgtctatcaactgatgaatggataaacaaaatgtgttatatccatgcaatccacacagtatatccatagtgacacatgccacaacacggttgaaccttgaaa

SEQ ID NO: 94769 - DNA, 389 bp, Homo sapiens
acggctatgatagagtaatacctaacccatgacctttaacaggggccactcagagccctattattgacctgcggactagccatgtgattttacttgcaatccatgtgggtgctgatactagggctactaaccgacacactaaccatataccatagatggagcgacgttgcacgaaaaagcacataccaaggccaccactcaccacctgcccaaaaaggccttcgatacgggataatgctatatatgacctcagaagtacttttgttaggcggacttttctgagccttttaccactcgcagcctatgccctaccccccaattaggagggcactgggccccaacaggcatgaccccgctagatcctgtagaagtcccactcctaaacacat

SEQ ID NO: 94770 - DNA, 354 bp, Homo sapiens
gagaggacagaaggctgagtaaagtttggggaagaaacgggaggctgcgaacatgtggtcaagcttgtgtaaacccaaacgtagtaaggaaacttttatgaaaaaggattattgcgaggtattgggggagggggagaaggggctgttgcaatagggagaagggttagttggattagaggcaggagagtaatgccagaggcttggggttctattgcagtggggtgggggtataagcaacaggggcatggggacagttgatgattgagctgcgggactaatgctgtagccacagggaggcagctgcagggggagagctctgtgaccgtcaagtatgcaggcatctgaagagttggc

SEQ ID NO: 94771 - DNA, 384 bp, Homo sapiens
ttggggctaatgtgtctggtgactgagttgaagccagtgctcatttattattccagtaatcctagggccttaaaaattatgctagatctattctgcctatgctctgtaaacaggaaaaaaaagaaaaaaagaaaaaaagcctggatgacagcacatctgtttacagcatggtttacttaatattttaagtctactggtgagacgttgctaaggaaaagattcctttcaaaatattagtgctcattgacagtgcatgtagtcacccaagagctttgatggagatgtgcaaggagattaatgttgtttttatgcctgttaactaacacagcattcattctgcatgcagcccatggatcaaggagcactttcaacttacaagtctta

SEQ ID NO: 94772 - DNA, 411 bp, Homo sapiens
  misc_feature (1)...(411): n = a,t,c or g
gacgcgtgggacttaacttgaccgctctgaccattaaaaattaaaaaaaaaaaaaaatngggggggggcgtttaaaaaaaaccctgggggggccaaagtttaccgggggggggaaaaaaaaaatttttttcttaaaggggggggaaaaaaaaaccagggggggaattttggaaaaaaacctttttttgggggggggaaaaaatgggcccacccccccacaaaaaataaaccccttaggggaaaaaaaaaatttttaaggggaaaagggggaaaaacacccccaattccctggggtaaaaaaaatttcnnnnnnccnnnnnagagaaccccaactcagggggggggccaaaaccgaccccctttttaagattgaacaccccccggcgaaaagaatttctatgggagaggggg

SEQ ID NO: 94773 - DNA, 407 bp, Homo sapiens
  misc_feature (1)...(407): n = a,t,c or g
gacgcgtgggacttaacttgaccgctctgaccattaaaaataaaaaaaaaaaaaaaaanggggggggcgctttaaaaaaaaccctggggggcccaaattttcccgggggggggaaattatgatttttttccttaaaggggggggattaaaaacccaggggggaaatttgggaaaaaaacccttttttgggggggggaaaaatggggaccccccccccaccaaaaataaaccccttagggaaaaaaaaaattttttagggggaaggggggcaaaaccccccgcaaaggcgggggggaaaaaaatggggngnccannnngcacaacatatttattatgggaggaacccataaacgactcgctcattattaaaatgccattacaaggcatgaaatgcttattaaaacctt

SEQ ID NO: 94774 - DNA, 387 bp, Homo sapiens
aaaatggtacagccatcctagtaggtgtgaagtggtacctggtcatgggtttgattttcatttccctaatgaccagtgttgaatatctctttatgtgctattggccatctgtgtatcatctttggaaaaatgtttattcaagtcctttacctacttaaaacattgggttaggttgtggtgtggctgtctgctgggatggtattgcatcaaatccataaatcaataggcagaattaaaatgttagtattgagtattctaatccatcaatatggcatatttctccatttattcaaatcgttaatttttatcagcaaggttttgagacttttagtgtagagatcttacatatcttttcaaaagttatctcacactattatgaatgaagtt

SEQ ID NO: 94775 - DNA, 472 bp, Homo sapiens
aggggtccccgccattgaacgcctttgagacccgtccggaattgccgggtagacccacgcgtgcgggcaaccatccgatttctcaatcttttccccacctttccgccctttctattccacaaaaccgccattgtcatcatggcccgttctcaatgagctgttgggtactcctcccagaccgggtggtggccgggcagaggggctcctcacttcccagtaggggcggccggacagaggcgcccctcacctcccggacggggcggctggcctggcgggggctgacccccacctccctcccggacggcgtggctgctgggcggagacgctcctcacttcccagacggggtggctgccggacggaggggctcctcacttctcaaatggggcggctgccgggcggagggactcctcacttctcagagggggcggttgccaggcaaacggttttctcacttgtcagacggcgcgagcg

SEQ ID NO: 94776 - DNA, 407 bp, Homo sapiens
  misc_feature (1)...(407): n = a,t,c or g
atttttagtggagacggagttttgttatgttggccaggctggtcttgaactcctgacctccagagatccgcccgcctcggcctccaaaggtgctgggatgacaggcgtgagccaccaggtccagccccagtaatgatcttgactttggacatagcaagcagtgtagaagcagggacgtccttcggtttgtcttttctttcttccagctgggctctgtctgcccaggagggctgcttggctgtgccttctgtgggtcacgagggctcctggttggagctcttctgctgtggaccaagccttctccccagctgtcacctgtgcctgcatctcagcgtctgtcctctctttccctaatgccgcccctcccccaaccccagcatttgacacacacgtccatagaaaccctn

SEQ ID NO: 94777 - DNA, 460 bp, Homo sapiens
  misc_feature (1)...(460): n = a,t,c or g
ggggaattgatcgccttcggnaccgatcgacatcctcgggacgacccacgcgttcgatgaaaatccacgcacacatctttgcatggatatattttttcattctctagagttcatatccgagagtggaattgccggatggtatgggagatatatatttaaaattttatgacaattgacatgctgtgttccgcagtggttatacatttttgcagcagtggattagatttccagttgctgtgcaccctcaccagcacttagtatcagtctttttaactttaaccgttctagtaagtgtgtatcagctcattatggctgtgaaatatatttctctaatgatattaagcatcttttcatgtgctaatttttatccatatgaaaagatggtgaaactattcaaatcttttgcccatttatttattagattgttttcttactgagatttgaaaagtttttaaagttg

SEQ ID NO: 94778 - DNA, 407 bp, Homo sapiens
ctttttttaaattagccaggtgtggtggcacatacctgtagtcccagctgcttgagaggctgaggcaggaagatcacttgagcctgggagattgaggctgcagtgagccgtggtggtgccactatactccagccattatattccagcccaggagacagagtgagaccctgactaacaaaaaaaaaaaaaaaaaaaaaaaaaaaaaaaaaaaaaaggggggggggctttttaaaaagttccttgggggggccaaattttccgggggggggaaaaatttttttttttttttttgggggggggtatttaaaacccggggggggtttttggaaaaaaaccctttttttgggggggggaactggggggccccccccccccaaaaatttaaaccttttagggaaaaataaaaa

SEQ ID NO: 94779 - DNA, 403 bp, Homo sapiens
cccacgcgtccgccacgcgtccggcagcccctccccacctcctcctcctccaggtctctgctcacacatcaccatctcagtgagtcttttcctggccatcttactaaaccccctgcctctcagctctgactctggcctctgttttaagtctcctttgacagcggtcaccccgcacacttttcattactaataagtgtattttctgcatctcactcatcctgccgcatccctgctgggctgtaagccctgggaagacagggacttttctcctgttttttttgtttttttgagacagagtctcattcctttgcccaggctgaagtgcagtggtacaatctcagctcagcgcaaccttcttctcccgagttcaagtgattctcctcctcagcctcccgagtagctg

SEQ ID NO: 94780 - DNA, 390 bp, Homo sapiens
  misc_feature (1)...(390): n = a,t,c or g
cccacgcgtncggcatagtggtgtgtgcctgcagtcccagctacttgggaggctgaacccaggaggtcgaggctgcagtaagccactgactgggcggcagagcaagagcttgtctcanaaaaaaaaaaaaaaaaaaaaaaaaaaaaaaaaaaaaaaaaaaaaaaaangggggggggcccttaaaaaaaactcctgggggggcccaaatataagggggggaagaaaaaaaaattttttttttttaagggggagaaaaaaaaaagcctggggggaattttgaaaaaaaaaacttttttttggggggggaaaaaatggccaaccccccccaaaaaaaataaagccttgaaaggaaaaaaaaaatttttagggggaagggggggaaaccccccg

SEQ ID NO: 94781 - DNA, 486 bp, Homo sapiens
  misc_feature (1)...(486): n = a,t,c or g
nnnnaagtgcctggggnnnnccnccaagaacttagcgacagactctcttagnaanggcccgacccacgcgtccgcagaagctgccatcaagtatttcctcacgcaagcaaccgcatccataatccttctaatagctatcctcttcaacaatatactctccggacaatgaaccataaccaatactaccaatcaatactcatcattaataatcataatggctatagcaataaaactaggaatagccccctttcacttctgagtcccagaggttacccaaggcacccctctgacatccggcctgcttcttctcacatgacaaaaactagcccccatctcaatcatataccaaatctctccctcactaaacgtangccaaaaaaaaaaaaaaaaaacactttaacttataaaaaaaaaaaaaaaaanngggggggcccttttaaaaaagacctgggggggggcacatgttaaaggggggggcgcatttta

SEQ ID NO: 94782 - DNA, 450 bp, Homo sapiens
  misc_feature (1)...(450): n = a,t,c or g
ggannnnttgttagnncctgatgccttcggtaccggctgatatgccttgggtagacccacgcgttcgcggacgcgtgggcggacgcgtggggtttatttaaagggatattaacagagaacttcccaaacctacagaaatatatcaatatccaagtacaaggaggttaaagaacatcaagcagatttaacacaaagaagactaactcaagggatttaataatcatactcccaaaggtcaaggataaattannnaaaaaaaaaaaaaaaaattgcggaaaataaaaaaattttaaaatataggggggggcctttttaatagaaacctgggggggcccaattttacggggggggaagaaaaagttttttttttttttttggggggngttttaaaaccccccttggtttttttgaaaaaaacctttttttgggggggggaaaaaaaaggaaaaa

SEQ ID NO: 94783 - DNA, 406 bp, Homo sapiens
cccacgcgtccggtggaatctcactgattgctaacacagcagtctgagatcaaactgcaaggtggcagcgaggctgggggagggacactggccattgcccaggctctcttacgtaaacaaagcagccgggaagctcgaactgggtggagcccaccacaactcaaggaggcctgcctgcctctgcaggctccacctctgggggcagggcacagacaaacaaaaagacagcagtaacctcggcagacttaaatgtccctgtctgacagctttgaggagagcagtggttctctcagcatgcagctggagatctgagaatgggcagactgcctcctcaagtggatccctgacccctgatccccgagcagcctaactgggaggcaccccccagcaggggcagactgacaac

SEQ ID NO: 94784 - DNA, 371 bp, Homo sapiens
ttgactattctctacaaaccatggagactttggaccactatacctatttccgcgcatgagctggagtcctaggcacagatctaagcctccttattcgagccgagctgggccagccaggcaaccttctaggtaacgaccacatgtacaacggtatcgtcacagcccatgcatttgtaataatcttcttcatagtaatacccatcataatcggaggctttggcaactgactagttcccctaataatcggcgcccccgatgtggcgattccccgcataagcaacataagcttctgactcttacctccctctctcctactcctgctggcatgtgctataacggaggccggagcaggaacaggttgaacagtctac

SEQ ID NO: 94785 - DNA, 405 bp, Homo sapiens
  misc_feature (1)...(405): n = a,t,c or g
gtgcttgtttacacatgacatgatnnnnnnnnnnnnnnnnnnnnnnnnnnnnnnnnnnnnnnnnnnnnnnnnnnacccacccctctcagaactcatgatcaatcaagcaaagtctcaagatacaaagtcaacatacaaaaggtgggtgctttcctatatatgctatctacgagaacaactggaatttgaaattaaaagcacgtcatttccatttgcatcccccaaagtgaaatacttaactataaatctaacaaaatgtgttcaagattatggaaggaaaagaaacttatgaaataaaagaagaccaaaataaatagatgttccattttcatggataaaagggcctaatattgttaatgacgtaggaggcaggactcaactctgggggcagggcttggactctgg

SEQ ID NO: 94786 - DNA, 402 bp, Homo sapiens
cccacgcgtccgaacaaatgctgcttgcattatgggacagcaatgctagattttacatatggtaagcattccttctataagcatttattagcacctactacctgctggctgagctgggactcatatagggtaattgcctccagcataatttttttgggtcatggggcagacagggtcttgctttgtcacccaggatggaatgcagtggtacaatcatagctcgttgtagcctcaaactcctgggctcaagtgatcctctcaccttggcctctcaaagtactaggattagaggcatgagccatcatacccagcctcaggcacaaaacttaactgaatgccaaaaaactcagtcaccgggataataatgtgtatacacttttttttaaaattttggtagagggg

SEQ ID NO: 94787 - DNA, 398 bp, Homo sapiens
caggagaactgcttgaacacaggaggcagaggttgttatgagcttagatcctgccactgcactccagcctgggcgacagaacaagactctgactcaaataaacaaataaaaaaatagttaaatgtttttaaaaatgaaaccacaaatgcattattatttggaaaaaccaaccgtaaaaatacatttttgaggcaactggagaaaatcaattatagatcaagtattagatgataccaaataatattgttaattttgttacatataatagcattatagttatacaaggaaatattcataattttaaaatgcatattgaagtatatagaggtaaaatgagttgatattttgggtgtactttaaaataattttgttgagagacagagtcagagagagagaag

SEQ ID NO: 94788 - DNA, 402 bp, Homo sapiens
  misc_feature (1)...(402): n = a,t,c or g
tacagatgcccgccaccacacctggctaattttcgtatttttgttagagatggggtttcaccatgttggccgggctggtctcggactcctgacctcaagtgatccaccgcgcccagccaaattaaattttttatagagatgaggtcatgctgttatgttgcccaggttggcctcatgagatcttgccttggcctcccaaagtgctgggattacagatgtgagacactgcacccaaaccccaccactttnttttttttttttttttttnggaaaaaaattttattccggtcccccggcgggggggggggggaaaaatttaaattaaatggaaccccccccccccgggtaaaaggggtttttttgccctggccccccaaaatattggaattgaaaagccccccc

SEQ ID NO: 94789 - DNA, 437 bp, Homo sapiens
tgggattctcgatgggggccaaggagcccccctgttttgcatattttaatccactctatatttggaacgagaaaaggaacaaatatctctgtccgtaatagtttcctctcccctcccttctacttccactggtcccactgcagctgcccagtcttccatctccggcccctcactgccactgccaccccacaacggggcaggggacgctccagctggtctggggttggccagggccctagtggcccgccctggggccccagctcggcccctcgcctcgctgagctctagtgtgccccaccgacccttcaggtgctgctcgtggtgggaggggcggcaggccgcgggtcctgctgtgcacccgcgggaccagccggcctgggagaccatcggccgggggggatgggtgagggccctgccgctccaccgaagtcatcttc

SEQ ID NO: 94790 - DNA, 413 bp, Homo sapiens
  misc_feature (1)...(413): n = a,t,c or g
cggacgcgtgggcggacgcgtgggctagttctagatcgcgagcggccgcccnnnnnnnnnnnnnnnnnnnnnnnnnnnnnnnnggcccccgccccccgggggttatccccatttttcttttttnnnnnnnnnnnnnnnnnnnnnnnnnnnnnnnnnaaaatcccttttaccccccggaaagggccccaaccccccaaaagtggggcttcccccttttnnnnnnnnnnttgtttccccaaaaaannnnnnnnnnnnnnnnnnnnnnnnataaaaccccccccattcccccccaagggccccgggggggcccccttaaatttacacccccgggannnnnnnnnnnaaacccccccaccatccttttggataaaaaaaggggcgttttggggccaccccccttcttctggaccaac

SEQ ID NO: 94791 - DNA, 486 bp, Homo sapiens
  misc_feature (1)...(486): n = a,t,c or g
gggggttaggggnnnngnatcgagaccactcgaagtgcggtggaattcattagaacaaatacctaatgcatgaggagcttaaaacctagatgatgggttgataggtacagcaaaccaccatggcacgtatatacgtatgtaacaaacctgcacgttctacacccagattcacgaaacaaatacttctagatgttctaaagacatagatacccagacaataatactgagggactttaacaccccatgaacagcgttatgtcatggaggcagaaaactaacaaagataatctggacttaaatttgatgcttggccaattggacctcatagacatctccagaatactccatgtgtcaaccagataatattcttctcctctttacatgaaatatactctaagagtggacacatgctcagccataaagcctgtcacaataacttttagaaaattgaaataatactaatcatactcttgtaccactgttgan

SEQ ID NO: 94792 - DNA, 477 bp, Homo sapiens
  misc_feature (1)...(477): n = a,t,c or g
nattgtacccttggcangnncactgatgaccctagtcagtgtggtggaattcggagaatcgcttgaacccaggaggtggaggttgtggtgagccgagatcgtgccactgttccccagtctgggtgacagagcaagactcctcaaaaaaaaaaaaaaatgggggggggatgagcccaaaaagttggttgggccctttttttgccccacctgggaggacctaaattgtccagagggcccgggagagccttgatggattttacccgggagggggggggaaccaaacttggggtatggatttctccttcacggatgtttggggggggggaaaactggtctgtccccccaggggggggttggcctgccctgggccaggcttgggggaaaaagccaggaggctgggggaaaaaacccttacgggttgatgggccagccctaaaacctagggtcttgtggggggggggggggcccaaaatgagg

SEQ ID NO: 94793 - DNA, 456 bp, Homo sapiens
  misc_feature (1)...(456): n = a,t,c or g
gtggtggaattcgaaacatacaatctaggtataaaatgagcaaagacatgaagagaaatttcaccaaagaggatctaatgatggcagatgaacacccgaggaggtgttgcacaccacctcacacctcccaggacagcccaggtcaaactagagctggagccgaacgagggcagggatgtggggaagctggccctgccacaccttgctggggggacgcagcaccagtacagccgctcttgcaaataggcaggcggtttcttaaaaagtgaacacatnnnnnnnnnnnnnnnnnnnnnnnnnnnnnnnnnnnnnnnnnnnnnnnnnnnnnnnnnnnnnnnnnnnnnnnnnnnnnnnnnnnnnnnnnnnnnnnnnnnnnnnnnnnnnnnnnnnnnnnnnnnnnnnnnnnnnnnnnntccagcaggcgagtggctccactagcttggtgcattcctgcca

SEQ ID NO: 94794 - DNA, 458 bp, Homo sapiens
  misc_feature (1)...(458): n = a,t,c or g
attgagactgggccgtcccacngacnaccggannggaantcccgggccgacccacgcgttcgctttgcctagatctatcagaggattttctgtgttatctatagcttcataaagaatattgcttatataatgatactcgtaagtcaaagctactccttgatccatggactgcagaatagatgttgtgttagcaggcataaaaacaacattcatctctttgtacatctccatcagaaccttggatgtcaataagcagtcatatttgtaaagaaatctcttattctgagcaataggtctcaacagcaggcttaaaattttcagtaaaccctgctgtaaacagatgtgctctcaatccagcttcattttttcatttatagagcacagagagcatagatttagcataatcctgaaaggccctaggattttcagaatggtaaatgagcattggcttcaacttn

SEQ ID NO: 94795 - DNA, 407 bp, Homo sapiens
  misc_feature (1)...(407): n = a,t,c or g
tcttttggcttgcttgttttttgacaagtttcttttaaaatactctctttctctttggctttttgcagctatgatatgtatatatatatatatatggtttttatcctctctggtgttctctgagcttccttgacttttgatttgttatttgttgctagatttgggaaattctcagccattattactttaaatatttcttcctttctttgctctttttctggcattctcattacatggtggttacaccttttgtaatggtatcacagttcttggacattgatccatttcttttattctcttttctctgcattggagtttgcgatgcatctattgatatatcttcaagctcactgactttttctgtgggcatgccaggggaactcatttctgtcagtgttttcatttcn

SEQ ID NO: 94796 - DNA, 384 bp, Homo sapiens
cacttgtgcacacacacacacacacacacactaggaagcactggattaaatgccacttgtgcacacacacacacactaagaagcactggattaaatgccacttgtgcacacacacacactaagaagcactggattaaatgccatttgtgcgcgcgcacacacacacacactaagaagcactggattaaatgccacttgtgcacacacacacactaagaagctctggattaaatgccacttgtgcgcgcgcacacacacacacactaagaagcagtggattaaacagctaaaagaaaaatatttgagctttccactggtggccaaggagaaataacaggaactgtatttgtcttcccaccagaaacaaccgatatctaactatag

SEQ ID NO: 94797 - DNA, 403 bp, Homo sapiens
cagtgttttacaagcacattgtttaaagagtaccagtcagataggcctatgaggcttgtaatggaggacgacagtggctactattacccttatctcatttcctgcttcttgtagacaaacaacttcaactattttagctgattttttttggtgtttattgtcataaatccaaataagtttatattgctgctacttgattttttttttgacgctatctattgacttcccacagtggaagataagaactctgtcctcttacctgtcctgttttttttttgtggtggtgggggttttgtttttgagacagggtctcactctgtcacccaggctgaagggcaggggggcgatcatagctcattgcaccctccacctcctgggcacagtgatcttcccgcctcagcct

SEQ ID NO: 94798 - DNA, 385 bp, Homo sapiens
  misc_feature (1)...(385): n = a,t,c or g
cttgttgtcccggctgctcgggaggctgaggcaggaggatggcttgagcccgggaggttggggctgcagcgagccatgattgtgcttactgcactgcagcttggaagacagagtgaaaccctgtatctaaaaacaaaaaaaccgggcccggcgtggtggntaacacctccaaatcaattatttagagtggaaaacgaacaattcccgatttctccttcccaatcactgcttttgttagctttctcaccatcacctcgccttgagtaacttttccttttttcataattccgaaaaatggctaccatcttctttgctatataaccattaaactaatcctatccttttaatccgataaaacttttcagcagcctctgcttatatactg

SEQ ID NO: 94799 - DNA, 406 bp, Homo sapiens
  misc_feature (1)...(406): n = a,t,c or g
gcagaactgcttgaactcgggaggcagaggctgcagtaagccgacatcgcgccactgcactccagcctgagcaacagagcgaaattttgtctcaaaaaacaaaaattgcaattaatagtttaaaatattaaatctaaatttataggagattcattagtttgcccttggtaatccccactttctgccttgtaaagcctaagaccctaagaaggttaaaaattagaagaaaaagtgataggcataataggctctgggttttgcttaatgcaaacgttctgaaaggttcaacattaacacagacattcacaaatgaggcatctaattttaactttgttttaaaaagttgtttaaaaaaaaagtcaaaataagtcaaactcttcccatttgtttgaatagagggtacatn

SEQ ID NO: 94800 - DNA, 405 bp, Homo sapiens
  misc_feature (1)...(405): n = a,t,c or g
cccacgcgtccgattatacattaacatattatatatttatatattatatatttatatatataaacaaacaaaggcaagataactgacattttatccaattttcctcccaaatttgttgatctttaatttgttctgtatcagaacaggctttttgagaatctaaacaaatgcttattcaatgcaaatcccaaatgctctattgttaaagaatttaaacagtattctttgtgtgtgtgtgtgtgtgtgtgtgtgtgtgtgtgtgtgtttaacatgtgggacaaaaagagtatgcattgtttttctgtttatagtggtgntcaattgcaaactctgtgtgagccctgttgttgatgtaataggcaaggctgggcaccgtggctcttgcctgtaatctcaacacgctgg

SEQ ID NO: 94801 - DNA, 409 bp, Homo sapiens
  misc_feature (1)...(409): n = a,t,c or g
agatgtgaggcaccacacccagcctttttatacttttaaaatttttatttttcttaaaaaaaaaaaaaaaggccggggggggtggctcatgcctggggccccggcgctttgggaggccgaggggggggatccattcagccctgggcaacagggggagatcctgtccttacccgccccacaaaaaaaaaaaaaaggggggggggttaaaaaaaccctgtgttactacccgctgggggggaggaggtggttttttttttgggcccccacctataaagttggggcggcggggattacagagggggccaggggaaacccccgggggcaacaaactaaaagccttttaaaaaaaacccccttcccccaaatggggaaaaaaaaaaaaagccgcnaaccttgcctcaaacttcgn

SEQ ID NO: 94802 - DNA, 409 bp, Homo sapiens
aaagtcaatattactccttgatccatgggctgcagaatggatgttgtgttagcaggcatgaaaacagcatgaatctccttgtacatctccatcagagctcttaggtgatcaggtgcattttcaatgagcagtaatattttgaatggaatctttttatctgagtagcaggtctcaacagtgggcttaaaatatttaataaactatgctataaacagatttgctatcatccaggctttgttgctccatttatagagcacagagtatatttagcatagttcttaaggatcctaggattttcagaatggtaaaatgaacactggcttcaagttaaaagtcaccagctgcctgagcctctaacaagagagtcatcctgtcttttgaagctttgaagccaggcattgacttcttt

SEQ ID NO: 94803 - DNA, 408 bp, Homo sapiens
caaagattagagtggaggtaaacaaaatgtataatagaaaactgttagaggaaatcaaaaaaatcaaaagtttgttctttgaaaacatcaacaaaattgaccaatttctacctagattaagaaaaacaagacagaagatgcaaattaataaaattagaaatgaacaagggggaatttccatcaacattatggaaattaaatatagttataaggaaatgctgtgagcaattatatgcaaaaaattaaacaacctacatgaaatgaacaaattcctagacacagagtaccaaaactgactcaagtagaaatagaaaacctgaattatatctataaaaagtaaagacaggccaagcacagtggctcgcccctgtaatcctagcactttgggaggctgaagagggcgaatat

SEQ ID NO: 94804 - DNA, 404 bp, Homo sapiens
agaggcttaaaaatacaaaacgttaatgaaattaagagttagtgttttgaaaagataaaaatcgacaaatttctagctagacaaaattttaaaaggaaaagattcaaattcagagatgtgaaaaggtgacattatggctgatattacagaaatataagggatcataagagcctattactaacaactataaggcaactatttggaaaacctagaagaaatgggtaaattcctagtcacatacaacctaccaaaattgaatcatgaatagaaaatctgaagaaaccagtaacaactctgagttcaaatcagtaataaaaagtctcccattgaagaaaagtccattacatgacagcttcactgctcaattctaccaaacatttgaagaagaatgagtctcagtcctt

SEQ ID NO: 94805 - DNA, 377 bp, Homo sapiens
  misc_feature (1)...(377): n = a,t,c or g
tctctacaaaaaataaaatgaaatatattagctggatgtggaggtccacacctgtaactctagctagcctggaggctaagaagggaggattgcctgagcccagtagttcaaggctggagtgagctaggactgcatcactgcactccagcctaggcaacagcaagaccacattctctctctctctctctctctctctctcaaaaggcagngaaataacgacttatttggggaaaaaataaaggcagagaatttgttgccagcacactagcataaaaaaaaaggaagtccttgaaacagaagagaaatgataaaagatggaaatttggatatatactaaagaatgaggattgctaaaagtgacatacatagataaatat

SEQ ID NO: 94806 - DNA, 358 bp, Homo sapiens
tcccaaagtgctgggattacaagcatgagccactgcgcccggccacaaacactttttttttttttaaacaagggaaaacaagtttattaacaaagttaaaaaaaaaaaaagggctattccatagggagagcagcctgaaaaaacactttttttgttgttgtggaggcaaagcgtctttttgtcccccaggcaggagggcaggggggcaacctaagttttaagttccctgcaccgcccacctccggggttaaagcgcttcttccccaagtagcggggactataggcccacaccaccatgcccggctaatttttttttttttaaaaaaaacaggatttccccatgggggtcgggctggcg

SEQ ID NO: 94807 - DNA, 367 bp, Homo sapiens
  misc_feature (1)...(367): n = a,t,c or g
tgtaaatgagatcatgctgtatttgtctttctgtgcctggcttatttaacttagcatgatgtcttccaggttcatccatgttattacaaagacaggatttcctttctttttaaggctgaggcaggacaatggtgtgaaccggggaggcggagcttgcagtgagctgagatcacaccactgtgctccagcctgggcaatagagcgagactccgtctcaaaaaaaaaaaaaaaaaaattagctggatggggaagggggctacgggggccccaattactgggtcccagttactaaggaggccagggggggaggattttttgacctcaggggaggttgaggtttcagggacccatgatcgccccactaccn

SEQ ID NO: 94808 - DNA, 362 bp, Homo sapiens
tatagagacggggtcttgccttgttgtttatgctggtctccaactactgggctcaagcagttctccctccttggcctcccagagtgctgggattacaggcatgagccactgcacctggctgatgtagtgtaattcttaagggccttagattttcagaatggtcaaggagcattggccttcaccttaaaatcaccagctgcattagctcctaacaagagaggctgtcctttgaagctttgaagtaagcattctcctctgtttgaagacaggatttctcctttctactctctagccacaaaagttttggattgtgtcttccaatagaatgctgttttttctacattgctgacatgttgtttaag

SEQ ID NO: 94809 - DNA, 366 bp, Homo sapiens
agtgaattgtgtctggatgtggtggctcacgcctcgattcccagcagttttggaggctgagtcgggaggatcacttgagtccaggtgtttgagaccagctcgggcaacatagtgagaccccatctcaaacaaacaaacaaataatttttttaacttaagaatgggccaggcgtggtggctcacccctgtaattctagcactttgggagactgaggcgttttgatgatttgagcccaggagtttgacatctgactgggcacaaaaaaatacaaaaattagccaatgtggtagcacattcctgtagtcccagctattcagcaggctgaggtgggaggatcacttgagcctaggaggtcaaggccgtgg

SEQ ID NO: 94810 - DNA, 374 bp, Homo sapiens
  misc_feature (1)...(374): n = a,t,c or g
ctctgtctcaaaaaaaaaattagtattattattattatgattattggccaggcatgctgactcatgcctgtagtcccagtgctttgggaggccaaggtgggtgtattgcttgaggccaggaggtcaagaccagcatagtgacaccctgtctctaaaaaaaaaaaaaaaaaaaaaaggggggcccgtttaaaaaaataaaattttacatacggggggagggaaggaaaaattttttttttagggcccccaaaatcaaattcaggggcgggggtttaaaaacgtggggaggggaaaaaccgtggcgttaccaaattaatagggttggaaaaaaatccccttttgggcgggggggtaataaaaaaaaaagccgnttn

SEQ ID NO: 94811 - DNA, 379 bp, Homo sapiens
caaggtcaggagatcaagactgtcctggacaacatggtgaaaccctgtctctactgtctctaacatttgtaaacctgtctctaatttgtaatttgtaaaccctgtctctcatatttgtaaaaatacaaaaattagcttggcatggtggtgtgcgcctgtagtcccagctactaggaggctgaggcaggagaatcacttgaaccaggaaggcggactgcattccagcctgggcaacagagaaagactctgtctcaaaaaaaaaaaaaaaaaaaaagggggggcccttttaaagggaccaattttaacttccgggggttgggagagttaatttttttttatggggccccaaaattcaattcccgggccggcgttttaacaa

SEQ ID NO: 94812 - DNA, 379 bp, Homo sapiens
cttaatagtgttggcattatatgtatataccacggttttgttttatccacttatctgttgataaacatttgtattgtttctaatttgggactttataattaaagttgctgtgaacattcatgtacaaggctttgtgtggatatatgcttttatttcttttgaataaaagctagaaattgaatggctatatcatatgatagatgtgtatttaatttttaagaatctgcccaagtgttttgcaaagcgattgtaccattttacattccacagatatatccagttgctgcacatcctcaccaaacttggtatagccaatctttttcattttagccatccttataggtgtgtaatatctcattatagttaaaatttgcatatg

SEQ ID NO: 94813 - DNA, 385 bp, Homo sapiens
  misc_feature (1)...(385): n = a,t,c or g
atcgcccttaccacgctactcctacctatctccccttttatactaataatcttataaggagaaaaaaaaaaaaaaaaaaaaaaaaaaaaagggggggggaaaaaaagggggggggggtttagggggggggggggggggaaaaaggggggggggggggggggctttaaagaaaaaaatcgggggggggtttggcggggggggggggggggtaaattgggggggggggaatttaggggggggggggggaaattccctttggggggggggggtgttttgggggggggggcttgaancccgggggggcctttcctcccttttgggggggggggtggaagagagggggggtgggatntttttctgtggggtgtggacaaggttttctttt

SEQ ID NO: 94814 - DNA, 477 bp, Homo sapiens
  misc_feature (1)...(477): n = a,t,c or g
agagtnccnaggggnnnnnnatagtaagccgattgataaccgtccgcctgcagaaaccgcggctcgacccacgcgtccgcccacgcgtccgaagaaaagaaaactactcatcagtatattcataaacatagatagaaatgttctgaacaaaattttataagtcaaattcaacaatatattaaaaagttaatacgtcatgaataattctggtttatcccggcattcagggctggtttaatattctgaagtcagtcattgtaacttatgttaacaagctaaaaatggaaaaaacataccatcatatcagtagatacagaaaaagcttttgacaaaatccattatctagccctgattttaattaaaaaaaaaaaaaaaaaaaaaagggccttgccccaaagttttattccaggggacctttttaaaaaaccaaatggggggtttcctggccttaaaatgatggggagggcaccaggggag

SEQ ID NO: 94815 - DNA, 398 bp, Homo sapiens
gagaggataaaccacacccttttttttttagcagaggcacagaagagactgccgactgggatatcagggagaggtaggccagcgattccccacaacacaccccaacgggcgccagatcatgcttacctacctgctgccctggctgcacaacatcgagctgggggacagcaggctcctcctcccggggtcgagccccagcagcccatatgacgaagtcaaggaccgggaaggtgacgtgactgcttctcacgggctgagaggaaatggctggggctctccataagccacgtcactggtcctgaacaacctcatgtacatgacggccaagtatggagatgaagttcctgggccagaaatggaaaatgcttggaatgctttagccaacaatgagaaatgga

SEQ ID NO: 94816 - DNA, 238 bp, Homo sapiens
cggacgcgtgggtagccgggcatgatggtgtaccccatagtcccagctactcaggaagctgaggtgggagcatagatttagctcaggagatcgagtgagcgatccatgatcatgcctttgcactctagcctgggtggcagagtgagactcttcctcaaaaaaaaaaaaggggggcccgtttaaagggaccaagtttaactcccggggggggggaaggaattattttttttatggggcc

SEQ ID NO: 94817 - DNA, 413 bp, Homo sapiens
cgagattgcgccactgcactccagcctggatgactctgtctcaatagaaaaagaaaaaatgaaaaattagctgggcatggtggtgcacacctgtagtcccagctactcagaaggctgaggcagaaaggtcccttgagcccaggagttcgagctgcagtgagctatgatcatgccactgcactgggcaacacggtgagaccctgtttcaaaaaaggaagggactatggccatgggaagatggcattggattagaagatggcattacagggtgtgaatgaagttcttaacaaaaagcgaatagtctgcgatttatctgtagatacatggccacagagctgagtcatcctagagcaaacctctggagtggagagcgaactacttcattcccctcccttagcctgggccagagagaa

SEQ ID NO: 94818 - DNA, 414 bp, Homo sapiens
aaaaataaaaataaagaaaatcagtcaatgtaataatccaccatagtgaaattctaaagaagaaaaactatatgatcatatcaattgacactgaaaaatcatttgacaaaatttaatacccattcatgacaaaactctcagaaaactaagactctctcaacttgataaacaacatctatgaaaaccatagctaacaccatacttcatagtaaaagactgaatgcattccctataaagcaaggatgtctgcaaggatgtctcaccattcttgttcaatataatactagaagttctagccagcacaaaaggtagaaaggaaataaaaagcttacaaattagagtggaagaaattaaccactctccctgtttgcagataacatgatgtttacatagaaaatcccaaagaatctatag

SEQ ID NO: 94819 - DNA, 430 bp, Homo sapiens
aaacaaacaaacaaaggattggctaggtgtggtggcatgtgcctgtggttctagctgctcgggaggctgaggtgggaggatcgcttgatgagcccaggaggtcaaggctgtgagcgatgctcacaccactgcctcctagtctgggcagcagagagagaccttgtcttaaaaaaaaaaagtcttgtctttttggtccttccccaaccccatccagacagtgagtcccccactcccagctgcatccctgcagatggaggttgcttctttggagaaactgaagttaagaggctttgacttgaagtcaccaagtacagtggaggatggggtgaaacaggcctgcaggcaaagggatctgcagcctaaaacagtggaaccccaacttccttccacttaaaacagtgggactccaacctccttcaactcccccact

SEQ ID NO: 94820 - DNA, 403 bp, Homo sapiens
gtgtgttgactgtagttccagttactccttttgctgaggtgggaggattggttgagcctgggtggatgaggctgcagtgacccatgatcatgcatgggagacagagcaagaccttgtctcaagaaaggaaagaaatcactggctcttctgtaaaaaatgatctgttaagagtaattgaaaaaataaatacaagtaataaaataatctttcatttaagaaatactaccaaaattaagatggagatctagcaaaaagtcaaaagcagctgggcgtgggggctcacacctgtaatccctacaccttggggaggctgaggcgggaggatcgcctggggtcaggggttcgagaccagcctggccaacagagccaaagtctctactgaaaatacaagagttagcttgat

SEQ ID NO: 94821 - DNA, 396 bp, Homo sapiens
aatttctatctcaacatggttttttatttttattttttgcaggcatagacaagcttattctaaaatttatatggaaagacaactaaaacaattatgaaaaagaagactgaaggggtgtaatcactctaccccatataaggcttactctgtagctacagtaatcaagatggtatggcattggcagagtgataaacatgtagaccaatggaatagagaacccagaaatagacccaattactatatgagccagtaattccctctttgatatgtgtcccagagaaatgaaaacttacctttacacaaaaatccgtacatgaatgttcataatggctttatttgtaatagcaggaaacaatccagatatccttcaacaggtgaatgggtaaacaaactgtg

SEQ ID NO: 94822 - DNA, 397 bp, Homo sapiens
  misc_feature (1)...(397): n = a,t,c or g
tcctcccaaagtgctgggattacaggcgttagccaccgcacccagccctttttcatttttttaaaagcaccccaaattccctaagatgcaggtaaaatgaggaaacattaaactgaaaatagattagtgatgtacttttctgaaaaattcggagattaactgaaagaccaacataagctttattatttagacatggcttttcagttcattttcacatttacatatgtaatgagatatagtatactatttaaatttaacattaggtgactaactttaagctctgttaaaatggctgtatttttagtagagacggggtttcaccatgttggccaggatggtcttgatctcctgacttcgtgatctgcccacatcagcctcccaaaatgccgggattacn

SEQ ID NO: 94823 - DNA, 415 bp, Homo sapiens
atcaagaattacccatatgttctcttctaagaacgtcatagttttagctcttacatttaggtctttgatccactttgagttaattttgtatatggtgaggtagaggtccaacttcattctttttcatgtggatatctaattgtctcagtacaatttgtaattgttctggcaccactatcaaaaaccaactgaccataaatgtgaggggttttttttttttgaacttaaaatccggtccctttaataggtctattcttaggccagccccattttttttattaccatacctttgccgtaagttttaaaactgggaagggggagccttcaaattttgtttttttttttcaaaactattttggctaaaaggggtctcttgcatttccatatgaaggttaggatcagcttgtcaattttt

SEQ ID NO: 94824 - DNA, 384 bp, Homo sapiens
  misc_feature (1)...(384): n = a,t,c or g
tggacatgccttctttccctaacatattagtgtattgtgaagcagcaagtgctttaatggagaacctgcagcaagtgatccacaagatctagctgcttcaccttacacttttatgttatggacatgccttctttccctaaacctcatgaaccaacctctgcaagtttccatcttttcttctgcagctttgtcacctctcagccttcatagaattaaagagagttagggccttgctctgggttaagctttggcttaagggaatgttattgctggtttgaccctctatccagacaccaaaactttctctatattagccgnatggctattttgctttcttaccatttgtgtgttcactggaatagcattttatatttcttggaagaa

SEQ ID NO: 94825 - DNA, 379 bp, Homo sapiens
agaaatgtccgcactcaaaagatctaattttaaaatgagatcttttttttttttgctgtggaaaggttggagtcccttgaatatttggaaaataaacccttcataaaaggcatggccggcaggaatgccctctgattctgaaggccatgtttttactctggggatggcttccttggcggggcaaaaccttttaggccaatataaccccattggataattttggttttggtggcccatgctttgggagcctaacttataaattttttccctggaccaaggtctggaaccattcccctgggttttcttctaagggtttaaaagttaagggccttacattaaggcctttgaggcatttggagtggatttttgtatacgggga

SEQ ID NO: 94826 - DNA, 408 bp, Homo sapiens
ttctttctaagcatctatgtttctggttatctttccacctacttgggggaatgggataaggtagaactagagaatcataaagttcctgtccagctctttaaaaaaaactgcaggaaggccggatgcagtggctcacacctgcaatcccagcaccttgggaggccaaggcggcagatcatctgaggccaggagttcgagaccagcctgggcaacatagtctgacccccatccctaccaaaaaaaattaattaatttaattaaaactgcaggaagaacaagagaaaacacactttaaagggcaataatagtcagacacggtggctcacgcccgcaatcccagcactttgggaggccaaggtgggcagatcacaaggttaggagtttgagaccagcctggccaacacggta

SEQ ID NO: 94827 - DNA, 381 bp, Homo sapiens
gagaactaagtcagaggacttgctgtatggatatcatgtcttattataaagctattgtaataacaatggcatggtattgattcaaggataaacaaagagtccaacagaacgaagtagaaagcccaaaaacactactttacatttacagactctggatttattacgaaggagacactacagataaaggttaaactttccaataaatggtactgggattcatggatatgacatgaaaaatatgtaattcgactatcattttacacaatgcataaaaatcaattgcaatggatgtccttagactgggtaatttacaaaggaaagaggtttcattggttcatggttctggaaacatgatgctggcatcggctcagtttctgcagt

SEQ ID NO: 94828 - DNA, 399 bp, Homo sapiens
  misc_feature (1)...(399): n = a,t,c or g
tttgctgatgacatgatcgtatacctagaaaaccttaaagactcatccaaaaagctcctagaactggtaaatcaattcagcaaagtttcaggatacaaaagtaaagtaaagtacataaatcagtagccctgctatatgccaacagcaaccaagctgagaaatcaagaacccaaccccttttacaatagctgcaaaaaaacaaaaaacaaacaaaaaaacaacttaggaatatactgaaccaaggaagtaaaagacctctacaaggaaaactacaaaacatcactgaaagaaatcatagatgacgcaaacaaatggaaatacatcccatgctcatgtatgggtagaatcgatattgtgaaaatgaccatactgccaaaagcaatctagaggttcagtgcn

SEQ ID NO: 94829 - DNA, 391 bp, Homo sapiens
aatttaaaaataaaatctgcagaattaaataattattcaaaagatgtatttaaagctacatgagccggggcagtgcctcaagtctgtaatcccagcactttgggaggccaaagcatgaagattgcttgagtccaggagttcaaggttgcagtgagctatgaccataccattgtcctccagcctgggtgacagagcaagatcttctttcaaaaaatacataaataaataaattacatgaaagatgtgtttgatctattgttaattaaaatgacagtttactgggccaagcatagtggctcacacctataatctcagcactttgggaggccgaggcgggcagaactcttgacgtcgggagtttgagaccagcctggctaacatggagaaactg

SEQ ID NO: 94830 - DNA, 499 bp, Homo sapiens
tacagtttgggaattgttgctaatagttgattagtttaattgcttcaatgagaacataaagcattaaacacagtaaactactctggagcaatagtaaggtgtactccttgagatacatcgtaattctgacttgaatttcattgctgatggagattctgagtttatgttacatttctttttcgaaagtgaatgtacactgactagcccttaaaaaaaagaaaaaaagcagccgggcgtggtggcacacgcctgtaatcccagcactttgggaggccaaggcgggcattatcacttgaggtcaggagttcaagaccagcttggccaacatggtgaaaccccatctctactaaaaatacaaaaattagtctggcttgatggtacacacctgtaatcccagctactccggaggctgaggcaggagaatcgcttgagcccaggagttgaagaccagcctaggcacagcaagaccccatctcaagagaaagaaagagagagagag

SEQ ID NO: 94831 - DNA, 398 bp, Homo sapiens
caacttcatgattaataaccttccaaaaaagaaagcactatgcccagttgtgtttactggtgagttctatctgccatttaaggaagaaactataccatgagttatacgaatctctctgagtctctattctctataatctttcagaagatagaaacagagggaatacttcctaactcattctatgagggctgcataatcctaatctcaaaaccatacaaagacatttaatgaaaactacagacttacatctgtcatgcacatagatgcaagattccttgacagtatcttagcaaatccaatccaacaatgtataaaagttatacactgcagccacgtggcatttgtgtaggtacgcaagactggttcaacattcaaaaatcaatgtgtaacttaccatt

SEQ ID NO: 94832 - DNA, 384 bp, Homo sapiens
  misc_feature (1)...(384): n = a,t,c or g
cccacgcgtncgctggattttaccatgttggccaggatggtctcaaacttctgacctcaagtgatcctcctgcctcggcctcccaaagtgctgggataaaggcgtgagccactgtgcccggcctctcacctcttaatttctgtgaggtcaggtttatggaatcttggtcatggaaaaggccttagaggacctcttgtttgttctgctcttgctaaatgctgtgacaggaatgcatcanaagtagttgacaagcttccttcctttcctaccccatgtgatccccctgccttcatcctgctgtctccgctttctgtgggtcagcatcagttcttcctgggatcatcgtgacaacctctgtgtgatctccctgccccacagccttgg

SEQ ID NO: 94833 - DNA, 383 bp, Homo sapiens
tctgaacaaacaaacacacacacacaatcactgcagctgtgggagccaggaagtctttctggtgtcacagctcatgctcagcccttcggcctcctccatgtcacacggatgagctgtccctgcacctccttgtctccttggagagttactgtggttctctgtcagtttggtttgaaaagtgaaaacaggctgggcgcggcggctcatgcctgtaatcccaaggtgctgggattataggcgtgagctactgcacctggccttcatgcctggctaattaaaaaagttttttgtaaagatgggggtctcactatgtggcccaggctcgtattgaacttctggcctccagtgatcctcctgcctcggcctcccaaagtgctgggatg

SEQ ID NO: 94834 - DNA, 409 bp, Homo sapiens
cacatgtctgtgaacccagctgctggggaggctggggcaggagaatcacttgaacccgggaggcggaggttgtagtgagccaagatctcaccagcaacaagagcaaaactccgtctcaaaaaaaaagaaatctaagaaccaaatatatcagagaatgttaaatttcttgggtatgatgatgatattgtagttacatagggaaatatccttattcttaggagatacatgctgaaatatttagagctgaagtgccatgtcagcaacttactttcaaaaagttcattcagcaaaaagccgggtgcagtggctcacacctgtaatcccagcactttaaggcaagctgatcactttgaggtcaggagtttgagaccagcctggccaacatgatgaaaccctgtctctactaaaa

SEQ ID NO: 94835 - DNA, 438 bp, Homo sapiens
  misc_feature (1)...(438): n = a,t,c or g
ntagatagccgtacgnccgccgnaccggaccggaattcccnnnacacccacgcgtccgctgtatcttttattcctgacattagtaatggttgtcttctctcccttttttctttatcaggcttgctagagttcataaattttactgatcttctcaaagaaccagcttttggtttaatggatttgttgtattgtttttgtttgtttgttttcaactttaccaagtttttactatatctgcatgattttcttctgtctgctttcagtttgttttgctctttttttcttgttttaagggtggagcttagattgagttgagccctttcttattttctagtataagcatttaatgctctaaatttccttctaaacactgctttatctgcatcccacaattttgatatgttgtatttttatttatgtttgctccctctgttttct

SEQ ID NO: 94836 - DNA, 372 bp, Homo sapiens
  misc_feature (1)...(372): n = a,t,c or g
caggggtgttatgagtctagcagacctgggtttaaaccttgggtgtgctatatactagtttgtgagatttcaatcctgtgtgccttagtttcctgacaaataacaatcatgacttttatctcatagactgtgggcaaacattgagtgagcacttcctagggccaggtgcatttctaagactggcatgtagtagctctcttagtctttctgtcctttgaagtacccagtgaagtaggtactatggtcatcacggttcaatatgtgaagaaaatgctggccaggcgcagtagctcacacttgtaatctcancactttgggaggccaaggtgggaggatcacttgacccaggagtttgagaccattctgggcaac

SEQ ID NO: 94837 - DNA, 391 bp, Homo sapiens
cggacgcgtgggcggacgcgtggggttctagatcgcgagcggtcgccctttttttttttttttgggggtttttggggggggggggtttaaaaacgggtttttattttatcccccaggtggaaaggcgggggctcaattttgattaatggaaccctccacctccagggttaaggggatcctccccccccaccctccaaagcagtgggaaccaggggggggcccccccgccccaagtaatttttggtttttttttgaaaaaagggggtttccccaggtaacccaggcgggtttcaaattatggaactaaggggacccccctgccggaccctccaaaggggtgggaattacgggggggaccccctcgccccaccctttgtttttaaaaaaaagg

SEQ ID NO: 94838 - DNA, 394 bp, Homo sapiens
  misc_feature (1)...(394): n = a,t,c or g
gcatgcatcaccatgcttgactagttcttgtatttttttgtggagataaagtctcactatgttgtccgggatgatcttgaactcctgacctcaaacgattgtcccaccatggcctcccaaagcattgggactacaggtgtgagccaccacacccggattcttctctctcttttttttttttttttttaacccccctgaattcttactgccttgggcccccccctcttattctttgaaacaaaataaaattttccttaaaagatttttggagcctttggccccccctaagggcttacctttaaaaagggccaaagggaggatatgaactagggtttctcaggttttttccccagaaaccgccatctcccagaacaagtaatgtctgcagaacaan

SEQ ID NO: 94839 - DNA, 406 bp, Homo sapiens
cggacgcgtgggtggggtttctctatgttgctcaggctggtctctaactcctgggctgaagtgatcctcctgcctcagcctcccaaagtgctgggattacaggcatgagccactgtgcctggcgtctgagtcctccttctaaagggaacccactgcacagcatctggctgctgccaacaaaatgactgccccaccagtcccacaggtgatgagagtttgcaatggccttcacagcttaataccttagtaccttttctctcctggtaacttaaaatggaagccccatgggggcccacgcatatctgcgagggtgcacaggcatgtggcagaatgagccaggggccaccctcttgttctggaggtgctgagagccggcctggctgggggctgtaactgtcaggctgac

SEQ ID NO: 94840 - DNA, 405 bp, Homo sapiens
  misc_feature (1)...(405): n = a,t,c or g
tgatatctgtttttctgtgcttgacatatttcacttaacataatgtccttcgggctcattcctgttgctgcaaatgacaggattccattcttttctatggctgaatagtactccatcatgtctgtatctatgttttctttatccattaatgcttcatgcgtgaaagtagagtggtgttacttgtatgtcttttatggagttaaatatccactgatggatatttaggttgattcagtatcttagctattgtgaatagtgctgcaatacgcattgggggtgtgcgtatccctttgatttcctttcttttgtannanaaaaaaaaaaaaggaaagaaagaagggacccccagggctgggatggcgggaccctatggaagttcttttttagtttttttgaggaaaggcg

SEQ ID NO: 94841 - DNA, 253 bp, Homo sapiens
gtggctgatgtgagagaatcacttgacccaggagactgaggttgcagtgagctgagattgtgccactgcactccagcctgggcaacagagcaggactacttctcaacaacaactaaaaaagcaaaatgaaaatacaacataaaaaacttatggtatacagctgatgaattgccaaattgcaaattattgctctaaattgctgtattttagaaaaatgtcaaatttacagtctaacctaaaaaaaaaaaaaaag

SEQ ID NO: 94842 - DNA, 411 bp, Homo sapiens
aaaaaaaaaaagctcaaaagtcaggaacaatagtgctcccctgtaatcccagttactcaggaggctgagttggggaaaatgcttgaggccaggagtcagcctgggctcatctcttaaaaacaacaataacaacaacaaaaccagcaacaaaccacctcaaagacagacccatatatctatggaacttgatacatgatagagggggtaaaacacacacagggatgggacagattgcttaatagatggggatggggcatctggctcatgacacaaagaaaaataaaattggagctctatctcacaccatatacaaggacgaactctacatggattaaagacctaaatgtggccgggtgcggtggctcgtgcctgtagtcccagcactttgggaggccgaggcgggcgaatcat

SEQ ID NO: 94843 - DNA, 411 bp, Homo sapiens
  misc_feature (1)...(411): n = a,t,c or g
aaaaaatttaacacccatagtaggcctaaaagcagccaccaattaagaaagcattccccctcaaacctaagaaaaaaaaaaaaaaaaaaaaaaaaaaaaaaaaaaagggggggggctttaaaaaaaaaaaaatttaaaggggggggggggggaaaaaaaaatttttttaaagggggcaaaaaaaaaaaattaggggggggggttaaaaaaaggggggaaggaaaaaaaccggggggaaaaaaaaaaaaaaggtttggaaaaaaatcctttttttccagggggggaaaaaaaaaaaaaaaccggggnnnnnnnnnnnnnnnnnnnnnnnnnnnnnnnnnnnnnnnnnnnnnnnnnnnnnnnnnnnnnnnnnnnnnnnnnnnnnnnnnnnnnnnnnnnnnnnnnnnnnnnnnn

SEQ ID NO: 94844 - DNA, 487 bp, Homo sapiens
  misc_feature (1)...(487): n = a,t,c or g
tggagganccgcccccccgcaatgagaccctaaggaaagctaccgacaggcncccggnncggaagacccgggccgacccacgcgttcgtggtgattgacagtttttttatgggaaatgaggcccgattcatcaaccatagctgtgacccgaattgtgaaatgcagaaatggtctgttaatggagtataccggattggactctatgctcttaaagacatgccagctgggactgaactcacttatgattataactttcattccttcaatgtggaaaaacagcaactttgtaagtgtggctttgagaaatgtcgaggaatcatcggaggcaagagtcagcgtgtgaatggactcaccagcagcaaaaacagccagcccatggccacacacaaaaaatctggacggtcatatnngaataaaaaaaaaataaaaaaaaaagggggggccgttttaaaggatcacaattttcgtccccgggcatgcaaggttt

SEQ ID NO: 94845 - DNA, 398 bp, Homo sapiens
  misc_feature (1)...(398): n = a,t,c or g
gtcaataatgttacattgtatggctatatcacattttgtttatccattcatctgttaatgggcatttaggtcatttccatctttggctattatgaatagctctgcaatgaacattcacatatgaatatttgtctgagtacttgtttttaatccttttgggtcttggtacattttaaggggagtttgctaagaatgatcccaaatcttgaaagcattggtggccagttttcttaagctctcccagaaattactgggctggtgcccactaatgtttatggcatggcaggctatggcatgggcaccattgaatggccttaggtgacggcaggtagcagagttcatctgggggcctttcttcctctcttggttgctttctctcccactcttagatccttccn

SEQ ID NO: 94846 - DNA, 391 bp, Homo sapiens
  misc_feature (1)...(391): n = a,t,c or g
cccacccctcagttgggacaaataaaggattctcatgggaaggggaggacccctccttcccaacttatgaaaaaaaaaaaaaaaaaaaaaaaaanggggggggcccccttaaaaaaaaaaaatttaaagaccgggggggggaaaagaaaaattttttttatggggccccaaaaataaattccgggggccgggttttaaaaacggggggagggaaaaaaccggggggaacccaaaataaagggcttggaaaaaaacccccttttcccagggggggaaaaaaaaaaaaagcccgggnnnnctgncttatttttttggtggtgttgttgnnnggttgnttttngtttgggggttggtgtgtttttttgggtttttgtttgtgtgggtgtttttt

SEQ ID NO: 94847 - DNA, 410 bp, Homo sapiens
  misc_feature (1)...(410): n = a,t,c or g
cccgcctcggcctcccaaagtgctgggattacaggcataagccaccatacccagcaattcctggttcttttctggagctgaggtcccactaagcacattttaatctaaataccaaaaaaaaaaaaaaaaaaaaaaaaaaaaaaaaaaaaaaaaaaaaaaaaaaaaaaaaaaaaaaaaggggggggggccttaaaaaaaaaaaaattttttgcggggggggggggagaaatttttttttttttttaggcccaaaaaaaaaaatttggggggggggtataaaaaaagggggggagaaaaaaaacccgggcccaaaaaaaaaaaagggggtgaaaaaaaaacccttttttgggggggggaaaaaaaaaaagaaagccccnnnnnnnnnnnnnnggnnnntgaaaaataaaaan

SEQ ID NO: 94848 - DNA, 462 bp, Homo sapiens
  misc_feature (1)...(462): n = a,t,c or g
catcgagatcggtcgcangcacgnaccggnccggaantcccgggtcgaggatttcgtgagagaagcagctagggactcctatgctggcttaaccaaggtagtggtgcaggctgtggaggtgggtgcagaaccatagatcttcagaagggtcgatttcctcctcccttgtgtgccaggtgggcagtatgcatcgtctccatttttctgatagaggggataatagggtaacggggtttgaggtcacaccaggagaaagaggccagaaagtggaccaggagaaccattcatgccttggactccagtcccaggggcctatactggatctggtaaagagtaacagctgggatagccgggcacggcaaatcacacctgtaatcccagcactctgggaggctgaggcgggtggatcacgaggtcaggagatggagaccatcctgaccaacatggtgaaacgccgtctct

SEQ ID NO: 94849 - DNA, 444 bp, Homo sapiens
  misc_feature (1)...(444): n = a,t,c or g
ntttgaatcgatccatgcccnaccggnnccganatccgggtcgacgatttcgttgcatttcctaatgactaacgatgctgagcatcttctcatgtgcttactggctatttgtaatttttggagaaatgtccatttagatccttgtcccatttttaaattgggttattactgagtttttctaagagttctttatgtattttgaattcaagtcccttatcagacacatgatttattttctccattctgtggnttgtctttttacttccttgatggngtcctttgaagcacaaatcttaatctccgatgaagnccagnttgtctacttttttcttttgctacttgtgcttttggtcttgcatctaagaaggctttgcttaactcaggtcatgaagatttactcctgtatttacttcaagtgttttgtagtttcagctctaacattta

SEQ ID NO: 94850 - DNA, 383 bp, Homo sapiens
tggatcgcaaagaaagtggtttcttgagatggaatctactcctggtgataatgctatagacattgttgaagtgacaacaaagggttttaattattacatgaacttagttgataaagcagtagcagggtttgagaggattgacagcaattttgaaagaagttcttctgtcagtaaaattctatcaaacagcattgcctgctacagataaatattttgtaaaaagaagagtcaactgatgcagcaacttcattgtggttttattttaagaaattgccacagccaccccaaccttcagcagccaccaccctgatcagtcagcagctatatacattgaggcaagactctccaccagcaaaaagattatgattcactgatggcttggt

SEQ ID NO: 94851 - DNA, 477 bp, Homo sapiens
  misc_feature (1)...(477): n = a,t,c or g
cagtggccgnnntncaaaggggaagttgngcccagaagaccnacnggntggaattcccgggtcgacgatttcgtgggaggatcgcttgggcccaggaggtcaaggctgtagtgagtcatggtcatgccactgcactgcagcctaaacaacagagtgagacccggtatcanaaaaaaaaaaaaaaaaaaaaaaccccccaaaggaaaacccgggcccttaaagaaagttaaaagccaaatttttttcctttgaaaaaaaatggtggtttacccccagcccggaaacaaaaaacagttatgggggacgggtttttaacaacccttgaaaccccaagagggaaccctttttttccaatttccaaggggttaaattagaggccccgggaaaaaccctgtctaactttaaaagaagggaaaagccgccaatcaagcctgaactaattggcttaacctaagggaaattggctttcttgaaaac

SEQ ID NO: 94852 - DNA, 473 bp, Homo sapiens
  misc_feature (1)...(473): n = a,t,c or g
aggcgccgnnnnnnnaacagaccgtgganncgacgacnanccgnccggaattnccgggtcgacgatttcgttgtccttgtttgatgagagaagtgagcaagagcattgtcatattggacaaggactctctggtgaagttttcctgggcatttttctgctaaacctttggctgactttctcaaaacactctcatggtaagctttctcaaaaaactcccacaatattgctctttggctggctagaaattcagcaaacaaaatgccttgagcattctaaaaaaaaatcattgctgggggaggttccaagatggccgaataggaacagctccagtctacagctcccagcgtgagccacacagaagatgggtgatttctgcatttcctactgaggaactgggttcatctcactggggcttgtcagacagtgagcgcaccccatgtagcatgagccgaaggagggcagggcatcacctt

SEQ ID NO: 94853 - DNA, 489 bp, Homo sapiens
  misc_feature (1)...(489): n = a,t,c or g
atggtccngnnnntttggaagccttgagcacgtggcgccggnccggaantcctgggncgacgatttcgnggattacaggtgtgngnnnntggcccagccgttgatatatttaccagtgtttttgaaatgagttttctatttcaataattaatgagcatcaaagtctcacccacattagtacatctttttctttctctctctttttttttttctgtggcccaggcctgagtacaggggggcaatcacagttcactgcagcctcaacctcccgggctcaagtgatcctactgcctcagcctcctcagtagctgggactaaaccacacccactaatttttttttttttttaaaaaaaaaaatttttgttgttttgtcccccaggctggagggcaggggcatgattttggttaattataacccccccctcccagtttaaagcagggggggggtctcaccctttcaagaattggggactataggggcccccccc

SEQ ID NO: 94854 - DNA, 536 bp, Homo sapiens
tttcgtggaggctggggctctgtgagacgtgctcctggcaccgccagctgctacttggccctcgccgggggcccaccaggacaatgcccccccgcagccatctcatgcccatcgccactgccctggggcagctgaactgagcgtatgtgccacgccgcccaggagacccctctgctgcaccacttcatggtaagtgcccaggcccggtgtccccagaaatgttcctgggaggggcagggtagggcaggatggctgtggccaggcccaggacatacaggctgcagcctccctcatggcagacactgccccagatagcccggggtccgcaggaagtgtccgtgctcttcctgcctgtgttcctgagataagcggctcctgggccttcctccaggcgctgctctgccctgagtcgcagcggccccactcctggccggcatgtggacacacaccccaggcagcattctttttgtggaggtcaggagggcgatatacgcgcttttcccactttatacctcgaggtatatcctggtcccccc

SEQ ID NO: 94855 - DNA, 403 bp, Homo sapiens
tttcgtgagaatcacctgagcctggggaagtttaggctgcagtgagccgagattgcaccactgcactccagcctgggtaacagagtgagaccctgtctcaacaaacaaaacacaaaaatatatatatgctgaatgctcagtgagctgtaacatgtgaggcagcccccaggggtgccgagatgaaccgctaagaaggcgtatgttcccacggggtgcagagatgaacccctgtctgagaaggcgcatgtacccatggggtgcagcgatgaacccctgtcttgagaagccgcatgtacccacgggggtgcagagatgaacctctgggaaggcgcatgtacccacagggtgcagagatgaacccctgtctgagaagacgcatgtacccacgggggtgcagagatgt

SEQ ID NO: 94856 - DNA, 401 bp, Homo sapiens
tttcgtcttgaacccaggaggcagaagttgcagtgagccgagatcactccactgcactccagcctgggcaacaagagcatacctccagctaggaaaaaaaaaaaaagaaaaaaaaaaagaaaggggggaggaaaacaaaaaccagggcccacccaggcctttgaaaagggaggttggaaccccggggcaaaaaaaacccttggggggggctccaacggggccggccaaaaacaaccggctaaaaaaagggggggaaaaaaaaggctgaccacaagggacaaagggggaaaaattaaaaaagaaaaagggaggggggggggagtacaagcaaaaataacagccggggcacaggggctaaggcctgaaatcccaccatttggggaggcggagggaaaaaaatc

SEQ ID NO: 94857 - DNA, 417 bp, Homo sapiens
tttcgtgtgcgttgcgctttctcccgcgatcgccctgccggtcgctagctccgagggcgcgcactggatcccaggctcctccgagagtgcggcgacctcggggctccgccggcgccggaggtggctctgagggcagggacgtgttggacacgctgactttgtaggctccgccaagaggcgccgcaggagcccgtggccacccaggagcccgatgtgcaaggcaggtgtgagtgccaggacggcattcctggagatgaaggcctggagctgcggtctgcggactcggcagtgcccgtggccatgacccaagctgccgtgcggccctgggcaccctgcctggagaacatgaccactgccccaaacggcctcgggccaggccccgcagccccctgtgcaggctcggacctgaaagacgcc

SEQ ID NO: 94858 - DNA, 420 bp, Homo sapiens
tttcgtgggctcagcacgcggccttctcccagccaagagccccgtcataggtgggcgccgaccccgagccgatctcgctttattaaattacagaaatcggtattcaaaaaaaaaaaaaaaagggggggggggggcccctcctttttttttgtcccccccccttatttgttccccgggtttgggaaacccccccagaaacggaaagggttttttccaagcccagcgcccccccgggtttgaatcccccccttcccagggcccggggggggggggtttgggggccgcccctaattttggccggccaaaatttttcccgggtggggaaaaaaaagctccaccactttcccccggggttttccactcaccctaccgacgggccttgggaaaattcaggcggaaagaggcccacccgggggggcc

SEQ ID NO: 94859 - DNA, 402 bp, Homo sapiens
tttcgtgtgggagttgattattgaatgccttgaggttttcttatttgagttaaattggtgctctataaccttcttgtactatgtggatatgtttctctagatttggggagttctctattattatccatttgaataaactttctacccccatctccctctctacctcctctttaaggccaataactcttagatttgcctttttgaagctattttctagatcttgttggcgcgcttcattcttttatattcttttttattttgactcctctgactgtgtgttttcaaataacctgtcttcaagctcactaattctttcttctgcttgatcaattctgctgttaagagactctgatacattcttcagtatgtcaatcacatttttcagctccagaatttctgctg

SEQ ID NO: 94860 - DNA, 387 bp, Homo sapiens
tttcgtagcttcttatcgataccagaaaaagtttggaccttgcgttccacgttgttctgctgggctttgtccgaatgaacccttgtgagctgctgtgtccatttcacgcggattctcctgcccacaatttcacctgggaagaccgagtcctcgaggattgcgacgtgcgcagctgtcggagcgtggatcctgggacgcttttgcttattttttgtacaccttttttgagttggtttaggcagaattttcctctaagcaatagacgacatacttaccagtgaactttttctccaattcacgtactagccagacttggatgttctggaattatttcagtggcagaagaagaacaaagattatgataacttccttttttttttctttctt

SEQ ID NO: 94861 - DNA, 393 bp, Homo sapiens
tttcgtatggggcggctgccgggtggaggggctcctcacttctcagacggggtggctgggcagagacgctcctcacctcacagacggagtcgtggccgggcagaggcgctcctcacatcccagacggggcgtctgggcagaggcgctccccacatctcagacgatgggcggccgggcagagatgctcctcgcttcctagacgggatggcagccgggaagaggcgctcctcacttcccagactgggcagccgggcagaggggctcctcacatcccagacgatgggcggccaggcagagacgctcctcacttcccatacggggtggcggccgggcagaggctgcaatctcggcactttgggaggccaaggcaggcggctgggaggtggaggttgt

SEQ ID NO: 94862 - DNA, 413 bp, Homo sapiens
tttcgtcttatgaaaccaagggagtgatgatagccagtttttcatctagagaagcagataatcacacagccttcataagaataaagactaatgcttcagacagcacagagtttatcattcttcctgttgaggttgaagttacaacaggttagtggaaaactgatgaaatcgaaagttgttttgttttcagtatagcttactctggcaaagtgaaaaataattgttgacttttcttttttccaagctcctggaatttattcctcaactgaaatgttagattttggtacactaagaacacaaggtaaaaaaatcttttaaaagagtctttatggagtttttttttttttaacccctgtattcagggctgaagggttttactatgtaattcacgctttaaacattatttctcaggg

SEQ ID NO: 94863 - DNA, 392 bp, Homo sapiens
cttacagattacattcccatatccaaccattgtagagattttgggtgcctccagagactcttttttttttttttttggaaacagagtttaactctgtcccccaggcgggagggcagggcaggggcaaaatctaaactaaggggtaccttcccctccggggcccaagggattttggggccccacctacggggggggcggggggaaaaggacaactcgacctggggggggaaaaccggaaaagagctttgatggccccccggccccccacctggggggacaaagggaaacccggccccaaaaaatttttttgcccaaaaagaaaggggcccgttttttcaaaatggggggcccgggaataagttattttaaaaaatggcttcaagaaacaaggg

SEQ ID NO: 94864 - DNA, 401 bp, Homo sapiens
agaatgtatagttttaattatacacattataatagatgtagagtggtatctcatcgtgattttgccttttcctaatgaatatctttccttacatatttgtcattagtgtgtcttctttagtaaatggtcctattgttttgcccatttttaaaagttgagttttcatattgttcaatttcgagagttcttcatatattctggacacaagtcctttgtcagacatgtgatttgcaaatattttcccccagagtttttcctgtcttgtcagtcccttaatagtgtttttaggaaggagaacagctgcttttaattttgataaagcttgtcaattgtttttcttttatggatcatgcttttggtgtagtatctgaaaactctttcttaaaccagtcacacatgtc

SEQ ID NO: 94865 - DNA, 426 bp, Homo sapiens
gctaaaaaaaggtttacagaagggatttttctgtttccatctcccagccagctcttttctacctcagtggtaactaatggtggtaggattttgtttattttcctagacatatttaatatttgcaaataagacataggtagagttgtagcctttacaaacccctcccctctcctattctttttctttccagaggtaactagtatgctgaagttgaagttggggtttatcattctgattcttttattacctatgtatatgtctataaacgcctatatattatcatatttttaaatatgaggcgcgaccatgctggtcttattattttaacttgcttttgatttgagacagagtctcactgtttcccccaggctggagtgcaatggcgcgatctcggctcactgcaaccttcacctccttggttcaagg

SEQ ID NO: 94866 - DNA, 420 bp, Homo sapiens
  misc_feature (1)...(420): n = a,t,c or g
caacttggaaaaaggtggggctcctatctgtttccagctcccagctctttggtgcatgcagttccagctgggtctcctccattgcaaagccagcaactttgcagtggccactctagatgggctgcagctgccatcaatatgctttcatttctcttgggtaaataaataactagaaatggctggctcaagtggtaggtatatgcttacctttttaaaaaactgccaaactgttttccaaagtataccgttgtgattttcatgtttgtttccctagcggccaatgatgttgaaaatatttttatgtgcttatttgcatccatatatcttatttggggaaggggctggttacatatttttttccattttttaattgggtggttttctttntcaattcacaatttctggtctttgaaagatact

SEQ ID NO: 94867 - DNA, 218 bp, Homo sapiens
acgaggtcaggagttcaagaccagcccaaccaacatggcgaaaccctgtctctactaaaaatacaaaaattagccagttatggtggtgtgtgcgtatagtcccagctactccgggaactgaggcagaagaattgtttgaagtgggccgagatcacaccactgcactccagcctgggcgacaagagcaaaactccatttgaaaaaaaaaaaaaaggggg

SEQ ID NO: 94868 - DNA, 396 bp, Homo sapiens
aaatggctgaagccactcaaggttttggaaacctcatctttgaatcttgggactttagtgtggtcttggattggggttatgcaatgaacatttcttttttcttcttctttttttttttttggggggggagtcccgccctgccccccaggcttgaggccaggggcccaattttgcctccctgcaccctccccctccaggtttcggggggttcccctccctaacttccccaagggcctgaaattggggcccccgccccccaccccaggctactttgggcgcttttgggttggaaggggaataaatttttccgcccgggcggcccccggaaccctgactttgggggcccccccccccccccccccaaaggggtgggatggcctggccgacccctctccg

SEQ ID NO: 94869 - DNA, 399 bp, Homo sapiens
  misc_feature (1)...(399): n = a,t,c or g
tgattctagggttatttctgtccgttccttatatcctcaggtggatatttactccttttgcatcattaggaataggctcagtgctttctttgaactgattttttgtttctttgtctctgcagcttaaagaacaagatctgggtgaatgagtttaggtatggcggcttttccctgggtgtcagtaatactcaagcacttcctccgagtcaagaagttaatgatgccatcaaacaaatgaagaaacacctaaagctggccaaggtaaaatatctatcgtaagatgtatcanaaaaatgggcatgtagctgctgggatataggagtagttggcaggttaaacggatcacctggcagctcattgttctgaatatgttggcatacagagccgtctttggcattn

SEQ ID NO: 94870 - DNA, 401 bp, Homo sapiens
  misc_feature (1)...(401): n = a,t,c or g
tgtagtctcagctacttgggaagctgaggcaggagaatctcttcaaccggggaggtggaggttgcgatgagctgagatcacgccaccacactccatccagcctgggtgacagagtgagactccatctcaaagcaaaaaaagaaacataggtgggacccttggtgtgtccttagggcatgatggttgaggtatactgctggtcctgtcatgtaaaagaaaacgagccgactctgtgtctactggagaaagcactgcatatatcagccacagtcaatacctcgcttctgcagggacggtggctgccagagtgggaggctttggtagcacccatgtcgtggaatcacaatgttgtcgatagctctggggtcttgtacaaaatgccagatccttccatttggttn

SEQ ID NO: 94871 - DNA, 411 bp, Homo sapiens
  misc_feature (1)...(411): n = a,t,c or g
ttaattttaagtagctaggttggtgtttcacacccataatccaagctactcgggagtctgaggcggaaggatcgcttgagtccacagaggtggtgagctaagatcgcgtcactgcattccagcctgggtgacagagcaagactctgtctcataaaaaaaaaaaaaaaaccaaaggggggggggaaaccctgaccccccacctattttaaaatttttttttttaaaaaaaggggttagggaaacaaaggtaactttaaaaaaaagacccctttccttttttggaaaaaccttgcttaatacataaaagggggggttgaattccccttttacccctggggggcaaagtttttttattttttttaaagttttttttttttaaaaaaatttttgcccccttcggaagggggaacn

SEQ ID NO: 94872 - DNA, 403 bp, Homo sapiens
  misc_feature (1)...(403): n = a,t,c or g
atcatatggaaaaattgtctcccaagaaaccagtttctggtcccagaaagttaggggaccattgtgttagagaactaaggaaaccgtcctctacctgccacataagaataaaggaaacaatggaacagtttccctactttccctaattaacacgtattcccattttgaggcagngagttgctggtacctgctttctccttctttctccaaatagtactttaaaagtatcttatcctggctgggcacagtggctcatgcctgtaatcccagcactttgggaggatgaggcgggtgaatcacgaggtcgaccatcctggctaacacggtgaaaccccgtctctactaaaaatacaaaggattagctgggtgtggtggcaggcacctgtagtcccagctactcagg

SEQ ID NO: 94873 - DNA, 403 bp, Homo sapiens
aaatgcaaataaaaatcacaatgagaaactactgcacacccgtgagaatgccttaaaaaaaaaaaagacaggaccaaacccaggtgttagggaggggggggaacaacaaaaattctcataccttgttggggggactacaaaataggggagccctctggaatcagtttggcagtttcttataaaataaaacaatcatttactgtatgacccagcaatcctgcccctcattttttataccagagaaatgaagacatatgtccacacaataaccaaatactgtaaccacaatgaaaaatgatgcaggggttcacagaagctttattcatttacctaaaactgaaagcaacccaaacactcttcaactggccaatgggtaaacaaacggcagcccaccggttccatt

SEQ ID NO: 94874 - DNA, 414 bp, Homo sapiens
  misc_feature (1)...(414): n = a,t,c or g
ctgagagggaaatttatgacactacattcttaattntaaaaagaggatagtctcagatcaataattaaactgcaaccctaataaaatagaaaaagaagggcaaaataaaaccaaagcaagtagaaggaaggttataataatgaacagaaacaaatgagattgaaaacagaataataataaattcaatgaaacaagaagttggttcttcaaaaacatgaaaaaaatttacaaatctctagtaagagtgaccaannnnaannnnnnnnannnnnnaaataaaaaaaaaaaagggggggaacccccttttttccttttgggggaggggggggggttttcccccactttccccggggtttcaagccttttttaaaaaaaaacggttttttttaaaaaaaacctggccccttaaaagag

SEQ ID NO: 94875 - DNA, 399 bp, Homo sapiens
attttcctactgacagacacttgggccgtctcaggtttggggctactatgagcaagatgctatgaatattcttgtacagtctttttggatcattggatagttacatatttagctttataagaaattttccaaactcttttcctaccatatatgagggttttagttgctgacatttatgattgtctgtcaacttaattttagccatttttgatgggtgtgtagtagtatctcattgtgagttaaattagcatttctttgatgacatactgggcatttttcatgtgcttttcggccactcatatgttttttgtgaagtttctcttcaaatattttgcctgttaatattgctattctgagacttctctgttcttttttttttttttttttttaaagttaaaa

SEQ ID NO: 94876 - DNA, 399 bp, Homo sapiens
  misc_feature (1)...(399): n = a,t,c or g
ctcatcacatgtagctacttgattttctcacgtggacggtttcaaggaactgcggagggagacagaagagaccaaacagacccactcataggaaaatgggctatggacttgttctgttgtgctccagagaccagaactagaatcaatggacagaaactacaagcaggccgatttggacttaattagaaaaagaacacactttctcataaccaaaactgtccagctgagctacttgatgaggttccaggggcacaggacaagaatgatttgagtgaaaactagatgaagctggcccagtggctcaagcctgtaattccagcactttgggaggccgagacgggtggatcacttgaggttaggagttcgagaccagcctggccaatgtggtgaaacaccgtn

SEQ ID NO: 94877 - DNA, 386 bp, Homo sapiens
tccaattattcaacttctcttcatcgtctcccccaacctccttagccctctggtaaccatcagtctgctctttatgagatccacttttgtagctcccacatatgaatgagaacatgtgatatatttgtctttctgagcttggcttatgtcacttagaatgacctccagttccatcctttttattgtttgtttgtttgttttgtcagagtctcaaaaaggctggaatgcagtggcatgatcttggctcactgcaacctctgcttcccaggttcaggcgattgttgtgcctcagcctccccagtagctgtgattgcgggcatgtgtcaccatgcctggctaattttgtatatacacacatatatattttttggtggagatgggtttcg

SEQ ID NO: 94878 - DNA, 399 bp, Homo sapiens
  misc_feature (1)...(399): n = a,t,c or g
cccacgcgtacgttctgattaatggagaaaccacgcaactcctggcagattgtatgacagtgatctgtttgctgattatttttattattatttttgctaccagcacttttttttttttttttaaaaaaaaccaccaccagggccgggggcgggggctcccccctgtattccaaaattttgggggggacccccgcacggggtcggaatttgaaaaccaccctgccccggggggggagcccccgtttttgaaaaggaaacaaaaattggttggcccatgggggccccttctttttacccaatttattgggaaaaatgggggggaaaaatcttttgcccccaggaggggggggtgggggggacccaaaatcccccccttgcccttttgccggggcgtcaaan

SEQ ID NO: 94879 - DNA, 419 bp, Homo sapiens
cattgcactccagcctgggcaacaaaagcgaaactccgtctcaaaaaccaaaaaaaaaaaaaaaaaaaaaaaaaaaaaccggaaaaaccaacccccccccaaattaaaaaggtttgggcccccgcttgggggcccaaccctggaaccccccctttttggaaaattggcccgggcaaaatttttgggggcggggtttaaaaaaccccctggccaaagggggggacccccttttttttttaaaaccaaaaaaatttccccaacttttggggggcccccgggggccccctttttttggggggggggggccccgaaatttttttaccctggaaaaaaaagggtggggggaactaaaaacccccccctgccctccccccggggggaaaaaaaaaaaaccccctttctaaaaaaaaaaaattttt

SEQ ID NO: 94880 - DNA, 396 bp, Homo sapiens
  misc_feature (1)...(396): n = a,t,c or g
caaccagtcattcaacagtttatgatattttgtggnctcggctgcttgggaggctgaggcaggagaatcgcttgaacccagaagtaggttatagtgagacgagatcgcgtcactgtactccagcctgggtgacagagtgagatcttgtctcaaaaaaaaaagaaaaaacaaaaaaaccccgggggggaaaaaggtggcaatccaattggccggctcctttttgatagggaagggggggtttttgtggacaaaaattttgaggccccccgggatcccataaaaaaaaaggtttggggggataagggtgggcacccaaaaacccccaaagggggagggcatccctgggtttttgggcccaatccatgtatccaatcctttgcccagacttgaccccat

SEQ ID NO: 94881 - DNA, 398 bp, Homo sapiens
  misc_feature (1)...(398): n = a,t,c or g
gcgattgtctttctgattttagccatcctattgggcataaggtgtcatctcattgtggttgtgttttgcattttttgatggctaacgttcagcaatttcttatgtgccatttgaccttttgaatgccatctttggagaaatgtctgttcagatcctttgcccattttttaactgggttgtctttattgttgaattttaagagatctttatatattctggatacatgtttcttatagatacgtatttttttattaaaatcaaatgaaaatattatttcaaagagcaatgaaaatacataacatattctaggctcagggtaaatagaaaaagcaggaactttatcatcagagcctagtatattacacaatttttgtctgtgcagaaaaaaaaagtttaan

SEQ ID NO: 94882 - DNA, 410 bp, Homo sapiens
tggggacccctgaggggttttaagcaggggatgctgagggtgtgtgttccagaaagctctctccagcaacagtgtgtgtgggcgggactgatagccagttaggaggccattggaaaggctagagtgggggagggcctggagggtggggtggatggagagggagggagctgcttgggaggcagggatgtgggttctggccagggcaagttgtgctgggcagggtccactccactttttttttttttttaaaagcgggggtttattttaatcgcgagattttgggcatttttttggattttttaaaaataggggattaggccgggttggggggctcacccttttattcccacctttttgggagcgccatatgggcgtaccaagaggtcgggaaattgagaccatcctggcta

SEQ ID NO: 94883 - DNA, 228 bp, Homo sapiens
ggaggccaaggcgggcagatcacctgggctcaggagtttgagaccagcctgtgcaacatagtaaaaccctgtctctactaaaaatacaaaaattagctggggcgtggtggtgcatacctgtaatcccagctactcgagaggccgaagcaggagaatcgcttaaacccaggattgcaccactgcactccagcctgggtgacagagtgagactctgtctcaaaaaaaaaa

SEQ ID NO: 94884 - DNA, 399 bp, Homo sapiens
ggattacaagcgtgagccaccatgcctggctgaaatatgtttatttatttttttgagacagagtctagctgtgtcacccaggctggagtgcattgatgctgaaataaatttcttatgcaataagacttcaaagtaaaaattactccttgatctgcggggctgtagaatggatgttgttttacagggatgaaaacaacactcatctccttgttcatccccatcagagcttgtgggtgaccaggtgcgttgtcaatgagcactagtattttgaaaggaattttttcttctgagcagtagttctgaacagtgggcttaaaatattctgtaaaccatgctgtaacagatgtgctgtcatccaggcttttgtggtccatttctagtgcacaggcagtgtagatt

SEQ ID NO: 94885 - DNA, 406 bp, Homo sapiens
aaaaagactcctagaagaaaaacccacaaggagcatcataatggtgaaaagactaagagcttttcctctaagatcaggaataaagcaagatgcgcattttagccattatattaaacatagtagtggctttctagccaaagaatatggaaaagaaataaaggcatcatttagaaaggaagaattaaaattatgtttgttcatagatatgatcatatttgtagaaatccctgaaaactcaccacaaaaactgaataaattaattcagcaaagtagcaggatagtaagtcagtacacaaaattcagttgcatttctttttttttttttttttttttaggggaaaattttgggcttgcccccccggtgggagggggggggggggatcttgggtcaatggaaggtttggct

SEQ ID NO: 94886 - DNA, 385 bp, Homo sapiens
  misc_feature (1)...(385): n = a,t,c or g
cattgacttatcctttctaactacgaagtcctctgtagtatcattttctagtataagactgtttcattgacattgagaatctgttgtttagtgtagctaccttcattttagctagatcttttggataacttgttccagcttgtacaacagcacttgctgcttcaccttgcatttttgttatggagatggcttcttttttttaaacctcatgaaccaacctctgctatcttcacacttctcttatgcagcttcctcacttctctcagcctttatagaattgaagagagttaggctcttgttctggattaggatttggtttaagggaatattatggctgggttgatcttctgtcttgatactaaaactttctgcatattcgtatgtn

SEQ ID NO: 94887 - DNA, 396 bp, Homo sapiens
  misc_feature (1)...(396): n = a,t,c or g
ggtctcgctctgttaccagggctggagtgcagtggcatgaccttggctcgctgcagtctccacctcctgggttcaagcaattctgcctcagcctcctgagaagctgggattacaggctctccccaccacaccagcaaatgggagggatatttctttctttcttttttttttttttcccggaaagggagtttttttgggtggcccccaggctggagggaaggggcccaatttgggttaatggaaccccccccctcgggggttgggggaattttttggcctaaaccccccaaggggttgggggttccagccccccccccccacccccagttattttttgtttttttaggggaaaggggggccnnccccgcngcgccgggcgggcccccaaccctcttg

SEQ ID NO: 94888 - DNA, 370 bp, Homo sapiens
ctcaatctcctgaccttgtgatccgcccacctcggcctcccaaagtgctgggattacaggcgtgagccaccgcaccaggcctatatttgaattttaatgagaattcttaaaagatgaaactagtggagaaagattgtaaaacctaaaagatttctgtattttaaaattccatagacaatataaaaggacactgctggaaaccaatatgtctaagaggcatttcaggaggggaaaaacagctgaagacacaataaagccctaagttgataaattgaaagggtttgctgacttccaggcagtagtactggaaaaaaattgctcttacctatccaaaatctggtgaaatatatgaatttgttaaaacatctta

SEQ ID NO: 94889 - DNA, 463 bp, Homo sapiens
  misc_feature (1)...(463): n = a,t,c or g
gggcagtagcnaggccngnnnncctgaaaaccttgagangcttagnanngacgnacnggnnnggaattnccgggtcgaaaaccgcgtccgctcagccgcctgagtgcctgggactactagcatgtgccaacacatgtattttttgtagagatggggtttcaccgtgttgtccaggctagtcttgaactcctgagctgaggcgatcctcccgccttggcttcccattgcaggcatcagccaccatgcccagcctagtttgtgctttttatttctcgttcataaacccctttgctgcccccaagcagcacacgattctcctgtgtcgagctggaaagctctctagatctgccttttacattgaggtcttttatcaacctggaattgatttttgtatgagggtgaaatccaagatccaatttaatgttttccacgtgattggccaatttttcccagccccatctgc

SEQ ID NO: 94890 - DNA, 442 bp, Homo sapiens
  misc_feature (1)...(442): n = a,t,c or g
tccgatnctacggcgaacctggnannnnncnnnnnnnnnnggnncganccacncntnnnacttacacaatattacttggaatggaattttaaggtgtacagagtatgaaggaagaaataggaactatgtttgtttgaagatgacatgagtgtctatgaagaaaacctgaaagaattgaccaaaaatactcctgaaatgaataagcaattacagtaaagttgcaggatataaggttaatatataaaaagcaattgctgttctacataccagcaatgaacagtagaattttgaaattggaaacacaatactatttatattagcacccccaaatacttaggtataaatctaacaaaatatgcgcaaggtctgtatgaggaaaactacagtaatctcatgaatgaaatcaaagaattaaatacatgggggatattctatgttcatg

SEQ ID NO: 94891 - DNA, 483 bp, Homo sapiens
  misc_feature (1)...(483): n = a,t,c or g
cgangatcccnnnggtnagnnaaaactganaccccnattganagtctcgnanaaacnannggntggaanaccgggccgacccangnnnnaagggtcaccgtgttgaacttgctggtctctaactcccgacctcaggggatgcgcccacctcagcgctcccaaagtgctgggattacaggcatgagccactgtccctggcccaatacatattttaaagtaaacattgtattacagaataccacagacagaaaagcacacaatgaattttcatgatgtgactccgtatacccagcaggacgttcccggcccccacgatcacccggcatggcccacctccgtgaccatcccttctccaacaccagactccccaagccctggcacagagatggctgtctggggtggccccgtagggacagtcgctcagtgctgtgtggtgacctgctgtctgcacagaagctggttctgactctccccttgacgggc

SEQ ID NO: 94892 - DNA, 461 bp, Homo sapiens
  misc_feature (1)...(461): n = a,t,c or g
ggagtccnnnncctgaaannccatttanacagnacanacncnngnnnnggaatagggggtcgagccacgcgttcgcttataaatacatgaatgcattattgacttagatctaaatgtagaacttanaacggggaacgggtaaaagaaagaacaagaaaaaatctttaggacctgtgggtaggtaggcagagaattcttagacatgactggaaaagaatttatatataaattcttatatataagaaaaataaattagagttcatcaaaattaaaaacttttgttcttccaaagacactgttaagggactgaaaagccaaactacagactgggagaaaatacttgtaaatcacatatccagtgaaaggacttgtatcccggctatgtaaaaagctctccaaacttaacagtaagaaaacaacacaattaaaaaaatgggcaaaagatatgaacagacacttct

SEQ ID NO: 94893 - DNA, 469 bp, Homo sapiens
  misc_feature (1)...(469): n = a,t,c or g
cgggctggnngnncngnattganncccatcgtagtcactagtccgtgtggtggaattccgcttgaacgggggaggcagaggtcacagtgagccgagatggtgtcattgcactccagcctgggtgacagagtgagactctgtctcagaaaaaaaaaaaaaccaaaaatctgctgctcagttggccggtttttgtttttggtttttttcttaaaaaaacttggcagggtttccaaatcaccccacatagatctacggcggtcttttttgtttccctccaggggctttgttcattcacgtttggagaaagggcttgcaggccctgctaagtgctgatcacggggacattgtcagtaaatacattgctacaactgggagcattttgtttataaggagccagttcacaaaaattacccgtcgggtgcctgtagtcccagctactcaggaggctgaggctggagaattgcttgaa

SEQ ID NO: 94894 - DNA, 1026 bp, Homo sapiens
tagcggcgttttgcaaaaaatcacaaaaagtaggtgatcaataagatggcagatgagaaaactgggccagatgacacaaagagagggcaggttaaggtgggtgggcccagctctgggtgacaaggcgggcgtccctgtttctagacaaaacccactggccagtggatgagcagaatctgggctccctgtacaccattgaggccacagcctatgggctcatgcagaagctggagctgggccggtacaatgagacacacgccatagccaagtggctactagagaagcaggagctgggaggaggcttcaggtccacccaggtgatggggacccccgggagaccacggtggtggcccttgaagctctgacccgcttccgcgaagctgtccccttcaagggcatccaggatctccacgtccagatcagagcccccaagacagccctgaatgtgaattggtacattgatcacagcaatgcctaccaacagcggtcagcaaagttccttgcccaggacgacctagagatcaaagccagtggcaacgggagaggcaccatctcgatcctgacaatgtatcacaagtccccagagtcccgggaggacaactgcaacctgtaccacctgaatgcgactctccacagtgccctagaagaaaataaaaagggaggtgagacttttcggctccggatggaaacaaggttccagaacaattgagaggccacaatgactatcatggaggtctccctgctcacgggcttctaccccaaccaggatgacctcaaacagctcacgagtgatgtggagaggtacgcctttcagtacaaaaccaagacaagtaccagcgacagcactgttgtcctctacctggaaaagctctcccatgagaagaacacggagctgggctttcgggttcacaggatgctgcaggcggagttcctgcaggccgccctggtcaccatctacgactactacgagccttcccggaggtgcagcactttctacaacctgcccacagagcaatcttccctgag

SEQ ID NO: 94895 - DNA, 726 bp, Homo sapiens
acaggactgaccattaccagtttcagagcctgaagcactgtctgaccggaggagaggcccttaaccctgacgtgagggagaagtggaaacgccagaccggtgtggagctgtacgaaggctatggccagtctgaaacggttgtcacttataagtgggagctaagctatgaggatgcaaatacatacatagtgaaatagaagactttgtagactcagaaagaagaaggttatcatctgtgccaatccaaaaggcatgaaaatcaaatcggtatccatggtgaaggagtccctaccctattatgtgcatattgtggatgatgagggcaacgtgctgcctcctgtagaagagaggaatgttaccgttcgaataaaacccactcagctcttatgtatcttgaattgctatttggacaaatgtgagaagacagctgtatcataacaaggtgacttttacatcacaggggaccgagctcgcatggacaaggatggctacttttggttcatgggaagaaacgacgatgtgatcaattcttcaagctaccggatcgggcctgttgaagaggaaagtgccctggtagagcatactgctgtcctggagtcgactgtggtcagcagcccataccccatcatgggagaggtgggaaaggcatatatagttcttactcgagcctactcctctcatgacacataggcactaacgcgggtactccaagagcatgtgataaag

SEQ ID NO: 94896 - DNA, 487 bp, Homo sapiens
  misc_feature (1)...(487): n = a,t,c or g
cccccagccccccccccatttganccctttcgagaccatagtccatgtggaggaattcagcgtcatctcctcgagataggactccctctgccccagttctgttcaccgtccaaagaccagggcccttcctgaagcccagcacttgagaaatgctcgctctcacgtattatgactctggctttggaaagaaattcagcaagggtactggttgaaaggtcaaaagtggtgaaatgccatctgcccaaacggaagcaaggggtcgcttggattggggtcttgctccgttacccagactggagtacggtggtgagatcatagctcactgcagcctcgacctcccgggctcaagtgatcctcccacctcagcctcctgagtagctgagaccacaggctggagtgcaatggcatggtctcgactcactgcaaactccgcctcccgggtcaagcgattctcctgcctcagcctcccaagtagctgggattacag

SEQ ID NO: 94897 - DNA, 463 bp, Homo sapiens
ggggacaatggatccgtcccctagtccgtgtggtggaattcagctatgaaaatcctagatgacatcttcttccagtagaaggtgggacatctatgctgaaattctgttgcttagtgtagccaccttcatcagtgctctgagctagatcttctgggtaacttgctgccgcttctccatcagcacctgctgcttcaccttgcacttttacattatagagatggcttctttccttaaacttcatgacctgacctctgctagcctcaaactttccttctccagcttcctcacttctcttagccttcataccattgaagagagttagggctttgccctggattaggcttttgtttaagggaatgttgtggctgatttgatcttctatccagaccactcaaactttctccatatcagcattaaggctggtttgctttcttcttcttcatgtgtgcactggaatcgcact

SEQ ID NO: 94898 - DNA, 462 bp, Homo sapiens
  misc_feature (1)...(462): n = a,t,c or g
cgggaaggggnnttcganctcgatnaccctatgcagngacgtggaattcctttcacctagccgtaatgtttttgagattcatgcatgttgctgaacatatctagtttattcctttttattgctgaatagtaatcctttgtatgactatatcacactttatccattctcttgtgaatgtatacctaagatgtttccagtttttggatattatgaataaactgttgtgaacatttttgtgcaagtccttttgtgggaatatattttcatttttaagggtaaatacctatgagtggaattgccagattataggggaaagtgtgagacccttttccataggggctgtactaatttatacccccaacaacagtgtatgaaagttctttttgttccacagtcttgccaaatttggcgtttttggtcttaagaattttacccatcttggtgagtgtagagataacctca

SEQ ID NO: 94899 - DNA, 439 bp, Homo sapiens
  misc_feature (1)...(439): n = a,t,c or g
ttttttatttttatttacgcgtttctatatttggggggagatcccccatggtttttttcccccgctaggaaactttaaagcgctccccatttttttacccccctgaagggggggcgggggtttttttttccccccccccccggggggaaaaaatttttttttggttgggaaagtttttttaaaaacccggggaaaagggggcaaaaaaaaaaatggggggcccccgggaagggggctttgttcgggggggggggtttaaagagaaaggggcgggggaaaccttaccagaaaaccccaacttttggggggggggggggaaagggaaacngggccggggttggcccccccccccccttcccccccggtgaaaagcccctttaaaaaaaaatcccggggcccccccccaaaaaaaaaaaaggggaaaaaaatttttttgggg

SEQ ID NO: 94900 - DNA, 386 bp, Homo sapiens
ccacaatcaaaagaatgaatttggaccctatgtcacatcatatgtaaaagttaaagaagctaaatgaatagctaaaactagaaaactcttagaagaaaatataggtgtaaatattcatgacattgaattaggcagtggtttcttagctatgatgccatgaagcataagcaatcagactaaaaatagagaaattggacttcatcaaaattaaaaatagttgtgcttcaaaggacactatcaacaaagtaaaaaagacaggtaggccaggcatggtggctcatgcctataatcccagcactttgggaggctgagacaggaggactgcttgaacccaagaatttgagaccagactgggcaatgtagtgagtccccatcattacaaaaag

SEQ ID NO: 94901 - DNA, 419 bp, Homo sapiens
tgatcacttccaggatgaagagggcagcaagatgttctccctggaagaggcacttactctgaatatgggcttatcttctctgcccgcaatccttccatggaagtatgatctgttaaccacagaccttttcaccatcatggtgtcccactcagaattgctctgactcaggaagctactttatatcaaaggaatgtggcaacgggtcagtgcttgtggaattcactgatgctgccttgttccctgccttccaaaagcagctgatctgggagaatagtggaatggagatttttctctctcaggcaaagaaaaaaaaaaagaattttacttgattatgactttctctcaatagaaacaccatattgccaaatgctgcagacactaatacgaatggatgacaaggcagcagtccttgccagcac

SEQ ID NO: 94902 - DNA, 425 bp, Homo sapiens
  misc_feature (1)...(425): n = a,t,c or g
agaaaataaattgaccaatcatggcaagacagggaatggcggtgcccaatctcagcaccagaatgtgaaccaaggacccacctgcaacgtgggctcgaagggcgtgggggcggggaaccatggggccaaggccaaccagatctcgcctagcaactcaagtctgaagaacccccaggcaggggtgccccctttcagctcgctcaagggcaaggtgaagagggaccggagtgtgtctgtggactctggagagcagcgagaggcagggacccaataaacctttgtgaatggaaaaaaaaaaaaaaaaaaaaaaaaaaaaaaaannaaaaaaannannnannnnnnaaannnnaaaannnnnnnnnnaaannnnnnnnaaaannnnnnnaaaaaaaaaaaaaaannnnnnnaaaaaannaannnaaaaa

SEQ ID NO: 94903 - DNA, 394 bp, Homo sapiens
  misc_feature (1)...(394): n = a,t,c or g
ttatctatgttttttttgttgttgctgcttttttagtatatacgctttattagggtgaggaaattctcttttattctttctgagtgtttttactatgaaggagttttgtattttgtcatttttttctgtatctattgagatgattatgagggtttgatcttttattctattaatatagcattaatagaacaattaataatatggtattacgttgatgtttttttggatgttaaaccaaccctgcattcctgggacaaactgcacttgatcattgtgtataatcctttttatatgttgctgaatttagtttgctagtattttgttattattgcatccatattcataagaggtattagtagtgttctttttttgngatgtccttgtctaatttcaa

SEQ ID NO: 94904 - DNA, 403 bp, Homo sapiens
gagaatctcttgaacccaagagatggaggttgcagtgagccaagatcgtgccattgcactccagcctgggcaacaagagcgaaactccatctcaaaaaaaaaaaaagggggaaaaagaaaaaaaaaaaggggtgggagaaaaaaaaaaaacggttagtgggggggggggggaggcttgcttttaagggaaggaacaaagggcaaagtttttacaaaaaaaaaaaaacccggtttttaaaaaaaaaaaaaaaataagcggggggggagggggggaaacggtacccccacttactaaggaggtgggggaagaaaaatggtggaaacggggaaggggggggttgcacgaacctaaaatggacccttgggatgccacccgggggaaaaaaaaggaaactccttctaa

SEQ ID NO: 94905 - DNA, 482 bp, Homo sapiens
  misc_feature (1)...(482): n = a,t,c or g
cgcccgttggatnaccgttgcgaatattgagcaccgtccggaangcccggcccgacccacgcgtccgagaccctctgcctggcaaccaccccgtctgagaagtgaggagcctctccgcccggcagctgccccgtctgagaagtgaggagcctctccgcccggcagccaccccatctgggaagtgaggagcgtctccgcccggcagccaccccgtccgggagggaggtggtggggggtcaaccccccgccaggccagccgccccgtccgggaggtgaggggcgcctctgcccggccgcccctactgggaagtgaggagcccctctgcccggccagccaccccgtccgggagggagatgggggggttatccccccgcccggtcagccgcctcgtacgggaggtgaggggcgcctctgtccagccgcccctattgtgtagtgaggagcgcttcggcccggcaacaccccgtttgtgtggggtgcc

SEQ ID NO: 94906 - DNA, 399 bp, Homo sapiens
ctctcctttccccctgtcattcattctacaacccattgctgactgactttttttttttttttgggagagggggctcggcccccccccccgggttgggggccgggggcacaccagggtataacggcccccttattctggggggggcaaggaaatccccccccctagccccccggggagggggaaccttcccggggccgccccctcccgggggaaatgtttttttttggaaaaaaaaaggttccccaagggcccccggggggccttggaccggggggcccaaaggactcccccgccccccccccccaaaggggtgtgaataacggggtaaccccccccccccaaccccgaaatttttgggttttaccacctttcaaaaaaaagggaaaaactcggggccgg

SEQ ID NO: 94907 - DNA, 482 bp, Homo sapiens
  misc_feature (1)...(482): n = a,t,c or g
tgaagtcagggagccaggagtgataccctgagagcgtcnggaannccgngacagcgacgcactgcgtcccccccccctttgtccccggggcgggcgtgtttctcgctgcagcgtttgagcccccttcgatcccccacctgccttctgttctccagctcgggtgatctctcaagccgggggaccgccggtctgtgctctcaacgcgaatccctcgcaccccgaccccgccccctgcctgtccactctttgtcccctggggtgatttatcacccccactatttccttttgtggagtggaccacctcagactctcttcctttggctccctgggggaaaaggttactccccccgtccctccttcacatttcctttaccctagtctcaacgtgcggggagtcccagagatgacaggcccctttcccctttctgttcattcatttattggataggagatggcaagcttattctgggctatgcaccgcg

SEQ ID NO: 94908 - DNA, 466 bp, Homo sapiens
  misc_feature (1)...(466): n = a,t,c or g
cgcccccatgagatcgatgacatagcccgngcggtggaatttctcagctcgccacaacctctaccttccagctgcctgccttggcctcccaaagtgctaggattacagcctctgcccggccgccaccccgtctgggaggtgaggagcatctctgcccggccgcccatcgtctgggaggtgaggagcgcctctgcccggccgcccggtctgggaagtgggcgcctctgcccagctgccccgtctgggaggtggggggcgcctctgcctggctgccccgtctgggagttgaggggtgcctctgcccgaccgccccacctgggaagtgaggggcacctctgcccagccaccgccttatctggaaggtggggagcgcctctgcccgactgccccgtctgggaagtgggcgcctcttgccggccgtcccatctggggggtgaggagcacctctgcccggccaccccgtctg

SEQ ID NO: 94909 - DNA, 475 bp, Homo sapiens
  misc_feature (1)...(475): n = a,t,c or g
ggaaactnntttgtagaccatttgcagtgcggtggaattcattttaagtttcctccagcaatgtatgagtgatcgatttctctgcacccttgccagcatttgatgctgtcactattttttattagtcatttgcatagacgtataatgatacaatagctttttgtgatttgaatttgcatttccttgatggctatgatattgaacttcttttcatgtgcttgtttggtatctgtgtctcctcttcaatgaaatgtctgttttggcttatgccaattttctaattgagctacattnttttttttttttttttttttgggagggggagtttattttttccccccaggttggagggagggggggaaattttgcttcgtggaacccttgccccccattggaaaaaaaattttgggccctaccccccccagggggggggaattaaggggccccccccccccaaaacgggttgtttttggat

SEQ ID NO: 94910 - DNA, 485 bp, Homo sapiens
  misc_feature (1)...(485): n = a,t,c or g
cggcggagggggnnnaattgatncccctnattgtagaccactagtcagtgcggtggaattcgagacatgccagactccatgatacaggcctgtagtcctagctactcagaagcctgaggcaggaagaacacttgagcccaggaattcaaggctgtagtttgctatgattgcacctatgagtaactacaaactccagcctggtaacacagcaagacaccatctaaacaaacaaacaaacgaaaccttatttttatgcccttatataaaaagaaacacaaaaaaaccttcttcatgaaggtttgtagcagcactgtccacagtagccaaaaagtaagcacaagccaagtgtcctccattaccccatgaaacaggagttcgagaccagcctggccaacatggtgaaaacccatctctactaaaaatacaaaaattagccaagcatggtgatgggcgcctgtaatcccagctactcgggaggctgggca

SEQ ID NO: 94911 - DNA, 462 bp, Homo sapiens
atcgtagtccctagtgagtgtggtggaattcctaattttggaggtttttccacctgtgtaagctttatgtacaaaatagaaaatagatgaccgttttgataaaactcatttgcctgactattcataaaggtgttgaagccactaaaatatgagtgaatatactttctttttttttttttttttttttagggaagggggttttttttttttccccaggccggtttggggatttgagggggcaaattttggtttattggaagcttctttttcggggttaaaccctttttttttgcttaaccctccgagggggtgggaataaagggccccccccccggccccggtttttttttttttttttttataaaaagggggttttccttttttaaccagggggggtttaatttcctgaccttaaaaacccccccccttggcctcccaaaggggtgggtttaaagggggggt

SEQ ID NO: 94912 - DNA, 468 bp, Homo sapiens
  misc_feature (1)...(468): n = a,t,c or g
cggagttnnnnnnattgagaccctagagcacgtggnggaanccccacagnaataattgactaaaaggaaggtaaataattattcagttttcagtttgttgtannnnncccgcctcagtataaaggattgactatcctaggaaaaagattagtcaaggaataagaagcaaaagtagtatttgaaatctaaaaacattaccatgtttgctttatcatgcaggcaaataaataaataaatgacatttttaggttggaataaaaaaagataaagtacatattgccttaattaaattcatcaagttcttactgaaaaacagctctccaccgtgcctggccaggaaatacataattttttttttttttttttaaagggagtctcgctttgtcgcccaggctggagtccagtggcatgatcttggctcactgcaagctctgcttcctgggtcatgccgttcttctgccttacctt

SEQ ID NO: 94913 - DNA, 384 bp, Homo sapiens
catagtggtgtgcacatctgtaatcccaactacttgggaggctgagacaggagaatcacttgaacctgggagggggagggatcttggctcactagccaagatcgcactacagcacccctgcaccccagcctggacaacagagtgaaactccgcctcaaaaaaaaaaagtcagtagggtttctatcccccagtattcttctagcaaagaaccaaatcaagaagccagccccatttacaatggctacaaaaaataaaatacctaggaataaatttaacgaaggacgtgaaagatctttacaatgaaaactactaaacattgatgaaaaacttaaaaggaggggccatgtgtagtttcacatccctgtgatcccagcactttgggag

SEQ ID NO: 94914 - DNA, 381 bp, Homo sapiens
aataccagcactttgggaggctgaggcaggaggatcgcttgagagcccaggagttcgggaccagcctgggcggcacagtgagaccccatctcttccgaaaaaagaaaagaaaagaaaagaaattagcccagcatggtggctcacacctgtgataccaatactttgggaggtcaaggcggaaggattgcttgagcccagttgttcaagaccagcatgggcaacagtgagaccctgtctctacagaaaaaaaaaaaagaaaaaagttagctcaccctcccgagtagctgggactacagacacccgccaccacgcccggttaatttttgtatttttaggggagatggggtttcgccgggttgcccaggctggtctggaactcag

SEQ ID NO: 94915 - DNA, 409 bp, Homo sapiens
  misc_feature (1)...(409): n = a,t,c or g
catctcagtctcccaaagtgttgggattacaggcatgagccaccacacctggcccaataatcctgagttttttttttttttttggaaaaaaagttttgcttggccccccaggctgaagggcagggggggaatcccagttaaccgaaacctttgcctttggggttaaggcaatcctccggccttaggaaaattttaagaaaagaggggttggtttttttagaaaagacgggttggaccatgcgggccaggtgggtctcaaactccggccctaaggggacccacctgcctgggcctcnaaagggggggggataacgggggggagccaccgcgcctgccccgacccctgattataaaaatctttcccctaacaccttaatactttggcaactagggataaggaaaaaaacct

SEQ ID NO: 94916 - DNA, 390 bp, Homo sapiens
tgagcagagatgacgccagtgcactccagcctgggtgacagagcgagactctgtctcgaaaaacaacaacagcagcaatgaaaaattaatactggtaggctgagcagctacatatgtatattgcaatctctagagcaatcattaaaatattaaagtgatataataaaaagtactgtaaaatcaaaatagaacactaaaaatgttaaagtaacctacagaaaaataagaaaggggaaatagaggcaggtaaaatagagggagcaaacacaaaagtaaataccaaaatggcagacttaaatcctaatatatgagtgattacaagatagagtttagcagaattgtacaattaaaaaaaaactatatgttgtttatatgaaactcacttcaaac

SEQ ID NO: 94917 - DNA, 393 bp, Homo sapiens
  misc_feature (1)...(393): n = a,t,c or g
tctgcctttcattaaatgtaaccttttgctttccaaattaaaggactccatgccactcctcaaaaggggaaaagaaaagggaaaaaaaaaaaaaaaaaaaagaaaaaaaaaaaaaaaagggaaaagggggggagaaaaaaaagggagggggggggggggnggggggggggggggggggttttttgggggtggggggggggggtttgtttttggggggggggatttttttggggggggggggggggggggtcccgcgggggggaagggaaaaccacggggggggaccaccttcgggggcgggggaggtgtttggggctcgggggttactccccgctgccttcctttccagcaggggcggggggggcggattacgggggacgggatgcctgcctt

SEQ ID NO: 94918 - DNA, 378 bp, Homo sapiens
attttataattttagccaaatagttatagtttttatgtttaggtctgtgattcattttgagttaaattttatggtttaaggtagaggtttgaggttcatgtttttttcctccattttagttgttctgtagcaccatttattgcaaagatattctttctcaatggaattatactggcaatattgaaaatctgttatctggactctattctgttccattgatctatatgcattttctttgtatcattaccaccttgtcttgactactttagctttgtagtaattctcaaaatcaggtagtgagtccttcagctttgttctttttcaaaattggtttggcttatatctttcttatataaattttagaatcagatcatcagt

SEQ ID NO: 94919 - DNA, 401 bp, Homo sapiens
  misc_feature (1)...(401): n = a,t,c or g
ccagaatagagaaatccatagagacagaaagcagacactggtggttgccaggggttggagagaggaaagaatggggagagactacatagtgagtaaggggttttactttggagtgatggaaatgcgttggatctggatagaagtggcggttttgcacaacgttgtgaatggactaaatgccactgaattgttcactttatgtatttattttatttttatttatttatttgnagagacggggtcttgctgcattgcccaggctgctgtcaaactcctgagctcacccaggcgcaatggctcatgcttgtaatcccagcactgggaggccaaggtgggcagatcacctgaggtcaggagttcgagaccagcctggccaacatggcgaaaccccgtctctactt

SEQ ID NO: 94920 - DNA, 389 bp, Homo sapiens
aaaatgaaaagtcaagccatagacttagagaaaatatttacaaaacatatatctgacaaaggacttggatatggattatataaagaactattgtaattcaataagatgtcaaacaacccaattaaaaatgggtgaaagatgaactaactcttcaacaatgggcatgtcatttgaatggatggtaagcaagcacatgaaaagatgttcatgtgcctttccctcattagtcactagggaaatgcaagttcatagacatctctcttcgtagaaagatatcactacacacccacaagagtggctgtaattaagcagtctgaccaagtatgcgtaagaatgtggaataagaactctcatacactgctgatgggaatgtaaaatgatagccactt

SEQ ID NO: 94921 - DNA, 393 bp, Homo sapiens
  misc_feature (1)...(393): n = a,t,c or g
tgatgcagaggttgcagtgagccgagattgcaccactgcactccagcctgggcgacagagccacactacatctcaaaaaaaaaagagaaaaaaaaaaaacccccccaggggggggttttttttttttttcggggcggggttaaaaaaaaaaacctttccccaaatttttttnaaaaaaaaaaaaaaaaaaaaaaaaaaaaaaaaaagggggggggggccttaaaaaaaaaaaaaatttaagggggggggggggggaaaaaattttttttttttgggggccaaaaaaaaaaaaggggggggggggtttaaaaaaaggggggggggaaaaaacccgggggcccccaaaaaaaaatggggggggggggnnnnnntnnnnnnanncataaaattatt

SEQ ID NO: 94922 - DNA, 393 bp, Homo sapiens
  misc_feature (1)...(393): n = a,t,c or g
cccacgcgtccggcttgggaggctgaagcaggagaatcgcttgagcctggaagacagaggttgtagtgagccaagatcgtgctactgcaccctggcctgggcaacagagtgagactctgtctgaaaaaaaaaagaaatcaagaagctgttacacaggatcctgaaattgaaaaagaagtactatctgctttaataggctctttcccagaaacattctccttccctcagctctttccattttgcggggacagagaaaatgatttactggtctctgctcttgtgctggtttattttaaaagcggggcagatatggttgtttttgaaaaatgtcctanaaacttgaaaactagccaagcgcagtagtgtatggcggtgggcccaactacttgggaa

SEQ ID NO: 94923 - DNA, 417 bp, Homo sapiens
  misc_feature (1)...(417): n = a,t,c or g
ccacgcgtccggtgataattggcatccttaattaattctggtttctcagatggcaagctttcaacattttaccattgagtaagatgttgctatagatttccttatattcccacttgccaagagtttttttaaatcatagttgggtttttgtcaaatactatttatgcatttatcaacaagatttttttttcctcttttctgttaatatggcaaattacattgactgattttttttttagatgttaaacaacccttgcatttctggagtaagccccatatatattatgtacttttatatactgaggtattttacctgctaatattttaagatttttgcgtctatgtttatgagagagattggcctataattttcctttcttgtattataannngcaggttttggtagcaaggtaaggc

SEQ ID NO: 94924 - DNA, 390 bp, Homo sapiens
cccacgcgtccgcgcaggagtagaattgcggaggcttgggccatgtacctgttcacttgctgtagataaaccaaactatttcccaaagtgcatggatttctttagacacccaccagcagcattagagagttcccattcctccacatccttaccaataactgctattgtcagaatttaaaatttttgccagtaatggtaacttgtggttttaatttgcatttccctgattactaatgaatgaggatgagtgtctttttgtaggttattgacactttgcatttcttcatgtgtgaaatttatgatcaagtctgtggccatttttctcttacattatcttgtcttttttctttttggtataagttcttatcccaattacaaactctttgccag

SEQ ID NO: 94925 - DNA, 393 bp, Homo sapiens
  misc_feature (1)...(393): n = a,t,c or g
cccacgcgtccggtttgtaggacactaatcctttgacaattgttgaggcttcctttggaacctaatatgtgctcaatttttatagacgttctgtgtttctttgggaaaaacatgtatttgatggttgtttggtttaatattttgtatttgtacattagtttgagtttgcttattatttggctgaaatctccattatccttaatgtgctctctcattttgtctgcttcctttattaattagagataaatgttaaattatctcacctcgccaaggaaaaaaaaatatttaaactttaattattattcatgtatattgtattgaaattnatgctggggggctctgcaaaaaaaatatatgtcatccttacggggggggaggatatttttttttttt

SEQ ID NO: 94926 - DNA, 391 bp, Homo sapiens
cccacgcgtccggggaggcggtggttgcagtgagccaagattgcctcactgtactccagcctgggcaacagagcaaactccgtctcaaaacaaaacaaaaaaaccaaaaatcaaaacttaaaaaacaaaaaactgctggtgggctgggtgtggtggctcactcctgtagtcccagcactctgggaggattgcatgagcccaggagtttgaggctgcagggagctatgatggtgccgctgcactccagcttgggcatcagggtgagaccttatctcaaaaataaataaacaaagggaaggaaaggaagaagaaaatgaaaaactgctggtggatgaacaacagcctcattcagttgacttctttttccttcaccaagactgactggagctct

SEQ ID NO: 94927 - DNA, 404 bp, Homo sapiens
  misc_feature (1)...(404): n = a,t,c or g
ttgctgtttttttgttttttaagtattttccatcctaatgggtataaagcggtatctcattgtgcttttgatttgcatttctctaatcattagtaatggtgggcagcttttcatgtgcttattggccatttatatatcttctgaagaaatgtctcttcaagccctttccccctttttttttttttgggggggggaaaaagcttctttttttccccccggtgggagggcggggggcttttttgggttaatggcaccctccccccccggggttttagagattcccccgcctcaccctccggagtggggaggaataacggggggcccccccccccccgggctatttttggcgctcttaaaaaaaagaagggttccccttggggcccaggttgttttctcattactcn

SEQ ID NO: 94928 - DNA, 496 bp, Homo sapiens
  misc_feature (1)...(496): n = a,t,c or g
agcggtttcnnnnnnaaattgaagcctttacacctgctgctactcgcaccacacagtccggaattgaccgcacgcgacccacgcgttcgtgcctgccatggcctcccaaagtgctgggattgcaggcatgagccaccattcctggccactatagtggctttagaaacctcctctcatgcctcttgtaattatccatgatgaccataagttgtccatagggctctgatgcaagaaacagcccttggccccacactatatgccattagagctgcaatgatcaccttgtactaggttatcctgaacattgaggctctcctgggccctgggcatgtgactctactcaactgctcattttgccatgggtcctagaaacagcaacctacacagacctcctttcaaaattacagagtcaaatgttagccttcagcatatcctctctgcaggagttggggtgggagggtgacttcttttctttcttccttgccagatgtcatgg

SEQ ID NO: 94929 - DNA, 392 bp, Homo sapiens
aaaaaaccatgcataaatatatggggctgtagaggccccacattcatggcagaaggcaaggaggagcacgttacatcttacgtggatggcggcaagcaaagagagagcttgtgcagggaaactctccctttttaaaaccgccagatctcatgagacttagttactatcacgagaacagcacaagaaagacccgcccccgtgattcagccatctcccacagggtccctctcgtaacacataggaatcatgggagctacatggacgagccgggcatggaggcacccgcctgtggtcctggctactcgggaggcttgggtggggggattgcttgagtctgggaggttgaggctgcagtgagccggcatcatgccgctgtactccactctgggtga

SEQ ID NO: 94930 - DNA, 399 bp, Homo sapiens
  misc_feature (1)...(399): n = a,t,c or g
ttctaggaatgtgttattagaattattgtcctctgtgccccctagaaaggcagngagtcttctcttttttttttttttaacggccaaaaaaaggaaagggggcgcccacccaaaaacacacacacattgggagaaatttttagggtaaaataacgtctttagggggggggaatatcaaaaccaaaggaaggggggaggttagggtttttagggggaaaaaaggattttggcagggggggtaagggtggaaaaaaaaggccctgatgggggggggggaaaaaaaagaattttttttggggggggcgggcctaaaaaaccttacccgggggccaaaattggattttatctattttccaaggcctttttgtgctaaaacaaggtaaattgggaccaattttg

SEQ ID NO: 94931 - DNA, 375 bp, Homo sapiens
  misc_feature (1)...(375): n = a,t,c or g
ccattgcaaataacattgctgtgagtagtcttttatgtatatcctagtacaactggcacaagttccttcaggtatatgctgaagaagtagaattgctagataataaggcacgcatactttaggcttttgccaaaccatttttcaaagtggttgtactaacttatactcccactagctagtagaaagtcaacactggttcacatgattcccaacatttggtattatcagccttttacatttttgccaatctagtggctatattgtggcatatatttgtggttttaatttgcacttccctgattactagtaaaggtaaatgcctttttaaatgcttactggcctttagggtttctgcttttgggaagtgtctgttan

SEQ ID NO: 94932 - DNA, 369 bp, Homo sapiens
taaacaaacacacaatattatgttctcaatgctgagtaagctgaaaagatgtatacctactgaggatgcaccaaataataagcaacagaaacctggtaatgtgcaattaggaatagttcctcttaataataataaaaaaaagattagtgtttaggttttaatggcataaagatgtaatgaaaataaaattaccaaagaagtctattttggagaaatttttgtcagactagataacaaagaaaagaacacatcctttttttatttttattttttattttattttggagatgaggtcttgctctgttgcccaggctggtgttgaattcctaggctcaagtggtcctcctcccttggcctcccaagatgctg

SEQ ID NO: 94933 - DNA, 385 bp, Homo sapiens
aggttgaggctgcagtgagccatgattgtgcctctgcactccagcctgggtgacagagtaagaccctgtctcaaaacaaaaaacaaaaaacaaaacaaaagacttaaaatagaccttgatgtaagaactaaaatcataaaacttttagaagaaaacataggcaataaatctttgtgaccttggattagtcaatggtttcttagatatgacaccaaaagcataagtgatgaaagaaaaaacagataaattggtcttcatcaaaatttaaaacttttgtgcttcaatgacaccatcaagaaaatgaaaagacggccaggcacagtggctcacacctgtaatcccagcactttgggaggccgaggtgggtagatcgcctgaggtcgga

SEQ ID NO: 94934 - DNA, 384 bp, Homo sapiens
catatggccacaaagcacatgaaaaggtgctaattgaaatgtgcacgttaaaaccacagttgaataccactaccccagatcaccagaatggctagaattaaaaatgacttgtcaatttcaagggttggcaatgatttggagcagtttggaatctcatacattgctggtaggattgtaaattggcacaaccattttggaaaattgacctatctattaaagccaaaataagcatgtcttacagccacgtagtaagaaaaatttttaaattaaaaaacaaatagtatattagaggtctaagtactgtgaaaaatacaggaaagaaggaaaataaagagtgtggagaaagggcagcgatatatcttcagttaattggcatttgctact

SEQ ID NO: 94935 - DNA, 385 bp, Homo sapiens
  misc_feature (1)...(385): n = a,t,c or g
ggtcttctctataccattggtttctctgtctatctttaagccaagatcacactgtttaattaccatggctttgtagtaagttttgaaatcaggaactgtgagtcctccaactatagtcttctttttcaagattattttagctattcagggttccttaatattccatatgacagannnnnnnnnnnnnnnnnnnnnnnnnnnnnnnnnnnnnnnnnnnnnnnnnnnnnnnnnnnnnnnnnnnnnnnnnnnnnnnnnnnnnnnnnnnnnnnnnnnnnnnnnnnnnnnnnnnnnnnnnnnnnnnnnnnnnnnnnnnnnnnnnnnnnnttttctgtaaactttaggatgggcttttctgtttccataaaaaatacaggccacgagcagg

SEQ ID NO: 94936 - DNA, 399 bp, Homo sapiens
  misc_feature (1)...(399): n = a,t,c or g
tcccaccctagtctccttagtagctgggaggataacttgagcccaggaggttgaggcttcagtgagccgtgattgaaacactgcactgcagcctgggggacagaataagaccctgtgtcaaaaagaagaaaagaaaacaaaagaaaagaaaacaaaaaaaaaaaaaagggggggccgtttaagaggatccaatttaacgaccccgggctggcaaggtaatattttttttatggggcccccaaaataaaatcccggggccgcggtttaacaccgcggggaggggaaaaccctgggggtaccccaaataaaaannnnnnnngnngnnnnnnnnnnngccnggnncancnncngnnngggncgccggcggcgaacgnncccggggggccgggggccgcgccc

SEQ ID NO: 94937 - DNA, 395 bp, Homo sapiens
gacgatagggcctccaaaatccatgtgtagggtttcttgtttctggctttttttttttttttttttttccccccaaaaaagggttgggggttccccccaaaaaaaaggggggccaaacccaaatggcccggttggggaatttttggcaaccggaccttttttttggacggggcccctaaaaaaaaacccggcccccccccgggcccttttttggggccccccccccccccccccctggggggggtgaaacccccccccttttttggcccgggggagccccttttttaaaaaattttttggtgggccggacccttttttttatagaaccaacccccgggggcctaacaaaagggggcccccctggcccctaaaatggggaaacccccccccaaaag

SEQ ID NO: 94938 - DNA, 400 bp, Homo sapiens
cttggccaggctgatctcaaactcctgaccttgtgatccactcaccttggcctcccaaggtgctggtattacaggtgtgagccatcatgcccggcccatatttctaaaaacattttcttataaaatgacattgccattatcaacctgcaaaatacattttccatttggttgttttcttgcttagtcttttaatctagagttttataccttatcttttttatttatatattttttatgtcattgactttttgcagaaactgaagcacttgtcctgtagattgtccaatattctagatttgtcattttgtttccttgtgatgtccttatgcttatttgtttgtccctctttctgtaattagaagacctagaactgcactatccttagagtagctactagctc

SEQ ID NO: 94939 - DNA, 396 bp, Homo sapiens
tttacttgaaaaggagcagagctgttctaatggtagataattataaactcactctgaggaatcagggttggtaaagtatgttttatcatcttcttttttggttttttttttttttttggaaagggggtctccctgccccccgggcgggagaccgggggcccacctttggttaattaaaccccccccctttggggttaaagggattttcctgcccccccccccggggggagggggatggcggcccccccccccccccccgggttatttttgttttttaagggaagggttttcccccatgagggccgggggggttttaaccccctgccccaaagggatcggcccccccccccccccccctttggaaaaactggggaaataggatctttgggggccggc

SEQ ID NO: 94940 - DNA, 394 bp, Homo sapiens
tgagccgacattgcgccactgtactccagcctgggtgacagagtgagactccatctgaaaaaaaaaaaaaaaggagggttttttttttaaaccttttcccaaaagctgtttttttcttttttggcgggggaaaaaaacacaaactttgttggaaacacactatccttccttaaaaaaatttgggaaaacaatcactttcccccccgggtttaaaccggaggggctttcacgttgggggctgtaaaaggcccccaggtttgggtaaacccccccaaaattaacctttttcccagggggggaaaaaaaagggcgggaaaaaaaaaattttgcttcagggttggcggggggaaaccttgcccatccaaaaaaggaccaggtcccttggttggccccg

SEQ ID NO: 94941 - DNA, 423 bp, Homo sapiens
aggcgcctgtagtcccagctactcgggaggctgaggcggcagaatggcgtgaacctgggaagcggagcttgcagtgagcggagcttgcagtgagcggagatcgcgccactgcactccagcctgggcgacaaagcgagactctgtctcaaaaaaaacaaaatgtaggcggcatcagcatgtaggctcattaacagtcagactgagacctggctattggattcggcattgtggatgtcactggtggccttaaatcaggccttttctggtgctgtgggagccaaaagccaggctggagtggatccagaaaggataggaggaaacatatcagacatagacaagtctttcgaggaattacactatcaaggggagcagagggtgggggggcaaatgtaactggagggagaaatggggtcaatatttttc

SEQ ID NO: 94942 - DNA, 414 bp, Homo sapiens
ggtgtgctaccctcccaggactttgtctgtgcttatactagtaccacattgtcttgactattatagctttctgtagtatgttatgaaagtggaaagtatgtgtccgtcaaccttgtttttatttcagggttgttttagctattctgggtcccttgaatttccatatgaattttaggattgattgtcaatttctacaaagaagcttggtgtgattttcatgtatttttttggacacagggtcgcaccgcatcacccagactgagatggggttttgccatgttgcccaggctggtcttgaactcctgggctcaagtaataatgcccagtttggcctaccaaagtgttgggattacaggagtgagccactgtgcctgaatctgtagatcagtttgggaagcattgccatcttagcaa

SEQ ID NO: 94943 - DNA, 422 bp, Homo sapiens
ccaaccacgagtgactactcacactttcctcttcactaaagataaccatacacaccaataagggacgaacctgatcttttattcgagaaaacataatcatttttattgccacaactaacctactcggactcctgcctcattaatttacaccaaccacccaactatttataaacctagccatggccatccccttatgagcgggcgcagtgattataggctttcgctctaagattaaaaatgccctagcccactccttaccacaaggcacacctacaccccttatccccatactagttattatcgaaaccatcagcctactcattcaaccaatagcccttgcccgcacgcctaaccgctaacattactgcaggccacctacttatgcccctaattggaagcgccaccctaacaatataaacctc

SEQ ID NO: 94944 - DNA, 417 bp, Homo sapiens
ctcaaagagttttggtttattttctctgataattgatgttgagcattttttatatatctcttagccatatgtatgtctttccttgaaaaatatttaagcctcttgctcatttttaatggttatttgtcttttgttgtacagtcatttaagctttttttaaaatattaaccccttgtcacatgtgatttgcaagcattttctctcattttttagttgtcttatcctgttggtcgtatcagattctgtgcagcagctttttaatttgaaatagtctgactcatctattttttctttgattccctgagagtttgaggttaagttaaaaaagtcactgcctagaccaatgttatggggatttcactctatatttttcatagtagtttcagagtttcaggccttacatttaagtatttaatt

SEQ ID NO: 94945 - DNA, 427 bp, Homo sapiens
  misc_feature (1)...(427): n = a,t,c or g
agagagtgaggcaggcaggcagggaccaagcttgggcacagccaggaaggcaggacagggcatggtggggccaatggaatcattacccaagacgggcattttcagggaaacagcttagataaggccgggcatacagtggctcccacctgtaatcccagcatttggggaggctgaggtgggaggactgcttgagcctgggagttcgggaccagcctaggcaacatagaccccatatccacaaaaaatttaaaaaaggagtttgtgttcctgtggtagcatacttgggaggttgaggtggcagtatcacttgagcccgggagttcaaggctaaagtgagctgattgagccattgcaccccagcctgagcgacagagagatatgctgtctcaaaggaaatacaaattanaaaaccagccgggcatgctgg

SEQ ID NO: 94946 - DNA, 385 bp, Homo sapiens
aggagggttgcttgaggtcaaagttcaagaccagcttgggcaacataataagaccccatctcttacaaaatctacatcttacccatctacacgcaaaaaaattgaaaaaacttaaccaggcatggtggcatgtgcctgtagtctcagctgcttgcgagattgaggtaggaggattgatcgagcccaggaatttgaggctgcagggaaccatgatggcgccactggactccagtctggacaatacagcaagactccaaatctaggggcgaaaaaaagcaagtaatatttactcattatacataatgtggaaagcatactaaaatgtaaatgaggtagtaattgctcataattgaaaaccctgacataggcattgttgatatttttg

SEQ ID NO: 94947 - DNA, 389 bp, Homo sapiens
gtttctccatgttggtcagtctggttgcgaactcccaacctcagttgatctgcccgcctcggcctcccaaaatgctgggattacaggcgtgagccaccgctcctggctgaagttttcccttctggatgtcccctcacccctcaccccagctcgtcagccgtgccactcatctcatatttggccacagggtggcgccaggctgccatagcagcaagtccgattttcctccatcagctggcccgcccagcccagccagcccgagaagccgcagctgacagctagctccctgccgactctgccttccctccgaagcagtggacgtgctgataaatgtttaccggtgctctctttaaaaaaaaaaaaaagccatgttttgtggcaaaaaaaaa

SEQ ID NO: 94948 - DNA, 307 bp, Homo sapiens
tgagagcgtgctcgcttcggcagcacatatactaaaattctaactggtgtgagatggtatctcattgtagttttgatttgcatttctctgatggccagtgatgatgcttttgctcattttaaaaatcagattattagatttttttttcctatagagttgtttgagctccttatatattctggttattaatcccttgtcaactggataatttacaaatttttttaccattccatgggctgtctctgcactttgttgattgtttactttgctgtgcagaagttttttaacttgatgtgatcccatttgg

SEQ ID NO: 94949 - DNA, 298 bp, Homo sapiens
actttttgagtggcaaatgagcattagcttcaacgtcaagttaccagctgcattagcccctaacaagagagtcagtttttatttatttatttattatttttaaaagagacaagagtctcgccttgttgcccaggctggccttgaactcctgggctcaagcgattctcctaccttggcctctcaaagtgctgggataacaggtgtggcccagcctgacctttgaagcaaggcattgattttccctctctagctgtgaaagtcctagatggcatcttcttctaatggaaggctcttttgt

SEQ ID NO: 94950 - DNA, 396 bp, Homo sapiens
ccaaagtgctagggttacaggtgtgagtcaccgggcctgctgaaaccccaattctttaaaaaaagaaaaggaggcttttttttttttttttggggagaaagatttttttccgccccccagggggggggggcggggggggggaagggggttaaaagaacccttgggccccgggaaaaaaggggttcccccggcccccccccccaaaggggggggaataaaggccccccccccccgggcccgttttttttggggttttttggggggggggtttgtatgaggaaggggagtcccccttggtcccccgggttgaaaaaagaggcaacaaaaagccagctggtttatgctgcaaaacccagagtggcatagcatgccatcgcttttcctggtaactttgtg

SEQ ID NO: 94951 - DNA, 385 bp, Homo sapiens
aaaagagctaaaagaaagaatcagtcatagtcttaagctcttttttctttttcttttttctttggttttttttggggaaaaaaaatttttttctttggccaaggcgggagggcggggggccattctaacctcccggaaccccccccccccggggggggggcctttccccggcctaacctttcgggggggggggaataacggggcccccccataagccggggaaatttttggttttttaaaaaaaaccggggttccccctgggggccggggctggttcaaacccccggccccaaaggaacccccccccccggcccccccaaggggcgggatttccgggcaggaccccttgcccccccccgttttaccggggtgggggaaaaaaaat

SEQ ID NO: 94952 - DNA, 421 bp, Homo sapiens
tcgcagtataggaaccttgggagccacagacactaggaatttgcacccacttgcagacactttttcatgactaccaggtgcttatgaaaatgttggttgtgacagtgagatatcatcttaccccagttaaaatgccttttatcagaaagacatttgacacagcaggcatgtgaaaaaaaaaaaagggttgttaccagggatccaaaaaagggggaatgcttattatcccccttggggggccttgtaaatgagtatagtaaaaaaaaaaacatgggggactttcttcaaaaaaatacaaaaagagttgccttgggatccagcaatcccatggttgggtatgtacccaaaagaggggaattcagtctttcaaagaggtatgggccttcccagtgttattggcacactatttccaatagccggg

SEQ ID NO: 94953 - DNA, 386 bp, Homo sapiens
gaaagcgattggcttttgtatattaactttgctacaatcactttttagttcaaagagttttttggtcagctcttgtgtggattttctgcaagacaatttcgtctcctgggaacagagactgttttgacttttttcttcccattctgtatgccttttatttccttttcatatcttactgcattagctaagacttccattacattgtcgaaaaggtgagggcatccttgccttgttgcttatcttagtaagaaagtttctagtttctcaccagtacaacattatctgtagtttacaaaaaaaaatcacgttgaagctgggcacttgtgctcgtgccagaatcctaccactttggaggccgaggctgtggatacccgagcccagagttt

SEQ ID NO: 94954 - DNA, 384 bp, Homo sapiens
  misc_feature (1)...(384): n = a,t,c or g
cataatagagagattataaaatagcgagagagatagagagagagagagagaaagaaagaaagaaaagaaagaaagaaagaaattgaaagtttgtggcaaccctcatggagcaggtctgtcagcaccgtttttcctacagcatgtgctcactttctgtccctgtgtcaacagctttgtgtaaagcattggctaggcacttttaaactttttcaaaacatattgaacttgggggtgatagatgatgtatatttgaaagcaatttggtggccaggcgcagnggctcatgcctgtaatcccagtactttgggaggccgaggcgagcggatcacctgaggtcaggagtttgagacgagcctggccaacatggcgaaaccccacctctac

SEQ ID NO: 94955 - DNA, 378 bp, Homo sapiens
tggaaagataaataccccatgttttcatgcctgactttcttcactgaagatattgtcttccaagttcatctgcgttgtcgcaaatggcagatttcattttttatggctgaatagtattccatgatggatagataccacattttctttgtctagtcatgtgttaatgaacatcttagctattatgaagagtgttgcaataaacttgggggtgcagatgtctcttgcatagacagactttcttttaaaaatgtatacagtagtaagattacggaatcatatggcagttctagtttgagttttttgagaaagtgccatacagttttccatcctggctgtattcatttacattcccaccaacagtacatgagtttccgtttg

SEQ ID NO: 94956 - DNA, 377 bp, Homo sapiens
  misc_feature (1)...(377): n = a,t,c or g
cacctgccaggtgcagaatctcagccaccgcctgtggcaactcatgggaccggccggccggcaggactcagctcctgtggaccccagcagcccccacagctatggctgaggtggggccgggccacacccctgcccatcccagccagggtgctgtgcccccgtccagagctgcagctgagccccatctgaagcccagtccctcggagctgcagacagcaggtcctgcagcaactctacctgcacgacaactcataanaaaaaaaaaaaaaaaaaaaaaaaaaaaaaaaaaaaaaaaaaaaaaaaaaaaaaaaaaaaaaaaaaaaaaaaaaaaaaaaaaaaaaaaaaaaaaaaanaannnngggaagggggggcccttc

SEQ ID NO: 94957 - DNA, 409 bp, Homo sapiens
tgaagaagccatgccaaaagccaagatgggctgaaggccttttgcaccaaacagccaaattctgaatgcaaagaaaaagttattgaaggaaattaagagtgttactccagtgaacatatgaatgataagaaagtgaaacagcctaattgctgatatgaaggaagtctgagtgatctggatagaagatcaaaccagccacaacatccccttaagccaaagccaaatccagagcaaggtccgaatgctcttcagttctatgaaggctgagagacgtgaggaagcttcagaagaaaaattggaagtcagcagaggtggaagtcagcagggttcatgaggtttaaggaaagaagcaatctccacaacataaaagtacaaggtgaagcaacaagtacagatggagaaggcgcac

SEQ ID NO: 94958 - DNA, 416 bp, Homo sapiens
cttttgagccccaatttggccatgagttgcccttagatttttttagttatgtgagccaatacatttcctaaaacaggtaaaattatgtttttagacactgataaccaaaacaggtcaaactatgcttacggcaatttgctttaaaagagaactagacagagagaatttgttgccttttgaccaatgcttccatgagagagctgatattctgattcctgacctcaaccactatttgattggcagatgtacacttacacactgcataatgacattttggtcaatgatgggcgcttgagcccaggaggtcaaggctgcagtgagctgtcattgtgccactgcactccaatctaaatgacagagtgagaccctgtctcaaaaaaaaaaaaaaaaaatgggccaggcgcgggggctctccc

SEQ ID NO: 94959 - DNA, 387 bp, Homo sapiens
  misc_feature (1)...(387): n = a,t,c or g
cggacagcgtgggatctnttttatagtgcttgttgagtcatcttgtatagttttttgggagaaattattctgtttctatgacactgtacctganntttttaaactttgtgtttctggttattgagttgtacggagttctttatatatttctggatattaatatncttgtcagatatatatgatttgcaaatattacctcccattttgttggttgccttttcattctcttgataatgtcttttgctgtacagaagttttaagttttggtgaagttcagtttacctttttttcttaatgttactattttgagcctttagaatgaaaagcttacctatcattattattattgntgntgcttgtactttctcctgtatgttttatgtaact

SEQ ID NO: 94960 - DNA, 378 bp, Homo sapiens
cccacgcgtccgagagaacccacagaagaggaaagagcacagagaccacgactccagcctgggcgacagagagaggctccgtctcaaaacaaaaaacaaacaaaaaaacaaacaaacaaacacggggagcagtattcacaatatggtaagtgattttgaaaaacaagttacacagacattttgaagtagtatgcagatgtctaataagcccttgaaaagatatttaacatcagtcattatagaaatgaatatcaagccagaataccacttcacacccattagaatggctataatcaaaaagacggacaacaccaaatgttagtaaagaatgttctcacttgccaggcatggtggctcacgcctgtagtctcagcactt

SEQ ID NO: 94961 - DNA, 374 bp, Homo sapiens
  misc_feature (1)...(374): n = a,t,c or g
atggtaaagaggtcagttaagaggacataatgatgttacatgtttatgcacctaataacagagcttcaaaacacatgaaacaaaacctgatagaaatgcaaggagaaattgagaaatccagtcataattggagattttagtaacccctgtcaataattgatagaagtggacagaaaatcatcaaagatatagtagacttgagtaactgttaagcaacttgacctaattgcatttatagaacactctacctaaaaagagtagaatacgtatttgttcacaagtttatccaaaacatttgcaacgataaactgtattttgggccataaagtacnnnnnnnnnnnnnnnnnnnnnnnnnnnnnnnnnnaatttatgg

SEQ ID NO: 94962 - DNA, 379 bp, Homo sapiens
agcttgcagggagctgagatggcgccactgcactccagcctgggtgacagagcaagactccatctcaaaaaaaaaagaaggttcttgcctttttatggactcgggggctagggatgggaaaagagaggagaaaatagggggggaatgcaggtatgtgtatgaacatggctgtctggagccctttatgcaactttctcaagaaaactacaacatagtaggaccccatctgtacaaaaaatttaaaaaataaggcaggcctcatgcctgtaatctgagtgacttgggaggctgaagcaggaggatcacttgaccccaggagttcaaggctgcagggagctatgattgcaccacttcactccagcttgggcaacagagcaag

SEQ ID NO: 94963 - DNA, 385 bp, Homo sapiens
tacaaaaaaggcataaatgcaaaaatctttaacaaaatttagtaagtagtaatcagcaatttcccatgatcaagtgggaattgttctagtgcttcaaggctttctcagtattcaaataaatcaatcagtgtaacccaccatgttaacaggctaaagaatcaatgctcatatgaatcgatgcagaaaaagcatttgacaaaattcagcagtcttcacatgggaaaataggaattaagggaaatttctttgacttgttaaagagcatctacagaaaaccaatggccaacgttatacttaatagtgaaaagatgaaatgccttccctgcaagtgtgaaaacaagccaaggatgtcagttgtccccactcttttttctttttttctttt

SEQ ID NO: 94964 - DNA, 372 bp, Homo sapiens
tgcagtggcgtgatctcgcctcactgcggcctcaaattcctgggctcaaatgatcttcccgccttggcctccagagtagctggaattataggcatgacgccactatgctcagctaattaaaaatttttgttgttgttggtggagatagtgtcttgcttttggagggtaaaggtttaaaacaatgtgtcgacccattgtgaagtgaaataaatcaatcaataaataaaatagaacagtgtgtatgtctgggtgtggtgactcacccaactacttgggaggctgaggtggagcccagggttgagaaatgttcaaggctgcagtgagccatgatggcaccactgcacttcagcctgtctctaaaaagaaaaattt

SEQ ID NO: 94965 - DNA, 376 bp, Homo sapiens
catagacctaagtttaaatctataagccttctggaagaaaacatgggagaaagttttcatgaccttgggttagcagtgatttattagatatggcaccaattgtgcaatccataagagacaaaacatcagacttcctagaaattaaaaaatcctgttcttcaaaaggtactgtttagataatgaaaaaacaagccacagactgggaggaacctttgtaaaacatacgtctaataagggatccataatgtatgaagaactttaaaacctttaaaaactttaaaacaacccaatttaaaaatgggcaagagagttctctagacatcttaggatacacagatggcaactaagcacatgaagaatgttcaacagcgttatt

SEQ ID NO: 94966 - DNA, 400 bp, Homo sapiens
gaaccacattaaaccctgaatagccaaaatactactcagtaaaaaaaaaaaaaaaaaaaaagggggggggcctcccctttccttgtaaaattttttttccaaaccttaccattcaaaccacctttttttggccaaaaaccaaccccttaactttgaaaaaaagaaaaaaacccccaaaaaaaaccccaaccttttggggccactttttttttgaaaggggcacaaaaaaaacccaggggggaaaaaaaaacccttttaaaaaagggggctgggaaaaactgtttttccttggccaaaaaaaaaaaatggccccttttttttttttccaaaaaccacctcaaaggggagaaaaaccctaatggtaaaccctgaaccctaaaacctgttaaaaaaaaatatg

SEQ ID NO: 94967 - DNA, 402 bp, Homo sapiens
  misc_feature (1)...(402): n = a,t,c or g
tggagccactgcgctccagcctgggcgacacagtgagactctgtctccaaaaaaaaaaaaaaatcaacttaaaagggattgaaaatttaaaagtaaaatctgaaactatccaattctagcaaaaaacataggggaaaagctttgtaacattggtcttggcaatgatctcttgggtaaaacaccaaaagcaggcaacaaatgcaaagatagacaagggggactacttcaaactaataaaatgcccagaagggacagggaaaaggcaccttagggatggaaaaaaatatttgtaagccatatacactcggccctttttatcttgacggttcaaccaaaaattcaaccatccttggtttgaaatatttgaaaaaaaacaaagacaaggcctggctcacacctgtn

SEQ ID NO: 94968 - DNA, 381 bp, Homo sapiens
cggacgcgtgggaaataagtattagtaacacagtggtgtgcaggtacactatatagttaagatgatataaaaatgactgagagttgttaaatattgcttacatcagggccagttattctccatgccacttattttatattgacttattctcttaaaatattatccccttatcaaatatgaaaaatactatatgagcagaaagatatcagactagtagaagtacagcagatagaattagctgtctttttatctgatcggcagagattgtttcccggattcagggaagaaaacaggggggaataataataataataataataataataatactaataataaagataataataataataaaatctcactttcactgaagcctta

SEQ ID NO: 94969 - DNA, 406 bp, Homo sapiens
  misc_feature (1)...(406): n = a,t,c or g
atatgagagttcagttcctctgtgtccttgtcaacacttggtatggtgggctttttagccattctgataggtgtgaagtggtacctcgttgtagttttaatttgcatttctctgaggaataataatgttgaaaatctttttttttttaagtaattttttaaagacagggtctcgctatgttgcccaggctggccttgaactcctgggctcaagcaatcctcctacttcacttcagcctcccaattagctggaactacaggcacaccacctcatcgactcaagcgtcgcttcatgtgctatttgtcattggttgtttggggaaccgtctgttgacatcttttgctgtttctttcactgggggggntcatccatattgagcactgaaagttctttatatattctggat

SEQ ID NO: 94970 - DNA, 400 bp, Homo sapiens
tcatcagtagatgtagtataatgtcacttctgtgtcttcgcttacttttattgccctattgcatagcaagactttatttatcagttttagacaacgattatggtgggaacttgagggcaggatagagcttttctactagttaggacatatatgtagttttcaaacatgaggatgttgctactaatgcatctcctagaatatgaagaagaaaaccacataataaagaatgcaggccaggcgtggtggctcacgcctgtgatcccagcactttgagaggctgaggtgggtggatcctgaggtcaggagttcgagaccagcctggtgaaaccctgactctactaaaaacacaaaaattagccagcaatggtggtgcgcacctgtagtcccagctactcgggag

SEQ ID NO: 94971 - DNA, 431 bp, Homo sapiens
gacaatatcccaaagaaatcagcagtttactattggataactctttttaagaagggctgagacaatgttgaagatgaagcctacagtggcacactggccatatcaatttgtgggaaaacattcatcttgtttgttccctaagtgacgaggaacaacattcaacagcacaaacaatagccaacaccatagacatcacagttggtttagcttacacaattctgactgcaaaatcaaagttaaacaaactttgtacttgatagatgccaaaactgtcataccctcttttctgaaagattttatgaaaaaacaaaacaaaaaacattgtactcaaatcagctgcagataaaagcagagcttccagtggaaattttacataactgcgatcaagatcctgaaacatggctgggtggagtggctcacacctataatcc

SEQ ID NO: 94972 - DNA, 432 bp, Homo sapiens
agaactcagcgcggatgtatctttctttttcattacaacacctttatctggggtattataacaaaactgggggattgctgcttttataccgatagagcttcgctctccgacagaagtgactttttcattcgatgtggggaatgggccttttgaaatctcattgcagtcacccacccacttcagcgaccaccagtggcaccatgtgagggttgaaaggaacatgaaggaggcctcccttcagtggatcagctgacaccaaatacacagcccgcccccgctgatgggcatgtcctgttacagctcaacagtcacctcttcgtgggtggaacggccaccacacagagaggctttctgggctgcattcgggctctgagatgaatgggatgaccctggatttggaagaaagagcccaggtgactccagaagtgcagg

SEQ ID NO: 94973 - DNA, 421 bp, Homo sapiens
  misc_feature (1)...(421): n = a,t,c or g
aatcctcctgccttggcctcccagagggctgggattgcagacatttgccactgtgcttggccattacttagactttctaagcctcaattttctaatctgtaaagcaagaagtttgcactaggtgatgtctaaagctctaatattctataatacatatatatattttttgagatggagtctcgctctgtcacccaggctggagtgcagnggcatgatctcggctcactgcagccctctgcctcccaaactcagtctcctgcctcccaagctcagcctgctgcctcccaagctcagcctcctgcctcaggcttgcgggtagctggaactatatgcatgtgccaccacgcccagctaatttttgtatttttagtggagatggtgtttcaccatgttggccaggccggactcgaactcctggcct

SEQ ID NO: 94974 - DNA, 416 bp, Homo sapiens
  misc_feature (1)...(416): n = a,t,c or g
aattttcagtgtagatgaaacagccttatattggaaaatgatgccatctagaacttggtatctggaaaggagaagtcaatgtctggattcagagattcagaggagaggctgactctctttttaagggctaaatgcacctggtgaattggagttggagatactgctcatttaacatccagaaatcttagggcccttaaattatgttaaatttactctgtctgtgttctattagtgtatcaatgaagccttgataacagcacatatgtttacagcatggcttactgaatgttttaagccctctgttgagacttactgcttaggggaggaaatgccttttaatatattactgctgattggcaatgcacctggttacccaagagctccaatggagatacaggagattaatattattgtcn

SEQ ID NO: 94975 - DNA, 385 bp, Homo sapiens
aggccaggcacggtggctcacgctggtaatcccagcactttgagaaggcgaggcaggaggactgcctcgcccaggagttctaggctagcctgggcaacttagtgagactccatctttatttttatttaatttttcattttgccctccgaaaattagaaagaccccatcttaaaaaaaaaaaaaaaaatttgcccggggggagggcgttttcttggggtcccacttttttgggaggttaaggtgggatgtatcctccagcccaaactagaaagacctcgtattataccaccttacttcggcctggccagaagagccggacctccccgggcaaattttttttttttttaataagaagggcgtgtttgtacccttctggacaaaaaaa

SEQ ID NO: 94976 - DNA, 418 bp, Homo sapiens
aggaaaccattacatcttttatgacgaacttcatggagaaagctgattctgggggtttttttttttttttttaaaaaaaaagaaagccgccctgggaccatggacacctccccccccgggccaagggggacccccccccccccccccccggggaccaggaaagggggggccaaaccccccccgccaaacaatttatggtttttggggccaaaggggccccccccccgggggggggggggaaccaggacccccgccccccggggaaccatccggcggggcccccccaaaccggggggccacaaaactggccccccgcgcccggcccataaaaaggtttttagggggcgtccaaaggggccccctagaaaggggtggaccccgggggggaacgctcccaggtgccgaataggggggcacg

SEQ ID NO: 94977 - DNA, 503 bp, Homo sapiens
  misc_feature (1)...(503): n = a,t,c or g
cgtgggtgngncccactgaagtcgttcccatggggntgctngcaggaaccnccgggncgacccacgcgtccggggaattacataatgataaaagagtttatttttcaaaaagacagaactatataaaatgtgtatgcacctaagaatatagctttaaaatacataaagcaaaaattgataaatctgaaagggaagagagacaaattaacacttacagttgcaaacatcagtacttgtccctgagtaactgatataacaagtagatagaaaatctgcaagggtacagaagaactattctaacaaccagctgcatttaattgacatttatagaacactctacccaacagcagcataatacacattcttttcaagtgcttacaattacagcaaaataggcaatagcataggtcataaaaccttttctaatttaagagaaatgataacatacagtggttgttctctgatcataatggaattaaatgagagataaatataataataac

SEQ ID NO: 94978 - DNA, 401 bp, Homo sapiens
  misc_feature (1)...(401): n = a,t,c or g
actggttagccaagttgtgaattcaaagaataggatcttgaagaaaattaaaaattctactccagtgcacacacacaaatgataagaaagcaaaacaaccttattgctgatatggagacagttttagtggtctggatagaagatcaaaccagccacaacattaagccaaagcatgacccagagcaaggccctaactctcttcaattctgtgaaggctgagagaggtgaggaagctgcaggaagctgggagaggttggttcacaaggtttaaggaaagaagacagctctaaaacctacaagtggaaagcgaaccancaagttgctgatgtggaagctgtagcaagttatccagaagatgtagctaaaatcattgacaaagatggctacactaaacaacggat

SEQ ID NO: 94979 - DNA, 405 bp, Homo sapiens
cccacgcgtccgtaggtatgtagtggtttcttatttgggttttaatttgcattttcccaaatgatattgagcatattttcctgtgcttacttgacatgttttcaaatcctttgcccatttttaatttggttgttgattattgttgaggtttgataactctttatatattatagatataagatatttatcagatatatgctttgaaaagatttttttgcagtctgagacttttccttctattactgtttttgaggaacaatttttaacatcgttgaaatcaaatataacaattttttatgatgaaacataggctgaaaacagatcttttgggagggagtgattttccattagataactgtcccggaggaaccatgtgtaacatgtgcgaaagtaaatcatacggtt

SEQ ID NO: 94980 - DNA, 423 bp, Homo sapiens
atacaaaaccagcctggttaacataatgagaccctatttcttttgtttttcttcaggaaatacgtaggtgtggtggctcatgcctatagtcccacctactcaggagatgaccctatctttaaaaaaaaaaaaaaaatttatccaacctgaaacagagagaggaaagggctaaaaagcccctcaacaaagcctcagtaacctgggggggaaacaatatccagcctgggcgacagagtgagactccgtctcaaaaaaaaaaaaaaaaaaaaaaccgggggcctttttgggaaacttttggccccccctttataaaagggggggggggaaaaaaaaatggggaaaaactttttcccccggggaaaaacctgccccaaaaaggggggaaaggaaaatttgttccctcctcctttttaaaaaggggga

SEQ ID NO: 94981 - DNA, 401 bp, Homo sapiens
ctgcctataagtggagttgctgggtgtgatagttttcctgcatgctcagctgtataagacactgtcaaaatgtttccctaatggctttactgatttacattctcaccagcgaaggatcagagttccagctggtccaagtcttttccagcatgtgatgttggcagcgttaaagtgcaggcattctggcagagaggagtggtgtttcatggtggttttaatttgcatttgcttgatgattaatgaggtcgagcccattcagatgtgcatattggtcatttgaacatcttttgtgaagagcttgcttaagtctttttctcacttaaaataaattatcttcaatttgttattgatttggaatgtcttatattacctatatatatccttatatatatataagaatg

SEQ ID NO: 94982 - DNA, 407 bp, Homo sapiens
ggttctgggagagagtcgccatgaatatgtctttgtgttgacgtaatgttttcatttcttttgagtaaatactgaaatgggatttctgggagcctgataaatgtatccttgggggaaaaaaagtatgcttgatcttataagcaactgctaaaatatttttcaaagtggctgtactatcttgcattcccaaagctattgataagggttctagtttttccataaccttatcaacacttggtattaggctgatgcaaaaatatcagttttaattttaacccttctaacagttatgtggtggtgccccattgtagtttcaatttgcacttccttaactaatgatagaaaaccttttttcatatgctcattggtagagtggatatcttctttagagaaatgcctcacaatct

SEQ ID NO: 94983 - DNA, 409 bp, Homo sapiens
cccacgcgtccggactagttctagatcgcgagcggccgccctttttttttttttttacctgaccacagttttttgctaattttaggggggcaaaaaaatgctctttagcccctccccatgggtttttgcttgaaaccccacctttttgggaggccgggggggtaggattaccggagagggggggttaaaaaccagttgggcaaaggggggaaacccccggggctacaaaaaaaaaaaagttaccctgccatgagggggggggcctgtttccccatttatttggaggggtggggggggaaaatcatttgaccacagggggggggggttctgggggggggaatcccccccattgtgccccacccggggggggggagggaaaccccttttcaaaaaaaaaaaagggggactt

SEQ ID NO: 94984 - DNA, 411 bp, Homo sapiens
cggacgcgtgggatggcgtgaaccccggggggcagagcctgcagtgagccgagatcatgccactgcactccagcctgggtgacagcgagattccgtctcaaaaacaaaacaaaaaaaaatcaataataaaagtagaacagatttgaacagacactttaccaaagaagacagatggatggcaataaacacttgaaaagatactccacatgactagtcattagagaagtgcaaattaaaaccacaatgcgatactactacatttctattaaaaagtctaaaataaacaaacctgaccataccaactgttggcaaggatgtggaagacctggaactctcatatactgctaatgggaatgaaaatggtaccatcgcttaagtgaactttttggtagtttttaaaaaggctaaaca

SEQ ID NO: 94985 - DNA, 411 bp, Homo sapiens
  misc_feature (1)...(411): n = a,t,c or g
cggacgcctggnaacttaattattgaaagtgttgtgttgaagaccccaactactattgtagagggggctatttctcccttcaatcctgtcaatgtttgctttatgtattttggggaactgttgtttgatgtgtatgtgtttataattgttatacatttttaattgagccttttattaacatatattgttatttttgtctcgaaataattttttagttaaaatctattttgtctgatattggtgtgaatgctgtacctttctgacaataaataatattcgaccatgaataaaaaaaaaaaaaattctaaaaaaaaaaaaaaaaataaaaaaaaaanncanantttttggggctgcttttttgtgaaaccccttgtccccccccaaataagcgccttttttttttttcttttt

SEQ ID NO: 94986 - DNA, 401 bp, Homo sapiens
  misc_feature (1)...(401): n = a,t,c or g
ttggccaggctcgtcttgaactcttgacctcaagtaatccgcccacctcggcctcccaaagtgctgggactataggcatgagccaccgcacctggcccagtttgctctattattatcttgtatacttgagctgtactctatggaacactattgtttcttaccctgctctaatacctacctgctactgcccaatgcttagttcaagcatcctctactcccggaatctaaggggttaagttgggtgctctttctcttacaaaagacctccatgcttacctctgttcttacactatacagtattataatggctagtttgcttctatgtttctgtgagttccttgtgcattccttgagctggggtctgtgttcatggnccctataaagctcaccatctagccaga

SEQ ID NO: 94987 - DNA, 483 bp, Homo sapiens
  misc_feature (1)...(483): n = a,t,c or g
agagacctgtactgantgcctagcgccgacgacagnnttggantngacgcacgcgccccactagagatggtgattcaccatgctggccatgctggtctcaaactcctgatctcaagtgatcctcccgccttggcctcccaaagtgctgggattacaggcgtgattcaccgcgcctggccatttttaagtatgttgttcattggtattaagtacattcataatattgggcagccattatcaccattcttctctgtttactcttcatgttataaaactgaaactctatactcattaaacagagagtcccattttcctcttctccccctaccctggcaaccaccattctactatatatgatttttactggctggagtacctcatatagagnttgtttgtttgtgactgggttatttcacttaacacaatgtactcaaggctcacctatgttgtagcatgtgtcaaaatttacttcctttaggctaa

SEQ ID NO: 94988 - DNA, 422 bp, Homo sapiens
gggacaggaagctttaaaaagcaggaatggctatattaatagacaaagtagacttcagaacaaagaatattatcacagaataaggaaacatttcataattacaaaggggtcagttcgtgaagagaacatatcagttctgaatgtttgcctcattacagagcttcaaaacacatgaaacaaaactgatagaactacatgtagaattaggtgaacacacaattatagttggagattcaacatctctttctcagtcctcaatagaatagacaaagaatcagcaagaaggagatagaatatttagaataacactaatcaccaacttaatctagttgacatttactgaaaaacaaaaaacactaccaacggcagaaccaccttctttccaagtgcacacaaactatttactataataattcatattc

SEQ ID NO: 94989 - DNA, 368 bp, Homo sapiens
cagggtcttgctctgttgcccaggtagtacagttgcgaccacaactcagtgcagcctcaaactcctgggctcaaacaatccttgtgtcagccgcccgaatgaatagctgggattacagatgcacgccaccatatttggccaatttttttttttgaaacggagttttgtttttattgcccaggctggaacgcaatggcgcggtcttttataaaaaaaaaaaaaggtgggggggttcaagaaagggtcctgcctaaccctcccagggaggggggactacaggaggtttagggaggagaaaattttgattccaggacgcggtttttgcaacgagctgatataaaacccctgggctttaccctggttgacac

SEQ ID NO: 94990 - DNA, 388 bp, Homo sapiens
gttgtaccattttatattcctaccagcaacataagagctccagttactccacgttctcttcagcatttggtatgatcagtctttttattttagtgatagtggtatctcattgactaataataataatcttaagcatctttttatgtgcttatttgccattactttgtcttctttggggaaggtcaaatctattgcccattaaaaaaaatctcagattgatgccttggaaatattttctccccatttctggcttgtcttttcattcccttaatagtgtctttggaaaagttgaagtttttaatttttaagaaatccagttaatcagttttttcttttatggattgtgcttttgatgtcatgtgtaacacatgtttgcctaacccaaagg

SEQ ID NO: 94991 - DNA, 402 bp, Homo sapiens
taagaagctcctgaattgttaaattgggctgtgttcaggggatataccattatattagttttactgagtatagattatttgtgggggggactgttaagaaccacgcttggatagactggttttgtaaagtgcctcagtaatataatgaagattttggattcatttgtatagaaagagagtttttccccccctcctcaaccctgtgattacctggaaagaaaagagagggtttgtttttgtttttgttttttgagacagggtcttgctctgtcaccctggctggagtgcagtgccctggtcatgactcactgcagcatcaacctcctgggcccaagtgatcctcccatctcagcctcccaagttactgagaccaccaacatgcatcaccttgcctgtgtaatt

SEQ ID NO: 94992 - DNA, 404 bp, Homo sapiens
  misc_feature (1)...(404): n = a,t,c or g
aaaagaaaatccgtccccgaactgatctgcctcccagatgctgagccccctgctcctatcgtccaaatctcccctcctcacctggaccccatctggaccctgttggcccaaccccaaccccatccccaccccggcccggtcctgcaaggggcccacctgcggcgaggccgaaggagccggcagagcctggcaaagaagaaagaagagggcttctcagctcctggaggaaacaatgtctgtctctttggggaataggagcagcgtgtccttagagacaagaagggagaactggtctatccagtgcactgctgtcctcccctgggacagggatgacccgcaactgccttatgcatgggctggagtcaggccaaatggctgaagtggcccaagatggctgtgtgacn

SEQ ID NO: 94993 - DNA, 407 bp, Homo sapiens
  misc_feature (1)...(407): n = a,t,c or g
ctcaacagtgggcttaaaatgtttagtaaacagtgctataaacagatgtgctctcagctaggcttttttctagagtacaggcagagtagatttgggccctanaattcagaatggtcaatgagcattggcctcaacttaaagtcacccagctgcattagcccctaacaaaagagcctgttctttgaagctttgaagccaggcatcagcttctcctttccagctatgagagtcctaggtggtatcttctttgaatacagggctgttaatacagagctgtttagttgactttgaaaatctgttgtttaggggagccacctttatcaattaaattatcttcctttcacttgaacacttaagaggcccatagggtaattggcctaatttcagtattgtgtctccaggaggcc

SEQ ID NO: 94994 - DNA, 498 bp, Homo sapiens
  misc_feature (1)...(498): n = a,t,c or g
tggccgggncccnaaaactgaggncccttgacgngtcctgcacngacgcacagnnccggaanacccgggccgacccacgcgtccgcccacgcgtacgggtgaatcctttccagattcacttaaatttactttgcccagatgcatcagatgaatcactgctcagggcagctgtggtcttatgaaataatatttcttaaataagaagacttgtaagccaaaattacttctttggtccataggcttcagagtggatgctgtcttcgcagacatgaaagcaatattaatctccttgtatatctccattagagctcttgggtgactatgtgcattgtcgatgagcagtaacattttgaaaggaatctttttttttctgagcagtaggtctcaacagtaggcataaaaagatttagtaaaccatgctgtaaacagatgtgctgtcatcagggctttgctgttccatttctatagcataggcaaagtagatttagcataattctt

SEQ ID NO: 94995 - DNA, 411 bp, Homo sapiens
gagtttcacctctttgcctgggcaggtctcaaactcctgagatcaaatgatcctccccccttggcctcccaaagtgcgtggattataggcatgagccattgtatctggctagcatgggagttttgaactgtcccatttccaacctgggccagtgcattcctccttaggcagcctggtggtccctgctcctgggatgtcactatattgatgctgaacttagtgcagacacctgatctgcctagcgtactacaacccagagctcctgggcccaggcgatcctcctgtctcagcctcctgagtagctgggactctaggcacacaccactatgcgtggctctccatgcttcttgggtctaccctctgagatgtttttccttttctttcaccttccttgattccttctgaagaggg

SEQ ID NO: 94996 - DNA, 411 bp, Homo sapiens
  misc_feature (1)...(411): n = a,t,c or g
cggacgcgtgggcggacgcgtgggtgcagtgagccgagatcgtgccactgcactccagccagggcgacagagcgagactctgtctcaaaaaataataataataataaataaataaaggagtagtcccagtgactggtgggtggggcgggggtgaggtgggagaatcacttgggcccaggaagtcgagattgcagtgagccatgatcatgccactgctctctagcctgggtgacagagtgagactctttttgtcttaaaaaaaaaaaggaaaaaaaaaaaggggggccggccctttaaaaggaaaaaattttatggccgcggccgggcgattttattttttttttttggggcaccctaatttaatttagggggccgggtttaaaaaaccncggagggggaaaacccttggtc

SEQ ID NO: 94997 - DNA, 394 bp, Homo sapiens
  misc_feature (1)...(394): n = a,t,c or g
gagaatggcttgggcccggagggtggaggttgcagagaaccgggattgcaccattgcgctccagcctgggcaacaggagcgaaactctgtctggaaaaaaaaaaaaaaaaaaaaaaaaaaaagggggggcccttttaaaaaaaaaaaatttaaggccggggggaggggaaaaaaaaattttttaaagggggcaacaaaaaaaaaaaaaggggggggggttaaaaaaagggggggggggaaaaacccggggggaaccaaaaaaaaaaggctgggaaaaaaacccctttttcccaaggggggaaaaaaaaaaaagacccccnnnnntttttttaannatnnnaatattaaaacccggggggaatttaattttttatatttgcaacaaaaaaacttg

SEQ ID NO: 94998 - DNA, 391 bp, Homo sapiens
agaaatcacccgtcttttacgtcagtcacgctgtgagctgcaaaccagagccgttcctattcagccatcttggaacgggaggtctctgctctatttttaaattgtgtgttatttttgttgttaagtttgttaaatattctataagtttatcttttgttgtgtatatttcacaaatattttctttcattctgtagattatctcttcactttgttaacgttttctttgctgtgcaaaacatttttagtttgttgtaatcccatttgcataatgttacttcttttgcctgtgcttttgaggtcttacttaaaaattctttgctctgtaatatgtggtaaagcattcctctatgtttatccaaatagctttataggtttgggttcacatttaaat

SEQ ID NO: 94999 - DNA, 420 bp, Homo sapiens
gaagaacgagagaaagaaaagacacacaccttttgaaggtgtaaggattttaggtggactagcattttaacagccagaagaataattttgactaccttagagccagtttaggaagaagactttctccctctctctccctctctctcccttcccctttccctttccctttccttttctcttccctccctccctgctttctggcttcctgtctttgttcctttctggctttccctcttttctgcctttctttctggctttctttctctctctcctctctttctttctccctcccttctttccttccttccaaaaacatggatctttctttctctctcttcctccttccccccttctttttctgtgtttatcttccttccttccatccattcatccatccatccatctttctgtcgttgactt

SEQ ID NO: 95000 - DNA, 396 bp, Homo sapiens
  misc_feature (1)...(396): n = a,t,c or g
ttcgtagcacagaaagatttagaattccagcttcattacctcctggctcttttggaactntntttttttttttttttttttgggaacctgggcccaaaaaaaccaaccaatctcaattaaacaaaaaaatgatacccggggaccaaatgggaaccccggccttttgggcaaaaggggttttttaccccaccggggttgggtcccccttgggggggggggaaattttttttttgaacctttttttaaggggggaaaaaccccgggaaaccatttaacctgggcccctttgggggggttaaagggggttttttccctttggggggggagggaaaaaaaattggaaatggggcccaaaaaaattttccacaaaaattttcttaaaaaaaaatccaggcn

SEQ ID NO: 95001 - DNA, 397 bp, Homo sapiens
  misc_feature (1)...(397): n = a,t,c or g
agggactggagaggcagggcagggtggcctgtaatcccagcactttggaagggcaaggtgcgaggatgcttgaggccaggaggttgacacagcctgggcaacacagggagacccccatctctactcaataataaaacaaatagcctggcgtggtggccaaaaaaaaaaaaaaaaaaaaaaaaaaaaatgggggggggccctttaaaggaaacaaattttttcccccgggggggggaaaaaaaattttttttttttgggccccaaaaaaaaattcccggggggggtttttaaaaacggggggggggaaaaacccggggggtacccaaattaagggggttggaaaaaaacccctttttcccgggggggggaaaaaaaaaaaaggcgcgggttcntnttc

SEQ ID NO: 95002 - DNA, 388 bp, Homo sapiens
atcgcgccactgcacttcagcctgggctacagagcgagactctgtctcaaaaaaataaataaataaaaaataaaaggattggaacaggacagtaagaggagtaaagggaggattcagatgaatgtggctggattaaggcaaagggagacaaccatgctgcggcaaaggctgatgtgagagggtgctttgctgttgcagagggggagaaggaagaatcaaagaggattcttaattttgaagccaggcaaacgggagaatgatactacatagagatggagcctagagaggcaaatggcttaaaaaaaaagatggccaggtgtggtggcacgcctgtaatcccatcactttgggaggctgaggcgggtgagtcacttgaggtcaggagttg

SEQ ID NO: 95003 - DNA, 409 bp, Homo sapiens
  misc_feature (1)...(409): n = a,t,c or g
cccttaccacgctactcctacctatctccccttttatactaataatcttataaaaaaaaaaaaaaaaaaaaaaaaaaaaaaaaaaaaaaaaaaaaaaaaaaaggggggggggccctttaaaaaaaaaaaattttttcccccggggggggggaaaatttttttttttttttgggccccaaaaaaaaaaatccgggggcgggttttaaaaaaggggggggggaaaaaacccgggggcaccccaaaaaaaagggttgggaaaaaaccccctttttggggggggggaaaaaaaaaaaaacccgcnntnnnnnnggggggggggggaaaaacacgggggaccccaaaaaaaaaggttttgcaaaactcccttttttaaaagggggaaaaaataaaaaaagggcccacttctttt

SEQ ID NO: 95004 - DNA, 386 bp, Homo sapiens
  misc_feature (1)...(386): n = a,t,c or g
cccaccggcccccgccagtgatgggcttatcacccaggccagcagctgcggagggtgtgccaggtcccccagcagtgctggcccaccagcaccacgctcaatttcttgccaggccttagctgcctccccatggggcagggctcaggacctgcagcccaccatgcctgagcctccccaatcccccgccgtgggctcctgtatggcccgagcctccctgatgagcgctgccccctgctccacagtgcctggtcccatcaaccgcccaagggctgaggagtgtgggcgcacagcacgggactggcaggcagctccacctgtggccccggtgcgggatccactgggtgaagccagctgggcttctgagtctggtggggacatggaaaatn

SEQ ID NO: 95005 - DNA, 401 bp, Homo sapiens
cccgggaggcagaggttgcagtgagctgttaccacgccattgtactccagcctgggtgacagagcaagactccgtctcaaaaaagaaaaaaaagggaaaagccgggttccctttaagaaaaaaccctttttttttgccaaactttggttttcggccccaaaaaaaaaaacggcccccccctccttgggagggtttgggccaaaaggaaggggggttttcacccgcccctaaaaaattaaaaaagggggcctaagggggacatttttatttaaaagggcccttttttgggaggggaaggaaaaaaaacctccccccaaatttttttttaaaggagaggaaaccccttgttttaaaaaccccaaaaccctttaaaaaaaaaaaaaagcggctttttccaaggg

SEQ ID NO: 95006 - DNA, 395 bp, Homo sapiens
  misc_feature (1)...(395): n = a,t,c or g
gctgtttcaccgagttggccaggctgtacttttactccttatctgaagggatgtgccagcctcagcctcccaaagtgctggggttacaggcctgagccaccgcaactggcctcatttctcttagggtcatatatctagcagtggaattgctgggtcccatgatgactctgcggttatctctttgaggtactctttcctttcccacaggggctgtaccatttcactgtcccacttagcatcgtataagcagggcagagagttcagtttgtccacattctcaccaacacatgttaatttccagtgctttcattccgagaagtggcatctgtttgtggttttaatttgcatttccctgatgactgatgatgttgagcatcttttcaggtgtttattgn

SEQ ID NO: 95007 - DNA, 400 bp, Homo sapiens
  misc_feature (1)...(400): n = a,t,c or g
ttgcagtgagcccagatcgcaccattgcactccagcctgagcaacaagagtgaaactccatctcaagacaaataaataaaatcttgaaacaaacaaaaatggaaatacaatatcccaaaacttaagagatgttgcaaaagaagttcgaagagagaagtttatagcaatgaatgcctgtatcaaaaaaaaaagaaaagccctaaataaacaacctaatgttatcccttaaggaactagaaaaagatgaacaaactaagcccaaagttaggagaaagaagaaaatcttaaatatcagagcagaaataattagagactagaaaaacagcggaaaagattaaaagaagagctggttttgaaaagagaagagccggtgcggtggctcacgctggtaatcccaacn

SEQ ID NO: 95008 - DNA, 392 bp, Homo sapiens
  misc_feature (1)...(392): n = a,t,c or g
ccgaggtgggagaattgctggagcctgggaggttgaggctgtagcaagccatgattgtgccaccgctctccatcctgggtgacaaagcaagaccctatctcaaaaaaaaaaaaaaaaggggggaggttttaaaaaaaaaaaggtgttttttcgggggggggggattttgtttttttaatatggggggaccattttccttaaaaaggcccctggtctgaaagcaggggatgaaacaagccttctatcacctagggaggcaagggggggggatcatgaggccaaaaaatcaaaaccatcctggtcaacggggggaaaccccgccctactaaaaatacaaaaattantcaggcatgagggggggcacctgtaatctcagctactcaggaggctga

SEQ ID NO: 95009 - DNA, 404 bp, Homo sapiens
  misc_feature (1)...(404): n = a,t,c or g
aaaaatgtcttaaaattagccaggtgtggtgacacacacctgtagtcccagctactccggaggctgaggcagaaggatgacttgagcctaggaggttgaggctgcagtgagctatgattgtgccattgtctgcgtgacagggcaaaactctatctctaaaaaaataaggtttaaaaataaaaaatgaaaaaaaaccattgttgcccattgtgctcccagtctccactcccaccctagaggctgggtctccgcgacaggcagccttgagggcagcccctggaatagcccctgggcagtggcactggccaccacaagaacagactgagtctgtgtctctctcagacctcaaagcagatgagaagagttcgtgcactctgcctgagggtaccaactcctcgccccan

SEQ ID NO: 95010 - DNA, 399 bp, Homo sapiens
cagcccacgcttctcacagagctgggattaaggcctgttccaccacacccagccactatgaacattctttactaataaataaacactatcttgcattacagctacaaaaattattttttgttcttgtttttgagacagggtctccagccactccaagctggagtgcagtggcaaaatcatggatcactgcagctttgaactcctggggtcagcttcctgagtagctgggaccacccaaacccagctaatttttttattattttttttttggagagacaaggtctcactttgttgcccaggcaggtcttgaactcctaggctcaagcaatacacctgcctcagccttccaaagtgctggtattataggcatgagccactgttcctggccttacaaaaatt

SEQ ID NO: 95011 - DNA, 427 bp, Homo sapiens
  misc_feature (1)...(427): n = a,t,c or g
gcgaatgtttggagatatttgcctttcaggggaaaaattaccctgacaacagtggggagtatggcatggggtgagttgcttctgggccaggaaaacaaagtgaagagaccattgtaaatataccatgtgattcagaatgagaattccaactagggcactggcaataagaatggagagaaaaggcaggagaatcgcttgaacctgggaggcggaggttgcagtgagctaagattgtgccactgcactccagcctgggtgacagagcaggactcatctcanaaaaaaaaaaaaaaaacaccgggtggggggaaaggggttttttttaaaagcttgggggggggataaatttttaaaaacgggttttttgttttggtaagggccccacgaaaaaaaaaaccgggggggaggcgtaattctccggttctgt

SEQ ID NO: 95012 - DNA, 401 bp, Homo sapiens
tatttttcaggttttgattttagagtctttatgacattagaaaatgagtgacgtcacccccttttctgaaagagtttgtgtaggatttgcattgcttctcccttaaaagaataataaaattcagtgaagccatatgggcctggagcttttgttataggaaggctttaaattatgaattcactttcattagttaatagatgctattcaagttttctattgcctcttcaatttgttatgataatttctgtctttcaaggaattttatccagtttgtcagatttattggcataaagacactcatcggatatatatatatatattttttttttgggacagagtccctgtcctggctcttacagaaatgttcttacatcgggtcactgtatacgtctgacttctgg

SEQ ID NO: 95013 - DNA, 402 bp, Homo sapiens
cccgggaggcggagcttgcggtgagccgtgattgcgccactgcactcaagcctgggtggcagagggagactctgtctcaaaaaatatatacatatttttctaaaattttctaaaatagctgtagtctcagctatttgggaggctgaggtgggaggattgctgaaacctgggaggttgaggctgctgtgagccatggtcttgctgctgcactcctacctggtgacagagcaagactctgtctcaaaaaaaactgtgtacacttgttttagacataatgctattgcacatttaaatagtggaaacataactttcatatgcactaggaaatggaaaaattcacgcgaactaaacccacagtatctctgaggtatgctataccttttactgtgttccgtgtttttg

SEQ ID NO: 95014 - DNA, 400 bp, Homo sapiens
  misc_feature (1)...(400): n = a,t,c or g
ttgaacccaggaggcagaggttgctgagccaggctccctccactgcactccagcctgagtaacagagcgagactctgcctcanaaaaaaaaaaaaaaaaaaaaaaattcccgggcgggggggttattccttgaaacccaacatttttgggggcccagggggggggaaaaaaaagggggggaccccaaacccccctggtttaaaggggaaaacccccttttttataaaaaaaaaaaaaataaccgggcaaaagggggcctccctttaattcccccctcccggaagggggggggcggaaaaattttttaaccccagggggaaaaggttgttaaccaagtttccttcctttgccttcaacctggaaaaaaaaaggaaaatttttcttaaaaaaaaaaaaaaag

SEQ ID NO: 95015 - DNA, 403 bp, Homo sapiens
gaatcatacagtatgtaatcttttcagactgtcttctttgcctcagcataatgtctttgaattttattcacgttgtgtgtttcatagttgctgagcactattctgtcatatggatgtctactgtttatccattcaccctctgagggacgtaagagtttctcccagcttttggtgattattaataaagctgcagtaaacatttatgtacaggttttttgtgtgaacataggttttcatgtctctaggataaatacctaggagtggaattgttgagtcacatgttaagtctagttttttttgcaagaaattgccaaactatatctagagtgtctgtgccattttgcattcgcatcagcagagtatgagaacaccatttattctacatcagcacttggtattatcg

SEQ ID NO: 95016 - DNA, 396 bp, Homo sapiens
gataacctgtcttttttagaaaaatatttttttacttccagatgaataggagataaatcacagtcattccgaaacaaagctaaaagagagagagaatacaaagcaggtgggataaacagatagtacataaagcatggtagatttagctttaatataaataatggtaataaatgtaggcagaataaatggttcagctaaaagacaaaaatgggtagactgaatttgaaaagaaaaggccagcgtcgagtctcacacctgtaatcccagcactttggaaagcttaaccgggagggttgctggagaccaggagttcgagaccagcctgggcaatataacaagaccctgtctctacaaaaaatttaaaaaatttagtggtagcatgcacctgtagacccg

SEQ ID NO: 95017 - DNA, 400 bp, Homo sapiens
aaaaaccctgcactgcaactgccaggtgggcggtggcatccggggaatatccagggagcatctgtggtcatgacccagggtgcatgcagacaaaggaatctgagagacccttcactgggggctgtggcagccacgggtgtaggcaggagttacccagagctgctagtttgggaggggagaggggagttggtaaagaatggcagtttggaggattttcctaaaatagagctatttaaaaaaaagatgggagtgtgatggctcacgcttataatcccagcactttgagaagttgaggtgagaggatcgcttgagcccaggagtttgagaccagcctgggcaacacagggagacccccacctctacaaaagagttaaaaaaacaacgtagctgggcatggtgg

SEQ ID NO: 95018 - DNA, 388 bp, Homo sapiens
tcactgtgccctgcccttcatgaagttttagaaatgctatctatctagaactatgattgtttgacttaatagtatttagcatggctgaatgaatttttgggaaaatagctcaactcttctctcttgttatttctcacagtgcctagtacagtgcttggaccatactataaacactctacttttctgtgttttctgggttgatagaatcttttggtagttcttggatttcttttttttttttttttttttttgggagagggaacccccctgggccccccaggcgggagggcaatacatggatcggggttaactggaccctcggcccccggggttaaaccaattttcctgcttaaaaccacagatgtctttggagacacccccccccccg

SEQ ID NO: 95019 - DNA, 413 bp, Homo sapiens
tcgaaaaaagaaaacacatttctttattttgaaaactgtataaagttttagaaaagtgggctgaaaagcctattttgagttatttagcttaattttaatcatgaagtgttaggtataaaaagtattacctgttttagaaggtggtaacactgacttatccctgggctactggcaccactttgagtatcttttttgtttgatttttattttttatttttttagagatggggtctcactctgttacccaagctgcagtacagtagtgtgattgtggctcactgcagccttttattttattttattttttgagacagagtctcactctgttgcccaggctggagtggctctctgcaacctctgcctccagggttcaagcaattctcttgcctcagcctcctgagtatctgggatta

SEQ ID NO: 95020 - DNA, 534 bp, Homo sapiens
  misc_feature (1)...(534): n = a,t,c or g
acactcatttccccgtcctaccctttatctgatataattcatcccagattattaaantcaaaaggtnnnntttgaagctgtaaacgtactaccggacggcagttcccggatctacccacgcgtccgcccacgcgtccgcagggtttcgctcttgttgcccatgctggagggtaatggcgcgatctcaggtcactgcaacctccgcctcccgggttcaagcgattctcctgcatcagcagtgtcctttggtgcacaaaagcttttaattttgatttccaagagatttatagttttagctcttaaatttagggctttgattcatttgaggttaatttttttttcttggagatgggggtctcgttatgttgcccgggctggcctcaaactcctgggctcgggtaagcttcctgcttcagcttctgagtagggggcattataggggtgtgccattgggcccagctgctgattctgagttaatctttgaatgcggtgtaatttttgcatatggcccaacttcattgttttgaataatgg

SEQ ID NO: 95021 - DNA, 378 bp, Homo sapiens
aagttttggaatagttaaaatgcactttatttgaagtaataaatactttttaatgatgggaataacaacatttaagtttattgttgatctttgacacatcttcatttctgatgcattttcttttctttcttttttttttttttggaaacaaagtttccttccttcccccaggttggagggcagggcaataattttgtttaattgcccctttccctccaaggctaaaagaattttcctgcctccccctcccttgaggggggaataacaaggggggcccccccccccgggaaaattttggaatttggaatttggaattttttttttttcaaggagtccaaaaccaccctgcccatggggggaaacccctgtctttacaaa

SEQ ID NO: 95022 - DNA, 402 bp, Homo sapiens
ttttgtttttgttttttgctttctcctgtctgatggaaatgttctgtagctttctgttttgttttgtttttatgtttttgttttttgtttctcctgcccgatggaaatgttctgtaccttgactgtggtagttggatacatgaacctgcatactggataaaacttggtaaaattatacacacacacacacacacacacacacacacacacactctagtgagtacaagtaccactggggaaatctacataagatcagtagattggatcagtgtcaatatcctgactatgatataatagtatagatttgcaagatttttctatgaggtgaactcagtagagggcgcacaggatctctatgatttcttccaattgcagggcagtcagtctacagtgatctcaaaa

SEQ ID NO: 95023 - DNA, 405 bp, Homo sapiens
  misc_feature (1)...(405): n = a,t,c or g
taactttatagtggagaaacctggtaaacactgactaaaccagctgttcaaatttaacatcagcaataataagttgtgttggtggtgtgtagctttgatatgatgtgataaaaaatggcacttttcccctatgatcttccaaaaatccataaccccaatatactcatgagaaaaatgacagatcctagatcccagtttaggggcattctacaacataccagaccagtgctcctcaaaactgtcaaggtcattaaaacaaggaaagtctgagaaagtgtccaagccaagaggagcttaaagagatattgaagggctagcgcagtggctcacacctgtaatcccagcgctttgagaggccaaggcaggcagatcacttgaggccaggagttggaggccagcctgccn

SEQ ID NO: 95024 - DNA, 388 bp, Homo sapiens
aaaattcatcgtaaaagaacttaattgtgcagataatataatttttatagagacaattctaagaagtacacacatacacaaactaaaaaaaaactaataaatgagagttcagcaaggtggcaggatataagatcaatacatacaaatcaattgtaattctatataatagcaatgaataatttgaaaattaaaaaaataattccctttataatagcatcaaaaagaataaaatatttaaaaataaatttgccaaggcagtgcaagacttttatgctgaaaactacaaaacatggtgaagaataattaaggaagacctaaataaatagaagaacgtcctatgttagtggattggaagactcaaattttaagatggtattactccccacat

SEQ ID NO: 95025 - DNA, 380 bp, Homo sapiens
agcctggggaggtcagggctgcagcgagcagtgattgtgcctatgcactccagcctgggcaacagagtgaaacaatgtctcaaaaaaaaaaaaaaacccccaaaaagcccagggaaaaaaaggcgataaatggggggggggcttttaaaaattttcgggcggtctttaaaaaggtttttaattatttgggggaaaggccccattttgtttggggtacctacccaaaaaaaaccccccccaaattataaaccctttttccggggggggttggcggcccctcccatggaaaggggcggacaagaaatgcccttttgtttggggggaatttttccccggggggggggggggaaaatttttttttttttttatttagaagtttt

SEQ ID NO: 95026 - DNA, 412 bp, Homo sapiens
  misc_feature (1)...(412): n = a,t,c or g
aaacaaagggatgggctctggctagttatctgcagcaggaacatgtccttaaggcacagatcgctcatgctattgtttgtggntcaggaatgccttaagtggttttctgccctgggtgggccaggtgttccttgctctcattccggnaaaccaacaaccttcagtgtgggtgccatagcaatcatgagcatgtcacagtgctgcagagattttgtttatggccagttttggggcctgcttatggccagatttgggagcctgttcccagcacactgaaactccacctcccgggttcaagtgattctcgtgagtcagcctcctgagtgcctgggattgcaggtgcacgccactacagacccagctaatttttgtatttttagtagagacgcggtttaccatgttgccaggctcn

SEQ ID NO: 95027 - DNA, 412 bp, Homo sapiens
gaactacaggcatatgccaccgagcctggctaatctttgatttttttgtacagattgaggctccttatgttgctcaagctggactcaaacttctggtctcaagcgatctttccatcttagcttcccaaattgttggaattatggacatgagccagtgtgcttggcctgattttttttttttttttaaggaaaaaaacgtcccttaaaaaaagtttctttgaaacgaggacttgctttgttgccagttgggccttgaactcttggccccaagggattctcctgccttgggtccccaaagcgtggggacggcaaatgtcaccccccgcccctggccttattcttataaacccaaaattatctgaattcaagcagggtaaggttttccccagcccccctgaaatataaagaggtc

SEQ ID NO: 95028 - DNA, 414 bp, Homo sapiens
catgcctataatatagtataacccatcccctgtttccctaactggggccctctcatccctgctaatgacctacggcctaaccatgggatgtcacttcctctccataacgctcctcatactaggcctactaaccaacacactaaccatataccattgatggcgcgatgtaacacgagaaagcacataccaaggccaccacacaccacctggccaataaggccctcgatacgggataatcctatttattacctcacaagttattttcttcacaagatttttctgagccttttaccactccagcctaagccctaccccccaattaagaaggcactggcccccaacaggcatcaccccgctaaatcccctagaagtgccactcctaaacacatgcgtattactcagatgaagaatatg

SEQ ID NO: 95029 - DNA, 422 bp, Homo sapiens
acatggagaaagtttcagtggtctggatagatcaaaccagccacaacattcccttaagtcaaagcctcatccaaaacagtgccctaagtctcttcagttctatgaagactgagtgaggtgaggaagctgcagaagaaaagtttgaagctagcagagcttggctcatgagattgaggaaagatgtcatcataacgtaaaagtgcaaggtagaagcagcaagtggtgatagagaagccacaggaagttatccagatgatctagctaagataattgatgatagtggctaccctaaattacacattttcaatatttgttgaaaaccaacagatactgatattgtagatgaaaccgccttatgttagaagaaaccatctacctactttctttttttttttttgaaacaaagccttgctctgcccccg

SEQ ID NO: 95030 - DNA, 383 bp, Homo sapiens
ctaaaaatatgaaaagcatccgggcatggcggagggcacctgtactcccagctacttttgaggctcagggacgaaaatcccttgatcctgacaggcaaaggttgccatgagccgatattgcgccactgcactcctgtctgggcgacacagcgagactccgtatccccctacctattaaattttggctaggataaaggtgagcgcctgcagtcccagctacttgggaggctaagcccagttcaaggctgcagtgaactatgatggcgccactgccttgcagcctgggtgacagaatgaaatcctggcacaaaaaaaaaaagaggggggggcagttataaaggatcacattctccgcccgcgggcttgaaactttttatatgttg

SEQ ID NO: 95031 - DNA, 395 bp, Homo sapiens
  misc_feature (1)...(395): n = a,t,c or g
tgacatccatcctccagaacctttcctattgctccaacagagaaggggactccccctcccaagccagaatcccccaaagagagcctgaagtccaggttcaacacttagaaaaggcgagtcatggtggctcacacctgtaatcccagcactttgggaggctgaggccagaagattgcttgagcccaggagttcaagaccagcctgagcatcatagcaaaatcacctctctacaaaaaataaaaaacacttaagaaaacaaaaaggataagcaaacaagctgatacaagaacctaaaatcggccgggcacagtggctcatgcctgtaattctaacactttgggaggccgaggcaggtggatcacctgaggttgggagttcgagactagcttggccan

SEQ ID NO: 95032 - DNA, 398 bp, Homo sapiens
aatgggagaaaatgtttgcaatgtatctatctgactaagcaactgtgtccagaccatatagatgacttttacaactgaataagacaaaatataaattaaaattgtcacaaagttgaataggcactttaccagaggagatgtagcgatggccaataagcacacaaaaagaaaatcaacttcactagtaatcagggaaattaaaaccatgagataccactatctgcttaaaagaatggctgaagttcaaaagttgtcaagtgttggcaagaatgtgggtaggggggtgggaaatgtggttagaagaacagtgattagtcccataagaaaagatcagaaaatgtaacacatggggaagtaaatgcagaaaatatgcactcaatataacaacttagttgacc

SEQ ID NO: 95033 - DNA, 410 bp, Homo sapiens
aaatattaatgtactttattcctgagtatttccccagactctgctgggggaatatgcaccatgttactgttccaaaatacactgaatttcaaaatatctctggctttgggagtttcagataaatgtttttcaaactttttgattatgaccatagtaagaaatgtattttatatacatggtaagaaatgtattttatattgttccccagggtgtgcacacacacatatgcacacactgatgcacacacacatacacctgaaacaattttttttgagacggggtctcactctgttgcccaggctggagtgcagtggcgcaattactgctcactgcagcctcgacctcctgggctcagattctcctcctacctcagcctccctggtagctgaaaccacaggcatgtgccaccc

SEQ ID NO: 95034 - DNA, 429 bp, Homo sapiens
  misc_feature (1)...(429): n = a,t,c or g
gggggnagtgttcgctctgtctggaccgacccaaacacacacacacacacacacacacacacacacacacacacgcgtgtacacacacaaggtgcttttttggtgtgtgcgtgtcctcacaccagtttatgacacacctacaatgtgagatgtgtcattgggggcaggtttcaaggggggggacctacacctaggtaaagtagagggtctctctaaataagggagggcgcacagtggagagaaagggtaggggagactgcccagtgccattgacatatgcctgagccccagggcactcttggccccaaaaaacaatcacaagtatcccccccgacaaacctgccaagtaggcattgtgtctccacttgacagttgaagaaatggtccctagaggagagacagagctatctagagactgcgctggccctg

SEQ ID NO: 95035 - DNA, 417 bp, Homo sapiens
gactccttcatttctctatcttatgtgatgtttagaaaggcctttaaaaaattcacaatgaagtccaggcatggtggctcacacccctaatcccagcactttgggaggccaaggtgggtagaccactgacagagtgagaccctgtctcaaaaaaaaaaaaaagggaattttttttaaaaaacctttggcagtaggacttatttgtacttgttcaaggggggtaagaaaaaaatctgtcaaaggcccttgtatactggaaaatataaaaaaatggggtggacgtgggggctcacacctgtaatcccaaatttttgggaggctgaggcagccaggtcatgaggtcaggatttaaagaccacccgtgccaaaatggggaccccccttctttattaaaaaaaaaaaaaaaaaaaaaaattt

SEQ ID NO: 95036 - DNA, 376 bp, Homo sapiens
tgacctgtagaaaggttttaaactataatttcaatgtctttaatagttatagggctattcaagttatccttttcttcttgagtgagctttggtaattggtgtctttcaagaaatatgtccgtttcatctaagttgttgaatttagtgccataatcttgcttatagttttcccttattatccttttaatgtctgtaaaatctgtattgatttcatctctttaattcctaatattgttaagttgtgtcttcattttttttctgtccagtctagctagaagtttgtcaatttcatacaccatcccacaaaagcagctttgggctcactgattttctctattggttttctgctttctgtttcaatgatttcagattttat

SEQ ID NO: 95037 - DNA, 402 bp, Homo sapiens
ctcaaaatggatcaaaaacctaaataaagagctaaaaccataagactcttagaagaaaccagagggaaatcttcatgacatcagatttggaaatgatttcttggatgtgacaccaaaaaacaggctacaaaaggaaaaatagataattgaactttaccaaaatttaaaatgttgatgaggatctggagaaattagaaactgctgctggtaatgtaaaatggtgcaactgctatggaaaaactatacagtggttcctccaaaagttaaacatactacaaaatttatataaatatttgcaaataagtatatataagtgcatcattataatagtgaaatattagggaaaatctatatgcctgttatagggaatctgctaaatagtgatatatccatacagtggga

SEQ ID NO: 95038 - DNA, 411 bp, Homo sapiens
tcggacagattgcttgagcccaggaggttgaggctacagcgagacaagatcacaccattacactccagcgtgggtgacacagcaagactctatttcttaagaaaaaaaaaaaaaaaaaataaaattgggtctttttaacaaaaaaacaaaaaaaaaaggggggggggttattttcccaattttttttttttggggggaaaaaaggggttttaaagttggggggacaaaaaggggggcctttaaaaaaatttaaaaaaaaaaaaattttttaaaagggccaaaaggaggggggggccccaattgggggccttcaacccccttttttttttaaaaaaaaattttgaaaaaaaaacccccttttccttaaaaaaaatttaaaaaacaaaaagggggtagggggggtaaaaaaac

SEQ ID NO: 95039 - DNA, 411 bp, Homo sapiens
ccaaagtgctgggattgcagccatgagccaacaccccggctttcaccttgcttttttcacatattatgataatatagactgaaataatttctttaccacatcatagcactcttcctcattctccctttttttccaatactaggatccattcacgtttcatgcattgtatttggtcatcttcctttagtccagaatcacctgccttcttgtttgtttttcatgacactaaatatttggaagaatccaggcaagttgtcttgaaaacattccatgatccgaatttctcttgtttccttttttttttggaaacgaaccctcgctctgtcgcccaggggggagggcaggggggctatctgggctcatggcaggctccacctccggggttacaccattctcctgtttaagcctccg

SEQ ID NO: 95040 - DNA, 385 bp, Homo sapiens
  misc_feature (1)...(385): n = a,t,c or g
cccacgcgtccgcaccgctacacccagctaaatttttattctttgtagagacagggtctcgctatgttactgaggttggtcttgaaatcctgggctcaggcagttctcctgccttggcctcccaagggccaagtgtcccagtgtgttgggattataggcatgagccactgcacctggcccaacttcatctcttttcattgctgagtaatatgtattatgtaggtacattatattttattcattcatcagttggacatttgggtcgtttagatgtttcagctactgtgaataatactgctgcaaacatttgcgtgcaagtttttatgtggacatatgttttcatctctcttgggtaggtacctaggagtggaattgctgggtcatn

SEQ ID NO: 95041 - DNA, 390 bp, Homo sapiens
  misc_feature (1)...(390): n = a,t,c or g
tgctgcccgaccaccctggcagctctgtctccaccccacgcggggtcatcatcacaggcagagggttctggcttctcttcccttgggtttccttcttttttttttttttttttttaaaaagaatttcccttttgccccccaattggaggggggggggccaaaatttgttaaataaaagcccccccccccggggtttttaaaattttcttgcctaacccccccaagggggtagaaaaaaaggccccccccacccccccggggcccctggggataaaaatccccacctttttttttttttggggaaaaaaaaaaaattttcaacccccccacgggtggggaaaaaaaaaaacccccttcaccatttaaatgggggggggggggccccaaccn

SEQ ID NO: 95042 - DNA, 381 bp, Homo sapiens
aaatttatagccgtcctagtcattgtaaagtgataactaattttatatataaatgtgtgtgtgtgtgtatgtgtgtatatatacacacacacacagatggggtctcacattgttgctgaggctggagtgcagtggtgcaatcttggcatgtggtaaccttgaactcctgggctcaagtgatcctcctgagtagcggggactacaggctcacattaccacacctggctaatctttacatttttttttttttttttgaacaaaggggttctcttttttttgttaaagctggtttaaaattctgggcctaaagcaaccctcccaagggttgggattacgggcttaacccacaccccccggccttacaggggggatttgtttttt

SEQ ID NO: 95043 - DNA, 400 bp, Homo sapiens
  misc_feature (1)...(400): n = a,t,c or g
gcacagaaatggttctccacacagaaatggttctccacatcagtgtctgggatccactgctagatagaccggggaggggagtgacatggctaatgctaacggcagaactctttctgtatggaggcacagaagccttctcttcctcatttgatgtctagggcccatgttctgaaacagtagagtgcttttcagatcctgagcctaaggccctccttaaaacacatagagtcctatttacaggttcgnttctttcttgcttgctttctgtatttatttactagagacaaggtctcccctctgtcacccagtctggagggaagtgcaggatctcanttcactgcaacctctgcctcccaggctcaagtgatcctcctgcctcagcctcccaagtagctgggag

SEQ ID NO: 95044 - DNA, 398 bp, Homo sapiens
  misc_feature (1)...(398): n = a,t,c or g
tgtgtgcctgtggtcccagctactcgggaggctaacgtgggagaatggctcanagtctgggtcgttaaggctgtagagagctgagattgtgccactgtactccagcctaggcaacagagtgagacccccatctcaaaaaatgtatatatattatgaacaacttcatgctcatacatttggcaacttagcagaaatggacaaattagttgaaagatacaaagtattatcaaagttcacttaagaagaaatagctgaatagccctgtatcaattaaagaaagggaattttgctgttataagccttccccaaaaggaaactctaggcccagatagttttactggtggattctacatctttaaggaagaattaatgccaattctacaaagacttttctggaa

SEQ ID NO: 95045 - DNA, 396 bp, Homo sapiens
tcctacgaaggccgcttcgaggatgatcgctccgacagctcctccagcttactgtcccttaagttcaggtcggaggagcggccggtgaagaagcgcaaggtgcagagctgccacctgcagaagaagcagctgcggctgctggaggccatggtggaggagcagcgccggctgagccgcgccgtggaggagacctgccgcgaggtgcgccgcgtgctggaccagcagcacatcctgcaggtgcagagcctgcagctgcaggagcgcatgatgagtctgctggagaggatcatcaccaagtccagcgtctatgccagcaggcggcggcggcggcggggccgggcggctggtggtactgctcaggccacccaaggcaggccactcaggccaggcgggcag

SEQ ID NO: 95046 - DNA, 400 bp, Homo sapiens
  misc_feature (1)...(400): n = a,t,c or g
gcatggtggcacccatctgtagtcctaactgctcgggaggctgaggtgggaggattgcttgagtccgggagttcaaggctgcagtgagttgtgatcacaccattgcagtccagccaggttgacagaatgagaccctgtctcttaaaaaaaaaaaaaaaaaaaaaaanttccgggggatgtttttttggtttaaaaaataaaataaaataaaaatgggcctcctttaaaaaaaaaaaaaaaaaaaaaaaaaaaaaaaaaaaaaaaaaaaaaaaaaaaaaaaaaaaaaaaaaaaaaaaaaaaaaaaaaaaaaaaggggggggggccccttaaaaaaaaaaaatttttttccgggggggggggaaaagtttttttttttttttggggcccaaaaaaaaagcgc

SEQ ID NO: 95047 - DNA, 399 bp, Homo sapiens
taatatgtttaataataatattctgcatttttctttgatccattagttattttggagtgttgaaagtttatcatatatttgtgaatttctccaatttgttcctgttactgatttctaatttcactacattttggtcagagagcatagcttttaaaattttaattcttttaaaattatgagccactgcacctggcctgaacatctttcatgttcttattttccatctgtatattatctttggtaaaatgtctgttcgtgtcttttgcacattttctagttggattttttttttaactgttcagttttgagatttctttatattttctagagtgtactccttgttaggcacgtggttggattttctcccgctcgctctataactttgaatgattttaacag

SEQ ID NO: 95048 - DNA, 401 bp, Homo sapiens
ctgggaggtggaggctgatgtgagccaagatcacacccactgcatgccagtctgggcgacagagggagaccctgtctaaaaaaacaaagtgtgatacaggtgaaatgacagaattacagacagctaggtcaatgggacagaatagaaagtacagtaatagacccatgcaaatatggcaaattgatttttgaccaaagtgcaaaggcaactgaatggagaaaggattcctagaatcatcagacctcttgtggaaagagagctttacaagagtaaaagccctggaagaaatcacaaagagaaaggtcaacagccttgccagtataagcgttaaaacggatgtgcatgttataaaagtgtaactcaaaaaaaaaaaaaaaaaaagggggggccgttttaaagaa

SEQ ID NO: 95049 - DNA, 425 bp, Homo sapiens
taaagtgcagtgatgtgatctcacctctctgcattctctgatgcccggctaattgaaacagcttttctagagacagggcctccctatgttgcccaggctgatcttgaactcctggcctcaagtggtcctcctgcctggcctcccaaagtgatggggttacagacatgagccatcacagccagctgggacattttcttggaagtacagtttctgagtcacagcatgtatcattttgctagattactgccagatttcctaccctagggattgtgccattttgcattcctgccagcaatgcccagaagtgttcaggtctgatcttaaagtatcttactcatgaggccttctcaaacatcacatctaaagaaaccccacactgggccgggcgcaatggctcacgcctgtaatcccagcactgtgggagg

SEQ ID NO: 95050 - DNA, 419 bp, Homo sapiens
ataaaactagattctaaaaatcatttgattaaacgcaactccacactttctacttctcttcttttagaaccacactgtatttctgctttttttttttttttttttttttgggaaaaaaaatttttttttcccccccgggggggggggggggggaaacaaatttgggttaaaggaaactttttctttgggggtaaaaaaaatttttttgttttaccccccaggggggggggaaaaaagggggcccccccccttccccctttttttttttttttgtaaaaaaaaggggaattttccttatgggggcgggggggttttaaattttgtttttagggggaccccccccttttggcccccaaaggggggggataaagggggggacccaccccccccccccttttttttttttttaaggggaaaat

SEQ ID NO: 95051 - DNA, 416 bp, Homo sapiens
tgccatacgaactttttatgtatgtcttttccacccgccatctcccatcaccccctgatgcccccccaccccgtgtctcgctctgtcgcccaggctggagtgtagtggtgtgatcttggcagaggttgagtgagctgagatcgtgtcattgcactccagcctggatgacagagcgagactctatctcacaactaataagaaaaaaaaaaaaattaataaaaataaaaaaaaaaaaaaataaaaataaatcagtaattttcttggggggggggtcttaaaataaaattatatttatccggcgggctttgagtttaatttttttattttagtggggcccattataatactgcgggcggggatatataaacagtgcggggggaaaaacatgggttccacccatattattttctcggccc

SEQ ID NO: 95052 - DNA, 398 bp, Homo sapiens
  misc_feature (1)...(398): n = a,t,c or g
attccgatgaaaggactggcccattgatttgcttttgggaggtgatctctaagcctttgaaatgtcctgcctgaagagtgtctttatttagcagggggccttgggccacactgtatagntcattcttttttttttttttttttttaaaaaaaaaaaaaaaaggggttttatttttgggcctaggggggttaaaaactttgggcctaaaaaaatttttcacctttacctttcaaaaggggggggattatgggggaggatccttggccccccccaaaacgggttttttttttttttttttttttttggggggggttttttttttttttcccccggcggggggggagggggggaattttggtttattgaacccccggccttttattttaaggggattttcg

SEQ ID NO: 95053 - DNA, 559 bp, Homo sapiens; identical to SEQ ID NO: 94631
  misc_feature (1)...(559): n = a,t,c or g

SEQ ID NO: 95054 - DNA, 391 bp, Homo sapiens
caagatttcaccgtgttagccaggatggtctcgatctcctgacctcgtgatctacccgccttggcctcccaaagtgctggattacaggcttgagccaccatgcccagccaaaacttgtttaatcctaaatgggtcctgttaagtattcctttgttatttgtcatgctttaaggcccaggaaaggccttcgcaaaactcttggggggcttttgttacattatagcctttgtataaagtcactggctcttttagcttttaatatttaacttaatcacccagtcagtactgaaacagttgttatgaagccctgcattagtgagacctgacctgccacacccctacacaggatcctaagacagactgttaaaggcaggtccccagagtggcactg

SEQ ID NO: 95055 - DNA, 397 bp, Homo sapiens
  misc_feature (1)...(397): n = a,t,c or g
atggtggccagcctggactcatactcctgggctcaagcaaacctcccgcttcagcctcccagagtgctgggattacaggcgtgagccaccgcactgggctagtaaagtttcttcttaacagtaccgagttgtcactcagcatgtggggctgggggattgggtccaggaccatcaccctcatatcgaaatctgcttacacaagtctgttatataaaatggcatagtgtttgcatataacctacgcacatcctcccttacacttttttatttgagacggggcctttttttgccccccaggctggagtgcagngccataaactcagtttactggaacctttgcctcccagcttcaagcgatcctcctgactcaagccttctgagtagctgggattacagg

SEQ ID NO: 95056 - DNA, 417 bp, Homo sapiens
  misc_feature (1)...(417): n = a,t,c or g
gctgcccaggctggcctcaaactcctgaccttgggatctgcctgcggtggcctgccatggtgctgtgattacaggcgtgagccactgcacccggcctccagtatcctttcttagagaaactggtcggtaatatctttgcgaggttataataagtatcttgggtcatactttccttttctatgacgggatggatgcgaggggggaggatatggaggggcatttatattgctattggacgcaccgacttgcctagagtgtgtgtttctatttcagagattcgcagctggctgcttaaactcccatttcttctgtcttgatcctaccaacagggcgaaaaggaccctttgaagactaggcctgcatcaataacccagatgttttgaaatgtgacagattggacacacggcgaccaaacan

SEQ ID NO: 95057 - DNA, 403 bp, Homo sapiens
catgaacctgggaggcagagcttgcagtgagccgagatcgtgccactgcactccagcctggggaacagagcgaggctccatctcaaaaaaaaaaaaaaaagggtaaatttaaaaaaaaacccttttaaaaaaaaaaaagagggcccgggaggggggcttcgccctttaaacccaaaattttgggggggtgggggggggggaacccccgggggggggaatttaaaaataacccggccaaaaggggaaaaccccctttttaaaaaaaaaaaaaaaaaataaccggggggggggggcccccccctgaatcctaactttttgggggggtgggggaaaaaaatttttttaacctaagggggggggggtggaaggaaccaaaaatgccccccttccactcaaccgggag

SEQ ID NO: 95058 - DNA, 422 bp, Homo sapiens
  misc_feature (1)...(422): n = a,t,c or g
catgaacctgggaggcagagcttgcagtgagccgagatcgtgccactgcactccagcctggggaacagagcgaggctccatctcaaaaaaaaaaaaaaaagggtaacattaaaaaaaaaactttttaaaaaaaaaaaattgggcccggggggggggtttcggccttaaaaccccacctttgggggggggaggggggggggccttcctggaggttgaaagataaaaacatcccggcccaatgggggaaaccccctctttttctaaaaaaaaaaaaattaggccgggggggggggccccgccttatatccttatttattgggaagggtgggcaaaaaaaattgttgaacctaggaagggggagtgttgaaggacctaaaattgctcctttgtctttactcggggcaaaaaaggagaactcaatn

SEQ ID NO: 95059 - DNA, 427 bp, Homo sapiens
  misc_feature (1)...(427): n = a,t,c or g
cccacgcgtncgcggacgcgtgggctagtttttgacaaaacagagtttaaaccaccaaagataaaaaaaaaaaaaaaggcccgggcctttccttaggggtaaccggtccattttaaaaaaaaaagctacctttccaaaaaacttgtttgcccccaacccaggaccccccaaattcataaaaaaagttcttagcgatctacaaaaaaacttaaacccccccccaaggatggggggaaactttaccccttccctgttaaaataaaacaaatcttcgaaacagcaaattaccagggattttcgggacttgacctcacctttggatcaaggggatctgtaaaaaatttacaaaactttttacccaaaaacaacagaatatacattctcctcagcaccccatggtttttactttaatttgatcacaaaattg

SEQ ID NO: 95060 - DNA, 377 bp, Homo sapiens
ccacctgccttggcctcccaaagtgctagattgcaggcgtgagccaccacgcctggcctactttttttttttttaaaagggggggattcccccccccaaaccaattaagggggggctggccctggaggggaaattttttataggccctgttggaaaaaaaaaacccccccccctttttttggaaaccccggggggcccaagggggggaaccctttgcccccccaacaggggtttggggggggggttttcaaccccttaaaagggggttcccccttggggttttaaaaaaaaattggggggccggggggaggggccctcccacaactttaaaaaaagggcggctactggaaaaaaaaaaaaagggggggcgaacaaag

SEQ ID NO: 95061 - DNA, 410 bp, Homo sapiens
tagatactcagtacatgcttattaactagacaggtgaatgcccaggtttctaaagttttttttttttttttttaaaaaaaccaagttttgtcccttccgggtttttaaattttgcggcggggggggaaggttttgaaaagggctttaaactttttttttgggttaacaaaaccccaaaaaggagtggtggaccagctccccccttaggagggaaaatcctacttgtgggaggttacctttgataaaagtaaatgaccgatttgggccctcaaaaaaaaaaaaatttgggggggggggagggttaaaaaggggggggagttaacaaaaggccaccttgtttgttgcaaacggccccaagggggaaggcggcccatgaggctcgctggataaaaaaaagctcaaccgggacg

SEQ ID NO: 95062 - DNA, 400 bp, Homo sapiens
  misc_feature (1)...(400): n = a,t,c or g
ttctctgggactgaaaaatattaattaataaaatgataaatcatattctgattttatttggtatttagaaaattgggatctgttttcttgcattttaacttaagcatgcatataggattggaatataaaaccagttttaatttcaaatgtaatgactggactgatgtccatgattattaccttactgctccaacttttcttattataactttttttttttaaggggaacttactttttttgggggtaaattccaccaaagagtagacccttctttccaggggtcccttgggaggggccgccaattttttttgttaacaaaaacagaatatcacatttttttcctgataaaggtttttaattcaaagactgagggggctggacttgctacctgaataaaan

SEQ ID NO: 95063 - DNA, 437 bp, Homo sapiens
  misc_feature (1)...(437): n = a,t,c or g
nnnnnagtttgttagaatggcttaaagtaaatgcattgtaagaaatcatcatggaatcaatcaataggtttgacgtaataacattttaaaatttctgtttataatgttatctcatgagcaaaatcaacagacaagcatcaagctgggaaatgtttgaaaccaatatgttggagaaaaaatattaatattcctaatatataaagaatgcatacaaatcaataagaaaaacattaagacccaaaatagatacccaggtaaaggacaaacaaatctctgaagagggaatgcaaatggcaaatcagcatatgatacaatgtccagccctccttggttttgaacaaaatgcaaattgaaatagcagaaggacatcatttgccctatcaaattaacaaagattctaaaatgatggtcgaagaaaggcggcagtgaagtataat

SEQ ID NO: 95064 - DNA, 433 bp, Homo sapiens
atctttgatctctagcatcacacatctccacatacggactaaggagcaggggtgctttctagtgttccccaggttctagtgactagccacaaagttccccattcagtgaccactgcagttatcaaaggttatttttgcacttagtaaaggtcagtacctacagattacagaaaattaggaaaatacataagtcacccggaaataacgagtattttggcggcttttttcttttcttttcttttctttttttttttgagacggggtttaattttgtaccccaggcaggagtgcagggacaggatcttggttaactgcaacctctgcctctggggttcaagggattttcctgcctcagcctcccagaactttttttttttttttttttttgagggtgtggggggggtttattcaaaaaaaaaaattcctttttgtg

SEQ ID NO: 95065 - DNA, 430 bp, Homo sapiens
cggacgcgtgggtcgcccacgcgtacgacttcatagaatgaagttaatttaagggagagctttctagaagggatgaattttgagccacagatggaagaaaaaggtgagcacaaattgatccatgctgtagctggaagtaacaagttcagttttgggaaaacatgcagatctaattaaatgattcaaacaagcaaaatgaattaacaaataaagcctcattttaatgacttctaatggaattcattttatttattttttatttttattattattatttttttttttttgagacagggtctcagcctgccacccaggctggagagcaatgtcttgatcatattttacgtgagctctaacttcccaggttaaagcaatcttacctaagcctttcaagtagctgaaactataggcacactgccatcatgcctgg

SEQ ID NO: 95066 - DNA, 494 bp, Homo sapiens
  misc_feature (1)...(494): n = a,t,c or g
ggcccgtgccaatggagcccntcgccagttgaatgtcgctcgaatgacccgcccgacccacgcgtccgatttcacaattagaagcacaccgattaattttgcctattactagaggcttgggggagtgtggngattttgttttttctttaatactctgaatttttacaaatattacagatgtgagccactgtgcccagccaaacataaggattattattccctgaactagacaatgagcctcttacaatcgaacctgtgactaatgtatctagtatcttgctcagtaaatatttgccgaatgactgaatccctaaggactagttatttatatttaaatggggccaggtgcggnggctcacgcctgtaatcccagcactttgggaagccaaggtgggtggatcaccaggtcaaaaattccagaacaccccggccacattgtggaacccccgctcttattaaaaaacaaaaatgtgcgggctggaagcgccttgaan

SEQ ID NO: 95067 - DNA, 493 bp, Homo sapiens
  misc_feature (1)...(493): n = a,t,c or g
cgcgcccttcgagcccnctcccattngaaccgccctcgcaatncccgggncgacccacgcgtncggctagatatgataccaggagaactgcttgaacctgggaggcggaggttgcagtgagccaagatcatgccactgcactctatcctgggtgagagagtgagactccgtctcaaaaagaaaaaggtatttgtgtttcattattaataccaagttttactttgaggtaggcagttatggttatacaaaccttttccttgtttttcgctaaaattccaaagatagcttgagggcctggtaccttcatgtcattgtaaggagacagagaaaggacagagagaattaacacctagtataataatatattttgactgggtctcccaaccccagaaagtcctggaacagacagtgtatattctcctcagagaaacacttgcccacagcctgctctgacacagagttggagaagaaaggttctaaaggtggattgctt

SEQ ID NO: 95068 - DNA, 390 bp, Homo sapiens
tatagaccaagagagagagagattgatggagggagatagggagagagataccgagacagacgcagagaaagatatggggagggaggaaatagataccgggagagagagagactgaggggaatggagagagagacggaaacggagagacagaatgacatagatgccaagagagagggagagagaaaatctgaattccttatacagagagacatatagagactttgagacagagtgggtgatggacagagagagacagagattgaaacggaggttgttgtgagccgtgatcgtgccatcgcactccagcctgggcagcaggagaaaaactccgtttcaaaaaaaaagatgaagagagggaaggagaacgggagagagatacttatatactgg

SEQ ID NO: 95069 - DNA, 453 bp, Homo sapiens
caaatgtggttcctcgaccttggacttctcagcctccataactgtaagaaatgaattccttttcttataaaaataatcttttggggacagtctcactctgtcacccaggcttgcagtgcagtgggtctatcttggctcactgtaacctccacctcctgagctaaaatgattctcccacctcagcctcccaagtaatacattatcttcttttttttttttttttttttgggaaaaaagtttctttttgcccccagggtggaggggaagggcccccttttggattactagaaatttttgctcccgggttaatgccttttttttgtctaaaccccccaaaggggtgggtttggcggccccccccaccatgcccaagttattttttgttttttttataaaaagagggttttccccgggtgaacccagaggggtttcattccctgagcctgggacccg

SEQ ID NO: 95070 - DNA, 404 bp, Homo sapiens
aaaagtctttctgccccttgttgtatagatagagctaccacccccacccaactcccgatttttctagaatgaagactgtatagagaccgctcaggacaataaaagaatgaacacaaaaaaaaaaaaaaaaaaaaaaaaaaaaaaaaaaaaaaaaaaaaaaaaaaaaaaaaaaaaaaaaaaaaaaaaaaaaaaaaaggggggggggggtttttaaaaaaaaataatttttcgcggggggggggaaaataatttttttttttaagggggaaaaaaaaataaaaatgggggggggttttaaaaacaggggggggggaaaaaaaccgggggccaacaaaaattaggggggggaaaaaacccttttttggagggggggaaaaaaaacaaacaacgggcctcttttatgt

SEQ ID NO: 95071 - DNA, 482 bp, Homo sapiens
  misc_feature (1)...(482): n = a,t,c or g
aggggnttcgggnttnnnnanncctggggacctaagtacatgcaangnnccggaannnngggnngacccacgcgtgcggagtgggctagtttctggtttttagtgattatgaataaagttactaaatacatttgngtacaggtttttgtgggaatacaagtttttatttgacttggatacatacttaggagggggattactggatcatatggtaattatatgtttaactttaaaagatactgccagaattttccaaagtggctgtaccattttatatttccaccagcaatatattcaaggtctagctgactcacattcttggcagtatttggtactgttagatttttatttgtttgttttgtttttagccactctagtaggtatgtcatcatatcttatagtagtgttagtttgcatttccctaatgacgaataatggtgaacatattttcatgtatttatttgccatctgtcttttttgat

SEQ ID NO: 95072 - DNA, 400 bp, Homo sapiens
ctataacaaaaaggggcaaggtgtagcaccaagatatgatgtagacactgcagcaaattttccaaaagagctagctaagatcattgatgaaggtggctatactaaacaacagagtttcaatatagactacacagccttatattggaagaagacaccatgtaaaagttatagctggagataaatccatgcctggcatcgaaggacaggctgacttttgttagtgggcaatgtagtgggtgactttaagttgaagccagtgctcattcactgttccaaaaatcctagggtctttgagaattatactaaatctactcttcctgtgctctgtaaatggaacagcaaagcctggataacagcacatctgtttacagcatgggttgctgaatattttgagcccact

SEQ ID NO: 95073 - DNA, 481 bp, Homo sapiens
  misc_feature (1)...(481): n = a,t,c or g
taatgggtacctggctgcccgnagnnnnccngnnnnggaanncccgggncgacccacgcgnncgaactgttgatctcacttgtttaaaattaccatttaaagctctgccttgtccgcagctgatttgggtagaacagttttggcacacatcaagtggaaagtttgctcaactctaacatttcagtcagaattatgtaagctgaaccagttgagatatgtatgttgctggctattatttctgctgttaatcatcaatactcttcagttagggcacagataagatgcattattttctctcaaattgatgggggaggccttcagctttgggcttcatcttcagcattatctcatcccttctttttttttttttttttttttgggggcgggggagactcccctctaaaaaaaaaaaaaaaaaaaaaatcgattgttttgtgggggggggggggtcccccctataattattatcttttgggggggg

SEQ ID NO: 95074 - DNA, 519 bp, Homo sapiens
  misc_feature (1)...(519): n = a,t,c or g
gttcttcnnnnnagggtggaggggnnnnnnnannccttgagnactgacgnacctgcncngnnccggaannnnngggncgacccacgcgtncgagggtcnnnnnctcacttgtttaaaattaccattgaaagctctgccttgtccgcagctgatttgggtagaacagttttggcacacatcaagtggaaagtttgctcaactctaacatttcagtcagaattatgtaagctgaaccagttgagatatgtatgttgttggctattatttctgctgttaatcatcaatactcttcagttagggcacagataagatgcattattttctctcaaattgatgggtgtggtcttcagctttgggcttcatcttcagcattatctcatcccttctttttttttttttttttttttggggccggggggaacctccttttaaaaaaaaaaaaaaaaaaaaattccttttttttttgggggggggggggcccccccccttaacccaaacctttggggggggggggggggc

SEQ ID NO: 95075 - DNA, 502 bp, Homo sapiens
  misc_feature (1)...(502): n = a,t,c or g
ggaggttgcccggngnnnccaaaacctttgaggcatcgcagatgcagcgaanggcannnngggnngacccacgcgttcgtggggtttcactatgttggccaggctggtctcaaactcctgacctcgtgatccgcctgccttggccttgcaaaatgctgggattactggactcaaacaatcctacttcctcagcctcctgagtagctgggattacaagcacaaaccaccatgtgcacctggctacctcaaaggttttcttcctagaaaactaatatctagccttgtatgtattttagtaatcctatcaagggacaagtgtcttgactcaacccccatccctgattcctaggcactcttctcctggggtctctgtccagctattccaaaagaaaacctgcagcatggatgcctcctgactccaagtatttcaggctactctgtcacctgggatggagtgcagtggcgtgatcacggctcactgtaaccttgacctcccaggctn

SEQ ID NO: 95076 - DNA, 492 bp, Homo sapiens
  misc_feature (1)...(492): n = a,t,c or g
ccactgaatggcattgangatgctnngcagcngcnccgnnnnnnaannnccgggncgacccacgcgtncnaaaaaatgatatttaagctgaaccttgaagaataaataagaggttgccaaaaggaaaatggtgagaaaggggtttgaggcagagagtactatttgcaaagccctaaggtatgaagaaattgtctgttcaagaaacactgagtttgttcatggttggctgtaagaaaacagaggccagatcatgaagggctttggaaattctgtggaaaagcttgaacataactagaagttctatgagggatgactgttgtatagatttgagtagctcgctgctggttttattgtattccagcaatgagtttccaaagaaattgtgaaggcttggccgggcacagtggctcacgcctgtaatcccagcactttgggaggtcgaggcgggtggatcacgaggtcaggggatcgagaccatcctggctaacatgg

SEQ ID NO: 95077 - DNA, 440 bp, Homo sapiens
agatggtgtcttactatgtgggccaggctggctttgaactcctgagctcaggtgatcctcctgcttcagtctcccaaagtgttgagattatagggatgagccactggcacctggatttaaattttgatgaagttcattttacctgttttttcttcgttgtttgtgcttttggtttcccatctaggaatgcattgcaaaatccaaggtcatgaagaattgcccctgtgttttcctttaagagttttatagttttagctgttacatttaggtctttgagccattttaaattttatatttgaaatgagatagggatccactttcattttttgtatgtagaaatcttgtcttggcaccatttgttgaagagactattctttctcagtttagtgctcttggcacccttgttgaaaatcagctgatcatagatgtttgtttttttt

SEQ ID NO: 95078 - DNA, 411 bp, Homo sapiens
attagacactccattgagatatgggacataataaataaacttggtaacttttggaactttcactgtcctgtttttgatcttattgggttttttttttttttggaaaacaggtttttgctttgttgcccacccgggggggcagggcccaaactttggttaattgaatttcccccccccaacccggggggggcctcaacctttaccccctgggggggggggatttgggccatgggcccccccagggggttaataataaaaatttttggggaaaaggaggcctactggggggccccaaaagggttgaaaactgaactaaaaagggggtggcctcaacctaagccaactctttggggccaggattcccaacccgcccgggccaaaatagaaagaccatttccttccaaaataaat

SEQ ID NO: 95079 - DNA, 408 bp, Homo sapiens
  misc_feature (1)...(408): n = a,t,c or g
aaagtttacttaaatagtgacccaaaacttcccttatctgtgaaagaaaatggacatccagattcaagaagactaaaggaccccaaataagatcaacataaacacacaccaagacacattataataaaattgtcaaactctcaaagacagtaagagaattttgaaaacaagaaaaaagtgacttgtcgtgtactagggaacacacatcagactatcaacatatttctggcctaagggnnnnnnnnnnnnnnnnngnganacannnnangnnggggaaaaaacaggcgttttcgagaagcagactggtggggagaatcctttaggccaccgggtgggcactggggcatttttttcttaaagacacaggatgatcaccttctttactttattgggaacatggaatttctg

SEQ ID NO: 95080 - DNA, 397 bp, Homo sapiens
tgcagtgagccaagatcataccactgcactccagcctaggtgacagagcgagactccatctgacaaaaaaaaaaaaaaaaaagggtttttttttttggcccctttttttggggggaccaccccctttttttgggccttttttggccgggcttttaaggaccggtgggggggggcccttccccctccgggggcgggacggggaaacctaaaaacgggcccggacctcttatggggccttggggggggagttgcccgggcgggaaaaaaaaacccccgtcctcagccggccaaaaaaaaaaaggggggggcccctccgggattaaaccagggtttccctttgaccttggccgggcccagaaaacagggtttttgcaaagctgcggcctctaaactttcg

SEQ ID NO: 95081 - DNA, 396 bp, Homo sapiens
  misc_feature (1)...(396): n = a,t,c or g
cggacgcgtgggcggacgcgtgggcggacgcgtgggcggacgcgtgggttttttttttgagacaggatcttgctctgttgctcaggttggagggaaggggcacgatctcagctcactgcaacactccagcctgagcaacagagcagactccatcttggggaaaaaaaaaaaaaaaaaaagggggggcccctttaaagggaccaaattttccgccccggggcgggcaaggaaatattttttttatggggcccccaaatttaattcccgggcccgggtttaaacaccggggggaggggaaaaccccgggggtacccaaattaaatggcttggaaaaaaacccccttttcgccggggggctaaaaaccaaaacaccccgaannnnnnnagggngtggtc

SEQ ID NO: 95082 - DNA, 429 bp, Homo sapiens
  misc_feature (1)...(429): n = a,t,c or g
ttataaaaagtccatgaccagacagattcatagcagaattctaccaaacattcaaagaattggtaccaatccttttgaaacgattccacaagataaagaaggaactcttcccagttaattctatgaacttgtgtcaccctaataccaaaaccaggaaaggacacaaccaaaaaaaaaaaaaaaaaaaaaaaaaaaaaaaggaaaaaaaaaaaaaaaaaaaaaaaattaaaaaagtgggggggaaaaaaaaaatttttttttgggggaattaaaaaatttatattgggggtgttttttaaataattgtttgttttgaaaaaagtggggaaaaaaattaaaaggggggtgaaggaatttngtttttggagtggggtgataaaaaacataggttnnntaannnnnnnagnnattattatatatttntnnnnc

SEQ ID NO: 95083 - DNA, 418 bp, Homo sapiens
  misc_feature (1)...(418): n = a,t,c or g
ttattctcaataatgcaagactgaaaccttttcttttaagataaacaacgagacaaggaattctgcttttgtcacttctattcaacaaaatatgagtactagaatttctagctggagcaattagtcaagaaaaggaaataaaagtcattcaagtaagaaatgaagaaatgagtaaaactcttttttcacaaacaacataatcttaaggtagaaatccctttataaagattccactccctaaaatgtcagtagtaaacaattcatcaaagtcacagaatacaaagtcagtatacacaattagtttcttctgggtgtgtggttcacacctgtaatctcagcactttgggaggcaagggtgggtggatggcttgagctcancagttcaagaccattttgcatgatatggcttggctctgtg

SEQ ID NO: 95084 - DNA, 428 bp, Homo sapiens
  misc_feature (1)...(428): n = a,t,c or g
catgnaaggaaatatttcttttcttttacttttcttttctttctttttttttttttttggaaccggggtttttttttttttcccccaggtggaagggagggggggaaacccgggtcggttaaaaatttgcccccggggaacaaaaaaatttttgggttcaccccccccaagaaccgggattggaaaatggccccccccggggggggtgattttttttggggttaataaaaagggggttccccccttttggggggggggggccagaacccccagccctagggggccccccccccttgggggcccaaaggggcgggaataagggggggcccccccggggcgggccaaaaattttttttttttttcaaaatttccccccccggggggggttaaaaaaagggggaaaccttttggaacccaaacaaaagggg

SEQ ID NO: 95085 - DNA, 436 bp, Homo sapiens
atttctccaaagaagatacaccaatggtcaataagcacatgaaagacgctgtacatcgttagtcattagggaagtgcaaataaaaaccacaacgagataccacctcatgcccactaggatggctatgtgtatatatatttttaattacattttatttcttaaaagaaaaataacaagtgttagtaaagatacagagaaattggaaccctcatacatggcagtggaaatataaaatgctgcagctattgtggaaacaatttggcagctcctcagaatgttaaacacaaaattgtcaaaagaccaagaaaattccactcctaggtatataaaaaaaaaaaaaaaaaaaaaaaaaaaaggggcggccgttttaaaggaataaattttactgacccgggcgtggaaaggattaatttttataatagcgcaccaaaataaa

SEQ ID NO: 95086 - DNA, 371 bp, Homo sapiens
gatggccagcttgcctttgagcagttgcagcagtggctttgctggtgccggaggccaccaggttaaccatggggaataacttaactgtttgcaccccacacagtatagcagaactgctgtcctctaagggagtctctggctaacagacaatcgcccctcaaatatcaagctttgctgctagagggatctacagttaagaacctttacttgcctgaacccagccactttcgcccagaagaaactggagaacctgaacatgattgtgaatgggtagtggtgcaaactggtaaaaggaataataaggatcactgtttatattctctgtaaagttttaattaataaaaagcattttcttaaaaaaaaaaaaaaag

SEQ ID NO: 95087 - DNA, 346 bp, Homo sapiens
caccgaccttacttttcctccaaataaatctaaatgtctcatagacctacatggaaaatgcaaaactcttaaaaggtaatatagaaaaccaactaaatgacgttgggcatggtaatgactttttagatacaacatcaaatgcatggttcattaaaaaattgataagttggacttcattataaataaaaatgtctgctctggaaaagtcactgtcaagagaatgaaaagataaaccacagaccgggacaaaatatcctcaaagggcatttctgataaaagactgttgtgcaaaatatacataaaaatccttacaactcaacaataagttaaaaaaaaaaaaaaaagg

SEQ ID NO: 95088 - DNA, 433 bp, Homo sapiens
cttagaagaacaactaaatttgttcctcattgtttcttattccctaagcagagaaaaaaataaaaagaaatagagtagcttgtatgcattttttaacactcttatggtagaaaattgggaaatttagaaacaaaataactttgggttctatttaatagatttggattttctctgtttaacttaaatatgataaccagttgtgtgtgtgtgtgtgtgtgtgtatgtgtgtatgtgtgtgtttgagacacagtctctgttgcccgggctggaatgcaatagcacaatcatagctcattgcagctttgaactcctgggctcaagcaggtgtcttgtcttaacctctcaagtagctgggactacaggcacacgcccaactaattttttttttttttaatttttacctcgaaagagggggggtttcactgtgctgccc

SEQ ID NO: 95089 - DNA, 417 bp, Homo sapiens
cagagattagttcatgaggtttaagggaaaaaagctactcctgtaacataaaaatacaacgtgaagcagcaagtgctaatgtagaaactatggcaagttattgagaagatctagctaaaatcatcaatgaaggtagctacactaaaatcacagattttcaatgtagatgaagtagccttagaagaagatgccaactaggactttcatagttagagagcggaagtccatacctggcttcaaagcttcaaaggataggctgattctatttttaggtctaatgcccctggtaacattaagtggaaaccagtgctaatttaccattccacaaatcctagggcctttaagaatgatgctaaatctattctgcttgtgctctataaattgaacagtaaagcatggaggatagcacatctgttt

SEQ ID NO: 95090 - DNA, 415 bp, Homo sapiens
  misc_feature (1)...(415): n = a,t,c or g
cagagaggttcatccacatacctcttccccaactttgtcacaaattttccagtcatgcttcttccagagtgcctgaccatccagccaagccactggccacagccaatgaatcagtatataatcacatatctggccatttctccttccatgcaaagtgcacaactaggtgcactgctcaaagttctgcttactgggaagattcctcttcactgctgtccttcaggggtgtcctagaaaggggggctgtagtgctccagttgtccactttnnnnnnnnnnnnnnnnnnnnnnnnnnnnnnnnnnnnnnnnnnnnnnnnnnnnnnnnnnnnnnnnnnnnnnnnnnnaaaaagacctgtactttaaataattgctttgctgagatgatgttaatgtgtagctttgccccagccactttg

SEQ ID NO: 95091 - DNA, 401 bp, Homo sapiens
cccgccttggcctcccaaagtgctaggattacaggcggcagccaccacacctggcctgcactgattttaaagttggaaagaacagaggccccagtgattagctttaggacggaaaccagtaaatagaaataaaaacacacaaaaatatatacatatatatacctacacacatctatacctacaaatgtttatatatgtatatacacacatatacacacacctgtataatatacacatattatatatattatttatttatttaaggttttggtctttggttttttgagacggagtctcactttgttgcccaggctggagtgccatggcgtgaccatagctcaatgcagcctcgacctccctacaaacaactaacctgccactaatagttatgtcatccctct

SEQ ID NO: 95092 - DNA, 427 bp, Homo sapiens
tcgttgaggtagagacagaagcagagacttaggcttagacagaagcagagggagacagagacagaggcagagacagaggcagagagagacagaggtatagacagaggcaggtgcagcgacaggggcggagacagagacagaggcttagacataggcagtgacagagacagatagacaggctgaggcagagacagaggctgagagagacagaggcagaggcagagacagagacagaggcagagacagaggcagagacagagagagacagaggctgaggcagagacagaggtagagagagaggcagaggcatagacagaggctgagagagacaggcagaggcagagacagagagacagaggcagacgcagagacagagagacagacagaggcttagacagaggctgagacataatcttagacagaggct

SEQ ID NO: 95093 - DNA, 421 bp, Homo sapiens
  misc_feature (1)...(421): n = a,t,c or g
ggattacaggtgtgagccaccgtgcctggctacccagctagtttttaaaattttttgttgttgttgagatggagtctcactctgttgcccaggctggtctcaaacttctgggctcaagcgatcctctcaccttgatctcccaaagtgctgggattataggcatgagccccacacacttggctttttttcaatttttttcaattttttttttttttttttttttttgggaaaggttgaaccctaaacccgggggctaaaaaaatactccggcctaagtttcccaggggccaaaaattatggcccccattttcttacccaaatttttttagggggggcaaaaaatgggggattccccccacaaaaaaaaataacaaaattaaaaaaaaaaaaaaaaaaaggggggggggcgcccttttaaaan

SEQ ID NO: 95094 - DNA, 406 bp, Homo sapiens
attgaatttgcccagatccaccagaggaatcattatctatggcagctatagccttacaaaatgtgtttcttaagtagtaagacttgaaagtcaaaactaccccttggtccatgggctgcagaatcgatgtgacagcagacatgaaaaccacaggaatctccttgtgcatctccatcagagctcttgggtgactgggtgcgttggcaataagcagtaacattttgaaaggactcttcttcctaagcaataggtctcaacagtgggcttaaaaaatttaggaaaccatgctgtgaacagatatgctgtcaaccaggttttgttgttgcatttctaaaacacaggaagagtagatttagtataactcttaagggacccaggatctttggaatggtaaatggagattggt

SEQ ID NO: 95095 - DNA, 409 bp, Homo sapiens
  misc_feature (1)...(409): n = a,t,c or g
cctcccgggttcaagccattctgcctcagcctgccgagtagctggaattataggcacccgccaccacgcctggctgattttttgtatttttaggggggacgaggtttcaccatgttggccangcngnttncnaacacctaacatcgagagaaacacatgcctatgctttgcaaataaactgtggagccaaggaagggggaagaattctggacatgtgtccccaccaggctaacaaactatttccccccccctctcacaaaaggtaggaaaaacagccgggcgccccgcccagccccactttttttcttcactcgaaaggttgagtccccacccggcgaccccgtggggaactcgcttctcgcaaaaatggaaaaaaatggccgcgtgggggtgcccttccttttttata

SEQ ID NO: 95096 - DNA, 416 bp, Homo sapiens
tgagccgagatcgcaccactgcactccagcctggcaactgagcaagactctgtctcaaaaaaaaaaaaaaaaaaaaaggaaaaggatggtttttaccgggcggaaaaaggggcttttttttggaaacccaaaaatttgggaaccctgagccgggagtatcctttggggccgggaattaaaaaccggttggcacaaaaaagaaaaccccttttttacaaaaaaaggttttaaaacattaacccaggcgggggggcccaccccgggggcccaaaatcctgggaacgcggggggggaagaaaaatttaaaccccggtgggtaaatacgccagcaaccctgaatatcacatttgcattccacccggaaaaagaaaccagaacccctttttacaaaaaaaaaaaaaaaggcgcgccgatct

SEQ ID NO: 95097 - DNA, 421 bp, Homo sapiens
aattgtacctcaattaaaacaattagcaccatagaaggccaggagttggggggcgtggctatagtcccagctactcgggaggctgaggaaggagggtcacttgggcccaggagttcgaggctgcagtgaactatgattgtgccactggaaccctgcctgggaaacagagcaagacactgtctcagattaattataaagaaaagccggagctattaaaactggcccctaccctttctacctcatcgaattaataaaaaataggggggggggctttaaaaatgctcaaactttctggcggggattgggacattttctttttttttttggggctcccaaaatgctgctggcggggggggattttaaccccttagcaggagagaaaccacggctctcccacaatttattcctcctctaaccccct

SEQ ID NO: 95098 - DNA, 391 bp, Homo sapiens
aatatattcaaagaaattatgtcagaaaacttcccaagccttatgtcagaaaacttcccaagcctggggaaggagatagaaagccaaatccaggaagcccaaagaacaccaaataagatgaacccgaaaagatccacaccaaagcaagttataatcaaattctaagttagagagagttgaaaacagcaagggaaaagtgaattgtcatatgtaagggaaccaccctaaggccagcagtggatttcacagcagaaaccttacagatcagaagagagtaggatgatacattcaaaaccctgaaaggaaaaaaaaaaaaaaaaaaaactttgccagcaaagcttactttccccagcattcttgtttttaaaaaaacaaggggaggatcaagatt

SEQ ID NO: 95099 - DNA, 419 bp, Homo sapiens
cccacgcgtccgtagcagagcaacaaatgtaatttcaaaatataaacagcacaaaaaaaaaaacacctcaaaatgaattaaagacttaaatgtaaaacctgaacccataaaactcctaggaaaaaacaacaggggaaaagctccttgacattgagcttggcaatgattttttggattcgacccaaaaacccgggcaccaaaagcaaacttaaccccatgaaactacttcaaactaaaaagtttccttacggcaaaggaaacattcaactaaaaccccaacaaaaaggggggcaaaccatatatctgatagggggttaatatccaaaatatataaggaacttacaattcagtagcaaaaaaacaacctgatttcaaaataggcaaaggacctgaaaagacatttttccaaagaagacgta

SEQ ID NO: 95100 - DNA, 410 bp, Homo sapiens
  misc_feature (1)...(410): n = a,t,c or g
agaaatgaggacacccgcctttctttttaagcattgctgggaagaccacacacctctgagacagaaggtggggctagcgcatctctgggcattctgtacacccccaacaaaaactgatttatttccttctttttccttgctcacaaaaaattggagaaggctttattttaacattctgcctgagttactttattttatttatttatttatttattttttggagacagagtcttgctgtgtcacccaagctggagtgcaggggtgcgatctcatctcactgcaacctcctcctgctgaggtcaggggattctcctgccttcacctcctgagaggcatggtggnggacacctgaacatcccgctactctgcaggctgacgcacagagaaacacttcatcctggagagacaag

SEQ ID NO: 95101 - DNA, 397 bp, Homo sapiens
cggaggttgcagtgagctgagatcctgccattgcactccagcctggacaacagagtgagactctgtctcaaaaaaagaaaaaaagaaagaaaatatgcattgaatgtaatactttaaaaagtcacaactatcatttgtctgtgggggaaaataccatagtccagttagttgtacctgtctctagtggtctttgggcaggagtttgaagagatcattggaaagacatcagaagaatttaaatgacccatatcccatctttcagaatgaaactaatattcattaaaaaaaattgtatgctctggctgagaatttatacagccttctaaagaggagacaggtatgcttttggtttccagtgatcagtctgtgaacttggggcattactcagtggatctgg

SEQ ID NO: 95102 - DNA, 385 bp, Homo sapiens
  misc_feature (1)...(385): n = a,t,c or g
aaaaaagcttttctctcaagctttgaacatttttgaaggcatttcatactttttttttttgggtatttaaaggaaaaaaaacaaaaccctattttgctggggggggggccacatgtaaacataatgggttaaaaggttctcaaagggcttaaaaacaaggagggctgaccaaattggntaattaattaattaattaattaattttaaaacggggttttttgttgccccccaagtggaagggcaggggcccaatttgggataactgcaccctccacctggggggttaaaggggttctcccccctcaccctcctaagaagctggaaaaacaggctccccccacaacacccattttatttttgtttttttagaaaaaacaaagttccg

SEQ ID NO: 95103 - DNA, 388 bp, Homo sapiens
cggacgcgtgggacggagagagatacagttttagagagagacggagagagagagacagagggagagagggatacagatggagatacagggagagagagagacatagggagagagagagttaggtttagagagacagagtgagagatggagacagagtgatagacagggagagagagagacagagtgagagagagagactgagggtgagagagactgggagagagatacttatattgtgagggagacagagactgagagagagacagagggagagagggatatagagagggagagagatattgttagagatagatatatggagatagagatagagacattttgagagagtgagagagggatagagagacagcgttagattctgagaaag

SEQ ID NO: 95104 - DNA, 393 bp, Homo sapiens
  misc_feature (1)...(393): n = a,t,c or g
cccacgcgtncgcagatttgcaatggagacaaaacagccctctactagaaggagatgccatccaggatgttcccagctagagtggagttgatgcctggatttaaggcttcaaaggacacgctgactcttttgttaaggcctaatgcagttggtgatgttaacttgaaaccaatgatgatttactattctgaaaatccaagggccctgaagaattatgataaaacacagctctgcctatactctacaaatgggaacaaagcctggatgacagactatcggtttacaaatatggtttactgaatatcttaaacccactgttgacacctactgctcaagaaataagattcctttcaaagtattaccactcactgacaatgcccctggactcaaggg

SEQ ID NO: 95105 - DNA, 416 bp, Homo sapiens
  misc_feature (1)...(416): n = a,t,c or g
cccacgcgtccgggaggctggggcacaggaatcctttgaacttgggaggcagaggacgcagcgagctgaaatcacactactgccccccagcctgggcaacagagcaagactctgtctcgaaaaaaaaaaaaaaagcgggggggccgtactagagaatacaacctaccctgcccgggaagaggaggcttttactcttataacgggcccccaaaattcatttctctggccttacctataacagcgttcaatggaaaaagacctgaccgacccaaactaaacggggtggaacaaaatcccctttgggcaaggggccagaaaaaacaaaaacacccntgagggagggagactctctctgtctcccatcctggaggggaagggaggcatcttgggtcactgaaacctcctactcccaggaa

SEQ ID NO: 95106 - DNA, 419 bp, Homo sapiens
cccacgcgtccggagatggggtttcgccatgctgccccggctggtcttgaactcctgagctcaagtgatctgcccacctcggcctcccaaagtggtggtattacaggcgtgagccaccgcacctggcctatattagcttctaataattattgatggacaaattatgtgccatttggagagatttattttgttctttttaaaaaatatcttgctttggatacttattttgtttattttcatttatttttgtttaataaaataatgtataactattaatttttctcagaattcacttttgccccattccattcatttgtacatatagtattgccgatcttgttctcttaatattttgtaattgaatttttaaattctcctgtgacattctggactatttctgtgtttatttgtggccgagt

SEQ ID NO: 95107 - DNA, 393 bp, Homo sapiens
tgcctgccgctacccctggctaaattttgtattactagtagagatggggttggaccatgctggctagcgacctcgagcggtctggctgacctcaagtgatctgcccgcctcagcctcccaaagtgctgggattacagctgagagccaccatggctggccttgatattttgttcgcctgttttaattttcagaaactttttatttacagagaatttgcaaacatgaaaatgttacaaagaatttctatatactcttcctagattccccaaatgttaatgttttacattttaccacacttagatgatcattctttttgtctacacacacatgcacacatttttttatttttattttattttcgagacagagtttcgctctgtcacccaggctggg

SEQ ID NO: 95108 - DNA, 425 bp, Homo sapiens
ggatgtttgtcactcatccttctacttgcagctagtatataaaacatcttttagaggctccatggctttttttttttttgcttttggggaaggggggttcctttttggcgccccgggggggggggcggggttttttttcggttccttggacccttggccccccagggtaaaaaaatttctccgccccccccccccaagggggggggacttcgggggccccccccccggggggggtaattttgggttttttactaaaaacggggtttccccttgggggcccgggtgggtttggccccccggcctttagggagtggcccttttcaaacccccaagggggggggattacaagggggggccattcccccgggcccaaaatcccattttaaacgggcttcctgaaagagaaactgggctccccttaaaac

SEQ ID NO: 95109 - DNA, 404 bp, Homo sapiens
  misc_feature (1)...(404): n = a,t,c or g
nnacccacgcgtccggtaagagtaacatcagaggactgacactacctgtcttcaagacttactataaagctgcagtaatcaggcagtgtggccttgttgagagcaaacacaaatagacaaaatagactggtggcccagaagtagacccatacaaatgcagtcaaatgatctttgacaaaggagcaaaggcaatccaataaagaactgataataatcttctcaacaagtggtaaaaagctagacatccacgtgccaaaaaaaaaaaaaaaaaaatcaattccgggccctgcctttttgatttacacaaaatttaactcaaacgggaggaaaaatttaagggtcattggcaaaacgtgaaaagttttaaaaaaaaacataaaacaaaactggggggacctgggggg

SEQ ID NO: 95110 - DNA, 449 bp, Homo sapiens
  misc_feature (1)...(449): n = a,t,c or g
catcgattgaccagcctccgacanngcgnggaannccccggctactcgggaggctgggtcatgagagtcgcttgagcccgggaggnagttttttttgtgagccaggatcatgccgctgcattctaggctgggtgagagagagactccggctttctctctctctctataactatatagnaaaacattaataactatattggaaactatggcatctccttggtgcctatcccaatatctattttccctttccctttcctccataggaataaaaccccaacttcattcagaaaggcagttaagtccagctgaaaattcccagtctcccttgaagttcagcataaccattttctagtcaatgatatgtaaatagaaatgtgtgtaggacttccagaaagacctcttaaacgagaggcacactttnttctttttttcttccttcctgctataga

SEQ ID NO: 95111 - DNA, 483 bp, Homo sapiens
  misc_feature (1)...(483): n = a,t,c or g
aggcccgnaaatgaaccatgatgactgtccgcagagccngcanatccggggttttgctatgtagcccaggctggtcttgaactcctgacctcaggtgatccctctgcctcagcttcccaaagcgctgggattacagaacatgagccactgtgcccggcttattgtacagtctttactctcggttttcaccagagaactcaagggctgtgaaaagagcaggacctcaccagctgcacggcggnggtgactggctccatcttgctgtccctcccaatcacacaacatctccccttgaaggctctgcccaggcccggactcccacctttcaagatgtctggatcagtgcaggacctcctccttggccacatcgctctccttggactggttcgttaaccctgttttacccacattttctttttttttctttttctttnttttttttttttncggaaacaaagttttttttttggtgcccaggggggg

SEQ ID NO: 95112 - DNA, 418 bp, Homo sapiens
  misc_feature (1)...(418): n = a,t,c or g
ccgacgcgtgggtttgttatttatactttaagagtaggtgaaatcgagaaatactactctttctgtgcctgacttatttgaactaatatcctctaggttaatccatgtggttgaaaataatacaatttttttttagaggtgaagagtattccactagacatacctaccacattgtctttatttacttattaggggttgagcgttgcacacaacatacaagagcaaactttccttcattgagattatattcattgcggacgcatatttaatagtgcaattgctgtattatatggcagttcgattttaaattttttttgaaaaatctctcttttgttttccaaaatggctggcctcatttacactcataccaatagtatacangcattcccttttcttcacatctttatcaacacttatt

SEQ ID NO: 95113 - DNA, 397 bp, Homo sapiens
cgagatagcacataccaaggccaccacacaccacctgtccaataaggccttcgatacggggtaatcctatttattacctcagaagtttttttcttcgcaggatttttgtgagcgcttttaccagatccagcctagcccctaccccccaattaggagggcactggccccgaacaggcatcacccggctaaatcgcctagaagtgccactgctaaacacattcgtattactcgcatcaggagtatcaatcacctgagctcaccatagtctaatagaaagcaaccgaaaccgaataattcaagcactgcttattacaattttactggggctctattttaccctgctacaagcctcagagtacttcgagtctccctgtaccatttccgacggcatctacgg

SEQ ID NO: 95114 - DNA, 377 bp, Homo sapiens
  misc_feature (1)...(377): n = a,t,c or g
ggcacgagccttgtacttttatgttacagaaagacagcttctttccttaaactgcatgaaccaacctctgttagcttcagacttttattctacagctcccttacctctatcagttttcatagctttaaagagatttagcgccttgctctgggttaggctttagcttaagggaatgggatgactggtttgatcttccttctagaccactcagactgtttccatatcagtaataaggctggttcgttttcttatcattcatatgtccactggagtagcacttttctaaaagttccttccagaacttttcctttgcatttacaaatttgctaactgtttggtgcaagaggcctagcttttggcctgtcttggctttcaan

SEQ ID NO: 95115 - DNA, 387 bp, Homo sapiens
ggcacgagccttgtacttttatgttacagaaagacagcttctttccttaaactgcatgaaccaacctctgttagcttcagacttttattctacagctcccttacctctatcagttttcatagctttaaagagatttagcgccttgctctgggttaggctttagcttaagggaatgtgatgactggtttgatcttccttctagaccactcagactgtttccatatcagtaataaggctggttcgttttcttatcattcatatgtccactggagtagcacttttctaaaagttccttccagaacttttcctttgcatttacaaatttgctaactggttggtgcaagaggcctagcttttggcctgtcttggctttcaacatgctttcct

SEQ ID NO: 95116 - DNA, 388 bp, Homo sapiens
ggcacgagctggagaatctagaagtccacatgcatgcccagagatgtacacatactcagaaatgacccaagaaatcctaagctctcacctctggctgatgtttaggctcatgcaagcctatgttaaaaaagaaaatcccaaatcaataacctacttttacaatttaaagaactagaaaaaaagaagaaactaaacccaaagctagcagaagaaacaaaaaaaaaaagattagggtagatttactcaaaataaagaagggaaaaccattagagggggtaaaaaaaaaaggtgggtttttttaaaggaccaacaaacgggataaacctttacttaaactacccaaaaaaaaggggggggggaggataaaaactttccacaaaacctccgg

SEQ ID NO: 95117 - DNA, 403 bp, Homo sapiens
ggcacgagaatcatatgaaaatatgttcaacgtcatatgtcattcgggaattacaaattaaaacaacaatgaaatagtactacacacctgttagaacgactgcaatccaaaatactgaccacaccaaatgctggcaaggatgaagagagcaagaagtctcatttattgttggtgacaatgcaaaatggtacagcactttggaagagagtctggcagtttcctacaaagctaaaacatagtcttaacatatgatcagcagttgtgctcctgggtatttacccaaacaagtggcaaatttaatgtccacacaaaaacctgcacatgaatgtttttagcaaaataaccccaatgttcatcagtggatgaagaaagaaagaaaatgtgtatatgtatgggtttgaaa

SEQ ID NO: 95118 - DNA, 366 bp, Homo sapiens
ggcacgagagtctccagcctgggcaagagagtgagactctgtctcaagaaaaaagaaaatttattctgaatgttggaggcctgtggccttgtgggaggtgtttgcgtcgtggaggcccatcctgcatgaagagcttggcgctcttctcagggtaatgagtgaattcttgctctatttgttcccatgagagctgattgttaaaaggagcctgccggacagggcagctcatgcctgtaatcccagcactttgggaagccaaagcaggaggactgcttgaggccaatagttcgagaccagcctgggcaacatagtgagaccctgtctctacaaaaaaatttggcacccgacctgtataatttttctatt

SEQ ID NO: 95119 - DNA, 418 bp, Homo sapiens
ggaacagacacagaataagcatgtgacaaaatccaaaaaccatttcctgacaaaagactcaacaagctaggaacaggaagaaacatcttcaacttgacaagtatctgtgaaaaacccaatagctagcatcatactgaagagcagaagactgaaatcagtccgcctaagaccaggagatggtagacaaggatgttcattcccagcatggctatttaacattatattggagggtctagccagggctattaggtaggaaaaacaaaaacaaaaacaaggacaaccagataggaaagaaagaagtaaacctgtctctattcatagaagacataatgttgtatatagaaaatcttaaggaatccacaaaaaaacctattataataataaatgagttcagcaggaaggaagatttcagaccaag

SEQ ID NO: 95120 - DNA, 395 bp, Homo sapiens
ggccttatagtcctggtactttgggaggctgaggcaggaggattgctgggggcaggagtttagaccagcttgggcaacatagtgagaccttatctttacaaaaataaagttaaaaaataagaaggatgaactaacggaagaaacatgggggaaggagtggaaggaaaaaatcctaggtaaggaaacaacatgacaatgttgtctttctcatgacaggctttctcagaaacaaaagaacagtgcaactggaatacagtctgtgaggaggaaggcctttcatgtggaggcaagagagattagtcaaagtccagagatcactcgtatggcaggccttttgaaagattttgctctttttcctaatgacaaagccttgaaggatttagagggccatcatt

SEQ ID NO: 95121 - DNA, 479 bp, Homo sapiens
  misc_feature (1)...(479): n = a,t,c or g
aggctggggcctaggggntttatgaanccacgcttnggacgaggcatgtggcccccaagacccttatctgacaccttatgtgaaaactcagtggattaaagactaaacaagaaataaagggatacaatttctagaagaaaacgggaagaatttatgacattggatttagcagtgatttattggatatgacaccaaagacacgggcaacaaaagtaaaactaagacgacatcaggcttagaaacttctgtgcatcgaaggacacaatcaacctttcccttctgtgcagggaaaaggtaacctgtggaatgtgagaaaatatctgcaaatcatatatctgataaggggttaatatctggaatatatagacaaccaccactcaacagtaaaacaagtcacctcatttaaaaatgagcaagggacttcaacagacacttctctgaagaggatatacagtcagcactctatcgatgggttttgg

SEQ ID NO: 95122 - DNA, 448 bp, Homo sapiens
attggtgcatatatcaataattaatttccttttattggctgagtagtatttactatatggatgtaccacattttgtttatcctttcaactgttgctggacatttgggttgtttccagttttgaggctatataaacaaagacacaaagatttgtatgtaaagcatcgtatggacagccaccttatttctcttggagcagaaagggaccttaaagatgacagaccaaacatcaacttcacagatgatgacacagaaggtgaatctactgaaaagagctaaagaaagacaaatctcttgaggcagatgaagggaatgcaaatattcaaagaccctgcagaaaatcagtcaacaagatgctgtttgtcttggtcttagtgtttgctatctgttgggccccgtttccacattgaccgactcttcttcagctttgtggaggagtggagtgaatc

SEQ ID NO: 95123 - DNA, 472 bp, Homo sapiens
  misc_feature (1)...(472): n = a,t,c or g
cttcgacattcgatgatccactagnccaggggggnggaanncctgaggcaagagaatctcttgaactcaggagacagaggttgcagtgagccaagatcacaccactgcgttccagcctgggcaatagagtgagactccgtctcaaaacaaacaaacaaacaaacacctctttgttttagcactcacttgaacccgggaggcagaggttgcagtgagctgagatcacgccactgctgcactccagcctgggcaacagagtgagactctgtctcaaaaaataaacaaaaaaaaaaagcctccaagctgaaaagcctcctgaactgagtagaaccccaaattcaatagaatttccaaacttggattgactcccttccaaactcaagagacacacccaaactcaagagagaggcccaaactcagtagagttctcaaacttaagggaggttttgtgtttccgagtccacaaaaggcc

SEQ ID NO: 95124 - DNA, 433 bp, Homo sapiens
  misc_feature (1)...(433): n = a,t,c or g
nattgangtaccactacnccagngcggnggaattcctgttttaaagcaacaatgaaccatttcttgattggattgtgatgtgacgaaaagtggattttatacgacaaccggcaatgaccagctcagtggttggaccaagaagacgctccaaggcacttcccaaagccaaacttgcaccaaaaaaggttatggtcactatttggtggtcgtcggctcgtctgatccactgcagctttctgaatgccagtgaaaccattgcctctgaggagtgtactcagcaaattgatgacatgcactgaaaactccagcgcctgcaggcagcattgatcaacagaaaagcccaattcttcttcatgacagcacctgaccacatgtcacacaactcacgctttaaaagttgaacaaattgggctacgaagtttcacctcatctg

SEQ ID NO: 95125 - DNA, 457 bp, Homo sapiens
cgaaaactcgagacctcgtagacactagtccgtgtggtggaattcctgttttccagagtagctggtttcacttttccaccagcaacgcatgagtgatccagtttgtccacagcctcaccagcatttagtgttactactgtttcttactttaatcattctgataggtgggtagtgatagctcactgtgatttttaatttgcatctccccaatgactaatgaacatcttttcatgtgctacttgccatctgtacatggtcgtcagtaaaatgtctgttcatgtcttttgcctactttctaactagactcctttgaaaatttctcatattgtttttaacaatagattttaaaagaatttacagagtaagaatacatttttgagacaatggggaaaatgatacggagtgaaaggtgatattaaagaattaatgctaatttcattatgtgataatagctgag

SEQ ID NO: 95126 - DNA, 445 bp, Homo sapiens
  misc_feature (1)...(445): n = a,t,c or g
ntcgagaccttcgtagaccactatcagtgtggtggaattcgcccgttctcagatctccagctgcatgctgggagaaccactgctctcttcaaagctgtcagacagggacatttaagtctgcagaggttactgctgtctttttgtttgtctgtgccctgcccccagaggtggagcctacagaggcaggcaggtctccttgagctgtggtgggctccacccagttcgagcttcctggctgctttgtttacctaagtgagcctggacaatggagggcacgtctaccccagcctcactgccgccttgcagtttgatctcagactgctgtgctagcaatcagcgagactccgtgggcataggaccctccgagccaggtgcggaatataatctcctggtgccccgtttcctaagcccgtcagaaaagcgcagtatttgggtaggagtgacn

SEQ ID NO: 95127 - DNA, 579 bp, Homo sapiens
tccctaagggcccgctcccgccccggctccgtttctgtctctctgaggaagcccggcgcagcctaaccctcacagggccgcggagagggcgcgccaggcggggatttgcgccaggcccgcggcgcatgctcagtggttggggactgggcgggtaccccgggcggggagcctgactgaacggcggctctgctgattggtcgggctgctcacgccacgcccgttgccttccgatggacagttccttacctgccgggtcggcctccgcagagagtggtggtcttgaaaacccagttttgggagaatacctgccgcgcctcccgcccaaatacccagaggtttcatagccgccatcgctgcggtggaggaggccgcctgttgcgtcccaccccaccagaaagcctaacactgggcctgaagcgtaatcttaaagtggtaggggaaaataccgatctaggcgcagagagcaaaacacctccgttctgggtttaatggggcaggtctgggaggtgaggtatgccgtccgcactcaataatttactttgcagggatccggattttttcttccagttgggttggggg

SEQ ID NO: 95128 - DNA, 490 bp, Homo sapiens
  misc_feature (1)...(490): n = a,t,c or g
gcattccaaaggggaaaaaattttgaaacccctgatgtccntaggacangtcgaggaantcatggaggctccctgtgttgcgcatgctggtcttgaacgcctgggctgatgtgatcctttcacttccacctcccatagtgctgggattatagggatgagttaccatgcctggcctgcatttaagaatatttttatagcaaataagagaaatgtttgacagcttttataagagatataagtaatttgcttcttttattaatctatttgctatgtacataaggacttaaagctgtttaacgtcccttactaacaggctgacaagatactttagctttcatattgttagaatatcccagaataattggtttattttattctattgcattttattctatttatctatttatttttgagacagagtctcgctctgtcgcccatgctggaatgcagtggcgcgatctcgactcactgcaaccttcgcctactgggt

SEQ ID NO: 95129 - DNA, 474 bp, Homo sapiens
  misc_feature (1)...(474): n = a,t,c or g
tttgaatgatgacacnannnaactggtggaattcccctaaactcgttggggtctgtaaacattacctgagaattccccagccgatacggctgctggggcaagaaacttcttgttagaacgttccacctccggcttccccctcgcacctcttttaccgtcccaaccttaggagacgctttttctcccccagaggagaaattatcttttttttttttttttttttttccccccccggggtttttctttgggaaaggggggattcaaaagggggccggggggaccccctcttccccctttttcgggttaatttttaatggtgggggggggttttaaatcccggaatggcccgccccgggagttttccccccctccccgtttcccgggggggggggtgggtgggaaaccggtgggcccccctgggaattttccttcaaagaaaaattatctgggggggaaaaccacccgccgcccggg

SEQ ID NO: 95130 - DNA, 468 bp, Homo sapiens
  misc_feature (1)...(468): n = a,t,c or g
attgttgtcnncnctgtccatgtggtggaattccaggctaaaagctaggcgtcttgtgctagttagccaagttgtgaatgcaaatggaaaggttcttgaaggaaattaaaagtgttattccaatgaacacactaatggtaagagagcgaaatagtcttattgttgctgtggagaaagttttagtggcctgagtaaaagaacaaaccagccacaacattcccttatgccaaagcctagtccagagcaaggccctaactcttttgcattctgttaaggctaagagaggttaagaagctgcagaagaaaagctagaagctggcaaacattggttcctgaggtttaagggaaaaagccgtctccataacataaaagtgcaaggtgaagcaacaagtactgatggagaactacagcaagttacttacccagatttagttaagatagttggtgaaggtgactaccctaaacagt

SEQ ID NO: 95131 - DNA, 478 bp, Homo sapiens
  misc_feature (1)...(478): n = a,t,c or g
tgggnnnaggccncctgagaccctatcgagngcggggaattccggcgtttcaccgtgttggacaggatggtctcgatctcctgacctcatgatctgcctgtctcggcctcccaaagtgctgggattaaaggcatgagtcacagcgcccggccttgactttttattaatagtcattctgactcagttgtgagatggtatctcattgtggttttgatttgcatttctctgatgattagtgatgttcggcattttttcatgttcgttggctgcttcttcgtgtcctttgcctactttttaatggggctatttgcttttttcttgttgatttgtttaagttcttttctggatattagtcctttgtcagatgcataatttgcaaatgttttctcccattctgtagtttgtccatctgcttcgttgatagcttattttgctgtgctgaagctctttaattaggtcccaactgtcagtttttctt

SEQ ID NO: 95132 - DNA, 475 bp, Homo sapiens
  misc_feature (1)...(475): n = a,t,c or g
cgcccccttgagttcgtaggcagtgnggaggaactcgctttttaaaatttttatcaatataagtatttaggccntnnnnctcccactgttcagtactttaattgtattttatgtattcagatagatagtgtttttattaacatttcgttttagaaattctgcaatttgggtttgtagttctccctttacccaataattacttaatatcaaatttttaaatttctgagggtaacagcctctttgttttattacatttatttatttctggttgtcttctattatgatcagataatattgtttttattttttaatttatgaatttattgagatttgctctgagttagttaatatatagccaatttttatgaatttcacttgagaaggtgtattctcctttgggtacaaagtataatatgtatccagaagatctatctttttttttttttttttttttgggttttagaaagggaacttt

SEQ ID NO: 95133 - DNA, 481 bp, Homo sapiens
  misc_feature (1)...(481): n = a,t,c or g
ggagttncncagagttccccccctaaaannncccagtgggacagtaccngcgcggaannaanggaactggcgagaataaatgcttgncatatgtttaaaggtcatttcattgagacaagaaaacgcaacttcagtagcatgcatagtatcatgtttaagtgagggctctagggcatcagaaaacctggtcctccacaatgcttcacccaattcatgtggactgggaattgccttcacttgtctgtgtaatgtagtgagcagtggaaacaaaatcacagattgttatgattaactatctagcagttgttaggattttttttttttttttttttaaaaaaaagtttcctttttgttgcccaggctggggggcaagggggtaatttgggttaaccgaaacctttgcctccgggtttaaaacaatttttgccacccccccgggctaatttttgttttttagaaaaaacagggtttttcctttttg

SEQ ID NO: 95134 - DNA, 462 bp, Homo sapiens
  misc_feature (1)...(462): n = a,t,c or g
ccccccccccccgcccccccnnattgtagaccctattgagngccgtggaannccccagtttaccattccagctggaggcacggatctggggcagcgcagggtgcagtcctggccgggttcggaggagtgggaaggcaaggaccaggagctgcgagtgtctctattccactctgcccggagaaccagggctgcagagagcctgggccgtcccacgctgtcccggcgccatcagccctgccaagcctcagatccttgacaggcggccagattggggggaccagagccgcccaagcagtgggccagggttgtcgagaggctgaaacataagtgctcaccacaacacccagcacctaccaggcctctatacatatttgcctgtctggaaccgggagcttccccagctgaggaccacagtgagagcagagaagacccaggatcgtatttgaaaccataaaagccaca

SEQ ID NO: 95135 - DNA, 437 bp, Homo sapiens
  misc_feature (1)...(437): n = a,t,c or g
tccagtgtggtggaattccataagtgatattggtctgtagttttcttgtgatatatgtctggttttggtatctgggtgatgcctcataactgaagtggaaaatgtcacctctttgtctattttttttaatagtttgcaaataattggtattaatttgtcttcaaaagattggtaggattcagtggtgaagccatttgggcnnnnnnnnnnnnnnnnnnnnnnnnnnnnnnnnnnnnnnnnnnnnnnnnttgttgttatatttaccaatcagtctcttgacttgttatccatctattcagattatctatttattctcaaattagttttggtagtttgtgtctcactaggaatttgtccatttcatctaaattataaaatttggtggtgcacagctatcattgtatccttttataatgctttttatttctggtgctccc

SEQ ID NO: 95136 - DNA, 462 bp, Homo sapiens
  misc_feature (1)...(462): n = a,t,c or g
aactcgatgacttgagaaacctcggnggaannnnnnnnagaccacctgtggncccagctacttgggaagatcatttgagccagggaggaagagattgcagtgagccaagattgcaccactgcactccagcctgggtgagagagtgagaccccacctcaaaaaaaaagaaagaaaaaaagatcagtgactgctaataccgtagagctaaaggagactttagagatcatctcatcaaacctctcatttgatggactggaacagtgaggctgggaggtgagaagcgacattcttaagatcctatagcaagttgagaggaagagctagaactattgttaattttagataataatgatgatcataataacagtgactaatatttattgagcatttattctatcccaggtactgtgctgagttncgcacatgcctttccttgagtaatcttcacactagcactacacc

SEQ ID NO: 95137 - DNA, 487 bp, Homo sapiens
  misc_feature (1)...(487): n = a,t,c or g
tgcgatccggaatgagacctttggaagccgttnnncaagcgatggaaatgcctgcgggcctagctactcatgaggccaaggcatgcagattgattgaacccggatggtgtaggctacagcgaattgtgatctcgccactgcactccagcctgggtgacagagcaagatcttgtctcaattagcactaacaggaagaacgaaagacataccctggaatattcacaccaacactattcaggatagccctaaactggaaagaatctgaatatccttcggctttataacagagagaaattatagactattcattcatacaggggatgactgatcagctttaagaataaacaaaccgtacacaacaatatagatgaatctacaaccttaatgtgcaaaatagttcacatatataaaggacaaaaacaggcanacctactccatggtgttagaaataggggtagagcgtactctcatgctgccaggagggtag

SEQ ID NO: 95138 - DNA, 496 bp, Homo sapiens
  misc_feature (1)...(496): n = a,t,c or g
cccccccccctttgatgacttcctagcagngcggggaattagcgcctctcccgcgacctgggccggcccgcaggatgagcccccggatcacgatcgctggcattttatttaccttcttccattacaaccccaggcgagtctcccgggccccgagaggagggggtgactggtcagggtcatcggtagcggcggcaggggcctgcatagggctgcctcggggcgactagcagaatggccgccagcctcggctgccccagcccccagcgcatggaatgtgccccgggccccaggagctccaggaaccgcgcttgtgagacggagcttcggctgcttggagctagtgagccaccggccacggcagggatttgagcagaacttgggggcagagggatgagatggtgcatcccttgaggtcacttcaggagatgacactcctgtggctaagtgtagcttcccaggtcatggctcccaggtcaggcctggtcaatggagaatn

SEQ ID NO: 95139 - DNA, 430 bp, Homo sapiens
gagttaatttagaggggtcatgtgactatagtcccagctactcaggaggctgagacgggaggatcacttgagcctgggaggtggaggttacagtgagccgagattgggccacggcactccagcctgggcaacagagtgagacccccatctaactggtggggcgggggaggccacatagcctgtgattccatttgtatgaaatgtctagaataggtaaatccatggagacagaaagtagactataatttaccagggctgggcgacgaggggagtgggcgttattgttcagtgggtatggagtttctatttggggtgataaaaaagttttggaggctggacacagtggctcatgcctgtaatcccagcacgttgggaggccggggcgggtggatcacttgaggtcaggagttccagacgagcctggccaaca

SEQ ID NO: 95140 - DNA, 420 bp, Homo sapiens
tttcgtccgggcctggctgaggcggaggttgttgcggatgcttctctctccaggcgcaccgcagattcctgcccgggggttggacccgaggaaccgccgtctctactggttccgacggccagaggctgggccctaggctgagcggagagtgggactggagcctgaaacgggcgcctaaaagaagcccgtgcatcccataggcctgcgcctcaggcttggagacgggcgggcggagaccgcgctgagtctttttttttttttttcttagcggggggggtttttatctccccgggggggttgaaaaaatctccgtctttaaaagaacccccttggggccttataattaaaaagcggctggtttttgcccccctttttggaaataaaacccccaaccacccttgtagggaggggctggtttcc

SEQ ID NO: 95141 - DNA, 388 bp, Homo sapiens
  misc_feature (1)...(388): n = a,t,c or g
ctataatcaactctctgtcactaccagcaaccttttggtgatgccttggcttgtctcacaaagaaagagtgcaggcttccaggcaatgcaagattccaggataagagacatatgctttttcacaagatataatggcctttgtggtttatccattggtatactgtgaattaggtagtgtgagaacacctatccataattgtaggtttctgcccacatataatcctgtgaactttggggccagacaggattgaatttttggaattgaaaagctaaagaccaggctgggcacggtaggtcatgcctctaatcccagtactttgggaggcagagacagaaggatcgcttgagccccaagagttcgaggccagcctgggcaacatggcgaaan

SEQ ID NO: 95142 - DNA, 393 bp, Homo sapiens
  misc_feature (1)...(393): n = a,t,c or g
cttgcagtgagccgagatgccgccactgcgctccagcctgggtgacagagcgagactccatctcnaaaaaaaaaaaaaaaaaaagaggggtttcctggcccggccaggggggtcacccttaaaaacccaaaattttgggagggccgggggggggggtccctttcgccttagagaaaaggacccgcccgggcaaaaggggaaaaccccctttttaaaaaaaaaaacccaggggaagggggaggccccggggccccaattaactggggggggtgaggaagaacctttctttgaccctggaaaacaaaggtggcaggggcccaaaaacttgccccggccctccagttaaggaaaaaaagggaaaccttgcttcaaaaaaaaaaaaatggggttttt

SEQ ID NO: 95143 - DNA, 427 bp, Homo sapiens
ctcctacttctgatcctatatgctatagtggaagctgtaacataaacagagggagcaggctaccctcccttaccagggagctactcccaccgtggagcctccggacaccgagccatattcgccttacacctaacaggagggtgctgtatctgaggggccatgcattgcatcacaacaatgatcgatatagaaccccctgccataacccaataccacacgcccctcttggcctgatccggactaatcacatgaggcctacgttgtgctatctctcccagtcctagatgcggggatcactatactactaacagaccgcaacctcatcaccaccttgttcaaccccgacggaggaggagaccccattctataccaacacctattatgagttttcggtcaccctgaagtgtatatacgtatcctaccaagg

SEQ ID NO: 95144 - DNA, 382 bp, Homo sapiens
gaacactatacctattattcgccgcatgagctggaggcctagctcagctctaagcctccttattcaagccgagctgggccagccaggcaaccttctaggaaacgaccacatctacaacgttatcggcacagcccatgcattggtaataatcttattcatagtaacacccatcataatcggaggctttggcaactgactagataccctaatatttgctgcccccgatatggcgttatcccgcctaaacaacataagcttgtgactcttacatacctctgtcctactcctgctcgcatctgctatagtggaggccgtagcatgaacaggttgaacaggctacctctgcttagcagggaactactcccacccttgagcctccgta

SEQ ID NO: 95145 - DNA, 379 bp, Homo sapiens
ggaggaggaggttgcagtgagccaagatcgcaccactgcactccaccttgggctacagagagagattctgtgtcaaaaaaaaacaaaaacaaaaacaaaaacaaaaaaacaaaaaaaaagaaccaggtatctagcaggttatcatttgacacctttcttttgttttatcaaataaataaataaataaagaccagggcgtgaattaacctcaggggagcctcatttgcagaaccattattttactcaaatatctaaaaaacaagccttggcagggggtgcgggctcacgactgtaactccaacaccttgggaggccgaggcaggcaaattgcttgaaccctggagttcaagaccagcctgggcaacatggcgagacttca

SEQ ID NO: 95146 - DNA, 255 bp, Homo sapiens
caatgaaacacccctgaacggggggagtaactatgactgtgtgagggtaaccaaatgcctcttcatctaattagtgacgcgcattaatggatgaactagattcccactgtccctacctactatccagcgaaaccacagccaaaggaacttacttggctgaatctacgggccaagaataccctggaccgcttgactctattctggcacggtgaaaagacttgataggtgtctaataagtggtagtccacacggctg

SEQ ID NO: 95147 - DNA, 361 bp, Homo sapiens
cgcacctggagtctcatctaccatggaggatgagatgggaggagggcttgagccccagaggagaggttgcagtaagcaaagatcacaccactgcattccagcctgggcaacagagtgagactgcctcaaatttaataataataaaaaaaattatctactactaatttctttaagaacacaaagctatttgtacttttctaagtgaattcatactaacttaaattgagcataaagttggcagggggcactggtgagaaggagcactagtctcaaaagaggaaaagcaagtaagatcctttacaacttaattcatataaaaacccaagttcgggccaggcgcagtggctcatgcctgtaatcc

SEQ ID NO: 95148 - DNA, 355 bp, Homo sapiens
  misc_feature (1)...(355): n = a,t,c or g
ggtgcccgagtagcatcctgtgacccctccccagtgcctctcctggccctgaaggtgccactccagtgcccaccagccttgtcctaataaaattaagttgtatcatttaaaaaaaaaaaaaaaaaaaaaaaaaaaaaaaaaaaaaaaaaaaaaaaaaaaaaaaaaaaaaaaaaaaaaaaaaaaaaaaaaaacaaaaaaaaagaacaaaaaaagaaaacaacaactgaacgaataagaaangggggggggccccggccccggcctttaattttcatttgctaaatataatttctcactcctgttctgtttttttttggtgggccgccgcaccatttttattttatttaaaatcacc

SEQ ID NO: 95149 - DNA, 377 bp, Homo sapiens
gtcctacgcccacggagtctcactgattgctagcacagcagtctgagatccaactgcaaggtggcagcgaggctgggggaggggcgcccgccattgcccaggcttgcttaggtaaacaaagcagccgggaagctcgaactgggtggagcccaccacagctcaaggaggcctgcctccttctgtaggctccacctctgggggcagggcacagacaaacaaaaagacagcagcaacctctgcaaacttaaatgtccctgtcattttgaagagagctttgaggagagcagtggttctcccagcacgcagctggagatctgagaacaggcagactgcctcttcaagtgggtccctgacccctgacccccgagcagcctaac

SEQ ID NO: 95150 - DNA, 408 bp, Homo sapiens
cggccgcgtcgacggtctttttaccttttttagagaggaagggcatagacttcgggtttttgttttttttttttggggaaaaaaaattcccctttttggccccggggggggccccggggggcctttttagtttccccgaagcctcttccccggggttaaacccttttttttggcctaaccctccagagaagtgaaaaaaagggggcccgcccccccccccgggtttttttttttttttttaaaaaaaaaggggttttcctgggggggccggggggggccccattccctgaccctaaaattggcccccccgggccccccaaagggggggaatttcggggggggccccccccccccggcccaaatttttttttttttttcttaaagggaaaagggggggggggcccccct

SEQ ID NO: 95151 - DNA, 355 bp, Homo sapiens
gttcttcagggacaaggattcaattttattcatacagtatatatgtggatatacatatacacatttatacataaaatcccagtacctagcactgtacctggtccttggtaaggccttgataaaggtttgttagaggcgtgaatattttctgtcttcagggcactttatattctttatgaaaagcagtttatgtagtttatgttattgttttaaaaaacttaatcctaaatgtgaagacatttcttttctttgttttgctttgctttggttttgagacggagtctctcattatcacccagattggagtgcagtggcaccatctcggctcactgcaacctccatctcccggtttaaa

SEQ ID NO: 95152 - DNA, 409 bp, Homo sapiens
gaacccccaaatttgatgtcaattgatctattccccctctttgtttcttggggcatttttccttttttttttttttgggttttttttaacccccgctttatttttggggggcaaaaaaaaaattaaaccccccccccttggaaagggggggggggggaaaaaagaaaaaccgcaaaaaccctttgggaaaacacccgggtttggcccccggatttttagggccggggggggttttggtttttaatcggcccttttttttggggaaaaaaggggggggaacctttggggggggattggccattggccccctttgggaaaaccaagggggggggggaaaagcccttttcccgctttgtttttggggaaaaggggtgtgcccaaaaaatttttgggggggggggggggggtg

SEQ ID NO: 95153 - DNA, 377 bp, Homo sapiens
ggcagaccgcaacctcaacaccaccttcttcgaccccgccggagtgtaggagaccccattctataccaacacctattctgatttttcggtcaccctgagggttatattcttatcctaccaggcttcggaataatctcccatattgtaacttactactccggaaaaaaagaaccatttggatacataggcatggtctgagctatgatatcaattggcttcctagggtttatcgtgtgagcacaccatatatttacagtaggaatagacgtagacacacgagcatatttcacctccgctaccataatcatcgctatccccaccggcgtcaaagtatttagctgactcgccacactccacggaagcaatatgaaatgatc

SEQ ID NO: 95154 - DNA, 397 bp, Homo sapiens
  misc_feature (1)...(397): n = a,t,c or g
gggtaattgggtaatagcagtctgaaacttgagttttgtcaaaataactccctatggaggttagttgaaaaaattcttgatgagaacagtcgagaagtaacatgattaattttgaagagaatcaattatatttttnatttttttgagacatggttttgctgttgttgcccaggctggaatgcaatggtgtggtctcggctcactacaacctctgtttcctgggttcaggctattctcagcctcctgagtagctgggattacaggtagagacagggcttcactatgttggccaggctagtcttgaactcctgacctcaggcgatcgtgngcctcaccctcccaaagtnctgggattacagatgtgagccactgtgcccaccacaattatgttaatttt

SEQ ID NO: 95155 - DNA, 453 bp, Homo sapiens
  misc_feature (1)...(453): n = a,t,c or g
cttcgattgcnntaccattgggaccacgantacnnnnnccttggcacgaggcagtaaatagatgagtagagaatggggcttccactgggcttattaaagtaagtgagcctagatttcacttgagcaagtgatagctgcagatggcgaaagaaacccatttaatttttgtagcttacaggtggtagaaacaaaaatgcaattttaaaaccttaaataccaaataccaaccattgccttttttttttttagaaaggaatttttgtttttgccccccgggtgggggggaaggggcggattttacctttttggaacctttgccttccggggccaagggatttttttggcctaaccctccaaagaatggggaataaagggtttccccacccaccccacttaattttggttttttggtaaaaaaggggttttctttatgtgggtcgactggattttaat

SEQ ID NO: 95156 - DNA, 452 bp, Homo sapiens
  misc_feature (1)...(452): n = a,t,c or g
cttgattaacatacagtccangannacgccaagnnnnnccgaggcaagggctgcacaatgggtgttgtgttaaaaagtacacaaacatggagatttataaatcttgtacgtctctataagaggtctagggtgatcaagaccagtatcaatgagcactaatattttgttgtatgagcactacatctcaacagtgggcctaaaatatttaataaaccattggtgaaaatagatgtgctgtcatccaggctttgttccatttataggcaaaatagatttagcataattcttaagagctaggattttcaaaatggtaaatgagctttgacaccaacttaaatttatgtttccccctaaaaaggaagtgagcctgtcctttgaagccaggcactgacttctcctctctagctatggaagtgctagatggcgtcttcttccaatataaggctgttttt

SEQ ID NO: 95157 - DNA, 453 bp, Homo sapiens
  misc_feature (1)...(453): n = a,t,c or g
ctcgattagcctacagttangaccatgattacgnnnnttgggcgcgaggcatgggctgcagaatgggtgttgtgttaaaaagtacaccaacatggagatttataaatcttgtacgtctctataagagttctagggtgatcaagaccagtatcaatgagcactaatattttgttgtatgagcactacatctcaacagtgggcctaaaatatttaataaaccattggtgaaaatagatgtgctgtcatccaggctttgttccatttataggctaaatagatttagcataattcttaagagctaggattttcaaaatggtcaatgagctttgacaccaacttaaatttatgtttccccctaaaaaggaagtgagcctgtcctttgaagccaggcactgacttctcctctctagctatggaagtcctagatggcgtcttcttccaatataaggctgt

SEQ ID NO: 95158 - DNA, 352 bp, Homo sapiens
ttcggcacgaggagagagagagagagagagagagagagagagagagagagagagagagagagagagagggggagggggggggcgggacaccaaattccctctatagagggacaacacaaaatagtgggggcgattatatacctgccgcgagtgtgagagaaaagatctccgggtccacctcctacatcaaggtgtgggacatccgggactcagccaagtgcattcggactctcacgtcctcgggccaggggatctcaggggatgcctgtgccgccacattcacccgtgccatcaccagtgctcagggcgagcattagatcaaccagatcgcccttcggccttcgggcaccat

SEQ ID NO: 95159 - DNA, 394 bp, Homo sapiens
accctatttcctggcaaacggccttctgaaccctgactttttgtgtacatacttgtaagcacggatttttctgggttttgggttgctttttccttttgtccccctgcccctgttctagcttgttcttcttggtttgctttcaacctgcttgatggatgtctgcagagtgctctctaagagtccacctcagtgcctcgtgtgctcagtggtcatgggaaggagcgaaggaaccatccttggttctcccagcttggttgtgtagcaatccctcagcattgtttttctcagcttcttggcaaaaattaaaacaacaacaacaacaacaacaacaacaaacagaaggataaactggcttgcctgtggaccctccccggctctggggccagtcgagagt

SEQ ID NO: 95160 - DNA, 398 bp, Homo sapiens
gggcaacaatggcatcatcagtggtggaatccttccagactttgatgatgttctctttgttagagttctcttgcatggcactgatggttctttgcatagagtactgtgtgtaatgagcctataggtccttatgactccctgatctagaaactaaattagagacattgtgtttgggggcaaatagatcacttcgatgcctttagtattgaactcatggagttctgggtgggtggccaggggcattgtccagtatcaaaacaactttaaaaggcagtcctttactggcaaggtacttcctgacttcaaagacaaaacagcaatggagccaatccagaaaaagggttcttgtcgtccaggccttcttgttatactgccagaagactggcagctggtgttta

SEQ ID NO: 95161 - DNA, 480 bp, Homo sapiens
  misc_feature (1)...(480): n = a,t,c or g
gggaccatacacgcaatgatcacgccaagcttgngacgaggcacgataacaggagaagcagcttctgctgaccaagagatagcagacaagttatcagatgccattaacaaaatcatggaggagaaaggataactaattgcctgaacaggtttttaatttggatgaaagtaccctattctggggggaaaaaaaagccacaaagaacattgcttagtaaggaaaagaagcgagcaccaggatttaagacaggaaaggataggctaactctgctgttttgtgcaatgcagttaagcttatcatcaggactgcccttacctataaagctgaaaacccccaagccttgaaggaaaatgttaaacaccagctgccagtcttttgtttgacaacaagaggccttnacaacgagaactctttctgatcggtccattgatgtttgtccctgagtcgggaagacccttgcactaaagtctgcttttcagg

SEQ ID NO: 95162 - DNA, 486 bp, Homo sapiens
  misc_feature (1)...(486): n = a,t,c or g
gtggctgaccctgcgctctcggcangancacgccaagcttggcacgaggacagggggctgattggtgtatttacaatccctgagcaggacataaggactctccacgtccccatcagactcaggagcccagctggcttcacctatgggatcccgcaccggggctgcaggtggagctgcctgccagtcccgcgccgtgcgctcgcactcctcagcccttgggtggtcgatgggactgggcgccctggagcagggggtggtactcgtcggggaggctcgggccccacaggagcccatggagcgggtgggaggctcatgcacggcgggctgcaggtcccgagccctgccccgcgggaaggcagctaaggcccagcgagatatcaagcacagcgcatgtgggcccgcactgctgggggacccagtacaccctctgcaggcgctggncgggtgccaagtcctcactgtccgggcccgaaggccggncggtgg

SEQ ID NO: 95163 - DNA, 464 bp, Homo sapiens
  misc_feature (1)...(464): n = a,t,c or g
cctgacccccctnttttgagacctctaggaagagcggaggaattccccagccagccagacacacacacacacacacacacacacacacacacacacacagcacacacacagcaccccaggtggacacacacacacacacacactctgtgtacacagggggtataagaaaatacgtgcttttcagacatgcacccgaatatgggcccacaggttcaggcgcacagggggggtgtgtactctcacacactcttacactctctctctcacacacatgctcacacacttattcattcacacatatatgctcgtgctcatacacacacaatcgcgggcacgtgctataaagtccacacacagctctatttttgttttgtgcccccacacatagagttataaaacacagcacccacaataggcgtgctttctcatattagaggggtctctgagcccttgggccggtgtga

SEQ ID NO: 95164 - DNA, 383 bp, Homo sapiens
tttttaagttttggctttgcccctcaggctggagggcaggggcacaatcacggttaagggcccccttgacctctaaggctaaagggatcttcccccctcaccctcctgagaagcgggaacaacgggttcatgccaccccccctggcaaatttttggattttttttttttttggaaaaaaggggggttaaatttggggccaaagaaaaatttgggcccggggggaaaaaaaaatcttttggtttccccccccaaaggggggggaaaaaaaaaggaaaccccggggcccgggggggtttttttttgggggggaatttttttttttttcccccccccttgttccccggggtaacccttaagccttttaaaaaaaccaaaagggggg

SEQ ID NO: 95165 - DNA, 469 bp, Homo sapiens
  misc_feature (1)...(469): n = a,t,c or g
atagaaaaacctgatgaacactaggcagngnggncgaattccgcgctgtcaccagcctgtgggacccctggggtgcagagagggagccaagcctcaggggcccggcccggatgccgccgactcccacccgccagcctcgccgagagcccactgacgtgatcactccacagagatcccatcccggggttccggggcccatgcaggagaaacgcaggtgcagggcctcgtgcccacaccgccggcatctgtgctccacaaccaaactcctagagccgtcatcatccctgggctgcagcgccggccggcgacgactccccgaccacctcgctggggtcacatgtccccgtgggtagaaaatccagtgacggatgtagacaaagagccctctgcacgcctggaagcccagcgccttcggaggccgaggtggggggatcacctgagctcaggagtttgagaccagcctgggcaa

SEQ ID NO: 95166 - DNA, 471 bp, Homo sapiens
  misc_feature (1)...(471): n = a,t,c or g
aatcgcagaccctanncattgacgagcaattcgctatgcgcccaagctgaggggnnnncctaccttggcccttctaaagtgctgggattgcaggtgtaagctgtcacatttggcctcttcacttttttgataatatcgtttgatgcacaaaaattttaaattttgatgaagtccagtttattttttctttgattgcttactttgttgtcatagttcagaatccattgccaaatccaaggtcatgaagatttatcatggttgtatcccttatatttaggtctttaattttgaattaagttttatatgtggtttgaggtaggggtccagcttcattcttctgcctgtagatattcagttgtccaagcaccatttgttgaagaaacttttcttttctcattgattagtgattagtcttggcatgttggttgaaaattaattggccagagatgtatggatttatttctagacttg

SEQ ID NO: 95167 - DNA, 429 bp, Homo sapiens
cggacgcgtgggctagttctagatcgcgagtggccgccctttttttttttttttttaattggaaaggagaagctttggggcccccctttcccctttttttgccccccaatttgaaatgaagaagggttttgggtctccttgggagggggggggggcagccggggtttacctgtccattgattggaaaccagtggaaaaaaagggccccccttaaaaaaaaaaaaagggggggcccttttaaaagattccttggggggcccaaatttaacgggggttgggaagtttttttttttttctttaaggggggcggaataaaaccctcctggggatttttggaaaagaacctttttttgggggggggaaaaaatgggaccaccccccccccaaaatttaaagccttgggggaaaaaaaaaatttttaaggggaag

SEQ ID NO: 95168 - DNA, 420 bp, Homo sapiens
  misc_feature (1)...(420): n = a,t,c or g
cggacgcgtggggctgaggcaggagaatcacttgaacctgggaggtagagattgcatttagccaagatcgtgccactacactccagcctgggcaacagcgctagactccgtcttaaatagataaataaataagtacagggctattcaaggaatctgtttcttttgggtgagttttggtagtttgtggctttcaagaagtatgtcatttcttttaaactgtagaatctatgggcataggtttgtttgaagcattcctttattattcttttagtatcttcagagttgtggtgacataattcctttttcctccccaatactgggaatttatgtcttctctcatatttctttttcagtatgacttgaggtttatccattttattgatcccttcaaagtatgcatttttggttttattggctttn

SEQ ID NO: 95169 - DNA, 447 bp, Homo sapiens
  misc_feature (1)...(447): n = a,t,c or g
gaattttcgggtcgacccatccgtccgtgcacaataatgactgacttgtctaattcgtagggatgtgaggctctgctgaggaaatgggtatgaatgtgccttgaacacaaagctctgtcaataagtgatacatgttttttattccaataaattgtcaagaccaccctaaataaaaaaaaaaaaaaaaaaaaaaaaaaaaaaaanggggggggccccttttaaaaaaacccttagggggcccaaattaaaccgggcagaaaaaaataaattttttttctaaaaggggagtataaaaaaaaaatgtctggaaattttaaaaaaaaaacttttttttgggggggaaaaaaattgtaaaaacccccccaaaaaaaaaaaaccctccagggaaaaaaaaaaattttaaggggcaagaggggtaaaaataccctttttttcttttgataaaaa

SEQ ID NO: 95170 - DNA, 393 bp, Homo sapiens
  misc_feature (1)...(393): n = a,t,c or g
cactgaattgtatactttaagagagtgaattttatgttatatctcaataaagctgtgataaaacaacccattctacacaaaaaaaaaaaaaaaaaaaaaaaaaaaaaaaaaaaaaggggggggggcctaaaaaaaaaaaaaaattaaaggccggggggggggaaaaaaaattttttttaaaggggccaaaaaaaaaaaaacggggggggggttttaaaaaagggggggggggaaaaaaccggggggaaaaaaaaaaaaaggggggggaaaaaaaccccttttttgggggggggaaaaaaaaaaaaaagcggggttnntttttttnntnttttntttttttttttctttttgtntatattnttgccccctcccccctttctctttttctttccg

SEQ ID NO: 95171 - DNA, 377 bp, Homo sapiens
tctgtacaagagggtgtggtgccggcatctgctcttggtgagggcctcaggaagcttagaatcatggcagaaggggaaacggagccagcgtgtcacatggtgagagagggagcaagagacagacaggggaggaaattcacacactgatggtggggatgtaaaatggtacaaccagtttggaaaacagtttggcagtttctcaaaggattaaacataaaattaccataggattcagcagttccacttgtgggtatgtagccaagagaaatgaaaacatatctccccacaaaaaaacttgggtatgagatttcacattatcattgctcataatagccaataagtaaaaacaacccaaatgtccaagaatgaataaatgg

SEQ ID NO: 95172 - DNA, 415 bp, Homo sapiens
  misc_feature (1)...(415): n = a,t,c or g
cccacgcgtccgataacaagctccatctgtttacgacaatcatacctaaaagcgctcattgcatactcttcaatcagccacatagccctcggagtagacagccattctcaacccaaccccctgaagcttcaccggcgcaggcattctcataatcgcgccacgggcttacatgctcattactattctgcctagcaaactcaaactacgaacgcactcgcaggcgcatcataatcctctctcaaggacatcaaactctactcccgctaatagctttttgatgacttctagcaaggctcgctaacctcgccttaccccccactattaacctactgggagaactctctgagctaagaaccacgttctcctgatcaaatatcactctcctacttacaggactcaacatactaggcacagn

SEQ ID NO: 95173 - DNA, 406 bp, Homo sapiens
  misc_feature (1)...(406): n = a,t,c or g
ttttattcaatataggctactttaatttatcctcaggttctagcatgaaacagaggcatgccccccccgaaatgatcctgtttttaacatacatgtatatccctctaaaccaaaagactcgtatctgtaagatctactttttttttttttttcctccggaaagggattttattttttcccccttgtttaggggggaggggggaattttttgttaattgaaccttttgcctctggtattggggggatcctcttgcctcccccccccgtgtggtgggaattaaaaaccccccccaccccccggggttatttttggaaaaaaaaggtttttccccttgtggcccagccggtttttaacccccggccctaaggggacccccccccccccccctcccaaggggtttgattn

SEQ ID NO: 95174 - DNA, 415 bp, Homo sapiens
aatcctagcacttttggaggcccagatggtttgattgctattgcccagtagttcaagatcagccctggcaacatactgagactctctaccaaaaaaaaaaaaaattacctgaccagggggatgcttgcctgtatccctacctactcgggagcctgaggggggaggatcacttgaacttggaaggtcattgctgccgcggggagccgtgacctgggacccatgacccttggttgtgcccctccaccctgggggacaaagcaagaccctgcctcaaaaaaaaaaaaaaaaaggactcttcctgtggggtaaactttatttttacccagggaattattttaaaattttttatcctatccaataaaatggatacccaaattttttttagggggtttttttattatttttaaggggacgg

SEQ ID NO: 95175 - DNA, 413 bp, Homo sapiens
  misc_feature (1)...(413): n = a,t,c or g
tggtggtgcatgccttgtaattccagctactcggaaagctgaggcagaaagatttgttgagcccagagttcgacgccgcagggagctatgattacatcactgtactccagtctgggatagtgtgaaaccctactctaaaaaaatagaaaatgaaagaaaacagaatgaagaaaaatgaacagagcttaagagacttgtaggataccatcaaacttaccaacagatgcatattaggaatcccaaaagaagagagaaagaaaggggcagaaggaatatttggagaaataatggttggaaactcctccaacttgataaggggaaaacattaatctaaacatcgaagtagctcaatgaactcttagtaggataaactgaaagagagccacactgagacatgttataatgaaaatgtn

SEQ ID NO: 95176 - DNA, 409 bp, Homo sapiens
  misc_feature (1)...(409): n = a,t,c or g
tacatatatgtatagctcacatttatttctttgtttaatattaaaagggtttggatctttatttagaagtttggtgatgttttctgaccagaaatatgttacaggaacttaaatcttgtttgtatcaactaccttttatggtaaaattggtctccttatacatcattttgcttaaagttgccgtttccaagaacctatcaatgacattaagtgaggacttactgtacttagttctagatgaggctggatgatattcaggttcaatttttttttttttttgagagggagtttcacgcttgtcacccaggctggagggtaagggggggatttcggttcctgcggcctccgcctcctgggttaaagcgattctcctgcctcaccctcccaagaagctgggattacaggcacn

SEQ ID NO: 95177 - DNA, 338 bp, Homo sapiens
agaaattgaaaagaaggggaaggggaagaaaagaaggggatgaagatcaaacaaaaaaaaaagagggggccgtttagaagggcaaaaatattagagccccccatgccccaggctcagcttttttttggtggacgaaaaagggcctgaagtgttgcaggactcactgggtggatggtggaaaactccttcggttgccctgaaatgactgactcaagccagccctatttagggccttttatgtattgaaaaaccgcgtgttggcttttctgttgacgtgggtgaaattgaaaaggaccaggatgtggaaaaaaaccaggacccatcatgccccaggctct

SEQ ID NO: 95178 - DNA, 361 bp, Homo sapiens
  misc_feature (1)...(361): n = a,t,c or g
tgagctgagattgtgcnnnnccactccagcctgggtgacagagcgagactccgtctcaaaaaaaaaaaaaaaaaaaagggggggggcccctttaaggagacccaagtttagccccccgggtagggaaaaaaaaatttttttaaaggggcccaaaaaaaaaaaaaccggggggggggtttaaaaaggggggggggggaaaacccggggggaaaccaaaaaaaagggttggggggaaaacccctttttgcgaaggggggaaaaaaaaaaaagggcggggnnttttntnnnnntttnttnttattttttttttggggggaaattttaattnttccaaaaaattatttttttatctgttgtggta

SEQ ID NO: 95179 - DNA, 412 bp, Homo sapiens
gagaggggtgagttggagcagctttggggagactaaatctatagcacttcgcacctgataggacatggcggtgagtggaaggacaacactgtaacttttgtgcagcacaagaaacaatcaacagagtgaaaagacaacacacagaattgttggaaacatttgcaaactggtcacctgacaagggattgatacccagaacatacaaggaactcaaacatctcaacaggaaaaaacattcctattaaaaatgggcagatgatctggacagacatttctcaaaagagacatacacaccacctaagacttactcatgtacccaatactgctgaccccaataactatagaaaattaaaaattaaaaacatctaacattaaaacgagactacaaggtggccataaaaggctggagcgg

SEQ ID NO: 95180 - DNA, 413 bp, Homo sapiens
gaggccacatgtggtggctcacacttataatcccagcgctttggaaggccgaggcaggtagatcacttgaacccaacagatcgggattggcctgggcaacatagagagaccctgtctcttaacaacaacaaaaaagacactggggactacaaaagggaggagggaagaagtgaggacaagggttgaaaaactatctattgggcagcatgttcactatttgggtgacaggttcaattgaagtccaaatctcagcatcatggaatgtatccatgtaacaaacctgcatatgtgccccttgagttgaaaattaaaaataaatagttttttttctttttttaagagatgaggtcttgctatgctgcccaggctggactgcagtggctattcacaagcacaaacacagctccctgcat

SEQ ID NO: 95181 - DNA, 416 bp, Homo sapiens
acggtctcattagccaggcatggtggtacttgccagtagtcccagcaacttggaggagtacaaaatcacgaggataaagaacttgtgtctccctactctgcctcaggggaactcagatttcctatttaatcaatagtatagtgtccagttcactttataagaattcattgtgtagagttttaagtcctgaggtgagaggattgcttgagcctgggaggttgagactgcagtgagccatgatcatgccattgcactccagcctaggtgacagagcgaggccctgtgaaaaaagaaaaagaaagaaggaggaaagaaagaaagaaaaagaaagaaagaaagaaagagagagagagagagggagggaaggaggaaggaataaaggaaggaaggaaaagatagaaagactgatagagagg

SEQ ID NO: 95182 - DNA, 397 bp, Homo sapiens
  misc_feature (1)...(397): n = a,t,c or g
ctngaaccgggaggccacagngagctgaaatcatgccgctgcactgcagcctgggtaatccggagggcttttctcaagaaagcaagggtgatttgatgttagaaagctattattgtgacttactgtgtaatgctcatctccatagagggagaaaaggcatttgataaaattcattgctttttttaattaagtaaacaccctgtatttatggggtatatgtgatatttggtacgtgcattaaagttcattgctttttctccttgggaggttgaggtgggaggattgcttgagcccangagtgttgaggttgcagtgagctgtgattgtgccacagctttccagcttaggtgacagagtgagactctgtctcataaaaagaaaagaaaggccgagtgtg

SEQ ID NO: 95183 - DNA, 489 bp, Homo sapiens
  misc_feature (1)...(489): n = a,t,c or g
agctctagccattccnggnnnnnnnnnaatgaggctctcgaaagcactaccggnncggaantcccgggcgcgcgccggggcacacgcctataatcccaactacttatgaggctgatgcaggaggatcacctgagcccaggagctggaggctgcagggagctgtgatcaccccactgcatgccagtctgggcgatgaagcaagaccttgtctcttaaacaaaacacacacacacacacacacaaccagccaacttgtttggggcttttcccacaagacgatttcaacactccagtcattttctaatttacattcaaataaacaggagttatggaccagcttggcgggctgtttatgggttacacacctcagagcaaacctgcatgtctggtctgtggcacccacaccacttgtcatgtggacaagtcaccatggtgccagcagaaccactggaatttctcaagtacccaaccaggctggctccactgggg

SEQ ID NO: 95184 - DNA, 412 bp, Homo sapiens
tttgacagacctgcagcagatcaaaaagctgcgtctgccctcaaggccagtggggttcaagctcaaatggcaaagggcacttaccatgactggagcttacaggactggaaggtgctctggatgactcactgagtgagtgcaacaggaacaagatcctaccaacctatacatttctaatttgccactctgcatggatgagctacaactagaaaatatgctcaaaccatttggacaagttatttctacaaggatactacgtgattacagtggtacttttcgcggggatggctttgctaggatggaatcaacagataaatgtgacgctgttattgaacattataatgtgttacttattatgacaccaccaggagtttctgcccccacagaacctttattgtgtaagtttgctgag

SEQ ID NO: 95185 - DNA, 431 bp, Homo sapiens
  misc_feature (1)...(431): n = a,t,c or g
ggaggcaggacaaccactggcatccatgaggcagaggttgcagtgagccgagttcatgccactgcacgccctgctgggtgacagagtgagactctgataaagaaaaagggaagagaacggaatgggaaaggaaaggaaagttccgtattgtcctcaggccaaagatctctgaggacacggattggaacaccaggtaaagtgtttagcagtttccatgagatgatagaagaaagagagagtcagcaaaagtggactcttctaggttgagaagtgagcagaaggtgtgagttgaatgtaagatggaagaagtgtggtacacaggatagagtggaattcacaacacaagttcttgagaggcaatgaacaagcaataaactggatgtgctggtgggaagcaagaaattctctggctccctgctctcactctgaan

SEQ ID NO: 95186 - DNA, 442 bp, Homo sapiens
tcagggctcactgtagcctcatcctcccatgctcaagtgatctcttacctcagccttccaattataggcatgtgtcaccacacttagctaattattttttattttttttttaaaaacagggtcttgctgtgttgctggggttggccttgaattgagctcaagccatcttcctgccttggcctctcaaagtgctgggattacaggtgtgagccatggcgcctggctcttttttttttttttaaaccaatgttatttaatttaatttttaattttaatttttggaaaggagaaactcccctgtggcccacgttttagtgaatgggggggaccttggtttattgaaacctccgcctcccgggctaatgggattctcctgtctcaacctcttgagaagcgggaaatataagccccccgccacctcgccgggctatattttttgttt

SEQ ID NO: 95187 - DNA, 418 bp, Homo sapiens
cggacgcgtggggttttttaaatcatttattcagctattagttaacagatttcagaccttgcttactatgcatttatagcagatattttatttaagaagtatttcataactagaaatactacaagaacactaagaatatagtttcagccaggtgaggtggctcatgctttgtaatcccagtgctttgcaaagctgaggcaggaaggtcacttgaggctaggagttcaagaccagcctgggcaacatagtgagacccgtctgtaccaaaaaaaaaaaaaggggggggcgtttaagggggatcaattttttgggccgggggggggggagataaaatttttttttggggggcccaaaataaaattccgggggcgggtttaaaaacgggggggggggagaaacccgggggtaacccaaatta

SEQ ID NO: 95188 - DNA, 397 bp, Homo sapiens
  misc_feature (1)...(397): n = a,t,c or g
aatgtggaaagatactgatttggtattaattaattaattaatgagacagagtctcactctgttacccaggctggagtgcagtggttgtgatcataactcactgcagcctctaattcctgggctcaagtgatccgcttgcttcagcctcctaagtagaggggactacatgtgcatgacactgcatatagctaatataaaaaaaaattttttaggccgggtgcgtggctcacacctgtaatcccancacttgaaactctgtctcaaaaaataaaggacgaaagaagggtttctttcttttttttggaaagggaaaagacactttttgggccaaaaaaatattttaaacccccggttaaaagtattctttttgccggggccccccaaagggttgggatat

SEQ ID NO: 95189 - DNA, 398 bp, Homo sapiens
  misc_feature (1)...(398): n = a,t,c or g
caatctcctgacctcgngatcctcctgcctttggctcccagngtgttgggattacaggcgtgagccaccgcgcctggcctatgtacaacatttaacctctaagccccacccccgaattccttgagcaatgactcatcttgtttctctgggcaccttggcttcatgagttagtctcagatttgggtagagacgtagtcatttaaatcctctcctaggacagtctttgatagccaaaacttccctgtcaattcctgacacccagaaattaacttctagttaaaaatggctcttaaaacaccctgaccattgttcttctctggcagccagtgcagccctgcacacttaactgtgccaagagagtgtcagcatcagtgaaaacctcccaggcctgcgggagn

SEQ ID NO: 95190 - DNA, 407 bp, Homo sapiens
ctgccgatagatctgctgttagtctgatgggcttccctttgtgcataactcaacctttctctctagctgcccttaacactttttcctgtctttcaagattggtgaatctgacaattacgtgtcttgggactgctcttaagtgaagattttaaaaatcatttttttttaaatttgaaaattggaataagataaaagataaccacagctatcgatcaatgagtgaaaagaagtcttggtttttcaattgggaaacacggaaaaaaatgtattcaggaacatgaaaaatgccttaaaaacctatcaaggaaattatgattattttgcattactcagaatattaaactgcctgaaatttgttaacgtattctatatatttttattgagcatttactatgtgccaggaatta

SEQ ID NO: 95191 - DNA, 435 bp, Homo sapiens
gttttaatcaccatagggcatggtagtactacgagatgacctaagggatctctcgtattccagacataacttttcttcctttcattgtttagtagcagcctaatttccctttggtagtcaggaggaatcaccctagccagtggagtaattcttcattgcaaaatgacccatggcagtcttaacttccagttcagtgaaataattgtgactcctggtgaaagcattcctccctttggaatgaagacctccagatcagcaaagcataaagccacagggatgggaagcaaagatttaccaggggaccactaggggtaatagtgagttgtgggtgccatttcatttctactactgatccctggaaccatgaatcctagctatgcgacaaatagcaccatatgtgggatgctgagttggagtatatatggcctcctgagg

SEQ ID NO: 95192 - DNA, 426 bp, Homo sapiens
accggtcaacaatatcccggcccgactccccgcgtccacccacacggccgcaatttcctttcttttgtgtgcatacccaatatcaggaccgctggatcacacgggagctctatcgttatattttttgaggaacgctcacatactgattgtactaatttacattaccaacaacagtgtacaagggttcccctttttccacatcctcaccatcatctcatccatttaaactggagtgagacgatatctcattgtaggtttgatttgcatttctctgattaatggaaattcttaattttaatgtagttgaatatttctgccttttcctttgtaattgggggtttttgtatcctggtgtgaagataatctacattattttctgttactggtttgccttttctcatttagatcaacaatctctggaatttt

SEQ ID NO: 95193 - DNA, 412 bp, Homo sapiens
  misc_feature (1)...(412): n = a,t,c or g
tttgagacctgaatatgcttccagatttcagtcttttcctgtttttgttaactttgggttaaaaaaaaaaaaaaaagggggggccgttttaaaggacccaactttactcccccgggcgggcaaggtaaaattttttttatggggcccccaaaatcaaatcccgggcccggggtttaacaccgcggggaggggaaaaccccgggggtaccccaattaaatcccttggagaaaaaaanttattccctcagaacattttttcttctcaggataattctgagcctttgaccgctccagcctagcccctacaccccaattaagaagacacaggccgcctacaggtcttctaccgctctctctcctacaaggccctttcgttaaccccatcggtattactttcatgaggagaaccaan

SEQ ID NO: 95194 - DNA, 437 bp, Homo sapiens
aaagtgtcttcgcatcagcccttgcgctgggccccggagaccctggtgtcccagtttcgaacccagggtgtgcgtctggccactaggggtaccccaagtcggacagaaggcccatgaggggaaggtgaggtttgagggaggagacgtgaggcaactgtggcagggaaaaaaaaaaaaaaaaaaaaacaccctgggaaaaagggggccttggttcccaaaggaaaaaaggggtttttcattaaccccttggtttggcccccagggactttgggaaccttgtttaaaccccggggggcccttgttcctcatagggggtttccaaaaggggccaaaagttcttatagggaaagggaaaacccctgggcccaagaaaaaaaacaaccggccccgaaaaagggggagcttgggtccccccgggaaagatgatttccctctct

SEQ ID NO: 95195 - DNA, 468 bp, Homo sapiens
  misc_feature (1)...(468): n = a,t,c or g
cgatctattgctcngcacgtttcggnnnatgaattcccgggtcgacgatttcgtggaggaggttgcagtgagctgagattgcgtgtctgcactccagcctggacgacagagggagactcaatctcaaacaacatttaattggtgaatgaaaatatacggtcaacagttggaaatgttctgatagtggtttggcattggatttgttcccctggtgctgtgtatttaattctctggacaaggtataaactgaagaaagctcagggctctgttccgaaaacgtgttcctccaccagcctgcaaagggcctgcgttacttaccctgtttttatattaaattgctgaggttctttacaaagtgtgagtgccttaagtcattaccggtcattagcatccccctccaattagtttattgaactaaatggccagtgttagtggggctgtgaagaaacgggaagttggagcgggaga

SEQ ID NO: 95196 - DNA, 418 bp, Homo sapiens
  misc_feature (1)...(418): n = a,t,c or g
tttcgtctatgtttgcatttcttgtgtttacacttcccgcccgcggtggaaactgcgacaaatgcggatctccgtgtcgctgttaccaaaaagaaaccaaaattaacagctgtttaatatattaagcccactccaccagccgctggagttgtacccaaatgagttattttaaggcctgtttttaaaaaagattaaaaatagcacttaaggcaggcttatacaccggtgcatacagctgttctggttggagaacgaagatgctggttaccgttggcggggaggggagcggttactctgcgcttttagaatgtttgggtttggctgggcgcggnggctcacgcttgtaatcccatcactttgggtaggccgaggcgggtggatcacttgaggtcaggagttcaagaccaacctggccaac

SEQ ID NO: 95197 - DNA, 392 bp, Homo sapiens
tttcgtaggagtttcaggctgcaatgagctatgattgtgccactgcactcaatcctggctgacacagtgagatctcatctctaaaaataaataaacacacaaataaatagccaggcatggtggcacatgcctgtggtcccagctgaggctgaggcgggaggattgcttcagctgaaaagatcgaggctgtagtgagccatgattgcgccactgcactccagcctgggcaacagtgtgagactttaaattaaaaaataaaaaggaaaacatgttgacactgaaaaaatcataaggttcgaagaggggggattgaagggattatcactatgggagctctgtggaagatggattgtaggaaggagacagaataggaaattacctgtttgcagtaa

SEQ ID NO: 95198 - DNA, 457 bp, Homo sapiens
  misc_feature (1)...(457): n = a,t,c or g
acccctccnnncctcccggctcgactatttcgtggagtttggaggaatcaaggctcatcttgtgttctctatgtttgagcaggacccttccttggctaggccccagggaaggtgccttgtgttgactgtctgggacccagctcctggcagctggaaggcccaagtgggtctgactggcctgacatcacaaatacccccttcctccatgggcttcctcttgctgtgggttttttttttctgccagggggcatttgagagggacctagcactggtgccctgagcacagggcacagctgggcccctgatagcctgtgggcaggtgggcttcaggatggagagccctttaatcccaaacctgagggtgtcatagtaggtccagcccacagcccaggcctaagccccaattggaatggnggggtgggaaaggggttggaaagggggnnnccncctcctccac

SEQ ID NO: 95199 - DNA, 421 bp, Homo sapiens
  misc_feature (1)...(421): n = a,t,c or g
tttcgtttctcagacggggcggccgggcagaaatgctcctcacctcccagaccgggtcgcggccgggcagaggtgctcctcacatcccagacggggcggcagggcagaggcgctccccacatctcagacaatgggcagccgggcagagacgctcctcacttcctagatgtgatggcggccgggaagaggtgctcctcacttcctaggtgggatggcggccgggcggagacgctcctcactttccagactgggcagccaggcagaggggctcctcacatcccagatgatgggcggccaggcagagacgctcctcacttcccagacggggtgggggccgggcagaggctgcaaactcggcactttgggaggcctanggccgctgcctggaaggtgaaggttgtaacgagcttgagatcactcc

SEQ ID NO: 95200 - DNA, 425 bp, Homo sapiens
tttcgtcttttgggtaaagtcttacctacactccttgcatacaaaagacttcttccctgagtgggttttctgatatgcagtgagaattgccttctataagaagtcttacccacactcctttcacaagaaagccttcttccctgagtgtgtcctctggtatgtgaagtgtgacttatttctaaagccccgccctcacttattgcacacataggacttccctcctgcatgtatattctggtgcaagagtaatgctgactcatcactccctgcatatgaaaaactaatgcttggagtgtgcttttttgtgtatgagtagattttttttttttttttgggaaacggaatctcgttgttccccaggcgggagggcagggggccattttgggttaaaggaaacctttgcctccaagagaaaagggtttttg

SEQ ID NO: 95201 - DNA, 428 bp, Homo sapiens
attgacagtgataaagctaaagtaagattattttcttcattcattcagcaaacatttgttgattacctactgtgcaacaggtgataacaacatctgccttcacagagctcatgatctaatggaattcaaaagcaagaatagtagttgactattacaggatcaacttaagataacactaacggtttttcaaaatgttctatgggatattcttagattacttttaaatgcctgccctgtgcatgatctgaagttttgtctcagtcaaaattaggttgtaggccgaatgggtggctcacgcctataatcccagcactttgggcagcctagtagggaggatcacttgagctcaggagttcaagaccagcctgggcaaagtaacgagactcttgtctctacaaaaaaattttaaaaattagtcaggcatggtg

SEQ ID NO: 95202 - DNA, 417 bp, Homo sapiens
ttacatctctgattttgatacctgagtaaccctggccttatggaataagttgggaagtgtgttccgttcttaaattttctgcagcagtttatgtagacttggtacttcttccttagatgttcagttgaattcaccagtgaagtcatctgggcctgattttttttttttaagggaaaagtcttaaactgtaagttcagtttttttaataaagagatacagggttattcaagcccccttcttgagtaaactttggtaaattatgtgcttcagggaatttaatttcatttaagttcttgaatttattagcctataaaaatataaatattctaacccccccctttattaaaaattatcagatggatttaaaaaatatttttccggctgggggcaggggctcacacttgtaatcccagcacc

SEQ ID NO: 95203 - DNA, 436 bp, Homo sapiens
cccacgcgtccgaggaggtggaggttgcagtgagccaagatcgtgccattgcactccagcatgggtgacagagcgagactctgtctcaaaaaaaaaaaaaaacccccccttcgggtgaggggggctcacccttggtaccccccccttttggggggtttgggggggggggccccccgggggccgggtttcggaccccccctttcaaaaggggggaaccccctttttttttaaaaacccaaaaattttcccgggggggggggggggcgggtttttttttttctcccgggggtgggggggggaaatccttttacccttggagggcgggggtggatttggttaaagtttccccctttgcttttccccgggggaacaaaaacaaaatttttttttaaaaaaaaaaatatatattttttatataagaaacaaaaaacctggt

SEQ ID NO: 95204 - DNA, 397 bp, Homo sapiens
caagcatgggggcacatgcctgtattctcttttactcgggagactgaggcacgaaagttgcttgaacctgggaggtggaggctgcagagagctgaaagcattgcattccagcctgggcgacagagtgagactctgtctcagaaaaaaaaaaatatttatgatttggcccgggccctgtaaattccttgggtgagtctacgcaacaaaaaaaaggggggggcgttccaaattttttgtaaaacccctgggtggaagtgcccgttacaaaaagcccacctcccctctgggtttcacggaattaacttgaaattcccagagggtttatgtctggcaaaggtgcttcacacccccgggggttggagggatcccctggcatgaaataaaaaaaggggaaggg

SEQ ID NO: 95205 - DNA, 399 bp, Homo sapiens
tccctgaagtcagggagtaccttactagtaggggactgccttttaaagttcttttgatactggacaatgcccatggccattcagaaccccaaaggttcaacactgaaggcatcaatgtgttctacttgcttccaaacccaaggtctctaattcagactctagatcagggggtcacaaggacctttaagtctcattacacgtggtactctacagaaaggattgccaatgctatggaagagaaccccgatagaacatcttgaaagtctagaataatgacaccactgaagatgctattgttatgacagaaaaagctatggaagccatcatgcccaaaacaataatttcctgctggagaaaactgtgtccagatgttgtacatgacttcacaagatttacaag

SEQ ID NO: 95206 - DNA, 391 bp, Homo sapiens
cccacgcgttcggttctagatcgcgagcggccgtaaaatttttttttttttttttttggggagggggcccctcaaaagggaagggcccccccaaaaaacatttaaaacaacccccatagcttttcctgggggggaagggctttaatttaaattttttccccgggcccgggggggggggtttggaggggggaacccccctttaaaatttaagggcccctaaaaaaaaaccccaaaagggggggggggggggaaaccctttattaaaaggggaaaaaaaaaacccccccctttccccccggtaataaaaaaaactgttttaaaaatttgaacccccccaacctttgcccagggggcggggttaaaaaagggccaaaacaatttctttttcatt

SEQ ID NO: 95207 - DNA, 469 bp, Homo sapiens
cgaagcactagaacgtcgcaccgcacgcaaaggcccggaactaccgcactcgacccacgcgtgcgcgctggtgagcatgaagcttgtcaacatctgtctgcttctgctcgtggctttgctctgagggaagaaacatctgggcgacagactggaaaagaaatcttttgaaaaggccccatgccctggctgctcccacctgactttgaaggtggaattctcatcaacagttgcggaatatgaatatattgtggctttcaatggatactttacagccaaagctagaaattcatttatttcaagagccctgaagagcagcgaagtacacaattggagaattatacctcgaagcaatccatccagtgactaccctacttaatggccttggcactcaaaaaaaaaaaaaagaaagcgggggtgccccgcttgaaaattattcgatcatcacccgggtacgccgctttttattttt

SEQ ID NO: 95208 - DNA, 429 bp, Homo sapiens
cgggaaaatggcgcgaacccaggaggtggagctcgcagcgagccgtgatcgcgccgctgcactccagcctgggagacagggtgagactctgtctcacaaaacaaacaaacagacaaacaaaataatagtctctcacattgcttcgtgtgtttcaaaacattacaaaaggagctttcgtctaacatatttaaaccattcattaattgtcctaatcattagtccatgaatttatgcaacacatatgtactgttcagttttcctttgtgccccctccctaaaccctgtgtcctcaatcagatgcatttcaggattaaaaagaaaggctctcactaggatattttcttaagaattcttggctgggccgggcgcggtggctcacgcctgtaatcccagcactttgggaggctgaggcgggaggatcacaaggag

SEQ ID NO: 95209 - DNA, 422 bp, Homo sapiens
aggacgcgtgggcggacgcgtgggggttggattctgcagtgagctgagatcgcagtactgcattccagcctggttgacagagtgagactccgtctcataaaaacccgaataaaaaaaggaaaagcggaactttcccggcctcctttaacaacaatggttccggctttccccaaaaaaaaaaaaaaccacagcttggactccaaaaaaaaaaaacggggtaactggtttgggactctcttataatgggaaacaggcgggaggtttaatttggggccggtttttttcatccaacagtatgcttgggaaagcccccggcttggccaggaaggcgaaggtttggctcttttttttggcggccccgggcccattaataaacccattggaggaggctttcttagtcccttaatattggccaaaccata

SEQ ID NO: 95210 - DNA, 412 bp, Homo sapiens
  misc_feature (1)...(412): n = a,t,c or g
aggcctgtgctcacagtggcaccagcaaccctgggtctccctctctgctgctccccagaaccccggggccctcctgctctccacaactgtccctccttaccccatgtagctcgatccgaagcaggagtgtcaataaacctgtcttcagtgcgnaaaaaaaaaaaaaaaaaaaaaaaaaaaaaaaaaaaaangggggggggccctttaaaaaaaaaatttttttcccccggggggggggggaaatttttttttttttggggggccccaaaaattttttgggggggggggtttaaaaaacgggggggggaaaaaaacccgggggccccccaaaaattttcgcgggggagatnnnnnngnnnnngnnnnngggggggggggnggccnggtgntttcttttttgggggcggggnct

SEQ ID NO: 95211 - DNA, 404 bp, Homo sapiens
cacagctcgctgcggcctcaacttcccttgctcaagcagtcttcctttcatagcctcctgagtagctgggactactggcacacaccatcatgcccagctaattcttttaattttttgtggagatgagctctccctaatgttgcccaggctggtctcaaactcctcccaccttggcctcccgaagtgttgggattacaggcatgagccaccacacctggccctgaaagaatgatttatcctagaaaattgtttgtgtgagcttcattggaaaagcagcttaataattcagttcactcccttctttgataccttagctagtagtttgtaatgggtatgagcagttattccgaaggaatgagtaaagttgttgaaccacttgcaatatggtggtttcattccttcaa

SEQ ID NO: 95212 - DNA, 412 bp, Homo sapiens
agctaggtttccccacagagaatggctgattgcctcacctccttaacgtctttgcttaaatgtcacctttttaatgaagtcttatccttcctttctttaaaattgtattgtcagttcccatccctcatgcttatccttgcctgctctattttctttttcataggacttaacacttttataatatatttatttgttacatttattgcctattggttctctttctatgatgtaggtcttagaaggcatggatttgttttggtaatttgtttagtgcctagtacagtgcctggcatgtagttaataataaatgtttgttggccggggttggtggctcatgcctgtaatcccagcactttgggaggctgaggcgggcggatcacatgaggtcaggagttcgggaccagcctggccg

SEQ ID NO: 95213 - DNA, 398 bp, Homo sapiens
cccacgcgtccgtgatctttttaatgaattattgaattttgtttgctagtattttgctaacaatttttgcatcaatatttatgagagatattggtctgtagatttcttttcttcatgtgtctttgtctggctttggtatcagaaacaccagccttgtataatgaatttggaagtattccctcctcctctatattttggaacagcttgagtaggactggtattagttattctttaaaattttttttcttttttgagacagagtcttaggccgggcatggtggctcacgcctataatctcagcactttggaaggaatcccagcctgggcaacagagtgagactgtcttggtttttttgctttttgtcttttatttggagagggagtttcgctcttgttcg

SEQ ID NO: 95214 - DNA, 406 bp, Homo sapiens
  misc_feature (1)...(406): n = a,t,c or g
cgccgttctcctgcctcagcctcccgagttgctgggactacaggcgcccaccaccacgcccggctaattttttttgtatttttacaaaaaaaatacacgtactcagtgtttcaccgtgaaacatggtttcaccgtgttaaccaggttggtcttgatctcctgaccttgtgatccgccctccttggcctcccaaagtgccgggattacaggcgtgagccaccgcacccagcctcacactgtattttttttaaacaacccagctctccctaagcttcaaacttgactannnaaaaaaaaaaaaaaaaaaataaaaaaaaataaaattaaaatataaatttattaaaataaaaaaaataaaaaataaataaaaagggggggcctctataaaaaaaccaattcccccccc

SEQ ID NO: 95215 - DNA, 403 bp, Homo sapiens
cccacgcgtccggttctagatcgctggagtctgtgaggtcaaggctgctttgagccatgcttgcgccacttcactccaccctgggtgacagagcgacatcctgtctcaaaaaaaaaaaaaaattggggcggaaaaggggttttattccctaagaaaaaaaccaaaaaatttttttgaaaccaaaaaaaacccaaaaaattttttaaaaaatattaaaaccccgggcggggggccccccccctgaaatctaaccttttgggggggccagggggggggaacccccgggggccgggattttaaaaccacccggcccaaatgggaaaacccttttttttattaaaaaaacaaaaaatacccgggggggggggaatttgcctgaaaccccattttttgggggggcggg

SEQ ID NO: 95216 - DNA, 395 bp, Homo sapiens
  misc_feature (1)...(395): n = a,t,c or g
cggacgcgtggggccgggacaacaggagtgtggatcacttaagtctgggagttcaaggctgcagtgagtcatgactgtgccacagcactacagcctgggcgacaaagtgagaccctgtcttaaaaaaaaaaaaaaaaaaaaaaaaaaaaaaaaaaaaaaaaaaaagggggggcccctaaaaaaaaaaaaaaaaaaaaagccggggggggaaaaaaaaaaatttttttaagggggccaaaaaaaaaaaatccgggggggggttttaaaaaacggggggggggaaaaaaccgggggaaaaaaaaaaaaaagccctggagaaaaaannnnnntnntnnttnnttngnngttnnttattnatgttttagggtattttatatattaaattaaaagaaaag

SEQ ID NO: 95217 - DNA, 384 bp, Homo sapiens
caggccaggtacggtggctcacacctgttatcctagcactttgggaggcagagaggggaggattgctcgagactaagagttcaagaccagtccgggcaacatatcaagaccctgtctctgcctcccaaagtgctgggattgcaggtgtgagccaccgtacccggccagcgggcgcgtgggctcgcctgggaattacggagccggacacgcaggcgtaccagcgccttctatggtgagtcgttcacaaaataatcgtgcgcgtaggcctacacctcgactatgattgactacaaaaggggttttttttagcctggtcaaaaaaggaacatgtgggcagtttgtttgtacccaaatggaggtgtgtacatctggtggggaaaattt

SEQ ID NO: 95218 - DNA, 400 bp, Homo sapiens
gctcctgacctcatggtcctcctgcctcggcctcccagggtgctgggattgcaggagtgagccactgcgcctggcctttttctttgttcttatatttttgtctttttttttttttttttttggaaagggggcccccttttttcctgggggggggaggccaggggggggtttttggttaatgggggccccccccttggggggggggggggttttcttgctttacccccccaaaaaaagggggggggggggccccccccccggggggggtaatttttggggttttaaaaaggggggggggttttccccccggggccgggggggttttgaatttttaccctagggggacccccccccccggcccccccaaggggggggatttaagggcaaaaccccccgggct

SEQ ID NO: 95219 - DNA, 417 bp, Homo sapiens
attttgcagaacacttgaagtggtaaaccagaataatgttgttgctaagttttgcggggtttttttggttttttttttttttttttggggaaaaaacctttttttgcccccgggggggggggggggggccccatttggggttattgggggggcccccccccggggtaaagggattttcctgccctggccccccggggggggggaactacgggggggggccccccccccccatttatttttttttttttaaaaaggggggggtttccccgggggggcccggggggccttgattttttagcccaaagaccccccccctttggccccccaagggggggggattacggggattcccccccgggccgggcccttttttaaggtttttttcgggttaggggaagaaatggtcccggggggggg

SEQ ID NO: 95220 - DNA, 416 bp, Homo sapiens
catatttagggctgaatttgcaagttcaagacaggagggaaaaactttttagctaaaaaacttaaaaaaaaatttttttagagatggtgtcttgctatgttgcctaggctggactcaaattcctgggctcaaggaagcctcttgcctcagcctctcgagtatctgggactacaggaatgcaccactgtgccagcttgaattaattttttatgtatgttgtgaggcaggcatcaagataaatatttgtccctaatagttaaccagtttttcaagcacagtctgttgaaaagactttcttttccccattgaattgctttggtggcttagttgaaaataaactggctatgtaagtgttggtccattttgaactacattctgttccactgatctatttatctgcctttacaccaatactc

SEQ ID NO: 95221 - DNA, 374 bp, Homo sapiens
tctagtttttctggataacatgctgaagcttctacgtcattcagcacttgcttcagcatgttttccagaggatctagctaagataatggatgaaggtggctacacaaaaggacagatttttaaagtacatggaacagccttctgttggaagaagatgccatctaggactttcgtagttagagagcagtcagtgcctggcttcaaagaacagactgactcttgttaggggctaatgcagctggtaactaagttgaagccaatgcccatttaccattctgaaaatcctagagtgtttaagaattatgtgaaacctattctgcctgcgctctacacatggaatagcaaagcccaatggcagcacctctgtttatagc

SEQ ID NO: 95222 - DNA, 383 bp, Homo sapiens
ttaatatttggaactagaaagcctggatgacagtacatctgttataacatgatttactgaatattttaagtccactgtagagaactgctgagaaaaaaaaaagattcttttcaaaatatactgcttattgacaatacttttggtcacccaaaagctctgatggagatatacaaggagataaatgttattttcatgcctgctaacacaatatccattctgtagcccatggatcaaggagtaattgcaactctcaactcttactatttaagaaacacatttcataaaactatagctttcataaattacgattcctctgatagatgtgggcaaagtcaattgaaaaacttttggaaaggattcagcattctagatgccattaggag

SEQ ID NO: 95223 - DNA, 389 bp, Homo sapiens
  misc_feature (1)...(389): n = a,t,c or g
gggcgcctgtactcagctaattgggaggctgaggcaggaaaatcgcttgaacctggagacagaggttgcagtgagccgatattgcacctctgtactccaccctgggcaacagagtgagaccctgtctccaaaaaaaaaaaaaagaatccttgtcccaaactaaaaaaagggccccccccttaataaattttttttccccggacggggacccaaatcccccccccaggcttttttccctgggggtggaaaagggttagaataacgggggggaccccccgccctgggtgaaaaacacaaataaaaagacttgggaattttgcttgggcctaanaaaaggcttaaaacaaataaaatatgggtattgaaggagttaaggatagggtggttaa

SEQ ID NO: 95224 - DNA, 378 bp, Homo sapiens
  misc_feature (1)...(378): n = a,t,c or g
gtgaggactgcttgagtccaggagtttaaggctgcagagagctatgattgagccactgccctccagcctgggttacagtgagacactgtctctaaaaaataacaaaatttggggtcaagtgtggtggttcacacctgtaatcccagcaggaggatcgcttgaggccagaagtttgagaccagcctaagcagtatagcaagacccagtctctacaaaaaaaaaaaaaaaaaaaattttttttttaggggcccgaagctttttccttttagggggggttaattttaatttggccctggcccgctttttaaaacgggggggggggggaacaanggnnngttnnnnnnnnnttntncccnnnttttggtttttttcccngcc

SEQ ID NO: 95225 - DNA, 381 bp, Homo sapiens
  misc_feature (1)...(381): n = a,t,c or g
ctggagctaattatgtgtgtggctgctattgtatgcggagaaaactagatgggcccatagtctagaaaagtaattataaaaactgagtaagtgccatgcccatcatagtaggggcttttataaatattccctttttcagcttggggcctctcaatttccccaggtcctcagaattacacacccccacaagggttcctgggctgcccccaggagttagggctgatcacaatgctacatttcttttcttttttttttgaaacaaagtctcactttgttgttcaggctggagggcanggccgcaattttacttaactgcaacctccgcctcctgggttaaagcgattctcccacctcagtctcccgagcagttgggattacagt

SEQ ID NO: 95226 - DNA, 382 bp, Homo sapiens
  misc_feature (1)...(382): n = a,t,c or g
ctggaagttgtactttgtacagaaaactgacagttatttaataaagttgaagacattcatacgctgtgatctagcaacctactaccagatttataaaccagggcaatctttctcaatgacagcttttggctactataatgaatgaggggcactactaaatagaggccaggaatgccaggcacttttcttgcataaagaaagtgctgctcagattgggcgcagtggctcacacctataatcccagcacttttggagggggcaggtggggtgcagcgccatggtaggcagatcacttgagctcaggagttcaagaccagcctggccaacatggtgaaatccttgtctcttnnnnnaanaannaaaaaaaaaaaaaaaaaaaaaa

SEQ ID NO: 95227 - DNA, 296 bp, Homo sapiens
  misc_feature (1)...(296): n = a,t,c or g
gtccaggacctgatggcttcactgctgaatttaaccaaacatttaaagaataattaataccaattctagtcaaactattctgaaaaatacaggaggtgagatattttcaaatttagtattaccctgacaccaaaatcaaacaaagacgcatnnnnnnnnnnnnnnnnnnnnnnnnnnnnnnnnnnnnnnnnnnnnnnnnnnnnnnnnnnnnnnnnnnnnnnnnnnnnnnnnnnnnnnnnnnnnnnnnnngaggggagggaagggagacaggaagacaggaagacaggaaggaaaaa

SEQ ID NO: 95228 - DNA, 381 bp, Homo sapiens
aaggaaagttgcaacaatatacatacttaatggcaccatttatgtaaattttaggcaaagcaatttcatttacaatagaatgaaaaggactaaaatacttaggaatatatttgaccaaggaggcgaaaggcttacacactgaaaactataaaatgttgctgaaagagcttaaaaaagacacaaatatatggaagggtatcttgtgtcagggactagaagacttaatatggttaaaatatcagtacctctcagctacttggaaggctgagacagtaggttcacttgagcccaggagtttgtgcccagcctgggcaacacagcaagactccatctctggtgaacaaaagaaaaatgaaagaaggaaatgtcagtactacctga

SEQ ID NO: 95229 - DNA, 380 bp, Homo sapiens
atctggggacaggggaggcctaatgcttattgcagaaattctctgcctgggaagtcaggatcactccttggaggaggcagcctgtcctctgagctttcaggaaaggaactggttgtgtggttccctgtaagctctggagatggggcgggcagtagggggaggagcacagcagtgtggatgtattaatacttaatgctggccgggtgcggtggcttacgcctgtaattccagcagtttaggaggccaaggcaggcagatcacctgaggtcaggagttcaacaccagctgaggcaggagaatcgcttgaacccaggaagcagaggttgcagtgagccaagatcacgacattgcactccagccctccagcccaggcaacaaga

SEQ ID NO: 95230 - DNA, 397 bp, Homo sapiens
aactggagttattttcatcagcacactgttgccccagtctcacagtgatgcagtattaccccccaagtacctacctctcatgactgccagagagaaaagagccctcataggacaaaaaaaaaaaaaccccttgaaggggttttcctgggttaaaaaataaaaacaaatttggaaaacccccccccccttcctttttttgggggcgggccccccccaaaggggggggggccctttaaaattgtttagggagggtggccctggccttgggggctaaaaatcccaactttgcccaaagggcccacaccccggcccccctgggggcctttgggaacctttgggggggaggggaaacccttgagggcttttcctttacaaaggttttttagggggcccgaat

SEQ ID NO: 95231 - DNA, 363 bp, Homo sapiens
taacaaatggcgatgaggcaactggatatcagtaaagatagataacttcaacttttaccttatgccatacacaaatttatcttagatcagagatgacttaaatgcaaaagctacaactattaaacttgttggagaaaatataggagaaaatcttgggataggaaaaaatttctgagagaggacactaaaagctcctaagaggaaaaaaaatggataaattggacttcattacaattggcaacttttgcttttcaaaagacaggattaaaaataaaaacaaggccaggcgcggtggctcacgcctgtagtcccagcactttgggaggccaaggcaggtggatcacctgaggtcagtagttcaag

SEQ ID NO: 95232 - DNA, 387 bp, Homo sapiens
aaggcatcccaataggaaaagaaaaagttatctctcttcacagagaatgggattccatacttataaaaccctaaagagtctgccaaaaggctcctaagtctgataaatgacttcagtaaagtttgagggtacaaaaacaatgtatgaaaaatcagtagcatttttaaacaccaataagttgaagctgagatcgtgccacagcactccagcctgggtgacagagtgagactccatctaaaaaaaaaaaaaaaaaaaaaaaaccccaagttgggggaccaccccttaaaatcccacctatttgataggctgagccaaaaaaattgtttaaacctggaaaccaaagggttcaaagagccgaaaacgcccccttggcttctttaaggcggg

SEQ ID NO: 95233 - DNA, 535 bp, Homo sapiens
  misc_feature (1)...(535): n = a,t,c or g
ttcggcacagcgggaggcggaggttgcagtcagccgagatcaagccactgagctccagcctcggcaacaaagcaagactctgtctcaaagaaataaggaaagaaagagagaggagagggagagagaaagaggaaggaaaggaaggaaggaaggaaggaaggaagcaagcatcccatcactgagacttattaattatcaacccatggttttttgaatttcacgcacattctcactcacttccccaccccattcacatcaagctttggtaaatctcagacatcacagtgtttttttctttgtttgtttgtattttggaggatgggagtctcacttctgtcatggcggggagtgttagtgggctcagtctcgggntcactgcaacntcgcctcccaggagaatcacttgatcccgggaggcggaggttgcagtgagccgagatcaagccactgcactccagcctgggcaacaaagcaagctctgtctcaaagaaagaaggaaagaaagagagaggagagggagagagaaagaggntgg

SEQ ID NO: 95234 - DNA, 379 bp, Homo sapiens
  misc_feature (1)...(379): n = a,t,c or g
caaaaatcacttgaccctagctacactggtttaaattttcactcagttctattccattgatgaatatatctatccatattccgtgccccacagtcttgattattgtggttttatagtcagttctgaattgggaaatatcagtcttccagctttgttttggctgaatctgttgcaatgtcatatgaatttttttttttttttggaaacagtctccttttgttgcccaggctgaaatgcaggggcgcgatttgggttcattgaaacctttgcctctttccagggcttttcttgctttagcctcccaagaagctgaaactacgggggcctgccccctatcccccnncccnnnngnaaaaataaaaaaaggagggaaaggaat

SEQ ID NO: 95235 - DNA, 393 bp, Homo sapiens
tgggttgcttccaccttttggcagttgtgaataatactgcgaggaacatttgtatacaagtttttgtgtagacgtacgttttcctctttcttgtgtaaatacttaggagtgtaatggctaagtcatatggtagctaaatattaacattttaggaattgccaagctgttttccaaggcaactgcaccattttacattcccagtaacaacctgtgagcattcaaatttttccgtatcgtcaaccaacatttattattatctttctcattgtggtaaaatgtctattcagattctgacattttagcttttgatataatcactttagggtcttcctcatgtaatatttatatttttccctttttctgtatatccttttttttctctctgaaaaacgg

SEQ ID NO: 95236 - DNA, 391 bp, Homo sapiens
ggttaatgcagccacctttatcaattttcttaactagatcttctatataatttgctacagcttctacaacagcacttgctgcttcaccttgcacctttaggtgatgaagacaatttctttccttaaactcatgaaccaacctctgctagcagcaaacttttcttctgcagcttactcacctttctcagccttcatagaattgaagagaattagggacttggctgtttcactttcttaccatttgtgtgttccctgtagtagcacgtttaatttcaagaacttttcctttgcattcaccagatgggtaactgcttggcacaagaggcctaacttttgacctgtcttggctttcaacatgccttcctcacgaagcataatttccagcttttgg

SEQ ID NO: 95237 - DNA, 423 bp, Homo sapiens
aactggagtagattccatctcgagaaatcactttctttgcttgtccctaagaagcaactcctcatccattcaagtttctcatgagattgcagcgtttaagtcccatcttcagctccagcctgggcgacagagcgcgactccatctcaaaaaaagaaggatgtcttgtctcaattgaaaatctgttgtttagtgtagccaccttcatcaatgaagttaactagatcctctggagaacttgctgcagcttctccatcaagacttgctactttgccttgcatgtttacgttacagaacacagcttcttttcttaaacttgatggaagttgctagcttccaacttttttcctgcaacttcctcagctcttcagtcttcatagaattgcagagagttagggccttgctctagattaggctttggctta

SEQ ID NO: 95238 - DNA, 463 bp, Homo sapiens
  misc_feature (1)...(463): n = a,t,c or g
tcggcacggagagtttttttcaaatataaaactacatcatctgcaaacaaagatataatttgacttctttctttccaatttggatgccctttatttttttctcttgtcaaattgttctggctggcacttccaatactatgtcgaataacagtggtgaaagtatgcatcttttgtgcctcttcttttgtcttcttcaggtgcagacaccttatcagaatgcccttgggtttaggttcccaatttcacaaggtaattcatcctcatacatcctattgtcttttcctgggtcctaggtttcagaactgtctgggaagaccacagatgcctatggtggccatgtctcttgggaatgtctaggggaatgacagctactgcatcacatcctcatggtggggcagcctgagggtttaggggtaggaggcctcacggggngcagcttgagttgccctgatggntaaagcgt

SEQ ID NO: 95239 - DNA, 398 bp, Homo sapiens
ctggaagtggttttgtggacaagttgcctgtgagaggcatccagagtccgattgctattttagtgctagcgtccagaagcaagcttaagacacatgtgtctcaatgcagggcagctgctttccaaaagagctaaactaggggctctctctctctctttttttttttggaaaaaaagtttggcttttgccccccagccgggagggcaagggggcaatttgggttaataaaaacctccgttgccgggattaaggggattctccggcctaacccttttaagaaacgggaataacggtggccggttccccccccaacctaattttggacctttaataaaaacggggtttccccttgtgggccaggcgggttttgacctccggaccctaggagccctccggcc

SEQ ID NO: 95240 - DNA, 423 bp, Homo sapiens
agcacacgtctgtagtcccagctacttgcggggctgagatgggaggatcgcttgagcctgggaggtgcactctagcctgggcgacagggaaaccctgtctcaaaaaaaaaaaaaaaggggcccccccccgggggggcctttaggggccccctgggaaccccccaaggggccatttggggggggcccgaaaaaaaaccccccgggtttttggggccaaacttttgtaaaggccgggaagggccgggccgacccccccttggggaagggccccggggggggtccaaattttgggtggtggggcccccggttgtgggaaacatctgggccccctttttgggggggggggaagggttccaaaggggggaacccgggaagggaacctggggcccaaagggaaaccaacctttggaaaaccctcaaacc

SEQ ID NO: 95241 - DNA, 385 bp, Homo sapiens
ggagtggagatcacgcaactgtatgccagcctgggcgacaaagggagactctgtctcaaaaaaaaaaaacacaaggggctgaaattacgggcttgagtccccaaccccagttggtttaaattaaaagggccacatggggttggaacttttgttttggaccctgaagttcccctgccagtaatcagttacaataatcagttacgggcccctgtattcccagttactcgggaggttggggcaggaaaataatttcaacctggaaggcggaggttgcagggatcggaaataaccccattgccctccaccctgagggaggggcaaaagtccttttcaaaaaaaaaaaaaaaaaaaattttatttccgggggggaggggttatttccttt

SEQ ID NO: 95242 - DNA, 343 bp, Homo sapiens
agcagagattgcaccaccacattccagcctgggcaacagagcaagactctgtctaaaaaaaaaaaaaaaaaaaaaaaagaagggcctatgggaaaaaaaaccttatgggggttttgcctttaaaaaaaattttaaatttcgaaaaaaaaaaaaaagtttaacctttcccaaaaaaaaaaaaaaccctggcaccttaaaagtaaaaaaaaaccccctgttaataccaaaatttttattttttcaaaatttttttgtttggaaagggatggaaccctttaaatccaacctttttaaaaaataacgggtttttgaaaaacgaacaccggtttttcctttaacaaaa

SEQ ID NO: 95243 - DNA, 362 bp, Homo sapiens
cccattttataatatacacgaaggatctgaatagacgtttctccaaagaagatatataaataattattaagcacgtgaaaaatgttcaccatcattagccgtcagggaaatgcaaatcaaaaccacagtgaggccaggcacagtggctggcacctgtaatcccaatactttgggaggccaaggcaggaggattgttcaagaccagctcaaacaacagagcaagacctcatctctacaaaaaaaaattttgtttcggttagccaggcatggtggcacgtgcccatagtcccgagtagctggaaacaggtgcacaccaccacgcccagctaatttttttattttttgtaataaaaagagacagg

SEQ ID NO: 95244 - DNA, 374 bp, Homo sapiens
attttcctagatttaagaagaaaacagttgggcacagcagctcatcatacctgtaatcccagaactttgggaggacacggagggaggattgcttgagaccaggcgtttgagactagcctatgcaacctagcgagtgtccgtctctcaaaaaaatttaaaaatatatatatatatatatcatatatatttatgtatagacacacatacctgtaagctaaacgtattgggtgtgcagctgtactctcagttacttggaggctgacgtgggagaattgcttaaccctgggacattgaggctgcagtgatgataccactgcactccagcctgggcaacagagcaaaccttgctcaaaaaaaaaaaaaagggaaacttt

SEQ ID NO: 95245 - DNA, 333 bp, Homo sapiens
  misc_feature (1)...(333): n = a,t,c or g
gtaatagtgaccacatagaatgagttgtgaagtgtccccttgtcttctattttggaagagtttgtgaagaattggtattaactcttctttaaattaatctggccctgggcttttctttgtggggagtttttgttttgttttgtttttggtttttgagatggagtttcgctcttgttgtccaggctgcacttnctatgttctaacacccttaccttttcgttcacctgtggttgcggctaaaataattttctgattctctgcccgccgttccctgactttttgccaattccttgctatgctgacttttaaggccaacaaattccctttggttac

SEQ ID NO: 95246 - DNA, 384 bp, Homo sapiens
  misc_feature (1)...(384): n = a,t,c or g
cggcacgagctattttataaaatagccatctgcttcaggtttttctcccccactacttcctctttttttttttttggaaaaaaaagccggttttggcaccagggggggggcggggggcgaaaaaaccccccgggggccccccccaggggaaaaaagaaaaatttggcccccccccccnaaaaaaaaaaaaaaaaaaaaaaaacggggggaaaaaatttccccccccccggggggggcccccccgggggggggaaaaacaaaaaaaaaccccccagggggggggcccccccggggggggggggggggcccgggggttttttacgggggggggggggattctacaattttgggggggaacgcgccccccaaggggggggccccccg

SEQ ID NO: 95247 - DNA, 352 bp, Homo sapiens
ccggcgtggtgggggatacctgtacttccagagactatggtgggaggatcaactgaccctggagggttggggctgtactgagccatgattgtacctctgcactccagcctgggaaagagagccagaccctgtctcaaaaacataaagacagaccttcgtagcttggcccagtgactcacatctataatccgagctacttgggaggctgaaatgggaggatcattcaagaccagcctgggcaacatagtgaccccccgctacaaaaaaaaaatattaaggggtacatttttaaatataacacagggggggggggggcccttatggagtcccagttactgaggagactgaggtg

SEQ ID NO: 95248 - DNA, 394 bp, Homo sapiens
  misc_feature (1)...(394): n = a,t,c or g
aacataatgacctccagttccatccatgttgctacgaatgacgggatttcattctttttatggctgagtaatattccattgtgtgtatatgccacattttctttatccattcatccataaataggcacttaagttgattctatattttggccattgtgaagaggaaactggtttttaaagtcatgcatgacctggccctcactaccccatgactttccagccactccccacatctcattctaccctcatctctctgaccactatgctagtctattactgttctgattattcactgcctcttactgtgggaggattttacttcctgtcccactgatatcagccttggccacatgacctgacttgctttgactcaccagccaaatgttagtggtgn

SEQ ID NO: 95249 - DNA, 163 bp, Homo sapiens
aatcaacaaaacgagaatagaaaaacaatagagaaaatcattggaactaaaacttgattatttaaaaagatcaagaaatttgacaaacctttagctagatggactaaggaaaaaagaacattcaaattaccaacatcaggaattaacgtagggatgttatagc

SEQ ID NO: 95250 - DNA, 360 bp, Homo sapiens
gcaaataatgaaacatctgaaaaagggaccagtatactgtaaaagtagaatatagaagttctttatgtactcagctggagaaagcaccaagatacgttgtttgtttgttgtttgtttttgtttttgagacggagtctcgctctgtctcccaggatggaggttaaagtgagccgagatcatgctactgcactccagcctgggcaacagagtgagactctgtctcaaaaaaacaaaacaaaaacaaaccaaaaaaaaacctcaataaatgttttgcatcatcattattaatcactctacctcctgccaggcacaaagcctgacacacagtaggtgctcaattaatgttagatatgtggatat

SEQ ID NO: 95251 - DNA, 422 bp, Homo sapiens
  misc_feature (1)...(422): n = a,t,c or g
aagggataataacagacaccttcccaaacctagagaaaggtatcaatatccaagtaaagaaggttgtagaccaccaagcagatttaacccaaagaagactacctcaagggatttaataatcaaactcccaaaaatcaaggataaaggatcctaaaagcagaaagagaaaacaagcaaatcagccaggcttcctcagccccatggactgctggggctggggctgggaaaatcaannnnnnnnnnaataaaaaaagaaagaaaacaaacaaataacgtacagtggagctccaatatttctggtcacagacttctcagtggaaaccttacaggtcagaagagagtggcatgacgtatttaaagttctgaaggaaaaagcttttaccctagaatagtatatctagtgaaaatatccttcaaacatg

SEQ ID NO: 95252 - DNA, 365 bp, Homo sapiens
  misc_feature (1)...(365): n = a,t,c or g
gcaggtgcacacctgtattcccagctgctcaggaggctgaggtaggtggatctcttgagcccaggtgtttgagggtgcagtgagctgtgattgcaccactggactctaccctgggtgacagagtggcccagtctctaaaaataaaataaaattaggtttttgtctgtgttgttgagttttaggagtcctttatacactctagatattaattccttgtcagatatttgacttacaaatattttctctctgtggttgtctttatactctgttgatagtgtcttttgatgcacagaggttttcattttgatgaagtccaatttatcttctttttttaaaatctgtgcctcatctgcaaatattaccan

SEQ ID NO: 95253 - DNA, 356 bp, Homo sapiens
ggaagatgaaagggtataaaagaccaacagttttgaccacatagaacaaaatttctgtaaggcaaaggacacttataaatacacttaccaagcttaataggggattttaatttatttactggcatttcattacttatatgcttggtcctatttgtatttatttttgagacagggtcttgctctgttgcccaaatgagtgcagtggcataatcatggcttactgcagcctcgaccttctgggctgaggcaatcctcccatctcagtcccttaagtagctggaatcacaggcatgggcctggctaatttatttattttttgtagagataagggcccactaccacccacctcagccttg

SEQ ID NO: 95254 - DNA, 385 bp, Homo sapiens
  misc_feature (1)...(385): n = a,t,c or g
tggtggtgcatgcctgtggtcccagctacttggaggctgaggtgggaggattgcttgagcccaaaagtttgagcctgcagtgagctgtgatcatgccacagcactccagcctggatgacagtgagacaatgagacagtgagacagtgtctcanaaaaaaaaaaaagaaaaagaaatttacaaaaacccttttttaccggggaaaatgtttttgggggttcctggaaaatttcccccccccccccccccataaaaagaaaggaaggaaaaagaagggggccaatttgcaaagcttgggaaaaaaaaaaaaattaattaaggggccggaggctttttccttttaaggggggttaattttaatttggcccgggccggggttttaaaac

SEQ ID NO: 95255 - DNA, 602 bp, Homo sapiens
  misc_feature (1)...(602): n = a,t,c or g
tatttttgagacaaatctcactctgtcacccagtctggagggcagtggtgcaatctcagctcactgcagccctgagcacccaggctcaagcgatcctgtatccttagtctccctcggagctgggaccactggcacgtgccaccattcctggctaatttttaaattttttgtaaaggtggggtcttgccgtgttgcccagggctggcagatctacacttttcaacttcaaattccatttctttctattactccagtggccttctcaggatgaccaataaaaccgagaccccaatgtctaccatccctaaaggagtgggtgtggcttggcgttttgggaacagcgagtgcatcttccaggaactgcctctgactctgcatcacttactttccaccatgttggcctcattcatccacagccacgaagcctcggccaatgcccttgtggggagaagcctcacggtggggtgggggtgccgtggggtgggggttagtgtggatccagccgcctggctgtggagggacctcaagggttgctttaggccgggtatggtggcgtattccacgacactcaacagggaatcaacncctnttnttctacccct

SEQ ID NO: 95256 - DNA, 426 bp, Homo sapiens
  misc_feature (1)...(426): n = a,t,c or g
ccagattaagaaaatttccttttatttcaatagttagttcccttagcactggttgaattttattaaatacttttgccatatctgttgaggagactagacttttttcttctctattctgttaatggggntgaattatatcagttggttttctgttattaaaccagtctttctttcctggagtaaacttaacttttatattaatggttttatatctaattggatatacaatttgctaatattctgtttaggatttttgcatctgttcaaaagaaagcctgacctgtaattttcatttcttggtaagtgcatctcanattttggtatcaaggttatgctgccttatagaagaaactgggggctgggcacagtggcttacgccctgtatcccaacactttgggaggccgaggcagacggatcacctgang

SEQ ID NO: 95257 - DNA, 409 bp, Homo sapiens
ggcacctggaaaatcaggtcactcccaccctaatactgggcttttctgatggtcttaacaaatgggacaccaggagattgtatcccacacatggctcaaagggtcctacaccaatgaagcctcccttattgttagcacagcagtctcagatcaaactgcaaggcggcagcaagactgggggaggggggcctgccattgctgaggcttgagtaaggaaccaaagcagctgggaagctcgaactctgtggagcccaccgcagctcaatgaggcctgcctgcctctgtaaactccacctctgggggcagggcatatctcaacagaaggcagcagaaacctctgcagacttaaatgtccctggctaacagctttgaagagacgtagtggttcttccaacatgcagcctgagag

SEQ ID NO: 95258 - DNA, 387 bp, Homo sapiens
  misc_feature (1)...(387): n = a,t,c or g
cttgaacccgggaggcgtaggttgcagtgagccgagattgtgccacttcattctagcctgggcgatatagcgagactccgtctaaaaaaaaaaaaaattagccaggcatggggtcatgggcctgtaatctcagcctccttctcgagtggnnnnnnnnntttnaaaagggaaaatttctccctctttttgagagttacagaaaaatcgtgtggggcatacgcccttctttttggtgttactatgtgaaagttttttgtaaaccccctcgttcaaccaaagttagttgtttacaccctcttttcctctccccgggggaagaatctttttgttagaacacctttctatgtgaagctatattcagtgcagtgtgtggccttttggtaaggt

SEQ ID NO: 95259 - DNA, 389 bp, Homo sapiens
acttttttttaaaagctaaaaatgattaaccttagtgaggagggcatgttgaaagccaaaataagccaaaagctaggcctttgcatcagttagccaagttgtgaattcgaaggaaaagttcttgaaggaaattaaaagtgctactccagagagtacatgaatgataagaaagtaaaacagctctgttgctaatacggagaatgtttgagagaggtctagaaccagccacaacattctcttcagctagagctcaatccagaacaaggacctaactttcttcaattctctgaaggcttggagaggtcaagaagttgcagaagaaaaatctgaagctagtagtggttggttcatgaggtttaaagaaagaagccatctgcataccataaaag

SEQ ID NO: 95260 - DNA, 364 bp, Homo sapiens
  misc_feature (1)...(364): n = a,t,c or g
tattaggaagaggtctagtttcattctcttgcatgtgaatagccagttgttacagcactatttgttgaaaagactttttcaccattgaattgtcttggtaccctttgaaagaaatcagttgaccataaatgtgagagttaattttccagactctcagtctataccactcatcttgatttctatccttaaagttagtactacactgtcttcattaatatagcnnnnnnnnnnnaaattacggggactttcaaccaaaattagattactggagctttatactatattttgaaatttgaattgggagtcctccaacgttgttcttcttttccaagatgattttggctattttgggccctgtacattc

SEQ ID NO: 95261 - DNA, 266 bp, Homo sapiens
tcaaggttcttttggctagtctaggtcatttgcttttccatataaattttagaatactcttgtcagtttctgtaaaaaaatgcccactgggacattggttgtaattacattgaatacctagttcattttgggggagaataggcattgataatattgcatcttctaatctattaagatggcatatctgtccgtttatttagagcttacacagcaatgtttatatttttcagttgccttacaatgtattacataaacactgcatgctg

SEQ ID NO: 95262 - DNA, 378 bp, Homo sapiens
tgtatatcctgtgaaactatcaccataatcaaaataatgaacatatgtatcattcccttccaaacttttttttttttttttttggaaagggggccccacccggggcccaaggggggggggagggggtaaagggaaccctaaattcccgggggcaaggggaatcccccactttaaccccccaaggaggggggaccaccgggagggaccccccccccggggaaaccggggaaaatttgggatttttgggaaaaaggggggttccccctttccccagggggggctggaacccccggaccaaaaggggacggccccccttggccccccaaaggggggggaaaaccgggggggaccaaacagccgggcccaaaaaaatttttc

SEQ ID NO: 95263 - DNA, 349 bp, Homo sapiens
tctgtttttaaccgtgttagccaggctggtctcaaactcctgacctcaggtgatccacccgccttggcctcccaaagtgctgagattacaggcatgagccaccgtgcccagcccagaggaataagataaatttaatgtgggtcttacactacttgtcatccactgttattacttacctaatttatttatttatttttctacagagtctcactctgtcattcaggctggagtgcaatggcatgatcttggctcactgcagtctcaacttcgcagactcacgtgatcctcacacttccgagtagctgggactagccacatgtcaccttgcctggctaattttgtttatttt

SEQ ID NO: 95264 - DNA, 347 bp, Homo sapiens
tactggatcaactacattttggaatcttaaatatctatttttaataactttttttttttttgggggaaaagcctattttggccccccgggcgggccccagaagggcggggaaaaattctaagttaatggaaaacttggccccaggggttaaggggattttgggcccccacttcctggagaacgggaaataacgggggccggcccccaccccgggtaaattttggatttttaagaaaacccggggtttgcccttggggcccgggttagtcaaaaaccccggccttggggatcggcccccctaaccccccaaaggggcgggaataacgggggggacccatgggcccaac

SEQ ID NO: 95265 - DNA, 385 bp, Homo sapiens
  misc_feature (1)...(385): n = a,t,c or g
gacgagtaggcgggactacagacccgcgccaccacaaccagctaatattttaattttttgtagagatggggcctccctatgttgcccatgctggtctcaaactcctgggatcaagaaatcctcctgccttgtcttcccaaggtgctgggattacagatgtgagcctggtctgtgaatttgaatggggaaaaatccgacctttattctcaaatggcctctgatgtgactgcattcctctaattcattcaattgcggatataaggaagaagccacattcatagttgcagggcctgtgactttgtcaccaacagaattcacagacggagtcttgctctgtcacccaggctggagtgcagtgatgtgatcttggctcactgcaacctcn

SEQ ID NO: 95266 - DNA, 385 bp, Homo sapiens
gaatcgtgaatcctttccagaaggttttcaatagatttttcccagacccatcagaggaatcactatggtagctattgccttatcaaatgtatttcttaaataataagacttgaaagttgaaatgactccttgatccatgggctgcagaatacatgttatgtcagtaggcatggaaacaacattaatctctttgtacattcccatcagagctcttgggtgactaggtacattgcaaatgagcagtaatattttcaaaggaatctatttttctgagcagaaggtctcaatagtggccttaaaatattcagtaaactatgcagtaaacagatgttctgtcatctaggctttgttgttccatttatagagcacaggccgagtagattta

SEQ ID NO: 95267 - DNA, 193 bp, Homo sapiens
ggaggggggcagaatatttttcaactcattctttgaggtcatccttaccctgataccaaaccaaaaaaagttgttgaaagaaaataaagctaccacccaatatccatcatgaatggagatgtaaaaattcttgcccaaactttattaaatcaaatccaacaatatttaaaaaggataatacattatgactctg

SEQ ID NO: 95268 - DNA, 830 bp, Homo sapiens
  misc_feature (1)...(830): n = a,t,c or g
ggagtggctgggagggcaagaggttgcaccgtcccggcaaggttgggaagtggctcggggtttggcaagggccactctgccccagatccatgctctcttgggtcatgacatttcaggtccctggggacctaggcagatcaaccactacaccccattggttgagggtgttcagcagaaggtccccagagatgtcctataagcctcccctgtgactaggatggcttctgaggtccacagaaaaatgcaagggaatcacaaaggggaaaggccaccagcagctctgaggctgaggctggctgcggatgggatggttcagagggggagctccccttctgtcctgcccacgcgtccgcggacgcgtgggtggcgctaaaccattcgtagacaaacccttgtgtcgagggctgactttcaatagatcgcagcgagggagctgctctgctacgtacgaaaccccgacccagaagcaggtcgtctacgaatggtttagcgccaggttccccacgaacgtgcggtgcgtgacgggcgagggggcggccacctttctggccacaggctgnactctcttattagggacctaatgcagttgttgacttcaagttgaagccaatgctcacttacccattctggaaaattctaggggcctttaaaaatcatggataaatctaggacttactgtattctacaaatgggggaccaacaatgcctggggggatgacaggcaccatctggtttacaggcatgggtttactggaatattttaaggttcacagttgaagacctactgctcagaaaatattcctttcaaaatattactgtttattgacaat

SEQ ID NO: 95269 - DNA, 470 bp, Homo sapiens
ccgtaatccgcacgaggaggattgcttgaggccaggcattcaagacctgcctgggcaatgtagaggtaccccttatccccccaccatctctagaaaaaagatttaataagtcaccaaggcgtggagtgatgcatctgccctcctagctacttggtaggcttaaagtgtgaggatctcttgagcccaggagttttgaggttacagtgagctatgatgacaccactgtacactccagcctaggtgacatagcaagactctgtttatataacaacaaaaattagtgtttatttctgcagctttctttgtaatatttttgtaccacaggtgtttgaaatggcagaaaatgaaacggggtaaggatgaactcctgtatagatagactggataaagagaaagccaagcgcatgatgttcatagaggagtcttaagagtaagccttatgtcatctatccaaatgttgttttctagga

SEQ ID NO: 95270 - DNA, 444 bp, Homo sapiens
cgtccaagaattcggcacgaggttggccaggctggtctcaaactcctgacctcaggtcaaacacctgcctcggtcccatagtgttgggattacaggcctgagccaccgtgcccggccctgcacatttcttataaatgaaatcatgcaatgtgtggccttaagtgcctggctgtttccgcttagcgtcatgttttggggttcatccgtggtgtggcatgtggagtgctgctttcctttttgtagctgagcaggcctccacggtgcgggtgcactgcatgctgtttttccgcgcctctgtggatgggcgtctgggctggtggctgccgggagcggtgctgctgggagcgcgcatgttcgggaactcgcttggcttctgctttcagtggtctccttttatgccctccttcccctcacccctctcgctcttcagcccgccctgcccct

SEQ ID NO: 95271 - DNA, 414 bp, Homo sapiens
tctctgtatcttttttcatttattggctgaagaacaggaggatgcggaagatggaagaaaatataatctctgaaagataatgaagaagctctcctaaatagaagaaaacctcataggggatttttttttcatcattttactctctgcttctatgcgtttaaatttttttttttttttttggaaacagcccccttttgtgacccagcccaaagggcaggggctggaccccaataaatggccccctccccctcgggggtcaaggcgattctcccccacccttttaagaaccgggaaaaacggggggggcccccccccccggacaaattttggctttttaaggggggggggggttccctaagggggggggggggggcctcagcccccggccccggggattggcccccctggccctcc

SEQ ID NO: 95272 - DNA, 378 bp, Homo sapiens
gaaactcatagttctaagtaatttgtaaaagacttgctttcatagtcttctttacaatgggtgacatgatcatatttttttttttaattttaatttttttttggaaagggagtctcaccctgggctacaaagcgagactttgtttcaaaaaaaaaaaaaatttccccgggcctgggggccccccccttgaaccccctgttcttgggccccttaaagtggaacccccctttgcccccggggggcgggggttccccaaaggcccccattgccccccgccgggggaaaacgggggaaattttggtccaaaaaggggactgtgttaaaccggggccccggaaaattaaaaatttggtaaaaatttcttggcccaaagggttg

SEQ ID NO: 95273 - DNA, 376 bp, Homo sapiens
  misc_feature (1)...(376): n = a,t,c or g
tgggtatttcagttttgccgggcataggagcccctgggaacaagccggagctgtttgaggaagtgaagttgtacaataacgcccgggagagggagaagtacgacaacatggcagagctgtttcggtggtgaagacaatgcaagccctggagaaggcctacatcaaggactgtgtttcccccagcgagtacactgcagcctgctcccggctcctggtccaatacaaagctgtctttaggcgggtccagggctcagaaatcagctctattgacgaattctgccgcaagttccgcctggactgcccgctggccatggagcggatcaaggaggaccggcccatcaccatcaaggacgactagggcaactctttatcgttn

SEQ ID NO: 95274 - DNA, 373 bp, Homo sapiens
accatttataagaccggaaaccataaaactcctagaagaaatcccagggggaaaactccttgaccttggtcttggcaatgatttattagctaggacaccaaatgcaaaaataaacacgtgggaccacatcaagctaaaaagcttctgcacaataaaggaaacaatcaacacaatgaaaaagcagcctacagattgcgagaaaatattctcaaggcttatatctgataaggggttaatgttcaaatgtgtaaggaacttgtacagctcaactgaaagaagcagatgactcagttaaagggtgggcagaggacctggatagacatttctccaagaaagacataaaaatggccaacaggcctggcaaggtgctggg

SEQ ID NO: 95275 - DNA, 377 bp, Homo sapiens
attatccaaaatttaacggaatgaccacggaattctcctaagggtctacttcctgcacccatgtgcacctgggcttctctgccaggctttgtggtcatgcgccctcagacacaggtgtcacctgatatcttctgcttcaatatattcaacactttgagcaggtggacatgactctcagcttgagactaagttgtgtcaatgatctggtggagctccaggaaaaagcaagcttctgcccaggcacctgtaatcccaacactttgggaggccaaggcgggtggatctcttgagctcaggtgttcaagaccagcctgggcaaaatggggaaaccctatctcaaccataactacaaaaaattagccaggcaggtggcatgg

SEQ ID NO: 95276 - DNA, 404 bp, Homo sapiens
atgtgtgtgaacccaggaggcggagcttgcagtgagccgagatcgtgtcactgcactccagcctgggtgacagagcgagactccgtctaaaaaacaaacaaaaagaaagtgaaaagaagaaaaaagatatttcatgcaaacagcaattaaaaagagtgggcatggctgtattaatatcagacaaaatatactataagttaaaaaaggttagaagagacaaagaatatataataaaagggtcaacttaccaagaagatatatcaattacaaatacatatacactaaacacctgagctccaaaatatatgaaggacacattgacagaattgaaggaagaaatagacatctatgcaataatagtaggagacttcaatacactacttttaataatatgtagaggaaca

SEQ ID NO: 95277 - DNA, 403 bp, Homo sapiens
  misc_feature (1)...(403): n = a,t,c or g
aatttgtacaccatcacactctcccattgttacaggctcaattttgcccctgcaaatcctaaccccatacctcagaatgtgactgtatttggagggagagaagatctttaaagaggtgactgaggttaaatgaggtcaccagggcaggccctaatccaccatgactggtgccgttataagaggatattaggggcctggcaccatggctcacacctagaatcccagcactttgggatgccgaggcaggaagaccacttgagtccaggagtttaagaccagcatgggcatcatggcaagacccctcatctcaattaagaaactgtatatatagagagaggatattaagatagaaacaaacacagagggaagacaacgtgaagacgtanggagaagacggctatcn

SEQ ID NO: 95278 - DNA, 395 bp, Homo sapiens
tagaaattattgtaatagcttaatatatggctcagttctttatagaagacacagtcattatacagacatacatttggatattgatataatccaaattacaacattagtattttaaataattaatatataatcaccgctcccggccgttccacagattttttgacctattcacctgttgatggacacttgggttgtttccgggtttgggctgttacaaataaagatgctatgaacatttgtgtataaatgtatggacatgtggtttcttttctcttgggaaaatacctataagttaaatggctgagttatatggtgcatgtatatttatttaacttttaaaaaaagtcctgctagaaattcttgttcttgcttcgaggataaaaatctaaactctt

SEQ ID NO: 95279 - DNA, 396 bp, Homo sapiens
gagcaaaaaacttgcataatctgaaggaaaaggctggtatagctgtacgaagtggcagagcatgaaattggggggtattacttttttttttttttttccccccccaaaaaatcccccccccaaaaaaagtgggccaaaaagggcccttttttttagggaaagggccccccctggcccccaaaaaaaaggggccataaaaattaggggatttcccaaacaaagggcccgcccccccaaaccggttttttttttaatttttggaaaaaggggtttccttttggggcccaaagggggttaaaaccccggggaaaaaagaaaccctccgccctggccctgaaaggggggaaaaaaccccgggaacccaaagggggggccccatttaaccctttaaggggg

SEQ ID NO: 95280 - DNA, 394 bp, Homo sapiens
  misc_feature (1)...(394): n = a,t,c or g
ctgcaagaggttggactttccgtatgttgaaatatatagatatttcatatatgtctatatgttgaatatagataaaaatgattggttctttgttttttgggtttgcttttttttttttttttggaaaaaaaacccctttttttccccagcctaaaaggagggggaaaaccctaaattacttgaacccccccccccgggaactaaagaaattctgggccttcacccccccaaaaggtgggaataaaggccccgcccccccttcccaaaaaatttttaattttttggaaaaaacggggttaccccttttcccccgggcggatttgaacccccgaccccaaaggaaccttcccccccggtctccccaaagggcgggaaaacaaaccccgccccggcn

SEQ ID NO: 95281 - DNA, 387 bp, Homo sapiens
tatggctgccagtgtgttctatctcccaaggaaaatgaagctcctacagaccaaagactgtgtcctgtttctttgtatcttcaccttataggacatagggaggacatccatttaacagaagaaaatcttgttaaagctgttttctgtgaggcagtgaatcatgaataccgatcacaagtactcaggcccaggatcccttatccaattgaaaaagaattatccaggccactttttttgatttttgatttttgatttttttgggacagtctcactctgtcacccaggctggagtgcatggctcactgcaacctcaacctccctggttcaagcagtcctcccgcctcagcctcccaagtagttgggaccgcaggcacgcaccaccatgcc

SEQ ID NO: 95282 - DNA, 363 bp, Homo sapiens
ctcattgtagcctcgacctcctgggctcaggcaaccctcccaaccttcgcctcctgagtaattggggctgcaggagcacgccactatgcctggctggtttttttgtatttgtggagacagggtttctccatgttgcccaggcttgtctcagacaaggttttaccatggttgcccagagccctcacagaaaattcatatcacctgaggagcctttgaaaccattcaggttctcttttactggggtggggtggggtttgggcagtggcggtttttttttttttttgagacggaatctcactctgtcacccaggctggagtgagggggtgcagtctcagctcgctgcaggttccgcctcctgggtt

SEQ ID NO: 95283 - DNA, 366 bp, Homo sapiens
gaactgcttgaacccagaggcagaggttgcagtgagcggagaccatgccactgccctccagtcagggtggcagagcaagactccgtctcaaaaaaaaaaagagagagaaaatatttatattttttacggttcaattggaggagtttaagaatttttatatatttttgttaacccccttgcaacacaacatacaaaacatttccttcacacttcaaaattcctttgggtttttttccagacaatactgcccctccccactagaaataatttttctgactcctctaactgaaaatttgctgggcctgttcatgaagggaataatacaaaattggttttttggggttgggcttttttaattcaaaacag

SEQ ID NO: 95284 - DNA, 382 bp, Homo sapiens
gaaaatactttgagacaaatgagaacaaaaatatacaataccaaaacttacgctgtgaaactagtattcagggaaaacttaacagttgtaaatgcctgtgttaaaaaagaagaaagatttcaagttaacaacctagctttataccctaagaattaggaaaagagcatgctaaacccaaaaggaaaaataataaaggttagatcagagaaaaatgatatagaatagaaaaatgatgaagagaatcaatgaaactaaagttggtactttgaaaagataacttattggcaaaccttagattagaagaagagctgggcaccatgggctatgcaagtctagtcctatccagttggaggccgaggcaggaggatcgcttgagcccagg

SEQ ID NO: 95285 - DNA, 405 bp, Homo sapiens
  misc_feature (1)...(405): n = a,t,c or g
caagactgtggtgtggatggaggaacagacacttaggttcatgaaacagagtagagaacccagaaacaggcctacacagatatgcccagctgatttttttgacaaaggtacagaagcaagtcggggaaggtcagcctttcaacaaatgatgcgggggcacctgggcacccacaggcaaaacaatgaacagccaccaaaggctcnnnnnnnnnnnnnnnnnnnnnnnnnnnnnnnnnnnnnnnnnnnntgtaaaatgtaaaacatagtattttttaaaatgggagaaaatctttgggatcactaggcaaagagttatgaggttaggacaaaagcatgaaccataaaaggaaaagttgacaaattagactttataaaaattaaacatttttgctatggaaagaacct

SEQ ID NO: 95286 - DNA, 394 bp, Homo sapiens
aatagcttcaaaggactctcttggtagggttatttaatgctgctggtaacttgaagttgaagccaatgctcatttgccattctgaaaatcctagggcccttaagaattatgctaaatctactctgcctgtgttctataagtggatcaaaatagcatggatgacagtataaacagttgcagcatggttgactgaatattttaagcccatttttgagaactactgctcagaaaaaagattcctttcaaactatttctgctcactaacaatgcacctggtcacccaacaggtctgatggagatgtacaagacgactaatgttggttccctgcctgctaacacaacatccgttctgcagcccatgggtcaaagagtaatttcaactttcaagtcttaa

SEQ ID NO: 95287 - DNA, 388 bp, Homo sapiens
gaatgctcgttttggatcagaccagcagcagaccaccaaacaatgaccgtgacctttttttggtgcaagtttggctgtaggaagtggctttggagctacttctcggttcagacactgagctgatcatcaccagttgtggtataaaatccacttttcatcgcatgtcacaatcccatcaagaaatggttcattgttgcacagaaaaagagaagacgacacttcaatacaatgatttttttttttttgttaagcttttagggcccccacttatttacctttttcacttttccaattggttctaaaacccaaaggaccataaaagggtggaccctgagttttttggcaacttctcgggaagttgttaaaaaatcactttcaatgatggctt

SEQ ID NO: 95288 - DNA, 246 bp, Homo sapiens
atttgtgattgtattgaatctgtagatcaaattgggaaaattgacattttaacgattttaaatctttcagttcatgaacatggtctggctcttcatttctctagatatttaatttctctcaacattgttccgtagttcttagtatatagatctggaacatacttttatcagatatattcctaagtaagttgtgtttttcaatgctgttttaatggctattattttagagtattcccccccaccccc

SEQ ID NO: 95289 - DNA, 339 bp, Homo sapiens
cggcacgagcggcacgagcggcacgagcggcacgagccagacttgcagaatcagccgtgtacgtagtacctcctcttggacgtctggcaggcatcttcagtgtcatgtgtcaaaagcagagagctcttggtttgtcctctcagcctcttcctgctccactggtagccccatctccctaagtggcagtgcagttcactcagcaactcaagcaaaaacctgactcttccttgtctcttctcttccctcctttcataaccatgagcaaatcctgttgattctgcctttaaaatatatccggggctgagctcagtgggctcatgcctataaatctcaggcact

SEQ ID NO: 95290 - DNA, 373 bp, Homo sapiens
gagacagaggaaaaactattcaaagcaactttaaaacccagtaatttgtagctggacacagtggcgtgtacctgtagtcacaagtgctcgggggatcacttcagcctaggagttcgaggctgtagtgcgctatgatcacactggtgaacagtcactgcactccagcctggccagcacagcaagaccccaggtcaaacaacaacaacaacaacaaaaagtaatttgattatctagcccagtgggatatacctatagacaaaaagaatgacacaaaaaataaaaaataaacctttaagtaatcatactcttgacagtagatgctggcataattattttgagtctgttgtgtgtgtactatgaatagcaagtgaat

SEQ ID NO: 95291 - DNA, 383 bp, Homo sapiens
gctgatgtacatctgggttgtttccacctttcactgttagggtaatgctgccatgaacatcgtgtacacgtttttgagtggatgttgggtgtaggcctagtagaaatgctgggtcatacggtaactccacgtttaactttctaagaacctgccaaactttttccaaaatgattgcaccatttcaagttcctgcctgtagtgtgtgagggttctgcttctctgatcctcaccaacacttgcttttatcttttttttttttggacccgggtttctttttttgccccgggtggaggggggggaagccaccttgggtcaatggaaattttggctcccaggaacaggggaatcttttaccttaaccctcttgagaagtgggaaccccg

SEQ ID NO: 95292 - DNA, 382 bp, Homo sapiens
  misc_feature (1)...(382): n = a,t,c or g
aaaaaagtcaagataataggagaagcagcagttgagttcccagataccattaagaaaatcattgaggagaaagaatatctgcctctataggtttatatatgcagatgaaagtggtctattctggaaaaaaaagctacaaaggacatttattagtaaggaagagaagcagcatggataggctaactcttatcattttgtgcaaatgcagttgggtttatgaacaggacggcccctgagccttgaaggaaaaaggtgaacaccagctgccagtcttttgattgtagaacaagaaggcctggacagtgagaactcttttcctggattagttccatcagtgttttgtccctgaagtcaggaagtacgttgccagtaagagactgcn

SEQ ID NO: 95293 - DNA, 373 bp, Homo sapiens
  misc_feature (1)...(373): n = a,t,c or g
gaaattgaacaacttactcctgaataactcctaggtgaacacagaaattaaggcagaaatnnnnnnnnnnntgcttgaaatcaatgaatacgaggacacaacttaccaaaatctttgggatgcagccaaagcagtgttaaaaggaaagcatgtagccccaagacactttcttcaagaagttaaaaaggtttaaaaaggtttcaaattaacaatctaactttgtacctaaaggaactaggaaagaacacatcaacctgaaagctagcggaagaaaataaatgactaaaattggagatttatttggcctttactttgtcctaaatggttaggatgcctattacctgcctgagcccttcttagcaccaacagatgt

SEQ ID NO: 95294 - DNA, 370 bp, Homo sapiens
  misc_feature (1)...(370): n = a,t,c or g
caggatagggcgatcctggaagctgggcttcagaagcgtccagatagggtctctctctctgccacccaggccagagtgcagttgacgcagggcaggtgagccccgaagtggagcatagtgtgtccggaactggtgggttcttggtctcactgacttcaagaatgaagccgtggaccctcacgagacagggtttcaccatgttggccaggcttgtcttgaactcctgacgtcgtgatctgcctgctttggcctcccaaagtcctgggattacaggcatgagccaccgtacccagccactcttgattaacttaatggaaatatttacagagattctttctcntttgggttctagcgtcttatctgtaacctc

SEQ ID NO: 95295 - DNA, 598 bp, Homo sapiens
gggaaatgcatacttgtaaactctagaagaaccactgcaaggaacagtcaaaaccccaatagagaaattaaaattaatataaaaacactccgctgaaatcagcaaaggtaaaataagaacaaaaccaaaggcactgaacagaaaacaaataattaaatgattatttgaactaaatactatgtttaaactaagtcttaaatatcaataattacattaaaaggcaatggtctaaacacatcaatgaaaagacagaaactgtcaaaatgtatttttttaaaaagacccaaccatatgttgtcttcaataaacccagattttgtctaggcacagtgggctcatgcctgtaattccagcacttttcagaggcctaggaaggaggatcacttgaggctagcaagttcgagaccagcctggagcaacctaggcaagactctatctctacaaaaaatttaaaaattagctaggtcgtgcggcacgcgcccttagtcccaagctactcaaatggctgaggtgggaggattgtttaagtccaggagttggaggtggcagtgagccttgatcacatcactgaattccagcctggcaacagagcaagaag

SEQ ID NO: 95296 - DNA, 407 bp, Homo sapiens
aatacacaggtgggagaattgcttgagtccatggaagtcaaagctgcagtgagctgtgataatgcgactgcactccagcctgggtgacagagggagaccctgtctcaaaaaaaaaaaaggggaaaaaaaaaaaagaaaaaaaaaaaaaaaaaaaaagggggggggaaggaaaaaaaaaaaggggggggggggggaaggaagaaaaaaaggaaggaagggaaaaaaaaaaaaaaccccccatttggggggggaaaaccgggggaaaacccgttttgggggggaaattgggggggaaaccggggaaaaaatgggtttttttggggcccttgtttttttaatgggaaaaaatgaattggaccccaactttaaaaaggcctttccaggggaaaaaaaaaagggccccctgg

SEQ ID NO: 95297 - DNA, 152 bp, Homo sapiens
gttggtgtgcagttcttcatgatacaaagtctctaatgatactctgtatttctgtgttatcagctgtcatatctcctttttcatttctgattttatttatttaggtattttctcttttttcttggttagtccagctaatggtttaccaattt

SEQ ID NO: 95298 - DNA, 445 bp, Homo sapiens
aatacaagggggtcattgcgaagacacataagtgtttaacgatgtctacagcgtgtaatgccaatcgctattatagctgtaacatctaatctacctctagttagagcatatacttatgacagcagcttagagaccctagagaacagagtccatgtttgcttcatctttgcagcaccaatgttgagcacatggcctataccacagaggaggcctcaataaacatttgctagagtgatttacgtgtctcaaacaaaaggtctaaagtgcacagcttcatcctttaaatatacaaaaccatcgccaaagtatattgctacatgatttttttttaaaaaagcaagatggggccgggcgcaggagctcacgcctgtaatcccagcactttgggaggccaaggcgggtggatcacaaggtcaggagatcaagaccatcctggctaacacgg

SEQ ID NO: 95299 - DNA, 389 bp, Homo sapiens
aatacaggctggtgattatttattttatattttggattataacctaatactttttttttttttttttgccccaatttttcccccttccccccgggggggcggcccccctgggtttggggggcccttaaaaaaaaccccggggttttatttttggggcctttcttttttttttaacaaaaaaaaagggcccccgcgcattgggaaaccctttggcccccccctaaaaaaccccctttttcccaaaaaacccgggctcttttttttgggaaggggcaaaaaaaaaaaaaaatgggcccccaaagggggggggccccacgggaaaattggggtttttagccccctcccgggggaggggaaaaaaaaaaatggcccggaacccacccgcgtaa

SEQ ID NO: 95300 - DNA, 388 bp, Homo sapiens
aatacacgtgtgtgttcgtatgtttgtgtttgtgtgattgtatgtgtttgtgtgcgcgtgtatgtacatttgtgtgtgtgtgtgcacgcgtgtgtgtatgtaggtttgcgtttgtatgtgcgtgcgtgtgtgtgttcaagccctcacagtgctatgcaagagcgtatgacctctctctatttcatggccatggaaaccctatccatccttcagtgctgcctcctgagcagcccgggggctggtggcaggggcatatagcacccttgctcatgtgcacaccccagctgaggatcccagactgcaaaaggccggagccagctcttctgagcctctatgcatgtcacgcccgtaagccctgcccagctctaagcagggcagagcaggttct

SEQ ID NO: 95301 - DNA, 391 bp, Homo sapiens
aatacatggtgtgtgtgtgtgtgtgtgtgtgtataaatatataaaagaatccttgtcctgcctgtctcatgggcagcttggaggaaacactgtttttttgtttttttttttttaaaaaaggaattttttttttggtccccaggggggaggggaagggccaaaatttaattaaaggggacccccccccccgggggtaaaaggaattttcccgccctccccccccgaaggagaaaaaaaaagggggccccccccccacccgggataattttttggttttttaaaaaaaagggggttcccccttgcgggccagggggggtttaaacccctgaccctgggggaccccccccccccggccccccaaaggggggggccccacggcagggccccctgc

SEQ ID NO: 95302 - DNA, 399 bp, Homo sapiens
ttccccttccacacgcacacacagccaactaacagatctgccttctaagtccacaagtaactacgaggaaagaccaagccatgcgcacaccccgcactctgctcctgccccaccaccctaacagtgtgggcagggcccttcctgttccgccaggtttacgaggacagaccaagccacgcgcacaccccgcactctgctcctgcctcaccaccctaacagtgtgggcagggcctttcctgttctgccatgattagcacacatacactcgacaccttgcgtgtgtgtgtgtgggtgtctgtgttgtgtgcacttgtgtgtgttgcatgcatgtgttgcatgtgtcttgtatgcaagtgcatgtatgtgcatgtgtgaatggtttcgtagcatagtggtgtg

SEQ ID NO: 95303 - DNA, 400 bp, Homo sapiens
tgcgttgaaagctgcgaagttgacattgagatggtgtcttgctgtgtctctcaggctagagtgcagtgtgcagtggcacagcctcagcccactgcagcctccccatcccaggttccagagattctcctgcctcagcctgccaagtagctgggactacaggcatgccccaccatacccgggtgtccccctgaagcccagagaagggttacaatttacagaattgccgtctggacagctggagatccaaccaacatgtgagaataaaaggtgacatgttccctgtgctctgtgagttcaactgactgacataagacccaactgacggtaccagtttcgagtggctgctgtgaatgtgcatggaactcgacgcttcactgcccccagcaaacacttctgttct

SEQ ID NO: 95304 - DNA, 413 bp, Homo sapiens
aatacagggtggtggtgcatacctgtaattccagctacttgggagtctggggtgggaggatcccttgaggctgggaagtctacactacagtgagccaagatcatgccactgcactccagcctgggcgacagagtgagaccctgtcagctactgggaagactgacgtggtaggattgcttgagcctgggagtttgaggctacaatgagccatgattggaccactgaactccatcctgagtgacagggcaaggtcctgtttctgaataacatgttgcccagtcaatctctcttcctggattcagaaatctttcatggtagatccagccggaagtgacaaaaagacattcaaccagaagtatcatctcagagctattcacaatgaaaggtgatctctgcggctcaaatgtgttgag

SEQ ID NO: 95305 - DNA, 421 bp, Homo sapiens
aatacatgctgggaagcaagtgtgagccactgtgctcagtcttagacaaagactttaaatcaacagctttaaatatgctcacagatctcaagaaaactgtggacaaagaactaaaggagaccaaaagaacaacatttaaactaacatggaatgttgataaagagacagaaattataaaaacaggctgggcacagcagctcactcctataatcccaaggcaggccaaggcaggaagatcacttgagtccaagaatttgaaagcagtctggacaataaagtgagatcctgtttctacaattttttttttccagtgcagcaggcctgtggtctcagctactcaggaggctgaggcgggagagctgcttgggcctgggaggttgaggctgcagtaagccgtgataccaccactgcactccagccg

SEQ ID NO: 95306 - DNA, 398 bp, Homo sapiens
aatacagtgcgtgtgtgtgtgtgtgtgtatgggtggatgtgagtgtgcacaggtgcatgagcatctctgggcatcgagaataatcagagttggacctgctcataaggcccaatccagctgtcggccagttcccgcagggtgctgtacctccgctcaaactcctccttggtgcagtgctgcaacagctgacccacctcctcggtgaggtgagtcactgccaggtgcttatccagggtctcactccacttgctgcccaggatgctgtctagactggtagcacagcctgccgtccactgagccggcagcatgtcgggctggagcacctggcggcgggcactgagcatggctaggatgtggcggcagggcaggtggaaggcctggttaaagtagcagctgca

SEQ ID NO: 95307 - DNA, 393 bp, Homo sapiens
aatacagggtctctctccacaatgagttatttgatgctgaacaagagtgatgtggcctctgaaggttctcccacattcactatatttacaaggtttttttttttccatcatactttctttgtataattaaatctgagttttgtttgagcatctttcaacatgtaccatatttatgacaattctcttccataggatctatctgttctgcaacaagtattgatcttacagtaaaatttttcacaaattcattaaattctatgtctctttttctggaaggaatttttgtgcaggtagctatctcttgccctaaattattctccttgtttagctgctgattcttaaactggcctctagatttccagatttcttccggtacagactttctctttgcag

SEQ ID NO: 95308 - DNA, 615 bp, Homo sapiens
  misc_feature (1)...(615): n = a,t,c or g
agcccgtggggagctgggcgcgctcttctggagctggatggcctccagggtcccctcagagtgtctccgatggggaggctggacacagcatccctgcaccaagggggcagtgctctcgtcacagagcagagggccgcaccgcccgtgtttgtctttcccattgcagcttctcaggccctaggccaggcctcgttcccatcagataaagcctggggcggccggacgcagtgcaagcaatcgtgcctgactcacaggaagggaggaaaacaggaattcacgcagaagctgtaatgttcccccttggccctgggaagggtgtgaagggatgtgcgggggggcggctctgcccttcctcgcccccttccaggtgcctagacttgggaaggagagggatgccgccaagctcgggtcctgcagggccccggccttctggtgtgggatctgacttgggaaggcccggcgctggggctgctgcnnnnnnnnnnnnnnnnnnnnnnnnnnnnnnnnnnnnnnnnnnnnnnnnnnnnnnnnnntccagggatggagagggtcctgactggcagtgtcgaagccccggggtctctccttggtccctggctcccctcacagccctcc

SEQ ID NO: 95309 - DNA, 385 bp, Homo sapiens
cccacgcgtacgcaaacatagacttttttagcctttcttacgtccctaagctccttctgctcctccctggctgctctgagagcatcacactccttcctccaatacaatcagcttccgcagttcccattcttgagctgcttctgtagcttgcttcttctctcccacctgtccttggcacccacgtgaccgactgacccacacagactttgtgtattgcaacatcttatctgcatatcacttctcatccaagcaatcatctaccactttggccaggataagataaagggagttatccttcaagtttagccacttcaggccttaatttttttttgagatggggtctgactctgttgcccaggctcaagtgcagggatgctgcaacctg

SEQ ID NO: 95310 - DNA, 398 bp, Homo sapiens
  misc_feature (1)...(398): n = a,t,c or g
gactggggntgcctctgtatcttggctttagtaacgcttttaaaaagcaatgggacagacactttggaagacagtttggcagtttcttacaaaagaagaaattggcccaatgtgacagtcatgtcctactacttggcacttgtattccttggtatttgcacaattgatttgaaagcttatatccacacagaaacgtgcacacaaatgattataataactttattaataattgccaaaaacagaaagaaagcaagttgttcttcagtaggtgaatgaacaaaaaattgtactacattcgtacaatggagtcttattcatccttaagatgaaatgagctatcaagctataaaaaacattggggggggggatcatagatgcatattgctaggtgaaataag

SEQ ID NO: 95311 - DNA, 396 bp, Homo sapiens
cccacgcgttcgctgtgtttgctccattgtcccattggactttacctacaaaatgcaaattcaaagataacattttaaataatttgaagatgacaatcacaagatgttagtctcaaagggtgggacttttctgagcacagggtctgttttgcacatctgtgaagctagcctcggagcaacctttaagaatattgtttcagctagacaagagaaataagtgttgagatttatggcacttcagggtgactatagtcaataataatatgtcaaaataacttacagagtaaatttcaaatgtatcaccacaaaataatgtcaagcctgggtgcagtggctcatgcctgtaatcccagcactttgggaggccaaggtgggcagatcacgaggtcaggagat

SEQ ID NO: 95312 - DNA, 384 bp, Homo sapiens
  misc_feature (1)...(384): n = a,t,c or g
cnnnnnnnnnnnnnnnnnnnnnnnnnnnnnnnnnnnnnnnnnnnnnnnnnnnnnnnnnnnnnnnnnnnnnnnnnnnnnnnnnnnnnnnntcttttataatgaggggtaaatgttatttatatattctgaatacaagtttcttatcagatacatgatttccaaatattttcttccactccttgtattgccttttcattttcttgatgatgttctttgcggcacaaaaatgtttaagtttgataaagcctcaattacctatttttctttggttgcttgtgattttggtgttatatctaagaaaagatcatctaatccaaggtcaggaagatgtatacctatattttcttctaaaagttttatggctttagctcttaaatttagcta

SEQ ID NO: 95313 - DNA, 405 bp, Homo sapiens
gaatagtcgcacatctctcattttaaatcaaaatctagaaacaagcttagtgagaaaggcacatggaaagccaagacaggctaaaaattaggccttttgcaacaaaaaaattagcaaaattgcaaatgcaaaggaaaagttattgaaggaagttaaaagcgctacttccatgaacatgtgaatgatgagaaagtgaaacaactttatccctgagatgcagaaagttttagtggtctggaatgaaacattccctatgccaaagcctaatccagaacaaggctttaactctcttcaattctatcaaggctgagagaggggaggaagctgaagttggaagctaccaaacgttggttcatgaggtttaaggaaagttgtctccataacgtaaaagtacaagatgaaggg

SEQ ID NO: 95314 - DNA, 400 bp, Homo sapiens
cccacgcgtccggcctggccaacttggtgaaaccttgtctctactagaaatacaaaaaattagccaggcatgatggcacacacctgtaatctcagttactcaggaggctgaagcagaatagcttgaacccaagagagtccagctcaaaaacaacaacaagaacaaaagtatcacattggcataagaatagacatgtaaatcaaataacaaaatagagaattcaggtataaatcttcatatttatggctgattgactttgaacaaaggtgacgaggcaagtcagtatagcagcatattcttttcaacaaatggtgctggcagaagaaaaaaaaagtacttggatccttacctcacaccatgcacaaaaattagctcaacgtggactatatcagggtttctc

SEQ ID NO: 95315 - DNA, 389 bp, Homo sapiens
ttttttgtatatggagttagattggggcccagtttcattcttcttcatatggatatccagttttcccagcaccatttattgaagagactgtcttccccccagtgtatgtttttggcacctttgtaaaaaaaaaaaaaaattgagttcactgggggggtgaaaatttgtttctgagttctctactttgttcctttggcctatgggggggtttttatgctagaaccatgctgttttggttactaaagctctgtagtatattttgaagccagggagggggattccttcaattttgggtttattttgctaaggaaaaacattggctattttgggccttcgggggccccatataaattaaaggatttttttttcttattttggggaagaaggtg

SEQ ID NO: 95316 - DNA, 365 bp, Homo sapiens
cccacgcgtccgcaaaatctaatttgagatggatcataaaactaaatttaagagctaaaactataaaactgctagaagaaaacatgggggaaaatctctgggaccttgaattaagcagaggattcttggataggacacaaaattatattccataaagttaaaattgagaaaatgaacttcattaaaattaaaaacttttgcttttcaagagacacttaaaaatcatagatggctgggaaaaatattttatctggtaaggacctttattcagaatatctaaagaaataatgcaacttaataataagacaaagtaaaacaagcacttgaatgttcatagcagcattattcataatagccaaacactg

SEQ ID NO: 95317 - DNA, 367 bp, Homo sapiens
tctttttgagagaattgatttcattttaacagtattgagtttaatccactaatatgttttatttcttcatttatttagatcttcttcaatttcttgcaacagtattttgtagttttcagtttctaggtcttgcacaccttttgacaaatttatccctaaaaatttcatatttcttatgctaatgttaatggtagtttaaaatattcagtttctgattgttgctacatatagaaacataatttatttatttatttttttattttatttcatttttgagacagagtctggctctgtcgcccaggctggagtgcagtggcgcgatctcggctcactgcaacctccgccttctgagttcaagcaatttctc

SEQ ID NO: 95318 - DNA, 373 bp, Homo sapiens
ctttaagtgttggtgacactctggttttattcctccctttgtgaaggattttgttttgttttctttttttttttttgaaaaaaattttttttgggcccccgggtggaagggcggggggggaatttaatttattggggccccccccctccagggtaaaggtttttttctggcttaaaaccccaaagaggggggaataacggggggggccccccccacccatttatttttggttttttaaaaaaaaaggggttttcccatggggggcagggggggtttgatttcccggccttgggaaccccctttctttggccccccgaaagggttttaaaaaaattttctggttcttttttgttttaaacaacaaacgggaaag

SEQ ID NO: 95319 - DNA, 374 bp, Homo sapiens
atttttaatgcagacaaaattgcccttctggaaaaaattttaaaagccacaaggaacttctgttggtagggaagaaaagcaagcaccaggatttaaggcaggaaggaataggctaactactattttgtgcaagtgcagtcgggtttatgatcagggctgcccttatctgtaaagctgctaatccccaagtcttgaaaggaagagataaacaccagctgccagtctttaggttgttgtacaacaagaaggcatggacaacaagaaccctttttctggattgctttcatcaatgctttgtccctgaagtcagaaagtaccttgccagtaaaggattggtttttaaagttcttttgatattggataatggcccctgc

SEQ ID NO: 95320 - DNA, 390 bp, Homo sapiens
  misc_feature (1)...(390): n = a,t,c or g
aatcactggaacccggaaaacagaggttgtagtgagccaagattgagccactgcactccagcctgggcaacagagacagactcagtctcaaaaaaaaaaaaaaaaaaaaaagggggggggggttttaaaaaaaaaaaaattttttccggggggggggggaaaaaaattttttttttttggggccaaaaaaaatatattggggggggggttataaaaaagggggggggggaaaaaaccgggggaaaaaaaaaaataatgtggaaaaaaaaaaaattttgnggggaaaccaaattaaaaattatgtgggtgtgttttatgttttgattaatttaattatccgggaattggaataattattttttattggggcaccttaattaaatttttggg

SEQ ID NO: 95321 - DNA, 422 bp, Homo sapiens
ttaaaaagtaggaaaaaggtttgaacatactcttcaccaaagaagatatgcagatggaaaaaaatttgaaaagatgcttaacataatttgttgttaaggagttgcaaattaaaatgagatatcactacccacctattcaaatggctaaaatttaaaaaaactgacaatatcaatcgcttggcaaggatacagaacaataggtactctttttattgctagtaagaacagccattttggtagtttctttcaaagctaaacatgatcttaccatacaatccagcatatcatgctcctaagtatttacccaaatgcattgaaaaagcatgtccacacaaaaacctgcatgtgaatgtttatagcagctttattcataatcaccaaaaactggaaagaaccaagatgtccttctatatgtgaatgga

SEQ ID NO: 95322 - DNA, 406 bp, Homo sapiens
cacaggttgcagtgagccgagatcatgccactgcactccagcctgggcaacagagcaagactctgtctcaaaaaaaaaaaaggaaactttcccccattggaattggccccccattcccctttcggaccctttaggatcccccaaaacattaaagggaaaagccagggaatacccgggtaaaaattcttttttttcttcccccaaaaaaaaggaaggttggggaaaacaagggctttggtttggtaacgggaaatggttcggggccccggaacaagaccgggccaaaaaaaagaaggaaatttttggagaaggaaagggggggtaacccaaaattggaaaagaatcttttggccaaattaaaaggccccattggattaaggggccccggaagggcccttttatattt

SEQ ID NO: 95323 - DNA, 365 bp, Homo sapiens
aagtcttgggcctcttaaaatcattcttgagggatggaatcagtttccgaactcattgatcttcctattttgaccttctcccatgaatcacgatgttcttaacagcatctagaatggtgaatcctttccaggtttttaatttgctttgcccagatccattagcgggatcacaatctgtgacagttatagtcttacgaaaagtgcaaatgactccttgattcctgtgctgcacaataggtattgtgttagcaggcacgaaaatattaatctccttgtatatctctatccaagttcttgggtgactgggtatattgtcagtgaacagctatatatatatatattatagtggtctggaactgatcatt

SEQ ID NO: 95324 - DNA, 395 bp, Homo sapiens
aacccccattggatatttttgtgaacatgtaacatgtgggttgattagaggggggggccggggtttttctttttctttttttttttttcaaaaaaaagccaaattttgccccccggctggaagggaaggggggaaccccgggttaatggaaccccccccccccggggtaaagggaatcccccggcccaacccccccaggaagggggaaaaacggggcccccccataagcccgggtaatttttgtgttttttaaaaaaaaagggggttcaaaaaggggggtaaggggggccccaacccccggccctaagggagccccccggcccggccccccaaaggggggggaaaaacgggaaggacccccgggcccaacccggcccaatttatattatgcgcac

SEQ ID NO: 95325 - DNA, 418 bp, Homo sapiens
  misc_feature (1)...(418): n = a,t,c or g
cccacgcgtccggttagcttgagcctggaaggtggaggttgcagtaagtcgagatcacgctactgcactccagcctgggcgacagagcaaaagtctgtctcaaaaaaaacaaaaaaaatttgaaagatcacattcacataacttttattacggtatattgttaaagttgttcttttttttttaaagttgggaaccatcttggtttcaggcaaccactgggggtcttgaaacataccacccgcaaatacggggggctactatgtactttttgaataaaaaaaaaggaagtgtatgtgtgtgtgttaaagacatgtaaataaaatttcagggcctgagncaaaagaaaaaaaaaaaaataaaaaaaaaaaaaaaaaaanaaaagagggggccccttaaaaaaaaacccacattttccccc

SEQ ID NO: 95326 - DNA, 379 bp, Homo sapiens
  misc_feature (1)...(379): n = a,t,c or g
ggtatagactcttggctgctaatttgtttactatccnnnagaaatgagggacaaataaagtcttatagattcttggctgccaatttgttttttctttcagtactttgaacatattatcccattctctccatgcctgtgaaatttctgctgagaaatctgctgctagtctaatagatgctcccttatatgtgacttgatagtttcctcttgctgttttttttagaattctctatgtccttgacttttgacaatttgactataaatcctcaaggaagacttccattttcagctattattttaataaatagggggnctttttttttcctttctttttattttgagacagagtcttaccttcatcacccaggctggagggcag

SEQ ID NO: 95327 - DNA, 380 bp, Homo sapiens
  misc_feature (1)...(380): n = a,t,c or g
atcaaatggctgtaggattgcgactttatttctgggnncccaacttctattccattgctctatgtgtctgtttttgtaccattaccatgctgttttggttactgtagcccaatagtactttgaaattaagtaatgcaatgtctctgcaaataaatattgctttgtctatttgggctcttttttgtcactgttttggtcctgtgactattacacgtgatgttgtgttgctacatttcaattgagcggacattaagatgtaggctttaaaaaaagacacagaatacagtcatagtgattccctgctatatttatttattttgccttatgctgtttgaagtattgaaattgaaactaagtgtttatgatttttgaatgggatt

SEQ ID NO: 95328 - DNA, 402 bp, Homo sapiens
  misc_feature (1)...(402): n = a,t,c or g
ttatttgttatgggatgagctgcgtttcttcattattcatatgttgaagctgtaacccccagccagaaccttagagtatgactgcatttttttagagatagggcctttataaaggttaaaatggggtcattagggttggccttaatccaaaataattgatgtccttaaaagaagaggagattaggacacaacacagaccaagggatgatcttgtgaggacctatcaagaaagtggccatctgtggccgggtgcagtggcttatgcctgtaatgccagcgctttaagaggttgaggcaggcagattacttgaggtcaggagttcaagaccactgtgaaaccctgtctttactaaaaatacaaaaattagccagggatggtggtgcatgcctgtagccccggcn

SEQ ID NO: 95329 - DNA, 410 bp, Homo sapiens
  misc_feature (1)...(410): n = a,t,c or g
gtgaaaccccatctctactaaaaatacaaaaattagctgggtatggtagtgttcaggcccaggtatagggggtcagcccagagctgtgggtgaaaggacaggcccatggtcccacctgtgggagcaggagaggaccaggccgatgagccttgcagggggcacgccagcttgtggtcccagctagtttctgctcccaccacccccatcccactcccagggagggatgtcccttctagggctacccccttccctgcagccctggctgctcagcagccgccttgagcaagcccttatccacttcctcctggcctgggggcggggcacgcatctgccagtcctgtgaccgtccccttcagccccatctctgagagtgnnggttcctgagagtctgcccttctgccccgcacacc

SEQ ID NO: 95330 - DNA, 391 bp, Homo sapiens
  misc_feature (1)...(391): n = a,t,c or g
aagtagaccaattcctcatatcccatgatctatcaaaactcaccgaagatgaagtacataacctgaatagttctacaactattggtagaagttgaattcaaagttaaaaagctgctgaaaaaagaaatcttcaggcccagatggtattactgggaaattctactaaacagttagagaagaagtaacaccaattttacatatctattccagaaatagagaaggaggaaacacttgtcaactcattttatgaggccagaatcatcctaatccaaaaccagacaagaacaaaccatagaccaatatagatgcaaaaaccaccagcaaagtattaccgaatagaatctggcagtatgtaaaaataatcatacagcataattaagtagggtttatn

SEQ ID NO: 95331 - DNA, 445 bp, Homo sapiens
tggatctgcattcccgggtcgagccacgcgtgcgaccaagcgttcgcaaacagtaagttgtacttctaaaagtattaatttgtgcttcaaaggacactttgaagagagcgaaaagacaacccataggatgggaaaaaatatttgtaaatcatatgcctgataaggacttaataccagaatacaaaatcaatatgcaaaaatcaggtgtatttctattcactaacaactcctacagctcaacaacagacaacgatattaataaatgggcaaaagacttgagtagacatttctctgaggaagatatacaaatggccaataagcacatggaaaagataatcagtatcattagtcattagggaaataaaaattaaaaccacagggagatagctcttcacacccaagtgttggcaaggatgaggagaaattataaccctggtgcattaat

SEQ ID NO: 95332 - DNA, 409 bp, Homo sapiens
  misc_feature (1)...(409): n = a,t,c or g
taggaggattgcttgaggccaggagttcaagaccagctcaggcaacaaagtgagacccctgtctctactaaagtaaataaaacaataaaataaaaaaaaaaattcgagagatcgaaccatcatctgccagtttgttttanaaaaaaagagagagagaaggaagactgcgtgcaataaggctcatgcctgtaatcccaccactttgggaggccaaggtgggaggattgcttgagcccaggagttgaaaaccagcctgggcaacaaagcaagacccggtatctacaaaaaaaaaaaaagggggggccctttaaagaaatacattttttcgggcggggggggggaagggttatttttttttttggggcccccaaaataatttctgggggcgggtgtttaaacgggggaaggg

SEQ ID NO: 95333 - DNA, 394 bp, Homo sapiens
agtgagacttcgtctcaaaacaacattcaaaaattagccgggtgtggaggcgtgcgcctgtaatcctacctactcgggaggctgaggcgggagaattgcttgaacccagcactccatcctggacgacagagtaagactccatctcaaaaaaaaaaaggggggcgcctcttatgagattccccgtaccgtcccttgcccttgccggtaattgctgtttatatgagctctgcacacatttttcctgcggcctctggtcaaagctcctgggaacggaaaacacccgtgccccccacatgtgtgagcgcgcccacggagcccgcggcctcctccgcctgctgcgctcgccctcccgcccctgctcccgggaccgccccttgggcggacctccgggtcg

SEQ ID NO: 95334 - DNA, 396 bp, Homo sapiens
  misc_feature (1)...(396): n = a,t,c or g
agtgagacttcgtctcaaaaaaacattcaaaaattatccgggtgtggtggcgtgcgcctgtaatcctagctactcgggaggctgaggtgggagaattgcttgaacccagcactccatcctggacaacagagtaagactccatctcaaaaaaaaaaaagggggggcccctttaaagagacaaattttttgccccggggggggggaaggaaaaatttttttttgggggccccaaaaataaattccggggggggggttttaaaaaggggggggggggaaaacccgggggttcccccaattaaagccttgtggaaaaaaannngnnnntnnnnnactcctttgtgtgtncccgccctccctaatgcttcccaagattctctatgaggagaggtagaggcg

SEQ ID NO: 95335 - DNA, 395 bp, Homo sapiens
cgggatgtggaggttgcggtgggtcttgattgtgccactgcactccagcctgggtgaagaagcaagactccatctcaaaaaaaaaaattctcccattttattgacagggaaacaaagattcactgatattaatgggttcggggtcttggaggttgggaaaggaggcagttttgaaccggatccacccatttcacctaatggttctaggcaataaagctggggaatggttggaaaatttggggttaaaaaaaccaaaaacgatgccacatgtcataggggacagaatgcagttatttctggggtcactcagcgaatgttgcgaaaacgtgcagcttatttttggaggaatctcctggcttcaaagttcttttctctcttgagaaagttaccacatc

SEQ ID NO: 95336 - DNA, 392 bp, Homo sapiens
  misc_feature (1)...(392): n = a,t,c or g
ccctgtctctaccaaaaatacaaaaattatctgggtgtggtggtgtgtgcggtagttccagctgggaggattgggtgagcccgggaggtggaggttgtggcgagccgagatggcgccattgcattccagcctgggcaacaagagcctaaaaaaaaataataaaaaaaaaaaaataaaanaggggggggggggttggggggtatccgggggtcttttttaaaaaaagggttttttaaaaaaaaatggcccctgccctttttgttcaaaaaaaaggggggagaaaaaccacactctttgccaaaaaaagggttttttgagggtttttttcttttaaaaaattttttggggggggaaggagagagatttccccccctccctcctttttttgtaaa

SEQ ID NO: 95337 - DNA, 391 bp, Homo sapiens
ttggattcagtttgatagcattttgttgaggacttttgcatctctgttcatcagagatattggtctgtggtttacttcttttgttatgtcctttcctggctttggtatcaaggcgatactggtttcacggaatgagttagagagaatttcctctttttcaatcttttggaatagattcagtaggattggttccaattcttctttggatgtctggttaattcagttgttaatccacctggttctgggctatttttttttcttttggaggcaattttatttttattattttattttattttatttttattaatttttttatttttattttattattatcatttttttgagatggagtctcactctgtcacccaggctggaatgcagtggcatg

SEQ ID NO: 95338 - DNA, 404 bp, Homo sapiens
  misc_feature (1)...(404): n = a,t,c or g
ggtttaagtgatagtcacacctcagcctctcaagtagttgggactatagacacaggccaccatgcctggctagtttttntttttttttttcttttttgcctnggcaagggtgggaaaaaaagggttttcccttttgccccggggggggggggccccccccccgcgggggggccccccccttttgtccccccaaaaggggggtgggggggggggcccccccgggttgggaaaaaaaacattcgggggggagccattttttcttttttgttatttttaaaatccctgggggggggggggggggggtttagccccggtgcccccctttttttgtggggccccacccttgcctcgttttttcttaaacccctttatttatgttttttttaaaaaaaaaaaaaaaaaat

SEQ ID NO: 95339 - DNA, 397 bp, Homo sapiens
attgctgcgtcaaagaatatgatgattattactttttttctactataatcagattgctctccaaaaaggctgttgataatcaaatgttcaccaagaatgcttgatagtgtacatttcctcgtgcccttgctagctctgggtattatctgtactttaacatttttgccaatctgatggatgaaaaattacacctgctttatgttgcatttccatgattagcgaagttgaggatcttttcatatgcttattggtcattagtattcccttgtctgtgaattgtgtgttcatattcttcacatttcttaacttttaggcactttctccgtattagagatattaacccatctgccatttttttaggcaaatactttctcccaatttgttgtttgtctcttct

SEQ ID NO: 95340 - DNA, 424 bp, Homo sapiens
  misc_feature (1)...(424): n = a,t,c or g
cccacgttcagtgaggcaggtattattgtacctgttttatggatagggaaactgaggctagactctaaattactactctgaggcacatctttttttttttttttttttttgagaaaagggggttttttttttcccccgggggggggggaaaaaaatttttttggtttaaaaaaacccttcttttggggggggagggtttttccccccccccctcttaaaaaaaaaaaaaaaaaaaaaaaaaaaaaaaaaaaaaaaaaanagggggggggggccttaaaaaaaaaaaaaaataaaccccggggggggggggaaatttttttttttttggggggccaaaaaaattttttgggggggggggtttaaaaaaacgggggggggaaaaaacccgggccccccaaaataaaaagggggtttcccagnnnnn

SEQ ID NO: 95341 - DNA, 425 bp, Homo sapiens
  misc_feature (1)...(425): n = a,t,c or g
cccacgcgtccggtgaagggtccgtttgaaatgagggtataggggcaggccatgaggtcagctttgcagcgaacaagtgcagaagtatgagaaaaaatgttgaggtcctggctttgaaccgaaggctagatggtgagctactaagtggtctaacaagtacacaggctttgcctggctgggcatatttgcatctactgtcccatcatgctgtgagacctttatttttatgttttaaaagaggctgggtcttgctgtgtcacccaggctggagtgcagtggcacaatcacagctttgaactcctgggccaagtgatcctccggcctcatctcccaagtagctaggactacaggagcataccaccatgcctggctaattttaaaaacttttttagagagcgggctcgctatgcttgcagaatnnnnnn

SEQ ID NO: 95342 - DNA, 410 bp, Homo sapiens
agctgatagttttgagtagggcccaagaagtcactgcaacaggtctgggctgctgtgcaagctactctgccacttgagtcatatgatctagcacatccaataatccttaaagtttcgttggcagatagggatgccatttgaaatctttggcagatacctatagttgcctcatagtacatacccttaggattttcagcaaagccatgccatcctctgtggatatctactcctcttttgaaaaaaaaaaaacccatttttttttgacggggggcgggggcccccccctgtattccaattatttggggaggctggggggggcaaatcatttgaccccaggagttaaaaaccagccggggcaatttggcaaacccccacctttacaaaaggttcaaactttagcggggcggggg

SEQ ID NO: 95343 - DNA, 407 bp, Homo sapiens
caactccagcctcattaaacatcggagaattcacactggagagagaccttatcagtgcagtgaatgtggaagagtctttaaccaaaattctcatctcattcagcaccagaaagttcacaccagataaagaatgtatatataaagcagatggggaaagacttcacacagaaatctactctgatttagcactgggacctacgttttaaaaaaagtattcttgtagaatacagataacataaaatctaacatcttaaccatgttaaagtgtatagttcagtaccgttaagtcattcacattgtgcaatgaatatctagaagtcttttcaacttatgaaactaagtctataccttttaaaaccttattcctcactccatccagcctcttgacaagcaccgctctgtatgaa

SEQ ID NO: 95344 - DNA, 399 bp, Homo sapiens
  misc_feature (1)...(399): n = a,t,c or g
ttaaatttgtgaatgtcaacatctccagcgtatattattaagaggaacaatttagataatacgtgaacatattttctcttgtggaaaacattaggattgtgtaaaggattcttgattaaggtggnnnnnncnnccnnccncccnccccnncctcccctccnccccccccctgcccttcncccctctcctccctgtttctcacaaaatgctctgcgtattgaacccccgctcaccgtcccccccccccaggtcctttcgtcccccccccaaaaccttgttgcccccctccacctcccctacgtccctggcctcccctcccccttcttacaaacccaattcccccccccaccctgtcctttcaccccgggcctgccctctctaattaagccaccctccccc

SEQ ID NO: 95345 - DNA, 395 bp, Homo sapiens
taaagagggagcctgggaagttgaggctgcggtaagccctgattgcacccctgcattccagcctgggccacagagagagaccgtgtctcaaaaaacaaacaaacaaaacaaaggagaataaggttgggaccagattatggaaaaggaaaccctggctgctgttctgtggtatgacgaatgggaatgcacagccattaacttttctgcagataatccgtctcagagacaatcagagtaaactagaatttagtccctgagattggctgtccttttctccactcaatcaacataaaagccttatcatggaaagcattttgagtgtgaaacaaaatgtacaatcctggtatctaacgactccctccttggtaaaatttcatcttctacagagagaacgt

SEQ ID NO: 95346 - DNA, 404 bp, Homo sapiens
aagggttctcttttctcccaccctcgcctacacttatctcttgttttatttgggagcaaccatcttgatgggtgtgaatatatggaaacaacctaactgtccaacaaaagacaacagaaaatcaaactgcagtacatatatagaatggaatattattcagccttaaaaaagaaatagattctgctttttgccataagataggtaaacctaggggacattatgctaagtgaagtaagccaaatgcagaaagaaaaatattgtattatctcacatgtggaatcttaaaaaaaagtcaaatacatagtgaaatcatatcactgcttcagattttattttttgagagagaaacaacatgtctgtatgctgtgagttagaaacaccatagaaagggagatgttgaaaag

SEQ ID NO: 95347 - DNA, 399 bp, Homo sapiens
  misc_feature (1)...(399): n = a,t,c or g
agaattattccattttgccttgcttgtgtctagcatagagtaaaaggggcttgatacatatttcaagggagggaagaaggatatggatggagtgtgtgagtgctcacatgaaccgatgaagattgaatcagtgtgaaccgggcatggtggaacgcacctgtagtcccacctactcaggaggctaagctgggagcattgcttgagcgcatgaattctaggctgtggtgagccgtgatcacacctgtgaatacaaccaagaccctttgtctannaaaaaaaaaaaaaaaaaaaaaaaaaaaaaataaaaaaaaaaaaaaaaaaaaaaaaaaaaaaanaaggggggggggtcttttaaaaaaaaaatattaaatccccggggggggggggaatttttttttg

SEQ ID NO: 95348 - DNA, 455 bp, Homo sapiens
  misc_feature (1)...(455): n = a,t,c or g
gattgtcaatctgcaggnaccggnncggaanaaccggggcgacccacacgtccgtctagatttgagattgctgagttgtattaaatttgcacatacaatttgttagagattgccaaattcccccaacgtaagagttgtgtcatttacattcccaccagcaatgaatgagagtgcctcacaagccttgccaacagaatgtgttgccaagcttttaaactttttgccaatgtgataaaaaagaaatggtatctcagcgtcattttatttgcatttcttttattatgagtaaaattaaaatagtttcatatgattaaggactattgtatgcctttttaatgaatttttggcttgtgcctttaactcattgttttattaaggctttagttatttcccccttttaagttgctaaatatattaaagataatagctttttatctgtgatacgttttgcaaac

SEQ ID NO: 95349 - DNA, 378 bp, Homo sapiens
cccaatttcagtacttttactataatggctcagtaatcaaggcagtgtggtattggtcaaaaaacagaaaaaatagatcaatgaaacagaacagagagcccagataaaaacctgcataaacatatgcaactgatctttgacaagggaacaaacacacctcaatgtagaaaggatgatcttttcaagaaatggtgctggaataactgaacatccacgtgccaaaaaaaaaaaaaaaaaaaagggggggggccttaaaaagaacaaaatttaacgcccccgggatgggaagatataatttttttatttggggccccaaaaaatatgcctggggccggggttaaaacacggtggggagggaaaaaccctgggtttccccag

SEQ ID NO: 95350 - DNA, 384 bp, Homo sapiens
  misc_feature (1)...(384): n = a,t,c or g
gggatgagcagggaagcatagagaccctctgggagccatctcaccagtccaggcagtggcttatataatacacatcggcgtcctggggtggtgccaggtacacagcaagcgctgcaggatggaagacattgctgttactgtttttgtttatttgagacagggtcttgctctgtcacccangctggagtgcattgacacaaccacggatcattgcagcctcaaccttccaggctcaagcaatccttctggctcatgcatataggggactgtgactaccggaggtgcatgccaccatgccgggccaatttttttaattttctttgcaaaaaaaaaaaaacactgcgccgccaagaggtgaatcaaacccctgcccttgtgcgggta

SEQ ID NO: 95351 - DNA, 390 bp, Homo sapiens
cggacgcgtgggcgggaggctgaggcaggagaatcacttgagcccgggaggtggaggttgcagtgagccgaacgaaattgagccacttcaccccagcctgggcgaaagagtgaaattccattcaaaaaaaaaaggatgaggactgggataaactgggggctggggggggggaaaatggaagtgaaggaaggccaaaaaaaacaaaaaaggcctggggcggcgactcacgcctataatcccagcactttgggaggctgaaaagggggattgtttgaggccaaaagttgaataccagtctgggcagcatagcaagaccctgcctctacaaaaaaaaaaaaaggggggggcctttaaaaaaaacaaatttttattcccgggggtggaaaattt

SEQ ID NO: 95352 - DNA, 390 bp, Homo sapiens
cccacgcgtgcgaggatttttcatgagaaagtttgtggactcctacttagtgccctatacaaaaagtaacttaaaatggaccatagacctacatgtaagagccaaagccataaatctcttaaattaaaatgtaagaatacatctttatgaccgtgagttatgcaatggcttcttagaaatgattaaaaaaacaaaagcagcagcaacaacaacaaaattagacttcataaaaattaaaaacttttgtgctcaacagatgtcatcaagaaagtgaaaagacagtccacaaaatggaagaaaaaatgttcctatcacatatctgataaaggacttgtatccagaaaatatgtgaagaaagcttataactcatcaattagaacacaatcccat

SEQ ID NO: 95353 - DNA, 394 bp, Homo sapiens
tcacattgattgatttgcatatgttgttccatgttggcatccttgggatgaatcccacttagacacgatgaatggtcttttacatagaatgattttggaaatattacagacttctctgttttttggaatagtttgagtaggattgatagtaattcttccttcaatgtttagtaaaattaatcagtgaagccattggatccagttttttctttgctaggagatgttttattatgggtccaatctcatttatccagttcttctaggtttgtggtttggttgcgtttttttttttggtttggtttttgcttaatggaggcccggatctttttgaccattaaagcaaatggctaaactgggaaaactggctctgtttgcctttaatactttttggaag

SEQ ID NO: 95354 - DNA, 407 bp, Homo sapiens
tagacatcccgtcctattcttgtttttaaacggaatctaaagttagccgggcatggtggcgctcacctgtggtcccagctactcaggaggctgaggtggggggattgcttgagcccgggagttcgaggctgtagtgagctatgatcacgccactgtactcacctgggtgtcggagagagaccttgtctctagaaaaaaatgtttttttaaaaaggaacctttccaatatttcttcattaagaataatgtagatttttagtacatgccttttattagggctaaagaagttcctttatattcttagttgctgagcattttaattgtgaatgggttttgaatttaatcaaatgctctttcagaatctgctgagatgatcatttggttttttccttttatctgtgaatgcg

SEQ ID NO: 95355 - DNA, 400 bp, Homo sapiens
  misc_feature (1)...(400): n = a,t,c or g
aaaatattcatgtaaatcatgatgnaaacttttgtattttcatccaggctttggtgttccatttataaagctcaggcagagtagatttagcataagtttaagtgctctaggatttttgaatggtacgtgaggactggcttcaacttcaagtcaccagctgcattagcccctgacaagacagtcagcttgtcctttgaagctctgaagccaggcattgacttcttctttctagctatgaaagtctaggtggcattttcttccaatagaaggctctttcatctacatgaaaaatctgttgtttagtgtagtgaccttcatatcaatggtcttagcaagatctggagtgcttgctgcctcatcttgcacttgattttacggagacggctttttttcttaaact

SEQ ID NO: 95356 - DNA, 407 bp, Homo sapiens
  misc_feature (1)...(407): n = a,t,c or g
cccacgcgtccgcccacgcgtccgcaaactcattacattattaaatgtttctcaaagatggagttcagaaaaaaaaaaaaaaaaaaaaaaaacaaaaaaaaaaaaaaaaaaaaaaaaaaggggggggggccgcctttaaaaaaaaaaaaaaaaaaagccccggcgcgggcgagtgaatctttttttttggggacccaaaaaatcaaccccgccgcgggtttttaaacaccgggggggggaaaaaccccccccccccccccaaaaaaaccccgcgaaagaaaatnnnnnntgggggtgggcagcacatggcatggtatttcgcccataaaanatagtaaaaaaacaaaaagcaccaaaaccctatattaaccgtctcacatctttggcagtttgttcctcaatgctag

SEQ ID NO: 95357 - DNA, 409 bp, Homo sapiens
tcgctagttctagatcgcgagcggcttccttttttttatttattttggtgtcattggccgacccccaaaaagagggggggttttttttccgggtggggggggggccccccaccccccccagggggggtgctaaaaaaaaaaaagggggggggggggggggcctccccccttttttcccccctctttgggggggttggggcgcccgcgccctatgtccaaaattaaaacccccccctccgcaggggggaaaccccctcttttttaagaaatcaaaattaaacggggggggggggcccccctcaataaccccccctttttggggggcctggggggaaaaatttttcccccccccggggggggggggggggggggccaaaaaccccccccccccccccccccgggggagaag

SEQ ID NO: 95358 - DNA, 400 bp, Homo sapiens
catctgtatatctggtgaaatgtctgctaaggtctttagcctattttttaatagggatggttgttttctcattgttgagttttaagagttccttatatattttggatatttaaatatactacaaataaacagtcctttaacagataaatgttttgcaaatattttctcttagtctgtggcttctgtctttattcccttgaagggggctgtcacaaagcagtttatctttttttcttttttttttttttgaaaaacaatttttttttttttggcccggttggaggggaagggcccggtttttgtttataaaaaccttggtttccagggttaaagaaaattttctgccttaaccccccaaatatagggaaaaacggggtttccccccccccccggtttattg

SEQ ID NO: 95359 - DNA, 404 bp, Homo sapiens
  misc_feature (1)...(404): n = a,t,c or g
gtttcaccatgctggccaggctcgcttttaactcctgacctcgtgatccacccgcctcagcctcccaaagtgctgggattacaggcgtgagctactacggccagcactttgccagagacttttaaatggttgatttgaaaaaaataattttcaccagtttcacttggaagctggtctgcagagctcttttcacttcatgttgaaagtcaatctctggaggtacctctcatacattactcatccctgcatatatatttcccctccctcatccttcctacttaatttcatcataattctaaattcagggtttattggttataaaaaattattcacagctgtgctatatagtactatgattatatttcttatgtgccttttagntntctgcaaagatattaactgct

SEQ ID NO: 95360 - DNA, 401 bp, Homo sapiens
catctgtatatctggtgaaatgtctgctatggtctttagcctattttttaatagggatggttgttttctcattgttgagttttaagagttccttatatattttggatatttaaatatactacaaataaacagtcctttaacagataaatgttttgcaaatattttctcttagtctgtggcttctgtctttattcccttgaaggtgtctgtcacaaagcagattatctttttttcttttttttttttttaaaaaaatatttttttttttttgccccggttggaatcaaaaggcccggttttttataaaaaaaaacttggttttcggggttaaaaaaatttttttggctaaacctcccaaaaacttggaattaaggggtttccccccccgccccggttaattg

SEQ ID NO: 95361 - DNA, 406 bp, Homo sapiens
catctgtatatctggtgaaatgtctgctaaggtctttagcctattttttaatagggatggttgttttctcattgttgagttttaagagttccttatatattttggatatttaaatatactacaaataaacagtcctttaacagataaatgttttgcaaatattttctcttagtctgaggcttctgtctttattcccttgaaggtggctgtcacaaagcagattatctttttttctttttttttttttttaaaaacaaattttttttttttggcccagctggaagggaagggcccggctttggtttaataaaaaccccgtttcccggggaaaaaaaattttttttccctaccccccccaataaggggaaataaggggggttgcccccccccccgccttatttttttt

SEQ ID NO: 95362 - DNA, 406 bp, Homo sapiens
aagaagaaaaagaagaaacccactaccttcccaggattgcctttttttttttccttatctttacccccgagggtgcctggggcgcgggggcccccctcgtcctttccatccaaacccgggctgggatgttaaataaaaaaatcaggggtctcaccagcccccaaaaaaaaaaaaccccgaaaaaccaacccaaaaaatttcccaaggccaaacccaaaaggggggggggaaaaattttttaatttaccaacccacccaccggggggaacccccccttttttttaaaggcgccgggaaaacccccccgggtttgccccccaaaagggggggttttttcccccggggggaggaattccaggggggaacctcgggggggcccaaaaaaaaaaaaaaaaaaggggggggc

SEQ ID NO: 95363 - DNA, 379 bp, Homo sapiens
cttgatttaaccattccacagcgtacatcgtattccatacgtcacattgagtcagggccagtggcacaggcctatagtcacagctacttgggaggttgagttaggaagatccctggagcctaggagttctagtccagcttgggcaacatagtgagaccccatctctatttaaaaaaaaaaaaaaattcccgcctgggcaccaagaaaaaaactccaccttaaaacaacacctccaacaacaacaacaacaaaccttggggctgggggggggggatcatgccagggattttaccatttggagacgccaaggggggcagattgtttgagcccaggaggtaaagactgcagggagccctgatggagccactcgcctgcagcc

SEQ ID NO: 95364 - DNA, 431 bp, Homo sapiens
caacaaatgagggataagaggaatttatttgaacataataaaagccagacatgaaaagcccacggtagacaccatacttagtggtgaaagcttttcctctaagatcaagacaatgctcatttcaccattcctattcaacacagtactaggagttctagcctgagctagaaaaagaaaagacatctaagttggaaagtaagaagtaaaatcctatatgttcacaaatgatatgatctttagacaacccgaaagattccacaccaaaaaaaaaaaaaaccggttatttcatggggggtccgggatccaaaccccccccccaaagggggggggctttcttatcccttaccagggaccccctggagagggaatttccaaaaacggcccttttcaccttggggcaaaaaaaaataaagggcccaaaatttttctcg

SEQ ID NO: 95365 - DNA, 403 bp, Homo sapiens
  misc_feature (1)...(403): n = a,t,c or g
cagggtgagcagatcccagcctctttatgccgttattcctgaatcagccctccattttgaacacagtccagttggcctcctctctgcctccaggtctgctcttgacctcgagctggagttcattctgcttctctccattagggcaatgagtctctgctgcctggtgagaaacgcaaggctgacaaggcccttggagattggctcattgcacagataaagaaagaagaaagaaagagagagagagaaagaaaaagacaaagaaagaaagaaagaaagaaagaaagaaagaaagaaaagaaagaatgaatgaaaaacaataaaaaaaaaaataanaaagggggggggggggtggggggtatacntagtacacccgcccgccgcgccgcggctattctttttattt

SEQ ID NO: 95366 - DNA, 407 bp, Homo sapiens
  misc_feature (1)...(407): n = a,t,c or g
tctgggattgccaggtatttggtaagaggaaataagcagaaccctggttaatacactattccctccttcccccaaaccctcactctttttttttttggaaagggagttccccggtggtggcagggacctaaaaccggccattggccccatggccctcaaccgggggaaaaaaagggaaaccccgcctcccaaaaaaaaaaaaaaaaaaaaaaanggggggggggccccaaaaaaaaaaaaaaattaaaccgcggggggggggggaaaaaatttttttttagggggccccaaaaaaaaaaacgggggggggggtttaaaaacggggggggggggaaaaaccgggggcccccccaaaaaaaagggggtggagagaaaannnnnnnnnnnnnnnnnnntnnnnntnnttg

SEQ ID NO: 95367 - DNA, 409 bp, Homo sapiens
cccacgcgtccgcggacgcgtgggtacaggtgtgagtcactgtgcccagccatgtgtttagacttttaactaatctcttttttagtttcaagccttatcgtccgcctctatagaccactcctgtgcctgtttcctgatccttccaagggccattgtattccctgtctgctgcccctcttttggattctcctgcacatttttttgttcatgcattcattcatttattgtttgattaatgacagggtcttgctttgtctcccaggctggtgtgcagtggtgcgaccacggctcacggcagcctcagccacccagatgtaagcgatctggttcccacctcagcctcccgagtagtaagtagctgggaccacaggcggtgcccaggttttttttttttttttttttttttttt

SEQ ID NO: 95368 - DNA, 388 bp, Homo sapiens
caaagcaattaaccaagggtgtttgggtttacctgtagtcccagctacttgagagcctgcggttgggaggataacttgagcccaggaggttgaggctgcagtgagccaagatcgtgccactgcattctagcctgggtgaagagcgagactctgtctcaaaaaaatagtaatcggtactttatctaataggtcatgttgaattatagaagacttctgagtgagagatggcctcatcaaactcatttttcaaaaagtttaatctggtggaattaggaaggaaagagaaagcagagagagtacttatccatgcgtaaaaacaagtattttttggctgggtgtggtggctcacaactatagtcccagcactttgggaggctgaggtgggagg

SEQ ID NO: 95369 - DNA, 389 bp, Homo sapiens
ctcaagaccagcttgggcaacacagcattaccttgtctgtaccaaaaatttaaaaaattaggcgggtgtagtagtgtgcacctatagttccagctactcaggaggctgaggcaggatgatcacttgaacctggtaagacgaggctgaagtgagccgaactgtgccatgattggaccactgcaatccagcctgggtgacaaagcaaaaccctgttcaaaaaataaaaaaaacaaagggggggagatttttttttttgcgggaggggtccccaaactgatgggcttggcaaagagaggaggaaaaacgggccctttcctttttttggaagatattgagccccccaaaaaagggtcaactaactgtttgtgtgccggttttaacgggggtcc

SEQ ID NO: 95370 - DNA, 392 bp, Homo sapiens
aggtttcgctgtgttagccaggctcgtcttgatctcctgacctcatgatctgcccgcctgggcctggcaaagtgctgggattacaggcatgagccaccgcgcccgaccgactcatttttcctttatcccagccactagaaaatgtctagcacattatgcttcctaataggcctattacaatggaaattataacatgtatgcttctgccctgtctcctgagtaagggtgtgtgtaaatgagtgtgctcgttttgtggagttagggggacgtggttctcacctaacaggattacagagggtattttggaaatatcagccaagaagaaagtgaacttgtaggaaaataaaggctggccccaggatttttgcctttttaatagatgggttaaaaag

SEQ ID NO: 95371 - DNA, 387 bp, Homo sapiens
ctaataattttgagactgggctcttgctttgcttcccagactgaactcaaactcctaagctgaggagattcttccacttcagcctcctgaaaagctggcactacaggtgctcaccactgtccccagcataatggctatttcttgacaaatcttgacattgccaccagtatgtttttctttaaagacagagtctcgctttgtagcccaggctggagaacagtggtgtgatcctagctcactgcatcctcaaacacctggactcaggagaaccccctgcctcagcctctcaagaaggtgaaactacaggtgcgcaccaccacacttggcgaaatttaatttattttttttattatacctataagttctagggcacctaccccatggcta

SEQ ID NO: 95372 - DNA, 402 bp, Homo sapiens
tgtggctgccccaaggcagaggtctgaatgcagatggtcctgggattaacaggtcctggcccaagtggtggaggagggtggtgtctggagccatccggacacacagaggacagatgtgttggggctcaggagggcaatgcagggcacctgcatcggggagcacagaagaggggccagtgtctgaggtccagggggaggtgaggactggaagatggcaccgaagccccagccccgggtgataagcagggtatgagagaccaaggcctgaggaaggcatggcaggaaaggaggggcttatagcaaggtgcgcgggtgaaactgtaatcccagcactctgggaggccgaggcaggaagatcacctcaggtcaagagtttgagaccagcctggccaacgtggcgaa

SEQ ID NO: 95373 - DNA, 433 bp, Homo sapiens
  misc_feature (1)...(433): n = a,t,c or g
cggacgcgtgggtgaggcaggagaatcgtttgaatgggggaggcagaggttgcagtgagccaagatcatgccattgcactccagcctgggtgacagagacaagactccatctcaaaaaaaaaaaaaaaaaaggttctaccccctaaatttgggcctttttttttgtggccggcccggggggcttccccctggtttaagggggggggtggaaacccccgggcgggcccccccccttggggggaaaaaagaaaaaaaaaccccatttccctttccggaaaaaaaaactctttttggggcttcggaaaccggcccaaaaaaacggggaaaaaaaatttggaaaaattctgggggtttttaaaacccccggtttttgggtttggccccaaaaaaaggtgtttttttctttataaaaaaaaataaaaanaaaaaaaat

SEQ ID NO: 95374 - DNA, 434 bp, Homo sapiens
  misc_feature (1)...(434): n = a,t,c or g
atggcacagtggngagactgtctttgtcatgctgtgggagggaggaacattccacactgcctggggcaccgtggaggtgcacagagattgcatgggccgattcccctgaccctgcaccttccccaccctcagcacttccctcccttttgcctttccatgtttacagggatgtgtgtcccgtgttgtgtctaaggggatggccgtgataaatggtggaaagagggcgtttgggcatcagcccaacttggctgttgggctggcctttccctggtggagctcccacatcaagcccgaatgatatttcctattcgcctacacaattctccgatccgtccctaacaaactaggaggcgtccttgccctattactatccatcctcatcctagcaataatccccatcctccatatatccaaacaacaaagcataatatttn

SEQ ID NO: 95375 - DNA, 388 bp, Homo sapiens
tgctggcctgaaactcctgttctcaagtgatcccaccttgacctcacaaagcggggggaggacagacgtgagccggtgtgggcagcctcaacaacaatctttttttttgagacaggtctcactctggggcccaggctggagtgagatgggtccatctgggttcactggaacctctgccaccaattccatctttgtttatgactccttgagggccctgtccagggctggggtcaagctggccccttagagagttttaggagcgcacagagagggtgagggggagtgacattctgacacacgtggctatagcactctgtgggacccctaaactttttggttgctctagaacacacctacctgaagtaatgatttcttttttttttttgcc

SEQ ID NO: 95376 - DNA, 399 bp, Homo sapiens
atacaaagtaacatattccaaaaatgattttacagtttgtgattatgccagttaattactacctaaaggtgatattatttgggcttacttcccttttcccgatcaattttctggatgtgacactaacagtaaaactatcattgatacagcacttactatgtgccaagtactttatacatcttttaatataggggtttcttagtctttgagatgaggtctcactatgatgcccaggctgatcttgaactcctgagctcaagcagtcctcccgccgtggtgtcccaaagtgttagaattacaggcatgagccaccacacccggccaagtgctttatatatgacttatcttcttggaagtcttcaaggtaggtgtacttttaaccacttgattatgaagaga

SEQ ID NO: 95377 - DNA, 474 bp, Homo sapiens
ttatgtctattagtccagtgcggtggaattcgaaggaggcaggcagggcagcaaacaggcagtttccttccttctctccctggaaagatgacagccgtgacgccagtcctcctgagcccgccagccccaccatcggcctcgataagaagactcgccgaaagttcctggacctgggggtcaccctgcgccgagcatccacgggcaagagccggaaggagaaaggcagcaaccgactgtccatgggcagcagggagtcagtggaggggtccggcaggtcagggggctccccgttcctgcctttttcctggttcacggacagcggcaagggctcagcatcctcgggtagcaccacctcccccacctgctcccctaaacacgagggcttcagccctaagaagtcagcttcccaggaatccactctgagtgatgactccacgccccccagcagcagccccaagatccccagtgggccct

SEQ ID NO: 95378 - DNA, 471 bp, Homo sapiens
  misc_feature (1)...(471): n = a,t,c or g
ccatactgtctcnggtgcagatgcagagatgcaacccgagaagctacactatatgtggcataaagttagttcagcctctttttgatttcatatggcacagcaggctgtcactttggtcggggagggaccttctatggtctggtaaggaaaccatgaatccgtgtctgaatcacagtattggggtcctacaggagtggcaggggtccgatgtaaaaaaaaggcggcggctgatggagagtcttacaggccccgccgctgatgttattcgcatccttaagtccaacaaccccgcgataaccactgccgaatgcctgaaggcgcttgagcaggtgtttgggagcgttgatagctctagggatgcccagatcaaatttctgaacacttatcagaacccgcgagacaattgtctgcttatgtcattcgtctggagcctctgctacagaaggtggtagagaagggggccattgatat

SEQ ID NO: 95379 - DNA, 411 bp, Homo sapiens
gaggcggagcttgcaatgagctgagattgcagcactgcactccagcctgggcgaccaagcgagactccttcttaaaaaaaaaaaaaaaaattggccgggcttggggggaggccccttttttcccccctttttgggggggtttgtttttttttttgttttgccctaaaaagttgggtcccggccggtccaaaaggggggccccttgttttccccgggggcaaaaaatttggcccgttttttttaaaaagggttataaccccccctttttgggggcccaactcgggggctttcttggtgaggggaacccaatcccgggtgtggctttaatggctggccctttttttaccacctgccaaaaacgggggccctcttcttaagaataatctgttatgagggcccgggggctggggg

SEQ ID NO: 95380 - DNA, 432 bp, Homo sapiens
ctggacacactcctgggggcgttttggtgggtgcctgtaatcttttctactcggtttgctgtggcgggagaattgctggaacccaggggacggtgtttgcagtgagtttgcacggagccaccgcactccagccttgccaacagagtgagactcagtctcaaaaaataaaataaaataaaataaaaaggaggggggtgtcccagattgacttcccctttcttgtctggtatctggctttgtcctaacatgagcccttttttttgttttttttttttggcggggttttttttaaaaaaaagggttttgttttttaccccagcttggaaggcagggcccccaccttatttctttggggagttaaattctgggtttaaagggctcctcttgcttcaccccccaaagaccttgaaataaaaggtgctccccaccact

SEQ ID NO: 95381 - DNA, 436 bp, Homo sapiens
ccgggattcccggcgggacccattttttcgtgaaaatgcagcttttatgtcggcgctttattgctataagaagggcatacgtatagactatggtatgatttgagaaaagcagtcttttgcttttgattggcattttgatttatattttgacaatgtaaagtaaaaggaaggtgaagagtctaaagctggagaatttaatgccagcacaggatggtttggtaattttagaaagaggttggctttaaaaatgtcagggtaacaggagaacctgcttctgtcacccaagaggcagcagatgagttcccagataactttaagaaaatcactgagaagaaaggatatctgcatggaaagtttttaatgtaccatgaagcagccaaatatttgaatttttggtgtcccacaaagtgaagagaaagtgaaagggatataaaat

SEQ ID NO: 95382 - DNA, 390 bp, Homo sapiens
  misc_feature (1)...(390): n = a,t,c or g
tggggtggccccagggcctggccccactctccctgctgtgcccactcctctccagactccacctccccagtgggtatgggccctccacatgccaggtaagtagcaaacccccactccctccaaggaccaggtctcagagaaggccctggtcactgcccccggcccacctggagcccatcggggctgcctctcccagccgcgacttctccttttgccttaggcctcgcgacatcctgatctctcctgcaataactaggaatcgagattccacagtagacgtcccttgccgtgctcgctctctctctctcgcgcgctctctctctccctctctctctctctctctctctctctctctctctctctatagcctgtctctctctctctcccccn

SEQ ID NO: 95383 - DNA, 405 bp, Homo sapiens
aaggggcctgcttctctttgccttccatcatgattgtaaatttcctgaggcttttccagtcatgtggaactgtgagtcaattaaacctctttcctttataaagtacctaggcttggttatttcttcctagcagtgcgagaatggactaatacaatgggtctgtttttataccagcaccatgttggtttggatacaatagccttgtagtatagtttgaagtcaggtaatgggatgcttccagctttgttctttttgcttaggattgccttggctattctggctcttttttagttctatatgaattttataatagtttttgaattttgtgaagaatgccattggtactttgatagaaatagtgttgattctgtaaattgcttttggcactatggccattttaatgat

SEQ ID NO: 95384 - DNA, 453 bp, Homo sapiens
tgtccgctccggaattcccgcctggacccacgcgttcgaatcgcttgaacccgggaggtggaggttgcagtgagccgagatcgtgccactgcactccagcctgagagacagagtgagactctgtgtcaaaaaagaaaaattgccagtggagataaaggtgtccatttgggtaggtcaggaagctgtggtattcatgcctcatggccttcattttcttagagcgtagggtaaaatcatgccattttttgcctctgtgcctcataagtttgtactccttcctcctttaaaaatcagctgtaagagctggatgtgctgtaagggctggacgtggtggcacatgcctgtagttcctacttgggaagctgagatgggaggaccacttgagtccgggaggttgaggctgcagtgagctatgattgcaccactgctctccagcctgggtgacagagcaac

SEQ ID NO: 95385 - DNA, 452 bp, Homo sapiens
  misc_feature (1)...(452): n = a,t,c or g
gccgagactgcagcactgcactccagcctgggcgacaccacaagattctgtctcgaaacgaaaaagagatatgactacagaccctgcaatctgaaaaggataataagcgactacaacaaacatctacatacataaattttataacttggatgaaatagaccaattcctcaaaaaacacaaactaccacaactcacctggtatgaaataataatttaaatagccctataactagaaattgaatttgtcattttaaactccaaaaagaaatatccaggctcagatggtttcactggagaattctaagattaatttcccagaaaatagaagagaaggaaaagcatcaatttacgntttatttatttatttggttattttttgggacaggttctcgctctctgtcacccaggctggagtgcaatggcacaaacatggctcactgtagcctcgacct

SEQ ID NO: 95386 - DNA, 404 bp, Homo sapiens
cccacgcgtccgctgacagggtcaagtgcatcgggtatgatggtagagatattccctaagacatacttaatatcctcagcttgctgggtaaaaattagtaagattgatctgaaactgttttctcctttttttttttttggttttttggaaggggggttttatttttgccccccaaattccaggggggggagcccaggggggaaatttggtttaattgaacctttgccccccgggttaaaaggaattcccccccccccccctaagagggggggggaatttgggcctcccccccccaccccggcttatttttttttttttttgtggggggggggggttcacccgtgtggggggggggggaaaacccccaatctaagggaaccccccaccttggcccccccaagggg

SEQ ID NO: 95387 - DNA, 383 bp, Homo sapiens
ttccgggtggttgtgggcttgtcggtccccagactcggagccgctggcctgccctgctggccccaggcagtgaggggcttatcacccaggccagcagctgtggatggtgcgctgagtctcccagcagtgctggcccaccccaccagcactgcactcgatttctcgccaggccttaactgcctccccgcagggcaggccttgggacctgcagcccaccatgcctgagtctcccctgctgccgccgtgggctcctgcgtggcccaagcctccccgacgagcactgccccctgctccccggtgcctggtcccatcgaccgcccaagggctgaggagtgcaggcgcatggtgcgggactggcaggcagctccacctgcggccccagg

SEQ ID NO: 95388 - DNA, 411 bp, Homo sapiens
caatttttaaagtttgttccagggccaggtttcgtggctcacacctctaatcccagcactttggaggcagaggcaggaggattgtttgagctcaggagttcgagaccagacggggcaatatagtgagatactgtctctataaaaaatgaaaaaatttaaaaagtaaaattcattccaaggatgatcaggttatagagaattaactctcagcaccattccataatgctttccgaacgaggagcatgaatttgtttggctaggactgttgtggacaacaggaatccacttgcctggaagtataggtgccagaagtccagcttaggctagagaaaagagaaggcttaagaacataccttccccaagctaggcccggtggctcacgcctgtagtcccagcactttgggaggccgg

SEQ ID NO: 95389 - DNA, 415 bp, Homo sapiens
cgtgatcacgccactgcacttcggcctgggtgacagaataagaccccatgtcaaaaaaaaataaaaaaagggagttttaaagggggggccacccccccaaccccttggggtttaagggccccccccggaaaaggggggccctgggcccttttggggccccaaaggaaaaaccccccttggccttgggggagccaaagggaaaacccttttaacggggcccaaagggtttctttttcaaaaaggggttggaacctggggctcccccccccccaaaacccaggggggaaaagccccccgtttttaaggggccccaccccttttgcaaaaaaggggggggggacaaaagggaaaaaaacgggggattataaagaaagaaacccaccgagttggggaatggccccccccccccggggct

SEQ ID NO: 95390 - DNA, 415 bp, Homo sapiens
cacactttgggaggccaaggtgggagaatcacttgagcccagtagttcgggaccagctggagcaacatagggagatcctgtccctattttaaaaaaaaaaaaaaaaaaaaaagggtttgacccgggggggccttccttgttttcccaccccccgaaaaagggggaataaagggccccccaaacaggggggggtaatttttggtttttaaaaaaaaaacggggttaaccatggggggaagggggggcataaacttccagccctgggaatggcccccccaaaccccccaaattggggggaataagggggtggacccccccccccaagtaaaatttttttttaaaaaaaaaaaaagggggggggcggggccccaattttggggggcgcgggggggaaaaatatttggacccaagtttt

SEQ ID NO: 95391 - DNA, 431 bp, Homo sapiens
caaccttgcactcctgggctcaagtgatcctcctgtctcagcctccccagtatcggggattataggtgtgcaccaccgtgcccagctaatttttttttttttttttggaaaaaggggttggttttatcccccggggggggataaaggggcttgataactgttaattgggccctcaccccccggagctaaaagaatcctcccccccaaaactcccaggaagtgggaactacagggccccccccccggccggggtaacttttttttttttttgaaacttttttttttttttaaaaagggggattctttattttggcccaaccctaaatgaaatggggggctttaaaaaagacgcccccggccttttccaaaaggggggggtataggggggggacccccatggagcccacacattgctttttgaaagagaacaa

SEQ ID NO: 95392 - DNA, 401 bp, Homo sapiens
  misc_feature (1)...(401): n = a,t,c or g
ttcattgacagngcttttagtcatacttgagctctgatggaggtatacaaggggattagggctatttccatgcctgctaacgacaacatccattcagcaagcccatgagtcaaagagtaatttcaactagcaagtcttaatatttaagaaatacatgttgtaatgctatagctgtctttatatatagngattcctctgatgaatctgggcaaagtcaattggaaaccttctggaaaggattcaccatttcacattgcgattaagaacattcatgattcatgagaggaggtcaaaatatcaacattagcaggaatttggaagaagttgattacaacccttattgatgactttgatgggtttaagacttcagtggaggaagtcactgtagatgtgatggaaac

SEQ ID NO: 95393 - DNA, 405 bp, Homo sapiens
tttcgttgaggtaggagtatggcttgagcccaggagactgaggttacagtgagctgagatcacgccattgcactccagggtgggtgacagagccagaccttgtctcaaaaaaaaaaaaaaaaaaaaacaccggggccctctttttttttggggaaggcttttaaaaagccggggcaaaaacctggggtaggaaaaatttttaaggcccaaaggcgggccaaaaaagggggggcctcctgcacttaggataaaacaaaaaaagccttcgtaaaaaaaaaatggggcccgggacctttcttttagaggggcaacaaaattttggaaccccggccatgccccgccctggaacatttgggggccctgagtttttaaacagaaaagggaagaggttggctttctcaaata

SEQ ID NO: 95394 - DNA, 429 bp, Homo sapiens
ccggcgacttaatttcgtaataaatagagcctacttgattcttccaaatttgaacccacccttggattggggtcgggcatatagtgggttttctatactataggcggtcaaaatcaagaaaagcctgaggcctgcctggccccccgctttccgtttgctccctggggagatgagtcccaagcaccaccatcccaggtccatttcttatctgtcagcatctccatcccataacgagaatccttcgatggcaggtgcccaggcatcgagtctgtcatttcctcagaggataacgagggggctgaagacaaaactccaaatgacatgggtgtcttctgcctgtcatactcctgtcacagtccctcagggcccacccaacccactctccccacaggcaaggggctttttctttcttttttttttcgtcagaag

SEQ ID NO: 95395 - DNA, 408 bp, Homo sapiens
tttcgtaatttttgtatttttggtggagacagggttttgccatattggccagggctttggcctgtgctatctcaaactcctgacctcgtgatctgcccaccttggcctcccaaggtgctgggattacaggcgtgagccaccgcacctggccaaggaggagttgtgtcttctgagaggccttcctgaccatgctgatggtcttacatatacccccaagtctgctgtggcactcagtatttacccatttgttagcacttagctcctagtgctttcttttttttttgagggggccttgggctgtcacccaggctgaagggcaggggcatgatctcggctcactgcaacctccgcttcctgggttaaagtggttttcctgcctcagcctcccaagtagttaaaattacaggc

SEQ ID NO: 95396 - DNA, 424 bp, Homo sapiens
tttcgtctcggggcctccttggacttgtctgggggctgcagtggagtcagctggacacctgctccacccctgccacctccgcccccaccctctgcagcatctggcatctccatggcagcacatctgcagctgccggcctgtgatcgtgccgcacagctttcttttctttcctctcatcttttttttttttttttttaaaaaaaattaatccctttccctttttggggggcatttaaccctttaagggaggcccccggttggtttagggaaatatttaaccccccccccagggccgattttttggggggaacccgggggggaaaaaaaccttggggcgggggtaaatttggccaagggggcaattttcctttgcctttaaagaaacccccggggccccaaaaaaatccccccccccactccccct

SEQ ID NO: 95397 - DNA, 400 bp, Homo sapiens
tttcgtggtttttcattcaacattaggtttctgagattcatccatgtttttgcatgtagtttattcattttcattgctgtagactggtccattgtgggaatatatccgttctataactgatggacatgcacttgtttccagtttaggggtagtatgaatagtgcagctatgaacattttagttcatgtcttctggtgaacaaatgtacacgctggcattgagtgcatacctaggagtagcattgctgagtcatgggttgcagctgctcagcctcagtagatactgtcggtgttccagaatgactgtacaaatttacacacccaccaacagtctgagagttccagttgcttcacaaccctgccaaaacttgggattattcatcttttttcctaattagctg

SEQ ID NO: 95398 - DNA, 455 bp, Homo sapiens
tcttgaattcccgggtcgacgatttcgttgcagcctccgcctccggggttcgggtgatttttttgcctcagcctcctgagtagctgggaccgtcagcctgcgccaccacgccagctaatttaaggaggtgaacctgattgcagagtgcgtagctctggaggctgggggcccattttagatgaaatgaagtcgttcatgtgcaactgcaacagtttgactgaaggagtgaaaggaagagtggaaatgatgagtcagaatggcagacttttgacaaagttttgccatgttggccaggcttgtctcaaaacccctgacctcaagtgatccgctcgccttggcctcctgaagtgctgggattacagttgtgagccaccgtgcctgacccaaatgccattttctttttttctttttttctgagacagagtctcgctctgtcaccaggctggagtgctgtg

SEQ ID NO: 95399 - DNA, 426 bp, Homo sapiens
tttcgtgctgagcgtttgacctcagtgcgcgcatggctgtcgtgctgtggcgcctgtgtgtgtgtgtttctgtttctgtgtctgtgtgtgttcccattgcgtgtccatgtgcatgtgtggggaggtgagtgcagggtggacattgctgtgtttgtgtctaagcacatgatagtggcgcttatgcatgtgactggggctgcggggctactccgcctgtgtgtgcgcgcgtgtgtgtgcatgcgtgtgtgcgcaactgctcacatgtataggtatgtgggagtaggggcaggcaggtcagggggaggttctgctggacctcccactttgcctctgcagctgttgggcccctcagtgacgctctggataaagggactctagaagcccttagcaggtcctgcccaccctgggcaccaggctgccctcctt

SEQ ID NO: 95400 - DNA, 414 bp, Homo sapiens
tttcgtctaagaatgacaataattcattacaggaatttatggacaaaattgctggcatgaaaaagaacctaggtaacctgacagagctgaataacacagtataagaatttcacagggcaatcacaagtattaacaacagaataaaccacgctgaggaaagaatctcagatcttgaaaactggctgtctgaaataatatagacaaacataaaaaatagttacaaggaatgaacaaaagcttcgagaagtatgggattatgtaaagaggctaaatctatgaatcattggcagtctttgaaagggagggagggaaagcatactacttacagaacatatttgaggatattgtccatgaaaacttccccaggtttgctagagacgccaacagtcaaattcaagaaatgcaaagaactcc

SEQ ID NO: 95401 - DNA, 444 bp, Homo sapiens
  misc_feature (1)...(444): n = a,t,c or g
gccctgggcaacngcnnnnnnnttcccgggtcgacgatctcgtgaagaggggcctcttccttggagaagagaagagaggctcactgtggggtttgggcggttccctcggctctccagcctccacgtgcttgtctgcataatgaggctgtcgggtggcatctggtgctttctcccacggctgctgctctctgcatccgtgaaccctgggattgaagtaggggtggggattgccattttgcaatttctgcggagtcttttttttttttttgaaagggggtttttttttttcccccaggggggggggggggggcaaaaaaaccggtaattggacccttgaattccggggcgaaagggaacccccccccccgccccccctaaaaattaagaccaacggcccccccccggcccttttttaaattttttaggggagggggatttccccgc

SEQ ID NO: 95402 - DNA, 409 bp, Homo sapiens
cgatttcgttctggttccaaactgaccctggcagggggatggggtggttgaggccaaccgttttattttattttatacatggctttcctttctctccagggtttctgatactcctttgatgtactccagcgctcttctttagttatttttattaaaacatagctgtttattcattgttttgactgtatttgtcaagggaacgaaagataagggcttctaatcaaccattttgctaatgtcacactctcttttccaggagttttttttatttcaagtcttatgtttaagtctttaattcattttgacttgatttttatgtatcgcgttaagataagggtccaattttttcttttgtatgtaaatatttacctttccagacactctttgttgaagacattatttttccact

SEQ ID NO: 95403 - DNA, 435 bp, Homo sapiens
  misc_feature (1)...(435): n = a,t,c or g
ccggaattcccgggtcnnagacttcgtgtggccaagtcaaattgtcagtgaatcttacgttttttaggaaaccatcaaaatggtttctgaaatggctgtaccattttccattcccatcaaaaatgtatgagagttccagtttctccacatcttctattatcaatcttttaaaattttagccattcttatgggtacataatggtagccctttgaggttttaatatgcgtttccccaacaattaatgatgttggacaatttttcatgtgaatattggctatttgtatagcttcttttgtgaagcgtgcattcgaatcttttacatattttctattagacgatgatagatagatagacggacgcacttcttgttaaccacagtaggtatgttctataaattcaacacaaacactgaattagagaatactgaactgctg

SEQ ID NO: 95404 - DNA, 676 bp, Homo sapiens
tggtcttgcaatcctgggacgacgacttcgtggcgaagcgtgcacaaggtcacctttctccagcatcctcatcttcatggtctcgatgggagagtggccgggggtgcctgaatcaagggaactagaacaggtgctgaagctgttcccactcgcaggaggaagagcagcatctggccccagacagggggagctggggagtcctcagggcccttcggggcctccctagacaggggaagccggggagtcctcggggcccttcggggcctccccagaactgtgctcgttggtggcatccacaggctgctcctctgggagcttgttgcttttcgggtcctgagccctcccgcctgccaccgtggcgtcagggaaactggtgcctcccaagcacccccagctcttctgcatgagaaggttggagactgtgctgcagccggggttcttatgatcaccttcctccctcgccagcatctgccctggagctgaacgaggaccaccaggctcctcaaggcctgtctccgtggggcaccaggaggcgcaaatgccagtttgcatcattgccctgtttttagctgtccaggatgccccatgtctgcaaaacgcagtgtgcacagtcccacagggcattccgtggcatcaccccggcctctcttttttggacttctcttcccctgaaaac

SEQ ID NO: 95405 - DNA, 417 bp, Homo sapiens
tttcgtggctcatgtctgaaatcctagcactatgggaggctgaggtgaaaggatcgcctgaggccaggagccagaggccccagtgagctatgattgcactactgcactccagcctgggtgacagagcaagaccctgtctcaataaataaataaataaataaataaataagaggaatgaagtactgctatgcactgcagcatggatggaccatgaaggcattgtactaagtgaaagaaaccaatcgtgaaaggccacataatgtgtgattccatttatgtgaaatgtccagaagaggcaaacctatagatgcagaaagtagatttgccaaggcctgggggagcaggaagtggggagtgactgccagtggagacagtttcttttcaggggacagggtgttctaaacttagattgtagtg

SEQ ID NO: 95406 - DNA, 404 bp, Homo sapiens
acaggcctgtggtcccagctattatgttggctgaggtaaggattgcatgaactcgggagtgcagggctgcagtgagctataatcgcatgactgcactccagcctgggtgacaagtgagaccctgactctaaaaaaattaaaaattaaaaaaagtaaaaaaaaaaaaagggccaaccccaggggctttgaaaggccaacatttggggaggccgggccaggaggattgttaaaggccattatttcgaaaccaagggttatccagggtactcaaaaaagcggagctttattggggtttaactcaaacgggggggaaaaccaccctccccagaaacagccttacttggggggactatatgccaaagctcattcacccaggggtggtgggccaccttctccttgtgggc

SEQ ID NO: 95407 - DNA, 432 bp, Homo sapiens
  misc_feature (1)...(432): n = a,t,c or g
taatgttcatctttttaattttaagcatctatgtgggtatagaagtggtataattatggtggttttaatttgcatttctctgatgattaatgatgtctctttgcttcctgaccatttgtttattggctcttctgagtgtttaaatctttagcctctttaaaaaagggtggttgttaccttcttactaagttgcaagagttctttcttttgaatataagacctctgtcaggcatatggattgcaaatattttctccaagtttgaagcttgcattttcattttattaatggtgtcttttagagaacagcagttttaattttgatgaagtccagcttacaattttttctatggttagtactttttatgtcataagacatgttgtatttttcttacatctcttctaaaaattttacagtattaacttttatatgtn

SEQ ID NO: 95408 - DNA, 431 bp, Homo sapiens
  misc_feature (1)...(431): n = a,t,c or g
gaacccctccttttccttgtttagactcttgaacatctcatattgctcctgactgccagcaaccaaatgaagggcttcattagttatagctaattaactacacaccagactgaaggatttctagccaaggagtttggggttgctttggaataatagcgagaagctagtcttttgagttttaactgttggatccctagcttagaaagttaccagtaccctttttaattttttactctgtaatgggcaggaatagaaattatgtacaacagtggaaaagtagaagaccatatcaaacctgatgtacccataagaagtagttggacgggcatggtggctcacgcctgtaaccccttcactttgggaggccgaggcgggtgaatcacgagatcaggagttggagaccagcctgactagcatggtgaaggcctgtn

SEQ ID NO: 95409 - DNA, 411 bp, Homo sapiens
  misc_feature (1)...(411): n = a,t,c or g
ggccaggagtttgagaccagcctgggaaatatatagcaagatcctgtctctaccaaagaaaacaaaataaaattagctgggcatggtagcacatgcttgtagccctagctactcaggaggctaaggtgggaagattgcttgaattgcttgagcccaggaggttgaggctgcagtgagcaatgattcaatgattgcaccactgctctccaaaaaaaaaaaaaaaaaaaaacctgttcttttgggcatattgcgaaaaaacccccccttacctttttttgtttgggtgggggtttaattcccccaaaaccaaaaaccattggccctgggccttggtttttttttgcttaggggggggcttaataaccccccccttttggggccaaaaggggggtgttcctttgggccttaaan

SEQ ID NO: 95410 - DNA, 407 bp, Homo sapiens
  misc_feature (1)...(407): n = a,t,c or g
acctgggaggtggagcttgcagtgagccgatatcgcgccactgcactccagcctgggcgacagagtgacactctgtctcanaaaaaaaaaaaaaaaaaaaaaaaaaaaaaaaaaaagggggggtttaaaatttaaaaaaaaaccggaaaaaaaaaagggaaattggggaaaattttttttaaattttaccgggaacccctggggtaaaaaaaaaatggggggaaaaaaaaaaaaaccaaaccccattttcccggttgaaaaatgggtttaaaaatggggaaaaagggcggggcccctttaaaaggggaccaggggaaaaccccccccaggggggaaaacccggaccaaaaaaatttcccaaaagggggggggttaaccttaaaacccgcaaaaaaaaaaagggggtc

SEQ ID NO: 95411 - DNA, 408 bp, Homo sapiens
aaaaaaaagccatgcataaagctttattctgatcacctgcatattttgtggggcccagtgcaaaagggcaccttattcaaaaattattaaaaagttaaagacagtggccaggtgaggtggcgcatgcctgtagatccagttacttgagaggctaatgcaagaggattgcttgagtcttaggagtttgaggctgcagggagttattattgcacctcactgcattcttgcctgggcgacagagtaagaccctgtctctaaaaataagagtcttttttgtttgtttgtttgattgtttgtttgtttcgagatggagactcactctgtcgcccacgttgaagtgcagtggtgcgatctcacttcactgcaagctctgctgtcccgactagctggaatacaggcgcccgcatt

SEQ ID NO: 95412 - DNA, 405 bp, Homo sapiens
acagacacagcaacaatctgatttctctatcttttccccacatttcccccttttctattcgacaaaaccgccatcgtcatcatggcccgttctcaatgagctgttgggtacacctcccagacggggtggcggccgggcagaggggctcctcacttcccataaggggcggccggccagaggctctcctcacctcgcagacggggggccagatgagaagaaggcccttcatcctcccaaacattgagcactgagtgagagacactccatatgttatacacgtgagctcgcgaggacaaggtttgcttattactcacaggtaagagcagaagaaaaagcggtctctactttaaaacccgtttcacctgaaaaaagaacctctcccccttacaaggatgcgcgtgcggc

SEQ ID NO: 95413 - DNA, 389 bp, Homo sapiens
aaattactttgttaaaatgcattttttatttcagatggtctgaggagagtccctagaacttgcatttattacaactgcccacctacactgatgctgacagtactggacctacactgagtggcatgaatgtaaagaatctacattggagttatgaatataaatacagatctatcactggagtgcagtggctcattctcggatcactgcaacctctgcctccaaggttcaagtgctcctgcctcagcttcctgagaagatgggattacaggtgcgcaccaccacgccgggctactttttgtatttttggtagagacagcgtttctcgaacgcctgacctcatgtgatctgcccacctcagcctcacaaagtgctgatattacaggcgtgag

SEQ ID NO: 95414 - DNA, 408 bp, Homo sapiens
  misc_feature (1)...(408): n = a,t,c or g
gcgcgggatttcaccattttggctaggctggtctcaaactcttgacttaatcccaaagtgctgggattacaggcgtgtgccactgcgcctggccaagatctcattcttttttagggctgagtaacatatgccatcatatatatgcactgtagtttctacagtttatccattcatccattgatgatggacagttaggttttttctgtatcttggctattgcgaataatgttccactgaacataggagtgcagacatctttatgaagtgatttcatgttttttggttatatgcccacaagaaggagtgctgggttatgtggcggttccatttttaatttctttagaaacctcccagctgggcgcggaggctcatgcctgtagtcctgagtagctgacattataggcaccn

SEQ ID NO: 95415 - DNA, 412 bp, Homo sapiens
atttttagtcgagatgggatttttccatgttggttattgctggtctcaaactcccgacctcaggtggtgcgcccgcctcagcctctgaaagtgctgggattacggatgtgagccaccgcgcttggcccgtttttttttttttaaaaaggtgtttggttttggttggcaggagctgatgagcttaggccccatacaaatttaatcccccccctcccctctggaatcaaaggagatctctgtcctaactctgcaggggggtgggagaaaggggcccccccccccagcccgggaaaattttggaattttgaggaaggacggggaccaccaattttgctagggggggactaaaactcctgacaataaagaagaccccctggcttacacttgcgaggggtgtggaaataacaggggt

SEQ ID NO: 95416 - DNA, 413 bp, Homo sapiens
  misc_feature (1)...(413): n = a,t,c or g
tgaaaccccatttctactaaaaatacttttattatccaagtgtggtggcatatgcctgtaatcccaactactcagaaggccgaggcaggagaattacttgaacgcaggagaatcactgcagcccaggaggcagaggttgcagtgagccgagattgcaccactgcactccagcctgggtgacagagcaagactccatctcagtaaataaataaataaataaaaagcgctgcagtagctgtggcctcaccctgaagtcagcgggcccaggcctacctcactctctcccttggcagagaagcagacgtccatagctcctcttcctcacaagcgctcccagcctgccctccagctgctgctctcccctcccagtctctactcactgngatgaggttaggtcatgaggacaccaaaat

SEQ ID NO: 95417 - DNA, 391 bp, Homo sapiens
cttgaacccaggaggcggtttttgcagtgtgtccaagattgtgccaccgcactccagcctgggcaacagagcaagactctatctcaaaaaaaaaaaaaaaaaaagggggggcccccttttaatatcaaaaggggcaggggtgtccttcggggaaaaaagggaggggggttgccgggaaaggggcctttgggcccgggtttgggggggaaaacaaaaccccccccggggggggacccactggggaaggccccttcccgcaaaagggggtggtgggcccctcgcagggccccacaaaggggcccaacctttggggcccggggggccccaaactggggggaaaaggggggcccccgggccctaccaaggggggggggggcccatcctcctttgg

SEQ ID NO: 95418 - DNA, 353 bp, Homo sapiens
ggatcacttgagcccagtagtttggaaccagcccggacaacatagcgaggccccgtctctacaataaatatttggaaattagctgggtgtggtggtgcacacctgtcatcccacctactcgggaggatcacttgaacctggaggttcaaggctgcagtgagccatgattgcatgcctgcactccagcctgggcaacagagtgagaccctgtctcacaaactaaactaaactaaaatccctgaaaatgaccaagcctctgaagttgacattttcagatacttgggactgtatctatttttattctaacagtggattccaaatcaataccagactcattctctttatttctcttc

SEQ ID NO: 95419 - DNA, 425 bp, Homo sapiens
  misc_feature (1)...(425): n = a,t,c or g
ctcccaagtcctgggattgcaggtgtgatccaccactcctggccctgagttaaatttttatcattttcctgtgtgacaaactgctaagggcgcacagttgacgtcacagattggtgctcacagtagagggagactgagcacttacctgcagctgggctgttctaggatttaagcatgactgctttatccccacagacagcctttgagaagatgctcttgttatcccagttcttttgagacagtctcgatctgtcacccacgctggcgtgcactggtgcgacctctcgcttccatgttaaagcgattctctagcctcaacttaccaggtagctgggactataggcaccgcgcaccacccctggctaatttttgtatgattattatagacggactttctctctgttggccaggctggtgctgaactn

SEQ ID NO: 95420 - DNA, 541 bp, Homo sapiens
  misc_feature (1)...(541): n = a,t,c or g
gggtgcaattccccaatttcaaaatttactacaaagctacagctatcaagactgtgctgctagcataaacagagatgaatagatgagagaataaaatttagactccagaaataaactcttatgtttatggttatttaaatttcaataaagatgccaaggcaattcaatggggaaatgatagtttttgtcaaaaaatggtgctgagataattggatatctgcatgcaaatacagtcagacttctgtatctgcaagttctgctnnnnnnnnnnnnnnnnnnnnnnnnnnnnnnnnnnnacataaataccaatnnnnnnnnnnnnnnnnnnnnnnnnnnnnnnnnnnnnnnnnnnnnnnnnnnnnnnnnnnnnnnnnnnnnnnnnnnnnnnnnnnnnnnnnnnnnnnnnnnnnnnnnnnnnnnncaaccccctgtggatactgagggatgactgtaggtgaatgtaaacactcaacttatatacaagcattaacacaaaaaggataagatgtctaaatgtaagagctaacactataaaaattgt

SEQ ID NO: 95421 - DNA, 385 bp, Homo sapiens
gagcctccgaggccttggtgaggggcgttcggcgggcaggggccgggtctgaggtcgagggccgcacacccaggatcgagcggggactgggcccgctgggggtggggaccgtggggctgggatttgggatcagggcgagtcgtggcagagagaacccggaggatctttgaccccagtgcgggagcggccagcccaccctagagaagcgagacaagggcaaccagaaggaaccgagtctgaggaagcgcttcctctgggcagggatattgggagagtcctggacgagtgaccctggacctaggaggcatgagaggtctacacacacttgcaaggataccttcatgattgttgagttgtggtacggagtctcgctctgtcgcccagc

SEQ ID NO: 95422 - DNA, 399 bp, Homo sapiens
tcatgaaggataagtaggagttaccttagcgaatatggaggcagtgggaaagaacaccccacgctgggagcaagctatgctaggatcatggtctttggggcttcattatttatttttagagacaatgtcttgcttgagcgcagtggtatagccatagctccctgttgcctcaaactcctgggctcaagcatcctcctgtcccaagcctcctgaggagctgggactataggcacacaccaccacacctgactaacttttgcattttttttgtgctggggtgtttttttctttgaaacaaaatctctgtcacccaggcaggagggcaggggtgcaattttggctcactgcaacctccgcctcctgggttaaagagagtctcctgtctcaccctcccgagag

SEQ ID NO: 95423 - DNA, 306 bp, Homo sapiens
attggccaggctggtctcagactcctgacctcaggtgatccacctgcctcggcctcccaaagtgctgggattatatgtgtgagccaccgcgcccagcctgctgaggaaattcttaaggtttttggaactctgtgcctggaaccacaaagaccaacaccagatatatttattataccatatctgttttgttttgtttgagatggagtcttgctctgttgcccaggctggagtgcagtggcgtattcttggctcactgcaacctcttgctcctggggtcaagcgagtctcctgcctcagccctccaaa

SEQ ID NO: 95424 - DNA, 400 bp, Homo sapiens
tccaaacatgaaaaaaggggatggtccccaagcagctgaaggtgggaaaaaaaccaccattcagctgctggggtccaaacatgaaaaaaagggatagtccagtttttcaccaccaggacccaattttcccaattcctttttttttttttggaaacgggtttttgttttttcccccccggcgggggggcaaggggggaatttaaattaaccaaaccctttgccttgggggttaaaggaatttccccccccaaccccccgggggaggggggaaaaagggggggcccccccccccccaattaattttgtttttttaaaaaaaggggggtttccccttggggggaggggggggttggaacccccccccctgggggaccccccccccttgccccccaaaaggggg

SEQ ID NO: 95425 - DNA, 402 bp, Homo sapiens
tgaaatggcctgataatctggaatttgcttactatttaagcagagcctttataaaggaaagagggttagttgaagaagcaaatgtggcaataaattattgaatctgggtgatagatatatggaggttcattgtaggagtatttctacttatatatgctttaattttatttattttttttttttggaaagggagtctggccaatttttttttttttttgaaaaggaagttttgtttttatcccccagcccgaaggggaagggccttttttgggttaattgaaacctcggtttccggggttaaagcaattttcctgcctcaccctccttaggagcgggaattacgggcccctgcccccacccccagttatttttttggctttttaagaaaaaagggggttttcg

SEQ ID NO: 95426 - DNA, 451 bp, Homo sapiens
cttgggggtaggggctcctgggcggccagatgaatgggtccctgggaacccagacctcatatgaggacttaatgtcttcttcctctcaagccaaattcgcctccacccactccctctgaagaactgggcatttgccaaagtaaccactggagtcatctaatggccctccccctccccaggtttcccacagctttcagggacagtgggcaagaggacacccctccccaccacctcagtggaacacaccattctccccccctcaacagtacactcagtgcagcaagactgacccctgaccccctcccagccctccctaccttggacaggaaggaagtaatgcaccttctcttgcatgatattaatttgtttggagagacagaaatgtaaaagtgtatctagaaatatctatatctctatatatttttaactgactctttggaatccccttacg

SEQ ID NO: 95427 - DNA, 380 bp, Homo sapiens
  misc_feature (1)...(380): n = a,t,c or g
aagataactcatgaaaacacatgcaaaattgctcaacaaaagagtagcaaattgaattcagcaatataaaaaaatcataacaaatggggtttatcctgggagtacaaatctatttcaacttttgaaaaatcaatttaattcagcttatcaacagcgtaaagaaaaaaaaagannnnnnnnnnnnnnnnnnnnnnnnnnnnnnnnnnnnnnnnnnnnnnnnnntccagttttgataaaatctctctgcaatctaggaaaaaacaaaaggaactttctctgcctgacaaagggcatctataaaaacaaaacagaaaaactcaatgaaaatcattcttaatggtgaacaattgaatgccttccccctaagattaggaacaaag

SEQ ID NO: 95428 - DNA, 445 bp, Homo sapiens
ggtaccaggggatgcaaaatggttctcagtcctacacctaaaagatgctttcttcttcattcctctggttccagagtcccaatacccttttgcctttgaatgggaaaatcctaataccagagaaaaacacttgggcagtgctcccctaaggcttttgggatagcccccacttctttgcccaacccttagagagggatctgaggggtctgcaattggaggatgggagtatactccagtatgtggatcaccttcttgtgtatagcccaacccaagaggcttctgaccaaaatactataaaaaccttacatttcccggctgacaggtcatacaaagtgtccaaaaagaaggctcagattactctccaacaggtccactgtttagggtacatcttaacacctggaacctgcaagtatccccagaacgagtgcaagccatatgtgggttg

SEQ ID NO: 95429 - DNA, 642 bp, Homo sapiens
gaaataaaaggcatccagattggcaaggaagaagtaactttttatttgcagatgacattgattatctacggatagattctacaaaaaagctactagaagtaatatgtgagttgaacaaggtaggatagaagatcaatatgtagacatgaattgtatttttgtatattggcaatgaacatttggaacttgaaataaaaattaatgccatgtataaaaacatcgagcactatgaagtacttagagataaatctaaaaaaagatgtttaagacttgtacactgaaaattataaagtgttcccgagagaaattaagataacctaagcaaatcaatgagagatactgtgtttatgcagcagaagactaaatactaagatgttaccttcccccaagtgttctgtgtgtactatgcaatcccagtcaaaatcctagcaggaattttttggtactagttgacaagctgattctaaaattcatatagaaatacagaggacctagaacagccaaaacaactttgaaaaagaagaaaaaagttgtaagacttacactacttatcttcaagtcttattataaaactatagtaatcacaatagggtggtatgggtttcaagacagacaagtagattgatggaacagaatagaatg

SEQ ID NO: 95430 - DNA, 424 bp, Homo sapiens
gaacagtccttctctgaataggtctatgtagggttcttttcatggggcgggtcttcagctcctcgtctatgttctctccataggaccagttgttctggatcttgacgaaggcccacttctcgtgtgtgtactccgcaaacttgttaatgaaggagtccagcttctccgggatgatcacactgagggtctccacaggccgcggatcaaagttgccttcagcatccactgtggcctttttctctgccttagatgaggatgaggcatccacatagccggggggcagagccccggcaatggcgcacagacaaggcatggccatgcggtccagctccgcgtcgtaattcttatggtccagagagccatacatgtctccaaatgagctctcgtgcgaggtgcaaatcctactctgacgtgatcctatgcg

SEQ ID NO: 95431 - DNA, 436 bp, Homo sapiens
  misc_feature (1)...(436): n = a,t,c or g
gattaacttttnnnatgttcctcagcgcctaatacatgctgggaggcagaggctgcagcgatctgagatcgcaccactgcactccagcatgggtgacaaagcttgactgtcaaaaaaacagtatcaacgacaacaaaacagactccaatatcatctacaggaatatgaaagaaaaaaatgagactattttttccaaagtgggtgtgcaatattataccccagttccagctggctcacatccttgccaatagctggtatgatcagtttaattttagctattctcataggtgtcaaataggtatttgattgcagttgtaatctgtatttccctaacgactaatagcgttgagcgtctcttcatatttgctgtcctttcagatacatatatatgtacatgtacacacacacacacacacaagacgaggtcttacttttc

SEQ ID NO: 95432 - DNA, 381 bp, Homo sapiens
  misc_feature (1)...(381): n = a,t,c or g
nntacatntcctgcatttcagcacccactgtttttctctgatcaaatttctcctccatcaagtctctgcaacaccggctctccaccagggtggacttagctggactgggggaggccccaaatcccatgaggccttggtgagagctgtaccccagcagccccaccaaggcatttgactgctggggctgtacagcctggaaactgctgaagggggtaatgtgacgaggttttgttccgaagcccatgagatctttgcagtacttgtcgtgtaccatttgctgctgtgtgcattcttccctttcttatctcacaccgctctccctccatgctgttgagtccgccagctagctatggttcaaccaggatccctggctccccttac

SEQ ID NO: 95433 - DNA, 932 bp, Homo sapiens
ttttttttttttgagctgcagagcagctgagctttatttacaaacttccacagaatccctcaccctccaccccagggtcctccctctctggaactcatggcatgcagacaatgcttgggtccacccacctgcccaacctaacggacatgcttgggcctgagctgggagtgcaggggattccatctcctgggtgcgcctgccagaggggtagaggctggaggcggtcgggaatgctgttctcccccaggagtcagtcctcagggcttctgccgtgggacgtggggccgagggacctgggggactgaccaggtcggggtcgggggcagcatctgcattggtgaggccgggtgaaaagggctgctggtgccggacagcttctggtgctgggcctcagcggagacagaggaccagaggtccaggttcctgggggctgagcttttctcagacttcggaggaaaaatgtcccagcccagcaggcagtgccggggcagggccagtgtgtcagaggcgtcaaagctctttcgccggtggatgtggtaccggtgcgggggctccaggatcgacagcgggatgctcaccctgcgcaggggggcagtgggggacccctgaggagcctcccagcggttgggggcccacgcccaggcccatcttttcttaaaaccagtggttcaggctctgtcccccaaggtgtcccaatactctggtcactcacctgacgtgcgctggctgcgccagggtcccagggccctgctggtctcgcggtgtcctgcacaggcggcagggggtaccgggatccacaggcaccgggaacaggcgccggttgacacggtaacagtacacgcctgcgaggcccatgagaagccacagctctccttgagccaggaacccaggaattcctccgcactggactagtgtcatcgagggttttctaa

SEQ ID NO: 95434 - DNA, 402 bp, Homo sapiens
aatacattgggtgggggtccttggccaggaagtgtagaacaaagcttagggggccgctctgtgccctctgggaggttcctctcctggggggggctgggatctccaccgctgggctgtggggcaggctgttcctgtgagtggccagacccccgtgagcgtgccccgatgctctcctggctgcgagagcgggcaggtgggagggggagtgggtcatggcctccccctgccatggccgtctgacccttcggcttaggtccctcgcccgcaacgcgtgtagcccggggcccccttgcgctgggccttcttctttcccaggtcccccgatgcgcttttgctccggtatccttgcccacccggcgctcatccttgtcttaggggcctgccctggcgccgggccttgct

SEQ ID NO: 95435 - DNA, 444 bp, Homo sapiens
gatgggatgccgcgacgttgcttgatcctctagagcggccgaatacaggggtgctcggtgcccatcacccgttctgttcatcagcaccgccttctgctggttactcagggcctctgcgtagtcgcccatgatgtactggaggcggtcgaggaggcgcatgcaggtgcaggtcttcacgtgcatggctccgtatacgttgttaaacaggttcagggcctcattgatgagctcacagccctccttcacgaagccctgctgcactttggcctgcccgctctggaagaaatggaaggtctccgaggccttggtgttgacgtgcttgaccacggctaatgatgtttagcacgtccttcttcgtgaatgcggccttgtggtgactgttgcagctgcactctttcatcaggaactggttccctgtttttcaggaaatttttcgcgatgtcc

SEQ ID NO: 95436 - DNA, 438 bp, Homo sapiens
  misc_feature (1)...(438): n = a,t,c or g
ctactgaaacctgctgtagtttggtcctctacgcggccgcatacagtccacgaagttggacacggagaatttttagtcgttgggcgtcacaccgtcctcgttatgcacgatgccgtccacgaacttcaggccttccccttggttgacgcccagcatgatgtcgtagttgaggaactcgccttgctccatcaggatctgccggtcccctgggatgacntccccgtcgatcaccggcccaaaggctatgggcgcacctcccgctntgatggcctgctgaatgagctccttgtacctcgtgctcttcagacattctaccatgtccgcggtgcctagcatgttgcagcccagcttgtctgcccatatctccactgtcttgccccgcctgataatttacttgccctcctttcttgctcacctccacgtgcctcccatcaaccg

SEQ ID NO: 95437 - DNA, 527 bp, Homo sapiens
  misc_feature (1)...(527): n = a,t,c or g
tagaccctaagttacgaanacccggggactcgcctttggaaggggcggctgatggagggcctgatgncgtctgtggngaggggaggggagaagattcaccaggtcttgtgaacctggccaaggagggaatgctggaggatggggtgggtggaggttcggggccaggtttctggctcagatggtggatgatggtgacagatgagtggcgaagctggggacctattgaataaaggactgatctgtgtctgtgggcacccccgaggcagcccaggtcttctatcccatagctgggcatggagacaggcttgggtgatctggcctcagaggtgcggggccccagggccctttctcccagactgggctaacgtgggtagggataggggtttgccnttttgggngtnnnttacgcctgggcagctcctcctcgtccgacttggttccgggttttctgcttgggcccaccatacttgttgcagatatcgcccttgtccttgctgtaatgctccaccatgtccatgaagttgttt

SEQ ID NO: 95438 - DNA, 415 bp, Homo sapiens
  misc_feature (1)...(415): n = a,t,c or g
ggagccgttaagagacacccnccgagcggncgcagacaaggccgggcatttgaataattttgtttgacgccccacgtccacaccacggcggggctgggagtgtataaaacaaacctggccctgccctcctgaagcttccagcacctccaggcacagcagaacgtgagctcgaaggacaagctgctaagggcttgagaaccaggcagcacccggcccggccgagggtcccagcctcttcctgctgcaggtgagagagatcctgggccaggcagtcatgaagggcacagaatcccagccccccagggaatcccagtcccgcctggaagccgcaaaggggcctgtggttctgtctctcctgcaggcccaggaggaggccccccgcggtgacacccacactcttgcccagtcgcctgtg

SEQ ID NO: 95439 - DNA, 414 bp, Homo sapiens
  misc_feature (1)...(414): n = a,t,c or g
gttcgcttttatcctccagagccgncgcatacacttcttctccagtgtctcagtgccgttgctttctcccaaccctgtccccacccctccaggctttgaacccttgctgtgcatcaggccccccatgttcttcttgagcttgctgcccaaggttttgccaaagctgcccagtttgttagccacagaatctgctctcttcttgtccttctcccgatctcgctttgacttctccttccgccggccgccctcgttgctggtggaactgctgccaactgactccttgtctgagtctccagactcaggagtggaccggggctcatctccagctgaggcggtgggggactcaggctgggccagaggagcctgtgcatcagaggacagtgggatccacttcacattcatgtagctatgcag

SEQ ID NO: 95440 - DNA, 382 bp, Homo sapiens
aatacaccgtgtgtgagtgtgtgtgtgtgtgtctgtgtgtgtgtctcccagtctctcttctctctctgtctctcagtctctgtgtgtttctttccctctctctgtgggtttgtgtgtgtatgcccgtgtgcgtgtgtgtctttggccgaatgtgccctgtgcgccacaaagcggtttgtcgcatggcggcctgtctttggtgagcctctttctgcgtctctacctgggtcatgaggccggctgtcaatcgttttcgccgcggcggatccgctttgggtgcctgaaagcctggcccacgtgaggagatgcgtcgctcccggagcaactgaaatctcatccccatcctgagtggcctcttttctaggatcaagatgagtacact

SEQ ID NO: 95441 - DNA, 525 bp, Homo sapiens
  misc_feature (1)...(525): n = a,t,c or g
gttgtgcacgtacctncgctnggattctcgagagcggccgcctacatgccctgctgctcccacggaaaccctgtcctgcttctcacactgacatctgctctctaatcacagaggatcctgtcattaaaagattcctggcctgggacaaagatctgagggtgtcggacaaggtaaggatgatctccatgtaactgctcctgttccaacgcatggctggggggagggcgcagcttccaaacccacagttctccctccaccacctcccaccagatgctcctacagtcttttttttttttttttttttttgggaaaaaaaatatttttttgggcccccacccaaaggagccggtcctcaaatttacctcttgggcccaaacccccccgggtttaaaccattcttccccccccacccccaagcagcggggatataatatataaaaccccccccctggtataaatgtccgcttttaaaaaaaaggggggtttccactttggcgccggtgtttcccaaaaccccccccctct

SEQ ID NO: 95442 - DNA, 1648 bp, Homo sapiens
atgactgtgccgctgcactccgggctgggtaagggagtaaaaccagagcggaagactacagtgagaaggccctttgtgtcggcgggaaagaaatatgcctgcccctttaagaaggcggagacgccccagtggcggcgtcttcgaatgcggcctaaggcgcctgccgccagtctcctggcgactttccctatatcgcagagactcatccctctgaccccagcccggaagcactgtccctcggagtccgagacttccacctgggtcgtgtccaaggccccggcgactccccggactcggggtgccgggccaacctccccgccgaggcccacccgccgtcgctatggcgtgcagtttgcagaagctgtttgctgtggaagaggagtttgaagatgaggatttcttgtctgctgtggaggatgcagagaaccggtttactggctcactgcctgtgaatgctgggcgcctgagacctgtctcttctaggccacaggagactgtgcaggcacagtcctccaggctgctgctgttacaccccactgctccctcagaggctttgggcctgccagacttggacctctgcctccctgcctccagcacgcccagtgctgacagccgtccatcatgcataggagcagctcccctaaggcctgtctctacttccagcagctggattggcaatcagagaagagtgacagtgacagaagtgctcagagagccagcaagacctcagtcctcagccttacaccccctactcacctttgagagccaacagcagcaagttggtggctttgaggggcctgaacaagacgaatttgataaagtcctggcaagcatggagttggaggagcctggcatggagctggaatgtggagtcagcagtgaggccataccaatcctgcctgcccagcagcgggagggttcagtattggctaaaaaagcccgggtagttgatctgagtggatcttgccagaaggggcctgtgcctgccatccacaaagcgggtatcatgtccgcccaggatgagtctctagatcctgtcatccaatgtaggactccacgaccccccttgagacctggtgctgtgggtcaccttcctgttccaactgccttaacagttcccactcagcaactccactgggaagtctgtccgcaacgctcccctgttcaagcacttcagcctctccaagctgctagagggaccattcagagcagccctcaaaatcgtttcccttgtcagccattccagtctccaagttcctggttaagtggcaaagctcatttacccagacctcgaactcccaactcaagctgttctactccctcaaggactagctctggattatttcctcggatacccttacaaccgcaagctccagtgtcttccattgggtctcctgttggtaccccaaaaggtccccagggagctctgcagacacccatagtcaccaaccacctggtgcagctagtcactgctgccagccggacaccccagcagcccacccatccctccacccgagccaaaactcgccgtttccctggcccagctgggatcctgcctcaccagcagagtgggagaagtctggaggacatcatggtttccgcgccccaaactccaacccatggtgctctggctaaattccagacagag

SEQ ID NO: 95443 - DNA, 372 bp, Homo sapiens
aatacacccctccaaacttatgcttaaatacagcctgattcattgatctttccagtcaacagcatttgtgggggtcagctttctcatcaggcacagactttcacaaaatgcactacataccatttgccactgtctgccaatgtatcatgtccggtttgcatgaagaaaataaatcattgtccagggatagcaacttaccttcctagagttccacattgcatgaaggacggctaaattcataaatttatacaccagatctggctggctaagatcacttgccagagaacaaaggttgcttgcaagtataatggccctgacttggaaccggagaaaaagaggtaggcaataatacacttctctcttttcagactg

SEQ ID NO: 95444 - DNA, 372 bp, Homo sapiens
aatacaggtgtggtaacgcatgcctgtagtcccagctactgagcaggctatggcaggaggatcccttaacaccagaaatccaagggtacagtgagctatgaatgcaccattgcacttcattccgggcaacacagcaagactctgtctcttaaaaacaaaaaaaaagttaaaaaatatttttttaattaaaaaaagaaaaataggtagcagaggtagcattacagattagagggaaattaatatgcactatttaggaaacagcgctgggacaattctctatccatacaggaaaaaaattgattcataaattcacaacataaacaaaatgaatccaaggctttgtaaaagtatctataaatcccatcctttatg

SEQ ID NO: 95445 - DNA, 376 bp, Homo sapiens
aatacacaggcggggatggatgttttgatgcatgcacagaggcggggatggatggggggatgcttgcacagaggcggggatgcccgcacggacggatgcatgcccagaggcagagatggatgggtgggtagattggacggacagatgatggtaggttgttcttgtcctggaggaggtgatccatgctgagtcctcacactgggcagagcaagaggcaggaggcgagcatggggagatgcagctgtgtgccccagtgctccggatgttacagatgacatcgatgtcctgtccttagttatagatggccatgatattcatccgcatggggtaacttggggccttcctgtgttgcctgcggggctgtgtctctgtcttt

SEQ ID NO: 95446 - DNA, 379 bp, Homo sapiens
aatacatggttaggaaagtcatagaagtttggtttcttcttcttcttcttctttttttttttttccgggggggttttttggggcaaggctggggccccccggcgccggggttttcctttggaaaaaaaaacccccaagggttgggttcaagcaaccttcgggggccttggtgaaccaacccttagcccgttcccgggggggccctttttttggtggggccccccacccccgccgaatttccttttaagaacttttcccgggggtttttgttggttggttggctgacttttaaacaaggcctcgtcttgtttccccacacggcggcctggggcaaagggaacccccgcctttctagaatcaatgccaccgtggatgcccg

SEQ ID NO: 95447 - DNA, 450 bp, Homo sapiens
aatacagcgtgtggtcagcttcaaagtgcgggagcagatgtcatagagggcctcattgtcaatgcagtaggtctcatcagtgttctctaccgactgatggatggagagggtgatgttgtagggctcgaccacagtgtcagacactttgggtggaggcaccacactgagggtgttcatgatgcaatcagggcactcttctcggatcttgctgataaagagagtacccattccagagcccattgagtgggtcagctgcaagccctgcaggcagtcacagctctcttactcctcctgcaccacatctacaactgaatcaaccagcttggccccctctatgtagtggcctttggcccagttgttgcctgccccagattgaccaaaaacaaagttgtctggtttaaacacctggcgcaaaagggcctgagcctagcagaaggccatgggtcccag

SEQ ID NO: 95448 - DNA, 385 bp, Homo sapiens
  misc_feature (1)...(385): n = a,t,c or g
aatacatcctctgattatatatttcctttcttttttctttttagaaacagtattcactctgtcacccaggctggaggacaatggcacaatcagggctcactgcagccttggccttccaggctcaagtgatcctactgcctcagcctccatttgcctccacatgccaccattcttggcaaattttttaattttttttgtagagatagggtctccctatgttgctcaagctggctcaagagatcctcctgccttggcctcccaaatgctgggattacaggcatgggccactgcacccagccttgagtctttntttttttttttttttttttttctttccggaaaaaatgttccccctggcccccggggggggggcccccaatttttt

SEQ ID NO: 95449 - DNA, 471 bp, Homo sapiens
  misc_feature (1)...(471): n = a,t,c or g
aatacaggcttggtttatggatgcgcacgatggctcacgcctgtaatcccattccggaacctcaacacgtacgacatccactggctggagaagatcctgaaggcccgaaagcatgtccacatggtcatcattagccagctgcagtgagtgcccagcctcagattggtgaaatagtagccatcctctccagtcatcagtcggcttggattgcagaagcgcgtgatatactggatattatactgaaggcatgggggttgcccttcaaaacaatgtagatgagggtggggaagaatcatctgctgacgccagctcgttctacgtgatcttgatggcatcgaagatgtgcttgctgcacttggtgatgcaggccancttgtctcgaggcacacgcctggaatccatttcaatatccttctttgatccgaaccctgggagaacgtcctgaagatttccttccctgggggttgacct

SEQ ID NO: 95450 - DNA, 790 bp, Homo sapiens
gatgtagccgcccggaattcccgggtcgacgtttcgtggaagcagtaaggtcaaagccatacttgtctctccccttttaaagtcggtgatcatttttcaatgtccctgctgagtgaacctcagcaaaagatattctagcttcatctgagtttataaaacagaacaacgacgtgtcttcacatgcagaaattcatgccccaagaggttaaatgacttgaccatattcacacagcctaggctgatggcagctggaaggcagagctggagagagggcctgacgggtctgccccatcccctttcccccagaagcctgcagcatccaggcagccggagctgggagagctggctacgttcctgggccgcgtagacccgtggtaccagagcaacgtcaacacgctgtgccccgccatccacaagctggctgagatgcctccttccctggacacatcccggactgtggaccccttcatcctagacgtcatcacctactacatccgcatgggcacccaacccatctatttccagatctacacagtcaagatctttttcagtgacctgagccaagaccctactgaggacattttcctcattgaactgaaggtgaagatccaagattctaaattccccaaagatggcttttcacccaggaggagaggcgtggctgagggcccaggggcagagctctccctatgctaccagaaggccttgcttagccaccggccccgagaggtcaccgtttccctgcgggccactgggctgatcctgaaggccattccagccagcatgtatt

SEQ ID NO: 95451 - DNA, 190 bp, Homo sapiens
aatacaccctctctacagaatatttagaaattagctgggtgtgggggtgcacgcctgtagtcctagctacttgcaagggtgaggtgggaggctcacttgcgcccaggaggtcaagtcaaggaggcaacagagagctatgttcatgacactgcactccaggcctgggtgacagagtgagaccctgacgaaa

SEQ ID NO: 95452 - DNA, 371 bp, Homo sapiens
atacatcctgtccttaggcactgatgtgtgaactggaaagaggctaaggatgaaacacctgggaaagatacctggaagtgatctttatgtcagaaaagagcctttgtgggagagaagctggtgcatgggctccttgtgtccccttcaggaggaagagtcccctcttgccctgacccctgggggtgcaggcctagatttcacgccattgctgtttattctttcctcaagcttcgagtcgttatcccggaagtctcaattcttcctgaagacctagaggagctctacgacttattcaaggtacgcagctctgggaagatgaggggttccaggccctgagctggcctgagccgcggtgcccagcctgcccaggg

SEQ ID NO: 95453 - DNA, 371 bp, Homo sapiens
aatacaggtctattctatctctcatctatctatatatctctttaatctatcatctatctaggggatctatgcatgtatctatgtctctatctatctaatctatttatccatgtatggatgtatgaatgtacctatctaatttatgtatgcatgtatatatctatctattctatggatctatttatcgattctatctatctatctgtctgtctgtctatctatctatctatctatctatctatctatctatctatctaatttgccacccatctatctttaagacagtgatcgatgagcacgcgatttttgctacctggagacattgagtagtatctggagacatttctgattgcccacctgtgggtgctccg

SEQ ID NO: 95454 - DNA, 377 bp, Homo sapiens
aatacagtccttggtgtaaactgtttagagagttatgcaaaataaatgtgtttgacacttgattcaccactcttgagcggcaaggagtttaatgacactacacataatacctttgaccatatgtggagaaccaaggaacataatgaagctggttggttgctcctaagttcagtggacaaagtgatgaaagaaaatgatgaactcagggattctaactcctggcttcagaagcaggtattaacccctcaaatctgctaagactgccctaagtgggagtcttaactcctgtagagaaaaagctgaaattgtggaaaaacagacacaatctcttaccatgtgagtggctgacctgcaacgaaagatgcatgtacagcctt

SEQ ID NO: 95455 - DNA, 378 bp, Homo sapiens
aatacataggggtggaagaatggtgaattcattgatgctttatgaaaagtttacgggcacaaagccccaaataaatcagcagtttacaaatggataacttatttaagaaaggacaagacgatattgaagatgaagaccacagtggcagagcatccacattgaggaaaaaaatacatcttgtttatgccctaattgacaaagactgagattaacagcagaagcaatagccaataccatagatatctcaattagtctggcttacagaattctgactgaaaaattaaagttgagcaaactttccactcaatgggtgccaaaacagttgtgcccagatcagctgcagagaagggcagaacttcccatggaaattttaaaacg

SEQ ID NO: 95456 - DNA, 380 bp, Homo sapiens
aatacattccgacttttcacgtgtgataatctttcttctgcccaaagaacatctttcagtatctcctttactgcagatctgatggtgacaaattctctgtctgaaaatgtctttattttggaaagatattttttgctgagtatagaagtctaagatgacagttattttctttctagaaactgaagatactattccatcgtctttggctttcattgctgctattgagaagtccgcattcattctaacagggactcctttgaaggcaaacttttttctctctttggctgcttttaacatttttccattcggctgtggcttttgaagttttactaccaatatatctcaatggagagctccctttctcatggattttttaagcg

SEQ ID NO: 95457 - DNA, 378 bp, Homo sapiens
aatacatattatcaaactgacacatgttgttatatctgtgagaattcattgcacatgctgtcttttacatgcttagatttgacttgggttatctgcccactagagaaatcaaatacttcttcactcacgagtttaagaatcaccatattattttgacagagacttttgctggtcctacttgctccaacaatatcactgataaaagctggccaatgttcggtccattcttgtttcagcatctgagcaaggatcatatttaactttccgatatacaccttttctttctctacacacgttgggtccgatgacgccttgataatgaggccaacaacgctattgttttattcctttgcactgggtcctttggaagaacgttcc

SEQ ID NO: 95458 - DNA, 384 bp, Homo sapiens
aatgcacgtttcactaaaagatcttctcaacttcatcttccaatgctttccttcagttatttttgctattatattttaattttcaatgacaatggttactgttcactgaatattcttctttatatcatcctgttctttttttttttttttttttcccggggggaagaactgggcctaaccccccggccgggggggaggggaatgaaacggggctaatggaccttcaacccccggggggggaggaaaccccccacctttaccccccggggggctgggactactgtcaatgcccccccccccccgccaaattctcttaatggaaacaaaaaagaggccccccccttgaacaaataaatgttgctccccgggatattcccctcccgg

SEQ ID NO: 95459 - DNA, 578 bp, Homo sapiens
tttcgtggttaagcatgctctgctccttggtctggactttctccctgggaagatggctccctggagcgggcaggggtgctcactgggccatactgagggtggaacctcttgggactttgcagtgggtggggcctcctggagactcaaggttgtatgtgtaaaaggagattcacacaaaggtcctgcgactcccatcgccagctgcaagggcccactggggaggccctgtccccttctggcgcaatccaaggcctgaggctcctagaagaggggatggcccctggaagtccctagctggctctgggcatgggaggtggggtaccgccttacccttatctcccaagttcatggaaaccaggtaactcagataatccccttctccactgagggggagactaaggcccagagaagccccagccttcctcctagggatctgatacgaggaagacacagctggaatctggattccactcagctcctgggatactgtcccctgcttcccccaccccttcaccctgcaggtcccctgcctgtgcccttcaccaatggggagatacagaaggagaacagtcgtgaag

SEQ ID NO: 95460 - DNA, 382 bp, Homo sapiens
tccggccaggacgctgggagctgcctgttgtatggtgcggggagcggagccatggtctccggtgcgtataacccgtatatagagataattgaacaacccaggcagaggggaatgcgttttatatacaaatgtgaagggcgatcagcaggcagcattccatgggagcacagcacagacaacaaccgaacatacccttctatccagattatgaactattatggaaaaggaaaagttgagaattacattagtaacaaagaatgacccatataaaccttatcctcatgatttagttggaaaagactgccgagacggctactatgaagcataatttggacaagaacgcagacctttgtttttcccaaatttgggtattcgatgtgcg

SEQ ID NO: 95461 - DNA, 691 bp, Homo sapiens
ttgtggtggaattcggaaacgccgaggaacccggctgaggcggcaggtaaagctcgcgtcctatggccctagtgcccgaggagctttgagggagattttttcaggctactgggaaacgggatctctgatcattggagtctcccaggttatttgggaaagacttcttccgtggtcattgtgggggaaatctcccggggtccctgtggattcgatttccctgggtcatttgggaggagggtttttcttctgatcattgggggagggatttccgtggttttgggggtccagcatcctccccggtcattggagggggtctcccgggtttgggggagggcaggatctttcctggtcattgagatctccccgggtcttgggaagcgcaagatctacggtgtcattgaggggtctccccaggtcattggcggccacgatctccccagatatttggcgggtggaggggtcttcccggatctttggatagggagtcagctcagcgcctcaggtactgttacctggggtcggcagatgtgcagccattttgagtgttgaatgccatttgggcccgtcagatggtgttcgatgagggaatttacacacttagccttattataaaaaatgcctttaaatggataagaggacatgtattgcgggcgctctataggctcaaagcttcgggagctggctacgacgt

SEQ ID NO: 95462 - DNA, 371 bp, Homo sapiens
aatacatcctggctaacacggtgaaacctcatctctaccaaaaaataaaaaaaaaaaaagggggaaaaaaatttacccggccgggggggcaggcccctgtagccccacttactcaggaggctgaggcagaaaaagggggggaacctggaaggcaaaccttgcagggacccaaaataacaccaccgcactccaccctgggggacaaaacaagactccttttccaaaaaaaaaaggagggggaggaatgggctcccacaacctttaattttggaaattttaaaggccctttctaaaaaaaaagggggggggtgggaaaaaaaaaaggcttttttttttatgggaaaaaagggctccgggcacccccccacccg

SEQ ID NO: 95463 - DNA, 374 bp, Homo sapiens
aatacatgcttggtaaggaaattgtgtctaaaaccaagataggccaagagctaggcctcttgaaccaaacagccaagttgtgaatgcaaaggaaaagttcttgtaagaaactaaaagtgctactcccatgaacacataaataaaaagaaagcaaaacagccctatcactgagacagagaaagctttattggtctggatagaagatcaaaccagccacaacattctcttaacccagaatgtaatctagaatatggccctaactctcttcaattctattaaagctgagagaggtgaggaagatacagaagaaaagttggaaggtagcagatattggttcatgaggtttaagaaaaaaaaagccatctctataacag

SEQ ID NO: 95464 - DNA, 364 bp, Homo sapiens
aatacactcggggaaaggagagagtctttgggacctagggctagacacagagtttttagacttgccatcaaaagcatgacacatcaaagcaaaaaatgataaactggacctcatcaaaatgtaaaacttttgctctgcaaaagaacataaacaggatgaaaacacaagctatacactgggagagaatatttgtaaacaacatatagaacagaaaactagtttacaaagaactcttaaaactcagaaattaaaaaaaatacaatcagaagatgagcaatagacatggacaggcatttcaccaaaaaaagatgccaatgacaaattagtatacaaaaggatgttcaatatcattagtcattctaga

SEQ ID NO: 95465 - DNA, 464 bp, Homo sapiens
aatacatgtgttattgaaagcaggttgctagtatttttgaggatttttgtatctatgttcatcagagatagacccctatccctcaccctctaaaaaaatcaaatcagaatggattaggacctattggatgaaactactatcagaaaatgctacgataatgcttaaagacagcgatctgagccaagtttgtttgtgttaacatcccatttgtacaggcagctaaagccaaaatagaagaataggattacattaagctaaaatggttctgctcagctaagggagcaatataaaaagcgaagagacaacccacagagtgataggatatttgcaaattatccctgtgtctacggattaataaccacaacatgtatggagttcacacaactcactagcttaataacgacaccaaccataacattaccctggaaccccagacagtcttatcatcacaaccctacttaaaa

SEQ ID NO: 95466 - DNA, 517 bp, Homo sapiens
cgttcgcccgacgaagcttgatcctctagagcggacgcaatacactctgcctctactctacaaatggaacaacaaagcctggatgacagcacatctgtcacagcatgatttactgaatattttaaaagtttcagttaagccagatgaataagttcgagagatcgactatagaatgttatacttatagtccacaatactgtattatacaattaaaaaatcgttaagagggtagatcacatgttaagcattcttaccaaattttaaaaacaagtgtagttattaataaggagaaaaaatatataataatccccaaaatatttttaaagccatttttaaaaaatttaacattcattttttactgctttattgagttacaattcacacattatatactttcaacatctatctttaatttaatttttaaaattatcctggtttatataaaccaaaaggaaactttcttttttttttttttttttgggtttttgaaacggatttctcttttggggccggggtg

SEQ ID NO: 95467 - DNA, 491 bp, Homo sapiens
  misc_feature (1)...(491): n = a,t,c or g
atacaccggttgttatggccgcctctcagtgccgcccgccccccgtccagggagagtggcctcaggtgtcgggcaccgcgccgtcctgcttccgctgccgctgccactgcggngtcaccttccctccacagcccctcagggccctcccagagccggcgtctgctgatccagcctcccctgtaccccagggggctctttacacctggggttccacctttagcccaggtgggagcagggagccgtcttgaagtctcacctaggacgccaggacgctgccgcttcccgttcttgggccacgccgagcacgacttcttggggcctgtccagcagtgcaggctgaggagggcgtggacccagtcggccacctcagtgaggtcctggctgccccctgcaaacagccctgaacacccccgcctgcctgccactgtctcgacggggagggccgaccatcaggggtccaggcaccacttcataaagcaaagctttacccg

SEQ ID NO: 95468 - DNA, 449 bp, Homo sapiens
aatacacttttgctctaatctgacttcaacccccacttacttgggctctccttttacaaccaccacaaccgaaatctagggctgctttttttttttttttttttttttttgggaaaaaaagccaattcctttttggccccccgggggggggggagggggaaaaattgggttaaagggaacccccccccccggggacaaagggaatgccccccccacccccccgggagagggggaaaaaaagggggggccccacagggcgggaaaatttggggatttaaagaaaagggggggtcccccctggggggcggggggggggtcaaaccccaaacccgggaggggggggggcgaaagcccccaaagggggggaaataaggggggggtcggctaccgcccccccaaattaagggaccgaaaaggggccggcccaaaaaaagaaaaggacgccccaa

SEQ ID NO: 95469 - DNA, 271 bp, Homo sapiens
aatacatggttgcactacactgtgattgaacttaatgccactgatttgtacacttaaaaatagttaaaatgacggctgggcatgatggctcatacctgtaatcccagcactttggaaggctgaggggaggtggatcacctgaggtcaggagttcgagaccaacctggccaaccttatggcaatataggggttatcacaaactcaatcactaaggtaatgtgaggctggattcgattcttggtcatgaggcctccctaaggacagcacgaaa

SEQ ID NO: 95470 - DNA, 459 bp, Homo sapiens
ttcgccattcgtgcgggtcggaacttacccgacaaggaatttcgctaccttaggaccgttatcgttacggccgccgtttactggggcttaaattcgaagcttcgttgcctgacttctcctcttaaccttccagcaccgggcaggcgtcagcccatatacctcacctttcggtttcgcatagacctgtgtttttgctaaacagttgcttgagcctattctctgtggccctgctttcacagggcaccccttctcccgaagttacggggtcattttgccgagttccttaacaatgcttcttccggcggccttaggattctctcctcatccacctgtgtcgggttacggcacgggtatgtgcatcactataacgggtttttttggcacatgggtcacatgcttccctactttggggagggccacacccacccgtaagattggaaggaaaatggggggttcctg

SEQ ID NO: 95471 - DNA, 464 bp, Homo sapiens
aatacatgatgagataccactatatacttataaggatggctaaagtaaagattatcaagtaccaatgacgatacacaataactgaagctcatacattgttagcaggaatgcagaatggtacagccactctggaaaatggtttgacagtttctaataaagttaaatatataattaccataaaacctagcaattttactctggggcatttacttaatagaaatgagtacttatgaattcagacaaaaatttgcatacaaatgttcatgacagacttaattgtgatagccaaatactggacacaactcaatgtccttcagtagccggatggataaagcaaaccgaagtatccacacagtggaatattactcagcagtaaaaaggaaccaactttgactcacacaacttgaattaatgtcaaaaacattactttcaggaagatattatgctcagtgaaagacatgctg

SEQ ID NO: 95472 - DNA, 474 bp, Homo sapiens
aatacagggtgggatagcagcatacagggtagacaggcaagagagatctaatgggaggcaagggaataggaggaacttatcaggcacaaatatgagaaggaacaagcagaagggcttgagaagatgcaaaccaagatggggagccgtggcatggcctggaaggtagacaaaccgagagatgcacgctaaaaaagtgatagagacaggcaggcggtgagacagatggctagagagtgagtggtgggctaacagcctgagaagcatacagacatccatagaggacaatgaggctgccagccagtcagggaggagcagacaggcaggcaggcagacaccataacaggagcaagcaggtaatgaggcagaaataaggagagaagaagaaaaatcaagaggtcaggagagagagagagagaacagatagagatgcagacaggcataagggaggatggatgagagggagaataacgcccg

SEQ ID NO: 95473 - DNA, 473 bp, Homo sapiens
aatacattgctgtgatcaacttcaaatactttttagttccaaatatatgagctaataagccttgcttttataagtatgtgccatattcatcaacatcaatgggttttctaaagcgaatataagtgtctttcttttaatgctatttgactctaataaaatgcaggattatatatataaatgacaaagttatagtacttacaatagtatggtactagcataaagatagacatatagactaatggaacagattacagagcccataattaaacccatccatatgggtccaactgattcttctaaataatgccaagaatacacaatgggtaaaggatactctcttagacaaatggtattgggaaactggatataccaatgcatgagaatgccgcttggctcatataccatacccatgaatcaattcaaaatgaattatggactctcatgaaaaagttacacattctaaatataactcg

SEQ ID NO: 95474 - DNA, 471 bp, Homo sapiens
  misc_feature (1)...(471): n = a,t,c or g
aatacaatacgtgcatgtatccctaaacaatatgttgttacatttttctatttttttcttttttctccctttttttttttttttttggaaagggggtttccttttaatcccccgggggggagaacacgggcccaatttgggttaatggaaccctccccctccgggtaaaggaatttctccggcctaaccccccaaagaaccgggaatggaaggggccggccacccccccggaacaaaatcgtgacccgggaaattcggaccgggacccggagggggacccagttttccttatagggggccaaataaaacttgggggaaaccagggccaaagtggttcccggggggaattggttaccccgcaacaatcccacaaaaaaaacaaccggaaggcaaaaggggtagggccgggggggcccatgggncnccanganggccccccgaaaacaccgacacacggaaaagggccaggcg

SEQ ID NO: 95475 - DNA, 476 bp, Homo sapiens
aatacacgggtgtgtgtatgtgtgggtgtgtgtgtagaaaggtcagcacggagggagcagctgctccaagcaggtctgcagagacttacaaagcggctggaattgttgttgcgcacagtcttggcgttgccgaaggcctcgagcagcgggttggactgcaggatgatatctttgacgtgctggggcagaggcaggtggagtgggaagaagtcacactgaggcaggagtgcagatgggtggggctgcactaccatgcaggtgagggcgacccagcttatccttctgttttcctcgtctcacctggaccttctcgcctccgccagacaccttggagatgtagcccatgatatatttggctgccactgacttcccagctccactctctccactaatgatgacacactgggtctgacagacgataagcattttccggcacattgctgcctgtagggcagaattttcctggacattcttat

SEQ ID NO: 95476 - DNA, 424 bp, Homo sapiens
  misc_feature (1)...(424): n = a,t,c or g
cattctctagagcggccgcactacattggctaattntttaaaaatatttttagtagagatgggttttcgccatgttggcacactggtctcgaactcctggtctcaagcaatccacccccctcagccttccaaagtgctgggattacaggtgtgagccacaacacccggccggctctttttttttttttttttttttaaaaaacgggttttggggctgttccctaggcgggagggcaggggggcaacaatagttaaaaagttaatggaggcctaaccctttgggttaagggaaccctccttgctaaccctccaaagaagtgggaacaacgggggcccacaaaaaaatcgccaaccgggaaattcggacacgggcctgtggggggaccaacttttccttatagggagccgaataaaagctggggga

SEQ ID NO: 95477 - DNA, 528 bp, Homo sapiens
  misc_feature (1)...(528): n = a,t,c or g
atacagaggcttgggaagtttgagggaggctagaggaagactggngagaacaggattctgcggtcttgaagggagggatgggaggaaagaaagatggttgtcagactggccagagccggcttatcctggggaagatggagtagggtttggacagacccactggggacatgactcacctctttgaagatgaagaatgcccacaagggaacacaggcagaagatcagataagccaaagtcacagctgagaccttccagccaccagtcctcagcaagcagtgccatagtactggccgagcagtgatcttcaggtggaatgacatggtcaggttgccacggtgacaataatactttccagcgtcttgagctggggcccggggcaacaacagacccggctcccttatccacatatctctggccgggcgatcgtcctttcagttttgggtccagcattggactacggcccctctggggggacatgggccccagcgaagtgttgtctcctcgtccctcactaagtggctatccct

SEQ ID NO: 95478 - DNA, 686 bp, Homo sapiens
aagacctgggacagaggactgctgtctgccctctctggtcaccctgcctagctagaggatctgtaagtactacaaaacttaaactttacactgagttttcattattgaagctatgcctccaatctgacctctgactgtggggccgccccagagggacccagcgggtgaatccctgctaggaacgtctgtccggacctctggtgactgctggggacgatggcttccagctaacttaatagagaaactcaagcagtttccttctaaatacacatgtcacatgtcctggttgacatgtccagtagagactatcacaggtctttggaacattcttttgagagaaacctatttaggtccttggtctgtctttcaatcaggttgtttgatttttgctattgagttgttggaattccttatgtattcagatatttgccccttctgccatgtaggttttgcaaatattttctctcattttctgggttatcttttcactcggttgattgtttcctttgctgtgcagatgctttagcgataaatgaacccacacttgtctattttccctttcattgcctgtgcctttggtgtcatagccaagaaatcattacctacatcaatgccaaaagctgtatccttctatacacttttagtagcttatggtttcagctgttacttttagggtttcaattcat

SEQ ID NO: 95479 - DNA, 462 bp, Homo sapiens
aatacatctgtacaaaaaaccctgtacatgagtttaccctgcagtaaaatctcacatgtactcccaagcctaaaagttttttttttatagaaaaaaaaaaggaaggaaggaaggaatggaaattttggcccttcccccccaaaaaacctttagggatataggaaaaaaggttattttttaaaaagctacacaaggggggggggggggggggggggggagtgcgtctaaaaaaaaaagtctcttttgggccccaaaaggggggggccggggagtgttttgagttaggggaaccctcccctttctcaaaaaagggaaagggaattcgggggcgggggctttttagaggggggaaataacgggcacaccccccccgggttaattttttgtttttttgaaaagaggggttttatattggaggggaggggggggcaaaaagggcggccctaggggaaaaaaccattt

SEQ ID NO: 95480 - DNA, 455 bp, Homo sapiens
aatacatgccttggctttggtaatgggtttttagacgcaacaccaaaagcatgatccatgaaaaaaataattaataaactggatttcaatgaaactgaaaacttctgctctgtgaaagacactgtcaaaggaatgaaaagacaagccactcactgggagaaatgcgcaaaacacatattttatataaagacttaatactcaaaatttacaatcaacttttaaaacatcacaataaaaaaaccagcacaataaaacagtaagcaaaagatctaaacagagaagatatacagatgacaaataagcatatgaaaagatgctcaggctgggggcggtggttcacgcctataatacgagcactttgggcatgtaaggtagaaggatcacttgaattggagtctagcctgggcaacatagtgagaccccatcgcaaaagagagagagagatacattgttat

SEQ ID NO: 95481 - DNA, 538 bp, Homo sapiens
  misc_feature (1)...(538): n = a,t,c or g
gcgacgcatgcctgnatcctctagagcgagcgcatacaggcttcttttactcgtacgctggaagctttctagactctgcccataggcatcctgacggggtgcctccacatcgatgttgaagccacagctgtcacaggtgtccttggctttgacctcgaggcggtaatacccacggtcccccagtaccaccttcccaatgtgcagctccacggggtacacattgctggcggagttgtgggactccttgaaggagaagcgggcgccactcttgctgcccagctccagccacttccccttgaaccacttgatggtcgggttgtctgggagctcctttccgttcaccttgggcacgaccactgcgtgcttcccagtctccaatgagacggagaccggcttcttcatgaaaacgccgtgggctcctctgggatcgtcactgggactatggtggggtttcttaggcggtttagatgagcgacttacgcgcaggctcctgccgcccctctggactaacttccttaggcgcctgtatcccacctct

SEQ ID NO: 95482 - DNA, 515 bp, Homo sapiens
  misc_feature (1)...(515): n = a,t,c or g
aatacagtgacgggagccttgaggagatgcaggaggactataatgtanagatgacgccacagaaatagtgtcttctgtatgcttcttaccacttatttcttcagttgttcctaaaactttctgaggtaaacttgtattcagtgcagggtctttagtttgtcccttcttcctgaaggggagcaaattaacagctggcacctgaagcacctggcttactctgcggggttgatgcaagtgggctttacttgtttggccagctgacctcatacgcactgaagacattccatacgatttggctgaccttttctcacttaaaatcttggtcaaggtaccatatgccaggctaccactgcaatgacatcatctggaacttatcctcatctgtctctacatcgagactgaaaagagactgcttcaccttccttgccattagagcatcctcatatagcttcttggcattaaccagagagctgccgcaggccctttattcgtgacaccttctttgacatcgcacg

SEQ ID NO: 95483 - DNA, 506 bp, Homo sapiens
aatacattgggtgtggtggtacacacttgtagtcctagctactcagctagactaggttgaggtaggaggatcactaaaacccaggaggccaaggctgtagagagccgtgatcatactactgcactccagcctgggcaacagagcaagactccatctcacagaaaatacctttgggaacagggaaaatcccccttttcttttaaaggggttaaggggggggggaacacacggggttttttgatcccaaaaaaaaagggtatttaaatttggaaaaaaaaaaatgggggggggcgggcgtggaaactcccccccaatacccccgccttttgggggggggggggggggggactacttgaacaaagggttttaaacccttcggggcaaaaaagggaaaccccttgtttccaaaaaaaaacaaaattaccccctgtgaacgtgggggggggggaaaaccccctggattcccccatcacttagaggggcgggaaagggaaaaaacccttggg

SEQ ID NO: 95484 - DNA, 613 bp, Homo sapiens
tttgttctacagccgttcaggtcctttactcggaagctgctcagagggagactgaacgtggcataacaacaaggagtggggcgtccttcccaaaggaagcacaggtgctctccggggcatgcgaggcagcaccaggtcattcaaaagaggcgagggtggctctctgctcaaaggaagagctggacacagacagggcctcagggaggccaaggccatggcccaggcatccagacaccctgtggggtctgcacccccccacccccctctcaggtgcaaactgcagacaggaggcaagccaggccaggcacaaccagaaggccgggctggagcaaggaggagaaaggggcttcagaggcaagcaggctgcgaggtgccaaacccacaagccagacccaggggacagctggggctcaggcggtggaggaaggtcctgtgtgcaccctgggcagggcgacccttgggttgttggccctgggactcagcctaaggacccggcgtcccagctgccagctgtgaagacaagattgagcccaggtgacgacagtgcctgagcccctggcagcttgggtgaggagacagcatgcagcccacaggctggagagcgtggacgaaa

SEQ ID NO: 95485 - DNA, 450 bp, Homo sapiens
  misc_feature (1)...(450): n = a,t,c or g
gagacagtagcagccancgaagtttggatactctagcgcggccgcccgccggcagcagctgggctgggaggcctggctgtagtacagtttccccctgcagctggagccctcggctcaaacctgggggcctggtaccctgcggctcccgaaccgggcccttctggtcaacgttaagtttgagggcagcgaggtgagcccatgcgtggcctgcggcatccaggctgctctgtccatggggagcacttcctctgtgaaactcctcagtcatccgcaagcccccctcccccagtggcatcagatggtgtttgccaggtgtctgtgcatgtgtggggctcaactgaacgtccccccaggagagcttcaccttccaggtgtccaccaaggacgtgccgctggcgctgatggcctgtgccctgcggaagaggccacagtgttccggcagccgctggg

SEQ ID NO: 95486 - DNA, 392 bp, Homo sapiens
aatacatggtgggggtggaattggtggtggtggcagacccatcacgggaagggccgaaggaggacgattgaagtagggcagcacactggggggcttatccacacgagcagatgagggtacaaggttctcagagggtgtggcccgtccatcagcagaatcactagaatctcgggaatgggcccgtggaggtattccccctcttgggactcggacacactcacgtttccgagcctgtgcctcaaactgtgacaggttctgccgggtggccggcctcacgtccactttttctccattaagaactttccctggtaggaagtccaacaattttggggacagagcttccagaggctacccgcacctaaatattcccttttgactgggcagttggtctg

SEQ ID NO: 95487 - DNA, 395 bp, Homo sapiens
aatacagaggtggctctttaaaagcagagatttttgaaaccctacatccacaataagacagattaggagttaggccaagagtaggagcaatctgaaccatttgaggagttaccctcacttctgtgaaagtaacttctttatatatgtctgggatacctgaacaaacatatcttcagcaatttttttaaaaaggttactaaatgaatagcttgtagtcacatatagttgctcactttgcttttctgactgctaacaaggagagagctgatatctctactcaccatggcagctgcgggggctgctgcctgtgcagctgcagcctggttgacctgctattgcgcacccttgatcttggcttgcaatgtgcaggggacgaaaggatttgacctttcccg

SEQ ID NO: 95488 - DNA, 383 bp, Homo sapiens
aatacagtgcttgttcaatgaaacaacaaagcctggatgacagtacatccatttaagcatggtttagtgaatattttaaggccacggttgagatttactgctcagaaagattcctttcaaaatattactggtctttgcccgtgtacatagccacccaagaactctgatagagatataaaaggagatttatgctgtttttattcctgctaatacaccatccattctgcagcccatggatcacggaataattttgagttccaagccttattatttaagaaaggccagcagggcacagcggctcacgcctgtaatcccagcactttgggaggccgaggcggccggatcacctgaggtcggcagttcaggactagcctgaccgactg

SEQ ID NO: 95489 - DNA, 383 bp, Homo sapiens
aatacatttctggttatgttcatgaactattatatatcattactaggtaaaatcaattattcagttcaacagtaagaatgagcctggcaaacatgacaaaaccccatctccagaaaaaacacaaattgtttggtggcttggcagcgagttgcgtagtcccagctactcgggggctgcgggtggtgctgagatgggcagatcacttgaatcctggaggtcgaggccgcagcgagcagagaccgcgccactgcactccagcccaggcagtgggagtgagatgctgtctttatagagagaggaatcatcttcccaggtggctcttacattgatgattcctataaaatgatttgaatagaaggtatcttcattttttttctcttatg

SEQ ID NO: 95490 - DNA, 838 bp, Homo sapiens
tttaacctttcctatggtgctgaaggacctacttttgaagacggccacaaggagtaagagggaacacttgtagaaggctcaggattgtgtctcacacgtgtcaagtgtgcatgtctcacaggtgatagcagggtaccgccagactgtaagtgagggaagacctagcgtcattcctgctaggctgggagggttgataggcgtgagccaggtatgggaactggcatctgcaaagagttggaaactggaagcagagagacccgctcagccagcaggtggggacgagggaggtggaggctgggccaagcctgcagggtcccccaggggctgccactgagcacttttcacctaggggcacaggctaaggctaggggtgggacgcccttggcctgtagctcccaccttcctaattcacatgtgggaagcctaaaggcacagagagacgaagccatggtgcaaagtggcttggccccagctgtctcctccacctgcacaagatggacgtgaggctcagagtggtgatgaggcttgcacatagtcgcagctaggaggcagcagggaagggaggaggagccgcccaggaccacagctgccccagaaacgctctgcttccagcaaacatcctgggccagctcttgctccctggagcattcagcccagccttcagaggtccaggtaagagctttgtccgtgcccagccactccccaatgtgggtacacccagctcagtttgcccagagaccacaggaagcccccaggtgagggagggggtcagtggcccaccccttaccctgtaactcctcatcaatggagtgatcaccagtatcaaaaatgagaggtg

SEQ ID NO: 95491 - DNA, 386 bp, Homo sapiens
tatacatggggttttagagggaaaaaaccacttatacactgtttataggaatataaattagttcagccactgtggagagcagcttggagattttccaaataactgagagttgaactatgattcaacgcagcaatttcaccgctgggtgtatacccagaagagaataaactattctaccaaaatagcacatgcacttgttggttcatcactgcattatttataacaggaaagacatgaatcaacctacgtgactattaatggtattttttttttttttagataaggtctcactttgttgcccaggctggagtgcagaggccccatttcagtttattataaccttcaccttccaggtttaaacaattttcctggtttagcccccgacg

SEQ ID NO: 95492 - DNA, 207 bp, Homo sapiens
aatacatgtgccgatattcccaactacttgggaggctgaggcaggagggttgcttgagcccaagaggtcaagactgcagtgtgttggctgggcgcagtggctcacgcctataatcccaacattctgggaggccaaggtgggcggatcacctgaggtcgagagttcgagaccagcctgaccaagatggagaaactccatctcacgaaa

SEQ ID NO: 95493 - DNA, 391 bp, Homo sapiens
aatacagcctctcatttcacagagaaaatataagacactaggccagaactcactcagctctgtgcacatcctcaccacatttcttttttgttcttgattcatattttcactcacttttatcacagctgaaaaatgctccttttacctaaggttaatgcccatattggtattccaaatcttactctctcattcattcttggggatccagctctattttaccctgtcctctgacatcttcaggctttccttctctaccgccttcttatcagcctttaccctgtccaagtctctttctactctagaattctctttcaaccctatgccttctcttcttttccttactgtcacagccaagcttctcaaacagatggccatctcaagtgtatctctg

SEQ ID NO: 95494 - DNA, 425 bp, Homo sapiens
aatacagagctggttgtttacagagcctgttacctcctcctctcttgctctttctcttgccatgtgatgtgccttttcccccctcatcttctgccatgagtaaaagcttcctgcggcctcatcagaagccaacaaaatgttggtaccataccttgtctccagaaccgtaagtcaaataaacctcttcataaattacccagtctcaggcattcccttagagcaatgcaaaacagaattttgcctattctacgaataggcaaatttttttttttttctcttgagatggagtctcactctgtcacccaggctggagtgcaggggtacagctccagttcactgcactccacctcctgggctcaagcgattttcctgcctcagcctcagccttctgaggagtgaaattacagaaaacacgaacatgccca

SEQ ID NO: 95495 - DNA, 389 bp, Homo sapiens
aatacaacgtggtctagataaaagctgtctcatcactgacaatattccctcaagccaaagcctaatccagaaaaagggtgtaaacccctccttcaaatctatgaaggctgaccgtggtaaggaagctgcagaagaaaagtctgaagccagtagaagttggtttatgagggagaaggaaagaagtcatctccataatataagtaagtgcaaggtaaagcagcatgttatccagaagacctagctagtatcattgatgaaggtggctacactaaacaatagattttcaatgaagattacagtggaagaagatgtgatttaggtcttttctaactagagagaagttaacacctggtttcaaggcctcaaaagacaggctgacacctttggtt

SEQ ID NO: 95496 - DNA, 457 bp, Homo sapiens
  misc_feature (1)...(457): n = a,t,c or g
ctttgannnnncgcgacgtagcttgatcctatagagcggccgacttctcgcagaattggcacatcttggtgctaaagtcgctcacttctgggtcggacaaagagtccaactcgcggactcctttgccgatgaagaggctgatctgtgaggagaggagcttgttcacgcgggcgccctcacagtccaccatgcgcacgacgggcaggaagggctgcacgtcacacagacgccgttgctcgtcctccagctcttgctgctccgctgtctggttgatgcaggtgaacacataggcctcggggccactgagcatgtggaagagcggctcatactgggcgcggtgccacagcagctgcttgatggtgctgaggttggcattgcgggacacagggaagttcacgtagaccccctgcgggccatcggaaagtctaccaccacgctctgagtctcctccttggcc

SEQ ID NO: 95497 - DNA, 408 bp, Homo sapiens
atacacgctcctccatcagcttctttttttcccggttcactgccagcaccttgcagatcctgctggcagctgtctctgcctgctcagccccggcaataactatctacaaccaggacacataggtcatgatggccttctcatcccgctttggggtggtcacaatgtcttctgcatccaacatcttggggatgtccaggtatttctctgccacctcaaaggcagtgttcaggtttccgatggggtcatcctttcgcagcttggcgtagccgatgaggtcactgccggcgtcggtggatgagggcacagagggccatgccatccttccagctggcgtggaagctctgcgcgcagaggcggcgtaggtctttgccccgctgactggcacggtacaggccgtcggttttctcc

SEQ ID NO: 95498 - DNA, 415 bp, Homo sapiens
aatacagtgtggctgctaggaaaccaggcttcctgggtcctggccaaagacaggagcaccttcaccactactgctgtgtatcaggaggcagaggagagtgagacagaaaaactagcactcaggacccaggagagaaggggctctcttgcttcctaaatgtctaccacatgctaagcgctgtttgctgctttttaaaatgtgcagcgatggtgccactgcactctgctgcccaggctggagttcagcagcgccatcatagctcactcaaagcccacctcaacctcccaagctaagtgaccttctcacctcggcctcccaagctgctgggactacaggtgcataccaccacatccagctaattgtttggattattattattagcagcaccagcacgagtagagagggtggattaccc

SEQ ID NO: 95499 - DNA, 417 bp, Homo sapiens
aatacatggggcggatataggagaatagtttaggcccagcggagaacgcgaggaagtccccatgcagtaaggagcgctccttactccgctggacactcagcgcgccggaacaaggaaaggagggagccaggggcttcactctggcccttcacaatcatgagggcacttacagcccctgggatgtcagggaagctggactcatcccacagcatgactggagcctccatatgctgtccaggaagggcagatgcatccaggccaatctcatccccgtagctgaaaacaggggtgcctggaaaggagaagagcatcagctgttatagtcagagaaggtgagccggctataaggaaggcaggaagcatgcctgagacaacatgcaaataaaccaacgattggcagtggcatatcaatcctgg

SEQ ID NO: 95500 - DNA, 394 bp, Homo sapiens
aatacatcttctctattttttttggacattatattaacatttgttttttcttcattttcttgttttaaggtgcatctatcatgctcttccttcagcttcttgggaaattgctgaggatacgttttcccaatctttctttgttgggttaatctgccagcagcagcagaagatgtactatcacatatattttctgaaagttgtattttttcacttttgtttgtattatttccttctttgacctgtggttgcttcttttcacttctttcatgcctttgttgctcttgctctgaagccactggtaaggcttgctctgctctcaatgtccgtacatttctttctttgaacttgctcctttcacagcaggatctttcacttcagggtaagcttcaaggat

SEQ ID NO: 95501 - DNA, 500 bp, Homo sapiens
  misc_feature (1)...(500): n = a,t,c or g
tgacacaagcctggatcctctatagcggacgcatacattccccaatcttggccctgctcgttggcatcttggctggcataagcacccagagaatctctcttcccaaattcccagtccccaaggcttacatctcgactactgtaggtacccagagaatctctctttccgaattcctggtcctggagttctgcatcccggctggagtaagtgccctgggaatccctctttctgaactcccagtcctgaacatctgcctcctggctccgctgagtgccaagctgggctggctttccaactacccggtcctgggctgtgagcacccctggggcagacactttactctggtcttggctgctgctggcctgcatctcctcctggacgatgccacacctgctggcccactccctggtgctcccttcccctgctccttgcccatacttgctggtccagtccctctctccgagacctgngtctgctctagggcttgcacccccaaggac

SEQ ID NO: 95502 - DNA, 387 bp, Homo sapiens
ccacaattattatatatttttattttttaaaatcatcactaaaaattcaaactgatctgtttccttctacagtgttttcagtaaagtttatttaaatttaataaaatctgtgaattaccacactaaattagctttgtgtttccccctacccttccaaagatgccccagctaaaacctgaaacaattagcatgactggcttaaacctgtttcagcatctctgtaacttggctcgattggctaccagtgcctatgatggttgttcaaattctgaggtatggatttagacttactttattaggcagctttattcctcaaattagattatcaaattcggtttccaaattatttttctacaaagtatagaatttactacctgtgcttgtatt

SEQ ID NO: 95503 - DNA, 505 bp, Homo sapiens
  misc_feature (1)...(505): n = a,t,c or g
naggacgaaccaggatnnggtnagaggaagcacagcaccgcaccaatgtgtctcttgaacatatacgcacaaatcctcagatttgtattagcaaatcaaatctacaaatgtataaaaagaattatacaccatgaccaagtgggatttatcccaattatgcaaagctggttcaacatacaaaatcaataaatgtaatctaatccatcacatcaacagacttaattagaaaaatcacatgatcatatcatttgacaaaactcaccacctattcataataaaaactttcatcaaactaggaatagaagggaatctcctcaacttgataaaaaacatatttttaaaaaccctgcagctaacatcatacttaacagtgagaaagtcagccaggcacagtgacccacacctgtaatcccagcactttgggaggctgaggcaagaagattgctagagcctatgagttcaagaccagcctgggcaacatgacaaaaccccatctctacaaaaa

SEQ ID NO: 95504 - DNA, 415 bp, Homo sapiens
aatacagtctgggtttggacttttacatataaatgaatgctttgatatactagtaacaaacaactgcaaatacaaattttaaaaatcacttacaatagcaccaaaaaatataaaatacttataaactggataaaagatgtaaaagaccagtacactgaaaaccaaaaaatacttctgagagaaattaaagatctaaacaagtaagagatacatcttgttcatggatattgttcagatgtcaatgttctccaactgatctatagattcagtgaaccccccaacaaaaatctcagcactttgtagatattaacaacctcattctaatttgcatggaaatacacaggaactggaatttacaaagtaactatgaaaaacagagttggaaggctatcactacctaattttcagaattatt

SEQ ID NO: 95505 - DNA, 419 bp, Homo sapiens
aatacactggctgtgaggggtttatactgttctgctttctctggcatcttgatggcagggtgtggtctacaaatggcaatgtcttcctgagcaaagcagctaaggttggattcagagtgtgttgccatggcggtgagtttaaggaaggtgttctcgggaggttttcgctcaaaattggagaagaacaggccgatggctattatcttttccaggttggcactgagcgtgaggtgcagcttcttcctccacatctttgctagcatggacaccgttgtagcgtacagctctgaccccaattgccagctgtcctgccttctcctgctcattgggactaaccatcgttactgagatctgtcctcctcttttatggtatggagtctgggctttttctagccctctcaacacaatcggcattctcc

SEQ ID NO: 95506 - DNA, 384 bp, Homo sapiens
agtacatcggcgggttggtgatgtccaggtattatgtgagggccgtgcgcgggacgtatggcacgggaatgggtgcttcttgttggactcctcatccaggttgttcagggacatgacgacgtacaggttggcacccaggattttgcccagctggtagacgagagcagagtcgttggctgggtacacagccacgtggcccccagagtcatacctgactgtggaggccctgatgtgcactttctagtgcatgacgcgtggctcgattgcctgactaaatcttcgattgctggtgcatgaacggaacactggtacttatgatcttgttgggacccttgatgcccttatcacatgtgttgaatactgtccagaagtgattgttctggt

SEQ ID NO: 95507 - DNA, 408 bp, Homo sapiens
  misc_feature (1)...(408): n = a,t,c or g
aatacaggctttctttgtgctttttgtcccattctttgttcaaaatgtcaaaaacctggacaccctccaccggtaacactcccatgatcaggacccaaggctacacacagcggaggtgcttaacgcacatcccaggagtggtcaggcacccgactcaccgactcctcgaccacggggtgaaccagcgcagctcgcggtagttgccttcattggccaaggccatcttgggtctgatgagcaggatcttcctgcagacaggggaacagggctgtgcacaccgggctcctgagatgaacgtgccactggcggtggtcagtgccaccaagtgacgaggggatgccatgcagagtcagcttgagaatggggccccgagcaaatctctctccttctctgggcttccgctttctn

SEQ ID NO: 95508 - DNA, 408 bp, Homo sapiens
tggggttggagctattcgatggagttgagtgtttggtggagtccgaatcaggctctttgtcaaagtcctgggctggatcagacatacttctcagaggcacagtcacgctaggctccgatccacctgatgagggccacgagatgtagggcttgttcctgcatggaggctggcgagccaggttggtgggagcggggcccgggctttcctcctgggaagggggcacagcactcagaggcaggtccatgagcacctgcttgccgtcgcctggacccatgtgggccacgtggttgaattttgttgcgatgtataatctcttgatcctttactggagggatctacggtttccctcgctccgtttcgaattctttactattaaggaccctaaacacaccttcctcttgacctccc

SEQ ID NO: 95509 - DNA, 470 bp, Homo sapiens
aggtgtgagcccctgccaggaaccccctgcccagaccatgtacttggcccacaggcccctgatgtctgcgtccagcgaggcctccagtggcgtcagcatgtttgtgtggaggaacgtggaaccttgctctgtggctgtgttctcctggtactctgtccccttcctgacccctccctgcagctatgtgaggtccagcaacctgccagtcactcagtggcctccaaccagagcaaagaacctgccaagtcagcagctgttgctcatgagtgtccaccaggtgggacagggagtgctgaccctgggtggccccctggagccacctgccctgaaagcccagggcccgcaaccccacacactttgggggtggtggaacctggtaaaagctcccctcccaccatggaggaggagccctgggcccctcaggggagtccctgctggacagtgagacagagaatgaccatgatgatgct

SEQ ID NO: 95510 - DNA, 555 bp, Homo sapiens
gagtgacccagggggcagcagtgagactgcggacattggcagggggctggttccggaaggtgctggggaaccgtggggcggtgtgaagcaggcgggttgtgttagacactgtgcggcttgaagggtggactgggaggtgactgaggcatggtatgtcgcccggcaccatctgctcagtgagacccttgagagacgtctccccgttcttccaagaccctcctgcatgctgggacccagggctgccgtggagctgcttgctgccccacccaccattctctagtgtattttcttcaagtctggggctagggaatccttataccttagagtcccccagattctgctgccctggggggccaataaggaggggatgtgcagcatgctgactctaaggcaggtggggaacagcagccagtccaccaagagctgccctcttccccatccccattgcctcctgcctggccagccatagcacttggctccttccctatcctgtgtgacggtgggtctctccccaccctgcgcaagatccctcccagtgctgcccagagctgtatt

SEQ ID NO: 95511 - DNA, 570 bp, Homo sapiens
  misc_feature (1)...(570): n = a,t,c or g
gagccggagcgacctagnntggatcttagagcggccgcctacactgctgctggacgctgtatctttgccatggcactttccaggtctcgctggtagccgttggcacagtcgggaactacccctcgaagggccactgcggcgttcctcaacacccgctcagtctgggctgccttgccctccttgatggcttgattgatggcagccacaccaagagccattctctgagctgtattagcgtcctgtgtggctctgaccactccctggcggatctcctcaagccacagcacagctccaggatcccctgtcacctgggccttctgccttttggctgccacaaggaggagatggtaccgaggggcgacagggaggctgacatcatctaggccagctgcaggaagcagtagggcagacagagtcttctcaaggctgcctttgtccagagcctcattgatgaggctgactgcaaggaccccggctagtctcttcctgggcctgtgcattgaacctggatcatcggtgggcctgcaggtcatttcccagcctagagaaggtctcgccccatccccctcn

SEQ ID NO: 95512 - DNA, 405 bp, Homo sapiens
aatacagggctgtggtatcacttcctcttcagtattgcatggcatggtttttaagaaggaaacagaaggtgatgtacatctgtcaaagatgcaaaaatagcagagtactcttgtccttttgatggcatgataacagaaactaagggaacagtgttgataaagactgatgaagaattgatgaatttaagtaagggagaagaaaatctcatggatgcataagtcaaagctattgctgatactggtgcaaatgttgtagtaacaggtggcaaagtggcagacatggctcttcattatgcaaacaaatataatatgatgttagtgaagctaaactcacaatgggatgtccgaagactctgtaaaacagttggtgctacagctcttcctaaattgacacctccttgtctt

SEQ ID NO: 95513 - DNA, 510 bp, Homo sapiens
cccgtcgcaagcttgcatactctagagcggtcgctatacaggctcgagacctggcgagatgtctgccgcacaaacacaagcagtgttaatcttggggccaggcaggccgccccttggggtacagggaagaagcccttcatctccaggagggggacgccagatggggatggggaagggggcatcggagagggccctgagcccctcgtctacctcaagccaccttgggaacagccgtttcaagcctgacttcagtgagcacccaggaccgtccttagctgctcatttccccgagcctggaggcccagggaaagcggagaaggaccaaggaggggctgaagagctgatgcttggccccaggggggttccccacctcgctgtatttggggaaagccccacgttgcctgtcctctgctgcacacactcccctttcttaagatgggaatgcccggaggcctcggccagctggggcctgccactgctgctctgaacgtgaaacgcgtgccccaagag

SEQ ID NO: 95514 - DNA, 472 bp, Homo sapiens
aatacaggtctggaactcggctcaagtgatccacctgcctcggcctcccaaagtgctgggattacaggtgtgagccaccatccctggccatgagcttctacttcttttctttttctttttcttttttttttttttgggaaaaggggcctggccccttggttaaggtaaaggggcgggggccaattcggggttaagggaaccgggcccctcgggggtaaagggaattcccccccccaacccccgggaaaagggggaatacggggggggggcaaccaggccaaccaatttttggatttttaaaaaaaaagggggccccccctgggggcccgggcgtgccaaaaacccggggccaaattgaaccccccccttggccctccaaaagggcgggagtaacgggatggaccctgggccccggcccaaaagtttaaatttttggaaaaaggctttggcccaagaaacccaaccccagggg

SEQ ID NO: 95515 - DNA, 735 bp, Homo sapiens
  misc_feature (1)...(735): n = a,t,c or g
ttttttttttttcttcgttaaaggtatttttattgctagtacaagattgcaggatctaggcaaataatataacaattaaatgtgcaaatctcatgaaggtaaactacctttctgttctgtaatatttacccaaatagtcaaggctcagacttgttaaactgtggagttactaaagaaggggggattttccaaattgtagaaacaagagtagtcagattttcccatccctactagctttctagggttaaattcaatgatgtggaaaacaaggcataggggtaggaggtccatatggatatttcatacaggggaggaatgtccactgggggaagtctctttcgggccctcattcaccacggtccttatcccctgtacacatcaagtcagaatggggctagcccattcagggaagcagcggtagaagaaatctgggcgtggcctccctacgattcagttttattgtgttggtaaagacgccattcagagccagggcaaggctggcagccagggcangcttgtctgctggtccctggggtctgccttcttgagaaaatttgggccaggaagatcagagacagtggagagagaaatgcaataacaaacatcggcttggtggggaaatactccgcctccacgtaggggttccggtagaagccacatctcctccggctggatgagtctcttggaacgggggaacagcttccgtcaccaggaaggccgcgaacagcgcgagcc

SEQ ID NO: 95516 - DNA, 433 bp, Homo sapiens
aatacagtcgggagtaacaaaaaaagcaaaaaactctattttgcagaaatagaaaaatcctacctaaatttcatatggaatctcaagggaccccaatgagtcaaaattatcttgaaaaagaagtccagtgttacaaaatgtacacttattcattccaaagcttaatacaaagttccaaaatagtgtggtactggcaaagagacacacatatggacactggaacagtataaagcagcatatggtcaaacaattttttgatggggatacaaagaccgttcaatgggcaaaggactgtctttataacaattggtgctgggaaaaaatggatatccacaagcaacaggatgaagtttaacatttaccctacaccataagcaaatataaattgccatcaagaccctaatagcaaggaactttataggtataaaaattt

SEQ ID NO: 95517 - DNA, 376 bp, Homo sapiens
atttattggtgattttttacatgttctgagccttatccatggccgaggcaggggctgggctgagcgagaccgctaatgagacaacggttaccgctgcacccgagcccgtgagaaaggcgggggggcggtgctgtttaggggtctgggagatactgggagggaggggacagggattagaagagttgttggaggagctaggcctagggatatgggaggtgtggggttgaatatctagggctgggagaatcggaaggtattggagctatttggagtggcagagatggtgcaggaggcaggtcaaggaacttgtaatagggaggtacagttaggatataggtgttgctgcttggggtggttatgtgtgtaagtaataaac

SEQ ID NO: 95518 - DNA, 488 bp, Homo sapiens
aacgccctcatccgtcaaggagctgttggctttgtgttgccctgcatggtgctgtgggctgtggagcctaccactggggaaggctggtggggaccccaccctggggcgcttgctccctagctgaggagctggaaaagaagccagatactcggtgagatgcgtcatagagctgcagatagatcctggagatgaggctgtggaggagcgggaagaggagggtgttgttgcagccaagtgcgcatgcgctgagatgggtgaacccatgtgtttgggagctgcgaggagcccggtggctggaccaggggatggatgtgagttgcagaaggtggagaaggtgaagaggtgacagggccaggcacatgggaggagcccggtggctggaccaggggatgcacgtgacagggcgagaggcattgagtgagtctcataagggggaaaggtgacaggaccaggcacatgggaccccgggcatgtgagccttgtgggct

SEQ ID NO: 95519 - DNA, 552 bp, Homo sapiens
cgaaatccaagaaaacgagcgttcccgtcaccccccatccctgctcctccttcgtgaaatcaagaaaacgagcgttcccgtcacccccagtccctgctcctccttcgtgaaatcaaggaaacgagcgttcccgtcacccccagtccctgctcctcctttgtgaaatcaaggaaacgagcgttcccgtcacccccagtccctgctcctccttcgtgaaatcaaggaaacgagcgttcccgtcacccccagtccctgctcctccttcgtgaaatcaaggaaatgagcgttcccgtcacccccagtccctgctcctccttcgtgaaatcaaggaaatgagcgttcccgtcacccccagtccctgtgctccttcgtgatcacaccttcctgcccctccctgagcccaggcagccatctactgtccctgtaggttgctttgggttttctagaattccacgtagatggaatcacacaggatgtgcattcttgttgatctgtcactcggcacgattgttgtgtgatccccgtgtgtcgtcgtgtgttgtccgtcattca

SEQ ID NO: 95520 - DNA, 470 bp, Homo sapiens
aatacactgccggttgaagataacaatgtccccatcacacatgtgccgtttcaccttatagccggtctgcaggtgaaggtcactgtgcttggggtggaaacgcaagtcaatgcgatcaccattgtctcggatgatgtacttggcgcctgggtactggctgttccccctgcgcactagttcttgaagtctgtcaatgttgaagggggtgacaatctccgcaaaggtcatgttggcagcaatggagcggtgcacgccaacctggtcaatggagaggttggtgacgtcggtgatgacagtctaggtcgtgtagtccactcttttgccctattatgttccctcggcgcctgccttcttagtctttatgcctgctgtccaaaactctttcctacttccgactttctcctggcacccgttactttcgttcccctttccacctggtgtcctcttgtctgttcgccgcccccttttcg

SEQ ID NO: 95521 - DNA, 520 bp, Homo sapiens
  misc_feature (1)...(520): n = a,t,c or g
tgtacgaagctagcattctctagatcggccgcaatacatccttggtcaattcttaaactcttgcttcattctgctgaagtttttcctccatacttaaagctgngggggagtctaagagggcaatctgattcccttgagcaagcagcgttttcagtctggctatttcagctcgcagctcacggataagtttgacgttggcatcctcattaatggtaggcttgttgatgatgtttttggctctatttgcatagcgaagagtacttagggtttctccataattgacatcagcaggtgaaatggtggccatcatgatagctttagagtttcctccaaggctatcttttaacaaccaagtcatcacagaatccctgtaaggcacgagaacttgctttttttttcaagagtatctgcagcatcctgagaaaaatcagctaatgcagaaatgacgttccccacagtcacgaaggactcggtaatatttcccccttcctttaacctaaccccggcgggttccgtggcn

SEQ ID NO: 95522 - DNA, 490 bp, Homo sapiens
aatacagggtgggtggtgaggaagggagaagggaatgggacgctgatggtgaggaggcttccctgtgttcctctttgcagttcggcaggtggcttgactgaggaggatgagggggagctgtgtgctgccggctttcctctcctggctgaggactttgggcaggctctgcagcaactgcagacagctcactcccaggccgttggagcccccaaggtggagaccaagtccttggaggtgggacaggagcccctccaacagcatatcccaaccacgcactttccatctcctagatcccctcagtgtcctggcatgatgagggtgcactgcccgctgtgaagatagagatcctcgggatcattcacttgctgccggagcgacatgcactattgagcctggtccaggcacgctcaggccttctgctgcatgggccccctgccaccgggaaaatccttctgaacaaggcaggaaccactgagtgctgccttacctt

SEQ ID NO: 95523 - DNA, 381 bp, Homo sapiens
agcgcactacagctgggtttcccaacactggcttagggtttatctcatctggactcctaaaccaattccattagtctgtttccagcttgtcaaattttgcttttgcacatccagaacatatattccttgctcttgaggatttctttcttaaaaaattgcctttgctctcattttatgagactctgggacagggtgctgggatacatgcatataaccctccatcttgggccgattgacgcactgaacacagagttctttcattcttcccaatcaagacagagtgccctactgctgccgttcctgcatttgcgacaagcaacaggggcagccttcctcgctctatatcatctttaatcagattctccaggaaggcaacctccg

SEQ ID NO: 95524 - DNA, 378 bp, Homo sapiens
aatacagagtcgcctgatgaggttctttataatcccgaactggatcagcttcctggaggatggacaccagtgtcacaacgccgtagtacctgagagagagagctgcgctcagcttctgaggaccatgccttcccaaccctcacacccagggcccctgaggacttccctggctggtgaccttgtcccaggtatgactgtaggcccactcacagcaggatctggatagcaatgcgcaccaggttgagcttcacatctgcctctgctgaaatcttctggacgtggcggaacccatcaatgtagggcaggatttgatgcgtagtgaggcctcactgtgagttgaagaaatactccttgtctttggatacgacaggtacatag

SEQ ID NO: 95525 - DNA, 375 bp, Homo sapiens
taatacatgtgtgctgttccgtgggagtgtgtgtgctgttcgtgggagtgtgtgtgctgttcgtgggagtgtgtgtgctgttccatgggtgtgtgtgccgttccgtggggggctgtgtgctgtcccgtgggagtgtgagctgctcctctcaacatctcagcaaccagatcatgcaaagcaggtgctcctcccaggtctcaaaaagggaaaacaggcctgaaaacaggcctcacttgtgatgtgacagcccaggactgcaccatggcccgtttctagctctaggctgggactgcagtgaaggggctgacttctccgcttctagctacctggcttgaagacatcgctgtcggcttcatgtagataaacaagcatccg

SEQ ID NO: 95526 - DNA, 424 bp, Homo sapiens
aatacagtccggctataattatatgaagaaatgcttcatgatcttgattccacttgtttaaaatggccatagaacgcttttctcttatctgcagctgagctgggagaaagttttggcacccaccgagtggacagtttactcaactttaatttcagtcagaattgtgtaagctgaacaccttgggatacctacagcgttggctattgtttctgctgctattaatcagtcctcttaaattagggcacaaacaagatgaattgtttcctcacagactgatgtggctggcctgctgctgtggacttcctctccaacatcatctcttctcttcttccaatgagttatccacttacttaaattgctgatttctttgaggcattgtccctataaactttcaataaatcatcaatgatttcaccatgtttcc

SEQ ID NO: 95527 - DNA, 469 bp, Homo sapiens
gaagcgccgtaagcttgtatcctctatagcggccgcaatacatcctgctctaagctcatgaacaaggcaaaggtttttgcttttgctatttctattccacatagtgcgggaagatctagtccaattaagaattaaaaagaaacatactatccaaattggaaatgtagaggttaaattactctagcctacagataatataattttatgtggaaagctctatagatttcacagatccacacaaaaagtattacaactaataaattcagcatagtagcagcatacaaaattaacatgcacatatcacttgtgtttctatacagtaatgacgaataattagaaaacaaaactaagcagacaagctcatttacaatagcactgaaaagaataaaatacgtcgggagtaacaaaaaaagcaaaaaattctattttgctgaaatagaaaaatcctacctagatttcatatggaatg

SEQ ID NO: 95528 - DNA, 1001 bp, Homo sapiens
  misc_feature (1)...(1001): n = a,t,c or g
tttcgtgactggtaagagcgacctccccgccaggtcctgtgtgttgccggctgaagaaggatgatgattattccccaccttctaagagacaaagaccaacgagccaccacagccaccagtcccagaacccgccaatgctggggaatggaaaatgagggagttcaactctggccctcacaatccagtggaggagacgaaactcatctgcctctgtccctctgggcacacctcatgccaggtgcatctgtggacaggggccatgctcctgggcttccaaagttggagaaagctgccaggctcagagccacctaagctgaagattcccttgagaacaagtactgtcctgcggtttcatggcctttcttccatttgtggttcttgcgaagtggaatttaaatgacatcttatcaagatggataaaccctagtttcccagtgctggaatatagaaaatggatggacaagtaaatcccactcagcacccatagtccaggcatggggacctcaacacacctgagcaccagacatcacctttcattctggacctaccatgaaagacttctgaatccaggaagagaaactgactgggcaacatgttattcagatggggtcttcttatgttgcncaggttggtctcaaattcctaggctcaagtgattccgnccacctctgcctcccaaagtgctgggattacgggcatgagccagcgcatctggccaccttattttcaattactggctcaatgtaatggctccatctcaggaacagccaatgaaagagatgcacaggacaagaaacaggaccttgccctgtcactcaggatggagttcagtggtccaattatggctcattgtagcctcaaactcccaggctcaagcagtcctaccatgtcagccttcccagtagctgggattacagttgaagcacctgtcctgcgagcttaggggtgctacaagttgaccactgcactccagcctgggcgacagagcaanactcggtctc

SEQ ID NO: 95529 - DNA, 476 bp, Homo sapiens
agtctgacgacgccgattaagtttggatcctctatagcggtcgcaatacagctctcccacaagaattgagaccgctgtctaagtgctatgattttatcccgatgaatagacctgattgtagaaggaatctgtaataacaatctctcatcgcctatgacggcagcttggctccaattaatcacttcagagaatggcaactcccatccattgctgagcatcacagggacacaggcagcctgcatagcctccaggaatctgaaggacccatgcctgcgaccacgatgaaccagacagaaagtggcattgtgcagcatttccccgaaatcattacttctcatactcggtgttgtctctgtcacagcgagaatccttgtgcttttgccagtctttgccatgcttgcaggtggtgaggatcacaacgtcctccccgttcatgacgtgatataaggcattcctggtggttgatccctatccct

SEQ ID NO: 95530 - DNA, 424 bp, Homo sapiens
aatacaaccctcatatttgctggtgggatgtgaaatgtatgccctggtcctctttgtgcccgccttctgcaccgctcgctcacccacgccacgcccgatcctccgctgctcaccctgccctgaataccgacaccaacaccgtcttcccggtgtgctccaaaggctcctccacacctgatttgccccacctcctgcccactctgcagcaagccccatccctggcctccctttcatcctgccagaccgggtccacgggatgaacctgctgcccgcctccctctgtgcctgcaccttggcacggtgggacggaagcctgctgtactctgaactctggggctcactctgaatgcctcttctgaagcctgagatgaggccgggagtgcaacacgctacttcccacctatggggaaagcccctggggctg

SEQ ID NO: 95531 - DNA, 418 bp, Homo sapiens
aatacatctcctgttactactaaaaataaacagagactttttattgaaggcttactatgtaccaagtgctatatcgcctgcactgcactgcactgcaacctctacctcccagggtcaagtgattctcatgcctcagcctcccaagtacttggaactatatgcacatgccacaatgcccaactaattttttgtatctttaccagagatgaggttccgcccatgttgcccacgctggtggcgcacacccgcattcccagccattaagaggccgaggtgggagtatcccttgcaccctacactctgacgctgcaaagaagtataacggggatactgtactccaccctgagtgacgaagcacgaacctgacctaacatcgctgacctaagtcctttagtgaagatcataagagataaactcg

SEQ ID NO: 95532 - DNA, 448 bp, Homo sapiens
aatacattcctgggcacggagagggctgaggggcttgatgggccggctcccaacactgtaatttcttggacgccttattgtattcgaactggacagaggcgtaaagctgttccttctcatccttacaggggcttggttcttggcgaagatgttagttggcttgtcacggcgcgtgttcacagcctccacgttaagtttaattgtttctactttgtaccctccccaccaggatatcgatacagatacttctcttgatcccgaagtgcaaactcttctgggtaccgttcttcaatctatgcataggcgatcccttcccacacaccactattgtatcccatccacaatcgttcactgctccatagggcacactcgacagattcaacactctgcatggctccccttcatctggatgtgtccatattttgacggtttgaccttctatggacac

SEQ ID NO: 95533 - DNA, 465 bp, Homo sapiens
aatacagtggggggatagagaaaggggatggggcaggggcaggcaggagatcctaccaggatctctgggcagtgtctatgctgatctggtggggatggtgatggagccccatgggagggagctcacaggcctcctggaggaagaacaggccaggctggctgtgacttgcgcttcacatatacagttttccctgagtggatgctagtatcccctccgcttgacaggtgggaaaactgaggcacgacctgtgagcaggcttcctagggagggacactggaggagaccatgacatgcctgacaggggatgctgctcgccgaggccagtcagagctggccttgggggtcactgaaggtgggaacatggggtgccgggaaggaaggggggagggctctctctccctttccctgtcgtcttccgccctccggggcaggtgtctggtaattcgccctcacgcgcgttgactc

SEQ ID NO: 95534 - DNA, 402 bp, Homo sapiens
atacatccccggccattataatggtcatttggtttgtcaattctataagacagcctccaggatcacactcttcacttctccactcattaaataaatatgtgtattttccaggatagcctacgaacttccctttaaagaaagctacgtagaaccaggatgagtataaatttacaaactgaaacaggaacattttcaaggtaagactgctctcatactcctggtatgttcgaggaatttccatttttgcgatccaggcagatatcttttcataaaagaaattcaggatcaagatgacaatacagttcacgcatgatcctgtgagtgatgcggttatctgaggagtaaggaagcttttgacctgctttaaggatacatcactttccatgaaactagcaaacgtac

SEQ ID NO: 95535 - DNA, 417 bp, Homo sapiens
aatacattgcccatagctttctgctttgtggtgaaaggccggcgatctgatgccacgatgttcagagtgtcattggccagcaggctcatgaggtaggttgaggtgttggtgtccactctcacgggaggcaccgtgacataagcagccgcgtgggaccagtcctggcggtagtagtgtaatcctgtttccgtggcatagtgcagcggtgggttccgccagcacaacctttccttgcatcttaccagctgtgataacgtcaccagccgacatactggacaccgttgaccagggagactggacagtgagtcctgtctcgattggctatacccccatgagtgtgatatgtgagttacctctcttgtaccgctgattcgctcccctcttcccctgtgattctcgacctcgcgctccatcgcc

SEQ ID NO: 95536 - DNA, 405 bp, Homo sapiens
aatacaggctggcgagtttttgccatactctgtagtttaaagggtagaccccgtgggatagagagggtagtggcaaaaaaaaaaaaaaaaaaaagccggggggccccctggggcccgcccaagggaaaaccccaaagacccaaaaaggggggggggcccaagggaacagaggaaaacccccccttttttccgggggaaattttggcaatggaagaatttttgggaatccccttccggccccgggccctgggggggggggtgggccaaggtgaaaaacccgggaaaagaaaaaatgggaactgggaccttttaaaaggggggggaaaattggttttttgccccatggtgggaaaaaaactttcgggggtgcccggggtttaacaaaaaaactttaaggggggttgg

SEQ ID NO: 95537 - DNA, 443 bp, Homo sapiens
gacgtaatcttgatcctcagagcggccgcaatacagtcgctgtagtgtgcccctcaggtcactctgttcagcacctgggatttacgcagttcagcctccatcagtgccagcatgggctgcacatgccaccactcaagccaggctgtgccaccctcggtcaccaccactgcgctgatagcagctggatgaaattggcaaagacaggaggtagccctggctcaggcacgcatggctcagctagctccacggacagccaagccttgggagccagggtggagaaagcttcataatggccataggcattgtctacctcctccagtctgcagccagccaccatgttgtgcgtcagcaaggcttcccacagcccctgcctctagccattgacactgaggtcttccatgcagccagcccagcagggaggcattggcagcccctggtgtcag

SEQ ID NO: 95538 - DNA, 395 bp, Homo sapiens
aattcactccctttagatctaatagttgctttttatatctgggtgctctagtgctaggtgcatatatatttccaactgttatattttcttgcttaactgatccctttatctcataatgtccttctttgttgctttttatagctttttacttgatgtctgtttggccttatgtaagtaatgctactcctgctggcttttggtttccatttggatgaagtatctttttctttcccttcactctcagtctgtatgactttacagatgaggtgagtttcttacaggcagtatatagttggggtttatccattcagccagtttatatgttttatatggcgcaactgatcccatcttcattaaggctattgggaggcacagaccctcccctcccgttgccc

SEQ ID NO: 95539 - DNA, 419 bp, Homo sapiens
aatacaggggcggttgccaggcggagggtcttttctcttctcagatggggcggccaggcagagacgctcctcacctcccagacgggggcgcggctgggcgctctcacatcccagacggggcggcggggcagaggcactccccacatctcaggcgatgggcggccgggcagagacgctccttacttcctatatgggatggcggccgggaagaggcgctcctcacttcctagatgggatggcggccgggcagagaggctcctcacttcctagacgggatggcggccaggaagaggcgctcctcactttccagactgggcagccaggcagaagggctcctcacgtcccagacgatgggcgggcaggcagagacgctcctcactttccagacggagtgggcggccgggcagatgctgccatct

SEQ ID NO: 95540 - DNA, 422 bp, Homo sapiens
aatacacgtgtccagaattaccttgaatcttgcaacctagcttattatttataataagttataaagaggttttttttaattttctacatatacaatcatgtcatctacaaaatcacagttttattcttccctttctcatccctgtactatttttcttgccatactcaactaggtaggacttccagtaaaataataaacagaattggtgacagtgaaaacaacttctctttccctgtctcaaaagaaaacttccaacatttcaccagtaaacatggtgtttgctataggatttttctgagtaatctttatcaaattaaggaagttaactttcattcataatgtattaagagattccattttgaatgggtattggattttgccaaaggcaatttttgcacctctgacattatcacatgattttg

SEQ ID NO: 95541 - DNA, 409 bp, Homo sapiens
ttgtgcccattatagcaagaaccctccacagcggccgttgcggacggacgctcgcctgccggctgttatttttggagtctgggagcgatccttttcatggtggggtgtgggcagccgccctttcaagaagccaatgacagtgaaacactgacaatgatcatggattgcaaatatacagaaccatcccatgtgtctaaagagggtaaagacctaatcacacggacgctacagatagatcccaggagaagggcttctttacaatagattgaaaatcatccttggcttaagggagtggacccttcaccagctacaaagaataacattcctcttgtgtgatacaaaaagtctctcggaagaggagcacaacagcattattcaccgcatggcgcttggggacataacggatcgg

SEQ ID NO: 95542 - DNA, 373 bp, Homo sapiens
aatacagtgtgtgcgactatgagtgcatgtttgtctgtgtgcaagcagctgtgtgtgcatctgcctgtatgtgcatgcaactctgtgtgtgtctacctgtctgtagtgtgtggctgtgtgcatgtccttctgtgtgcgtgcgcaactgtgtctgcctgtctgtgcgcgtggctgtgtgtccacctgtgtatgtgtttgtccgcctgtctgtacatgcgactgtgtgtgcatgtctgcctgtgtgtgcaccgcctgtgtgtatgtgtgactgtgtccacctgtgtgtgtgagcggctatgtgtgcctacctgtgtgtgccgctgtccctgtatttgctccagcctgaatggcaatgaatggatgggataaacac

SEQ ID NO: 95543 - DNA, 407 bp, Homo sapiens
atacacgggtgggtttgtggtgggggaaggggcaatggcaggggttgtggcaacaaccggggagcagatgggaagtccagggtgacaaactggggtcccccattgtgccagctcctggtgactgccaggtgctagggtgctggggtgctgtgctgacaggtgggaggtgccaggatggattcgaggtgcctgccctggctcaggtggatagagtgacagcacatgccaggcggttccacgggggtagggggacccaaggctgatagacaagggtcccaggcagaagaggagaggaatagaagtggtgagggaggggtcttactccagcaaggaggaagggcccctctgcctgcacgcaaaagccaaggggcctctcagctgctgacaaacccagggccagagggact

SEQ ID NO: 95544 - DNA, 412 bp, Homo sapiens
  misc_feature (1)...(412): n = a,t,c or g
aatacaccctcccctgaattgcacccctgctagccagggctactccccactcccgtctcctcctcagcagcctccaacctgggctcctccgaggaccagcacccaacagaaacttccaatcctgtgtctcctcaagcccagcgcccacactgatgctccctgtacccagcccggcagcaccctccctcttcacacccctcacactcagcaagcacaaggcacagcttaccagatacacacaacataagcagcacctcctcctggggccaagccaggctgacgctgcccacccccgccaccatccaggcagccacaaaggatgcagaccccagccccagggaatccgcagccatgtcctcggctcacgaccctgactcgggtgctggtgcccgctgtgcctcccctgcctgtn

SEQ ID NO: 95545 - DNA, 451 bp, Homo sapiens
taaccacccgtacgtaagttaggaaactctagcgcggccgcaatacattcggcccacttcaatctccgcctcccaggttcaagtgattctcctgcctcagcctcctgaggagctgggaggagctgggattacaggtgcatgccagtacacccagctaacaccatgttagccagcctggtcttaaactcctggtgatctgcctgccttggcctcccaaagtcctgggattacaggtgtgagccaccccacccggcctcacttgtcttgatttttaatgcccttagagtgaggccaccatcatctcttgcttgtactattatcgcagcctcctaacatgcctccctgattccaacgcttctctacagggcagctggaatgttcttccttcagaacaaatctgatagtgccatccccctctctaaatttccacagtgatttcccactaacttca

SEQ ID NO: 95546 - DNA, 400 bp, Homo sapiens
aatacatgcaggtcaggactacaatgagcgatcacagttcccattcgattagcaaaatcaacactgacaataccaagtcttgcaaaggataaggatccacagaatctctttttcatgaccgttgggaatataaatttgtgcaactgctttgggaaacagtttggcattacgtaagatgaacattcacaattctctacaacccagaaattatactcaagagaaattccggcacacatacaagaatgtttgtagtgacccatcatcaggaaaatgcataagtaaaaggtgctacatttgcaccctggactttatacaatagtcaaaataagtcttgtaaaaataacatactctatatattagaaaccctttttgaaataaggttaaagatgactgcatagcg

SEQ ID NO: 95547 - DNA, 399 bp, Homo sapiens
aatacattgggggtattactttttaaagtaatggttttattcataggccgcaaatccaactttgcctgcagtttttttctttttttttttggaaacggagcccccctttggccccccgggtggaagggcagggccccaatctcggctaacggaaccccccccctccggggttaaaccaatcccccggctccaccccccggagaaccggaaaaatggccggacccaaggaggcgggggtggcggggacccaaaaccacccgggggccccccaccctaggcaacggggcaaaactcggccggaaaaaaaaaaaaaaaaaaaattccccggcctggtgcccatggggcggatcccctactacctgggaaggcggggggggaagaatggcttgaccccgcaag

SEQ ID NO: 95548 - DNA, 406 bp, Homo sapiens
  misc_feature (1)...(406): n = a,t,c or g
aatacaagcttgggagtgccagatctggaggtgatttctttctggttctcatttctgtgcccttcccactgcactgcctcaaatggaattcaataccatctattagtaaatgtgcccatttaaaaagcttcacacagccaggcgcagtggctcacgcctgtaatcccaccactttgggagaacaacaacggnctgctacatgccacacatcttgctgttgcgaactggcccaaactcaggagtgtgctgtgcactggggctggcgccggggagacccgctcaccttgacctgctcattcgaggggacagctcagaagacaatctccctgataccctgggtgcgaaacatgcggaagcagatgccaccgataacccccccatcttgatcagggcaaatgcttgtgtt

SEQ ID NO: 95549 - DNA, 1855 bp, Homo sapiens
tttgtttttttttttttcgtgagaaattggcattctttattcataaataaaaacataaaattgccacaaatagtttacatggccaaaaagtgacgtcaaaaataaaatgaagctgtcaaaagcaaaccaaaccaaacaagaaaccacaaagagaaaaataactatgtacatcttccagatgctggtccgtcccagcctgcctctgctgggggctccagctctgcctgcaggcgcagcacaaaggccaccttgcacaagaggtgggtgagcagccccgctggcccaggggtgcagcctctgtcatggcagcacccaccgatgatggcttgaggtctgcagggaaatccctctccccaagctgctgctcctccagccaggcctggcttagtttcgggcaactgtctcacctaagagatggcccaggctggggccaggcacaggaggctcactgagtgcctctctggggaagagatgcccccatatcccagtcccatgtgagctcagtgctataggggctgtgtgtgcctggcaggagttcactgggagagctaggagggaaccccgtgacagtccagtcgttcccaggtccaggggcagagtccgatccttggtgaggtgatgcggagtgctgctctctcctgcaggcgtcctttggggacagagcaggttggtccatccgagtgggtcagtgggtcggccagcaggcgtgcccagagggaagggcaggaagcccaccctgtctggggcctggggccaggctctgtgcttggaggcttctgctgtccagagcctctttccagagaggcagaatctggcatggtccaagaatagtgagggcgcttttggacagggcaggaaagaacacccacaggaaggtgaggttgcaaggtcgcaggatacttgcattctagtgccacggtgggccactctggggcgggggctggtggcagcccagggaagacatctgccaccttggacgtaggacaaggcctgggggggacacatctgggccggcctgggacaggaccaatggatatatggagaaggctgcactccctctgtgtaatggaaaggtaaccgggaacacccaatgcggagcacagcctcccgcctcagggccttccccctgggtgtggcagccacttcttctcaggcaacgtctgaggcagagcactggactctgactgctctttcctggagttggggggggtctccagcctggggagggggagccagccctttcctctgtctccgtggggcagtctcactgggaggaaaaactcaaacaaggcacggcctggtggaaatgaaggaactgagggctgaggcgcaaggaatggggcatctttgacttgggtctggactgtgcccaatggagggtactgccctcaggcagggagggacttttggcttgtagattccaggtttaagcctagcttgggactaagagcaatggtttgaaattccagaaaagctcctctgtcgtttgaggatggcaggatgggcaccgtttaacctcagggacaggaaggtagagccagccacagaaaaggtgactctggcctcagcccgcactcagggaagggctaggacccatgagggcggggggcaaggagagaagcatctccccacccctacctcggggtctctaagggccagcggtgagcgaggcagaaatggggactggccttggactcgcaagttcccagacgctcccctcctcatctcagcaggcagcaggcgcaggcatgtgggaagggatgctgtcctgagaacagcagctgtggctacagtcaaaaatagaacatggaacagcctgctaggtctggctagcctcgtgccgaattcctgcaga

SEQ ID NO: 95550 - DNA, 428 bp, Homo sapiens
  misc_feature (1)...(428): n = a,t,c or g
aatacaggggtgcggagggtgatgcccagcagagtgctgggtgccccaccagcaggtgctcctcgagcatctcatggaactttacaaggagacgcaggggaggggtggggggcgggaataggcatccgctgggtggtctgagaggggcataagaagggggaagggagcagtcgaaggagaggagtgtaagggggaagggagcataagaaattgggaggggagcttcctgcacttgtttccagccaaggaaagagatgagagtgtgagtgtgtctggattggccctctccctccaggcccaggggggtgccgtgtcccagaggtggtgtggccaggggtaggctcctgcctctgtcagcctccattgtgtctgctggaaatggacgcctctcactttcctctggccactcttaacatcaggcagatctn

SEQ ID NO: 95551 - DNA, 399 bp, Homo sapiens
  misc_feature (1)...(399): n = a,t,c or g
aatacacttcctggaagtcagggaaacacaacagttcctaggcgacgaggtactgtggcgttgtggggagcacaacgtcaaagcagagtgtttttctgtggaggaaggaactgatacgcgctgtagaactaaggctgaatcactacggagggcgagtgcaactatgcatccacaccaaagggggaagggtctcttcttgtctcggcccatgcggttcctgttgatggatggggagcatggcacggcatctacatggcgtgagctgatgggcagggtgtgtacccactggctgttcctcttggccttctgttccctgaggagatacacgaaaagttctctcaggcagtataggagcctgatcctgcccaccaggaatcaactaatgctccagggatgccn

SEQ ID NO: 95552 - DNA, 538 bp, Homo sapiens
gaacctagtatcctctagagcggccgcactacattctgtgggctgggaagttcaaggtcaagtcaccagcagactcggtctctggtgaggacttattttacttcaaaaatggcaccctggtgctgtatcttccatggtggaaaggggctagcttctccactcgggtctctttttttcttttccagacaaggtcagttctgtcgtccaagctggagtgcaatggcatgatctcagctcactgcaagctccagcttctggatccaagcgattctcctcccttggggatcacaggcatgcaccaccacacctagcacatttttgtatttttagtagacacaggatttcgccatgttggccaggctggggacctcttttatttatttatttggttgttgctgttgttgagacaggatctcactctgtcgcccaggctgaagtgcagtggcacaatcacagctcactacagcctcattctcccaggctcaggcgatccttccacctcagcatccccggcagctgggaccacaggaatgcaccg

SEQ ID NO: 95553 - DNA, 400 bp, Homo sapiens
aatacatgggctgttctaagcattcaacttgagttacctcactgatccaaacaataacccttaggacacagcactattatttcccctgtttacagatggggacaagaggcaccgaggttcattagcagcccaaggtcacttgaaccaagaggctcttaaccagtaagctgagctgcctcagatgagccctgggggacaaggccccacctggagaggggtgccaggcagagcctctgtgaaggcatgcgccagcaggaatacgtcatccacgccgattcccagagccaagaagggcaacacctggaggggcagaggagcgggcagctgaggacccgtgaagcctggtgactggcactgagtctgccctgcagtcctggcgtacctgggtagtggcagcatt

SEQ ID NO: 95554 - DNA, 542 bp, Homo sapiens
cccttgatcctctagagcggccgcttgccctccccggccagcgctgtcccttccgcgtcctccagtcttcacacgacgcatgggtccccaaggcagcggtctccccaagcttcccgtttcagccccatcctcgagaatgggctcctttcctgctccctctccgctcctgctggcgagtggagaccggcacctatgtccagacgcggctgcgctgcctctcctagccatcgagacaggatgtgactccctcccctggccactgaccccctccctccccaggcggcctgcatccttgctctcctccctcctagcctacccagctcggggttctgtccccgcccagagacctgaggctcggggctgcagatggaatgcacggcagggaggcgggaccctttgtttgtgtgtgcgtgttgttggcctccatccccactccccagactccacttctccaggcctctctcccgccttttcatcccgcatccgcaggacacccaatcaccgggcaacaggtggctggtcattgaccgcaaggtttacag

SEQ ID NO: 95555 - DNA, 519 bp, Homo sapiens
  misc_feature (1)...(519): n = a,t,c or g
aatacagtgaggggtagtaggggcttggtggaagaggcagtccctgtcccatgtatctctgagggactggcaggggcacccaccgtctggcctaaggagccaagcaacagcacctgcctgcagatttgctcagtcatctgcatctgatggatctgccgctgctgcagcacccgtagctcttccaagatcagggggatattcaagtggccactgcctacccctgggggcggagggggtggtggaggaggaggngtgcannnntctattctggaggtaatggggttgctcccagcttgggactggccaagatcatgcccccgcctcccccagccgctgtacctgtgtgatcgaccatgaaatgccctgaagactcctcttctctcctctctgggccacaggtgggatccgtgggcacggatgacacataatctggggggatgctatgctctttgtacctgacctgttgattatttgaaacctcacgcctgtgtctcttaataatgccgtacaactcgtatt

SEQ ID NO: 95556 - DNA, 551 bp, Homo sapiens
  misc_feature (1)...(551): n = a,t,c or g
tcgcactgagtttatngagagtcccgcccacagcctggcattcctgggtgtctgttcccctggctgctccccatcaccttctctcaccctgggccctgtttttgttccctgcctcatgcctgactgatcatcttgcccttctgccaacataacttatcttgccagctaggccgggagctccctgcagcctggaactgtgaggctgtcttgtttcgcttggcgtttcccatgcctggcagagggtaggcacttgggaaatatttgtagggtaaatgaatgcgggatgaatgagtgcgtgaacgagaggaacagaaatttcgcgcattggccaatggatgggtggggaaggaatgtctgggctcacctcctggttcctccttggagagatgaacccctgagggctcagggagcttaacttgcttcttaccctcagcatcaccatgaacggagagaccatcgcctgtgctgagggctgccaggccatttgtgacaccggcacctctctgctgaccggccaaccagccccattgcccaacatcagagcgacattg

SEQ ID NO: 95557 - DNA, 396 bp, Homo sapiens
  misc_feature (1)...(396): n = a,t,c or g
aatacagagtgctgctataacaaagtaccacagactatgtaatttacatagaacagaaatttattttctcacagttctggaagctgggaagtccaaggtcatggtactagtatctgatgaggggcttcttgctgcatcataacatggtgaaaggcaaagaggatgagagaaagacaaaaggggccagactcattcttttttttttttttttttttaaaaaggaatccccctccccaccccgggtggaggggagggacccaaaacttgggtacatgaaaccctttgccccccaaggtaaaaaaactttcccgcccaaccccccctgaaaagtgggaaccaggggccgtgccccattgcccaaataattttttgttttttagaaaaaatgggggtccn

SEQ ID NO: 95558 - DNA, 416 bp, Homo sapiens
  misc_feature (1)...(416): n = a,t,c or g
aatacagcctctctcttcagtttgagggggctgagcttgccttgtgacatcagttctctgaaggatggaagaagagcttgttgaggtttcagtttgttcagctttttgttacaagggaataataacttccaagctccttacatgctggaccaaaaactagaagtcatttaacttttaaaaagaactgccacactgttttcttaattggttgtaccattttacattcccaccagcaatgtgtgaagattcctgtttctccatatccttgccaaaacttattttcttttttagttttttattttacccatcctagtgggtgagaagtggtatctcctttttgttttgatttgcatttctttgatgactaattactgacaatgtttatttttcttggagaaatgtctatttacatcctn

SEQ ID NO: 95559 - DNA, 411 bp, Homo sapiens
aatacacgccatgtgaatatcattttttattaagtgcccattcaagtctcttgcccattttcctactgggttgtttgtcttttcttattactttcagaaatgctttatgtattccagaaatgatctatttgtcagttatgtattgcaaatattaatatattctcccaatctattgtttgcctcgttttattttttgatgaactgaggtttttaattgtatcgtagtcaaatttatcagtctttttctttatggtttagggtattttctgttctgtttaagcctttccagattttaatattatgaagatattttcttgtattattttctagaagtcttattgttttacctttcatttttatatccataacccatttaaaatggacttttgtgcataaggctggggtgagatt

SEQ ID NO: 95560 - DNA, 829 bp, Homo sapiens
ggggacaggcctgccactttattttccgttctgcacaggcgggcggcagtaggctgagaatttggagggctaaacaactgggactctggagagtctgtgctctaataatgcctgctttggagcactccttccccacccgcctgctccaggggaatagcgtccctggtcctagcatttcactagatacctcgtgcctttgaaccgctgtgtttgggagggaggaagaggatagacaggtccagggctcccctcacttgggaaggtcctagtagaaggcattccttctgagtctcctggccctacagcttctcacccctgctgctccccaagacctgacccggaccaatcagctgcatctctgcaccaagtgccacccccaccgtgcactgatcgcacctcacgctccccatgggctggcccggaccccagtgaggtctgcacctctcggaccagccaggacctcggaagccatgacctgggtgttcagggcttggcggaggagacgctgctccgcgggggatggagaagccccgcccctccacaactcccttaatctggatgcaattagaggaaaccagccaaaaaccccgcggcagctgttgccccgggattattcccagccagcgagaggcattagggcgataattcagtcattagacttctagccttcccaccgccagaacgtgcaaataggggataatcagccctgcacggccataactcagcaatgctgcttatttaacccattttttaaaatgacacttaatgttattggctggcgtacgtgtgtgcgcatacttaaaagttgatgcgtggtgcaaaaaaaaaa

SEQ ID NO: 95561 - DNA, 423 bp, Homo sapiens
aatacaggggtggtatgtctgcatgtctgtctcttctaattttatcaaacgagcatgtgtcacttttcgagagagaggagagaagacgcgactgtggaagaagagctcacttcaggcagaagaacaaggaatccctcgtcctacaggtcaggaggctgtcaaagagcgcagggacaggaaggccagcaccaggtgcaggaggacccacatccacctctgggagcgcagacctggactcacccaggtgcacggccagggcagccaaccccagcacatgtggggcactcaggctcgggccctgcaacgagaatgagggtggcagagcagactgccctcttccaagctggaattttccagggcactgaagacgaactgagaagtagcagcctggccctcagagtgggcccccaagggtggccccca

SEQ ID NO: 95562 - DNA, 433 bp, Homo sapiens
ccaagatcctaccaagatgacgaaagaagagttaaatgcgctcaagtcgacaggggatgggaccctaggaaagccagtgaggtggaggtgaagaatgaaatcgtggcgaatgtggggaaaagagaaatcttgcacaatactgagaaagaacaacacacagaggacacagtgaaggattgtgtggacatagaggtattcactgctggtgagaataccgaggaccagaaatcctctgaagacactgccccattcctaggaaccttagcaggtgctacctatgaggaacaggttcaaagccaaattcttgagagcgcttctctccctgaaaacacagcacaggttgagtcaaatgaggtcatgggtgcaccagatgacaggaccagaactccccttgagccatccaactgttggagtgacttaaatggtgggagcc

SEQ ID NO: 95563 - DNA, 581 bp, Homo sapiens
ggataactgagtgtttcttcattattttgtcttggatctctccccatactgtaatctcaagggctacaggcttcccacagagggaggaccaccatccacttgagaactaaataacagcatcttaactccttctgtaagggatgcctgcactaaaaaaatcgtgtaagtcatccctgaggaatttggctaatgtcacaaagccagttcactttggcgcatagatatctatgacattagtactttcatcagaagaagaacaatttattgaatatatacagatcatagcttctgatttctgaaaaataaatttatcctacaatgtttggcaaggacatcatgaaacaggtgtttactcacatactatactactaaacgatcttttctcgacaggtacttcgcatccagaatgctctgtctgataagcccaatgtgagcaccgtgtattccaacaatggctctgagcttcatggcacctctgaggcttctgtgaccactggaaaattcttataagcaccgaatatcacaaaactcttgacttgcaagctctatactctatatagtaaaataataaataattgaag

SEQ ID NO: 95564 - DNA, 422 bp, Homo sapiens
caaatacatatggggactccagtacctggagatgtgaattccataaaaatggaagcatctaagaggcagtgaacactggcgcccacaggagaaccaggtgcatcagcgcattgcggagctgaggaaagcaggtctgtggtcccagaggcgtctgctgaagctgcaggaggcccacgacccaagtcccactgggactatctgctggaggagatgcagtggatggccacagactttgcccaggagaggtggaaggtggcctctgtgaagaagatggtcagagctgtggcccggcagctgcaggacaggacgcgcagggaggccggggccaggagggaggagccgagcaggctgaggcagacgtcacctgtactaccagagaaatcgagcgtccctggtctagtactgcgcaggtaaagattcca

SEQ ID NO: 95565 - DNA, 443 bp, Homo sapiens
ctggaagtcactggggagcactttgctgctgctgggttggaacctgatcatgcattatagtctcctcagcacctgttgcggctctgcacacctctggggcatcgccagagtcaggatccaagccttcagggcagggaagtttcagcaactcttcgcggagctgaccagtgcgacgcttgatagctgctgaatggcgagacataatcctgcctacccgcttatcactgctgtactgctggatatccgcaatccactcctcacattgggccattatctcaactcttttcaagtaaaaaggttggtgcataacctctttagaacatggtgaaagcattctgaattgatctagcattgcccacttaactgttgcttggccaaagattccatcataatcacgagaactatgtgtgccactggtagtgcctctagaccgttcatatcct

SEQ ID NO: 95566 - DNA, 684 bp, Homo sapiens
  misc_feature (1)...(684): n = a,t,c or g
gtccgttcagagttgactctgtcacagactgactctttgtgaccttggacaaaccacaaactccccctgaacctcagtttcctcatgtggaaagcaaagggggtgtgggaatcaatagcatttgaggccaacctgtggaacttagaatgttgttgatttctctgagtggccacgtgtaccctagacaaagtcatctgcccaagaggcctgtggatgtgttcctctcacctgcactctcttgttcttcaagtctggccctgcctgccatatttttccatgaccccgttctagcctacaagggcaagaactctccaggccttggggtagaaaagggaatttccctggtcccccagttcctcctccccaaaggatgttctatgattcagagctcttctctggcatctctgaccctagctgctgctttcttctgcccccacagctgaccaggtgtatggagaccaggacatgcatgaggttgtgcgaaagcattgcatggactatctggtgagaaaatggaggcctttggggaaagggcagggtgggaagatttcttctccacacagaccttaaccttccaatctattctgcagatgaagaatgccgactacttctccaactatgtcacagaggactntaccacctacattaacaggaagcggaaaacaattgccttggcaacacatt

SEQ ID NO: 95567 - DNA, 595 bp, Homo sapiens
ctgtctcctaacactcaggccattgcctcttccaatctctgctagctgagcttgaagccttagactagtggggaactcaccatcttccagacagcctgggcccaccctttatgtacatgagagggtctcttcctctgcgcttgcacatggaggccctccctggtccaggtggaggggctgctgtcccgcagtgtggccccagcctccacccctgctgctggaccagctctccccaggcccctccctgggggtgcagcacgtgaactccagagaggcgcatccttgggcccatggggaggtggaaccactctgccaggctgtgcctgtggatggggcgggcccaggatctgcttttaatgacacggtttgggcagctggactctgtctgttccagcaggtaaattacaggcttagcaagtcagaaatcaaataaacactccaactcccagtggctgttccaaggagaacagcggtttccgggaacagtggaggccgagacaaacctccccacccaactcagcctaattactgcctgtcactccctgggccagggaccttttctttgactcacagacccaagacacaggacatgtat

SEQ ID NO: 95568 - DNA, 435 bp, Homo sapiens
ctcatcctgtggtaggccccacccctaggtgcaagcggaggcagagggacttcctggagacacggagcatccacagccccagttaatgtcgcgttccctggagggccaatcggatgtgaccatcaagcacgtggcctgtggggacttcttcactgcctgcctgactgacagaggcatcatcatgacattcggcagcggcagcaatgggtgcctaggccatggcagccttactgacattagccagcccaccattgtggaggctttgctgggctatgaaaaggcgcaagtggcctgtggggcctctaacgtgctggcccttgccactgaacgagaactatttgccctgggccgtggagacagcggcagaactggggctaggaccaaggagtcccacacttgccccagcaggtgcccatgcccccatgacaggaaaag

SEQ ID NO: 95569 - DNA, 2083 bp, Homo sapiens
  misc_feature (1)...(2083): n = a,t,c or g
ttttttttttttaccacataaagtttttattgaactcaaactcaggggctccaaagcctgaggaagaagagggaggctggggtttgcacgcagaggcccaggccccaccccggggccccactccccaccccacctaccttttacccgctcctgactcaacgagagtttcagcagctaccaatctaagctaacccactctaattaggtaatcccctgccctcccccctccctgctttagcagttgccaagccaggcacccaccaaggagccgcggctgaggccagccctccgctgacctctctccatttctcccagggcctcccgctgccggcctggcctccctccaacccacttcccacaagtctccagggcatgtcacttcctccaccctggttctcttcttccagcatcctcagctcctccattctcctgcggcttctccactatcctccctaaaggttcctctagctccctggccccttattttttgcccacacctcccacccctgctggggccccaagtcaccgccggcccgccgcgtgggtccgctggtggcggatgaggtcggagnctctgggagaaggcctttccgcagtcatcgcacttgtaaggccgctcgccacttgtggacccggtgatgctgcagaagcgtggaggagcggcagaagcccttgccgcacacggcgcacctgtagggccgctcgcccgtgtgggagcgctggtgctggatgagagtggaggagcgattgaaggtcttgccgcagtcggggcagctgtaggtgcggcctggcaggtgggtgcgggcgtggatggccagcaccgagctctggccaaagcgcttgccgcactcagggcacttgaagggcttctcccgggcgtggctgcgggcatgggggataagggccgaccgctgggagaagctcttgccgcagatgccacagctgaagggcctctgaccggtgtgcaccctctgatggctgcgcagggacgagttctggctatagcacttgccgcactcggtgcagctgtagggccgctcgtggctgtgggtgcgctggtgtcgcaggaggtaggagctgtcgccgaaggccttgccacaatgtgggcacttgtagggcttctggccagagtgagtgcgctggtggcgaagcaggtaagagctgtcggcgaaggccttgccgcaacggggacatttgtagggccgctcgccagtgtgggtgcgctggtgtttgatgaggtcagagctctgggagaaggccttgctgcagacctcacatttgtagggcttctcaccggtgtggatgcgctggtgctggatcagggtggagccccgcccgaagctcttcccgcagatgccacagatgttaggccgagggccctgcccacccctggcccggccaccccgccgacctggacctcgaagggctcctgtgagacccaggggattctgaagcatctcaaactgcggtgtagacagcagggcccctgtgggcatctcaaaaggtggccctatgggcaggtcccctgtgggctgctccccaaacccctgagtgaaggagtccagggggtgaactcctacggagatattcaaaggactcttttcctcggggttcagaagcatctccgcaccttcctggaatttggaactttgagcttcaaattctgggctttgggttttgagctcagtgttctgggattcatatctagagctctcagattcatagccagggctccggggttcatacccggggctccgaggttcatagccagggctttggggttcatacctagggctctgggattcaaactcagggctctgagaatctgattcagggcttctgggtgcaaactcagggcttgggggcacaagcccagggcttcgggactcaaaccccgggctttcaggctcaaatctggggctttggggttcaaactctgggctttgtggctcaaacccagggctctggggttcaagcccaaatggtatctcttcgacttcatagtccccactgccttcttgctgagaaatttcctcttcctcattctcactcatgttgcctctgaggtacccttcggacgaaa

SEQ ID NO: 95570 - DNA, 482 bp, Homo sapiens
  misc_feature (1)...(482): n = a,t,c or g
gttaccagaaacaaattttgccgagctttttttgccctatatttcccagcataatttgattagaaagtacaaaaagggccaggcgcggtggcttacgcctgtaatcccagcactttgggaggccagggcggttggatcacgaggtcaggagatcaagaccatcctggccttcatgaagaatggccttgaatactacacatgaatccattacattgggcgtatagaatatgccattgttggccgttttatattggaccatgatcgctgaagggcagctggaatgactaccctgagctatacttttgaatcatgagtactgtaagggtgcaatggtcgaaaggagtaccctatgttcagagtatagaaagcctacattcaaggcctctaggagaatgttacacaggaggaagctatcattgactaggatataaagcttgattaggcggtatgcagagcatccactcatggccatctgatgaaan

SEQ ID NO: 95571 - DNA, 424 bp, Homo sapiens
ctgaaggacaagccatagtggaaagaatgaatctctgcctgaaacagcagttgcagaagcaaaagggggaaaacaggtactacaggacaccccataagcaattgaatcgcattattaactttaaattttttgagcctgcctaaaggccggatcttatcagcagctgaacagcatctacagaaaccagctgcaaagacagaagcagaacaactggtttggtggagagacctgataacagaaagttgggaaataggtaaaataataacttggggtagaggttatgcttatgtttctccaggactgaaccatcaagacacctgaaaccttatcatgagcgaatgctgaggaagagattccgggaggatcccgaggacccccccagttgcagccatgtcaagactgatgctgaggaggaccccaactt

SEQ ID NO: 95572 - DNA, 400 bp, Homo sapiens
agcacaacctcgtcagcttgctggcagaggatgaccaaggcttctctagagacgcagccagctcaagctgtctcttaaataccttgtgatgttctgggacaggcatggtgcacttgtaggagtaattgaagcctgtttctccaaatgccacagtcgtggggtgccttaaggcttgtaaaagatttctttcctgactcttattgtagtaacatggaaaatgagggtgacagccaaaggccccccagaccagattctctttcaacagctccccccgtaggcaatttgtcagggtgagggtggcagaggtcagagatgcaaccctgaaattccttatagaaggagctgctgtaaattcttctgaacttagtcaaggtccctttgaaagacaacttggaatacc

SEQ ID NO: 95573 - DNA, 405 bp, Homo sapiens
cggagacacatcggaggaggcgtgcggctctactacatcggaggggaggtcttcgcaaagagcctcagtgacagcgctatttttgcccagactcccaactgtaaccagcgctatggctggcacccgggcaccgtctgcaagatcccaccaggatgcaacctgaagatcttcaacaaccaggagtacgctgacctcctggaccagtcggtcaaccagggcttagaggctgactaccattgacccgaatgtgcaccatactgatgagcttactgaaaggctgtggagcggagtacaggagacagactgcgaccaggaccccctgctggattgagctgcacctgaatgggcctttgcaaagggttgacaaggtactcacccagatgggctatccaagcattctgatgt

SEQ ID NO: 95574 - DNA, 452 bp, Homo sapiens
agagacatgaagatggcagagaatgacagggaagggagcatgcacaaggcggccagagccctggggctgggcacctcggtccaacccctgagccccaacccgagccccagcccaggccaagctcccaggcggttcctgcagggcgctgggagccagcccaagagcaacacgccatccgcatccacgcctctccccagcttccaggccactcgggagcccacctgcgcccctcgtgagaagcagcccaggaagatgtcgccttcatgagcacaccatctggagctccacggtagggacgtctgtggagccggccccatccctcggccggcctcaggcacctctagagcctgggacagtcacttcctcagtgaggctacagcagcctcacatgcacaccccaggcaagataatgcccgatccctccaagagaaacggcaagttcacattcaccg

SEQ ID NO: 95575 - DNA, 413 bp, Homo sapiens
  misc_feature (1)...(413): n = a,t,c or g
acattttttgtttataaacaaaagggggttcttcaggatgattaataactgattataaataaaaataatacacttatctatatctccccataataactcatatgtcactgtcagtgaaatggataagaacatttgtctccatttctgaaacctgtaatagtatgtaattgtttgtacatatcacttgtccaaatcagtgattctcaaacttttttatttcacagtctccctaaaagttcccctaaaatcctcccccaattctgatttccctgcctataagattccctttttgttttgttttgttttgtgagacggagtttcgctcttgttgcccaggctggagtgcaatggcatgatctcagctcactgcaacctccgcttctggactcaacaattcttcttgctcagccccn

SEQ ID NO: 95576 - DNA, 412 bp, Homo sapiens
aagatgtagacattttctaccaactgggagctaaggctttccaaagactgaactagagaaagaaaattgttttttgcctgtgacaatgtgtggaaacatttgaaaaggtacctacgtaagaacagttttggagaaaacctttggtcatccagaaacattaaaaaaaaaaaaaaaaaaaaaaaaaaaaaaaaaaaaaaaaagacaaaaaacttttccaccccaaaaaatttttttttttttaaagcctgtcaatgcatggggaaaaaaaataccaagcacgattttcatgaacaaaactttattgagcatgcgctgctacaacagttgaacataaattttagcaccaactacattgaaggacgcgttttttcacccgggggctcctatagaaagcctgctccttatgtgccat

SEQ ID NO: 95577 - DNA, 158 bp, Homo sapiens
ggagaagcggcgcggcctggacaagcggaccccggccaggcggccttcgagaaaatgcaggagaagcggcaaatggaaaggatcctaaagaaggcatccaaaatcccacccccctttgtttgtatgtggtccgttgattcgtgagtgtatttggcatt

SEQ ID NO: 95578 - DNA, 163 bp, Homo sapiens
aaacagaatttcaacctagtgaaaagtgggtgaagacctaggtgataacacttgggaatacatatttgccattgatctgctctgctgccatcagaaatggatctgccaccccctttttttagttggggttgttcgcgcgggggccgaggtatctggggtattc

SEQ ID NO: 95579 - DNA, 439 bp, Homo sapiens
gacaagacggcagctgaggatgccatacgcaacctgcaccattacaagcttcatggggtgaacatcaacgaggaagccagcacgaataagagcaaaacctcaacaaagttgcatgtgggcaacatcagtcccacctgcaccaataaggagcttcgagccaagtttgaggagtatggtcctggacatcgaatgtgatatcttgaaagattatgccttcgtacacatggagcgggcagaggatgcagaggaggccatcaagggccttgataacacagagtttcaaggtaaacgaatgcacgagcagttgtccaccagtcggcttaggactgcgcccgggatgggagaccagaacggctgctatacgggcgggaaagatgggcactggtccaaagagtgttcgatagatcgttcaggccgcgtggcagacttgaccgagcaa

SEQ ID NO: 95580 - DNA, 158 bp, Homo sapiens
gtggtcgctgcctccaaggccatgaagtgggtgactggaagacctgtcacagttttatcatcaatgagaagatgaatgggaaagtgtgggaccttttccccgaggctgaccccgttttgctcaagcgattgcgggagtcgcgttagtaaatttagcat

SEQ ID NO: 95581 - DNA, 425 bp, Homo sapiens
aaacatctccactctgaagaagacactggagagtgactgcacgcaagctcttcagccagggcattggaggggagcaggcccaggccaaggttgacagatgcctttctgacttggccgccgagaccaacaaattccgagacctcttgcaggaagggctgacggagctcaacagcacagccatcaagccacaggtgcagccttggatcaacagctttttctccgtctcccacaacatcgtggaggaagaattcaatgactatgaggccaacgacccttgggtacaacagttgatccttaacctggagcagcaaatggcagagttcaaggccagcctgtccccggtcatctacgacagcctaaccggcctcatgactagccttgatgccgtcgagttggagaaagtggtgctgaaatccacctttaac

SEQ ID NO: 95582 - DNA, 449 bp, Homo sapiens
cggtcgcggggcccgcgcccggagctggcgccaggcccgggttagatctgcaatttctccagcggttcctgcagatactgaaggttttgtttccttcttggtcatcacaaaatgccttgatgttcctgacccttttgtgcctgaccctactggctgaagagctttgatcagttcacctgcaacctgctgtatgtgagctggaggaaggacctcactgagcaccttcaccgcctctacttccggggccgagcgtactacaccctcaacgtgctgcgggatgacatcgataacccggaccagcgcatcagccaggacttggagcgattctgccggcagctcagcagcatggccagcaagctcatcatctccccgttcaccctcgtctactacacttaccagtgcttcctaagcacaggcttgctcgggcctgtgagcatcttcgggtattt

SEQ ID NO: 95583 - DNA, 527 bp, Homo sapiens
cttctggataactgtcaaatgacagttcttggagcacctacctgtatccatggaaatactgtctctgtgatctgcacaggaagcctgacccagccactgtttccatgcctcgcaaatgtatctgacccatatttgtctgcagttccagagggcagtgctttgatctgcttagaggacaaacggctccgcctagtggatggggacagccgctgtgccgggagagtagagatctatcacgacggcttctggggcaccatctgtgatgacggctgggacctgagcgatgcccacgtggtgtgtcaaaagctgagctgtggagtggccttcaatgccacggtctctgctcactttggggaggtgcagggcccatctggctgatgacctgactgcacaggaatggagtcccacttgaggcaggccctttcggagctgtggcctcaatgatggatgccaatggagacgctgggtcatgtgtcaaatttcatctcttaggcttactgggaactatataaaagctatttcgagcc

SEQ ID NO: 95584 - DNA, 411 bp, Homo sapiens
agttcgagaagaccattcatcgcattgaagactaagagtatgagggacctgaatccagaagacattgaccagctcatcaccatcagcggcatggtgatcaggacataccagctgattcccgagatgcaggaggccttcttccagtgccaagtgtgtgcccacacgacccgggtggagatggaccgcggtcgcattgcagagcccagagtgtgcggccgctgtcacactacccacagcatggtactcatccacaaccgctacctcttctctgacaagcagatgatccagcttcccgagtctccggaagacatgcctgcagggcagacaccacacacagttatcctggttgctcacaatgatcttgatgacagggccaacctgtggacagagtgaatgattcagggttttttc

SEQ ID NO: 95585 - DNA, 474 bp, Homo sapiens
cttttttttttcaggctattagttcgttacaccaagaaagtggcccaagtgtcaactcccactcttggaaaggtctcaagaaacctaggaaaagtgggcaagaaaagttggaaacatcctgaagccaaagaaaaggccctgtggcaaaaattagtgagtctttaaaaaaaataataaattaataatgaaaaaattttacctttagaaattgataatgctagctttcataagcagaaggaagtaatgtgtgtgtgtgcatgtttgtgtgcatgtgtgtgtgcatgcatgtgtgtgaatgtgtgatattggcagtcaaggccccgaggatgataattttttttttttttttgaaacggagtccccctttgttgcccaggctgaaatgcaaggggcccatttgggctaattgaaacctccggctccaaggttaaaggcatttttctggccttaactctcccagaagaggtggaataa

SEQ ID NO: 95586 - DNA, 475 bp, Homo sapiens
  misc_feature (1)...(475): n = a,t,c or g
gaaaaaacttcggagacaaacaaggagggaagcccagaaggagactccccgataaagttccgctggggcctcgtgactccttccgaaaccccagtgggaatttctaatttgagcccgtttttaggaccaagatgtttncgaaccccgcagagttgaaacccccttggagatttccatgggccnaaagaccgaaagcgcatggagagggccaacgctggcccgaaaactccagccgaacagagaaaggtcaagaaaattaaaaagcttaaagaagacatttcacagggggtacacatatctgtatatagagttcgaaatttgagcaacccagccaagaagttcaagattgaagccaatgctgggcaactgtacctgacaggggtggtggtactgcacaaggatgtcaacgtggtagtagtggaagggggccccaatgcccccaagactattacgcgccttatgccgcttcgaatag

SEQ ID NO: 95587 - DNA, 431 bp, Homo sapiens
cccagctaaggacacgggacagagggtggccctcgcgcaggccagagagggagaagaggaccagccagagtgcccggcgccctacctgcacagagtctaggtggaaatcagaagaggaagtggaaagtgatgacgagtatcttgccctccccgctcggctgacacaggtttctagcctggtttcgtatctaggatccatttctaccttggttaccctgcccactggggatatcaaagggcagagccccttgaagtgtcagacagtgatgggccagcttccttcccttcaagctccagccaaagccagcttccccctggagctgccctccaaggatctggggatcctgagggccagaatccctgtttcctgcgctccttcgtccgtgcccacgactccgcaggggaaagcagtctggggagcagccaagccc

SEQ ID NO: 95588 - DNA, 401 bp, Homo sapiens
gccttggacctaagaggcctccaaatccttgtgggattcccaaagcgtagagtaaccacctgctcttatcccacagcactgcaatcgcccattgagtatcaacggaaagaaaggagcacagctgtgatgaggactgaacctgacagtgcttaccaagccagccccaggccctactccgctggacctgcggactcaaagaagcccactaagggctactgctataaccctactctgcctctgcctggagattatgaccctcgagggaacgactggggctattgtgatagcagctcaagagtgcgctgacgaacatctagaacgatgagaacggttacgtgtcgactcgtgccctccgtagggatgtggtttcatagctgagggctgactaggaagtggagtgc

SEQ ID NO: 95589 - DNA, 372 bp, Homo sapiens
  misc_feature (1)...(372): n = a,t,c or g
caaaatattgatctggtcatctccttctttagctcaaggttgctgcaagctggagctgagctgtcagtggaacgggtcctggaaatcattaagcaaggcgtcgttgcgctgcccaaagacagactgaaggatcctgtgctccaacgctgtcagccgctggccgatcgtcaggtggacagagtccttgcatgccaggcctttgtgtatgcagcttctgggttctcacagtttcatggcttgtctgtcagaaatttccagaattgaaattcaaatatgtggaagaggagcagcccgaggagttttttatcccctatgtctggtctcttgtctacaactcagcagtcggcctgtactggaatccacaggacatcn

SEQ ID NO: 95590 - DNA, 391 bp, Homo sapiens
cgccgccaccggcgccacgtattcctacatagccactggcgccaccacacgctcctacgccaccaccagcgctcccacttcccccaaggccgccaatggtgcccctacttctccccacaccgtcactggtgctaccacatgctcctacaccaccaccagcacccccacttccccgacactgccacaggcacccccacttcccccaacgccgccactggtgcccctacttctctccacccgccactggcaccaacacctccttctacgccaccaccaggcgccccactatctgcaatgacgccaccagcgccccttctccccacgccgccactggcactaccagctgctcctacgccgccaccggcgcccccacccctcccaatgccgccac

SEQ ID NO: 95591 - DNA, 362 bp, Homo sapiens
gtgggtaacctttatttcccttctttttctctttagctcggcttattccccgggtgtgtttcgtcgagatgcacacaacagcgaggttgctcatcggcttaaagatttgggagaagaaaatgacaaagccttgctgttgattgcctttgctcagtatcttcagcagtgtccatttgaagatcatgtaaaattactgaatgaagtaactgaatttgcaaaaacatgtgttgctgatgagtcagctgaagattgtgacaagatcacttcgataccctttttggagacaaattatgcacagttgcgactcttcgtgaaacctatggtgaaatggctgactgctgtgcacaacaagaacctgagag

SEQ ID NO: 95592 - DNA, 358 bp, Homo sapiens
ggaagctaacagaggctggttcatcagattgaaggagggaagccagctctataacataaaagtgcaaggtgaagcagcaagtgctgatgtagaagctgcagcaagttatccagaagatctggctaagatcactgacgaaggcggctgcgctaaacaacagattttcaatgtagataaaacaaacagctttctcttggatgaagaggccatgtaggaccctcatagctagagaggagaagtcagtgcctggcttcaaactttaaagaacaggctggctctcttattaggagctaatgcagctggtggctttaagttgaagtcagtgctcatttgccattctgaaaattctaggaccttt

SEQ ID NO: 95593 - DNA, 353 bp, Homo sapiens
cttgagcccaggagtttgagaccagcctgggcaacatggtgaaaccctgtctctactaaaaatacaaaaaaattagctgggcgtgtgcctgtaatcccaaagtgctgggattactggtgtgagccaccacacccagccattgaatgttacagctttaacagtgaaggaaaggaagcaggtctggtctcatcataagagagtgatgatgaaaattgaaaacagtagggagtgcaggtgttaagttggaaggcatgttgggaatctcaaggaaactacatgctttgaaatagcaactgaattcaatctgagggccttccaggttgagacaatgctcctaatactgccattatccc

SEQ ID NO: 95594 - DNA, 367 bp, Homo sapiens
ggtatgtgccaccacgcccagctaatttttgtatttttagtagagacagagttttgcacggctgttctcaaactccttgtctgaagcaattctcctgccttggcctcccaaagtgctgggattacaggtgagagccaccacacctggctgaaaggaaggggttctcttaagagtttttgctctctgtgtccactgtgaagctctatagttcatgctgcaggccacccttgtgtggaaggcaaaagatgaagaaagaaaaaaaacttggaaactcactggtattggtcatttttcaagtttttatttctctcccctgctgttgtttacttttcagagtcttcaggtagatgctttttgttctcaaaaa

SEQ ID NO: 95595 - DNA, 345 bp, Homo sapiens
  misc_feature (1)...(345): n = a,t,c or g
accaatgacatttttcacagaattagaaaaaacgactctaaaattcatatggaaccaaagaagaatccaaatagccaaagcaatcctaactaatcaaaaagaacaaagccagaggcatcacaaatatatgttaaggcaagtggcctagaggcagtcaggaccatatacttggctatgaaaagtacttgaatttaatatgcattatttaagaggcaaaaaacccaatagtgtttgactcacaaaataaacacagcatttggctggtaggagtgtataaagtgaagtgaaatctcgagacaaataaagaaaatttaaaataccattctgaaantaatggctgagggg

SEQ ID NO: 95596 - DNA, 353 bp, Homo sapiens
aagcatctccacaagccctctgtggcttgtgtggcctgatgtccatggccaccaagggcctctcaccatacgcttctccactcaacctttggagagacacggaccaccaaaggcttgatttttcttcatcctacattatattcaaaacaaacaggctgggtgccgtagctcacacctgtgatcccagcaccttgggaggatgagctgggaagatcgtttgaggctaggagtttgagaccagcccgtgcaaaaaacgagacctcgtgtctaaaataatttttaaaaaagagcaaaaaaaaaaagcaatttcagattaaaggagactgaagagacatgacaattggacacaacat

SEQ ID NO: 95597 - DNA, 328 bp, Homo sapiens
aaagatgctcaatgttagccgtcagggaaatgaaaaagccacaaagagatgccacttcttgcccaccaggatagcactcatcaaaaagatgcagtaacaagtgctggaagccactgctggtgggaatgtaaaatggtgcagctgctttggaaaatagtctggcagtttctcaagaagttaaacatagagttgccatttgacccagaaatcccactcagagatatatacccaaaacaactgaaaacatatgtccacacaaaaacttgtgggcaaatgttcatagcagtattattcatacttaatgtccctcatctgatgaatgtttaaa

SEQ ID NO: 95598 - DNA, 368 bp, Homo sapiens
aactggaagaatggtatcttgccaggcacgggggctggtgcctgtagtcgcaacactttgggagaccaaggcaggaggatcacttgagtccaggagtttgagaccagcctgggcaacatacagatgtctacaaaaataaaaatttgcaaggtgtggtggcatgcacctgtagtcccaactgctagggaggctgaggtgggcagattgcttgagctcaggagtttgagaccagtctgggcaacctggcaaaaccaaaaatacaaaaaattggctgggtgtggtggctcatgcctgtaatcacagcactttgggaggctgaggcaggtggatcacctgaggtcaggaattcgagaccagcctgcccaacg

SEQ ID NO: 95599 - DNA, 287 bp, Homo sapiens
ggtatatcgacggtatcaaatagctgcgggctcttcttctatgagggcgaattatggagaaattgataggggaaagaagacccttccttagaataggggctactgggacataagcaccactatgtttatgccttcggcatctacgtcttttgataaaaagacttacagtgctgggcacggaggctcatacactgtaatcccatcactacgcgaggccgaggcgggcagatcacttggggtcgggagtttgaaaccagcctggccaacatggtgaaaccctgtttctg

SEQ ID NO: 95600 - DNA, 346 bp, Homo sapiens
gagaattttgggaataacagcttaggggataaagagtaattaacaacgcagagctcatattaaatgtcccataggtggtagctaagattgtcgactgtggtcagtcagtttagcttaggtaaagagcctttgttgaactttaatggaatacttttattttgaagagattcatgttttatgaattaagaattagagggcccagcctagtaatttttaaataatgaaatttaatctgctgaaattttattttatttatttattttcgagacagagcctcagtctgttgcccaggctggagtgcactggcgcaatcttggctcactgcaacctctgcctcccaagttca

SEQ ID NO: 95601 - DNA, 311 bp, Homo sapiens
  misc_feature (1)...(311): n = a,t,c or g
attttgatacctggctttagggtctcagtgtattctaaacctgttaggctagagttgttcacttagccaagaagcaggtgtcagggttgatcagatacttgggtattccaaagtgagtgttnnnnnnnnnnnnnnnnnnnnnnnnnnnnnnnnnnnnnnnnnnnnnnnnnnnnnnnnnnnnnnnnnnnnnnnnnnnnnnnnnnnnnnnnnnnnnnnnnnnnnnnnnnnnnnnnnnnnnnnnnnnnnnnnnnnaggcacatcttacatggtggcaggcgggagagaaaatgaaagccaagtgaaaggagttt

SEQ ID NO: 95602 - DNA, 302 bp, Homo sapiens
tctcagactgctgtgctagcaatcagcgagactccgggggcgtaggaccctccgagccagccagaaaacatactctgtgtgttttaattccttggacttgattgagacttgtttcatgattcagcatatggtctgccttgcaggagtctaaaaactcaaacgtatctaaaagccatgacacagaaggcctggagactgcatggaatgatgaggactgcagtgaactctgaagtgcctacccatgtgaaacgaacaagtgctattcggaagaagcaggttgtgttaatctgaggcctttgaga

SEQ ID NO: 95603 - DNA, 333 bp, Homo sapiens
  misc_feature (1)...(333): n = a,t,c or g
ctcgctgattgctagcacagcagtctgagatcaaactgcaaggccgcggccaggctgggggaggggcgcccgccattgcccaggcttgcttaggtaaacacagcagcctggaagctcgaactgggtggagcccaccacagctcaaggaggcctgcctgcctgcctctgtaggctccacctctgggggcagggcacagacaaacaaaaagacagcagtaacctctgcagacttaaatgtccctgtctgacagctttgaagagagcagtggttctcccagcatgcagctggagatctgagaaggggcagactgcctcctcaagtgggtccctgan

SEQ ID NO: 95604 - DNA, 326 bp, Homo sapiens
cacaaagaggttaactagagaggtattaatcctgactgacataccccaggcaccatactagactctgggaatatgctatacagggaaagtggggcagtggcttaagggtcagagaagatttgggaaaggtttgtttgtttttttcggttgtaaactgcagacccggcgcggtggctcagcctgtaatccaacactttgggaggctgagacaggaggattgcttgagcccaggagtttgagaacagcctgggccacatagggggccacatagtgagaccctgtctcttaaaaaaagattaacgggtggagcatggtgcagaaggagg

SEQ ID NO: 95605 - DNA, 373 bp, Homo sapiens
cccccgcctaggcctcccaaagtgctgggattacaggcatgagccaccgcgcccggccttgctactgaatatgaaccttggttttttttggttgattgttttggaatgtctacatagatgatcatgttatctgtgaacaaagacagtgtgagttcttccctcccagtgtgtgtaccttttatttcctttttttttgtcttatttcattaggtaggacttccagtacaatattggaaaggagcggtgagaggagacatgcttgccttgttcttgatcttaatggaaaggtgttcagtttcttaccttttttttttttccttttttttgaaagggagtctacctttggttttccaggttgaaggccatgggccca

SEQ ID NO: 95606 - DNA, 395 bp, Homo sapiens
  misc_feature (1)...(395): n = a,t,c or g
tccctctccctctctttccatggtctccctctgatgccgaacttagtgcggacacccgatcggcatagcgcactacagcccagaactcctgggcaacacagcaagacttcatcctctcctctcccacctgtctcgtctttttggtggcagcagctccacttgtccccacggaaggcaccgggatggtaggagcccaggaggctggtgtgggctggatttcagccgccgctggccccttggccacgctcgtaggtattccagaacccgccaaatatatttggtggccctgatatcactacttttcccagtggctctggaccctgacacaaaagggaactcctagagggaagggcacagagggacaggtctgtgacttcctccccacaggccaggan

SEQ ID NO: 95607 - DNA, 337 bp, Homo sapiens
gggtttcaccatgttggccaggctggtcttgaagtcctgacctcgtgatttgcccgcctcggcctctcaaagtgctgggattaaaggcatgagccaccatgcctgaccaattttttgtatttttagtagagatagagtttcactggtctcgaactcctgatctcaggtgatctgcccacctcagcttcccagagtgctgggattataggcataagccacagtgcccagccccttgacaactgttttgtaaggaaccattgcctgaagtagaattgctggatcaagactacttttccaaaagaggataataaacatgatctcctcttttgttaatgag

SEQ ID NO: 95608 - DNA, 357 bp, Homo sapiens
cggcacgagaactggttttttttttcggggcatatcgtaaaggcttttttcatagggacatgaaaccaaaaaatttgctttgtatgggtccaaagcttgggaaaattgctgattttggacttgctagagaattaaggtcacacccaccatacactgattatggctctaccaaatggcgataaggggtaatccagccctcctgaggcctacgccaatggcgaaatttccctacgaaggatggttacatatttctggaagttccatatggaatattaaaacctcagattcgaattttatattctttaaagaaagcaaaggatagtttaattgctattttgatcactgaacagaacaaag

SEQ ID NO: 95609 - DNA, 377 bp, Homo sapiens
gtgaagacacaaatgccaggaggtaggagagcactttccacgttaggtgtgagagctcctctcagccttgccttctaaactaagtgacttgctatcagtcttttcaggttgttttgttggtttggtttgggttttttgtattcattttatgattagagctataaaatgaataaatatattaaatattctccattactcctctagaacattgtagagaatattgtgttttgctggcctggtgtctgcttcctccagacgtgcactgtatgtatcaatccagaaacgtctgacgagggccaggcgcggtggctcacgcctgtaatcccagcactttgggaggccaagacgggcagatcacgaggtcaggagatcgagaa

SEQ ID NO: 95610 - DNA, 324 bp, Homo sapiens
ctaaaaaatgggggaaaaggcctgaatagggctccgaatggaaggagatacccagagacgaggtgggcattggaagaagatcaatgtcatatctgtaaggaactgcacattaaaacagtgagattccactgcacacctattagaatggccaaaatccacaccactgataacccccagagctggccaagatgtggaacaggaactctgattcattgcaggaggggatgcaaaacggtggtcactctggaagacagttcgacagtcttacaaaactaaacatacctttaccatgtgatccagcagttttgtccctttgtatttacc

SEQ ID NO: 95611 - DNA, 383 bp, Homo sapiens
ccgagttagccaggatggtctcaatctcctgacctcgagatccacccgcctcggcctcccaaagtgtgggattacaggtgtgagccaccaagcccggcccatttttaaccttttataccacatttttagtgtaccttttctatatttagatacacaaatacttaccattgagttacagttggctacagtattcagtatggtaatatgctatacagcttaataggctaaggggggtaccggtaaggcataccatctaaggtccggggagtaatctctaataagcttgcgagactaaattggctaacaatgcagttcttaaaacatgtgcctatacttaagtgttgtgatactgtatttgaaactatcttcttttggtgctttga

SEQ ID NO: 95612 - DNA, 422 bp, Homo sapiens
  misc_feature (1)...(422): n = a,t,c or g
cgctggaacccgggaggtagaggttgcagtgagctgagattgcactactgcactccaacctgggtgacagagcgagactccatctcaaaaatagcaaaaaacaaaaaaacaaaagaccaagaaacaattgtagacattagcttatttttccccatcattataaaggaatttagacatttgtatttgggtcctatattggatttatcagaattaggtaaatcctttttttcttgcttcttccacctaaaaaatgatagtaaaacatatatttctgcagacttctgaagaaaactatataaaattacatgaaggggcaccatatagtgttagcaagtagaacctacaggataggaggcaaatctggaagcatgccacctattttaatgttagagaccacatatctattgacattattgctaaan

SEQ ID NO: 95613 - DNA, 338 bp, Homo sapiens
agaaaggaccatctcttccaaatatgaggaatctggatcaagtgcagtggctggtccccaggactttgggaggctgaggcgagaggattgcttgagcctgggagtttgaggccagcctgggcaacatagtgataccctgtctctaaaaacaaacccaaatttcagaaatctgtgctccggtcggaattgatgcttctggccaggcacggtggctcacgcctgcaatcccagcgctttgggagcctgaggtcaggagttcgagaccagcgtggccaacatggcaaaatcctgtctgtactaaaaatacaaaaattagtacacgcctatgatcccagctg

SEQ ID NO: 95614 - DNA, 363 bp, Homo sapiens
caacacttttgggaggtccaggcaggaggatcacttgggcccaggaggtcaagcctgcagcgagctgagatcacaccactgcactccagcctggggtgatagaacaagaccctgtctcaaaaaaaaaaaaaccaccaaaaccttaaaatgggggagtggaccctccttgggttccctcattccaaaataggggctgacccttcctatcccaatttttggccacctttgggggggggggccaccaccctgttaacccaagaactttgggccataggctgcccaatttgaccaaaccccagggaggctttattgacccaaaaccaagtcttcaaggcccctgacccattggggctttttaagcta

SEQ ID NO: 95615 - DNA, 381 bp, Homo sapiens
gtttggcctgtctagtataataaatatgtttttgtcagaatttgacccatttatgatgtaagcaaaaatgatatgtcttaatccatttgtctcacacactaattttataatttaaaagagcaatagtagtttcattcagaaagacaggtttaaggccaggtgcagtggctcacacccataatcccagcattttggatcacctgaggtcaggagttcaagaccagcctggccaaggtggtgaaaccccgtctctactaaaaatacaaacgtggcaggcgcgtgtaatcccatctacttgggaggctgagacaggagaatcgcttgaacccggggggcggaggttgcagtgaatcgagatcccaccactgcactccagcctgg

SEQ ID NO: 95616 - DNA, 296 bp, Homo sapiens
cttcgggtagagggcacttactgtactttgagactatatgaatagtctcatgtactttcattcactggttttagcatccactgatgaaggattcctacctaaaacagttagtacgcaaagtgctgggattacaggcataagccactgtgcccggccatggattccttttttttttttttttttaaaaataggaaaactcgttttgtggcccaggctgaagggcaggggggcaattttggctcattgaaccctttgcccccggggttcaggggatttccctgcctaagcctaacaag

SEQ ID NO: 95617 - DNA, 356 bp, Homo sapiens
tttcactttgttgccaaggctggagtgcagtggcagtgatcttggttcactgcagcctcaacctaccagggctcaggtggtcttcctgcctcagcctcctgagtagctggaactacacatgtgtagcacctttttctatcttctattattttatttttttaacatgggggggaacccttaactgctgaccgcaggtacctatagcgccagtcttcatgcgtctagaaagatggacaggtacacggcacctacaagccacgctgtgccgattggctgaccgaattactgatactgtggtgagtataaaagccttctatctattgcatttttcaccctggatatatgtggggatgaag

SEQ ID NO: 95618 - DNA, 196 bp, Homo sapiens
tgttggccaggatggtgaaaccccgtctctactaaaaaaagaaaaaaaaaaaattccaaccggccttgggggcccatgcctgtaatcccagttattgggaaccttgaggcaaaaaaatcgttggaacctggacggcaaatgttcccgtgagccaaaatcgccccattgcattccagcctgggacaacccggccgca

SEQ ID NO: 95619 - DNA, 363 bp, Homo sapiens
gaccagccttgccaacatagtgaaacgctgtctgggactaaaaatacagaaattagccgggcatggtggcaggcacctgtaatcccagctactagggaggcttttgaacccaggaggcagaggttgcagcgggctgagatcgcgccactgcactccagcctgggtgatagagtgagattcagtctcaaaaaaaaaaaaaaataaaaaggtggggaaaaaattttggtttttttgggggccttttttttcttttttttttaaatttatcccaaatttttaattccaagtttttatatcaaagggggaccctcaaaaaattttggtataaaaaaacctttaaaagccctttcccctttaaagggg

SEQ ID NO: 95620 - DNA, 352 bp, Homo sapiens
  misc_feature (1)...(352): n = a,t,c or g
ggctgaggcacaataatggcttgggcgccaggagaaggaggctgcagtgagccgaggtcgtgtcactgtactccagcctgggtgacagagtgagactccatctcaaaaaaaaaaaaagggggttttactttaaaaaaacttttggcccgggggcttttgggaaacgggttggatttaccctttaaaaaggggggtggttttcccccttggggggaaaggtcttaaaaggggccttgttaaaagggaattaaattagtcaggggcctttggagaagtaccctttcaataacgggttttctttttaaaccccttttttttgagaaactctcgttgggggggggttaaaatcttn

SEQ ID NO: 95621 - DNA, 344 bp, Homo sapiens
ctggagtgcagtgagccgagattatgccactgcactccagcctgggtgagggagactccgtctcaaaaaaaaaaaaaaaaaaaaaaaaaaaatacccccagccccttggggagggaaaatcaaaaaggggggaaaaattttttatactgccccaatattttttaaaaaggtgataaaaaatcccttcgggtttattttaaaaaagtgtttaaaaaaaaggggattttattttaaaaagggcccccaccccaaaaaaccctattttttgcaccccaaacccccaaaaaaaaacccatttaaaatcccaaaaattttggggcccaaattttttggaaaaaaaacct

SEQ ID NO: 95622 - DNA, 243 bp, Homo sapiens; identical to SEQ ID NO: 36174

SEQ ID NO: 95623 - DNA, 246 bp, Homo sapiens
aggtggacgtgactcgtaatggtttgattactgtaggcatgtaatgtattttggaattaaaaagtgtgatactttcagctctattcttactcaagattggtatttgctatttggggccttttgtggttctgtatgaattttagggctgtatcttctattgttgtaaggaatgccattgaggctgggtgtggtggcacacagcctattatgcccagcactttggggagggcaaggaactaacttatt

SEQ ID NO: 95624 - DNA, 344 bp, Homo sapiens
  misc_feature (1)...(344): n = a,t,c or g
cggtgacatcctccaccaaagtcttgaactccttaaagtcatccgtgctggttggaatcaacttcttttttattcctgttaatgttgatatttttacctcttcccatgaatcatcagtgttcttaatgccatctagaatgatgaatcctttccagaaagttttccattcactttgccaagatccattagagaatcagtatccatggcagctataaacgtacaaaaatttatttctgaaataataagacttgcaagatgaaattactccttgatccatgaactgcggaatggatattgggttagcagtcatgaaaacattcatctccttttggatcttcaccaan

SEQ ID NO: 95625 - DNA, 334 bp, Homo sapiens
ggcagatgttgccagtgagctgagatcacgccattgcactccagcctgggcgacgagagcaaaactcaaaaaaaaaaaaaaaaaaaaaagggaaaaaaaaacccaaaaaggaaaaaacggtttgggtttttgggccttttaaaggggaaaaactttttttttaggggggaaaaattaaatttttcccaaaaaatttttaaaaattaaaaaaaacttttaaactttttggggcaaaaaacggcccttttttaaatttaaaaagccttttaggggaccccaaattggccccaaaaaaggggggggaggcccttttttggggaaaagccaaaacctc

SEQ ID NO: 95626 - DNA, 349 bp, Homo sapiens
caggaggccaaggtgggacaatgacttgagcctgggaagttgaggttgcagtaagccataactgagctactgcactccagcctgggagacacagagagaccctgtccccaaaacaaaaaacacaatccctcccaccttcattactagatcttcacaactgttagaacaaggacatacattttataaatataggctcttagcactatagtttaaccttaagcacaaactaagtgggcttcaaccttgtatttataaagttatcatttctattctcaagtcgattgtttaaaaaacagctatttctgggctaggaggctcagaaatgcaatcccagcactttgggaggctg

SEQ ID NO: 95627 - DNA, 194 bp, Homo sapiens
atagactaggactaaaacctctgtcataatatattaccaatgcgctatgcaaaagctttgtacatccttttaaatagcactatgtgtgtctctgcacgtgagatgggcttcctgaatacagcacactgatgggtcttgactctttatccaatttgccagtctgagtcttttaattggagcatttagtccattag

SEQ ID NO: 95628 - DNA, 338 bp, Homo sapiens
ttattgttaatgagaaatggcccaacttggaccatgactttcccatttgcaggtcttagaataattttttttttaattgagacaggggttcgctgtgttgcccaggctggccttgagctcctgggttcaagtgatcctctgcctcaacttcctgagtagctgggattacaggtgcttgccaccatccccagcacagtcttgggagaattttaagaagcttacttcattgaaaaaagaggaaagtgaaaatgtgctaagtatatgaaagggaaagcttggattaaagatgagaaacatttttagactataacatgttaaagagagatactataggcttt

SEQ ID NO: 95629 - DNA, 403 bp, Homo sapiens
cccacgcgtccgaatgatttcagaattttcagttacaagtgtatataccgtggctattgtttatggattcatatgtaaggtagggtcttttttgcatatagactccagtattagttactttcattctaaaattatatttatgcttctatggggaagaaaatttttaattcacttggttgtattaaaattatacttacggtttgagaaaacatgctatgaaaatcatgattatagcaaattaaatatgctcaaaatttaaatctaaaataaaagcccagaaactgaaaaaaaaaaaaaaaaaaaaaaaaaaaaaaaaaaaaaaaaaaaaaaaaaaaaaacaaataaaaaagagcaaaaaagaaaaaaaccgggggccctccattaaaatatccacccgggggcg

SEQ ID NO: 95630 - DNA, 400 bp, Homo sapiens
cccacgcgtccgggaggtttaattgactcacagttccacaggcttaacaggaagcatgactaggaggcctcaggaaacttacaatcatggcagaaggcgaaggggaagcaagcactttcttcacttggtggcaggagagagagaaaaaagggggaagtgctacacactgttaaaccattgatcttgtgagaactcactcactatcatgagaacagcaagggaggaatctgccctatgatccagtcacctccaaccaagcccctcctccaacatgagatttggatggggacacaaatccaaaccatattatttcacccctggcctctcccaaatctcatgtcattctcacattgcaaaaatacaattattccttctcaacagtctcccagctttaactcat

SEQ ID NO: 95631 - DNA, 357 bp, Homo sapiens
tagaaacatcatgtattttaaaatataagatgaagtgtgacgcactgtatacaatttaatatatatttttagggttttgttatttaagaaaatggaatgtaatggcacttttcccccccacaaccactgccccccccactctccccaacccccccccccctcccacccctcccccaccccacccccccccccccccccccgccccccccctccccccccccccccccgccccccccctcccccccccccccccccccccctctccccccccctccaccccccctctctccccccccccccccctccacccccccaccccccccccaccacctcccccccccccccctctcccccccc

SEQ ID NO: 95632 - DNA, 374 bp, Homo sapiens
agctctataaatggaacaacaaagcctcgctggcagcacatctgtttgcggcatggtttactgtatattttaagcccactgttgagacctactgcttgggaaaaaaaaaattcctttcaaaatactactgctgattgacaatacaccatgttacccaagagctctgctggagatgtgcgaagagattagcattgttttcgcgcctgctaccacgacatccagccgaagcccatggatcaaggcgtcattgtgactttcaaatctaactatttaagaaatacatttcaggctgggggaggggagaaaaaagaaaaacacgaaaggaagaaaaacatcatttcataaggctatagctgccatacaataggattccg

SEQ ID NO: 95633 - DNA, 367 bp, Homo sapiens
cccacgcgtccggaaaagcccaggacctaatggcttcactgccaatttctaccaaacatttaaagaattaatatcaatccttctcaaactattccaaaaaaaaaaaaaaataaaaaagggggaaaaccctccaaactcattttatggggccataattccccggatcccaaacccaaacatggatttatcaaaaaaaaaacctacgggccagtatctgggagaaacatggaggcaaaaattttcaccaaatttttagcaggccattttaaacaatcctttgggagggaaatccatcatgaccaacgggaatttatccctggaatacagggagggttcaacattggcaattaattcaaggggacgggta

SEQ ID NO: 95634 - DNA, 463 bp, Homo sapiens
  misc_feature (1)...(463): n = a,t,c or g
tttaaaacttatgaaagcaaaatgcccatctagcttgtcaagtcgagagtgacttcagtatgaagaaagccaaagtgccccctctaaacagtggcacttgcccgtgaaagacacatgcttctcagcctcagagctgggctgtggtgagacagcgctgtctgttaatgtgaacttctatgatgtgacatgtgtaactgcacataactgcgtaaggatagaacgtcgagctttggacttnttnngccaaggttnnnnnnnnnnnntnnnnnnnnntntngttgtttnttttttttggttgtggtgttggtgtggtgtgtggttttgttgtttgtngttgttgtgttgtggttgtgtttttttggttttgttgtgtgttgtgtggtgttttgttnttgtggtgtttggttttttgtgttttttgttgtgtgtgttttgtgtggggttttgttgggttgttggtgtg

SEQ ID NO: 95635 - DNA, 284 bp, Homo sapiens
ctccttctccctccttctccctcctcttgcctccctccttctccctcctcttccctccctccttctccctcctcctccctccttctccctccttctccctccctccgcctccctccttctccctccatgtacctccctacttatacatcctcctacctccctccaactccctcctcttccctccttctaccttctattacctacatccatctcccatcatcttcccactcacaatcttcctactacttccatacaagatcctagtaccccttgcagcataaaac

SEQ ID NO: 95636 - DNA, 94 bp, Homo sapiens
tgcagtcccaggtactcgggaggctgaggcaggagaatagtgtgaacccaggagacggagtttgcagtgagccaagatcgcgtcgacgcggccg

SEQ ID NO: 95637 - DNA, 348 bp, Homo sapiens
ttgtaatcccaacacttggggagggtgaggcaggatgattgctggaatccaggagttcaagaccagcctgggcaacatagacaaaccctatctgtacagaaaaaaaaaaaaaagtcgacgcggacgtttattctgaggctttgtaacatatggtaattggttgtggtctgactggatccccatttggctccagtcattgttgttggttcttaagttcatgttttatgggctttatgctgcgtacctattcctaattgctgccagcaggtatatgggtccctggggaaagtagctagtctttagccctgatgctttttgtctacaggttctagtgccttagttttatag

SEQ ID NO: 95638 - DNA, 267 bp, Homo sapiens
  misc_feature (1)...(267): n = a,t,c or g
gtgaggagcgtctctgcccggccgccccgtctgagaagtgaggagaccctctacctggcaaccgccccgtctgagaagtgaggagcccctccgcctggcagccaccccgtctgggaaatatagggttttgccatgttggccacgctggtctcaaactcctgacctcaagtgatctacccaccttggcctctcaaagtgctgggattacagagtcattcttatagaagagcatcagaggaagataaaaaagaatcctcaatgtcaggn

SEQ ID NO: 95639 - DNA, 344 bp, Homo sapiens
gttccattggtctgagagtctgttttttttccagtaccatgctgccacaaaaacagcaatggtagtagtataatttgaagtcagataatgtgattcttctagttttgttctttttgcttaagatgactttggctattctgagtcttttgaggttccgtataaattttgggattacttttttatttctgtaaagaatgtcattggcatttgatagggattatgttggatctatagattgctttgagtagtatggacagtaatgctcttttaaaattgctttgttaaaatataatttacataccatgacagcattcatttcaagaggataatttagttatttttag

SEQ ID NO: 95640 - DNA, 353 bp, Homo sapiens
ggaggatcatcttagcctgggaagtggagattgcagtaagccaagattgtgccactgcactccagcttggctaacagagtgagaccctgtctcaaaaaaaaaaaaaaaaaaaaaaaaaaaacttttttttggcccaatttttcagggggccaaaaaagggaattcccaaaggctggcaaaaaaaaatgggttttttccaaggaagggggtttttggaaacctaaaaattttggtaaaaaaaacctcaaaatttagccggggaaccccaaaaaaaaaaagcttaggggggtccaacttggtttttttccaaaggggaaatcttaatttcccctgggggaattttaaaaatgggg

SEQ ID NO: 95641 - DNA, 326 bp, Homo sapiens
ggcagatcacctgaggccaggagttcaagaccaacctcaacctggccaaaatggcaaaaccccatctccactaaaaatagaaaaaattagcagggtgtggtggtgggcacccgaggctgagggaggagaattgcttgaacccaggaggcagaggctgcagtgagccgagatcacgccgttgcactccagcctgggcaatgacagcaaaactctggctcgcaaaaaaaaaaaaaaaaaaggggttgaaaaaaatgaatgtggccgaaaggtcatgagggtccccaagggcccaaggcaaaagtaaaaccttggggggaaaacctttt

SEQ ID NO: 95642 - DNA, 331 bp, Homo sapiens
tctcactcttgttgcccagggtggagtgcaatggcgcaatctcagctcactgcaacctccacctcccacaacctccacctcccaggttcaagcgattcccctgcctccgcctcccaagtagctgaggtgagaggatcacttgagcccaggagttcaagcctggcctgagcagcatactgtttccctggctcttaaagaaaaaaaaaagatgttcatatttactcgtaatcaggagaaaaactgatgccattttattctcatcagactggcaaacatttaaaagactggtaactattactcatcatttgctgatagaaatatgaattgctag

SEQ ID NO: 95643 - DNA, 379 bp, Homo sapiens
  misc_feature (1)...(379): n = a,t,c or g
ccacaaaatacccaaaaaatagccaggcgtattggcgcacacctatggtcccagctactctggaggctgaagtgggagaactgcttgaacacacgaggcaaaggttgcagtgagccgggatcgtgtgcactccagcctgagtgatggagaccctgtttcacaaaataaaagaataagccgggcgtggtggctcatgcctgtaatccggccaatattttcatttaattatttcattaaggttattatttcattatttttatcagatttatccctaagtatacacatttttaaaatttaaattgttcatcagcattttagaataccgaacattcaccatttagaaattccagacttctggcttctttttgaaaagaaatcn

SEQ ID NO: 95644 - DNA, 302 bp, Homo sapiens
  misc_feature (1)...(302): n = a,t,c or g
gccttgctctcattaggaggtggcttaagggaatgtggttgttggtgcctgatcttctatccagactatgcctactttctccatatcaacattaatgctgctttgctttcttatcatttgtgtgtgcactgatgtatcacctttaattttctccaagaacttttcttttgcattcacggcttgactaactggcacatgaggtctagtttttggcctgtctcaactcttgacatgccttcttcactgagcttaatcatttctagcttttgatttatagtgagaaacatgtgactcttcctctn

SEQ ID NO: 95645 - DNA, 110 bp, Homo sapiens
cttcgctcttgttgcccaggctggagtgcataatggcacaatttaggctcactgtagcctctgcttcccctgttcaggcgattctcctgtctcagcctcctgagtggccg

SEQ ID NO: 95646 - DNA, 314 bp, Homo sapiens
  misc_feature (1)...(314): n = a,t,c or g
cgattgcttggggcccttggactttagacttatggctgggtcacagagaagggggcaaccacactgggtggagcacgggagaagaaaaggaagaaggagagaaaggaaggaacaagagaatcctacaactaaaaaaaaaaaaaaaaaagtcgacgcggnnnnnnnnnnnnnnnnnnnnnnnngnngnnnntnnnnnnngggnnnggggggggnngggnggggggggggggngggagggttggngggggggngggggggggggaggttgtggtgattggtttaggtgtataaatatttattatatgtgtatgaag

SEQ ID NO: 95647 - DNA, 133 bp, Homo sapiens
tgcgcctgaagacccagctactctggaggctgagggaggagaattgctggagcccgggaggcaccaggttgcagtgatgctgatattgcgccactgcccttcagcctgggcgactgagcgagactccttctca

SEQ ID NO: 95648 - DNA, 326 bp, Homo sapiens
cccagtgctttgggaggccaaagcaggactgcttgagcctgggagtttgagaccaccctaggaaacaaagcaagaccccatctctaaaataataataatgataataataaatactgtgaaacagccttgttgctgatatggagaagttttagtggtctggatagaagatcaaaccagccacaacattcccttaagccaaagtcaatccagagcaaggccctaactctcttcaattcaattaaggccaagagaagtgaggaagctgcagaaaaaatatttgaagctagcagagactggttcatgaggttcaagataaagcagaaagt

SEQ ID NO: 95649 - DNA, 414 bp, Homo sapiens
ggcacgagccatatcctgagaacactcaggcagtctgtagtgatgtccatgtggttaaaaacgaggtctgtcagtaaacttggatgcagatcttcggtgtgagtgatcttggaagcagattctccaggcagagttgagcctagaggtgaatgcaaatgcagtagacagctttactacaacttcatgaaagcccctggccgggtgcgtggctcatgcctgtaatcccaacactttgggaggccaaggtgggtggatcacctgacgtcatgaactcgagaccagacttgccaacatggcgaaaccccgtcctttcctattatagaataatgagcttcgactactagctccctctaccattctcgcctcattatttattgttagttcagcagggttttaccacatttattaagccgc

SEQ ID NO: 95650 - DNA, 310 bp, Homo sapiens
cagggccccttttaggggccctttgcggggaattatcccccaaaattggttttaaaaaaccctttttggggtaagcccccttaaaagggaacccccttttcccaaaatccgggttaaccacttgggcctgccggctgggaaacccccagggggggggggaaaaaacccgccctttggccccggggaaaacccaaccccgttttttaggggggttgggccggaaaattggtttgcccccagttttttggggcccctgggctttcccggggtcttgcacccggatttacaaaacctttgttttttaaaaaag

SEQ ID NO: 95651 - DNA, 380 bp, Homo sapiens
ggcacgagctggatgatctggattataatgaacattagccaactcaaccctgccctgcccaaggctgataatgagatggatactataacactgtttaacttaacagtaacatacacattcacaaactctttctctatgtagtacgctggatactacttttatttttatttaattattattatgattattattattttggagacagagcttcattctgtcgcctagtaatggtacgatctgggctcactgcaacctatgcctctcaggtttaagcaagcttcccgcgtaaacctaccgaggagctgggattatcggcatccaccactgagccgacttaacgatagtatttatagtagacacagggattctccatgttggcc

SEQ ID NO: 95652 - DNA, 384 bp, Homo sapiens
ggcacgagggagactgcctctgcacacacacagagactgcccctacacacacacacagactgcccctgcacacacacacacacagaaactgcccctgcacacacacacattgctcctgcacacacacacacacacacacacacacacacacagactgctcgtgcacacacatacagagactgcccctgctgtctcttcttgcttttggagaagctgccagtgggttgagaagcaactctgtggtcaccccatctgtctggcggcaagtcctttgcaggcctacagccccctcagccctttctatatgccctacacacgtgctacaccgtgtatgagctctacctggaagaaaggtaacactggatgaagaagccaatctcccta

SEQ ID NO: 95653 - DNA, 406 bp, Homo sapiens
  misc_feature (1)...(406): n = a,t,c or g
ggcacgagtctgcattagaaatctgtttagtgtagccaccttcatcaatgggctatctaggagatcaattctagatagatcattgttgaaggtcgatcagattttctagatagatcatcagatgaaggcgatgaaggaagatctagatagatcagctagatcttctagatagatcacctagatcttctagatagatcagctagatcttctagataactggctgcatgcagcttctgcataagcatttgctgcttcatgttttacttttatgttacaaagatggcctctttccttaaacctcacgaaccaacctctgctaccttcaaactttcttctgtagatttgtcacctctctctgccttgatagaactgaagtgagttagggccttgatctggattaggtttn

SEQ ID NO: 95654 - DNA, 347 bp, Homo sapiens
ggcacgagctggccaggcactgtggcttctgcctgtaatccaggcactttgggagactgtggtgggcggattgcctgagctcagtagtttgagaatagaccagcttgtgcaacatggggaaacccagtctttacacacacacacacctgggcaacatggcgaaacccagtctctacacacacaaacacacacctgggcaacatggtgaaacccagtccctacacacacacacacacacacacatgcacacacctgggcaacatggtgaaacccagtccctacacacacagacacacacacacacacacacacacacacacacacacggactatatggcgaaacccag

SEQ ID NO: 95655 - DNA, 335 bp, Homo sapiens
agcacgagggccattgctatctacatatctattatgtaacacatttacttggggcatgtatgtactacttgaaacctgattcgtggccttcttgaatcccacatactgattagcatgaggtatggatactgtaaaagctatacactgtcaatgagagacattccagaagcccttaacaagtggaaaagcttcccatgttctgttcatggagcagaagacttattgttagtatggcagtgctctccaaattgatcaatagattcaatgcaaaagatgttcaacattagttattagagaaatgcaatcaaaaccacaatgagatacctctttacacg

SEQ ID NO: 95656 - DNA, 330 bp, Homo sapiens
  misc_feature (1)...(330): n = a,t,c or g
ggcacgagggaataacgaggcattatgtctgcaaaaagactccaatagttcacaaaaaaattataaacacacacacgcacatacacataccatgtagcattctaatttttagaaccagaaatgagcttttaaaaagtcaccataggctgggtgtggnggnnnangcncgnnnnnnnnnnnnnnngngagggngngggaggggggggggggggggngggggggggggagngggggggccgggggaagggaaggaggaaagtagaagaagggaagaggataaaggagatagagaagaagaagagtatatgagagtagagtagggtagaggag

SEQ ID NO: 95657 - DNA, 333 bp, Homo sapiens
  misc_feature (1)...(333): n = a,t,c or g
ggcacgagagcacacacacacacacacacagcacacacaagcacacgcatgaacacagcacacacacgagcacagcacacacacgagcatacagcacacacacaaacgcacagcacacacagcacacagataatatcaaaatctttaggatcaaaactttcataatggatgactgaagtgaaaaatccctgagacaatggaggatcacctttaactcttagaaaatagtggttgtggggaatgaatggaggagatagtaaatcagatttagttaccaatatgctgaaatgggagacaaaaggaagctagtctacatatttgcaaagctgactn

SEQ ID NO: 95658 - DNA, 352 bp, Homo sapiens
ggcacgagggagaatcccttgaacccaggaggtggaggttgcagtgagccgagatgcctgccactgcactccagcctgggcaacaaagagcgaaactttgtctcaaaaaaaaaaaaaaaaaaaaaaaatttcaaattataaaaccccatttaaaagttaccgaatttaacccaaatccccgggggattcatatccttaaatcaggtttaaaaagcattcgtggaggcaatctttctttttaaagccttaaaaaaactctgggaggtagtaacattttccctattgccagggttgaaaccctaaaatttaaaaagactctgaggccctgagggaataaggactttatcaaagg

SEQ ID NO: 95659 - DNA, 355 bp, Homo sapiens
ggcacgagcgtgccttgggctcccgagtagctgggatttttagtggagaacaggtttcaccgtgttggccaggctggtcttgaactcgcaacctcaggtgatccacccacctcagcctccccagagtgttgggattgcaggcatgagccaccatacctggccccttttgttgttttgaggggcaggcagtaagaagcaaggatttcttcaaatgctagtaagcacaaagagagagagggagaagtttttgtaagtaacaaacagggccggacatggtggcttgagaggccaagctgggcatatcatgatttcaggagttcgagaccagcctgaccatcatggtgaaacaaacgtg

SEQ ID NO: 95660 - DNA, 341 bp, Homo sapiens
ggcacgagggactacataatgcattgtcactgtgaacactagaggggagaacattaatatctgctggagtcctgatgggcagaccattgctgtaggcaacaaggatgatgtggtgacctttattgatgccaagacacaccgctttcaaagcagaacagcagctcatcgtcgaggtcaacgaaatctcctggaacaatgacaataatatgctctatcctgacacaggcaatgggtgtattaacatccttagctacccaataactgaatcccgtgcaatttatcaacgtccaatcttccacgtgcatgtgaatcaagatctgcctcacggggacgtactctcg

SEQ ID NO: 95661 - DNA, 351 bp, Homo sapiens
ggcacgaggcgctccccacatctcagacgatgggtggccgggcagagacgctcctcactttccagactgggcagccaggcagaggggctcctcacatcccagacgatgggcggccaggcagagacgctcctcacttcccagacggggtggtggccgggcagaggctgcaatctcggcactttgggaggctaaggcaggcggctgggagggtgaggttgtagcgagccgagatcacgccactgcactccagcctgggcaccattgagcactgagtgaaccagactccgtctgcaatcccggcacctcgggaggccgaggctggcggatcactcgtggttaggagctggagac

SEQ ID NO: 95662 - DNA, 339 bp, Homo sapiens
ggcacgagggcaggaaggaagagttgatgacatgtcttgtgtaatttttgatcatctgctaagagtgaagggaacgtggtagaataggagttttttaaacaatgtatgtgaggccaagtgctgtggcatgtgcctgtagtcccatctactcagtaggctggggcaggaggatcgcttgaacccagaagttgaaggccagcctgggcaacataatgagaccctatctcttaaaaaacacacacacaaacaaaaaagccaggtaaaattaatccacccctgtgaaaggaatggaaaaaaagatagtctgtagtttatacatactctttgtaaacggcttcc

SEQ ID NO: 95663 - DNA, 323 bp, Homo sapiens
  misc_feature (1)...(323): n = a,t,c or g
ggcacgagttttaatgctttatgaatgtttttaaagtattgttctaaaagaatattttaataattgcatagtatttttgttttgggagagttgtttggttttggtttttgntctttttgtttntntntgggcccttgtctttcgctgtgcctccccctgccctgctctctctcgggcctcgctcctccccccggcgtctcccccgcgcccctgccgccttctgcccctcccgtccggggcccccccctgccccttctgcgccggccgcttccttggcccccctcgccccccccgcgtgcttcgcccgcctccctccctccccc

SEQ ID NO: 95664 - DNA, 449 bp, Homo sapiens
ggcacgagctggaaatctatctgtatttttacacaatttaattgaaattgtaagtgtaatccaaacttcaaaattacaaagctttctcattgaagtataaatacgatctgtaatcaatttgactgggcatttgttctctgaattgtcctttgtcccttcttccaatcagataaataaaatagcatttaattctgtaaactgctgaaatgcctaattatattaggtattgagtctacaaaagtggttgacacaattcttcaccgtttctaaattattgaatttttcatgtgaacctgggagatgaagtgatattattctagttcttctcttcttccacccaatcttcactccacctcttttttctttttgagacagagtctcgatccgtcacccaggctggagtgcagttgcacgatctcagctcactgcagcctctgccaactggggtg

SEQ ID NO: 95665 - DNA, 471 bp, Homo sapiens
  misc_feature (1)...(471): n = a,t,c or g
ggcacgagaactggtcttgaactccttacctcgtgatccacctgcctcagcctcccaaagtgctgggattacaggcttgagccattgtgcctggctcggctaatttttttatctttttggtagagatggggtttnnnnntgttntnttngttgttttttttttttttttttttgggggttttgtttgtgtggtggttttttgttgtgtttgtgttttggggttttggtttgttggtttgttttgttgttgtgttgtgttgggttttgttttgtttttttgttttgttttgtgggggttttgggtggtgggtttggtggtgtggtttttttgtgtgtttggtggngttgggtttggtgtggtgttttttttggtttttggttttggtgtttgggttgtgtttgtgtggttttttttgtgtggnttggggttgtgtgtttttggttgttgggtggggtttgttttgtggggtg

SEQ ID NO: 95666 - DNA, 303 bp, Homo sapiens
ggcacgagcacacacacacacacacacacacacacacactcttcctctccaaataattggatgatagtaattcaagtcccgtctggctgcttggggtggtgccagtggatgtcgtcgacctttaggtatgatctttcgtgggcagcggggtgggtgagcgtatgggggggttcgtggacgagcttgtgggcaaattttggtggggggggagtgttggcaagtggggatgaaggaggtgggtggcggtgtggggggcgtggggtgcggctggcggttggggagcagggaggggtggctgagttg

SEQ ID NO: 95667 - DNA, 333 bp, Homo sapiens
ggcacgagacagagtttcaccatgttggccaggatggtctcgatctcctgacctcgtgatccgcccgccttggcctcccaaagtgctggaattaacaggcctgagccaccgcaccctgccataataatacatttgaccaagtggagtttgtttgcagaatcgttcattataagttgccatattactagatcatcatctctgtatgtgctaaaaggcatttgataagattcctgttcttgatcagattccttaataaatagacggggtcgggtgtggtggctcatgtatataatctcaatactcttggatgcttaggtaggaggattgcttgcg

SEQ ID NO: 95668 - DNA, 365 bp, Homo sapiens
ggcacgagacaaggtcgagacattcctgcgcatggtgcagtgccgctctgtggagggcagctgtggcttctaggtgcccgagtagcatcctgtgacccctccccagtgcctctactggccctgaaggtgccactccagtgcccaccagaccttgtccataatacaatcaagtcgtatcattacgcaccccatacagctacttccggcaccaaaagcatcagcctcaacctagtagcactaccgtctccgattccaactatacgagtactactcatgccaggcacagcctgcctcgtaagcacatcatacttctgagacgaggagcgtaagagtcgaccgcctcacacctcatactctagagtgcg

SEQ ID NO: 95669 - DNA, 337 bp, Homo sapiens
ggcacgagctcggcgtggtggcgcgtgcctgtaatcccagctactcaggaggttgaggcaggagaaacaacgcttgaactcgggaggtggaggttgcagtatatacccgattgcgtcattgcacttaggactgatcttgatagcccaaatttgtgtctctcctttagtggagaacaacggtcgagctgacttttacacaaacgccttggagtccgaatggtgcatgaagctacgtgcctgcaacttgagcttgtaccgaggaatgggcattcatggccagagggacgacctcttttgctctataggtgatgcctacctatcagaagggggttagcag

SEQ ID NO: 95670 - DNA, 327 bp, Homo sapiens
  misc_feature (1)...(327): n = a,t,c or g
ggcacgagatctgaggcatatggagggtttgtccattcattcatttatacactcatccttttttcattcagcaagtatatactggatgcttcctgtgcaccagtcattgtgtatgagctagagatacagggtgaaggtgatagacaatgaacaaggggaatttttaatgtactgttacaggaaggggtcccgatccagaccccaagagagggttcttggatcttgtgcaagaagaaattcaggacgagtccataaagtgaaagcaaatttattaagaaagtaaaggaatagccaggcgcggtggctcatgcctgtaatcccagcacn

SEQ ID NO: 95671 - DNA, 344 bp, Homo sapiens
  misc_feature (1)...(344): n = a,t,c or g
ggcacgagtgtgatttacattgaagccaacagtggggccgtgaaggtaatgccttccttgggacacagcattgtccctgatttgtttgccatgagaagacctaagtgacaagggagttgctttcttcagagggtgtggggtgtgtggngaggggnngnnnnnngnggnnnnnnnggngggnggggggggggggggggggggggggggggggggggngggggggggggggggggggggggggggggggggggggggggggggggggggggggggggggggggggggggggggggggggggggggggggggggggggggggggggggggggggggggggggggggg

SEQ ID NO: 95672 - DNA, 329 bp, Homo sapiens
ggcacgaggtggattacttgaggccaggagttcaagaccaacctggccaacatggtgaaaacccatctctattaaaaatataaaagctacgacggatgtggcgttctgactgttgtgagatagtatctcattgtggatctgatttgcatttctatgataattagtgatgttgagcatttgttcattgttttaacagtttgtacgtcttgtttggagaagtatctgatcatgtcttttggccattttttaatgggattgtttgcatttttgcttgcacaattgttacaagttccttatggattctggatattatacttctgtcacatgcg

SEQ ID NO: 95673 - DNA, 341 bp, Homo sapiens
  misc_feature (1)...(341): n = a,t,c or g
ggcacgagcaagactttagatgtctgcctgcagattgaattcttcccaattaaataaggagtctcatcttaagatgttgctggtggtcaaaacagaaagttactgaatgtggcattattccgctctctgcatttaaaatttaaaattttgattcaggtaatgcttagccagactattttgctagcttagagttaaagtgagtagcactttgggaggctgaggtgggcggatcacgaggtcaggagatcangaccatcctggccatcatgatgaaaccccgtctgtactaataatacgaaaattagctgggcgaggtgggtcgtcccgtgtgaacgaactcg

SEQ ID NO: 95674 - DNA, 348 bp, Homo sapiens
ggcacgagctctctcattaggggctaatgcagctggtaactttaagttgaggccactgctcaggtaccattcccaaaatcctagggcccttaagaattatgctaagtatactctgcctgtgctccatagatggcacagtgaaagcttggagacagcatttacagaatgctttactgaatattttaagcccactgttgagacctactgctcagaaaaagattttttacaaagcattactgctcattgagaaggcacttggtcacccaagagctctgatggagatgtacaaggacattagtattgttttcatgcctgttaatacaacatccattctgcagcccatggacc

SEQ ID NO: 95675 - DNA, 370 bp, Homo sapiens
ggcacgaggcaccatagcttcaataccctgtgtcaaaacaaagacaaaaacagaaacaaaaaaatacaaagcagaaagaaggaaacgatagagattagagcagccataaattaaatagagaatagaaaaataatctacaaaaccaaaagttcggtttctggcaagaacaaaaaatctgacaaacttttggtaaaaaaaagaaaaaggaggccagccaggggggttaaggcctttaatcccagcacttggggaagctgaggggggcggataacaggggcaagagattaagatcaacctggtgaacatggggaaacccaatatacgcttaaaaaaaataaattagccgggcttgggggtaggcccttttatg

SEQ ID NO: 95676 - DNA, 326 bp, Homo sapiens
ggcacgagaaaaaatacaaatattggccgggtgtggtggtgtgtgcctgtagacccagctacttgtgaggctgagataggaggatcgcttgagcctgcagggaaccgtgatgacgccactgcactccagcctgggtaagagtgagaccctgtctcaaaaaaaaaaaaaggtaaaattctcccagcatttggggaggccgaggcgggcaaatcatctgaaaccaggctggggtaaaactccgggtctaaaaggatccgcccaattaagcctttaaagggcctggaattacgggttggacccaccgattccagcagtcaccgccccca

SEQ ID NO: 95677 - DNA, 331 bp, Homo sapiens
  misc_feature (1)...(331): n = a,t,c or g
ggcacgagaaaatattaatattttaaggaatgtggttggagagctgcctttacacttactttggaagatttctttaggtttggntatatttttntgatttnntgttnntgcttttttttntctgntnttagtgttttggtgggttggtgttttgngtttgtggtttgtggttgtgtgggtggtgtgtgtgttttgtggttgtgtttgtttgtgtttgtntnttgggttgtgtggttttgtgtttgtgttttgtttgtgtttggtgggggtttgttgtgtggttttttttggggggttgtgttgtgtttgttgtttntttttggggtggggg

SEQ ID NO: 95678 - DNA, 337 bp, Homo sapiens
ggcacgaggacatttctgcctccctcttataaagacccttgtgaatatactgggcccatccagataatccaggctcatcttccaactgcaacatgcttaacttcagcacatctgatcccctgttcacagttctgggaattggaaagtgctctcctctcccaaccgaccatactactactcctacactgcaactccacacaccgaccctactcctcacctcccctctcctaacccctcaagcccatccccctcatatcctctactatcagactctaccatctgccaaactactccgacgactactccaatcacatcatcacacacactactgacctcc

SEQ ID NO: 95679 - DNA, 350 bp, Homo sapiens
ggcacgagcttacatttaggtctttgatccattttgagttaatttttatatatggtataatgtaagggtccagcttcactaatttgagagattatcagttttctttttttctgtttttttttttttttggggtgggggtttggttttttttttttttgggtttttgtgttctctcctcttcgcctcctctttctcctctttgtcctgtcccggctccttctttgtcttccctgctgttctttgttccttttctcctggttctctccttcctttcgtcccgctttctcctctctgctctcgtctctcctctcggttgccctctttctcgtgcgcttgttttcctttctttg

SEQ ID NO: 95680 - DNA, 356 bp, Homo sapiens
ggcacgagcccgtctctactaaaaatacaaaaattttagtggtggcaggagcctgtaatcccagctactcgggagggagaggcaggagaatcgcttgaacccgggaggcggaggttgcagtgagctctcacctgcctgtgatgaccaacagcatttgggatacccagtgtggcactcattccagtgagttttagtgacacccccaccacacacagcttcccagtcacttccactaatactccagctggcttcccagcaagtcttatcgaagtcccagaaaattccagaaggggccaggtgcggtggctcacatatgtaatcccagcactttgggaggctgaggtgggaggatcgct

SEQ ID NO: 95681 - DNA, 345 bp, Homo sapiens
ggcacgaggagagagctagaccatgagcttcaataccctgtctcaaaaaaagaaaaaaaaaaaaaaaaaaaaccggggggaaaccacccccttgggggcccaaaacccaaaaggggggggggggggggtcccccccccacaaaaagaaccctttttggccccccccagggtaaccaaaccccggggggggtttccggcccccaaaaggtgacccccccttttccccaattcccccatgccaaaggaaaagtcccccatttgaaaaagggggaaaaaaagggccccccccttggaggggggttaaaagggaaaaagggcattttttaaaaaatttccaacaaaagg

SEQ ID NO: 95682 - DNA, 337 bp, Homo sapiens
ggcacgagcatgttgcccaagctggtctcaaactcttaggctcaagcgatctgcccaccttggcctccccaaagtgctgggattgcaagcgtgagctactgcgcctggcctcacatctttcccatctcaggacctctgtatgtgttttttcctctgcctagaatgtccccccatacacacacacacaaatacaccaggacttttttccactatgcacacaaacactgtgcttgcacactcaacttactgctcagggctcagtttcaatgtcacttcttcaaaggggttgtccctgacccctaggctaatgtgagcctctagaggctgggtgcggcgg

SEQ ID NO: 95683 - DNA, 347 bp, Homo sapiens
  misc_feature (1)...(347): n = a,t,c or g
ggcacgagggcatgtggtaggtgaagcccaccattgtcaagtacctacctagagggtttggggtagagggtcctgtggtttnttntatttttttttttgttgtttgttttttttgttttttggtttgtttgtttttgtgtgttttgtggttttttttttttttgttttttttgttgtgtttggtttgtttttggtttttgtttgtttttgtgttttttgttttggttttgtttttttgtgttttttggtttttttggtttttggttttttgtgttttttttggtttgttttttggtttttgtttgtttttttggttgttttttttttttgttttgtttttttttttg

SEQ ID NO: 95684 - DNA, 325 bp, Homo sapiens
ggcacgagcaatgaccaaaacatagatgtctctcctggagctgattcttgagcccaaccgaacgctcagtacagtgccttggtcttaaaaggtgcttaccaaaagtttgtgtgaatggatgaaaggaaaaaaataaggggggggggtaggcaggggaaggaatgcaaaatacattgtaaaaagaaactgagcccaggtataagaagctatccggttgagaacttgagataccatgtatgattacttgcagcctgcctattataagttgaacgacctgacgaatgcagatccctgtgcagtccgatatctgctctttgatcagaat

SEQ ID NO: 95685 - DNA, 338 bp, Homo sapiens
ggcacgagaaatgaacataaataattactctgaatgaataaggatcagtcatcctgtctaaaataactgccctccctgaagttgcttgggaaatttatccacctctattctcattctcccactctctctttcacacacacacacacacacacacacacacacagagagagagagagagagagagagagagagagagagatatgcatatgtatgtctgtatatgcctgacactcaatatatctgctctctctgtatagagctcatactgagagccactactttctatatccatcatcactacgtcccacatacctacatacgctgactctggaggttga

SEQ ID NO: 95686 - DNA, 345 bp, Homo sapiens
ggcacgagtccaggtcactgcaaatgctgctaattcattcctttttatggctgagtagtattccatcatatatatatatatacacacacacacacacacacacacgcacacacacacacatatacacacacacacacatatatacacacacacatatatatatatctcacagtttctttatccactctaagattgatgggcatttgggttggttccatgatttcgcaattgtgaattgcgcctctgtaaacacgcgtgttctataatgaatattcacactgttttccatagtgactgtactatttcacgttcccatcaacagtgtacaaatgttacagtcaattc

SEQ ID NO: 95687 - DNA, 362 bp, Homo sapiens
ggcacgagcgtgccttgggctcccgagtagctgggatttttagtggagacacggtttcaccgtgttggccaggctggtcttgaactcgcaacctcacgtgatccacccacctcagcctccccagagtgtcgggattgcaggcatgagccaccatacctggccccttttgatgattcgaggcgcaggcagtatgaagcacggattgattcggatgctagagagcacaaatacagacagggagaagtttttgtaattatcgaacaggacgcggcatgctggcgtgagaggccgacctggcctgatcatgaagtaatgagttcgacaccagcctgaccatgatgatgatacccctgtatgcacag

SEQ ID NO: 95688 - DNA, 330 bp, Homo sapiens
ctactctggaggctgaggcatgagaatcatttgaatctgggaggcagaggttgcagtgagccgaggttgcaccattgcactccatcctggatgacaagagcaaaactccatctcaaaagaaaaaaaccaaacagcccatggaatggcaaaacctctgccttaaaaaggtttttggaaataccggagtacgggaaatatttaacgggatcaaactgtcctaaaaaaaaccctcctttttcagaaaactctgggtggcctactttacctttccaaaatccccagagtgcccaattttttggttggtcaattgggggcttttgaaacagggcg

SEQ ID NO: 95689 - DNA, 184 bp, Homo sapiens
tgctgttagggggtgccagagggacacacacacacacacacatacacacacacacacacacacacacacgcacacccgcgcgttagccttcagggacgaagctccagactcctgatctgtggtaggtagcactgatacacacacacacacacacatacacacacacacacgtacacgcgttcgt

SEQ ID NO: 95690 - DNA, 304 bp, Homo sapiens
tgacatgttccagtatgaggcctttttgtctacattgaaaatctgttgttttgtgtagccaccttcatcagtgatcttagagtgatcttctgtataacttggtgcagcttctgtatcagcacttgccacttcaccttgcacttttgttgttacagagatgacttcttttccttaaacctcataagccaacctcggctagcttccagcttttcttctgcagcttcctcacctctcagccttcatagaattgaagagagttagagccttgctctggattaggctttggcttaagagaatgttgtgg

SEQ ID NO: 95691 - DNA, 166 bp, Homo sapiens
gttaagaacagactgccctggaaatcctagccagagcaatcaggcaagagaaagaaataaagggcattcaaattagaaaagaggaagtcaaactatgtttttttgtcaatgattatggtcttataccttgaaaactctaaagactttttgaaagtcgacgcggccg

SEQ ID NO: 95692 - DNA, 176 bp, Homo sapiens
tctatacatacatgcctatgataaagtttaatttataaattaggcacagtaagagattaagaataatagaccaggcatggtggctcacgcctatatcccagcactttgggaggccgaggcagacagatctcctggggtcaggagttcgagaccagcctggtcaacatggtgaaacc

SEQ ID NO: 95693 - DNA, 268 bp, Homo sapiens
gatttcgccatgttggccagggtggtctcaaagttctgacctcaggtgatccacctgccttagtctcacaaagtgctgggattacaggcgtgagccactgcgcccagccaatagtgggagactttaacaccccactgtcaatattagacatcaacgagacagaaaattaataaggatattcaggacttgaactcagctctggatgaagcagacctgttagacatctacagaactctccaccccaaatcacagaatatacattcttctc

SEQ ID NO: 95694 - DNA, 268 bp, Homo sapiens
ctcctgaggcttctgcattctggacgtagttctcgagccttgattttcagctccatcagctcctttaagcacttctctgtattggttattctagttatacattcttctaaatttttttcaaagttttcaacttctttgcctttggtttgaatgtcctccctagctcagagtaatttgatcgtctgaagccttcttctctcagctcgtcaaagtcattctccatccagctttgttctgttgctggtgaggaaccgtgttcctttggagg

SEQ ID NO: 95695 - DNA, 338 bp, Homo sapiens
  misc_feature (1)...(338): n = a,t,c or g
tgggctttcaccatgttgatcaagctggtcttgaactcctaacccctcaggtgatccacccaccttggcctcccaaagtgctgggattacaggcgtgagccaccgtgcttggccagtcctcattttcatcaaatagccatctcacagaagaggcacagagaagctaagtgactagctaaaggtaacacagccaggtagggacagaccaggatggcaactcaggtctattcactccagagactggcccttgccactctgcctgagaaatttgctctgacctttacagaaggctgtggggaggtggggtgggcagacacagctgtgtctcagtcacatcn

SEQ ID NO: 95696 - DNA, 424 bp, Homo sapiens
tcggcacggggaccagatggattcacagctgaattctatcagacattcaaagaagaattggtacaaatcctactgaaacaattccaaaggataaagggggaaatcctccttaaaatcattatgtgaaacccagtatcaccctaatacccaaaaccaggaaagggacataacaaagaaactgttgactcgctctttctgtgtttctctctgccccgtgctgtctcccctgcagtctctgcagtccaggccctcttctctctctatgatctctttgcactctgtctgtttctctgttctgtctgcctctgctcacccacacgtgcacttgtgccccacatgccccaccctcgttctctctggttcccactgtgtctgttgtgtgtctctattcttcttctgattactctttcctcccccaccctta

SEQ ID NO: 95697 - DNA, 370 bp, Homo sapiens
ggcacgagaactggaacaacaaaggctggggtgacagcactatttatagtatgaagtatttatactttaagcccatgttgagaccctactcctcaaaaaaagattccttttaaaatattattgctctttgacaatgcacctggccacccaagagttctgatggagataatgtataaggatatggaggtttttcatgcctgttaacacaacattcatttacagcccatggatcaaagagtaattctgactttcaagtcatattatttaagaaatacatttcataagactatagctgccataaatagtgattactctgatggatctgggcaaagtcaattgaaaaccttctggaaaggattcatcgttctag

SEQ ID NO: 95698 - DNA, 241 bp, Homo sapiens
cattttcctgtggaaaatgagtcggcccctgggtcaaagccgccggagacctcctgaccctattgctcggtggcaacgcagccggcgattttaagttgaaggccctgttggtgtacccctcggagaacccgtgtttcctcaagggttccttcaagcccaacctgcccttggtgtggtgttcgcacaaaaaagcctgggtacagcttgggtgacagagcgagactccgtttcaaaaaaaaaa

SEQ ID NO: 95699 - DNA, 390 bp, Homo sapiens
ctatattgcagattaagtccaatgtttgttgatttttttgtctggaagatctgttcagggttgaaagaagcaaggtgttggtgtctccagttattatcgtattgggccctagctctgtctttagctttaataatacttgcttaatatatctgactgctttagtgttggctgcatgtatatttaaaattgttataacctcttgctgaattgtcccatttatcattgtatagtaacctccttttgtctcttcttatagtttgttgcttgaaatctagtctgtctaatatatgtataataactcctgctctttttttgtttctttcggcattaaatatctttttccatctcttctttattttctttctatgtgggtttttttttttttttttt

SEQ ID NO: 95700 - DNA, 383 bp, Homo sapiens
  misc_feature (1)...(383): n = a,t,c or g
caatgcaccccagcctaggcgacagagagagactccgtctcaaaaaaacaaaaacaaacaaacaaaaaaagtcatgaaactgaggcagatggccataaatgtaaacatcactaagattagatttaagttttgggggttttaacctattttttaatctaatatttaatctgtttttctaaaacaatgattccaaaacactatacatatttgtgtgtgtgtgtgtgtgtgtgtgtgtgtgtgtgtgtgtntttggtttgtttttgtgttttttttttttgtttgttgtgtggtggttttatgtgtggttgttggtgtgatttttgtattttgttttgtttttatggggttgggtttttttttttgtgattatttttaaattagtg

SEQ ID NO: 95701 - DNA, 341 bp, Homo sapiens
agaggatggagtccgcgctggaccggctcaagcagttcaccaccgtggtgggcgacacgggcgacttccacgccgtcgacgagtacaagccccatgatgctaccaccaacccgtccctgatcctggccgttgcacagatgcccgcttaccaggagctggaggaggaggcgattgcctatggccggaagctgggcgggtcacaagaggaccagattataaatgctattgataaactatctgtgttgcttggagcagaaatactaaagatgattacgggccgagtatccacagaagtagacgcacggctctcctttgattagatgcgatggtggccacagccc

SEQ ID NO: 95702 - DNA, 306 bp, Homo sapiens
tgcttatgtatatcccacaaattttaaaatttgtattttcatttatattcagttccaaatattttctaatttcccttgagacttcatctttgatctgtggataatgtagaagtctgttgtttaatttccaagtatttgaggattttctggatatcttcctgatactgatttttagtttaattctattatggggggagaaatactggttatgattacatttctcttaaatttgttatgtagtttattttatgacccaggatgtgagtcataaacaagcagaaatcagtaaaaagaaatcaataaaat

SEQ ID NO: 95703 - DNA, 388 bp, Homo sapiens
  misc_feature (1)...(388): n = a,t,c or g
atcaaaccaaccacaaattcccttaagccaaaacctaatccagagcaaggccataactgccattgtatgaaggctgagagaagtgaggaagctgcaggaaagtttgaagctagcagaggttggttcatgaggtttaagaagtcatcttatcataaaagtgcaaggtgaagcagcaagtgctggtgtagaagctgtagcaatttatccagatctagctgagttaattgatgaagttgctacaccacgagattttcagtgtattccaaacagccttcttttggaagaagaaaccatctaggactttcatggagaagagaagttaatccctggcttaaaagcatcaaaggacagctcgtctctcttgttaagggttcatgcagctggtaan

SEQ ID NO: 95704 - DNA, 393 bp, Homo sapiens
ggcacgaggggttctgggttatcaaggtgagagaaaccagaggttgccagttgtaggtgggcgtcaggactagagttatgcttccagaagtttctgcaagtgggccgagtctaatgtaggtctgggtacgcctgaagtttagggtctctaggtttactgtcctatctgttggttggtttttttcttttgcttctgttctgttttgatcctgtttgttatgttcgtggtctgtgtttctctttcttttgttttcttgggtttgttgttgttttttcttcgttttacttgtttatttgtgtttttttttttattgttcttggttgcctttttttgtgtgttgtgtttgatctgttcttatttgtattgttcgttttgtgtctttttttcgtttcg

SEQ ID NO: 95705 - DNA, 374 bp, Homo sapiens
ggcacgagcgtgccttgggctcccgagtagctgggatttttagtggagaacaggtttcaccgtgttggccaggctgggggtgaactcgcgacctcaggtgatccacccacctcagcctccccagagtgttgggattgcaggcatgagccaccatacctggccccttttgttgttttgaggggcaggcagtaagaagcagggatttcttcaaatgctagtaagcacaaagagagagagggagaagtttttgtgagtaacgaacagggccgggcatggtggcgtgagaggccgacgtgggcagatcatgaggtcccgagttcgagaccagcctgaccaacatggtgaaacccccgtcttcactacaaatgcgaaag

SEQ ID NO: 95706 - DNA, 450 bp, Homo sapiens
  misc_feature (1)...(450): n = a,t,c or g
ggcacgagtttgaccacgctatgcttcaagcccatcgcgcgcaccatctggccattgacgcctaccatgagtttgaagaaacctatatcccaaaggaccagaagtattcattcctgcatgactcccagacctccttctgcttctcagactctattccgacacccttcaacatggaggaaacgcaacagaaatccaatctagagctgctccgcatctccctgctgctcatcgagtcgtggctggagcccgtgcgggtcctcaggagtatgttcgccaacaacctggtgtatgacacctcggacagcgatgactatcacctnctaaaggacctagaggaaggcatccaaacgctgatggggagggctgaaaaacggcaccgncggactgtgcagaatctcaagcagacctaccgcaggttgacacaaactcgacaaccatgacgcactgttn

SEQ ID NO: 95707 - DNA, 395 bp, Homo sapiens
cggacgcgtgggccaaaaactaacaaagaataaataaataatataaaaataaaataaaaaaaaaaaaaaaaaaaaaggaaaaaaaaaaaaaaaaggaagggaataaaaaaaaaaaaaaaaagaaaaaaaaaataaaaaaaaaaaaaggggggggctttttttaaaattcttggggggggctaaaattttttttggggtttttttaaatgtttctttttttttggggggggtatttaatggtccctttttttttttgggaaaaaacttttttttggggggggaaaatttttggggcaattttttttaaaaaatattctttttttggggtattaaaaattttttcttcggggggggggtaaaacaactttttttccccggggctagaagattctttt

SEQ ID NO: 95708 - DNA, 407 bp, Homo sapiens
  misc_feature (1)...(407): n = a,t,c or g
aatggatgttgtgttagcaggcatgaaaacattaatctctttgtacatctccatcagagctctttgatgagtaggtgcattgtcaatgagcagtagtagtaggtctcaacagtgggcttaaaatattcagtgtaccgtgctgtaaagagatgtgttgtcatcaaggctttgtttttccatttatagagcactggcggagtaaatttagcataattcttaagggccctgggattttggaatggtatataagcattggcttcaacttgaagtcaccagctgcattagcccctaacaagagtcagcttgtcctttgaaaccttgaagccaggtattgatgtctcttctgtagctgtgaaggttctagatagcatcttcgaatagaagcctgtttcatttacactgaaaan

SEQ ID NO: 95709 - DNA, 402 bp, Homo sapiens
tacttggaaattaatgttattttcatggctgctagtacaatatttaccttcagcctgtggatcaaggagtggttttgactttcaggtgtttttggtgatttttatatttattatttttatttttatcttgttttattttatttttttatttttctttttttttattttttttttttttttatactattattattttatttttttttttcttttattttttttttttttttattcgtttattttatttttttatgttatttttttttatttttcttttttttttttttttatcttttcttttattctttcttctttttttttatatttttgttttttttcttttttttttttttctttttttcttattatcttattttttttttatcttatattattttctat

SEQ ID NO: 95710 - DNA, 413 bp, Homo sapiens
tgaagttgtgttaaatagtactagctagaaatacaaatttctggttatcatttctcttccctgtggcacttggcattttaattgtcttaaagggggtgaagtacatcttctggccccttgagtactgccagaggctaaagatgtttgtttcttattcattccactattgtcttcctgggatctcttctgttcctaaagtatggctttcatatgtacttgatattattgctttgatttttatcataatcatgtgtttttttatcaagtattctttttttttttgctgcttgtatcacttttttttttcgttctatttgttttttctttattttcttatatttttgttatctcgtcatcctattcttctcttttctgttatttctatttttatcttcttattgtttttttttttc

SEQ ID NO: 95711 - DNA, 1307 bp, Homo sapiens
  misc_feature (1)...(1307): n = a,t,c or g
gcctttgcaaatgcatgcagagcatggaaatgtcccagctgccctgctgttgaaacagaatcctatttggaaggcagacatgtggcccatctctgtagccatcactgagaaatctggattttcaagggccttnnnnnnnnnnnnnnnnnnnnnnnnnnnnnnnnnnnnnnnnnnnnnnnnnnnnnnnnnnnnnnnnnnnnnnnnnnnnnnnnnnnnnnnnnnnnnnnnnnnnnnnnnnnnnnnnnnnnnnnnnatgttttgcgtattattaaagatgaagacttcaaaatactggagcaaagacaagtagtattatcggaaaaagaagcacaagcactgtgcaaggaatatgaaaatgaagactattttaataaacttatagaaaacatgaccagtggtccatctctagcccttgttttattgagagacaatggcttgcaatactggaaacaattactgggaccaagaactgttgaagaagccattgaatattttccagagagtttatgtgcacagtttgcgatggacagtttgccggtcaaccagttgtatggcagcgattcattagaaaccgctgaaagggaaatacagcatttctttcctcttcaaagcactttaggcttgattaaacctcatgcaacaagtgaacaaagaggggtccatctatggtcatgattctgaccaagtggaatgctgttgcagaatggagacgattgatgggcccaacagacccagaagaagcaaaattactttcccctgactccatccgagcccagtttggaataagtaaattgaaaaacattgtccatggagcatctaacgcctatgaagcaaaagaggttgttaatagactctttgaggatcctgaggaaaactaaagtatatactgtgaaaactttgagaagataatacatatgttcacgtcaatatacaaccatttggcacagcttcctgggaggaataataagaaaaacatgctttggaggaaaactcaagatacaaaaatgaatggctatgcataataacaataaaaatgtattccccaaacaaatcttaatgtttatttttaactgatcttccggaaaagatttaaggtatataaatgcacacaatctacaacaagataattgagggaggaacacggaatgtggggaagaagacagtaggagagatcaaataaagccaggagtggagttaaatacaaatgcatactgcctaatgtatattgaaaattggtcaaagttttgactctaaattttcttgcagaaaatgaggaaaaggatgacatgtagatttatatgtttgca

SEQ ID NO: 95712 - DNA, 397 bp, Homo sapiens
tactcaggaggctaaggcaggagaatcacttgaactggcggggtggaggatgcagtgaaccgagatcccagcactgcgctgcagcctgggcagcaacagtgaaactcctcagaaaaaaaaaaaaaaaaaagaaaaaaaaaaaaaaaaaaaaaatttacctaattcagccctaaaaaaaacatattcacaaaggggcaaacttttttaatccaaaaattaaacgggataaagggcccattaataaaacattattttacaaggaggttttacacataaatcagtggagccactttttttttttttaaaaaggaagtccccctttgtgcccaaggctggagggcagggggggaacctaagttaattgaaacttcaccctccgggggaaaagaaatattcg

SEQ ID NO: 95713 - DNA, 401 bp, Homo sapiens
cggacgcgtgggctagttctagatcgcgagcggccgcccttttttttttttttttttttttttttttttttggcccccgccccccgggggttatccccatttttcttttttaaaaaaaaaaaaaaaaaggggggggggggggggaaaatcccttttaccccccggaaagggccccaaccccccaaaagtggggcttcccccttttccccccccccttgtttccccaaaaaaccccccccccccctttttttttttataaaaccccccccattcccccccaagggccccgggggggcccccttaaatttacacccccgggagggggggggggaaacccccccaccatccttttggataaaaaaaggggcgttttggggccaccccccttcttctggaccaac

SEQ ID NO: 95714 - DNA, 440 bp, Homo sapiens
  misc_feature (1)...(440): n = a,t,c or g
tcatgtttgatgtttctttgctcactttcactcactctctttttcatttctccccccagtttcaccgcaaatgtgaattatcaacgttgtgtgacggtggggaactcagagaccacatcttactgcccacctccatatgccccatcacccgggtaagtgctcctgccccggcgagggctgtagcttctccgggttctggtttcagatgtaggcagctttcagacattcacatccttcccagggcttccctgacaactctttgggtttgagnnnnnnnnnnnnnnnnnnnnnactggtattttaggttagagagtacatgggagggttgttacacacgcagacacgtcttgcgggagcttgttgtgcacaatatcttatcacctggggttctagcccagagcccagttcgtaatcttttctgctcctctctgttggggtcg

SEQ ID NO: 95715 - DNA, 241 bp, Homo sapiens; identical to SEQ ID NO: 95698

SEQ ID NO: 95716 - DNA, 419 bp, Homo sapiens
  misc_feature (1)...(419): n = a,t,c or g
aaaaaaaactgatttgaagaaaaagaaaaccaaaaaaatatcggggggggccgttttaaaaaaaccctgtgggggcccaattttacgggctgttgaaaattaaaattcttttttttttgaggaggaattatataaccctttcgggggacttggaaaaaaaaccttttttggggggggggaagaatttggccacactccccccgaaaatgaagcccttggcggcaaaaataaattttttacgggagaagggggacaaaccttctccaataatggggaggagaaaagtgtgtctttctggatcagcattgaaaaaattttacaccgggcccttctggccatgncctctgcaaaaattgtgttgtagaattaaacttcggtcagaaggaggagcccttcttcccaccaccagaagagtttgn

SEQ ID NO: 95717 - DNA, 399 bp, Homo sapiens
cccacgcgtccgggcactgatctgccttataagcacagtcatctgaaagtcaggcctgctgcaggacaggatcccccagagaccccatttgcctctcaacactcagaccttcaactgttttttaataaatctactttttaaaaaaaaaaaaaaaaaaaaaaaaaaaaaaaaaaaaaaaaaaaaaaaaaaaagggggggggccttttaaaaaacccccgggggggcccaaaatttccggggggtgggaaaggattattttttttttttagggggggataaaaaaacccccttgggggtttttgggaaaaaaccctttttttgggggggggaaattttggcccccccccccccaaaaaatttaccctttggggggaaaaaaaaattttttggggggggggg

SEQ ID NO: 95718 - DNA, 458 bp, Homo sapiens
  misc_feature (1)...(458): n = a,t,c or g
atttgaacccattgaaggnacctgtggccggaaggtnccggaattgacccacgcgatccgaacagagcaggacttgtcatctgcccgtctgtcaacctacagatctggaaacaaaatatagtaatggaataaaaagttcagcactcttggagataagcagcattataatattatacatgctaatatatacacaatgtggagtacaaacatagctcaaaaacagatgtccagagtgttgcagataaaggaaccaaattggggcgggggcgggggaaagcctgaattcaaggaaaaaaaaggcagttgatatcaaagagcaaacatcctctttttcctttttggtattttaatctacaggagccttgacctcccaggctcaggcgatcctccacctcagccttctgagtagctgggaccacaggcactgggcaccaggtccagctagttttttaaaaaat

SEQ ID NO: 95719 - DNA, 410 bp, Homo sapiens
  misc_feature (1)...(410): n = a,t,c or g
cggacgcgtgggttctacctaagatatcttcttttctcagtaatagctttttaattgatcaccctgctttgacttttgcccctcatccaatactttttacagtcagtgtggtctttttcacttttaaactttttttttttttttttgagaggagggnnnnnnnnnnnnnnnnnngggggggggggnnnggggngggnnggggggggggnnngnngggnggggggggggnnnnngnnnnngggggngggnnggggggggnnnnngggggggngggggggnggnggggggggnnnnngnngggggggggnnnggggggggnnggngngggggnnnggnggggggnggggggggnnnggnnnnnngnnggggggggggggggnggnnnngggggggngggggggggggggggg

SEQ ID NO: 95720 - DNA, 428 bp, Homo sapiens
  misc_feature (1)...(428): n = a,t,c or g
ctcaactttcatattattggaacaattaatttgatgtaggttttattcatactttgtttcttcagagatgtctgtagtgggagtattttcccaacgctttactatataaaagtccagcatgttgatgttgctcctgaccattcaactaaagtaatggaattcaaacagagaatcttaaaaaagaggaaaaaaaagagaaaaaaaagaaataaaaatatcaatattggtaaaaaaaaaaaaaaaatttgtaatctgagaaaaaaaaaaaaaaaaaaaaaaaaaaaaaaaaaaaaaaaaaaaaaaaaaaaaaaaaaaaaannnnnnnaaaagnnnnnnnnnnnnnnnanaaggaanngggggggggccccccccccgaggaacatatataagggcctttttttttttttgggggggaattttttattttt

SEQ ID NO: 95721 - DNA, 543 bp, Homo sapiens
aaactccagttttagttaaactgtttcacctcatttttatgctgagttttgtaaagtaggtattcttgctgaacagagtcctgaaaatcaaactatacaagtagtaggaagtccattaagctgtttaaaggaaaaagtgttataaatggcagttaaatgaacccaggaaagacccatcctcctttgtggctttctctgaggccccatgaggccaagcagaagcaaactggctctaggtgcagccagactttgaaaaggaatcccggccaggcttgtgcggctcatgcctgtaatcccagcactttgggaggtcaaggcaggcagatgacctgaggtcaggagttcaagaccagcctggccaacatggcgaaacactgtttctactaaaaatatgaaaattagctgggtgtgctggtaggcgcctgtaatcacagctacttgggaggctgaggcgggagaatcgctcaaacctgggaggcagaggttgcagtgggctgagatctcgccactgtactccagcctgggcgacagaccaaggctctg

SEQ ID NO: 95722 - DNA, 440 bp, Homo sapiens
cccacgcgtccgcccacgcgtccgccgaaatctcagctatctgtgaggctgaggtgggaggattgcttgagcccacgagtttgaggctgaagtgtgcctgtgaatagctactgcactccagtgcctaggacacatagggagacctcacttttttatggctgcatagtattccatggtaaagaaatgtaccacattttctttatccacttcactgttgatgggcatttatccacttcactgttggtgggaatttaggttgaatccatgtctttgctattgaagtcacactttttaatcaagttatttaactttcctgtgttcatttgtgttatataccagaacatttttatttctatggttttaatgccacctaatatgattatcaatgtgtcattctccataaatcattgtgctatacatgttaaacgattaggtattag

SEQ ID NO: 95723 - DNA, 94 bp, Homo sapiens
tgcagtcccagctactcgggaggctgaggcaggagaatagtgtgaacccaggagacggagtttgcagtgagccaagatcgcgtcgacgcggccg

SEQ ID NO: 95724 - DNA, 381 bp, Homo sapiens
  misc_feature (1)...(381): n = a,t,c or g
cacacatacacatcatacacatctcacacacacacacacacacacacacacacatntntgtcagatgttttatgctgttgcttatagtattctggtgaatgattttgttaatttattagagtttaggactaagcatagtggggtatctaaccccagtttgggtcttacctattgtctcttcagggtattaaagcaactttcgtaccatattttatttcagctggagtttttttacaacttagacagagtttagctttattgagggtagatcttaaacactctttatgccaagttctgttagcttgggttaatcgtatgacggtggtggctggcacaaaattaaccaatgctaaatattagtatagcttagttaaactttcg

SEQ ID NO: 95725 - DNA, 337 bp, Homo sapiens
tagaaaaggaacaacaaagcctggatgacagtacatctgtttacagcatggtttcctgagtattttaggcccactgttgagacctactgctcagaaaaaaagattcctttcaaaatattatactcgttgacaatgcacctggtcaaccaagagttctggtggagatgcacaaggagatgaatgttgttttcaggcctgctaacacagcatccattctgcagcccatgaatcaaggagggatttcaacttttaactcttattatttaagaaatacatttcataaggctatagttgccatagatagcaattcctctgatggatttgggcaaaataaatt

SEQ ID NO: 95726 - DNA, 356 bp, Homo sapiens
ccctgtctcctcttcccaggtgagagcatctgtttatttaaaaaaaaaaaaaaaaaaaggccccccccccgaggggattacaaatacggcgggggaaaaaccccctcaaagtttccgggggaaaggggcctcctttcccactgataagcccgaaaaaggagccggttatttacatttttaaaaaattttgggccctgcacaatcggaaaaaaaaaacccccccatcccccagcaaaaaatgggggtccactccagcacccccgacccagggggggggacggggcaaaaaaaaggggaaaaacaaccaaagacctttgagcgggttgggggggaaccggagccctaagcctccattt

SEQ ID NO: 95727 - DNA, 358 bp, Homo sapiens
  misc_feature (1)...(358): n = a,t,c or g
tataatttaggaataccaggacgatttcaggttctaatattaaagtatagatcaaagaccatttgcatatatttcttttttagggatttatcctctgattgttccaactctggctctttgaaacacagacctgaattattttgtataaaggtgatagcagccaggttcggtggctcacacatgtaatcctgacactttgggaggccacggcaggaggattgcttgtgtccaggagttcaaggccattctgggcaacatagtgagacaccacctctaccaaaaaaaaaaaaaaaaatacccacctgtagccctacctactggggaggctgaggggggaggatcactggaccccaagaan

SEQ ID NO: 95728 - DNA, 508 bp, Homo sapiens
  misc_feature (1)...(508): n = a,t,c or g
gaattgancccgtttagaggcctgtagtaccgggccgacccacgcgtccgataaagaatattatcaggttaccttcctgcagagctctaaaagaattgcatatttcaagctgactttcaggatgtaaatataaccaaagcaactgatatgtaaaaaatatattcaatggcattcctagattttcttctagggtgttttattgttttgggttttacatttgagtctttaatccatcttgagttaatttttgtataggcataagaaagggggacaataaaaatgatggggggatggcctcttgcacgtaatatacctgaattgttttttggcatgacgatcccctgttcactgtactgacaaagcatctgacctgcaatagtcagcactattgtgagagaggtctcctctacctagtggctggaggcgggaccttagcgcagcaatactgctctgaaaagcactgagaatgttatgtgtatgcatatccaaaagcacagcacttaatctg

SEQ ID NO: 95729 - DNA, 411 bp, Homo sapiens
caaaatatctttattttgaattatttatattcttaagaaataagcaaatatattaagttagggagatgttaaaattatttgcttaacaatctttttttttttttttttttggaaagggggcttacttttgcccccagggcgggggggtgggggggaaatttaacttcatggaaccttggccccccagggcccaacaaaccccccccttttccccccaaaaggccttgggactccaaagcccacccttaaggaggggttatttggtttttttaaaaccacagggtttccccctggtgcccaaaaggggcccgaactaccgggcctaaggggaccccccggcttggcccccccaaggggtgggaataaggggggaaaccccccccccgggcccttaaaaacatttaatggaac

SEQ ID NO: 95730 - DNA, 422 bp, Homo sapiens
  misc_feature (1)...(422): n = a,t,c or g
ttgttttcatttttcttgagacagggtctgtactctgtcacctaggctggagtgtcatggcgtgatcacagctcactgcagccttgcctgacctccagggctcgagccgtcctcccatctcagcttcctgagtagccgggactacgggcccatgccaccacccccaaaaaaaaaaaaaaaaaaaaaaaaaaaaaaaaaaaaaaaaaaaaaaaaaaaaaaaaaaaaaaaaaaaaaaaaaaaaaaaaaaaaaaaaaaaaaaaaaaaanagggggggggggccttttaaaaaaccccggggggggcccccaacctcggggggggaaaaaaattttttttttttttttgggggggggcaaaaaaaaaccccccgggtgttttttgaaaaaaaccccttttttgggggggagaaaaaaaaacaaacc

SEQ ID NO: 95731 - DNA, 480 bp, Homo sapiens
  misc_feature (1)...(480): n = a,t,c or g
agatgtcccggnnnagnncccccctagggngcaatgcagggnctgtagnacggccgaccacgcgtccngagtatggngcccagccaggatacatttttaaaatgtatcctgcctcctgacacattacaggcgtgagccacagcgcgcagcccatctttttcattttaataggagtatggtgatatctcattgtgtttttttgtgcattcccgtaaacactaatgatattgagcttcatttttatgtgctttgtttgccacctggatggctcctctggtgaaatgtttagatttttttacccatttaaagaaaattgggttgtttgtcttcttatgattgagttgtaaggtttccttatatattctacagataagtcctttattggatatgctttgcaaaattgttctccaattctgtggcttgtacatgacaggagatggaagcaagtaagctaattattgcaattcagttgaataagtg

SEQ ID NO: 95732 - DNA, 167 bp, Homo sapiens
  misc_feature (1)...(167): n = a,t,c or g
cccacgcgtccgcccacgcgtccgggtgtttatggtattctctgatggangtctgtatttctgtgggatcagcggtgatatcccctttatcatttttattgggtgtgcctgattctttcctcttttcttttttgttagtctggctagcagtctattttgttaatctt

SEQ ID NO: 95733 - DNA, 413 bp, Homo sapiens
ctggaaaaggaaagccgacctccccctcctcctccacctcctcctcctcctcctccttctcctcctctcacccaggatcacttccgaaaccacttggccttcagcccctgcctcggccagaggtttcatttttaactgaatatttaccaaagctgaaagcgtgcgaggggggtggggtggaaatagcggctgcttcttttccaaggatttatttaatggggatgtgttcaaggcaagaccgaattcagaaggatatcgacgtcgtgatccaaaagtccagagctgaggactgcctgtttgcaggagtgaaggcaattttgaaggcatgactacgacctgctctggccacaagagctaagaagtggcagggggtggtggttcaaacactttgagatgccaatcccaacactttg

SEQ ID NO: 95734 - DNA, 440 bp, Homo sapiens
aagacttttctccggagcctctggcaactcgtggagtctatataagctctggattgattgatgaccaccggcggccaatggctctgacaccacgccatcctcggtcgggcatcacagccccacgtccccgacctcagcctcccgggcgcgttggcatccccgaacccacagcgctgagcccgagcccggggccgccgcctcctccctgctctacgcctgggcgctgccaggttccttccctggaacggcggagaaaggaagggagggagccaccgagcgttggaagggggtgtggaggccacgggatctccccctcttctgacatcttttttcacttaaacttttgtttggcccacccccccgacctgtttgtgtttgtttgcagcatctcaaatcaattatacatttttcatgaaaaaaaaaaaaaaaagggcgggcgg

SEQ ID NO: 95735 - DNA, 422 bp, Homo sapiens
cggacgcgtgggctagttctagatcgcgagcggccggccttttttttttttttggggggccccggggggggaagaaggaaaaaaaaattttttttggggccccagggggggaaaaaaaaaaatcaggggggccccaaccccaaggggtaaaggaaaccccccaccaaaaccttgggggaaaaaggggggagccccccccaaaaatttggggttgtttggaaaaaagggggcccaaagggggccccccgggtggtttaaaaccccggggaaaaaaaaatcaccaccacctggccccaaaaagggaaaaaaaaacaggggaaggccggtggccccccccccaaattttttttaaaccctttttttccacgggggaaaaaaaccccttggggaaaaaaaccccaaattggaggctcctaccctgg

SEQ ID NO: 95736 - DNA, 373 bp, Homo sapiens
tctcgattaacattctcgctttttaaaaacctttgctaatgcatttattgttccatctttctcagagtgtgctttttgttttttgtttttttttttttttttttttttgtttttttttttttttttttccggggggggtttgtttttaaaaaaggcaccacaaaaataaccgccctttttttccccggggggggggggggggggcccccccccgggggggggaaaaagtttttttttttggggggaaaccccggcttttttttcttaaaaggggggggggggggtgttgccctttttggggggggggaaaggggccccctggggggggggggggggcccctgggggttaaaaaaaaaggtgtgtttttttttt

SEQ ID NO: 95737 - DNA, 364 bp, Homo sapiens
  misc_feature (1)...(364): n = a,t,c or g
ttgcggaaaacattggaaagcttatgggctttggaatcagataaatctggggtagactacagtcttaactatatcaatactgactttggaatgaatttgagaggattatataatctctgtgagcctaatttcctcatccaaaagaagcgcaaaattaggataaaacgatggctctcaaaattgatgagaaaatttaatataatgatctgacatacctagaaaatgttcatttccttctttaattgttgntggtttgagacaaagtctcactctgtcccccaggctggagaacagtggcacagtttcggcccactgcaacctctgcctccagggttcaagtgaattctcctgcctcagcctcccn

SEQ ID NO: 95738 - DNA, 362 bp, Homo sapiens
  misc_feature (1)...(362): n = a,t,c or g
ttttttttttttggtagagacggggtttcaccaggttggccagggtggtctcgaacacctgacctcagatgatccacccaccttcggcctcccagtgtgggtgggattacagggnatgaagccaccgcgccttggcctcagaggctatactcttataattttgttctgaggggagacagggaaagggttagacaacttgaaacattgaccctgtataaaaatgcaaaattctcaatgtgtatttataaatttctattttttataactttatgggacttcttagaggccaaaagtagtaaacatgcagattaaaaatgtttatgaaaatctcaataaaaattcataataaaaactttgtaaat

SEQ ID NO: 95739 - DNA, 419 bp, Homo sapiens
  misc_feature (1)...(419): n = a,t,c or g
agaattgcttgaacccaggagatggaggttgcagtgagccgagattgcgccactgcactccaacctgggagacagagtgagactccatctcaaaaaaaaaaaaaaaaaagggtggggcgggggggttcccccctgaaaccccaccttttgggggggccggggggggggaatcacctggggaagggatttcaaaaccccccggcccaactggggaaacccccgtttttataaaaaaaacaaatatcttccgggctggggggggaccccttataaccccggtttttgggggggttgaaaaaggaaaattgtttgaccctggaattggggggttgaagggatcgccccattgcactcttgctggggaaacaagaaagaaactttttttttnnnnannacanggnaaaaaaacaaaagaaagt

SEQ ID NO: 95740 - DNA, 421 bp, Homo sapiens
cccacgcgtccgctagttctagatcgcgagcggccgccctttttttttttttttttttttttttttttttttttttttggggggaaggggggtttttttttaccccccggggggggggggggggcctaatttttttaaaaaaacccctttccccccggggaaaaaaaaattttttccccccccctccccaaagggggggtttttaacccccccccccccccccccctttttttttttttttttaaaaaaaaagggggttataaatggggggggggggggtgttaaaatctctcccccggggggaacccccccttttctcccccaaaagggggggaaaaaaaggggggccccccccccccgcggaaaaaaaaaatttttttatttttttttccgggggcaataaaacagagacccccccccg

SEQ ID NO: 95741 - DNA, 378 bp, Homo sapiens
atgtgatctgggctcactgcattttccacctgctgggctacacagacagaccctgtctcaaaaaaaaaaaaaaagggttccccgggggggaaaaaatggggctgaaaaatttttttccccccttgggaaaaaaaccccccccgccccaaatcccaaatttttggagcgtaattgaaaaacccccccgggggttttatttggggggggcggcgccccccaaaaaattttttttattaaaaccttgggccgcctttttttaaggaacccccccccccaaaaaaaaaaggcggggccagcccccctctaaaaaaaaaattttttaaagggaaaaaaagcccgcccttttttttttcggacccaacttcttaaaaaaaaaac

SEQ ID NO: 95742 - DNA, 422 bp, Homo sapiens
  misc_feature (1)...(422): n = a,t,c or g
agagagagtaaaaaatttaacacccatagtaggcctaaaagcagccaccaattaagaaagcgttcaagctcaacacccactacctaaaaaatcccaaacatataactgaactcctcacacccaattggaccaatctatcaccctatagaagaactaatgttagtataagtaacatgaaaacattctcctccgcataagcgggagaacaaaaaaaaaaaaaaaaaaaaaaaaaaaaaaaaaaaaaaaaaaaaaangggggggggccttttaaaaaaatccttgggggggccaaaattaacgggggggggaaaaaaaaaatttttttttttttggggggggaaaaaaaaacccccggggggtttttgggaaaaaacccctttttggggggggggaaaatgggggccccccccccccaaaaaaag

SEQ ID NO: 95743 - DNA, 435 bp, Homo sapiens
cggacgcgtgggtgctgaatgttgcattaattgtgctgtttgcttgtagttgaataaaaatagaaacctgaaaaaaaaaaaaaaaaaaaaaaaaaaaaaaaaaaaaaaaaaaaaaaaaaaaaaaaaaaaaaaaaaaaaaaaaaaaataaaaaaaaaaaaaaaaaaaaaaaaaaaaaaggcaagaaaaaaaatttatattattaagggtcttattataaaaggccgtgcttatttttttagaaacttttttttttttggggtttttttttttgttcatttctttttataaaaaaaaatttttttttgggaaaaaatattaagtttaaaaacttatttttttttattatccgacacaatccttctctacaaatgattgttggttttgtgtttttaaataaaaaaaaaaaaaattcccgggcaatataaagagacccg

SEQ ID NO: 95744 - DNA, 433 bp, Homo sapiens
cccacgcgtccgactcatcacccttaccacgctactcctacctatctccccttttatactaataatgtgaaaaaaaaaaaaaaaaaaaaaaaaaaaaaaaaaaaaaaaaaaaaaaaaaaaaaaaaaaaaaaaaaaaaaaaaaaaaaaaaaagagggaaaaaaaaaaaagaaaaaaaaggggaaaaaaaaaaaaaaggaagggaaagagggagaagtatgcggggggggggggggggtgataaaaggcatggggggggtggggggtgaaaaaacaacctgtggggggggggtgggtgtgggggagatttataaaaataaaagaaggtgggggggggagaaaaaaatttcatgggggggggggggggaaaaggggaaaacggtagggggggaggagagaagggagtaagggaggaaaaataaaaagaactctccg

SEQ ID NO: 95745 - DNA, 607 bp, Homo sapiens
aagcgcgctggtgttaacagcctgcgggtttgcacagaagcgcatcatcgcgcaggtcctcaccatagctctggtggccacctctgtcccgccatgctgcttaccgacagtggccagggcccacagcaccaagaggcttgggccacaaagtaaagggtcccggagcctctccggccgccatgtggagctgcagctggttcaacggcacagggctgggggaggagctgcctgcctgccaggacctgcagctggagctgtaactgttgtacctgctggacctggaggggggcgtgccaccgggcctgtgctacaacgccctgctggggctggccaacctacacagcaaggccagcatgaccatgccggacgtgtactttggcaacatggaattggcaggcctggagctcaccgccctggcccctgtgcacctgctcggccccccgagctcccggtggtcgctgcggagtgtgggcggctaagaccacgacgcactgcagatccccttcaatgagtactcactggaggacatgtactccaccgccctggtgagccccgaccactacctcaagctggctactgtcgcggtacctacatgggacaggggaaa

SEQ ID NO: 95746 - DNA, 450 bp, Homo sapiens
  misc_feature (1)...(450): n = a,t,c or g
ctagttctagatcgcgagcgggctccccttttgtataatttaataaagaaatggtcgcgcttctgtttttaaaaaaaaaaaaaaaaaaaaaaaaaaaaaaaaaaaaaaaaaaaggggggggggttgggggggnngggggggggggngggnaaggggggggggggggggggggagaaaggccttctttgggggggggggaaaagaaacttttttggggggggggtaaaaggactttatttttgggggggggggtggggggggcccccccccccccaaaaaaaaagggggggggagggggaaaaaagattttaattttttttgggggaaaaaacccggccctcccacgggggggggggggggttttttttgggggggtttaataaaaaaaaccccacccccccccccgggggcnncnnnnnncnnnnnnnnnnnccccccnnnngactctca

SEQ ID NO: 95747 - DNA, 458 bp, Homo sapiens
atcacgaggtcaggagatcgaggccgtcctggctaatatggtgaaaccccgtctctactaaaaaaaaaaaaaaaaaaaaaaaaaaaaaaaattgtttgggcggggggggggccccctttggccccactttttcccaaggttgaggcaaaaaaagggggtaaacccgggggggggattttgcagggacccaaaaaaacccccttggcttccacccgggggaaaaaaagaaaattttttttaaaaaaaaaaaaaaggggggggccttttaaaaaaatctttggggggcccaaatttaacgggggggggaaaaaaaaattttttttttttaaggggggccaaaaaaaaaccccttggggatttttggaaaaaaaccttttttttgggggggggaattttgggcccaacccccccaaaaaatttaagcgtttaagggaaaaaaaaaatttttaggggaaagg

SEQ ID NO: 95748 - DNA, 433 bp, Homo sapiens
cgggcttaaaaaacagcgcaccaggagattatatcccgctcgtggctcggagggtcctacgcccacggagtctcgctgattgctagcacagcagtctgagatcaaactgcaaggctgcagcgaggctggggaggggcgcccgccattgcccaggcttgcttaggtaaacaaagcagccgggaagcttgaactgggtggagcccaccacagctcaaggaggcctgcctgcctctgtaggctccacttctggggacagggcacagacaaacaaaaagacagcagtaacctctgcagacttaaatgtccctgtctgacagctttgaagagagcagtggttctcctagcacacagctggagatctgagaacgggcagactgcctcctcaagtgggtccctgacccctgagcagcctaactgggaggcactccccaga

SEQ ID NO: 95749 - DNA, 466 bp, Homo sapiens
  misc_feature (1)...(466): n = a,t,c or g
gtggatttagcagtaaactgagagtagagtgcttagttgaacagggccctgaagcgcgtacacaccgcccgtcaccctcctcaagtatacttcaaaggacatttacctaaaaaaaaaaaaaaaaaaaaaaaaaaaaaaaaaaaaaaaaaaaaaaaaaaaaaaaaaaaaaaaaaaaaaaaaaaaaaaaaaaaaaaaaaaaaaaagaaaacaaccaaaaaaaaaaaccagaaaaaaaaaaaaaaaaaaanaaaccacnnnnnnnnnncaacccccccctttaaaaagaaaatttggggggccccccctctctgaaaaagaaaaaaaaaaatttttttggttggattccggnnnaaaaaaaacaaaaaaaattttttttatgaagggcctctttttgggggggagaggggggggggaaccaaaaaaaaaaaaaaaaaaaaccccccaaaaaannnnaaataaggnggna

SEQ ID NO: 95750 - DNA, 384 bp, Homo sapiens
gcagaggttgcagtgagccaagattgcgacactgcactccagcctgggtgacagaaggagactgtgtctcaaaaaaaaaaaaaaaagttcctgaccctggggggaaaaacctttaaaaatttttttttttttaaccgggccccagggactttcccctgaaaccccacctttttggggggccccggggggaaaaccccggggggccgggattttaaaaccaccgggcccacctggggaaacccccttttttcctaaaattcccaaaaaaaaaaaaaaaaaaatttaaaaaaaaccccgggggggggcggggccttggccccctttttcccccctttcccgggggggggaaaaaaaaaaattttttgccccccggggggaaggggg

SEQ ID NO: 95751 - DNA, 411 bp, Homo sapiens
aaaaatccaccccttacgagtgcggcttcgaccctatatcccccgcccgcgtccctttctccatagggttcggagaaaaaaaaaaaaaagagaaaaaaaaaaaaaaaaaaaaaaaaaaaaaaaaaaaaaaaaaaaaaaaaaaggggggggggggggggggggggttttttggggggggcccgggggcccccctgggcccggaaaaaatttttttttttttttggggggggaaaaaaaaccccttttgggtttttggggggggggtcctcttttgggggggggggggggggggggcccccccccccccccaataaaaggggggtgggggggggtggggatttttttttttttttggggggaaaaaccgcgccccctgccggggggggggggggggggggggaatgaaaaaat

SEQ ID NO: 95752 - DNA, 371 bp, Homo sapiens
ataacaaagcagctgtgtacagtggcttgtgcctgtagtcccaactattcaggaagctgaggctggaggattccttgagcccaggagtgaaagactgcagttagccactgcactccagcctgggcaagagtggctcctctctctcttaaaaaaaaaaaaaaaatttaaaatgcaaggccccggcaatttgctcttttttgtgaatggaaaaacaaatgtcttgaacctggaataaattggcccctatttgcgtgccaccaagaattgaaatcttttgaaaccaccatgcggctagcctgtggttatgtgcgaagcacaggatgttaaaatttataggtggccattaatttttacttttattgcagatggat

SEQ ID NO: 95753 - DNA, 438 bp, Homo sapiens
  misc_feature (1)...(438): n = a,t,c or g
gatgagaccatgaggaccgatgagaacctcggancgacccacgcgtccgtggtgacaggcacatgtagctactcaggaggctgagacaagaatcacttgaacccgggaggcaaaggttgcggtaagctgcgagcatgccactgtactccagcctgagctacagagcaagactctgcctctnaaaaaaaaaaaaaaaaaggaggggtttttgccctttgggggggcttaaaagttaaaaaaaaaacccccgtttatttttttttttttttccccagggttttaaagggaaaaaccaagggttaataatgccgggggggggggggggaaaaaataacccggaaaggaattttcccacccggaaaaaaaaaaaaaaagggcccaacaccccccccatttaaagggtggaaaagggggtttgcccaatgggctggtgggaaa

SEQ ID NO: 95754 - DNA, 624 bp, Homo sapiens
tgagacagggtttcactcttgttgcctgggctggagtgcaatggtatgatctcggctcactgcaacctccacctaccggattcaagcgattctcttgcctcagcctcccgagtagctggaattacaggcatgcaccaccatgcccagctaattttgtatttttagaagagacggggtttctccatgttggtcaggctggcctcgaactcccgacctcaggtgatctgcccgcctcagcctcccaaagtgctgggattacaggcatgagccactgcgccagcctaaagtgtgttcttaccacctatttttcttcccataggagttagccagtgaagggagaatgtctggttttctatgctgtcagaaatctcttttctaggtttgtaaaattgaacttttagtacttcgaattatttctctttaagataaaaatgcatacgatttttacactgatcttagatttttgacttatgaggccagtggtttaaacaatcattattgaataccaagcccaaaagtttagttaatacaccaattgtaagttctggtctgaattttgtcaacatatttagaatgtaaatggcattattaaaaatgtatctgatttctctgtgaaaaaaaaaa

SEQ ID NO: 95755 - DNA, 338 bp, Homo sapiens
  misc_feature (1)...(338): n = a,t,c or g
gaaacgtttaaaaataagtttaaacctgaaccagaaaagaaaattttatcagatgagtcccttatattctaagaattcagcacaggccaataataatctaccaccatattgaaataagactttccaaagtcttatttaaatgtgctttaagatattatctttatttctgttttcaacaaaggtattatattgcccttaagaagaatgccactaatgaanngnnnnnnnnnnnnnnnntgnggnncnnnnntnnnnnngnnggnnnngnnaggggggnggggggnnnnnnnnngggggggnnggnnnnggggggggggggggggngggtttttgggggg

SEQ ID NO: 95756 - DNA, 350 bp, Homo sapiens
tcagtatacctgaaatgtttcaaaagtaaaaagtcaaatgaaaaataaagtaaaatacatattttgcctggggaagaaaaacatttgtatcctcagagaaagaagatattaagtccacagaaaaagaacagaatcttataaaaatacaacctaagcaaggaagctcttagaaatgtaccatgtaggccaggtgcggtggtgcgatctcggctcattgcaacctccgctcttggattcaggtgattctcctgcctcagcctctggagtagctggaattgtagacgtgtaccactgtgcccagctatcattatataacatttttgacatcttattttactggttgcttctgc

SEQ ID NO: 95757 - DNA, 356 bp, Homo sapiens
  misc_feature (1)...(356): n = a,t,c or g
gatgaaagaagcttgtctcagagatccagatcatggtcctataatggatattattcagaccttagtacagcaagacactctggccaccataaaaaacgcanaaaaaaaaaaaaaaaaaaaaaaaaaaaaaaaaaaaaaaacgggggccctttaaaaaaaaggggcccttaaaaacccggaaaaaaccccgaggggggcttttaaaggcccaccctttttgggggggcccccccccggggttttttttgaccggggagggggccccccccccggttttttttaaaaaaaaaaaaaaaaagcccccccttggggggaaggggggttttctttgggggggnnnnncnnngcnggcggcg

SEQ ID NO: 95758 - DNA, 607 bp, Homo sapiens
ttttttttttttattttcttcaagacaaaatcatcggctctctgggttttaccattttcatctggtgtttctctcttgggggctttgatcagaggcacccctccagtcctctcgccgttttcctgcttgtccttgtgcttgagatcggttccgcaggagctgggatcaccatcggggccgcggtggtgatggtgcttgtgccgctccttgtggcccttatgcttgggcccggccgcgctcaccgtcagaggcgagaaggtgaagagggccgaggtgcttggggccgggagaggggcagcgacagcgggcccggcgggtgccagcgaaggtggcggcggaggcggcaggagaagaggctcaacagggcctgggacagttggggctgcattcgttggcggcagcggcccaggatgttggcggctgcgaccgccgccggtgagggggagcgagagggggctcctggctcggccgcccccgcttctcctgagaccccccactgctagatcggcgctgccgtttaactccccgcggggagaccccagcatgaggtttctccttcccctctttgtccggctcctcatgcgccgccaccgcccgtaatacgcgc

SEQ ID NO: 95759 - DNA, 363 bp, Homo sapiens
gagcaacgctgctgtctgattgcatcattttcccaagcccatctgcccagctcatttctctgcatgcatacactggccccaacacccacacacgtgtgcatgcacacaggcacacatgtgcaagcccaaacacatcacacacatgcatgcacacacattgtgtactctcaggtacgcacccctgggtgcacacaggtgtgtgcgcgcgcgcacacacacacacacacacacacacacacactgtctcaggtacacacgccaggtccatgcattgcttcacactgcccagccccagaggctgaaggcctcagagcccacacctgcccagctacaacctggcaggcaggaggggctcactggttt

SEQ ID NO: 95760 - DNA, 338 bp, Homo sapiens
  misc_feature (1)...(338): n = a,t,c or g
gttttgttttgttgcaaaagtggtacagaaaaaggaagtgtgaccacctgcacacgattgttcttttaccagtatgtgtatatatgtaatgtgtggaaatgcctgtgtgtgtgtgtgtgtgtgtgtgtgtgtgtgtgtatgctgatatacacagagataagtgtcacacacacataccttatgacctgggtaattgggtaagaaagtgcctgtgatgggccctttcaaactcatggctttatagatgctatttggggtgttctagcccacactactgcagactagattgggtgattcaaggctcacaagggaacctcaaggggggaaaggacaatacn

SEQ ID NO: 95761 - DNA, 363 bp, Homo sapiens
gaagaatcgcttgaacccaggaggtggaggttgcagcaagctgagatcgtgccactgcactctagcctgggcaacagagtgagacaccatctcaaaaaaaaaaggaaaaaaggaaaaggaaaggaaggaaaagaaaaagaaaaaagaaaattgtttatactaaaattgaaaaagggaatgctaaaatgacaggggagtcatttatacacttttgcaaaaaatcaagctctgtgcctcaagtagccttaagtgctgagtacagatgctcctcaacttagcgatggggctacatcaggataaaaccatcataagctgaaaatatatttaatacacctaacatactcaacaccatagcttagccta

SEQ ID NO: 95762 - DNA, 366 bp, Homo sapiens
  misc_feature (1)...(366): n = a,t,c or g
gttttaccatgttggtcaggctggtctcaaactcctgacctcaagtgatccacccgccttgggcctcccaaagtgctgggattacagacgtgaggcactgcgcccagccaaatgttaaaagtatttttgagcttctcagaggaaaccaatgaactgaagttcaataatctgtggtttgtgttacaatattttgaatccttccggagactgaatgaaagatacatatttaaagtgaatgcagtaagtatgaagaggcactgcttcaggcctagcacagncattactgtttaatgattaattgaaaacattgattaagcacagagtattcttaagcaaactggtcttcactttttagaatcttcttat

SEQ ID NO: 95763 - DNA, 390 bp, Homo sapiens
  misc_feature (1)...(390): n = a,t,c or g
tggtgaaaccccgtctctactaaaaatgcagtaaattggccgggcatggtggcgggcgcctgtagtcccagctacttgggaggctgaggcaggagagtcgcttgaacccaggagttgtagaccagcctgggcaagatagcgagatcctgcctctgaaaaaatcataataatactttaatttagaaaataccctgaattagaagggcttcattcctcatttgtgtacagctgttcctctatatacgaaggggattggtaccagaaccactgcataccaaattccacccatactcaagtctcacagtcttccctgcagaatccaggtatacaaaaagtaggcctatcatttatatgggttttgcatcctgacagtactgtattttcaatccn

SEQ ID NO: 95764 - DNA, 395 bp, Homo sapiens
aggacgcgtgggctaattctagatcgcgagcggccgccctttaattttttttttttttttttttttttttttttttttgttttgcagagggggggggcccccctttaaccccaggggaaaagaaagggggggttttttaataaaagggcccccccccccggggggaaaaaaaaatttttgggcccccccccccgggggaggggaaataaaaagaacgcccccaccccccggggttttttttttttttttaaaaaaaaaggggttttcctttgggggggggggggggaaaaaaccccaccaccaggggaacccccccccccccccccccaaaaggggggaaaaaaaaagaaaaaaactcggggcccccttttttaaaaaaaatttttaaaaagggg

SEQ ID NO: 95765 - DNA, 158 bp, Homo sapiens
ttttttttttttgaaacagtctctctctgtcacccaggctggcgtgcaatggcgcagttgactcactacagcctctgcctcccaggttcaagcgattctcatgccttagcctcccaagtagctgggattacaggtgtgtgccgcaatgcccagctaat

SEQ ID NO: 95766 - DNA, 340 bp, Homo sapiens
  misc_feature (1)...(340): n = a,t,c or g
gctttttaattgttgtttctttctagagggctttgtaagaaacaacaacctcatcctagcaataatccccatcctccatatatccaaacaacaaagcataatatttcgcgcggtgngnggtgtgtgttcttgtggaggatcatgagaggctcgccactcaaagggaagagcggatggtggtgcactccaagtttgtcataagctctcagagcccctaggactcgaagggaaagaagggttctatttttggataggcacactccgaggcaggaacagtggttttggctttaacagtcatctgagacatctcactgggggaggccaaaaaatggaagcgagg

SEQ ID NO: 95767 - DNA, 257 bp, Homo sapiens
attatctcaaaaaagatctaaatgtaaaccaaaaaactctaacacttttagaagaaaacagggaaaaatcttcatgacatgcggttatgcaaagaattcttaaacaagacatcaaaagcacaatacattttaaaaaagataagccagtattcatcaaagttcaaaattttaatgctgtgaaagatcctgttaagaggatgaaaaggcaagcctcagactggagaatatattcacatatttgacaaaatatataagga

SEQ ID NO: 95768 - DNA, 94 bp, Homo sapiens; identical to SEQ ID NO: 95723

SEQ ID NO: 95769 - DNA, 308 bp, Homo sapiens
gcccgaggagagagagagagagagagagagagagagagagagagagagagagagagagagagagagagagagagtttttgtggagagcgcgccgctctctctagagagcggggggataagtgtgagagatctgggctcttttgagagggggtgcacacatatacacgcgcgctctataaaaagagagagcgtccccacccattttgtgggcgtccccatatatatagtgactccctgtgtgagccagacacaagaagaactcagagagaatatagagaatttctctgccccaaaaaaatctctgaagg

SEQ ID NO: 95770 - DNA, 304 bp, Homo sapiens
gcacgaggacagggacatttaagtctgcagaggttactgctgtctttttgtttgtctgtgccctggccccacaggtggagcctacagaggcaggcaggcctccttgagctgtggtgggctccacccagttcgagcttcctggctgctttgtttacctaatcaagcctgggcaattgcaggcgcccctcccgcagcgttgctgccaccttgcagtttgatctcagactgctgtgctagcaatcagcgagactccgtgggcgtaggaccctccaagccatgtgtgggatataatctcctggtgtgg

SEQ ID NO: 95771 - DNA, 163 bp, Homo sapiens
ggtttcagaggcggagcacagagagctgcggctgggacaaggacgcaaggtcacagtcaagatcccccccaaggcagcaagcacatggtcatcattctacacacacacgcacacacatgcacacacgcacacacacgcacacacacacgcgtggacgcggccg

SEQ ID NO: 95772 - DNA, 351 bp, Homo sapiens
gcaattttaaactattttgcaaaggatttttttttttgagacagagtcttgctctgtctcccaggctggagtacagaggcacaatcttggctcactgcagcctctacccgctgggttccagctgttcttgcaacctccgcctcccgggtccaaggacacccaccccggagtgcaacggcatgatcataactcactgcagccctgaactcccgggctcaagcgggcccctgcctcagccttctacttgcacaccaccatgcccggcttattatgtttaaaaaaaccccctatattattcacctatgggatgtgtggggtgagaccacctaccccttttaagggggccaatcc

SEQ ID NO: 95773 - DNA, 317 bp, Homo sapiens
  misc_feature (1)...(317): n = a,t,c or g
taaagtttgagaaccactgctttgtggctttgaaatgttcatttgaatttttctatgattactaagatttttgcccttaaggctctgtatataaacaacatactgtataaaataaactgggaatggcgtgaaaacacaaaaaaaaaaaaaaaaaaaaaaaaaaaaaaaaaaaaaaaaaaaaacaaacaaaaaaaccaaaaaaaatgagtcgtagattctgaaaaaccattcttgtgtgatttatttgtgcgtcgggcccccacctcttntgctttgtgcagacaacccaaagcttcttttttgtatctatactcccc

SEQ ID NO: 95774 - DNA, 376 bp, Homo sapiens
ggcacgagatggagaaaccctgtctctactaaaaatacaaaactatctgggcgtggcggcacatgcctgtaactccatctgctcaggaagttgatgcataaaaatcgcttgaacctaggaaggtgttggatcctgggattttagaactggcgagtttaattggccccggactacttgaacaatacttagtcctttgctaggttggcaggccaataacactattttttgtttcctaaggtatattttacgctgaaattcccattgtgggatagccaagaaaagtgactacactgtttgttctctagaaatgctaactgacttagattattgaataatcataaatcttttttctttatgagatggggtcttgctggat

SEQ ID NO: 95775 - DNA, 361 bp, Homo sapiens
ttctgacagggataaatacagtaagctctgcaaatgacatcgtagctgcatataaataaacccagtgacaattaaaggaacatgaaattcagaacacactattaagcagggccctgtagctctactcgtgtgtgtgtgtgcgtgtgtgtgtgtgtgtgtgtgtgtgtacacaaatggatattgctatatccatctatatataacaagtatatatcaaacatgtgctgagggtgacaggatatgctcacttaaattgttgaaaaccataatttggtgcattaaagttaagattgttatgttgaatagctatttttaaaatagtgctgtaaaaaaaaaaaaaaaggggcggccgttttaaagg

SEQ ID NO: 95776 - DNA, 459 bp, Homo sapiens
  misc_feature (1)...(459): n = a,t,c or g
tggattgcagcttccccttacggagaacanngacgtagcgnaccancannacgnnnagnntgggaggaggtttcttaatcatcattacctctcatagatatcatcatgttttatgtgtttcccactactgtcattagccttaaggaagctcatgttgtccggccatgtctttaattagtggaagtctcttcaagttggccctagagtcctttggaaggacccctgatagaattagtgtttaatagcttccttgctgtctggcttgaaaacatgttccaggctcttcttatacttggctttttttttttttagggggaattttttgaaaaaaggggctaattttgttccccagggtgttttaaagggggggaatctcagttctctgtaccccccccctccaaggttaaagcaatattcctgtctaaccctccttagaattgggaattacaggcatgcgcc

SEQ ID NO: 95777 - DNA, 218 bp, Homo sapiens
ctgcacttattattttttgatagtagccattctaatgggtgtgagatggcatctcattgtggctttatttccctaaagactactaacgctgagcattctttcgtgcgcttgttggccatttgtatattttctttggagaaatgactgttcaagtctttcataacagatctttatagaggctaatattaaccccttatcatatatatgatgcgcacata

SEQ ID NO: 95778 - DNA, 505 bp, Homo sapiens
cgatgtcaccatttctacctgccacgcatcggcgaaggttgggactcgactggtgtttgatcactatgggaaaatcatccagaaaaccccctacccccaccccagagggatgacagtcagcgtgaagcagttattttctacactacctgtgcgccataaggaatttcaaaggaatattaagaagggattagggatggaggtcatgcttctgcttcgacttcatgctgagcagggcactgagtcccctaaagtgaaaggaatgaaactcttgggcttctgagttcagatgagttctggggtcacccagagtagcttgaaaggctggtattgttgtaatacaagctgaaggtggaagtgttggagcctggaggacaaacagctcaccatccatttaaataaataggaccaaaaagtaacagaacagtggccacgaggggccccaacagaggaagaaaccaggtgaggtgtggtatagtggactcgactgccttctaaatctcagttg

SEQ ID NO: 95779 - DNA, 566 bp, Homo sapiens
ctcggtcgtccctattcccagaagcctgagcaactacggacgcaagccgaggaccgtgctgccgccgtccacgaaaagacccgcgccatcggcctccagtttgcgtcgagaattcctggaagggccctgatatgactgtggttggactgacctgactgccagatggtgggacttggtctggagcagggactacttggaatgataaaggcaaaactcaacagcccctggagctgcgcttgtggtggagctggaccctgaaattacctggaccttttttttagagacagggtttccttctgcagtctcaatctcccagcactttgggaggccgtggtgggcggatcacgaggtcaggaaatcgagaccatcctggctaacgtggtgaaatcttgtctctactggaaacacaaaaaattaacccaggtatggtggcatgcacctgtagtcccagctactcgggaggctgaggcaggagaatcgcttgaaccagggaggtggaggttgcagtgagctgagattgcgccactacactccagcctgggtgacagagactctgtctcaaaaaa

SEQ ID NO: 95780 - DNA, 383 bp, Homo sapiens
  misc_feature (1)...(383): n = a,t,c or g
cacggatgttcttatggagatgaagcctccatgttgcatgcttccaagagaatatataatctactttcttgcaggggcacgcacctgtaatcccagttacagggaggctgaggcatgaaaatcgcttgcacccgcgaggcgtaggttgcactgagccaaaattgggccactccactccatcgtgggcaacagagagagaccctgtctcttattacaaaaaaaaaaagaagggggggggtgttttaaatatacccctgggggttccgacatttaccggaatctgaaaattatttttttttcccttttttgggagccattataagcggactggggtaattttgaaaaaaaacccttttttgggggaggaaaagatgtgaaaaaan

SEQ ID NO: 95781 - DNA, 366 bp, Homo sapiens
  misc_feature (1)...(366): n = a,t,c or g
cccacgcgtccggcaatctaaagtaatttccatatcctagatggaaaccctcatgctaaactgtctgattatgcatggttctaaatggtttcagtggcaaatacataacattgtactactgattaaactgaacttaaaagcatcaataccaccattgctgcncttaaaaaaaaaaaaaaaaaaaaaaaaaaaaaaaaaaaaaaaaaaaaaaaaaaaaaaaaaaaaaaaaataaaaaataaaaaacatggggggccctttaaaaaaaacttttgggggggcaaccaagaaactgggcggggggcgttttttcttttttttttattcgagaggtttttcatccaaagttttaatttttaaatagaaaa

SEQ ID NO: 95782 - DNA, 385 bp, Homo sapiens
cttacacttaggagatttcaacttaacttgaccgctctgaccaaaaaaaaaaaaaaaaaaaaaaaaaaaaaaaaaaaaaaaaaaaaaaaaaaaaaaaaaaaggggggggccccttttaaaaaattccctggggggcccccaattaccccggggggggaaattattttttttttttttttgggggggactttaaaacccccctggggtttttttggaaaaccccctttttttgggggggggacttttggccccccccccccccaaaaaatttccccccttggggaaaaaaaaaattttttgggggggagggggggaaaacccccccccttcccccttggggggaaaatttttttctccgggttttaaaaaaaaaaatttccccccg

SEQ ID NO: 95783 - DNA, 415 bp, Homo sapiens
gtaataatcaacaccctcctagccttactactaataattattacatttggactaccacagccgagaaggaaaaaaaagaaaaagaaaggaaaaaaaaaaaaaaaaaaaaaaaaaaaaaaaaaaaaaaggaagaagagaaaaaaaaaaaaaaaaaaaaaaaaaaaaaaagggggggggggggggggaaaaggggggggggggggggggaattgtagggggggggggggggcatggccgtgttggggggggggggggggggaaagaagagagggggggaggggggggggaaaaataaaggggggggggggggtgcagggggaaaggacctaaaaaaaaaaacggggggggggggggaaaagaaggggcgaggggggggggggggggaaaacaccggggcggtcgtgggggggggggg

SEQ ID NO: 95784 - DNA, 369 bp, Homo sapiens
  misc_feature (1)...(369): n = a,t,c or g
agaaggcggaaacgccgcaattatatattaataaatgaagcgaccctcccccccccccccaacaccaccccccccccccccccccccccatccccttttgccccccttccccgaaaaaaaaacagggcccccggagggttttttaaagggggagaacgggggcccccccccccaaaaaaaaaaaaagacccccccccccaaaaacaaaaaaaaaaaaaaaaatgggggggggggggggggggggggggtnaaagaaaaaaaaaacacccccaaaaaaaccccccccccccccccgggcggggggggggaaaaaattttttgtgggggcggccgaggggcccccccccccaagggggggggggaaaaaaa

SEQ ID NO: 95785 - DNA, 342 bp, Homo sapiens
  misc_feature (1)...(342): n = a,t,c or g
cagtaagccaagatcatgccactgcactccagcctgggcaacacagggagactccatctcanaaaaaaaaaaaaaaaaaaaaaaagggacttcccctggggggcccgggagaaaaaactatttttttttccttaaaaccgggccaaaaagcccaacccaaaaataaaatcccttttaaaaaaaaaattccttttttttccacccccaagggaaaaaaaaaaaaaaatttccaggggggcccaaaaaaaaaaaaaaaggaaatttgaaaaaccccttttttaggggggggacccccagggccattaaaaaaaccaccctttttttttgaaaaggaaaaaaaaa

SEQ ID NO: 95786 - DNA, 278 bp, Homo sapiens
gcacgaggagagagagagagagagagagagagagagagagagagagagagagagagagagagagagagagagagagacggcaccccccccccgggagcgtgagatagggagtttctctcttgctgcccacgatagagtgcaggggcgcgatcttggctcaccgcaacctccgtcttgtgggtacaagcatttcttctgtctcacccccgcgggttaaagcatctcttgtgtctcactctcccgagtaggtgggaacacaggcgcgcgcccacacacgt

SEQ ID NO: 95787 - DNA, 286 bp, Homo sapiens
  misc_feature (1)...(286): n = a,t,c or g
gcacgaggagagagagagagagagagagagagagagagagagagagagagagagagagagagagagagagagagagagagagagagagagagagagagagagagggggggggccccccccccccggctctatagagagcgtgtcttaaaaaaacagagggggcgttttctccccccggtgagagagagaaaaaaggttcttcngttcaaaccctccctggatacgggatccctaaggggttttattcaatacctgggggaggggaacttttaaaaggacggggggg

SEQ ID NO: 95788 - DNA, 364 bp, Homo sapiens
ggcacgagagaaactggcagtatgggcacccttcttctttttttattggtttattttttggagaccaaatctcggtctgttgccctactggagtgcagtggcggaatcttagctcactgctccctgcgcctcctgaggcaggagaattgcttgaacgcatgatgcaagaggtggcaatgagccgagattgcgccactgcattctgggcgacagagcaagactctgtctcaaaaacaaaaaactgtgtatgagaagttagggcccgctttctattattaaatttttttcttttggggggttggagctggtgaggaaaacaaaaacaagggaggccatgccttgggactcaagcctggattgccac

SEQ ID NO: 95789 - DNA, 390 bp, Homo sapiens
ggcacgagggcatgatcttagctcactgcagcctcaacctcccaggctcaggcgatcttcccatgtagctaggactacatgtgtgcaccatcacgtccagctaattctgtttatttttgtagagactaagtctctcactatgctgttcaggccggtctgaactcctgagctcaagcgatcctctacctctcaaagttctaggattacaggcatgagtcaccacacctggcctgaactcactctcttttaacattgcctcttcttctaaaaacctactcctctccttgctctctgggtatttaaaaatgacatccagggaccaatagcctattgctctcattctctaatccaggcaattatcaagttttttttttttaattctgccatcta

SEQ ID NO: 95790 - DNA, 378 bp, Homo sapiens
ggcacgagtgccactgcactccagcctgggcaacagagtgagactctgtctcagaaaaaaaaaaaaaaaaaaaaaaaaaaaaaaattttccctggggaaaaaacttgggggggttggaacaaaaaaaaatttttgtttttaaaccggaagttttttttagggaagggcctttttcatttaaaaaggggacccttaaaacttttttgaaaattgggcccttgttttaaggcaaaaaaaaagggggaatttttttttcttttaccaaaaaagggggtttttctttttggagggaaaaaaatttaccccaaaatgggaaaaatgattttgaaaagtaaaactttttgtgggggggctacaaaaaaggttagttttaagggc

SEQ ID NO: 95791 - DNA, 379 bp, Homo sapiens
ggcacgagcggcacgagctggaagaattattaaagaactttgttttttttttttttttgggaatttaaaaaaaaaaaagggtttttttttggggcccgggggggtcaaaacccccgaccttgggaacccccccccttggccccccaaaggggggggattacggggtttacccccccccccgggcccaaggggggttatttttaaaaattttggaaaaagggggccccctcccccaccggggttaaaaagttggggcccaagggatttttttggcttggcccttcaaaggggtgggatttcggggctaaacaacggggcccccccctttttttttggggttttgaaaaaattgccccctttgttttttgtttccaagggg

SEQ ID NO: 95792 - DNA, 379 bp, Homo sapiens
ggcacgagcagtagtgggatcgcgcctgtgaatagccactgcactccagcctgggcaacatagcaagacactatctctaaaaaaaaaaaaaaaaaccccccccccccaaaaaaaaaaaccctgggccaaaaaaacaagaggggggccccttgagggggccccccactttttcgggggggggggggggaaaaaaaacttgcccccaaaagttaaaagcggcggggggctaaaaaaagcccctgggcccccacccggggcagaaaaaaaaaaccctgcccttgggggggaaaaaaaaaccttgggccctaacgggaggggcccaaaaaggctaagggggcttgcaaaaaagggaaaccccccttcctcctttggggggaaa

SEQ ID NO: 95793 - DNA, 397 bp, Homo sapiens
ggtcagagtctcccggtcagtcccaggctgcagctgtccaatggcaacagaaccctcactctactcagtgtcacaaggaatgacgtaggaccctatgaatgtgaaatacagaacccagcgagtgcaaacttcagtgacccagtcaccctgaatgtcctctgtgagtatcttctgttcctctgtggcccaggccaccagcccaaatccacgcagccagaggccaggcctctcagtccctctcagctccaaaaatgcagattccccacccacccctagaaacccagctcgtcatgactttctgccccaggcaaacatgggtaggcctagccttgaccaagaataagaggggaaggggtgctcctgtcatgggagacttggagttcacatcttctgatgc

SEQ ID NO: 95794 - DNA, 371 bp, Homo sapiens
  misc_feature (1)...(371): n = a,t,c or g
ggcacgagggcccacaaaacctaaaaatactgcctgccttttacagagaaagtttgccaaccccttgctagaagtatctttatttattcaacattagttaagcagcacctactatgtgccagccttttgttttgtttcaagactgtctcaaaaaaaaaaaacaaaaaactttgccacatttaattggttcccaaatactatattgttttaaaaatagggaaagggggctgggcgcagggcctttgcccgtaatttgggaggccaaggggggcggatcacctgggggcgggagcttgaaaccagcctgaccaacggggggaaaccccgtctttactaaaaatacaaaattagctgggcgggggggcgcgtcn

SEQ ID NO: 95795 - DNA, 363 bp, Homo sapiens
  misc_feature (1)...(363): n = a,t,c or g
ggcacgagataccctgcccctacatgtgaataatgacttgctgatagaaggagctttctctttttcttttctttttttttttttggaaagggggctttgccctttttccccggccaaaagggcaaagcccccttctcaaaaaaaaaaaaaaaaaaaaaaaaaaaaaggtttttttttttggggggggggggttttttttttttggggggggggatttttttgggggggggggggggggttttaaaacgggggggggggagaaaannnnnnnnnnnnnnnnnnnnnnnnnnnnnnnnnnnnnnnnnnnaagnnnnnnnnnnnnnnnnnnnnnnnnnncccncnnnnnnnnncccccgtgncccc

SEQ ID NO: 95796 - DNA, 356 bp, Homo sapiens
ggcacgagcacaccccactaataattctaggtctgttgctattcccaccacttgtgcagcgacttcttctgctgaagacgtgagctcctcaaaggcatccacgcagcttggaatcagactcttccaaactattaatgctgacattggagaccccctcccatgaatcatgcgtcttcttaatggcatataaaacggggaatcctttccggaaggatttcaatttactgtgcccagagccatccaaggaatcactatccatggcgactatattcctataccaagaaattcttacataataagacctggcctcccaaagcactgggattacacgcgcgagccataatgcctggccagcc

SEQ ID NO: 95797 - DNA, 478 bp, Homo sapiens
  misc_feature (1)...(478): n = a,t,c or g
ggcacgagcgcctgccttggcctcccaaagtgctgggattaaaggcatgagtcactgtgcctgatttgtaccgctttaaatgtaccatgaatcatgttaaaggcagtataatccaacaataagataattagtataagataaacattaattatgagtagtacaaatctcattgtattttttggcattatttattagaggcaaaaatttcaagtgcagcatttcttttttttaaattttttgaatccttcgagacatctgaaagcacagtttctataatgaggaaatgacgtctattttttagtatttttgttcgtttgtttgagaaggagtcttgctctgtcgcccaggctggagtacagtggcatgatctcagctcactgcaagctctgcctcccaggagaatggcgtgagcccaggagtttgaggccagcctgggcaacatanggagaacacatcntctanaaaaataaaaaagaaa

SEQ ID NO: 95798 - DNA, 393 bp, Homo sapiens
  misc_feature (1)...(393): n = a,t,c or g
ggcacgagcggcacgaggttacaatcaacacagtttggacaatgagaaataagtttattcctgtagcataaaaatccatgctttgggatttgacaaacttttgggaaacattttctgcatcctcctggttgtggaagtgttttccctgcaaaaaagttgtcaagatgcttgaagaagtagtagtcagttggcgagaggtcaagtgaatatggcagatgaggcaaaactctgtagcccaattcattcaacttttgaggcattgtgtgatgtgtagttgggcgttgtcatggagaagaattgggccgtttctactgaccaatgccagctgctggtgttgcagttttctgggcatctcattgatttgctgagtatacttctcatatataatggggn

SEQ ID NO: 95799 - DNA, 417 bp, Homo sapiens
ctaggattccatgtccagtgaaattattgttcagaaggaaagggaaaataaagactttcttagataaatctatcaccagtagactttctgtagacaataaaagaaattccagggagtagaaaattatataggtgcttttatggaagagtggagatgtttggtgaatgagtagcaaaagtgggagtggggtgatcattttgatagtatagccagagaaagcaccctaaaataattagaattaatctgaggtatacttgcaaactgtgcatctatcaaagacctaatatccagaatctataagaaacttaaacaaatcaacaacaaaaaacaaatgaccctcttaaaaagtgggcaaaggacatgaatagatacttctcacaagaagaaatacaaggagtcaacaaacatatgaaaaag

SEQ ID NO: 95800 - DNA, 494 bp, Homo sapiens
  misc_feature (1)...(494): n = a,t,c or g
cctccccccnnnnnnnaatagatcgcatcagtaccggcccggattgaccgcgntgacccacgcgtccgggattgtgcggtgtgtgatgctagggtaaaatcccagtatgttggagaaataaaatgtgcatagtggggattttattttaagtttgttggttaggtagttagtattaggagggggggttaaaaaaaaaaaaaaaaaaaaaaaagggcccccccctttaaaaaacccctggagggccccaattttacccgggcatgcaaagtaaaatcttttcccctaaagggggcccaataaaaacccccctgggaatttttgaaaaaaacccttcctttggggggggaacaaattggcccaacccccccccaaaaattaaaccccctagggaaaaaaaaaaattttaaagggaaaaaggggaaaaccaacctccataccctcccgcctgaaaagtttccctcccggggtttgatttaaaaaaattttcccccccg

SEQ ID NO: 95801 - DNA, 414 bp, Homo sapiens
  misc_feature (1)...(414): n = a,t,c or g
agcttggccaacacagtgaaaccccatctctactaaaagtacaaaaattanctgggtgtggtggcgggcgcttgtaatccctgttactggggaggctgaggagtaaaatcgcttaaacctgggaggcggagctgagattgtgccactgcactccagcctgggtgacagagctagactccgtctcaaaaaaaaaaaaaaaaagggggggccgttctgggggtttttttgggggaccaaaaataacccggggggccaattaaaaatccctttccttatagggcctttaaaaaaaacctgcttgggaattttggaaaagaacccttaatttggggggggaatatattgggacactttcccaacacttttttaaagttttatggaaaatataccattttaaaggggaaagggggtaaa

SEQ ID NO: 95802 - DNA, 454 bp, Homo sapiens
  misc_feature (1)...(454): n = a,t,c or g
natgaacgctgcggaccgcccttgatcccgttcgacccacgcgtncgcccacgcgtncggcctggactcgagccattgtcgccttctagggacccccgagggcacagggacccggggccccgcggggctggagccagacaaagactcggcaaaggggcgagaggagggaacgagcgggcgccgggccactcggggctgagctgggggcgagcgggggcaggcggctgatgttttataaattgtaaaataaaaaaaaaagaaatctaaaaaaaaaaaaaaaaaaaaaggggggggccgtttaaaaggatccctgggggggcccaagttaacgggggcgggggaggtaaaagttttttccttaagggggggcgaataaaaaccaacctggggattttggggagggacccttattttgggggggggacatattgggccaacctccctccggggattt

SEQ ID NO: 95803 - DNA, 243 bp, Homo sapiens
tcttactctgtcacccaggctgaagtgcaatggcatggtctcggctcactgcaacttctgcctcttgagttcaagcgattctccctgaggaggagaactgcttgaacctgggaggtggaggttgcagtgagctgagattgcgccactgcactccagcctggacgacagagcgagactccgtctcaaaaacaaacaaaaaaaactctctgaaaatattcacgtgcttttttgtcgacgcggccg

SEQ ID NO: 95804 - DNA, 362 bp, Homo sapiens
ttttctcagttattaagactgtttatttgtttcaaggtggaagattgctctgctgtgaatcgtgcccagcttccttccacccggaatgcctaagcatagaaatgccagaaggctgctggaattgtaatgactgtaaagctggcaagaaactacattacaagcagattgtttgggtcaaattgggaaattacaggcaagtttttccaagaacaaagaggaagtattcaatcattgtgcagaccagtttcatactctggatacagagtgacttggagatagataggtagacagcatggacctacttccttaaaaaaaaaaaaagaaaagaaccatgttttgaggctgggttcttaaggggttgg

SEQ ID NO: 95805 - DNA, 248 bp, Homo sapiens
aaacaatacaaaaattaggcaggtgtggtagcacgcgtctgtagtcccagctgctctggaggctacagggagcctccagaggtgggaggatcaccagagtctccccactgagactctctccactgcactccagcctgggtgaggccctgtctcacaaagaaaaatattgtgatctaattgctgctggatgacttgtccagaagccatgggggtgaatggcttctggacaagtcatgtcgacgcggccg

SEQ ID NO: 95806 - DNA, 365 bp, Homo sapiens
  misc_feature (1)...(365): n = a,t,c or g
aatcacttgaacccgggaagtagaggttgcagtgagccgagattgtgccacttcactccagcttgggtgacagagcgagactccatctcaaataaataaataaataaataaataaataaataaataaatagttccagaaaaacgaaaatgaaagggagatatgagtgctacttaaaaatacttgggaaaaaaccataaaggaaggtgggtatactcatgtaacactgaacataggtatgtagtaagaagtgaggcctagaacagagagaagaatgtttagattaactatgaggaaaaacttctcaatatggagcttgtgaagatgaggagagagcccagcaagagactgcgggagcaccattaan

SEQ ID NO: 95807 - DNA, 228 bp, Homo sapiens
gcatcctaattgaaaaagatcaagccatctgttcacagatgacatcattttatacatggaaaacactaaacactccacaaaaaactgttagaactaataaaggaaataagcaaagttacaggatacaaaaatcagttgcattcctatatgttaacaataaacaggcaattaagaaaacaattccacttacaatagcgtcaaaaagaataaaaaactcgggccaggcac

SEQ ID NO: 95808 - DNA, 363 bp, Homo sapiens
tttttttttgagacagggtctcactctgttgcccagactggagtgcagtggcacgatctcagcttactgcaacctccgcctcccaggcctccccactcttttgcatatagatatctagttgtcccagcaccatttgctgaaaagactactcctctgctgcattgtcttggcacccttaagcttgcttttgccctcaggatattaggccatctgggcaaacctgaattttggttgaggacttcctaagtcgaagtggaaagaaatcttctccagttcatgcctgtaatcccagcactttgggagccgaggtggttggatcatttgaggtcgggagttagagagcagcctatccaacatgacaaa

SEQ ID NO: 95809 - DNA, 339 bp, Homo sapiens
gcatgcctgtggttccagctacttgggaggctgaggaaagaggactgcttgagccagggaggttgaggccacagtgggccatgatggtgccactgcactccagcctgcatgacacagcgagaccctgtctccaaaaaaaaaaagatttcctaccatatttatttaaacaatgaacagagtttagtacatgtgggaatttgaagctattttagtagtacttcaagtttccctaaaaaaaaattcaataaatggggagagtcaatgatctacaaaaaacaaacaacaccaccaaaccccaaaaacccattccaaaaataaaaattagaaatatctgaaatg

SEQ ID NO: 95810 - DNA, 145 bp, Homo sapiens
caaaatacaaaaattagcctggtgtggtggtgtgcacctgtagtcccagattcttgggaagctgaggtgggaggatcacttgagccagggagatggaggttgcagtgagccgggattgcgccagggcactccgtcgacgcggccg

SEQ ID NO: 95811 - DNA, 317 bp, Homo sapiens
gggaggccaaggcgggtggatcacctgaggtcaggagtttgagaccagcctggccaatatgatgaaaccccgagattgcgccactgcactccagcctgggtgacagagtgagactctttctcagggaaaaggaaaaaaaaagggaaaataaaagaaaatgaatttctccaattaacagttactggctttatttcaggcgagctgtcatgggggaatttgtctggttttgagatataagatcagtgcgaagatttattgatacatacaaaatggagtggcatgctctgcaatgaatttgcgtgttaaaactgaatatc

SEQ ID NO: 95812 - DNA, 376 bp, Homo sapiens
cttgaaccgggacctgggaggcggaggttgcagtgagctgagatcgtgccactgcactccagcctgggctacagagcgagtctccttctcaaaaaaaaaaaaggaaaaaaaaaaaaaaaaaaaaaaaggggggccggggccgaaattccaaaatttaaaaggggaaaatcggaaaaacccccgagggttcttttaaggggggctggggccccaataaaattttttttttttaaaacagggttggcctttttttaaggaaaaaaaccccctaaaagttaaatttgggcccgggacccctggaattaaaaaattttttaaaggaaaaaaaaaaaggccccttttttttttgggccaaaattttttaagaaaaaaaaag

SEQ ID NO: 95813 - DNA, 345 bp, Homo sapiens
cccggttcaagctgttctcctgcctcagcctcccgagtagctgggactacaggcgtgtgccaccacgcccagctaattttttgtatttttaatagagacagtgtttcgccatattgactagctccaagacagaaaggcagagtagattagagtgtatttttggtttctatggtctgccttgcagagaaaaaagagcaagtgaaaggaggtcagttgaagggcagagagaaagattctgttttctttcgattttttttttttgggggggacagagtcttgctttgtcacccaggctggagtgcagggatgctatcttggctcaccgcaacctccacctcctgggct

SEQ ID NO: 95814 - DNA, 333 bp, Homo sapiens
ttcctttcgagttttctaagtgcagtgtggtattgtggactggattctggaacagaaaaacggttcatggagaaaccgataaaatacaaataaaatctatagtttagtgaagagtaccgtaatgtcactaatttcttaatgttgacaatgtcctgtagttgtttaacattagtggaagctgagtgaaggctacatggcaactccctgtactattttattattattattttttcagagacactgtctcactctgtcaccaggtggagtgcagtggtgcagtcatagctcactacagcctcagactcctgggatcaagtgatcctctcacctcag

SEQ ID NO: 95815 - DNA, 345 bp, Homo sapiens
gtttcaccatgttggccaggctggcctcgaactcctgacccagtggtctatccatctcagcctcccaaagtgctgggattttaaggcatgagccaccgcacccagcctaaagacaattttttacctttgcttttataatgtaaatttgattgttatatttaagtaaaatacacttataaagtataaataatactagggtacaatatagaaatcaaaattttcatgtaaacttcttatataaccatagttattaacagatatttacctatcattataaaataaagaactgcactattctgaatctcattgttttcacttaacagtatattatggatatctttcaat

SEQ ID NO: 95816 - DNA, 178 bp, Homo sapiens
aatttttttaatttttacctttttagagatgagttctcactatgttgcccaggctggactcgaattcccaggctcaagctaacctcccgcctcagcctcctgagtagctgggactacaggcgcccgcctccacgcctggctaatttttttgcatttttagcaaagggcgacgcggccg

SEQ ID NO: 95817 - DNA, 232 bp, Homo sapiens
gggcatggtggcacacgcttgtaatcccagctactcaggaggctgaggcagggagaactgcttaaacctgggaggtggaggttgcagccgagattgcactgcactaggtgacagcacaatactctgtctcaaaaaaaaaataaaaaataaagaaataaaaataaaaataaattaatttaaaaaaaactaaaaaaaaaaaaaaaaaaaaatgccaggggtcaacccggccgca

SEQ ID NO: 95818 - DNA, 386 bp, Homo sapiens
cacacacacacacacacactctctctctctctctctctctctctctgtgtgggtctctctctgggtctctctctatgtctggctcggggtggatatcgcgagcccgggggggcgctcgcgcgggggttggggtgggggtgtgtaaggagcgggggccgcggggagtgggggtgcgttctaggtgttgaaagagagggctcattggcgcgcgtgtgcgaccgtgagagaggaatgataaaggggtttcggggcgggtttgtgtgttttggggcggagggggagctccctctgtgcataatgaatgaaaagttggggggggggggggtgtgtgttagtgagagaaaaattaagctgccccgtggggccgtgagctatagagacacagg

SEQ ID NO: 95819 - DNA, 351 bp, Homo sapiens
  misc_feature (1)...(351): n = a,t,c or g
gttccctaagtccaactactaaactgggggatattatgaagggccttgagcatctggattctgctgaactgttcagtactgaaagtggggtggtgaagtctccagctgttattgtattggggtccatctctatttagatctaataatatttgctttatatatttgtgtgctccagtgttgggtgcatatatatttacagncggtatatcttttttttttcctttttttttttttttaaagggaaaattttggggggtttccccaaaaggggaattgggggccaccccgcccgcaattcccaaatttttaatccggaaaaccggaaaacccccgaaggttcctttaactggg

SEQ ID NO: 95820 - DNA, 374 bp, Homo sapiens
  misc_feature (1)...(374): n = a,t,c or g
cacaatcgcttgaacccaggagggtgaggctgcagtgagccacgattgcaccagtgtgctccagcctgggcaaaagagtgagaccctgtccccgccccacaaaaagagggtcagaaccttggtgttagagcagttcacttccacccaaaaacagggacttagaaagggagacacttgtgtggagcccgaggcagacatgccctgacttatcagtgcaggtttctgtactggaatgagggcctggggcaggtggcctctggcaggatgcatctgttacctgagtctgaaggcagcgtggcgaggagatgggagggctgtgcctgggatcctggngccgtggagagctcatctagaggtcatgagtattgggcaat

SEQ ID NO: 95821 - DNA, 336 bp, Homo sapiens
tagagacaaggtttcaccatgttggtcaggctggtcttgaacccctgacctcagatgatccacctgcctcggcctcccaaagtgttggattacaggcgtgagcctccgcgcccggccaggtgaatctgttcttggaaaacagtctgctgtaataatatgagcgaaccgacactattaaggaccacttaatgagtttctgaacagatatttatcatgtcacagtttatttcatacatttattatggcaaataccaaagttttggaatataattgtttcattggaactactcatgcctttgataattgggtactttggcttggctcctaattgaatca

SEQ ID NO: 95822 - DNA, 448 bp, Homo sapiens
  misc_feature (1)...(448): n = a,t,c or g
gggagggcggggtttccatgatnactgatgtccctcattacgccaagcttggcacgaggcagccattgatgaagttcgcactggcacctaccgccagctcttccaccctgagcaacttatcacaggcaaggaagatgctgccaataactatgcccgagggcactacaccattggcaaggagatcattgacctcgtgttggaccgaattcgcaagctggccgaccagtgcacgggtctccagaggcttcttggttttccatagctttggtgggggaactggttctgggttcacctccctgctcatggaacgtctctcagttgattatggcaagaagtccaagctggagttctctatttacccggcgccccaggttttcacagctgtagttgagccctacaacttcattctcaccacccacaccaccctggagcactctgattgtgcctt

SEQ ID NO: 95823 - DNA, 366 bp, Homo sapiens
  misc_feature (1)...(366): n = a,t,c or g
ggtgcccgactaattttagtatttttagaagagacgggatttcattatgttggccaggctggcctcgaactgctgacctcaagtgatccgcctgcctcagccttccaaagtgctgggtgttttcagtttctttacccttaacctgagtgctgtggactcaatgtgtccccccaaaatttgtatgttgacgctccaaacctcaatgtatttggagatagaggctttatggaggtaattaaggttaaatgatgttataagggtgggatcctgatctgataagattagtgtccttataagaagaggacagcagagagctgacttttgctgcctgccacgtgaggacacagcaataaggtggccatccan

SEQ ID NO: 95824 - DNA, 460 bp, Homo sapiens
  misc_feature (1)...(460): n = a,t,c or g
tgaggggccnnncaggggttccactgagaccgtctgatagatcacatctccaagcttggcacgaggggtctccagggcttcttggttttccacagctgtggaaacctggggaactggttttgggttcacctcgctgctcatggaacgtctctcacttgattatggcaagaaggccaagctggagttctctatttacccggcgccccaggtttccacagctggagttgagccctacaactccatcctcaccacccacaccaccctggagcactctgattgtgccttcatggtagacaatgaggccatctatgacatctgtcgtaaaaacctcgatattgagcgtccaacctatactaacctgaatagggtaataggncaaattgtgtcctccatcactgcttccctgagatttgatggagccctgaatgttgacctgacagaatttcagaccaacctggtg

SEQ ID NO: 95825 - DNA, 613 bp, Homo sapiens
  misc_feature (1)...(613): n = a,t,c or g
gacctctgggcacacgggccggggacaggggcagggatgtgctctccgcggtgctttccggcatgcgcgaccgtgctactctacaggtggcagatatgctgttggagctctgtgtcaccgagttggaggatgtggccacagactcgcacagcggccacctcatcaagaaacacacggggcaacggtgttcttttgtcaagggccacagcaacacgggaggccatgcagtacctccggaaccaggacccacttgtgcgtctcggcacagcaagggcagaagtgtccagcttccagagtcacaagncaagaagctaccagtaccttaaagaaatggngctgtggagcagctgtttgccacccctcacaatagngatcttcatattcaaactgcctttgcaaagcttctggaagacctttcaccaaagcagcaagagcactacctgtaaaactcaaagctcttgtttccccatcattttctccaagcagcctatttatgttaattgactgcccaaattcagttgtaagcagcttcctcagtctctgaagggcccacattctgtgactggcagctagggcactcagctgtgcacaagctgccagcgaggccgcaagg

SEQ ID NO: 95826 - DNA, 394 bp, Homo sapiens
gggccaatgctggcccagctctccgtgttccggtgtgggtcgacaagtgcccccaatgatttatggtaccacttcattgaactgccctaccacggggaaagcatcaccatgctgattgccctgccgactgagagctccactccgctgtctgccatcatcccacacatgagcaccaagaccatagaccgctggatgagcatcatggtgcccaagaaggtgcaggtgatcctgcccaagttcacagctgttgcacaaacagatttgaaggagccgctgaaagatcttggcattactgacattgttgattcatcacagggccatttttgccaaataacaaaggcagaaaaccttcttgttttcatattctgcaaaagcaaaaatcgaggcagggaaa

SEQ ID NO: 95827 - DNA, 402 bp, Homo sapiens
ggcacgttgggcaggctggtgtccagattggcaaagcctgctgggagctgtactggctggaacacggcatccagcccgaggggcagatgccaagcgacaagaccattgggggaggaaatgattccttcaacaccttcttcagtgagacgggggctggcaagcatgtgccccgggcagtgtttgtagacttggaacccacagtcattgatgaaggtcgcactggcacctaccgccagctcttccaccctgagcaacttatcacaggcaaggaagatgctgccaataactatgcccgagggcactacaccattggcaaggagatcattgacctcgtgttggaaccgaattcgcaagctggccggaccagtgcacggggtctcagggctttcttggttttcccag

SEQ ID NO: 95828 - DNA, 478 bp, Homo sapiens
ggggcgggggggtttgcatagaataccagttgtaacacctcttacgccaagcttcgcacgaggcctcgtgccaagcttggcacgaggggttgaagctcgtaatggggctggtccaattaaatcctatcctagacctggatcaagattaaagatgcagaatggcagtaaggggtcaggactacagaacaagacatttcattgggaaatctgtgatgctcatgttaattcaaaaattcaactcaaacagcgacatttctagccgaaggcataaagatcgagttgcagggaaaccactgaagccaaaatacaggccttacaacaaactccagcggagcccgagtattctagcagcaaaacttgcattccagaaagatatgatgaaccctttggccccagccttcctgtcctcacctctcgcagcggcggaagccgtgtcctcagcgctgacactcccaccccggcccttttgcttcgtttt

SEQ ID NO: 95829 - DNA, 360 bp, Homo sapiens
caaagaggtcttttcccacccaggtgtggtggaatgcacctgtagtcccagctactcaggaggctgaagtaggaggactgcttgagcccatgagtttgaggctgcagtgagccatgattgcgtcactgcactccagcctgggtgagcaagatcctgtctccaaaataaaaaaaaatttagtggacaaagaactaaaaaactttttatacccttttttgtggggcaagaaatctgatgtggcttaacaaagagaaattatagggtaaaataattttaaaagtagggattggggacccctactcaaaaagggaggagcgcctctgcccaatagcccaaccatctgggaagcagggagtgctt

SEQ ID NO: 95830 - DNA, 366 bp, Homo sapiens
  misc_feature (1)...(366): n = a,t,c or g
ntattattttaaaatataaaaggggataatgggaaaaaaaataaaatatttaaaaataaaagggggggggaaaataaaaaaatttttgttgggggtttttgaaataannggggtgtgtgtttgggggggggtaaaggggaaaaattttttttttttttttttttccggggggggggtttttttttgggtgggggtccccccccttttttttttttttttctaaaggcccctttttttttttttatctttcacccccccaaaaaaagccgcgctttttttttggggtccntttttttttggtgtcttttttggggggggtttcccccttttttttttttctccccccgggggggggnnttcccgggg

SEQ ID NO: 95831 - DNA, 144 bp, Homo sapiens
atccgaatttcctgtctcctaggctggactgcaggggcacaatcagagggcactgcggactgtacctccctggctcatgcgatccttcctcctcagccccccgagtagctgtaattatagatctacaccaccttgccttgcaga

SEQ ID NO: 95832 - DNA, 132 bp, Homo sapiens
ccgatgtggtgaggctttgtctgtactaaaaatacaaaaaatatggcaggcacccataatcccagctacttgggacactgaggcaggagaatcacttgaacccggaaggtgaaggttgcagtgagctgacat

SEQ ID NO: 95833 - DNA, 337 bp, Homo sapiens
gtttggttgtgccatatgttcatcactattagtcctgcatctaagtccccggcacagaagaggcaaggacctcttcagggtatatctccaagagtgaatatggctgagctgtatggaaggcactttacaaggtaatgccaaattgttttccagagtggcgatgccaagttacatacccaacacagcacataagacaaccttgccgatacttggcattttcaggcttttggatgtttgccaatctggtgggcacaaaatggcctcctattgtggttttattttgcatttctctggttgctaatgagattgagcatcttttcatatgtttggatgttta

SEQ ID NO: 95834 - DNA, 334 bp, Homo sapiens
  misc_feature (1)...(334): n = a,t,c or g
gtttatatagatacacacagcgcacacacacacacacacacacacacacacacacacacatattttgtgagacagagtttctctctgtcccccagggtggagtgcagtggcacagtcttggctcagtgcagtctgtgtctcccagatactcaggagggtgggacaggagaattgcttggattcgggaggggggggttttagtgggccgagatcgcgccattgcactacagagtgtgcgacagagagagactctgtcttaaaaaaaaaaaaaaaaaaaaaaaatttttttcgggcaattttgaagggggnnntnntngnttcgtgaaatatggcg

SEQ ID NO: 95835 - DNA, 371 bp, Homo sapiens
gcagagcccaggccatggtggagacgtcccgagagcgctgcctcctgagacccccccaaatagagacaaggctatgtcgcccaggctggtctcaaactcctggcctcaagtgatcctcccacctcagcctcccaaagtgctgggattacaggcgtgagtcaccatacctggccacaacctcttactttctgccctcatgcaaaatctctcccatttatcaaccaaatttaagggccacctctatcaaactggagtggaaaaagctgggagtctaatagattcccagggaaaaaaaaagaaaggtggggagtgaaattgtacttatctgggcagcgggcgcggtcgacgcggccgcgaattccagatctatg

SEQ ID NO: 95836 - DNA, 215 bp, Homo sapiens
gcttgaggacatcatatgagtttgagacttgggtagagatcctgtctctacaaaaaatacaaaaaaaaattagccaagcatagtggaacctgccagcagttccagctacttgggagtctgaggtggaagatcacttgagcacaggaagtggaggatgcagtgagccgagatcgtgccattgcactccagcctggatgacaaggtcgacgcggccg

SEQ ID NO: 95837 - DNA, 160 bp, Homo sapiens
gggaaggtgtccaggggtgccatcataactcactgcagcctccaactcctgggctcaagcgatcctcccacctcagcctccatagaagctgggactgcaggttcacactaccatgtctggctaatttttcttttgttttgatttgaggtcgacgcggccg

SEQ ID NO: 95838 - DNA, 160 bp, Homo sapiens
gggaaggtgtccaggggtgccatcatagctcactgcagcctccaactcctgggctcaagcgatcctcccacctcagcctccatagtagctgggactgcaggttcacactaccatgtctggctaatttttcttttgttttgttttgagggcgacgcggccg

SEQ ID NO: 95839 - DNA, 319 bp, Homo sapiens
cgcggccgcggggacgcttgcagtgagccgggatcgcgccactgcactccagcctgggcgacagagtgagactccatctcaaaaaaaaccaaacaaacaaaccaaaaaaaacaaaaaaaaattttgtaccgtatttggccaaaacctctttgaattctcggggggtaaacttgggttttttaattgggggtttttggctttttggtttttttgaaacggactctcgctccagcctgggcgacagagtgagactccatctcaaaaaaaccaaccaaccaaacaaaaaaaaacaaagaaaaattttgtaccgtttttggcc

SEQ ID NO: 95840 - DNA, 395 bp, Homo sapiens
  misc_feature (1)...(395): n = a,t,c or g
ccttgtcatcctagtttgtttccttttctttcttcccttccttcccctcccatctctttttttcatcttcctctttccctcccttcctcccttccttccatttttccttccttccttctgaccgtccatctgttgttccttcctccttccctccttccttccaagagccaatgcttccttgctgccttgtcatcctacatgtggctaaacaagacagatgatttcttaaatttatcgtccctctctcccaaatttgcaagagtttgggatcctcttaagttttaagacatccccaagaaaattcctcacttgttttctccattttataccctggcacttgaagttttcttcctatagtctgaagacttcttaaaatgtagagcctgatcttgctn

SEQ ID NO: 95841 - DNA, 307 bp, Homo sapiens
cccacgcgtccgtgccacagtgctggccttcatgttgtcagttccagaagtggggttgagggagagagagaatacttgaagaaataatggctgaagacttcctaaatttgatgaaagacctgaatataagcatccaagtagctcaacaaattccaagtaagatgaactcaaagagaccacacagataccaacatttcagaagccaaagccagagaattttgaaagcaacaagggagaagcaacttgctacatacaaaggatcctcagtaacaggtccccaagccctgggccacagactgttaacagt

SEQ ID NO: 95842 - DNA, 352 bp, Homo sapiens
caggatttcaccatgttgaccaggccaatctcaaactcctgacctcaagtgatctgcccgcctcaacctcccaaagtactgggatcacaggcattgagtcactgcacccagccgaatttcccaattctaagcaagcagcatcttctattaccaatttaataactgctgccttaaaaaagatcaataatttatttatccaaggcaataaaatttacacctgaatttttaaacataaagaactccaaaactaataggtaatataaaaagttgttgcattttatattaatcttttatttcaaaattaaaccctgaaatgatttaacacagaatgacaaaaattatgggaggttta

SEQ ID NO: 95843 - DNA, 150 bp, Homo sapiens
cctgcctcagcctgccgagtgcctgcgattgcaggcgcatgccgccacgcctgactggttttcgtttttttttggtggagagggggttttgctgtgttgaccgggctggtctccagctcctaaccgcgagtgatccggtcgacgcggccg

SEQ ID NO: 95844 - DNA, 356 bp, Homo sapiens
ttttttttattgttgagttttgggacttctttatgtattctagatactagttccttattagatatgtgatttctaagtattttcttctcttctggagcttgcctttttaaatttcccaacaggtctttaatagagaaaaagtttgaattttgatgaagttcagtttatcaattttctcttttgtgagttgtgcttttgatgtcaagtctaagaatgcattgtctagccttgtatccataagatttgctccattttttccccctagaaattttgtagttttatgtttcacatttgtgcctgtgatccattttaaattaatttttgcataaagtgtgagacttaggttgaggtttagg

SEQ ID NO: 95845 - DNA, 396 bp, Homo sapiens
  misc_feature (1)...(396): n = a,t,c or g
gggcatagcttgcagtgagccgagatggcgccactgcattctagcctgggcaacagagcgagactgtcttaaaaaaaaaaaaagaaaaaaattccaaaatttacccaggcgggggggggcaggcctggggccccacctacttgggaggctgaggcaggaggatcacttgaccctgggaggcaaaggttgtactccaccctgggggacaaagcaaaactttgtctaaaaaaaaaaaaaaaaaaacctaaagttcccttccccgggtggggggggggccccctgttcccccctttcctaaaagggttggggcaaaaaaaggcccgaaacctgggagggggacttttgcaggaactaaaaaaccccccctgccctcccaccggggggaaaagggaaaan

SEQ ID NO: 95846 - DNA, 156 bp, Homo sapiens
tactctcactctgacgcccaggctggaatgcagtggcacgatatctcggctcactgcaagctccacctcccgggttcacgccactctcctgcctcagccccccgagtagctgggtgtggtggcgggcacctgtgatcccagtcgacggtccgagat

SEQ ID NO: 95847 - DNA, 347 bp, Homo sapiens
gctcaggctggtcttgaactcttggcctcatgcaatcctcccaccttagcctcccaagtagctaggattacaggtgcagagtcactgtgtctgacaatttatccactattttaaaatgaggtgagagaagtaagtacagtatgttacttgactttttatgaagttgaagaaagttttgtaggcaatatggaagataataaatctaattattaaaaaatctcactgatactaggtgtacataaaatatgttgtgagtttttttttttgagatgaagtctcgctctgttacccaggctggagtgcaggggcatgatctcagctcactgcaacctccgcctcctgggtta

SEQ ID NO: 95848 - DNA, 348 bp, Homo sapiens
  misc_feature (1)...(348): n = a,t,c or g
cttgaacctgggaggtggagggtgcagtgagctgagactgtgtcactgcactcaagtctgagcaacagagcgagactccgcctcanaaaaaaaaaaaaaaaaagaaaaaaaatttttggggccccccttaaggccttttggggtaactcccccaatggaccaaggtccattccccaaaaattttcaaaatttggttgtgggggggggggaaatttagggcgggccccaattctgggttccaaagtgggcccaatttcccaaaaaggccccattagttttttcttgaccccagggtcaacggggccggaattcccaaatttttaattcgaaaatcctgaaaacccccgc

SEQ ID NO: 95849 - DNA, 332 bp, Homo sapiens
  misc_feature (1)...(332): n = a,t,c or g
tgtgttcttttttctctaaacttcccttctcgcttcatttcattcatttgatcttccatcactgataccctttcttccagttgattgtgtcggctcctgaggcttctgcattcttcacgtggttctcgagccttggctttcagctccatcagctcctttaagcacttctctgtattggttattctagttatacattcgtctaattttttttcaaagttttcaacttcttcgccagaagtggaannnncnccnngagctcagagaannnngancgngtgaagccttcatctctcaactcgacaaaggcattctctgtccaacgttgatccgag

SEQ ID NO: 95850 - DNA, 358 bp, Homo sapiens
cagccctcgcagctgctctgtctatggaatagccattcttttattcctttactttctttataaacttgcttttgctttactctatggacttgctctgaattctttcttgcatgagattcaagaaccctcttggcctctggatcaggacccctttcccgtaacagtgctatggctgggattttgctccctgctctgccactctggacatagctgtacatccttgagcaaactttttcacttctctggtttccttacttgtaaaactgggcacatggaactacaaaaggtcccttgcatcagcaatattctaagattactcaggaaaatataagcccaaagacccaagttgttaaaggag

SEQ ID NO: 95851 - DNA, 356 bp, Homo sapiens
  misc_feature (1)...(356): n = a,t,c or g
aattaattaatctttactaagataatgttaattgttagagaaaccacatcacacacatgcacacattcttgtacaaacttgtgcttttggggaaggattagagagagcctgagccaataaaaactatttactcaatataattactttttttttagatttattactaccataatgtgaaatgcagacgcnnnnnnnncnncnncncnccccctcngccccnnccccccttccttcccccctccnnncccctctctccctctccttcttttctcttcctcccttccctttcttttttcctttttttccccttttcttccttccttctcttttttttttccctccccttttttcccgcc

SEQ ID NO: 95852 - DNA, 404 bp, Homo sapiens
aagattctgtgagataatgcatatcaagtggttagcactttgccaggcacattgttaagtgcccaataaatgtgggccaaatgtgatagctcacccctgtaatgccagagctttgggaggatcctttgagatcaccctgggcaatatagcaaaatcccatctctagcaaaaaaaaaaaaaaaaaaaaaattttttgggctggggggcacagccttgtttccccactttcttagaaaactggggcaaagggttttttaaacccaaatgttaattgtttaagggagcgggaatctttgcccctgccctccccccggggaaaaaaagaaaaaccttttttcagaaaatattattaataatatttgtaaaggggctttgaaaaggaaccaaaattatatttttttttg

SEQ ID NO: 95853 - DNA, 420 bp, Homo sapiens
  misc_feature (1)...(420): n = a,t,c or g
agtgctggtgaggaacgccacagacagagccaccctaggagtgagtatagtgctggtgactgtgtttcatagccccagtccagggctgtctaagaaataaagatcatcagactccacctggaaaataaaaaaaaaaaaaatttaaaaaaaaaaaaaaaaaaaaaaaaaagaccgaaaaaaaaaaaaaaaaaaaaaaaaaaaaaaaaaaaaaaaaaaaaaaaacaaacgcgaggaataagtaaaaaacatttttctccgcgctggcctgtcttaaaaaaattgtacgctcgcaaacttctgggggggcccgtttatttttaaggttctaaaccacttcctggtggggagcctgggccggccaccannttgtggganttttccctttcggnganncccttattgggcaagatccttgggttg

SEQ ID NO: 95854 - DNA, 417 bp, Homo sapiens
  misc_feature (1)...(417): n = a,t,c or g
tttcgtcccccagctggagtgcagtggcgcaatctcatctcactgcaatctctgcctcctgggttcaaacgattcttgtacctcagcctcccaagtagctggactacaggtgcatgccaccacaactagctaattttttgtttttgttgtttttgatgttgttgttgttgttgttgttgttttagtagagatgaggcttcgccatgttttggccaggctggacattgtggttttaatttgcatttccctaatggctaatggtatggaatatcttttcttgtgctcatttgccatccatcttccctctttgctgaaatgtcggttcacgtattttgcacattgcctctttctttattattttttagagacagggtcccactctgtcactgagactggatggcagtggtgcatcataan

SEQ ID NO: 95855 - DNA, 427 bp, Homo sapiens
  misc_feature (1)...(427): n = a,t,c or g
gctgcgagaagacgacagaagggaaactgaaagtggaaatcaggaaaaggtaatggaagaagaaagcactgaaaagaaaaaaaaaaaaaaaaggcggccgttttaaaggacccaattttacgtccccgggctggcaaggaattattttttttatggggcccccaaattcaattcccgggccggggttttaacaacgcggggacgggaaaaccccgggggtaccccaattaattcccctggccaaaananngnnnggngcnanaaattgatnaggactctaaaacaaatctgggcttccagatctcaactctcggtgctttgcaaaacgcaggtgacgcctattttgatcggcctttgtgaagacaccaacctgggtgctatccatgccaaacgtgtaacacttattgcccaagacctccagcttgcc

SEQ ID NO: 95856 - DNA, 426 bp, Homo sapiens
  misc_feature (1)...(426): n = a,t,c or g
gctgcgagaagacgacagaagggtaggttgatattttttgtgcaatggttttgttgttaaataaactcaggcattactcttgatttgttaaaaaaaaaaaaaaaaggcggccgttttaaaggatccagttttacgcccccgggcttgcaactttttagtttttttttggggccccctaatttcattccccggcccgccgttttacaccgtcgggacgggaaaaccccgggcgttccccaccttattcccctggcccaaaaannnnngngnnctncctcttccgnntttatcctcatggatcaacccgggagggtgccttatggcacccttggttctggccccctggccacaatggctggttttgacgataagcttaagccacacatggagggggcggccgcccctattctggtgaggcgaaccctc

SEQ ID NO: 95857 - DNA, 464 bp, Homo sapiens
  misc_feature (1)...(464): n = a,t,c or g
cgaagacctctggaannnnnccttattcctgaaaggcctcatttccgagtgtcatcagatgtatgaagncccatttgttactctgattctacagtatatccaagccatatctggagggttgtatatatgaattgggttttggtgaagtcatcctttttttttcttttcacttgttaccactttaaaacagctgtctgtctcataatcagaggcaactgctttttcgactggaaaagggtatgggacctatttcagctcaggaaaagttagtacttcacaccctctctggtttttctgggttggttggttggttggttggtttttgagatggagagttgctctgttgtccaggctggagtgcagtggcgagtgcacccaccacccaggttcaagcaattctcctggcttagcttcccgagtagctgggactacgggcatgtaccaccatgcccggctaatttttg

SEQ ID NO: 95858 - DNA, 428 bp, Homo sapiens
cctgagcccccatcactgccgcctgatggggcaaagaaacaaaaaacacagaagagtaagaaatggcgcatatgttttctaagaaaaaaaaaaaaaaaaaaaaaaagaaaaaaacaaaaaaaaaaaaaaaaaaaacggggggggggctcacaaaaaaagtcccggagggggcccaaattgacgacggagaccaacataataattttgataaaaggggggctgaaaaaaatgaactaccgggagatcgaaaaaaaactcctttttgggggggggggggtgattgggccaaccccaacccaagacatcaagggtagggaagaaataaactacttggaggctgtggggcgtgaaaaacagcggttcatctccctcgtgaaaaaaatgtggccctgaagcaacccgagacaccattttcagaggatacctgt

SEQ ID NO: 95859 - DNA, 414 bp, Homo sapiens
tcgacccacgcgtccgcccacgcgtgcgtggacgcgtgggttcacatcttcaggctccacttcttccagactccttttaatgctggaattttgaccgcctcccatgaatcagaatgttcttagaggcatttagagagctaaatgctgcccagacgggtttcaattgactttgcccagactcttcagaggaatcactagttagggcagctacagccttattaaacgtatttcttaaatacataagacttaaaagtcaaagtgactccttgacccatggactgcagcataaatgttgtggtactctggcacgaagacaacatgaacctccttgtacatctccatcagaactcttacgtgaccaggtaacactgtaatgggcagtaataattggaaagaaatttagcaggtctcacg

SEQ ID NO: 95860 - DNA, 469 bp, Homo sapiens
  misc_feature (1)...(469): n = a,t,c or g
attggccactcgttccgngctgcaggaattcggcacgaggagagagagagagagagagagagagagagagagagagagagagagagagagagagagagagagagagagagagagagcgcgcgcgccgaaatatatatcacacatatagaccccggccaccgcgagtttttttttttttttttttttttttttttaaaaaaaaaagaagggggtttttggtcccaaccccccccgggggggggggggcccaaaaaaaaaaaacatctctggaaggggggaaaggggttttttttaaagggggggggaaaaaaacccccttaaaaaacccgggggggtggggggaacccccccaaaaaaaaaacgggggggggggaccccccccaagagatccgcccccccccccacggccccttttttgagggggggggggggggggggacaccaaaaaaaaaaaagggggggggggggc

SEQ ID NO: 95861 - DNA, 463 bp, Homo sapiens
  misc_feature (1)...(463): n = a,t,c or g
ntttgcaccgtcctgcangaattcggcacgagggaccctaggatttttggaattgtaaatgagcattggcttcaactttaagtcaccagctgcagtacccctaacaagatagcctgtcctttgaagcttggaagccaggcattgattcccgttctacagctatgaaaatcctagatggcatcttctttgaatataaggctattttatgtacactgaaaatctgttgtttagtgtttagtgcatccatcttatctagatcttctggataacttacagcttcatcttgcacttttatgttatggagatggcttctttccttaaacctcatgagccaacctctgctaccttcccactgcagtttcccactgcagtttccctctgcggtttctctcagccttcgtagaatcgaagagagttagggcccgctctggattaggctttggcttaagggaatgttgtaact

SEQ ID NO: 95862 - DNA, 482 bp, Homo sapiens
  misc_feature (1)...(482): n = a,t,c or g
agggccggccatagtagacattaggattgagggccgttagccatcatcaaagtgatgttgcacaactgcaaataacaccatcaacaaaggaagacctggcaaaacagaccagaaaacaaggccagggtggcctctatctcctgcccttgtgttctgcccgccttggcctcccaaagtgctaggattacaggcgtgagccactgtgcccagccttttgcccattttaaaactgggttattaggatttttcctatagggttgtttgagttccttatctattcgattattaatcccttgtcagatgtatagtttgcaaatattttctccccttctgtgggctgtctcttcgccttgctgattgtttcctttgctgtgcagaagctttttaacttgatgggatcccatttgtccatttttgctttggttgcctgtgcttgtgaggtatttttcaagaaatccgcccagacccccacggngaggtgg

SEQ ID NO: 95863 - DNA, 289 bp, Homo sapiens
ttcagtccaagatgacagaggttctgctgatataacattgttagaaaccttgtgggtctcctatgtatattttgggggttcttgtcattagacaagagggttctctatagagcttttctggataatcccatctccattcctaccttctgcttatggttggctgaaggaattcatgagtcacactcctgatcccttcagcatgactaagaggttgtcctgcaacatgcttgactttctctccacagcatgcttttcttaacagtgaatttcctaattttaacatattttg

SEQ ID NO: 95864 - DNA, 520 bp, Homo sapiens
  misc_feature (1)...(520): n = a,t,c or g
ngagtgccnnncaatgagaaactcgagancgctaggcgcaagtgcgcgctatgaaaaacctacagttaacctcatacttaatggtgaaagactgaatattttccctataagatgaaaacaaggttaggatatctgctgtcactactcttatttaacataggactggcaatcctggccagtgcaataaatcaaaaaaaggaaatacaaatcatacagattgtaaaaaaaaaaataaaaacacaaagaaaaaaaaaaaaaaataaaacaaaaaaaaaaaaagccctgtttaaatttaaaggcggccctgaaaaagaaaaaggccccccaaaaaacccctttaaaaccccccccgtggttttttaaccccccccccttttttttttcccccccccggggggttttttttggggggggggggcccccccccaggtttttttttaaaaaaagaagaagaagtttgtttctttttgtatgggggntttattttcattgtgcnggnnnntctccatacaagtcattg

SEQ ID NO: 95865 - DNA, 487 bp, Homo sapiens
  misc_feature (1)...(487): n = a,t,c or g
nggctgatgnaccactagtccangcggnggctggagaccttagtacaccgcggggaattcaatttttgtatttttagtagagacagggtcttgtcatgttgaccagttggtctcgaacttgtggcctcaggtgatcctgctgcctcagcctctcaaagtgctaggattgtaggtgtgaaccactgcatctggcctcagtatggacttgattttctcgtaatagagaaaaaagatgtatgcagtagacctaccagcatgaaacagcagcttttggccaatttttattaggccagcttatcattcactctttaccagcgtttatggataggaatttgtgaatataacaataaaaatagcaaccagcctacattacaaagccatagtaattaaagcagtatggtaatatggtactggcataaaaacagacacatagaccaatggaacagaatagagagtctagaaataaacccacacatatgcaataaac

SEQ ID NO: 95866 - DNA, 467 bp, Homo sapiens
  misc_feature (1)...(467): n = a,t,c or g
tacgagaccacttgaagaccgtggaanacccagngctctgggaggccaacgtgggaggatttcctgaacccaggagtttgagaccagcttgagcaatatggtgagacccctgtaagaattagccagctgtggtggtgagcagctgtggtgagcagctgtggtggtgagcaaatgtgggcagctgtggtgagcaggtgtgagcagctgtggtgagctatggtgagcaggtgtgagcagctgtggtgagcaggtgtgagcacctgtggtgagcagctgtgagcacctgtggtggtgagcagctgtggtgagcagctgtggtggtgagcaggtgtgagcagctgtggtggtgagcaggtgtgagcagctgtggtggtgagtaggtgtgagcagctgtggtggtgagcagctgtggtgagcagctgtagtgagcagctgtggtgagcaggtgtgagcagctgtggtgagca

SEQ ID NO: 95867 - DNA, 467 bp, Homo sapiens
tgaaaaaatgttactcaacagggaaaaattcatatcagggacaagcttgacgaaatgtgggggaacacctctgtattttgcacaaatcatatgaaacatcagacaaattttaatgcaaagaaatgcaatgtatttaaagaatgtggcaaagactgcttgtaactttcaactaactcaatatcaaataagtcatgctaatcagaaaccctatgaatgtcagatatgtggaaagccctttagaaagcgtgcccaccttacccaacataatcgaattcacactggtgggaaaccatatgaatgcaaagaatgtgggaaagtgtttatctgttgttcaacattgattcaacataagagaactcacactagtgagaaaccctatgaatgtctggaatgtagaaagacgtttaggcggagtgcacatcttattcgacatcaaagaattcatactggtgagaaaccttataaat

SEQ ID NO: 95868 - DNA, 421 bp, Homo sapiens
  misc_feature (1)...(421): n = a,t,c or g
ggccagtgcaggtgggacaacgctgtgatccttgagagaagagagaacacagatgagctgcccttcaccccagtggtgttgctggcatatttcccaaaccctggagcaggaagtggaccctgagcggacggcagtgtacagatagagattgtccttcggggcagccagaggagccgggacttgaggggcaaaatcccaagaagcaagaaacaaagaggaggaccccagcttctgcatacaactgccccccaccccaagcctctaagccccacacacacacacacgcacacacacacacaaccacacatacacatgcacacatgcacacgcacacatgcacatacaaacatacacacacacgcacgcacacacacacaagaatcacttgaacctgggaggtggaggttgcagtgagccgaan

SEQ ID NO: 95869 - DNA, 478 bp, Homo sapiens
  misc_feature (1)...(478): n = a,t,c or g
tgcgggctnnnnatcgatagcatncgttagngcggngcaattcanagtttgcagtgagctgaaatcgtgccattgcactccagcctgggcgacagagtgtgactctgtctcaaaaacaaaacaaaacaaaacaaaggagaactctggggagtatattctttcagcatacatttatgcatttaaaaaaagaaaaaagcttaatacttcagaaatggtaaatcatttgacaaatgagaaaaccaatttctgggggcaccactgattatagagcctataccttctggattcaagtctaggttgtactacatattagctggatgaccttgggcaagttacttaaatttttgtgctatggctgcctcacctgtcgagaggacgtaataatacacctaatttaggattgttatgaatttatatatatgtgtagaatttagaacagtttctggcatagactattgcctattaagaggtgcaggtg

SEQ ID NO: 95870 - DNA, 480 bp, Homo sapiens
  misc_feature (1)...(480): n = a,t,c or g
gtgctgtnnannnaaactgaaancatacncaagnnnggctnagcacaagcnctacaaataactaacctaccactaatagttatgtcatccctcttattaattatcatcctagccctaagtctggcctatgagtgactacaaaaaggattagactgaaccgaataaaaaaagaaaaaaaaaaaaaaaaaaaaaaaaaaaaaaaaaaaaaaaaaaaaaaaaaaaaaaaaaaaaaaaaaaaaaaaaaaaaaaaaaaaaaaaaaaaaaaaaaaaaaaaaaaaaaaagaatgttttgttttttttttttgggggggggggggcccccccttttttttttttttttaaaaaaagggcccccgcaaagagcagagagggggggtaaaaaaaaaaaaataccaaaacaatccctagggaagaaaaaacnccccggggggggggggagggggggagtcacctcaaaaaaacaaaaaaaaaaaattttgt

SEQ ID NO: 95871 - DNA, 491 bp, Homo sapiens
  misc_feature (1)...(491): n = a,t,c or g
tggggggnnttttgagaactgagtcccctnggnggaantccggcaaaccccgtctccaccaaaaaaatacgaaaaccagtcaggtgtggcaggctgatgcaggagaatcaggcagggaggttgcagtgagccgagatggcagcagtacagtccagcttcggctcggcatcagagggagaccgtggaaagagagggagagggagaccgtggggagacgggagacgggagatgggagacagggagggagagggagagggagacgggagacggggagggagacaggagacgggagacgggccgggagagggagacgggcagggaaaggggagaggggagagggaaaggaccctctggcatttttaggaattgttgtcttaccagaatgagaaccaaatactggtggtttgggatatgcaaaagtcctttatggattttgaaagttaaaaaaatgaaagttaaacaattatgtatagcttgctcttttgtttttg

SEQ ID NO: 95872 - DNA, 455 bp, Homo sapiens
  misc_feature (1)...(455): n = a,t,c or g
agcgctgnnnnaaattacagcgtgcatgtggcgggaatcatcccgtacctggctcgagggtcccatacccgtggagcctcgctcattgctagcacagcagtctgagatcaaactgcaaggaggcagtgaggctgggggaggggcgcccgccattgctgaggcttgagtaggtaaacaaagtggcctggaagctcgaacttggtggagcccaccgcagctcaaggaggcctgcctgcctctgtagactccacctctgggggcagggcatagccaaacaaaaggcagccgaaacctctgcagacttaaatgtccctgtctgacagctttgaagagagtagtggttctccctgcacacagccagatatctgagaatggacagactgcctcctcaagtgtgtccctgaccccagagtagcctaactgggaggcacccccaagtggggcagactgacacn

SEQ ID NO: 95873 - DNA, 542 bp, Homo sapiens
  misc_feature (1)...(542): n = a,t,c or g
aggggnatagcagnccnnnnnnnctttgacatcgtccgcgttgngcaattcacgggaaacaatttaacaatttgtttgtgctttttctactgtttctgcgtctgacagccctccctgggtgtggctccgtccatgaagcctttgctggtttgtgtgtgcaggagatggggtcggagggcacggcttggcagaagatgtcgatttcacccgtggcgtacgagctgtgggccctgtggtgccaggtctgaccttggggaacacacaccccagctcggcctcggtggccctggcagtttctccccttcctcggggcttttctgttctgggcccctcctttccggaagcgagccccggagcacgtggagggagtggccgcggagcctgaggctgggaccttgggtggttctggctttttcccagggcctctccctgcagtgagagtcctgtgtcctctgcatcctgagtgtgtcctaaatcctgagggtggggtgagggcacaccccgcacttcntggtgtgtgtgtgtgtgtgtgagttatgaga

SEQ ID NO: 95874 - DNA, 452 bp, Homo sapiens
ctcaaagacagcggcagagactatgtgtcccagtttgaaggctgcgccttgggaaaacagctaaacctaaagctccttgacaactgggacagcgagacctccaccttcagcaagctgcgcgaacagctcggccctgtgacccaggagttctgggataacctggaaaaggatacagagggcctgaggcaggagatgagcaaggatctggaggaggagaaggccaaggtgcagccctacctggacgacttccagaagaagtggcaggaggagatggagctctaccgccagaaggaggagccgctgcgcgcagagctccaagagggcgcgcgccagaagctgcacgagctgaagaagagcttagcccattggccaagagatgctcgaccgcgcgcgcgcccatgtggacgcgctgcgcacgcatatggccccctacagcgacgagctgcgccagg

SEQ ID NO: 95875 - DNA, 338 bp, Homo sapiens
ggaattcctcccctcccagctctggccactcaacaccccgcctggcaccccctagccctgcccgtgagggcaccgacaaggctgtgagtgctctgaagtctccccagcctaatagggggatggggagaggtcaaaggcagggctccccagtgtacagcaacaataacccctcacaccagtggttttccaaagcaacctcagctttccctaaaggttcaaactcaaagggcaaaggggaggctgagtcactgggatcttgaaccctaactttcactttagtcagatctggtctacttttatttctcatgcgtcaagtttctgcataggattttaaaaag

SEQ ID NO: 95876 - DNA, 457 bp, Homo sapiens
  misc_feature (1)...(457): n = a,t,c or g
gaattgattaccctagaaannccctgatgtccctagtccangcggnggaattccatgaattaaattagtaattgataacatacagaaaatctccaattatttggcaattatgcaatgcacttacatggacttaatctatgatactagaaaccagaagcagtgtttgcctcagagtaagtaagatgtggcgattgtttggaaagggagatatggaaactttctggattaatggaaatattctgttttttgattaagtgacgattaattaaatagatatatacgtttgtcaaatcctcaagcaaaacactaagacccaggcacatagaccaatggaacagaatagagaacccagaaataaagccaaatacagccaactgatctttgacaaagcaaacaaaaacataaagtgggaaaaggacacccttctcaacaaatggtgctgggataactagcaagg

SEQ ID NO: 95877 - DNA, 487 bp, Homo sapiens
  misc_feature (1)...(487): n = a,t,c or g
tgagttccacaagtagnnaaaaactgaaaccanncctgnnnggctnngcanaaacacnnaanntnnnngnggaanggnatactgtatattttaagcccactgttgagacctactggttgggataaaaaaaaaattcctttcaaagggctactgcggagggacaatacaccatgttacccaaaatctctgctggagatgtgcgaaaagattaacattgttttcgcgcctgctaccacgacatccagccgaagcccatggatcaaggcgtcattgtgactttcaaatctaactatttaaaaaatacatttcaggctgggggaggggagaaaaaagaaaaaaaagaaaggaagaaaaaaatcatttcataaggctttagctgccataaatagtgattcctctgatggagctgggcaaagtaaacagaaaacctctggaaaggattcagcattccaaatgccattaaaaacattcaggatccgtgggagga

SEQ ID NO: 95878 - DNA, 470 bp, Homo sapiens
  misc_feature (1)...(470): n = a,t,c or g
tggccgggnccnnaatgagaccctgagaccctgggagnggcgggaattctcgcggccaccaatgccaggcggggccctgctggggcggctgccagcgcatccagcgcctacaacgcgggcagcagaaagagtacccccaccccgtagacgtgcagctcccaggagaagctcaggacccgccgaagggggccccagcgtagcgggggtgcagtggcgttggctggggggctggaggctggggctgaagccatggagctggcggtgggctccggagggggaggctggcccagggctcgctgcgtggtgactcgaatgaggccccggcgtgacgtcgagggggcctggactgggggtgctgggggatggctttgggggcgccccggccactcctcggcttcatctgcaattataacaatattaaaatagccatttgaaaaaaaaaaaaaaaaaaaaaaaaaaaaaaaaaaggg

SEQ ID NO: 95879 - DNA, 500 bp, Homo sapiens
  misc_feature (1)...(500): n = a,t,c or g
gggggagnccnnnttttggganccctannnatcgagatccactgtccatgtggnggaattcggtgaatgagttccttatatattttggatattaaccttttatttgatacatggtttggaaatattttctccctttctgtaggttgcctttttgttcgctgtgcagaagctttttagtttgatatagtcccacttgtttatatcacatcttaatgtgactgtggtcagttctacccttaatggttgggtgggctacactagtagacccaagtggactgaggtttaaatgcagtagcagttaagttttgcttatgtcctggcactgtcccagtgggtcagcaggctgtccctctcggtgcggtctttcggatcctatctcatgggcctgtgtcatcttcagcacctggcttccgaggttgcactgggaactcattcctatcaacctgaaaagggaagagatcgtggatgagttcttcctgggagtcaggtgtatgtgggcc

SEQ ID NO: 95880 - DNA, 549 bp, Homo sapiens
  misc_feature (1)...(549): n = a,t,c or g
gcgatgcgactgatactatcagagnggnctaattcagtaaacacatcccagcagggacacaaacacatacacacgcagacacacacacagacacacacacagtatatacatcccgacagggacagacacacacacacatgcaccgtggacacatcccattggggacacacacacacacacacacacacacacacacacagggtgaacacatcccagcaggggtgagatgcatctgagtcaggcaagaaagctgacccccacctgggcaggtgacccagggcagccgacccccacctgggcaagagagtagcgtcttcccaactctactggaagcgggatggtcagaaacctgaaaagcgcaaggatcccatgctggaccccaccctaagagactgctggtggggtgggggtcacccaagaagaagatttgtctggcgcctgcatgggcaagtggtgttacagccgcgccaccagctactctgtgtgttagactctatanactgccccgacctaatctttaccagtataagtctcttccaggcccggggn

SEQ ID NO: 95881 - DNA, 393 bp, Homo sapiens
aacaaagatagtttgacttcttcttttcctattggatgccttttatttctttctcttgcctgatttctctggctaggacatcaagtactatgttgaataggaacctaacttttgaaagcctaagcagagacttgagagaggaagtggaagtggtctgttttttctgagggctactgggagctatccctggtgctgccacaaaatcaacctctctaacaccaattttcggctgtttgacctcagtagaacatgactactaagctgagctaaattaagcatcaactgtttgagctaatgaatcttactaaaaatttaacttcagttttgcaagtgattttcatatgttatgtgctgtgtatctccaccacacttcttcctttcttgtatttgagg

SEQ ID NO: 95882 - DNA, 291 bp, Homo sapiens
atgcgctggatagtatgtagggacagagggaatctcgttcatatcattcatgcgcgtcactaattacatgacgaggcatttggctaccttaagagagtcatagctactcccgccgtttacccgcgcttcattgaatttcttcgctttgacattcagagcactgggcagaaatcacatcgcgtcaacacccgccgcgggccttcgcgatgctttgctttacttaaacagacggattaccctggtccgcaccaggtgtaagtcggttgctaagcgcccgccgggctccccggt

SEQ ID NO: 95883 - DNA, 456 bp, Homo sapiens
  misc_feature (1)...(456): n = a,t,c or g
ggagcgccccctancccgaaacgtttgncnagcacngtcctnannntagggngccccacccgtccgcttgacagtgaaacacttaaaaagataatgttatggatgttaactcctgtcaaatagatcacttgcaattgcttccttatgtggaggttgcaatgagctgagatcatgccactggactccagccttggcgacagagggagactgtcaaaaaaaaaaaaaaaaaaaaaaaaaaaccagggtggggttttttaaacccccccccccaaaggggaaaactttgtttttaaaaaaggggcccggggttttaaaaaactttcccaaagggagcttttccaagggcccaaaaaactttgaaaaaaaaaataaaatttttttttggaaaaaaggggaaggcccatccccggggggcttttacctctaaccctttgggggggccctttttaagaggtg

SEQ ID NO: 95884 - DNA, 463 bp, Homo sapiens
  misc_feature (1)...(463): n = a,t,c or g
nagatgcggncttctcnnnnnggaccttttagcancgtcnnnacnntngnggtgaggnaaccgtncgcttgacagtgaaacacttaaaaagataatggaatggttgttatctcctgtcaaatagatcacttgcaattgcttccttatgtggaggttgcaatgagctgagatcatgccactggactccagccttggcgacagagggagactgtcaaaaaaaaaaaaaaaaaaagaaaaaaaccagggtggggttttttgaaccccaccccccaaagggaaaaacttggttttttaaaaaggggcccggggttttaaaaaactttccccaaggaaagctttccaaggggccgaaacacttttgaaaaaaaaaccaaatttattttttgagaaaaaggaaaggaacagcccagggggggtttacctttttccccttgaggagggccgttatctaccccaaacaaga

SEQ ID NO: 95885 - DNA, 408 bp, Homo sapiens
agtttttcccttaagttttcttctaggagttttgtgatttcaggtcttaaatttaagtctttaaatatttcacgttaatgtttgttatggtataagataagggtccagtttcattctcttgcatgtggagatccagtttttccagcaccgtttattggagggactatcctttccccattgtgtattctccttggtgcccttgtcaaagagagatctagtagtttctaagcagcatcatgaagctgtatctttactgatttcatgttacaacaaaatttttttaagcacaaacccaggggtgtgacataccctgaaactggtgatttgaaaaacagtactgttagagaaagggatctatggagatcattgttagtagtagtaattggggcattggatcatgatacccca

SEQ ID NO: 95886 - DNA, 396 bp, Homo sapiens
  misc_feature (1)...(396): n = a,t,c or g
actacgcgtacatcgcgagcggcctccatgactttttcaaaaaaaaaaaaaaaaggggggggccttttaaaaaaaccctataggggccccggggcccccttaaaaaaacccccttgggtcccttctttttggggggggggcaaaaaatcttttttttttttttggggggggaattttttttttggggggggggtttaggggccccccccccttttggggggggagggttaggggccccccccccccttttaaggggtttctgggggcacccaccccttttttgggggggggggggggggacccccccccccccccgggggggaaaaaagtttccnnnntncttangccctcccccccccgaagcttgaggggtctataaccccccccagatttatt

SEQ ID NO: 95887 - DNA, 467 bp, Homo sapiens
  misc_feature (1)...(467): n = a,t,c or g
aggcncaattgccctcctgcggcattcggcacgagtcactgtctatggcagttatagccttataaaatgtatttcttaagtaataagagttgcaagtcaaaattactccttgatccgtggagtacacaatggatgttgtattatcagacatgaaaacattgatcttgaacatcttcatcagagctcttgggtaactaggtgcattgtcaaatgagcagtaatattttgaaagaaatctttctttctgagcagcatgtctcagcaatgagcttaaaatattcagtacaccaaggtatcaacagatgtgctgtgcccaggcttctttgttcctatagagcacaggaagagtagatttagtgtcattcttaagggcactagaactttcagaatgataaatgagcatttgtttcaacttaaagtcaccagctacaattgtccctgtctgtagaagctttgaagccaggcaa

SEQ ID NO: 95888 - DNA, 450 bp, Homo sapiens
tctatctatctatctatcccatcaatctatcaatcaatctatcaatctatctgtctatccctatctatctatccatctatctatatctgtctatatctatctaacatttatctatcatctattcatctatcagctatcatctgtctatcaatatttcaatcaatctctctatccctatcaattaatctatctacctacctatcaactatccatctatctctatcatctatcatctattcatctatcatttatcatctgtcaatccatcttcctactatctatcaaaagcaacacattttcttcctgactttaaaaatatttaagtgggccgggaggatcgtcacgcctgtaatcccagcactttgggaggcctaggcgggcggatcacgaggtcaggagatggagaccatcctggctaacatggtgaaaccccgtctctactaaaaatac

SEQ ID NO: 95889 - DNA, 446 bp, Homo sapiens
  misc_feature (1)...(446): n = a,t,c or g
nctcgtagatcattagaccaccgtggtggaattcttttaaagtagttacggggtgatagtaacctaattgtcaggcactgcagagaacgaaatacagatcctctctggagaaagtcaccttcaaggcaaacctaaaaaaaatccctggagttcagatgataaactataaggaaaaaaaatccctattgttaagttcctttgaatatgtgttcactaataaaaatcccacaaacacaaagcaacaggaagtaggccaccataaatgagaatgagcagaaatcataaatagcagaattatgcccacagagactttggatattagaattatattgctgcatataaagaagtatgtttgccaggagcggtggctcacacctgtaatcccagcactgtgggagaccggaggtgcgtggatcacctgaggtcaggagttggagaccagcctg

SEQ ID NO: 95890 - DNA, 470 bp, Homo sapiens
  misc_feature (1)...(470): n = a,t,c or g
aggggaggagnnncnnagnnncccccaatcgagatccatttggagtgcggtggaattcccacacatacaaacctacatacgcacacacaaacacacatgcatacagtacacattgattcatacaaacacatgcacacacatataaacacatggacacaacacccatgcacaaacatataaacacatgtatacacatataaacacatgtacgcatgcgcaagtcccgagaacccacttctagagtctttgggctcttcaccatctagatgcccacctggggctccccatagagctctgacccatctcggaggagctgcctcttctcttttttttttttttttaaaaagggatttttgttttgccccccaggtggaaaggcgggggaaaattttttgttaattgaaacttttgcttccgggttaaaaaaattttttttgcttaaccctcaaaagaagtgggaactacagcca

SEQ ID NO: 95891 - DNA, 479 bp, Homo sapiens
  misc_feature (1)...(479): n = a,t,c or g
ggggnaggagnncaggggnccnnnntttgannccactgatgtctcttagtaccgtctggtggaattcctgggaagtgaggagcacctctgcccagtcgccccgtctgggaagtgaggagcgcctctgcccggccgccccgtctgggatgtgaggagcgcctctgcccggccgccccgtctgggatgtgaggagcgcctctgcccagccgccaccccatctgggaagtggggagcgcctctgtccggccgccccatctgggatgtgaggagcgcctctgcctggcctccccgtctgggaggtggggagcgcctctgcccagccgccccgtctgggaggtgaggagcatctctacctggctgctcatcatctgggatgtgaggagcacctctgcccggccgacccatctgtgaagtgaggagcgcctctggccacccacccttcctctgggaggtgaggagcgtctctgtctggcctcccc

SEQ ID NO: 95892 - DNA, 441 bp, Homo sapiens
  misc_feature (1)...(441): n = a,t,c or g
aatcgagcncctcaatggaagagcactagacagngcggnggaattcggtacacacctgtagtcacagctactcgggaggctaaggcagaagaatggcttgaacctgggaggcagagattgcagtgagccgagattgcactccagcctgggcaacagagtgagacttgggggaaaaaaaaaaaggaggaaggaaagaaaagaaaggtnatggcttttttacataccaccaaaaacaattagaaaatgaaatttgaaagacattgctgtttaaaacaaaataaaagtctgttttagtctgttggggctgctgaaataaaaaaccatagaccgggtagcttatgaacaacgggagtttatttctcacagttggggtggctgggaagtctgagatcgtggggccagcatggggccaaaaaccgtggtcgggttctggggagggct

SEQ ID NO: 95893 - DNA, 396 bp, Homo sapiens
tttttttttagtaaagacaaggtttctccatgttggtcaggctggtctcaaactcccgacttcaggtggtccgcctgccttggcctcccaatgttgggattacaggcatgagccaccgcacccagccagaagcaaaccttataaccaatgcgactgatcctatatgctgtgggatttagcggacaccacacagaaaacatcagtcaaactcaagttgcaaagcctaatcagatccttacatccttgtatccacaaggttaaaacttttcatttaatcctataccaaattccaaacctctacaaccacattttaacaatgaggtatactggagtagtaaagtgaccatgtgacctggctgcccaggaccattccagtttaagcccactgtcctagca

SEQ ID NO: 95894 - DNA, 412 bp, Homo sapiens
  misc_feature (1)...(412): n = a,t,c or g
atcgagtccatagcccaagcggaggaattcggattccctacgttggccggactggtcttgaactcctgaccttgtgatccgcccacctcggcctcccaaagtgctggaattacaggcaggagtcactgcaccttgcctgtttatgattcctaagatttactaagggcttaggcttttttatacttcagattatgtatagggataaaagaaaattatacaggaataattccttttcctcaatttggatgcctttgatttttttctctaatttctttgtcttggatatttagtaccatgtggagtaagtctgactagagcgggcatccttgccttgttctagctcttatagtaaaagcttacaacatatccctgattatgaagtcgatagcagtttttttggctatatatggcn

SEQ ID NO: 95895 - DNA, 490 bp, Homo sapiens
  misc_feature (1)...(490): n = a,t,c or g
nccttgaganttttagngccgtgncgnggaattccggcggcggaggaaagggaacatcacagaaaggtgaagaaatttgccctaaatcataaaactttgtaagtggcagaacaaggatttgaagctggcagtctggttccagagatggggttttactatgttacccaggctggtcttgaacttctgttctcaagagatccacacacctcagcctcccaaagtgctgggattacaggcgctgctttccaccagcgatggagcgtggggacagtactgctgcaagtggatcgtgggactcctccagtaggtgactgtggctcgagaactccccagtggcctgggcaagcctttctcagaactgctctgaagtctgaggcccatcctccccactcctccacagatgtcacacctgtactgtggtctgaaggatctccctgccttctatcccctccttctttgtccttcacaggcggntccccccatatggctc

SEQ ID NO: 95896 - DNA, 199 bp, Homo sapiens
ccaggctggagtgcagtgacacgatctcggctcattgcaacctccgcctccgggttcaggtgattctcctgcctcagcctcccgagtggcttgggattgcagggtggctacggaccacaacatggataacacgtcaactgtgctgcgggagtggctggtggccgtgaatagtttgtaccattccgtggagtggcggccg

SEQ ID NO: 95897 - DNA, 370 bp, Homo sapiens
  misc_feature (1)...(370): n = a,t,c or g
tacagaccaaaatgtccatcaacagggacttagattgacaaacgtggaatatccatataatttacattattcaacaataaaagggaatgatctactgatgcaacaacattggtgaatctcaaaatcatagtaagtcaaagaaaaaggggctggtcaagcacggaggctcacacctgttatcccagcactttgggaggctgaggcgagtggactgcttgagctcaggagttcgagagatgaaaccctgtctctacaaaaaatacaaaaattagccaggagtggtgatgcgcacctgtggcccaagctacttgggaggccgaggtaagaggatgagtggagcctgggaagtctgggaaggctgtagtgagcn

SEQ ID NO: 95898 - DNA, 365 bp, Homo sapiens
  misc_feature (1)...(365): n = a,t,c or g
cgttaggctcacttaatgctgactgcaactctagcgtacccacggccatcgctgggcgctgtgaagtatcccgactggcagctcaccctgattagctggtgatttcctgtgttcttgggcatgtcctttcccttccctaggcctgaattttactctttgtaaaagaatcacagactcaggttggatggaaggattcttctgttctgtcatttgtgattttgtcaggcagtcattggccccacaggctaagncactgattatttctatttatttatttatctgagacagagtctctctctgttgcccaggctggagtgcagtggcaggatctcggctcactgcaacctccaccttccggattcaag

SEQ ID NO: 95899 - DNA, 363 bp, Homo sapiens
  misc_feature (1)...(363): n = a,t,c or g
ttttatgagcatagatattaatgattattatgncttcttgtataactgacttctttatctttatgaaatctcttcatcccctgtatctttccttgacctaaaacctgatttatctaaatttaaaatagctagtccatatttcttttgattagggctagaatggcatatattcctccatacctttatatttaatgtatttgcatctttcagtttaaaatggttttcatgtacacattgctgggccttgntttatttgttgttttttttttttttgaaacaaatttttgttttgttccccaggttgaaaggagggggcaaattttgggttaattgaaccctccgcctcccggttcaaaggaattt

SEQ ID NO: 95900 - DNA, 332 bp, Homo sapiens
cacgcctgtagtcccagctatttggaaggctgaggtgggaagatcgcttgagcctcaggaggtagaggctgcagtgagccatgatcgcaacactgcattccaccttggctgagagtgagactctgtctccaaaaaataaaaaatacaaaaataacacaataacacaatcagagatttccttcaggtgctatgaaaagaaactgaggcaaactggcagtaactcaaactaaaagacagttgcctgagttaggataatggctgtactatgattcaataatcgacaaattcaattccaagtccctcttcacctgcagatacttagaaaagctaaa

SEQ ID NO: 95901 - DNA, 483 bp, Homo sapiens
  misc_feature (1)...(483): n = a,t,c or g
aggtgcggnnnnnnnnaaattgatgacctcgagtacctgcggtggaattcggggaggctaaggtaggatcacttgatcccaggaggcggaggttgcagtgagttgcagtcacacccctgcactccagcctgggtgacagctagaccctgtctcaaaaaaaaaaaaaaaaacgggaaaaaaacctagggggactaggaaatatggggtttgaaggtttatgggagggaatatccccttaaaaagtggtgtttttgggggccggggacaaatccagaaaaggatggttgttgataggaataaattttggggttgggggcggggggaacaaatgtgtttggaaacccccaccccttatttatggaaaatagaggggcggggctaaactttgtggcggtttattatttttaccacctaagtttttacacaataaagctttattgtttttgggaaaaaaaaaaaaaaaaaaaaaaaaaaaagccggga

SEQ ID NO: 95902 - DNA, 438 bp, Homo sapiens
  misc_feature (1)...(438): n = a,t,c or g
natcgatgacactcctcagtgcggnggaattcgttgcagtgagctgagattgcgccactgcactccagcctggatgacagagtgagactctgtctcaaaaaaataaaaagaaaaaagagagaaagagagagagacagagagccatgagtttccgactcatccgattctggcttaacaccccaggggtcactctcgttagccttcctcactttcatatttgtaagttggttctctggtgggaagaaacctgcctatgattatttacaatatatttgcatatttgctcagtcttctctgaactatacaggccactccctctgctgctggctaccccacatccctgcccttactggccccaaccttgaaaggagcctcgctggctgaattcgcagctcccatcatagtggccactctgatggttgagtggccttgctgcan

SEQ ID NO: 95903 - DNA, 472 bp, Homo sapiens
  misc_feature (1)...(472): n = a,t,c or g
natcgagnactgaggncctgcgnagnggcnnnnnnnnanaaccactactctcttcnnccgtgtcagacagggatattcaagtcttcttatgtttctgctgccttttgtttgcctatgccctgctggcagaggtggagtctacagaggcaggcagtcctccttgagctgcagtcggctccacccagttcgagcttctcggccgctttgtttacctactcaagcctcggcaatagcgggcgcccctcccccagccttgctgccaccttgcagtttgatctcagtctgctgtgctagcaatgagcaaggctccgtgggctaggaccctctgagccaggcaccggatataatctcctggtgtgccatttgctaagaccattgcaaaagcatagtattagggtgggagtgacccgatttttcaagtgccgtctgtcacccctttctttgactaggaaagggaattccctgacccccc

SEQ ID NO: 95904 - DNA, 418 bp, Homo sapiens
tggggtcccttgtactaacatactgagttagacttctgcaaagcactctagagcatgacaagggaagattctggacaattaattgatgggaagaaatgatgataatcataaactgctaataacctccattatttaaatattcagcccttgccctgcctcattctactcatcctccaatacagaaaagcccctcccttatttagttctgttttacgtcataaaggaaactgggccgggtacggtggctcacccctgtaatcccagcacttagagaggctaaggtgggtggmtcacctgaggtcgggagttcgagaccaaactcaggcctggcaacatggagaaccccatctctactaaaaatacaaaattagctgggcgtggtggcacacacctgtaatcccagytwctcggggggctg

SEQ ID NO: 95905 - DNA, 403 bp, Homo sapiens
  misc_feature (1)...(403): n = a,t,c or g
cttgagtagcatacaggagtttatattaggggtaagaaatcacttgctcagcacttaatttcattcagtccaaggaaaggacaagaagtaatcttagctcatggctgtagtcccagctacttgggaggctgaggcacaagaatcgcttgaacccgggggttggggaggaggtgaggaaggttgcagtgagctgcgatcatgtcactgcactccagcctgggtgacagagcgagactttgtctcacacacacacgaaaaaaaaaaaaaaaaatggggcggccctttaaaaagaacccttagggggcccaagtttacgcggggatgccaacntaaaagtttttcccttatggggggtgcaataaaaaccgaccgggagattttggggaggaaccctaccttcggg

SEQ ID NO: 95906 - DNA, 411 bp, Homo sapiens
  misc_feature (1)...(411): n = a,t,c or g
ctcaatcatataccaaatctctccctcactaaacgtaagccttctcctcactctctcaatctaaaaaaaaaaaaaaaaaaaaaaaaaaaaaaaaaaaaaaaaaaaaaaaaaaaaaaaaaaaggggggggggggtaaaaaaaaaaccccgggggggccaaaaaaaaaaggggggggaaaaaaaaaattttccttctaaaaaggggggcaaaaaaaaaaaaaggggggaatttgggaaaaaaaacttttttgggggggggaaaaaaagggaaaaaaccccccaaaaaaaaaaaagccccaagggaaaaaaaaaaaatttaagggggaaaggggggaaaaaaaccccaaaagggggggggaaaaaaaaaggggnccnnnnnnaagaaacaacaaccttcggggagaaaaaaaag

SEQ ID NO: 95907 - DNA, 250 bp, Homo sapiens
  misc_feature (1)...(250): n = a,t,c or g
ggggggggccgttttaaaggaacccttgggggggccaaagttaacgggggagggcaaggtaatagttttttccttatggggggcggaataaaaaccaacttgggaattttgggaaggaaccttttttttgggggggggacaaattgggccaacctccctacaaaaattaaaggctttagggnnnnnnnnnntttttaaggggtaaagggggtaaaacaaccggaatatcctggcggttaaaaaaatgggg

SEQ ID NO: 95908 - DNA, 394 bp, Homo sapiens
gcaagtgagcatataaaaatgctcaacatcatatatcaatagagaattacaaattacaacaacaatgacatattaccacatacctagtaggatggtgaaaatccaaaactgacaccaccaaatgctaatggaggatgtggatcaatatgaattatgatggaatgcaaaatggtatagctcctttggaagtcagattggcagattcttacaaaagtaaacatactcagctgggcgcagtgacttacacctgtaatctcagcactttgggaggccaaggcaggtggatcacgaggtcaggagatcaagaccaaaataagaatttaagagaaataatggggccgggcgcggtggctcatgcctgtaatcccagcactttgggaggccaaggtgggcg

SEQ ID NO: 95909 - DNA, 389 bp, Homo sapiens
cccacgcgtccggggtggcagaaggataccctgttttataatgaacaaaaaaaaaaaaggggggggggggcgaggcaaaattttttttaccaccctttgaaagtttaatcccagggagctgggtaaaattgcttaaaaaaaaaaaaaaaaaccaccctgggcccgggcttcccccgtttttgggggccctggggaagggttttttgggccctttaaatttcaaaatgggtttgaaaaaaattgaaaacccgggcttcccaaaaaaaaaaaaaaaaaaaaggggggggggggggggggcccaatttggtgccccaattttttaaggggggtgggggggaaaatttttttccccttaaagggccaggcccccctatatttgaattgcccct

SEQ ID NO: 95910 - DNA, 387 bp, Homo sapiens
caactcctgggttcaagggatcctcccacctcagcctcccaagtagctgggactacaggtgtgtgccatcacgtttggccaattttgcattttttataaagatggggtctctatatgtttcccaggctggtcttgcactcctggcctcccaaacactgggattacaggtatgagccactgtgcctggccacagacacaccattttacattcccacagcaatccaatttctccacatcctcaccattaagaaataatttttgagctgggcatggtggctcatgcctgtagtcccagcacttcgggaggccgaggcgggtggatcatttgaggtcaggagttcgagattagcctggccaacatggtgaaaccccatctccactgaaaat

SEQ ID NO: 95911 - DNA, 374 bp, Homo sapiens
  misc_feature (1)...(374): n = a,t,c or g
taatcgcataaaacttaaaactttacagtcagaggttcatttcctcttcttaacaccaaaaaaagaaaaaaaaaaaaaaaaaaaaaaaaaaaaaaaaaaaaaaaaaaaaaaaaaaaaaaaaaaaaaaaaagggggggggggggacaaaaaaaaactagggggggggaaaaaaaaaggggggggagaaaaaaaaaaatctctctttctggggggggagaaaaaaaacccccggggggaaatggggaggaaaaaatttttggggggggggggatttggcggacacccacccaggaaaaaaaagaggggggggggggaaaaaaaaattcatgggggggggggggggaaaaaaaaccggattggggggggaaagaaan

SEQ ID NO: 95912 - DNA, 386 bp, Homo sapiens
actaagccactggggagtaatttaacagtttgctgtgtcatagttcttagacttaaaacacttttttttttttttaactagccttttttgacccaaaaatattttttcacccccccagaggagggttttttaaaaaaacctaaccggagggaggggcccccttctcctataacggatcctactttgtggccaaacatgatgaaggggattgtaccaaaggccccccctataatttttatggggggagggataaacatgactttctcgggttttgtcacaaccaaggccccatttccacggcccctccgttttaaccctatgttacggcagggattcgacctcctcacattaaaggcatccgtgggggagttctgcttcctggtact

SEQ ID NO: 95913 - DNA, 414 bp, Homo sapiens
  misc_feature (1)...(414): n = a,t,c or g
tccaggatatataagcctcttagaggtttaagcgtgtcttatgtgcttttctgtggtttagctgttggctctgaattaggagagaacaatatatcttattgctgtttgggaaagcttggattattttgtcagcttagaattggtgtgtgtgtgtgtgtgtgtgcgcgtgtgcgcattttttgatataaacagcttttgcttgtctttctctttaggggcacagaaaagagttaaaatancccgcctgggggggggggggcagctcacacctgttatcccaacactttgggaggccaacgcgggcgaggtcgggagttctagaccactcctgccaacatggagaaaccctgtctctactaaaaatacaaaattaacccggcatggtggcccatgcctattatctccgctacctcg

SEQ ID NO: 95914 - DNA, 400 bp, Homo sapiens
gcgttcaaggatacagtgagctataatcacacatctgcactccagcctggctgatagagtgagacccttgtctcaaaaaaaaaaaaaaaaaaaaaaaaaaccccccccccccccaaaaacccaaaaaaaaaaaaaaaccccccacccccccccccgggggcaaaaaaggggccagggggaaaatttctcccccccctattttccaaaaaaaaagggggggttttaaaaaattcccccaaaaaaacccccgaaaaaaaaaaaaacccccccccccctggggaaaaaaggccccccccccccccgggggggccctcttgggggttttccccccccccccccccaaaaaaaaaatgggcccccccccccaaaaaaaaaacccccctttttttttccccccaag

SEQ ID NO: 95915 - DNA, 462 bp, Homo sapiens
  misc_feature (1)...(462): n = a,t,c or g
cattgaacnactgatgaccactagccagnngcgnggaattcgcgcgttctgtgcctcctgcgcccctggaggccccttcgggcccgcggctgtgcttccgacggggcggccgggggctcagagatccaagtgcgcgccctggcgggtccggaccaaggctgtaggttccatgaggacaggccttgagtctgtcctggtctctggaatcacggtgtctagtagaggccagcacacagcaaatatataaatgtacaaatgagtgaatgaagagaatctgattggccttaaggaacttacgcacttaaaataattgggcagaagagaagcagtgaaggagtgcagaggcatcacctgaaagatacaagattggccgggcgtggtggcacatgctgtagtcccagctactccggaggctgaggcaggagaatcgcttgaacctgggaggcggaggttgtggtgagc

SEQ ID NO: 95916 - DNA, 394 bp, Homo sapiens
agcaggcctccgtctcgaacagaaaaaataagaaattttttttttgtggagacggggtcttgctatgttgcccaggctgctctcaaactcctggactcaagtgatcctcccacttcggcctcccaaagtgctgggttacaggcatgagccacagagcccagcccacaagtgttaatagagcacttaccatgtgccagcgcctgtattgggtgcagactcgaccctgccattggggaacttgctgttgtcataatggtagggcagttctgcaagtatgcgagcatttgtgctcattttcaagtttgggtttctctattcccaattcattttcagccccttatgccagcttggcctgcttgtcactgctttcatggattttttaacattctgtctg

SEQ ID NO: 95917 - DNA, 391 bp, Homo sapiens
gaggttgaggctgcagtgagccaagattgcaccactgcattctagctggggtgacagagcaagaccctgtcggagagaaagaaaagaaaaaaaacctaactccctggcctcatggagcctacattttggtagaggctaagtatggcttcatggtgggtgcagggcaaaagctaacaccatcctggagggagctgcccctctgggggataccatgcggcgccactagagagtgcttgccatcctccagacacgtcatggaatccccattggtgactgaatgaaatccagattcaggagaggaagtaagtgcagaataaggctgtgaaacccagctcccccgatcccatgacctgggaattatccagcctgcctttgtttctttaaaccatgc

SEQ ID NO: 95918 - DNA, 401 bp, Homo sapiens
aggttgcagtgagctgagatcgcgcttctgcactccagcctgggcgacagagtaagacggcatctcagaaaaaaaaaaggggaaaaaaaaaaaaggggggggttttttatttttgaaagacccccaaaaatggctggggggtttgggctttgaaaaagtaaagaaaaggaccctgggccccaaagaaaacttggaaaattaaaaatggaacatttaggagtcccccaccggggggggaaaatttttttttaacggggggggcttaacaggattttccaaaaaaaaaaaagaaaggggggggggggctccccaaaaaaaagggtaaaggtaagggggggccttttttttattttaaaaaaataaatttttgggggttccaataccttaatgggaacaagggg

SEQ ID NO: 95919 - DNA, 407 bp, Homo sapiens
gcgctcaaaaaaaataaaaataaataaataaattaaactgtggtgcaaagtttaaaggtttgggtgacacatcagaggcagacttggggaagaagtgtctgtcccaccctcccagaccacatcctctaagggcttgggccccggggatgctgggtggccccttggaactgtgaggagctgacacatgggtggggaccagaggaggggacgtggagagccctggtgaggatgtgggcgctggtggggactgcctggtgtgtgatggggacaggaacaggcatggagatggcccacacccgagacagtgggctcctggggccacctcttctccacacggcggcagcaggtctagttcgggcctaacagcccagccatccctgagagccagcgccgagggtgcagcagct

SEQ ID NO: 95920 - DNA, 402 bp, Homo sapiens
  misc_feature (1)...(402): n = a,t,c or g
gagactctggaaatccttttgcattaaaaggactttacacacctgtgtaaaaggatgtgggagaggagggtctgaagctgagctgctaaatgaatatccctgctctgctggtcaataaaacgcttcctaatagcanaaaaaaaaaaaaaaaaaaaaaaaaaaaaaaaaaaaaaaaaaaaaaaaaaaaaaaaaaaannnnnnnannnnnaaaaaannnaaaaannnnnnnnnnnncccaanaaaaaaaaaaaaaaaanaanaanaaananaaaananaaaaaaaaaaaaaaaaaaaaanaaannaaaaaaanaaaaaaaaaaaaaatttaaaccccnaaccccnaannanaaaaaaaaaaaaaaaaaaaannnnnnnnnnnnnnnnnnnnnaaannaannnan

SEQ ID NO: 95921 - DNA, 378 bp, Homo sapiens
tttctccatgttggtcaggctggtctcgaactcctgacctcggatgatccgcccaccttggcctcccaaagtgctgggattacaggcatgagccactgtgtctggccacgaaagggttttaaaaaggaaagtaatatgcttggatttgcgtttctaaaggttcgctcttggcagcagtgtaaagaagaaagccaaactgtgggagataagataataatagtatggacaaaaaggattaaaatgatgaaaagtaaaatgttaagcagttttcaacagaacttactgatagtttgatttaggagttgaaagcgtaggatgacttgaacactcgaatgtgattaacagaaataaccaagtgagggttatttcaaaagtagt

SEQ ID NO: 95922 - DNA, 191 bp, Homo sapiens
gttgcttgagcccaggaggtggaggttgcggtgggctgaggttgtgctactgcatgccagcctgggtgacagaatgagactgtgtctcaggaaagaaagaaagaaagaaggaaagaaagagagaaagaaataaagaaagaaagaaagaaaagaaagaaggaaagaaagaaagaaaaaaaaaaaaaaggggg

SEQ ID NO: 95923 - DNA, 384 bp, Homo sapiens
cttgagcctaggaggtcaaggccgcagtgatcccagatgcgtcactgcactccagcctgggtgacagagcgagactctatctcagaaaaaaaaaaaaaaaaaaaaggggggggggggggggccaaccaagggagggaggggggggggggcccttaagaagaatagggggaccccccttgggggggggattttgaaaaaaggacctcaaagggggggggggaaaaccccttttttcccaaaaaaagggaaaattcagggcaagttttttttgggggaaaaaagggcttaaaaaattaaatttttaattttaaaagccctttcagccccttggggaaattttttttggggggggggtatgccctaaacaccagtttttgggggata

SEQ ID NO: 95924 - DNA, 408 bp, Homo sapiens
tgggattaaaggtgtgagccactgtgcccagccatttttttttccttaaatatttgcaagaatttaccagtgaagccagttgggtctggagttttctttgtagaaatgtttaagttatgaagtgtatttctttagcagaggaatattcagactttctctttgtttcaattttggaaaattgtggctttcaagggctttgtccattttatctaagttatttgttggcacaaagttgttcataatattttgtattatctgtttaatcctgttatctatagtatctgtagggatgttcccttgttcgtttctttttttttttttgagacggagtctcgttttgttacccaggttggagggcaggggcacaatctgggtttactgaaggcttaacctccggggctaaccctt

SEQ ID NO: 95925 - DNA, 398 bp, Homo sapiens
atctctgaaaatttttacttcattccatacttcatttttttgaaaatgaacttaacatgggcaccagaatggggttgattcatcattcttggattctaagtcttaacaatttttttttctttttcttttttttttttttttgggaaacggagtttcttttttttccccaggcgggggattttgtttaattgaaaccttttgcttttaagtttggggcaattttcctgcctcaccctcccaagggggggccccctgtacccccggttactcagggggttggggaaggaaaatggcttaaccctaggaggcaaaggttgcagggacctaaaatattgcccttgaactccaacctgggttacaaagcaagattttgtttaaaaaaaaaaaaaaaaaaaaat

SEQ ID NO: 95926 - DNA, 412 bp, Homo sapiens
  misc_feature (1)...(412): n = a,t,c or g
cgaaatcacaccactgcactgcagcccaggcaccagagcgagacttcatctcanaaaaaaaaaaaaaaaaaaaaaaaaaaaaaaaaaaaaaaaaaaaaaaaaaaaaaaaaaaaaaaaaaaaaaaaaaaaaaaaaaaaaaaaaaggggggggggggggttttaaaaaaaaatttttttttggggggggggggggaaaatttttttttttttttggggggaaaaaaaaaaaggggggggggggggtttaaaaaaggggggggggggaaaaaacggggggccccaaaaaatttgggggggggggaaaattttttttttgggggggggggaaaaaaaaaaaaaaaaaggggnnnnnnnnnnncnnnnnnnnannnntcntnncttttttttctntaatttaaaaagccttcctcct

SEQ ID NO: 95927 - DNA, 400 bp, Homo sapiens
tgtgggcttcctgaggctgcacagcatgcttctcattgcttgtccgccacatgcttctctggggcttcctctccatgtccgccagcagcctgttgagctaaggcaccttccctttccttggtgctcttctctttctccactttcttcttgggcatacagggtcttgcccttttgcccatgctggagtgcaggggcgcaatcacggcttactgcagcctcaacctcccggactcaagtggtcctcccacctcagccccatccccgaccccctaccaatagctggggctacaggcacacaccacaatgccctactactttttaaatttttttctagagacgggctcccactatgatgctcaggctattctcgagctcctgggctcaacaatcctcctgcctc

SEQ ID NO: 95928 - DNA, 391 bp, Homo sapiens
agtgtgttctttcagagactctgagcattttgagagttggctcatatgtcacttacctctccaaaaacagaaactggcagaatttgggcactcaagaaatgttggatggatacatgaataggcaaatgcatggatggacagatagttgaatgaatgaatgaatgagccagcagatggacagatggacaaattgatggatagatagaaggatgaatggaaatgaatggatggataggcaggtagatggatagatagttgaatgaatggatagatggatggatgaatgatagagggatggatggatagatggatggatagacagatagatggaccaatggatggagggagcttcaccactcctgtgcttatggcttaagtggaaaaacattaa

SEQ ID NO: 95929 - DNA, 507 bp, Homo sapiens
  misc_feature (1)...(507): n = a,t,c or g
tcttcagagagctcacagtctagctccataaataactaacttataataccctgtgtttcatggaaaggagacagcataagacagataggatctgctctcagcatggagggaggcaggaagaagacaggaggagcagtattttcaagactgcataaaagtttgcaaagaaaacaagggagtgagggacattccaagcaggggcaactgagtagcaatgacagaggtcaaaggcgctctggtgtctccaagggaccatgagcaacttggtattgtcngagcgaanaaaaaaaaaaaaaaaaaaaaaaaaaaaaaaataaaaaaaaaaaaaaaaaaaaaaaaannnnnnnnnnnnnnnnnnnnnnngggggnnttttttagaggggnnntttaaaaaannnggttggtggaggtttaaaattttttttagtgggaaaaaatggggggtatacgnggggtttataganaaannnngnggnaaaaaannnnnnnttaggngnnnnnntttaa

SEQ ID NO: 95930 - DNA, 388 bp, Homo sapiens
cctgcattagtttgctaaggaaaatggcctccagctccatccatgttgctacaaaggacatgatcctgttccttttatggctgcatggtattccatggtgtatatgtaccacattttctttatccagtctaccattgatgtgcagtaaatgcccttcagaaagttgaagccgggctcagtggcacgtacccgtagttccacctacttgggaagctgaggcaggagggctgctgaggccagtaattcaacattgtattgtggtattactgctcctttgactactggtctccagcctgggcaatgcagtgagaccccatctttcataaaaaaaaaaaaaaagggggggagaaaaattttttttttttgttgggccccaaataaaacttga

SEQ ID NO: 95931 - DNA, 403 bp, Homo sapiens
  misc_feature (1)...(403): n = a,t,c or g
aaaggtgggaggattgcttgagcccaggagtttaagactagcctgagtaacatagcaagacccctgcctctacaaaaaaaaaaaaaaaaaaaaaaaaaaaaagggggggggggcttttaaaaaaaaaaaattttaaggccgggggggggaaaaaaaaatttttttttaaggggccaaaaaaaaaaaattggggggggggttttaaaaaaggggggaaagaaaaaaaccggggggaaaaaaaaaaaaatggtttggaaaaaaatcctttttttggggggggggaaaaaaaaaaaaaaggaggggnnnnnnnnnnnnnnnnnnnnnnnnntntttnttnnnnnnntttttttttttnntnnntntnnttttttnnnnnnnnnnnnntnnnttttttttttttttt

SEQ ID NO: 95932 - DNA, 398 bp, Homo sapiens
aaggaaaggaagggaaggagggagggaggaaagaatgaaggaaggaaagaaggaaggaattgatgaaggaagagaggaaggaaagggagggagggaggaaggaaggaaagaagggattgtttctttaacctcatccccatttttgccaaggagatctgaggcctgatctttgagctgctaacaccattccgtgaggttacagcctcctcacatttcctagatgagcctgaaaggaatcttagaatgatctttgtgggaagttgtgaagtaatagtccggcagatcacggcccacattgtgtgtctgtttgaatctatgtgattttccagaggccagggcattatcagcaagaccctcttacactgctctttttagtagtgtgtgtacaaacaccacag

SEQ ID NO: 95933 - DNA, 408 bp, Homo sapiens
  misc_feature (1)...(408): n = a,t,c or g
tttcgttgcctcccagttaggctgctcaggggtcagtggtcagggacccacttgaggaggcagtctgcccgttctcagatctccagctgcgtgctgggagaaccactgctctcttcaaagctgtcagacagggacatttaagtctgcagaggttactgctgtctttttgtttttctgtgccctgcccccagaggtggagcctacagaggcaggcaggccttcttgagctgtggtgggctccacccagttggagcttcccggctgctttgtttacctaagcaagcctgggcaatggcgggcgcccctcccccagcctcgctgccgccttgcagtttgatctcagactgctgtgctagcaatcagcgagactccgtgggcgcaagaccctccgagccaggtgccggatan

SEQ ID NO: 95934 - DNA, 403 bp, Homo sapiens
atgttatgacaggattagccatggtggtgagggaggccttcaaatcctcacctgcaggggagggcatacgtctgacttacagagtgctaagattataggcgcaagccaccatgccaggcctcattaatgagaaataacgggtgtgaccgcacacacgctctttaagcatttctacttataagatcctatctgcaaatagagataattctacttctttcttttcaattatgatgccttttatttccttttcttgcctaagtgtgccggttagaacttctagcactgtgttgcatacaagtaatgaatgcagacatccttgtcttgttcctaattttagaggaaaagctttcagttttcaccattgagtgtgctgtggctttctcatatatgaattttattatgg

SEQ ID NO: 95935 - DNA, 412 bp, Homo sapiens
cttcaaagcttcaaaggccagcctgtctcccttattaggggctaacacagctggtgactttaagttgaagccagggctcatttaccattctttacattcttaagaattatgctgattctattctgctcgtgctctgtcaatggaataacaaagcctggatgatagcacatctgtttacagcatggtttactgaatattttagcccaccattgagacctgctcagaaaaaaatttctttcaaaatgttactgttcattgacagtgcacctagtcaaccaggagttctgatggagatgtacaaggagattaatgttgttttcatgcctgctaatacaacatctattctacagcccatggatcaaggagtaattttgactttgaagtcttattggttaagagatacatttcataa

SEQ ID NO: 95936 - DNA, 398 bp, Homo sapiens
agaatcgcttgaacctgggaggcggaggttacagggagccaggatcatgccgcttcactccagcctggacaacagagtgagactctgcctcaaaaaagaaagaaagaaagaaattggagtcctcatacgttgctggcaggaatgtaaaatagtccagccactgtgggaaatagtttggtatttcctcaaaaagttaaacagagtcaccatatgagccagcagttccactcctaaatatatatccaagagaaatgaaaatacatgtttacacaaacacttgtacacaaatatttatagtagcattattcacaatagccaaaagtggaaaatggtggggcacagtggcttgcgcctgtaagcccagcagttcggaaggctgaggtgggtggattacttga

SEQ ID NO: 95937 - DNA, 424 bp, Homo sapiens
  misc_feature (1)...(424): n = a,t,c or g
gcgaaggttgcagtgagctgggatcgcaccactgtactccagcctgggcgacagagagtctgtctcanaaaaaaaaaaaaaacccaaaaaaaaaacccaatggggttatgccttccaggggcccggggtaaagggggccattccttttttaggggggggggggccaaaaccccaggggggggttttgtggcccaaaaccccaaaaaccattttttggggcccttaaattaaccccaggggccacccccttctttgtttttagaaaaaaaaccctgtttttaacccttttcccccgggggagggggggaaacccattttttttaaaaaaaaaaaaagaaaggcccccgttgtttatttaatttcttaaaccacggggttccaccgccccccaagggcccgggcatggtttaaaacatccccccaa

SEQ ID NO: 95938 - DNA, 395 bp, Homo sapiens
gaaaataaacagtctgagagaaatgaatgaccccattaactgaactgacaaatgtgtaaaggaagcaacagaaggagaggaaaaagagtagggagtagacaaatcagcaagaaaaaaacaaatgctcccatcaaaaagtgggcaaaggatatgaatagagaattcatatacaaatggccaacaagcacatggaaaaatgctcaacatcactgattatcagggaaatgcaaattaaaagcacaatgagataccacctgtattagtctgttttcacactgctgataaagacatgcccgggaccgggtaatttataaaggaaaagggtttaattggacttacggttccacgtggctggggaggcctctcaatcacggtggaaggcaaggaggagcatg

SEQ ID NO: 95939 - DNA, 389 bp, Homo sapiens
gaatctgtgcagataacaaaatgtcacgaagacatttaccttcgacagttttactggtcttttcaagggaccgacttttggtttcattggctgtctctattttgtttatttttgctcgttatctttgttacgtactgtgctccatctgccttagtttccgtgtgctcttctttttccagtgtcttaagggagatgcttaaattaatatttgagatcttcctctttttaaaaactgtataggcaattataaatttccctctaagtactgctttagctgcaacctgtactttttttttttccttgcaataggatcttgctctgttgcccaaactggagtgcaggggtgcagtcacaaatcactgcagccttgacctcccgagctcaacatt

SEQ ID NO: 95940 - DNA, 385 bp, Homo sapiens
gcgcctgtaccgagggctaaaccccacagtgggtgtgagatgctggcctgggctggcgtgaggcaggatgctggatgagtctagctgctggtcctgtggctgctggtcctgggaaaggaaggctagtggtggagtctggtcctccatccggctctccgtggggacacagaaagggtggggccacccagggcctcaccagggaagcaggacttgagctggactgtgaaggactcagagaaaaaggggagggtgttcaggacagggaaggatgcaccacagcctggaggttggagtgtgggaactgttgaacgaaacagcagctctcccagcccaacttccagaaactgtgcatctaatcaacacaggccgggcacggtggctcacg

SEQ ID NO: 95941 - DNA, 446 bp, Homo sapiens
  misc_feature (1)...(446): n = a,t,c or g
attagttagcctaccntgngnggnggaattccagctattcgggaggctgaggcacgagaatcgcatggacccgggaggcggagggctgcagctgtctgagatcaggccactgcactacagcctggacgacaaagcgagactccatcccccactccggatgccccaaaaagaagacagtgtggaatggattttggatggcgaggatgtccaaaaagaaaagttcacccatgcagtgggtccagcgggtaagaagatcacttagattgagcggcatgagggctaacttatgtgataacaaagctaggctatatgaagtcatttggcaaaacactagtctaaatgctgctagaaaggtattttagccgggcacagtggctcgcgcctgtgatcccagcactttgggaggctgaggcgggtggattacttgcggtcaggagttcgagacc

SEQ ID NO: 95942 - DNA, 475 bp, Homo sapiens
  misc_feature (1)...(475): n = a,t,c or g
ttgagcccctggtattgagacataggacangcggtggaattccacacacacacacacagagactgcccctgcacacacacacagagactgcccctgcatacagacacacagagaccgctcctgcacacacacatggagactgcccctgcacacacacggagactgcctctgcacacacacagagactgcccctacacacacacacagactgcccctgcacacacacacacacagaaactgcccctgcacacacacacattgcttgtgcacacacacacacacacacacacacacacacacagagagtgcttgtgcacacacatacagagactgcccctgctgtcttttcttgcttttggagaagctgccagtggggagagaagcaactgtgtggacaccccacctgcctggcggcaagttctttgcagggcctccagccctctcagctctttctatatgctctacagacgtgctg

SEQ ID NO: 95943 - DNA, 386 bp, Homo sapiens
  misc_feature (1)...(386): n = a,t,c or g
gtcattcagtactgtaactgtcaatattgtaatttcctcaaaccaccccccatgcctcanaaaaaaaaaaaaaaaaaaaaaaaaaaaaaaaaaaaaaaaaaaaaaaaaaaaaaaaaaaaaaaaaaaaaaaaaaaaaaaaaaaaaaaannngggggggggggggattaaaaaaaaaaaaaaaattttccgcgggggaaaaaaaaaaattttttttttttttggaaaaaaaaaaaaaaaacgggggggggttaaaaaaaaaaaggaaaaaaaaaaaaaactttttaaaaaaaaaaatttttttgggggggggnnnnnnnnttnntnnnttncttnttaaatatcattctctttggaaagaaaaaatatcctaggaaaaaaaaaaaaaa

SEQ ID NO: 95944 - DNA, 408 bp, Homo sapiens
  misc_feature (1)...(408): n = a,t,c or g
tgcctgtaaccccggctactcgggagactgaagcaggagaaacgcttcagcgatttaggagaaccaggaggcagaggttgtggtgagttgaggtcatgccactgtactccagcctgggtgacagagcaagactctgtctcaaaaaaaaaaaaaaaaaaaaggggggcccgttttaaagaatcaaattttacgaccccgggcttgcaaagaaatattttttttttgggggcccttaaattaatttccggggccggggttttaaaacgccgggatgggaaaacccttgggtttccccaatttaataggccgtgggggnnnnnnngctgngcacagaggctgactcctgctgtgaccgacttttgggggtgaagggggcaaaaaccggggcgggaaattatatctttcttc

SEQ ID NO: 95945 - DNA, 397 bp, Homo sapiens
cggacgcgtgggggaagatagtgctgggcagagggaagagcaaaggctacgtctctgcattccaagattacaaatagagggtaacattcaccctccacccctcaacgcctctttcctgtgaccttcgggagctgcagaacttcagtgtccatcagacagaggcaatgcccctgacccagacgcctctagttgagagatagacagagctggatttatagcaccacagacctgacctggaatgagacttgcaaatggagtcttgctctgttgcccaggctggagtgcagtggcgtgatcttggctcaccaaaaattctgcctcctgggttcaagtgcctccacacccagctaattttgtatttttggtagagacgggatttcgccacgttggccaggct

SEQ ID NO: 95946 - DNA, 417 bp, Homo sapiens
  misc_feature (1)...(417): n = a,t,c or g
gagaatggcgtgaacccgggaggcggagcttgcagtgagccaagattgcgccactgcagtccgcagtccggcctgggcgacagagcgagactctgtctcanaaaaaaaaaaaaaaaaaaaacccccttaggggggaaacctttttacccttaggggttggggtttttaaataaaaaaaaaggggtgggaaaaaaggacccccggcccttaaaaaagggtggggcttaatttttttcaaaaaaggggggatgttttttttttaagcccccttttatacactttttcaaaaccaattgggaaccctttttccatttaaaaaaaaacaaaacccggttgggtttcctgggaggtaaaaaacccaaaaaaatttttttaaaaagaaattatgttgaaaccccattgtaaaaaatttctacc

SEQ ID NO: 95947 - DNA, 402 bp, Homo sapiens
  misc_feature (1)...(402): n = a,t,c or g
agatcaggagttcgagaccagcctggacagcatggcgaaaccccatctctactaaaaatacaaaaaaaaaaaaaagggttacttggttgggggaatagaaccctgtattctaacttcttgggggggttggggcagaaaccccggggggggggggttgcagggacttaaaataccccccccttggccaagggaccaaattttttttttaaaaaaccaaaaaaaaaaaaaaaaaaaaaaaaaaagggggggcccttttaaaaaaaaaaaattttaagccccgggggggggaaaaattttttttttttttggggccccaaaaattaatttcgggggcgggtttttaaaaaggggggggggggaaaacccgggggcccccccatttttattttttttggnnnnnnn

SEQ ID NO: 95948 - DNA, 380 bp, Homo sapiens
cttgggttattttctgcattctactctctaaacacttctgctgaagtgactttcttcatacatatgattttgcccaccttaggtatcatctgcaggataaatttctagaagtgaattgctgcctcaaagactatcctttattattattattggtaaagaatttctaggtctccttttaataaattggggcagccttatttttcccccagcaagtgaatctgttcttttgggttgaggtcgtacgtcctgaggggaacacaggtgttcccactccctaaagaggctacaacccaggccgggcgcggtggctcacacctgtaatcccagcactttaggaggccgaggcaggcagatcacgaggtcaggagatcaagaccatt

SEQ ID NO: 95949 - DNA, 415 bp, Homo sapiens
cacaaaaaaagccaaagaaagatatcaagagcatcagtgagctgtgggattataccagacaggttaagcatataattggagtcccagaaggaaaggtgggggcataggtggtgttagaaaaagtatttgaagaaataatgatggaagattttccaaatttgaaaactgaactgacaagtttgagaagttatccataccccaagtagaagaaacaccatgctaaaatgtatagtaatcaagttgttgaaaactggtgataaaaatattaagtgcaacgagaaggaaaaaggcacattaagtacagaagaaaaagatatcccagaagaaactgaagaaacaaaaacttatggcacgggagtaaattcagcattaaaataaatgtaattaaaaggaaaaaaaaaaaaacaaaaaaaaa

SEQ ID NO: 95950 - DNA, 407 bp, Homo sapiens
acggagtttcgctgtgttggccgggatggactagatctcctgatctcgagatccacccgcctcggcctcccaaggggctgggattacaggcatgagccaccgcgcctgtccatgccttccatttttcttaatacagattgagcatctctaatctgaaatctgaaatgctctagaatctgaaatttttgacatgacacacaattttcagatatttggattaacgatattaaaccagtatgtattctgtaaatattccaaaatctgaaagggtctgaaatttagaacacttctagtcccaagcattttagataaggcatactcaacttgtacctcaccagaactgaactgttgcttgggcctcagcaggagataccataggttgcttccttgtgttttttcctacatgg

SEQ ID NO: 95951 - DNA, 439 bp, Homo sapiens
  misc_feature (1)...(439): n = a,t,c or g
acctgcaaatagatacagcctatcctatactatttaaatggttggctgttttgttttatagaaattattttgctgaattcacaaataaaatttaagaagaaaaaaaaaaaaaaaaaaaaaaaaaaaaaaaaaaaaaaaaaaaaaaaaaagggggggagggggggggggggggggcggggggggggggggggnntttgggggggaaccaaaaaaaaaaaaaaggggggggagaaaaaaaacttgtgggggggggggaaaggggggggaaagggggggggttccttttattngnnnnttaaannnnannnnnnnnnnnaaaaaaaaannnnnggggggggggggnnnnngggnggtgcggttccccaaacacaccgaaccgcctgtcgggacgaggtcgagactggggggagggtgggggtagaggagataggcggagtag

SEQ ID NO: 95952 - DNA, 410 bp, Homo sapiens
  misc_feature (1)...(410): n = a,t,c or g
cccacgcgtccggttggaaaaatgggcttctttgatgggtctcaagttttggtgagctgggatagcttgatagggttttttttttttttttttggaaacaccctggtttggccccccaggcgggggggcgggggaaaaatctgggttaacggaacccttggtctcgggggtaaaggggattttttgccctcaccacccggagaagcgggaataacgggcggccccccccgggccgggtaaatttttttaattttaagaaaaaacggggtttttcctgggggcccggggggggccccaacccccggccccaaaggaaccggccggtttggccctcccaaggggctaggataacgggcaggcccccccccccccaacacgctgggaggttttggttaacccaacaaaaatgn

SEQ ID NO: 95953 - DNA, 383 bp, Homo sapiens
aaaaattatctttataatttcagtatgtatatgtcactttaaatacgtgaaagtctatatacaagagacagcttgagtagttgtagagtcttcattttaagaaatatataatgagttcttaatttttatgtttctaagaaggcttaatatttgattaacattcacatttcaaaaatctcagtagtatcataaaaaaactacacagaaacaatacattcactgaacacttttcattgagtagcagtttaaatcagtgtttcttaaatttaactgtattttatagtcacctaggaaactttaaaaattcaaattctggccgggtgcggtggctcacacctgtaatcccaacactttgggaggccgaggtgggcagatcacgaggt

SEQ ID NO: 95954 - DNA, 399 bp, Homo sapiens
  misc_feature (1)...(399): n = a,t,c or g
cggacgcgtgggttcaatttcaaaatgatcttttggattggaatcaccagactgctgcttatcctggattctttctctgtggacttttacagtcattgaaccctcatctctttcaacacacagcctcaagctgggttgtaatttatctttgtacatgccagcgttcatctttcaactgagctattgaaggacagattatttattcatttttgatatccctagtgcctggcacacagcaacacagtataaatgtgggtttgtttctgtttgttttgttttttatttttagagacagagtcttgctcttgttgcccaggctggagcgcaatggagagagatcttggctcactgcattctctgcctcctgagttcaagcaattctcctgcctcagcctcccn

SEQ ID NO: 95955 - DNA, 383 bp, Homo sapiens
ctcaccctccttatttacagatcagtaagctgagaccctgagcaggggtgctgctaacttgcgataggacaacacagaggtggtcagggcagggtcgggacgtgaggggctgctcttgtcgtctgtgacgtgctggcccctggttcttttcctgcttctccatcagctccatccttgctgctttctgacttggaccctcagctcttgggcactgcaagaatgctggcctgtcttagcggatcttccattttataacagcagctggaaatccgtttctttgtgtgtgtatttttttgtttttttgttttttgaggcgaggctcgctctgtcacccaggctggagtgcaatggcacgatcttggtgcattgcaacctctgcctcc

SEQ ID NO: 95956 - DNA, 386 bp, Homo sapiens
cttttaacatcttttcccaagtcagacctactggtaaccaatcccctcagtttttgtttgtctgagaatgtctttatctcttcttcacttttgaaggatgattttactgaagaattctatgttggtgaattttttcttccaacacttaagtattttactccactctcttcttgcttgcatggtttgtaaatagaagtctgatgtcattcttatcattgttcctctagaagcaaggtgttcttttcctctggcttttaagatttttcttggctaggcatggtgactcacacctgtaatcccggcactttgggaggctgaggcaggtggatcacctgaggtcaagatttcgagacacggtctggccagcatggtgaagccccatctct

SEQ ID NO: 95957 - DNA, 161 bp, Homo sapiens
caaaaattagccaggcataatggcgagtgcctgtaatccaggctacttgggaggctgaggcaggagaatcgcttgaacccgggagtgacccgagatggcgccactgcactctagcttgggtgacaacagcaggattctgtctcagaaaaaaaaaaaaaagg

SEQ ID NO: 95958 - DNA, 420 bp, Homo sapiens
  misc_feature (1)...(420): n = a,t,c or g
tatggggtgcttggtggtggctacagtcaaattcttattccaaccccaaattggcaacgttataacaacatagaatcttattatttagaacctaattactgttgttccccttacccatgagggatatgttccaagacccgcagtggatgcctgaaacttcaggtagaactgaaccttattatatacgtttttgtcaacaaaaagagtcaaactctgtaaaacattttagctgggagttgtggctcatgcctctaattccagtactttgggaggccgaggcgggtggatcacatgaagccagtctggccaacatggtgaaaccccatctctactaaaaatacaaaaattagccggccattgntatatgtaaagttttcgggcccgcaaagaaatagcacttgaatataaaattttcttttt

SEQ ID NO: 95959 - DNA, 300 bp, Homo sapiens
attacaggcatgagccactgctcccgatggattatatttcaatataattcaattatgcaatataattgcataattgttatcatctctccctgatatattatcggaatggatgtgacatctgaatggggatgctgttgaggaaagagatttcatgaaatgtacagtgagtggcataattgtggctcactgtaaccttgaattcttgggctcagtgatccttctgcctctgctccccgagtggctgggactacaggcatgtgccaccacatctggctaatttttgtaattttggtagagatg

SEQ ID NO: 95960 - DNA, 285 bp, Homo sapiens
aatgaaactggatcctcatctctcaccttatacaaaagtcaactcaagatggataaaggacttaaacctaagacccaaaactataaaaattctggaacctaacatcagaaaacccttctaggcattggcttaggcaaggattccatgaccagaaacccaaaagcaattgcaataaaaacaaagctggccaggtgagtggctcatgcctgtaattccagcactttgggaggccaaggcaggcagattacatgaggttgggagttcaagaccagcctgaccaacatg

SEQ ID NO: 95961 - DNA, 417 bp, Homo sapiens
gcaggagaattgcttgaacctgggaggcagagggtgcagtaagccgagatcatgccactgcactacagcctgggcaacagagcaagactcgtctccagaaaaaaaaaaaaaaaaaaaaaaaggtggtttttaaagggaaaaaagggggggggaggggggctaaccccggaaacctaacctttttgaagggggggggggggaaaaaaatttggcctaaaaatttcaacctggggaaaaatgggaaaacccggtttttaaaaaaaaaaaaaaaaaaaaggggggctggggaagccttccttatacccccacttttttggggggttgggggggaagaaaaatttacccccagaaagggggggtggaaaaaaccaaaaatggcccccttgccctccatttggaggaaaaaaaactttgttt

SEQ ID NO: 95962 - DNA, 403 bp, Homo sapiens
cggggctttaccatgttggccaggctggtctcgatctcttgacttcatgattcacccgccttggcctcccaaggtgctgggactacaggcgtgagccaccacgcccggccagctgcaggtattaatagcagaataggtcaagctgaggacagaatctcagagcttgaagactggctttctgaaataagacagtcaatcaggcaggaatatggataaaagaatgaagatgaacaaacaaaacctccaagaaatacgggattatgtagagaccaaatctatgacacccgactcattggtgtccctgaaagagttggggagaatggaagcaacttggaaaatatatttcaggatctcattcatgagaactacaaagggaagcccatcagactaatggtggacctct

SEQ ID NO: 95963 - DNA, 404 bp, Homo sapiens
ctcaaacagctgttccatacattttatccaagttttatagctatattcagtaggagagacagggcagaaaatactttttctttcctgaaaatggaaccctaatgggagcctgatgaattttttaattgaagccaaaataaaaaaattaatatgtgctcataaattcatatttatactcataaaatatgacattcaacccaagttcttcattttaacacttacgccttttttttgagacagagtcttgctctgttgtccaggctggagtggaatggcatgatcttggctcactgcaacctctgtcatcagcgttcaagcaattcttgtgcctcactaccgggtcttactacattgcccaggctggtctcgaacttctgggctcgagtgatcctcccgccttggcc

SEQ ID NO: 95964 - DNA, 398 bp, Homo sapiens
  misc_feature (1)...(398): n = a,t,c or g
agaactcacgctggtccccgagcaccgggcgcacaggcctggttcccacccgtgcctctccccccacacctccccgcaagcagagggagccggctcaagcctctgccaacccagagaggggctcccactgtgcagcagtgggctgaagtggacgccgaggccgaggaggcaccgagagctagcgagggctgctagcttgtgtctaaatgtagtttttatttgcatttcccttatgattagccaagttgaatattttgttctatacctgctggccatttgtgtgttttcttttgagaagagtctaattggatatttttccttttttaaatcagatatttttgttttattgagttggttgagttttgtatataactgggtgaactccaactgcttgctgn

SEQ ID NO: 95965 - DNA, 411 bp, Homo sapiens
  misc_feature (1)...(411): n = a,t,c or g
actcaggggagttgtgggcggggggcactcggaggcagggagcttgggggactgggctttgtgagtctgcacggggtgcattggagtccatgcagttcctccaggagcatggggtgcagacagggaatgggggcgcggcagggcccccagccactggcatagcctccctgaccctctcctggctgtccccagaaaaaaaaaaaaaaaaaaaaaaaaaaaaaaaaaaaaaaaaaaaangggggggggcccctttaaaaaaaaaaaattttttcgccgggggggggggggattttttttttttttttggggccccaaaaatttttttgggggggggttttttaaaacgggggggggggaaaaacccgggggtaacccaaattataggttttgggaacaatcccttttttgggg

SEQ ID NO: 95966 - DNA, 399 bp, Homo sapiens
aaaaagaaaaaagtgagggtgaaggaggagagaagtgaagagtggaaaattttagcagttatttctctagaaggtacaaaaggacactataaaaggtatagaaggaagagtcagggtctagacttcaggcccgccttcaccacctaccatggaaccttgatctagtcagtgtgtctccttgggtttactaatttataaaagaggtgggcagggcaggtattattcctatatttatgattatgatcaactaactagatgcttttgaaaatgtgtagcactgggttgggcatggtggctcatgcctgtaatcccggcacttttgggaggccaaagcagggagatcacttgaggtcaggagttcgagaccagcctggccagcatggtgaaaccgtctctatt

SEQ ID NO: 95967 - DNA, 396 bp, Homo sapiens
gcaggagaatcgccttaatccaggaggtggaggttgcagtgagctgagatcgtgccattgcacttctagcctgggtgacaacagcgaaactctgtctcaaaaaaaaaaaaaaaaaaaaattttttgggaaaggagggggataaaaaaccccctcgggaaagggaaacttaaaagggggggtggcaaaaaaaaaagttttgaaggccttgttaaaaaaatttttttggcccaaggggaggggatctgggaggaccccatcctgggggagggagggaaaacccccggagccggtcccggtgggggcaaaaaaaaaaaaccccccggcccctttggatttttaaaagaaggttggagggtgaaaaaaaaaaaaaccggggcaaaagggatttttcaagg

SEQ ID NO: 95968 - DNA, 417 bp, Homo sapiens
acagtgttgggattacactatgcctaaaaacagttttttttgttttgttttgttttttttttttttttttgggaaaaaaccgggttcaaaaggttggccaaggcggaccccaaacttggggtttaaatttcggctccccacctttttggggggccgggggggggggtttttttggggtcgggagtacaaaaaaacccggcccatctggggaaacccccccctctccaaaaaaaaaaaaaaaaacccccccgggggggggggccccgggggccccacttccccggggggggggggtggaaaaatcgttgaaccccctgggggagaaccccctttatataaaaaacaaaacaataaaattccgggggggggacaaacttggagccgccctcccccagggaaaaaaaaaaaaaaaaaaaa

SEQ ID NO: 95969 - DNA, 428 bp, Homo sapiens
  misc_feature (1)...(428): n = a,t,c or g
taagattacacatgcaagcatccccattccagtgagttcaccctctaaatcaccacgatcaaaagggacaagcatcaagcacgcagaaaaaaaaaaaaaaaaaaaaaaaaaaaaaaaaaaaaaaaaaaaaaaaaaaaaaaaaggggggaaaggggggggggctttttaaaaaaaatggtttttttgaaagggaaggttttttatagtgtttttttataaaaaaaaaaaaaaatgatttttcggggggtttaaaaaaaaaaaaggggggggaaaaaccattggggccccataaaaaaacccctttaaaaacaccttttttttgagggggagaagaagcanaaaaaaaacnnnnnntannaaaaacatgagtacagggacatntaatgcttattgtgctagactgaataccgctgctatgtggggggaaa

SEQ ID NO: 95970 - DNA, 402 bp, Homo sapiens
atcgtaccactgcaccccagcctgggtaacagagctagattgtatctcaaaaaaaaaaaaaaaaaaaagggggggggggggggagggaaaaaaggggggggaaaaaagggaggggggcccctttttttttttttggggaagggaccccaccccttgggactggggggggcaaaaaaggggcttggcccgcccccccaaaaaggggaccctcaggaagggggggccctttttttttttgccccattggggtccttgaacccccggccgggggggtttttgaaccaaaaaagaaagggggggggccccccaacccccctttttttggggccccccccttggaggagggcccctgggcaaaaaagggggtagggggccccaaccccggccctttaaaaaaaagtt

SEQ ID NO: 95971 - DNA, 401 bp, Homo sapiens
tttagtagagacggggtttcaccatgagatctcctgacctcgtgatccacccgcctcggcttcctaaagtgctgcgattacaggcgtgagctaccgtgcctggcccatattttcaatcatcatttgcatttcctggtccacataaataacatgcccatgggtctaggaaagtgtttttaaaaaacactgccacataactggaaacagttactttggcttagtcttccacaataggagacctcctctcagaaagtctttgtaaccattagtatgtcaatttctccaaccagtttctctcatcttgccccttcctatatctgagtctggttctttcctctttctgcttactaggggactttatttctgggttgctgcagcctctaaactaagatgtgtcttcc

SEQ ID NO: 95972 - DNA, 458 bp, Homo sapiens
  misc_feature (1)...(458): n = a,t,c or g
atgtctgancccggaacttttagcanccgtnannncnntggaannaccgggncgacccacgcgttcggatcgagacactgcactccagtgtgggcgattgagtgaaactctgtctatgaataaataaatagagagtatagtggttaaataagtttgataaatgtggatggttgtgtagctgccaccacaattcagatatagaacatttttgtcatccaaatattatgcagagaggccaggtgcagtggatcatgcctataatcccagtgctttgggattctggggatagaaggatcacgaggtcaggagattgagaccatcctggctaacacggtgaaaccccgtctctactgaaaatgcaaaaaaaaaataaataaaataaaataaaataaaaattagccaggcgtggtgatgtgctcctgtagtcccagctactcaggaggctgggttgggaggtt

SEQ ID NO: 95973 - DNA, 418 bp, Homo sapiens
  misc_feature (1)...(418): n = a,t,c or g
cggacgcgtgggattctcgcagagcaatggcaatccttcatccctttctttcaccctcctgaaggtcgactttgaggtgacaatccctggggaagggaaggatcgaatctttaaggtctccatcaagtggctagccattgtgagctggcgaatgctgcatgaggccctggtcagcggccagatccctgttcccttggagtctgtgcagccctggatgtggccatgaggcacctggcatccatgaggtattgggtgtagttagtatctgggctactagtgttggcagaactgctgtcaggggaggagggggagcacatattaaggtcccacagagtgccattnnnnnnnnnnnnnnnnnggggcggccgttttaaaggatccaattttacggacgcgggcatgcaaggtattagttttc

SEQ ID NO: 95974 - DNA, 484 bp, Homo sapiens
  misc_feature (1)...(484): n = a,t,c or g
ngggatcccagtccgnccctaggangcagntgggcatgcacagcagcaccggccggaatcccggtcgacccacgcgtccgcggacgcgtgggcgatgattgctctcagttggtcattgccaacttctggccggccactacactcctcatcttcaaggctctcgtctcctttgcaacacttcttgaaccaccactgcacagtttctgggccagatgtgtagttgatgttgtgagttgtctccactgcttcacgacccattttgaactcaagaaaatcacttgaatttgctttttgtctaacataatttccatagtctaaaaaaaaaaaaaaaaaaaaaaaaaggnnnnnnnaaaaaaaaaaaaaaaaaattttgcccccggaaacacacgaaaattttttttttggcacaccaaaaatccattcttttgcccggaattaaaaaannnnncgcgggggaaaccccggggggtccccgccccccccc

SEQ ID NO: 95975 - DNA, 422 bp, Homo sapiens
  misc_feature (1)...(422): n = a,t,c or g
cggacgcgtgggcggacgcgtgggcggacgcgtgggttttttttgagacggagtctccttctgtcaccaggctggagggcagcntacntnatcttggaccctccanagcgggcgccctgggcggacgcgtgggctgactcttgtgtttaaaaaaagaggggggatccttttttttcccggggggggggccttttttaaaaaacccttttttttttggcgccacctttgggggagggaaacccttttgttttcctttatcccccgtttcccttggggggtctgaagaaaaaaatagaaactttttttcttggtaaaaggccgcgtaaaaaggggggcccaaaaaagaggtcttttggggggccgaaaacctctttttctggggggggtactgggggcttgggatatttaaaatcacaggggcg

SEQ ID NO: 95976 - DNA, 413 bp, Homo sapiens
caggagaatcatttgaacacagggggcggaggttgcagtgagccaagatcatgccattttgcactccagcctgggcgacaagagtgaaactccatctcacaaaaaaaaaaaaaaaaaaaagggggggggaattttttttgggcccaaaaaaaaaaaaatttaaagggcccgggccttttttaggggggctttctttggcaaaaatgggaaaaaaaaaaaaaaaaggggggggcaaaaaaaaaaggggaaaaaccaaaattgttttggcccccccctaaaaaaaaaataaaaaagggggggggggggggggcaaaaccctgaaaaccaaaaaattggggggggcggggggggcaaaaacccggggggggggaataaaaaaataaacgggccaaaagggaaaaacccttttttat

SEQ ID NO: 95977 - DNA, 411 bp, Homo sapiens
  misc_feature (1)...(411): n = a,t,c or g
tttttgtatttttagtgaagatgtggtttcaccgtgttggccaggctgatctcaaactcctgacctcaactgatctgcccaccttggcctccctaagtgctaggattataggtgtgagccactgcacctggccttgagcatcttttcatacacctgtttgccatttgtatgtcttttgagaaatatctattcagatcttttgcccattttttaattgaattattagattttgtttccatagggttgtttgagctccttatatattatggntattaatcctttgtcagatggatagtttgcaaatactttctcccattctgggggttgggtcttcactttggttggtgtttcctttgctgggtagaagctttttaacttgatgtgatctgatttgtccattnttgctttggg

SEQ ID NO: 95978 - DNA, 398 bp, Homo sapiens
  misc_feature (1)...(398): n = a,t,c or g
actgaaaataacttttattgagaccccaccgaattgcaaaggaagaaggagcttaatggcaagaacagaatttgcaggtggggggggctcaataaaaggtattttccactggaaaaaaaaaaaaaaaaaaaaaaaaaaaaaaaaaaaaaaaaaaaaaaaaaaatgggggggggccctttaaaaaaaaaatttttttgccccccggcgcgggaaaaaaaatttttttttttgggggcccaaaaaattaatttcgggggggggtttaaaaaaaaggggggggggaaaacccggggggaaaaaaaaaaaaaaggtttgggaaaaaaccccttttttggggggggggaaaaaaaaaaaagaaagcggnaagcggggntttanaaaatnnggggagaagaact

SEQ ID NO: 95979 - DNA, 487 bp, Homo sapiens
  misc_feature (1)...(487): n = a,t,c or g
agagtgcagacccaaaaanccctagcngggcccgcaagatccaccggnccggaattgccgggtcgacgcacgcgttcggggaggcggaggttgtagtgagccgcgattgctctattgtactccagcctgagcgacggagcatgaaaagactgaaaaaagcagcctgtcttttttttcaatctcaaaaagaaaaaaaaaaatggaaaagcttcatgacattggatttagcagtaatttcctgggtatgaccaaaagcccaggcaacaaaaggaaaaacagattggacttcagcaaaattaaaaatttgttcatcaagggacactatcagcagaatgaaaaggcaacccaaggaatgggcgaaaacatttgcaaataaatcctgcaacaataaaaagcctgaaaaaattgataaaaataaaaaaaaaaaaaaaaaaaaatttttggggggggcccttttaaaaaaaacaaatttaaaaccccggggtgg

SEQ ID NO: 95980 - DNA, 406 bp, Homo sapiens
cggacgcgtgggcggacgcgtgggcaagactccatctcaaaaaaaaaaagctgaatctctgaggggggttttcatttttcatttttttttttaaacagaggcctaaaaaccggggtaactcatttaataaaaaattcatttttcaagttgggaaggataacactgggggcgggcagccactaataaaacatctgattttgggaccacgttaaaaaacccatgaaggatataaaaaccctcccctataaaaacttttgggccgggggcggggactcacacctgtcttcccagttacttgggaggctgaggcaggaaaatggcgtgaccccgggaggcggaactttgcagggagccgaagacaccccactgcactccagcctgggcgacaaagcgagactccatctaa

SEQ ID NO: 95981 - DNA, 204 bp, Homo sapiens
  misc_feature (1)...(204): n = a,t,c or g
tgggaagganaaaatttgaatgcgtactggagagcgaccggnccggaattcccgggaaagacccaacacggtggctcatgtcatgtctataatcccagcacattgggaggctgagacgggcggatcacctgaggtcgggggttcgagaccagcctggccaacatggagaaaccccgtctctactgaaaatgcaaaaaaaaaaag

SEQ ID NO: 95982 - DNA, 385 bp, Homo sapiens
  misc_feature (1)...(385): n = a,t,c or g
caggcttggtggctcacgcctgtaaccccatcactttgggaggcctaggccggcagatcacgaggccaggctggtctcgaactcctggcctcaagtgattcgcttgcctccgcctccccagtgtgctgggattacaggtgtgacccaccgcacctggccgctttttgtttttaaaatatcagtttccaacctgattgacagtttgtcctcaacagcatgggcagagatgggatcctggctgctggtagcggaagagggtgctgtggtcaggctctgtgcacctcctccctctcccccttccagatgctccttcccttggtgctgggcacaggaaggacaggtggagaggcttagttctatgtgtcttccacctgcagagggtgtn

SEQ ID NO: 95983 - DNA, 397 bp, Homo sapiens
tcgttcatgcactaaataattggctcaacattccttgcgttagacattgagccaggccctaggagacacagaggaaataagagctgtccctgccctgaaggagcttattcttaaacagaaaagcacatggagaataaataattctaatccaatgagataatatcacacatgccacacaatacattgtaacatacatcacatttaacttcatttgacaagcgaatactacagaaaaacgtgtgaattattattattattattattaaattattattttagagacagagtgctggctcagtcgcccaggctggtgtgcagtgatgagatcgtaactcactgcagccttgacttcctgtgctcaagcgatcctcctgcttcagcctctccagtagctggg

SEQ ID NO: 95984 - DNA, 417 bp, Homo sapiens
  misc_feature (1)...(417): n = a,t,c or g
tcaccgtgttggccaggctggtctcgaactcctgtcctcaagtgattcgccctccttggccacccaaagtgctgggattacaggcctgagccaccatacctggctgctttttccacctaatttttattaaaaaagaataaaaaaatcaggaaatgagtattttgagaaactattaagttataatttatcctaatttatgattattccaattgcattttatcctggttcttttaaccacttttcttcattcctatcacaccctaatgtacataccaaagacacaagaagatcaaattctgtaatcagtttaagtcctagttggggacttagatgaaaaattttcagtggagagattgctaaaactgactaaaatgacttctaaagacttataanaatatccatgaaatctctggtttt

SEQ ID NO: 95985 - DNA, 397 bp, Homo sapiens
cctcagcctcccaaagtgctgggattacatgtgtgatccaccgtgcctggccaggcctctaaatttttaagatttactttttaattttgtgtgtgtgtttgagacacagtttcgctcttgttgcccaggctggagtgcaatggcatgatctcagctcactgcaacctctgcctcttgggttcaagcaattctcctgcactccagcctgggtaacggggtgagattctgtctcaaaaaaaattagtttcagagttccaaatattaccactcctgtctcaaattaggtttaaggcactcctgtgaacaggcagattctataggtataaattaagatgtcatttccctagagaggctaagaaataaatacattcaacaaatatttgatgaattaaaggag

SEQ ID NO: 95986 - DNA, 404 bp, Homo sapiens
gcatctcattgttgagtaccttcttttgagaaatgcctattcgcgtcatttgcccactttttgatgggattatttgttttttttttttttttttggggggacaggatgggggcctccttccaaatagggaaaataaccctttgggggaccacacagctgcaaaaaatccccccccacctggttttcggcagtacattttttttcccccttaagggggggaccaatgtttgggcccttttttttcgccccaaggttttgggggggttttaaatattggaacttttttttggagaaaatgccccccggaacccccaagggggcttcggtttttcggggccgttttctgcacagaaaaaaatggttttgtggaaattaaaaaaaaccctactggggtgggctttccg

SEQ ID NO: 95987 - DNA, 394 bp, Homo sapiens
agaacctttgttgccttgtctgcaaaatgagaatgataggccgggtgtgggggctcatgtatgtaatcccagcactttgggaagctgaggtgggaggatcccttgagtccaggagttcgagaccagcctgggcaacatagcaagatcccatctgtataaaaaaaaaaatgaactaaaaaaaatgagaatgataataaccgtcccaatgtcatagaattgttcaggggctttgatggaaaagcgtttgattggtatgaaaaaaacacatgtgttctcacagactctttttctttctttctcctgccccttcccttttttaacgggggttttctagtttttaaaatgcttcaaggttttctacctttaccctgtgctgaagggccattgttcctag

SEQ ID NO: 95988 - DNA, 383 bp, Homo sapiens
cccacgcgtccggcatctcaacaactttttgcagggaaaatgcttccacaacccacgcttcagaagttgaacaaattgggctacgaagttttgcctcatctcccatgttcacctgacctctcgctgagaagaagctccaaaacacttcccaaagccaaacttgcaccaaaaaaggtcctggtcactgcttggtgggctgctgctggtctgatccactgcagctttctgaatccctgggaaaccattacacctgagaagtatgctcagcaaaccaatgagatgcaccaaaaactgcaatgcctgcagctggctttggtcaacaggaagggcccaattcttctccaccacaatgtccgactgcacatcacaacccacgcttcaaa

SEQ ID NO: 95989 - DNA, 384 bp, Homo sapiens
agtttttccagcaccacttgttttaaatgactattctttctctcttgacttaactttttaccttcatattaaattcagtttttcatacttatatgtgtctctatttttggactctgttcttttctgtcaatccttttgtctccatgccaataccacaatgtcttgatgacagtagctttataataagtcttgactcagaaataaatccaaacatatacagtcaactaatttttgacaagaagacacaaaggggaaagaatagtctgcctgacagatggtgctgggaaaactgcattttcacatacaaaagaatgaaatgggacccttatttataccatacacaaaaatcatctcaaattggatgaaagacctaaatataaaacc

SEQ ID NO: 95990 - DNA, 392 bp, Homo sapiens
  misc_feature (1)...(392): n = a,t,c or g
cccctctgcctgctgtgtcttctccacctcgatgtccccctctgcctgctgcgtcttctcacctcgaagaacacctctgcctgctgcatattctccacctaaatgataccctctgcctgctgaaacttctccatctggatgtccccctctgcctgctgcgtattctcacctcgagggccccctctgactgctgcgtcttctccacctcaatgtcccccgctctgctgcgttttctccacctcgatgaacccctctgcctgctgggtgttatccacctcgaaggcccccactgcctggtgtgtcttatccacctcgatgtccccctctgcctgctgtgtcttctccaccttgataacccccccccctgctggtgtgtattctcacctcgatgn

SEQ ID NO: 95991 - DNA, 440 bp, Homo sapiens
cgcccacctccacctccccattgctgggattacaggctgagccaccgcgcccagccaaccctgtgggtaatttttaaattatctgtagagacaaggttgtgctatgttgcccagattggtctcgaactcctgggctcaagcaaggaatcatcccgccttgacctcccaaaatgctgggattacaggcatgagctgctgtgctggatggtgatttttcaagaaaagctggtaatctggatttttatttaaaatacctcgattttttaaagctggaatggaaattttcaagcagattgagggtttttggtcttcccacccactggccacatgagaaaataaaataaataagtaaataaaatttcaaaaagactttgaaagcattgtgtaggtcaagaaaaaaaatgcaagtttgcaacctctggggtatagtactatagaac

SEQ ID NO: 95992 - DNA, 407 bp, Homo sapiens
tcgcggacgcgtggggtctgagagggactcatggcccatgggaacaagcaggcatctctgggatatccccctcaaatagttttttgtttgtttgttttagacagagtgttgctcttgtttcccaggctggagagcagtggcgcagactcggctcactgcaacctccgcctcctggatgcgggcgagaatcctgccgcatccttccagggaggcattacacccagctgtttttttgtatttttagaaaagatggggcttcatcgagttggccaagctgggctccaactcctgatgtcgggtgagccacccgccttgtgctcccaaagaagagggattacaggtgttagccaccatgcccggcccccctcaaaaggttttatctggcacactggtgctcccgcgatggg

SEQ ID NO: 95993 - DNA, 574 bp, Homo sapiens
  misc_feature (1)...(574): n = a,t,c or g
cgccgtgtttcgcccgaccctcctcactacatacaactcacgtaccctttctcgcgattctcatatgctctctactctttgtgcgcgaccacccccnnnnnnntttgtattgcactccntccggcaccgccccgaancccggccgacccaccccccacgagggggngggtccctgtaaaccagctagctacttgggaggctgaggcacaagaattgcttgaacccacgagacggaggttgcagtgagccgaggttgagccactgcactccagcctgggtgatagagctaaactcactctcaaaaaaatgagagagagaaaaaaccccaaaacaaacctataaagttaaagagactattttatttaatgcagtgattaagcactttagttatgaaatcagactatgcttaaattatttcttaatcatttactggttaagagaccttgagcaagttagccaatgtctaaaccactctttaatcttttaaatgaggatagttatagtaatctcactatatggcggttgtaaggaatatgtgaggtaattactacagcttttcataagtatttgaata

SEQ ID NO: 95994 - DNA, 399 bp, Homo sapiens
cccacgcgtccgggcagaggttgcggtgagctgagatcctgccatagcacgctagcctgggcaacagtgaaactacgtctcaaaaaaaacaaagaaaagaaaaaaaattgcccctcttgtaatcctacagccatcaccttagtaattttgctatatcggtagtctttaagtatcaattatgtcctcacaacaatgaaaacttacatttttataacattttgacattttcaaagcaaacacaccttgtcatatgatcttatttaaccctcacaactgcctgattacccctgttttagaaataaaccaaggtttagggtaaggactgccaagtattacactggcacaataattccagccttctgaaatcaggactagaaaattttcctccataccacactg

SEQ ID NO: 95995 - DNA, 431 bp, Homo sapiens
cggacgcgtgggcggacgcgtgggctggggctgcgcttcccccaacgcaacatctaggttcttaggaaacttcatttgttgtgaaaatcggaaatgaaaagacagttggtgacaaactcctttctccatcacctccttattggacagaaacgacccaggaatgcgcctcgcaagccaaagaagaagaagaggaagaggaaagaagaagaagaggaagaggaagaagaagaagaagaagaagaagaagaagaagaagaagaagaagaagaagaagaagaagaagaagaaaagaagaagaagaagaagaggaagaagaagaagaatgccgcagtaggttgtttacagattgagcacgagtcttggcaagaaagtctgaagacggcaccagctgcacatgttttaccctaagagcttgctatataaaggatact

SEQ ID NO: 95996 - DNA, 413 bp, Homo sapiens
tctgtttagggtatccagttcttcctgatttaagctaggaggtttgaatcttcccaggaatttatccatatattctaggttttctaggttttgcatgtaaagttgttcatagtagccttgaatgatattttgtctttcggtggcgtcaggtgtaatagctcccattttgtttatcttttcaaagaaccagctttttttgtttcatttatcttttctatttttttatttttggttcaatttcatttagttctgctctgatgagaatgctacatgtaaagcagcacactggttggtgtgccatatatctgagcgattggctttgccttcaagaaaactgttgtccaggtctggcgtggtgcctcatgtctgtgatctcagcactttgggaggctgaggtgggaggattgcttgag

SEQ ID NO: 95997 - DNA, 405 bp, Homo sapiens
gggtttcaccatgttggccaggttggtctcgaacccctgacctcaagtgacctgcccaccttggcctcccaaagtgctgggattacaggcgtgagccaccatacctggccctctccttatgttatttctttgagcattcccttcccttaatttgctctgttttcttggttgggaatgtctcttagttgggtgttgaacttcctgtaggctgttgatcctgtaggctgcttaccttttctctcatactttctattttatgggatgggaataagttaatagaaagtctgactgagccgggcgtggtggctcatgcctgtgatcccagcactttgggaggctgaggcgggaggatcgcttgagcccagaagttaaagaccttcctgggcaataatagaacatgaagag

SEQ ID NO: 95998 - DNA, 386 bp, Homo sapiens
aaaatgggatggtctgattttatcattaccaatttattttattttatgttattttatttatttttttaaattttatttattttatttttttagacgagttttgctcttgttgccctgggaggcagaagttgcagtgagccaaggtcctgccactgctttccagcctgggtgagttagtgagactctgtctcaatggaaaaggaaaacacctactctaaataatgctaaatattggggggggcggtttttaaggtttttttttttaacccggggtgggggggggagattttttttttttgggggtacaaaaacaaagtctttgggggcgggttttaaaaaggggggcgggggaaaacccggggggcctcccaataagggccttgggc

SEQ ID NO: 95999 - DNA, 395 bp, Homo sapiens
  misc_feature (1)...(395): n = a,t,c or g
cccacgcgtcaggtaaggatcaaactctttccaagaatctacgttcataccagaaaaaggctgaagaatatttacggaaatacagaaacattcatcacccaaccatttaaaaatcacagtgtctggcaactaattagaaataacaggaatgcaaagaagcaggaaaatgtagcccataatgaggagaaaaataaaaagcaatcaattgagacaaacccagaaatacacccacaataaaaacctgaanaccanaaaaaaaaaaaaaaaaaaaaaaaaaaaaaagggggggggccctttaaaaaaaacaatttttaaggcccgggggggggaaaataattttttttttttggggccccaaaaattaaattcgggggccgggttttaaaaaggggggg

SEQ ID NO: 96000 - DNA, 423 bp, Homo sapiens
atcaagacatttctgtttttcgtagaagggaaactggaaattatctgaacttcatcctttaaaatttttttttgtaatagaatcataatgtttgcattcaacagtaaaaacggcacaccaatcaataaagaactgagcagaaaccctaaaaaaaaaaaaaaaaaaaaaataaaaaaaaaaaaaaaaaaaaaaaaaaaaaaaaaaaaaaaaaaaaaaaaaaaaaaaaaaaaagggggggggggcctttaaaaaaaaaaaaatttttccccgcgggggggggaagtatttttttttttttggggggcaaaaaaaaattttttgggggggggttaaaaaaacggggggggaggaaaaaatcttgggcccacaaaaaaaaaacggggggaacaaactctttttttggggggggggaaaaaaaaaaaa

SEQ ID NO: 96001 - DNA, 235 bp, Homo sapiens
agaccctcacatgacttttggatccctaagtatgcatttctgttcatatacatatgagtggaattttctgggttgtggcatacatgttgtttgcctttattagatcctgtcaatcagttttccagagcacctgtatcaatttcccaccaagcagtgtatgagagttccagttgtcccccatccgtagtaacacttggtattgttttcttttttcagtcatttaagtgtgtatatg

SEQ ID NO: 96002 - DNA, 403 bp, Homo sapiens
  misc_feature (1)...(403): n = a,t,c or g
atcctcctacctcagcctcctgagtagctgggactacaggcatgtgccaccatacccagctaattaaaaaacttttttttttttttttttttcaaaaaaaaggggcccccgggggccccgggggggtcaaaaccccggggcctaggggaacccccccccccccccccccaaaggggggggaataccggggggggccccggggcccggcccaaaaaaaacggggggggttttttttttttttggaggggggagcctcctctcccccccccgcaaaggggggggggcaggacctcgggccgggccccttcggccgggaagagacaaacaattttcccgcgccggcccccccaggccctaaaaataaaaacctcgggccccgggcccagaaaattctttgtttctn

SEQ ID NO: 96003 - DNA, 410 bp, Homo sapiens
cccacgcgtccgcacggttttgccgtgttggtcaggctggtctcgaactcctgaccttaggtgatccgcccgccgtgacctcccaaagtgctgggattgcaggtatgagccatcgcgcccggcctcagctcttgatagcaagcctgtactgtacatataatcgtaagaagcactgaataggaaaggtatttcactcaagcatttcttaattacctctctgtgctataacttaagatgcttataactacctgaccacagcaaaaaaataacagcagcaacagtgatattcaggaattgaattttaaccacatttacttgacataccaaggatctgcttaaaacaaataaataaatcataagaaaagtgtatagaatacaaataaataagatcagtaagaacaatggtttta

SEQ ID NO: 96004 - DNA, 417 bp, Homo sapiens
  misc_feature (1)...(417): n = a,t,c or g
actagttctagatcgcgagcggccgccctnnnnnnnntttttcccccccctggccccggggcaagtagggcaatttttttacgggaaaggcccttggccggaaaaaagtaaaaaaaaaaaccggttttggggaaccaaacccttccccccggaagggggggggcctcccccccccccaaattcccccccgggggggggggaaaaaagccccctttttttttttgggggtaaggggaacccaacctggtccccaggccccaaatttttaaaaaaaagggttataaaaggccccctccaccctgggggcaaggggtataaaaaaaccagggaatttgggttaaaaccggggcccccacccccaaaattttttttggggggtgggcgggtttccaaaattgggaaaaacccccccaaccc

SEQ ID NO: 96005 - DNA, 278 bp, Homo sapiens
  misc_feature (1)...(278): n = a,t,c or g
atttttactgtcttggcgaggcgagtgtagcagggcaacaggtggcgagaaggtcagcagggaaacgtgagcaaaggaatctgtatcatgaataagttcaaggaaaggtactgtgcctggatgtgcacataggctagatttatgtttcactttacacaaatatctaactagcagagagcannnnnnnnnnnnnnnnnnnnnnnnnnnnnnnnnnnnnnnnnnnnnnnnnnnnnnnnnnnnnnnnaatagaacgaatgggaatggtcgactttacacta

SEQ ID NO: 96006 - DNA, 486 bp, Homo sapiens
  misc_feature (1)...(486): n = a,t,c or g
acgtnctcntcactgatacctagagagcgtgcnggaattcgactctgtctcaaaaacaaaaacaaaacaaaaaacaaaaaaattgagcaaataagaaaatccactgaggacaaaggagccaggtttctcactgctggagaaggtattcacaatcatgaaaggtagaaagctagaaagagcccggaggtgttgggctgaaactgaaggcatggttatggatttggtttttggaaaaacacatgtatgcaacatagacatagctacagacgtgtgtatatacacaggcacatacatcttacattcctagcctatgtccaccgagagagcccagaagcaatgagcgcactgctcacccaaatcctgctgttttttaaattattatcctttttgagacggtgtctcgcgctgtcacccaagctgtagtgcagtggtgcagtcttggctcgctgcggcctcggcctcctgggttcaagagattctggtgct

SEQ ID NO: 96007 - DNA, 409 bp, Homo sapiens
gacgagggtaatgttctattgtgtgcatatgccacatttggtttatccattcatcagttgatgcacatttcggttgttcccacctttgggctattatgaataatgatgctgtgaacactggtatacaaatatctgagtggaattgctggatcatatgggaattctgcatttaactttttaaggaactgccaaactgttttccacagagctgtaacattttacatccaaaccagcaataggacctggataaaaggtgggtaaggcacaggtaaataaaaaactggtagttactgcccatttgcattgggtttctagtggcaaataatataaccgtgtccttgactggatctcccaatgattcttttcagtcatttgaatgaagatggtggcggtgacactggcaggaggg

SEQ ID NO: 96008 - DNA, 493 bp, Homo sapiens
  misc_feature (1)...(493): n = a,t,c or g
cgagcgcaatgatangcttaaatngctncgcaagngccgcggaanttcaggctcctcaaccccagcttttctcctctctctgtcgcatctaccgctctggctagatccagctcctcttcccctctgtccctgcgcggccagtgcactgagcatggccggagaagaacacatccacaccgactggacgcgctttaagtccatgatcgtgaacctcaaggaggcccctaaggcttccagacaaccatgctgcactctcccgccctcctagacattttcttgacttttcccaccttcacttcctgcctcccaccccaaactctcaacacagcaaccagagaggtcccactctgtcactcactgtggctggaccgcagaggcagtgatcttggcttactgcagcctcgacctcccaggctcaagccatcctcgcgtcttagcctctggagtagctgggactacaggcctgcgccaccacgcccggctaattnttgta

SEQ ID NO: 96009 - DNA, 465 bp, Homo sapiens
  misc_feature (1)...(465): n = a,t,c or g
gggagtcagccgntccnnnnaactgaaaccctganntcctggagaancacagggacantnnaaggctgcagaggttcctgctgtctttttgtttgtctgtgccctgcccccataggtggagcctacagaggcaggcaggcctccttgagctgtggtgggctccgcccagttcgagcttccctgctgctttgtttacctaagcaagcctgggcaatggcgggcgcccctcccccagcctcgctgccgccttgcagtttgatctcagactgctgtgctagcaatcagcgagactccgtgggcgtaggaccctccaacccaggtgcgggatattatctcgtggcgcgccgttttttaagcccgttggaaaagcgcagtattcaggtgggagtgaccctattttccaggtgccgtctgtcacccctttctttgactcggaaagggaactccctgaccccttgcgcttcc

SEQ ID NO: 96010 - DNA, 483 bp, Homo sapiens
  misc_feature (1)...(483): n = a,t,c or g
agtatcnagagtnccnnnaactgaagtccctacnggttccagcaagngncgnggaannnccaaagagctaggattacaggtgtgagccaccacgctcagcccgtttttgtctttttgatatgagatctcattctgttgcccaggctggagtgcagtggtgtgataatagctcactgcagcctccaccctctgggctcaagatgctcccacctcagcctttcaaagtttggggactacaggtgtgagccacagcatcccatccattatattcttaatgatctctctgtacaacttaaagtttattttttcaactctgagtacttttaaagatatattaactagacattagataataggtaaaagagtaacacctaatcatttattatttgtttagagatggagtctcactctgttgcccaggctgttttttttccttcagcacttttatttttatgtttttggacagagtctggctctgtcgcc

SEQ ID NO: 96011 - DNA, 444 bp, Homo sapiens
  misc_feature (1)...(444): n = a,t,c or g
atcggtgggnnnacccaagtttacagacgtacgncccannangagccggccccgcctgggcacccggattcacctctggaccaccctgatattgcttctcctctgaatgctctgaaaagtgcaggtgcccagggcatgacttgcagctgtctcctggattgtgtcatcatggggtatcagggctggcaaaacccctgctctgcttttggccttggatatggaaacctcaaccactttgttctcctaccacctctttgcccttcctaccccttcctcccttcagtcagtgtccccagggtccagcctggctagagttagaaggcagacctagcctttggaagcagggtggcctccagagccttgccataaaaaggctgaaggcagccgggcgcagtggctcacgcctgtaatcccagcactttgggaggctgaggcgggcggatc

SEQ ID NO: 96012 - DNA, 445 bp, Homo sapiens
  misc_feature (1)...(445): n = a,t,c or g
tgggggnnttttgagacctgagtcactgcggnggaattcgggcaggtggatccgtggcccggggactggggacccccgtgacagctggaaggagaagaaagaggcatagggcgcgtggaggggcgaaggagggcggtggcgcggcgtgccccagcgtgggtcccttccctcctccaggtgtctatacacgccccgcggagcagacggcccacctcctcccggtcctccggggaaggggacacatgagggactcacctgtggctccctctgcctgcagcaactccatccgctcctgcaactgccggacgtgtgcctctatgtcccggttccgagcctctgcctcgcgtagttgactgtggggaggtaaggacggtgagtccgtccgggccggacgagaggggctgccaagggttgccaccggcccgcatcccggccccggccccgg

SEQ ID NO: 96013 - DNA, 419 bp, Homo sapiens
cgacggaaacagcgagaagggagagagagagagagagagagacagagagagacgtgagagagagagagaagttggcacacagacacaggctgcgcgcgcacacacacagacacacacacagacgcatccccccaacacacacacacacacacccataacgaacacacacgtacaggagggaacacccacccgcaggcagcccctgaagctcccgggttctgctctccgcgactaagagccaccggtgagagagcagcccacgggcacacaggcggacctgtgctcgtcatcacaagggctccacttttggggagactcacccgcacaccgtccgcgcacgcctgagggtgggatcccgcgctgcctcgccggagatctgtctgaggtttcttcctcttggggtttcttcctgctggcgg

SEQ ID NO: 96014 - DNA, 1128 bp, Homo sapiens
gctgggttttcaaaagacatggcgcgtaattggacgaacagtgtacttcggagatccaccggaggggcgaggccacagctcgaccgcgagcacctgagcatcctgcaccgcctgcgacggccgtcagggggcgcgatgccgcctcacagaacctcaagcggcgcccgggttccggcacagacggcctgcggctccagggggcggagccgagccgtctcctcaggacctacgcaggaggcgccgtcatccctagagggacacctgagagggcccagcctcctcctcctcaggacccactcgggagacgccgctggctctctaggaacacctggggaccgtggccagggacgacccagcctccttctcctcagctcctcaggaacgactggggaagctgtggcttcatggtccccgaggctgcccgaggaaaggtatttcaggacagccaggagggggcgcacatccgccgcgaaactgtgagcaagagcgtctgtgctgaaccatggcgccaccagagggcgcgcgatcccgccccaaccaacttcccgctgaagtgccagaagcagcgaggagcttcaacttcctcagggcagcacggggatcgtgttaatttggtgttcttcattgatgatgattattccccaccttctaagagacaaagaccaacgagccaccacagccaccagtcccagaacccgccaatgctggggaacggaaaatgagggagttcaactctggccctcacaatccagtggaggagacgaaactcatctgcctctgtccctctgggcacgcctcatgccaggtgcatctgtggacaggggccatgctcctgggcttccaaagttggagaaagctgccaggctcaggtctgaaggccagaattctacagtaagtcctactgagtcaaggtgggagcagggtcggtagcttccgaggctctgcgggagaatctgtttcctggccgtaaaggtggcctgccctccccagcctgtgttgcccgttttgaatgactggaagtttcctgcttctgtccctacccctccccccccaatcccaaattttgttttggttctaactccctccaaaatgtgttcaataaaatgcttttataatataaaaaaaaaa

SEQ ID NO: 96015 - DNA, 495 bp, Homo sapiens
  misc_feature (1)...(495): n = a,t,c or g
natgtgtnaaatgagactgctgcgtgcgacnggcccggaanncccgggtcgacgatttcgtccgcaaacccggatccnnnnnacctggagaagaacaagatcggtcccctgtttgagcagagtccactgtcaatgaaaaaagtacatcgattaattccaaaggccatggagggaggagccaagatggccgaataggaacagctccagtctacagctcccagcgtgagcgacgcaaaagacgggtgatttctgcatttccatctgagctttgaagagagcagtggttctcccagcacgcggctggagatctgagaacgggcagactgcctcttcaagtgggtccctgacccccgagcagcctaactgggaggcaccccccagcaggggcacactgacacctcacacggnaggatattccaacagacctgcagctgagggtcctgtctgttagaaggaaaacttacaaacagaaaggacaaccacaccaaaaaccct

SEQ ID NO: 96016 - DNA, 415 bp, Homo sapiens
tttcgtgtaaaaaaaaaagggagaatcgagaggtagagcttgagggggggcggggagggaccggaccggaccgagccggggccacggccccccgccccgaaaccccgccgagcccaaggtggacaaaaatgaagccaatgaagaaggcatgcactggcctttcaggtcctggcagtggcagcaagtcccccccagccaccagggccaaggttttgaggcggcaaggggctggggagggtgacaagccacaggaggtggatgacgaggcacagcagccgtaaccacagtccgggcccgaaaaggctgaggaaggggaggaggaggaggcttatcggggccctgtggctgaaggtcctccactggagctgcaccctggcgacccggctccagggccagcagaggacccctttggggg

SEQ ID NO: 96017 - DNA, 410 bp, Homo sapiens
gctattcacagatgcgaacatagtacactgcagcctccaactcctagcctcaagtgatcctgctgtctcaacctcccaagtaggattacaagcatgcgccgacgatgcccagaatccagaactttgtctatcactctccccaacaacctagatgtgaaaacagaataaacttcaccccgaaaaaaaaaaaaaaaaaaaaaaaaaaaaaaaataaaaaaaaaaaaaaaaaaaaaaaaaaaaataatattttggggggggggtctattaggggggggggggttttaagagaggggcctatatatatttcctttttttggggggggcattatttttttggggggcgcgcgataaataaccgggggggggggggaaaaacccgggggggagaaaaaaaattttgctacaaaaat

SEQ ID NO: 96018 - DNA, 390 bp, Homo sapiens
ctacgtgatctgagttcagaccggagtaatccaggtcggtttctatctacttcaaattcctccctgtacgaaaggacaagagaaataaggcctacttcacaaagcgccttcccccgtaaatgatatcatctcaacttagtattatacccacacccacccaagaacagggtttaaaaaaaaaaaaaaaaaaaaaaaaaaaaggggggggcctttttaaagatcccttggggggcccaatttttccggggggaggaaagatttattttttttcttttaggggggggaatttaaacccccccggggatttttggaaaagaacctttttttggggggggggaattatggggccaccccccccacaaaatttaaagggttcagggaaaaaaaaac

SEQ ID NO: 96019 - DNA, 457 bp, Homo sapiens
  misc_feature (1)...(457): n = a,t,c or g
agatgtctgggnttncaanaactgagatctcagtaactgcggnggaanncggagcgcctctgcccggccaccccgtctgggatgtgaggagcgcctctgcccggctgccaccccgtctaggaagtgaggagcatctctgcctggccgcccatcgtctgggatgtgaggagcgcctctgcccggccgccccgtctgggaggtgaggagtgcctctgcccggctgaccatcgtctgggatgtaaggagcgcctctgcccggccacccattgtctgggaggtgaggagcgcctctgcctggccaccccgtctgggaagtgaggagcgcctctgcctggccaccccgtctgggatgtgaggagcgcctctgcccggctgcccatcgtctgggatgtgaggagcgcctctgcctggccaccccgtctgggaagtgaggagcgcctctgcctggccaccccgn

SEQ ID NO: 96020 - DNA, 344 bp, Homo sapiens
cttgcagagagcggagatcatgccactgcactccagcctgggcgacagagcgagactccatctcaaaaaaaaaaaaaaaaaattttttttggaaacgggccccccgggggaccccaggcgggtttaaaactccgggcctgggggttttttcaaaaaagggggaccatggggccgggaactaaaaaccatccgggccaaaggggggaacccccgcttttacaaaaaaaacaaaaaataacccggccggggggggggggccctggggccccaccccctcagggggggggggcgggaaaatcttttaaccccgggggggggatgttccaaggaggggaaatcccccc

SEQ ID NO: 96021 - DNA, 110 bp, Homo sapiens
cttcgctcttgttgcccaggctggagtgcataatggcacaatttaggctcactgcagcctctgcttcccctgttcaggcgattctcctgtctcagcctcctgagtggccg

SEQ ID NO: 96022 - DNA, 240 bp, Homo sapiens
cagagttttgccgtgttgcccaggctggtctcaaactcctgggctaaagtgatctgtctgcctcagtctcccaaaatgctgagatcacaagaatgagccaccacgtctggccattaccctaacattttattatgaacattttcaaacatagagaaaatccatccctctattcatttatcaatctattttacttattttcttgcacattcaatgtaagttgcagacgtgtcgacgcggccg

SEQ ID NO: 96023 - DNA, 465 bp, Homo sapiens
  misc_feature (1)...(465): n = a,t,c or g
ccttgattagccttcggtatatgcngcagcagctcgccgtctccgcagtgattgcggcgtgattcggcactgatgaaccaaaacagcacattatcacatcgcccggctgtgccgctgacaacggcaccggatacagccccggtgcctgcagaatatccagatagagattctggccgttacgccaccagtcattctcacgatgaaagtccggcatctcaatccccgccagatgataagcatcccggaacagtgtgtaacagtccgtcacaccgtgctcaaagcgccgcccggtgagatgcggcacacagcggaacttatgaatcgttccccggcagaccagccaccacggcaaatcactctgcacctgcagccgccgggcggactcactcagccagggcagaccaccgtggtggctgtggaccagcgccacaatctcaccctgcatttctagctgcagccagtctn

SEQ ID NO: 96024 - DNA, 427 bp, Homo sapiens
aagagggtgcccgaacatcttctgagcgccacccttgcaacaaatacttgctcctgcacagcctggcccacctgttcattaatgcgctcaatttagtactgaaggggctttctcccagcccattcccagcccttcctatttcctttcctattttttttttctccccacactttcttgggactcccaccttggaaggaggaagggctgacctgccttttctccagcccccaggtgcgccgggtaacccgcgccccttaattatggacctgggccctaccggaacccctgccccagttaccacaactcaagccggctggcccgggccatgggctgctcaaatcaccaccccccaacccagggaggaactggcccctcctagggagcctcttcgacttttttaaaaaaaggacgtccattcctttgcccg

SEQ ID NO: 96025 - DNA, 401 bp, Homo sapiens
ggcagctactcgggacgcttgaggcacaagaattgcttgaagccaggaggcggaggttgcactgagctgagattggaccactgcattccagcatgggtgacagagggagactgtcttaaaaaaaaaaaaaaaaaaatagcttttcctcttttccaccgaaactgttaaaaaaacaaagccactgattttgccttaataaacttttattttaaattgaaaaaggttttaaacatgtaaaagggaccagggaatttaaattccctctaattggtcaatcccaggaaaaaaaaggcgggggttttgaccagcctctttaagtaaaaaaacattaatttttacatcatgggggtttctgaatttatgtaaaaaggtattactgttaggatggggaaaaataaaat

SEQ ID NO: 96026 - DNA, 442 bp, Homo sapiens
acacgcctagcttggcacgaggcctcgtgccactgactggggcgtccgactggagctcagccgcgcttgtccggtgctaggtcatcctgccaaacacccgaggccccaaagatggtgcaaagtgaacttcagctacagcccagagcaggcggacgagctgaagctgcaagctggggagatcgtggaaatgataaaggaggccttggtaacccagacatgccttcagtcagcccgggtccccagcggcctcccaagaccacagaggataagggctggtgggaaggagagtgtcaaggacgaagaggagtttttccagacaactttgtactcccaccacccccaattaaggatgctcaacctttacttcttttcggcatagatcaagaagctggtcccacggaaagtggtatctcgggaatcaggttcaggcgattatcctgct

SEQ ID NO: 96027 - DNA, 412 bp, Homo sapiens
  misc_feature (1)...(412): n = a,t,c or g
cccacgcgtccgatttatcctcctccctccccagtagaaataaaaaaaatctttacccaaaaattaagcagaaagctatttaagagacactataaaaaaaaacacctgaaagtacccatcccggggggggggggtctttttaggcgtcccccggggcgccccaataaacccgccgccctccccaatattttttttcttttttgggggcgggtttttatcccccccggggttttttttgggggccccccttttttgggggggggtcttttttgccccccccccccccccggatttaccccccgggggggaaaaaaatttttttgggggggggggggggcccctcccccccggggggggggggggttaaaattttcnnnccccnnnncnnaagccccctcctctgcctggggcg

SEQ ID NO: 96028 - DNA, 394 bp, Homo sapiens
ccgggtcgacccacgcgtccgcggacgcgtgggggaaagcactgttaggtttttgacaggagaatcgcttgaacccgggaggcggaggttgcagtgagctgagatcacgccactgtactccagcccgggtgacagagtgagaccctgtctcaaaaaaaaaaaaaaaaaaatggagggtgggtaaccttttttttttggcccgggggggtaatttggggggattttagggactttttcattggcccaaggtaaaaaaagcaatggggttttttttattttatttaattgctatagacttaccacgaaaaagacagccacgggtaacactcaataaaacttcccaaaaaaaatggttaaacctggtttaaaaaaaaaaaaaaagggcggcgcgtag

SEQ ID NO: 96029 - DNA, 441 bp, Homo sapiens
  misc_feature (1)...(441): n = a,t,c or g
tgaaaatgtttagacgggctcacatcaccccataaacaaataggtttggtcctagcctttctattagctcttagtaagattacacatgcaagcatccccgttccagtgagttcaccctcttaaaaaaaaaaaaaaaaaaaaaaaaaaaaaaaaaaaaaaaaaaaaaaaaaaaaaaaaaaaaaaaaaaaaaaaaaaaaaaaaaaannnnngggggggggggggaaaaaaaaaaaaaaatttttttggggggggggggggaaattttttttttttttggggggggaaaaaaaaaaaatttgggggggggtttaaaaaaaaggggggaggaaaaaaaactctggggaaacaaaaaaaaaaagggggggganannttctttttttgggggggggggaaaaaaaaaaaagaggccnnnnnanannnnnnnggaggttttnttagaa

SEQ ID NO: 96030 - DNA, 409 bp, Homo sapiens
gcaactgcgccaggccagcttccttacttgtaacattggataaaatgtcttgatgtctgtctggtagaaatacttcagaagcaatgatctggttggtggccaagggtggtgcacgcctgtagtctggctgctcgggagcctggggcggtagaatcgcttgagcccaggaggcgaaggttgcagtgagctgagattgcgccactgcactccagcctgggcgacagaggagacgatctccaaaacaaaacaaagaaatgctggttcgggaggcacacagccctagacttttgggctatatccttggcagtgactgttgatcagcttctggttgtttcaaggacacctgtaagactggagacccagttgagccaagagtggggcacatcaggaagactaggggatggaaaag

SEQ ID NO: 96031 - DNA, 352 bp, Homo sapiens
gaaaaactcgagactgctaaaaataggacctcaagttcaccgagtccactgggtcctcttgctcacgtaccagctcttagaaataatgctaccaggattgacaggcctccagctcagtcctcaaactttgtgtgtgtgtgcgcgcgcgcctgtgtgtcgtgcatgtgtgtgtgcatgcgtgtgtgtgtgttgtgcgtgtgtgagtgcgtgtgtgtgtgtgagagagtcacctgggatctagttcaattgcagattccaattcggattttcggaggggtccgtggattctgctttcttacaggcggaagccgagccagggcggtggtctgaaactggcgagcttagcaggttt

SEQ ID NO: 96032 - DNA, 391 bp, Homo sapiens
gcgccggggcatgtgtccagaagggtatttcctaggtttccttctagggtttttatagttgtaggttttacatttaagtctttgatccatcttgggttgatttttacatgtggtgaaaggaaggggggtccagtttcaatcttcttcctatggggccaggcctgtggcttttctctctggctccttgaggttaaacacctgctatgcttgcaggggccaagggtctcccagtctgctggcaacaacactcagttgggggggtcccagcaaagtgctttgtcagggtggtggtgacagcagggtccccgcatgtgccagtggtgactaggcagcagcactgtggattctgcacatgtgcatgtgctggctgtgacaaggcagcagcgtagtg

SEQ ID NO: 96033 - DNA, 434 bp, Homo sapiens
ggagggaggagataagataggttatcaaggcccagctcctttgatgttgacagaggaacaaaagccccttcccaggagctgagcagaggccacacacacacacagacacacacgcacacacagactgcccctgcacacacacacatacagaaactgtccctgcacacacacacacagactgtgccgtgaacacacacacagactgtttctgcacacacacacacagagtgcccctgcacacacagagactggccctgcacacacacacagagaccgcccctgtacacacacacacagaaactggctctgcacacacacagagagtgtgtgtgtacacacacacaaaactgagtgtgagtgcgcacacagagtgtccctatacacacacagagtgggggtgcaacacacactcacacaaatatagagccctgtgt

SEQ ID NO: 96034 - DNA, 437 bp, Homo sapiens
ggaggcaggagacaggaaaattgcttgagcccaggaggcagatgttgcagtgagccagcatggcaccactgcattccagcctgagtgacagagccagaccctgtctcataaaaaaaaaaaagaaaagaaaagggtttgggttttgtccccccccctgcttaaattggggagtaaaaaaattaatggtggggccaaaaaaaaaaaggttggaaaaagggcccttgttttgaaccattaccttttaaaaaaaaaaagttgggggagggaaaattcttcttcaaggtaaaaaggtttgttaaagggaaaacaatgtcttttgacctaagggttaaaatggcctttttaattttttaagggccacttctttttcaagagggaaggggttgaaaacagtaaaatagaaaaaatggttgagggaccaccaatataaccacccc

SEQ ID NO: 96035 - DNA, 409 bp, Homo sapiens
  misc_feature (1)...(409): n = a,t,c or g
cgggttttctccatgttggtcaggctggtctcgaactcccgacctcaggtgatccgcccaccttggcctcccaaagtgctgggattacaggcgtgagccaccgtgcctggccaaaatgcacaattcttaagcattcaattcactgaattttgaatatactcacttgtaaccaccatcctaaacacaatcttgaacatggaaatccccagaatatctctaggtggccttttctagtcaatcccaccctaccccctttctaggtaaccgctttatcttttatcaccataaagtagtttttaaccaggtgtggagactcacgcctgtaataccagcactttgggaggctgatgcatgaggattgcctgaggcaaatagttcgagaccagcctgggcatcgtggtgtgatctn

SEQ ID NO: 96036 - DNA, 406 bp, Homo sapiens
ataaaataaaataaaatctgtaacttggtgatgtatgtgctttttttttttttttttacctaaaaaatcagttaaaccccggaggaaaattgattttgcctgtgggccctgcgggcgaaaaccaaaggtgggagcagtttgacaagctacaaaagggcggcatcaaaatgaaccctttgaggggggggatatccgtccctttaacaaaaaaaaaaaaccaggggcccggggggaagggatttaatttttggctttttttttttccacacatgcaaggggaagggggggggtttttaaaactttaaactacaaaagctgttttgtggggcacctttatgctcctccattataacggcaaagattcttttcttttaaaagggggaaaatggaaaaaaaaaaaaaagag

SEQ ID NO: 96037 - DNA, 416 bp, Homo sapiens
  misc_feature (1)...(416): n = a,t,c or g
cggggtttcaccatgttggccagggtgatctcgatctcctgacctcatgatccgccagccttggcctcctaaagtgccgggattacaggcgtgagccccgctcccagctattcccctattaattgccaaagcagttctacacataattcccagatctgcttggaaggtggcattttttctacctgatttgttttttctactgtagatggtttgtagacattattcccacagagtgggcttcaggatattcatttattcaatcaccagataattattgagtgcctactatttgccagactttgtatttgttttatatatatgaataaattcttggtacttgtgagggtgtgtgtgtgtgtgtgtgtgtgtgtgtgtgttggtgngaaataaatatgtgagcagacagtagataaatt

SEQ ID NO: 96038 - DNA, 406 bp, Homo sapiens
  misc_feature (1)...(406): n = a,t,c or g
atttctgcacaggtgaggcgtgggcatcaggtgggcctctcacccgagggggacttctcatcgttacttctgcactgttctagagggatttcaacaatgaggtggttaggagcaggggccggatggcctaggtttgatactcagcccagcctcttccagctgtgtgaccctgagcaagtagcataaaccctccgtgcctcagttttttcatctctaaaatggggatagtcgttatacctactgaataggggtgttgtgagggtgaagtgagttaattcaggtgaagtgcttagaatagctcttagtaagcagnacttcttttttcttcttttccttttttttgagaaagagtttcactcgtcacccaggctggagtgcaggggcgtgatcttggctcactgcaacc

SEQ ID NO: 96039 - DNA, 410 bp, Homo sapiens
tttcgtatttgaataccctttatttctttctcttgcttgattgccctggccagaacgtccaatactatgttgaatagcagtggtgagagagggcatccttgtcttgtgctggtatagcagtgatgagagagggcatccttgtcttgtgctggttttcagggggaatacttccaccttttgtccatgcagtatgatattggctgtgggtttgtcgtaaatggctcttactatttttttttttttttttggaagggggatttcctcctggtgccccgggttgaaggcaaggggggtaattggggttaatggcacctttggccttggggttaaaaaaattgcccctccctaaccttcaaaaaaggctggggtaagagcccccctcccttaccccggggatatttttttatttg

SEQ ID NO: 96040 - DNA, 389 bp, Homo sapiens
  misc_feature (1)...(389): n = a,t,c or g
cggacgcgtgggcggggnnaaccatgttggccaggctggtctcgaactcttgacctcgtgatccatccgcctcgggcctcccagagtgctgtgattacagtcgtgagccactgcgccctgccatgagggtacttttaaagaagataacatcttccatggtgtattcaatgaggtcgtgtctggaattgttcccttaaggtggaggctgctctgtggccactgtgcctggcggttgtatgatcctgggttcctgggcagagaagcctcagcctcagagtgtttggggccttttcctgccgctccaaggctgaaggagaggagcttaaccccaactgcacagcgctgatcaccacttcctgcagtcattcttcctaaatctcaaaaactcc

SEQ ID NO: 96041 - DNA, 396 bp, Homo sapiens
attttaagttgaagctaatgctcatttaccattctgaaaatcccagggcccttaagaattatactaaatctaccctgtctatgctctataaatggaataacaaagcctggatgatggcacatgtatttacaacatggtttaccgaatattttaagcctattgctgagacctacttttggggaaaaaaaaagattactttaaaaatattaccgcttgttgataatgcacctggccacccaagagctctgatggagatgtacaaggagattaatgttttcaaatatgtattctgcagcctatggatcaaggagtcatttcaactttaaggtcttatagaaataaatacattttgtaaggatatagctgccatagatggtgattcctctgatagaacta

SEQ ID NO: 96042 - DNA, 411 bp, Homo sapiens
cacaaaaatagccatgactcacgcctccacatctcatttgtgctgtcacttcccctgggaagcctgatcaccccaaatgccgcattgtataatcttttttttttttttttttaaaagggggggaactttccccccccagggggggggggagaaaaaaaaatctggctaatggggggccccccccccggggaaaaaggaaaccccccccccccccccccggggggggggggaagggaggtcaccacccaccccccgggccaatttttttttttgaaaaaaaaaaaaagggtttatttggggggcagggggggctccaaactcccaccctaaaagaaacccccccccttggttcccggaggggggggaattaacaaaccccccaaccttcttttttgaggggggggctttttt

SEQ ID NO: 96043 - DNA, 416 bp, Homo sapiens
ttcaccatgttggcaggctggacttgaactcttgacctcagatgatccacccgcctcggtcttccaaagtgctgggattacaggcgtgagccaccgcatccggtctgtttcctagctttaatagttgacttatctgtattcttcgaaactctggcagtcagccagtagctctgttccctgtgcctagagtagtactctgcaccttgcaggtgtttactggatgctgagtaaatgcacacctggctgcaatgtcctggagtggtggccagagacattatgaagcttccaaatccataccatacacagcacctgaccttagggatcattatttagagctgggaaaatcttccttatgtcatttagggcttcaaacaagtgatttctccctgtttttttttctttggtacactaaaatg

SEQ ID NO: 96044 - DNA, 396 bp, Homo sapiens
cggacgcgtggggaagttttttagtttgatgttatcccatttgtctgtattcacttttgctccctgggcttttggggtcaaatccaaaaaaatcattgctcagaccaatgtcatgtgggtttccccctgtttcttctggtagtttttcagtttcaggtcttattaagtctttcatccatttcgatttttgcattcggagtgagatgagggtggtccagtttcattctttttatatccagtttttccaacaccatttattgaagagactatccttttcccattctgtattcttggcaattttgtcaaagatcacttgaccatacatgcgtgggttcatttctgggctctctatattgctcctttggtctatgcgtctgctttttttgccaggaccat

SEQ ID NO: 96045 - DNA, 422 bp, Homo sapiens
ccgttgcactccagcctgggcaacaagagtgaggctccatctggaaaaaaaatgtttaaaggctatgtccaatgttccataagggcagggacacacacacacagtgtcacacacacacacacacacacacacacacacagtgtcacacatacatactagcaacacacagaacgggcataaagtaagatgtattaaggagaaattgcgagcagggagcagtggagtccacatgacccccgagctcttattgcacagagaggtgggtatggtggacacacagcaggatgtggtacaagagagagacctgctcctgtttaacagaaaatgggaaaggcacaaaaaaaaaaaaaaagggggggcccttaaaaaaaaaaaaattttaaagccggggggggggaaaaatatttttttttttttgggcg

SEQ ID NO: 96046 - DNA, 380 bp, Homo sapiens
gaggtttctccatgttggtcaggctggtctcgaactcccgatctcaggtgatccgcccgctttggcctctcaaagtgctgggattgcaggtgtgagccatcgcgcctggccagtgtcaggatttattctgtgggaggggaggaggacaaagaaaaatactgagctatgtttgaagctcctgccctctaagagccttagagcagctgacttaaatgtgttcctttgataaactgtagatggttgttgtaactcttctgcaaactgtttatttttaaaaacaatttgatgagattttacttatgcccattgtttgagtacagcatttaccaaagaacaattttggccagatcccatgcagtagaatgcccttggccaaaatt

SEQ ID NO: 96047 - DNA, 410 bp, Homo sapiens
ggtgtttgaagcagaaccgggccaaatcctagggctcagacagatcggcctgtggtttgcgtggcttttgcttgcttcgaacttccattgtggagatctgtagactcagctactcgggaggctgaggcgggaggattgcttgagcccaggaggtcgaggctgcagtgagctgcaactgtgtcactgcactccagcctgggtgagagcgagacccttgactttcctctggtcggtggccatggtcccatcggtcaccaggccggagcccagcgcgtgctccagggaagtggcccagcttctcagcgtcatggcctgcgttggagcctgaagtctcgatgaggacgtaaaacggactctcttgcaccgggctggccaggtggagatggcgcccgaccagctgcatgcacaca

SEQ ID NO: 96048 - DNA, 388 bp, Homo sapiens
agcgttcacctgtagtcccagctacttggaagactaggtgggaggattgcttgagtccaggcggtaaaggcagcagtgagctatgactgtgacattgcactgcagcctgggtgacggagtgagactgtatctctaaaataaatgaataaaattgtggtataatatatgcaacatttatcattttgtgcatctgaaagtgtacaattcagggacattttgtacatctatcatgttgtgcaattatcaccactacctagtttcagggcttttcaacacctcagttggaagcctcatatccattcagcagtcactctgcatactccctcctgcagccgttggaaacctctcatctactttctatctctgtcgattggcttagtctgaacat

SEQ ID NO: 96049 - DNA, 379 bp, Homo sapiens
ggggagttggaggttgcaatgagccaagattgcaccactgtactccagcctgggtgacagagcgagactctgtttcaaaagaaaaaaaaaaaaggaaacccggtttttttaaaatttttaaagggaatcttttttttggaacctcattatttaaaaagttaagggccaaaggccaaaagggacttgttcagggaataataaaacgccctcaatttttgggagccccggttaatttataaaaggaacctaaacccggggttacagggtgccaggaaaacggggggaggtaaaacatgggaaacttttaccatacgggaaaggcccccaggagggcctcaaaaaaggtaaccttttattaataaaacaaaaattttaatta

SEQ ID NO: 96050 - DNA, 381 bp, Homo sapiens
  misc_feature (1)...(381): n = a,t,c or g
aacccgggaagcggagcttgcagtgagctgagattgcaccactgcagtccgcagtccggcctgggcgacagagcgagactccgtctcanaaaaaaaaaaaaaaaaaaaagggcccccccaaaaatctttaaattttggcggcaaaaatgggaaagcccaaaaaagggggaaacccaaaaaattttggggccccccccttttaaaaaggggaaaccccccctaattggggtaaaaaaaggaaaaaaaaaactttgggggggttttttgaaaggaaaattttaacccgccctttttttgggttttttgggaactaaaaaaaagaattttccttattaaaaaaacccaaaagctttaaaaaaaaaaaaaaggcccccaaaaaaa

SEQ ID NO: 96051 - DNA, 381 bp, Homo sapiens
tagagcttttatacacaacgtttttgttaggcatcacagttttgcaacctctgctccaaagagaaaaatagaatgagttttctttctttttttttttttggaagaaaaatacttcttctttggcccgggggggggggaaaaaccgcacctgggcccattggaacccccccccccctgggtaaaaaaaatttcccggcttgccccctaaaaaattgggaataacgggggggggacccccccctgggtaatttttgtgatttttaagaaagggcgggtttccccatgtgaacccgggtttggacctcgaaccttggaaacccccccccttggcccccccaagtaccgggaataacgggggggcccccgtggcccggcccgttt

SEQ ID NO: 96052 - DNA, 392 bp, Homo sapiens
ggcacatgcctgtagtcccagctgcttgggagactgagacaggaggatcccttgagtcctggaggcaggaggatcccttgagtcctgaaggtggggtttgcagtgagtcgtgatggcatcactgcaccgtagcctgggtgacagcagagcgagactgtgtctcaaaaaaaaaaaaaaaaaaaaaccttcccccggggggggggggtttaaaaagggtgccttttttttaaaaggggggggcttttccttaacgggggaccccgggttaaccttttttccaacaattttttttaaaacttccagggcaagaatttcctcttttgaaaacttttttggccccctggccctggggggggggaattttttccctggcctttaaaaggggagcaggg

SEQ ID NO: 96053 - DNA, 394 bp, Homo sapiens
  misc_feature (1)...(394): n = a,t,c or g
aagaaaatgcctgggtccatagcagccgggaaaggctttcttgtaactccttactcagccacaactggaaattgctctttataacagaatccccatagcaataaatggcaggtaactgtggagccagccagacaggtagaataggatgaggtgaggtagtgaggaaagaaaagattccaaatggagttacaaatgaggaatgaaacagggataaatggaaacgctcttctgaactttgcctaggagacaatactgtatcagaggccaaggctttttgtttggtttttgtttttgttttttgagatgtagtctcgctctgttgccaggctggtgtgatctcggctcactgcaacctccgcctcctgggttcaagtgattctcccgcctcagcctn

SEQ ID NO: 96054 - DNA, 391 bp, Homo sapiens
atctgtttagttgttggagttattttaggaaacccccaacgaagcttcaccaaaaactagctgggactacaggcatgtactgccatgcctggctaatttttttattttttttgtaaagacagggttgcccgggctggtcttgaacttctgacctcaagcgatctgctttgcttcccaaagtgttgggattacaggcatgaaccgctccacctggccactttccagtgtttttggcagtattttcttagtctattattggcctctctacttaatagaaactaatatgcttactacactttaaccaatcagaggattgcatacattctattttcttactttttttttgagacagaatttctcccttgttgcccaggctggagtgcagtggcct

SEQ ID NO: 96055 - DNA, 1473 bp, Homo sapiens
acttcacatgctgtatttctgtgtgtgtgtctttaattcctctagcaccactgggttagggtctccacaaccgagctggtctcagcagtaaatattgaaaaggaatagatacaattgtcattatttacagatagaatttccaaacaattcccagggaataaactgaaaaactaacagaaacaaaacaagaatgtagtaaggtgtctgggtaagagatttgtatctaaaaatcagtagctttgcaatgtgcaagcagtaatctgcttagacatcagtaaatacctcattcatattttaaacaaaaaattaaaaatgccttgaaataatgtaaccagaaatacaaaaaaaaaggatatgaaaacgtggctgctaatggacatgaaagaatgtaatactagattctgagatgcaatttttttcatttgttcttcctgaaaaatcattaggttgatgtgcattacagtgttacgattatgtatgagtctaaggaaaatcagatgaaatttccaaattaaaccatgaaggtgcattggtagaggaagagacaattagggtcagtggagcaaagcacagttagagggagaagcaaggaggaggagggatcacggaggtggtgcctgtgtgtcccacaggaagcaaaagctgatgcccagttcccagcatacctaagtaaacttcaggtccactcctagcacgtttctcgtgatagtaaaactatgaaggaactcagtgtacaaggagcttctacaaaataggcagaagacagtagccagatgggccaagggccccagccacccacgcccctccctctccttgaagaccttcggttccaaccccaccatcagcagggctctgctcagttcctccttgtgtgtatcaccacagggctgctggctcgtgtcacgttcaccaccagaccccacatcaggagtcccgccaggggtgtggggaggcagcgctgcctggttggccgtggagccgtatggaacatggtgcctcacaggcagtctgcttggcgtcctggatcctggctgtatcccgctggaaaggatgtgtgtgggtctaagatatgtatataatagaaacatttattcagaagctttagtcaagacttcatttttaagttcagagtaataaactcatagtctaaatttcctaatttttctgtttaatttacataaataaaatgaaatgcaaaacaacaggtctaaaagttaagcagttcttggtatggctgcttctatgaattaaaagtttacaaataatattttgtgccacagtcaacgcaaaatcatgctgccgtgttccgtgtgggaagcttgttgcaagaaggttgtgggaaaatcagcaagctctatggagacctgaagcatctgaagaccgtttgaccggggaatggtctggaacacggacctggtggagaccctggagctgcagaacctgatgctatgtgcgctgcagaccgtcaatgga

SEQ ID NO: 96056 - DNA, 357 bp, Homo sapiens
tagagtgcagcagcaagatctcagctcactgcaacctcggccttttaggttcaagtgattctcctccctcagctactcaggaggctgaggcaggagaattgcttgaatccaggaggtggaggttgcagtgagccaagatggagccattgctgtccaccgcctgggtgacagagcaagactccatctccaaaactaaaaaaaagccttccccctggctttatattgaacaattttcattatggggggcccttaaattttttttttcttaaaaagtgggggtttctaccaacaaggctcatttttggggttttgacaccaaaaggtgcgggggcatttttttcttttcaagccaatgat

SEQ ID NO: 96057 - DNA, 370 bp, Homo sapiens
  misc_feature (1)...(370): n = a,t,c or g
gtctcaccatgttggtcaggctggtcttgaactcctgaccttgtgatctgcctgcctcggcctcccaaagtgcagccactgcgcccggccaggctgaccattttgtatgggaaagtcagcactttcgtgaatgaacacattgatcaagccactgaggaaaatgtgattcaaatcataaggaggccaggacgaaggtcacacaaagagcccctgactctaatctacaatcatgacgaagggggccccagtccagttctaggagaagcctccctgccacatcctgtgacaagtttcacaccagcagggatcttgctgagccagttaggtgggctgagtccagccctggaagatgggccatcctcgtgtcctn

SEQ ID NO: 96058 - DNA, 405 bp, Homo sapiens
ctcacttaaaggtcattaataggttcttggaaactgactttaagcaaaatgacgtataacaaaaccaatttttttttttttggaaacggagtttccctccacccggggcaaccgagggaaactttgtctcaaaaaaaaaggccatagtggtaaaaaaaaaaatgggggcccaggggcagggcctaagcgccggaaccccagcctttgggggggccaggggggccaaatccctggacccgggaagtaaaaacccacccgggccaacgggggaaaccccctttcccccaaaaaaaccaaaaataaggggggcccgggaaggcgaccctgaagccccgggacctcgggggggccagggctgcagggaaccgggaaaagtgccctgccctccacccggggcaacaaagg

SEQ ID NO: 96059 - DNA, 402 bp, Homo sapiens
ttatttttgtagagttggggtcttccttttgcccaagctgggcttgaacccttaggctcaaatggtcctcttgttttagcctcccaaattgctgggattacaggcatgagccaccgcgcatgggtccaatttgtagagatagggtctcactggcttttattttatttatttatttatttatttatttatttatttatttattctgagacagagtttcactccagcctgggcaacagagcgagaccttgtctcaaaaaaaaaaaaaaaaataaccggggggggcgggggcgggcctataatcccagtaactcggggggctggggcgggaaaatagtttgaacccaggaaatgggggtttcggggagctaagggccccccacttgatgacaacctgggcaaaag

SEQ ID NO: 96060 - DNA, 385 bp, Homo sapiens
agtttttttatcagaagtgtacagcttgaagaattattacgaaattaacctagctgtgtaaccagcacccaaatcaagagctagaaaatttccagtactcaaaagtacccccctgttatctaccaatatctaccacctccaaagggtaacaccactacactatcctgacttctaatatgaccattaattttgcttgtttttgagcttcatagaaatggaataatatatactcttttgtgtatgacttcttttactcaataaaagggtaattttttttttttctttttttgagacagggtctcactctgttgtccaggctggcttgcaggggcatgataagagcttattgtaaccttgaactcccgggctaagcaatcctcctgct

SEQ ID NO: 96061 - DNA, 365 bp, Homo sapiens
ggacatttgtgtcgtctgaatggccttttcatgccctttgccgatttctgtgctgggttgtttgtcttattgagttataaagactcatataaaatgtttctattgttttaatctgtcattcaatttaatctgattcgacttgtggtattttgatcactaggcttctagattttatgttacgctttaaaaggacttctttgtttttaaattattaaaaatatgactgtaaggccaggtgcggtggcacacgtccgtaatcccacgatgcaggtggatcacctgaggtcaggagttcaacaccagcctggccaacatggtgaaaccctgtctctactaaaaatacaaaaattatctgggtgtggtgg

SEQ ID NO: 96062 - DNA, 378 bp, Homo sapiens
gacagaggctgcagtgagccaacatcgtgccactgcactccagtctgggcgacagagcgagactgtgtctcagaaaaaaaaaaaaaaaaaaaaaaaaaccccccttttaagggggcccgaaaaaaagaacggaaaccccccattccggggttttttccggaaaaaccccgggtttaaaagaaaaaaggggggggccccgccccccggcctttttaaaattggccgaaaaaaatcccccgttgggggccaccggcacacttttatcttgggaggacccttgccccggttttaaaggggggccccaaggaaagggaaaaccagggtttacgaggggaaacaatcctgtttgggccatcccttttctaagaagagatggcg

SEQ ID NO: 96063 - DNA, 308 bp, Homo sapiens
tctctctcctgctcctccatagtaagacgtgcttgcttccccttcaccttctaccatgattgtaagtttcctgaggcctcccagtcatgcttcctgttaagcctgtggaactgtgagtcaattaaacctcttttcttcataaattacccagtttcaggtagagcttgatagcagtgtgagaatggactaatatatcatccctggttgttttaagatgcaaactttgaccaggcacagtggctcatgcagttaatcccaacacattggggaggcaaggcagaaggatcacttgagtccaggagttcaag

SEQ ID NO: 96064 - DNA, 596 bp, Homo sapiens
  misc_feature (1)...(596): n = a,t,c or g
aatgaagaatgctgaagacatcctaaccatggaggttttgaaatccaccatgaagcaagaactggaggcagcacatgaaaaagcattctctttgtgaattgctccgcatacccaacatatgtaaaagaatctgtttcctgtcctttgtgnnnnnnnnnnnnnnnnnnnnnnnnnnnnnnnnnnnnnnnnnnnnnnnnnnnnnnnnnnnnnnnnnnnnnnnnnnnacaaagattactgcctggtccctcctctggaagcttcattttataggagcacctgcctgatgccagccagagctctcctatttgcaagtaccatccctttttggggccttactttgcacctccagcatctgggaaacaatgttttcctgttgcagactctctttggtgcagtcaccctcctggccaattgtgttgcaccttgggcactgaatcacatgagccgtcgactaagccagatgcttctcatgttcctactggcaacctgccttctggccatcatatttgtgcctcaaggtgagaaaagttcacaggtggaagaaagaaaatgtctttccctcttttctcagggattgccctggtcacacctatctg

SEQ ID NO: 96065 - DNA, 366 bp, Homo sapiens
  misc_feature (1)...(366): n = a,t,c or g
ctttctttctttctttctttctttctttctttctttcttttgngagttaaggatttatttatttttatctttatttttattcttttttttgagatggagtctcgctctgttgctgttggatggaatgtcctgtacctatctgttagatccatttggtttatattatactgtatttcaagtccactgtttccttatcaatattctgtctggatgatctatatctatccatttttgaaagtgaggtattgaagtactctactattattatattgctttctatttctctgttcagntaatatttgctaaatatgtaggtacaccaatgttgagtgcatagtattcataattgttatatcctcttgatag

SEQ ID NO: 96066 - DNA, 363 bp, Homo sapiens
  misc_feature (1)...(363): n = a,t,c or g
gagagagctagcaccatgagcctgggaggtggaggttgcagtgagctgagactgtgccactgcactccagcctgggtgacagagctagactccgtctcaaaaaaaaaaaaaaaaaaaaaannnnaaaaaaaaaaaaaaaattttttttttttggggggggggggtttttttttttttgggggggggaaattttttgggggggggggggcgtttttaaaaaaggggggggggaaaaaaaatnttnnnnttnnnnnttnnnnnnctgcctttggttagagcaaagaaatctcacgcgcgaanntnntttnnngnnnnnnnatnnntttattnnnttggggtnttttggnattcttgtttataggg

SEQ ID NO: 96067 - DNA, 402 bp, Homo sapiens
  misc_feature (1)...(402): n = a,t,c or g
aatacattggttgcagtgagcagagatagcaccactgcactccagcctgggcaacagggtgagaccgtgtctcanaaaaaaaaaaaaaaaattaaatgggggagggccttgtgggaaatcccgccggtgggaatgggagggaacccaacccttgtctttttttggggccattgggaaacccccaaaagggagggctggggaggggcttaaaaacggcccttgggaaaccccccaaagggagggccttgggggggtttaaaaaaaacccttgaataacccttttttagggagccgttttctttttgggggggtggaaaataagggcttaaaaccaaataggcttttgggttttttaaaacccacttttaaccagggggcccttggggagaacttcattttgag

SEQ ID NO: 96068 - DNA, 382 bp, Homo sapiens
aatacatgtgtgtgtgtgtgtgtgcatgtgtttgcatctgtgtgcttccatggatgtgtctctgtgtgtgttttactgtgtctgtgtgtgttggtatctgtgtgtctgtctgtgtgtctctctgtgtggacaccaacacctggcggtctctggaaagcggagccagccccctagccatgagtctttcaaaaccagcctcctgctgtgggtctttaagaacttgccccctcttctttgcgcctgggttccccaagtttcccaaaatatgccattagatgggaccagaacactaaataatgtgagcctgcctgatgagaaggtccatgatctcctcctcccgctgactgctgcataggaaaggtctcggttgctgccatcctgt

SEQ ID NO: 96069 - DNA, 387 bp, Homo sapiens
  misc_feature (1)...(387): n = a,t,c or g
aataccccnaccggcctgatgcttagaatattaggttttcagtaagaattcattgaatgaatgaatccttgctttcctgcaaaagatggagcctcctggccttctcacacatttggtcttttgtttaatttgttcaacagacatcagtgccctctgcgtcactgtgtgtgcatgcatgcatgtgtgtgggtgtaggtgtgtgtgcatgtgcctgtgtgtgtgcctgtgtttgtgtgtgtgcaggtgcatgtatgggcgtgtgtgtgcgcccatgtgtctgtgcgtgtgtgtgcattgtgtacttgctcgcatgtgcgcttgtgggtgtgggtgtgtatacaaagcagagtgcccaatctgatggcaggaggggcagacgccagggag

SEQ ID NO: 96070 - DNA, 381 bp, Homo sapiens
aatacatgtgtgcatgtgggtatatttgtatgcacgcattgtgcctgtgtgcatgtgtgtatgcacatgtttgtgcgcacatgtgtgcctgtgtgcatgtgtgtatgcacgtttgtgcctgtgtgcatgtgtgtatgcatatgtgtgtgcctatgtgtatgtacaccaatcataacactcccttttctttcccaagaaaggatttctttttgtactgatctcaggagtttcagggctacagcgaagagatcacatgaggaagtcaagaattgtgtttacttacaaactatatggaaccaatatttaatcattttctacttacaaaatcccaattttggctgggcacagtggctcatgctcgtaatcccagcagtatgggag

SEQ ID NO: 96071 - DNA, 381 bp, Homo sapiens
aatacatgtcctgggtaattgtctttacttctctgagcctcagtttcctcactggcaacagaggattacacgctctttcttggagggctacggtgagaatttgatgagattacacatgtcctatatacacatgtgtttacatatatgtgcatatatttgtatatttatgtgtgtatatttgtgtacttttgtgtgcatatatttgtgtgtgcgtgtatttgtgtgtgtgcatttgtatgtgtatatttgtgtatttgtgtacacatatttgtgtatttgtgtgtgtacttgtatgcatatacttgtgtgtatttgtgtgtgtgtatttgtgtgtgtatcaagtccagcacagaattgagtacatacagtaggtgttcagtt

SEQ ID NO: 96072 - DNA, 393 bp, Homo sapiens
aatacatggtggcatctgtctgtagttccagctacccaggaggtcgagacaggaagatggcttgagcctgtgagtttgaggttatagtgagccatgatggtgccactgcactccagcctgagtaacagagccagaccctgtctctcaataaataaataaagaagtaaataaagccatgggagtaagggacagaatttgctgtgcaggattgaattgtgcattgcacaagtccaggcatacctggcctatacctactaaatatggggagcattcttctaattgttgtgccattttagacatatccccacatatgtccaaaatgcctataggggtcaccactgcctgagaaccactggactagttgttcactaaggtctcttccaaccccgggat

SEQ ID NO: 96073 - DNA, 414 bp, Homo sapiens
aatacagtgggtctctgtgtgtgtgtggtctttttgtgtgtgtgctatctctgtgtgtggtctctctctgtgtgtggtctctgtgtgtgtgtggtctctctctgtgtgtgcggtctctctgcatgtggtctctcactgtgtgtgtctctgcgtgtatctatggctatgtgtatctgtatgtgtatctctctgtgtgtctctgtgtgtatgtgtctatgagtgtgtgatctcaagcaccaagagatctttgggggccccttctagagctgaggcagcaaagctgcctagaaattgggccccagccaagcagagccactgaggtctggcggcccacattgagcaggcgggggtccgggtccatgtggggaggttaatgcatctgcagtgtgcaggcacaggcagcaggtggcagcg

SEQ ID NO: 96074 - DNA, 391 bp, Homo sapiens
  misc_feature (1)...(391): n = a,t,c or g
aaaaccatttcatcatctcaatagatatagtaagcatttcagaaaaatccaccagccatttgtaccaaaagctatcaccaaactaggaataaaaggcaacttcctcaacttgctgaggggtacctctgtaaaatccacaggtaacatcaacatgtaatggtgaaaaaccaaataacttgcctctaagattagtaatacagggggatgtcctctttcatcttctgttggaggtcctagctagtgcagtaaaaaaaaaaaaaaaaaaaaaaaaaaaaaaaaaaaaaaaaaaaaaaaaaaaaaaaaaaaaaaaaaaaaaaaaaaaaaaaaaaaaaannnngaaggggggccccttaaaaaaaaaaaaaaataaccccccccgccgcgaaaaaat

SEQ ID NO: 96075 - DNA, 410 bp, Homo sapiens
atccgcaattcccggggcgacccacgcgtgcggatccaccgtgtttcccacagctgttttcgaactccttggctcaagcaatccacctgctctggcctcctaaattgctgggattgcagacgtgagccactgggcctggactcagtgtcattttcatttgcattttcctgataacatgatattgaacatcttttcatatgcttacttgccatctctgtacatctcctttggacaggcatctgtatagggcttccgcccattttttaattgggttgatcattcgcttatcgtagagttttaagagttctttgcatattctggacaatagtgggttctttttaatcagatgtgtcttttgacaatattctttcctgggcttcttattatctagacattatctgttgaaagag

SEQ ID NO: 96076 - DNA, 409 bp, Homo sapiens
caatcttggtctttggggccactaggaaatacccgaaggaagttgcccattgggagggggggtgcccttttaacctgagcagagagcagctatttaggaattgccactcaacctcctgcccgtggcggtggtgtgggaaccgctggctgtttaaagtttccctatggccaggtgccgtggcccgtgcctgtaaccccaacactttgggaggccaaagtgggcagatcgcttgagcccagttcaagaccagcctgtgtgtagcaaaaccccgtctctacaaaaaataggaaaaaaaaatgctggagggagtggtgtatgcctgcagtctcgagaggctgaggtgggaggatcgcttgagcccaggttgcggaggttgcagtgagccatgatcgtgacattgcactccagc

SEQ ID NO: 96077 - DNA, 418 bp, Homo sapiens
  misc_feature (1)...(418): n = a,t,c or g
attttaatttttttgtagagacaagagtcttgtttttttgcccaagctagtcttgagctcctggctttaagcagtcctcccacctcagcctctcagaatgatgggtgagatgccgcacctggcctcctttttagttcttgagttgaacaacttttagaaggctacaggacgaagtccttgtacttgaggagcttttttttgtttgtttgtatgtttttgagatggagtcttgctctgtttccccaggcttagnnganngncacnatctcggctcactgcancctccgcctcctgggttcaagcaattctcctgcatcagctttgtgggcatggnggcgcacacctgtgagaggctgaggtggaatattccctgagcccaggaggtcgaggctgcaancggccgtgtttcaccaataga

SEQ ID NO: 96078 - DNA, 405 bp, Homo sapiens
  misc_feature (1)...(405): n = a,t,c or g
aaagccggggcccagatgggcatcaaacatccccagcatagcagccggttaaggctgcggagaccttccccaaggctgccctccagtcagaagcccctgaacactcactacttcccatctttcagcttctgcgcgcacagacacacacacacacacacacacacacacacacacacacacacacacacaggtgttctctccacccccacaccctaaagaagctgttttttttttctaatttccaggcgagagatcactcctcagggaagccaggccctgtatatactccctcctccggccttttcttgcacaggatatatgaaggcgaggggcgggcaggtcctagcgacacactccattatggactgagtgtgtgcccttaaccnagctataaaacctctctgc

SEQ ID NO: 96079 - DNA, 371 bp, Homo sapiens
caggaggattgcttgagcctttcaaagtgctaggattatataggattataggtgtgagccaccatgcctagtctggctgaattttttgattatagagatgaggtcttgctatgttgcccaggttggtcttgaactcctggcctcaagcattcctcccactttggcctctcaaattgccaggattacaggcatgagccactgtgcctggccccaaaattacttcttgatctatgggctgcagagtgggtgttgtgttagcatgcatgaaaacaacattaatcttacacatctccattagagctcttgggtaactaggtgacttgccaacgaacgcaatattttaaaagaaatttttctttctaagccgtagg

SEQ ID NO: 96080 - DNA, 428 bp, Homo sapiens
  misc_feature (1)...(428): n = a,t,c or g
cggacgcgtgggtgaaggcagaggttacagagccaagatagcgccactgcactccagcctggatgacagagcaagactccgtctcaaaaaaaaaaaaaaaaaaaaggggggggggttttaaaaaaaaagggttttttttggggggccccggggccttttttttttttaaggggggttttaaaaagggtttttgggggcccctttttaaatggggggggggggaatcccggggggggagaaatttttttttcgggggggggaagggtttttttttttccccaaggggggggttgggggagggggaaaaaaattttttgcttttttaaaaaaaaaaaaaaaataaaaaaaaaaanncccccnnnnaaggggggggggtctttaggggggcccgccgccatagagcgttccttctttaatggttttttttt

SEQ ID NO: 96081 - DNA, 447 bp, Homo sapiens
  misc_feature (1)...(447): n = a,t,c or g
gaattccnnatcgacccacgcgtccggtgttacaaacatttactgaaagaatgaacggaatatattttttttaatcaccagtgtgcatacagtcatggagttgggtattcccagctaccagggaggctgaggtgggaggattgcttgatgccaggagttagggaatatagtgcaccgtgattggacttgcgaatagccactgcactgcggcctggacgacgtagtgataccctgactcttataaataaataaatgaataaacacccannaaaaaaaaaaaaaaaaaaaaaaaaaaaaaaaanannnnnnnnnnnnnnnnnannnnnnnnnnnnnnnnnnnnnnnnaaaaaaaaaaaaaaaaaaaanaaaaaaaaaaaaaanaaaaaaaaaanaaaaaaaaaaaaaaanaannaaaanannnnaaaaaaaaaaaaaaacaaaaaanac

SEQ ID NO: 96082 - DNA, 210 bp, Homo sapiens
cgatctcggctcactgcaatcgatctccttctcccgggttcaagcaattctactgcctcggcctccccagtagctgagattacaggcgcctgcaacaacaaccggcaagacttttcctttataattttgcaaatctagattaattaaattagaatctgtttttaaaagcattaaaaaaataaagtttatgagaaaataaaaaaaaaaaag

SEQ ID NO: 96083 - DNA, 421 bp, Homo sapiens
  misc_feature (1)...(421): n = a,t,c or g
ggacccaggctgtgaggttcctggngttttgtttgagcacatgtgtgtgtgtgtacgtgtgtgtgtgtgtgtatctgtctgtctaggcgggtggttgtatgtgcgcattcccatgtgtgcgcaggcatatttctgcatttaattaatcaaacttttaccacccatctgttgtgtgcaaagtaatggctttgagggtgactccctctccctgcctccaaggagctcacaacccagttagccgggcaatgtatgtgtgccaaagtctgtatgaattttatgtacatctttatcgagggacatatttgcccccagacttgttcttgtctaggagaacccatccgggggggcctatccccattggtgtgcatatgctgtgcgcaggtttttttgttagtttttgttttgagacggagtctcactc

SEQ ID NO: 96084 - DNA, 400 bp, Homo sapiens
tttgttggtgaaattgatattcttgtttatgcagcctgaaatacagatcacatttgaaagcctttcttgaagctcaattggttaagtgactgtggctgtcccatgtgtagaagccaaagattatgtggtaattctggtaacctttcttaagagaaagctgctacagtctgtctgctcagtcctcccctcttccttcctgctgcttggaagattttttttttttttgaaaaagggggtttttcgtcccccagcccggagggcgggggttcactgcaccctccccctccggggttaaggggattttcctgactcacccccctgagaaaataggaaacccggcccctacccccccccccggttatttgtttttttacaccaaagggggttttgttttgtcggc

SEQ ID NO: 96085 - DNA, 440 bp, Homo sapiens
  misc_feature (1)...(440): n = a,t,c or g
ngaagtagattcccannnttnnggagancccgcctcgacccattctttcgntttttttgntncttatttatttctctttttggaaaatatacataaagggattcgaacgattttatgagtacagctcattggcataaagaacattcatattgggggaccatcaccaccatccatctgcagtacattttcatcttcccagacggaaactctgtacccatgaaacgggagctgcccctccccctccagccctgggagccactgtcccaccttctgtctctgtgtgtttgacaggggggggacctcagataacccctccccctccagccctgggagccagagacctaccttctgtctctgtgcgtttgacgatggggggacctcagataacccctccccatccagaccagcagccactgtcccaccttctgtctctgtgtgtn

SEQ ID NO: 96086 - DNA, 383 bp, Homo sapiens
cagcaggtggcacctgctggggttctcactctgcaagatgcctgggggacatacttcccaacttctctgtggcagttttcacttaaaaggaaacttgaatatttaatccgaccctaagtcaaatccttctgtgctagcatgagggcatgtgtgtgtgagtgtgtctatatgtgtgtgtctatgtgtgtctgtgtctgtgtgtgtgtgtctgcatgtctaatatgtgtgtgtctgtgtcaggtgatttaataaataaatgtgttttgaacattaaaaaaaaaaaaaaggggggccctttttaaagaatcaaattttacttccgggggctgggaaggttatattttttttatggggcccccaaaattaaattccggggcgggttg

SEQ ID NO: 96087 - DNA, 440 bp, Homo sapiens
  misc_feature (1)...(440): n = a,t,c or g
ggggggatgctgggaaccgcaacncccggggggacccacgcgtgggcagcaggtggcacctgctggggttctttctctgcaagattcctgggggacatacttcccaagttctctgtgggggtttttacttaaaaggaggcttgaatatttaatccgaccctaagtcaaatccttctgtgctagcatgagggcatgtgtgtgtgagtgtgtctatatgtgtgtgtctatgtgtgtctgtgtctgtgtgtgtgtgtctgcatgtctaatatgtgtgtgtctgtgtcaggtgatttaataaataaatgtgttttgaacattaaaaaaaaaaaaaagggggggcggtttaaaagaaacaaattttacgtcgcgggggtggaaagtttttattttttttattgggccccaaaaattaatctccgggcccccggttaaaaaagggg

SEQ ID NO: 96088 - DNA, 412 bp, Homo sapiens
atttctacttctttctacacagacacgattaaccgcacagccctgcattttgcagtggggagaaatcatttatctgcagtggatttcttgcttaaacacaaggccagggtggatgttgctgataaggatggaatgaacgccctccactttgccactcagagcaatcatgtgcgcatcgtggagtatcttattcaagatctgcacctcaaggacctgaaccagcctgatgagcctaaggagtcccctcttcatttagttgttatcaacaaccacatcacggttgtaaacagtttattaagcgcacagcatgatattgacatcttaaatcagaagcagcaaaccccctctgcatgtagctgctgatcgtggaaatgtgaaactggtggaaccctgctgaaggcaggctgtgact

SEQ ID NO: 96089 - DNA, 404 bp, Homo sapiens
gcaggcctcggcgacttctaccagctttttcgggacgccacggcggtgagggaggcttggggtcctccaggccccctaacggacagcagctgcagtcagcacggtctctttcccccaggactttgagggccagagtcccaaatgcacccagggtgtgcgggaagcgctccgacagatcaaggacttgttcctacagggagcctacgacacggcccgctgggagtttggcacctgccagccgctgtcagacgagaaggacctgacccagctcttcatgttcgcccggaatgccttcaccgcgctggccatgatggactacccctaccccactgactttctgggtcccctccctgccaaccccgtcaaggggaggcgccgcctcccacggcgcagggagaggccgc

SEQ ID NO: 96090 - DNA, 231 bp, Homo sapiens
tttcgtctgtcttcccgcccccgcgtgcctacaatcagccccagtctccctgggaaaccgacgagcgcacctgagctggcttctgagctccagcgttttggggctagaagttgcggactagtagctgaggcggcacgggagtgtaggcgcgcggggtcgttgccgggggcacagagtgagaacaagcaagggagccctgctgaattgcagcttaggaagccctgaatcctg

SEQ ID NO: 96091 - DNA, 422 bp, Homo sapiens
  misc_feature (1)...(422): n = a,t,c or g
gtcgacgatttcgtgacgggaatggagacagacgggggagcgattggacagatggagacagagagcggccatggggaggtagagtcccagggcggggtggagacagggacgggaaggctctggcggagaaccgcagacacagcaagcacaggtgcatacgtgggggaggctgtgagaccctgcccctggagatgggaagtgtgggggtcgagtcacacagttaggccccccgcacggggagagccccagcttccaggtacaccaggccccattttttgttttgttttgttttgttgccgtttggggttgttttgagacaggatctctcactgtcacccaggctggagtgcagtggcatgatctcagctcacagcagcctcgacctcctaggctcaagcaggcctcccacctgagcctgccan

SEQ ID NO: 96092 - DNA, 417 bp, Homo sapiens
tttcgtaccaccaccaccaccaccaccgggcccagccgttgcagcagagtcaccacccccctcaccaccaccggccgcagccccatctgggcagctttcccgagagctgcagcagcgactccgagtccagctcctactcggaccacgcggccaacgactcggattttggctccagtttgtccagctccagcaattctgtgtcctcagaggaagaggaggaggagggagaggaggaggaggaggaagaggaggaggaggaggaggggggcatcgttgcctctgattccagtgaagtcagctcggaggaggaggactcgtccaccgagtcggactccagctccggctccagccaagtgttagggcagagcattcgattcaggcgcaccagcttttgcagcctcccagggtgaggcgcac

SEQ ID NO: 96093 - DNA, 415 bp, Homo sapiens
tttcgttctcgatctcctgacctcgtgatccgtccgcctcggcctcccaaagtgctgggattacaggcgtgagccaccgcgcccggccgcctctaagtagtttaaaaagattttatcatatagatcttgtactttttttgccaactttattcttagattattaatctttttttgttgttactataaaggggataatttattatttttatggttttttttttttttttttgaaaaggggttttttttttgccccccgggtgggggggcggggggggaatttgggttaatggaagcccccccccccggggtccccccttttttcgggcctaaccttttctaaaaacggggaacaagggggccccccccccaaccaaaattttttttttgttttttaaaaaaaaagggggttcccccg

SEQ ID NO: 96094 - DNA, 406 bp, Homo sapiens
  misc_feature (1)...(406): n = a,t,c or g
tttcgtcagagtcctcctacactggtgcggaaatgaaacagacagtctggctcgttgggcagcctagcctcctccagaatctgtgcttgccttccctatggagtgactggtagatcttagaattcagacctcagtggttgctagccagcactctcacattggttggtccttctctctgcatctttgattctttagagatagataaaccaagcaccgactctcctttgacatgtgcttggaacagacacctgcacgagctgcctttctcctcccacttctgcctggtcttccaaacacctgcttttcttgtttgaactcttcctttttttttgagacagaacctctctctgtcacccaggctggagtgcaggggcatgatctcagctcactgcaacctctgcctccn

SEQ ID NO: 96095 - DNA, 469 bp, Homo sapiens
  misc_feature (1)...(469): n = a,t,c or g
naccgggtcgacgatttcgtgacaactgaaactgggggctttcctcccctcgtccccccaagcctcacggtctctgctctcgaagaagcccaaaccgcctccctgagagaccctggcaagtcccttttcctcccaaggctgcaatttccttctttgcaaaagggatccaaaaccttgaacttgcacaggaggaacaaggcccagagagggacaggggattgcctggggccacacagccagtcaggtccccagtgaaaccccaccgcagagctcagtccctctccatcccctcctgtcagctgtctgtccctgtagttctgtctctctctctcagtggcctacatatgtctgtatgtctgtcttcccctttcttggactctctctctctctctctctctctctcagnntctcttgctggggcctttttaatctgtctttctgtttccagtttgttcatgctgccttgtct

SEQ ID NO: 96096 - DNA, 392 bp, Homo sapiens
  misc_feature (1)...(392): n = a,t,c or g
tttnnttnaaaggttactgctgtctttttgtttgtctgtgccctgcccccagaggtggagcctacagaggcaggcaggcctccttgagctgtggtgggctccacccagttcgagcttcctggctgctttgtttacctaatcaagcctgggcaatggccggcgcccctcccccagcctcgttgctgccttgtagtttgatctcagactgctgtgctagcaatcagcgagactccgtgggcgtaggaccctctgagccaggtgtgggatataatctcatggtgcgccgtttcttaagccggtctgaaaagcgcaatattcgggtgggagtgacccgattttccaggtgcgtctgtcacccctttctttgactcggaaagggaactccctgaccc

SEQ ID NO: 96097 - DNA, 396 bp, Homo sapiens
tttcgtatcttgagggtccccagagatcataacttatttatagaaagagattagatgaagggccaggacgctcagcttcccctcaaggagaagtgaccgatatagagagagaacagctcttggagtcagggataggggagaggagaacctgacctggagtcactccactaataggtttggcggaggcgaagatggtcaacatcacaagaccatgcataattgttggagttcagtagcaggatggacgtgagaatgccgctctaaggatatgacttttgtttgtttgtttgtttgatttgagatggagtctctctctgtcgcccaggctggagtgcaaaggcgcgatctcggctcactgctagctccgcctcccgggttcaagcaattctcctgcct

SEQ ID NO: 96098 - DNA, 422 bp, Homo sapiens
tttcgtgcgtgaagttcattattacttgaatacatgtgactttccctttttgctagtgacagaaggggctgctgacagaatgctactgaggtggcaagtcgcaggcctgtgcaagcccagaactgctgagtgaaggccctaagtagggctgagctgagcaagacggtggaaaacctgtagattttacatgggaaggaactaaagctttggaattgcttttttttttttttttttgggggggagattggggggccccccaggggggggggggggggggcccaatttgggtttaatggaacctttgcctccggggttaaggggggtttcccgcccaaattttctgggggggggggggggggggggccccccctccccggttttttttttttttttagggggaacgggggtttaatttttttggc

SEQ ID NO: 96099 - DNA, 413 bp, Homo sapiens
  misc_feature (1)...(413): n = a,t,c or g
aaccccgcctctactaaaaatacaaattttattcaggcatggtggcgggcaccttgtagtccccagtagtagaattgcttgaactggggagacggaggttgcagtgagccaagatcgcgccactgcactccagcctgggcaacagagtgagacttcatctccaaaaaaaaaaaaaagttaaaatcgggggggcccgtttaaaggaaccaaggttaacgtccccggcctggcgaggtaaaattttttttatggggcccctaaaatcaatttccgggccggggttttaacaccgcgggaagggaaaaacccgggggttaccccatttaattcgcttggagcaaagtnccgcgccggcctctcacgtgggttacagaccccgctttatattgcggcaggctgcacttccgcatacg

SEQ ID NO: 96100 - DNA, 455 bp, Homo sapiens
  misc_feature (1)...(455): n = a,t,c or g
atctatggcctgcggtaccggnccgnnnnnttcggctcgagaggctgaggtgggaggattgcttgagcctgggaagtcagatgctgtagtgagcagtgattgtgccaatgcactccagcctgggtgatggagcaagaccatctcaaaaaaaaaaaaaaaaaaaaatttttttggggacccccccaaaattccgggggggttttttttttttatttcaaaaggggtccgggaaaaaccctttttaaaccaccaagggggaatattttgggatccaaaaaacaaaacccccgttttaaaaaatttgtttttgaagggggccccctttttttcaaggggcccttgttaaaaaaaccccccttaaaaacaaaaaatattggtgggggggagctcttttttttttaaaaggaaaaaaaacatttttgaaaaaggggggggggggggggaatttattttgg

SEQ ID NO: 96101 - DNA, 496 bp, Homo sapiens
gaattgtctgtttgcttttagtacctacattttcgttatgaatctaggtgtgtaaagagtgagccaccacgccctgccaaaaatgtgcatttctagcaggttcccaggtgacgctgctggccacaggggctgacgctgcgggaagccctgacctagtgcacaacccattgggctcttcactgtcagtgtagaggcataggtccaaaatatgtttccccagtcaaaaacatgtaaggtttgcaccaggagtggaaggaaacaaacaaacataaaccaaagcaaagacacttaagggctgggtactcatgcctgtaaacccaacactttggggagtttgaggcaggaggctcatttgaggccaggagtttgagaccagcctggggaacatagtgagaccctgttgcaacaaaaaccagaaaaacaacaaaaagaagacattggaaaatggctggagctgattctaggtgaataaacaaccctcgacttaaaaaaaaaa

SEQ ID NO: 96102 - DNA, 438 bp, Homo sapiens
  misc_feature (1)...(438): n = a,t,c or g
gcagacgtcagataaacatcctaacctttgctcttctctccacctgctgggcatgccatggaggaggatattttgccccccgcccccagctttcttttctatttcttcttctattggctggtgtgggttaagattatctatctatatgtcttagctcaggctgctacaacaaattaccataggctgagtggcttaaacaacaaacatttatttctcacaattctggagcccaggatgccaagatcaaggtgccagcagatttggggtgcaatgagggctcacttcctggtttgcagatggctgctttctttgtatgtcttcacatggcagagggagagcacaagaatgctcttgtatctcttctttgatgggcattgaatccatcattagggcccttacctcaggcctttatcntgacctaactaccttcttgctcag

SEQ ID NO: 96103 - DNA, 371 bp, Homo sapiens
  misc_feature (1)...(371): n = a,t,c or g
ccaggctccctctgctgagggggagatgacatcctatgtgctcctcgcttatctcacggcccagccagccccaacctcggaggacctgacctctgcaaccaacatcgcgaagtggatcacgaagcactccgaatgcccagggcggattctactacaaccaggacaacctgccctacagtctatgctcaggacgaaatgagtcaacagcatttggcacaaacggacaggacattatccaccctgtacattcatcgtgaggccattgaaaatgccactaccagtgcacaagtccttcgtaccatggagcttgctgcccaaagcctgaacaaggcctaccaggacatggacattgacaagggagaagaactgan

SEQ ID NO: 96104 - DNA, 372 bp, Homo sapiens
gaagtgccagtgtgacgagctctgctcttactaccagagctgctgcacagactatacggctgagtgcaagccccaagtgactcgcggggatgtgtttactatgccggaggatgagtacacggactatgacgacggcgaggagaacaacaatgccattagacatgaacaggcggtggttcacatccgtgatctccgacctccaggcccagatcatctggatttctgagcaaaagcatgctatgtcctttgtcgaggagatgacagtactggaggtgatcttgtaatcactaggagggatgcacattgggccaataatttttgtgatcggtatgaccttcagggacctttgaagcagataagtctatggaggcc

SEQ ID NO: 96105 - DNA, 433 bp, Homo sapiens
tcgcgattgtgagcgagaatcctctagagcggccgaatacacggcttccttgaaggcctcatgttggatgggtgacctcgctgaatctccatcacttgatccccaagtggcaatggggacccctcccgcaggaccctgcggctggtcagtgggaacgcgtagccagccttttcccaggggcccgtcacgtggcccatgttgtgtgtcgccaccctcatggactcccgagcccggaacaggacagtgggtgagggaggtgggaggtggagccctcaggttcccccgacccagggctgcccactgatccctccagaccctgtcagacccaagactggactaggaggaaggcagggctgagagaagacgccaagccttttccagaagacagaaatcaattccacgcacagatattcttggcttttcgtttagagag

SEQ ID NO: 96106 - DNA, 399 bp, Homo sapiens
  misc_feature (1)...(399): n = a,t,c or g
atacatggcttctctcccgtgtgggctctgtgatgacgcacaaggtcggagttctgactgaaattctttccacactcatcacacttgtagggcctctcccctgtgtggactcgatagtgattgatgagatcagatctctcactgaagcctcggccacattcgttacattcatacnttttctcacccgcgcgggtgcctctggtgctgagctaggcgatacctccggctgaaacttttcccacactcctcacactcatagggtttctcaccagtgggggtcctttggcgtcggattaagcgagagagaccgcacaatctttttttcacactcactacattcgggagccttcccctccaactgtggttttgtctgtcccctgatcgccgcctcaccccctt

SEQ ID NO: 96107 - DNA, 396 bp, Homo sapiens
aatacagttgccgtgttcctccaaaggttctttgtattttcggaccacatgatttaaaccaaggtctagctcatataaagtaagtgtctgctgggtattacctgctgcttcccctgttgaaccattgtctgcttcctcataatccatttccagacaagcaaacattggattttcaaatccgacatctactccaactacatgatacactaaagcgcttgctttgtgggcttccacgggagatgaaatggtaagtcgcgctgcagcatctctgttcaaaatatacaccaatttctgtttctcaatggcactaatcataacggctcgccctttgggacccacagctaagaactggccaggaacgatgctacggcctccacctcttgccaaaggtttctc

SEQ ID NO: 96108 - DNA, 384 bp, Homo sapiens
aatacacgcctcgcagtaattgaactggtactggccccggctgggttggtacggaaacaccacacctagggggtggcggggatcctggggagggccagcggatgggagcggagggggaggaagggcggcgcggcctgggagagggagctggggtccccaggggtgcggaggagatactgggaaggagccctgggagacccaggcgaggcggacccgctgctacacaggaatggggcgggagcggaagggcctcaccctccaagctcaaggtcagcgccacgctctcgtcctcgatgccgttgatgagctcgcagcggtaccggccctcgtcctccaggcgcacgcccgcgatgaccagggaggcgtctagtcgatgccccctcc

SEQ ID NO: 96109 - DNA, 427 bp, Homo sapiens
  misc_feature (1)...(427): n = a,t,c or g
tcgttagggggacccctccagagcggnncganacaatccacctnnncgcggtttttttctttgattcctcatgacgtaggcgctgataaactttgggttcattgtctaatactaccacagattcagagggcgccgcatccccattgaaaatgaagcttagatcccctcgttggcacttcatgtcagtaaagtctatgagagttgtgtcaagcctgatattgataccttgcttgtatattttacatgcatcggaaggcagaattcgggaaagtaaaggcacccagctttgaaaatcccagtgaagttctagataaaagtcacctagctctttcagggcttttaataatcgaggtcgattttcttctacactttccctggattgctgcttaagcttcctcaaaagagctgtaatcatctgcctatctcc

SEQ ID NO: 96110 - DNA, 426 bp, Homo sapiens
  misc_feature (1)...(426): n = a,t,c or g
ggtaatgctacagagccgncgctcgccattcgngctcctntggtnacacgntttgtattttttcctggncactctcaacacccatgggcttagatatgatgacaatgggtatatcttctgacaaagtattatgcctcaaataaaatcgtccttgtttcacagccatattggttctgctttttttctcatgggtagagctggtaactgaagctccaacagccccttttctatcagcctccacgatgatcctgttcttagacagctgctcttggataagaataactttttctactcctttaacaatgaagtagccacctggatctaagggacattcgttcagtttggcaaattctgctggcgtttttcctgtaagaacacagtcttgaactacgtaccattatgggcattctgccgataggtaaggca

SEQ ID NO: 96111 - DNA, 376 bp, Homo sapiens
aatacagtcctttagtgttgtgtatggttatcatttgtgttcacaaggcattctttctgaacgtgtatctgcatccaaatttcctcttctttttttttttttttttaaaaaggggggtcccccttttatgccccggggggaaagacaaagggccccctgaaacccggggacccccaatcccccgggataaaaggttttccctgcctggcccccccaaataaggggaaaaaagggggccccccccctccccggggaaattttttgggatttaaaaaaaaaaaaaggtttccccaggtggggggggggggttcaaaacccccgcgggaggggaaacccccccccttggccccccaagggggggggaataggggaggcc

SEQ ID NO: 96112 - DNA, 402 bp, Homo sapiens
  misc_feature (1)...(402): n = a,t,c or g
aatacagggggatcacttgaacagggtaagggtcactacatccagccttatagctgaagcctggagggaggaggaatccttgctgggcaantgcatccagttgccgttgatcacgagggaatacgggaatcattaatggcggcagatgaccttgaacctggatctgttgctggagcaaattgattttgtgttgttgctgtataagccgctgctgctgtcttgcaatttgttcttgctgcctgcttgcccagcttcatatgctgacgctgtttctcaatctgagaggcagctagtttcttttgctcatagtgggcatgcaacagctgctctcggaagctgctcagctggttgatcatacccatgagttgcctttctttctcagacaagctcctcggagccccg

SEQ ID NO: 96113 - DNA, 426 bp, Homo sapiens
gaacgctcgctgcttgatcctccgagcggccgaatacatggctgcatgtgtatatgtctgtatttccgtgtttgcgtgcatgtgtttctgtgtgagggtgtgtgtgcctgtctgtgtgagtgggtgtctctgtgtctgtgtgtctatgaatgtgcacctatctctgtgtgggagcagtgtgcctgtctctggatgtgtgtatctctgcatgtatgtctatatatctgcgcatgtttgtgtgtgagtgtgtgtgaggctgtgtgtctgcacctggagagtcactgcagagggggatcaaggccatttcctgtcgtgggtccagccttcagcctctcaagctgcctcattctggctcccccatccgttacctagcaacagggtccttgtatgaggaggaggctgtgatgagttgtggggttcacgaag

SEQ ID NO: 96114 - DNA, 380 bp, Homo sapiens
aaacagtcctatcagtgtatcatttaaggtaacagtaaagttgctgggacaaaagtaaaggaatagaaatttcaacaaaaacagcagctttttttttttttttaaaaaagggccttggggggggggcccggggggaaccaaggggccaaaacaaaggcaaggggaacccaaaccattgggggcaaaaaaatttccccgggcaaacccggaaaccccggaaacccacgcctgggccccccccccccaaaaaaatttttttttttaaacctttggaaaaaaaggggcccggccagggcccccaaggggggcaaaaacccgggggccaaaaaaaacccccgggcggggccccccaaaaaagggggaaaacggggggggaaacg

SEQ ID NO: 96115 - DNA, 372 bp, Homo sapiens
aatacatgtgtgtgtgtgtgtgtgtgcgcgcgtgtgtgagagagagagaaagaaaagcagggagcaataacgagtcattttgtctgtgtcctccaactggaaggtagtacacgagatgtcgtctgtcttgcccactgctgcgtctgctgttcttagaacttggcacatagtaggcgctcacgatttatctgccacacagctgtgtgacaggattgtgccccgttggccagggcaggaggggaacaaagatggggatgacttacgtgtggcctgaaacaccctctctttgtccatctcagacctggccacgtggagcaccagtgtatggtttgagaagaatcccttggggtgcttcctacttagtggcattac

SEQ ID NO: 96116 - DNA, 445 bp, Homo sapiens
aatacatgcgctttctgtctttttgccatctgagctctgacgtgggcttctaccttcgtggggtcttgaacagcttctgttcctaatactcgcatcaaattagaaattctcactttgggttctggaggaggcatcaggcccagcctgactttttcttgtagttccttctgtgcttccctccttgtttgtctccgaagttttttctgttccttcttggtaagatatactcccagagtaactggtgtgtcattgtcaactggaggattgagctgggctggatgttcaacaagatttgcgattccaaaataatcttctctcttgggagtttcctctgtaagatcaaagcccattggggattatggaagagtcccaccacctcatttcaggaaagatctcctttctttagctccctttttagagcaatgagggccaaccctaaccaacg

SEQ ID NO: 96117 - DNA, 478 bp, Homo sapiens
cgacccacgcgtccgaaaagaaaactgaaaagccatcgactccagtccagacaagagagcaagaaggtaagagtactcctaatgctgaagataatgaaatggaagaagagacagatgatgggccattactggttcctcgagtaaaagtggcagaagatggttccattattttggatgaagaaagtttaactgtagaagttttaagaacaaaaggcccttgtgttgttgaagaaaatgaccccatatttgagcgcggttctacaactacatactccagctttaggaaaaactattactctaaaccatggtcaaataaagaaacagatatgttttttttagccatcagcatggtaggaactgacttttctatgatcggacaactttttcctcacagagcaaggatagaaattaagaataaatttaaacgggaagtgtatgcgtccgctatagaggatcaagctacgtcggtgcatacgca

SEQ ID NO: 96118 - DNA, 383 bp, Homo sapiens
aatacatttacggtgttgtacatgctgacgtacttgttgttgtagttaactgctataccactaccttggacataggtgatcctgatctctcgagcatttatatacaatagaaaatcatccagtgtgttgcacagtctataatactccaacagtctcccatctgtattcaatggagccacccaatacagtcctttgtttggatgctggggagagtaatccctaccccacgcaccatatagataataaaaccctctccagttgagctgaaccacatacggtttgctgatgttcaccacaccaccatgaccacagctccctggagtgggaggaggccggacgattgggttgtcttgatacttttaagtcctcacacttcttctgcg

SEQ ID NO: 96119 - DNA, 1325 bp, Homo sapiens
tttcgtgctactctcagacctgagaccatgtttgggcagacaaattgttgggttcgtcctgatatgaagtacattggatttgagacggtgaatggtgatatattcatctgtacccaaaaagcagccaggaatatgtcataccagggctttaccaaagacaatggcgtggtgcctgttgttaaggaattaatgggggaggaaattcttggtgcatcactttctgcacctttaacatcatacaaggtgatctatgttctcccaatgctaactattaaggaggataaaggcactggtgtggttacaagtgttccttccgactcccctgatgatattgctgccctcagagacttgaagaaaaagcaagccttacgagcaaaatatggaattagagatgacatggtcttgccatttgagccggtgccagtcattgaaatcccaggttttggaaatctttctgctgtaaccatttgtgatgagttgaaaattcagagccagaatgaccgggaaaaacttgcagaagcaaaggagaagatatatctaaaaggattttatgagggtatcatgttggtggatggatttaaaggacagaaggttcaagatgtaaagaagactattcagaaaaagatgattgacgctggagatgcacttatttacatggtaaccagagaaacaagtgatgtccaggtcgtcagatgaatgtgttgtggctctgtgtgaccagtggtacttggattatggagaagagaattggaagaaacagacatctcagtgcttgaagaacctggaaacattctgtgaggagaccaggaggaattttgaagccaccttaggttggctacaagaacatgcttgctcaagaacttatggtctaggcactcacttgccttgggatgagcagtggctgattgaatcactttctgactccactatttacatggcattttacacagttgcacacctattgcaggggggtaacttgcatggacaggcagagtctccgctgggcattagaccgcaacagatgaccaaggaagtttggggattatgttttcttcaaggaggctccatttcctaagactcagattgcaaaggaaaaattagatcagttaaagcaggagtttgaattctggtatcctgttgatcttcgcgtctctggcaaggatcttgttccaaatcatctttcatattacctttataatcatgtggctatgtggccggaacaaaggtgaatgataaaataggtgtggactagatttattgattgtcaataggggtgtcttgtggcttcaaatatctaataaattattgtggagggaaaaaaaaaa

SEQ ID NO: 96120 - DNA, 368 bp, Homo sapiens
aatacatcctggctaacacggtgaaacctcatctctaccaaaaaataaaaaaaaataaagggaaaaaaatatttacccggccgggggggaaggcccctgtattcccaactactcaggaggttgaggcagaaaaagggggggaacctggaaggcaaactttgcagggagccgaaatataaccaccgaactccatcctggttgacaaaacaaaacttcttctttaaaaatataagggagaagggggttgggctccccaaactttttattttgggatttttatggggccttccattaacaaaggggggggggtggataaaaaaaagagctttttttttttagggaaaaaaggggttgggccaccccccctt

SEQ ID NO: 96121 - DNA, 381 bp, Homo sapiens
aatacatccctgggaattgtgggcctgtcactcactttaaaattactacagtggcgatattgagatatctagtgtgcttaaatgacctcatcttgtaaaggagggcaatagtcaactaaagagctggtgtcaataacagaataatgtttatctcagactcttgtgggaaactttcatgtagatgtgccctctgatatctctggatacatcatacgtagagatttgtgagaatctcttcaacttcttgcttcagccaggttttgcatcagtgagatgcagagccctagggagaggggactcacttactgctcctgctggctgactgaacaacttccgggtaagaggaagggtcgtcccctctgatataggagttgatggctt

SEQ ID NO: 96122 - DNA, 2084 bp, Homo sapiens
  misc_feature (1)...(2084): n = a,t,c or g
ttttttttttttaccacataaagtttttattgaactcaaactcaggggctccaaagcctgaggaagaagagggaggctggggtttgcacgcagaggcccaggccccaccccggggccccactccccaccccacctaccttttacccgctcctgactcaacgagagtttcagcagctaccaatctaagctaacccactctaattaggtaatcccctgccctcccccctccctgctttagcagttgccaagccaggcacccaccaaggagccgcggctgaggccagccctccgctgacctctctccatttctcccagggcctcccgctagccggcctggcctccctccaacccacttcccacaagtctccagggcatgtcacttcctccaccctggttctcttcttccagcatcctcagctcctccattcgtctgcggcttctccactatcctccctaaaggttcctctagctccctggccccttatcttctgcccacacctcccacccctgctggggccccaggtcagcgccggcccgccgcgtgggtccgctggtggcggatgaggtcggagnctctgggagaaggcctttccgcagtcatcgcacttgtaaggccgctcgccacttgtggacccggtgatgctgcagaagcgtggaggagcggcagaagcccttgccgcacacggcgcacctgtagggccgctcgcccgtgtgggagcgctggtgctggatgagagtggaggagcgattgaaggtcttgccgcagtcggggcagctgtaggtgcggcctggcaggtgggtgcgggcgtggatggccagcaccgagctctggccaaagcgcttgccgcactcagggcacttgaagggcttctcccgggcgtggctgcgggcatgggggataagggccgaccgctgggagaagctcttgccgcagatgccacagctgaagggcctctgaccggtgtgcaccctctgatggctgcgcagggacgagttctggctatagcacttgccgcactcggtgcagctgtagggccgctcgtggctgtgggtgcgctggtgtcgcaggaggtaggagctgtcgccgaaggccttgccacaatgtgggcacttgtagggcttctggccagagtgagtgcgctggtggcgaagcaggtaagagctgtcggcgaaggccttgccgcaacggggacatttgtagggccgctcgccagtgtgggtgcgctggtgtttgatgaggtcagagctctgggagaaggccttgctgcagacctcacatttgtagggcttctcaccggtgtggatgcgctggtgctggatcagggtggagccccgcccgaagctcttcccgcagatgccacagatgttaggccgagggccctgcccacccctggcccggccaccccgccgacctggacctcgaagggctcctgtgagacccaggggattctgaagcatctcaaactgcggtgtagacagcagggcccctgtgggcatctcaaaaggtggccctatgggcaggtcccctgtgggctgctccccaaacccctgagtgaaggagtccagggggtgaactcctacggagatattcaaaggactcttttcctcggggttcagaagcatctccgcaccttcctggaatttggaactttgagcttcaaattctgggctttgggttttgagctcagtgttctgggattcatatctagagctctcagattcatagccagggctccggggttcatacccggggctccgaggttcatagccagggctttggggttcatacctagggctctgggattcaaactcagggctctgagaatctgattcagggcttctgggtgcaaactcagggcttgggggcacaagcccagggcttcgggactcaaaccccgggctttcaggctcaaatctggggctttggggttcaaactctgggctttgtggctcaaacccagggctctggggttcaagcccaaatggtatctcttcgacttcatagtccccactgccttcttgctgagaaatttcctcttcctcattctcactcatgttgcctctgaggtacccttcggacgaaa

SEQ ID NO: 96123 - DNA, 476 bp, Homo sapiens
aatacactcctgtttattaaggtttgaggatatgttaaaagctctgccacattctttacatttgtagggtttctccccagcatgaattctcttatggttagtaagatttgagaataggttacaagcttttccacattctttacacttgtagaggttctctccagagtgaagtatcttttgtgtagtaaggtgtgaggactggctaaagactttgccacattcttcatatttgtaaggtttttctccagcatgaattattttatgtatagtaaggcgcgaggcctgtttaaaggccttgccacattcttcacatttgttggggttctcttcagaatgaattatcttatgcctatcaagaagcgaggacctgttccaagccccagccacattcggttacatttcgtagggcttcttttcccagaatgaagaggcgcttaagggttagttagcaccccccggacccagggtaaaagccg

SEQ ID NO: 96124 - DNA, 455 bp, Homo sapiens
aatacagtggtcggtcgctgactgagacgtaatcacacagcgcgtagctgcgagtgaagaagcatgtggcttctttcacttaacacaatgttctcaaggctcatctgcgtggtagcatcactgcttcattcttttccatggtcaaataacatcccattgcgtgaatggaccacattctgtttctccatgaatccagcggatgggcatctgggttgtttccactttttggctatcatgaagatgctactgtgaacaactgtgtatggttttgtgtggacacatgttttcatttcttttggatagatgctgccttgcctgtagagtgcagcggcataacgggatgtgttactggtggcctgggaagagcataaggtctgcttgtccatcaccttcgaggaaaacgtgctgggctaaaagggggcaggaccccgttctacgttcaaaacaacctgctg

SEQ ID NO: 96125 - DNA, 477 bp, Homo sapiens
aatacagctggtcgtctttaaaaaatcaggccggtcatttgcagagcctttggttgaattatagtgatcccaggctttgaggagcaagggagggtaagatccctggacacagtgcactgagttcagcccgataaagccttctgtgcggttgcacacttcaccggataagaggctcaactctttggagatgatgatctctggcaggatttcctcaaaggttttctgatgggatccattgactaaatctggtccttcaatagcaatgatttttatggctacaggggtgtgatcagcaattgtttgaaacactttgccaaacaccccttccccaatcttgtcacagaggtgcagtttttctgtgggaaggcaatggtttatggggaaaggatccttttgactgcatttcccataaacctttttaggattaaatgccttcttgtgtgaatacttataagtttttagggcctatcccatatc

SEQ ID NO: 96126 - DNA, 476 bp, Homo sapiens
aatacattcttgtaaaataaaaaagttgaaagttttaagtacattttcacactgatttgtgctccatgaagaaatgagtaaaagtgggctacctctgaaaatcctagaagagtaacttacgttatggtggtctacggcatgatcatcacatgccacattgatacgtatgccaaagatataaacttcaatccattcctaccatcatacacaaaaattaactgcaaatgggtcacagacataaatgtaaaacctacaagtgtaaaacttctacaagaaaaaagaagaaaatctttgtgaagttaggttacacaggtttctttctcttttgtttttttttttggggacggagtcctgctctgtccttaagcgttgttataaaaagttccccccccttcccccttcctctatttccttactcgttgccgcgatgtttcccctctcttcttggctctttcggtgcgtgcctccgctcgccg

SEQ ID NO: 96127 - DNA, 494 bp, Homo sapiens
  misc_feature (1)...(494): n = a,t,c or g
aatacagctggagcaggtggccggagctggcagagcacacacagctgcagctctgaaaggcaccagccagggtggggcacggnggctgcctcactccacgaccttcctctcacccacagaccctccaagtccctcctctcctcctgcctgtacatgcccccaccggcagaggccagacggatctgagtttaaatcctggctcagccacaggggtcactgagtcacagcatctcccgctccccttccctggagcctggtgagctcagtgagcagcaagggctggttccctggatgtgagggtcagagctacgtagccacagtgtctgggccaggggtgaaggtggngagggcggcctgtgcatactgacccgtgatccctccggccttgaaagtcttggcaatgatggctggtggctggggctttgccctggcanaagccttgcacagcttctccaccctgggttccttcacgatgaaggcatgcccaaccgaag

SEQ ID NO: 96128 - DNA, 480 bp, Homo sapiens
gatgtacgtgtccggttttcccgggtcgacgatttcgtcccatgttaaaaaacatttattatcttgttttgctgtaatgggaagtactgtctcgattatctggccctaaacaatgtaaaatcacagtactttgatacacttctgaggctgtgcctacgctgacaagccctgtaacagcctttagtttaggccaatttttggccactgatttaaggcaatgatagagacatctgctccagtgtctactaacccttcaaactgttttccttgaataatggccttacacgcaggtctgttctctgagacccgacttgcccaatatgcagcctttcctgttggatcagtgcttccaaaccctcctgttctttttatctcactatttccaaccttaatataaggcaggagtaataattgcgcaatcctgtctcctggactggccatgtatgcgtccgctatagagatccaagcttcgctacgagc

SEQ ID NO: 96129 - DNA, 510 bp, Homo sapiens
  misc_feature (1)...(510): n = a,t,c or g
aatacaggctgtgttctgtgacgaaaccatgttggtggaataagaatatttttgtgcccaatcattgaaggattaatcagaacattttgaactgcagttgttgcaggaactggtttgacaggtgtggactgagaaggtggaatctgcaccgtaaatctttggcttgtcactgacattggagttgcaactttatttgggacagacaccgtttgtggggttgctatagtaggagtagtaggtttgctactaacagcaccaacacttaatcgtggaactagtctcccttggttaggtccctttttaattaaggacttcagcctatagtttggagctgttaagcagtatctatcaggtggcagtctaggtcctgcatatggcttaatcagtggcaaaggggtttgatttttctgccttgcgatatccagtaaaaaatctcttgggggaggagaggtaaaagattggtcagcacgacactggattgccagtctcacatcatctgcatcaacattn

SEQ ID NO: 96130 - DNA, 500 bp, Homo sapiens
aatacaggggtctggtgtacagataattgtgtcacccaggtaatcaacataatatctaataggattttaaaaattgtgtcattgctccacccacgaacctctgtgaagaaatatctctgtacctttttaaagagacttcctgagtcctcgctgacttgtacaaatcgaggaatgatattattcaggtagatgtcactcagggtggtatgagccctgctttcccgcttcacctgggttaagaggagatggcagcaattgactggagagagaacattctgatccttcttgaattgctggtccttggtgctgcatgtcttggccaggaagcgttctgccagcttctccaggttgcgggaggagtccatcccacctctctgccttctttcggaagaagtcccgtacgtactggggcaggttgctctcttagctcacacttataggaagaggcctcctctcttggtcttggacctggacccggatcctctacaacttgccattgt

SEQ ID NO: 96131 - DNA, 474 bp, Homo sapiens
  misc_feature (1)...(474): n = a,t,c or g
aatacaaggtccattaataattagaatgacagatgagatagaagtattttatcaatgttaactgaaggtaactgtactgtggttacgtaagagaatatcctaaagaaatacacaccgaaatatttagagttgtaaaagccatgattttctaatttacccttanaaatttcagaaaaagtgtgtatacgtgagagagaaatgttagttcactgtatcacttctgcagagcaaaaagaaaactgtttaatggttgacacataaccttacatatgtgataaaaagggttaacatacctgaataggagatggcttttcccagcccatttcacaaattcccatcagtaactcccgtttcaaacagtaatcttcaaactcattttcttttgtggagtcacatccgaggtttgantcttagatcctttggagggaggttaaagtctttttcaggcatcccaggttantagcggggacatcn

SEQ ID NO: 96132 - DNA, 482 bp, Homo sapiens
  misc_feature (1)...(482): n = a,t,c or g
aatacaccttctttttgtttactgtttattatttgtcttccccaaactagaatgtaagctccacaggacagagatctttgttttgtttacacatagaccattccaagaagttggacattgcctggtacacagtaagcactcagtattactgaataaatgagtggatatcatacttagcacaaaagggatctctctcttcaggttctgaatatgagtcattaatagtgcacctcaacttcactccagcacttanatgcatgacttanaaaaaaaaaaaaagcatggggtttacagcgtgggggaaaaaattttccagcaaaggcagagctacccacccatggaatccaaattaattcctgttctgtgcgattggggatataaaaaaggaaaagccattttctattttaaaagttgagggccaggcccaagcaagaactcatcttaaccgggcttttgacataatagtcctcaccagggggggg

SEQ ID NO: 96133 - DNA, 408 bp, Homo sapiens
atacagctcctcggggtaaatatcatatagtatgactgctggatcgtatagtatgtttagttttgttaagaaactgccaaactgtcttccaaagtggctgtatcattttgtattcccaacaataatgaatgagatagcatatctttttgcaagttaattctttgcactgcttctcattggtaaaaccggaggaaagaacagtatctcattataaaattagtgtgcagagtaaatgaaaaacgcatgtgaagtacttataatagtcctagaacataatagatactcaatacatcataactactattattgccaaaaacagtcgaattctagaggcagtagagtgtactatctaagataagaacaggtgctgtactgttagatagacctagtccatgtcccagctctatt

SEQ ID NO: 96134 - DNA, 400 bp, Homo sapiens
aatacatgggggtggggcaggctttttgtttttcggggaatggcggggaggccagtgtgactggagcagggagaggcggtgagagtacagagggtggtggtgagtcagataggaagtaggggacattgttaagtttgtttccaaggactggggagccctggagtgtctgagacagaggtgtgagggtgtatgattctcagtgtcagcctcaccttcatctgtacatccagggtctcacccgtggttgctggaggtgccaccagaccatagttgattccagccacagaacctattttgggcattactacagagaaagaaaatggaccatgagctggctcccacgcccagatcgctggaagcttgaatgccggaatcagaatccccttaatcttgaattacg

SEQ ID NO: 96135 - DNA, 366 bp, Homo sapiens
  misc_feature (1)...(366): n = a,t,c or g
gacgtccgctcgatgctnagagcgagcgaatacattcggtggngtgaattctttgtcaagtgatgggccagcacacagaccagcacgttgcccaggagcctgaagttctcaggatccacgtgcagcttgtcacagtgcagctcactcagtgtggcaaaagagcccttgaggttgtccaggagagccaggccatcactaaaggcaccgagcactttcttgccatgagccttcaccttatggttgcccataacagcatcaggagtggacagatccccaaaggactcatagaacctctgggtccaagggtagaccaccagcagcctgcccagggcctcaccaccaacttcatccacgttcaccacgaaa

SEQ ID NO: 96136 - DNA, 373 bp, Homo sapiens
ttcgccattcgtgctgttgttgcttttgtttctgctgcgccctggaggtgtgtagctgtgtgaaggagctgggactgccggtgctggaactgctgctggtggtggatggcaatctgctgctggatcaccacctgtttctgctggaggtggatctgttgctgttgctgaatcagtgaatgcggctgcatctgtgtgtaggtggctgagctaataactgcctggctgagcgcaagtgtggctgtccatgtcacgttcatgccctcattctgcttgccactcccatttgctcttaccttcttggatgctgcactttctgcctctgcatggctgacctccctcacacgcttctgcatgcgcctgcaggcgaatcccg

SEQ ID NO: 96137 - DNA, 377 bp, Homo sapiens
ttcgccttcgtgcttcttaagaatttctttttactatccaccgcatctcccaagtcttcattcaacaggaacgcctcctgcttgctcatccagttgtccacctgctcagtgtcccggaagaagagctgcaggtccatgcactgctcgtactgctgcctgcgcagctcccacagctccagcagcgccgctctctcctcggaaaggacggccagcttctccctcacttcatctgacgcatactgaccagcagcaagcagcgcctgtccagattcatctgcagatttgaagctgtcttcatgggcatcaatttcacccttgcgctcttgccgtctatctaccagggcttcagccctcagccacatcactgcccagctccg

SEQ ID NO: 96138 - DNA, 379 bp, Homo sapiens
aatactggtgttgctgaatctccttcctaatctgggatcgcattgatgctacttgctgctgggtgagggccttgtcacaggtctggcaggtcaatctatagcagagactgacctgttgagtctttggatgctggaaacggctaagaaactgtatggatataatagtgtcctgagacactgctcggcccacagtgtgaaactctagttcatcaaatcctttcttctgatctatccaaaaactaacatcatgcacataacatggaggatacagagaatgacttttaaagggctctattttgccagggacaaaatttttcaggaaacggttattataccgtccacaacatttctccacgttagagatactccccgaccagcg

SEQ ID NO: 96139 - DNA, 403 bp, Homo sapiens
agtggtggccgaggaggacacggagctgcgggacctgctggtgcagacgctggagaacagcggggtcctgaaccgcatcaaggctgaactccgagcaggtgtgtttttagcactagaggagcaagaaaaagtagagaacaaaactcctttagttaatgagagcctgaaaaagtttttaaataccaaagacgctgcaaggtctcgaaggtcgagagaatttagcccgagatttaggtataattgaagcagaaggtactgtgggtggacccttattattagaagtgatcaggcgctgtcaacagaaagaaaaagggccaaccactggggaaggtgcacttgatctatctgatgtacattctccaccaaagtcaccagagggaaaaacaagtgcacagacaacacc

SEQ ID NO: 96140 - DNA, 410 bp, Homo sapiens
aatacactgatctttattgtttcttttcttctaattttaggtttggtttgctctcacgtttctagttctttaagatgtagtgttatacagtgtatttgaagttttatacttttttacttttatacttttttttttttttttggggaaagggtttttggtttggccccccgggtgggaccccgggggcgcaatttgggttcagggaaggtttggcctccggggttaacccatttttctggcctaaccctccggggaagtgggaaccccgggggccggcccccaccccgggtagggggttccctttttttaagaacagacggaggttcccggggtaacccgggggggcctccttctctggacctaaggatcggcccccctggccctcccaagggggtgggattacgggggac

SEQ ID NO: 96141 - DNA, 409 bp, Homo sapiens
aatacagtgctgggggtgaggacttggatactggaggaacagggctccagggcagacgcatgggcaagcagagaggacagcccatggtagatgggaggggcacacaggtgtgctgttttcaggttggcaggagaggaggaaggtgtgtgcggtgaggccctggagactgaaagaggatagggggcccagtgagtgaggggcccttgctagaacctgggggtgggaaggggcctaggagtgtgccatccatctcatgctagctctcttgcctgtgctgggcttccctgtgcagcgctcacctgcaccaattagagagtatggtatatttattactggattctccttcctcgtttggagtcagtcgtgcttttatctcacagtgctcctctgaccctcttggttcgtgtcg

SEQ ID NO: 96142 - DNA, 398 bp, Homo sapiens
aatacatctcttgtctgtgtgaatgctggtaggagatacagcagcaccaaggttgccttggggtatgcctggcagcttccctcctggagatacctgcattgcagctagctgggcagcatataactgctgcagctggagtgggcctaagcctggtgttgctgcggcagcacctgccatggtagttgggatcatctgaacagggtaagggtcactacatccagccttataactgaagcctggagggaggaggaatccttgctgggcagctgcagccagcggccgttgatcaggagggaatacgggaatcattaatggcggcagctgaccttgaacctggatctgctgctggagccaatgattttgtgttgttgctgtaaaagctgctgctgctgtcttgc

SEQ ID NO: 96143 - DNA, 518 bp, Homo sapiens
  misc_feature (1)...(518): n = a,t,c or g
ttgatactgactggatgaatcactggcgctgcccaacaactgctccagttcagccatgggatcggngcttgggcgaggcatgggccaggagctccggtgcgttgctggaggggtgtcagtgccccaggcttcagggaactcagttctaggagttgctggagggaaggcagagctatcaggagcaaaagatgagtgctcttcaggaggaaccacaggccatgagggagcccggaggtaagactggggagatctgaaaggggcaggaggtgacaaggcctcaggaagggggcaagaagcctgtggggtggaatgagaaggctgcgggagggcagaggagagctgtgtgagggcctcaatggcaatggcggtctgcaagctgatgtttttttccttggcaatgctcagggcactctgggacaggggcaggccctcttggggagagatctggggcacctctgagctgaggagtgtcccggcgcttggtgctgggaggtcggtctcactaggaggtcaaagct

SEQ ID NO: 96144 - DNA, 405 bp, Homo sapiens
aatacacctgcagtttcttcactgcatttatatactttgttttcctttgcttcttcagttttttgctgacgttggggtcactggctaggcggcggtcggcctccgtaatctgggactgaatggcaaactctcgttccaggcgttccagctcagcttcctctcctttgggcaggattttctgttcatccagtttgaaggctgggccctattcttctccgaacaatgggtgggtcctcccctggatccaggcgatattctactggcagcttgcccgggagctcaccttctcggagacacagctttttcagttcctccagcctctgacgcagggcttcctccagagcttcctggctggactttcaggcagccagcatgtcccctcctgcccgaccggaacctatctgg

SEQ ID NO: 96145 - DNA, 480 bp, Homo sapiens
aatacagtgccagtctgagcctgcgcacagcggatggcgttactcaccttcacctgcgggtcagcctgggggccgaggccatccagggaaggagaccattcacccccaaccagcactggctcctcttctttcctgcccagcaaaaacttaatctgcttcacaggatgctctggcgtctcccttggctcagccgtgtcatccacaaagagcatgcaacatcgatacaattcctccaaccccggggaagagagcagcagtacctttgaactataagcgaggtcactgtctgctgtgatgcgctcagcaccagcgtctggagctgcctccttttcagaagagacctggatccgccttggatgatggatggaataagggctgtctcagggggaaggctgatagcctactcaaatgcccggtctgaaacatctgaggggacctcgaggcctgcggtaaccgccgccttgagttactaggaagtcc

SEQ ID NO: 96146 - DNA, 373 bp, Homo sapiens
agtggtggccgaggaggacacggagctgcgggacctgctggtgcagacgctggagaacagcggggtcctgaaccgcatcaaggctgaactccgagcagctgtgtttttagcactagaggagcaagaaaaagtagagaacaaaactcctttagttaatgagagcctgaaaaagtttttaaataccaaagacggtaagatgttcagtttgttcttgtttatctatctctgaatttttgaatcttgataccatttgggagaaatcaggaatttcagggcttttttttgtcttcaattgttataggtcctcattttaaaataatattttattgtacaacaatcgtgttgctattacatatttttggatttgggatgg

SEQ ID NO: 96147 - DNA, 371 bp, Homo sapiens
aatacacctcactgagtagaaaagttgatcagcacattgatcactactggatgctgcctctagtaaagaatgataggcgagctccattaatttctttacatactcactgatacggcatgtgggcaaggaataggaatgctggtccaatgtattttcaagctctaaattcatcacttcgtggtactgaggattggatactttctgtacttccaactcggtatcctcatcaggagggggtaaccctggcacatttatattaaaaccaggaataatcttgcacagcgtgatgaatttgagatgtcattacatttctggctgccacaatcacatcctggcactttttgtttgcaaaatgagaactgatgttacag

SEQ ID NO: 96148 - DNA, 436 bp, Homo sapiens
aatacactgtgtgcatgaataaatgggggttttgtatatctgacacaaagcgtgcatgaataatggggagacgcctcttgcactgggagagcgcagctcggaatcgcccacaagtcagtccttcctacactgactgataaatttaacacaatcccagcaaaaacaccaatgagcttctttaaggagccagacaagctgacacccaagttcacatgaaaaatcgcaccccaagaacagtcaagaaaaccctggaaatgaaaagacacgccagacacgccctctgagacattaaacatcctaaaaagcctgtataattaagccagtgccatcgcagcacatgaaaaccggcggacagaaggaggaggcaggaggcccagaggcagacccaagcacgcccagagaggtggcatctcaaggacagaggggattcttcatg

SEQ ID NO: 96149 - DNA, 375 bp, Homo sapiens
aatacatcgggcggggtgggggctgagcggtggcctctccttcgcggtgaacctcaggcttggtgtggagaggcctgtcttccctgccagctgacctgcctagaatccctgagttccaggtccagcgagagactccacacagaggagggctgtcaagaatgacaagaaagaactcatgagcatcccggggatcccagggccggtccaggtaccgggaggtgggctgtctactgcgcatgcgagggtttccaggcagcagcctaggatttctaactatcccaggcggagctctcatccctttttcccccgcgttcttcagtcgggttggcggagacctcagtccgcgaaacactgggccagggcagaagccaggcc

SEQ ID NO: 96150 - DNA, 437 bp, Homo sapiens
aatacatgtgtgcttgaacaaaaagaaatactaagtacttatgcattaatgaaaagttaacatcaggaatttaattacccagatgatattacctttcacaacccccacactctgatgagtcacagatccccatttgtattttggtgtggtgacagaggctttgacccgcactttatcaccaatcttgatgtgagaagaacttcttggtggaggatagcctataagttccacatgaatggacctaaaccagtagatgccccctttttggtggcaggcacactggacattgagaacatgccatccatctctgtgcaacttgatgaatttggcaacattacattacctttgcacacttttttggatgtgtgggagaatctaaacattatttccacccggaaattttctctctcatatacccggtaaatttttctttaccc

SEQ ID NO: 96151 - DNA, 456 bp, Homo sapiens
tcgctgagagacccgccgtatgggatacttcaccggcgcatacatgcccattcatgctgtcccccacatttatcttgatgctgtctctgagcagagctgcagggggggggggagcaccttcagcccatgcatggcgaggccagagaacaggataacgaaattctcctccacccgcacaatgaggcctgtgtcgccctcgaatcggccagcaatcaccttcacgtggtcccccatcttgaagtattttctaagttcctgggctgggaactccaacatgtccttgaggtcctcatgcttgtgcatgatggtgatcttgttgccatccacgctgaggatcttgccctgcaggttgatgagctcaccctcacagacctccacgttgtccccaggttggaaggtgtgctcccgctcctttcctgtgctctcagtcaccacctccagggcaatgccctctgg

SEQ ID NO: 96152 - DNA, 405 bp, Homo sapiens
aatacaggggtggatggtgggaggagggcattttgtgtttggataagcggacaaagctatggcgaagatcccccctgtggctgcatcacggtggaacttgagcaggacctggatggatgaactctgcactgatttcttgaccatgctccggaggaagacgccgagccgtggtgctgtttgctgtggcccatcccagatggcgatgaaatctccagagggctctgtctgcagcaggctgaggttgaggcggacgccatggccactgggcacggtgatcatccagacacagtcctgtgagctggatgtacgggctagggaaccccgggtaggacacagggccgttggaagaaatgatgctcccgccacaagggacttcacacttggacagggggtggtcccacttcc

SEQ ID NO: 96153 - DNA, 421 bp, Homo sapiens
aatacatggcttccagcttcatccatgtccctgcaaaggacatgaactcatccttttttatggctgcatagtattccatggtgtatatgtgccacatttttttttatccagcctatcactggcggatattgggttgactccaagtctttgctattgtgaacagtgctgcaataaacatacgtgtgtgtgaagacacttgttctcttggtgtgaacacagtacaagctgagaatctttgatccaaaaaatcgctaagtccaaaatgatccaaaatccaagttttgttgctgctgttgctgttttgagatagagtctcactctgacacccagactggaatgcaggggcacgatctaagctcactgcaacctccacctcctgggttcaagtgattctcctgcctcagcctagcaagcagccggg

SEQ ID NO: 96154 - DNA, 430 bp, Homo sapiens
  misc_feature (1)...(430): n = a,t,c or g
ttacactggccgcaacagtaccggggcccggctggcggtagcggagccgtatggcgaacaccagggacaagatgaggatggagacgaacagccccacaatcacccagcggctcttgacggctgaccacaggacccagtggtgcagcagctcctgcagctgcacgatgagatggccgcggctgcccgtgatggaggctggctgcagaccctcgcgggacacagacaccagggacacgtctcccagctccagcgacactggctcttgctcgacctccagcaaggggatgtcatcatccaggtagggtatggggacctgggcagggctgcctccaacctgctcgggagtggctaacacgtctccggggaagtgcagggaggtcttccggctgcaattctggtggcagctggtctggcaggagctctgcagtgn

SEQ ID NO: 96155 - DNA, 463 bp, Homo sapiens
acgattgcattcgcacgtacgatgtgggtatcctcccgagcgcccgcaatacatgctcctgaatcatatgaagtagacctttggacacagcacggagtaacacgggcatatttgccatgtcattttttttctcttgtcgaattatattatgacattctgcatgtaaaaactgtaagtggtctgctaccattcgttggtgacattcatgaatcaccttagtatatgaacttggatgtaggtatttttgacatcgaatttcttcatcttttaatctacctagaaccttttccatatactgtgagcagtttgattcttgtaataaatttgaagcttcttgcttgtaatactctcctgtttcagtcacaaagggagactcataaatttcctgataaaactttaaggggaaattttttcttatactggtcaccatgaacaaagggattatataaccccatggattact

SEQ ID NO: 96156 - DNA, 403 bp, Homo sapiens
aatacaatccgggaggcggagtttgcagtgatctgatatcgagccactgcactccagtctgggtgacagagtgagaccctatctcaaaaaaaaaaaaaaaaaaaaaaaaaaaaaaaaaattttttgcccgaaacaagggaaagggcccttcccgggaaaaaaaagggggggggggggtaaaaattttcgggggggccccaaggggggccttttgggacccccggaaccacaccccaaaagggggaaaaagggttaaaaaaaaaaattcctttgggggggtgggcccccgggattagggggggtccccattaaggccccggggtgaccccaaaggggaaaaggggggggggggaaaaaaaaacccaggggtttaatggggggccccccccaaaaaaaaaaaaac

SEQ ID NO: 96157 - DNA, 411 bp, Homo sapiens
aatacagtggtgggatttaaaatattgctaaaaagaaactgcagtgtatagctagtacatcagctcatggttttcatgctaaatctttaaaaatgtaagcttattttctgaaatcaaaaattattttttgattaagagattaattcaaattgacaaaagctattaaggctgttatcaataaaggaatctgctaataaacatgggcaactattaaattcatttaatatttattcatttagtatttattgattacctaagtgtcaggcattcttctaagattttgggatatatcagtgaacaaataagaaaaagaaactcgggctgtatgtggtggctcacacctgtaatcccagcactttgggaggcggaggcgggcagatcacgaggtcaggagttcaagaccagcctggc

SEQ ID NO: 96158 - DNA, 431 bp, Homo sapiens
  misc_feature (1)...(431): n = a,t,c or g
aatatcattaccgggaatcagagaaagccgagatcatgcttctcatacttttggacagacagcttggcgttgagcatgataacgcagaactgggagagggccgccttgaataacaagtcttcggcgctgaacttgaggagggggctggccatggcattggtccgcacctggagccatggagaagtggcactggtgagctcagggcaagcagccagagggccagagccactgccaggcactggggggccagctgggagctggttcatgtcccgaggtgaggccctgttaacccaggaccccaagggcagggagccagggaccagcttggagaggtcagcggccagtgcgtgagcgaccaagatcanggtgtgatggtggctgggttggaggtgaggcttnatcccagggtttttgggcccttctgagagccc

SEQ ID NO: 96159 - DNA, 463 bp, Homo sapiens
tgtgccgctttttcggatactctacagcagccgcacctatgaccccatcctcaggtggcagcaccctttcgggcatcactgcaccagccgtgcctaacatcccatcccccattggggtgaatggcttcaccggcctccccccacaggccaatgggcaacctgctgcggaagctgtgttcgccaatggcatgcacccctacccagcacagagccccaccgtcgcggaccccctgcagcaggcctacgccggagtgcagcagtatgcaggtccagctgcctaccctgctgcctatggtcagataagccaggcctttcctcagccgcctgcaatgatcccccagcagcagagagaatggcccgagggctgtaacctgtccatctaccatctgccccaggagtttggggacagctgagctgatgcagatggtcctccctttcggtaatgtcatctcctcgaaagtgt

SEQ ID NO: 96160 - DNA, 425 bp, Homo sapiens
ggctgaagaccatgaagggtgggacgggcaatgggctggaaatcatgctggacatccagcaggacgagtacctgcctgtgtggggggagactggtacgtcacccacttcaggggcccctctgcatggctctaggccccagcctctgccaggggattcctgggcttcactgtgagacctgggcagggcccgggctttcccctctccctccagcatctcaccatctctatcactgactctacctgacttccacactcacatctctctggctcccacttcctggttcagttactctccaaggtaaccagccatcctcttccatcaacgccgccgccactctataaataactccctctcttctcgggctggcttgctgtctggtctcggggggccttggggcagagagagatgggggaaaagggaaaaa

SEQ ID NO: 96161 - DNA, 2046 bp, Homo sapiens
ccctccaaagtcatatttttttacctttgtgaaatgccctcccacctaactaccccatttgacacctgcaaccatcctctagagaggcagacaagatcgaccgtctcactttacagaagtgcaaagagtagctggcctaatgccacagccaatgaacagatgaaggaggcctacaaccacctagtcttccctacttctcctcactcctcccctctgacctccttatgtcaccactgaccaatggatcactgtgtggccgttcagcatcttcctatgctgtgtcaggcaagagaaattctggaaagagagcatctcatgtttattaaggagactgggtgtccttgtagaaagtcctgccatgcacaaccccggtcttaactgatgtgtttcaccatactgaaggcaagttgccatctaacatagttgaaggcgagccagttgtggtgatctttgttcctgcctagtccaatgtgaataacaaaatgaagaatatcaggatgattcgagaccaggaatactacagatgtccaacacttccacctggaatccccaaagaggcccgcttttagcctccacactggttggtgacctgcctctgcagttcactctgctgcttcagatgaaaattttcaggtctgtctgccactgtagtgaagcactgctttgggtagtgtctgtggagaaactttttaaaggacatagttgaaatattgtgctacaaaccaattcttgaacaccactcattttgtcctacctctctgtgaccgtgaaagacggctgtactcttggcaaaggtcatctctctgtcatgagtctggatctccttttcttctcctgattatctgtcactcagttatccccactctcttccacaactttaacttcagcttctctattctaagagactcttctcgcaggctcaaggctctcctaccctccatcattcctccctctaccccacacagccagcatgtgtccagctagtctatccttcagccaaacttccttagaaagaggacttacctcactgtccctacccctctactctctgactcacttcttagctccatgactgggttctggtttctttcccttgcctgttgtgacttcctatggacacagccaaaaatcatcacatagtcctgttgtatggcatccccaccatcttgaaatgtcctctccctcagttcctatgtgttaccacacacgcctgccttggcttctccctctagttgttccttctctgtcttctgtgggcttcttattgtctgctcactccttcttcagtgtcctctcatgggcttccttcccttctcagctgatgccatcacctggggaatcacagttactcagcagcactggggcctctctatctctatgctggtcatgcctatgtgtgagctgcagacccagtggaatttccatttgtgcatcccatgcccagcccaccctccaccagcctcgaatgcagctgttcagccctaccccagtcctcagaaaagttcctctccctggatcctctttttccttcatgagtgcccggttgcccaagtcaaaaacctgggagtgatataaactccccacacatccagtcagtcactcatcaactctattgattctgtctgctaaatatatctcaattgtattaacttaaacatatgcataatacatcttcttcttcactgcatttttgtgggctgcacttacctttcaggtaacaacaacactggcccctcttgcccttctagtcagaagtgccaaaatgatgagagctagccatgacaaacccacagccaacattacactgaatgtgcaaaactggaagggcatccaaacagaggagggaagagaggaatagacaggaagtcaaactgtctctgtttacagatgacatgtttctatatctagaaagccccatagtcttggccccaaagcttcttctgctgataaactttagcaaagtcttagcatacaaaatcaatgtgcaaaaattactagcagtcctatacatcaagtcaagcagagagtcaaatgaagaacacaatc

SEQ ID NO: 96162 - DNA, 399 bp, Homo sapiens
ttcgccatctcccaggaccaccccgctctcccgtctaggccccccagcctccaccatcccaagcctggaacgctgaccttccatcctgacttgccgcaccaggccacctgctcccgacctatccgtcaccagcgcacatggcctgaggacgcacccttggctaaagcagacactgtgagtcccgctgaacacccgcccgctgctgccactaaagctcccccaggcagctcctgacaagccgggagggacctcggatcctcagacgggcccggctcctgccggcctcgcctccctgctctgggcctggctcctcaaccagttcctcgaaaaccctctcgcgcggctccttcaaaagtctctgtcactgtccctcgcagggtccctcgcactttccctccc

SEQ ID NO: 96163 - DNA, 453 bp, Homo sapiens
  misc_feature (1)...(453): n = a,t,c or g
ttagttcgtgacgtaaggnagaatcctctacagcggccgcaatacagggggtgggggtgctcttagggtctctgtggagggagctgggctggcatggaggcgaggagcggcgtcggcgactgagggttgaggctgtccaggatgctgaggacactgctcatctggctgctgatctgccggagggagtggctaagcccgtggatcttgcgggaggtgagactcggagttgagtcgaggtgaggcggggaaaaagattcagaactttcactgctcaggctgtccatgtcactgaggtcgaaggttactgccttcttggtgggggatcctcccagagagccctcatctgaggcctcttcccaaagagaggactccaactgattcagcttctcctctttgttcttcaacaaggtgtggccttttcgcatgggcgacttcatttcattcaccttggca

SEQ ID NO: 96164 - DNA, 370 bp, Homo sapiens
actacattggcccagtaataagtagcgaatgcactcagcaagggcgcactgacctaatgcaatgacgaagtttataagccagagaaagacaaataagttgtatacatggaaggtagggatgtactgatggtacaagctcttttcaccatagaaagcaaagttacacagagccccagggcaagctttggcaatttcaggtgtattaaaaatctctgggtcacaggtttgattttcatgtatacaatgcccccctggagctatgactttgtatacaggtacccccgatgtcgtcaagaaaactgctgtcacgatccagtagcatatgcagattgagagcaaaatgaaagttatagctggatagactaatgta

SEQ ID NO: 96165 - DNA, 404 bp, Homo sapiens
aatacaagtggtgggcgcctgtagccccagctacccaggaggctgaggcaggagaatcgcttgaacccgggaggcggaggttgccactgcactccagcctgggcgacagagcgagactccatctcaaaaaaaagaaccatgggagagaagcctccccaggatttacccctgaaggggaaaaagaagaattaagggccgaaaccttaatagagaatttcctgagggcccgggaaggggaagaagaacccccatttgtacccgaaagaagaacccctggagagggccgccaaaggtttttattgggtttttcccagatggtcccagggggggggaaaaaccccaaaaagaccggggggttatgcccacaagcaggaggtaagaggggcccgtgccctcctggcggg

SEQ ID NO: 96166 - DNA, 410 bp, Homo sapiens
  misc_feature (1)...(410): n = a,t,c or g
aatacatttcccctttctatattactcatatgagagcacatactaacctccctggtccttttaacttaatcaaagggcggatgcactggtttctgcagcttttgccgatgcacaaacgttccattccttaacccatcttaatgctgcaggcctcagaaaaagatacggcttatcctggaagcaggttaaggagattgtaaaacacttttctgccggtgaagtcctgcatctgccacatcagggagcaggagttaaccctagaggtctatctccaaattccatctgtcagatggacataacacacattcccacttttggaaaattgtcctttgttcatgtttcagtagatatttattcacattttatctgggccacatatcaaacaggggaagctacagctcatgttaaan

SEQ ID NO: 96167 - DNA, 384 bp, Homo sapiens
  misc_feature (1)...(384): n = a,t,c or g
aatacactctctgtgtctctgtgtctctctgtctgattctctctctctgtctctatctgattctgtctgatgctgtctctctctctctctgtatcttattctccctgtctctctctgtgtctctctatctctatctgattgtctttttctgtctctctctgtctctatctgattctctctctctctgtatgtctctctgtctgattctctctgtttttctctgtctctctctctatgtagctcttctgtctctctctatctgattctgtctctctctgtctctatctgattctctgattctctctgtttttctctgtctctctgtgtatctcttgtctttctctgtctctctctgatactgtctctgtctgattctctctgttn

SEQ ID NO: 96168 - DNA, 432 bp, Homo sapiens
actcctttactttgctaaaaggtatggagctgcttttggagaatgttgccaagctgctgataaagctgcctgtctgttgccaaagctcgatgaacttcgggatgaagggaaggcttcgtctgccaaacagagactcaagtgtgccagtctccaaaaatttggagaaagagctttcaaagcatgggcagctgctcgcctgagccagagatttcccaaagcttaatttgctgaagtttccaagttagtgacagatcttacctaagttcacacggaatgctgccatggagatctgcttgaatgtgctgatgacaggtcggaccttgccatgtatatctgtgaaaatcaagattcgaacttcagtaaactgaatgaatgctgtgaaaaacctctgctggaaaaattccactgtattgccgaagttgaaaatgattc

SEQ ID NO: 96169 - DNA, 426 bp, Homo sapiens
ctaacctactgaatgatgccttggctattcgggagaaaacgttgggcaaagatcatcctgcgggggcggcgactttgaataaccttgcagtcctttatggtaaaagagggaagtacaaagaagcaaagccgatgagtaaaagagctctggaaatccgaaaaaaggttctggggaaggatcaccccgatgttgacaagcagttaaataacttggccttactgtgccagaaccaggggaagactgaacagggagaatattattatccaagagccctccatatctaccatactaaactgggacctgatgaccccaacgcggctaacacgaaaaatgacctggtagcctgctatttgaaacatggaacggtcaagcaagcatgatctctgaacaaggagaatctcactagtgcacatgaatgggatgttg

SEQ ID NO: 96170 - DNA, 389 bp, Homo sapiens
  misc_feature (1)...(389): n = a,t,c or g
ggaccctaaaaactagccggataagggctatggggccatacactcattactaacccactgactgaacccctaacctaccccttccttggactatacctatgaagcataattataacaagctccatctgcctactacaaacagacctataagcgctcattgcatactcttcaatcatccacatagccctcgtaataacagccattctcattcaaaccccctgaagcttcaccggcgcagtcattctcataatcgcccacggacttacatcctcattactattctgcctaacaaactcaaactacgaacgcactcacagtcgcatcataatcctctttcaaggacttcaaactctacgtccactaatagctntttgatgacttctagcaac

SEQ ID NO: 96171 - DNA, 432 bp, Homo sapiens
  misc_feature (1)...(432): n = a,t,c or g
cttatccccaccttggctatcatcacccgatgaggcggccagccagaacgcctgaacgcaggcacatacttcctattctacaccctagtaggctcccttcccctactcatcgcactaatttacactcacaacaccctaggctcactaaacattctactactcactctcactgcccaagaactatcaaactcctgagccaacaacttaatatgactagcttacacaatagcttttatagtaaagatacctctttacggactccacttatgactccctaaagcccatgtcgaagcccccatcgctgggtcaatagtacttgccgcagtactcttaaaactaggcggctatggtataatacgcctcacactcattctcaaccccctgacaaaacacatagcctaccccttccttggactatccctatgagggaan

SEQ ID NO: 96172 - DNA, 438 bp, Homo sapiens
ccaagctcacggacccctcgctgggtgccggttaagaccccgctccccgtcgccagtgctatggaggcggcggcggcggtggtggcggcagaggcggaagtggaaaacgaagacggcgacagcagctgcggggatgtatgcttcatggacaaaggcttgcagaggacttgaagaactaattaatctgactagactaaatgtatcttataaccacatagatgatcttagtggattgattccccttcatggaattaagcataaacttagatatattgatctacatagtaatcgtatagatagtatccatcacttactttagtgtatggtaggattgcacttcctgaccaatcttattttggagaaagatggagacgataatcctgtctgtcgactgccagggtacagagcaagtatttttcagacttttgcccagcttag

SEQ ID NO: 96173 - DNA, 415 bp, Homo sapiens
gagggcgagccatattgcttttggaagaagccatacagtatttgagcgggatagagattgacctgattgatacggatcgaggtgaatgggatagtctgactccacaagcccgccgataaaaggaggctggcctacagatgtttgtacagctggcacgtttccataacatcgtgtgcaaggaagcattcggtacccttgcctttctcacatcggagatcaagtcactctttgggcatccgttcctggctgagcgcatcatctccatgttgaactacttcctgcaacacctgattggccccaaaatgggtgccttagaagtcaaggacttcagcgaatttgacttctgaccccagcaacatgtatcagatagcggcgctatctacttagatcttggggatgaggagaatttctgtgc

SEQ ID NO: 96174 - DNA, 453 bp, Homo sapiens
  misc_feature (1)...(453): n = a,t,c or g
ggatgccaaaatgtacctgagctataagtatgccactgtcatacggaatctacgggaaggcacatgcccagaagccccatcagatgaatgcaagcctgagaagagatgtgcgctgagccaccaccagaggctcaagtgtgatgagtggagtgatatcagtgtagggaaaataaagtgtgtatcagcagagaccaccgaatactgcatcgcctagatcatgaatggataagctgatgccatgagcttggatggagggtttgtctacatatcgggcaagtgtggactgatgcctgtattggcagaaaactacaataagagcgataattgtgaggatacaccagaggcagggtattttgctgtagcagtggtgaagaaatcagcttctgacctcacctgtgacaatctgaaaggcaagaagtcctgccatacggcagttggcagaaacgcttgctn

SEQ ID NO: 96175 - DNA, 413 bp, Homo sapiens
agatggcggtggagtcgcgcgttacccaggaggaaattgggaaggagccatagaaaccgatcgaccgctagaagacatgcccactgatgctacgggtcttcaccaccaataacggccggcatcaccgaatggacgagtactcccggtgaaatgtaccgtccagcgagttgcagatctacacttggatggatgcaaccttgaaagaactgacaagcttagtaagagaagtctacccataggctagaaagaagggcactcacttcaattttgcaatcgattttacagatgttaaaagacctggctatcgagttaaggagattggcagcaccatgtctggcagaaaggggactgatgattccatgaccctgcagtcgcagaagtttcagataggagattacttggacatagcaatt

SEQ ID NO: 96176 - DNA, 798 bp, Homo sapiens
cttgaggtcatgctcatgctggttaaagctggagcagaccagagagccaagaatcaggatggaatgaacgccctccactttgccactcagagcaatcatgtgcgcatcgtggagtatcttattcaagatctgcacctcaaggacctgaaccagcctgatgagaaaggaagaaaaccatttcttttggcagctgagaggggccatgttgaaatgatagaaaaacttaccttcctaaacctgcatacttcagaaaaggacaaggggggaaacactgccttgcacctcgctgcgaagcatggtcacagtcctgcagtgcaggtgctgctagcccagtggcaagacataaatgagatgaatgagctcaatatcagtagtttgcagatagcaaccaggaacggccatgcatcccttgtcaactttcttctcagcgagaacgttgatctgcaccagaaagcggaacctaaggagtcccctcttcatttagttgatatcaacaaccacatcacagttgtaaacagtttattaagtgcacagcatgatattgacatcttaaatcagaagcagcaaacccctctgcatgtagctgctgatcgtggaaatgtggaactggtggaaaccctgctgaaggcaggctgtgacttgaaggctgttgacaagcaaggatagactgccctggctgtggcctccaggagcaaccatagccttgtcgtggacatgctcattaaagcagagagatactacgcctggagagaggagcatcatgagagcatcagggacccgtcaacaggctttactctg

SEQ ID NO: 96177 - DNA, 431 bp, Homo sapiens
ggcgtggtcaatcgctccctcccacccccattctaaagtgcctccagggcccaggagggggaaagcagaaggaaggcctggggctgcagcacaggcagcggaacaggcagaggttcacccaccttcaagcgggccttctcccttacctgcacgtcaaccacctgtgtggcaaattcctccgacccctagccttaagacaacaacaaggagaggcgcccagccacagcactcaaggaaacgacttgcctaatctcggagcgtgtctgttttgttcaggaaaatgtgaaccagctgtaacattctgtctctccagaggtgcagccacaccgcaacatggctaaagatagcccggtgattgtatgcttgcagggaggcacagaattaagcacagccaagtgggcgaaggcagtccatgcaccaagtgaccgtgg

SEQ ID NO: 96178 - DNA, 438 bp, Homo sapiens
attattttaggcatattatggattaaattggcatctgggggccactctgtctcaaaaaaaaaaaaaaaaaaaaaaaaaaaaaaaaaatttccccagagggggggggcctccccggaacccccatttttggggaattggggggcggccggggactggacccccccggggggaaaaaaacgggttaaaaaaccaaaaaaaggaaaaatttttggccccccggtaaaaaaaatccacgggaaaaccccttaaacccccccagggaaagggttggggggggggccccaagtttcccaaaaaaaaaaggccccctagggccgggggaggttccctaaaaccaaaggggaaaaaccgggaaccttttttagcccttaaaagcttacccggggtttttttggggggctttgggggaaacccggggatggggcttaaaaaccaaaa

SEQ ID NO: 96179 - DNA, 394 bp, Homo sapiens
tgatgttgaacacttttccataagcctgtcaaccatttgtgtatattttgtggagaaatgtctatccaagtctgttgcacatttttaaattggattatcttaagttgtgttgttgagttgtaagagttctttatatattctggattatagacctcacctgcattttcaaatgatgtctttgctgagtatggaatgtggggctgacagtttgtctttcagtatattaaagatgccactccattgagttctggcttgcccacttctgactcaaaacacacgcctcctcttctgccatatagtgccggggtgtgagtccatctagtcagggtcaagctgggtttgcgttttgtgattgctgtggttacgttcagtgtacttggggccttaggttttt

SEQ ID NO: 96180 - DNA, 723 bp, Homo sapiens
gaccgtctctggccagtttgcttcaacccattccattccccaaagaagctctcgcacatgagaagttcaccaaggaactgaagtacgtgattcagaggttcgccgaagaccccaggcaagaggtccactcatgcctgctgagcgtgcgggccggcaaagatggctggttccagctctacagccccggaggggtggcctgcgacgatgacggggagctgttcgccagcatggtgcacatcctcatgggctcctgttacaagaccaaaaaattcctgctctccctggcagaaaacaagctgggtccctgcatgctcctggcactgagggggaaccagaccatggtggagatcctgtgcttgatgctggaatacaacatcatcgacaacaacgacacccaactgcagatcatctcaaccctggagagcacagacgtggggaagcgcatgtacgagcagctgtgtgaccggcagcgggagctgaaggagctgcaaaggaaaggcgggcccaccaggctaacactgccctccaagtccacagacgctgacttggctcgtttgctgagctccggctccttcggaaacctgggagaacctcagtttggccttcaccaatgtaaccagtgcctgcgccgagcacctcatcaaactgccttcgctcaagcagctgaacctgtggtccactcagttttggagacggtgggcctttcggttcctgttcgggaac

SEQ ID NO: 96181 - DNA, 438 bp, Homo sapiens
cggcacgagctggaagaaatccatttcaaatctgctgaaacctgttaccaagcaacagcagtgattaaaagcaacctgatgagtgagtaaagaattagggtttcagacctgtagttaatgatggtctctgtctccctgctgccctgcattcccttcccttccgttcactgctgggtgaaggagggcttgctgcattttggaagttaagggaaccaataaggtgactcttttgcagattggaatatggtgctcagccagccatatggaagcactgtcctggcgtgatctgccctgggctgaaggctctctgagtgctgacttgggaggagcactgcccttcataacataagagatggcttccagtccccattctataccaacacctattctgagttttcggtcaccctgaagtttatattcttatcctaccaggcttcg

SEQ ID NO: 96182 - DNA, 479 bp, Homo sapiens
gcttaacagtctagtagaaaataaacataacatttttttcagttcccatgagatactatgttggcatgagaggcatatttttacagaattttgaagacgacttatttaaattagttttgagttttggttctattactacaaacaaaatgagtaattattgtgtcatatggttatttagacatctaagagtgaacaaaaatgataagtgtgcttagagaattaaatatctccactgaggcatggtagcaccacaggaaagatgtgtcccgtagcagatatgagataacttagctattggaaataatctaggactaaagtaattgatcaaaacaaaaactggggggaaataactgaacatgtagcccaactccagagctttgcaaatttataagcttaagtggtggctcacgcctgtagtcccagcactttgggaggctgaagcgggtggatcatgaggtcaggagatcgagaccatcctg

SEQ ID NO: 96183 - DNA, 419 bp, Homo sapiens
cactgactttgcactcaaacacattaccgccaccagagatgtcagggctgacgtgaccgccagcgacgaatgcttactggaccttcctgccttctgcgattaggctatttccagaaatcttttttattgcggtattattatcagtatcattatttgatgagacggagactttatctgatgcccactcttggcggctgaccttcaaatatgaaagggatgctaactaccacttgctcatgtctgctcaagagaggctagaacgactatttggactgcatggtggaactattcccattgtacccacggcagacttccatgacagtatatcgggcgcatctgatacagacatcgcgcactctggcttggcatacacaatggagcgttctgccaggcaaattatgcgcacagccatgaagtat

SEQ ID NO: 96184 - DNA, 419 bp, Homo sapiens
cacaagtgtgaggggaggtacagagggaaaacatacggggggtactggtccctgtgcgccaccgtgaacaaagccctcgacgaacggataccaataactagtgcctcgtactacgcgacagtgaccctggatcacgttcggaatatacttggttctgacacagacgtttccatgcctttactataagagaggcatcggattctcaatgaaaccggaaaatttctggtggacaagttcggaggctcttttatcaactgcgtccgataaagggacaatattgcgcacaagttaatgcacctggtggttgaaagttttccttcttaccgagatgtgactctgtttgaggggaactgagttgctttttacacacgagcccaaatccttgtgacagatacgggaaccgtcttggaaggaaaagg

SEQ ID NO: 96185 - DNA, 397 bp, Homo sapiens
agctctcaataatcaagatcagattgatgcaggtgaggaattccttacgctttaagtcattttccatctccaggctagcagttcagttgatttccaggaagaggaatcaataaggtagatttatttttaatatatggatatgcatatagtctagcttagccttttggtaagagtagagtactgatagtgaggacctgatctccaactgcgctaaacacggatgatgtgaaccccttcatgggctcaagctccaggggtcatcatcgccagttccagacaggcatagtttcagaccaccctgctgaggctggccccatctcataagatgagcaggagcttccgtacgctgtcctacactttcacaaggtgcaacctttagaaccaaaggttaccgact

SEQ ID NO: 96186 - DNA, 455 bp, Homo sapiens
gaggtggctcacacctgtaatcctagcactttgaaaggaggaaatgggaggactgcctgagccgaggagtttaagaccagcctgagcagcatatcaagaccccgtctcaaaacaaacaaacaaacaaaaaaaccctctgaggctgagcatttagagtgtttgttaaacagttggcctttttacttttatggtaacacacataaatgttatatatgtgttaaggctagttaaatacatgcaaatggtaggtatgatatcaccaaatttgtgacccttatgtggtacgatacctgtactatattattcatatggacagtgagtaaactaaaattgctcatccttaccatctgctgtatggtctttctaatctttaagttttacatggacggatgggaaataaacagcattaactcggttatcttgcttggccaaatggttaaaacctttgatttggg

SEQ ID NO: 96187 - DNA, 425 bp, Homo sapiens
gtaaatatttattttgtggtcaccatatgtaagacgctagcaaccatgaagatgaccttgaggaactcacagtggaggaaaaatatatacatagatgctgtattacaaggtggaaggcatagagctcattataaaaggaatccctggagtgctttcagcatagaagacaagcaaactaagttactggtttactcagaatacagtgtatgataaaattattttcaaggggtaggcatccatttatttaaataggcggttactttttttttttttcctaaggagtttaacattgtcacccaacctgaagtgccggggagcaatttgggttaattgaagcttcggcttccaaggttcaaaaaattttcctgcccaaacttcccaagtagctgggactaaaggcacttgccaccatgcccagttatttg

SEQ ID NO: 96188 - DNA, 441 bp, Homo sapiens
tacaaggccctagtcgtgacctggttagcgagttataccaaataaatgcgtttgacactccggagtcattgctcatgataggcaaggaccatagtgaccctatacatcatacctttgaccatatgtggagaactaaggaacataatgaagctggatggttgctcctaagatcagtggataaagtgatgaaagaaaatgatgaactcggggattctatctcccagcttcagaagcagatactgagcctcaaatatgccaagattgccctgactgagagactaatctcctgtccagtatgaactgagattgtcttgaactacacataatctcttatcatgttactgactgacctgctctgaaaagtgcatgcacagtctcaccatgcacactctggccaagcatctaactgtaacgtgatgacattgattggtttgcagcacc

SEQ ID NO: 96189 - DNA, 423 bp, Homo sapiens
  misc_feature (1)...(423): n = a,t,c or g
agcacatatgcatgaaaatttgcttctggtttcagggggttcaccaaccccacaaagcctatctttgaaccctgagttaaggattcctgtcacaggatgttgtcatggaattaatttcataggattttaaggcccagcccccatggtgattcttttccacctcactggcttcttgcttgccttcctccctctctctcacttacttacctcttaccttgtgccctggattctttcagggactgatgggcacactttccggagtgcctgtttaccgagatggttggaagcagagtggatctttgggggtgtgaaataccagtatggtggcaaccaagaaggcaagtgatgttttttcactggttaaagttacgtttacaatggaagctctggaaaagtcccatgggaaactttttccagaactcn

SEQ ID NO: 96190 - DNA, 447 bp, Homo sapiens
agctgggccagggtgcggacctgcgcctccctcggctcctggcgcgggcctcgacgagaggggtggaagatgtctatggatgtgacattcctggggacgggtgcagcatacccatctccaacccggggtgcctctgctgaggtccttcggtgtgaaggcaagagctggctctttgactgaggcgagggaacactgactctgctcatgaactgccaacttaaagcggaattccctcatttgggctttgagtcgtggaacagaatcgcccaggtagactcaatgcacagatacttaaagaccttggtgtttcaccaggttctgactatgggaagctgaaaaacggaatttctagtggtctggacaatggggttaccacttctgaccacgatgtcttaaaaatggctattgttggaagaaaaatctggatattgggtgactggtctgggg

SEQ ID NO: 96191 - DNA, 457 bp, Homo sapiens
attcatatgtgaccccttaatcaaggctattggtactgaaggggatacggatgtgctctcagaaataatgaattcttttgcaaagtccattgaagttatgggagatggttgccttaatgatgaacacttggaagaactgggaggaatactgaaagcaaaacttgaagggcactttaaaaaccaagaattgagacaggtgaaaagacaggaagataactatgatcaacaggttgagatgtctctgcaagatgaggatgaatgtgatgtttatattctgaccaaagtatcagatattttgcactcattatttagtacttataaggaacagattttaccatggtttgaacaactacttccattaattgtaaatctaatttgttcaagtaggccatggccatactgacagtggggattgtgcatatttgatgacatcgtaaagcactgcagtccatctttg

SEQ ID NO: 96192 - DNA, 297 bp, Homo sapiens
gatcacaggcagaaactgtatgcacacaccgagtgtggaaaagccctcttgtggaagtcagttatttgtgtacatcagaaaattctggaagaagagaaaccttgtgaaggtactaaatatgacaacatcttcagtaacagaggatgtccccctgtacccagaatggtgcatgctgtggagataccctgcaagtagaccgaatgtgagaaagccacaggagtacatgggcctcgcggtgcatcagagttcctgccagagaggcccacaggcatgaacatggcaaagtgtgaaagtcgt

SEQ ID NO: 96193 - DNA, 408 bp, Homo sapiens
cgcttcgacgtgagtgatggattggaactgagaccgaaatataatggaattgctcatcgcttgactaccatttggtatcttgatggactacggggactttataaaggagtaaccccaattatatggagtgcaggtttatcctggggactctactttgttttttacaatgccatcaagtcatatataacagaaggatcatctgaacgtttaaaggcatcagaataccttgcctcaactgctgaacctggacccatgaccctctgcattactaaccctttatgggtaacaaaaactggccttatgttacagtatgatgctgtggttaactccccacactgacaatataaaggaatgtctgatacacttgtgaaaatatataagcatggaggtgtgcagggattatattag

SEQ ID NO: 96194 - DNA, 493 bp, Homo sapiens
ggtagagacagcgtttcaccatgttgtccaggatggtctcagtctcctgtcctcgtgatccggcctcccaaagtgctgggattacaggtgtgagccactgcgccgggcctgattcctgtattctttaaaacgggaaaaaagacaagcagcagctcctcaggtcacaaggccaggtatatcaaacactggcctccgagaatagatcatgccaccaagtgaaagaaacctcttcttggtcctgttgtgattttagataaagtagtcatggaagcttggtcattactatagtcttaatgttattttttttaaaaaggggatttagttgagctgattcctcccctaaagggcctctgtcaccttattttaaattaaaactgggtttcccagaaaatagggaacaaacaccactgggtgtctcccaaaccctttcttgggcttcctctccctcttttttataaatgggggtgatgaaaacacctgttcacgaacccct

SEQ ID NO: 96195 - DNA, 455 bp, Homo sapiens
ggaaaaggtatggctgtttttccaagaggatgaataagagatccgctacaaatgtcttcttttgtgctagaaaaggtgaagttttaggattattaggacacaatggagctggtaaaagctcatccattaaggtgataactggagacacataaccaactgctggacaagtgctactgaaagggagcggtggatgggatgccctggagttcctggggtactgccctcatgaaaacgcgctgtggcccaacctgacagtgaggcagcatctgtaggtgtacgccgccgtgaaagggctgaggaaaggggatgctgaggttgccatcacacggttagtggatgcgctcaagctgcatgaccagctgaattctccggtgaaaaccttgtcgcagggattaaagataaagctgggcttttgccttagcatacttgggaaaccctcctgtgggattttggcg

SEQ ID NO: 96196 - DNA, 429 bp, Homo sapiens
gtggactacacagtacggaagttctgcatccagcaggagggcgacatgaccaacagaaagccacagcgccttattactcagttccactttaccagctggccagacttaggggtgcctattaccccgatcggcatgctcaagatcctccagaaggagaaggcctgtaaccctcagtatgcaggggccatcgtggaccactgcaaagcatgagtagggcgtacaggtacctttggcgacattgaagccatgctggacatgatgcatacataacggaaggtggacgtgaatggctttgagagccggaaccgggcacagagctgtcagaaggtgcaaaccgatatgcagtatgtcttcatataccaagcccttctggagcattatctctatggagatacagaactggaagtgacctgtttagaaaccccctgg

SEQ ID NO: 96197 - DNA, 435 bp, Homo sapiens
aggagccctaagttgtcactcagtttaatttcttttaatggttagtttagcctaaagatttatctgcatattctttttcccatgtggctctactcatttgcaactgaatttaatgttataactcatctagtgagaccaacttactaaatttttagtatgcactgaaagtttttatccaacaattatgttcattttaagcaaaattttaagaaagttttgaaattcataaagcatttggttttaaactattttaagaatatagtactcggtcaggtatgacgggctacgcctggaatcccagcactttgggaggccgaaacaggcgaatcacttgaacccaggagttcaagaccaacatgggcaatgtggcgaaactccatctctacaaaaaatgcacaaataaaaaatatagtactcaggattcttgatcctggg

SEQ ID NO: 96198 - DNA, 431 bp, Homo sapiens
gttttagaatccaaaagcaatatatactgacagcaggggggaccttcaaccaatttaaaagtgaatcaattaaatataaaagttacttctttctatcccatccatcctcttaaagaaataatcacaatgaacaatttgatgtgtattcctctcactttttaaatacatgcacaaatatatacagtttaaattctgctttttcacataacacttcctcataacattaaatattctccaaaatatgtatttttaatggatttaactattttcctattgttggacatataggtcgcatatatttattcattgagacagggtctcactgtgtcactcaggctggagtgcaatggtgcgattatggttcactgcagccttgaactcctgggctcaagtaatcctcccaccttaggctccccagcagctgggaccac

SEQ ID NO: 96199 - DNA, 439 bp, Homo sapiens
ctaaaatcttttaacctttgaatatgagataactttttgtctgtgcaaaattacatgaagccaattatagtcataatttttagaggaaggcttagattaaaatgtaaagatgtggtagacttctaaatatgcaaagaatcacatggagtatgattgtgaattacaggtttaattacagtttttttcttttaaaggaagtatctaacttcttagtataatacactattatataaactgtctcatttaatacagagagtattgaggtatatgttgatatctttcttttttgttttttgagagaagagtctccctgtgttacccaggctggagtgcagtggtaggatcatgacttactgcagccttgactgcctgggctgaaatgataatcccacctgagcctcctaagtagctgggaccacaagtgcaggccaccattcct

SEQ ID NO: 96200 - DNA, 439 bp, Homo sapiens
ctattgggctccatcctgagctccatgcagaagccacgcggcctcgttgaccaggagactctgcgcaaggcccgataacaggccgcccgtctgaacaaactacaagagcacgagaaacaacagaaagtggagtttcgtataaggatggagaaagaggtgtcacatgttgtttaagacagtgggcatatcacgacataggttcagtcaatgaacagtatcgagaggagcatactgcatgaagtggtggaagtggatggcctgacatccttctactttggggaagatgatgactgtcgctatggcatgatcttcaccaaggatgctgcaccctcagatgaagagctagactcttaccgccgtgctgaggaatgggacccccatatggctgatgataagcgtaagctcactgagctggctcagaggcctgatgatgacgcat

SEQ ID NO: 96201 - DNA, 439 bp, Homo sapiens
gtcatacgaaaagtgactggaactgaaggatccagctcaactgtgctggattacaccattccgagctcaactggaggcatgcctgtgcggaaatctgaagaccaaacagatactaagcgaactgtgattaaaacgatggaagactataataatgacaataccgctccagctgaagatgttatcattatgattcaggttcctcaatccatatgggatcaagatgactttgaatctgaagaccaagatgataaatccacacagcctatatcaagtgtaggaaaacctgctactgttataaaaaatgttcgtacaaagccatctgctatagtcaagtatcctgagaaagaaagtgagccattcgctaaaattctgaaattcaccatggacgtgagtcatgaagtcatacctcatgaggttaaaagttcataatactctgcat

SEQ ID NO: 96202 - DNA, 453 bp, Homo sapiens
ggagaaacccgaaaaagaagaatgtaatttatggaccgaaatgtggcaggaaaacgtacctggatcctttggtggcattcgattatacctgcaggagttaatgactattacccagaaggctttgcactctcagccctggaaaatgaaagcccagggagcaattgccatggcatcaatggccctacagactaactctctagtacctccatatctaggaatgatactgaccgcattggtggaaggcctggctggaagaacgtgtgcactaaaggaggagctattgaaagccattgcctgtgtggagacagctcgcagcgcagagctgtaaaagtctgtgcccaatcaacccagcacacatgagatcattcaagctgatctgaaggaatgtagcaaagagaatggcccatacaagatttgaccagtcatatgtgcagctgacatcttgcacgcccg

SEQ ID NO: 96203 - DNA, 441 bp, Homo sapiens
  misc_feature (1)...(441): n = a,t,c or g
tcttgaaccagctctcccaggaagatggggtggtcgctctgcggagagccccccttcaggatccgtgaggaagaccagacagaacaagcagaagactcctggaaacggagatggtggcagtaccagctaagcacctcagccccctcggaagaaaagggcccgggcagaccccactgttgaaagtgaggaggcgtttaagaatataatggaggttaaagtgaagattcctgaagaattaaaaccatggcttgatgaggactgggacttagttaccaggcagaagcagctgtttcaactccctgccaagaaaaatgtagatgcaattctgtaggagtatgcaaattgcaagaaatcgcatggaaatgttgataatacggaatatgcggttaatgaagatgtggcaggaataaaagaatatttcaatgagatgttgggcactcn

SEQ ID NO: 96204 - DNA, 430 bp, Homo sapiens
cgaggtgatagagacttacactgtactgaaagtcagtctgaagcttctacagaagaaggtcatgattcactctcggtaggaatctttgaagaggattcacaattagaatttattcttgatccccctaaatcaaaacccccagcttggcttaatggaataatgacttgctaagactttgaattactaaacccacgcagagtcagatttttactggaagttaaagaccttgctctcacgaggcgccaaattttactccacaaaggtctttctgactatgagaagagcacaaccttacaggaactagtgctgaagaaatcatcacgttctgggcctccacttagcatagaggatttaggattaaatttccagttatgaccttcctcaagagtatatggttttacagctgaggaactcaagccaagtggtgaaa

SEQ ID NO: 96205 - DNA, 554 bp, Homo sapiens
agactgcatagggctcggcgtggcggctcacacctataatcccagcactttgggaggttgaggcaggaaaaagacttgagcccaggagttcgaggctgtagtgagttctgatcatgccactgcacttcagcctgagagacagagcgagaccctgtctccaaaaaaatttgaaaacagatttttaaaaactgttttggaacctcctcatacttgcacaaaaaaattcctcttgtacaaaggcttttctctagatttaatgttgactcttttatctttcttcataagatctacttttaatcctttgttcttttttgaaaagacagtatttcttttctatttgcatccagccatttttttatcctatatttgtgaatttgcaaaataaaatataagttgtttaattctgcccttcttttcttcagacagggtcttgctctgttgcctaggatggagtgcagtggtgccatcaaagttcactgcagcctcgaccccctgggctcaagtaatcctctcacctccacctcccaagtagctgggactacagatgcacgcca

SEQ ID NO: 96206 - DNA, 499 bp, Homo sapiens
  misc_feature (1)...(499): n = a,t,c or g
gccaacaaggcgtctgactactcctgagaaagaactccttgaggacaaggaccttggtgcgtcctgacattgccagtgtccagcacaagcctggcaaagagcaggtgcctaggaaaagtttgctgaatgaatgaatgagggacaacgggcacacctagaggctacctgatcctgagtcaagaccagctctctgcagggtggtgggtggaagagagaagatcctggaggtttcagatacgcgatacttacctccaattgtccagagcttcactggacatttgtgctatgtgtcactagcccctctctgctccttccctctaggatgtaattgcacagagaccccccttcccagcaaggagggcagcgagtctgggctggttccacctttaactacccaggccttaccttggtaatggaaatggaaggtgccagggccagccggtggcggtaggcttctggacctcagggccgcttggtgggtggagcttccgattaattn

SEQ ID NO: 96207 - DNA, 389 bp, Homo sapiens
actttatattatgtaacatgcacatttatagggatcactcaaagttgaggttctcttctcaaagttttactggcatgattacagaataatgcctgagcatcccccatggtttcaaacagatgaaaattatttttgaagcccttgtttcttaaaatgcgaactataggaccaatcgcaagggaatttttttgggggagtggggggaatgggtacagtgtttagatagcatcaaacaataacttacagtagattaactgtcagaattctatacttatgaaggccctagcatcagaccacctatcggatcctaaggcacaaacttacccttgccactttcatacatacctcggtccccatccgccgtggatgatgagaatttattagatgag

SEQ ID NO: 96208 - DNA, 460 bp, Homo sapiens
atcaacactcatcactaataatcataagggctatagcaataaaactaggaatagccccctttcacttctgagtcccataggttgcccaaggcacccctctgacatccggcctgcttcttctcacatgacacaaactagcccccatttcaatcatataccaaatctctccctcactaaacgtaagccttctcctcagtggtacctgaagcctttgcttccggaaagcgcggtatggttcgtaagtagggctagtaccgagggctcgtatcgtagggttcctaggtagggctactaggcatggctagcaggcagggctagtaagtagggctagtaggcagggctagtatgtagggctaggaggtatggttcgtaggtaaggttagaccgtagggctagaacggatcgctacaaagcatgccctctccatcaaggtcactcaccaggttcttcgaccaccact

SEQ ID NO: 96209 - DNA, 382 bp, Homo sapiens
atcaatactcatcattaataatcataatgggtgtagggataaaactaggaatagccccctttcacttctgagtcccagaggttgcccaaggcacccctttgacatccggactgcttctttacacatgacaaactctaacccccatttcaatgatataccaaatctctgcctcactaaacgtaagccttctcctcagtggtacctgaagcctttgcttccgtaaagcgcggtagggtttgtacgtagggctagtacgtagggctcgtaagtagggttcccatgtagtgctacaacgtagggctatgaggaaaggctagtaggtaaggctagtaggtacgggtagtaggcagggctagtagggacggttcgtacgtatggctcc

SEQ ID NO: 96210 - DNA, 447 bp, Homo sapiens
aaatcaatgtttaatttttgctgattgtctagacttcatagtgatggagaaggattgattgcagattaaatttgtgtgtcacgactgcatctcttaaacattttttttcaatagctcataaatttcacctgcacaatggctcacacctgcaatcccaacactcttgtgaagctcagcttagaagaacggccagattcattatatgttgtctaccatatggagaatctggccagtcttggcctacgttaacattagaaagggcaaaccttaattggcttactgtctacttcaataattggaaagactgggaatatgattcagatcaatacatgtctaattttgatcgttcctctgagatgatgaacatcatcgtttggtgacgatcgattgataatctaccccacattatatgcagcacattaattaatactaaaaattcttttcttc

SEQ ID NO: 96211 - DNA, 455 bp, Homo sapiens
caggaaatcaggcaacaccaaaaacagcaccagccaccatgagcactcccacaatactggtcgcaacagcagtccatgcatatcgatagtaagtcgctgagaaggaacaccctctgaagtttggtggaagggcgtgcagttaagctactttttctcgaaaaacctctgtttgttgcaaaacggttatttagcccttccacggacaaaatatcagtagaacttttaacatctgaattggagatttctgtggtaaaacttgaaaagccattatcttgtctactgtctttagggagtgcttgtaccctcaacagctgtcaaatgctcaaagaaagcctctccactgagatagcatgaatgatagatatttatatttaaagagtaagggaatagtatatgagctttaaattataaactgctgggcacggtgcggtggcgcacttctgtaatccaacatc

SEQ ID NO: 96212 - DNA, 453 bp, Homo sapiens
ccacggtcctggaggcctgctggattacatcgacaaagagaggattcgggatttcctgaatggggagtgcatgtgcgaagtgccagatggtggactggtccccaaatctctgtaccggactgcataggatctggagaacgaagacctgaagctctggactgataccatctaccaatctgcaagcgtcttcaaaggagccccacatgagattctcattcaaattgtggatgcctctacagtcatcacttgggattaccacgtgtgcaaaggggacattgtgtttaacatctatcactccaaaaggtcgccactaccacccaataaggactacctgatagcccacagcatcacctttccggatgggaacaatgttcatctcaataacaaagtctggatgttaggccccgactacatcatgtggataacaactttgattaccaataatgaaaaccg

SEQ ID NO: 96213 - DNA, 402 bp, Homo sapiens
gaagagaagcaagcaccaggatttacaacgggaaggggtaagctaactccactgttttgtgcacatgcagtcaggtttattatcagtacgtcccttatctataaaggcgcttatccttgagccttgaagggaaaagagaaatactagcttgcagtcttctgggtgtacaacaaaaaaggcctgaacaacaataatctttttctggatggggtacatctgtgctttgtccctgaagtcaggaagtacctggccggtaaaggcctgcctttctccattggcctttaccatcttattttattgttatttttttttttttaacttatttattaatttttgaaagggagtctaactttgtcactaggctgaattgcactggtgcaattttagctaactgcgacctct

SEQ ID NO: 96214 - DNA, 478 bp, Homo sapiens
ttttttcctgctttatttaggtataattgacaaataaaaattatatgttttatatgttggtcaaagggtacagacttacagttatgaaatgaatacattctggagacctaatgtacagcatggttaataacaatgtattatatacttgaaatttgctaagagtagatcttaagtaatctcaccacatatacacacaaggtaattatgtgaggtgatggatatgttaattagcttgattgtggtaattatttcacagtataaatgtatatcaaaacatcacattgtattccttaaatatatataattttaaactttcatttgtataattttaggtataatttgggcgactacaatggagagatcgtgtctgaggttatggcacagagacagccaatgaaacctacttatgccatccccatcatccctattactaatagcagtcaatttaaacaccaggaagcaatggatgtgaaggagt

SEQ ID NO: 96215 - DNA, 430 bp, Homo sapiens
  misc_feature (1)...(430): n = a,t,c or g
cgacatccacacctaatgtccacatgggcagcaccagcctgcctggggacagcacgacgattgaggatgcaattcaaagtcacagcgaatcagcctcaccttcagccctgtccagtcaccccaacaatctgagcccaacaggctggtcacagccgaaaacccccgtgccagcacaaagagagcgggcaccagtatctgggaccccggatagagacaaacttaggccttgtggacagagagattaaggctattattgggaaatagaagccagtgaagtgatgctggccactcggattgtgtcaggctcttttggaactgtgtatcagggtaaatggcacggagatgttgcattagctatcctacaggttgtcgactcaaccccagagcaattccagggcttcaggaatgacgtggctggtctgcgcataan

SEQ ID NO: 96216 - DNA, 421 bp, Homo sapiens
cgcgctgcagaaacacgaagacaccgactgtccctgcgtggtggtgtcctgccctcacaagtgcagcgtccagactctcctgaggagcgagtagagtgcacacttgtcagagcgtgtcattgcccccagcacctgtagttttaagcgctatggctgcgtttttaaggggacataccagcagatcaaggcccacgaggccagcttcgtcgtgcaacacgtaaacctgctgaaggagtggagcaactcgctcaaaaagaaaggttcctcgtttgataaagaatgtgtagataaaaacaagagcatacattgctggcacattcaaatatgtagctctgttatttaatattgagttatttaatggtatatcttataattaattatgcctaattacttcctttatagatattgtatttattattac

SEQ ID NO: 96217 - DNA, 428 bp, Homo sapiens
ccggcacactggcttgtgggtgacttctctccctgctgtatttcccggacaggtgaggcggaccctgttcatcacaggactccccagagatgccaggaaggagactgtggagagccacttccggtaagcaggtgggtggggagttttttgatacattacattcaggagcactgtctgtgagggagactgaatggaggagggggaggttttagttatctatgttttatcctatagtactattttattaagaatttttgactttttttattattgtaatatttatttatattttctaatatcttttaagatttttttgttcattttctatatatgtattttaatgttttatatctttatttttactactaaatatcgtatcgttatttatctagatttttatatttaatttttatattttctttaatccg

SEQ ID NO: 96218 - DNA, 419 bp, Homo sapiens
cttaaaacatcccagttcttctactaagacatgtgggaaagtatttctaaatgttcttgttttagggacatgttcatcctggaacttacacaaataccttagaacgtctagtgaaggaaatggaagacacacaaaggtttgttagcataaagattaatttgctaaatttaacattttgcttgtttgtgtggcttacttttaatttaccttttttaaaaaatcatgagaaattagcgtgcattttggactctgttgtcaactgtgttagaataagatatgttggccggacgcagtggctcatgcctgtaatcacaacactttgggagacccaggcaagattacttgagcccaggagttcaaggctgcggtgagtcgcgatggcgccactttactggaactgggtggcagaatgagaaccc

SEQ ID NO: 96219 - DNA, 442 bp, Homo sapiens
atttcacctgcggtaccataatcatcgctatccccaacggcgtcaaagaatttacctgactcgccacactccacggaagcaatatgaaatgatctgctgcagtgctctaagccctaggatacatctttcttttcaccgtaggtggcctgactggcattgtattatcaaactcatcactagacatcgtactacacgacacgtactacatggtagctcacttccactatgccctatcaataagagctgtatttgccatcatagaaggcttcattcactgatttcccctattctcaggctacaccctacaccaagcctacgcctgaatccatttcactatcatattcatcggcgtaaatctaactttattcccacaacactttgtcgggctattcggaatgccccgacagtactcggactaccccgatgcatacaccacaagaat

SEQ ID NO: 96220 - DNA, 454 bp, Homo sapiens
ggcggcgcccatggagctgatctgctggtcagggggctgggggctgccgtcagtggacctggacagcctggccgtgctgacctatgccagatttactggagctccactgaaggtacacaagatcatcaacccctggtagagcccttcaggaactctgcctgcccttcggaccagtcatggagaggtcatctcagttccacacaagatcattacccaccttctaaaagagaagtacaatgctgattatgatctgtcagctcggcaaggggcagacaccctggccttcatgtctctcctggaggagaagttgctcccggggctggtacatactttttggatagacaccaagaactacttggaagtgacccggaagtggtatgcagaggctatgcccttttcccttaacttcttcctgcctggccgcatgcaacggcagtacatgtaacggctaccg

SEQ ID NO: 96221 - DNA, 410 bp, Homo sapiens
taacaaatttagtcagaaacatctgcaattgaatgagacatgtgctgctaatcatatacacagtaaaaaagacacatgatctggattttctgttagccacatccctggactcagttgcttatttgtgtaatggatgtggtcctctaaagcccctcattgttttcgattgccttctataggtgatgcggacactgtgcatcaatgtgcaatgtcttttcagaaaggacactctgctcttgaaggtgtattacatctggttttcaaacctgacctggtgtatcagacactgctacagatgcctcctagaaaatgctgtttgtggccgggcgcggtgactcacgcctgcaattccatgactttgggaggccgtagccgttgattcacaaggtcaggagttcaagaccagcccg

SEQ ID NO: 96222 - DNA, 322 bp, Homo sapiens
ttttttttctgaaacctcgtctctactagaaatacagggtatagccagacatggtggcacatggaggctgaggcaggagaataacttgaacccaggaggtggaggttgcagtgagctgagatcctgcagctgtgctccagcctgggtgacagtgagactcgatctcagaaaaaaaagaaatagaaatccatagaaaatcctgaaaaattatttaaaaatatttgttatatagttttctttgaacatgtggtctctgcctgcaaacatagacttttagtgttaatttgcacagggttaaatatacacatatcattctgaagat

SEQ ID NO: 96223 - DNA, 370 bp, Homo sapiens
cggcacgagcagctcggaccctgcccagccgggggatgataaggagtttatcgatgcttcccgcctggtatatgatggcatccgggacatcaggaaagcagtgctgatgataaggacccctgaggagttggatgactctgactttgagacagaagattttgatgtcagaagcaggacgagcgtccagacagaagacgatcagctgatagctggccagagtgcccgggcgatcatggctcagcttccccaggagcaaaaagcgaagattgcggaacaggtggccagcttccaggaagaatagagcaagctggatgctgaagtgtccaaatgggacgacagtggcaatgacatcattgtgctggccaagcag

SEQ ID NO: 96224 - DNA, 376 bp, Homo sapiens
catgactgacacagatgccttatattaaagagaactgtttgatccggccgataaggacaaaatggaccacagtaggagaggaattgctttagtcttcaatcatgagaggttcttttggcacttatcactgccagaaaggcggtgcacctgctcagatagagacaatcttacccgcaggttttcagatctaggatttgaagggaaatgctttaatgatcttaaagcagaagaactactgctcaaaattcatgaggtgtccactgttatccactcagatgccgattgctttgtgtgtgtcttcctgagccatggcgaacgcaatcacatttatgcatatgatgctaaaatcgaaattcagacattaactgccttgttc

SEQ ID NO: 96225 - DNA, 461 bp, Homo sapiens
gacatggcattcctaatacttaccgaacgaaaaattctaggctatggacaagggcgcataggccccaacgttgcatgcccctacgggctactacaacccttcggtgacgccatataactcttcaccaaagagcccctaaaacccgtcacatctaccatcaccctctacatcaccgccccgaccttagctctcaccatcgctcttctactatgaacccccctccccatacccaaccccctgggcaacctcaacctaggcctcctatttattctagccacctctagcctagccgtttactcaatcctctgatcacggtgagcatcaaactcaaactacgccctgatcggcgcactgcgagcagtagcccaaacaatctcatatgaagtcaccctaaccatcattctactatcaacattactaataaaaggctcctttaaccttcgcagccttatcacaacacg

SEQ ID NO: 96226 - DNA, 384 bp, Homo sapiens
agaaaatttcaaagccttggcgatgattgcctttggtcaatatcgtcagaagcgtccatttgaagatcatgtaaaattagcgaatgactaactgaatttcgcaaaaacatgtgttgctgatgagtcagctgaaaattgcgacaaatcacttcataccctttttggagacaaattattcccaattgcaactcttcgcgaaacctatctcgaattggctgactgctgtgcaaaacaataacctgatatacatgaatgcttcttgcaactcaaatatgacaacccatacctcccccgattggtgaaaccaaacgttgatgtgatgtgcactgcttttcatgacactgaagagacatttttgaaataatacttatatgaaattgccac

SEQ ID NO: 96227 - DNA, 373 bp, Homo sapiens
acctttatttaccttctttttctctttagctcggcttattccaggggtgtgtttggtcgagatgcacacaagagtgaggttgctcatcggtttaaagatttgggagacgaaaatttcaaagccttggtgttgattgcctttgctcagtatcttcagcagtgtccatttgaagatcatgtaaaattagcgaatgaggtaactgaatttgcaaaaacatgtgttgctgatgagtcacctgagaattgagacaaatcactttataccctttttggagacaaattatgcacagttgcaactcttcgtgaaacctatggtgaaatggctgactgctgtgcaaaacaagaacctgatagaaatgaatgcttcttgcaac

SEQ ID NO: 96228 - DNA, 376 bp, Homo sapiens
  misc_feature (1)...(376): n = a,t,c or g
caaagggccctgttaccgacttgtcagtactggaacacagaggaggcaccctggggctgtttacctaaacaagcatctctgctgatgtaatgtgggcaaggcctgaggcccacactgtgagaaatgtacccttccatgcacattcaacgaagagccattgaaggccctgaccttcttccgggaacacggtccatgagtgtcggatccagaagtggcaactgcacccactgaaaaggaaataccttcattggatcaagagacaaccaaacttgagcctggtcaaccccagctatctccaggcatttccactattcatctgcatccacagtttccagtagtgattgaaaaaacatcacctcctgtgcctgttgaagtn

SEQ ID NO: 96229 - DNA, 478 bp, Homo sapiens
cttcataaccatctatattatttattcagtatttttatagacttttttttcttaaaggaaagtttatactgtgaatggaaaatcaatattgattgccataactagaaaaccaacaaaaggcaacagtaaaaggaaatatagaactatgaaatgcctgtttcatgtagcacccaatcatatatgtactacatttcaaaaagtcactggcttataaaaatattttttagcatctcatacaagtctcttcataatctgttatacagctcaccttacttgcacgattgctgagccaaagcagatcgaaagtcattttggtaagaggctagatgctgaccttgtattctgaaaatctgatgattctactgttgttgatgtgattccaagtaagcctgtgtgaacttctgggctattctcagggaagtgtttatgacacattgttgaaggtatcatcagggcagttgatccaagaaaactctat

SEQ ID NO: 96230 - DNA, 376 bp, Homo sapiens
gaggctctagttaagtcagctagtaaccagcctgtgtgcaggattcctactagatagaggtcttatgcccggctgtcagtccgttggttcagttaactgtggccaggaatactaggcatataacttaaaatcagataacttttatacaagaaaagccaatggccaccttcctgagaataggataaggagacaggggtagaaccttagattctaaggaacctaattaagaatcacttctggccgggcgtggtggctcatgcctgtgatcccaacactctggaggccatgtaggggcagatcacgagatcaagagattgggaccatcctgaccggcatggtgaagccccgtctgtactaagaatacacagattagccg

SEQ ID NO: 96231 - DNA, 423 bp, Homo sapiens
gctgaggcctgcggagaagggagtgtctgggaacttttcggaccccagttcccaacactgcatccagtcccgcctttttttttttttggaaaaaacgggggtttgggtttgttcccaaggtgggtttgaaccccaaaccctaagggaaccctcgggcttggccccccaaaggggtgggggtaaaaagggggaccccccagttgggccccattttttaagggggctacccggcccgaacctttcccgggcaaaaacctttccctggggcaaaaggggtttggaacctgggctttatttcggccctggggaagggggaacgggcaccctctggttttaaacccggcgtggggaatttgggcctggggaaaggccctggggccctaagttttccaacccccaagggggggcaaaggttccccctta

SEQ ID NO: 96232 - DNA, 338 bp, Homo sapiens
gtggcacacacttgtaatcccagctattcaggaggctgaggcgcgagaatcgcttgaacctgggaggtggaggtgttagtgttctgagagcccaccactacgctcgagctctgggaacataacgagacattgtttcagtcctgctatgcgtctgtgaggcccttggaaacctctggtactaagctcttaagacaactgttggttgaccctgggggctcacgcgtgtaatgccggccctttgggcagctgacccggttggatcatgatggccagagatctagagcattctgggcaacatggtgactccctctctctactagcagggtatacagatttcc

SEQ ID NO: 96233 - DNA, 339 bp, Homo sapiens
atgctgtgaaaaacctctgttggaaaaatcccactgcattgccgaagtggaaaatgatgagatgcctgctgacttgccttcattagctgctgattttgttgaaagtaaggatgttcgcagaaactatgctgaggcaaaggatgtcttcctgggcatgtttttgtatgaatatgcaagaaggcatcctgattactctgtcgtgctgctgctgagacttgccaagacatattaaaccactctagagaagtgctgtgccgctgcagatcctcatgaatgctatgccaaagagttccatgaatttaaacctcttgtggaagagcctcagaatttaatcaaaca

SEQ ID NO: 96234 - DNA, 369 bp, Homo sapiens
gactgatattgattttaaaagtcacttgggcctgaatctaggaaagtggtatttatatctgtcatttcttttttgtctgagtagaagtgactggacaaccccaaaatgcatcttttgtcaagaggaaccggtggtggctacttcctctgatagctgctcttgcctctgggagtttttgggtctttagaactcctgatggctaaacctctgttgtacgctagatacataaccacatgacccagctgattaataaccacctcagagcctgatattccgtctatcgagacatttacttcctttggatagcgatctgatgatcctcatgaccagcttcagttctgcttttcacagctgactattgcccagaat

SEQ ID NO: 96235 - DNA, 348 bp, Homo sapiens
gacatggacatgaaccccctgaggccccagaactatcgtttcggttgagaactaaaggccgacatagattatcactttaaggaggataatgatgaagatgatcaccagttatctttaagaacggtcagtttatgggctggcgcaaaggatgattagcacattgttgaatcagaggcaatgaattacgaaggctgtccaattaaagtaacactggcaactttgaaaatgtctgtacaggcaacggttacccttgggggctttgaaataacaccaccaggggacttaaggatgaagtgtggttcagggccagtgcatattatgggactgcacttagtagctggggaggaa

SEQ ID NO: 96236 - DNA, 325 bp, Homo sapiens
ggttatacagatacaatattagatgtacggtctcagcgggtaaggtcattacttggactatctaattcagaaccaaatggatcagtagaaacaaagaatttataacagatcctgaatggaggtgaatctcctaagcaaaagggacaagaaataaaaaggtatgatttatacttaacatagtttatataatggatattatggatattgatattgttaatctctttagctccttgttactgccattaagaactttttttttttttttttggcccgggggtttggttttggcccccaaactgggagggcaggggaccaatttgggttc

SEQ ID NO: 96237 - DNA, 366 bp, Homo sapiens
ctgtagcctcagctacaggggaggctgaggcaagaggatcccttgagcccaggaggttgattctgcagtgagccatgattgcaccattgcgcggcagcttgggccagagagttgagaccctatctctaaaaaaaattaaagtaataaaatatcattacattcttgtaccgctttatagtttagaatgtatttcacatattccctgtgtgcctctcataatcctccaagacaaggcagctattaactcatttttatggatgaataagctgaaacatgcagaaataacttgctaaaggtggaaacaatccaaatgtctatcagctgatgaatggataaataaaatatggtgtatccataaaaaaaaaa

SEQ ID NO: 96238 - DNA, 369 bp, Homo sapiens
gaagtggatcacctttatttcccttctttttctctttaggtctgtttatgggaagtttgagtttcttctagatgcacccaaaaatgatgttgctcatcggtttatagattttggagaacaacatttcaaagccttggcggagattgcctttgatcactattttcttcattgtccatttgaagatcttgtaacattagtgaatgaatgaactgaatttgcataaacatgtcttgctgatgagtcagcttaaaattgtgacaaatcacttcataccctttttggagacaaattatgcacagttgcaactcttcgttgaacctatggtgaaatggctgactgctgtgcaaaacttgaacctgagagaattga

SEQ ID NO: 96239 - DNA, 349 bp, Homo sapiens
  misc_feature (1)...(349): n = a,t,c or g
gtaacctttatttcccttctttttctctttagctcgggttattccaggggtgtgtttcgtctagatgcacacaagagtgaggttgctcatcggtttaaagatttgggagaagaaaatttcaaagccttggtgttgattgcctttgctcattatcttcagcagtgtccatttgaagatcatgtaaaattagtgaatgaagtaactgaatttgcataaacatgtgttgctgatgagtcagctgaaaattgtgacagatcacttcataccctttttggagacacattatgcacagttgctactcttcgtgaaacctatggtgaaacggctgactgctgtgcaaaacaagatn

SEQ ID NO: 96240 - DNA, 403 bp, Homo sapiens
tatgtgcggtgggtgtgtagtgtgtgtgttgtgtgtgtgtccgtgaatctaggactgaatctcttcctggtgacaatgaggacttcaatgtcaagaatgcgtctgtcaaggatgttcgttgcgtccactttgattgcgacagccaaaatgacccaccaatggaagcaactggcttcactgctcaggtaacaatctatagtctcattaacttattgcataggctaaagtacttcgagactttggatttgcactgaatagcaatctttttttccaaagtgagtatcctgaaccatccaggccagataatcgccgactatgcccctgcattggattgccacacgtgtcacattgcatgcaagtatgctgagctgaaggaaatgattgatcgccgttctgttaaaat

SEQ ID NO: 96241 - DNA, 355 bp, Homo sapiens
  misc_feature (1)...(355): n = a,t,c or g
gctagaatgagcattacagacacatatggacagcacctcattgctggcggactcatgacgcaagaggacgtgtctgaaataaaatcctcctactatgccaagtcgaatgatcacttaaataacatggcccactacaggcccactgccctgaacctgcaagcccactggcatggcctggctcaggcagaagcgcaaatcaccacctgtagctcaggggtgcccttcgatcttctgctgatggtaggcatgatgactgtacaggtgccctgagagctgcagatgcacagtcacctgctgaagacacatgatcagtccagaatggagaacatgatgtacggaatcaagctagactggn

SEQ ID NO: 96242 - DNA, 360 bp, Homo sapiens
gctttttgaacatcttggatagtacaaattccagaatgcgctattacttcgttacaccatgaaagtaccccaagtgttaactccaactcttgtaaaggtctcaagaaacctatgaaaagtgggcatcaaatgttgtaaacatcctgaagcaaaaagaatgccctgtgcacaagactatctatccgtggtcctgaaccagttatgtgtgttgcatgagaaaacgccagtaagtgacagagtcgccaaatgctgcacagaatccttggtgaacaggcgaccatgcttttcagctctggaagtcgatgaaacatacgttcccaaagagtttaatgctgaaacattcacctttcatgcagatat

SEQ ID NO: 96243 - DNA, 358 bp, Homo sapiens
gtaggcatgagccactgtacctggccttatttttattttaaatgaaaacattgctacaaagtgaggcaagtgccctgtggaatgggagtaagttcatgtcattgttgatgactgctaggtgtaacttttgtaggtgggcattttctagtggcagtttagccacttttgttatataaatttaaaaaaataatccttgcaggccatgtatgttcatgcccataatttcagcactttgggaagctaaggcaggaggatcacttgagctcaggagtttgagaccaatataggcaacatagtgagaccctgtctctacaacaccaccaaaataacttacagggtacgatggcacatgtatata

SEQ ID NO: 96244 - DNA, 356 bp, Homo sapiens
aactggactttgtaaacattaaaaaaaatcttctctttgaaagacgctattaagagaataaaaatacaatctgtgcgctggaagaaaatatttgcaaagcatacatctgataaaggagttgaatccaaatatatataaagaactctcataaatcaataagaaaacaactcaatcaaaaattggtcaaaaaatttgaacagacgcttcaccaaagatatacagaaagcaaataaacatatgctaagtgccacatcattagttcattaggaatccaaattaaaataacaatgataccactacacatctattagagtggctaaaatgaaaaagactgattatgtcacatcttggtgagg

SEQ ID NO: 96245 - DNA, 340 bp, Homo sapiens
gctttccctattgtctgaggcagccgccctcgcgctgggcaatttctggtctttcgttgcttctggtccaggctaataaagtttttctttctttaatttttttttttttagttttaacgggaaaaattaactccccggggccgccgggttgactgggctgcctgggccggaggtcttttccggccagggagccctgtggaaaggggctcgagcggccagggccaggcaaggccgggggggcggggggttaggggaccccggggctactcttgggagcgcccctgtccggctggctgcgccccggttttaaatagcatttttcggacttgtcttcgcggcc

SEQ ID NO: 96246 - DNA, 510 bp, Homo sapiens
  misc_feature (1)...(510): n = a,t,c or g
gacttctcctaagtctaaagaagacaacacacatggccagtattagacctgaggaggccttagacttgttaatcagaacatttttaactagtgcaccatactggaactaatcctctttgtgttgttaacatagacatttaaatttaaactttaactaagacccaatgagttaataaatcccacatcacaatccaaacttccttccataagaggaatacaaaggccttacaaagtccatacccatgtccagccacttttaagcaacatgtaagacagggcccattccacttgtttactgctttacttactttccaaagagtttcatgatacctctggatttctttttggaatctggagatggaggcggtatctggaagggactgttcctctgtgaatcttttggccgagaagaagcaccagccagatctaggtgctctgctgtctctttttctgtttcagctactccaagagcagaatgcagacaatgaattttaaaatatggaatanacc

SEQ ID NO: 96247 - DNA, 376 bp, Homo sapiens
ctgaggtgggaggatcgcttgagcccaggagtttgaggctgcagtgagccatgattgtgccactgcaccgcagcctgggcgacagagagcgatcccgtcttttaaaatatagaaagcggggtttcagaaagatatttgtacacccatgctcacggcagcactattcacaatagccaaaagatggaagcaacccatcttccatccatcagtggaggcgtggataaataaaatgtggctcgtccatatagtggactactagccttaaaaaggaaggaaattctggccaggtgcagtggctcacgcctgtaatcccagcactttgggtggctgaggtgggcagatcatgaggtcaggagatcgataccatcctggccaa

SEQ ID NO: 96248 - DNA, 363 bp, Homo sapiens
cttcctttcaaagcgaatcccattccttctggttaggttaaggaatatggatattacatttttaaaagaataggtaataaataaatttctaaaaatattttatttccatttgtagagtaccctggaagttaccaagagtataattaaaactcccttttgcccaaacgtgtgtgtgtgtgtgtgtgtgtgtgtgtgtgtgtgtgtgtgtgtatataggggtgaggatgagggcaagggcgtggaatcggcattactatatataagattacttacctaaaatgtgctttcaataaatgttgcgtacattgacattattgcccttcaattgccttctagatagagaggaattttagcatgtgcacc

SEQ ID NO: 96249 - DNA, 365 bp, Homo sapiens
gtggctggagatgacaagacattctggatggttgagttgccatagttattgtgttggtttttgctcatctgtgtgggctgatgttccttcagtctttgaagttgctgtcttttggatgttttttccccccctttaaccttctttgtggtttcactgtggtataaagtgagttcagtcaactggccttaattctagtctgctcctgggtcttggaggatcccccctcaattactgtctctgtgccttcatttttccttccttccttccttccttccctttcttccttttcttccctttcttccctttcttcctttcttcctttctttctttctgtttgaggcataatcttactctgttgcccaggg

SEQ ID NO: 96250 - DNA, 352 bp, Homo sapiens
  misc_feature (1)...(352): n = a,t,c or g
ctggagatacagagatgaataacaagtagttccgtccctgaagcagctaaaatttttgtgagggagacagaaatgcaaacaaattgttacagaatgtgagacagccatgtgccacataatgatgtttcaatcagtgatgaactgcataggacggtggtcccattagattataatggagctgagaaacctctatcgcctagtatttactatactgtactttctgttattttattttatttgaccagaagtctcattctgttgcccagtctggagagtagtagtgtgatctcggctcactgaaacctctgccttctgggttcaagagattctcctgtctcagtctcctgagaan

SEQ ID NO: 96251 - DNA, 325 bp, Homo sapiens
gagagagcatggcttcacctgagcccaggagatggagtttgcagtgagccaagatcacaccactgcactccaacctgggtgacagagtgagactctgtcgcaaaccagcctgggtgggacagagtgagactctgtctcaaaccaacctgggtgacagagtgagactctgtcagaaaaaaaaaaaaggcaatttacaaaaaaggatctgggaaaaatttttttttttttttgggggcgagattaatttgggccccgggcccgatatacaacaggctgaatatggaaaagaatcgacagaacaaggactgcttttttgatactctac

SEQ ID NO: 96252 - DNA, 342 bp, Homo sapiens
gagattgtgccactgcactgcagcctggctacatagcaagacttcctcttaaaaaaaaaaaaaaaaaaaaaaaggggggaaaagggctgagccatttgcccttgggggcttgggggaggaaaaggatgtaaacggggaagggattaaaaaccttccttaggagggagggacccctttttccggaaaggctctccggctttgccacagttttaagccaattatcacggccttaaaaaggcttataagccttccaccctttaaaaagggcccttttcccccttgggggaaaaaccccaaagttaactttgggaataaaggttaatttcccttaggtttaaggaa

SEQ ID NO: 96253 - DNA, 377 bp, Homo sapiens
ctggaagaattttttttttcatggatcctgctgattttaatgttggggcttgccatgactgtggctccagtgtctgtagtgcccatcaaggatgacagatgcctagttctgtgttgacaagagttgcaaatgcatattactctgggttttttttttggtttttaaaacaaaagttttgctttgtcactcaggctgaagtgcaggggcgcagtatcagttaaccaggacctttggttcccggtttcaagcgatttttgggcctaaccctcctaagtacctggaattgcaggcgtgcaccaccaggcttggttatagcctgtggttttaaaatgtcattactcacgttataaaggcagggtaaaatttcttacatttgg

SEQ ID NO: 96254 - DNA, 321 bp, Homo sapiens
agatggggtttcaccatactgttcaagctggtctcgaactcctgacctcttgatctccccacctcggcctcctaaagtactgggattacaggcatgagccacctcgcccagccaattccccctttttctatttattggaatagtttcaggaggaatgataccagctcctctttgtacctctggtagaatttggctttgaatctgtctggtcctggactttttttggttggtggtctattaattattgcctcaatttcagagcctgttattggtctattcagagattctacctggtttagtcttgggagggtgtatgtgtcc

SEQ ID NO: 96255 - DNA, 311 bp, Homo sapiens
gaatcttgctctgtcacccaggctggagtgcaagagtcagggtttcaccatgttgatcagactggtctccgtctcctgaccttgtgatctgcccgcctcagcctcccaaagtgctgggattatgggtgtgagccaccatgcccagcctttcttacattcttatctaagacccctaatactcataaaaggggaccagtttaaatatgcatttaatttgttctcttgttgataatgcttactaatctgtttattatacatgattgaaatattggatattaggtcatggtttttcatttggtaatggaaaaaaa

SEQ ID NO: 96256 - DNA, 301 bp, Homo sapiens
aactgggccaccaatgctccacaaatgacgtatacacaaatatgagaaaactagggtgaaaggaaacaaactgtggtgcctgccagccctttaacacagcagcttctactcctctgtatacggtctaggtcaggccactggcagggttgggcagcccactcatttttttttttttttttgaaaaaagtttggcttttgttgcccaggctggggggcaaaggcataatctgggttaattgttacctttgcctccggggttaaagggattctcctgcctaaaccttccaagtacctgggatag

SEQ ID NO: 96257 - DNA, 334 bp, Homo sapiens
gagtagcaccatgagcttcaataccctgaaatggaaaaatcacattataaaaatctatttatagctgggtgcagtggcacacacttgtagccccagctactcaggagcctgaggcgggaggattgcttgagcctgggaattcgagtccagcctgggcaacatagtgagaactcatctctaaaaaggtaaaaattaaaaaaattaagattaacaaaatccaattaggacctcactaaaaataaaaaggtggaggggaaaatggaactggaattaactgctagatcattctggaaatctttaacaagtaagctaaactagagatcaagaagactaa

SEQ ID NO: 96258 - DNA, 330 bp, Homo sapiens
ccaggatggtcttgatctcctgacctcatgatccactcgcctcggcctcccaaagtgttgggattacaggcgtgagccaccgcgccctgccccaatcaacaaatgtttactgagcatctaccatggaccaggccctagtctgggcactgagggggagaaaggacaagactacattccagccatcgagcagctcacagaccaatggaggaggctgacgtggacaggctgttactgtgctgcagtagctgaggactcgatgggtgtggtgtggccactcttgccaggttatgaagcagaaaaggaggcagggagatttcactgagggctcag

SEQ ID NO: 96259 - DNA, 338 bp, Homo sapiens
aggcaggtaaataaaaataaattcatgagaatttaacactctaagcaaatgtgtttggatttactagctcttttctctctctctctctctctctctgtgtgtgtgtgtgtgtgtgtgtgtgtgtgtgtgtgtgtgtctgtgtgtatctgtctgtcttttttatggcagcccaatttgcctacattttatgcaccccgatacattatcagaggaatccttccactttctgcagataatttccaaagagctccttaaatgttaaaacgcaagaagatgtgttccacacataaaatatgttggccaaccatccagcattcttttcatagtgctgccaatat

SEQ ID NO: 96260 - DNA, 307 bp, Homo sapiens
atagggctcggcgtggtggctcacacctgtaatcccagcactttgggagtgcaaggcgggcagatcacctgaggttgggagtttgagaccagcctgacctcgtgatccgcccgccctggcctctgaaagtgctgggattaccggtgtgaagaagaacttaatagctgagctctgggaagtgaagagctgcatcttactcatattcatatcccttgacaaagtttgagacaaagagcaagtacaaaacaaacatgatgagtatatgaaagacatacaaaggtattgtttttatcttaattaagcggcg

SEQ ID NO: 96261 - DNA, 321 bp, Homo sapiens
aactggaagcactgctttgcacagggaagtagcaccaggagggggtaaagaaagagggactttggagccccaagattggcaaaaactatagctaatgatagaggtgaactgtaaagtctagataatggggaaggagaggtgccagagcaagaagggattctcacagggccctacgggtcagtcctgaattggctttactagaactcaggcccagcacaatggctcacatctgtaatcccagcgctttgggaggccgaggtgggtggatcacttgagatcaggagtttgagaccaacctggccaacctggagaaaccctgcg

SEQ ID NO: 96262 - DNA, 359 bp, Homo sapiens
gaaaaatacctcaaacaccaatcttaggttttccaatagtaatgttatctgtaggagcaagtgggggaggttagtgatattgtggcctctggctacatgacttctgagccataatttctaatctagtggctaatttgttggttttacaaacgcagtctggttcccaagcaaggagggagtttgtttcagggagagtctattaccgtctttgtttgtttttttggtttgttttgttttttgagtcagggtctcgctctgttgcccaggctagagtgcagtggtgcaatcgtggcccactgcagcctcgaccacccaaattcaagccaacctcctgcctcagtttcctgagtagcctggac

SEQ ID NO: 96263 - DNA, 357 bp, Homo sapiens
catttttgaggcttaaaaaagcacagacaagtctgctttgcctacctcacaaagttaccattgatacaatgagattaggtttataaaaactgagaaaattctgtacacatgtgagctgccactgctgatcctcatgagatagtcatgtccacattttagtagtatgatgtcctgatttcagtctctgatgaagaataaggaagtggctttattattattattactatcttttaagatggagtcttgctttgtcgcccaggctggagtgcagaggtaccatcttagctcagtgcaacttccacctctagagttctagcagatctcctgcctcagcctcccctgtggctgggattacag

SEQ ID NO: 96264 - DNA, 375 bp, Homo sapiens
  misc_feature (1)...(375): n = a,t,c or g
agaaaaagacacctgataattaaaataaaacaaatgtaaaagaggtttacaggtgctgtaatagccagagaagggccacaacctctgaaaggattttggaatatgtcactgaaaaggtagtgcctaacctgaatcttgaattaagagtgttttatattggagctgtctatacagagagacatgggaagggcatttgagatagagactagaggattgccaaggcatagttatgtgagaggaagtgttatattcaaggaaagataggcatgtggcaagttattctagaaagtgatggtaaaggtcgggcgcagaggctcacgcttgtaatcccagcactttgggaggccgaggcgggtggatcacgaggtcaggagn

SEQ ID NO: 96265 - DNA, 355 bp, Homo sapiens
ctggaagattgcttggggccaggagttcgagaccagcctggctaacatagaccttgtttctacaaacaaagtaaaattattaccagggtgtggttgcactcacctgtggtcccagctactctggaggccgaggcaggaagattgcttggggcctggtctcaacctcctgccctcaagcaatcctcctaccttgactcccaaagtgccaatactattgatacttacttttgttgctcagattattgcagctgtggccattgagagctctttcaagttggcttctgtatccttttcccccaatctttttgttgtttggccacttccttactttctgacactacaagttactctatct

SEQ ID NO: 96266 - DNA, 389 bp, Homo sapiens
ctggaccagaggtgatgcattttcccctgttcaacatagatgcctgtggaggtaggtgcaggggaggagcaggtgagaagccacctgtattagtccatgctcacactgctaatataaacatacctgagactgggtaatttacaaaggaagaaggtttaattgactcacagttcagcatggattgagaggcctcaggaaacttacagtcatggtggaaagcgaaggccaagcaagtcaccttcttcacaaggcggcaggaaggagaagtgagtgccagcagggcaattgccagatgcttataaaatcatcatatcagccgtgcgcggaggctcatgcctgtaatcccagcactgtgggaggctgaggcgagcggatcacaaggtcaggag

SEQ ID NO: 96267 - DNA, 385 bp, Homo sapiens
gtcttaatctcttgttgcttctgaaggtgctttgaattcagaatctttatgtcaaaatagaggatgaaggaagctgctttcagtgattctcagatcttacatagatgcaggagcgtgcacacacacacacacacacacacacacacacacacacacacactcttctgacccgcagaatgcaaaagcagctgccttcgtacacactacatcagagtccggcagtggtttaacactcattgccctgcctcttttatttaagccagagaaacaatgtcagctggatgcagacagctctctgccatgaacagaagtgtttttgcaggctagcccaagcatgtcacagagagttggggggaaaaatggatttaccctttgcaaattaata

SEQ ID NO: 96268 - DNA, 382 bp, Homo sapiens
  misc_feature (1)...(382): n = a,t,c or g
gagtgatattggtcatggtgcccatttcattggtggatgtcactggtggattaaatgagttactatatgtaaaactttagaacagctcctggcctgtggcaagggctctataggtttaattagtcattaaaattaaaatttgtatgttgtaggtctaaagatggctaataaaaaatcaccccacccaggccagaatccaagttagaggactgcttgacagggactgccagacacagacttggttgtgggagtcaggggtgcagcctctggctaccacccccaggaggcattcagaaatggggggttggccgggcgcagtggctcacgcctgtaatcccagcactttgggtggccgaggcgggtagatcacttgaggtcaggn

SEQ ID NO: 96269 - DNA, 378 bp, Homo sapiens
actgcatagggtcggcgtggtggcttgagactgccagtccgagcaactcaggaagctgaggtgggagcatcactggagccagggggtttgaggctgtagtcagccgtgatcacaccactggactccagcctgggtgacagagcaagaccctgtccaaaacaaacaaacaaaaaactacaacacacaccaaagagcaggggaggtttggagggagatcaactgtctctcgacagagcaattaacagaactatattcagaaataacccagatattggcactgtcagtcaggaattaaaaattattataatatgttaaaagttctgtaatttcagcagagacacagatctctggaggaaaaattttctaggcctaaggtag

SEQ ID NO: 96270 - DNA, 376 bp, Homo sapiens
gggtttcaccatgttggccaggatagtctcgagctcttgacctcgtgatccgcctgccttggcctcccaaagtgctgggattacaggcgtgagccactgcgtttggcctagtttgccatttttttaagtagactgtttctaatgttaggtttaaatgtataacaatgtggtctctttttctttctagttactggaccattatcagaattgcaaatagcctatgtatgcagagaaaccttacaggtactatattttcttaatatagttagaaaggcaattctaggcaatattttcttaatgtagttagaaaggcaattgcctgacaattgataactataaaatgatagtctaccttaaagagaaagggtaaaacaaa

SEQ ID NO: 96271 - DNA, 395 bp, Homo sapiens
ctcctcattgaacacattctaatcgcaatggcattactaatacttaccgaacgaaaaattctaggctgtatacaactacgcaaaggtcccaacgttgtaggcccctacgggctactgcgacccttcactgacgccataaaactcttcgccagagagcccctgcaacccgtcacatctaccatcaccctctacatgaccgccccgaccttagctgtcaccatggctgttctactatgaacccccctacgcatacccaacccactggtcaaccatgacctaggcctactatgtatactagccacctctagcctagccgattactgaatcctctgatcacggtgagcatcacactcaaactacgcgctgattggcgcactgcgagcatgtccccatac

SEQ ID NO: 96272 - DNA, 365 bp, Homo sapiens
ctgtccgaattgacaatgcggccgtatgcctattatattgagcgtgggctgaattcatatgggcactggcaaacctcattattcgacccgacctggaccacccaggcaaccttctaggtaacgaccatatctacaacgttatcgtcacagcccatgcatttgtaataatcttcttcataggaatacccatcatatacggaggctttggcaactgactagttcccctaataatcggtgcccccgatatggcgtttgcccgcataaccaacatacgcttctgactcttacctccctctctcctactcctgctcgcatctgctatagtggaggccggagcagcgggcacgtgaggaccccatctgccg

SEQ ID NO: 96273 - DNA, 398 bp, Homo sapiens
caccatgttggccaggctgctctcgaactcctgaccttgtgattcacccgctttggcctcccaaagtgctgggattacaggcatgagccaccgttagttatacttttaaaaccagccctgcccttcccaaaatgatgagctgaccttaaaatgtagaatgcatggtttgatcatacttctgtactcttattttgcatttgctgttattttcacaccaatctgaataatattttggcttagtgtgttgttgataaactgtgtacccactgttatacagtgcttgactgtgagagaaatttatatgtcaagaaaatcaaggacaaatatatatatatattacatggatgtttgaaattgtataaaactgttaagttgtggagaacaaaaaaaggaacatt

SEQ ID NO: 96274 - DNA, 361 bp, Homo sapiens
atcacttgaagttgggaggcggaggttgcagtgagccgagatgacgccattgcactccagcctgggcaacaaaaatgaaattccatctcaaaaaaaaaaaaaaaaagaaaaaattttttataaagggggctaatacttaaacccttttacaggggagaaacgaacactggaactcacgcctgtaatcccaacactctgtgagacagaagcagacttatggcttaaactcaggagaatagacaacgtcatagaaaataaggaatatcgtagtgtatagaaatataataataaaagagtttattataaaagacatcggaaaactcgatcaaaaatacagaaatttgtgatggatggaaaacaa

SEQ ID NO: 96275 - DNA, 382 bp, Homo sapiens
gagctataaccttccattagggagctgccaggtgcctgtgttgggggcagctctccccagttcattctggtggtgcagcatggccttgcaggaaactctttctgttgcttctgagccctcctgatcccgggaagcacagagagacctaccatgcagagtgaaccccagggctctcagctcactcggcccctccccacctgtctcctgctgccactgccttctcttccttttcctctgcttaataagaaaaagtttaaaatgttagcttgggctgggcatggtggctcacacctgtaatcccagcactttgggaggccaaggcaggtggatcgtttgtgcccaggagttcaaggtcagcctgagcaacatggtgaaaccccat

SEQ ID NO: 96276 - DNA, 381 bp, Homo sapiens
  misc_feature (1)...(381): n = a,t,c or g
ctggtcacttatatgctttaacatttttcttcaatagtcaaatctgtttgtttccaagaatctataagacttgtaaaaagagtttttggttgcctttcctgaatttagtaagcctgtgtgctatagagggttacaaaacaaaaaaagtacccagtaatgtgtaaaagggaatttttatccatcaccaaacaggatttattctaagaatgcaaggttggttaaacatatgaacctcaattaatggaatataccatatcagcagaatagaggacaaaaaccacaaaaccatgtttatagatgcagaaaaatggtttcacaacatctaacacccattcataatagaaaacattcggccaggtgtggtggctcacatctgtaatn

SEQ ID NO: 96277 - DNA, 361 bp, Homo sapiens
aaaacaataataaaacttcacctcctaatgtcggtgaaaagccgctctccctgttgagggttccaaaacaataataaaacttcacctcctaatgtcggtgaaaagccactctccccattgaggtggatcccagggccttcctccaccctgactcctcacacaaagcagccagtcttcatgaatgatgatgataatggtggcagcggtggtggtggtggtgatggtagcaatagtagctaacatttcttgaggtcttactgcaggcaacgcctagctctttgtatttgatctactaaatgtgatttaatttcctcagtggttctctgatggagcagtttaacaacatagcaacataacaagg

SEQ ID NO: 96278 - DNA, 377 bp, Homo sapiens
gacttcaccatgttggccaggatggtctcgatctcctgaccttgtgatctgcccccctcggcctcccaaagtgctgggattacaggactgagccaccattcccagccccaaatgaatttctgttacttcacagccttttgtcaaagcattatgccttaggccgaccccacacccccagggaaaggaaaaaagcctcaggcatccttagatgactgccctcataaattgttctgtgctggctttgaaccctttcaagatgtcctataaaacaaggacatgccaattcttacttcaggtctgcctgcaatctaagtctagctcctagagtaagagtttgttagatttcacactgatgatgcttgtattgatgacaaaga

SEQ ID NO: 96279 - DNA, 376 bp, Homo sapiens
cgatctcttgacctcgtgatccgcccactttggcctcccagagtgctgggattatagacgtgagccaccacgcccagcctcatatgcatttattaaatatttctgtccagccctctcatgcttttggtgcattgagacagggccttatttaatctttgcatacctcagagaagaaagttttgtacgtagtaggacttgagagaagactgcttagggaagcttctgggaagctctgaagaacagtggtgaggaacccagctctgaagttagagctgtgattgaatttgagctgtgcaagtgacttcccttctctaagcactggattcctcatttggattgttgtttgagttaaatgagataatgcatatgaaatgct

SEQ ID NO: 96280 - DNA, 356 bp, Homo sapiens
caacctcctaacctaaagtgatctccccaccttggcctcccaaagtgctgggattataggcgtgagccaccatgcctggcctgacatttcttatagtttgtacaaatcactcagtatgttcttgccaaatagtacacactctgcaagagaaacacaaagagaagcatcctccaggagccaggataaggtgtgctggatagagagggttctgctttgctagtcaataattattgattataaggaaaaagttaggcagtcccagtcaaaatggcgattgttaaaaagacaagaaacaacagatgctggtgaggctgtggagagataggaacgtttttacactgttggtgggaatgtaa

SEQ ID NO: 96281 - DNA, 366 bp, Homo sapiens
catttctgccattgtgaatcagggccactgctgttgacgcatctagcttttcaatgcctgcattaaccttgttgcagtgagctgagatcgtgccattgcaccccagcctggccgacagagtgaaactccattttttaaaaaaagaaaaaaaaatggttaggggaattaaaagaaaaacaaaaaaacatggcatgtgctaatgatccatagcctggacaccctctctccattatcctgcaatggatttggggcgaagataccaggagaggtccaatgcacgaagccttacatgggaagagtggagacggggtctatgcagttcgtttattgactgcctactaggtgtcatgttctggggcgctcagg

SEQ ID NO: 96282 - DNA, 355 bp, Homo sapiens
cggcacgagggcttgaacctgggaggcagaggttgtggtgagccaagttcgtgccactgcactccagcctgggtgacagagtgagactctgtctccaaaaaaaaaagaaaaggaaaaaagaaatccgctttaattttaattttcagcaacggggtcttattctgtcacttaggctgaagctcgggggtgtgatcatagctaactgcaacctcaaactcctgggctcgagggatcctcttgagtagctggaaccgtgggaccataggtgtgccaccatgcccagctagttaaaaatttttttttatagagatgaagtcttgctatgtttcccaggctggtctcgaactcctgggcg

SEQ ID NO: 96283 - DNA, 390 bp, Homo sapiens
cccagctactcaggaggctgaggcaggagaactggggctcagtgggcttaggcaggagaactgcttgaaaccggtaggcggaggttgcagttagccgagattgcaccactacactccagcctgggcagcatagtgagactccatctgaaaacaaaaaacatacaggaggccaaatgagcattgctgttcccctttgatgctgagaaactcactccagggctcccttgatgttttttatttgtgtttttttattttgtattttattttatttacttatttatttttttgagatggagtatctgggactacagacatatgccaccacacctggctaatttttgtatttttagtacagacagggttttgccgtgttaccatggctggcctcaa

SEQ ID NO: 96284 - DNA, 322 bp, Homo sapiens
  misc_feature (1)...(322): n = a,t,c or g
gttggccaggctggtcttgaactcctgacctcaagtaatccaccagcctcgacctcccaaagtgctaggattacaggcatgagccaccacactccgcctacttctccattgaagtgctctagttttggtaaaatcttctccttgacttcaggaccctctccacatttatccccagtctataactcgcatatttcgtgttttcaaacagaaaaccgtaattcaggagtgaacagcatcctctgtaaggtgtcacaggagcagcctganatccattaggcagtcattctgaagctgtggtgaaatcgaagggagctaatggtgc

SEQ ID NO: 96285 - DNA, 376 bp, Homo sapiens
ctgcatagggctcggcgtggtggcgggtgcctgtagttccaggctgagacaggagaatgacatgaacctgggaggtggagcttgcagtgagacgagatcacaccactgcactccagcctgggtgacagagtgagactccatctcaaaaaaaaaaagaaaaaggaaccggtggggagggactagattttccaactagtaaatgaggatttcctaataaatttgggagctagtagcttttcaagctgcttaactattaccatgtcctacttacaaaattattttctccatggttcaccaaattctcagagaggaaaatgatgtcgttgccaagggaccttttccactcaggttcgttaatacactcacccttcagggg

SEQ ID NO: 96286 - DNA, 376 bp, Homo sapiens
atctagtgaagaatttaactgctaacaaggaagaatttggggtcaccatgttggccaggctggtttcgaactgctgacctggtggtccgcctgcctcggcctcccagagtgctgggattacaggcgtaagccaccacgcctggccaagaaaatcaagatttacctggtttatgtgttgaccagctatacacagagaattctagatttttttctaaaaattattatcaaacccccaatttcaccagtagaaaaagagatcttaagatttctgtgtttttttttccagcataactcagttacttatggctgggagaaaatatgtagggagataatctaatacctaattcgaaggaagaaaatatctaattctaagtct

SEQ ID NO: 96287 - DNA, 358 bp, Homo sapiens
ccaaaatgtcttagagttgcgggtgctcgtcctagacaaaagagataactgaactatctcaattaaaagtaagaaatggaaaaacaagcaaggtgaatacaataaatggtgcatggaaaactggctagccatttgcagaagattgaaactgtgcccctatgtattagtccattcttgtattgctataaagaactacctgagactgggtaatttataaagaaaagaggtttaattggctcacagttccacaggctgtacaggaaacatggctgagaagcctcacggtagaaggtgaaagggaagcaggcccgtcttacatggccggagaaggaggaagcggggggtaagatgccacact

SEQ ID NO: 96288 - DNA, 335 bp, Homo sapiens
  misc_feature (1)...(335): n = a,t,c or g
cttgtatgcagcaaaagttcctctgcaaaaggcctgcataaggaccttctcttatatttcttttttcatttttttttttttttttttttttggaaaacaaagttcctttgggccccccgggttgaaggcaagggggggaaccccacttattggaaccccccccctcggggttaaaaggaattttttgccccaattttccggaaaaccgggaataacgggctgcccccccttgccccaaaaattttggttttttaaaaaaaaacggggtttaatattttaacccgggggggttccaaattccgaccctaagggaattggcccccctaaccccccan

SEQ ID NO: 96289 - DNA, 341 bp, Homo sapiens
ctcatacctataatcccagcatgttgcaaggctgaggtgagaagattgcttgagcccaatagtttgagtctgcagtgagccgtgattgcgccactacaccccagcctacacgacagtgaaaccctatctcttaaccagccgtggtggcacacgcctgtagtcctaggtggcacatgccactgcactccagcctaggtgacagagcaagaaagaccctctctcaaaaaagaaaaaagaaagaaaaagaaagaggtgacacatgtatgcatatttgcttttgttacctactactgtaatgcttattgacatggttaaaggaacctattactaccttgcctgaa

SEQ ID NO: 96290 - DNA, 340 bp, Homo sapiens
gttaacaaagtgtacattcctaaatctaataaacccctcctttagaaaagcaatcaggctccaatcataatgttctatttgcattcaaggaaagccaataaaaatgtcccaatgaaacatttataataaaagatccttctggataatcctaaagtccaccattcttgtttaaatatgaatttgtatgttacttgaagttgttaaatagtacagaatgactgtattcccggccaggcatggaggctcacacacctgtaatcccagcactctgggaggccgaggcgggtggatgacctgatgtcacgagatcgagaccaccctgggcaacatggtgaaaccg

SEQ ID NO: 96291 - DNA, 341 bp, Homo sapiens
caaactatgacaagtagatggctgtggttagaggactttctctcaatcagttgctccatctcagagtcatatggtgagaggtggcttgcaactgcctgttgcctgccattggctgctttgctagtgttacttatgtttgatcctcagtacttttgtgatttgaactttgagtattaaatgaaaatagctcattttaaaattttattcattgatttttttgaaacagggtcttgatctgctgcccagactggagcgtcatggcatgatcatagttcactgaagccctaacttcccagactatacgatcctcccacgtcagcctgccaagtagctgggactat

SEQ ID NO: 96292 - DNA, 326 bp, Homo sapiens
ctaaactaaactcttgattttctaccccaccacacctgatcttcccccattcacaaaattgcccaggtccaaaattttggtatcttcttgactctttctcatatctcaaacccaacgtagtaataacttgtcagccctacttccagaatgtttcctgaatccagccatgtctttccacctccatttctgtaattccagttactccggaggctgaggtgggaggattgcttgagcacaggaattcaaggttacggtgaactatgatcgcaccagtccactctagccttggtgacagagcaagaccctatctctttaaacaaaaaaga

SEQ ID NO: 96293 - DNA, 360 bp, Homo sapiens
gaagcacaacatagccaggagtgaagagatggcagatgttaatttcttaaaattttccttttttttttttttttttttggaaaacccccctttggaaaatcccaattgggaacttttggggaggggccgggttgttgggtgggggtttttttcccccttggttaggggaaaccccaaaaaacccctttaaatgggcccttttggcccccagggggggaaaaaacggaacctttttttggaaaagggggacttgggggaaccccaaatgggaaaaacttttggggaccgggtggtttgcccaggggcccccaacctggccttgaaggccctgggtttgttttgtaaaccggcccgaaattc

SEQ ID NO: 96294 - DNA, 329 bp, Homo sapiens
cacaggcatgatcatgtacactgcagcttacaactcccaggctcaagtgatcctcccgccccagcctccccaataactaggactacaggcatgtgccaccacacccagcaagtttcccttagttctctgaaatgttttaagactccactcaaatcttcttaaacagtcttaaattttcatcatgatattacctagtgatttttttttttaagatggagccttgctctatcacccaggatggagtgcagtggtgtgatctcagctcactgcaacctctgcctcccaggttcaagcgattctcctgcctcagtctcccgtcgacgcggccg

SEQ ID NO: 96295 - DNA, 343 bp, Homo sapiens
ctcggagtctgaggtgggaaaatggcttgaacccgggagggggaggttgcggtgagccgagatcctgccattgcactccagcctaggcaacaagaccgaaactctgtctcaagaaaaaaaaaaagattatgcttctaaaaatatggcctattgcatatggacactggtttttaaagcttgaatttaaaaagaattttttgtaataggttttaaagctttttctttttcttttttataatttttttgaaatggagtctcactccagcctgcgcgacagcgagatgccatttcaaaaacaacaccaaaaaaactccctactaaaccagaaaagtgatggggacgg

SEQ ID NO: 96296 - DNA, 342 bp, Homo sapiens
gcgtggtgatatgcgcctgtagtcccagctccttggggagctaagttgggaggatcgcttgatcccaggaggttgaggccactacactccagcctgggtgtccgagctaaaaaaaaaaaaaattaaaaaaaaacattaaatcacatctttcaattcagggaattcgatgagatacatcattcatcaatttttactgggagtctatttaggggaaaacattatcaacgatacagatgtgagaataaagggttaaatgagaaactacttaaggaacctagcacattgcctggcacccagcaggtgctcagtaattgggtttttaaagttctgaacttaggattc

SEQ ID NO: 96297 - DNA, 346 bp, Homo sapiens
ctcgatctcctgacctcgtgatccgcccgtctccaccacccaaagtgctgggactacaggcgcgagccaccgcgcccggccgactacaaatattttttaaaagaagttgcaagcttaattgtaaaattatatcttttttgcaaacttaattttgaataaaaacataaataaaaccaaaaacacacacacaaacagtggtcgtttctgggtggcgaaactgcaggtgccatattttcttctttgtatttttacatagtttccaaatcacctctataagtaatttaaaaatcaataagaactatatatttttaaatacagtttaatcaatagaaggctgtctaagaag

SEQ ID NO: 96298 - DNA, 344 bp, Homo sapiens
caaaatgaacaaaattaaaacctttagctaaactgaagggaaaaaacaaaaatatcttaggactcaaatgactgaaatcaggaataaatgcaggaacattattactttatcaaaagaggaaataaaatgattataaggaaatatgtacaattgcacgccaacaaattagacagcttagataaaatagacaaattccaagtcaaaaaccaccaaaactgactctaaaagaaatagaaaagttggccgggtgcagtggctcacgcctgtaatcccagcactttaggaggccgaggcgggtggatcacgaagtcatgagatcgagaccatccctggctaacatgttg

SEQ ID NO: 96299 - DNA, 384 bp, Homo sapiens
  misc_feature (1)...(384): n = a,t,c or g
ctacacaaagtaacaactgtcttgagattcttaagtaaatttcacatccttgttttatacttttactatacatgtgtacatgtatctgtaagtgatatgtggtgttggtttttgtattaaatttttacagacatgtataacgctgtctttcaatagcttgatttttttaaactcagtatcaagtttttgaggtgtatatgttgatgcgtgtattagatatttattcctgtttttatttattgttttttcttatatttgatatgtctgtttctttcttatttcttatttaatatttatgtcatgcttttattttatattttatgtattatttatttctatgttattttcnnnnnnnnnnnnatattttccttgttaatttaatgt

SEQ ID NO: 96300 - DNA, 293 bp, Homo sapiens
ttttttggtttggtttttttaaaaaaggttaaataaatttaaaatttaaaaaatttatttggaaaaaatttgaaaaaaatttttaaaaaattgaaagggaaaccaaaaaaaaaattttggttaattttaaaacttaaaaagggaaaaaattttggtttttaaaaaaaagcaaaattcaaaaaaaagccaagggaaatttttaaaaaggaatttgaaaaaaaaaaaatttaattgggaaaaaaccaaaattaattgaagttttcatttaaatagatggggaaaaaaaaaacaag

SEQ ID NO: 96301 - DNA, 139 bp, Homo sapiens
aaaaatacaaaaattagccaggggtggtggccgacgcctgtaatcccagctactcaggagcctgaggcaggaggatcgcttgaacgtgggaggcagaggttgcagtgaaccaagattgcgctactggtcgacgcggccg

SEQ ID NO: 96302 - DNA, 349 bp, Homo sapiens
cccttatcccacggggacaagggagtactgtggtcttaccatacaatccagcaacctcaatctttggtaatgacctaaatgagataaaaatgtatggccacgcaaaaacctgcatatggatgttcatgacatcttcattcattattgacagaactcggaagcgacagtgatgttcttcagttcgtgaatggataaacaaacagtgatgcattcagacaatggagttagtgtttggaagaaacttttttttttttttttttttttttttttttttttttttttttttttttttttttggggggcccccccccccaaaaattcaaatttttaaagaaataaacccacaacc

SEQ ID NO: 96303 - DNA, 346 bp, Homo sapiens
cctggatatacaatcgtgtcatgtgcaaacaggaacaatttgacttcctcttttcctaattgaataccctttatttctttctcctgcctgattgcctaagcatcttctgaacagctcccagtgctcccaagatagaagaactttaggagaaaaggatcaacttcctttcttctcaactaaacatcccagctcttaaacctgccactacctattattaaagctatatttggaaatggtaaatttaactcataaacggttaggttgtcagtttatctgaaaacattccaaagcacagagctatgtatacctggattaccatgcaaggaaacatcaaacatgaaagggg

SEQ ID NO: 96304 - DNA, 361 bp, Homo sapiens
ggtttcgccatgttgcccaggctggtcttgaactcctgagtgcaagcagtctccccaccttggcctctcgaagtgctggaattacaggcgtgagccactgtgtccagccttagacttggtttttatgatacctcctttaagatagcagacatccaatcatgtttctcttgggtcttgtactattgcctgcaaagtgctgagctttaacttcatgaagtttcagcctgactttataaaatgctgcttcttttttcccctcagcttatttgaagctctccaagggtgttgtgtatctctagagtttttcagggattctacatttcgtgaaataacaactgatgagttccttgggctaccaaag

SEQ ID NO: 96305 - DNA, 387 bp, Homo sapiens
cctgaacttgcttgtttgttctacgagagtcgtttggtggaatccttaggattttctacgtacacaatcatgtcatttgcaaattggataatgtttctatcaaatctatgtgccttttatttttctttgtggcctgtgttgactaggactttcagtactatgttgaacaacaatagtgaggatggatattctttcttgttttcaaccttgagggaaaaggattgtctttcctattaagcattacgttacttgtaagttttttggtaaacgctccttatcatgtcgaagaaggcccttttattcaatgcttgctgggaggttttaaccatgactgactgctgattcttctcccctttttcaaacgagttcttactctggttactcgcg

SEQ ID NO: 96306 - DNA, 329 bp, Homo sapiens
tgattctcctgtctcagcctcttgagtagctgggattataggagcatgccaccacatccagctaattttttgtatttttagtagagacgaggtttcaccatgttggccaggcttgtcttaaactcttggccccacagtgctgggattacaggtgtgagtcaccatgcccagccattcaattattttttcatatgaacattttttaaatataacaaatgctgaaggaatagttaaagaatctcttatgtaccccccatgtggattcaataattaatattttgccacgcttttgtatgtccgtatccatgtgtttattttgtgtgctgagg

SEQ ID NO: 96307 - DNA, 380 bp, Homo sapiens
ctatgttgcccaggctggtgggaaacggctagactcaagcgatcctcccgccttagcctcccaaagtgctgggattacaggcatgagtcattgcacctggcctttggttttttcttattgtagtattttggtccttatttaatggtttatgttttttcttttaacctatatgacttctctttggtttactctctttatgggacttcaatttgatgcgtatttgagcttgacattcaatccatcatatctctcacgtgacgtctagtttccattctctcatctctatgtgctacaatctcatgcatatcttaagctatattttgccgagcattcattctatgttcagctgcgtcataatgaggaggctaatcgcgtcgtgc

SEQ ID NO: 96308 - DNA, 299 bp, Homo sapiens
cttctgcaagcctttaaaatacaaatttaaagatttttaaaaaccaatataaaaagcagttcatgtaaacatattcttcattaccaaagtgcatctaactatggagacacaaattgtttctctctctctctttccttttccttccttccttcatccctccctctctctgtcttcctttctttaaagagatagggtcttgctttgttacccaggctagagtgcagtagtacaatcatagttcacatggcctcaaattcctggactcaggtgagcctcttgcatcagccttgtgagtagct

SEQ ID NO: 96309 - DNA, 320 bp, Homo sapiens
gttcttcttcccatctgacatctacaatctcttcactgggtctgtactccatagctattttaccactttctgaaataaagttagcaaggatgaattcagaatctttttcattccaaaacttcctgcatataatggtagcaacccacaatgagacattcttttagtttctaaaagcaggaaataagcattttcctgaaagtttcctcatctcttcatcatacacttcgatttttgtttttcttttttcttttagacagggtctcactctgtcacccaggctggagtacagtggcactatcatagctcactgtagcctggaa

SEQ ID NO: 96310 - DNA, 99 bp, Homo sapiens
ataatcttagcatactcctcaattacccacataggatgaataatagcagttctaccgtacaaccctaacataaccattcttaatttaactatttatatg

SEQ ID NO: 96311 - DNA, 361 bp, Homo sapiens
gaaactcacacttttcttgggctatcacatgaaagtttttactgtagtcaagtatggaaaatctgaaacaaccttcacataacctacaaatgtaacttttcttcaatgagctcaaaacatagatatttaattttaattcctctttagataatacattggccgcacatgtacttggaattttaatatttaagtttcctttctgagtgaaaaataactcacttttttcttttttttttttgaaagggagtctaattttgtcacccaggctgaaatgcaggggggcaatctggtttaattgaaacctcggcctccggggttaaagcatttttactacctaagtctccaaagtaccgggaactac

SEQ ID NO: 96312 - DNA, 333 bp, Homo sapiens
aaaaatagctttcaatattttagtagcaaatatacaggaagaataagttataacaaatgagggagaagtttaacattattatttctttttttttttttttttttggaaaaaaattttctttttgtgcccaaaatgggatcccggggtggaaatttgggttaatggatggtccaacttccgggtttaagggaattttcaaccttaaccttttggggaactgggaataccgggcattgcccccaacccccgttaaattttggggttttaagggaaaacgggttttaccattttggccagggtgggtttaaaattctggccttaggggaattgcct

SEQ ID NO: 96313 - DNA, 364 bp, Homo sapiens
attttgtttatccattcatcacttagtggaaacaactcaagtatccaccaagtgatgaatggataaacaaaatgtggtgcatccacgcaatggaatatttggcaataaaaaggaacaaagtacagttatgtgtcacttaacgatggggatatgttctgagaaatgaatcattaggcaagtttgtccgtgtaggaacatctgagtgtacttatgcaaacctaagtgatttaagctactacacacctaggctatatggaatagctgatggcagggtcgggggaggtggagatggttaatggataccaaaaaaaaatagagaaagacctactatgtgatagcacaaccaggtgactatagtcaacaa

SEQ ID NO: 96314 - DNA, 338 bp, Homo sapiens
cttaaatcagtatttcagtaggaaaaattcttagaaattaaactgtgagggcaagcaattgtgaacatttacattttaataagtaccaacaaattaccttaaaacgtgtaccgatggatactcttagtaaaatgtaagagagtgattcactacattcttactagctcaggcattatcaatttttttttattttaaattactgcctaagaaatacagtcatatatcttgttcttttattttaaatttctatttgagaagttatgcacttttgtttgtttgttttttgagacagagtcttactctgtcatccaggctggagtgcagtggcacaatctcag

SEQ ID NO: 96315 - DNA, 130 bp, Homo sapiens
gggtttcatcatgttagccaggatggtctcaatctcctgaccttgtgatccacccatctcagcctcccaaagtgctgggattacaggcatgagccactgtgccaggccaggtagagggtcgacgcggccg

SEQ ID NO: 96316 - DNA, 368 bp, Homo sapiens
gcggaatcgggggtatgctgttcgaattcataagaacagggaggttagaagtacggccttggtgacaaaatatgttgtgtatagttcatgggagagtgcgtcatatgttgttcctaggaagattgtagtggtgagggtgattattataataatgtttgtgtattcggctatgaagaatatggcgaaggggcctgcggatctccatattgtgcctatgtataccatgatgacacttttaatggcctgattcttgagcattggacttcttcattttccgtgcggcagtttggagctcggatatactatctatcatgattgcataccactaatctgcctcatccaatccaccctatgactgaagttttacg

SEQ ID NO: 96317 - DNA, 325 bp, Homo sapiens
gtttctccacgtttgtcaggctggtctcgaactcccgacctcaggtgatccacccgcctcagcctcccaaagtgttgggaatataggcctgagctactgcgcctggacgatatttgttttcttactgaattttaaaaattctttggatattcaggatatttctcttgtcaattaaatgtttcttttagactaatatgcatgtgtgtgtgtcttgtctttttatattcctaacagtgtctttcatagaacagacgttttaaatttctttcttttatgcatcatggatcatgcttttgatgtcatttttcttcttttttttttaaca

SEQ ID NO: 96318 - DNA, 322 bp, Homo sapiens
gaacagacactttacaaaagaaaacatacaaatgcccactaggcacaagaagagagaccctcaatcatcactagtcatcagggaaatgcaaacaaaaaccaaggtgagatactacttcatacttactagaatggctaaagttaaaaagatcgacaatactacgtgttaataaggatatgaaaaactgaatagccccaaattgcaaacaaccaaatgtcctatttttgaatgggtgaacaaactgtggcattcccaaattgtggaatacttctcaggaattcaacatgcatgaatcccaaagtcattatgttaagtgaaagaa

SEQ ID NO: 96319 - DNA, 347 bp, Homo sapiens
tgggcttgcagtttaattagaacgccttagttcctggaacaaggcacgagtaacctcttgaaacatgtttgaggaggacaaatatatcaggcagtgattagtatcatctgagtaataatgaatttatcagattctttttttttttcctgagatggagtgtcactctgtttcccaggttgtagtgcggggaagcaatctctgctaactgcaccctttacctcccgatttcaaacgattttcctgcttcagctactgggaaggctaaggcaggataatggcgtgaacccaggaattgtagcttgcagtgagccaaaattgcgccactgaagtccgcagtccgacctggg

SEQ ID NO: 96320 - DNA, 333 bp, Homo sapiens
gcctttctataaagctacagtaattaggacagtgtggtattggtgaaagaattgacaaatagatcaatggaacagaaaagagagcccagaaatagacctacacaaataaagtttgctgatctttgccaaaggagcgaaagcaattcaatggagaaaggatagtcttttcaacaaatggtgctagaaccgctggatatccacatgcaaaaatgaatccatgctgggtgtggtggctcacacctgtaatcccagcacttcaggaggccaaggagggcggattgcttgagttcacgagttcgagagcagcctgggcaacatgtcaaaaccccgtct

SEQ ID NO: 96321 - DNA, 323 bp, Homo sapiens
gtatcttgtctgatgccctccaaacctagctatcaagctattcagtaagaaattctccacacaatttttagtatttttcaaaagaaaggatacttccactgctcaaaaaatcttaattatacagatcagtaaaagattaagtgctctccaaatgtgcatgtggactgatgggaagatgattaaagatcaagaaagggtcgggcgcggtggctcacacctgtaatcccagcactttgggcagctgaggcgggcagatcacaaggtcaggagttcgagaccagcctggccaacatagtgatctctactaaaagtacaaaatcccg

SEQ ID NO: 96322 - DNA, 271 bp, Homo sapiens
aacatttattattaaatatctagtagataccaggggcacaggaataaataaaacatggtccaaggtaggttatattttaacacacacacacacaaacaagtagaacatggtcaataaactcacaatctaaataaagagaaaagcataaaaacaaataattttgtttttctttttttgagatggagtctccttcacccaggctggagtgcactggcacgaccccagctaactgcagcctccgcctcccgggttcaagcggtcgacgcggccg

SEQ ID NO: 96323 - DNA, 225 bp, Homo sapiens
atcagtctcttccccacaacaatattcatgtggctcagtgtcagttcgagataataacttcttggtctaggcacatgaatattgttgtggggaagagactgataataaaggtggatgcgacaatggattttacataatgggggtatgagttttttttgttagggttaacgagggtggtaaggatggggggaattagggaagtcagggttagggtcgacgcggccg

SEQ ID NO: 96324 - DNA, 423 bp, Homo sapiens
agtatttagccatattagcatatctttagaggaggcctggtggaatacccggggcctctactagtctgtttttccggtcataggaagacttttttttttacgtatcaaagtatgcgtgaacagccccaaaaaaaaaaaaagggggcgcccccctaggaggccccccgaggggccccatcttaccgcggatacccgagaacagacgtcccccctaatagggggcccttttaaagcccagccccggcccgcggtttaacaccgcctggccgggaaaacctgctccccgggaatctttgaaaagagccccttccttgggggggggcccaaagcggcccaaccccccaccggaggttaaagcctctggggcagataaaaaattgtagggggataaaggggcaaaccaagctccatcgcccgcgggcg

SEQ ID NO: 96325 - DNA, 415 bp, Homo sapiens
  misc_feature (1)...(415): n = a,t,c or g
tgctcttgttcactcttttactgattcagcaagtacctattggatcaccagctgagtgccgggcttctagttgagcaacacagaggcagcctctgccctctgagcctcctgcattcggactcctcattgtcatttgctgtctcaggcaaggtcagtttggctgcaagtatcagaaataaacttgagcttcctgaaacataaagggccctgatgatgtagaatcatgggcatcctttggagttcggaggtatgtgatgaccgtggacctgagaacctggtagctgacgctgttaagagctggggcaaccaggccaggcgaggaggctcgcctgtaatcccagcactttgggaggccgaggcgggtggatcatgaggtcaggagttcgagaccagcctggccaagatgttgaaaccn

SEQ ID NO: 96326 - DNA, 414 bp, Homo sapiens
agaaaagccacggaccgttgcacaaaaaggaaagtttgggaagggatgggagagtggcttgctgatgttccttggtgtttttttttccttttctttcctttcttcttcttttttttttttttttccggtgggggccccccctttttttggggggcccggggggcccctttaaaaatttttcccccccccagggggtttttgaccccttttaaaaggccccgggggaaaaaaggggggtttagggaaagggaaaaccctttgggggggataaaaacccaaaattgggggccccaaccttttcccgggaaaggggacccctttcccccccaaaaggggaaaaaacccgtttgtaaaaaaaaatttccttttggtttccaaaaaaaatcctttttaatttccaagaaggggttccgg

SEQ ID NO: 96327 - DNA, 395 bp, Homo sapiens
cctttgggaattcaattctctagtgttaggagcaggcttggcccagggattcttaaatgcatccaggttttggcatcaaagggccccaaacatgacaatttacctatactcatggtctgttcccattcaactttaataggttatgtgtgttttttttttcttaaaagctggttgggggggtctaactatgttgcccaggctggctttgaactcctgggctcaagcagtcctcctgtctcagcctcctgagtacctgggactacaagggtgtaccaccatgcctggctgaacacttttttttttttgaaaaaaaatcccctttatcactttaatctaaatgctgggggggaaaccaatttttttgggacctcaaatttttgggtcaaagcaattct

SEQ ID NO: 96328 - DNA, 378 bp, Homo sapiens
atacattcattttaataacattgagtactgatggatgttttgaaagtgagcattcatttaaggataaataaaaaataaagtagtaataaagaataaaatactttaaaaaaaaaaaaaaaaaaaaaaaaaaaaaaaaaaaaaaaaaaaaaaaaaaaaaaaaaaaaaaaaaaaagggggggcctttaaaaaaaaccccggggggggcaaaaattaaagagggagggaaaaaaaaaattttttccaaaaagggggggaaaaaaaaaagggggggtggggggagttttaaaaacaacgggggggggaaaatacttttggggggaatttttggaaaagcactttattttggggggggaaaaaaaggggaaaacctccctaaga

SEQ ID NO: 96329 - DNA, 401 bp, Homo sapiens
agaaccttatattttcctgaagagaggtgatgacttaaaaatcatgctcaataggattacgctgaggctggaggatcacttgagcccagggagtcgagtctgcagtgagctatgattgcaccacagcactccagcctgggcggtagaccaagacaccgtctcttaaaaaaaaaaaaaagaaaaaaaggggattggctcaaagggggttgcccttgatttcaggcccttttaaaaggagcctaacgctgtttcctataactccaatgaggggccccacctttgacatttaagcacttcaggatcaagggtaaacttttgcccaagggagctctggaagtatttaaaggcagccaccttctcctctaatcctctttttgctgggcctctttggagtccctgag

SEQ ID NO: 96330 - DNA, 408 bp, Homo sapiens
agaaccttatattttcctgaagagaggtgatgacttaaaaatcatgctcaataggattacgctgaggctggaggatcacttgagcccagggagtcgagtctgcagtgagctatgattgcaccacagcactccagcctgggcggtagaccaagacaccgtctcttaaaaaaaaaaaaaggaaaaaaaggggattggctaaaagggggtcgcccttgatttcaggtccttttaaaaggaccctaaagctggttcctaaaactccaaggaggggccccacttttgacatttaagcccttcgggatcaagggtaaacttttgcgcaagggagctttggaagtttttaaaggcagccaccttatcctttaaacctatttttgctggggctttttggagttccagacatttccc

SEQ ID NO: 96331 - DNA, 399 bp, Homo sapiens
atactcattaggaaacacagtgacattggaacactgtacctattattcgacgcataaactggaactataggcaccgatctaagcgtacttaatagaaccgaacttgagcctgatcaggcaacacttctaggtaacgaccccgtccacgaggttatcgacacagcccatgcattgggaataatcttcttcatagtaatacccatcataatcggaggctttggcaactgactagttcccctaataatcggtgcccccgatatggcgtttgcccgcataaacaacataagcttctgactcttacctacctctctactactcctgctcgcatctgctatagaggaggccgtaccaggaacagggtgaacagtctacccttccttagcgtgaaactactgccgg

SEQ ID NO: 96332 - DNA, 397 bp, Homo sapiens
cggacgcgtgggactagttctagatcgcgagcgcgcccttttttttttttttttttttttttttttttttttttttttttttttttttttttttttttttttttttttttttttttttttttttttttttttttttttttttaaagaaaaaaaaaaaaaaaaaaaaaggggggggggtaataaaaaaaaggggggggggggggaaaagggggggggagaacaaaaattttttttctcttcttaaggggggaaaaaaaaaaagaaggggggggggggtttaaaaaaaaagggggggggggaaaatttggggggggggtttattaaaaaaaaaaatttttttgggggggggaaaatataagaaaaaccccacaaaaaaaaaattaagggggggggagaa

SEQ ID NO: 96333 - DNA, 348 bp, Homo sapiens
  misc_feature (1)...(348): n = a,t,c or g
ctcagctgataaacacaagaacggcgatcctgtcttcaagatggcgagactgcccttctcagctgataaacacaagaacggcgatcctgtcttcagtaaggctccacgagaagagaggaagtatatctacacctcaaccctcctagtcaccagcttgaaatanaatggttagggactacttaaaaaaaanaaaaaanaaaaaaagaaaaaaaaaaagaaaaaaaaaaaaaaaaaaaaaaaaaaaaaaaaaaaaaaaaaaaaaaaaaaaaaaaaaaaaaaaaaaaaaaaaaaaaaaggggggggccctttaaaagatagttctcttgggtgggcgcgcccacatttttt

SEQ ID NO: 96334 - DNA, 374 bp, Homo sapiens
ttctagatcgcgagcggccgccctttttttttttgggccccttaaatgggaattttggccaccgggggaatcctcggttttttttcaaaagccggaattacccccatattaaccggcccttgggatttaacgggttttttttcaaaattcctttgaaaaccctttggttaacctcaaacctttttacccggtctaaaactttttttttttttcaatttcccaaattcccctttttcttaatccgcctttttttctctggcccccttttttttggcccttttttgggcccacggtctaattttaaaggggggcgaaaaattttatttcccacttttcacgttctagggaaccctcgtgcttttgtgtttttttaa

SEQ ID NO: 96335 - DNA, 382 bp, Homo sapiens
acaagacgctactgcccctatcatagatgagcttatcagctttcatgatcacgccctcataatcatttgccttatctgcttcctaatcctggatgcccttttcctaacactcacagctaaactaactaatactaacatctcagacgctcaggaaatagaaaccgtctgaactatcctgcccgccatcatcctagacctcatcgccctcccatccctacgcatcctttacataacagacgaggtcaacgatgcctcgcttaccatcaaatcaattggccaccaatggtactgaacctacgagtacaccgactacggcggactagtcttcaactcctacatacttccgccattattcctagaaccacgcgacctgggactcctg

SEQ ID NO: 96336 - DNA, 374 bp, Homo sapiens
tgactggccacctacggtgaaaagaaagacgaatcctagggctcagagcactgcagcagatcgtttcatattgcttttcaccgtacgtggcctgactggcattggattagcaaactcatcactagacatcgtactacacgacacgtactacgttgtagctcacttccactatgtcctatcattaggagctgtatttgccatcataggaggcttcattcactgatttcccctattctcaggctacaccctagaccaaacctacgccaaaatccatttcactatcatattcatcggcgtacatctaactttcttcccacaacactttctcggcctatccggaatgccccgacgttactcggactaccccgatgcct

SEQ ID NO: 96337 - DNA, 350 bp, Homo sapiens
cagaggggaattttaagcccttctcatcacccaattggatgtttttgcttatagcaaattcctgcaaaatagataaataaatatttgcaaaactaaaaaaaaaaaaaaaaaaaaaaaaaaaaaaaaaaaaaaaaaaaaaaaaaaaagggggcctgtttaaaaaaaccccacgggggggccaaagaaaaaagctggggaagacaaaaactattttcctttaaaggaggatgataataaagaaaccccgggggccggttaaaaaacaaaggtggggggaaaaaacgtaaggggggattatttggaaaaaacatatttttggggggggaaaaaaaatgtgcaaaaccccacaa

SEQ ID NO: 96338 - DNA, 363 bp, Homo sapiens
gcagaggttgcagtgagccgagcttgcaccattgcactccagcctgggcaacaagagtgaaactccacctcataaaaaaaaaaaagatttaatttttaacccattttattttttccttggtattaaaacattttttaactagggtataattcccattttaaattaagggaataacttttgggaaaatgaaaccaaaaacttatcggggccttggtttttaaaaagttaaattttattttggatgaaacttaaggggaaaaattttggggcgacgtgaggggggccttttcccgagggaccaatttttaaaaatctgaaaagggaaaggaaaaagggtcaaaaattaaaagtgttttttttttt

SEQ ID NO: 96339 - DNA, 362 bp, Homo sapiens
aaggcttccaatgtggtggcaataaatgtcccaaataaatttataacaattgaaaaaaaaaaaaagaaaaaataaaaaaaaaaaaaaaaaaaaaaagaaataaaaaaaaaaatataacggggggggcctttttagatttcctcctggggggcctctttttctttgtttttcgcggtgtttttctttttcctttgggggctgttttttttctcctcccgtgggggctattttttcagaacccttttgggtgtaccggtgggattttttttttttggggggtttcctttttttggggcgtcacaaaatttgcactgtttcccagcctttttaacgcctttaatggcaaaagactttttttcggg

SEQ ID NO: 96340 - DNA, 360 bp, Homo sapiens
actacttgctcctgttttttcatagacgggtcctgctgttgctcaggctggtctcggattcctggcctcaagcaactttcctgccccagctcctaaagcggccagggttacaggtagccgccttgtctgtcccgtttcgaccatattttatttttgagaaggtcttgctctgtcgccagactggagtgcagtggcacgatgatagctcactgcagcctcgatctcccaagctcatgtgatccttccacctcagcctcttgaataactgggactgcacgtgaggaccaccatgtctgggtaatgtaatttattactatcagaaattgaggcttgcaatactcacaaagggtgtctcgaacc

SEQ ID NO: 96341 - DNA, 352 bp, Homo sapiens
taatctcaagaaactaaggaagaataaataaataatatacaaataaaatgaaaaaaaaggaaaaaatacgaaataataaatatataaaatataaaaaaaaaaaaaaaaaacaaaaaacataaaaaaaaatttacgggggcgtgctttttaaaaacttctggggggggctcttttttacgggtcctttaccttctgtgtttttttttttttggggggtctttttttagagatttccagctctgctgtttttataccctttttgggggaatattgtgttctggtagttttttatgcgggctttttttttgggggggtgacttattgtgaagcatcctcctcttatatttaggtt

SEQ ID NO: 96342 - DNA, 370 bp, Homo sapiens
  misc_feature (1)...(370): n = a,t,c or g
cttacagttaagaattcttgaggggtggagccaagatggccgaataggaacagctccagtctacagctgccagcgtgagcgacgcagaagacgggtgatttctgcatttcccactgagcaaacggcataccaggagattatctcctgcgcctgactaagagagtgctacgcccacggagcctcgctcattgctagcacagcagtctgagatcaaaccgcaaggcgggagcgaggctgggggaggggcacccgccattgcctaggcttgagtaggtgaacaaagtggccaggaagctcgaagtgggtggagcccactgcagctcaaggaggcctgcctgcctctgtagactccacctctgggagcagggcn

SEQ ID NO: 96343 - DNA, 341 bp, Homo sapiens
tttttttttttgaccgggtccaaatttttaatttggaggccaaaattcccccgggaaaaaccaaaatttatccttgccaacttagaagggaaatgggcctggaaaccccaaaaatgggggccccacagtcccgggaacccctccggaaacccggggttcccttctaagaaccttgcagggacccttacggccttctggaacccccccaacccggagggccccagggaccccagttggaaacccagggttttagcccagggatttctttgcccaaaaggggccaaatgtccgggaagggttaaaacagggccctaaccctaaagggcttaatcctcctcctc

SEQ ID NO: 96344 - DNA, 172 bp, Homo sapiens
ggcacagaacctagcatagttggtgggaatgtaaactagtacagccactataaaaaacagtacgaagatttctcaaaaaactaaaaatagatccaccatattatccagcgatcccactgctgggtatatattcagaagaaaggaaatcagtaaagcaaagtcgacgcggccg

SEQ ID NO: 96345 - DNA, 349 bp, Homo sapiens
gatggcttgagcctgggaggttgaagctgcagtaagccatgatcataccactgcactccagcctgggcgacaaagtgagaccctgtttcaaaaaaaaaaaaggttgggggaaggggaaaaaaaaaaaaaaaaaggggaaaccaaaagggtaaagaacttgcctaagggtaccccacccgggatgaaaccccaagttggcctgggggtcctttctgggcccttgggaaaaactgggtcattccttgggggtaaaggtttttgctaagagaaaaaaaaaccccggttccattttaaaaagtgtttcaaaaaattaaaaaggccgttttaagctttttggaaaatcccgtag

SEQ ID NO: 96346 - DNA, 311 bp, Homo sapiens
cccaagtcttcaacatgttctagtctgttccatcttaaaacacacaccaaccacagaatgccccctctctcaaccccccagcacctctcactaatgcttaccttttatctccctttcatatccaaacttcttcaaagatttccagtttctttttctttttttcttttcttttttttcttttttgagacagtctcactctgtcacccaggagaatcgcttgaacacagaaggcggaggttgcagtgagccaaaatcacgcaactgcactccaggggcaacagagccagtctctgtcttaaaaaacaaacaaa

SEQ ID NO: 96347 - DNA, 329 bp, Homo sapiens
  misc_feature (1)...(329): n = a,t,c or g
tggttctttattatcattattaaacattacatactatacataattgtttgtgctttacttttatgtgcctggccacacagtggtttttttttttnnntttnttttttttttttttttttttttttttttttttttttttttttttttttttttttttnttttttttttttttttttttnntttttttttttttttttttnttttttttttttttttttttttttttttttttttttttttttttnttttnttttttttttttttttttttttttttttttttttttntttttttttttttttttttttttttttttttttttttttttt

SEQ ID NO: 96348 - DNA, 338 bp, Homo sapiens
gaccgaccgttgactattcagtactaaccacggatacattggaacactatacctattattcggtgcatgagctggagccctaggcacagctctaagcctccttatgcgagccgagctgggccagccaggcaaccttctaggtctcgaccacacctacaacggtatcgacacagcccatgcattcgcaataatcttgttcatgagcttagccatcataatcaggagctttgggaactgactagttaccctaataatcggcgcccccgttttggcggctccccggataaccgacataagctggtgactctgacctcactctgtcctactcctgcttgcat

SEQ ID NO: 96349 - DNA, 326 bp, Homo sapiens
gtttcaccatgttggccaggctggttttgaactcctggcctcaagcagtccatctgcctcccaaagtgctaggattacaggcgtgagccaccgtgcccagccacgcatatttattgattcatttatttttcttttttttttttttttttttttggaaaggggatttttttttgccccccggggtggaaaaaaggggtttaaattgggttaactggagcttcccctttccgaaaaacgggcccgaatttccaaattttaaaacccaaaatcctggaaaccccccgggggtttttttaagggggtatggggccccattcaaatttttt

SEQ ID NO: 96350 - DNA, 252 bp, Homo sapiens
  misc_feature (1)...(252): n = a,t,c or g
atcttgtcccccccaaaaaaaaagtttctagttttaatgattattttctaatttttcttgtgctatttttgcttttggtgtcatctaagaaacaatcacctaattcaagttcacgaagatttacacctgtgttttctgagagttttatagttttaactcttacatttagatctttgatccattttgannnnnnnnnnnnggaatagtgcaaggtaggtgtcccgatttgtcccctgcatttgatttccattg

SEQ ID NO: 96351 - DNA, 303 bp, Homo sapiens
ctggtcttgagctcttgtcctcaagagatcctcttgccttgacctcctaaagtgctgggattatagacatgagccactacacctggccttgagtgaaatactaatgtacagattctgtctatgaatatttgacatctttttttattggtactctagagaaatagatttgatttttgtatattgatttttttttttttttttggaaacagggttttggttcttgctacccaggggtgatctgggttaatgggaacctccacctcccggttacaagggatcctcctgtttgggcctcccaaggat

SEQ ID NO: 96352 - DNA, 356 bp, Homo sapiens
agaaacctgattgcatcatctcatgtatataagaatgagccattgctgtcactaacaactgctgccctctccatcctcttatgtaaaaaattattcctttaaatagtgatttgcagagtatggttcttctatttctttttcctttatttgttaaaatatttgagaagtaacagtagtgatctgtactttcttttttaaaatttgtatttatttattttttgagactaggttataagactggctaatttttgtattttcggtagagagagggttttgccatgttgctcaggttggactctaactcctgggctcaggagatccacctgcctcagcctctcaaggtgccgggattacag

SEQ ID NO: 96353 - DNA, 333 bp, Homo sapiens
  misc_feature (1)...(333): n = a,t,c or g
cttgactcaaactcctggccttaagtgatctgcctgcctctgtctcccagagtgctggaattacaggtgtgagccaccacacccagctggctttctcttttagagacattttgataagggtgtgagctagttgcttatatatcctggtacaggctggnnntnnnatnnnnanannngttgntnnnangttttggggtgtttctgagtgtgggtttattgtgntgaggatacatggaagacagaccctggagaacataggaaggctcaagcacatgacttctgcctccactggcattagattcttatgtatcggttattttaaagactaatacg

SEQ ID NO: 96354 - DNA, 324 bp, Homo sapiens
acatttggattctgcctaataaaagacatttattttcattgcaaaaaataaaaaaaaaaaaaaaaaaaaataaaaaaaaaaaaaataaaaaaaaacaaaaaaaaaaaaaaaaaaaaaaaaaaaaaaaaaaaaaaaaaaaataataatagaaatcagaaaaaaaaaaaaaaaaaagactccttaccctataaaaaaaaaataaaaaacaaattttaaaaaaaacccccgttaatttttaaatttggtagcacccccccaacattttttttttttaaaaaaaaaccatgatttttttttttaaaaaaaatttctcccaaaaaagaa

SEQ ID NO: 96355 - DNA, 318 bp, Homo sapiens
cagatacttaggaggctgaggtgggagaattgtgtgaacctgggaggtggaggttgcagtgagccaagattgcaccactgcactccagcctgggtgacagtgtgaaactctgtctcaaaaaaaaaaaaaaaccctttactttttttttaaattttaaaacccctttaggggaaaggggaatttttttttggttaactttaggaaagtttttttaaagccccattttcaaagtatggctttaaatttcccacattttatttggggttaattggatagccgggttttttaacaccctttgtttttaaggggctttatcct

SEQ ID NO: 96356 - DNA, 355 bp, Homo sapiens
tttcttcgtaagaaggcttttacttgaaaatccaagtctttcgtaggtacagagccattcagttttttttttttttcccatttttaataagtttggaaggttatttttgaagggaattaacccgggttattaaaattttggaattcccgggcaaaaggttttcggaaaaattcattggcctaaggttgggcccgggggttaaaaccggaaatcccagcttttggggaggttgaggggggcaaattacagggtcaaaagttcgagaccagctttgttaacagggggaacccccggttaacttaaaaatccaaaaatttacccggccttggggacaggggcctgtaatcccagttat

SEQ ID NO: 96357 - DNA, 345 bp, Homo sapiens
gcgatgggagagttgcttgaaccctggaggcggaggttacagtgagccaagatcgtgccactgcactccatcctgggtgacagagtgagactctgtctcaacaacaacaacaaaggaaaaagaaaggaaacaaaatagaacatggagtgaaagcaacagcttacaaaaatacaaagacactaaccacttttaggaactcaagtctatataatccaactgaaatgactgaaaccctgtgacatgaaaatggaaaagatttgggaatattttcaaaagataaggggtttagatcaaaatttcagagactgaatgttctaacatgatatagaatcaatttcaggaatg

SEQ ID NO: 96358 - DNA, 332 bp, Homo sapiens
ctttggtggaagacttttattactccttcaatctcattattcattatggcctgtcagtagtgtttctatacactaacagcgaacaatccactatcgcaagaacagcatgggggaaccaaccccataatccagtcacctcccgtcaagtctctccctcaacatctggggattacaattcaagaggagatttgggtgaggacataaagcctaaccatatcaccataagaagcttctgggccgggcgcggtggctcacgcctgtaattccagcactttgggaggccgaggtgggtggatcacgaggtcaggagatcaagaccatcttggctaacg

SEQ ID NO: 96359 - DNA, 331 bp, Homo sapiens
cctgcatggaaaactgtatggtgattccaccaaaaaaagttaaacataagaattaccatatgatccagaaattctacttctggaaggcagttcagcagctttctacagaactaaacatactctgaccttatgatccagcaatcacactcctgggtatttacccaaaggagttaaaaacttccttccgtacaaaaacctgcacatgaatgctaacagcatctttatttgtaattgccaaaacctggaaacaaccaagatgtccttcagtaggtgaatgactaagtaatttgtagtatgtccagacaatggaatgttattcagtgctaaaaag

SEQ ID NO: 96360 - DNA, 209 bp, Homo sapiens
tccacctgcatttttaatgaaatatcttccctttaaaaatctgttttagatcttcaagttatagtttttttttttttcgaaataaagtctcgttgggccccccatgctggagggcaaggcccctatttcggctcactgaacccaccgcctcctgggttcaagcgattctgcggtcttaccctcctgagaacctggggtcgacccggccg

SEQ ID NO: 96361 - DNA, 211 bp, Homo sapiens
tccacctgcatttttaatgaaatatcttccctttaaaaatctgttttagatcttcaagttatagtttttttttttttcgagataaagtctcgctgggtcacccatgctggagggcaagggccctatctcggctcactgcagccaccgcctccggggttcaagcgattctgcagtcttagcctcctgagtagctggggtcgacccggccgca

SEQ ID NO: 96362 - DNA, 334 bp, Homo sapiens
gttttgccagggtgcgcaggctgttcttgaactcctgagctctagcagttcatctgcctcggcctcccaaagtgctgggattacaggtatgagccaccgtacccacccagcatctgctcttaacccaggttttacgtcctgttgccttctaaaacccacataaccgtttcacagaaacaccagaaaagtgccagaatttccttgtgcatgaaaaaaaacagggacagaaataccttttcttaattactttatatcacaagagaagtgaatgagaacattagggtaataagtttctagttgaaagataaaatttgaaatgagtacttaagcatta

SEQ ID NO: 96363 - DNA, 364 bp, Homo sapiens
ctggagtgcagtgaggcgggattggatcactgcactccagcctgagcgacagagagagactccatctcaaaaaaaaaaaaaaaaaaaaaaaaaaaaaaaaaaaaaaaaaaaaaaaaaggggggggttaggcacggggttaaatcccggaaaccttaaacttcgggaaggccagggcggaaaaatcattggaggcaaattcagggccagcccaaaactccaagggaaagggctgaggctttaaagaaccgggtgggtttaaaaaaacttttcaaaaccccaggtcacgtaaacggggccggaaatcccaaatttaggaacggaaaatccggaaaacccccggaggttcatttaaatggggcatgg

SEQ ID NO: 96364 - DNA, 120 bp, Homo sapiens
ctcccgagtagctgggattacaggcacgtgccaccagacccagctaatttttctatttttagtagagatggggctttgccatgccggccaggctggtctgaaactcccgacctcaggtga

SEQ ID NO: 96365 - DNA, 193 bp, Homo sapiens
tgtagatcaaataataagaagggaatagctgctaagaagaattttatggagaaagggacgcgggcgggggatatagggtcgaagccgcactcgtaaggggtggatttttctatgtagccgatgagttgtggtagtcaaaatgtaataattattagtagtaaggctaggagggtgttgatgtcgacgcggccgt

SEQ ID NO: 96366 - DNA, 327 bp, Homo sapiens
tttttttaaatattagaaacaaggtctcgctatgctgtccaagctgagcttgaactcctggactcaagcaatcctgctgccttggcctaccaaagtgctaggattataggactgatccactatgtccaacctacagatcctttgtaaacactacgacttttcatgaaaagaacagagctatgccaactagacacactcagaaatctcatgattttatactgaatatctttgactaaattgaacttacaaataagtgtattatggacaaggagctgggattacaggtgagaaccaccacacttggactaatatttgtgtttaaaaaag

SEQ ID NO: 96367 - DNA, 379 bp, Homo sapiens
attaacactgacctttatttaagggtctaatttgttcatgttgggcacttagaacatcggtttgttgttttttttttgtgagattctggaaacattccaattttaccttttccccttgactccagactttttaacactggtctgctactgttaagttgtatgccattttgttaggccttctcaagtgggaatcaggaacgctgctgtgctctaaagatgttttgttcttcctgtagggctgaagcagtgcctactcgatagaatcagtcatcatgcaaataaaagccacctgagtcaaaggcaaagccagagtgcagcttggagcaaagaagttaaaagcatattggcagaggaagagccctggcattccagcaggagc

SEQ ID NO: 96368 - DNA, 364 bp, Homo sapiens
gttttatgttgttaatgtggtgggtgagtgagccccattgtgttgtggtaaatatgtagagggagtatagggctgtgactagtatgttgagtcctgtaagtaggagagtgatatttgatcaggagaacgtggttactagcacagagagttctcccagtaggttaatagtggggggtaaggggaggttagcgaggcttgctagaagtcatcaaaaagctattagtgggagtagagtaggaagtccttgagagaggattatgatgcgactgtgagtgcgttcgtagtttgagtttgctaggcagaatagtaatgaggatgtaagcccgtgggcgattatgagaatgactgcgccggtgaagcttcc

SEQ ID NO: 96369 - DNA, 356 bp, Homo sapiens
cttttgcatgtggatatccaggggtccaagtaggttttgttgaaaagactattctatcctcatttaattttcttggcacctttgttgaaaatcagttgacaataaatgtgagtgtttatttctggactctcaattctgtttcttttttttcttttcttttttcttttttttcttttttcagacagagttagactctgtctcaaaagaaaatgaacaagaaaaatctgtgcaacttgtgtagtaatttcatttatacagtcttcagtcatgggctgtctacaaactttatcaataaacaaatgaacttgcccttcatggttgcccttctggggccaaatgtgggctcttagacaacc

SEQ ID NO: 96370 - DNA, 324 bp, Homo sapiens
gcgcaagtaggtctacaagacgctagttcccctaggatagaagagcttatcacctttcatgatcacgccctcataatcattttccttatctgcttcctagtcctgtatgcccttttcctaacactcacaacataactaactaatactaacatctcagacgctcaggattctgaaaccgactgttattcacagtcctatattttatgactatcttttattcggacctcactatgtgatcatattatattactgatgcttatttggcatctttccctttcttaatctaatcaattctttgcagatctctcctactgtactgtattg

SEQ ID NO: 96371 - DNA, 543 bp, Homo sapiens
tacaagtgtaatgaatgtggcaaggtttttaatcaacaagcacaccttgcacagcatcagagagttcatactggagagaaaccttacaagtgtaatgagtgtggcaagaccttcagtcagatgtcaaaccttgtataccatcatagacttcatagtggagagaaaccttaaaagtgtaatgagtgtggcaagaccttcagtcagatgtcaaagcttgtataccatcatagacttcatagtggagagaaaccttaaaagtgtaatgagtgtggcaacaccttccatcacaattcaacccttgtaagtcacaaagccattcatactggagagaaactttacaagtgtaatgaatgtggcaaggtttttaatcaaaagacaacccttgcacgtcatcatagaattcatactgcagagaaactttacaaataggaagaatgtgacaaagttttcggttgcaaatcaaaccttgaaacacataagaaaatgcagttttcaaaaacagactcagcattcagcctccaatgaataagacatcttccaagc

SEQ ID NO: 96372 - DNA, 348 bp, Homo sapiens
gagaatcgcctgaactcaggagggggaggttgcagcgaaccaagatcgcaccactgtactccagcctgggcgacagagcgagactccgtctcagaaaaagaaaaagaacaaaaacaaaatttccacctaaacgcacagtcaaactgccaaaagctaaagtcaccatgaaaatatttaaagcaccccgagaaaactgacatcttgtccaaggccagtcagtataataaccagctgactgctgatcaaagcattttaaaattcaaaacaaaaacttttgatcaaaaaaaagggaggccaaaaggccacgggatgacatattcaaacagctgaaatttttaaaaatggccc

SEQ ID NO: 96373 - DNA, 334 bp, Homo sapiens
cagaaatgtgttttgaggtttttttgcctgggggttggggagctgaagctggtactgaaaaagagaataagtgagttctgaaaagaattaaatttaatctttgacattctaagtataaatatgttagtagaacatcctcttaaaaatgtgaggccagcagtagaaatttggaatttgataacatttaagagttgcacaggccaggtatggtggttcctgcttataatccgaacactttgggaggctggagcaggaggattgctttagaacaggagttcaagaccagcctggacaacatggcaagattccagctctgcaaaaaattaaagaaaaa

SEQ ID NO: 96374 - DNA, 218 bp, Homo sapiens
gcgtggtggtatgagattgtggttccagctactcgggagactgaggcaagaagatcacttaagcctggggctgtagcagtgagctgtattgcaatattgcgccacagcactatagcctgtatgacagattaagaccctgtctcttaaaaaaaaaaaaaagaaaagaaaagaaaccccccaaagggacagagggcaaatggggcgtcaacgcggccgca

SEQ ID NO: 96375 - DNA, 332 bp, Homo sapiens
ggggattcaaaattaacatgcagtcctgtccttaagggttgtatatgagttgagatgggaaatagtcctataaatagaaagtatgtgtatcctaagagctataacagatgcttgaaatgtaacacagaagagggagtactgaatgacttggggatagctgaattcaatacatgcagcaaaagtttattattactaattttttttaaaggcaggatcttgctctgttgcccaggctggattgaagtggtacaatcacagctcactgcatcctcaactctcgggctcaagtgaaccttccacctcagcctctttggtagctgggaccacaggtg

SEQ ID NO: 96376 - DNA, 331 bp, Homo sapiens
gcatcataaatgttgatatgtctggctggctggtgttatgtgaaataccttcaaagttttatgaacctttgattccttaatttcttcattgttcttttcagattacaaaagtagttaatatttggaatcaaaaatcataagaaagggacagtccttcgtaatctcattcattgctcagctagagtcatatcaagtttattttttctccgcttgtgttatgttaatgctttttctcttctctctttttgtttttttttttttcttttgaaacggagtctccttttgtcgcccaggctgcattgcaggggggtgatcttggctcactgcaccc

SEQ ID NO: 96377 - DNA, 325 bp, Homo sapiens
ttcctctctcagtgaggccaccttggctcctctagaagcctgagaccatagccacatagcagaaggcagagctgagaccctgagaaaaaaacaagcccaaataacgtatttgggccaggggtgatggctcacgcctgtaatcccagcactttggcaggctgcgatgggtggattgcttgaagccaggagtttgagaccaacctgagcaacacagggagaccctgtctctacaaaaaataaaaagtcgacgcggccgaagtcaacgcagacgcgaatttcagatctatgatatcgacatactgggtaagccgcgaagctgacttcg

SEQ ID NO: 96378 - DNA, 151 bp, Homo sapiens
ctgagttctctctttaagcctagacaatagatggagacatacagaaatagtcaaaccacatctacaaaatgccagtatcaggcggcggcttcgaagccaaagtgatgtttggatgtaaagtgaaatattagttggcgggtcgacgcggccg

SEQ ID NO: 96379 - DNA, 311 bp, Homo sapiens
tttttattttgcaaaagaattaaaaggttactggaaaccacatacctttcttcctttacgacaacctgtcattcatcacagctaaaacatccacccattaaatgatatttttacaagattaaagaatggttttaaaaagaaagaaatctccttagttaaaaatgaaccaaacaaaggtacctaatcactgatcagcatcaaagttttgttccacacatgaaaataattcatcaggccaggtgtggcggctcacacctagaatcccagcactttgggaggccaaggtgggtggatcacctgaagtcaggagt

SEQ ID NO: 96380 - DNA, 320 bp, Homo sapiens
gggaggcggagcttgcagtgagccgagatcgcacctgtgcactccagcctgggagacagagtgagactccatctcagaaaaaaaagaagaaaagaaatagttacaaatatacacaaacatctagcttgcaagataattcttaacatttgttgagaaataattacatgccaggcactattctaagtacattatatatttcgatttataaaacaaaactgtttttttaactcaaattaaagattagaaaatgactgagagggtgagtaacttgcctaagtttactccgctagaaagcagcagagccaggatttaaacctgtg

SEQ ID NO: 96381 - DNA, 300 bp, Homo sapiens
gccaccacacccggcctagaaacaagatttgtatgtatacttttaaaaataagttgttggtttttttttttttttctgagggaactttgggaaattatactgaaccgggcttaaaaagtaaaatttttcccttgcaaaattttgttttcaaaatccattaaaaatttttcaggttttttttcaaaagggagtctcgttttgttgcccaggctggagggcagttgcgggatctgggttaattgaaacctccgcctaaaaggttaaagcaattttcgggcctaagcctcctgagtagcggga

SEQ ID NO: 96382 - DNA, 303 bp, Homo sapiens
ggaggttgcagtgggctgagattgtgccattgcactccagcctgggagacggattgagaccctgtctcaaaaaaaaaaaaaaaaaaaaatttcacccgggcaaagttgttaatctttggaaccctggttcttgggaaggttaaaaggggagggccttttaaacccaggattttgaaactaccctgggaaacttggcaaaaccttgtgtttactaaaaaaaaaaaaattttttttttgaaaaaccggggggggggggaataatggtttaaccccaggatttgggggtaaacaggaaccgggggt

SEQ ID NO: 96383 - DNA, 302 bp, Homo sapiens
tcgatctcctgacctcgtgatccacctggctcagcctcccaaagtgctgggattacaggcgtgagccaccgtgcccggccataaatgtatatttttaagaatctttcctgaagaaaaaagttgggtaaatgcagggctgtaggtacaaagttgtttgctgtggggtggtttgtcgtgccgaaaaattggaccaacttagaaggagattggctaactaaatacgttaaggtataatctgaataggattctacatagtcattaaagagtaaagttgacctgtattcattttcatgaagaggttt

SEQ ID NO: 96384 - DNA, 332 bp, Homo sapiens
ggaggttgcagtgagccaagatcatgccactgcattccagcctgggcgacagagccagattccatctgaaaaataaataaataaataaataaataaaaataataaaaaataaatagaaataaaaaaggtaaaaatcatttcctcagttcaagtacttgatagccacaagtggccagtagcttcttgactggacagcacagatacacaaaactgtaatcatctcagaaagttctactggacagtgctactctacaaagtaaatccaatgcagaggtgaagagagtgaatagaactacagactagcagttctattcagttcggtacagcgccca

SEQ ID NO: 96385 - DNA, 326 bp, Homo sapiens
ccctaagtcttacctacgggagaataccgcaaaataatttagggtgtctatatttgttttatttttccataggacttcattattttataagctgtaataaacctaaatatgatacaaaaagttttaaaactaaatacaaatataaccccaagaaagcagaaaagggcagaggtggagagggaggaggaagagcaggggtagagagggaggaggaagggatgttataaaacgacaacgggcagtcgggtgtggtggctcatgcctgtaatcccagcattttgggaggccaaggtgggtggatcatctgaggtcgggagttcaagacc

SEQ ID NO: 96386 - DNA, 300 bp, Homo sapiens
ccaagatcgtgtcaatgcactccagcccgggcaacagagcaagactccctcaaaaaaaaaaaaaaaaaaaaaaaaaccgtttggaaaaattttggaaaaacgggtttttcaaaaaaatgggggaaaatttttgcccggtttggaaaaattttaaaggggggtttaaaagggggggattttaaccgggggcccattgcccaaaaagttttaaaaaaaaccccttttttaaacctttgggcttggggcaaacggggcggaaattccaaatttttaaaagggaaattttggaaaacccccgag

SEQ ID NO: 96387 - DNA, 305 bp, Homo sapiens
caggagtggattggcatctagagtattttcttaaaaacacagcagccctgcctgaggtttcttcaggaataacggtaatactggcagaatcggcgacaaatggaactctatccacaagaccactgcagaaattcgggtctggtttctatcacactataaagaacagctggccaggcatggtagctcacacctataatcccagcacttagggaagccgaggcaggagggtcacttgacccctggggcttgagaccagcctgggcaacatagagagacctcttatccacaacaaaaatttttaaagg

SEQ ID NO: 96388 - DNA, 308 bp, Homo sapiens
cttaaactcctgatctcatgatccacccaccttggcctcccaaagtgctgggattacaggcgtgacccaccacgcccggctgcatatttcttttatgtcactttgtacactagactgtcacttcaaatatttactataattgggtgctttaaattttgttgatatttttcacttctaatgtttttcccactagattaggagtgccatgagtatctttatcattattacttagcatattactttgtacttgtaggtatttaacaaatattttagagtaacaatacagttaactgtggtaccccacacag

SEQ ID NO: 96389 - DNA, 314 bp, Homo sapiens
ttttttccttttttgttttttggttaaataaaaacagcacccgggaaacggcccaaacccttcgggaaagggccccggaagggccagccgttttttaaaaaaaaaaaatttttttttttaaaaaacacccccaaagaaaccccataccccttgtaaacccagccctaagggaaagggacctgaaaggctcccctggcatttttttaaccaaaaatttgggccccttccaatgggacccaaccctgaccaaagggcagggttttgcctgcgggacccctaggggggggggaaaaaccgatcacctccaacccttc

SEQ ID NO: 96390 - DNA, 137 bp, Homo sapiens
cccttcccctactagggtgtagaataggaagtatgtgcctgcgttcaggcgttctggctggttgcctcatcgggtgatgatagccaaggtggggataagtgtggtttcgaagaagatataaaatgtcgacgcggccg

SEQ ID NO: 96391 - DNA, 236 bp, Homo sapiens
caaaaacagacgtaaaggccgggtgtggtactcaggaggctgagtggggaggattccttgaacacaagaagttaaggctgctgaggctgcagtgagctatgactgtgccactgcactccagcctgtgtgacagagcgagaccttgtctctaaaaaaaaaaacagggaatgttttaaactgaatgataatgtaaatattatacatcgaacttatgacatgggaagtcgacgcggccg

SEQ ID NO: 96392 - DNA, 291 bp, Homo sapiens
ggaaactggtggtaccaagcagcgggtagatatatgggaactctagttttcactcaatttttctataacataaaaatgctcaaaaaaagtctaagctttttttttttaaaaaaaactgggggtttttggttttggttttggttttaaaaccaagtctaactttatcatgcaggctaaagggcagttgcccaatctgggttaattgaaacctttgccccgggggttcccgcaattttccggcctaagcctttcaggtacctgggattacaagcacacgccagccaccaggcc

SEQ ID NO: 96393 - DNA, 322 bp, Homo sapiens
gtatttatgtggatctatttctgggctctctattctgtttcactgacctatttgtcttttctttctccagtaccacactgtcttgattattgtagctttatagtaagtcttgcagtttggtagtgtcaatcccccaactttgttcttttttttttttttttccggaattggagcttaattttgccccccgggtggaatgcctgtccctgaatttgggtttgtggcacccttggcctccgggtttaaggcgtttttccggcctaacccccccgattacctggattaacgggcacgtcccactatccctgcctatggtggattt

SEQ ID NO: 96394 - DNA, 328 bp, Homo sapiens
gggtaattatggtgggccatacggtaggatttagttggggcattagccacaccagccaccactttctgataggcagcctgcacgggaagtccccaggtcctggtccaggataaaaaggacctggccccggtggttgaactggatattgttgggggggcccaacataaggagggccactatgacggtactagaaaagagaaagtatgaatatttataaataatatggtatctgggggcgaaaaacataataaaataataagaaagtagcttactacagaaagtaaagttctctgtgtaagagaatcatttaaatgaggtaaagcgattg

SEQ ID NO: 96395 - DNA, 322 bp, Homo sapiens
gccgagcttgcagtgagccgagattgggccactgcactccagtctgggcgacagggcgagactctgtctcaaaaaaaaaaaaaaaaaaaaaaaaaaacctttaaaaaaaccccaaataggggcaccaaaaggccttttggcaaaggaatttaacaatcaagtggaaacctaaaataaaaagggttatccaaaaaagaaccatttaaaaaggaaaaaagaaagccaaaaaaattttggagtttaaaaaaaacccccttgaatccaaaatttccaaaaaagaactccaaaaaaaaatggtttaaaagcgggcccttaaaaaagg

SEQ ID NO: 96396 - DNA, 422 bp, Homo sapiens
  misc_feature (1)...(422): n = a,t,c or g
ctaatgccgcacgagatcatatagtaaaacccagcccatgacccctaacaggggccctctcggccctggtaatgacctccggcctagccatgtgatgccactctcactccatatcgcttctaatactaagcctactaaccagcacactaaccatataccaatgaaggcgcaatgtaacacgataaacctcataccaaggccaccacacaccaactgaccaaaaaggccttcgatacggcataatcctatttattacctcagaagcatttttcttatcatgatttttctgagccttttaccactccagcctatcccctaccccccaattacgagggcactggcccccaacaggcttaagcccgctaaatcccctagaagtaccactcttaaacacatccgaattactcgcatcatgagtatcn

SEQ ID NO: 96397 - DNA, 354 bp, Homo sapiens
ggcacgagttggaatatttcccatttcagattttcatattagagatactcagcctgtactaagttcttggcattcactatgagtacaatcttgggtcccatcatttttgccatgacacgggtagaaagggtttctttcctttttttttttttaaatgacttaattaatttttggaaagggaatctggctttgttgcccaggctgaagggcagggccagaatctaagctaatggaagcctttttttccgattttaaagcatttttcctgcctaagcctcctgagaagctggaactacgggcccacatcaccagtgccagctaaggttgggggtttttggagaaacaagatttacc

SEQ ID NO: 96398 - DNA, 360 bp, Homo sapiens
ggcacgaggatagatgctgctgaagatcttttcttagccttagccttcttgcagctctaatatgtctctaactcaaaatgtagcaatcatagaaaatgaagtctcttttttttttttttttttgaaagggaatccagttttgtaccacaggttgaattgcatggacgggatttgggttaactacaactttggctcccgggtttcgggaaattccccggcctaaccccccttagaaacggggatgacgggcccaggccacaacccccggcaaatttggggcttctagtaaaaacggggttttcccccgtggcccatctgggtgtaaacctcgggaccttgggggattgcccagccttaccg

SEQ ID NO: 96399 - DNA, 393 bp, Homo sapiens
ggcacgaggggaggctgaggcaggagaatcgcttgagcccggaaggcaaaggtggcagtgggccaagatcacgccattgtactccagcctgggcaacaagagcggaattccgtctcaaaaaaaaaaatataggtgccagaaatgttttgagcacattttttaaagctagaataaaaccaaatgtggcctgttacttttttaacattgtatatctcatttggaaaaacattttttaaactggggaatacttattatgggcgaaaatcgtataggaaaaggcttataaaaattatgttaaatttaaaggtccttttaaagggaaatttttttttacaaaccttatgttggggaataaatttttccaacaggggttctaatattctaatagttttt

SEQ ID NO: 96400 - DNA, 429 bp, Homo sapiens
ggcacgagggcacgcgccactgcactccagcctgggcgacagcaagactgtctcaaaagaaaaaaaaaaaaaccggtcaactaaggattctatacatgtaaaagggccctttagttactattaaaaagaaagtacctaaaatgccaaaattaccaagtgttgaaaaggatatggaaaaaggggaacccttatgcactgttgctggcaatttaaaatggggcagctactatggaaaacagggtaccaattcctcaaaaaattaaaattagaattattatccaatgtaccaattccatatctttgaatatagctcgccctctgaatccatggtttttttgtttttggtttttttttgaaatggagtctaactctgttgcccaggctgaagtgcagttgcacaatttcagctccttgaagcctccaccttcg

SEQ ID NO: 96401 - DNA, 380 bp, Homo sapiens
ggcacgagtgcatagggctcggcgtgggagtaattccctgctaagggagggtagactgttcaacctgatcctgctccggcctccactatagcagatgcgagcaggagtaggagagagccaggtaggagtcaaactcctatgttgaatttgcaattcaatatgaaaatcacctcggagcttgttaaaagaggcctaacccctgtctttagagatacagggcaaagctttactcagaccttttaccttacccccactgatgttcgcccaccgcggactattatctacaaaccccacagacattttggcactatacccattattcggcgcctgagctcgaggcctatgcacagctctaaactccctattttagcccggcgggg

SEQ ID NO: 96402 - DNA, 345 bp, Homo sapiens
ggcacgaggtaagaatagacgtacacacacgaacatgtttcaccttcggtaccataatcatcgctatccccaccggcgtcaaagtatttagctgactcgccacactccacggaagcaatatgaaatgatctgctgcagtgctctgagccctacgattcatctttcttttcaccgtaggtggcctgactggcattgtattatcaaactcatcactagacatcgtactacacgacacgtactacgttgtagctcacttccactatgtcctatcaataggaactgtatttgccatcataggaggcttcattcactgatttcccctattctcaggctacaccctagacg

SEQ ID NO: 96403 - DNA, 339 bp, Homo sapiens
ggcacgagtggggtttcaccatattgaccaggctggtctcaaactgctgaccttgtgatctgcctacttcggcttcccaaagtgctgggattacaggcatgagccaccgcgcctggccttaaaatttaacaacatcaaaaaaaaaaaaaaaaaaaaaaaaaaaaccccgggggaaaaaatttaaagccccggaattcaagccttttgaagggcttggggggggggggcctttggccccaggatttaaaaccccgttgggacccctttggggacccttttccccctaaaaatttaaaaaaggggtccggctgggaacccccccccttgacccccagtttc

SEQ ID NO: 96404 - DNA, 400 bp, Homo sapiens
ggcacgagggcgtggtggctcatgcctgtgattttagccctttgggaggcagaggcgggaagatcacttgagcccaggtgttcaagaccagtctgggaaacataaggagacttaaacgttggttttttttggtctgatcttgttccataatcatctggacatggctgcatggactattagtcccagctacttgggaggctgaggcataaggatcacttgagcccaagcggttgatgctacattaagccgtggtcgatcctatgaactctagcctatgtaacctagtgagaccccgttacactcaaataatacattctatatattgaccacttcatcattcttacttatcagtaatcgcttactgtttcctgatcgcttactccattttcacactgctata

SEQ ID NO: 96405 - DNA, 94 bp, Homo sapiens
  misc_feature (1)...(94): n = a,t,c or g
ggcacgagaatcaatactcatcattaataatcataatggctatagcaataaaactaggaatagccccctttcacttctgagtcccagaggttgn

SEQ ID NO: 96406 - DNA, 93 bp, Homo sapiens
ggcacgagttttttttttggaaacagggtttcactctgtcacccagactggagtgcagtggtgcaatcttggctcactgcaacctccgcctcc

SEQ ID NO: 96407 - DNA, 464 bp, Homo sapiens
ggcacgagggctcaatccctgctactcgggaggctgaggcagaagaatcagttgaacttgggaggcagaggttgcagtgagccgaaatcaggccacctaactccagcctgggcgacatagccagaccttgtctctacaaagagttgtactttaatctatctcgtgactcaggccctgcacataaccctattaccatagggaaacttacctacgtgaacggctgcatttttaaatggcagtttcctgtaacgcgacaaaaacaagaagcatgtcattcttttttctttttgtagagaggaggtctggctatgttgcccaggctgatctctacaaaaaaaaacaaactgaacgatttttatttaagcggccggaggttaatccctttaagggggggataatttaacttgggcctggcccggcgtttaacaactctgagctgggggagaaagtcttatggtgccccg

SEQ ID NO: 96408 - DNA, 333 bp, Homo sapiens
ggcacgagccgcttcagccggggagggcaaggctgcagtgagccaagatcatgccactgcacttcagcctgagcaacaagagtgagaccctgtgccaaaaaaacccctcaaaaaaccatgttgggagggctgatcagattacgggaggaaggtcatttgtgcaggaaaaaaagcagttctaagcctcactggtttccagtggtggccagatttgaactcagcttgcctttggccctgaccccagctcaacccatgggtggtgggtcagagggagggcctctgtccccaggcagtgcttttgggggttcctccagcttctagtcctttcttgcg

SEQ ID NO: 96409 - DNA, 347 bp, Homo sapiens
  misc_feature (1)...(347): n = a,t,c or g
ggcacgagctcccggttttgctgaaaatgaggtttttgttttctcttcttgttttgtttggatggttccaggaggaaaaggggagaatgctgagctcatgcagccgagttcgtactgagagtctcagcatttcttccctgcccctccccgctgctcttcatgtgtgtgactgtgctccctgggtccttctcttctgggtacactcatattttgtcagtttactctaagtgaattacccagattcagaaaaggataattttcttcctccctcaaaaaggtgttttgttttggagacagggttttgctgtgtcacccaggctggagtgcagtggtgcaaactcagctcn

SEQ ID NO: 96410 - DNA, 353 bp, Homo sapiens
tgcaccaggcgcgatgtaacacgagaaagcacatacggaggccaccacagaccacctgtccaaaaaggccttccatacggcataatcctatttattacctcacaagtttttttcttcacatgatttttctgaaccttttaccactccaccctaacccctaccccccaattatgaggtcactggcccccaacaggcatcaccccgctaaatcccctaaaagtcccactcctaaacacatccgtattactcccatcacgagtatcaatcacctgagctcaccatattctaatataaaacaaccgaaaccaaataatttcatcactgcttattacaattttactgggtctctattc

SEQ ID NO: 96411 - DNA, 400 bp, Homo sapiens
ggcacgagggtttttcaagatttggcctgtttcaaagataaattcacattttacagaggtttgcccatggttatacacaaatggagtacactgatgttctcagaggtgatggaaaacttggtatagctaaattccctgatggaaaatttccagatccacagggaaaggtgagatatttagatacagttaccagagaagactatttataagctctgtttatgaagttcaaaggaataaacttttttttcttagaagtatgagtagagcattcaaatagcaataaagaaaatttcttaggccagggcaccggttgtcacgcctgtaatctcaacactttgggaggccgaggtgggcggatcacctggaggtcaggagtttgagaccagcttgaccaacatgg

SEQ ID NO: 96412 - DNA, 345 bp, Homo sapiens
ggcacgagatttagagcctaccagaactactgacaaatgaagatagtgttttccttctgacagataaaggcagatttttttttttaattgtaactatttttggccagggggctcacgcctgtaatcctagcactttgggaggccgaggtggcagattgcttgagctcaggagtttgacacctgcctgggcaacatggcgaaaccctggtccttgtgaaaacgtagaataactgtagctagctgggtgaggcgttgcattctgggtgtattcagctatttctgggtctcgtcgtttgtggggttcatttgtcggaagggtagtttatttttatgcttacggtgtgg

SEQ ID NO: 96413 - DNA, 356 bp, Homo sapiens
ggcacgagggacatattcccaaaccatcagttttctactttttatacaaacgaaatacgggaggaggattgcttgaggccaggaggttgaggctgcagtgagccatgattgcaccactgcactacagcccagatgacagagcgagatcctgtctcaaaaaaaaaaaaaaaaaaaaaaaaaaatggaaaaaaattttttttataattaagggtttttttggcaagttttaaaaaggcttctaaatttttttttttttcaattttttttcccctaaaaatttggattaaaaaagccttttaaaggggaattggaatttccttaagaattcgaacgggggaaaaaaattttacctttcc

SEQ ID NO: 96414 - DNA, 338 bp, Homo sapiens
ggcacgaggtaaataaagaccatgggcaattgtaatgaatttcgccttcattctttgactacatgactgtccccagagctgtaactttattgaattttttagaagccatttagctagcaactgagcctaaccagccactcaccgtcattattcagtgctcttttattattgtctatttctcctccaacttggctacactcacaaagtgataaaaacttgcatttgttttctttccttttcagagacagcgtcttgctctgttgcttaggctacagtgcagtgacatgatcatggttcactgtagcctcaaactcctgggctcaagtggttctctcacg

SEQ ID NO: 96415 - DNA, 359 bp, Homo sapiens
ggcacgagcagaagtattcattcctgcatgactcccagaccttattctgcttctaagactctattccgacaccctccaacatggacgaaacgcaacagaaatcccgtctagagctggtccgcatctccctgctgctcatcgagccgtggctggagcccgagcggctcctaaggagtatggtcgccaacaacctggtgtatgacacctcggacagcgatgactatcacctactaaaggacctacaggaaggcatccaaacgctgatggggaggctggaatacggcagccgacggactgggcagatgctcaagcagacctacagcaagtttgacacaaactcgcacaaccatgacgcactg

SEQ ID NO: 96416 - DNA, 338 bp, Homo sapiens
ggctcgagcgcaacctcgacaccaccttcttggaccccgccggaggaggagaccccattctataccaacacctattctgatttttcgggcaccctgaagcttatattcttatcctaccacgcttcggcatagtctcccatattgtatcttactactttggaaggctggagccatctggatacttaaggatgggctgacctatcatatctgttggcttactagggtttatcgtgtgatcacaccacatattttcagtgggagtagacatacatgcacgagcatacagctacttcggtagcttagtcatggctatcccctgcaccctcgaagtgtttacg

SEQ ID NO: 96417 - DNA, 406 bp, Homo sapiens
cggcacgagggagagaagctgaggcggccgaccttcggcccgaggcaccggggcgccgggacggcgaagatgtcggcttccttagtccgggcaactgtccgggctgtgagcaagaggaagctgcagcccacccgggcagccctcaccctgacaccttcagcagtaaacaagataaaacaacttcttaaagataagcctgagcatgtaggtgtaaaagttggagtccgaaccaggggctgtaatggcctttcttatactctagaatatacaaagacaaaaggagattctgatgaagaagttattcaagatggagtcagagtattcatcgaaaagaaagcacagctaacacttttaggaacagaaatggactatgttgaagactaattatccagtgagtttgtgttca

SEQ ID NO: 96418 - DNA, 330 bp, Homo sapiens
ggcacgagaactggaaggcgattttatcggactgggacgcgcctcctagggggttgggtgatcccgttccttgcaagaatcggaggaggagtgctgctacggctgcaataatgaaggccaagacgaagggaaaggccaagaatcccgtgacggtgggactgtctactgagcagcctactcaaattcattgaactaggtctgtcccaatgaatgggatggcggctagtatgtacgcaattaccgtggcccctcacaatgatatttggcctaacgggaggacataacctatcaaggctgttgctatagttgcctgcatgacgataatgccga

SEQ ID NO: 96419 - DNA, 349 bp, Homo sapiens
  misc_feature (1)...(349): n = a,t,c or g
ggcacgaggaagcaaagaaaacagaaaaataacaatttaaggtgtgtaaattggttgcctttatatattacatttggtaaaatcagtgcttaaatacgcaatgatttaaactggaacctgaggtatttttcatgctatctaatcatatacctaagataaaccaacccagttacttatattaataatattcagaaagagaagtggctttttttttttttggaaacggattttgcttttgaacccaggctgaatggaatgggggaaatttgggttaattgaaccttttgcctccaaggtaaaaagaattctcttgcaaaatcttcccgagaacttggaattatagcccccn

SEQ ID NO: 96420 - DNA, 590 bp, Homo sapiens
ttttttttttttaagagacataggtctcgctgtgttgcccaggctggtctcaaactcctgggctcaagcaatcctcctgccttggcctcctgagtacaaaagtgcatctcaaatagttttaaaatgatgtgcaatatttagcaaccagtacagcccagcatcaaccaattagaagaagtgtctgactgttgagaacagatgcagccaaggtgtcaccccggtgtgtaccagctggacttcagcactgtgtagtgttctcaatatgaaaggaaaagctgaacagctaacaggagaagatgtaaaatatcttaacaactctattaaataagcaatcaaaaagcaaccaactgcagaacaagataattcatactgtttacattaaaattaaaattttctttttttttttgagacaaagtctctctgtcactcaggctgatgtgcagtggcactgtctttgttcactgcagcctccacctcccgggttcaagtgattctcctgcctctgcctcctgagtagctgggattacaagcatgcgccactgcacccagctaatttttgtatttttagtagagatgggatttcaccaagt

SEQ ID NO: 96421 - DNA, 370 bp, Homo sapiens
gaagagcttatcacctttcgtgatcacgcggtcataatcagtttccttatctgcttcctagtcctgtatgcccttttcctaacactcacaacaaaactaactaatactaacatcttagacgctcaggatatacaaaccgtctgaactatcctgcccgccatcattctagtcctcatcggcctaccattcctacgcatcctttacataacagacgaggtcgacgatccctcccttaccatcaaatgaaatggccaccaatgggactgaacctactagtacaccgactacggcggactaatcttcaactcctacatacttcgcccattattgctagaaccaggcgaactgcgactccgtgacgttgacaatg

SEQ ID NO: 96422 - DNA, 348 bp, Homo sapiens
ggcacgaggatgaggaccccccatgttgcctaaactggtttggaactcctgagctaacgtgatctttctggctaggcctcgcaaagtgctgaggtaggagaatcacttgaacccaggaggtgaaggttgcagtgagccaagatcacgccactgcattccagcctgggcaaaaagagtgaaactgtgtctcaaaaaaataaaaaactgttatgctttgtttgttgtgtgtttgagaagagatctcactctgttgcccaggctggagtacagtgatgccatcatggctcactgtagcctccaactcccgggcccaagcgatcctctcacctcaacctccccagtagctga

SEQ ID NO: 96423 - DNA, 334 bp, Homo sapiens
ggcacgagcacgaggtcaagagttcaggaccatcctggccaacatggggaaaccccatctatactaaaaatacaaaattagctgggcatggtggcgcacgcctgtggtcccttctactcccgatgctgtccaaggacactaaattcccggccccccccccctttcccaatttatttctggattttaagtaaacccgggttttccctttgtgggcaaggttgtcctaaacctccgatttcggggcattccccccccttggccctcccaaggtttgggtttcccaacctggacccccgggccccgcccgtttcaaatttttgtgtaaaaatgggcg

SEQ ID NO: 96424 - DNA, 321 bp, Homo sapiens
ggcacgagaaaacccagcccatgacccgtaacaggggccctctcagccctgctaatgacctccggtctaaccatgtgattgcacttccactccataacgctcctcatactaggcctactaaccaacacactaaccatataccaatgatggcgcgatgtagcacgagaaagcacataccaaggccaccacacaccacctgtccaaaaaggccttcgatacgggataatcctatttattacctcagaaggtggtttattcgcaggatttttctgagccttttaccactccagcctagaccgtaccccccaattaggagggcag

SEQ ID NO: 96425 - DNA, 370 bp, Homo sapiens
  misc_feature (1)...(370): n = a,t,c or g
ggcacgagaatcactattagtgaatggagaatacacttgaaagggctgtgttttaaatctggatgggaagagttctttggaaggacagattgtatggggtgttctgcagggcgttcaatagggcagttacttccagggtgtgggccgaggacccttggagggttcccaagaccctttcagtggatccaagaaaactcccccctttcagctaaatatctgtgagaggccagatttacttcacataatttttttttttttttgagacagagtctcacactgttgcccaggctggagtgcaatggtggggtgatcttggctaattgcaaccttcacctcccgggtttaagcgattttgcctaagcctcccacn

SEQ ID NO: 96426 - DNA, 345 bp, Homo sapiens
ggcacgagcgcatcgtcagctggatgagccatgattataacgacggcctggggagagacacccgagctggtgaagtgaagaaactgtggaacggcaacggacgaagacttgaagtgagtcatcacagactgggacctctatcacatctagcagaaatgcacgaaggagagagagtgagaagtctctacaccttgaaacactcaataaggaggaagattgccactctccaacttttaaaccttccactcctgatcatcccctaaaggtaatgccagccccttcaccaaaggagaatgcttgggtgaagcgaagttctaaccctcctgctcgatctcagagctcaga

SEQ ID NO: 96427 - DNA, 376 bp, Homo sapiens
ggcacgagcggtgagccaagatcgagccattgtactccagcctgggcaacaagagtgaaactccatctcaaaagggaaaaaaaaaaaaaaaaaaaaaaaaagggaagggggggggggaaaaaaaaaaaaaaaaaaaaacggaggggggaacaagggggttaacccaggaaacccaattttttgggaacccaaaggggccaaaacatttgggggcaagaaattaaaaacatcgggccaaacaggccaaaagggggaaccaaccccgggaataccggtttactgaggagaaaaagggggaaaaattgtttaaccccgggggggggaggtcacagaaaccaaaaacggggcaatggaattcagccgggggaaaaaaaaa

SEQ ID NO: 96428 - DNA, 336 bp, Homo sapiens
ggcacgagctactagccagcatactactcatatactgatgatgccgcgatgttacacgagaacgcatcataccactggcgcaccacactccacctgttcaaaaaggccttcgatacgggataatcctatttattacctcataagtttgtttcttggcaggactgttctgatacttataccactccagcctaccctctacggcccaattaagaggtcactggcctccaacaggcatcaccccgctaaatcccctagaagtcccactcctaatcacatccgtattactcgcatcactatgttcatttatctgagctcaccatagtcttatcgaacacg

SEQ ID NO: 96429 - DNA, 336 bp, Homo sapiens
ggcacgagctgggaggcggagcttgcagtgagcagagatcgtgccactgcactccagcctgggcgacagagcgagactccgtctcaaaaaaaaaaaaaaaaaagagtcaaaaaccgacttaaaaaattgggaaaaaccctgatttaataaaaaacccaaaatttacccgggcccggggcccccccttaaaaacccgatttactaagaaggttgaggcagaaaaatgtttaaaccccggaggccaaagtttgaaggaagagaaaacggcccaatggccttcgatttgggccaaaaaagcaatactccttaaaaaaaaaagataaaaaatgattttag

SEQ ID NO: 96430 - DNA, 337 bp, Homo sapiens
ggcacgaggttgcagtgagccaacattacacccatgtactccagcctgggtgacagagtgagactccatctcaaaaaagaaaaaaaaaaaagtggagtgcagtaacgggaatgtgtgcagaactatgtgtatattgtgttgcttttggtgaaaaaaatgggaatgacgacagagggatcatgtccttggaatgttatatgtcatgaaagctagggagcgacggaaagattaatatacttctaacctacgagtatcgatatcaagggtatatttcaatgaatacagtagattacaatcatcaaagatcttgataacacttttataacgctatgttgcg

SEQ ID NO: 96431 - DNA, 348 bp, Homo sapiens
ggcacgagttttagtccaaatccttcatcatatcttacttgacttattgtaggggcctactgaccagagggccttaatccacccttgctccattaaggccacggcatctcataaccgcctgtatctaagaactcaagttgattattataaaaacaccataggctgcgcgcactagctcatgcctgtaatcccaccacttacggaagccaacgtgtgcatatcatctgacgtcctcagctcaagaccaacttgaccaacatggagagaccctgtctatactaataatacgcttacaattacttaggcatggcagtgcatacctgtaatactcactactttgcaagctga

SEQ ID NO: 96432 - DNA, 338 bp, Homo sapiens
ggcacgagaacaaacaaacaaactccaaatactttaaatgctattacagattataaaattacaacactgcagacttggcagaaggaaagatttagatttcagaaaacatacacaagtcatttggtagaaggcccagggatatgaacagatactacacgcatgagaaaatatcatgagtaaaacaagtacagaaaactgtacaaaacagtgccacttttggcatgttaacatttgatattctattttttttttttttttgagacaaagtctcgctttgtcacccaggctggagtgcaatggcgtaatctgggctcgctgcaagctccacctcccgggtc

SEQ ID NO: 96433 - DNA, 353 bp, Homo sapiens
ggcacgagctgggtaatttatgaagaaaagaggtttaattgactcatagttccacagattgtatgggaagcatggctggggaggcctccagaaacttacaatcatggcagaaggcgaagcggaagcaggcatttcttcacatgacagagcaggagagaaagagcgaaaggagaagtgctacacacttttaaaccaccagttcttgtgagaacttacgcacttatcatgagaagagcaagggggaagtctgcccccatgattcaatcacctcccaccagacccctcctccaaaattgaggattacaattcaacatgagatttgggtggtgacacagagccaaaccatatcaaca

SEQ ID NO: 96434 - DNA, 338 bp, Homo sapiens
  misc_feature (1)...(338): n = a,t,c or g
ggcacgaggagactgctatgaagacatcacattttccaaagataacctatagatttaatgaaaatggccagttttttccaaattctatacctcgcaagctaattctaaagtatacacagaaagaaaatcttaaagaattatctaaaaacttgtagagttacccaaataataggaaaataggtcaacatttcatataactgagttaaaaatgaaccatttagccgtgctctgtggctcacacctggcctgtaatcccagcacttggagaggctgaggcaggcggatcgcttgaggtcaggagtttgagactagcctggccaagacggtgaaacctcgtn

SEQ ID NO: 96435 - DNA, 352 bp, Homo sapiens
ggcacgagcaaagattaacaccagaatggaagaaagcagcaactgcattaggagatgttgtcaaagttggtgcagttgatgcagataagcatcattccctaggaggtcagtatggcgttcagggatttcctaccattaagatttttggatccaacaaaaacagaccataagattaccaaggtggcataactggtgaagccattgtagatgctgcgctgagtgctctgcgccagctcgtgaaggatcgcctcgggggacgaagcggaggatacaggtctggactacaaggcacaagttatagatcaagtaagaaggatgtgatcgagctgactaacgacagctttgataacat

SEQ ID NO: 96436 - DNA, 349 bp, Homo sapiens
ggcacgaggactattctctacaaaccacaaagacattggaacgctatacggattattcggcgcatgagctggagtcctaggcacagctctaagcctccttattcgagccgagctgggccagccaggccaccttctaggtcgcgacgacatctctcggatacatgtgaagcggataattccaggctgcgggacactggacggcattagtgtgggccgggaatgcgcctgcctgtggacgccagcctgtagccgcaagtgcgcgagaggctgaagcgggagattcggttggaccccggagttcaggcattcggcggcggtgggacggccggtgtgcggcgggaatgtgggg

SEQ ID NO: 96437 - DNA, 317 bp, Homo sapiens
ggcacgaggagaattctatcaaacatttaaagaattaatgtcaattctacatactcttccagaaaaacagaaagggagggaactcttctgttctctcttctcttctctgctttctcttctcttcttcttcttttttttttttcccttgaaaaagggtcggtctctgtggcccatgttaaagggcaggggcatgaccagggttcactgcaccctcaaccttccaagctaaagcagccttccaaccttaccctcctgagtacctgaaactacaggggcctgccaccatgcccagctaatttttaatttggtaaaaagga

SEQ ID NO: 96438 - DNA, 325 bp, Homo sapiens
ggcacgagattttgtgtttccattttaatttgttccaagaattttttttttatttcttccttaatttgtccctctaccagtggtcattcaggagcatgttgtttagtttccaggtagttgcacagtttccagagttcctcttgttattgatttctagttttattctattaagttattagaaaatatatgatataatttcagtgttttaaaatttcttgaggccgggcacggtggcttacacctctaatcccagcactttgggaagccgaggtgggcagatcacgatggcaagagatcaagaccatcctggccaacatggtgaaat

SEQ ID NO: 96439 - DNA, 330 bp, Homo sapiens
ggcacgagcttggagtcccagctactcaggaggctaaggtgggaggatctgttgagccgaggagtttgaggctgcagtgagccatgatcataccactacagtctagcccaggcgacagagcaagaccctgcctctaaaaaaaaaagtccacttgagactggaggagccctagagggttccccggaggagatggcactttgagccaggcctgaaggatggatcaggtttcaagcagaggagatggatgagaaaagatgctgccagatgagggaacagcatgggcaaacgcaacgaggagagaaagtaccagatacgtgggagggaaatgct

SEQ ID NO: 96440 - DNA, 329 bp, Homo sapiens
ggcacgagggtttgtgttttgaatgagtgagaactgcagcaataaatagacctggctttttactaccttgcttcatagggcagaatttctttttttattagagatttgaaacatacagattaggtgtgtgaatgatactgactcctcattagtatctattatccagcttgagtggtttagattgtgtcatattcttttcttttatcttgtttttttattggtttatagtttactgtcatgtgtttatggtatatctttttttttttttgtttgtgattttgtttgttctttgtgtttttgtcgtttgtttttattttttgctttttgtg

SEQ ID NO: 96441 - DNA, 349 bp, Homo sapiens
  misc_feature (1)...(349): n = a,t,c or g
ggcacgagacacaggaggatgtgcctagataatatgcaaatatgataccgttttgattaacaaattaacaaatttttttttttttgaaattgcgccacggcactccagcctgggcgacagagcaagactgtctcaaaaaaaaaaaaatttttttttgggggaaacgggtttccacggggttgcccaggcgggggtcaacttctggggttcagggaggcttcaggcctagacttccaaggcccggggagttacagggggacgccaccatgcggggtgaaaatttgggggtgcggggagagccccgggggtctgggaagccgtcccccttggaggcttgagaggagattcn

SEQ ID NO: 96442 - DNA, 366 bp, Homo sapiens
ggcacgaggttacagcagtataacctcacttgttttgttgctgttttttgtttttttgttcttttgtttttttttttagcactcaactcttgtttatcctgtcattttaattgcaatgatggccctgtgtgttttggctaaaaatttgtggcaccagcatattaggattgcatatctatagttaacttacacaattactaaacttaatttaatatcagaatcaaattgaatatccccaaccttatgcccaatgcggcccccggtctggcaatgcacaacaaattggccattcattccctaatggctgacaagtacctgcatctggaatgcatggcctgccctgtacccatcaaggattaaagaaga

SEQ ID NO: 96443 - DNA, 370 bp, Homo sapiens
ggcacgagctaaatgacatttcaccacccttcagatctcaatgtcacttttgacagaaaccttagccaggcatgatagcacacacctgtggtcccagctactctgaagactgaggagaaatgatctcttgaagtcaggagctgggggttgcagtgagctaggattgcaccactgcactccaacctggacaacagagcaagaccctgtctctaggccaggtgcagtggccagtgaacactaatgtcttacgaggtatttatgagagaaaagcttaaaattgcaaaaagtccatgcagagccctcattcctcgcaacacattgggctgaggccactgtctaattgcagtttagggaaagacaggctatcccg

SEQ ID NO: 96444 - DNA, 324 bp, Homo sapiens
  misc_feature (1)...(324): n = a,t,c or g
ggcacgagcacagataaaacatcagtattaagatatctattgagctgcagtattcttacttggtgtaatgatgtggggtgagatttatgattactattgggtgagtttcataagagaattaaaagaaaatcttagagctaaagtagctggaaggatgaatgggtagaaatactaattactgctagaaatactcgtgactgaataaaaatatatgctgccaggcacggtggcttatgcctgtaatcccagcactttgggaaggcgagacaggcagatcacgaggtcaggagatcgagaccatcctggctaacatagtgaaacccn

SEQ ID NO: 96445 - DNA, 331 bp, Homo sapiens
ggcacgaggggatttcaccatgttggccaggctggccttgaagtcctgacttcagataatctgcctgtctcagcttcccaaagtgctgggattacaggcgagagccactgagcccatgagagatctgatggttatgctaatacgaattcaccaggctgatacctcagttatattctgctaccatgctaacggggaagctcatggtaccaaatatcctgttctctggcaccattaaaacggtatttctacaggtaagagtagcacctacacatgggggtataccttttcaggaatcattattgggacgtgatacaaaaaaatccatacttcg

SEQ ID NO: 96446 - DNA, 361 bp, Homo sapiens
ggcacgaggtctcccaggtaaagcacaaagcaatcacctagtatactgttggggtgaaagagggaacatgccttcaaaatatactgacccataaaaatacccaaaaagcgatttacaacctttttaaaatttatttttaatattttgataatataacttttattaagaattgtatccctcttttggagaaaaagttcccctcttggtgtccaggctgaaatgtatcggccagatcttcctgtaacaaaacctccgcctcctgattaagacaaggactcctgccttagcctcctgataacctgggattataggcttgctccaccactcccagctaatctggaattttaaatataaacaggcg

SEQ ID NO: 96447 - DNA, 346 bp, Homo sapiens
ggcacgagggtaatcataagttcaaaataattaacgttcatttgagataattaaatcaaaacctctagtctgggttggagggtgataaagttatctggcgaaatatatgaacttctgttaccttcctcttctgctaaatgaatggtaaaatgaatcctgatttgtttaggcagtttacttatgaagttgggagaattttttttttttctttaaaggactgagtctggctctgttgcctaggctcaagtactgtggatcttggctcactgcagcctccacctcttggattcaagcagttctcctgcctcagcctcccgagtagctgggagccaccatgtccagctga

SEQ ID NO: 96448 - DNA, 393 bp, Homo sapiens
ggcacgagaaaaaataaaaaaaccccacaattttatgctgtaaaggggggggggcccaggcctgaaaaccccggttacttggaaggctgaggcaggaaaagggtttgaccccagggggggaaggctgcagggacctgaaatcaccccttggcattccaccctgggcaacaagaccaaaactccttttaaaaaaaaaaaaaaaaaaggggggaaaaaaaaaaacccttttttagaaggttttggaaattgggcctaattggaaaaaaataagggcacaggatacccctttaaaagggaattttataaacggaaattttttttttctcggggaaaaaaatgaggaaacttgctggttggtttatccccccccctgaattttccaaaacctatggg

SEQ ID NO: 96449 - DNA, 354 bp, Homo sapiens
ggcacgagggtggcgcatgcctgtagacccagctgcttgggaagccgagctgggaggatcacttgagactaggaggttgaggctgcagtgagctgtgatcatgtcattgcatgccagcctgggtgacacttcagtttggtgtgggtctcaatacacagaatgcaaactggaagtaattcagagttgttgatttcaaggcaaaacaaaaaaaaaaaggttttaatggcttggaaggggaatccccacccttttggaagaaaagggggcccaaatcccctggggttaaaacttcgaaaccacctgggccaccagggcaaaaccccttttttccaaaaattttaaaattgacccggc

SEQ ID NO: 96450 - DNA, 376 bp, Homo sapiens
ggcacgaggaaagcataacatgttagacaaatttcattcttaaacattaggttagtgttttctgtcaacagattataagaacttttattgtttttattgtcatttttttcctaaatcgtgtgtggaaaaatattgaatgtcttcaaatgtataatacacacagtaacacaataagctacaaaacaaaaacaaagttgattaacccactatcaagctgatgttaatttcacagagcttgggcattttaatttttattcagaaaagagattttgaagtgaactatgggatgattttaaaaaagagaggctggccaggcccggtggcttacgtctgtaattccaagactttgggaggccaaggtgggcagatcacttga

SEQ ID NO: 96451 - DNA, 360 bp, Homo sapiens
ggcacgaggagatacatgctttataccttaataaacaaatctgtgactcctcactttggagggagggctctgtatattcgtttgacaacggttattaatgttctttgccagtgttactgccttttactgataattctgtctgcttgaactgtcagtatctgattaaagcggatatggcttctaatcttgcacagccatccccatacatccccacatgatcggggagtgactcaactggaggcgattggaccacgatggtactgaacctacgagtacaccgactacggcggactaatcttcaactcctacatacttcccccattattcctagaaccaggcgacctgcgactccttgacgcg

SEQ ID NO: 96452 - DNA, 362 bp, Homo sapiens
ggcacgagtcctttcttttctttcttctttctttctttctttccttccttccttccttttctttctttcttcaacccaaccacccttctgctttctcttcactctaacatttcttgaaaaaaagttttattttcttttgagatggagtctcactctgtcaacaggctggagtgcagtggcacaatctcggctcactgctctccagcttgggcgacaggaactgactccatctcataagactactgaaaacctgagattacattaacgcaccacaacctaaagccctttagggggggttaattatagactgggactgaccatgttttaacagctgagacacgtgcaaaacaactcgtgatgcg

SEQ ID NO: 96453 - DNA, 364 bp, Homo sapiens
agactacaggcgcgcaccaccacaccggctgacttttatgtcgtttctcatgttttccgtacgtaggtatgtgtgtgtgtgtgcgtgtgtgtgagtgtgtctgtgtgtgtgtgtgtgtgtgtatatatatgtacgtacatatgtatgtatgtatgcgcgtgataccgcattcggagatatatcatgttacccactctggtctacaactcatgtccagagatacacgacagcaagtcttgtgcgctacacactggagctattacacgcgcgacacgctgaccctgtctctgtatacatatacctgtctgtctaacagtatgcctcactgtatggctgcatatatgcctgtctgtctgtatggata

SEQ ID NO: 96454 - DNA, 433 bp, Homo sapiens
ggcacgagggctgacgcaggagaatcgcttgaatctgggaggtggaggttgcagtgagctgagatcccaccactgcattccagcctgggcaacagagtgagatgctctctctcaaaaaagaaaaaaaaaaaaaggtacctatagggggattatttgaaaccttctaagttctgaactacatcaattttctaaaggcctaataaatagtaaatccttgaaaagatttcttccttccacccttggaaatcaaaactgagggtataccctggttggttaatggaattaaagtatactttgcagcatatgcatatttattaatagaattaaaggtatatagtatggcgctatcattattggggtaaaagtaattttaagggacagataagacaatattccatactattctgatcaaaatactgggatcacacagggg

SEQ ID NO: 96455 - DNA, 342 bp, Homo sapiens
tggtctctgaattctgaagccttattttcttgtgaataacacgtgatgctgttgatcttacagtttttttttaaaattaattttcagtcttagtttgaccagtgaagattttattatagtgtgaaaatacacagtgaactttgtgccacttgtacatgtaatgcttctaaaggaattggaccaccaggtgtggcggctcatgcctgtaatcccagcacttcgggaggttgaggcgggaggattgctgagcccaagagttgggagaccagcctgggcaacatagcaaggccccatctctgctaataaaaatttttaaaaagataaaggaattgggctgtatta

SEQ ID NO: 96456 - DNA, 349 bp, Homo sapiens
ggcacgaggactctctgaaaaagataactgattcaatgaagaccctagggcaaggcttgagaagccactggtaccaatggacactgtggacaatggtcatttctccaaggacgctgtgagtattaactgtgatgctgtgattagtcagactgggattggctgtggaatgaaatactgatcagaactgacaagatttgcgtttgggactgtggctaacgagtcttttcagacttctatatgaatttgaaatggtctctcaggaaaaggagaacatggccgggcctggtggctcacgcctgtaatcccagcactttggcaggctgacgcgggcagatcacttgaggtcagg

SEQ ID NO: 96457 - DNA, 349 bp, Homo sapiens
ggcacgaggctacttcccctatcatacaagagcttatcacctttcatgatcacgccctcataatcattatccttatctgctatctactcctgtatgccctttacctaacactcacaacaaaactaactattactatcatgtcagacgctcatgaaatacacaccgcctgaactattctgcccgccatcatcctagacctcatcgacctcccatgcctacgcattctttacgttacagacgaggtcaacgatccctaccttaccatcacatcgattggccaccaatggtactgaacctacgaggacaccgactacggcggactaatcttcaactcctacatacttacccc

SEQ ID NO: 96458 - DNA, 352 bp, Homo sapiens
ggcacgagaatagacgtatacacacgagcatatttcacctccgctaccataggcatcgctatcccgaccggcgtcaaagtatttagctgactcgccacactccacggaagcaatatgaaatgatctgctgcagcgctctgagccctaggattcatctttcttttcaccgtaagtggcctgactggcattgtattagcaaactcatcactagacatcgtactacacgacacgtactacgttgtagctcacttccactatgtcctatcaataggagctgtatttgccatcataagaggcttcattcactgatttcccctattctcaggctacaccctagaccaaacctacgcca

SEQ ID NO: 96459 - DNA, 342 bp, Homo sapiens
ggcacgagcacgcttccgtacgtccctgctcctggcttttgccctgctctgactgccctggcttcaagaggctggtgccgctcaaaccgtgccgctaaccacgctttttgaccacactatgctacaagatcatcgggcacaccaactggccattgacacctaccaagagtttgaagaaacctatattccaaaggaccagaaggattcattcctgcatgactcccagacctccttctgctactcagactctattccgacaccctccaacatggaggaaacgcaacagaaatccaatctagagctgctccgcatcttcctgctgctcatcgagtcgcggctgga

SEQ ID NO: 96460 - DNA, 331 bp, Homo sapiens
ggcacgaggctcggcgtgggagtacaagagaagccaggagttcaagacaagcctagactgtaacatagcaagaccctgtctctagaaaaaaaaatttttttcattagccaggcatggtggcacaggcctgtggtcctagctgctcaggaggctaacgatagaggatcacttgacccctggaggttgaagctacagatgccgataagcatagctttgcatgtctgactgactgatggcttgatagcctgggtattagtcatacatatactggtatagagcgacgtttcaacgaatcgttctattagcatggatgaggtcctaagatatgcag

SEQ ID NO: 96461 - DNA, 340 bp, Homo sapiens
ggcacgagcacccatacacacacacacacacacacacacgcgacacacacggacacacacacacacacacacacagaggtgtgaatatggatgtgtataagtctccttcggtgcactgcgtgctcttggtgaagagggattctaataatctagtgatcatagggagtatatatcaatatctttatattgcacaggctatagatatttgtgggaggagagaggtgtcatgtagagatgtggccatgatgtatatatatatagtgcaaaatgtgtgtgtgctactctcacatatatatgtaatctaatatagtgagggaaacgcacacttcacgcactgtat

SEQ ID NO: 96462 - DNA, 336 bp, Homo sapiens
ggcacgagctaatttggttgaggcaggagaatcgcttaaacccaggcggcagaggttgcagtgagccaagatcgcgccactgcactccagcctcagcaatagagtgagactgtctcaaaaaaaaaaaaaaaaaaaaacccggccatttttaaaacttccggaaaaattttttttaggggccctttttatagtataccaccggggttttaacttggggtttccccaaatccatttggggccatggttgggggccggaattttttaagggccataatcagtaggctaagggttttgataacgggcttacccgggcattatcccctattgggaaagggg

SEQ ID NO: 96463 - DNA, 348 bp, Homo sapiens
ggcacgagcctgatctctgatactagtatccttaatcattcctaatgccacatctaacctgctcggactcctgccttactcatttacaccaaccacccaactatctataaacctagccatggacatcccattatgagcgggcacaatggttataggctatagctctaagattagacatgccctagcccacttcttaccacgtggcacacctacgcacctcatccccatactagccatgatcgaatccatgagcctactcattcaaccaatagcaatggccgtacgcgtaaccgataacattactgcgggccacctaactatgccccttactggaagccccactgtaag

SEQ ID NO: 96464 - DNA, 347 bp, Homo sapiens
ggcacgagggagaatcatttggacccggcaggcagaggttgcagtaagtcaagatcacaccactgcattccagcctgggtgacagactgagactctctcaaaaaaaaaaaaaaaaaaaaaccccaaataatcctgggaaatgggggaactgaagggaaccaaaagtaaaggggaaacccatttagggggccatgggggccatccaggcaaaaaataaaggaacttggaccggggggaaaacatggaaaatccaaattttgaaaactggctatcacatctctaaaaatctttttttccacaaaataaccagttaagggtccctctaatctcctttaaaaacaggttgg

SEQ ID NO: 96465 - DNA, 314 bp, Homo sapiens
actcccgacctcgtgatctgccctcctcggcctcccaaagtgctgggattacaggtgtgagccaccacgcccggcctagaattccatttctaacgtgggttaacccagcacttcccaaactcttttgacagggaacccttctcttccccaaggagcttcttacagaacaggtgttctcaggaacacattcgaggagccccctgctaatgagagccagagagcccctgggttcgcacactccaatgctggccatctgaatccggagctgtgggtgggaggggaccctgagccttgggcactagagggatggcatg

SEQ ID NO: 96466 - DNA, 348 bp, Homo sapiens
ggcacgaggtgtacgcttgtagtcccagctactcaggaggctgaggcaggagaatcacttgaacccaggaggcagaggttgcagtgagccgagattgcgccactgcgctccagcgcaagtatcaaaagagaactccggtacggaagaaaagccaaaaacccttaccccttattttaaaaaaggctttttggcccaggcgggggccaccgccccgggcctaaggctttatcctgtaaaaaaattattattgaaaataaaccctttcggaaaatttataaaacctttctccaaccttaaaccttactgggaaagatttaccattacttaactttttttaagaaaaagctg

SEQ ID NO: 96467 - DNA, 333 bp, Homo sapiens
  misc_feature (1)...(333): n = a,t,c or g
ggcacgagaactgggtaaggagatgtaagagacatgggccaagtgctaaggggaggaagagggtaatggcagggcctaggaagggcagtagccagggtgcccaggagttacgaaatcacctgggccgggaatctgaaaggcgctgcctgatttcagcagcttttttttttttttttttttnatnttttntttttttttttttttttttttttttttttttttttttttttttttttttttttttttttttttttttttttttttnttttttnttttttttttttntttttttttttttttttttttttttttttttttttttttttttttttg

SEQ ID NO: 96468 - DNA, 353 bp, Homo sapiens
  misc_feature (1)...(353): n = a,t,c or g
ggccgcaatgggccaacgctggggccaaaaatccacaggtttctctctccatccctgctggtttctagtcccccctccccctcttccctcccaggcttaatcatattttggaacgggtgaggtcttttgttgggtgggcaccccctgattgcttgtctgtttattttttaatgtgcaactaatttgatttgaatttccttcagtttccaggccttcctagggaaagctaagggagagggaatatgctttttaaaaatcgttttctttctttctttctttctttctttctttttctttctttctttctccttctctctccttccttccttccttccnttccnttccntctcttc

SEQ ID NO: 96469 - DNA, 345 bp, Homo sapiens
ggcacgagcggcacgagaccgcatccataatccttctaatagctatcctcttcaacaatatactctccggacaatgaaccataaccaatactaccaatcaatactcatcattaataatcataatggctatagcaataaaactaggaatagccccctttcacttctgagtcccagaggttgcccaaggcacccctctgacatccggcctgcttcttctcacatgacaaaaactagcccccatctcaatcatataccaaatctctccctcactaaacgtaagccttctcctcactctctcaatcttatccatcatagcaggcagttgaggtggattaaaccaaaccc

SEQ ID NO: 96470 - DNA, 345 bp, Homo sapiens
ggcacgagcaatttcacatgattcaacctattaacatacccctgacttaggggctagtaagaggacggttctcagccctgattgcccattagaatacactggaggttttataaaatacccttgctaggacctaaccacaagactattaaattcaaatctttgcagatgggggcaggcatagagctattaaaaaagctcatctgggctgagcacagtgtctcaagcctgtaatcccagaactttgggaggtcatagaggcaggatcgctagacgccaaaagtttgaggacagcctgtccactgtggaaaaaccccatctctactaataatacaaaaatcagccagg

SEQ ID NO: 96471 - DNA, 337 bp, Homo sapiens
ggcacgagagaatttggctgtgacttcatcatgcccatagctcttttctggatggtagggtttttttattagtgtttcaattttagaacttgttattggttggttcaggggttcagctactttctggctcaataatgggaggttgggtgtttccaggagtttacccatttcttttactttttgcagtttgtgtgcttataagagttgataattgtttgaggattcttttttttttttgctacggggtaaattttaaggggcctttgatgattgcgaagtccttattggactcttctttttctcccttagttattcatgctataaggctttttttatt

SEQ ID NO: 96472 - DNA, 332 bp, Homo sapiens
ggcacgagctcggcgtggaggcacgcatagtagtcccagctgctcaagaggctgaggcaggaggattccttgagcccaggaggtcaaagctgcagtgagccgtgattgtgccactgcactccagccagggtgaaagggcaagatcgtgttgccaaatacacgaacatataaaaaataaacataggtgtaaatgggcgggtgcgtatctatggattccctagctaaatcttctgagaaggtccacaaatggattctaaataagacccttcactaaaagaaccagggttcctttatgaaatacccgattctacagctggagacatggaagaacg

SEQ ID NO: 96473 - DNA, 340 bp, Homo sapiens
ggcacgagacaaactattgatatacacaataacttggatggatctcaaaggcattatgctgagtgacgaaaaaacaatctctaaaggtcatatattgtatgattctatttatgtaatattcttgaaatgatcaaattatagagatgaaaacataatattgccaggcatgttgtggagaggtgtgtatgcactaaaggagtagcacaagggagatgtttgtggtgatgaaatatttgtgtatcttttttgtttttgttttgttttgttttgttttgagtctcactctgtcacccaggctggactgcagtggcgggatctcggctccctgcaacctccatct

SEQ ID NO: 96474 - DNA, 360 bp, Homo sapiens
ggcacgaggagcccttattatgtgcccgttactcaactagggtgtttatgggtaatattgattctataagataggcatttaaatgtaagcctcagtttaaagacaaggaaatggttcaggaaggtgaaagtaacttgcttgggatccaaacccagggctctctgacttgggagcatctgccttttctagtatactttcctgtctcctggagtgtgggtgggactttgggtggggtacaagaaattaaagagcttttggccggcgcggtggctcacgcctgtaatcccagcactttgggagactgaggtgggcggatcacgaggtcaggagatcgagaccatcctggctaacacggtgaaa

SEQ ID NO: 96475 - DNA, 351 bp, Homo sapiens
ggcacgagaagagaaagggtacaaaaagcatcaggaatgagaaaaacaatggcacagcagagctttgaaatctaataagaactaatacaagcaactgtatgccaataaatttgagaacattaacaatatgggcaaactccttaaaaaatataacttgtcaatactgatttatgtagaaatagaaagcctgaatagttctttaaaggaatagtcctttatgtactttaaaaattgaacaataggccaggcgtggtggctcatgcctttaatcccagcacattgggaggctgaggtgggtggatcatgaggtcaggagttcgagaccagcctaaccaacatggtgaaaccccg

SEQ ID NO: 96476 - DNA, 360 bp, Homo sapiens
  misc_feature (1)...(360): n = a,t,c or g
ggcacgagagtaatagttgtccaaagaactgctctaattgaggaggcagtagcatagcctgaaccagcttctaggtttgctttccattttgctgtaaatctgggaaagtctctctctttttctctctgtgtgtgtgtgtgtgtgtgtgtgtgtgtgtgtgtgtgtacgtgtgtgtattttatctttcttttttacgtatcatattttatctccatgaaacatgaccttaggaataagccttccaagtaatgtgggacctgaacatcctggcgacaagggacaagctcnnnnnnnnnnnnnnnnnnnnnntgaaaccagagacttatttacctctaaaattctttctccataagattttag

SEQ ID NO: 96477 - DNA, 338 bp, Homo sapiens
taagctgattctcatatgtggaaatacaaagcaccaggaataaccaagatactcttgaagaagagtaagatatgaggatatcatcaagattggatatcatccagatatcaagatttatttcacaaagatatgatatttaaaataatgtcatattggtacaagaaaagacaagtagaccattgggatagaatagagagcccagaaaccagttcacaaatgtatgaacacctgatttataacaaagataacattgcagagtggtgagagaaagatagttttctcagcaagtggtgctgggacaattagatatccatatgaaacttggcacctacctttca

SEQ ID NO: 96478 - DNA, 436 bp, Homo sapiens
atcgctatcctgacatgatacgattatacactcctatagcgagtcggccctagaggccaagaattcggcacgagggccacagtaattacaaacttactatccgccatcccatacattggggcagacgtagtaaaatgaggctgaggaggctactcactagacagtcccaccctcacacgattctttacctttcacttcatcttgcccttcattattgcatccctagcaacactccacctcctattcttgcactaaacgttatcaaacatccccctaagaatcacctcccattcccaccaaatcaccttccacccttactacacagatcaatactccctccgcttacttcccttccttctctcttttacgacattactacttatcctccctaactttctattctatccaccctaaacgactcttacctttcccttcg

SEQ ID NO: 96479 - DNA, 398 bp, Homo sapiens
cgcaaaattagccccctaataaaattaattaaccactcattcatcgacctccccaccccatccaacatctccgcatgatgaaacttcggctcactccttggcgcctgcctgatcctccaaatcaccacaggactattcctagccatgcactactcaccagacgcctcaaccgccttttcatcaatcgcccacatcactcgagacgtaaattatggctgaatcatccgctaccttcacgccaatggcgcctcaatattctttatctgcctcttcctacacatcgggcgaggcctatattacggatcatttctctactcagaaacctgaaacatcggcattatcctcctgcttgcaactatagcaacagccttcataggctatgtcctcccgtgaggccc

SEQ ID NO: 96480 - DNA, 369 bp, Homo sapiens
aactatcaaactcctgagccaacaacttaatatgactagcttacacaatagcttttatagtaaagatacctctttacggactccacttatgactccctaaagcccatgtcgaagcccccatcgctggatcaatagtacttgccgcagtactcttaaaactaggcggctatggtataatacgcctcacactcattctcaaccccctgacaaaacacatagcctaccccttccttgtactatccctatgaggcataattataacaagctccatctgcctacgacaaacagacctaaaatcgctcattgcatactcttcaatcagccacatagccctcgtagtaacagccattctcatccaaaccccctgag

SEQ ID NO: 96481 - DNA, 342 bp, Homo sapiens
ggcacgagaacttaatatgactagcttacacaatagcttttatagtaaagatacctctttacggactccacttatgactccctaaagcccatgtcgaagcccccatcgctgggtcaatagtacttgccgcagtactcttaagactacgcggctatggtataatacgcctcacactcattctcaaccccctgacaaaacacatagcctaccccttccttgaactatccctatgaggcataattataacaagctccatctgcctacgacaaacagacctaaaatcgctcattgcatactcttcaatcagccacatagccctcgtagtaacagccattctcatcc

SEQ ID NO: 96482 - DNA, 361 bp, Homo sapiens
ggcacgagtctgcctacgacaaacagacctaaaatcgctcattgcatactcttcaatcagccacatagccctcgtagtaacagccattctcatccaaaccccctgaagcttcaccggcgcagtcattctcataatcgcccacggacttacatcctcattactattctgcctagcaaactcgaactacgaacgcactcacagtcgcatcataatcctctctcaaggacttcaaactctactcccactaatagctttttgatgacttctagcaagcctcgctaacctcgccttaccccccactattaacctactgggagaactctctgtgctagtaaccacgttctcctgatcaaatatcact

SEQ ID NO: 96483 - DNA, 284 bp, Homo sapiens
ttcaaatctactattatatatggcagagctcaatactaatattaactgtaaatagatcagacattccaataaaggaattattttcaggctggataaacacacacacaaacacacacacacacacatacactcacatgcacacaccatactatgtgctggctaaaggagacacactttgcatataaatagaactacgctgaagataaagctctggacaaaagtgtatcacgtacacagcaaccataaacagatatatgcgtatactattagtcgacgctttcgca

SEQ ID NO: 96484 - DNA, 391 bp, Homo sapiens
caggatttctcattactaacaacatttcccccgcatcccccttccaaacaacaatccccctctacctaaaactcacagccctcgctgacactttcctaggacttctaacagccctagacctcaactacctaaccaacaaacttaaaataaaatccccactatgcacattttatttctccaacatactcggattctaccctagcatcacacaccgcacaatcccctatctaggccttcttacgagccaaaacctgcccctactcctcctagacctaacctgactagaaaagctattacctaaaacaatttcacagcaccaaatctccacctccatcatcacctcaacccagaaaggcataattaaactttacttcctctctttcttcttccc

SEQ ID NO: 96485 - DNA, 380 bp, Homo sapiens
  misc_feature (1)...(380): n = a,t,c or g
cggacgcgtggggctgggcacggtggctcacacctgcgatctcagcaccttgggaggccgaggtaggcggagtgctggagcccaggagtttgaggccagcctgggcaacacagtgagaccccatctctacaaaaaaaaaaaaaaaaaaaaaaaaaagggcgggggggggggttcaaacctttatttcccacctttttgggggcccagggggggaaaaaacaggggccctaaaaagaaaaacttttggcccatatggaaaaaccccctttttttaaaaaaaacaaaaattgtgccactgatgggggcctccctttgtgtatcgccatttttgaggtgccatgcgatggtcaataatggatcctgaaactcgacatcttccn

SEQ ID NO: 96486 - DNA, 324 bp, Homo sapiens
ggcacgagacctgccaccagagcttgtgatttaatcagaggcggcatgagagttttcaatttttttttttttattattattattattattattattattattgtgacgtgatcttgctctgtagtgcttatttgattgctgtgatttgttcgctttttgtatgtttctgtgttattagctgttctttcttgctgattctgttatgtgtcttttgatattatttttggtttgttgttctttctttcgtctatttttcgtgtttcgttggtattattttgtgttgttctgctgcgggtttatgtgtttggtattgtttgtatatag

SEQ ID NO: 96487 - DNA, 345 bp, Homo sapiens
ggcacgagagcccacagatccctctaaatccccttgtaaatttaactgttagtccaaataggaacagctctttggacactatgataaaaccttgtagagaggtgaccgccctttcttgacctcctgctccttcgagctaatacaccacctcccttattcaggaccggctcttcttaatgatggcggttctctcttcagcctctcttatgaggggtaacgttggatctaacattatgaatgccctatctcacttcttaccacaaggcactgctacactttttattcccgtactagatattatggaagccatcagcctactcattcaaccaatagccctggccgtcg

SEQ ID NO: 96488 - DNA, 379 bp, Homo sapiens
cggaagctaagaagttaccattaagatcaaagataataagtagcaactggggttcaaatccagattgatcagatgccaaagcctatgcatgctttctctgcaattgcatgctgcagggaatattttaccatttaggtttttcttttgttttaggattattttctttaggatagattttcagcaacaaaattactgagttaaagcctgtggtcattttaaaagttgtgatgcgtatcaccagtctgctttttaaaagaactgtataaatgtccactcccggccgggcgcggtggctcacacctgtaatcccaggactttgggaggctgaggcgggtagatcatgaggtcaggagatcgagaccatcctggctaacacagc

SEQ ID NO: 96489 - DNA, 374 bp, Homo sapiens
ctgagttggtgtttaactctttattttgcctacctcctggctcttttttatttttattttttgaagatactggatcttgctatcttgcccaggctggtcccatactcctggccttgagccagttctcctgcctcggcctcccaaagttctgggattactggcatgagtcactacacctggcctctacctcaaactttgaacccattccttttttttgtcccctaaacataacttgaaggaatcctcatacagctcttagcatttttccaagtattacctctttttaagtttcaacctttgcagtattttaaaggcctgtgttatactttgttattaatcctcagttgtgtggcacttttcatctttcaagtgtg

SEQ ID NO: 96490 - DNA, 288 bp, Homo sapiens
aaatatctcatcaacaaccgactaatcaccacccaacaatgactaatcaaactaacctcaaaacaaatgataaccatacacaacacttaaggatactagtataacagatcagggtcatcctttaatggagtgtatgattatcatttgcttagaagtgagagtgaacatccatggatgatagttgacaatactgaatatgatgagatatacacacgaggcggcatagaataatgtaacgtttaatgcttataattgactacaatatttgacctaactggatgtaaatta

SEQ ID NO: 96491 - DNA, 332 bp, Homo sapiens
cttgcctccctccttctccctcctcttggctccttctccctcctcttccctccctccttctccctcctcttccctccctccttctccctcctcttccctccctccttctccctcatcaagcctacatacttctcactcatcaaccctaactccatctgcctcttgcacactaactataactgaatcattcacacaaagactagctcaatcttacataactatactcccctaagcttcaagaacgaccatgcaactattgaaatatagaacccttcaaacgactagaaataatacccactccatgactagacctaaagcactaactaaaataa

SEQ ID NO: 96492 - DNA, 243 bp, Homo sapiens
aagacattggatttggcactgatttctcagatatgacaccaaaagcacagactaaacaagtagatcaattggacttcatcaaaatttaaaacttctggccaggcaccgtggctcacacctgtaatcccagcactttgggaggccgaggcatgtgaatcaccaagttaggagtttgagaccagcctggccaacgtggtgaaacaacacaaaaattggccgggcatggtggcgtcgacgcggtcg

SEQ ID NO: 96493 - DNA, 301 bp, Homo sapiens
ttggctcactgcactccagcctggacaacagaactagactctgtttcaaaaaaaaaaaaaaaaaaaaaccaaaccaaaaaggggtaaaaaaatttttttccaaaagggttggttgcaaagagaaagatataaaaaacataacaaagaataacaaatatatgcattaaagtacccacattaaacatataatctgaactgctaacacagaattagaacaaaatagtcaccatatacgacacactaacgttaacatcacttacaatataaaaaaaaagaccgtttgaaacatcactaacaaaag

SEQ ID NO: 96494 - DNA, 107 bp, Homo sapiens
tggcaataaaaatgattaaggatactagtataagagatcaggttcgtcctttagtgttgtgtatggttatcatttgttttgaggttagtttgatgtcgacgcggccg

SEQ ID NO: 96495 - DNA, 323 bp, Homo sapiens
ttgaagagtatgcaatgagcgattgtaggtctgtttgtcgtaagccgatggagcttgttataattatgcctcatagggatagtacaaggaaggggtacgctatgtgttttgtcagggggttgagaatgagtgtgaggcgtattatacgagggctatgaggctgattgaatagtatgcttgggatctgcccgtctcggcctgccatagggctgggattacaggtgtgaaccatcatgcttggtcgattctttttttgtcgtttcctttgtcttgttatcttctttttttcgttatttttgctattgctttctttatattatcgg

SEQ ID NO: 96496 - DNA, 310 bp, Homo sapiens
acaaaatttattttaaaaattagctgggtatggtggcatgtgcctgtggtctaaactacttgagagaccaacgcgcatgaatcacttgagcccacgaagcgagggcctgatggagccatgatcacacaactgcattccagactggacaccatagcagaatcctgtctcagtacaaataactggtttttgttttctgacacctaaccttgctatgccgcccaggctgaacctcagtggcccaatctgctgtcagttgagcctccgactgctgggtcctcgcctctttgctgcgtcagtttctggagtatga

SEQ ID NO: 96497 - DNA, 378 bp, Homo sapiens
cagcactttgggaggccaaggtgggaggattgcttgagaccgggagttcaagcctggtcttatgggcaacatagtgagacttccatctctactacaaaagaagacaaattttaaaaggaaaaggtggtatggatgctaatttgtggaggaatatttctacctgaagtctgctattatctctttgaaagaggaagtgaggacacattctgagaagtacgaggcggaagtggtggaattgaaagctggaagacagttgtgaggatttggaataggtattgaggcaatgggagttggagttcacttggaaaatgtagagagaccaggatgggtctgatgaccatgggtttttgcggcggtttctgttgagtgtaaggatcg

SEQ ID NO: 96498 - DNA, 129 bp, Homo sapiens
cacctattcggtacaaaccacagggacattggaacactatgcctattattcggcgcatgagctggagtcctaggcacagctctaagcctccttattcgagccgagctgggccagccgtcgacgcggccg

SEQ ID NO: 96499 - DNA, 323 bp, Homo sapiens
tgtgtatgttggggatatagaattcccagatgtaatataggacaccacctaaagttttttttcttttctctttttttttttttttttggaaacaaagtttggttttgttccgaaggttgaagggcaggggaccaacttttgataatggaacctttggcttccgggtttaaagggatttttttccttaaccttccccagaactgggaataacgggtttcccccaaattgccgggtaaattttggattttttaattaaaaacggggtttccccttgtggcccaggttgtttttgaactccggacctcgggggatcaaatggcctg

SEQ ID NO: 96500 - DNA, 367 bp, Homo sapiens
gtcctcctcagtttttttctttcaaaggttttcataggtgtagttgcacatttatttttctatgtgaatttaggaatcaccttcattagttctagagaagttagcatttttatgtgggtcacactaaatgtattcattcacgcaaacacatatacatacataagcaaatacatacgcatgcacttttatggatgtgtttccatctagtcagatctgcttttgtgtttttcaggagtgtttttgatttttttgttcttttttgttttgagatggggtcctgctctgttgcccaggctggagtgcagaggcatgatcatagctcactgcatcctcaaactcctgggctcaagtgattcccaggagtctc

SEQ ID NO: 96501 - DNA, 257 bp, Homo sapiens
ttccagataagaagttaagctggactcaatggctcatacctgttgccccagctatttgaggggctaaagtgaggggattccttgagcccaggggttcaagggtacaatgagctatgatcaggccactgcactccagcctgggtgacagagcgagaccttgtctctatgtttgttttttttttaatgaaaaaaaaaatcctggcacacctaaaactttaatatttagaaaacaatctaaacaaaaaaaaatgagaaaa

SEQ ID NO: 96502 - DNA, 242 bp, Homo sapiens
aatttctctaattaaggctagtttacacaccagttatcatgttataatattctatgattttctgtgtacttatattgccagttagttttacatcttcagatggtatctttttgcttattaatctttttcttttttattgaagtacataccctttagctttttttaagacagagtctcactctgtcacccaggctggagtgcggtggcaccatcttggctcactgcaacctccacctcccagg

SEQ ID NO: 96503 - DNA, 309 bp, Homo sapiens
ctaagaccagtatgaactgatagctttaacattatctgttttaaggaaatatcaattgtgagcaaaggcttgctacaataataaaaacctgttaaacaatgatgcccatacttcaaaggaaatgttatacacctctaaatatctgttccagaataaatagaatccaattaacaatgaaagggcaaggaaataaaaaacacaacaacgtatctaacaaaaaagagaatggaaagaatattctgtaaaaataaaaaccacacacacacacacacacacacacacacacacacacacacaaattataaaccc

SEQ ID NO: 96504 - DNA, 251 bp, Homo sapiens
  misc_feature (1)...(251): n = a,t,c or g
ttttcagtagagacggggtttcaccacgttggccagcctggtctttaacccccgacctcaggtgatccgccctccttggcctcccaaagtgctgggattacaggcatgagccaccacgcctgacctctttcttcttttttttggaacatttccttattttctggcacaaaatcttccagactcatcttgtaccttctctgttccagttttagaactggccatttctcttataaatgaaaagctgagtgttn

SEQ ID NO: 96505 - DNA, 167 bp, Homo sapiens
gccaggctggtcttaaactcctgacctccagtaatccacctgccttggcctcccaaagtgctgggattataagcatgagccacggtgcccaaccttgggttgtattattaatcaggctttctatttatgttagtgccactaactgactcttttgaacacatgttgcc

SEQ ID NO: 96506 - DNA, 357 bp, Homo sapiens
  misc_feature (1)...(357): n = a,t,c or g
ggcacgagggattctactgctgaggataatgctgacgacactaaccagatacccatgatgacgcgatgtaacacgagaaagcacataccaaggccaccacacaccacctgtccaaaaaggccttcgatacgggataatcctatttattacctcagaagnttttttcttnncangatttttntnnnnctttntccnntncnnnctnncccctaccccccnnttnctaaaacncttccccccctcctccttccccccncttnnttcctttttccnctcntttcttccctcttccctcttcntcnctctnctccnttttctctnttctctnnntcctcttcccntcnnntnntncttccc

SEQ ID NO: 96507 - DNA, 351 bp, Homo sapiens
ggcacgagaatacacatcgctacaactgatcctacaaatgacctttataatggcatttacatgcacagatcgaaccttatatgagctcgcctttgagtgctaactgatgcgaaccttggatataatcactcgatgaggcaaccagccataacgcccgaacgcaggctcatactggctattctacaccctactaggcacccttcccctactcatcgcactaatttacactcacaacaccctaggctcactaaacattctactactcactctcactgcccaagaactatcaaactcctgagccaacaacttaatatgactagcttacacaatagcttttatagtaaagatacc

SEQ ID NO: 96508 - DNA, 321 bp, Homo sapiens
gccgtctctgtacctcttctcttctttctgagccctcatgggaatcaccttttttttttttttgggaaagggggtcttggccccccgggggggagggcgggggggcaatccgggtttatgggggggcccccctccggggttagggcctttctccggctaaagcctccaaggggggggggcctaggggcccccaccacaagccggggcaaattttgggtttttaattttgagaaaaacacggggttccccggggtgccccggggggttttggatcccgggacctggggaccggcccgctggggccccccaagggggggggtg

SEQ ID NO: 96509 - DNA, 361 bp, Homo sapiens
ggcacgagcacgcgacttggagtactgctgctatcattgcaccatgccggatctatcaaccccctaggaatcaccttgcattccgataaggtcaccttacacccttactacacaatcaaagacgccctcggcttacttctcttccttctctccttaatgacattaacactattctcaccagacctcctaggcgacccagacaattataccctagccaaccccttaaacacccctccccacatcaagcccgaatgatatttcctattcgcctacacaattctccgatccgtccctaacaaactaggaggcgtccttgccctattactatccatcctcatcctagcaataatccccatcctcc

SEQ ID NO: 96510 - DNA, 350 bp, Homo sapiens
ggcacgagcgcttatactccgtaccgctacgtatactacgccgactccccgacccactatccataccccaaggatggcgccatgttatacgagaaagcgcatacaaaagccatctcacactacctgcgcgaagaggccttcaagacgggataatcctatttattacctcagaagtggttttcttcgcaggatttttctgagccttttaccactccagcctatgccctaccccccaattatgagggcactggcccccaacaggcatcaccccgctaaatcccccagaaagcccactcctaaacacatccgtattactcgcatcaggagtagtaatcacctgagctcaccct

SEQ ID NO: 96511 - DNA, 410 bp, Homo sapiens
ccatgttggcccggctggtctcgaactcctgatggcaaggtgatctgcctgcctcagcctcccaaagtgctgggattacaggcatgagccactgagcccggctgtttttttgtgtttttttttgttgttgtttgtttgttttttttttgagacagagtcttgctctgtcgcccaggctggagtgccagtggcgcgaatttcagctcactcaggagtgagccaccacacctgggcctgtgattggctctattttgagtgattacgtgtaaatcatctagaaccagctctgagcaatggcgttgcggtgtccctccctccccgctggggccataccagcccctctccactgggagcccaagttggccaatgactgtggccaaactcccccatttttgtctgtatcctgctct

SEQ ID NO: 96512 - DNA, 369 bp, Homo sapiens
ggcacgagcggcacgaggagatgtgatttagtcttttcatgtttttgcccaacgtgatctcaatctcctaagctcaagagatcttcctgctttggcatcccaaagtactggcattactggcatgagccaccaatgcccaggctaatattgattttttttattgcttctactccatctaatatacaagccttgcttaaattagtactctacctgtctcccatactcacatccattctctatcacctcgtttttactgcactaccgcatcttcacttctatccttcagcgtgatctactctcatacacactactacaataactcgcgaacagacacacctccacatcagtgcgcgcgtagcgtctctcacc

SEQ ID NO: 96513 - DNA, 343 bp, Homo sapiens
ggcacgagggaggtacagatgcctttgagaaatgaatgaagtagagagaaggggaagaaaaactagccaggcacagtggctcacgcctgtaatcccagcgctttgggaggctaaggcaggcagatcacttgagaccagcttgggcaacatggcaaagccccatctctacattaaaacacaggaattagctgggcattgcggcgcacacctgtattctcatctactctggatgctgtcatggaataattacttgcgcccactaattctctgtctgttccgtatactcttttacctcttcccttcctcctccgtctcttcctactcgttttctccttcgtaactt

SEQ ID NO: 96514 - DNA, 337 bp, Homo sapiens
ggcacgagttcttatcctaccaggcttcggaataatctcccatattgtaacttactactccggaaaaaaagaaccatttggatacataggtatggactgagctatgatatcaattggcttcctagggtttatcgtgtgagcacaccatatatttacagtaggaatagacgtagacacacgagcatatttcacctgcgctaccataatcatcgctatccccaccggcgtcaaagtatttaactgactcgccagactccacggatgcaatatgatttgatctgctgcagtgctctgatccctaggattcatatttgttttcatcgtaagtggccaggct

SEQ ID NO: 96515 - DNA, 388 bp, Homo sapiens
ggcacgagctcggcgtggttgaggcaaaagaattgcttgaacccaggaggcagaggttgcagtgagccgagatagcgctattgcactccagcctgggcgacagagactccgtctcaaaaaaaagaaaaaaaaaaaaaatgtcaaacgtttgaacccgaaagttcttttcctgtctgcctggaaaatggtgggggtggtaattttatctctttattttttttattcttgattatattatctctttttttttatttttattaatttttttttattatttttgtttactcttattattatttttatttttgtttgttttcttatttttttttttatttttttattaatcttattatttttttattgttaaattacttcttttttttcattt

SEQ ID NO: 96516 - DNA, 374 bp, Homo sapiens
ggcacgagtttgagactgcatagggctcggcgtggatagcaaagtgaaaggaccaggagcccacagacatggggtccgcccatttccaggtcttcaaaggctggaggcaagttggaggagctaatgaagatagaattaattctcatgggggcccagtcatgttttctggccagtattatggtcagttagtcagatttcttgtctattaaatcattatctttttcatgcttttatttttttctttattttattcttattttctttttattagtattttttttgttttggttttctattgtctttttatttttttattttattttagttttttttttatttttgttttttttttttattattttattgttattttt

SEQ ID NO: 96517 - DNA, 307 bp, Homo sapiens
ggcacgagggatttcactacattagccaggatggtctcgatctcctgacctcatgatccgcccgtctcggcctcccaaagtgctgggattacaggcgtgagccaccgcgcccggcccgatttcccactttaagaatctggctgtacatcctcaaagccctatacacagtgctgggttgctatagggaatatgaggcttacaggccatggtgctggacacacagaatggacggaggtcaagaggtagaagggcggagagagggaacaggcggaggtcacatccttggcttttagattgggccagggag

SEQ ID NO: 96518 - DNA, 420 bp, Homo sapiens
gcgtagatccggaggcgcgacgtcctgcttctgactcttacctccctctcacctactgctgctcgcatctgctataatgggggccgcagggggaacaggttgaacagtttagcctaccttagcaaggaactactcgcagcctggagtctgcgtaaacctagccatggtctccttacacctatcaggtgtgtcctctatattaggggccatcactttcatcacagcgattatgaatatggaagcccctgccataacccaataccagacgcccctcttcgtctgatacggcctaatcacagcagacctacttgtcctatctctgccagacctaactgctggcatcactatactactaacagaccgcaagctcagcaccaccttcttcgaccccgccggaggaggagaccccattctataccg

SEQ ID NO: 96519 - DNA, 351 bp, Homo sapiens
agagaaataaggcctacttcacaaagcgccttcccccgtaaatgatatcatctcaacttagtattatacccacacccacccaagaacagggttttaaaaaaaaaaaaaaaaaaaaaaaaaaaaaaaaaaaaaaaaaaaaggggggggggctttaaaaaaaaccctgggggggccaaattttaaggggggtgggaaagtaaaaatttttcccttaaagggggggaatttaaaaactatgtggggatttttggaaaggaacttttttttggggggggaaaaaattggggaaaatttccaaaaaaaattaaaaggtttaggggaaaaaaaaaatttttaaggggaaaaggggac

SEQ ID NO: 96520 - DNA, 341 bp, Homo sapiens
tatttagctgactcgccacactccacggaagcaatatgaaatgatctgctgcagtgctctgagccctaggattcatctttcttttcaccgtatgtggcctgactgacattgcattaccaaactcatcactagacatcgcactactcgacacgtactacgttgtagctcacttccactatgtgctatcactaggagctgtatttgccatcatacgaggcttaattcactgatttcccctattctcaggctacaccctagaccagtcctaggccaaaatacattgcgctatcatattcatcggcgtatatataactttcttcccacatcactctctcggcctg

SEQ ID NO: 96521 - DNA, 340 bp, Homo sapiens
ggaactactcgcaccctggagcctccgtaaacctaatcatcttcaccgtacacctagcaggcgtctcctgtatcttaagggccatcaatttcatcacaaccattatcaatatcaaaccccctgccataacccaataccaaacgcccctcttcgtctgatccgtcctaatcacaggagtcctacttgttctatctatcccagtcctatctgctggcatcactatactactaactgaccgcaaccttaacaccaccttcttcgaccccgccggaggaggagaccacattctataccaactcctattctgattgttcggtcaccctgaagcttatattcttac

SEQ ID NO: 96522 - DNA, 364 bp, Homo sapiens
gcgtgtccaaaaaggccttcgatactggataatcctatctattacctcagaagtccttctcttcgcaggatatttctgagccttgtaccactccagcctagcccctaccccccaactaggagggcactggcccccatcaggcatcaccccgctaaatcccctagaagtcccactgctatacacatacgtattactcgcatcaagagtatcattcacctgagctcaccataggctaatacaaaacaaccgaaaccatataattcaagcactgcttattacaattttactgggcctctattgtaccctcctacaagcctcatagaacttcgagcctcccttcaccatttccgacggcatctacgga

SEQ ID NO: 96523 - DNA, 367 bp, Homo sapiens
cccacgcgtccgcccacgcgtccgatacctattattcggcgcatgagctggagtcctaggcacagctctaagcctccttattcgagccgagctgggccagccaggcaaccttctaggtaacgaccacatctacaacgttatcggcacagcccatgcatttgtaataatcttcttcatagtaatacccatcataatcggaggctttggcaactgactaggtcccctaataatcggtgcccccgatatggcgtttccccgcataaacaacataagcttctgactcttacctccctctctcctactcctgctcgcatctgctatagtggaggccggagcaagaacaggttgaacagtctaccctcccttg

SEQ ID NO: 96524 - DNA, 365 bp, Homo sapiens
tctatcatatagtataacccaacccatgacccctaacttgggccctctcagccctcctaatgacctccggcctaaccatgtgattccactttcactccataacgctcgtcatactaggcctactaaccaacacactaaccatataccaatgatggcgcgatgtatcacgataaagcacataccaaggccaccacactccacctgtgcaaaaaggccttcgatacgggataatgctatttattacctaagacaggtttttcttcgcaggagttttctgagccttataccactccagcctagcccctaccccccatctaggagggcactggcccccaacaggcatcaccccgctaaatcccctagaa

SEQ ID NO: 96525 - DNA, 144 bp, Homo sapiens
cagactcgcacggaagacacgtgattaatggataaacatgcgtgactatctgcttcatccgccaactaataggtcactttacatccaaacatcactttggcttcgaagccgccgcctgatactggcataaaaaaaaaaaaaagg

SEQ ID NO: 96526 - DNA, 422 bp, Homo sapiens
accaacgactattagctacaaaccaccacgacattggaactctatacctatcattcggcgcatgacctggagccctaggcacagatctaagcctccttattcgagccgagctgggtcagccacgcgaccttctaggtaacgaccacatatacaacgaaatctgaacaggccatgcattaggaatactcttcttcataggactacccatcataatcgaaggctttggcaactgactacatgccctaataatcggtgcccccgatatggcgctgccccgcataaacaacataagcttctgactcttacctccctatctgctactactgctcgcatctgctatagtggaggccggagcaggaacagggtgaacagtctaccctcccttagcagggaactactcccaccctggagcctccgtagag

SEQ ID NO: 96527 - DNA, 382 bp, Homo sapiens
gccggacgcgtgggctattctctacaaaccacatagacattttaacactatacctattattcggcgcatgagctggggtcctaggggcagctttaagcctccttattcgagccgagctgggccagccatgcaaccttctatgtaacgaccacatctacaacgttatcgttacagcccatgcatttgtaataatcttcttcatagtaatacccatcataatctgatgctttggcaactgactacttcccctaataatcggtgcccccgatatggcgtttccccgcattaacaacataagcctctgactcttacctacctctctcctactcctgctcgcatctgctatattggaggcctgatcaggaacaggttgaacagtctg

SEQ ID NO: 96528 - DNA, 406 bp, Homo sapiens
ctgtaatcccagctacttgggaggctgaggtagaattgcttgatcccaggagggtgaggatgcagtgagccgagatggcgttactgcactccagcctggtagacagagtgagaacctgtctcaaaaataaacattttatgaaaccacaagcttacaaagactggcaccccattataaggctcccctttgggcactatctgtttcatccgccaactaatatttcactttacattcaaacggtagctataaataccaagccgtgcgactgttactggcatactgtatatgtgggcggactatttatgtgtgcctccatctattgatgatggacttatttggggaaaaaaaaaatttttaagcgttaaagggggtcaaaagaggggaaaaagcttttgtttgaaaaatt

SEQ ID NO: 96529 - DNA, 247 bp, Homo sapiens
cccacgcgtccgcccgtcatctactctaccatctttgcaggcacactcatcacagcgctaagctcgcactgattttttacctgagtaggcctagaaataaacatgctagcttttattccagttctaaccaaaaaaataaaccctcgttccacagaagctgccatcaagtatttcctcacgcaagcaaccgcatccataatccttctaatagctatcctcttcaacaatataaaaaaaaaaaaaaagg

SEQ ID NO: 96530 - DNA, 369 bp, Homo sapiens
ggacacgagacagcacatacctaggccaccacactcctcctgttcataccggccttcgatactggagaatcctatttattacctcggacgcttttttcttcgcaggatttttctgagccttttaccactccagcctagcccctaccccccggctaggagggcactggcccccaacaggcatcaccccgctaaatcccctagaagtcccactcctatacacatccgtattactcgcatcaggagtatcggtcacctgagctcaccatagtcttgtagaggacgaccgttaccaaataattcaagcactgcttattacgattctactgggtctctattttaccctcctacaagcgtcagaggacttcgagg

SEQ ID NO: 96531 - DNA, 401 bp, Homo sapiens
atttaacagtttgctgtgtcatagttcttagacttaaaacacttttttttttttttaacaagccttttttgacccaaaaaggttatttcaacaccccagaggagggatttttcaaaaaacctaaccggagggtagggcccccttctcctatgacggaccctactatgttgacaaacttgataaaggggaaggtaccaaaggccccccctaggatcctaatggggggagggatcaacatgactttctaaggctttgtcacacccagggccccatttccactgaccctccgtttaaaccctatgttacagcagggaatcgacctactcacattaaaggcatccggggggagtcctgcatccgggaacttcctaaaggaattggggcttcggagcattaacttt

SEQ ID NO: 96532 - DNA, 348 bp, Homo sapiens
  misc_feature (1)...(348): n = a,t,c or g
ttccattgtacctgatcccaaatcccacaaagacttagaaacttaatttctccatgcaaacttccaagctacaaaatcaaagtttagaatctaaattagtccataaaatattgtgataatatagcaccttgaagggatcataataagccacacatcattactgttttagtccctttatgttgctgtgaaggaatgccagaggctgggtaactgataaagaaaagaggttgaggctgggcatggtggctcacgcttgtaattccagcactttgggaggcgacggcaggtagatcgcctgaggtcaggagtttgagaccagcctggccaacatggtgaaaccctgtctcn

SEQ ID NO: 96533 - DNA, 349 bp, Homo sapiens
agcaaactcaaactacgaacgcactcacagtcgcatcataatcctctctcaaggacttcaaactctactcccactaatagctttttgatgacttgtagcaagcctcgctaacctcgccttaccccccactattaacctactgggagaactctctgtgctagtaaccacgttctcctgatcaaatatcactctcctacttacaggactcatcatactagtcacagccctatactccctctacatatttaccacatcacaatggggctcactcacccaccacattaacaacataaaaccctcattcacacgagaaaacaccctcatgttcatactcctatcccccattctc

SEQ ID NO: 96534 - DNA, 929 bp, Homo sapiens
cccacgcgtccggagacacaataattacttgagcctgggagatggaggttgcagtgagccgagatggcaccactgcactcccgtctgggcaacagaacaagactgtctcaaaacaaaacgaaacaacaaaacaaaacaaaacttccttttcttcccccagagaggaattaagagtagacatagatagggtgttttctcaaaagcccttcactcctcagagtgcttgggtagcgtctctttctttttaccacatcacagttctgaggcctttctcacctagggcaggggaaagaagaggtttgctgagtggattggggtccaccgagcctccatggcttctcttaatcccactgaatttcctttaaaagaaacacttcttatattgaacatattgagaccatttgctcatctgctttgccataaacatccctgtctcgattcctgcttctcctcccccacgtgcttacagctctgggatcacttacagtgacttccagttggtttgagtgaataaacacttgctgaggggtgggggtgagcaaggcgaggttgcctcatgtcttctccaaagggtctgagggcaggcgcttccaggctatttagataagagcagccgttgagggtgttcttcaggaacaggctgctgcccaatcctctgcgacctgcccaggccctggtcttgcagaggagtagggggctccccttcaagcacagcccacctgtgtccacgaggctggaggtcaggccggtgcttcttaccacccctgtctgcctcgtaggtggacagcgccatgtccctgatccaggcagccaagaacttgatgaatgctgtggtgcagacagtgaaggcatcctacgtcgcctctaccaaataccaaaagtcacagggtatggcttccctcaaccttcctgctgtgtcatggaagatg

SEQ ID NO: 96535 - DNA, 437 bp, Homo sapiens
  misc_feature (1)...(437): n = a,t,c or g
atagacnccctcgcgacctcgatcaccctaggaaccgccncggaattttcgggtcaacccacccgtgcggtggcgtgtgactgtggttccggctacttgagaggcttatgcaggaggatcacttgggcccaggagattcaggctgcaatgagccataatcacgccactgcactccagcctgggcaacagtaaatgaatacatgatagatagatagatagatagatagatagatagatagatagatagatagaagataagtaaattaataaaaatagtacctatattgatattttaagatctatcatctatgtatctattatctattttatgtatagaagttgctaccagaggccgggcgcagtggctcatgcctgtaatcccagcactttgggaggttaaggcgggaggatcacgaggtcaggagttcgagaccacg

SEQ ID NO: 96536 - DNA, 357 bp, Homo sapiens
acatacctatgatataaggaaacccagacgatgaaccctagcatgcgccctctctgccttactaacgacctccgggctagccatgacagactgcttccactacataacgctcctcatactatgcctactaaccaacacactaaccatataccaatgatggcgcgatgaaacacgagaaagcacataccaaggccaccacacaccacctgtccaaaaaggccttcgatacgggataatcctatttattacctcagaagcttacttcttcgcaggatttttctgagccttttaccactccagcctagcccctaccccccaattaggagggcactggcccccaacaggcatcaccccgct

SEQ ID NO: 96537 - DNA, 357 bp, Homo sapiens
accacgcgtacgatactctacagaccacagcgacattggaacactatacctattattcggcgcatgagctggagtcctaggcacagctataagcctccttattcgagccgagctgggccacccaggcaaccttctagggaacgaccacatctacaacgttatcggcacagcccatgcatttgtaataatcttcttcatagtaatacccatcataatcggaggctgtggcaactgactagggcccctaataatcggcgcccccgatatggcgtttccccgcataaacaacataagcttctgactcttacctgcctctgtactactcctgctcgcatctgctatagtggaggccggagg

SEQ ID NO: 96538 - DNA, 363 bp, Homo sapiens
aaaaaatttaaaaatagtgcagtatggtgacatgtgcctttggtcccagctactcagggagctgagatgggaggatcgcttgagttcaggaggttgaggttgcagtgagttgtgttcgtgccattgcactccagcttggacaacacagcaagactgtctaaaaaaaaaaaaaaacttttggccagttggggaagtcaaggggaggcacatgctttgaggcagtgagggggatattttttgtgggcatttgccaggcactccatggccacccattcctccttttcctcatggggccagttcatcttggaatctgcccaaagaactcaaaaaagcaataaactggctggctggttgcagttactt

SEQ ID NO: 96539 - DNA, 354 bp, Homo sapiens
cgctatccccatgactaccgctagactgaccatacacgaagcatacctgattatactcgaacggactacaaccacgaccaaagatgtgaagaaccctcggcgtattgcggctgccataactgcatcctgcctgggaggaggacttgaggatgccatttcatgccaatacggaatagcaacaaaagacagaccaacagggttaggtacccctgaagttttgctgggggccttaccaggagcaggaggcacacaaaggctgcccaaaatggtggttgtgcctgctgctttggacatgaggctgactggtagaagcattcgtgcccacagggcattgaaaatgtgactggttgacca

SEQ ID NO: 96540 - DNA, 150 bp, Homo sapiens
acctatttagctgttccccaaccttttcctccgaccccctaacaacccccctcctaatactaactacctgactcctacccctcacaatcatggcaagccaacgccacttatccagtgaaccactatcacgaaaaaaaaaaaaaaaaaagg

SEQ ID NO: 96541 - DNA, 344 bp, Homo sapiens
catagatgctggaaaaaaggaactgatgttttcagcatattttcaaaatattgataagggaagtcattacttttatatagtattcaacttttttcaggtaatagaagtgaataatttattgtgaaataattcattttataaatgtataattatttttataaattttattgttggaaatcaaaaattagtagattttttaccatgttaaattatagtgagattaaagtattactaaactgtgatgctatgtttgtttcactaaactttctaaataaaaactgagaaaaaaaaaaaaaaaaaaaaaaaaaaaaaaaaaaaaaaaaaaaaaaaaaaaaaaagaaaaa

SEQ ID NO: 96542 - DNA, 378 bp, Homo sapiens
cggacgcgtgggcggacgcgtggaaccaaacgcccctcttcaactgatccgtgctaatcacagcagtcctactgctcctatctctccgagtcctagctgctggcatcactatactactaacagaccgcaacctcaacaccaccttgttcgaccccgccggaggaggacaccccattctataccagcacctattctgatgtttcggtcaccctgaagtttatattctgatcctaccaggcttgggaataatctaccgtattgtgactgactactacggaacaaaagaaccatttggatacataggtatggtctgagctatgagatccatcggcttcctacggtttatcgtgcgagcacaccatatagttacagtcggaa

SEQ ID NO: 96543 - DNA, 387 bp, Homo sapiens
ccattctataccaacacctatactgatttttcggccaccttgaaggatatattcttatcctaccaggcttcggaataatctcccatatggtaacttactactccggaaaagaagaaccatttggatacataggtatgggctgagctatgatatcaattggcttcctagggtttatcgggcgagcacaccatatatttacagtaggaatagacgtagacacacgagcatatttcacctacgctaccataatcatcgctatccccaccggcgtcaaagtatttagctgactcgccacactccacggaagcaatatgaaatgatctgctgcagtgctctgagccctaggattcatctttcttttcaccgtatgtggcctgactggcattg

SEQ ID NO: 96544 - DNA, 432 bp, Homo sapiens
cccacgcgtccgcccacgcgtccgaaaacacatagcctaccccttccttgtactatccctatgaggcataattataacaagctccatctgcctacgacaaacagacctaaaatcgctcattgcatactcttcaatcagccacatagccctcgtagtaacagccattctcatccaaaccccctgaagcttcaccggcgcagtcattctcataatcgcccacggacttacatcctcattactattctgcctagcaaactcaaactacgaacgcactcacagtcgcatcataatcctctctcaaggacttcaaactctactcccactaaaaaaaaaaaaaaaaaaaaaaaaaaaaaaaaaaaaaaaaaaaaaaaaaggggggggccttttaaaagaatccttgggggggccaaatttaacgggggagggaaaaat

SEQ ID NO: 96545 - DNA, 391 bp, Homo sapiens
cacagaactaatcatattttatatcttcttcgaaaccacacttatccccaccttggctatcatcacccgatgaggcaaccagcaaaaaaaaaaaaaaaaaaaaaaaaaaaaaaaaaaaaaaaaaaaaaaaaaaaaaaaaaaaaaaaaaaaaaaaaaaaaaaaaaaaaaaaaaaaaaaaaaaagggggggggtttaaataaaaaaggataggggggagttttaaaaagggggggggggaaaaaaaaatttttttttttaagggggggaaaaaaaaaaaaaccgggggtttttttgaaaaaaaattttttttggggggggaaaaatattgagacaacctccccaaaaaaaataaaaccgtgggggaaaaaaaaaattttttggggggggggag

SEQ ID NO: 96546 - DNA, 358 bp, Homo sapiens
cccacgcgtccgtattttcctgtggacgccggggaagcacagcaccacccccgcacctgccgtcggcctttgagagctttgtggtcttcccatcatgaacgctggaaagtgacattgtgtacacactgcagcttgggggttttttttttgtattgctgcacatattatatttttgtactgtttattccatagtcctcatgtggtcttactttgatttttattacttgtattattctctttggttctatctcgttctttcttttctttaccattgttttttctataattatagtaactacttttaagtttagactgttgtattctatcatttttctttcgtatttattatgttagttat

SEQ ID NO: 96547 - DNA, 378 bp, Homo sapiens
aatttaccaagattgaatcctaaagaaatagaaatcctgaacagatcaataatatgtaataagatcaaagcaataataaaaagtctcctgtcaaagaaaagctcgggacataatgatgtcactgctgaattctactgaacatttaaagaagaactaataacaattctactcaaattttacctcacccccaaaaaaaaaaaaaaaaaaaaaaaaaaaaaaaaaaaaaaaaagggggggcccttttaaaaaaacccctggggggccccaattttaccggggccggaaaaataaaatttttccccttaagggggggtttaataaaacccttcggggaatttttggaaaaacccctttttttggggggggaaaaaaagggag

SEQ ID NO: 96548 - DNA, 371 bp, Homo sapiens
cccacgcgtccggaatttccttacaataaagcctctcatgtctgtaaaaaaaaaaaaaaaaaaaaaaaaaaaaaaaaaaaaaaaaaaaaaaaaaaaaaaaaaaaaaggaaaaaaaaaaaaaaaaaaaaaaggggggggggggggttgaagaatttttgggggggggtgttatattgggggggggggggggggtttttttttttaaaaggggggtttttttttgggggggggggggtttttttgggaaaaactcttttttgggggggggggtttttggggaaaatttttttttaaaaggtgtaacccctcgagggaaaatcccgtttttggggggggggggggggtaacacgcttttttaaagatgaaaaaa

SEQ ID NO: 96549 - DNA, 402 bp, Homo sapiens
cccacgcgtccgatctactctgcctatatcctataaatggaataacagagccttgatgaaagcacatctgattatgaaatgatttactgaatattttaagaccactgatgagctctacctgcacgacaacacataaaaaaaaaaaaaaaaaaaaaaaaaaaaaaaaaaaaaaaaaaaaaaaaaaaaaaaaaaaaaggggggcccttttaaaaaaaccccttggggggcccaattttaccgggggggaaaaaaataaaatttttccctaaaaggggggcataaaaaaacccccttgggaaattttggaaaaaaacctttttttggggggggaaaaaaatggggaaaacccccccaaaaaatttaaagcctctagggaaaaaaaaaatttttaaggggggaggg

SEQ ID NO: 96550 - DNA, 365 bp, Homo sapiens
gctatcatatagtgcaacccagtccatgacccctagcaggggccctctcagccctcctaatgacctccggactagccatgagatctcacttccactccataacgctcctcatactaggcctactatccagcacactaaccatataccaatgatggcgcgatgtaacacgagaaagcacataccagggccaccacacaccacctgtccgaaaaggccttcgatacgggataatcctatttattacctcagaagttattttcttcgcaggattattctgagccttttaccactccagcctagcccctaccccccaattaggagggcactggcccccaacaggcatcaccccgctaaataccctagaa

SEQ ID NO: 96551 - DNA, 358 bp, Homo sapiens
cacacaccacctgtccgaaaaggcctttgatacgggataatcctatttattacctcaaaagtttttttcgtcccacgattcatctgagccgtttaccactccagcctatgccctaccctgcaattaggagggctctggcccgcaacaggcatgacctggctaaatcccctataagtcccactctgtaccacattcgtattactcgcatgatgagtatcaatcacctgagctcaccataatctaatagacctcaaccgatgccacgtaatttacgcactggttattacaattctactgcggctctattttaccctcctaccagcctctgagtacttcgaggctcccttgaccatttccg

SEQ ID NO: 96552 - DNA, 373 bp, Homo sapiens
gcgtgcctatgatatagtccgacccagaccatgacccctattaggggccctctcagccctcctaatgacctacgggctagccatgtgagttcactgggactgcataacgctcctgatactaggcctactaaccaacacactagccatataccaatgatggcgcgatgtatcacgagaaagcacataccaaggccaccacacaccacctgtccaaaaaggccttcgatacgggataatcctatttattacctcagaagatgtcttcttcgcaggaattgtctgagccttttaccactacagcctagcccctaccccccaattaggagggcactggcccccaacaggcatcaccccgctaaatcccctagaagtc

SEQ ID NO: 96553 - DNA, 403 bp, Homo sapiens
ctaaaagcagaacatgattccattctggcattacttatatgacatgtctccatacccattacaatctccagcattccccctcaaacctaaaaaaaaaaaaaaaaaaaaaaaaaaaaaaaaaaaaaaaaaaaaaaaaaagggggggccctttaaaaagaacccttggggggccaaaatttaacgggggaggggaagaaaaaagtttttcccaaaagggggggctaaaaaaaacccacgggggaattttgggaaggaaccttattttgggggggggaaaaaatggggaaaaattcccccagaaaattaaagccttaggggaaaaaaaaaatttttaaggggaaaagggggaaaaaaaagcggaaaaacccgggggtaaaaaatttttctcaaggggaaaaaataa

SEQ ID NO: 96554 - DNA, 360 bp, Homo sapiens
acttatccccaacttggctatggtcacccgatgaggcaaccatccacaacgcctgaacgcaggcacatacttgctattcgacaccctagatggctcccttgccctactcataggactgacttacactcgcaacaccctaggctcactaaacgttatactacttactatcactgcccaagagctatcaaactcctgagccaacaacttagtatgactagcttacacattagcttttatagagaagatacctctatacggactccacttatgactgcctaaagcccatagggaagcccccatcgctgggtcaatagtacttgccgcagtactctcaaaactaggcggatctggaaaaaacaa

SEQ ID NO: 96555 - DNA, 341 bp, Homo sapiens
actgctgctggtgtgtatttttgtaaatgttatgcactctctgaaaggaaaaacacacacaaaagaaaaagacttttttttttttttttttttgccaagggccagggtggtggccaaaaaaaaaaaaaaaaaaaaaaaaaaaaagggttaaaaagggggaaagctttttttaaaagggccccaaggggggaaagccccccttttattgggtcgggtttggtttggtttttgggtttggtggaaaaaggggaggggggggccgggggggaggggggggatttatagccatatttatatggggaaaatgcatgcctgtggattacaaagcccgggatggggag

SEQ ID NO: 96556 - DNA, 389 bp, Homo sapiens
ttgttgtctgcattgcattgtgctatcctctgattgtgttgtttagttccagctgtttggggtgcttatgtgggaggatcacttgatccataaagttggaggctgcagtgagctctgatcttgccaccacactccagcctgggtgaaaaagctagaccctgtctcaaacaagctaataaatgagaggtataagtcctcctttaaaagtaaaggaagagatttttctttccttttgtctcttagaacattcaattagaaaatttgtaaattcattttctctgtcttctgaggtttttttttttagacagagtttttctcttgttacccaggcttgagtgcaagccacgatctcgcctcaccacaacctccgtctcccgagttcaagcgat

SEQ ID NO: 96557 - DNA, 354 bp, Homo sapiens
  misc_feature (1)...(354): n = a,t,c or g
cttgctcactgcaagctccagtgagatcgcgccactgcagtccagcctgggtgacagagcaaggctctgtctcataaaataaaaagagggtgtgcttaattctatataaagcgggaaccaggggaaatcttatgctaacgtgtaccggctactgtacctggaccccattcccaaaatttatgcggaggcatacactccataaaatgttaactccacaaatttggagacaaagagccccaagacgattcaaaaatttccggaggatagggagttcaagaacgatttttttgaaaaaacaaagaatggggacagagaaactggggcttttcacccctttcttttatttctggtaan

SEQ ID NO: 96558 - DNA, 400 bp, Homo sapiens
ggcacgagagctgcgataattacatcggcggccgacaacttatttcctttagcgaagttcaatgttaccttgtcactggacctcctgttacgccctgagccctgggaatccactttattttcaccgtaagtggcctgactggcattggattagctaactcatcactacacattgtactacacgacacgtactacgttgtagctcactttcactatgtgctatcactaggagccgcattcgccatcataggaggcttcattcactgaattcccctatactcatgctacaccctagaccaaacctacgccaaaatccatttcactatcatattcataggcgtaaatctaactttcttcccacaacactttctcggcctatccggaatgccccgacgttactc

SEQ ID NO: 96559 - DNA, 382 bp, Homo sapiens
  misc_feature (1)...(382): n = a,t,c or g
aaacattctactactcaccctcactgcccaagaactatcaaactcctgagccaacaacttaatatgactagcttacacaatagcttttatagtaaagatacctctttacggactccacttatgactccctaaagcccatgtcgaagcccccatcgctgggtcaatagtacttgccgcagtactcttgaaactaggcggctatggtataatacgcctcacactcattctcaaccccctgacaaaacacatagcctaccccttccttgtactatccctatgaggcataattataacaagctccatctgcctaaaaaaaaaaaaaaaaaaaaaaaaaaaaaaaaaaaaaaaaaaaaaaaaaaaaaggggggggcccttttaaaan

SEQ ID NO: 96560 - DNA, 407 bp, Homo sapiens
ggcacgaggagctatacgcatctttacagagtcttcttagaactcattaagatgagcgtctatgacctgaaccataccgtaataatggttatctctggacatgtaagactagccttttatggcattgtacaccttacactcattctgaatctcttgactgaccacatactctaccccttccttgtactatccctatcaggcgtaattattataagctccatcttcctacgacgaacagacctagaatcgctcattgcatactcttcaatcagccacatagccctcgtagtaacagccattctcatccaaaccccctgaagcttcaccggcgcagacattctcataattgtccacggacttacatcctcattactatgctgcctagcaaactcaaactacgaacgcac

SEQ ID NO: 96561 - DNA, 367 bp, Homo sapiens
ccggagtaatccaggtcggtggctatctacttcaagggtatggcttctgcctaataaagaatgttcagctcaaaaaaaaaaaaaaaaaaaaaaaaaaaaaaaaaaaaaaaaaaaaaaaaaaaaaaaaaaaaaaaaaccgccataacaaaaaaaacaaccaccgccaaatggaaaaactgaaggactgagaaaataaggcatactcgtcttcctttaatttcttctcgagatgctaaatgcgtagatttcctttatacataatacgtatcatcgttggtactggcccctctcttataatgtttacttaaagattttaaaatgaatataataaattttgcatcatttgtactaacatcaaatattactt

SEQ ID NO: 96562 - DNA, 400 bp, Homo sapiens
ggcacgagtaactgaattgcaggacacccagtttgtatctgcagagagctggagaactgcttagtgtggaaaacccacacatttggtgtcagaaatgtgtgagaaaaaacaattttttccttttttttttttttttctttaaaacggatctttattgtccccatatttgtattgcattgtctattacttgctttcttgctatttctatctctggtttatttgccttcttcttgcttaattcgtttaattatcatttcattattgttccctaaaatttttctctttctatttatctttgtcttcattctcttttctatgtcgggttcttcttttcttttgacatgatgatcttctctattttgacttgaacactctttttttgtttattatttcacttgcg

SEQ ID NO: 96563 - DNA, 123 bp, Homo sapiens
tggaagcccagctgctcaagaggctgagggggaagaaaagcttgaaccccggaggcacaggctgcaatgagcttaaattttttcactgcactccaacctgggcagcaggtcgacgcggacgtt

SEQ ID NO: 96564 - DNA, 343 bp, Homo sapiens
cagagagtgcacaaactacccagcacagccccctccgccccctctggaggctgaagagggattccagcccctgccacccacagacacgggctgactggagtgtctgccccccttggggggggggcagcacagggccttaggcctgggtgccacctggcacctagaaaatgcctgtgccctggttcttgctgaccttggcactgggcctaagcccagtggacctttctctggacaggcttgcggagcctcaggacgcttgccactgctctccgggcctatcctgccgcctttgggacagggacatactttgtctgcctggggacatcatgcctgatccgtgccg

SEQ ID NO: 96565 - DNA, 329 bp, Homo sapiens
ctttgaagcagggatatactagttatgaccgaggacggagaattcttttgagggcatgtctaaccctgagaccgctccaggcgagccgataccccccgattaggagggcactggcccccaacaggcatcaccccgctcaatcccctataagtaccactcctaaacacatccgtattactcgcatcaggaggatcaatcacctgaactcaccataggctaatagaatacatccgacaccaaataattcatgcactgcttattacaattttactgggactatattttaccctcctacaagcctcagagtacttcgagtcttccttcaccag

SEQ ID NO: 96566 - DNA, 339 bp, Homo sapiens
agcacaccatatatttacagcacgaatagacgtagacacacgagcatatttcacctccgctaccataatcatcgctatccccaccggcgacaaagcatttagctgactcgccacactccacggaagcaatatgaaatgatctgctgcagtgctctgagccctaggattcatctttcttttcaccgtacgtggcctgactggcattgtattagcagactcatcactagacatcgtactacacgacacgtactacgttggagctcacttccactatggcctatcaataggagctgtatttgccatcataggaggcttcattcactgatgtcccctattctc

SEQ ID NO: 96567 - DNA, 395 bp, Homo sapiens
  misc_feature (1)...(395): n = a,t,c or g
ctcttagctatttcctggagcacagggcccttacctcagggcttttgcacacttgctaatcctcagcctagaatgttatcacatcctcacccatgtccaaccagtgtcctatatcaccttcttcaggtttttgctcaattgttactttatcaatgatgcttaccgtattcacctttcttaaaagtgcaacagccatcctagcactcactctccttcccttcttgcattttctccacagcacttatctgacacactatatattttgtttattatctacttccactgccatccccattagaatatagcttcctttnttttttctttttggagacagggaatcactctgtcacccaagctggagtacaatggcaagatcacagctcactacagccctn

SEQ ID NO: 96568 - DNA, 385 bp, Homo sapiens
  misc_feature (1)...(385): n = a,t,c or g
ggcacgagagtgctattattatcccctttttacagatcaggaaatcaggctaagcagggggaagtgatttgttcaaggtcacagagcttgcactgtagagtctggatttgaacccagcgctcacagcacgccatgctttaacctttaacccctgtgcttcccatcccagcactggggcaagagttccaactgcctttcatcccttaaatacttcccaagctctgggcttcccctgaggtgcaaagctgagttagatgatgtgaagcagaaagcagataaggagctggatgtggtggctcacgcctgtaatcccagcactttggtaggccaaggtgggcggatcaccctgaggtcaggagtttgagaccagcctggccaacatggn

SEQ ID NO: 96569 - DNA, 378 bp, Homo sapiens
ggcacgagtatcaattggcttcctagggcttatcgtgggggcgcacgatatgtttacaggacgaatggacctatacacacgaacatattgcaccttcgctaccatactgatcgctatccacaccggcgtcccagtatttatctgacttgccacactacacggatgcaatatgaaatgatctgctgcagtgctctgagccctaagattcatctttatttccaccgtatgcggactgactgggattgtattaccgaactgatcactagacatcgtactacactacatgtactatgctgtagctcacttgcactatgtactatcaataggagccgtattcgccatcttaggacgcttcattcaccgattgcccgtattcag

SEQ ID NO: 96570 - DNA, 400 bp, Homo sapiens
atagcattcttgggcacaagggattaaatacaacttttatatacagaggatctttacatgtttattaaatctgaatttgaagatacattccaatcttgcataaagtgtttgttgggcttttacattacgtaattaaaaaacaaaattttttaaccaattttatgtgccatgtcacgtttaatgctatcttgtgtgaccagatcccaccagtaatgacaaaactgtcttaaacctcatttttttttttttggaaacaaaagtttcatttttgttgcccaaacaaaagcatgggccccttttcaactaattgaaacctttgcctcccaggttaaagcaattttcctgcctaagcctcccaagtagctggaattacccgcatgcgccaccatgcctggttatg

SEQ ID NO: 96571 - DNA, 468 bp, Homo sapiens
cccagctgttgccgaggcctacctcaaacccgtggtggatgactcgaagggatcctttctgtgggggaaacctgatctcgacggaattagagaatgttgtcagcggaatttcggctggaacagaacgaggacagatgagtctctgtttcctgtattaaagcaactcgatgcccagcagacacagctccgaattgattccttctttacattagcacaacaggagaaagatgatgctaaacgtattaagagccagagactaaacagagctgtgacatgtatgctaaggatagagatagaagcagcatccagcgaaatagaagcagtttctgttgactagcagaaagaacttgagctaattgataaggcagtagcgtgccacttagaatatatgtatgagacagatccttagtagaggtatcataagtttagtaaaacaaggattctgaatcgactccggatgaatcctcc

SEQ ID NO: 96572 - DNA, 453 bp, Homo sapiens
cccacgcgtccgcccacgcgtccgcccacgcgtccggacaaaggaagggagcagccccagcagagaagaaatgtggagcggaagcccagcacgaggggctagaactcagggtagagaatttgcaggcggtgcagacagactttagctccgatccactgcagaaagttgtgtgcttcaaccacgataataccctgcttgccactggaggaacagatggctacgtccgtgtctggaaggtgcccaacctggagaaggttctggagtccaaagcccacgatggggagattgaagaccttgttttagtacccgaaggtatgttgtaaatcgtttgccctgaccattattcgcctgtggggataaacgactttatgtggttattatagctaaattggggaaatcgtctctatttcccacatatatcagtctatctgatgtttcattttcgtacgttct

SEQ ID NO: 96573 - DNA, 417 bp, Homo sapiens
atcttatcctaccaggcttcggaataatctctcatattgtaacttactactccggaaaaaaagagggatttggatacatatgtatggtctgagctatgatatcaattggcttcctagggcttatcgtgagagcacaccatatatttacagtaggaatagacgtatactcacgagcatatttcacctccgctaccataatcatcgctatccccaccggcgtcaaagtatttagctgactctccacactccacggaagcaatatgaaatgatctgctgcagtgctctgagccctacgattcatctttcttttcaccgtaagtggcctgactggcattgtattagcaaactcatcactagacatcgcactacacgacacgtactacgtttgaactcacttccactatgtcctatcaatag

SEQ ID NO: 96574 - DNA, 448 bp, Homo sapiens
aaaatgagtaggcagctcatgtgcacgttttctgtttaaataaatgtaaaaactgccaaaaaaaaaaaaaaaaaaaaaaaaaaaaaaaaaaaaaaaaaaaaaaaaaaaaaaaaaaaaaaaaaaaaaaaaaaaaaaaaaaaaaaaaaaaaaaaaaaaaaaaggggggggcttacttaaaaaataaatggggggggagtttataatcggggggatacctaggaaaactttctttgttatggggggatttaaaaaaaccccattagggattttaaatgaagatttttatttttgggggggaatactatctgaatcatccccacaaggttattactgatcggatggaaaaaatttgttatctggggtgaggtaggaaaaaaactgtgataagtccctggagtgttaaaaatttttactgcggagaactatttaaaggaatatttacccgcga

SEQ ID NO: 96575 - DNA, 421 bp, Homo sapiens
aaaacatcctggggataagcagtccttagcaaagaggggccaggcctgaggtgggggaggtggccttacacggaagccctggagaagtgaaacagaggatgcagtgtccagggcatcatctatgaatggagacaacctttaccggacaccaaacctaccagcaccatgaccttgaactttccagccttctgaactatggcgtactgctctgttgcccaggttagagtgcagtggcttgatcatagctcactgcagccttgagctcctaggctcaagcagtcctcttgcctcagcctcctgaatagctgggactacaggttctattctgaggtactaaggttaagacctcaacatatgaattctggaggacaaaattcaacccagaagtctaccttgtattgggtcctcacggcaaggctgc

SEQ ID NO: 96576 - DNA, 398 bp, Homo sapiens
ccagtttccagtactgcatcccttcatggaatggcttctgttttcctgggtggatcctgactgaaagaaggagttcaaaataggtcgtaaagcagcagagaagatgactcgcaacatcaacaacgcatttggcccaggcactgctaacgaatgtacagtgcagtggtggttcaagaagttttgcaaaggaaacaagagccttgaagatgaggagtgtagtggcaggccgttggaagatgacaacgaccaatggagagcaatcattgaagctgatccccttacaactacaagagaagttgctgaagaactcagtgtcaaccattctatggccgttcagcatttgaagtaagttggaaaggtgaaaaagctcaataagtgggtgcctcatgagctaagcg

SEQ ID NO: 96577 - DNA, 397 bp, Homo sapiens
accaggctggtctctaactcctgacctcaggtgatccacttgtctcagcctcccaaagtgctgggattacaggcataagcgaccaagtccgaccagtcggcaaacttttgatcacgcacctaacaaaaactccagtcactcacccccaatatacatgtaataaaacacacaaaggtaagtgttttagatggatgaggtagaggacgcaatatatttttttaaaaatttctttagagcaaaaaccctttcagctcactctaacgtttttaaaaagtgcttgaatgtgttcctttatttaaaattttctttaatatgttgaggggcaacaatttgaaggttgattctgagttgctgggagttatgggtatcgaggaaatcatctaagtcattgctggtc

SEQ ID NO: 96578 - DNA, 434 bp, Homo sapiens
aaatctggttaggctggtgttagggttctttgtttttggggtttggcagagatgtgtttaagtgctgtggccagaagcggggggagggggggtttggtggaaattttttgttatgatgtctgtgtggaaagcggctgtgcagacattcaattgttattataaaaaaaaaaaaaaaaaaaaaaaaaaaaaaaaaaaaataaaaaaaaaaaaataggggggggccccttttaaaaattcctttggggggccccttttttccggggtcgtgaaatattttttttcttctttttggggggggcttttaaaacccctctggggttttttgggaaaaacctttttttttgggggggggccttttgcgccccccccccccccaaatttttagcctttgggggaaataaaaacttttttgggggttgggtgggaccaccccg

SEQ ID NO: 96579 - DNA, 408 bp, Homo sapiens
gcagaagaatcacttgaacccatgaggtggaggttttagtgagctaagattgcgccactgcattccagcctgggtgatggagtgagactctgtctcaaaaaaaaaaaaaaaaaaaaaggggggggctgcccaaaagggcccaaaaaaaaccgctcctattaaaactccccaggggggggaaacaaaaaaagggggaaattccgtttttcccacggggggccccggttttttttactgggcctttgtgacaaaggggtccccaacaaggggggcccccccctctaacaggacccaaaggggggggggagcccccccctctgggaaaacaaaggggctgagaaattccttttttattccagggaaacttgataaaaaaggcccctgaaaaaaaatgccccctccccccta

SEQ ID NO: 96580 - DNA, 432 bp, Homo sapiens
  misc_feature (1)...(432): n = a,t,c or g
aaggcaataagcaaaacccagatctctacccaagcagaccttgtacttgatggacaacaaagaagtctgttagctaatgtttatttcatgaatactgactgccagaataattgtaagcaataaacaatcatgcattctcaatttctttctttccctctttctttctttccttccttccttccttccttccttcctttctttcttctttctttctttttctttctttcttcttcttctttttttttttttttgaaaaagtggacctttttcaccaagaataaaaggcagtgtgggaatctgggtaaattgcattctcaacctcggggggaaaaaaaaaacccttaaccttgaaagggagagattgtttttaggggaaatgaaaccccggccctcaattaggggggacagaggggctcttttttgaaaaggaan

SEQ ID NO: 96581 - DNA, 415 bp, Homo sapiens
atcgcgctattgcactccagcctgggggacaagagcgagacttcatctcaaaaacaaacaggaaacctgtcagatcatgtgcaagaagtaagcgaagtggtgagaactgggtgggggagacacagccctcgacacagggagagcaccccgtgcgggaggagccttcagtacaagagacttggtctgccatcaagtggctctctgcactgttgacaattgtcagtcatttaagacagaggaggccgggcatggtgactcatgcctgttatcccagcattttgggaggccaaagcaagtggatcacttcaggcctgcagttcgagaccacctgggacaacatggttcattcacctgttgccaacaacatgagggagtttctccacagcccttgattcctgaattgtccaacaaatca

SEQ ID NO: 96582 - DNA, 441 bp, Homo sapiens
  misc_feature (1)...(441): n = a,t,c or g
acgtttgataataaaaaacaaattttgatggacttatcattgttactagctttctttgttaaaggctttacttcaagatcactagtcagagcaagtaagatttttccccaaatctctacaacaaaggtattccaaagtttcttaagttagttcaactatctcattattaacatcagggactgataaaacccacacttggccagaaatgtatttgattaagtattcagaatcttctcttgtagccctgctttagacaaaagagaaccagtgaagacacttttaaaaaagtgtcatctagctcaacccttaatcctancacttggggaggctgaggcaggagcatcacttgagtccaggagttgaagaccagcatggacaacatcaagactccatctctaccaaaaaaaaaaaaaaattttcttaattatccaggcttaactg

SEQ ID NO: 96583 - DNA, 273 bp, Homo sapiens
  misc_feature (1)...(273): n = a,t,c or g
gtttcaccatgttggcctagatctcttaaccttgtgatccgcctgcctcggcctcccaaagtgctgggattacaggcgtgaaccactgtgcccggccctggttattcttttaactgctaaatttactaactttaggtaccgggttaaaaatgtttgcacttttcatgtggagagcaacnagannnnnnnnnnnnnnnnnnnnnnnnnnnnnnnnnnnnnnnnnnnnnnnnnnnnnnnnnnnnnnnnnnnccttatagggggccgttttataac

SEQ ID NO: 96584 - DNA, 414 bp, Homo sapiens
  misc_feature (1)...(414): n = a,t,c or g
gggtttcactgtattagccgggatggtcttgatctcctgacctcgtgatatgctcgcctcggcctctcaaattgctgggattacaggcatgagccaccgagcccggcccctcttttcatttcatattctatctgtctctttctgtctaaactgatacaattcctttaaaaattttgtaggtttactgtgtatgttacaatctatcacattagacaaaagccacactcactaataagcacttctctctcttgggctccttgtaaacctgctgtggggcaatccccttaagatacttagaacccctattgttatcacaggaggtcttctacacatagccttaagatcttcagaagttcttttgtctgtctgaaagggtttataatgcattaccttanatcattctggggtcattga

SEQ ID NO: 96585 - DNA, 422 bp, Homo sapiens
  misc_feature (1)...(422): n = a,t,c or g
cggacgcgtggggctgggcacggtggctcacacctgctatctcagcaccttgggaggccgaggtaggcggagtgctggagcccaggagtttgaggccagcctgggcaacacagtgagaccccatctctacatataaaaaaaaaaaaaaaaaaaaggggggggggtgggggggcttaaccctttattcccacctttttggggggccaggggggggaaatcacggggggtggaatttgaaaccttcccgccaaacatataaaacccccttttttaataaaaaaaaaaaaatgggccgggggtgggggctccattttgggtccccaaacttttgggaggccagggggggtttttctatgtgtttgtataaaaaaaacatcctggaaaatatgggaaaaccctttttttataaaataacaaaaaan

SEQ ID NO: 96586 - DNA, 415 bp, Homo sapiens
ctgtcttttcaccggaggtggcctgactggcattggatcagcaggctcatcactagacatcgtactacacgacacgtactacgttgtagctcacttccactatgacctatcgataggagctggatttgccatcataggaggcttgattcactgatttcccctattctcaggctacgccctagaccaaacctacgccagaatccatttcactatcatattcatcggcgtaaatctaactttcttgccacaacactttctcggcctatccggaatgccccgacgttgctcggactagcctgatgcatacaccacatgaagcatgctatcatctgtaggctcagtcattactctaacagcagtaatagtactaatcatcatgattagagaagccttcgattcgaagcgaacagtgcta

SEQ ID NO: 96587 - DNA, 370 bp, Homo sapiens
gtcgacgcggccgcgctttactatctgtcaccataagatgttctaggcttgtcttataattttcctgcccgaactcaggaaccaaccatttcaccaaggagctctgtttctttttattgtaagaatggtatttagaaaactcaggatttggttactagatatactgattgctactgaagtatcactgcttttaggccctttcagcacatggagctaagaaattttttttttttttttttatttttttttttttttttttttttttttttcgtttttctttttatttttctatttcttttttattttcttttcctctatgaaatatacttaatattattttttctttaacatcacttctactccgccgtct

SEQ ID NO: 96588 - DNA, 451 bp, Homo sapiens
  misc_feature (1)...(451): n = a,t,c or g
cccacgcgtccggtcaagactgcactgagccatgattgtgccactgtactccagcctgggagactttttcaaaagaaaaaaaaaaaaaggaaaaaaggaaaaaaaaaaaaaagaaaaaaaaaaaaaaaaaaaaaaaaaaannggggggggggtcttaaaaaaaaaaacccggggggccccaaaataccccttggtgccaaaaaaaaattttttttaaaaagggggggaaaaaaaaaaacccttttggtttttttgaaaaaaccctttttttttggggggggcaaaatggcccccccccccccaaaaaaaaaaaactttttaggaaaaaaaaaaaattttggggggagggggggggcccccccccccccctttcttgtttggtggaggtttttctttctggggaaaaaaaaaaaaaaaataacccccgggccgggtggaaataannntnnnt

SEQ ID NO: 96589 - DNA, 388 bp, Homo sapiens
  misc_feature (1)...(388): n = a,t,c or g
tagangttgagattaccccctgcaaganaccacggccccggaattccaccgaacgacccacgcccccgggagntgtaagccactaaaccaggaacaattgggttctgcagatcgtgaannnnnttccaaaacagacaatctccttggccattaaacaaacgtcaacaaatgtaaagttcccagagttatacagagtgtattctctagccacagtggactcaagctagaaataaataacagaaagatgaaagaaaaatctttaaacacttgaaaaatcaataacatttcttattgggtacaatgttcactctacaacttgaagagtaacagttataccaaaagctcagacaacaccactacacaatatatgtatgtaagaaatctgtat

SEQ ID NO: 96590 - DNA, 396 bp, Homo sapiens
ctggactgcagtaaaataagcagttatttgcaaaagtcttcaagccatgttctttttttttctttttctttcttttttttttttggggggggggggggatttgccctggaaaacccttaccctccggcagggttggggccccaaaaaaaaaaaacactttcccccccttggctggtggggggacccccttttccggaaaaagcccccccttaggggggccattttttggggaaaaaaccccaaaaaaacccggggggtcaaaatccaaaaaggccctctggggagggaaacccctttttccaaccccccgggggggagaaaaaacaaattggcccccccactggttttgggggaaaaccttttttttcattttaacccagggagccaccgggccct

SEQ ID NO: 96591 - DNA, 428 bp, Homo sapiens
  misc_feature (1)...(428): n = a,t,c or g
ctgcgtcagattaaaacactgaactgacaattaacagcccaatatctacaatcaaccaacaagtcattattaccctcactgtcaacccaacacaggcatgctcatannnnanaaaaaaaaaaaaaaaaaaaaaaaaaaangggggggggcccttaaaaaaaaaccttaagggggcaaaaaaaaaagggggaaggaaaaaaaaaaatttttcccaaaaaggaagggaaaaaaaaaccaaccgggaaattttggaaaaaaaaccaaattttgggggggaaaaaatggggaaaaacccccaaaaaaaattaaaggcttaagggaaaaaaaaaaatttaaagggaaaaaggggaaaaaaaaccgaaaaaggctgggggtagaaagtttgccttacggggagaaaaaaaaaaaaaaaaaccccgggcggggga

SEQ ID NO: 96592 - DNA, 400 bp, Homo sapiens
agaaatcgctgtcgccttaatccaagcctacgttttcacacttctagtaagcctctacctgcacgacaacacataaaaaaaaaaaaaaaaaaaaaaaaaaaaaaaaaaaaaaaaaaaaaaaaaaaaaaaaaggggggggggggttaaaaaaaaacccgggggggggcaaaaaaaaaggggggggggaaaaaaaaaattttttttaaaaaggggggggaaaaaaaaaccccggggggattttgggaaaaaaaacctatttggggggggggaaaaatgggggaaaaccccccaaaaaaaaaaaagggccggggggaaaaaaaaaattttaaagggggaaggggggaaaaaaacccccaaacgccggggggggaaaaagtttgtaaaaaaaaaaaaaaaaaag

SEQ ID NO: 96593 - DNA, 409 bp, Homo sapiens
  misc_feature (1)...(409): n = a,t,c or g
ctttctattagctcttagtaagattacacatgcaagcatccccgttccagtgagactctgtctcanaaaaaaaaaaaaaaaaaggaagaaagaaaaaaaaaaaaaaaaaggggaggggctggaaaaagggcctaccaaaaagaaggcccaataaagggccaatttggaggggggggaagggatccaacccgggggtggggaattgaaaaaaaagcgggatccccgcccaaaaaaacaggggggggtttggacccaagggacaaacccggggggccaaaaagttcgaagggaaaaaaagggaaaaaaaaaaaacccttataaacccgggttaaaaaaaaaaggctaaaagggggccaagggaactttgaggggggggaagaaaaaaataaggggggaaggggggaataan

SEQ ID NO: 96594 - DNA, 399 bp, Homo sapiens
  misc_feature (1)...(399): n = a,t,c or g
cggacgcgtggggttgactattctctacaaaccacaaagacattggaacactatacctattattcggcgcatgagctggagtcctaggcacagctctaagcctccttattcgagccgagctgggccagccaggcaaccttctaggtaacgaccacatctacaacgttatcgtcacagcccatgcatttgtaataatctannaaaaaaaaaaaaaaaaaaaaaaaaaaaaaaaaaaaaaaaangggggggggccttttaaaaaaatccttgggggggccaaatttaacgggggggggaaaaaaaaaatttttttcctttaggggggggatttaaaaacccccggggggattttggaaaagaacccttttttggggggggggaaaaatggggaaaaccccc

SEQ ID NO: 96595 - DNA, 417 bp, Homo sapiens
  misc_feature (1)...(417): n = a,t,c or g
atttaatctcctcaacaactttatgaggcagatactgttctaaccatcttctagcctctggggagacaatgggcagttcaaccaacaaagatctctgcctgcatggaactcacattcttgttagggcaggcccaaattatcaagctaataaaatatcattcagcaacccaaaaaaaaaaaaaaaaaaaaaaaaaaaaaaaaaaaaaaaaaaaaaaaaaaaaaaaaaaaaaaaaaaaaaaaaaaaaaaaaaaaaaaaaaaannnggggggggggttttttaaaaaaattttgggggggccccaaaatccccgggggggaaaaaaaattttttttttttttttgggggggaataaaaaaaccccggggggtttttgggagaaaaaccctttttttgggggggaaaaaaaaaaaaaaaaa

SEQ ID NO: 96596 - DNA, 414 bp, Homo sapiens
  misc_feature (1)...(414): n = a,t,c or g
ttaatcctatctctgctaaaattataaaatacaaaatttatgccaggtgcagcggctgaggcctgtaatcccagcactttgggaggccaaggggggcggatcacaaagtcaggagnacaaaaccaaccaccccaaaataaagcaactcacactgtaaaaattgaaaaaaaagaaaaaccagaaacaaagacagtggccaaagaacacaacaaagctaaaactgcagaaaagagtgaagaatagactaaaaaggaagtgaaaggtggaaaacaggaaaaagtgaatcatacagctgcaaaagtaaaagaagtacagaaaacaccatcaaaacccaaagaaaaggaggacaataagaaagcagctgtgtcaaagcatgaacagaaagatcagtatgcattcttgcgatatatgatt

SEQ ID NO: 96597 - DNA, 425 bp, Homo sapiens
  misc_feature (1)...(425): n = a,t,c or g
gtacccacccccagagttgttttgaggactaaccacgataatacatgtaaaatgctcagaagaatgtgtggcaaacagcaagcacttaataaattttttttttagtngagaaaaaaaaaaaaaaaaaaaaaaaaaaaaaaaaaaaaaaaaaggggggggggggcttaaaaaaaaacccgggggggggcaaaattaagggggggggggaaaaataaattttttcccctaagggggggggaaaaaaaaaccagggggggattttgggaaaaaaaccttttttgggggggggggaaatgggggaaaacccccccaaaaaaattaaaggggtggggggaaaaaaaaaatttttggggggaaagggggaaaaaaaaagggaaattgctgggggggggaaaagtttcctacaggggaaaaaaaaaaaaaaa

SEQ ID NO: 96598 - DNA, 302 bp, Homo sapiens
aaagcctggcctcctgtttaagctacctagtatgtgttattttcttagggcagcccaagccaactatatgactccaaaattctaccccccacaagaaataaaacccaacagaaagatacgtaaagacttgtactcaaattttcatagcattattatttaaaaaggagaagcaacccagatgtccatcagctggtgagtggataaataaaatgttgtatgcctgtacaattgaatattggttggcaataaaaaggtatgaaatactgatatatgccacagtatagatgtaccttgaaaagata

SEQ ID NO: 96599 - DNA, 409 bp, Homo sapiens
  misc_feature (1)...(409): n = a,t,c or g
cggctacatgacgctactttccctatcatagaagaacttatcacctttcatgatcacgcactggtaatcactttccttatctggttgctagtactgtgtgcccttttcctaacactcacaacaaaactaactaatactaacatctcacacgctcaggaaatagaaaccgtctgaactatcctggccgccatcatcctagccctcatggtcctcccatccctacgcatcctttacataacagacgaggacaacgatccctcccttaccatcaaatcaattggccaccaatggtactgaacctacgagtacaccgactacggaggactaatgttcaactcctacatacttgccccattattcctagaaccaggcgacctgcgactccttgacgttgacaatcgagtagtan

SEQ ID NO: 96600 - DNA, 156 bp, Homo sapiens
  misc_feature (1)...(156): n = a,t,c or g
ttttgctttgtcacctagtctggagnacaggggggcaatcatgactcactgcagcctttttctcctgggttcaaatgattctgctgagtatgctgagactgtaggcatgcaccaccacatctggctagtttttgtatttttaggtcgacgcggccg

SEQ ID NO: 96601 - DNA, 423 bp, Homo sapiens
ggcacgagcggcacgagcccatattgtaacttactactccggaaaaaaagaaccatttggatacataggtatgggctgagctatgatatcaattggcttcctagggtttatcgggcgagcacaccatatatttacatgatgaatagacggacacacacgagcatatttcacctccgctaccataatcatcgctatccccaccggagtcaaagtatttatctgactcgccacactccacggaagcaatatgaaatgatctgctgcagtgctctgagccctaggattcatctttcttttcaccgaatgtggcctgactggcattgtattagcaaactcatcactatacatcgtactacacgacacgtactacgttgtagctcacttccactatgtgctatcaataggagctgtatttgccatcat

SEQ ID NO: 96602 - DNA, 416 bp, Homo sapiens
ggcacgagcaaacattttactactaactctcactgcccaagaactatgggaccccagagccaacaacttaatatgactagcttacacactagcttttatagtaaagaaacctctttacggactccacttatgactccctaaagcccatgtagaaacccccatggatgggccaatattacttgccgcaaaactattaaaactagggggctctgggataatacggctcacacttattctcaaccccatgacaaaacacatagcctaccccttacttggactatccctatgaggcataattataacaaggtccatctgtctacgacaaacagagctaaaatggctcattgcatactcttgaataagccacatagccctcgtagtgacagacattctcatccaaaccccctgaagctgaa

SEQ ID NO: 96603 - DNA, 421 bp, Homo sapiens
  misc_feature (1)...(421): n = a,t,c or g
cccagtcctagctgctggaatcagtatactacttacagaccgcgacctgctcaccaccttattcgaccccggcggaggaggagaccccattctataccaacacctattctgatttttcggtcaccctgatgattatattcttatcctaccaggcttcggaataatctcccatattgtcactgactactacggaagaaaggaaccatctggatacataggtatggtctgagctatgacaccagttggcttcctagggtttatcgagtgagcacaccatatatttaccgtaggaatagacgcacacacacgagcatatttaacctccgtgtccatattgatcgttatccccacctggcgtcaagtatttagctgactcgccacactccacggaagcaatatgacatgatatgctgccctgctn

SEQ ID NO: 96604 - DNA, 416 bp, Homo sapiens
tgtgagcacaccatatatttacagtatgaatagacgtatacacacgagcatatttcacctccgctaccatagtcatcgctatccccaccggcgtcaaagtatttagctgactcgccacactccacggaagcaatatgaaatgatctgctgcagtgctctgagccctaggattcatctaacttttcaccgtaggtggcctgaatggcatcgtataatcatactaattgctagacattgaactacacgacacgtactaatttgtaatgggttgcccccgcaaagtctatttttgagatggaaaaagaaaaactcgcccggcaggaatgttgaaacacattgtggtatgttattttatagtaactggacaagcaaatgacagcttatgttacaatgctagatttttctctatactgtgg

SEQ ID NO: 96605 - DNA, 422 bp, Homo sapiens
ggacacccatcataataggaggctttggcaactgactatttcccctaataatcagtgcccccgatatggagtttccccgcataagcaacataagcttatgactcttacctccctctatcctactactgctcgcatctgctatagtggaggccggaacatgaacagattgaacagtctaccctcccttagcagggaactactcccaccctggagcctccgtagacctaaccatcttctccttacacctaacaggggtctcctctatcttaggggccatcaatttcatcacacctattatcaatataagaccccctgccataacccaataccaaacgcccctctgcgcctgatgcgacctaatgacagcagtcctacttctcctatctctaccagacctagctgctggcatcactatactacta

SEQ ID NO: 96606 - DNA, 490 bp, Homo sapiens
  misc_feature (1)...(490): n = a,t,c or g
catagacagccgtggnatagaccccattcccgggccgacacctaaccatgttctccttacacctagcaggtggctgctctatcttaggggccatcaattacatcacaacacttatcaatataagaccccctgccataacccaataccaaacgcccctcttcgtctgatccgtcctaatcacagcagtgctacatctcctatctctcccaggcctaactgctggcgtgactatactactagcagaccagaacctcaacaccaccttcttcgaccccgccggaggaggagaccccattctataccaacacctattctgatttttcggtcaccctgaagtgtatattcttatcctaccaggcttcggaataatctcccatattgtaacttactactgcggagaaaaagaaccatttggatacataggcatgtgctgagctatgatatcaatcggcttcctagggattatcgtgtgagcacaccatatatttac

SEQ ID NO: 96607 - DNA, 403 bp, Homo sapiens
  misc_feature (1)...(403): n = a,t,c or g
cccaaatcttgtccaagaccatcaaagtggtatacctctaagagcctgcaagaaccacagcattcctgggcttggggtgcccctaaagcagatatagttgagatcacaacactcaaagtcctttcaaatatctggaaagccttcccaagaagaatggccacaaataagcccagacagtacagactatataataaatacctaacacttcaatgcccagatgctgaagaatatctattagcaccaaccccatggcctccatgactttttcnnaaaaaaaaaaaaaaaaaaaaaaaaaaaaaaaaaaaaaaaaaaaaaaaaaaaaaaaaaaaaaaaaaaaaaaaaaaaaaaaaaaaaaannnnnnnnnnnnnnnnnaaaaaaaannccccgggggggggccccacc

SEQ ID NO: 96608 - DNA, 400 bp, Homo sapiens
cggacgcgtgggcggacgcgtgggcggacgcgtgggcggacgcgtgggctagttctagcgagcggccgcccttttttttttttttggagtttccaaaaccatccttttaaaaaaggggatccggattggcataaaccaaatttttttccttacccattaaaaatataaggggcccctttaccctttttaaaaaaaaaaaaaaaaaaaaaaaaaaaaaaaaaaaaaaagggggggggccccctaaaaaaacccccgggggggcccaaaaaaacccggggggggggaaaaaatttttcccccccttgggggggggtaaaaaacccccccgggggattttgggaggaaccccccccttgggggggggggaccttggggcccccccccccccgggggtgggggg

SEQ ID NO: 96609 - DNA, 401 bp, Homo sapiens
atctgatgcagtgctctgagccctaggattcatctatcttgttctcgaaggcggcctgactggcattgtgttagcggactcatttctagacctcgaactacacgacacgtactacgttggagctcacttccactatgtcctatcaataggagctgtatttgccataataggaggcttcgttgactgatttcccctattctcaggctacaccctagaccagacctacgccgaaaaccatttcactatcatattgatcggcgcaaatgtaactttcttaccacaacactttctcgggctatccggaatgccccgacgttactcggactaccccgatgcatacaccacatgaaacatcctatcatctgtaggctcattcattactctagcagcagcactattag

SEQ ID NO: 96610 - DNA, 413 bp, Homo sapiens
cggacgcgtgggcgaacccatccctgagaatccaaaattctccgtgccacctatcacaccccatcctaaaaaaaaaaaaaaaaaaaaaaaaaaaaaaaaaaaaaaaaaaaaaaaaaaaaagggggggggggttttaaaaaaaaccttggggggggaaaaatttaagggggggggaaaaaaaaaatttttttttttaaagggggggaaaaaaaaaaatttggggggatttttggaaaaaaaatttttttttggggggggaaaaatggggaaaaaccccccaaaaaaaattaagggtttggggaaaaaaaaaattttttaggggggagggggggaaaaaaaatctaaaattgtgggggggggaaaattttttttttgggggtttttttaaaaaaaattttccccggggggggtgg

SEQ ID NO: 96611 - DNA, 415 bp, Homo sapiens
  misc_feature (1)...(415): n = a,t,c or g
cctcactctctcaatcttatccatcatagcaggcagttgaggtggattaaaccaaacccagctacgcaaaatcttagcatactcctcaattacccacataggatgaataatagcagttctaccgtacaaccctaacataaccattcttaatttaactatttatattatcctaactactaccgcattcctactactcaacttaaactccagcaccacgaccctactactatctcgcacctgaaacaagctaacatgactaacacccttaattccatccaccctcctctccctaggaggcctgcccccgctaaccggctttttgcccaaatgggcnnaanaaaaaaaaaaaaaaaaaaaaaaaaaaaaaaaaaaaaaaaaaaaaaaaaaaaaaaaaanggggggggggggcgcttat

SEQ ID NO: 96612 - DNA, 413 bp, Homo sapiens
  misc_feature (1)...(413): n = a,t,c or g
ttttattactttgagactatctcttctgggtctcaaatcagatctcagtttttaccagggctctctctggtaaactctaaatncttttttttttttttttttttccgggccggggaacccctaaatagttccaagttttttttaaaaaccaccaatacctcattggaaaaaccaacctgatgggaaagggggaaaaacccccgccccccgggggaaaaaaaaaggaaaaggggggacctccaacctttgggataaaactaaaccctgtcccgggttggccgggagcttttcttcttcttcttgaagaaaaaaaaaaaccttttactgtgccgacaccctttattaaaaaaaaaaaaaaaaaaaaaaaaaaaaaaaaaaaaaacacaaaaaaaaaaaaaaaaaggggggccccg

SEQ ID NO: 96613 - DNA, 279 bp, Homo sapiens
cccaggccgaccgggactccgagcgccaggtgctgatggcgcgggcccgcgaggggccctgcccgttcccgggggtcacggccaagatccagcggaggatggaccaggtgttcacgctggcggtgcgcgagacggaggccctgatcccgcccgaggtgcctccccgccaatgcccagcacacgaggctgtcggaaaggttcattggctaatttgccacagttggttttcaatatgtccatcccttttcctgatttccagagctcagtatttctacccag

SEQ ID NO: 96614 - DNA, 401 bp, Homo sapiens
cccacgcgtccgcccacgcgtccgcccacgcgtccgattttttgttatgatgtctgtgtggaaagcggctgtgcagacattcaattgttattataaaaaaaaaaaaaaaaaaaaaaaaaaaaaaaaaaaaaaaaggggggggccctttaaaaaaaacccttggggggcccaaatttaaccggggaaggaaaaaaaaaatttttttctttaaagggggggaaaaaaaaaccccctgggaaatttttgaaaaaaaccttttttttggggggggaaaaaatgggcaaaacccccccaaaaaaattaaagccttaagggaaaaaaaaaatttttaaggggaaaagggggaaaaaaaaccccaaaaccctggctgttaaaaaattttctaaaaaaaaaaaaaaaaa

SEQ ID NO: 96615 - DNA, 415 bp, Homo sapiens
  misc_feature (1)...(415): n = a,t,c or g
tcgcggacgcgtgggcggacgcgtgggtccggcctatccatgtgatttcacttccactccataacgctcctcatactaggcctactaaccatcncatanaataaataaaaaaaaaaaaaaaaaggtacgcaaaatttaaaaaaaaataggggggggcgcgctttaaaggttctttgggggggccaaaatttttccgtgggggggaaaattatatcttttccttatgggggggggtaaaaaaaccctctttgggttttttgagaaaaaacctttttttggggggggggaattttgggcccaacccccccaaaaaattttaagctggggggggaaaaaaatatttttaaggggattggggggtaaaaacatccgtaacggggggggggtgaagaatttttttaacggagaaagataa

SEQ ID NO: 96616 - DNA, 412 bp, Homo sapiens
  misc_feature (1)...(412): n = a,t,c or g
cacaattttgaatggctgtgttttacctctaaataaatgaattcagagaaaaaaaaaaaaaaaaaaaaaaaaaaaaaaaagggggggggggggggggttttaataaggggggcgggggcccccccttccccgggggggggaaatttattcttttttgggttgggggggataaattaaaccgctccgtgggaatttggcccaaacccctttttggggggggggtgggtatggccccccccccccccaaaaagttttggggtttagggaaaaattaaaattttaaagggggaaagggttaaaacctccccccctccctggggggggggggtttcggcttcgggtttttaaaaaaaaaaaccccggcccgccggggtggtggggnnnnnnnnnnnntttttatttcatctctccc

SEQ ID NO: 96617 - DNA, 420 bp, Homo sapiens
ccttaataccaggtgatgggttggtagatgcagcaaaccaccatggcacacattttcctatgtaacaaatttgcaaattgtgcacatgtacccagaacttaaagtgagacaaaaccaatgtccacgcctttgcagtttgattgaacgtataaaggagaaaaatcctgtaagtatgctgaacatgaaaggacctggaagcagtagtgtgtcttcagcctttaccaaattatccctacttgagagaaaacttggaaatgtaatcaatgtggcacaaatttcaaccagttttttaaacagactacacatctttgaaatcatactagggataaccaaatctgcttctccaagattggcctggaatattattacagaataactaccagacaacatttgttaaaactcaggacagtatgtatttta

SEQ ID NO: 96618 - DNA, 419 bp, Homo sapiens
ctgggcaacaatggcgaggctgtctcagaaaagagaaaagagaaatcgcaaaaagaaaaatctcataatgtcgttgttggtttttttttttttttttgggggaagcctccttttgtgccccaggcggaagggcaggggcggaatttttgttaaccgaaaccttggcctccggggtggggggaattccccggccccgccccccgggggggggggaacggaaggcaaaaacaaccaggccgggggaattttggggtttaaagggaaaaggggggttcaatgggggggcccaggggggcctaaaaccccggacctaagaacccacacccctggcccccccagggcccggaaataacggggggaaccacccgcccccacccaagtggaatttttaaaaaaacctaaaaaggaaacctttttct

SEQ ID NO: 96619 - DNA, 397 bp, Homo sapiens
ccaccacacctggtcttaatagcatttttatatatgaatttgatgaagattaattatgattttatactgtgctgatgaggctgacaaaaaggcactttcttatattgtcattgaaggacaaattagtacattctctacaagacaaattggcagtctctatcctgattacaaatgcacatgccctttgatctatttcatttctaggaatttgtccctcacatacttaggaaatgatgtacagcattgtttgtattaatagtagtaaaaaattagaaatcccctaaatgtttatcaaaggggatggattaaataaattgcggccaggtgctgcggcttacgcctgtaatcccagcactttgggaggctgagctgggcggatcacgaggtcaggagatcg

SEQ ID NO: 96620 - DNA, 402 bp, Homo sapiens
cggacgcgtgggtcgctatttaagaaccctaaatctgtcacccataataaagctgatttgaagtgttaaaaaaaaaaaaaaaaaaaaaaaaaaaaaaaaaaaaaaaaaaaaaaaaaaaaaaaaaaaaaaaaaaaaaaaaaaaaaaaaaaaaaaaaaaaaaaaaaaaaaaaaaaaaaaaaaaaaacaaaaaaaaaaaaaactgactaaaacaaaaaaaaaagggagttggagtttgttgcctttatacaggagctctcttttttttactgagacaaaacacaaaaacctgatctctgtggaacaaaaaatgtcctttgaaaaaaaaaatcctggacttgctggcacaagatttgcctcttactcgccctgtgctctgaatacatttacctgcccttcaaaaaa

SEQ ID NO: 96621 - DNA, 410 bp, Homo sapiens
cccacgcgtccgcatcccttccactcacatttcatggtggggagtagttacagggatataagggaacccaggatgggaaatgtagttgggcagctggggtctttacaagggagaatgtacatattggttagaccattagacacatttgacaaaaaaaaaaaaaaaaaaaaaaaaaaaaaaaaaaaaaaaaaagggggggggctttttaaaaaaatctttgggggggccaaattttacggggggggggaaaaaaatttttttttttttttggggggggaataaaaaacccccgggggatttttgggaaaaaaccttttttttgggggggggaaatttgggcccccccccccccaaaaatttaaaggcttgggggaaaaaaaaaatttttaagggggggggggggaaaaccc

SEQ ID NO: 96622 - DNA, 410 bp, Homo sapiens
cggacgcgtggggtggcatgctcctgtagtcccaactactggggaggctgaagtgggaggatcacttgatgctaggaggatgaggctgcagtgagcagcgatcactctactacactccagtccgagcaacagagtgagaccttgtctcaaaaaaaaaaaaaaaagggggggtcacttaaaagggtaaaataacctttatttcccccaggaaggtataaaaacttatagtttccaaaaccccattgttgatggggagggaaattggcaaagggggagactccaaaaaagaatgggtggagattccccccccaccttcaccccccccgggggagacagatcgggggggtgagccacaaacaaacaataaaaggccagtggttgcaggtgaaaaaaatccacctcacttagtt

SEQ ID NO: 96623 - DNA, 400 bp, Homo sapiens
  misc_feature (1)...(400): n = a,t,c or g
gggggtttggtgaaaattttttgttatgatgtctgtgtggaaagcggctgtgcagacattcaattgttattattatgtcttacaagcattannaaaaaaaaaaaaaaaaaaaaaaaaaaaaaaaagggggggccccttaaaaaaaaccctgggggggcccaaaattaacccgggatgggaaaaaaaaatttttttccttaaagggggccaaaaaaaaacccacttggaaattttggaaaaaaacccttattttgggggggagaaaaatgggcacaacccccccaaaaaaattaaagcctttgaggaaaaaaaaaatttttaaggggtaaaggggaaaaaaacaccccaaaagcctgccggttgaaaagtttgcttcccggggtagaattaaaaaaaaaat

SEQ ID NO: 96624 - DNA, 399 bp, Homo sapiens
accttttcatcttttgactattgtgactagtgctgttaagaacgtacatatatttgtttgagtacccctttttaattcttttatttatatacccttttttttttttttttttggaaagggggatgggttttgggggcccagggggaggggcatgggaaaattttggtttaacaaaaccttcggtttccagggttaaagctttttttgggcttaaccctcggaggaggcgggtataatgggatcccccgccaatcaattttggatttttaagaagggagggattttctatgggtggggggggtgggtcaaaaattccgagtttggggggaccggcccactgggccctccaaaaggggtggggtaactggggagaccaccctcgccgggccttctttttta

SEQ ID NO: 96625 - DNA, 404 bp, Homo sapiens
tggattccatgccgcagacatgaaataaaagctttgcaaaggcccgaaaaaaaaaaaaaaaaaaaaaaaaaaaaaaaaaaaaaaaaaaaaaaaaaaaaaaaaaaaaaaggggggggccccctttaaaaaaaaccctggggggcccaaaattacccggggggaaaaaaaaaaatttttttttttttagggggggataaaaaaaacccccgggggatttttggaaaaaaaccttttttttgggggggggactttgtgccccccccccccccaaaaaattaaaccctctgggaaaaaaaaaaattttttagggggtaggggggaaaaaaaacctttttttttttggggggaaaagtttttccctcccgggtttttttaaaaaaaattttccccccggggcttttgag

SEQ ID NO: 96626 - DNA, 411 bp, Homo sapiens
ttttgttatgatgtctgtgtggaaagcggctgtgcagactattcaattgttattattatgaaaaaaaaaaaagaaaaataaaaaaaaaaaaaaaaaaaaaaaggggggggccccctaaaaaaaaaccccgggggggcccaaaattacccgggggtagaaaaaaaaattttttcccttaaaggggggctaaaaaaaaccccccgggggaattttgaaaaaaaaccctactttgggggggggaaaaatggggcaccccccccccaaaaaaataaaccccttggggaaaaaaaaaaatttaaaagggaaaaagggggaaaaaaacttcaattcccttgggggaaaaaaatttctctccccgggttttatttaaaaaaaatttaccccccgggccggggtttttttaatttctcg

SEQ ID NO: 96627 - DNA, 430 bp, Homo sapiens
  misc_feature (1)...(430): n = a,t,c or g
atactaactacctgactcctacccctcacaatcatggcaagccaacgccacttatccagtgaaccactatcacgaaaaaaactctacctcanaaaaaaaaaaaaaaaaaaaaaaaaaaaaaaaaaaaaaaaaaaaaaaaaaaaaaaaaaanngggggggggggttaaaaaaaaaaccggggggggggcaaaaaaaacgggggggggaaaaaaaaaatttttttcttaaaggggggggaaaaaaaaaccccgggggggtttttggaaaaaaaacctttttgggggggggggaaaatgggggcccccccccccaaaaaaaaaaaaggggggggggaaaaaaaaaaattttaggggggaagggggggaaaaaaacccttttttggggggggggaaaaaattccccccccggggttttttaaaaaaaaaattca

SEQ ID NO: 96628 - DNA, 125 bp, Homo sapiens
cttatgaattcgaacagcatacccccgattccgctacgaccaactcatacacctcctatgaaaaaacttcctaccactcaccctagcattacttatatgacatgtaaaaaaaaaaaaaaaaaagg

SEQ ID NO: 96629 - DNA, 111 bp, Homo sapiens
atcggcctatccggaatgccccgacgtttctcggactaccccgatgcgtacgccacatgaaacatcctatcatctgtgggctcattcatgtatctacagcaggataataag

SEQ ID NO: 96630 - DNA, 1141 bp, Homo sapiens
aaattggtgggttccttggtcctccactgaacttccaaaaaatgaaagccgtggaaccctcgcggtgagtgttaacagctccttaaaggtggcgtgtctggagtctgtccccttctgatgttcagatgtgttcggagtttcttccttctggtgggttcgtggtcctcgctggcttcaggagtgaagccgcagaccttcgcggtgagtgttacagttcttaaggcggcgcgtctggagttgttcattcctccccgtgggctcgtggtctctctggcttcaggagtgaagctgcagaccttcgcggtgagtgttacagctcataaaagcagcgtggacccaaagaactcaggagcccagctggcttcacctagtggatcccgcaccagggcagcaggtggagctgcctgccagtcccggtgccgtgtgcccgcactcctcagcccttgggtggtcgatgggactgggcgccgtggagcagggggtggcgctcgtcggggaggctcgggccgcacaggagcccatggagtgggtgggaggctcaggcatggcgggctgcatgtcccgagccctgccccatggaaaggcagctaaggcctggcgagaaatcgagcacagcgccggtgggccggcactgctgggggacctagtacaccctctgcagccgctggcccgggtgccaagtccctcactgccttgtgcgagcagggctggccggctgctccaagtgcggggcctaccaagcccacgcccacccggaactccagctggcctgcaagcgtggcacgcagccccggttcccgctcgtgcctctccctccacacctccctgcaagctgagggagtgggctccagccttggccagcccagcaaggggctcccacagtgcagtgggggggctgaagggctcctcaagtgccgccaaagtgggagcccaggcagaggaggcactgagagcgagcgagggctgtgaggactgccagcacgctgtcacctctcaactcagtctcccacatggcgtggccacccttgtgtctgttaaactctttctctacaaaaatgccatggtctttctttgtgcagtggtcaggaaaaaccccttgggcagatacaaaagttctttcaggcatctgtttccagaatag

SEQ ID NO: 96631 - DNA, 379 bp, Homo sapiens
  misc_feature (1)...(379): n = a,t,c or g
aaaaaatatgacagacataaaaccaactgtattgataattaagtataaggggtctaaatattataattaaaaggcagagattataagactggataaaacagcaagattcaactctatgctgtccctaagaaatacacnnnnnnnnnnnnnnnnnnnnnnnnnnnnnnnnnnnnnnnnnnnnnnnnnnnnnnnnnnnnnnnnnnnnnnnnnnnnnnnnnnnnnnnnnnnnnnnnnnnnnnnnnnnnnnnnnnnnnnnnnnnnnnnnnnnnnnnnnnnnnnctttaaacataaaaatacagataagatacaccacgcaaacattaatcgtaagaaagctggaatggctatatcagaaaaagtagacttcaggacaagaaat

SEQ ID NO: 96632 - DNA, 405 bp, Homo sapiens
actattctctactaaccacatttacattggaacactatacctattattcagcacaagagctggagtcctaggcacagctctaagcctccttattccagccgagctgggccaaccaggcaaccttctaggtaacgaccacatctacaacgctatcgtcacagcccatgcatttgtaataatcttcttcatagaaagacccatcataatcggaggctatggcaactgactaggtcccctaataatcggggcccccgatatggcggttccccgcataaacaacataaccttctgactcttacctccctctctcctactcctgctcgcatctgctatagaggaggccggagcaggaacaggatgaacagtctaccctcccttagcagggaactactcccaccctggagg

SEQ ID NO: 96633 - DNA, 399 bp, Homo sapiens
atcacttgaacccaggcggcagaggttgcagtgagccaagattgcaccactgcactccatcctgggcaacagagtgagactctgtctcaaaaaaaaaaaaaagtagaaaaggttggacaggattatttatttagtttaaaccctttttattataaaaacatccgggaggggacccaaaacaaaggtatagcttatggaaggattataatggaagggggaaaaacctttgtgcccaccacctggggaaaaaaaagaattttgccaaaaaccccaggaggttttccaaagggcccttccagccaaagccttttttttttccccctctttgccccaacaggaaatcctgactttaacaaaaaggactttttgggttttttgagggcagttaagccttgccgg

SEQ ID NO: 96634 - DNA, 502 bp, Homo sapiens
  misc_feature (1)...(502): n = a,t,c or g
caatagagcgcctattgaanangccctccggaanncccgggncgacccacgcgtgcgccaataccaaacgcccctcttcgtctgatccggcctaatctttgcaggcttacttctcctatctctcccaaccctaggggcaggcatcactatactactaacagaccgcaacctccacaccgccgtgtttgaccccgacggaggaggagaccccattctataccaacacctattctgatttttcggtcaccctgaagtttatattcttatcctaccaggcttcggaataatctgccatattgtaacttactactccggaaaaaaagaaccatttggatacataggtatggtctgagctatgatatcaattggcttcctagggtttatcgcgggagcacaccatatatttacaggaggaatagacgtagacacacgagcatatttcacctccgctaccataatcatcgctatccccaccggcgtcaaagtatttagctgactcgcn

SEQ ID NO: 96635 - DNA, 464 bp, Homo sapiens
  misc_feature (1)...(464): n = a,t,c or g
cggacgcgtggggtccattttccttgaaggatgagcctttagaaacctctgacaataaagtttattttgcatccccggaaaaaaaaaaaaaaaaaaaaaaaaaaaaaaaaaaaaaaaaaaaaaaaaaaaaggggggggggggtttaaaaaaaaatttggggggggggaaaaaaaaggggggggggaaaaaaaatttttttttttaaaaagggggggaaaaaaaaaaactccgggggtttttagaaaaaaaaatttttttggggggggggggaattgggccacccccccccaaaaaaaaaaagtgcggggggggaaaaaaaaaattttggggggggagggggggaaaaaccccctttttgggggggggggggaaaagtgtcctcccgggggtttaaaaaaaaaaaaaatctcccggggggggggggtggagccccnncctnttcncccccccctttaaaagggaa

SEQ ID NO: 96636 - DNA, 399 bp, Homo sapiens
cttttcaccggagggggcctgactggcattgtattaacaaactcatcactagacatcgtactacacgacacgtactaggttgtacctcacttccactatggcctatctataggagctgggtttgccatcataggaggctccattcactgatttcccctattctcaggctacaccctagaccaaacctacgccaaaatccatttcactatcatattcatcggcgtaaagctaactttcttcccacaacactttcttggcctatccggaatgccccgacgttactcggactaccccgatgcatacaccacatgaaacatcctatcatctgtaggctcattgatttctctaacagcagcaatattaataattttcatgagttgagaagccttcgcttcgaag

SEQ ID NO: 96637 - DNA, 367 bp, Homo sapiens
cgtaatttggctaatttaaaccaaattaaaggggttggagaatttagaagaattctgggatagtttatataacttaaggaagagctgaacaactaagcttgacaatgggaactaaggtgcttccatgatcctcagcagcatgatctttctagaatgcattgtaggtggcttccctgtcttttctgtgtatctgttcaagcttcaaatactaagacagtctagtacaatgtgtttcgttttgttttgtttttttgagataagatcttgctctgtcacccaggctggagtgtagcggcgtggtcatggctcgctgtaacctcaacctcctgggctcagccacccaagtagccgggaccacgggcatgtg

SEQ ID NO: 96638 - DNA, 370 bp, Homo sapiens
tgtaatcccagctactgaggaggctcaggaaggagaattgcttgaacctgggaggcggaggttacagtcaccagagatgacaccaatgccctctggcctgggcgacagagtgagactatctcaaaaaaaaaaaaaaaaatttttcactttttttaaaaacggggggtttttacccctttttaaaaaaggcccccctggggaccactttaagccccaaaaacaaccttcccctttcccccctttataaaaaaagaaccggcccatggaattgggaaaggaaaaattttgggaaaaaaaaagggggggtaattggtttacaagggggaaaaacaattcccaaataaagggcaaaacaaaaagaaaatggggg

SEQ ID NO: 96639 - DNA, 359 bp, Homo sapiens
ccgggtactgtggctcacgtctgtaatctcagcagtctggggggccgaggcaggcggatcacctgaggtcaggaagcctaggttgcagtgagctgagattgcgccactgcattccagcctgggcaacaaaagtgaaactccgcctccaggaaaaaaaaaaaaacccccccccccccttccaacttaatactaccctttttgcaaatttaaaaaagaaccccattttccaccaaaggttcacgggggggctttttttgttttaaaagctgattgggccaaatcgttaaggcagaaaagggggccagggggctcatcacccctttattcccaccattttgggaggccaaggggggcaaatc

SEQ ID NO: 96640 - DNA, 159 bp, Homo sapiens
attcgaggacatacaaaaaatcacccgagtggtgggggttgcctgcattcccagctactcatgaggctgaggcaagacaatgtagctagcccgggaggtggagcttgcagagagccgagatatcgccactgcactccagcctgttcgtcaacacatatg

SEQ ID NO: 96641 - DNA, 126 bp, Homo sapiens
cgtttagtgagggagagatttggtatatgattgagatgggggctagtttttgtcatgtgagaagaagcaggccggatgtcagaggttaaaaaaagtccttcatgaaaaagaaagtcgacgcggccg

SEQ ID NO: 96642 - DNA, 343 bp, Homo sapiens
gtttgagtttgctaggcagaatagtaatgaggatgtaagtccgtgggcgattatgagaatgactgcgccggtgaagcttcagggggtttggatgagaatggctgttactacgagggctatgtggctgattgaagagtatgcaatgagcgattttaggtctgtttgtcgtaggcagatggagcttgttataattatgcctcatagggatagtacaaggaaggggtaggctatgtgttttgtcagggggttgagaatgagtgtgaggcgtattataccatagccgcctagttttaagagtactgcggctagtactattgacccagcgatgggggcttcgacatgg

SEQ ID NO: 96643 - DNA, 364 bp, Homo sapiens
gtttaagttgagtagtaggaatgcggtagtagttaggataatataaatagttaaattaagaatggttatgttagggttgtacggtagaactgctattattcatcctacgtgggtaattgaggagtatgctaagattttgcgtagctgggtttggtttaatccacctcaactgcctgctatgatggataagattgagagagtgaggagaaggcttacgtttagtgagggagagattttggtatatgcagagatggggggctggaactaattctgtatactgagggatgacgactgtgtatgtttttacaattacgctgtaggatacatactgttgcatagccttgaaaataataatttttaattg

SEQ ID NO: 96644 - DNA, 116 bp, Homo sapiens
cgaaatacaatagcctcatcatgcccaccatgatagccaccatcaccctccttaacctctacttctacctatctccccttttatactaataatcttataaaaaaaaaaaaaaaaag

SEQ ID NO: 96645 - DNA, 129 bp, Homo sapiens
caaaaaacaatagcctcatcatccccaccatcatagccaccatcaccctccttaacctctacttctacctatctccccttttatactaataatcttataaaaaaaaaaaaaaaaggggggcccgtttaa

SEQ ID NO: 96646 - DNA, 445 bp, Homo sapiens
taaatgttaatctcatccaggaacaccctcacagaaacaccaaaaataatgcttgagcaaatgtctgggcaccccatggcccagccaagttgacaaataaagataactatcacatatggaaatccaaaagactcaaaatagccaacatgacaataaagaaattgaacgaagtcataggactgacactccccgacttcaagacttatgtagaactcgtgcaataaaggcagaatgctattgattagcgaaaacataaacagccagtgaaacagagcccagaagcataaccacacagttatagtcaacttatctttcactggggagcaaaagcaaatcatggaagaaaggatagccttttctacaaatagtgctggtaaaactggaccatttctagccaaaaattgaacctacacactgaccttacaaatttcacaaaaattaactc

SEQ ID NO: 96647 - DNA, 434 bp, Homo sapiens
  misc_feature (1)...(434): n = a,t,c or g
cccacgcgtccgggatcgcttgaagcctgggaggtggaggttgcagtaagctgagattacactactgcactccagcctgggagacagattgagaccctgtctttaaaaaaaaaaaaaagttcccgaaaaggcgcgattttgttatagggccgggttttaacaggggggctatggaggttatttaaaaccatagtccgggttaggaaaagccctatttgggaaaaacataggggttccttctcctaagatgggccataaaagggcggggggggccatgaaattttatttaattttaggaggagaccaacccttcattttacctctgatatcttcctatgaaaggggaaaatatcccgcccaaaaatattttttggcttatacttaaaggcatttatttttctatcttggaagtggnttttaacttggttaacccc

SEQ ID NO: 96648 - DNA, 411 bp, Homo sapiens
  misc_feature (1)...(411): n = a,t,c or g
tctgaaccctgatccgcaagcattggccaggtcaatagttggacaagtatgtgctacaaggacctacttgggccacttccctcaggacgtgaacttgtcctgcctttctttcctggattcaaccttgagatacataatgggagaggccgtggaaagcccaagaggcagtgttctggatttgagtgagtgccttctgggcacctcctcctttgatggagaaacaaatccctcctgaccttgagcaacactacaggaatgtgcctggtgtaaacaggaaccagccgttcgtttctttttttttgagatggagtctcacggtcgcgcaggctggagtgtggtggcgtgatctcggctcattgtaacctctgcttcctgggttcaagcgattcttgtgcctcagtctcctgagtn

SEQ ID NO: 96649 - DNA, 417 bp, Homo sapiens
ttttgccgtgttggccaggctggtctcaagctcctgacctcaagtgatccgcccgcctcggcctcctaaagtgctgagattacaggtgtaagccagcgtgcctggtccaaaataacgatactaaaatctagttcattttcatattttcccaatagttgcaaaatgtgtttttggctgatttgcttaaattagaatctagtcagggaccacacattgcatttggtacatagttcttccagctcttttaattcaaaacagtcttctcaccctcggcagtgtagcaacaccctccctcccccatctctacaaaaaagaaaatttgactggatatagtggcatgtgcctgtgttcctaggtactcaggaggctgaggtgggaggatcattcgggcccaggaggttgagcctgaggtgggcc

SEQ ID NO: 96650 - DNA, 406 bp, Homo sapiens
cggacgcgtgggcggacgcgtgggttcttatcctacctcgcttcggaagaacctcccatattgtaacttactactccggaaaaaaagaaccatttgcatacatagggatggtctgagctatgatatcaatgggcttcctagggtttatcgtgtgagcacaccatatatttacggtgggaatagacgtaaacacacgagcatatttcacctccgctaccataatcatcgctatccccaccggcgtcaaaggatttagctgactcgccacactccacggaagcaatatgaaatgatctgctgcagtgctctgagccctaagattcatctttcttttaaaaaaaaaaaaaaaaaggggggccgtcttaaaggttccttgggggggcccaagcttacccgggtgtggaag

SEQ ID NO: 96651 - DNA, 451 bp, Homo sapiens
  misc_feature (1)...(451): n = a,t,c or g
ctagttctagatcgcgagcggccgccctttntttttttattttgttactttttttattttttttttttcctttttgttnnnccccgccccccctggggaaaaaaaaaaaaaagggggggggggggggggccccgggggcggcaaaattttttttcccccaagggggggggggttttgtggaaaaaaaaacccccctgttttcccccgggggggaaaagggggggttttttttttaaaaaaaaaaaaagggggggggcttttaaaaaatttttgggggggggccccaccccctggggggggggaaaaatttttttttttttttgggggggggcataataaccaccggggggggggtagggggagaccatttttttgggggggggggcctggggggccccccccccccggggaggaaagccggggggggagaaaaataattcgtggggggggg

SEQ ID NO: 96652 - DNA, 430 bp, Homo sapiens
  misc_feature (1)...(430): n = a,t,c or g
aactaggcctttccttgtaaaaggggggtggggcaaaagccacattaacagctggcatcccctccccggttcaagggaccctgggggccggtgctttttcctaatccaacagggggggttgggggggtgcgcgtgtgcgtttcaataaagtttgtacacttaannaaaaaaaaaaaaaaaaaaaaaaaaaaaaaaaaaaaaaaaaaaaaaaaaaaaaaaaannaaaaaaaannannnnnaaagggggggggcttttaaaaaaaatcttggggggggccaaatttaaggggggggggaaaaaaaatttttttttttttttggggggggaaaaaaaaaccccggggggttttttgggaaaaaactttttttttggggggggcgatttggggcccccccccccccaaaaaattaattgtttggggggaaaaaa

SEQ ID NO: 96653 - DNA, 410 bp, Homo sapiens
  misc_feature (1)...(410): n = a,t,c or g
cccacgcgtccgcgagaaagcacataccaaggccaccacacaccacctgtccaaaaaggccttcgatacgggataatcctatttattacctcagaagtttttttcttcgcaggatttttctgagccttttaccactccagcctagcccctaccccccaattaggagggcactggcccccaacaggcatcaccccgctaaatcccctagaagtcccactcctaancaccnnanaaaaaaaaaaaaaaaaaaaaaaaaaaaaaaaaaaaaaaaaanggggggggggccttttaaaaaaatcctggggggggccaaattttcgggggggggggaaaaaatttttttttttttttgggggggggaaaaaaaacccccgggggggtttttggggaaaaccccttttttggggggg

SEQ ID NO: 96654 - DNA, 401 bp, Homo sapiens
cacactttcaatttcagtatctaccaaaaagctacagtaataaaaacagtgtggtactggtataacaatagacatacagttgagagtccagaaataaacccatacatctatagctaattgattttttttcttttttagacaccaggtctcactctgttgcccaggctggcgtgtactggtgtgacatagctcggtgcaggcttaaacccctgggttcaggcgagcctcccgccttggcctcccaaagcactggaatcagaggcgtgaaccactgcatccagccagttaattgatttttttttttttttttacaaggggactaaaacccttcaattaaaaaatagtattttaaataaagggcactgggacaactagatatccacatgtaaaaaaaaaggaat

SEQ ID NO: 96655 - DNA, 426 bp, Homo sapiens
tgaaaactagaaaatggtgttgaaagaaatcaaagaagatctaaataaacagacagatatactgttttcatgacttcaaagactcatcacagtaaggatgtcaattctccctaaattaatatacaagtttagtgcaattcctatccaaatcccagcatgatttttgtaaataaagattattataaaatgtatgaggaaaggcaaataaactagaatagctgaaacaatttttttttttttttttttgagccaaagttttattttgtcacccaaattggaccacaggggggggatcacagctaattgcactccaccctgggcaataaaagggaaactccttttaaaaaaaaaaaaaaaacccccaaaaaccaaaccagaaaaattttttatacaaaaagccaccggggctgagggtggggttcaccc

SEQ ID NO: 96656 - DNA, 420 bp, Homo sapiens
cggacgcgtgggctcctgcctcaacctccctagtagctggaattacaggtgcatgccacgactcccagctaatttttttggggtggagatggggttatattggtcaggttggtctcgaactcctgacctcaagtgatctgcctgcgttggcctcccaattttttttttttttttttggctatcctaatttttgggccccccataaattttaaacttgttaagttaaaaaaaaaatttccttggggccgggcgggggggttcacccctgtaatcccaggattttgggggggctggggaggggggattttttgaggccaggagtttgcccccaccctgcccgacttgggaaacccctgtttttactaataatacaaaatgggtggggcgggggggcacattggggaggttgcgtcacaaaaa

SEQ ID NO: 96657 - DNA, 474 bp, Homo sapiens
  misc_feature (1)...(474): n = a,t,c or g
nattgaccntcatgtaccggnccgatagatccgcgttgacccacgcgtccggatgctgggtgatgaacagggagattatttctattcttgtgtttcagttatatccatttttaaaagtttgtatattggcaggcctcttgatcttcataaatactgtacggacttattgtttttgttaagccatcagcttaacagtgcacttgtataaaagtgcattctgggcaaaaaactggctcaacaccattagtcattggggaattacaaattaaaatcacattgggatgctactatacacccacgttaatggctcagattaaaaagactgacagaacgaagtgttgttgaggatatggagcaattggaatgctcatactttgctggagggaatgtaaaatagtacaatccctttgaaaaagagtttggcagtttattatataattgaatatatatcttgccataaagttaaacatatan

SEQ ID NO: 96658 - DNA, 484 bp, Homo sapiens
  misc_feature (1)...(484): n = a,t,c or g
tgttaggccatattnttttcccccgccatattagtggttctcagccttggttttatgttaagatcctcctcgagaggtttgcctaccccagaccttttcagggtagttacctaggaatctatatttttaggaagtgctgtaattcattctgataacatagctggagataacttggtgtcccaagtttaattatgtatgtttatcaaactactgattgaaatttttttttttctcgacacagagtctcgctctgtcacccagggtagggngannnnnnnnnnnnnnnnnttnntnnnnnntnngnntnnnnnnntnattnnnatttttttnttttnnntttttatttttttttatattanaatatttttattatttttaaaaattattttatttatatttattttnatatatatttaaaatatattttatatataattttatttatattattttattttatataatatttattatatttataatt

SEQ ID NO: 96659 - DNA, 378 bp, Homo sapiens
ggcacgaggagatttttttttcactccataacgctgcttatactaggcctactatccaacacactaaccatataccaatgatggcgcgatgtaacacgagaaagcacataccaaggccaccacacaccaccttgtcaaaaaggccttctaaacgggataatcctatttattacctcagaagttttttttttcgcaggatttttctgagccttttaccactccagcctagcccctaccccccaattaggagggcactggcccccaacaggcatcaccccgctaaatcccctagaaatcccactcctaaacacatgcgtattactcgcatcaggagtatcaatcacctgagctcaccatagtctaatagaaaacaaccga

SEQ ID NO: 96660 - DNA, 356 bp, Homo sapiens
gcgcgtgcctgtagtcccagctactttggaggctgaggtgggaggaatgcttgagcccaagagtttgaggttgtagtaaacaaagatcacaccactgtactttagcctgggcaatagagcatgagcctatctcaaaaaaaaaattatagttaaaattttaggtgtgataatgttttaagaaaagttgtataggggtggttcatgttttaaggggtccttatattatagaaataaatgcttcgaatatctctcgggtgtaatggaataatcgccgtggattttaaaaattgtttacacagtatttggctgtgtgttaatataaacaaaactttgtttgtttggtattttatgtattg

SEQ ID NO: 96661 - DNA, 378 bp, Homo sapiens
  misc_feature (1)...(378): n = a,t,c or g
cccatgcctataatcccagcacttcgggaggctgaggcaggcggatcacttgaagtcaggagttcgagatcagcctgggcaacatagtgagacctcattgctaccaaaaaaaaaaaaaaaaaggcggccgttcgatttaaaggggcccgttaaaccccgttgaccaccctcaaggggccctttaagtggccaccctttggtggttggcccttcccccgggctttttttgaccttgaaggggcccccccccattgccttttcttaaaaaaaggagaaaatggcttcgctttgtctgagtgggggcctttctattcgggcccnnnnnccccccgggggagggggtttgcaggacctgggggagccggcttccactgcttc

SEQ ID NO: 96662 - DNA, 420 bp, Homo sapiens
gagtgcagtggcgcgatcttggctcactgcaagctctgcctcccaggtttacttacacctgtaattccagctacttgggaggctgaggtgggagaatctcttgaacctggggggctgctgtgagccgagatagttccattacacttcagcctgggtgacagagtaagactctgtctcaaaaaaaaaaaaaaaaaaaaaccccctttctgggaaaaaaaaaaaagtttccaggaaaaattgggcccggggcctcccatttgaaacccttgggcggggaaaaacccttttattaaaaaacctacccccccccttttttttttttttaaaaatttcttaaaaaaatggttggcgggggccctgggaacctttttaaaaaggccctttctatttcaggaacctgggggggggccagaaaatttt

SEQ ID NO: 96663 - DNA, 418 bp, Homo sapiens
ctttaatctcagctacaggagaatcgcttgaacccaggaggcggaggttgtggtgagccgagatcgtgccactgcactccagtctgggcgacagagtaagactctgtctccaaaaaaaaaaaaaaaaaaaaaaaaaggggggggtgggttcccccttcccttgggggggggccaaagaaaaaaaaccctttttttaaccaagaagggggcctttaacaaaacacaaaattggttgggccttttttttggacttccccaccccaaaaagggaaaaaaaaaatttttggggtttaaaaacaaccccatttttaggggtttgttttaaaacccggggtttgccctaaaccccaaaaaattaaaatatttttaaagcccagcccggggggccaaaacttgaaaacccaaccttttgggaaag

SEQ ID NO: 96664 - DNA, 419 bp, Homo sapiens
tgctttgaacagtaaaaagatatacaagtaaaaggcattatttatatgagtaagaaagacatttttgaggggagaaaagttattccactttaaaaatcaatagccaagtctcatgccttttgttactttagtaagcgaaaatttcaggtactaaatacctttcttagccaagtttataacaaaaacatctcagtatacttcattacttatttaagcgggatgtcttttttttttttttgaaagggagtttcgttgtttcccaggttggagggcaggggcataatttgggttaattgaaagctccgcctccaaggttaacccatttttcttgcttaaccctccgagaaacttggaagaacaggccgcggtattttttttgtttttttataaagacggggtttcaccatgttacccgggag

SEQ ID NO: 96665 - DNA, 371 bp, Homo sapiens
caatcctgtttgagatgacgaatttccctcatcccttgaattcactgccagcagggcatttttttcttttttttatgcaaataggaaaatgcatcctaaatgagggtttaaaaaatcgaaaatatttaaatatacaggatggtgataaatatgactccattatcaatctggattcacaagtggcttctgctttattttattacattttatcttttacaaacaaggcgtcactctgtcacccacgctggagtgcactggtgtgatcatagctgactgcagcctctacctcctgacacaagctgtcatcccgctttggcttctcaaaatggctaggattataggcgtgagccaccatgccccgacagtttttg

SEQ ID NO: 96666 - DNA, 347 bp, Homo sapiens
ggaggttgcagtgagctgagccactgcactccagcctgggcaacagaacaagactctgtctcaaaaaaaaaaaaaaaaaaaaagggggggagggaaaaaaggggggggggaaaaccggggaaaaagaaaaactggggccttgaaaactttacatttttttggggggcccctggaaggccttcccttaaggggggggggggggttccccctttggacttttttatagggaggggcatccccctggcctttttggaaagggggcctttttttttttgttgaccaagttcttggggggtgtgggtgacaaagggatcggcacattgtgtatttttgccaacaaaacgtgg

SEQ ID NO: 96667 - DNA, 430 bp, Homo sapiens
  misc_feature (1)...(430): n = a,t,c or g
gatggtctcgatctcttgacctcgtgatctccttgccttatcgtcccagagtgctgggattacaggcatgaaccaccacacccggccagaaactactttttacggctggagtttcagaactaatttagtaaaggattgaaaaggaaggaggatacagttgactcatttgtacagagtatatgactcatttgtacagaatgaaaacatgtttatgaaggttcacactaagtgaaagctggcatccaagttgattcagacaaaagtgaaagtcaagaagttaatagtacattaattctccaaatgcatgccagcagagcgtggcaggaaggtacacaagtcagcagatctgggttggcctggttctcctattgactcgtgtgtgtgatgttaggggggtgaatcttggctttgaatctccatttgaaaatan

SEQ ID NO: 96668 - DNA, 379 bp, Homo sapiens
  misc_feature (1)...(379): n = a,t,c or g
gcgccactgcactacagtctgaatgacagagtgaaagctcgtctcaacaataacaacaacaacaacaacaacaaaaatatacacacacacacacacacacacacacacacacacacacacacattaagcctaatctctaacaacctttgcaactcattatataacgccagtgggagacacatgcccatatattttggaccaaacactatggtgtaaattaagatctcactcctgtagaaataattcacactagagaaaccagtattttataagaaagtattttataaaattttacgccagattttgcactttgggtgtacgcataataaaagtgccacataacaagaataaacaagtgaaatttctaagtatatataan

SEQ ID NO: 96669 - DNA, 413 bp, Homo sapiens
aaggccaccacacacaacctgtccaaaaaggccttttatacgggataatcctatttattacctgagaaggttttttcttctcaggatttttctgagccttttaccactccagcctagcccctaccccccaattaggagggcactggcccccaacaggcatcaccccgctaaatcccctataagtcccactcctaaacacatccgtattactcgcatcaggagtatcaatcacctgagctcaccataggctaatataaaacaaccgaaaccaaataattcaggcactgcttattacaattttactgggactttattttaccctcctacaagcctcagagtacttcgagactcccttcaccatttccgacggcatctacggctcaacattttttgtagccacaggcttccaccgt

SEQ ID NO: 96670 - DNA, 420 bp, Homo sapiens
aatagcttgaacccgggagatggaggttgcagttagccaagattacactactgcactccagcctggggaacagagctggactccatctcaaaagaaaagaaatatccataccatgtataccatccatcaatgaaaatgactatctacaactacagacaacaaaatgtaaatcacatatatattatgttggttgaacacagccagacacaggaaaacacgtgttttatgatttcaggaaattttttttttaaccttccaatagtgttgggggaaggagagaaaaatcaacactcaatatcctttaagcttttttttaatttttaatttttgggggggataggggtatatatttatggggtacatgagaaattttgatacatgcatggcatgggataataggccacttctgggaaaaggggg

SEQ ID NO: 96671 - DNA, 484 bp, Homo sapiens
  misc_feature (1)...(484): n = a,t,c or g
ttgtctttcatttatgtgtagtatagaaatcacctttctaatatgtgttgccaaactatttgccaccatctatttggtgaaatattcattgtcattgtgattttccacaagtataagttcttaagtactttatagattcagaagtaaatgctgtcctgttctccatcagctgttcgtttgttacagattttgtatttcttttttttttttttggaaagggggtctccttttgccccccggccggaataaaggggggggggtttgggttccttgaacctttggcttccgggtttaaaagaatttttttccctaaccctcttgagaagtgggaataacgggcgcggccccccccccggggcaaattttggaatttttttttttttttttttttgaaaagggagcttttttttgccccccggtgggaggggagggggaaaattttggtttatttgaaggggcccccctggggttacccccatttctn

SEQ ID NO: 96672 - DNA, 380 bp, Homo sapiens
  misc_feature (1)...(380): n = a,t,c or g
gtctgatacgaagatagggatttcctcagtcacagatgatattttgaaggaaagctgcaataaagccacaatgatttgaggtctttgcttaagtatgagatactcgatgggggctttatcatgcaacattagtttgcttaccttaagaattgcccaaaaatgaaagaaaatatgagcttttcagttaaacatactcctaaaaacattttccgggattttactactaaaattggacatttaagcgaagtaaaagaggccgggtgcggtggctcacgcctgtaatcccaacactttatgagtccaaggcgggcggatcacttgaggtcaggagttcaagaccagcttggccaaggtgataaaacccgtctctactaatacan

SEQ ID NO: 96673 - DNA, 391 bp, Homo sapiens
atcacatgcctatcatataggataacccagccgatgacccgtaacaggggccctctcagacctcctaatgacctccggcctagccatgtgaattgacttccactccataacgctcctcatactatgcctactaaccaacacactatccatataccaatgatggcgcgatgtaacacgagaaagcacataccatggccaccacacaccacctgtcccaaaaggccttcgatacgggataatcctatttattacctcagaagttttcttcttcgcccgatttttctgagccttttaccactccagcctagcccctaccccccaattaagagggcactggcccccaacatgcatcaccccgcgtaataccctagatgtgccactcctaaacacc

SEQ ID NO: 96674 - DNA, 388 bp, Homo sapiens
gatcatgaggtcaggagatcgagaccatcctggctaacacggcgaaaccccgtctctactaaaatacaaaagattagctgggcatggaggcatgcgcctgtggtcccagctacttgggaagggtgggactgcagactcacatcaccacgtcctgctaattttggaaactttctattctttgagggagagaaggcatctcacttcggtgcccacgctaggtatgaattactgggctcaagacatccgttgaccacagcctccaaagggtatgggattagaagagtgagccactgcgcccagcctttgagttcatacagtacaatgcagaccctctcctttacaacactattatttggggatcgacttataactactgatgtaacattgg

SEQ ID NO: 96675 - DNA, 394 bp, Homo sapiens
  misc_feature (1)...(394): n = a,t,c or g
gtccggattgatcaagagccgcctgtccagtgttatgtaggggcaacgggcagtactccaagggccgttgcctgtgtttcagcggctgtaagggcaccgagtgtgatgtgccgactacccagtgtattgacccacagtgcgggggacgtgggatttgtatcatgggctcttgtgcttgcaactcaggatacaaaggagaaagttgtgaagaagcaccaagatacattccagagaaggaaagnnnnnnnnnnnnggcctccaacttgcatgtttaggagaaatggccggacatagcctaccaaagtggtggttcttcgggattttttggacaaggggggtaactaggaacttttcttttttactaaaacactgaggttcggggggtttattttga

SEQ ID NO: 96676 - DNA, 395 bp, Homo sapiens
  misc_feature (1)...(395): n = a,t,c or g
cagggttttaccatgttggccaggctggtcttgaactcctgactttgtgatccgcctgcctcagcctcccaaagtgctgggattacaggcgtgagccaccacgcccagcccatacaccccctcattcttgactgtgctgctctagtggacgaaacagccccaaagcattgctcagttgggagggggtggagggagtccagcctgggtgtgtgcaaaggagtcacccaggaaattcgccgcgggatctgcccttacagatgcactcgcctggggccaagccctcggtggctggggcaggttacccagaggcccaggggccaaatgcaggagcaagttcccatcangaaaggggaagagtgaagcanagatccagctcctgcatgcaggggagtggg

SEQ ID NO: 96677 - DNA, 399 bp, Homo sapiens
gtgggttttgtatgttcaaactgtcattttatttttacgttgttagatatggggagtagtgtgattgaggtggagtagattaggcgtaggtagaagtagaggttaaggagggtgatggtggctatgatggtggggatgatgaggctattgttttttgtgaattcttcgataatggcccatttgggcaaaaagccggttagcgggggcaggcgggcagctgaagatgatgaggatgacgatgtccataccaacaagcagaagaccgacgaggatgactagacagcaaaaaaggaaaagttaaactaaaaaaaaaaaggccgccgggacctattcaccctccacttcccgtctaaaaatctaaacgtggtccccttcgattaaagaggcccccccgcccac

SEQ ID NO: 96678 - DNA, 402 bp, Homo sapiens
tctgttttaaatacaaaatttattgaatatactttttcaaacaaagtttcatgttctaatcattgtctgatttcagcattaaatgaaacacagtaaagaaagttgggctgaaaaaaaaaaaaaaaaaaaaaaaaaaaaaaaaaaaaaaaaaaaaaaaaaaggggggggggctttttaaaaaacctctgggggggccaaatttaacgggggggggaaaaaaaaaatttttttttttttaggggggaaaataaaaacccctcggggtttttttgaaaaaaaacctttttttgggggggggcatttttgccccccccccccccaaaaaataaaagctttggggggaaaaaaaaatttttttgggggatgggggggaaaaaaacctcattttcccgtgggaaaaaa

SEQ ID NO: 96679 - DNA, 403 bp, Homo sapiens
cgatcatagagtagattaaaaaaaattttttttgaggaaccttcatgctgttacccatagtggccacaccttttttacattcccaccaacagtgcacagatgttctaatttcttcacatccttgtcaatacttctgattttttaaataatgttaatcccaccaggtatgaggtgacatctcattatggttctaatttgtggttggaaagggtacttagtgtgatttcagtcttaaatttgttaagacttgttttgtgatctcacacgtggtccatcctagagaatgttcggtgtgcacctgagagagaacatgctgttgctgttgggtagaacgttctatgtgagtttgttaggaccatttggtctacagtgttggtgaaagcctctggtttcttattgatct

SEQ ID NO: 96680 - DNA, 372 bp, Homo sapiens
  misc_feature (1)...(372): n = a,t,c or g
gttttctattagactatggtgagctcaggtgattgatactcctgatgcgagtaatacggatgtgtttaggagtgggacttctaggggatttatcggggtgatgcctgttgggggccagtgccctcctaattggggggtaggggctaggctggagtggtaaaaggctcagaaaaatcctgcgaagaaaaaaacttctgaggtaataaataggattatcccgtatcgaaggcctttttggaccagtgggnnnnnannacnncnnnctctttacaaatgttatatggcctgatgtgagncattaccttccagagtgggtttgattttaatatactggggggtggccagtttaaacttgttatctaatcttttttt

SEQ ID NO: 96681 - DNA, 375 bp, Homo sapiens
  misc_feature (1)...(375): n = a,t,c or g
ccgggtactgtggctcacgtctgtaatctcagcagtctggggggccgaggcaggcggatcacctgaggtcaggaagtctaggttgcagtgagctgagattgcgccactgcattccagcctgggcaacaaaagtgaaactccgcctccaggaaaaaaaaaaaaacccccccccccccttccaacttatttttaccctttttgcaaatttaaaaaatgaccccattttccaccaaaggttcacgggggggcttcttttgttttaaaacctgatttggccaaatctttaaggcagaaaaggggggcaagtggttaatcacccctttaatcccagccctttgggaggccaaggggggcaaaataattggaaccgggaan

SEQ ID NO: 96682 - DNA, 392 bp, Homo sapiens
tttttttttgcagattttaaaaaaatgtttattctaataaaccattttaaaatggaacttacaacatattttgaactgaaaagaaatgaagcaacagcatctgagaattgttgagatgctgtgaaagcagtacttgggggaaaatttatagtactaagcacctatattagaaaagaagaaaggcctcgaattaataacatcagcttccaaattaaacactggacaaagaagaattaaacctaaggtaagcaaaaaaaaaaaaaaaaaaaaaaaaaggtcaccgggcccgaaattcccaaatttttaatcgtgaaatctggaaaacccccgaaggtcattttaactggggcttggggcccaatcaaatttctttcatttattacacggttggg

SEQ ID NO: 96683 - DNA, 368 bp, Homo sapiens
  misc_feature (1)...(368): n = a,t,c or g
gagaaatgtaaattgaaatcacaatgaggtaccactataatactgctagaaggctaaagttttaaaagactgacaatatcaagtgttagtaaggacatggaacaagtggaactctcatataccattggcaggaataaaaaatggttcaaccactttggaaaatagtatgacagntgntttcttttttttttcttttttttttttgaaaacagttccctttttgtgcccaaggttgaagggaaagaacaaaatttgggttaattgaaccttccccttccaagttcaagggaattttctggcttaaccctcaaagacccgggaataataggctggccccaccagcccgggttaatttggattttttggaa

SEQ ID NO: 96684 - DNA, 510 bp, Homo sapiens
  misc_feature (1)...(510): n = a,t,c or g
ggcacgaggttagccaggatggtctcaatctcctgacctcatgatctgcccgcctcggcctcccaaagtgctgggattataggcgtgagccaccatgcctagcatggcttattcttcctgatgactgtgtaatattccaaaaattaaaattactccatcataatttattgaacctttcctgtattgatgtattgatgggcatttatagtctttccaacttttcacaaagtaattttcctttttttttttttttttaaaaaaaaattttgttttgccaccaagccttaagggaaggggttaaatttgggttaattgaaccttttgtccccgggtttaaaagaatttttctggttaacttccccaagggttggaccggggggggttnttttttttttttagccccattcttaaaacaaaaaattcttttgcaggggggctaaaaaataaaatatataaggtggatttaaaaacagtggctcaaagacattttttgaatttattaatttaaag

SEQ ID NO: 96685 - DNA, 414 bp, Homo sapiens
ggcacgagtccaatcttaaataagctacagtcatattccttcatttgtcacacagtgattgcacattaggagtgagggtagtggttctgagatactagcatcaattcaatgagattcaatggctaacatccagtgtctcggtttttatggcgcttctgaaaattaggaccatctttatgcttaagtgaaaaggacttgtcatggtaacttcctgatgcaaaatgtttttttgtctttccatttttttttttttttttgaaagggggttttgtttttttgcccaggctggagtgcaggggcacaatttaagttcattggagcctttgcctccccagttaaagcaatttttttgcctaaccctcccaagaagttaaaaatataggcctgccccaccttgcccagctaatttttact

SEQ ID NO: 96686 - DNA, 299 bp, Homo sapiens
gaaaactacagaccaatatcttttatgaacacagatgcaaaaatcctcaacaaaatattagcaaatcaaatccaacaatgttcaaaaagaattacacatcgtgaccaagtaggatttctcccaggtatgcaagggcaattctacatttgaaaatcaattaaatccattaatgcaattcaccacatcagtaggctaaagaagagaaatcacatgatcccttcaatagaggccaaaaaagcatttaatacccattcatgatttatgaaaaaaaacaaaaaattggccttccaggaaactag

SEQ ID NO: 96687 - DNA, 395 bp, Homo sapiens
ggcacgagaaggagtagttttattaccctaaaaatcccctgtacaccacctggtcatctctctttcccttctcttttcctgagcccctggcaaccacagattctttttttttaactgtctctatagttttgccttttccagtgttatatagttggaatcatacaataagtaagtagcttttgcagactggcttctttcacttggtaatatgcatttaagttcctccatgtcttttcatggcttattaatgcatttcattctaccccgaattgcattccattggaaggatgctattatatatatatatatatatatatgtgtgtgtgtgtgtgtgtgtgtgtgtgtgtgtgtgtgtgaataaattagagatggagctcgctcttggtgcccctgcg

SEQ ID NO: 96688 - DNA, 423 bp, Homo sapiens
  misc_feature (1)...(423): n = a,t,c or g
atcggcacgagcatgcctatcatatagtaaaacccaccccatgacccctaacaggggccctctcagccctcctaatgacctccggcctagccatgtgatttcacttccactccataacgctcctgatactaggcctactaaccaacacactaaccatataccaatgatggcgcgatgtaacacgagaaagcacataccaaggccgccacacaccacctgtccaaaaaggccttcgatacgggataatcctatttattacctcaaaagtttttttcttcgcaggatttttctgagacttttaccactccagcctagcccctaccccccaattangagggcactgggccccaacaggcatcaccccgcttaatcccctagaagtcccactcctatacacatgcgtattactcgcatcaggagtat

SEQ ID NO: 96689 - DNA, 391 bp, Homo sapiens
ggcacgagaaaagcttttaaataaagtaattggcagcttgggcaacatagcaagaccctgtctctacaaaaaaaaaatttaagttggccctgcatggtggcactgacctgtggtcctagctactctggaggctgaggcgaaagtatcacttgagcccaggagctcaaggctgatcatgccaccatactccagcctggatgataaagcaagaccctacttttttttttttttaaaaaaaggggccccatctggggctctgaaaaaaaagggaggttttcccacatctttttccttattctgaaaatatgccggggaatttttaaccaaaaattggggaaaaaatggggaatttttaaagggtgcaccatggccacaatttgtgtttctcaga

SEQ ID NO: 96690 - DNA, 446 bp, Homo sapiens
  misc_feature (1)...(446): n = a,t,c or g
ggcacgaggctagcaccactgcacttcagcctggtgacagagcgagactcgtctcaaaaaaaaaaaaaaaaaaaaaaaangggggttggggggggcccccccttaaacccccccttttttaaaaaaaaacagggaaaaatttttggccccctttttttaaaggaaaagaaaaacccccccccaacccccggggtgggggaaaaaaaggggggccaaaaccccccccggttatttttttttttttttaaaaaaggggggtaaaaaaatgttcccaaaaagggttaaaaattcggggttaaaaaaaactttcttccttggccctaaaaagggggccccttggaaaatggggattttttttttggaaaaaacaccacccccccccccacccttgttttttttaaaaaaaaaacttaaaaaacaaaatttggttgggcgtttggctttga

SEQ ID NO: 96691 - DNA, 388 bp, Homo sapiens
ggcacgagaaaaaagaaccattttgatacataggtatgggctgagctatgatatcaattggcttcctagggtttatcgtgtgagcacaccatatatttacagtaggaatatacgtagacacacgagcatatttcacctccgcttccataatcatagctatccccaccggcggcaaagtatttagctgacttgccacacttcacggaaacaatatgaaatgatctgctgcagtgctctgagccctaggattcatctttattttcaccgaaagtggcctgactggcattgtattatcaaactcatcactagacattgtactacacgacacgtgctaccttgtagctcacttgcactatgtcctatcaataggagctgtatttgccatcaa

SEQ ID NO: 96692 - DNA, 403 bp, Homo sapiens
ggcacgagcggcacgaggaactatcaaactcctgagccaacaacttaatatgactagcttacacaatagcttttatagtaaagatacctctttacggactccacttatgactccctaaagcccatgtcgaagcccccatcgctgggtcaatagtacttgccgcagtactcttaaaactaggcggctatggtataatacgcctcacactcattctcaaccccctgacaaaacacatagcctaccccttccttgtactatccctatgaggcataattataacaagctccatctgcctacgacaaacagacctaaaatcgctcattgcatactcttcaatcagccacatagccctcgtagtaacagccattctcatccaaaccccctgaaacgctagagaggaaaa

SEQ ID NO: 96693 - DNA, 381 bp, Homo sapiens
ggcacgagcaatcacatgcctatcatatagtaaaacccagcccatgacccctaacaggggccctcttagccctcctaatgacctccggcctagccatgggattttactttcacttcataacgcttctcatactagggctactaacctacacactaaccatataccaatgatggcgcgatgtatcacgagaaagcacataccaaggccaacacacaccacctgtgcaaaaaggccttcgatacgggataatcctatttattacctgagaagcttttttcttcgcaagatatttctgagccttttacgacttcaggctaggccctaccccccaattaagagggcactggcccccaacaggcattaccccgctaaattctctag

SEQ ID NO: 96694 - DNA, 410 bp, Homo sapiens
  misc_feature (1)...(410): n = a,t,c or g
gttatttggggggaagaaagggagtcgtggctaacaaaggtgatcttgttatgcagaggaaatcccacagatagcagccctcaaagagaacagatgagaanncnttntttttttttttttttttttaggggaaagggggggggggtttttttttttccccccggggggggggggggggggggaatttgggttttttggacctcccccctcgggggttaaaggatttttttttccttccccccccgagaagggggaataaaggggggccccccccccccccggtttttttttttttttttttaaaggggggggtttccccttgggggcgggggggtgttaaacccccattttggggagccccctttttttaccccccattttttttttaaaaagggggtggcccaaaaatt

SEQ ID NO: 96695 - DNA, 427 bp, Homo sapiens
  misc_feature (1)...(427): n = a,t,c or g
atttgttagatgttttatttgtggttgctatggggattatagttaacatcctacacttaaaacaatctaatttaaactgataccaatttaccttcaatagcatacaaaatctctactcctgtaaagctctgcccctgccccccttatgttattgatggcacaaattgcctaataaataatttatagttaaaaaaaaaaaaaaaaaaaaaaaaaaaaaaaaaaaaaaaaaaaaaaaaaaaaaaaaaaaaaaaaaaaaaaaaaaaaaaaaaaaaaaaaaaaaaaaaaaaaaaaaaaaaaanggggggggggttttttttaaaaattttgggggggggccaaccacccccggggggggaaaaaatatttttttcttttttgggggggggtaataataagggggggggggggggggttataaaaaaggggg

SEQ ID NO: 96696 - DNA, 417 bp, Homo sapiens
agcgacgcacgtaggtctacaagacgtaacttcccctatgatagaacagcttattacctttcatgatcacgccctcatgaacattttgattatctgcttcctagacctgggtgcccttttcctaacacttgcaacaaaactaacgaagactaacatgtgatacgctcaggaaatataaaccgactgaactatcctgcccgccatcatcctaaacctcatggccctcccatccctacgcatgctttacataacagacgagggggacgatccctcccttaccatcaaatcaattggacaccaatggtactgaacctacgagtacaccgactacggcggactaatctttaactcctacatacggcccccattattcctagaaccaggcgaactgcgactccttgacgttgacaatcgaat

SEQ ID NO: 96697 - DNA, 430 bp, Homo sapiens
attttaagtgggattggttttgtttttatctgagcttccattgaacgggggtattttaactttttttcatcaagggatatattcacccttccctgggggacgaacctgggctcttatggtaggctcctggggtcttgttatggcctcaacagacctcctcggacccctgtgccacgcatttaccccagccacgcaactacttcttaacctagccgtggccagccccttatgaccggccgcactgaggataggctgtcactctaagactacaaatgccctaacccacttcttaccgcgaggcacacctaccccccctaggcccatacttgttactatcgaaaccatgagcctactcattcccccaatagccccggaccaacgcctagccgctggctttactgcacgccacctactcttgcacctaagtgta

SEQ ID NO: 96698 - DNA, 453 bp, Homo sapiens
ggcctcgtgccataaaattttatagggattggcctggtcatgaaaggaaaagaattgcctggaaaggagacccctgtcacatggtcttgataaaagatgaaaaaggcttgatgtgtcaaaaaaaaaaaaaaaaaactccatttttctgggcccccaaaattccccttgtttttcccccggcccaaaaaaaccagggatcttaacctaatcccccgggggggggagggaacccacctttgcggcctgggccttaaaggaaaaaaccaccggccctaatggggcctcctccctcctcccccgggggaattaacccaaaatcctttttttatttaaaccccggccctgcacattaaccccggggggaaaattgactagggccggtctttgagaacctgtttttaccccttttaaaaaaaatatttttatggggggagttaaggtgttcccaaaccc

SEQ ID NO: 96699 - DNA, 397 bp, Homo sapiens
ctgaggcccccacccctgcatcatccatgatgtgccctgtctattcttttttttttttttttggaaggggggtttactttttccccccaaatggggggggggggggggaatttgggttaatggaaacccccccccccggggtaaaaaaaatcccccggcctaacccttttcggaagggggggaaaagggggccccccccttggccggccaaattttgggattttaaaaaaaaaaggggttcccccaggggggccggggggggccccatccccggccctgggaaccccccggcccggcccccccaaggggggggaataaagggggggggccctggggcaaagctttgcctttttttttttaaccaaccagggggtttgggtttttttgaaaaaggctt

SEQ ID NO: 96700 - DNA, 384 bp, Homo sapiens
  misc_feature (1)...(384): n = a,t,c or g
cctcaagtgaccctcccacctcagccttccaaggaagtgggacgacagacatgtgtcaccaccaccatgcccagctaatttttaatttttttgtagagacagggtcttgctatgttgcccaggctggggttcagtggcatgatcatggttcactgctgtctcagactcctgggctcaggtgatcctcaggggccactgttttgaactgggctcctgcgctgggtcctagaagaccagacccaaccagaatggagtcactggtgctaatgaaaccaaggggttcactgatcaggtcagcctgccctgattgctttttggtattttggttttcctttttccatgaagctgaaggctgtgcctctgaatgctgacgcccacccttcn

SEQ ID NO: 96701 - DNA, 449 bp, Homo sapiens
cggatttagctgactcgccacactccacggaagcaatatgaaatgatctgctgcagggctctgagccctaggattcatctttcttttcaccgcaggcggcctgactggcattgtattagcaaactcatcactagacatcggactacacgacacgtactacgttgaagctcacttccactatggcctatcaataggagctgaatttgccatcataggaggcttcattcactgatttgccctattctcaggctacaccctagaccaaacctaccccaaaatccatttcactatcatattcatcggcggaaatataactttcttgccacaacactttctcggcctatccggaatgccccgacggtactcggactaccccgatgcctacaccacatgaaacatcctatcatctggaggctcattcaatgctcttaacgccggaagtataacta

SEQ ID NO: 96702 - DNA, 460 bp, Homo sapiens
  misc_feature (1)...(460): n = a,t,c or g
cccacgcgtccgagcctttctattagctcttagtaagattacacatgcaagcatccccgttccagggagttcaccctctaaatcaccacaaaaaaaaaaaaaaaaaaaaaaaaaaaaaaaaaaaaaaaaaaaaaaaaaaaaaaaaaaaaagggggggggggggtaaaaaaaaaacgggggggggggcaaaaaaaggggggggggggaaaaaaaatttttttttaaagggggggggggaaaaaaaaaccgggggggggtttggggggaaaaacttttggggggggggggggaaattgggggaacccccccaaaaaaaaaaaggggggggggggaaaaaaaaaaatttggggggggggaggggggaaaaaacaccccctctggggggggggggggagagttcttcccgggggtttaaaaaaaaaaaaatttggggggggggggtgggggggggccccgnncg

SEQ ID NO: 96703 - DNA, 418 bp, Homo sapiens
ctcaacaccaccttcttctaccccgacggaggaggagaccccaatctataccaacacctatactgattttgaggtcaccctgaccctgatattcatatcctaccacgccccggaataagatcccatatcgatactgactactccggaaaaaaagaaccatatgcatacgtaggcatgggctgggctatgacatcaattggcttcctatggctaatggtgagagcgcgccctctctttacagttggagtaggcgtagacgcacaagcatattcctccttcgcttccattaccatagctatccccaccggcgccgaagtatttagctgactctgcccactccccctaagcggtatgaaatgaactggtgctgcggtctgggccctaggactaagatttatttttacctgtagcggacggg

SEQ ID NO: 96704 - DNA, 434 bp, Homo sapiens
ccccgcataaacaacataagcttctgactgttacctccctctctgctactcctgctcgcatatgctatagtggaggccggagcaggaacaggatgaacagcctaccctcccttagcagggaactactcccaccctggagcctccggaaacctaaccatcttttccttacacctagcagggggctcctctatcttaggggccatcaatttcatcacaacaattatcaatataaaaccccctgccataacccaagaccaaacgcccctcttcgtctgatccgtcctaatcacagaagacctacttttcctatctctcccaggcctagctgctggcatcactatactactaacagacctgaacctcagcaccaccttcttcgaccccgccggaggaggagaccccattctataccaacacctattctgatttttcgg

SEQ ID NO: 96705 - DNA, 383 bp, Homo sapiens
tggactatcttgtacaaaccacaaagacatgggagcactatacctattattgggcgcgagagctggagtcctaagcacagctctaagcctacttattagagccgagctgggccagccaggctaccttctagggaacgaccacatctacaacgatatcgtcacagcccatgcatttgtgataatcttcttcatagtaatacccaccgtactcggaggctttggcaactgactaggtcccctaataatcggagcccccgatacggcggttccccgcataaacaacataagcatctgactcttacctccctgtctcctactccggctcgcatgtgctatagaggaggccggagcaggaacaggttgaacagtctaccctcccttag

SEQ ID NO: 96706 - DNA, 442 bp, Homo sapiens
  misc_feature (1)...(442): n = a,t,c or g
cccacgcgtccggccctcgtagtaacagccattctcatccaaaccccctgaagcttcaccggcgcagtcattctcataatcgcccacggacttacatcctcattactattctgcctagcaaactcaaactacgaacgcactcacagtcgcatcataatcctctctcaaggacttcaaactctactcccactaatagctttttgatgacttctagcaagcctcgctaacctgcctgcccccacacccactccacaccagtaataaaaagccaccaccccnaaaaaaaaaaaaaaaaaaaaaaaaaaaaaaaaaaaaaaaaaaaaaaaaaaaaaaaaaaaaannaaaaaaannnaaaaaagaannnnaannnnnnnnnnggggggggggggnnnnnaaggggnggttgtggggggcaaaacttttgggggggggaaaaatatta

SEQ ID NO: 96707 - DNA, 442 bp, Homo sapiens
tgttgatccggggaggcagaggttgccatgagctgagatcacggcactgtactccagcctgggcgacaagagcaagaactctgtctcaaaaaaaataaaaaacaacaaaccctaaaaaaaaactttgcttaattttttttgggggaaaaaaaaaaaaacttaaaaagggttaaaataacccttcccaaaagggtttaaaaaaaaagaattttttttgggggctttttgaaaaaaattttccccaaaaaaaaaggttttttttaaaaaaaagtttttttccttttccggggccccccccattgggggatgggggaggacccccccgcaaaatgaatttttgtcttaaccttgccacagagaaagggttttccagaaaagggaaaagcttacaaaattgaaggccctggggatataaccttccaaacctcaaaagaaagggtgc

SEQ ID NO: 96708 - DNA, 401 bp, Homo sapiens
gtcgaggctgcagtgagctatgattgtgccaccgcactccagcctgggcaacagagcaagaccctgtctcttttaaaaaaacaaaaagaagaagaagagtcttcccatcctcttgctgttttctttttatccattgatttgttgaagaaatcaggtcatttgtcctgaagaagctcccctattctagatatgttcagttgtttctatggtggcatttgactaattcctctatttgtcatgctttatatatactgggagttaaacagaaagccttatttagattttggatcagattttttttgagacagggtcttgctctgttgcccaggctggagtgccaggggaccaattcatggttcattggaacctttgaacctccttggctcaagtgtccctcccac

SEQ ID NO: 96709 - DNA, 419 bp, Homo sapiens
agaattctatgtttgattcacagtaaaacttttcatgaatcattgagggttaactgttatcacttgccaatggaaactggatattgaaacatttttttaagaaatgcacttttacctgaaataaaactataaaaactaaaaaaaaaaaaaaaaaaaaaaaaaaaaaaaaaaaaaaaaaaaaaaaaaaaaaaaaaaaaaaaaaaaaaaaaaaaaaaaagggggggggccttttaaaaaaaattttggggggggccaaaaattacgggggggaaaaaaaaaatttttttttttttaggggggggaaaaaaaaaacccccgggggtttttttaaaaaaaaaattttttttggggggggcgttttggcccccccctcccccaagaatgggggggtggggggaaaaaaaaattttggggggggg

SEQ ID NO: 96710 - DNA, 391 bp, Homo sapiens
gaggatagcttgagcccaggagttcgagacctgcctgggcaatataacgagaccccgttctccagaaaaaggaaaaaaaaaaaaaaaaaaaaccaaaaaaccaaaaaaaaaaaaaaaaaaagggggggcccttttaaaaaatcccttagggggccaaaattaaaccgggaaaggaaaaaaaaaacttttcccctaaaaggggggcaaaaaaaaaaaaccctggaaattttgaaaaaaaaactaattttgggggggggaaaaaatggggaaaaccccccccaaaaaattaaaggtttaagggaaaaaaaaaatttttaaagggaaaagggggaaaaaaaactcaaattccttgggggttaaaaattttttttaacgggtttgattaaaaaac

SEQ ID NO: 96711 - DNA, 238 bp, Homo sapiens
  misc_feature (1)...(238): n = a,t,c or g
ggggggggccgtttaaaggaacccttgggggggccaaggttaacgggggagggcaaggtaaaagttttttccttatggggggcggaataaaaaccaacttgggaattttgggaaggaacctttatttnnnnnnnnnnacaaattgggccaacctcccaacaaaaattaaaggctttagggnnnnnnnnnnnttttaaggggaaaagggggtaaaacaaccggaaaaggctggcggttc

SEQ ID NO: 96712 - DNA, 448 bp, Homo sapiens
  misc_feature (1)...(448): n = a,t,c or g
nttgatagactcccatgcgaacnggnnngaagtgccgggtcgacccacgcgtccggtttatttgaatagagtaagctatggcaaagattgttttaattagctagaaatagaaatcagccagaagtaactaatttcttgctaatctagaaatacaatcatcttttttttttttttttaaaattttatccggagggggttttcgggttgggggctaatttaaaacggggggtttttttttatggaaaccctttattgggaaaacccaaattggggtttcaaaaagggggattctttaaagggcccccatttttggcccaaaattggttggttttttttggtagggagaaaaaaaaaagaccccgggttttacccccaaaaataccggggttttgaaaaaagggggtttgggggggccggaataaaaaaattccggaaaaaaccttggggg

SEQ ID NO: 96713 - DNA, 451 bp, Homo sapiens
cggacgcgtgggcggacgcgtgggcggacgcgcggtctgaataccactctgtaattgcaaaaaaaaaaaaaagggggcaccggtttgggggacattcgaaaggctttaaaaaaaaaccaatttttttttttggtaaaaaaaaaaaaaaaaaaaaaaaaaaaaaaaataaaaaaaaaaaaaaaaaaaaaaaaaaaaaaaaaaaaaaaattggggggggggcccttaaaaaaaaccccgggggggggccccatcctcggggggggagaaaaatattttcctcttttttaagggggggaaaaaaaacaccccccgtggtttttgggaaaaacctccctttctggggggggcgattttgtccccccccccccccaagagaatatcggcggcgggggaaaaaaaataattttgggggggggggggggaaccccccccccctcccgggcggaagagg

SEQ ID NO: 96714 - DNA, 442 bp, Homo sapiens
gaggtggaggttgcagttgagctgagatcgtgccattgcactccagcctgggcaacaagagcaaaactccatctcaaaaaaaaaaaaaaaaaaaaaacagggttccttcaaacctgcccataaaaagggcggaaaagggttttttttttttttttatacacacacccccacacccacacacacacccccggggggttttattttttttttggggggaaagggaattttcccttgtggccggaacaacccaaaaagggggggggggggacccccccacatttgcctttggggggggggaagggggggcccccccccccacccgggcctaatggaaaaaattttttttggaaaaaagggggttcccttatgtggccggggcggatttaaaactccggcccccaaggagtccccccatataactctcccgaagggggggaaatag

SEQ ID NO: 96715 - DNA, 424 bp, Homo sapiens
aacccgtcatctactctaccatctttgcaggcacactcatcacagcgctaagctcgcactgattttttacctgagtaggcctagaaataaacatgctaaaaaaaaaaaaaaaaaaaaaaaaaaaaaaaaaaaaaaaaaaaaaaaaaaaaaaaaaaaaaaaaaaaaaaaggggggggggcctttaaaaaaaattctggggggggccaaaatttccggggggggaaaaaaaaaattttttttttttaaagggggggaaaaaaaaaacccggggggatttttggaaaaaaaacttttttttgggggggggaaatttgggcaaaacccccccaaaaaaaaaaaagcgtggaagaaaaaaaaaaatttttaagggggaaggggggaaaaaaacttcttttttttttggggggaaaaaaattttttaaag

SEQ ID NO: 96716 - DNA, 435 bp, Homo sapiens
  misc_feature (1)...(435): n = a,t,c or g
ccaacttacacttaggagatttcaacttaacttgaccgctctgaccaaaaaaaaaaaaaaaaaaaaaaaaaaaaaaaaaaaaaaaaaaaaaaaaaaggggggggccctttttaaaaaatttttgggggggccccatttttcccggggggggaaaaataattttttttttttttaggggggttttttaaaaccccttgggggttttttggaaaaaaactttttttttggggggggaatttttggcccccccccccccaaaaaatttaacccttttgggaaaaaaaaaattttttagggggtagggggggaaaaaacttttttttttttttgttttgaaaaattttttttttcgggttttttttaaaaaaatttttccccccggggcgtggggttgcanccccnccnccccccccccctcgcctcacacgtcggttt

SEQ ID NO: 96717 - DNA, 390 bp, Homo sapiens
cggacgcgtgggtgaattttgggggaggttatatgggtttaatagtttttttaatttattaaaaaaaaaaaaaaaaaaaaaaaaaaaaaaaaaaaaaaaaaaaaaaaaaaaaaaaggggggccccctttaaaaaaacccctggggggccccaaattaccccgggggagaaaaaaaaaattttttccctttaagggggggaaaaaaaaaccccccggggaattttggaaaaaaaccccttttttgggggggggcaatttgggcccccccccccccaaaaaaaaaaaccccctagggaaaaaaaaaaattttaaaggggaaaggggggaaaaacaacccctatttcttgggggtaaaaaaattttccccccgggccttaattaaaaaaaaat

SEQ ID NO: 96718 - DNA, 401 bp, Homo sapiens
cgcacgcgtgggggaccacattaggaaaataattgtcttgggccacacataaaatatgctaacactagtgatagctgatgagcttaaaattgcgaaaaaaaaaaaaaaaaaaaaaaaaaaaaaaaaaaaaaaaaaaaaaaaaaaaaagggggggggcccttaaaaaaaaatctggggggggcccaaaataacgggggggggaaaaaaaaaattttttttttttaggggggggaaaaaaaaacccccggggggttttttgaaaaaaaacttttttttgggggggggaaaattgggccccccccccccaaaaaaaaaaaacccctgggggaaaaaaaaaaatttttaggggggggggggggaaaaaaaccccttttttcttggggggaaaaaaaatttactaa

SEQ ID NO: 96719 - DNA, 432 bp, Homo sapiens
agccaacaacttaatatgactagcttacacaatagcttttatagtaaagatacctctttacggactccacttatgactccctaaagcccatgtcgaagcccccatcgctgggtcaatagtacttgccgcagtactcttaaaactaggcggctatggtataatacgcctcacactcattctcaaccccctgacaaaacacatagcctaccccttccttgtactatccctatgaggcaaaaaaaaaaaaaaaaaaaaaaaaaaaaaaaaaaaaaaaaaaaaaaaaaaaaaaaaaaaaaaggggggggggttttttaaaaattcttggggggggcccaattttccggggggggaaaaaaatattttttttttttttgggggggggtaaaaaaaaccccccggggggtttttgaggaaaccccctttttggggggg

SEQ ID NO: 96720 - DNA, 447 bp, Homo sapiens
cccacgcgtccgctagttctagatcgcgagcggccgccctttttttttttttttttttttttttttttttttttttttttttaaaaaaagaaagggcctttttttttggggggggtttaaaaaaaacccaccccctaaggttttttaaaaagggggggggcccttttgggggggggggaaaaaaaaaaaattttttaaagggcccccctttttaaaacagggggggggaaaaaaattttttccccccccccttttttttttttataaaaaaacaaagggggggggggggggcccccaaaacccccaaaggtttttgggggaaattttaaaaaaaggggggttttttttttccccccccaagggggggcttgggttttttgggggggcaaaaaaaaaaaaaaaaaatttctgggggccccccaaggaaaaaaaaaaaaaaaaaaaaaa

SEQ ID NO: 96721 - DNA, 449 bp, Homo sapiens
  misc_feature (1)...(449): n = a,t,c or g
tgtctttctgacctggcacaaaggaaatgttggctgtgaatgtgaccaatagaaagaagcccgtatttctcagtcagtcctagaaccccggtaagtaattaacagagaataaaaatgtgtttgttaaatgaaaaaaaaaaaaaaaaaaaaaaaaaaaaaaaaaaaaaaaaaaaaaaaaaagaaaaaagaaagaacngggaagggggggggtttttaaaaaaaccttggggggggccaaacatctccggggggaaaaaaaattttttttttttttttaggggggctaataaaaaaccggtgggggttttttgaaaaaaaacttttttttgggggggggccaattttggccccaccccccaaaaaaaattagctgttccaggaaaaaaaaaaatttttgaggggaaagtggggaaaaaccccgttcattttttttgtgtaaaaaaatttta

SEQ ID NO: 96722 - DNA, 442 bp, Homo sapiens
ttaaaatgctaagtgggagaagagaaaccttttttttggggggcggtttttttggttagttggggggtttttttttttttggggggaaaaagggattttgcctttggtgccccaggtggggggcaaaggccggaatccccgttaatggaacccccccccggggggtttaaagaaattttttggcccaacccccctaagaagggggaataacggggcccccccccctcccccagtaatttggttttttaagggaaaacggggttccattacgtggcccgggggggtttgaacccccgattttaggggagcccccccccctacccccccaaaagggcgggaaaaacgggcgaaaccccccgcccccacttaagggttttttggttttgtttaaaaaggaattttcctctttggtgcccagctggaaggcaaggggggatccaag

SEQ ID NO: 96723 - DNA, 452 bp, Homo sapiens
  misc_feature (1)...(452): n = a,t,c or g
cttggtcttttattttttgtaagagtcatttgtataactctaaacgcccatgatagtagcttcaaactggaaatagcgaaataaaataactcagtctgcagccccaaaaaaaaaaaaaaaaaaaaaaaaaaaaaaaaaaaaaaaaaaaaaaaaaaaaaaaaaaaaaaaaaaaaaaaaaaaaaaaaaaaaaaaaaaaaaaaaaaaaaaaaaaaaaaaaaaaaaaaaaaaaaaaaaaaanngggggggggggggaaaaaaaaaggggggggggggggccaccccctccggggggagnannntttttttttttttttttggggaaaaaaaaaaaaagggggtggggtgaaaaaaaaaaaaaattttttttggggggggggggggccccccccccccccccccccaaaaagtngggggggtggaaaaaaaaaaaaatattggggagaaagggggcc

SEQ ID NO: 96724 - DNA, 450 bp, Homo sapiens
  misc_feature (1)...(450): n = a,t,c or g
aaaaaacttcctaccactcaccctagcattacttatatgagatgtctccatacccattacaatctccagcattccccctcaaacctaaaaaaaaaaaaaaaaaaaaaaaaaaaaaaaaaaaaaaaaaaaaaaaaaaaaaatgggggggggggggtaaaaaaaaacccggggggggccaaaaaaaaacgggggaagaaaaaaaaaatttttttttttaagagggggacaaaaaaaaacccgccggggatttttaaaaaaaaacccttttttgggggggggaaaaaagggcaaaacccccccaaaaaaaataaagggtgagaggaaaaaaaaaaatttaaagggggaagggggggaaaaaaaaaccataatggggggggggagaaaaatttccctccggggtgccttttaaaaaaaaattaaccccgggggggtttgttgttttngcccccg

SEQ ID NO: 96725 - DNA, 456 bp, Homo sapiens
cactatgcttagccctaaacctcaacagttaaatcaacaaaactgctcgccagaacactacgagccacagcttaaaactcaaaggacctggcggtaaaaaaaaaaaaaaaaaaaaaaaaaaaaaaaaaaaaaaaaaaaaaaaaaaaaaaaaaaaaaaaaaaaaaaaaaaaaaaaaaaaaaaaaaaggggggggggccaaaaaaaaaaaatggtggggggagaaaaaaaaaaaccgggatagaaaattttttttttttttataaagaaagtgaaaaaaaaaaccgctctgggggataaaaaaaaaacacaattttggggggggagctaaatttaaaaaaccccccaaaaaaattaacgatcgcggctgggaaaaaaaattaaatgtggggagtggtttggaaaataaacaaaattaatattcggccgtgaaaaaaaattttttctaaaaaaaaaaat

SEQ ID NO: 96726 - DNA, 448 bp, Homo sapiens
  misc_feature (1)...(448): n = a,t,c or g
cccacgcgtccggtctcgaactcctgacctcgtgatccgcccgcctcggcctcctaaggtgctggaattagaggggtgagccaccgcacccagctgccaactggtgtttctaggcagctgtgggctttttctccccacaggcatgcagttcttgaagatttttcctattggtcatgagtgcagaagagcaggaggctgagctgaacctatgccagcccaagaccaggccagactctgctgtccttgtgagggaataggggttcctgattttgtagctttttacaaaatggaagagacagaaaacaagttccagatcttgaaccttccccatgtgtttgaaggcagncaagggtttcctgattttacattcaagatacttacactcagggccgggcatggtggctcacgcctgtagtcccggcactttgggaggccgaggcgggaggaa

SEQ ID NO: 96727 - DNA, 449 bp, Homo sapiens
  misc_feature (1)...(449): n = a,t,c or g
cggacgcgtgggcggacgcgtgggcggacgcgtgggtgcttgagccttggaggtcaaggctgtggtgaattctgattgtgccactgcgttccagcctgggtgacagagtgagaccttgtctcttaaaaaaaaaaaaaaaaaaaaaaagaaacccccccaaaatacttattttcgggggcaaaatcttaaaagtggaaaaagcccatgaaaaaaacccgggaaaaaaccgttgaagggaaaaagggctgtttgaaaaaaccccacggggaaggaaaaaaaaaggggggggggggggggcaaaaaaattaaggcttgaaacccaaaaatttgggaaggccaaggggggggaaaaaccgggggcgggaagttaaaaaccacccggccaaaaagggaaaaaccccttttttaataannaaaaaaannnnnnnaannnaagaaaaaaaaaagga

SEQ ID NO: 96728 - DNA, 436 bp, Homo sapiens
cgaccgttgactattctctacaaaccacaaagagattggaacactatacctattattcggcgcatgagctggagtcctaagcacagctctaagcctccttattctagccgagctgggccagccaggcaaccttctaggtaacgaccacatctacaacgttatcgtcacagcccatgcattgggaaaaatctttttcatagcaatacccatcataatcggaggctttggcaactgactagctcccctaataatcggggcccccgaaatggcgattccccgcataaacaacataagctagggactcttacctccctctatcctactcctgctcgcatctgctatagaggaggccggagcaggaacaggttgaacagactaccctcccttagcagggaactactgccaccctggagcctccggagacctaatcatattt

SEQ ID NO: 96729 - DNA, 445 bp, Homo sapiens
  misc_feature (1)...(445): n = a,t,c or g
caacttacacttaggagatttcaacttaacttgaccgctctgaccaaaaaaaaaaaaaaaaaaaaaaaaaaaaaaaaaaaaaaaaaaaaaaaaaaaggggggggggcccctttaaaaaaatcccgggggggcccccattttcccgggggggaaaaatatatttttttttttttttggggggggaaaaaaaaccccccccgggtttttttgaaaaaacccctttttttgggggggggaatttttgcccccccccccccccaaaaatttgccccccttgggaaaaaaaaaattttttgggggggggggggggaaccccccccccccctccctggggggaaaaaatttccctcttcggggcttttaaaaaaaaaattccccccccggcgcgtggggcccnnnnnttcccccttaattggtgctcccctaaaaaaaaaaagaaaagaag

SEQ ID NO: 96730 - DNA, 444 bp, Homo sapiens
  misc_feature (1)...(444): n = a,t,c or g
gaacagctctttggacactaggaaaaaaccttgtagagagagtaaaaaatttaacacccatagtaggcctaaaagcagccaccaattaagaaagcgttcagaaagaaaaaaaaaaaaaaaaaaaaaaaaaaaaaatagggggggggggtttataaaaaatttttaggggggacaaaataaacgggggggggggaacaaaaaatttttttattaatgggggggtgataaaaaacagcggggggaattttgagaaaaaaaattttttttggggggggaaaatgggcgccaaaaacccaacaaaaattaaagcctgtggggaaaaaaaaaaattttaaggggggatgggggaaaaaaaaactaaatttgttgttgggaaaaagagtgtctttttcgggggtcttttgaaagaaaatttacagcacggcgggggggttggtnccnttn

SEQ ID NO: 96731 - DNA, 436 bp, Homo sapiens
ttcaaactagactacttctccataatattcatccctgtagcattgttcgttacatggtccatcatagaattctcactgtgatatataaactcagacccaaacattaatcagttctaaaaaaaaaaaaaaaaaaaaaaaaaaaaaaaaaaaaaaaaaaaaaaaaaaaaaaaaaaaggggggggggggctttaaaaaaaaccccggggggggccaaaaaaagcgggggggggaaaaaaatttttttttttttatagggggggaaaaaaaaaacccggggggaatttttggaaaaaaaaatttttttggggggggggaaaatatccggaacccccccccaagaattgagggcctgtctgcaaaaaaaaattctggaaaggggggggggggaaaacaccccccccttcttcgggggggagaaaaaattttcaaagaaaaa

SEQ ID NO: 96732 - DNA, 442 bp, Homo sapiens
  misc_feature (1)...(442): n = a,t,c or g
attttgttgtgattttgtacagaatttttaatgactttttataatgtggatttcctattttaaaaccatgcagcttcatcaatttttatacatatcagaaaagtagaattatatctaatttatacaaaataatttaactaatttaaaccagcagaaaagtgcttagaaaggtattgggttgccttagcacttctttcctctccaattgtaaaaaaaaaaaaaaaaaaaaaaaaaaaaaaaaaaangggggccattgggggcattttttttcttttaaagggtttccggcccccctaaaaaaaaaaaaaaaaaaaaaaaaaaaaaaaaaaaaaaaaaaaaaaannggggggggggggcttttataaggatttggggggggggccaatatttggggggggggggaaaaatttttttttttttaaaggggggggaaaaaaaaagg

SEQ ID NO: 96733 - DNA, 434 bp, Homo sapiens
gatttcgccatgttggccgggatggtctcacactcctgaccttgtgatcctcccacctcggcctcccaaagtgctgggattgcaggcgtgagccaccgtgccggacttcatttgattcttaaagggtctgggcctcaaaaaatgtcaacctctgctctcttggttggtatcctgcaattattattaatgcttcaaataaggtaatttccagtagggaagtcatagattaatttgcttgcctgtcagtgagcaatgtgtgctactagattgagttccatatcagccacagccttagaaatgtattagtaaattaaaaattcaaagagttgtagcatctgaactaggaatcattagaggtgatcgttacagagtggcatgaggagtaaatctgcctgttgtctgcccatggtttcatcgattgttaaatgaggtta

SEQ ID NO: 96734 - DNA, 414 bp, Homo sapiens
ttttttgttatgatgtctgtgtggaaagcggctgtgcagacattcaattgttattattatgtaaaaaaaaaaaaaaaaaaaaaaaaaaaaaaaaaaaaaaaaaaaaaaaaaaaaaaaaaaaaaaaaaaaaaaaaaaagggggggcccccccaaaaaaaaaacccgggggggcccccaaaacccccccccaaaaaaaaaaaaatttcccccccaaaaagggggaaaaaaaaaaccccccctgggtttttaaaaaaaaaccccccctttggggggggaaaaaattcccccccccccccccaaaaaaaatacccccccaaaaaaaaaaaaaaaattttgaggggggggggggcaaaccccccccccccccccccccgggaaaaaattttcccccccccgcaataaaaaaaaaaaaac

SEQ ID NO: 96735 - DNA, 413 bp, Homo sapiens
  misc_feature (1)...(413): n = a,t,c or g
gcgcgtgcctgtagtcctcagcctcctgattagctgagactacagatgtgtgccattgaacccagctacctttgcatacctttaaagaccgttagaatattccctttcatgaaggacctttttaaatcgtttgcccatttttctactggattatctggcttcttcttaccaatttatagaactttttagtattgcagataaagttcctcatcggatatcttctctccttctattgggtacctttttattgtcttaatgggggtcttttaatgaccagaagttcttagttttaaaatagtccagtttatccatttttaaattgttagtgctatttgcgtcctgcttgagagatttttgcctactgcaaggtcacaaagaggttttcctctaaaagccttttggtttgccctttn

SEQ ID NO: 96736 - DNA, 407 bp, Homo sapiens
  misc_feature (1)...(407): n = a,t,c or g
ttctactatgaacccccctccccatacccaaccccctggtcaacctcaacctaggcctcctatttattctagccacctctagcctagccgtttactcaatcctctgatcagggggagcatcaaactcaaactacgccctgatcggcgcactgcgagcagtagcccaaacaatctcatatgaagtcaccctagccatcattctactatcaacattactaataaggggctcctttaacctctaaaaaaaaaaaaaaaaaaaaaaaaaaaaaaaaaaaaaaaaaaaaaaaangggggggggccgttttaaagattccttggggggggccaattttagggggggggggaaatgttttttttttttttttatgggggggggaaaaaaaaccccgggggggtttttgggaagg

SEQ ID NO: 96737 - DNA, 419 bp, Homo sapiens
  misc_feature (1)...(419): n = a,t,c or g
agaattgcttgaatctgggaggtggaggttgcggtgagcaaagatcacaccattgtactccagcctgggcaacaagagcgaaattctgtctcaaataaaaaaaaaaaaaagaaaaggtatttaagtgggatatgttcttttaacaaaggaaaaaatggaaggagtttaaaaaattaaatacttttagttattcagcaaaccgaaattcaaaacctagttaagggatcctttattttcaagccttttttagttttttatggctcaaaattaggaaggaggatagcttgaccttccaaaaataattttttttgaaaaccatattttaggcaaagcttcctaaatagagaaaaagaaacaatttgggagggttattaaaaataaggacttggagggctgtcacattataggcttgtggaaan

SEQ ID NO: 96738 - DNA, 504 bp, Homo sapiens
  misc_feature (1)...(504): n = a,t,c or g
atttgcccacagaaccctctaaatccccttgtaaatttaactgttagtccaaagaggaacagctctttggacactaggaaaaaaccttgtagagagagtaaaaaatttatcaaaaaaaaaaaaaaaaaaaaaaaaaaaaaaaaaaaaaaaaaaaaaaaaaaaaaaaaaaaaaaaaaaaaaaaaaaaaaaaannggggggggccgcttaaaaaaaaacccgggggggccccaaaaaacccgggggaaaaaaaaaaaatttttttttttttaggggggggaaaaaaaaaccccctggggattttttaaaaaaaaaccttttttggggggggggctttttgggccccccccccccaaaaaaaaaaaacccttgagaaaaaaaaaaaatttttaagggggggggggggaaaaaaccggggggttgggtggggggggggaaaattcttttccccgaaaaaaaaaaaaaaaaaacacccccccccggcggcggggggggtattcntggct

SEQ ID NO: 96739 - DNA, 381 bp, Homo sapiens
aaaacattttcttatttatttttaaagaaaggtcactagtgtgggtagatgataatatatctaaaaagtaaaaatgggggtttataatgtgccagtacttttaaaaaaatgtaattagcttttggtacataaacacatttgcatcattgcagtgtgtgtgtgtgtgtgtgtgtgtgagagtgtgtgtgtgtgtgtgtgtgttatccaggtcccttattaaactcaggacatacttgtgtgacctttgcattctttcaattcctttgaatacttgaatcataaaattctatacctcagaaataacataatttaatttaattcaagaccaaatttttcaattgaggatgctaacgcccaaagaggttgaatgaagaccttgag

SEQ ID NO: 96740 - DNA, 453 bp, Homo sapiens
  misc_feature (1)...(453): n = a,t,c or g
cttctgctcttttcctagccagagagctcttgtcagagctattagctctgctttctaagcagaagtttctgcagacacagacagtacctctactgctgagtccaaagtcaccgcggcatacccagctcggcagactccccttagtatgaaactgcttccatcagtaaaatattcaatgtccaggtccccgaggggccaatctgttaaatctttccagcttgagaacactttatctaccacgtccacacagcaatgaaggggacttcctgtgtagggtccagccctacgggggcttagcgggtgttctccccgtgtgcagagacaagagatcgttngaaataaagacacangacaaacagataaagagaaaacagctgggcccaggggaccactaccaccaagacatggagaccgcttgtggctccgaacggctggctgcgctgatatttattg

SEQ ID NO: 96741 - DNA, 380 bp, Homo sapiens
  misc_feature (1)...(380): n = a,t,c or g
ccacagagccacccggcgaacggcggcgttttgtancttacgggtactagagtgggaatggggcagggttggggagcggggctaagggacttgggcgggacatgccaggagggcgcggtttggatctcagaagccaagccaggtagaggtagcgggcgcaaagcatgttagccaggtgagagagagggcgcacatgggtcgaaaaaacagggagggagagcaaccgaaaatggctgagcgagcgagtgcagagctccggctgcccgcttggggggtgtttccggctcaggcgctccccactcccagatatagtcccacccaaataaactagttttgttgtnnnnnaaannannnnnnnnnnnnncccttnnnnnannntt

SEQ ID NO: 96742 - DNA, 450 bp, Homo sapiens
  misc_feature (1)...(450): n = a,t,c or g
actagttctagatcgcgagcggcctccatgactttttcaaaaaaaaaaaaaaaaaaaaaaaaaaaaaaaaaaaaaaaaaaaaaaaaaaaaaaaaagggggggggcccctttaaaaaaatcccgggggggcccccattttccccgggggggaaaaaaaaattttttttttttttgggggggtaaaaaaaaccccccgggggtttttttgaaaaaacccctttttttgggggggggaaatttggccccccccccccccaaaaaaattacccccttggggaaaaaaaaaattttttgggggggggggggggaaaaaaccccttttttttttggggggaaaaaatttttcttcccgggttttttttaaaaaaaatttccccccccccggggttgtatttnnnngnccnnttcctgccctctgcctcnncnngcccggtggtggatgccctcccg

SEQ ID NO: 96743 - DNA, 370 bp, Homo sapiens
atcttgccgctacactccagcctgggcgacagagactccaactcaaaaaaaaaaaaaaaaaaaattccccgtttggttcccccagggggttcaacccggccttatttaatactatctggggattgaaaaccggaaaaaggggggtttttttaaataacagtcccctcttttgttggaaaaaaaattttttttttggggggttccttcttaaacgggaaggggggagggagaaaagggaacctggcaaactttgaaaatttcgaggggggtggttggggacctggcccccaagtgggtggattggaaaattttttttttgggaggggggggtttggggccctttataaaatttacttggggggagggggaa

SEQ ID NO: 96744 - DNA, 371 bp, Homo sapiens
cggacgttggggcggacccgatcctgcacacctccactggactataactagccatgcagtactgaccagaagcctgaaccgccttttcatcaatagcccacataacttgagacgtatattatggttgagtcatccgctaccttcacgccaatggggcctaaatattctttatctgcctattactacacatcgggcgaggcctatattacagaccatttctctactcaaaaacgtgaaaaattggccttatcctcctgcttgcaactataacaacagcctttatagggtatgtcctcccgtgaggccctatataattctgaggggccacagtaatgacaaacttactatccgccatcccatacattgggacg

SEQ ID NO: 96745 - DNA, 398 bp, Homo sapiens
atcgctatccccaccggcgtcaaagtatttagctgactcgccacactccacggaagcaatatgaaatgatctgctgcagtgctctgagccctaagatacatctttcttttcaccgaagggggcctgactggcattgtattaccaaactcatcactaaacatcgtactacacgacccgtactacgttgtagctcacttccactatgtcctatcaataggagctggatttgccatcataggaggcttcattcactgatttcccctattctcaggctacaccctagaccaaacctacgccataatccatttcactatattcatcggcgtaaatctaactttcttcccacaacactttctcggcctatccggaatgccccgacgttactcggactaccccga

SEQ ID NO: 96746 - DNA, 401 bp, Homo sapiens
ccgtcatctactctaccatctttgcaggcacactcatcacagcgctaagctcgcactgattttttaccaaaaaaaaaaaaaaaaaaaaaaaaaaaaaaaaaaaaaaaaaaaggggggggcccttttaaaaaaacccttgggggggcccaaatttacccgggggggaaaaaaaaaattttttttttttaagggggggaaaaaaaaaccccccgggggtttttggaaaaaaaccctttttttgggggggggaaatttgggccccccccccccccaaaaaaaaaaccccctggggaaaaaaaaaaatttttagggggaagggggggaaaaaaacccttttttttttttgtggaaaaaatttttttccccggggtttttttaaaaaaatttctccccccgggcgg

SEQ ID NO: 96747 - DNA, 402 bp, Homo sapiens
aaaaatccaccccttacgagggggggttcgaccctatatccccgggccggggccctttctccatgggttcaaaaaaaaagagaaaaaagaaaaaaaaaaaaaaaaaaaaaaaaaaaaaaaaaaaaaaaaaaaaaaaaaaagggggggggggggggggggggggtttggggggggggggggggggcccggggggggggggaaaaaaatttttttttttggggggggaaaaaaaaaaaacatttgggggggtgggggggggggggaactaaggggggggggggggggggggggggggccccccccccaaaaaaaaagggggggggggggggggaaaggggtttttatttgggtttggggggaaaaccccgcccccggggggggggggggggggggaaaaaaaaa

SEQ ID NO: 96748 - DNA, 403 bp, Homo sapiens
cgagcctggtgatagctggttgtccaagataaaatcttagttcaactttaaatttgcccacagaaccctctaaatccccttgtaaatttaactgttaaaaaaaaaaaaaaaaaaaaaaaaaaaaaaaaaaaaaaaaaaaaaaaaaaagggggggggcccttaaaaaaaatccttgggggggcaaaaaataaaccggggaaaaaaaaaaaaattttttttttaaaaaggggggaaaaaaaaaacccccggggaatttttaaaaaaaaacttttttttgggggggggaaaatgggggcaaaaccccccaaaaaaaaaaaagccttgggggaaaaaaaaaaatttttagggggtaaggggggaaaaaaatggtttattttttggggaaaaaaaaattttcaaaaaa

SEQ ID NO: 96749 - DNA, 409 bp, Homo sapiens
agatcgtgccactgcactccagcctaggcgacagagtaagactccatctcaaaaaaaaacaaaaaacaaaaaaaaaaaacccccaaaattaacctgggtttgggggcccacacctgaaatcccacttatttggaaggctgaggcagaaaaataatttaaccccagaaggggaaggttgaaggaacccaaaattgtcccgttgaactcaaccctgggaaaaaaaccaaactccttttaaaaaaaaaaaaaaaaaaaaggggggcccttttaaaaaaacccttggggggccaaattttaaccgggaatggaaagaaaaaatttttttcttaaaaggggccgaaaaaaaacccacctgggaatttttgaaaaaaaaccttatttttggggggggaaaaaattggaaaaacca

SEQ ID NO: 96750 - DNA, 384 bp, Homo sapiens
aactaatcgtcccaacaattatattactaccactgacatgactttccaaaaaacacataatttgaatcaacacaaccacccacagcctaattattagcatcatccccctactattttttaaccaaatcaacaacaacctatttagctgttccccaaccttttcctccgaccacctatcacaccccatcctaaaaaaaaaaaaaaaaaaaaaaaaaaaaaaaaaaaaaaaaaaaaaaaaaaagggggggggggcctttaaaagaaccccggggggggccgcacattggggggggggggggagggaaactttttttcctaaagggggggaaaaaaaaaacagaccgggggttttttggaaacaaacctttttttggggggggaaaa

SEQ ID NO: 96751 - DNA, 390 bp, Homo sapiens
aaaaaaattaaatgagtgctagaactaaggacaggtgtccgcacagttgcagctttggggctctgcttacgtgacagaaggagaacacttaggagtccctgacaaccttggtggggaggaatgtcgccaagagcatcacctatcacaccccatccaaaaaaaataaaagaaaaaaaaaaaaaaaaaaaaaaaaaaaaaaaaaaaaaaaggggggggcccttttaaaaaattttttggggggcccaaatttaccgggggggggaaaataaattttttttttttttgggggggcttatttaaaaccaccttgggtgttttggaaaaaacccttttttttgggggggggccttacgggcccacccccccccaaaaaattccagcgtggaagga

SEQ ID NO: 96752 - DNA, 353 bp, Homo sapiens
actcaaaaccatacctctcacttcaacctgcctcaccattggcagcctagcattagcaggaatacctttcctcacaggtttctactccgaagaccacatcatctaaaccgcaaacgtattatacacaaacgcctgagccctatctattactctcatcgctacctccctgacaagcgcctatagcactcgaataattcttctcaccctaacagggcaacctcgcttccccacccttactaacattgaaacaaaaaaaaaaaagggggggccgtttaataggtaccctttgggggcccaagtttacgggggcgggcaaaatgaaaaatttttccttatagggagggaaattataa

SEQ ID NO: 96753 - DNA, 377 bp, Homo sapiens
cccacgcgtccgagagattgcagtgaactgagatcgtgccactgcactcctgcctgggcaacagaaggagattccatctcaagaaaaaaaaaaaaattgtcgacaaggacagctttttaatatacagaagctatcaacagcctaatatattcattaaatattggaacatttaaaacttattttcctaaaattaaaacatatgatagacattttgacttttaaattggctgtaaagtaggctaatgcacatgaaactttccccaccccaaccctttcaggtttaaggaaagatacaaacatgcccaaataaatcagtcttctggggataaattcaaattttctaatgatttgggattttcaaccttctacagtttgac

SEQ ID NO: 96754 - DNA, 384 bp, Homo sapiens
  misc_feature (1)...(384): n = a,t,c or g
tgctgttcctagtaagatattctgaattccattttatcaataaagcttgatttaacanacccgaaagaaaaaaaaaaaaaaaaaaaaaaaaaaaaaaaaaaaaaaaaaaaaaaaaaaaaaangggggggggcccctttaaaaaaaaccccgggggggcccaaaataaccggggggggaaaaaaaaaattttttttttttaagggggggaaaaaaaaaccccccggggaaattttggaaaaaaaccttttttttggggggggaaattttgggcccccccccccccaaaaaaataaaccccctaggaaaaaaaaaaatttttaaggggaaaagggggaaaaaaaccgttttttgcttgggtggaagaaagttttccaaaaaaaaaa

SEQ ID NO: 96755 - DNA, 381 bp, Homo sapiens
  misc_feature (1)...(381): n = a,t,c or g
cccacgcgtccgatttagtgatactaatcttttgtaaggttatcaaatcccctaaattcctcatatacaagtagcaattgtgtaaaaatatgaaagtgtattgaaaggttatcttgaggcttttccttctgtttatatctgaactacttaactgctagattaaacccccaacttccactcagttatcttttattttagaattaaactgcaataggcaaactttctacctagaagcatttttttcttctaaggaaatctgtgcgccggctgggcgcggtggctcacgcctgtggtcccggcgctttgggaggctgaggcagactgatcacgaggtcaggagattggggccatcctggctaacacggtgaaaccccatctttn

SEQ ID NO: 96756 - DNA, 391 bp, Homo sapiens
  misc_feature (1)...(391): n = a,t,c or g
tgggaggacctgaatttctcgactgagggttgggaatgggctgggggtccagctgcagttgcaattgccgagcaagaatttttatttaaatacatttatttgaaccggcgcnnaaaaaaaaaaaaaaaaaaaaagggggggcccctttaaaagaataaattggggggcccaatcttacgggggggggggggggaaaaggttttcccattaagggggggggaataaaaaccacggggggatttttggaaaggaacctttattttgggggggggaaaattggggccaaacccctcccaaaaataaaaggctcaagggaaaaaaaaaaattttaaggggttaggggggaaaaaaaaccccaaattcccgcgtgtggagaaattttcttaaagag

SEQ ID NO: 96757 - DNA, 407 bp, Homo sapiens
cttcagttcgcaatgttttttaacctccattatgatttctgttttgaattgtataaaaagggtttcttttttttttttttaaatttaacttaaagcccgggaatcctgggccaaaagggccaaattggtcccataggtaaccatgtccctggggggttggcggcccccgtaaccccataatttaggtttaaaccccggctgccttaaggatttggcccaaaggcttcccctcccttggccctcaaacccgaaagggcccaagttgggggaacccccccccctgggcccaggggtcccaatggtcaaccccccccttttaaggaaaaccagccagggttgggtttccggttccggggtaaattggcggaaaaaagagggttccacctttaatccatgcccctggaaag

SEQ ID NO: 96758 - DNA, 391 bp, Homo sapiens
attgggccactgcactccagcctgggcaacagagtgagactcagtctcaaaaaaaaaaaaaaaaaaaaaaaaaaaaaaaaaggggggggcccccctttttttttttttttaaaaaaaaaatttttttttcccccccgggggcaaaaaataaaagggggaaatttttttaaaaacccccaaaaaaaaaaaaaaaaattttttttttcccccccccccccctaaaaaaaaaaaaaaaaaaaaaaaaaaaaaaaaaaaaaaaaaaaaaaaaaaaaatggggggggcctttttaaaaaaaccccggggggcccccccccccccggggaaaagaaaattaatttttttttttttaaaaggagtttaaaaaaaagccggtggttttttttgaaaaaa

SEQ ID NO: 96759 - DNA, 381 bp, Homo sapiens
aaaagaaccattaggatacatacgtatggtttgagctatgatatcaattggcttcctagggggtatcgtgtgagcacaccatatatttacagtaggaatagacgtagacacacgagcatattttacctccgctaccataatcattgttatccccaccggcgtcaaagtatttagctgactcgccacactccacggaagcaatatgaaatgatctgctgcagtgctctgagccctaggattcatctttcttttcaccgtagggggcctgactggcattgtattaacaaactcatcactagacatcgtactacacgacacgtactacgttgtagctcacttccactatgtcctattaataggaggctgattttggcatcatag

SEQ ID NO: 96760 - DNA, 388 bp, Homo sapiens
  misc_feature (1)...(388): n = a,t,c or g
cccacgcgttcggcatggaccactcagcttctgggtgtgactggagcagggcttgtcatcttctttagagacactttgcaggggttggcgaagctgatcccatccacgtacagctcccagtctactgatgtttaaggatggtctcagaggttgggcccactagaataaactgagtccaatacttgtacacagctatgtttaactgggctctctgacactgggagcaaggggggggggtttagggtgatgcaaacttcagatcttatgtggggattttcacagagcaagctttggtatctagttagnctagcattcattacctaatggtgccctttggtttttattaaaatcaccacaggatagggggactttacagtgaggctttggg

SEQ ID NO: 96761 - DNA, 382 bp, Homo sapiens
cccacgcgtccgcccacgcgttcgctgagaatccaaaattctccgtgccacctatcacaccccatcctaaaaaaaaaaaaaaaaaaaaaaaacccctaaaaaaaaaaaagggggggggccttttaaaaaaaccctgggggggccaaaattttacgggggggggaaaggaaaaattttttccttaaaagggggggaaaaaaaaaacacctgggaatttttggaaaaaaaacttttttttgggggggaaaaaaatgggcaaaaccccccaaaaaaaattaaggccttaagggaaaaaaaaaatttttaaggggaaaagggggaaaaaaacctccattactttggtggttgaaaattttctttaacggatgttattataaaaaaa

SEQ ID NO: 96762 - DNA, 377 bp, Homo sapiens
  misc_feature (1)...(377): n = a,t,c or g
cttgattccaggaggcggagattgcagtgagctgagattgcaccgctatactccagccagggtgacagccagactctgtctccnnaaaaaaaaaaaaaaaaaaaaaaagaaaagaaaaaaaaaaagcccgggatccccccccaaaaaatttaattccaagtaaaaggccaaggggtaaattcaagtgcccaaaaaaaaaaataaaactttcaattaaaaaaaaaacctcccccccaatttttccaaaaaaattaattaattgaaaaaacctttggaccggcccctcaaaaaacaattccataactgggttggaaattggaaaacncaagggggccagtaaaagcaccaaccctaactttcatatgaaaactctctat

SEQ ID NO: 96763 - DNA, 364 bp, Homo sapiens
gtttttacattataataactgtgtttctgctgatacaagttgcgtattagaattatatttcctttcttgtacagttttggctttttttttttttttttttttgggaaaggaaatttggggtggcccccagggcaaattttggttttttttaaagaaaaaaaaaccctggctttttaaaggacctggtttttaaggatttttttttttttttttgggggggggggggaaatttttccaggggtaaaaaatttttttttttttttttttttgaaaaaaaattttttttttcccccccggggggggggggggggggggaggtttattttttggggctcccccctccggggaaaaaaaattttctctg

SEQ ID NO: 96764 - DNA, 377 bp, Homo sapiens
gtgccactgcactccagcctgggcggtaaagcgagactccatctcagaaaaaaaaaaaaaaaaaaccctggttttttaaaaaattttggccctttggcccttttgggaatgggagttgggaacataaagggcttgaagggccagaaagggaaaaaccctgcctttggggcccacactggggggggctgtttttcactcagggggagaaacacccctttccccaaaagggctgagggaataatatgttacaactccccccattaaaaggaaacttgaaaggctttggagcctcgggggtataaggggttgtgacaggctctggcccttcccaatttaaaaagtgggaaaatggaacacatacttaggggggcccccgg

SEQ ID NO: 96765 - DNA, 351 bp, Homo sapiens
agagggtttgaaataatgtgagcatcactattaataaaatgtgccagagtgagcacatgctgttggaaaaatggtgctgaaacacttgctccactcagagttgccaaaaacctttaatttctttaaaaaaaaaacctgcaatatctgtgaggcataataaagtcaagtccaataaagcaaggtatgcttgattttataaaacttatgttttgaaaaagtagatcacatgcccaagttgtttcaaacatactcaaaagtatttctcacaaggcatggtggctcacacctgtaatcccagcactttgggaggctgaagcaggaagatcgcttgagtccaggacttcatgacca

SEQ ID NO: 96766 - DNA, 366 bp, Homo sapiens
ataatagttcccaccttgcaggcttgttgtgaagatggggaaagtgtatatagtgcagaggtgccccttattttctgtgtgaccttgagcaagttagcctctctatgcgtttcctcccttgcaacatagggttactaaacagcacatacctcttagggttattgagttaaaaattatataaatctttccttctgttttttttttttttttttggaaaggaatcactctgccctccagccgggagggcaggggcacaatcgcagctcactgcagccttggtttccggggttaaaacaattctcctgcctaagtctcccaagaagttgggataacgggcttgtgccacaacacctggttaattttttt

SEQ ID NO: 96767 - DNA, 359 bp, Homo sapiens
cccggctcgagccggggcaccaccgcattccagcctgggtgacagagtgagactgtctcaaaaaaaaaaaaaaaaaaaaaagggtatgggtttaacaccgggggtagggttaatattttttaaaaaagggaattttttggaacccccaaaaaaaccttttttggaaaatttttaaaaaaaaaatcttttttaaaaagagttcccttttaaaaaagggttttggggggttttccctttaattgggaccttaatttttttccggtttttaacaaacccccctttatttttttttaataaaacccagggggttgggggtttgaaccttggggggggaggaggggggggggggggggcgacca

SEQ ID NO: 96768 - DNA, 387 bp, Homo sapiens
ggctggtcttgaactcctgacctcaggtgatccacccgcatcaccctcccaaagtgctgggattacaggcgtgagccactgcgccctgcttttacctttaattctgcttatgtggtgtatcacgtttattgacctgcatatgttaaaccatccctgcatccctggtatgaaacccacttgatcatggtggattatctttttgatatgttgtttgattcatattcccaaaaactttccattccctccaattacataaatacgtaaagtaatgaaagtgtccttttcctcttcattataagcaatatagcaagtctcaagagttgagactatttagaaattaatctcacttcagccatcaacctttaaaaaaacaaaaaaaccagaatt

SEQ ID NO: 96769 - DNA, 399 bp, Homo sapiens
cccacgcgtccgcgccactgcagtccagcttgggctacagagcaaggccctgtttcaaaaaaaaaaagaaaaaaaaaaaagggggggggggggggggatttttttttcctaaggggggatttgggccccttccaaaaaaaggttttttttctggaaaaggggggcttggaaaatggggtttggggggggctggaaaaaccccgggaattaaaaaaccccttggaaagggaccccccaaaaaaagggggggcaaaaaaggccaaaaagggccccatttttaaaaaaaaaaaaaaaaaaaggggggcaaaaagctaaaaaaggggcccttttaaaaaccttttaaaaaaccccttttagggcggggggttcaaccctgaaacccccaccttttgggagggg

SEQ ID NO: 96770 - DNA, 395 bp, Homo sapiens
ctgccccactgcctgtcccttctggtaaaataaagaactcttaatgcccaaaaaaaaaaaaaaaaaaaaaaaaaaaaaaaaaaaaaaaaaaaaaaaaaaaaaaaaaaaaaaaagggggggggccccttttaaaaattccctggggggcccccattttcccggggcgggaaaaaaaaattttttttttttttgggggggctattaaaacccccctggggattttttggaaaaacccctttttttgggggggggatttttgggcccccccccccccaaaaattttacccccttggggaaaaaaaaaatttttttggggggtgggggggaaaacccccccttttttcttgtgggggggaagtttttccccccgggttttttaaaaaaaaattttcccc

SEQ ID NO: 96771 - DNA, 378 bp, Homo sapiens
  misc_feature (1)...(378): n = a,t,c or g
cccacgcgtccgaatttatgttgactaaatgagtgactgaatgagcaatgaggcatattttgttatcagaacacaataaaaattaaaaacaaaaagcactcatctgaacaattnccttttttttttttttttttttttttttaaaaaaaagggggttttttttccggggggggggggggggggggaaaaaaagttatttgttttttaaaaccccgggggttaaagaaacccattcccttttgggggggggcccccgggggggggggcccccaaatttttttttgtttgggttgccccccccttttgggttaaacccaagaaaaacccgggggagccgaccaagaaaagggaattggtttttttttataaaccccaaaa

SEQ ID NO: 96772 - DNA, 150 bp, Homo sapiens
ctgaagttttctttttttgttgtttatctgaaaggttttggtattaggataatgaaagcctcattgaatgaattgggagagcatccctcctcttcaattttttggaatagtttcagtaggagtggtaccagctcttccaaaaaaaaaaag

SEQ ID NO: 96773 - DNA, 387 bp, Homo sapiens
ctgaatttgcctactgtggacattccatgtaaatggaataatatatattattataataatggaataatatatgtggaataatggaataatataatatatggaatagaataatatatggtgttttgtgactggccttttacacttagcataatattttcaaggtttcatctatgttgtagcatgtatctgtacttcattccttttttttttttttttccttaaaagggagttttgttttgtcactcaggttgaagtgcaggggcccaatttcacttaattgaaccctcccctttttggtttaaagaaatttttttgcctaaccctccaaattggttggaataacaggcccttgcccccaccccaagttattttttgtttttttaaaaa

SEQ ID NO: 96774 - DNA, 336 bp, Homo sapiens
ccacaggtggactttgggtaatatgaaaaatgtacggctctccttcagatggtctcatcattcatttggatggaaagagaaggcactcatcagtactctttctaccggaaggacttttcattggcttccaaagttaacattgtgtcttattacctctctccaatagtggaatgattttttttttttttgagggggtctccctttgccccccaggctggggggcaggggcccaatttgggctcatggaaacctttgcctccgggtttaatgccattctcttgcctaaccctcccggggggttggaactgcaggccccccccaccgggcccggttaat

SEQ ID NO: 96775 - DNA, 344 bp, Homo sapiens
tttgtcgtttttatttttgtttttcttttttggtttttaaaactggttttttttttttcccccgggttttttttttttgtaattttttttggttttcggggaccccccccccccaggaaaaaggggacccccccccggggcccccccgggggggggaaaccgggggggggccccccccccccccttttttttttttttttttaaaaaccgttttttggcggggggccccgggggggttaaaaaccccgggcccagggaattggccccccctggccccccaaaggggggggaataaagggcgggccccccctgcccgggtaaaaaaaaattttttttaaaaccca

SEQ ID NO: 96776 - DNA, 356 bp, Homo sapiens
gaatatttgggttgtttccaagtctttcctattgtgaataatgccacaataaacatacgtgtgcatgtgtctttatagcagcatgatttattactccttttgcttcctcttttcttgggaaaaactgggattacatggcgcatgctctaaacacacacctctctttctttttttggctaaaaaattcccttccaaaaaatattttttattccttgaaaaattattggcacctgattctccccttcacatttataaaccttcgttttttttggcaaggttaatattttctttgggttttatcctctaaaaatcttttttgaaaaatttttttgtgcccatattattatttttaaccg

SEQ ID NO: 96777 - DNA, 2135 bp, Homo sapiens
  misc_feature (1)...(2135): n = a,t,c or g
agacagggtttcaccatgttggccaggctggtctcaaactcccaacctcaaatgatccggccaccttggcctcccaaaatgctggcattacaggcgtgagcanccacacccggcttacatgcattttttatcaccacaaactgaaactctgtacccactgaaaaagagctccaaattccaccctcaccccagaccctggtaaccactatttcactttctttctgaatttcccttcacatgagtgggatcaaacaagagttgtccttttggtgtttagcattcttacttagcaagccatcaactgctcgaacagtcactggggcaactacttttcgcccagtgtcctccagaaaagaaagatctggagggtcaggccactctttttcttcaaaataatggggtgcagaagggtagggatgaacctcttcctcctttgccactttagctttagctcaaaggaactccaactttttattatttgcaacagttagttagctttctttgtttcacatctctgccttgcagaaccatgacctatcaaggtgttttgtcaaacaaaaactaatactttccctgggaaaaagccatgtggtagcaagtaccagaaatttttatggccaaataatacaccactatatccatagaccgcatttggtttatccactcatctgctgattgtttcccccctcttgggtattatgagtaatgctatgaacatgggtgtacacatctctcttgaagtcccttcttaggtcctttagggatacatatccaggagcagaactactagatcacatatgctaaggtctgaatgtccccccaccaaattcgtatgttgaagcaaccaccaacgtgataggtgaggctttaggaggtgattatgtcatgagagctccatcctcattaatggatttagtgcctttataaaggggctcaagggaaccaattacctcctttttgcccttcgattcccttccaccatatgaggacacagcaacaggccccgtcctagaagctgagactgggccctcaatagatgataccagnnnnnnnnnnnnnnnnnnnnnnnnnnnnnnnnnnnnnnnnnnnnnnnnnnnnnnnnnnnnnnnnnnnnnnnnnnnnnnnnnnnnnnnnnnnnncggttaacacaaatgactaagacaacaggataattctgnnnnnnnnnnnnnnnnnnnnnnnnnnnnnnnnnnnnnnnnnnnnnnnnnnnnnnnnnnnnnnnnnnnnnnnnnnnnnnnnnnnnnnnnnnnnnnnnnnnnnnnnnnnnnnnnnnnnnnnnnnnnnnnnnnnnnnnnnnnnnnnnnnnncgtattttgattctatgtccctaatgactagtgatgttgagcattttctagcattgatttttaagatgttacccaaagaccccttgtatcaaaataagctggatttttttattgaaaattattaactctagaaattttagtttaaactagacttagggatatgtgtattttaccggtattccacgttttatgcatgggtttttaaaacttctcaagtattaaaactaaaagctttaggtgctttgcttatcaagaaatcctacactgtccactggagacatccatgtttttacttggctctgcccctttagtggtccctgtgaaccttacctcaaaccatgcatctggggcagagatccttacttgcttggtggttacaaatgcaaatacagtgaagaatgtcatctttgtgattgttcctgaaatagttcacgagaaatccatgaccgtaaagtactgtgatagtgatgtctaccactgtgagcttccagtactaggtgattggtctgcattcacagtgaccaaaatcagctatgtggccaggtaattcactgctgagggctttggattttcctttatgaactactgaaatgaggtcaacttgactattactaagggacattttgctacaaagaatgttagttttgccaattccctttccaaatctaaaatttattttaaccaggattttagatgtaaacatcaagtagttttggttgtttcaatgaagtaacatgtttaagctcacattatttgaagtacttcagttcctattgccatgaaaattgtatccagcagctaaaaaaaaaa

SEQ ID NO: 96778 - DNA, 160 bp, Homo sapiens
  misc_feature (1)...(160): n = a,t,c or g
tggancctctgnctcctgggttcaagcaggtctcctgcctcatcctctgtctcagcctcccgagtagctaggactacaggcgtaggctaccatgcctggctaatttttggatttttactatggatgggggttcaccatgttagccaggatggtcttgaag

SEQ ID NO: 96779 - DNA, 366 bp, Homo sapiens
gtggtgcccaattgtagttccagcactcagaaatgcgagtcaggaagatcgtttgaatccaggagttcgacaccaacctgggtaacataatgagacccctctcatctcaaaaaactaacaaattaagaaaaatagactggtttctgcaaggggtaaaaacaataagagaaaataaatttataaaccctgagtggacatttttttcaaagaagacatacaaatggccggaaagcaaatgaaaagggacttaatatcactaatcattagagaaattcaaatcaaaaccacaattacatgttacctcatacatgcaaggatgggtactatcacgagagattagcgttagagcacagagaataaggaagc

SEQ ID NO: 96780 - DNA, 403 bp, Homo sapiens
cccgcctcagcctcccaaagtgctgggattacaggcatgagccaccgtgcctggccaaaaattatttactgataaatataacacaaatacagaaaacggcatgaaacaagtgggtgccctagcgaattattatatggcagacacctttgtaatcaccacctgtttaaaaaaaaaaaaaaaaaggataaaaccttggcaggcatttttgaatttctttccaaacccactgactgcccctcaaaaagaaaactactacctggacttgaagggaaataactttctcactttttttcacggttttattacccaactgggtatccttaaacactgtatagttaacctttgcttgggggttttttgagcaggattataaccaactttcattgttttcattataggaacc

SEQ ID NO: 96781 - DNA, 343 bp, Homo sapiens
tgcactccagcctgggtgacagagcaagactgtctccccctgccaaaaaaaaaaaaaaaaaaaaaaaaaaaaaaaaaaaaaacccccccaaaaaaaaaaaattttttggtttttttttaaaaaaaaaaaaaaaaaggttaaaaaacccaaggggggggttgaaaaaattttaaaaaaaaccccaattgggcctctttaatttttttttttaaaaaaaaaaaggcctaaaaattttgccccggggggggaaaaaattttggggcaaaaaaaaccccccccccccccccccaaaaaattgaaaaaaaacgggggaacaacaaggccccccccctaaaataaaaat

SEQ ID NO: 96782 - DNA, 368 bp, Homo sapiens
  misc_feature (1)...(368): n = a,t,c or g
gcagtgagctgagattgcaccacagcactccagcctgggtgacagagtgagattgcatctcanaaaaaaaaaaaaaaaaaaaaaaaccctttttttttttttaaaaatttaaggaccccccctttccccccccttttttttggcccccccccaaacaattacccccccccccgggaaaaattggggccccccatttttaaacccccaaagggcccccccccccaaaaaaaaaaaaatgttgaaaaaaaaaaattttgaaggggggaagggggaaaaaaaaaaaaaaaaccccccccaaaaggccccaaaaaatttggggcccttcaaaaaaaaaaaacccttggggggggggcaaaaccccccctctg

SEQ ID NO: 96783 - DNA, 366 bp, Homo sapiens
  misc_feature (1)...(366): n = a,t,c or g
ttttgtagagatgaagtcttgctattttgcccagactggtctccaactcccgggctcaagcaattttctcacctatgcctcccaaagtgttggtcttacaggtgttagccaccatacccagcccaaggggtctttctgaaataacatctgaccaagtcactctcctgtttaaaactcttcatggcttctctctgcctccaagataaagtcccagctcctcaaccttgcgtgaaaggcctttcaaaatttttcctatgtcatctcctttccactttgatccctttcacacactctcttttttttttgtttttgggttggtttttgagacagnatcgctctgtcacccaggctggagtgcagtggcgc

SEQ ID NO: 96784 - DNA, 362 bp, Homo sapiens
  misc_feature (1)...(362): n = a,t,c or g
gggaaccaaccaaaacgcctgaacgcaggcacatacttactattctacaccctagaaggctccgttcccctactcatcgcactaatgtacactcacaagaccctatggtcactaaacattctactactcactctcactggccaagaactatcaaactgctgagccaacaacttaatatgactagcttacacaagagctttgatagtcatgatacctctttacggactccacttatgactccctaaagcccatgtcgaagcccccatcgctgggtcaatatgacttgccgcagtactcttaaaactaggcggctatggtataatacgcctcacactcattctgaaccccctgacaaacacatn

SEQ ID NO: 96785 - DNA, 357 bp, Homo sapiens
gccatgattgcaccactggacaccagcctgggtgacagagtgggatcctgtatcaaaaaaaaaaaaaaaaaaaaccctttttcccttggctcccctttttcagggatatggggggaaacctgggttggcctttttaggctcccaaaacagggccctccctggaattgaacccttttttttttttcttgccaccccctcttaaaacttgaggaacccccagccttttgaaaactttaagcggcacttttttcaaaaggcttggaacttaagggaaagggttccttaccctcccttgaacaggtttttttgggttgccctttttaaccaaacggtgggttggagttcccaggggccctc

SEQ ID NO: 96786 - DNA, 353 bp, Homo sapiens
gaaggtcgaggctgcagtgagctgtgatcatgccactgcactccagcctaagtgacagtgcggtaccctgtctcaaaaaaaaaaaaaaaaaaaaaaaaaaaaggggggggaaaaggaaaaaaaaaagggggggaaaaaaacaccctcttcgggcccaaaaagggaaaattaaggggcccccaaaaaaggggaaaaaaaataggccctgaaaaaaaggtgggaaacaatttaaaaaaagggattttttttagggaaaaaactttttaacacccaccttggggggcacggggaaaaaaattaaaaaaatttaccctttaagggaaaacggggcccccaaaaaaaaaaaaaaaaaa

SEQ ID NO: 96787 - DNA, 446 bp, Homo sapiens
  misc_feature (1)...(446): n = a,t,c or g
ncttgataaccagatcgataacgttaccgagctcgcttacgcttgacacagacctgggatccactactccagcgcgggggaattcgaactcctggcctaaaaacaatccttctgcctcagcctcccaaagtgctgggattatgggtgtgagccactgtgccagactttccttaattttgtaagtggcagtcaaggttgcaagaggacctaagctagtattggagtgagcattatgcaatgacccaagtattggagggtttttcatacagtctgcaggatcacttttatttctgtttcaggagcataaggagaattattttttactcccttataaagcccagtatcaatgactagggagagagagaactagaaccaatcacaacctctcaagccctgcagattgctggcagagctggcagattcagctcacggtttaaagaaggagn

SEQ ID NO: 96788 - DNA, 345 bp, Homo sapiens
  misc_feature (1)...(345): n = a,t,c or g
tcaggcatgagctgctgcgcctggcccatttaactatttaaaagtcactttcaagttatgcagagtcataaagtaggatgggatcaatattttctatcttattttgctttgattttccccagagccctatctgtatcttttaacnnnnnnnnnnnnnggaaagggagttccctaggtgggcttgcggggatttaatactggttaattgcaccctcaccctcttaggctaaggcaattttccggtttaacccttttaaatagcgggaatttaaggcttttgcccccactcggggttaaatttgggattttcagaaaaaaccggatttttccttcggggccgggctg

SEQ ID NO: 96789 - DNA, 389 bp, Homo sapiens
atcgcgccactacactccagcctggtgacagagcaagactctgtctccaaaaaaaaaaaaaaaaaagaaaaaaaaaaaaaaaaaacccccttttccaaaaaacacccaaaaaaaaccaaaaaaaaaaaaaaggggggggttaaattggggggtaaaaacccccccacctttaaaaacccaaaaaatgggaatttcccccggaaaaaaattaaaaaaaaaccttttccccttaaaaaaaaaaaaacccgaagggaacccacttttttaatttcggggcttttaaaaaaaaaaaaaggccccctttaaaaaaaaaaagaaccccccaaagtaaaaaaaaaaaatttttttttaaaaccccccccaaggggaggcccccccccctttaaaaa

SEQ ID NO: 96790 - DNA, 386 bp, Homo sapiens
  misc_feature (1)...(386): n = a,t,c or g
ccgagataacgccactgcactccagcccgggcaacagtgcaagactccgtctcanaaaaaaaaaaaaaaaaaaaaaaaaaaaaaatggttttttaggggaaaaaaacacgaaaaacccccggcttaaaaaaaaaaagggggggaaacaaaaaaaaaatttttttttttaaaaaaaaaaaaggggtttttggaaaaaggttttaaaaaaaatttttttgcccttaaagggggtagggaaaggtttaatccaaagggaaaaaggttttcttaaaaaaattttttttaaaaccccacccaaaaaaaaaagcccaaaaaggttttaatttgccctaaggaaaaattttaaaaatttgggaatttgggggccacccaaaaagggggggaag

SEQ ID NO: 96791 - DNA, 356 bp, Homo sapiens
  misc_feature (1)...(356): n = a,t,c or g
atggcgtgaacctgggaggcagagcttaccctgagccgagataatgccactgcactccagcctgggcgacagagcaagactcagtctcanaaaaaaaaaaaaaaaaaaaaaaggggtttaaaaaggtttttgggacattaaacccgggggaattttttcccccaaggcccacccttaaaaaatgggtcccccccccccaaaaaaaaaaggaaaaaaaggcctaagagaacttcacccaggggggaaaataaaaactgcttaaaaaaaccccaaaaaactttgaaaagtttttttccccgcaaaattttatcaaaaaaaaaggggggggaagcctgtctcattttggaaaaagggaa

SEQ ID NO: 96792 - DNA, 345 bp, Homo sapiens
ctcccatgtagttactactacaagtatgtaccaccatacctggctaattttttaattttttgtagagataaagtctcgccatgttgcttaagctggtcttgaactcctgacctcaagcaatcctcccaccttggcttcccaaaggagacttttcagttactgtataagcctttccatacttgttcatttttaaacactgaaaatgtatctgttttttaaacaaattaaaaagtaacaaaagtaaactataaactattatgacacagtgttgcttggttgccatagatctggaagaaaattacgggaaaaaaataacctaagtttgggaaggggggaatcaactaa

SEQ ID NO: 96793 - DNA, 352 bp, Homo sapiens
ctggactcgggctccatctcctcctcatctccctgtggggtgggcacttgtaatacctccatgttacagaaaggaaactgaggcacagagagggccatgcctcgcccaaggttagccagccaatagatgggagggctgagatttgacccatgagcatgcctccaagcccatttcattcattcagcaaggctcgggcaggacaggctggtgcccgcgctggggatgcctgaacaccagatggactggcctcagcccatggcgggcagcaggctgggcacgggcatcaacatggcaatgccaacctcagagggcattacggaggatgggcaggggctggcctaccccgtggctg

SEQ ID NO: 96794 - DNA, 374 bp, Homo sapiens
  misc_feature (1)...(374): n = a,t,c or g
agctgacttctatcacaactcacccctcccttcgtcagcagctgcagctgtgccaacggttggcacaagagcaaggtggccacacattaatcaagtggctaatgacagtcatatggactgttttcaatgatgccagagagatactacaaactgcaaggcggagagcagcaggagaactggtggtctccttcctcactatgacttaaaaaaaaaaaaacaagagtcccttcaaaatattactgctcattgacaatgcacttggtcactcaagagtcctgacagagaggtacaaggatattttcagacctgcaaacacaacatcgtttctgaggcccatggttcaagaactaattccaactttcnagtctgtgaaa

SEQ ID NO: 96795 - DNA, 367 bp, Homo sapiens
gaaatagaaagtatccaaatagatggccacacaaaaaataaattcctaggaatacatctaacttatctaaccaaggaggtgaaagatctctgtaagaagaattacaaaacactgctgaaagaaatcatagatgacacagaaaaatatgacatgcttatggattgaaataatatagttaaaatggccatactccccaaagcaatctacagatttgacactatttctaccaaactattaatgtcatttttcatggaattagaaaaaatattttaaaatttatattaaaaagcctgaatggccgaaacaaccataagcaaaaagaacaaagctggaggcatcacattacttgacttcaaactatactata

SEQ ID NO: 96796 - DNA, 369 bp, Homo sapiens
  misc_feature (1)...(369): n = a,t,c or g
gtaagacgtgacttgctcctcattgcctttcgccatgattgtgaggcctccccagccatgtggaactgtaagtccattaaacctctctttcttttgntcaaaaaaaaaaaaaaaaaaaaaaaaaaaaaaaaaaaaaaaaaaaaaaaaaaaaaaaaagggcgccgccgcaaaattaaagggccccccaaaaacccctaaaaccccccccccgggtttttttgattcccccacccttggggtctccccccccccccgcttttttttggcgggggggggggcccccccccgggcctttttcaaaaaaaaaaaaaaaaatgcgcctgactggtggagggcggctttttttgcttgcccgnncctggntttgcg

SEQ ID NO: 96797 - DNA, 367 bp, Homo sapiens
caaatatttattttccagtatcccagaaggcaaagaaaaaatgaaaggtatagcaaacctatttaatgaaataatatctgaaaactgcccaagtctagcaagagatttagacatccagaaaactcgacacgcaaatccatataatctaaaaaaatcttctccacagcacattatagtcaaactgtcaaaagtcaaagacaaagagagaattctaaaaacagcaagaaaagaatgttttatcacttataaaagaacccccataaggcctggcatggtggcttatgcttgtaatcccagcactttgggaggctgaggcgggtggatcatgaggtcaggagatcaagaccatcctggctaacatggtgaa

SEQ ID NO: 96798 - DNA, 360 bp, Homo sapiens
  misc_feature (1)...(360): n = a,t,c or g
attaacataaaacaattanccaggtgtggtggcacatgcctgtggtcccagctatccagaaggctgaggcgacaggattgctacagcctgggaggtcaaggctgcagtgagctatgatcaagccaatgcagtccagcatgggcaacagaaagagactctgtctcaaaatataaaataaataatttcctttagaagtacaatttgtaatgtacttgtcacttaatgagtgttatacccatttctgttctgaccaaactaatccccaaatgtcatctttgattcctaggacagtccagagaaaactgctgccacggtaaggggagatttttatgtcactggagacagaggaatgatggacag

SEQ ID NO: 96799 - DNA, 294 bp, Homo sapiens
tctcatcatgatacatttctacattcaaaagaatgaagttggacctaaccctaaccctaacccacaaatatgtattgagtgccttctaggttctagttttctagaaaactagaaaatacctagttttcccagcaccatttgttgaagagaccattatttctctattcaggggttttgacatccttgtcaaaaatcaattgatcatcaatgtgaaggtgtatttttgggctctcaattctgctgcattggtctatatgtctatccttattccagttttacactgttttgattacc

SEQ ID NO: 96800 - DNA, 466 bp, Homo sapiens
ggaagaacctcttaagaagtcctcagaaccagaagcaatgtgaactctcagcgctggtcctggtgggtttgctgaccatgactgggcaagccgttctttttgctgccatcttcctcatcataaagtgtggaacataggcaattgctttgagattcttggatagaagaggactacattctgcacctgcccccttttttaaatctttggggaaagatgagcaacttttgatactactttgccttcctgttaccaaaatgctcctaataacaggtttgacgacctttctgactaagaacaagagatagatactatgactgtgaatatcatcttgcctctcagaagcctgaacatagtgattacaaatccctataatatctaacatcaccaacatgatctcgactatacctatcctgatactactggccagcttgtcaactgtgcctacttcattaatcttttacaacct

SEQ ID NO: 96801 - DNA, 355 bp, Homo sapiens
ggggctgaggccagctgtttcagggaggaagtaactccaaagttgagcaaagtctggagcctcaagttctgtgttcagcggggaggctggctctggctttctgagtcctgtgtgaactcttggctcttgggtattgctcccttgtctccctggggctcattgcctgtttctgtagcttaattgtagcttaatttggggagcatggccccgggaaattttttttttttttttaaacagagcctcactctgttgcccaggttaaagggagggcaattttggctcactgcaaacttcacctcctgggttcaaacgattctcgggcctcagcctcctgagtagctgggattacagggtg

SEQ ID NO: 96802 - DNA, 361 bp, Homo sapiens
gttaattaattaatgcttgtaggacataataataacaattgaatgtctgcacagccgctttccacacagacatcataacaaaaaatttccaccaaaataaattcctaaggctaaaagcaagttacacaagacagtcatttgaatccacatttttaaaaaagcactggtataggtaatattaacattataaaagacagtagaaatgcatcttttctctttatcataaattgtttataaaataatatgtgtataatggccgggtacgatggctcacgcctgtaatctcagcactttgggaggctgaggcgggtgtattacgaggccaggagatcgagaccatcctggctaacacagtgaaacc

SEQ ID NO: 96803 - DNA, 438 bp, Homo sapiens
  misc_feature (1)...(438): n = a,t,c or g
tttgttaacctgcgaaccgcacngtagtaccgtctcgacccacgcgtccgcgtgttagccaggatggtctcgatctcctgacttcatgatccgcccgccttggcctcccaaagtgctcggattataggcgtgagccactgcacccagcgaatttgctattatttttaacattttaactggtttttctttttcattatattaataggaattgtttgtaggattttttgggctctctttgctagggtttgcatactcagattacattaaactttacaacttaacaaaatgaattattccaaaacagtttatgattaaccgattctccaattacaaaataaaacaccaagtttatattcagcattagaatttttaattctttaacacttgaaacaattcacctgaaaaattatctgggcctaaaaattgtttttaggagta

SEQ ID NO: 96804 - DNA, 374 bp, Homo sapiens
  misc_feature (1)...(374): n = a,t,c or g
cccacgcgtccgcccacgcgtccgactagttctagatcgcgagcggcgcccnnnnnnnnnnnnnnnnnnnnnnnnnnnnnnnnnnnnnnnnnnnnnnnnaaaaggggggcccccccgggggggccctccaaaaaggggaaaaccccccgcggggttaaagggcccccccttttttaggggggcccnnnnnnnnnnnngggggnnnnnnnnnntnnnnnnnnnnnnnnntgggggttttttttgggggggggcccccccaaaaaaggccaaaaaggggggcccccccaaaatttttgggggtggnnnnnnnnnnnngctttttgggggaagggttctaaaaccgggggggcccctttaaaaaacccccggggggg

SEQ ID NO: 96805 - DNA, 392 bp, Homo sapiens
tcatcacctgcggtctcctgaccttgcagtaagcaggggccatggagagtgccaagcagcattctgtctgggagggctttgagcactttaaagatacagttttattttacatttcccaccatcctcataacctggcttaggccacaggcaccctgctagctttaagccggacagacctgtcacttgctaagtgtgtggtctctgagcctcagctgatctttctgggaaggcaggaatggtaaggagactcctgacttcaggggtcattgtaagtgctagaaatacataaagtgcaggccgggcgcggtggctcacgcctgtaatcccagcactttgggaggccgaggcgagtagatcacgaggtcaggagatcgagaccatcctggctaaca

SEQ ID NO: 96806 - DNA, 387 bp, Homo sapiens
cccacgcgtccgctagttctggatcgcgagcgccgccctttttttttttttttaataaaaaaacaggttctaaggagttggaaaccacccggggcaccgtcctgaaaacttgtcttttttttaaaaaaaaaaaaaaggttttgggggggcccaaaccccccttgggaaacccaaagggggttggaaaacccttgaaagggtttcctgggccaaacccttggccccccccttaaaaagggcccggttgccatttttaaaaaaatggtttttaggaccccgggcccaaaaagtcccatattccatcctgggtggggggaaaaggatcttcccttcttcctgggcccttggggggcccttctgaggtttatttttcccctctccgagccg

SEQ ID NO: 96807 - DNA, 406 bp, Homo sapiens
taatacagtgatggaaggaagcattgtgtttttatgatacaccatgtgaaactatttctttaaatctgacaaataacgcatggccaggcccgagctgggccttccaggcaaccttctaagtaacgaccacatttacaacggtatcgtcacagcccatgcatttgtaataatcttcttgatagtaatacccatcataaacggaggctttggcaactgactaattcccctaataatcggggcccccgatatggcgtttccccgcataaacaacataagcttttgactcttacccccctctctcctactcctgctcgcatctgctatagtggaggccggagcaggaacaggttgaacagtctaccctcccttagcagggaactactcccaccctggagcctccgtaaag

SEQ ID NO: 96808 - DNA, 393 bp, Homo sapiens
cccacgcgtccggctccttgggccctggagatggaggctgaagtgagctgtgaccgtgccactgcactccagtctgggtgacagagtgagacctgtctcaaaaaaaaaaaaaaaaattccctaagggggtccttttggggggatctgaaaaaaaaaaaaaaaactttttaacgggcctctttttggggaaaaaaaaattaaattaagttgggttttgaaaattttaaccccccccctttaaaatttttgtttcccccccaaccttgtaaaaaaacagggggaaaatttttttttttttttttttttaaagaggaaaccttttttttgacaaaaatttttaaaatccccggcccccagaaaaaattcaacccgtctgggaaatatctccttttt

SEQ ID NO: 96809 - DNA, 391 bp, Homo sapiens
  misc_feature (1)...(391): n = a,t,c or g
ctggtgcctctttgaaggtgaagaatgggaggagggagaggagtaaaaaaaaactggttatctggtttagtaccttggtgacaaaataatctgtacaacaaacctctgtgatatgagtttacctgtgtaacaaaccctcactgtcaacccaacacanaaaaaaaaaaaaaaaaaaaaaaaagggggggggcccttttaaaaaatccctgggggggccaaaatttaccgggggttggaaaggtatttttttttttttttgggggggctttttaaaaactccctggggatttttgaaaaaaaaccttttttttggggggggaattattgggccaaccccccccccaaattttaacggcttaggggaaaaaaaaaatttttagggggaaagggg

SEQ ID NO: 96810 - DNA, 394 bp, Homo sapiens
cccacgcgtccgctagttctagatcgcgagcggccgcccttttttttttttttttttttttttttgggggggggggaaaaattggtttttttgggaaaaattttccccccttcccccattttaaaagaaatttccttttgggaattttgggcccaaaaaaaaccctttcccccgggtttcaaaaagataaggggggggaaaaaaaaaacccccccggggggggggggggcccccccggaaaccccacctttttggggggcccggggggggggtttttgggggcggggtttaaaaacccccccaacggggggaaccctttttttttttaaaaaaaaaaaaattcccggggtggggggggggggcccggggttttaaatttttggggggggggaac

SEQ ID NO: 96811 - DNA, 402 bp, Homo sapiens
  misc_feature (1)...(402): n = a,t,c or g
cccacgcgtccgcaaaatgccagcacagagacacaaagggatcacttgtcgttggaaaaatggcattgataagcctgcttgaaatatctgaagtgcagttaaaagaaataatgcctgtacctgttttagagacaaggataatttgatatctgaactgatacagcagctgttgaccccatctggagggaatctggaatgttggatgaagcattctgatgtgattgtgctgtttgtttcctttaccaggggtcactcccattgatggagctccccaccgatcatacagggagtgctaccctgtcctgctggacggtgtcatggttggctgggtggataaggatcttgctccaggcatcgcagattctcttcgtcattttaaggtgatgagagagaaaagaattn

SEQ ID NO: 96812 - DNA, 361 bp, Homo sapiens
  misc_feature (1)...(361): n = a,t,c or g
ttaatttttgcataaggtgtagggaaggggtccagtttcagttttctgcatatggctagtcagttttcccaacaccatttattaaatagggaatcctttccccattgcttgtttttgtcatgtttgtcacagatcacatggttgtagatgtgtggtggtatttctgagatctctgttccgtttcattggtctatatatctgatttggtaccaggaccatgctgtttgggttactgtagccttgtagaacttcgtgaagcatacacaaggatgaatagccaaatctatcaagtggaagaaaggatatcagagattgaagatcaacttaatgaaataaagcatgaagataagattagaaaaan

SEQ ID NO: 96813 - DNA, 382 bp, Homo sapiens
ttctagatcgcgagcggccgcccttttttttttggggggcccgtcatatggatataccacaattggttaatctttccataaataagggccattgggctaatttcaactttttgggctataaaaaaaaaggcggctgggaaaaaaaaaaaaaaaaaaaaaaaaaaaaaaaaaggggggggcccccctaaaaaaaacccccggggggcccaaaataacccccgggggggaaaagataaattttcccttatatggggggcaaaaaaaaacccccggggggatttttggaaaagcccccccctttggggggggcccatttggggaacccccccccccaaaagtatacccccccggggaaaaaaaaaaatttaaaaagggagacggg

SEQ ID NO: 96814 - DNA, 132 bp, Homo sapiens
gtaatcccagctgctcaggaggctgaggcaggagaatcgcttgaacccgggaggcagagattgcagtaagctgagatcgtgccactgcactccagcctggtgacagagtgagactccgtctcaaaaaaaaaa

SEQ ID NO: 96815 - DNA, 348 bp, Homo sapiens
gctgcatttaagaccataaatccaggcatctcactcttttcttttctcttttttttttttttttttttttttgggaaggggggtttcttttttttgccccggggggagggaaagggcccaattttggtttattggaacctttgcccctggggtaaaggggaaccccctgccccccccccccaagggggggggattaagggggggccccccccggggggggtaggttgggattttttaaaaaaaaaggggtttcccctttgtgggaaacccggttttaaacccccccccctaggggaaccccccccctcccccccccaaagggggggattaccgggggggacccctgcg

SEQ ID NO: 96816 - DNA, 339 bp, Homo sapiens
gcttgaacaaggtaggcagaggttgcagtgagccaagatcgcgccactgcactccagcctgggcgacagagtgagactccatctcagaaaaaaaaaaaaaaaaaccggaatctcggggtattctcaaagtaaaagggcttacccaagccctcttttatctggccttatggctatactatttacaccccacggcaaaacagcaaatttggggtttttttatatacttctcaaagccctgaaaaaaaaggaagggtttgcaaaggaaagggtaaaaatcccagggggagcattgcccaacaggggagtaaaaagggagggttaccctgacatttgagttat

SEQ ID NO: 96817 - DNA, 355 bp, Homo sapiens
aatgaagtttgttcatttcttttgcccattatttgattgggtcaactgccttataattactgagttgtaagtgttctttgtatattatgaatacagatgctttatcagatgtgttttgtaaatatttcctccagtctgttgcttgtcttttaattttcttaaggctgtcttttaaagggcaagagttttgaattttaagtccaatttatcaatttttgcattcatcacctatgcttttggtccaaaaaagaagtgggccaggcttggtggttcacggctgcaaccccagcactttgggagaccgaagtgggtgaatcacttgagcccaggagttccagaccagcctggccaacat

SEQ ID NO: 96818 - DNA, 336 bp, Homo sapiens
gccgggatggtctcgatctcctgacctcgtgatccgccctcctcggcctcccaaagtgctgggattacaggtgtgagccaccgcgcccggctggacatgagggatttttaaaaccagagtctctgaagagaattagggagtttcttcaaaggacttgtcttctagcatctgaactcaggcagcacaaagcattgggttcttccaggctctttggaaggcatcacgttgggaccttgtgttccttcaccccacaccattagggcctgtttatgattcttagagaatggtgtttcaatgtctccaagaaacagtgcagctttcttagagctctggtgt

SEQ ID NO: 96819 - DNA, 340 bp, Homo sapiens
caaaaatcattctgtgtaccttttgtgtgttttttccattccattccctacgttttgttttttttagttttgagtatttaatactttttaatttaaattaaattgaattaattaatttacttatatagacagggtcttgctctgtcacccaggctggagtgcagtggcatgatcatagctcactgcagccttgaactcctgggctcaagcggtcccctgcctcagccttctacttgcacaccaccatgcctggcttattatctttaagaaaacagcttatataattcacatatggtatgtatggtatgatacaacttacccatttaaagtgtacaattca

SEQ ID NO: 96820 - DNA, 313 bp, Homo sapiens
aaaaaatccaccccttaccagcgcggcttcgaccctatatcccccgcccgcgtccctttctccataaaattcttcttagaagctattaccttcttattatttgatctagaagatgccctccttttacccctaccatgagccctacgattcatctttcttttcaccgtaggtggcctgactggcgttgtattagcaaactcatcactagacatcgtactacacgacacgtactacgttgcaccccacttccactatgtcctatcaataggagctgtattagccatcataggaggcttcattcactgattccccc

SEQ ID NO: 96821 - DNA, 355 bp, Homo sapiens
aaagttcccccttatccaggggaatatgttccaagacccccagtgggtgcctgaaaccgaggacaggaccgaaccctgtatatactaggcatgaatttctctttctttcttcacagacagcttcatggatagaaatttgtttttactgcagatcttagcaagttcattataggattttttctttctttcttcccttactaaattgagaactttcaccttttcgcttaaagaaaacactttactagctgggcatggtggctcatgcctgtaatcccagcactttgggagcccgaggtgggcagatcgcttgagcccaggagttcaaaaccagcctgggcaacatggcgaaaccctg

SEQ ID NO: 96822 - DNA, 355 bp, Homo sapiens
  misc_feature (1)...(355): n = a,t,c or g
gcaccacccaacaatgactaatcaaactaacctgtaaacaaacgatagccatacacaacactaagggacgaacctgagctcttatactaatatccttaatcatttttattgccacaactaaccttctcggactcctgccttactcattgacaccaaccacccaactatgtataaacctagccatggccatccccttatgagcggacgcagaggttataggctttcgctctaagattaaaaatgccctagcccacttattaccacaaggcacacctacaccccttatccccatactagttattatggaaaccatcaacctactcattgaaccaatagccctggcccgacgcctaan

SEQ ID NO: 96823 - DNA, 356 bp, Homo sapiens
  misc_feature (1)...(356): n = a,t,c or g
caaatatctcatcaacaaccgactaatcaccaaccaacaatgactaatcaaactaacctcaaaacaaatgataaccatacacaacactaaaggacgaacctgatctcttatactaatatccttaatcatttttattgccacaactaaccacctcggactcctgccttactcatttacaccaaccacccaactatctataaacctagccatggacatccccttatgatcgggcgcaatggttataggctttcgctctaagattaaaaatgccctagcccacttcttaccacaaggcacacctacaccccttatccccatactagntattatcgaaaccatcagcctactcattctac

SEQ ID NO: 96824 - DNA, 370 bp, Homo sapiens
ggcacgagagaaagtgtctgtgttggtccaggcaggagatgacagggctgtgtgaaagggtgggtgcttgaggagcaggtgagaagaggttggattctggatagctctgaaggcaaaactgatctcaagcagagaggcagcccaggttcctggccagagcacgtgggaggatggagcggagtcatgggataatcagaagcttggacaggccaggcacggtggctcacacctataattacagcactttgggaggctgaggtgggaggatccctgaggcctggagtacagtggcataatctcggctcactgcaacctctacctcccaggttcaaacgattctcctacttcagcctccccagtagctgggatt

SEQ ID NO: 96825 - DNA, 356 bp, Homo sapiens
ggcacgagggctgactaatccaaccatccttaaaacttatgatttccatacacaacactaaaggacgaacctgatctgttatactattatccttaatcatttttattgccacaactaacctcctcggactccggccttatttatttacaccaaccacccaactatctataaacctatccatggtcatacacttatgagcgggcgcaatggttataggctttcgctctaacattaaaaatgccctagcccacttgttaccacaaggcacacctacaccccttatgcccatactagttattatagaaaccatcaggccactcattctaccaatagccctggccgtacgcctaaccgct

SEQ ID NO: 96826 - DNA, 376 bp, Homo sapiens
ggcacgagaaccaacacacttaccatataccaatgatggggcgatggaacacgagaaagcacataccaaggccaccacacaccacctgtgcaaaaaggccttcgatacgggataatcctatttattacctcagaagtttttttcttcgcaggatttttctgagccttttaccactccagcctagcccctaccccccaattatgagggcactggcccccaacaggcatcaccccgctaaatcccctagaagtcccactcctaaacacatgcgtattactcgcatcaggagtatcaatcacctgagctcaccatagtctaatagaaaacaaccgagaccaaataattcaagcactgcttattacaattgtactgggtg

SEQ ID NO: 96827 - DNA, 358 bp, Homo sapiens
  misc_feature (1)...(358): n = a,t,c or g
ggcacgagaaacggataatacacaaacgcctgagccctatctattactgtcatcggggcctccctgacaagcgcccagggcagtcgaataattcttctgaccctaacagggcaacctcgcttccccacccttactaacattaacgaaaataaccccaccctactaaaccccattaaacgcctggcagccggaagccgattcgcaggatttctcattactaacaacatttcccccggatgccccttccaaacaacaatacccctctacctaaaaatcacagacctcggtgtcactttcctaggacttctaacaggcctagacctcaactacctgaccaacaaacttataataaaagccn

SEQ ID NO: 96828 - DNA, 397 bp, Homo sapiens
ggcacgagaacttgctccacatcgcacagcaagctagctgagtttcaaattctttcacgaccttttgagccagttctttgaactgttttacctgtactgccacacatgttggtgacagaagtgcaaatgaaggatagtgaggaagacgtggattaagctagaaactgcaggagcagagtagaagggagaaatgtgagatttttatacttttaacaggacttgatgggtgattttgttttttaaattattttttatagagacagggtctccttatgttggctgggctggttttgaactcttggcctttgcagtcctcccaccttggcttcccaaagtgttgggattacgggcgtgagccaccatgcctgggcaattgattgattttgtgaatagcagg

SEQ ID NO: 96829 - DNA, 380 bp, Homo sapiens
ggcacgagcacggtttcaccatgttagccgggatggtcttgatctcctgacctaatgaaacacccacctcaggctcccaaagtgttgggattacaggcgtgagccactgcgcccgggcaagaccttttttttaaaaaaaaaaaaaaaaaactccatttttttattcttccgagagggtttcaaagaaaagagcatattgggaataaaattttttcggcctacagggggtgtcttgattttaacggggaatcatggatggggctgtaaaacgggaactgaacttctggtccccagccgatttcccggcctagccttcaaaatatgtgggttatgggcccatgacacaccacaccgggtcaggaattggttgtagaaaataa

SEQ ID NO: 96830 - DNA, 283 bp, Homo sapiens
  misc_feature (1)...(283): n = a,t,c or g
tgcacgagcgcttatggggaggctggaagacgggggccgccggactgggcagaacctcaagcagacctacagcaagtttgacacaaacttgaacaaccatgacgcactgatcaagaactactggctgctctactggttcaggaaggacatggacaaggtcgagacattcctgcgcatggggcatggccggtctgtatagggtagctgtggcttctaggggcccgcggggaatgatgtgaccgacccctccccactggctctgctgggcctggaaggtgccacn

SEQ ID NO: 96831 - DNA, 378 bp, Homo sapiens
gcacgagggctgcagtgaactctgactgcaccactgcactccagcctggggaacagaatgagaccctgtctcaaaaacaaaaaaaaccaaaaacaaaaacaaggttaagactgtcttggaaactgaaggggcccagaaaacctacaagacctgcctgagattttatttagggataagaagaaagcaagcaagctgaaaaggacagaaaaagaaaataatgttgacttcagtttgcaggttaaatcccattgaccatataagggttacatccatgtaaagtgcctggctcatagtagtgcacccatcatttccccttcaccataggagaagctgcatcccaggcgatccaagcccaacgaattcctcccactcccagga

SEQ ID NO: 96832 - DNA, 385 bp, Homo sapiens
ggcacgagcagacgtagacacaccatcatatttgacctccgataccataatgagggatatccccaccggcgggcaagtatttagctgactttccacactccacggaagcaatatgaaatgaacagctgcaccgctcttaaccctaggattcatctttcttttcaccgcaggtggcctgactggccttgaattaacaaactcatggctagacatcgtactacacgacacgtactacgttggacctgacttccactatgtcctatcaataggagcggtatttgccatcataggaggcttgcttcactgatatcccctattctcaggctacaccctataccggacctacgcccaaatccatttcgctatcatattcatcggcgaaaat

SEQ ID NO: 96833 - DNA, 373 bp, Homo sapiens
ggcacgagatatgttggccaggctcatctcaaatgcctgacctcaagtgactcacccgcctcgacctcccaaagtgctgggattacaggcgtgagccacagcgcctgaccgaggacagagtttttaaaagagtaacctttgtaactaaggggaaattccacaggttattcagtaatttctgaaatggtgggctcccacagttgacataagtcagccttttgggacacagcatagaaacaataatactgggaccatatacactctggggttccaaccatgtgccaggcactgtggcaggcacttacacacgtctcctcactggattctcacaagagttcacagtgatgggttcttctttatttttttaaataga

SEQ ID NO: 96834 - DNA, 360 bp, Homo sapiens
ggcacgagccaacacactaaccatataccaatgatggagcgatgtatcactagaaaacacataccaagggcaccacacaccacctgtccaaaaaggccttcgatacaggataatcctatttattacctcagaagattatttcttctcaggatttttatgagccttttaacactccagcctatcccctaccccccaattatgagggcactggcccccaacaggcataaccccgctaaatcccctaaaaatgccactcctaaacacatccgtattactcgcatcaggagtatcaatcacctgagctcaccatagtctaatagaaaacaaccgaaaccaaataattcaagcactgcttattag

SEQ ID NO: 96835 - DNA, 321 bp, Homo sapiens
ggactgcttgagctagggaggttgaggctgcagctgcagtgagctatgatcgtgtcactgctctccagcctgggtgacagagcaagactttgactcaaaaaaaaaacccgcaattctagcaagttgtttaaaacatttgaatcccttgtcttctcattgatttctcaaaatttggtttattcttaccaaaaagttattgttatcaatgcaagtcacacttcagtgttccaaaagtctactttaaaagtaaatacatactctagttgtctctgaaagtatgtcatactttcatatcacttttgcccttaaacacactcaatg

SEQ ID NO: 96836 - DNA, 361 bp, Homo sapiens
cacccatacacacacacacacacagacacacacacacactcacacacactcacacacacacacacagaggtgtaaatatgggagtgtataactcttttttggtgctctttttgccttgggggaagagggattctaattatctagtgaatatgtggagtatatataaaaatttttctattgcacgggctttaaaaatgaggggggggagaggggggtcatgtaaatatgcgcccattatgcatatatattttgtggaaagtgtgcgcgtgattctctcacatatatatgtgatctaaaatatgggggggaaaacagttttggagaaaagtttttttttccccatagagtggtgtgtctagag

SEQ ID NO: 96837 - DNA, 2221 bp, Homo sapiens
  misc_feature (1)...(2221): n = a,t,c or g
tgtataaatgggaagaaagattcaattaagttattaacatttgggacctggataattatatcagagtatgtcagtccaataaattatttaactaattaaaaaatagttgcaaagcatttgagctgtggttgaggaagtggtgtaaaagtgcatccattaggaatgatgcactttcattaggatggactcgtgtctgattagaatgtcagttgatcagctagatttgtgtccacactaccaggtttcacaccccctttccatctgtttgatacagtattatagatataaatatatatatatttctctgtggccatttgtgatacttcctcatatacttgaatattatacttctttattcacagtatctgtgtctcctgcaccctttggtgttgcaattttagatatgtgaaagtagatgttagcagggttctctccctatttaaaaaaaatacattaaaaaagacaaaaaattttagcatgaagttgctttctgtaacaactcaaagccgtaaccctgttttagtgccagatacaagtctctcccgtgatgctagacaaaaaattatttttctttgctttcaccaacatggagtttgtgggggtgggtccagttatacatgaaagggtttacagattgttggtttaagattatggatttatctcatttttaatcacaggatagtttggggtttattcctattattattcatgaaaccgacttaagattttttctttatttttctttttttttccatttgctaaagttgaaagttgaaactaactataatagtttgaaacatgttttctcatttttccaaatagtatctgtttattaaattctctaatagaagatgtttgtctttcttacccaaagtaaagatcccctgatcagaaagaaaaaatacaatactttgggaagctatagctataaaacacttgagacacagatatctaaatcagtttttttccaagactccaacattgcactctgtaaagtaacacactgtgatctagtattatttatcagtagataatactgttctgactgtatatacagtctagaactcacaaatcaattagttcctctcacaaatcattcatcttagacttacaaataaggaatgaaatagtcaatggcctgattaaggcaaagagctaccaggctagatggacactttttaaaaattttatctgttctttttcttgctcagggctggtaggttggatctgaaccattaaaatcaaatggtccactaggcgtatgatctctttgagccaaatcagttcctgaatataaaggaggaaatgatgaggatgtactgaggcaacggggaagtatagaaacatccaagacaaaagccaagggatgcaaaggcagagacacaggtgctttttggtgacccagtggatatggcaaccagtgtaactgccatacaagaaaccctaggagcaaacccacaccactcattctcagctaagagattttacacaggcaaacgtgtcttaaaccatctataaatcagttattttatatgacagtcaaaaccttagaaaccttaggatcattatatctattttctgcctattaattgctgtgaggtttgatttgaccaatctgggcaatttattcatcagcttcccttgaagtgcaccagaaaatagaagaaaggtgtgtggagacttaagagatgaggatggagaggaagcttaggtaacagacctgtgtttctcatagggtgtcccaactttctgaatatcagcattcatttgtggaaaaaggattattaaagtaagcgatctcctgagattgttagatataaagtaataaaattttcagaatcacaaaattatttaaaaagcccaagatttagaatagttaagagaatgccatgtagtcaacttgtgcagcatgtttgtgcattttttaatagctggagttaaatgccacttcctgtctttttttggagagctatatataaaataaagacattaataaaggtnnnanannnnnnnnnnnnnnnnaaaaaaaaannngggagggggggttttaatattctttgggggggagggctaacgttgggggggagggaaattttttcctttcgtagggggataaaattaggccgggccggggttcaatttaaccgggggggaaggggaactgtggttgtttaatagaaaatacccttgggggggagaagggcgcccccccccgaagaaa

SEQ ID NO: 96838 - DNA, 372 bp, Homo sapiens
agcttacacaatatcttttataggaaagatttctttttacggactccactaatgactccctaaggcccatgtcgaagcccccatcgttgggtcaatagtacttgccgcagaactcttgaaactaggcggctttggtataatacaccttacactcattttcaaccccctgacaaaacacatagcctaccctttccttggactatccctatgaggcataagtataacaagctccatgtggctacgacaaacagacctaaaatcgctcattgcgtactcttcaatcagccacatagccctggtagtaacagccattctcatccaaaccccctgaagctttaccggcgcattctttcttataattgaccacggtcg

SEQ ID NO: 96839 - DNA, 391 bp, Homo sapiens
gttaaacgtagcatgtggcatcgcagtctcttagaatttgtttcatctattttattttattgaatactgtctgtatctttggttatcctgtttgaagaaaaaggacaaataaaacatggccagcaaatacaaaaaaaaaaaaaaaaaaaaaaaaaaaaaaaaaaaaaaaaaaaaaaaaaaaaaaaaaaaaaaaaaaaaaaaaaattaaaaaaaaaaaataaaaaaaaaaaataaaaacaaaaataaatggtggggggggcttttgttaaaaattacttttggggacccctcctagaattggggggaaagaaatttttctttttctttatgtgggattattataacaatcggggcgccgttttatttaataaaaagggaagaagaaaattct

SEQ ID NO: 96840 - DNA, 370 bp, Homo sapiens
cggctttatcaacctggtttgacaacaaagttaatgaccttttagtaatgaactggattttatgaatggagtgaaagtgagcaataggaaccagaaaaagccatttatatttctgatgttttcttaaaaaccccctctcttatttctctgggaaagccataagggtgactcaaaatgactgaactgagaggggctcctgcctccaagcccagaggccaggaaccaccaccccattatccctgtcaccaccaccaccaccaccaccaccatttcttgtgagtaacaaagggccagggaccccaccattggccatctcctaccagggaccctggctggctatgatctccctcctaggaagaccagaggaggg

SEQ ID NO: 96841 - DNA, 393 bp, Homo sapiens
cccagctactcgagagactgaggtgagaggattggcttgggcctagggggtcaaggctgcagtgagccatgattgtgccactgcactttagcctgggtgggtgacacagtaagaccctgtctcaaaaaaaaaaaaaaaaaaaaggggccccccttttaaaaatcccttggggggcccaaattttcccgggcctggaaaggaataatttttttccttttagggggcgtttttaaaaccaggccctggcccgttttttaaaacgggaggaaggggaaaatgcgcaacttggaaacttttggaaaaaacctttttttggggggggggccattttggcccaacccccctccagaattgaaagccctcagggcaaaaaaaaactttgaaggggctaag

SEQ ID NO: 96842 - DNA, 400 bp, Homo sapiens
accaaaaccaaacgcccctcttggattgaggcggcctaatcacagcagtcctactgctcctatatttggcagtactaactggtggcatcactatactactagcagaccgcagcctcgacagcaccttattctaccccgccggaggaggagaccccattctataccagcacctattttgatttttcggtcaccctgaagtttatattcttatcctaccaggcttcggaatagtctcccatattgaaactaactactggggaggcaaagaaccatttggcttcgtaggtatggtctgagctatgatagcaatgggcttcctagggtttatcgggtgagcacaccatatatttacagtgggagtagacgtacacacacgagcatagttcacctccgctaccat

SEQ ID NO: 96843 - DNA, 373 bp, Homo sapiens
gagaaactgaaagtgttttactctttttctaaagtgttggtctttctacctgcacgacaacccataataaaaaaaaaaaaaaaaaaaaaaaaaaaaaaaaaaaaaaagggggggccctttttaaagttcccctggggggcccaattttacccccggctgggaaagaaatattttttcccttttgggggggttttttaaagcctggcccgggcccgcttttttaccccccgggggggggaaaaacccccacgggggattttttgaaaaaaccctttttttttggggggggaaattttggccccccccccccccaaaaattaaggcctttggggaaaaaaaaaattttttagggggttggggggccaacctcccg

SEQ ID NO: 96844 - DNA, 379 bp, Homo sapiens
ctaaacttgatccaaagacaatgaaggtaggtgtagaaatttctttagcttccccctcaaacctaaaaaaaaaaaaaaaaaaaaaaaaaaaaaaaaaaaggggggggggcttttaaaaaaaaccttgggggggccaaatttaacgggggaaggaaaaaaaaaatttttttcttaaaagggggggtaaaaaaaaaaaaggccgggggggggtttaaaaaacggggaaaggggaaaaaatgctacttgggaatttttgaaaaaaaacctttttttggggggggaaaaaattgggaaaaccccccaaaaaaaattaaaggtttaagggaaaaaaaaaaattttaaggggaaaagggggaaaaaaaaccggaaaaagctgggg

SEQ ID NO: 96845 - DNA, 377 bp, Homo sapiens
  misc_feature (1)...(377): n = a,t,c or g
taatgtacctgtgaatggtgactatatttttttgttgctgattttgttacattagcttggtgcaccattgtatatataatgatctcagctttgaacgtaaaaaaaatatctttgttcctgggcaaatcaattcaatttctagtattgcataagaagcacactgtaaaaataaatcactcctccatgctgtgaaaaaaaaaaaaaaaaaaaaaaaaaaaaaaaaaaaaaaaaaaaaaaaaaaaaaaaaaaaaaaaaaagaaaaaaagnggggggaaaaaaaaaagaagaaaaaaaaagagggaagannnnnnnttaaaaaggaaaaaatttttagggtnaaaatggggggggggccataaataaatattttttttttt

SEQ ID NO: 96846 - DNA, 377 bp, Homo sapiens
atcatctgcagtccttgttaaaaatgcaggtttttagaaccctctgaagttctgattaaatagatttattgcaaaccacaaaaaaaaaaaaaaagggggggccgttttaaagattctttggggggcccaaatttaaccgggggggggaagggattttttttttctttttagggagtggttttaaaatttgggccgggccggcgttttaacacgttaggactgggaaaacccgcctcttgggaattttgggaaggaaccttttttttggggggggaaattatggggccaacccccttccaaaattttaagcttctgggggaaaaaaaaaattttaaaggtgagagggggtaacattaccgcctaagttggctgggtgg

SEQ ID NO: 96847 - DNA, 383 bp, Homo sapiens
atttcaccgtattagccaggatggtcttgatctcctgagctcgtgatctgcccgcctcggcctcccaaagtgctgggattacaggtgtgagccaccgcgcccagccaagaataaaatactcttaagttgatctaatgaagtgtttccttaccattgggattattggtactattatttgctatattttaatattggtggttaccaaatattctcctttaaacagactcgctttttaaacttttttttttttttttgaaagggattttccccttttttccccaggtgggagggcaggggcaaaatttaatttaaccaaaccctccccttccgggtttaaaaaaaggttttggcttaatttcccaaggaggttgaaattccgggcc

SEQ ID NO: 96848 - DNA, 415 bp, Homo sapiens
ccacccctgagtcccctcagccatagaagggcccgtttcagtctgagccctactacactcaagcactatagtggtagcaggaaatttgttactcatacgcttccaccccctagcagaaaagagcccactaatccaaactgtaacactatgcttaggcgctaacaccactctggtcgcaggaggctgggcccttacacaaaatgacagcaaaagaatcgccgccttctccacttcaagggggctaggactcataatagttacaatcggggtcaaccaaccacacctagcattactgcacatatgtacccacgccttcgtcaaagccatactatttatgtgctccgggtccatcatccacaaccttagcaaggaacaagatattcgaaaaataggaggactactcataaccatacct

SEQ ID NO: 96849 - DNA, 393 bp, Homo sapiens
  misc_feature (1)...(393): n = a,t,c or g
gctcctttaacctctccacccttatcacaacacaagaacacctttgattactcctgccatcatgacccttggccataatatgatttatctccacactagcagagaccaaccgaacccccttcgaccttgccgaaggggaggccgaactagtctcaggcttcaacatcgaatacgccgcaggcccctttgccctattcttgatagccgaatacacaaacattattataataaacaccctcaccactacaatcttgctaggaacaacatatgacgcactctcccctgaactctacacaacatattttgtcaccaagaccctacttctaacctccctgttgttatgaattcgaacagcatacccccgattccgctacgaccaactcatacacctcn

SEQ ID NO: 96850 - DNA, 400 bp, Homo sapiens
aatttctgatttatctgaaaaataattcaagaggttagttgttaagctaatcatggaggcaccagaaaaaggcaaagcccaatgcaaggaaatccaaaaaatgacacaagaagtgaagggagaaatattcaaggaatagatagcataaaggaaaaaaaaatcaaaatttcaggaaacattagacacacttatagaaatgcaaagtgctctggaaagtttcagcaatcgaattaaacaagtagaagaaagaaattcagagctcaaggacaagatctttgaattaacccaatccaacaaagacaaaggaaaaagaataagaaaatatgaacaaagcctctaagtagcctgggattacattcaatgaccaaacctaggaataatcggtattcctgaggaagag

SEQ ID NO: 96851 - DNA, 451 bp, Homo sapiens
  misc_feature (1)...(451): n = a,t,c or g
gattgtagatcattgatcnctagcatcagaaacnacgcnnggnacgaggntccatgttggtcaggctggtctcgaactcccgacctcagattatccacctgcctcggcctcccaaagtgctgggattacaggggtgagccaccatgcccagccgcccatttttaaaatgttaggtcgattgcttgtttattactgagtcgaaatagttctttataaattccagatacaagtcccttatcagatatatgatttgcaaacattttttcccattctatggggtatctcttaactttcaaaagttttatggctaaaacacaaaactcttaaacttagttgaagnccagattatttcttcattggatgtttgtgcctttcattatattgaagaaagctttgcctaatctaaggttatgagaatttagtttttcttttaaaaaaaaagtttattact

SEQ ID NO: 96852 - DNA, 371 bp, Homo sapiens
gggggttttaccatgttggccagtctggtctcgaactcctgacctcgtgatccacctgcctcagcctccctaagtgctgggattacaggtgtgagccactatgcccggctgccccatcctttttcttgatattatagttaggggggaaaacatgtaaatgataatactccatgcagtatgtatgctgaagtgactaccctgaagacattttttaagtcctattttcttttctttctaggatatgataatcattttctgtttgtattaatacatgcttgaaaggaattagtaaagcgattccatccttgtcagcagcttggaacaaagctgtggatctgggattgtgtagaactcatttgacatcagtagtt

SEQ ID NO: 96853 - DNA, 348 bp, Homo sapiens
ggcgggtttttaccgtattggccaggctggtctcgagctcctgaccttgtgatctgccgcctcggcctcccaaagtgctgggattgcaggcatgagccactgcacctgggtttttttttttttttttttgggacaaaaaagggaaaccccttttcaaaaaacagacaaccaaaaaggtcccccccggccaatttttggggggtttttaaggaattaaaaccacttccgaaaaaaacctctaattaagccctaaggaaaggggagcccttataatttttccctttttccagagggggaacctaaaacccaaaaggttcgggtcctttgaccccaaaagggtgggggagg

SEQ ID NO: 96854 - DNA, 411 bp, Homo sapiens
ggcatatataaacacgctttgcaaaaagagagcgtatggtttaaaatataaaatgaagaacaggataaaggctggagtgcagtggtgtgatctcggctcactgcaacctcaacctccctggctcaggtgattctcccgcctcagcttcctgattagctgggattacagtaatggtgaaattgccggtaatcgctaagtaaaaactactgaagaacaggacagaagccaatgaccacctcacctccaccgagtgccctgcagaaaaaggaaatggaaatccttcctgttattctccgcgtcccttcgtaaaaggctgcctgagaggtcagcacaggagtcctctaagtgccctgcagagaacacgggtctcggagccggacaaacctatattttgaaacccactttgagttt

SEQ ID NO: 96855 - DNA, 409 bp, Homo sapiens
  misc_feature (1)...(409): n = a,t,c or g
tacgccaagcttggcacgaggcagaattattatttaattcagcacctcttgtgtgccagacacagcgctaagtgccctgcatactttgtcattgaactataccaacaattttctgagaagggttcagatatgattcccatttcacagatgaggcttatagaggggttaagacatttgctcaaggttacacagcaaagccttgtagaccnnnnnnnnnnnnngggggggtttccttttttccccccgggtgggggggaggggggcaattttggggaattggaacctttgccccccgggttaaggaaatttttctgcctgggccccccaaggaggggggattaagggccccggnnnnnnnnnnngggtagtttttgggtttttaaaaaaaacggggtttccccttgttggc

SEQ ID NO: 96856 - DNA, 425 bp, Homo sapiens
ggttccagagaccatggcaagaacccacttggtctggagggtttgggggggctctctgcgggggtgggaagggatgggggacaggggacacttaacccaaggcatgaaggataacttcgagttaccacagtgaagatggatgtagtgggaaataacaccccaagctgggagcatgttatgctaggatcaggggctttggggcttcattatttatttttacagacaaagtcttgcttgagtgcactggaataaccctagctccctgtaacctcgaactcctgggctcaagcatactcctgtcccaagcctcctgattagctgggactatgggcgcacaccaccacacctgactaatttttgtattttttttgatcgggggtccttttttttttgagacagagtctctgccacccacgcatgagagc

SEQ ID NO: 96857 - DNA, 393 bp, Homo sapiens
  misc_feature (1)...(393): n = a,t,c or g
aaaagggtgaaagaattctacaaggaacacttaaactatccaccacctagacagagtgacnnnnnnnnnngggacggagtctcgttttgtggcnnnnnnnnnnnnnnnnnnnnnnnnnnnnnnnnnnnnnnnnnnnnnnnnnnnnnnnnnnnnnnnnnnnnnnnnnnnnnnnnnnnnngacaggatgatttttaatgttttggcccatgccaaatattttttgaaagtgggcatactagtatctataagaaaatatcaaaatagcccgcctgtagtgacaactacttgggaggctgaggcaggaggatcacctgagcccaggaggttgaggctgcaataagccgtgattgtgccactgcactccagcctgggggatagaatgacaccctgtat

SEQ ID NO: 96858 - DNA, 428 bp, Homo sapiens
aaattttcttgtatctctagtaaacaccaaaaattaaaattaacccccaaaccccccaaaccaccaccgaaaaaaagccccttggttttacccatcgggaaaaaaataagggaaaccttttggggggcttttaaaagcccaccacccaaccaaccaaaaggggcccaaaccttacccttaaaaatttgggataaaatgggtgggggggggggtttggccctcgttgtttaaaaagcccccccggggaattttaagggcccccctggggggaaacccatggaacaaccctaattggggcctgggccccccctcaaatggaaaggggggctcccccaccaaaagggggggttttctaaggccccgggagaaaaaaaaaaaggaggggaagggaggctttaaaaaaaacagggggttatttccggccaccc

SEQ ID NO: 96859 - DNA, 420 bp, Homo sapiens
  misc_feature (1)...(420): n = a,t,c or g
cgggggtctcctcagtatcatcccttcatggttcgccaggaagatgttactagaaaggggtccggatcnnnnnnnnnnnnnnnnnnnnnnnnnnnnnnnnnnnnnnnnnnnnnnnnnnnnnnnnnnnnnnnnnnnnnnnnnnnnnnnnnnnnnnnnnnnnnnnnnnnnnnnnnnnnnnnntagcggaacagccagagctccattgtatgttgtttcctctgtcttgctgcatttaaaggattctttctgtattgtttacctttgggagtatgattattaaatgtcttgaggtagtcttcattaggataaatctgcttggtgttctataactttcttgtacttggatattggtatctttctccaagtttggggacttttctgttattatcactttgaataaacttactacttctgtctcta

SEQ ID NO: 96860 - DNA, 116 bp, Homo sapiens
caaaaaacaatagcctcatcatccccaccatcatagccaccatcaccctccttaacctctacttctacctatctccccttttatactaataatcttataaaaaaaaaaaaaaaaag

SEQ ID NO: 96861 - DNA, 407 bp, Homo sapiens
gcgcctatgtaatcccaactactcgagaggctgttgtaagaaaatcacttgaaccccggaggcttaggttgcaatgagcaaagatcacaccattccgctgctgcctgggcaacaagagtgaaactctgtctcaaaaaaaaaaaaaaaaagtccttttaaaatggccaccctgggagaccttatggggaatgaaaaccctttcttgaggaaagcggggatcgggggtttcccccacccttcttttttagctagctcccctgggattggagcccaatttggggggggcggaatacagaacctattgcttttgcagccccagattaatacttatggaagggaagggcttttggatgaacatgggggagacttaaacaccttccactttattatatttgaagaggtgactt

SEQ ID NO: 96862 - DNA, 414 bp, Homo sapiens
  misc_feature (1)...(414): n = a,t,c or g
agggtcctgtacacaaccacccactagttctcttctccagccaagaggaataaagttttgcttccattcngaagaaaaaaaagaaaaaaaaaaaaaagggggggggcgggtaaaaaggacccaagggggggcaagattcacgggggcggggggggcagaccacccccccctaaaagggggcctttaaaaaccaaacgggggtatttggggaaaaaacctttttttggggggggaaaaaaagggggaacaccccccccgaaaaataaaccgctagggggaaaaaaaaatttttagaggggaaaggggggaaaactcacctcatattcttctgttaaaaaaagtccnncncccnnngaaanccatcaatcccggcagtatggctctgaagggacccactcccctctttacatggtt

SEQ ID NO: 96863 - DNA, 373 bp, Homo sapiens
cttttaatttgtgagtgtgcctcctatactacattatctctttaagatttttttttttttttggagacggagtctttgtctgtcccccaggctggaatgcaggggcacaatctccgctcacggcagccttggcctcccaggttccagggattccccgtctttactaaaaatacaaaattacccttgcgggggggcacatgcctgggatcccagctacttgggttgctgaggcatgaaaataccttgaccctgggggggggaagttgcagttagccgaaatcatgagatcgggccatggccctccaggcggggctacaagacaaaactctgtctcaaaaaaaaaaaaaagaaaaaagaggcccccggggggggg

SEQ ID NO: 96864 - DNA, 366 bp, Homo sapiens
tgggtattaatgtcatatgtgctttagattgtcctaatgaattaatatttcagattcacttactgcaaatgctggtactgaagcaagcacagaaggccgctaggcactggctacatgctgaacatctcctcctcctgatgttcacaacagctctgctggatggatgttagccccatttggcaaacaaggggctgagggtccctgatctgtttttttttttgttttgtttggttttttttatggagccttgctttgtttcccaaacccctggctggagtgcagtggcacaatcttggttcactgcaacctccacttcccaggttcaaaggattcttccgcctcaccctcttgagtagctggaacaac

SEQ ID NO: 96865 - DNA, 407 bp, Homo sapiens
cacatcgtgactgctctgctctgcgtttacaaaactcaacagcccgcgcaggtacctagctacctgcattcatgtgacatgtctggggaacagaaaataaataaaggatcttgctgaaaaccagaaaaaaaaaaaaaaaaaaaaaaaaaaaaaaaaaaaaaaaaaaaaaaaaaaaaaaaaaaaaaaataaaataaaaaaaaaaaaaaaaaaacacaagaaaacctcccatcgaaaaaaataaaaaaaaaaaatctattcataaattcttaaaaaaaattataatatattatgtgggtgcgtcttcttctttctactcttcttgtgttctcctattctttattcaaaaaataatataaattataatatttgatagtacataattttttcttcgtctcttttagctccc

SEQ ID NO: 96866 - DNA, 386 bp, Homo sapiens
cctagcctttctattagctcttagtaagattacacatgcaagcatccccattccagtgagttcaccctctaaatcaccaaaaaaaaaaaaaaaaaaaaaaaaaaaaaaaaaaaaaaaaaaaaaaaaaaagggggggggccttttaaaaaaaattttggggggggccaaattttccggggggggaaaaaaaaatttttttttttttaagggggggaaaaaaaaaacccttgggggatttttgaaaaaaaacttttttttgggggggggaaaattggggcccccccccccaaaaaaaattaaggttttgggggaaaaaaaaaatttttaaggggaaaggggggaaaaaaaactttatttttttggggggaaaaaatttttttaaaaaa

SEQ ID NO: 96867 - DNA, 399 bp, Homo sapiens
ctatcatatagtaaaacccagcccatgacccctaacaggggccctctcagccctcctaatgacctccggcctagccatgtgatttcacttccactccataacgctctaaaaaaaaaaaaaaaaaaaaaaaaaaaaaaaaaaaaaaaaaaaaaagggggggggcctttaaaaaaaaccctgggggggcccaaattaaacgggggaagaaaaaaaaaaattttttccttaaaggggggggaaaaaaaaaccccggggggaattttgaaaaaaaaaccttttttggggggggaaaaaatggggaaaaccccccccaaaaaaataaaggccttggggaaaaaaaaaaattttaaaggggaaaggggggaaaaaaaaccgaaaatggtgggggggaaaaaaatt

SEQ ID NO: 96868 - DNA, 403 bp, Homo sapiens
tgtgcgtgtgagtgcgtgtgtgtgtgtgtgtatgtttgtgtgatctgtgtcatggttttgttacctttttgtttttgtaaacttgaatgttcaaaataaacatgctgtttacaaaaaaaaaaaaaaaaaaaaaaaaaaaaaaaaaaaaaaaaaaaaaaaaaaaaaaaaaaaaaaaaaaaaaaaaaaaaaaaaaaaaaaaaaaaaaaaaaaaaaaaaaaaaaaaaagaaataaaaaaaaaaaaaaaaaaaaatgggggtgcgctgtctaattaataataatagtggcccccccccttctttgggaagggagattttactttctttccaattaaaaaaaaaaaaaaaaattttttgtgagggagaaataaaaaaaacacttctttttggggaagaaactaaattg

SEQ ID NO: 96869 - DNA, 383 bp, Homo sapiens
caatccccttgtatttctaaggtgttttttatagttcatttgcagacaatgggttatgtgataacttttatcagtgatagattaaacagaataatgaccaagctttcaaccttaaggagtcaggccagtatttacaaaaggaggtctccatgaactccttaaatatgagttcccctaatatcatcttgccaggtactaaataacaactgatagcacaagctatagggaatttgaaagaattccatggatgggtgttgtctagggccttttgttgtttttgagacggggtctcactctcacccaggctggagtatagtgtggcgcaatcttggctcactgcagcttctgcctcccaaattcaagcgattctcctgcctcagcct

SEQ ID NO: 96870 - DNA, 385 bp, Homo sapiens
cttacacttaggagatttcaacttaacttgaccgctctgaccaaaaaaaaaaaaaaaaaaaaaaaaaaaaaaaaaaaaaaaaaaaaaaaaggggggggccccctttaaaaaaatccctgggggggcccaattttccccgggggggaaaaaaattttttttttttttttagggggggtttaaaaaaccccccgggggttttttggaaaaacccctttttttgggggggggaaatttgggccccccccccccccaaaaatttaaccccccggggaaaaaaaaaattttttaggggggagggggggaaaaaccccctttttttcttggggtggaaaaattttttccccggggttttttttaaaaaaaattttcccccccggcgggggg

SEQ ID NO: 96871 - DNA, 321 bp, Homo sapiens
cccatactgtaatttactacttcggaaaaaacgaaccatttggatacattggtgtggcctgagctatgatttctgttggctccctagggtttatggcgtgagcacaccatatatttacagggggaatagacgtatactccccagcctatttgacctgcgctaccataatcgtcgctatccccaccggcgttaaagtttttatctgactcgccacactcctcggaagcggtatgaaaagatctgctgcagtgctctgaaccctaggattcatctttcttttcaccgcacgtggcctgactgggattgtattatcaaactcat

SEQ ID NO: 96872 - DNA, 392 bp, Homo sapiens
ctttaaagaaaaatgaaaaaggttagtgtttgggggccgggggaggactgaccgcttcataagccagtacgtctgagctgagtatgtttcaataaaccttttgatatttctcaaaaaaaaaaaaaaaaaaaaaaaaaaaaaaaaaaaaaaaaaaaaaagggggggggccttttaaaaaaaaccctgggggggcccaaaattaagggggggaggaaaaaaaaatttttttctttaaaggggggggaaaaaaaaaccccggggggatttttgaaaaaaaacctttttttgggggggggaaaaatggggccacccccccccaaaaaaaaaaacgccttgaggaaaaaaaaaaatttttaaggggaaaggggggaaaaaacacccgtaacgggggg

SEQ ID NO: 96873 - DNA, 359 bp, Homo sapiens
attccactgaagagtcaattatgtttatgataaccaccaaatctcaaaaggatacgctccaaaaaaaaaggggaaggaaaaaaaaaaaaaaaaaaaaaaaaaaaaaaaaaaaaaaaaaaaaaaaaggggggggggttgtaaaaaaaaatcttggggggggaaaaaatatggggggggggaggaaaaatttttttttttttttggggggggaataaaaaaccccgggggggttttttgggaaaaaacttttttttgggggggggggattttgggaaaacaccttcccaaaaaatttagtttggggggaaaaaaaaaatttttaagggggggggggggggacccaacggtgtaagggggga

SEQ ID NO: 96874 - DNA, 386 bp, Homo sapiens
  misc_feature (1)...(386): n = a,t,c or g
aatctatcaccctatagaagaactaatgttagtataagtaacatgaaaacattctcctccgcataagcctgcgtcagattaaaacactgaactgacaattaacagcccaatatctacaatcaaccaacaagtcattattaccctcactgtcaacccanaaaaaaaaaaaaaaaaaaaaaaaaaaaaaaaaaaaaaaaggggggggggccttttaaaaaatccctggggggggccaaattttacgggggggggaaaaaaaatttttttttttttaaggggggggaaaaaaaaacccccgggggatttttggaaaaaaacctttttttggggggggggaatttggggcccccccccccccaaaaaattaaggggttgggggaaaaaaa

SEQ ID NO: 96875 - DNA, 386 bp, Homo sapiens
  misc_feature (1)...(386): n = a,t,c or g
cggacgcgtgggttccctgtaaattgtaccttggggtttttttctgtcgttttgttaaaattagcgccattttaatattaaaaatactgatttttaatattgaaaataaaagcatttaatatctcttaaaaaaaaaaaaaaaaaaaaaaaaaaaaaaaaaaaaaaaaaaaaaaaaaaaaaaaaaaaaaaaaaaaaaaaaaaaaaaaaaaaaaaaaaaaaaaaaaaaaaagcccaccccaaaaaaaaaaaaaaaaaagaannnnnggggggggccccaaaaaaaaaaaatctttggggggcgctttccattggggggccctcaccccttttttttttttttgggggggaggaaaaaataatgttggtgtgagtgagngaggccccct

SEQ ID NO: 96876 - DNA, 371 bp, Homo sapiens
cccacgcgtccgaaaaaaaagaaagaaaatattttaaaggtcagaagctacaagcttttcatcatttagccaagactccatctcaaaaaaaaaaaaaaaaaaaaaaaaaaaaaaaaaaaaaaaaaaaaaaaaaaaaaagggggggggggcaaaaaaaaaaaaccgggggggggcaaaaaaaagggggggggggaaaaaaaaatttttttttttaagggggggggaaaaaaaaaccccgggggggatttgggaaaaaaaacccttttggggggggggggaatgggggccccccccccccaaaaaaaaaaagggggggggggaaaaaaaaaaattttggggggggggggggggaaaaccccccgcaagcgggg

SEQ ID NO: 96877 - DNA, 391 bp, Homo sapiens
cggacgcgtgggcggacgcgtgggaaagtaaggcatggttgtggttaatctggtttatttttgttccacaagttaaataaatcataaaacttgaaaaaaaaaaaaaaaaaaaaaaaaaaaaaaaaaaaaaaaaaaaaaagaaaaaaagctaaaaagggaatgaaaaaactcgggggccaaaaaaaaaggtacatagggatgttacaaaaaaaattttgtgttataaaatttgcccttttaataaagggatatccctaattgggacctaaagtgtggggggttttttggaaaccgcaggctattattacttcaaaggttttatacaccttaattttttaaatagcggggccaattgcaaccacccccccttttatggctgttttggaaataa

SEQ ID NO: 96878 - DNA, 377 bp, Homo sapiens
tacttgggaggttgaggcaggaaaatcacttgaacctgggaggctgaggttgcagggagccgaaatcgcaccaccgcattctagcctgggcaacagagcaagactccatctcaaaaaaaaaaagaaaaataggggggccggtttaaaaaaatcccacaggggccccaacttaacgtggaagggcaaaggaaaactttttcccttaagggggggaagttaaaaaccaacctgggaatcttggggagggaccattatttggggggggggccaaattgggaaaacctcctcccaagaatttagggttttggggaaaaaaaaaaattttaaagggaaaagggggaaaaacaacctgaatctcttggtggttggaaagtttg

SEQ ID NO: 96879 - DNA, 403 bp, Homo sapiens
ctagtgctgaagcttattaatgctaagggcaggcccaaattatcaagctaataaaatatcattcagcaccaaaaaaaaaaaaaaaaaaaaaaaaaaaaaaaaaaaaaaaaaaagggggggccccttttaaaaaatccctgggggggcccaaatttcccggggggggaaaaaataaatttttttttttttagggggggtaaaaaaaaccccccgggggatttttggaaaaaaccctttttttgggggggggaaaattgggcccccccccccccaaaaaaaaaaaccccctgggggaaaaaaaaaatttttagggggaaaggggggaaaaaaacccttttttttttgggtggaaaaaattttttcttccgggttttttttaaaaaaaattttccccccgggcccc

SEQ ID NO: 96880 - DNA, 362 bp, Homo sapiens
cataatttgaataaacacaaccacccacagcctaattattagcatcatccctctacttttttaaccaaatcaacaacaacctatttagctgttccccacccttaaaaaaaaaaaaaaaaaaaaaaaaaaaaaaaaaaaaaaaaaaaaaaaaaaaaaaaaaaaaggatgaagaataaaaaaaaaaaaaaaaaggggcggggggggggcaaaaaaaaaaaaccacggggggcccaaattattagggggaaaaaaaaaattatttttttttttaaaaaagtttttaaataaaagggggggggggatttataaaaaaaaaaatctttttgtggggagaacaatttggaaaacactcacaaagaaag

SEQ ID NO: 96881 - DNA, 356 bp, Homo sapiens
ccaaccccctggtcaacctcaacctaggcctcctatttattctagccacctctagcctagccgtttactcaatcctctgatcagggggagcatcaaactcaaactacgccctgatcggcgcactgcgagcagtagcccaaaaaaaaaaaaaaaaaaaaaaaaaaaaaaaaaaaaaaaaaaaaaaaaaaaaaaaaaaaaaaaaaaaaaagggggggggggtcttataaaaaaatcttgggggggccccaatcttcctgggggggaaaaaaatttttttttttttttttgggggggttaaaaaacacccttcgggggtttttggaagaaaaacttttttttgggggggaaaaaaaaag

SEQ ID NO: 96882 - DNA, 378 bp, Homo sapiens
cccacgcgtccgttagataacctcgggccgatcgcaccacccccctgacccctgttaccgcatttgtgtgtattaatgctgaaaaattaaatgtttaaagagtttaaaaaaaaaaaaaaaaaaaaaaaaaaaaaaaaaaaaaaaaaaaaaaaaaaaaaaaaaaaaaaaaaataaataaaaaaaggtaaatataaaaaaaatattaaaaccccaaaacaaaaaaacaacatataaaacttgtaaggtctatcaaaatgccatattctctctttatgataatcatggtttttctctgtttctttgtttttgcttttcaataattctctattaaaaaactattatatataaaatgtgaattttgctttttagtcttgttta

SEQ ID NO: 96883 - DNA, 376 bp, Homo sapiens
  misc_feature (1)...(376): n = a,t,c or g
cccagctttcagggaggctaagaggcgggaggatagcttgagcccaggagttcgagacctgcctgggcaatatagcgagaccccgttctccataaaaaaaaaaaaagaaaaaaaaaaaaaaaaaaaaaatgggggggtccaaaaaaagggtggctagggggggcaaatatgtggggggggggggggcattgatggttttcttttggggggggactaattaggggggggggggggattttttaaagaaacatttttgtgggggtgggaaatttgtggggaaaaacaaaaaagaaatatttatttgggggggagaaaaaaaattttcaaagggtcaaaggggtgagncgccctggggaggcctctttttggaaagggt

SEQ ID NO: 96884 - DNA, 366 bp, Homo sapiens
  misc_feature (1)...(366): n = a,t,c or g
agacaaccttagccaaaccatttacccaaataaagtataggcgatagaaattgaaacctggcgcaatagatatagtaccgcaagggaaagatgaaaaattataaccaagcataatatagcaaggactaacccctataccttctgcataatgaattaactagaaaaaaaaaaaaaaaaaaaaaaaaaaaaaaaaaaaaaaaaaaaaaaaaaaaaaaaaaaaaaaaaaaaaaaaaaaaaaaaaaaaaaaaaaaaaaaaaaaaaaaaaaaaaangggggggggggttttataaaaaatttgggggggggggccacaaagggggggggggaaaaaaatttttttttttttaaaagaaggaaaaaaaaaaa

SEQ ID NO: 96885 - DNA, 357 bp, Homo sapiens
ggtgatagctcatttcttttcatcactgaataatattcaccggtatgagtgtaccaggttatctactcacctattgaagtacatcttgtttttttctcatttttggtaattatgaataaagttattgagtccggaaaaaaaaaaaaaaaaaaaaaaaaaaaaaaaggggggcccttttaaaaaaatccttggggggcccaaattttcccgggggggggaggttttaccttttttctttaaggggggggaattaaaaaccccctggggatttttgggaaagaaccttttttttgggggggggcttttttggccccccccccccccaaaaataaaagcttttggggaaaaaaaaaatta

SEQ ID NO: 96886 - DNA, 342 bp, Homo sapiens
aaatgtaatgatggcttaaaaatttcaaactaagaatattaaagcaaattaccaagtaaaaaaaaaaaaaaaaaaaaaaaaaaaaaaaaaaaaaaaaaaaaaaaaaaaaaaaaaaaaaaaaaaaaaaaaaaaaggggggggccccctttaaaaaaaccctgggggggccccccttttcccgggggggggaaaaaaattttttttttttttagggggggaaaaaaaaacccccccggggttttttggggaaaacccttttttttgggggggggccctttgggcccccccccccccaaaaatttatactcttcggggaaaaaaaaaatttttgggggggggggg

SEQ ID NO: 96887 - DNA, 347 bp, Homo sapiens
gcccctttggggagggagagacaaacgggcggtttgacttggacacaaaaaaagccttggtttctaaaaaaaaaaaaaaaaaaaaaaaaaaaaaaaaaaaaaaaaaaaaaaaaaaaaaaaaaaaaaaaaaaaaaaaaaaaaaaagggggggggccctaaaaaaaaaaaaccgggggggccaaaaaaaaaccggggaaaaaaaaaaaaaatttttttttaaaaagggggaaaaaaaaaaaaccccggggaatttttaaaaaaaaaaaaaatttttggggggggacaatttggcccaaacccccccaaaaaaaaaaaacctttggggaaaaaaaaaaaatttttggggg

SEQ ID NO: 96888 - DNA, 404 bp, Homo sapiens
acaagagacagagcctggagggtctgcaaagcatgaaacaccaaggatgccggctactgccagaagctggggagaggtgcgggatggactctccctcggcacctccagtgggaagcacccctgcccagaacctgggaccttttttttttttttgaaaaaaagtttcgttgtttcccccaccctaaagggcaaagggggggaaggggaatttgggttaattgaaccctaaaaatcgggggttggggggattttcccccctggccctcacaggaagtgggaactgcggggcccccccacaaccccggccaagttttggggtttttgggggaaagggagtttaatttttttgcccaggtgggtttggacccccggggctgggggaattttctggcttgggcctccaa

SEQ ID NO: 96889 - DNA, 379 bp, Homo sapiens
cccacgcgtccgcggacgcgtggggaagaaatgaatggccaggtgcggtggctcacgcccataatccaaccacctcgggaggctgaggtggatggattgcttgagcccaggagtttgagtttgagaccagcctgtgcaaaatagtgaaacctcatctctccaaaaaaaaaaaaaaaaaaaaaaacttttccccggggggggggggccccccttgttcccccattttttaggggggtgggggggggggggaacccggcccccagggggtgggggttgagggaccccggatttccccctttttcttcacccggggggaaaaaataaaaaccccttcaaaaaaaaaaaaaaaaaaaaaaaaggggggcccttttaaaaaatc

SEQ ID NO: 96890 - DNA, 348 bp, Homo sapiens
gctcacgcctgtaatcccagctctcagggaggctaaaaggcgggaggatagcttgagcccaggagttcgagacctgcctgggcaatatagcgagaccccgttctccagaaaaaggaaaaaaaaaaaaaaaaaaaaaaaccaagggccaaaaaaaaaaaaaaaaaaaagggggggggccctttaaaaaaacccctgggggggcccaattttccggggggggggaaaattttttttttttccttttgggggggggttttaaaacccccggggggtttttgggaaaaaacccttttttggggggggggaatttgggggcccacccccccccaaaattttaagcctttgggg

SEQ ID NO: 96891 - DNA, 362 bp, Homo sapiens
cggacgcgtgggcggacgcgtgggctcacccaccacattaacaacataaaaccctcattcacacgagaaaacaccctcatgttcataccccaaaaaaaaaaaaaaaaaaaaaaaaaaaaaaaaaaaaaaaaaaaaaaaaaaaaaaaaaaaaaaaaaaaaaaaaaaaaaaaaaaaaaaaaaaaaaaaaaaaaggaaaagaaaaaaaaaaaaaaaaaaaacatagggggggggggcttatataaaaaagaaagggggggggagcccaagaacagaggaggaaaatcaatattgttttctcttgggggggaaaaaaaatatactaagggggagttgtttaaaaaaaacacctcattagggggggg

SEQ ID NO: 96892 - DNA, 363 bp, Homo sapiens
  misc_feature (1)...(363): n = a,t,c or g
tcgcccacgcgtccgcccacgcgttcgccctcggcctgcagccagagtagccaggccgcgcaccccanaaaaaaaaaaaaaaaaaaaaaaaaaaaaaaaaaaaaaaaaaaaaaaaaagggggggctttaaaaaaaaattttggggggggcaaaaataaagggggggaaaaaaaaaaaatttttttttttaaaggggggggaaaaaaaaaccctggggggaattttaaaaaaaaaaatttttttggggggggaaaaattggggaaaacccccccaaaaaaaaataaaggtttaggaaaaaaaaaaaatttttaagggggaaggggggaaaaaaaagttaatttttttgggggaaaaaaaatttg

SEQ ID NO: 96893 - DNA, 369 bp, Homo sapiens
cggacgcgtggggttctagatcgcgagccggccgcccttttttttgtttttttggtttttttttttttttttttttttttttttttttttttttttttttttttttgggggggggaaaaacctttatatttttttttttttaaaaaaaaaaaacccccccgggaaaaaagggttcaaaagggtttttctttgggggggggaaaaaagccccttttttaaaaaagggggggggccccccttcggggaaaaactttttttggggggggaaaaattaaggccggcccggggggggggtcgcggggggggggttttttttttttttaaaaaaaaaaaaaaaaaaaaccgggggggggggttttttttggtttt

SEQ ID NO: 96894 - DNA, 303 bp, Homo sapiens
cgaccgttgactattctctacaaaccacaaagacattggaacactatacctattattcggcgcatgagctggagtcctaggcacagctctaagcctccttattagagccgagctgggccagccaggcaaccttctaggtaacgaccacatctacaacgttatcgtcacagcccatgcatttgtaataatcttctaaaaaaaaaaaaaaaaggggcggccgttctaaaggatccttggggggacccaagcttaccggggctggcaaaggaaaatttttttccctagaggggggggtataataac

SEQ ID NO: 96895 - DNA, 339 bp, Homo sapiens
tgactattctctacaaatcacaaagacattggaacactatacctattattcggcgcatgagctggagtcctaagcacagctctaagcctccttattcgagccgagctgggccagccaggcaaccttgtaggtaacgaccacatctacaacgttatcgccacagcccatgcatttgtaataatcttcttcatagtaagacccatcataatcggaggctttggcaactgactaaatcccctaataatcggagcccccgatagggcgtttccccgcataaacaacataagcttctgactcttacctcgctctatactactcgtgcgcgcatctgctatagcg

SEQ ID NO: 96896 - DNA, 367 bp, Homo sapiens
aaaaccccctgccataacccaataccaaacgcccctcttcgtctgatccggcctaatcacaggaggcctacttctcctatttctcccagacctagctgctggcatcactatactactaacagaccggaacctcaacaccaccttatttgaccccgccggaggaggagaccccattctataccaacacctattctgatgtttcggtcaccctgaaggttatattcttatcctaccaggcttcggaataatctcccatattggaacttactactccggaaaaaaagaaccattgggatacataggtatggtctgagctatgagatcaattggcttcctagggtttatcgagtgagcacaccatatattg

SEQ ID NO: 96897 - DNA, 370 bp, Homo sapiens
cccacgcgtccgatttattttataaattttatatgtacatttatgcatatacatatttgaattggatggtagacatataaatgaataataaagacatgacccaaaagttttggtgctagtggtctctcaatgatgcaggtataagtcttctttcttctgctgctattatctctgtttcaccattttctgcagtgaacgtgtctgctttttgtaaagaaaaatcagttgtgtgctatttatgaaagggtcacaggccaggcatggtgactcctgtctgtaatcccagcactttgggaggccaaggtgggtggatcaggaggtcgggaatttgagaccagcctggccaacaaggtgtaaccccgtctctact

SEQ ID NO: 96898 - DNA, 363 bp, Homo sapiens
actagttcccctaataatcggtgcccccgatatggtgtttccccgcataaacaacataggcttctgactcttacctccctgtctcctactcctgatcgcatatgctataatggaggccggagcaggaacaggttgaacagcctaccctcccttagcagggaactactcccaccctggagcctccgtagacctaaccatcttctccttacacctagcaggtgtctcctctatcttaggggccataaatttcatgacaacaattatcaatatatgaccccctgccataacccaataccaaacgcccctctttgtttgatccgtcctaatcacagcaggcctacttctcctatgtctcccaggcct

SEQ ID NO: 96899 - DNA, 364 bp, Homo sapiens
ctctacatcaccggcccgaccttagctctcaccatcgctcttctactatgaacccccctccccatacccaaccccctggtcaacctcaacctaggcctcctatttattctagccacctctagcctagccggttactcaatcctctgatcagggggagcatcaaactcaaactacgccctgatcggggcactgcgagcagtaccccaaacaatctcatatgaagtcaccctagccatcattctactatcaacattactaataaggggctcctttaacctctccacccttatcacaacacaagaacacctctgattactcctgccatcatgacccttggccataatatgatttatctccacactag

SEQ ID NO: 96900 - DNA, 355 bp, Homo sapiens
gatcgcttgagcccagaaggtcgaggctgtagtgagctatgattgtgccactgcactccagcctggttgacagagcaataccctatctcaaaaaaaaaaaaaaaaggtttcccctgttccggaagttggaaaaccactgccccacaacaaggggctcaaggaccttttgccacctttcttgggcaaaaaacgggccttaagctttgccattccttaagcccttacttggggggtcccgggttgttttaaaaaagctttccttgttcctccttgccctttccaattttgccggaggctgtgccccttccccgttttggggaggaagttacccctgttttccctcgcccaatcctag

SEQ ID NO: 96901 - DNA, 316 bp, Homo sapiens
gtacacacacacacacacacacacacacacacacacacacacactgtgtatgtttagacctaatatacacacacccacgcacacactgtatgtttatgtgacctaaaacatacacacatgcacacacacatacatatacatttattcattcattcaaggggtgtatccagtgtctgtgtgtcactgtttatgcagtttccattttccagtgaattatgaggggagggcatcttttctaaccagattgttttttgagaacaaagacctgagaattgaggaagagtttggaaagagggagaggcgaggaaagagatct

SEQ ID NO: 96902 - DNA, 338 bp, Homo sapiens
  misc_feature (1)...(338): n = a,t,c or g
gtggcgcgatctcggctcactgcactccaacctgggcgacagagcaagactccgtcctccgtctcaaaaaaaaaaaaaaaaaaaaaaanggggggccctttaaattaaaagggccctttaaaacccgggaaaaaccccgggggggtcttttaaagggccacccttttgggggttgccccccccccgggctttttttggccggggagggggcccccccccttttttttttaaaaaaaaaaaaaaaaattgccttcctttggtgggaggggggttttttttttggnnncnnnnnnnnncnnacctnnnacactncncccgaaactagtatcttttaaacc

SEQ ID NO: 96903 - DNA, 388 bp, Homo sapiens
cttttaaataaagtaattgtcagcttaggcaacatagcaagaccctgtctctacaaaaaaaaaatttaagttagccaggcatgggggcactgacctataatcctagctactctggaggctgaggcgagagtatcacttgagcccaggagctcaaggctgatcatgccaccatactccagcctggatgatagagtaagaccctactttttttttttttttttttttaaaaagggaacccttcggggccatgaaaaaaaaggggcggttttcccaatcttttacctttttttgaaaaaaagcccggcaaatttttaaccaaaaaaggggggaaaaagggggcctttaaaaggggtggattgggccccaattttggttttcccagaaaaga

SEQ ID NO: 96904 - DNA, 477 bp, Homo sapiens
  misc_feature (1)...(477): n = a,t,c or g
tagtgggggcncncccatttgatatccgtagatcgaagctcgctagcgccnacacttaagcgtggaacctgaaccttgataccgtactccgatgcactagaccagtgtggaggaattcttgtcttaattctgtagcttgttgatgtgtttagaaatcagaaattgtaatgcctccaacattattccttgaagattattgagtactttattaactctttagattccatatacttttggatttgctgtttttattcaaaagtgcaatgagaaatttgaaaaatggtgcattaattctgtagattaaattgaacagtatagacatcttcacaatattactcctttttcgattgtttgtttttgagatggagttaaattcacccacctcagcctcccaaagtgctgggattacaggcctgagccaccgcacccagccagttatttcaacaagtgcatgcttaatactgtgttgcatcattt

SEQ ID NO: 96905 - DNA, 415 bp, Homo sapiens
gtttcgccgtgttggccgggatggtcttgatctcctgaccccgtgatccgccctcctcagcctcccagagtgctgggactacaggcgtgagccaccgcatctggccaaactttctgatgaaaactctaagtccacctaagctaaggacaggagttacagcttccatgaattttaaaaccagacccaccgatttgagtaagcaattactctcttgaaggagaaaagtcagaaaacataatgatgaaatcactaggacctaactggcatgtggaactattttctgcttatgaactatcaactttaatttcatttccagatgacatggtctcagctgttctacagtggttataaatgttctaaatcaagggaattcatcaatctagtagaataaaataattgagttcttaatttcctt

SEQ ID NO: 96906 - DNA, 409 bp, Homo sapiens
  misc_feature (1)...(409): n = a,t,c or g
cggagtttcaccgtgttagccaggatggtctcgatcgcttgacctcgtgatccaccctcctcggcctcccaaagtgctgggattacaggtgtgagccaccgcgcccggcctcattcccctcatttttgaccgtaaggatttcccctttcttgtaagttctgctatgtatttaaaagaatgttttctacattttatccagcatttctctgtgttctgttggaagggaagggcttaggtatctagtttgatacataggtagaagtggaacatttctctgtcccccagctgtcatcatataagataaacatcagataaaaagccacctgaaagtaaaactactgactcgtgtattagtgagtataatctcttctccatccttaggaaaatgttcatcccagctgcggagatn

SEQ ID NO: 96907 - DNA, 340 bp, Homo sapiens
gtctctcagccagtaagtatggctctgacatttgaactggcttagtaattgcagagcatttgcttttttttttttttaaaaagggattttggttttgccccccgggtggaagggcggggccccaaggtaatttaatggaatttccggtttcgggggggaagggaattttctgccctggccccccaaagagcggggaataacgggcccccccccccagccggggtaaattttggttttttaaaaaaaaagggggtttgcccttttggcccgggggggtttaaacctctgaccctaggggaacccccccccctttgggcccaaaggggggggaataccgggg

SEQ ID NO: 96908 - DNA, 325 bp, Homo sapiens
cgccactgcactccagcctgggcgacagagtgagattccatctccaaaaaaaaaaaaaggaaaaaaaaagaaaaggtttggggtggaggaacagtttttcttaaaaaaaagcgggggggtgaaatttggaaagcattttttgaatgggataaccccaggctttaatggaatttttccatcggctcggttaagttggatttaaaggcaaattaaaaaggcttaagtttttcttataaaactttaaataggtaaaaggctatttggtttaaatttcagtccttaagcaaaaccggggtggggtttaaaattcaaaaaaaaagctttc

SEQ ID NO: 96909 - DNA, 313 bp, Homo sapiens
  misc_feature (1)...(313): n = a,t,c or g
gagttgggaagataaaacgcggcacgtgtaatgtaatacatgacaatggaacannctacncctttaaggggtaactctgaaatcagaagacaagttttccaagacttgggaaggtggagagatcagagatcagtgagagaacaaagaatcggatggagtttggctcttgtcgcccaggctggagtgcaatggtgcgatctcagctcaccccnncctccaccttccgggttgacgtgattctactgatgcagcctcccaaggacctgggagtaccggtgcccaccatctcgcccgtgtaatttttctattttcc

SEQ ID NO: 96910 - DNA, 361 bp, Homo sapiens
  misc_feature (1)...(361): n = a,t,c or g
cccattaatgcaggacatgcactggttcccagcctttggggtgggcattaccccattttacagatgaagaaactgaggccacagccaatgagacacgaatgtggtgtgcatctcacccttccccgtcggctttttgaggatggtcctggttgaggtgggccccgtcctgcccctctatttagagaaggggaccccattcctacgggagcacctcctgtccactcatctggcccctccctttatctggcctgaccacctccacccccaccctggccatgggcgcccctcccagggctgcactcctccgcacgtctacttacggatggcaaccatgctaccggcagccgtggtccccaccttn

SEQ ID NO: 96911 - DNA, 344 bp, Homo sapiens
caaaaaataagacactatctatttctcattagttatacacgttcattataaaacgtaatttaagcaatactgaaatgccaaaaagaaagtaaaattcactccaaaagtaaaattcaccccaaatctcactactcctgtaactatgtctgacagccagctgttgggtcttccatcgtttttaaccttcaggtgagcacacagatccttattttttcttttcttttctttcttttttttttttttttggaaacccaacctcttgttgcccaggctggagggcaagggggcaatttttgttaaccgaaatttttgcctccggggttaaagcaagtttcttgcctaag

SEQ ID NO: 96912 - DNA, 350 bp, Homo sapiens
  misc_feature (1)...(350): n = a,t,c or g
gcacgaggagagagagagagagagagagagagagagagagagagagagagagagagagagagagagagagagagagagagagagagagagagagagagtttttttttttttttttttaaaaaaaaaatctctctcccccccccggggggaaaaaaaggggggggggggggtttcactccccccccttttggggggaaaaagattttctccccccccgccccccaaaggggggggaaaggggggggcgccccccccccccggtttttttttttttttttaaaaaagagggggcccccccgggggggggggtgggntcaaaaacccccgtctgtggaccccccccccctggc

SEQ ID NO: 96913 - DNA, 365 bp, Homo sapiens
gaacagtgccttttacaaatgcagtttatccctggttctgaggagcaagtgcagggtggaggtggcacctgcatcacctcctcctcttgcagtggaaactttgtgcaaagaatagatagttctgcctctttttttttttttttccgggggggggggccttggcatattttttttggggaaaaaaaaaattaagcccctgaagggtctaaccttttgggggggggctagggttttacctttggaaagggtttgacccccccaaactttacccttccgggggaacctcttttatcaggacgggggggggagccccccctgggccctaaagggaaaggggggggggttaccctccaccaccccaaact

SEQ ID NO: 96914 - DNA, 271 bp, Homo sapiens
gcacgagctctctctctctctctctctctctctctctctctctctctctctctagagtttttttttttttttttggccccgacccaaattttggggggggggcttttttacccccccaaggggggggcccacctgtcaaaccggctggggggggggagagttttttttggcccccctggaaaaaaaacggcccccctggggggggggagagttataaaaaaaaaaacccccccgggcacccctctttttttttgaccccccgtttttttta

SEQ ID NO: 96915 - DNA, 316 bp, Homo sapiens
gcacgaggagagagagagagagagagagagagagagagagagagagagagagagagagagagagagagagagagattctttgtttctccccccgggccagacacactccaggacagagggggtgtctccctctttgcgagtgaccccacacacgagatatacctcccctgccccctgaggggccccctatctgagcgggacccagaagaactccacggggtgtgtttttttagcgagccttcccacaggtggttcccagaggagggcgtgggtgacatctgtcagtgctgacacaggggtgagtgtggctctcccc

SEQ ID NO: 96916 - DNA, 369 bp, Homo sapiens
  misc_feature (1)...(369): n = a,t,c or g
ggcacgaggcgatgtgacacgagaaagcacataccaaggccaccacacaccacctgtccaaaaaggccttcgatacgggataatcctatttattacctcagaagtttttttcttcgcaggaattttctgagccttttaccactccagcctatcccctaccccccaattaagagggcactggcccccaacaggcataaccccgctaaataccctagaagtcccactcctaaacacatccgtattactcgcatcaggagtatgaatcacctgagctcaccatagtctaatagaaaacaaccgaaaccaaataattcgagcactgcttattacaattatactggggctctattttaccctcctacaagcctn

SEQ ID NO: 96917 - DNA, 364 bp, Homo sapiens
  misc_feature (1)...(364): n = a,t,c or g
ggcacgaggaaaaagcactcaaccatcctgataataagagaaatagatattaaatttatgccaagattccatatttctcccatcagattggtaaaaatctaagcacttgctaacataaggtgttagcaacagtgtggtaaagtaggcaatctcttgcattgctgattctctaaattggtgcaatccacagggagggcaatttggcatgctctcgttctctctctcgctcgctcgcgcgctctctctctctctctccatganaaggagagagagagagagagagagcccgcgaacaagcgattgagtgagagagagagcacgtatctgcagtctcagctgctcaggaggctgaggtgggaggatt

SEQ ID NO: 96918 - DNA, 352 bp, Homo sapiens
ggcacgaggaacgctccttttactatgcctattattcttcgcactaaccatatacccccgatggtgcgatgtaacacgaaaaagcacataccaaggccaccacacgccatttgttcaaaaagagcctttggtgctgggaggaaaactatttattacctcataagttattttctttgcaggatttttctgagccttttaccactccagcctaacccctacccccctattaggagggcactggcccccaacaagcatctccctgtttaatcccctaaaaaaaccacttctaaatacatccggattactcgcatcaggagtatcaatcacctgagctcaccatagtctattacaa

SEQ ID NO: 96919 - DNA, 361 bp, Homo sapiens
ggcacgaggaaccattggggtacataagaatggcctgagctatgatatcaattgggttcctagggttgatcgtgagagcacaccatatatttacaggaggaatagacgtagactcacgaacatatttgacctccgctaccataatcattgctatgcccaccgggggaaaagtatttaggtgactcgccacacttcacggaagcaatatgaaatgatctggtgcagggctctgagccctaggattcatgtttcttttcaccgtaggtggcctgactggcattgtgttaacaaactcatgactagacatcgggctacacgacacgtactacgttgtagctcacttccactatgttctatcaat

SEQ ID NO: 96920 - DNA, 340 bp, Homo sapiens
ggcacgagcggagacacacgagcatatttcacctccgctaccataatcatcgctatccccaccggcgtccaagtatttagctgactcgccacactccacggaagcaatatgaaatgatctgctgcagagctctgagccctacgattcatctttcttttcaccgtaagcggcctgactggcattgtattagcaaactcatcactagacatcgaactacacgacacgtactacgttgtagctcacttccactatgtcctatcaataggagctgaatttgccatcataagaggctccattcactgatttcccctattgtgaggctacaccctagaccaaacct

SEQ ID NO: 96921 - DNA, 352 bp, Homo sapiens
ggcacgaggagacgtagacacacgagcatatttcacctccggtaccataatcattgctatccccaccggcgtcaaaggatttagctgactcgccacactccacggaagcaatatgaaatgatctgctgcagtgctctgagccctaggattcatctttcttttcaccgtaaggggcctgactggcattgcattagcaaactcatcactagacatcgtactacacgacacgtactacggtggagctcacttccactatgtcctatcaataggagctgtatttgccatcataggaggcttcattcactgatttcccctattctcaggctacaccctagaccaaacctacgccaaa

SEQ ID NO: 96922 - DNA, 370 bp, Homo sapiens
ggcacgaggctcggcgtggtggcgcatgtctgtggccccctcagctgcttgagagtctgaggcgggaggattgcttgagcctgacaggtcagccacagagtgagaccctgttttgagagagagagagagagagacagatacagacacacacagagagagtgtgagcgagcaaaagagatatattctgggttttttttgtctgcttctgaaatggagtcttgctctcttgctcaagctggaggttgcaaagagctgaggatgtgccattgcactccagcctgggtgacacagggagactgtgtttcataaaataaaaaataacattgggagaaaaagggtctttggtttttgggggtaaatataagcactc

SEQ ID NO: 96923 - DNA, 360 bp, Homo sapiens
  misc_feature (1)...(360): n = a,t,c or g
ggcacgagtacgtgatcattttttgtctggcttttaaaaatttggtataaatgttgttgaggttcattcatgttgtaacatgtattaattggttcttcgttgctgaatagtattccattgtatggatatatcacatattgtttatccattcacaagttgatggaaatttgaattgtttcccatttttggcaactatgaataatactgctatgaatattcatgtatgagtctgtgtatggacacgttttaacttctcttgcgaagattttttttttttttttgaaacggagtttcttttttgttccccacgctggagtgaatgggtgtggtcccggttcattgaaacctttacctcctggn

SEQ ID NO: 96924 - DNA, 351 bp, Homo sapiens
ggcacgagggaacaacactccaccacctattcttgctcgaaacgggatcaaacaaccccctaggaatcaccttccattccgataaaaaaacctttcacccttactacacaatcaaagacgccctcgggttacttctcttccttctctccttaatgacattaacactattgtaaccagacctgctaggcgacccagacaattataccctagcccaccccttaaacacccctgcccacatcaagcccgaatgatatttcctattcgcctacacaattctccgatccggccctaacaaactaggagggggccctgccctattactatccatcctcatcctagcaataatccccg

SEQ ID NO: 96925 - DNA, 350 bp, Homo sapiens
ggcacgaggaatatgatttatattcacactaactgagaccaaccgaacccccttcgaccttgccgaaggggagtccgaactattctcaggcttaaagataaaatacgccgcaggccccttagccctattgttcataaccgaatacacaaacattattataatagacaccctctccactacaatcgtcctaggaacaacatatgacgcactctcccctgaactctacgcaacatattttgtcaccaagaccctacttgtaacctccctgttcttatgaattcgaacagcatacccccgattgcgctacgagcaactcatacacctcctatgaaaaaacttcctaccactcg

SEQ ID NO: 96926 - DNA, 349 bp, Homo sapiens
ggcacgagattcactgatttcccctattctcaggctacaccctagaccaaacctacgccaaaatgcatttcactatcatattcatcggggtaaatctaactttcttcccacaacactttctcggcctatccggaatgccccgacgttactcggactaccccgatgcatacaccacatgaaacatcctatcatatgtaggctcattcatttctctaacagcagcaatattaataattttcatgatgtgagaagccttcgcttctaagcgaaaagtcctaatagtagaagaaccctccataaacctggagtgactatatggatgccccccaccctaccacacattcgaaga

SEQ ID NO: 96927 - DNA, 388 bp, Homo sapiens
  misc_feature (1)...(388): n = a,t,c or g
ggcacgagccattctaaacgcaatggccttcctaatacttaccgaacgaaaaattctaggctatatacaactacacagaggccccaacgttgtaggcccctacgggctactacaacccttcgctgacgccataaaactctttaccaaagagcccctaaaacccgccacatctaccattaccctctacatcagcggcccgaccttagctctcaacatcggtcttctactatgaacccccctccccatacccaaccccctgagaaacctcaacctaggcctcctatttattctagccacctctagcctagccgattactcaatcctctgatcagggtgagcatcaaactcaaactacgccctgatcggcgcactgcgagcagtagtccan

SEQ ID NO: 96928 - DNA, 355 bp, Homo sapiens
ggcacgaggagagctagcaccatgagcttcaataccctggaggcagaggctgcagtaagccgagattgcgccactgcactgcagcctcggtgacagcgagactcggtctcgaaaacaataataataaaaataaaaaaggatgaagccaagctggaggaaagaggtcacctagaatttaccactgaacttccacgcaccaaccttgaaatccaatgatattttcaaatcgtagtaacttacatatctggagtttggcgctatttgttacctccttttcttcctttaccatctacaaattcctctaatttttggttttcaattttatgaatgacagatacaagcagtttatggccaa

SEQ ID NO: 96929 - DNA, 369 bp, Homo sapiens
ggcacgagcaacctaagccttctatttattgtagccacctgtggcctagccgccaactaaatgctttgatgagggggaaaaataaactaaatctacaccctgagggtggcactggcagcaattatccacaccatcctgtatgaaataaccctaagcatcattctactataaacattactaataagtggctcctttaacctgtccacccttatcacaacacaagaacacctctgattactcctgccatcatgacccttggccataatatgatttatctccacacttgcagagaccaaccgaacccccttcgaccttgccgaaggggagtccgaactattctgaggcttaaacatcgaatactccgcacgc

SEQ ID NO: 96930 - DNA, 366 bp, Homo sapiens
  misc_feature (1)...(366): n = a,t,c or g
ggcacgaggggaggaactatcctgcccgccatggtcctaatgctaatcgacgtgccatccctgcgcatcctttacataacaaacaaggtcaacgagccctcccttaccatcaaatcaaatggccaccaatggtactgaacctaccagtacaccgactacggcggactaatcttgaactcctacatacttcccccattattcctacaaccaggcgacctgcgaatccttgacgttgacaatcgagtagtactcccgattgaaacccccattcgtataataaatacatgacaagacgggttgcactcatgagctggccccacattaggcttaaaaacagatgcgattgccggacgtgtaaaccaaacn

SEQ ID NO: 96931 - DNA, 320 bp, Homo sapiens
  misc_feature (1)...(320): n = a,t,c or g
ggcacgagctttagcattcatatcattatttgcttacatgaaactatactcttacttgatactctgtggcattatttgatgaatatctgtctaccctactagaccctaagttccagagaatcatttctctttaaggcttggcaccttcaagagaatgagttttaacatagtaccctttttcctaaaagcccccccaccccacccccacccaccnnnnnnnnnnnnnnccccggggggaaccccccgggcccaaccctataagggcccttttattgggggggggaaagggggccccccttttaaactgggggcccaaagga

SEQ ID NO: 96932 - DNA, 361 bp, Homo sapiens
  misc_feature (1)...(361): n = a,t,c or g
ggcacgaggttagtcagtcttgtcgcgaactcctgacctcaggtgatccacctgcctcggcctctcaaagtgctgggatttcaggcatgcaccaccgcgcctggcccgtttcctgaactttccatatcttcaatatttactgtggaccaggcactgtgttaaaaccttatctcaatctttagaacaatcctatgaagtcagtactatgattatcctcattttgctcttgaaaatattaaaggtcagagacagaggttaacaaagtctcacagttaatgtgtggcagagttgagttgaaacccagggctgtcagacttggcattgagaaagaaaacttacatagtgaagctatcaataaagn

SEQ ID NO: 96933 - DNA, 354 bp, Homo sapiens
ggcacgagagagtcacttcagactggcacctgtgttcttttgagcactttctaatcatttgaggcataccaagatgttttaggttctgggagctcgttgcccttgtgctggagtcagccgcgtctccatggagccctggttcctctggcagcaggcgtgcttgctgccatggtggcgttgctgcctctccaccctttacgcaaacagagctgatagggatgtgccttaaacatcaagaactgggccggtcatggtggctcacgcttgtagtcccagcactttgggaggccaaggcgggtgggtcacaaggtcaggagtttgagaccagcctggccaagatggtgaaaccccgtc

SEQ ID NO: 96934 - DNA, 379 bp, Homo sapiens
  misc_feature (1)...(379): n = a,t,c or g
ggcacgagattccctctgttgggcagtgtgttgtaggagaggattatatgtttggaatcagacagacctgtattcagatcctgcagacacctgatcttttaagaaagtttgtttaaattttgagggcagggaatttgttttatggttgtgtctctaggattgtcacaccgcttggcacattgtaggtacacagttggtgttaataacctgttatgttcatcatctctgccctttctccttcctcttctccccctccccccacctgaaggtccaagntgggatgatattaatattattatttttattatatttcgagacaaggtcttactctgttgcctaggctggagtgcagtgacatgatcacagctcactacagccn

SEQ ID NO: 96935 - DNA, 368 bp, Homo sapiens
ggtacgagcccatcccatgacccctaacaggggccctgtcagccctcctaatgacctgcggcctagccatgtgaatccacttgcactccataacgctcctcatactaggcctactatccaacacactaaccatataccaatgatggcgcgatgtaacacgagaaagcacataccatggccaccacacaccacctgtccaaaaaggccttcgaaacgggataatcctacttattacctcagaagcttttttcttcgcaggagttttctgagccatttaccactccagcctagcccctaccccccaattaggagggcactggccccctacagggatgaccccgctaaatcccgtacaaggcccactccta

SEQ ID NO: 96936 - DNA, 352 bp, Homo sapiens
ggcacgagcgctggcgacgtaaattatggctgaatcattcggtaccttcacgccgatggcgccaaaatattccttaggtgccgcttcctacacagcgggcgaggcctatattacggatcatatgtgtactcaaaaacctgaaacatcgctattaacctcctgattgcaactatagcaaccgccttcataggctatgtcctggcgtgaggccaaatattattctgaggggccacagttagtacgaacttactatccgacatcccatacattgggacagacctaagtcaacgaatctgaggaggctattcagtggacaggcccaccctcacacgattctttacctttcacttca

SEQ ID NO: 96937 - DNA, 360 bp, Homo sapiens
  misc_feature (1)...(360): n = a,t,c or g
ggcacgagccgagatctcgccattgcactccaacttgggcaacgagagtgaaactccatctcaaaaaaaaaaaaaaaaaaaaccccccgggggggggggcaaaaattggaatccatacccctcgggaaccccccccccgaaccccccaaaggggggggaataaagggaagaacccccccccctaaccaaaagggttttttaaaaaaaaaaagtgttttttgaagggccccgggtaaaaaaaaatctgggggggaaaggaaaaaaaaaaagggggttccctgcccggtaaaaaaacccggtttttaaagcaaaggggaaagggaggaattttggcccccaagcttttttttttaaaaaaan

SEQ ID NO: 96938 - DNA, 368 bp, Homo sapiens
ggcacgagttcttcttcttctccttcttcttcttcttcctcttcttcttcttcttcctcttcctcttcttcctcctcttcctcctcttcttcttcttcttcctcctcttcttcttctttttttttggctaatggaaggaggcagccttctgggtccatagggacttttccaggcttatattcgaatttttgccaggcttatattggaattccttggggggaatagccacaaagtttctgttctgtggcctcttggccagccggggacttgatggagatcctgttaactgtgggagttcagcaacatctcccttcaccaagggttcccctggggactatgtccgaccagggttcaaaagcccaaaacag

SEQ ID NO: 96939 - DNA, 374 bp, Homo sapiens
ggcacgagggggaggctactcaccacacagggccaccctcacacgaaccgttacctttcactcgatcttgcccttcattattgcaggcctagcagcaatccaccttctattcttgcacgaaacgggagcttacacccccctatgaatcacctcccattccgagaaaaccaccttccacccttactacacaatgaaagacgccctcggcgtacttctcttccctctctccttaacgacattaacactatgctcaccaaacctcctaggcgaaccacacgattataccctaaccaaccccttaaacacccgtccccacataaagcccgaatgagattgcctattcgcctacacaaatatgcgatccggacctaaca

SEQ ID NO: 96940 - DNA, 266 bp, Homo sapiens
  misc_feature (1)...(266): n = a,t,c or g
ctaggactggtagaacatttcctaacactcacaacaaaactaactagttctaacatctcggacgctcaagaaatacaatccgtgtgaaatattctgaccgccatcatactaaacctcatggtccttccatccctacgcatgctttacataacaaacgaggtcttcgatccctcccttaccatcaaatccattgggcaccaatggtactgagcctacgagtacaccgacttcggaggactaatcttcaactgctacatacttccccn

SEQ ID NO: 96941 - DNA, 362 bp, Homo sapiens
ggcacgaggttaaataatatatgatgttcctgtatggatttggaacatgttatctttccttaattcatgagtatctcttcttatggtaatattcatgaagaaacagacttgttaaaaaaaaaaaccatgaataatttcatttattatgaaaggggtgacagatttgattgattacagcacgggaaaccagcaaaataattcattgaattctatttttattaaagcaaaaaatatatgtactttttggtttctctaattagggatcctcaattcctgagttagcacattctgatgcttaccagactaaagaaatatgctccagtggaaaggtatataaatatttgcaatgttgggagaaatgg

SEQ ID NO: 96942 - DNA, 365 bp, Homo sapiens
ggcacgagacagaagtcacatgtatcatatccaggaaaaaagcttttcactgccagtgttcagctccaaccatccttttctctgctgccatcctcatggaggcatatctccatatggagcccccatcacctgggtctctgcctacctataggaggatacagtgtgagacagaaataaaatcatggtatagataagggtttaagatacagaatatatacggttcaacaagaagacaactcagttaaaagatgactgaaggacttcaatcaacatctctccaaagacaatatacggtcggctgataagcacatgaaaagatgtccaacatcattagtcattaatataatgccaatcaaaccaccatg

SEQ ID NO: 96943 - DNA, 357 bp, Homo sapiens
ggcacgagatcacctggggtcaggaattaaagaccagcctggttaacatggtgaaacgaagtctctactaaaaataccaaaaaaaaaaaaaaaaaaaaaattttccccggcttgggggaaaatccctgaatccccagttcctcaaaagggtaaaaaaaaaaaattttttaaatttgggagggggagggccaaaaacccaaaattgcccccttgccctccaccctggaaaaaaaacgaaaactccttttaaaaaaaataaaaaaaaaaaggggatttttggtttggggaaaaaactgcaaaaaaaatttcagggggggtgaaattggccaaggggcattaaacttctaacttgaagtg

SEQ ID NO: 96944 - DNA, 355 bp, Homo sapiens
ggcacgagaacccagcccatgacccctaacaggggccctctcagccctcctaatgacctgcggcctatccatgtgaattcacttacactccataacgcttctcatactaggcctactaaccaacacactaaccatataccaatgatggcgcgatgtaacaccagaaagcacattccaagggcaccacacaccacctgtccaaaaaggccttggatacgggataatcctatttattacctcagaagtttttttcttcgcaggatttttgtgagccttttaccactccagcctagcccctaccccccacttaggaggggactgtcccccaacaggcgtcaccccgcttaatgcccta

SEQ ID NO: 96945 - DNA, 369 bp, Homo sapiens
ggcacgagggaaatgatctgctgcagtgctctgagccctaggattcatctttcttttcaccgtaggtggcctgactggcattgtattagcaaactcatcactagacatcggactacacgacacgtactacgttggagctcacttccactatgtcctatcaataggagctggatttgccatcataggaggcttcattcactgatttcccctattctcaggctacaccctaaaccaaacctacgccaaaatccatttcactatcatattcatgggcgtaaatctaacttttttcccacaacactttctcggcctatccggaatgccccgacggtactcggactaccccgatgcatacaccacatgatacat

SEQ ID NO: 96946 - DNA, 376 bp, Homo sapiens
ggcacgaggcggacaacctgaagattatattcttatcctaccaagcttcggaataattttccatattgtaacttactactccggaaaaaaagaaccatttggatacatatgtatggtctgagctatgatatcaattgggttcctagggtttatcgcgtgagcacaccctatattttctgtaggaatagacgtaaacacacgagcatatttcacctccgctaccataatcatcgctatccccaccggcgtcaaagtttttagctgtcttgccacactccacggaagcaatatgaaatgatctgctgctgcgctctgagccctacgattcatctttctttttaccgttagtggtctgactggcattgtattatgcaac

SEQ ID NO: 96947 - DNA, 357 bp, Homo sapiens
ggcacgagcaacttcaaagaattaaaaagaaatggctttttacctaaataaccttttgttgctggtagtatagcttgtgctaatttttgtaatgtttaagtagtgaaataattctacatatcaggtcctttttatttagaacatcgacttcctaatatcatccgaataaatactctggacatagtaggtgaaagtattttgttaacaacttctttctggccaagcatggtggctcatgcctgtggtcccaacactttgggaggctgaggtggggagatcacttgaacctatggatttgagaccagcctgggcagcatggcaaaacactgtttctaaaaaaaaaaaccacggctgggc

SEQ ID NO: 96948 - DNA, 361 bp, Homo sapiens
  misc_feature (1)...(361): n = a,t,c or g
ggcacgaggtctctctgtccatctctggctttctctggctggctctctctttctccctgtctctgtctctgcctctctctctctctctctgtctgactctctcactgggggggggtgtatgtctaatgcctctctatctctctctctcttttccatccccccctacagtggggacaaggacatacattctaacccctaccagatgctcctgggcgacacctttgactctgaatccagggacaaaaagaaagccgatggagatatctttctgacagctctaggaacagaggcttcaagatcaagtttttggtgctaaagtagcagaggtaccacaacatctagtgcttggtggtagctaacn

SEQ ID NO: 96949 - DNA, 353 bp, Homo sapiens
ggcacgagccaggaggcagaggttgcggtgagcaaagattgcaccactgcactccagcctgggcaacagtgagactttgtctcaaaacaaacaaacaaaaaaacaacaacaacctagagatgtccgtccaggctgaagagaatattccagagcagaggttgggacactatggcccatgggccaaatctgacctgcttgcacatgtgtttgtcaataaagttttactgaaacacagccatgcacatttgctgcatattgtctatggctgctggatttggctgttctctcatgctataaagaaatacctgaggctgggtaatatataaagaaaagaggtttaattggctcacagg

SEQ ID NO: 96950 - DNA, 354 bp, Homo sapiens
aaatgcccacaattaagaacgagggcctgaaaacaggattctttaagtactggcttgtggggggatgtggtgtctgtgtcccaatggaccctggggggctatggaaccagccagtgcttcaggaccagggtcacccccaggaggtcagctgcatgtctctctgcccagtgtttattcattcaataaacattcagttagcacttaccatattggcccatgtttatggcaacctttaattttttttttttttttgagacggagtttcacttttttccccaggctggagggcaatggggcgattttggttaattgaaacccccgcctgccaggttaaagcaattttcctgtttaaac

SEQ ID NO: 96951 - DNA, 364 bp, Homo sapiens
ggcacgaggaccgagacacaccagcatattttacctgcgctaacataatcatcgctatccccaccggcgtgaaagtatttaactgactcgccacactccacggaagcaatatgaaatgatctgctgcagtggtctgagccctaagatacatctttcttttcaccgtaagtggcctgactggcattgtattatcatactcatcactagacattgtactacacgacacggactacgttgtagctcacttccactatgtgctatcaataagagctgtatttgccatcataggaggcttcattcactgatttcccctattctcaggctgcaccctaaaccaaacctacgccgaaatccatttcactat

SEQ ID NO: 96952 - DNA, 360 bp, Homo sapiens
ggcacgaggaaacctatatcccaaaggaccagaagtattcattcctgcatgactcccagacctccttctgcttctcaaactctattccgacaccctccaacatggaggaaacgcaacagaaatccgtgagtggatgccgtctcccctaggcggggatgggggagacctgtggtcagggctcccgggcagcacagccactgccgagccttcccctgcagaatctaaagctgctccgcatctccctgctgctcatcgaggcgtggctggagcccgagcgggtcctcaagagtatgttcgccaacaacctggggtatgacacctcggacagcgatgactatcacctcctaaaggacctagagg

SEQ ID NO: 96953 - DNA, 350 bp, Homo sapiens
ggcacgagcaaaattagttgactaattaaataaattaagcaaaatgagaggcccggtgtagtggtgtgtacctgtagtcccagctactcagggaagacagctgcaggtttatcacttgagtccaggagttcaaggttacagtgagctatgatcacaccactggactccagcctgggcaatggactgagaccctctctccacaaaagtatatacaaataatgaaaacacaaaatgaaataatctgtctggtctgtgccatcccagggtataaggtgagagtgatctgtctgtgaccactgtcatgcgatttacagatgcagctgaattgcgctgcgaggacaggtagactt

SEQ ID NO: 96954 - DNA, 345 bp, Homo sapiens
ggcacgaggcctgtagctctcttccttttgtttctcacccttcagaaacatatttttcagtagctccaggtagatgagccttttttttttttttttaaaaacccatattaagggggggggggggattttaaaaacccaccccggggggttttttgaatggctggggccgggggttttgttcaactaaccattggcccgcgggaatggagggggcttttttttttttttggggagcggtttttggggggggggggggcgggctttcctgggggggcccccaagggggggcaaggggccgggcccccggggggggggaaaacccccggggaaggggcggcccccccc

SEQ ID NO: 96955 - DNA, 320 bp, Homo sapiens
  misc_feature (1)...(320): n = a,t,c or g
ggcacgaggaatgtttggcacatactctctgcttttttaacttgatgtcatgaaggactacagttattttgcacagaatgttttccattgtcacagctatttagtatttattgagcagccaatatgttattgggtactatatatatgtatgtatacacacacacacacatatgtatatacacacacacagacataggacatttatatgtgtgtgtgtgtgtgtgtgtatatatatatatanaggnatatgtgtatatatctcatttaatccttaccataaccctgtgagcagatggacactgctcctattttatatctga

SEQ ID NO: 96956 - DNA, 474 bp, Homo sapiens
ggtacgagcttctactcctcaatggacccattctaaacgcaagggcattcctaatacttaccgagcgaaaaattctaggctatatacaactacacaaaggccccaacgctgtaagcccatacgggctactacaacccttcgctgacgccataaaactgttcaccaaagagcccctaaaacccgccacatctaccatcaccctctacatcaccgccccgaccttagctctcaccatcgatcttctactatgaacccgcctccccatacccaaccccctggacaacctaaacctagggctactatttattctagccacctctagcctacccgtttactcaatcctctgatcagggtgagcatgaaactcaaactacgccctgatcggcgcactgcgagcagtagcccaaacaatctgataagaagtcacgcctaccatcattctactatcacattactataagtggctacgtaacg

SEQ ID NO: 96957 - DNA, 348 bp, Homo sapiens
  misc_feature (1)...(348): n = a,t,c or g
ggcacgagggctacaagacgctactttccctatcatagaagagcttatcacctttcatgatcacgccctcataatcattgtccttatatgcttcctaggcctgtatgcccttttcctaacactcacaacaaaactaactaatactaacatctcacacgctcaggaaatagaaaccgtctgaactatcctgcccgccatcatcctagtcctcatagcccttccatccctacgcatgctttacataacagacgaggtcaacgatccctcccttaccatcaaatcaattggccaccaatggtactgaacctaccagtacaccgactacgggggactaatcttcaactcctn

SEQ ID NO: 96958 - DNA, 363 bp, Homo sapiens
ggcacgaggagagctagcaccatgagcttcacctgtttttttactttttttttttttttttaaaaaaaatggggttttgtgccccagcaaaaaaagggcgggggaagaatttcggttaatggaacccccattttcaaaggtaaagggaatttcccaccctaaccccccggggaagggggaacaaagggccccggccccaagcccaagtaaatttggatttttaaaaaaagggggggtttaatattttggcccaaacaattccccacccccggacccaaggggacccacccccctggccccccaaaagggggaaaataacgggggggaccccccagcccgggggggtttaattttaaaaggggg

SEQ ID NO: 96959 - DNA, 356 bp, Homo sapiens
  misc_feature (1)...(356): n = a,t,c or g
gaattccaccagttcctgaccatgctctgctgagctaaaggaaaagagtatattgaaactgttgctgaaaaaaaaaaaaaaaaaaaaaaagccccccccccaatttaaaaggccccttgaaaccccgggaaaaaaccccccttggcccttaaattcccccccccttcccaaaaggccccccccccggcccttttttgcccctgaaagggcccccccccccgggtttttccaaaaaaaaagaaaaaattccccccctttggccgaaaaggttttttttttacgggggggaagncttnnncccagggcccccttcccggccctaaccttttaaaaaacaagggccccaaattttaaaa

SEQ ID NO: 96960 - DNA, 374 bp, Homo sapiens
tttcttcactctctccatctctctctcagattgttgtatctgccagtcgaagacctgcgtctgtcttccctgcttttcaggcgccgggcttagagaagcctgacagagctgcatcttgaatttagactaaaagagccagtttttaaataatggggcattgttttgactcccataaaaattttcaatgtttattatactgttgaaagcatactatacattgtgtgtgtgtgtgtgtgtgtgcgtgtgtgtgtgtgtgtgtgtgtgaccactaaacaaaatccacattaaccattttacatgctctacagtcagggggaggagcaacccaatcttttttcccccattattaaactagaggccattttacacaactg

SEQ ID NO: 96961 - DNA, 427 bp, Homo sapiens
ctagttctagatcgcgagcggccagagcaacctaatatttcaaaaaaaaaaaaaaaaaaaaaaaaccccgggctttggggtttcctttttttcccccctttttttggggggcttgggggggaaaatcccctaaaaccaaaattttagggccccccggggccacttttaaaaactccttttttaaaaaaaacttttgggggggaaaaaaatcccaaaccctttttaaaaagggggcccccttggggtttttccccttttttaaaaaaaattaaagggggggggggggaagggtttttccctttttccccccctttttggggggcccgggggggccccttggcccaaaaaggtttcctttgcccaaaaaattcggggccccttggaaacacccgggaaattttttgtttttttaaaaaaaaaaaaaatg

SEQ ID NO: 96962 - DNA, 404 bp, Homo sapiens
  misc_feature (1)...(404): n = a,t,c or g
cctaggcacagatctaagcctcattattcgtgccgatctgggccagacaggcgaccttttaggcaacgaccacatatacaacgctatcgtcacagcccatgcatttgaaataatcttcttcatagaaatacccatcataatcagaggctttggcaactgactaattcccctaataatcggcgcccccgatatggcgtttccccgcataaacaacataagcttctgactcttacctccctctatcctactgctgctggcatctgctatagtggaggccggagcaggaacaagtggaacagactaccctcccttatcagggaactactcccaccctggagcctgcgtagacctaaccatcttatccttacacctagcaggagtctcctctatcttaggggccatan

SEQ ID NO: 96963 - DNA, 417 bp, Homo sapiens
cgcctttgtatgaatcgcccacattactcgagacgtttattatggctgaatcatccggtaccttcacgccaagggcgcccgaatattctttatgtgcctcttcctacacatcgggcgaggcctatattacggaacatttctttactcagaaacctgaaacatcggcattatcctcctgcttgcaactatagcaacagccttcataggctatgtcctcctgtgaggccaaatatcattctgaggggccacagaaattacaaacttactatccgccatcccatacattgggacagacctaattcaatgaatctgaggaggctactcagtagacagtcccaccctcacacgattctttacctttcacttcatcttacccttcattattgcaggcccaaacccactccaccttactacccg

SEQ ID NO: 96964 - DNA, 415 bp, Homo sapiens
  misc_feature (1)...(415): n = a,t,c or g
ctcgaactcctgacctcatgatccacccgcctcagcctcccaaagtgctgggataacaagcgtaagccaccgcacctggccaaaatcagagctttataaataggtaaaaatctatgtagaaaaaggaaaaaaagacattatgtaaacttacaaagaaaaaggaaaaaaaaagacattatgtagttttaaataagtagctaaatttggaagaacaaaagattttgctgataaggttaggatatttgaagatatcatgactatgaattggctgcccaaaattctggcataaatattatttaaagaaagttttcaaacctggagatcaatatttagagattttaaagactgtgttaatttaactaaattgaatttgcaagcatatgccccaaagagttttataatttaataaaatagn

SEQ ID NO: 96965 - DNA, 396 bp, Homo sapiens
tctcaacttagtattatacccacacccacccaagaacagggtttgaaaaaaaaaaaaaaaaaaaaaaaaaaaaaaaaaaaaaaaaaaaggggggggcccttttaaaaaaacccttggggggccccaattttccggggggggggaaaaaatttttttttttttttagggggggtttataaaaacccccgggggattttttgaaaaaacccttttttttgggggggggaaaatggggcaccccccccccaaaaaaattaaacccttagggaaaaaaaaaaattttttagggggaaggggggaaaaaacccccccttttctttggcgggaaaaaatttttctctcggggtttttttaaaaaaaattttccccccgggggccttttatatagccctcctt

SEQ ID NO: 96966 - DNA, 118 bp, Homo sapiens
gactcttacctccctctctcctactcctgctggcatatgctatactggttgccggagcaggaacaggatgaacagactaccctcctcttacagggaactactaaaaaacaaaagcacg

SEQ ID NO: 96967 - DNA, 418 bp, Homo sapiens
  misc_feature (1)...(418): n = a,t,c or g
atagtttggagttttgcatttaagtatttaatcagtctcgagttacttttagtataaggtgtaaggaagaagtctagnnncattccttttttttttttttctttttttttcggggggggggtacccccttcccccccccccttttttttgaggggggatcctttccccctttttttttttttggggggtttgaaaaaaatcaattttgggggggtgggggccttttttttggcttttttttttctggtttttgggctttgggtccctttttcccccccctttgggggggtcctttcctttcctnnaaaaaaaaaaaaaaataccctctcttttctctataaacttcattttatttgtgccttttttcttttcttgtattgttgtacggttttgctcctcccttcttctctttcttcct

SEQ ID NO: 96968 - DNA, 215 bp, Homo sapiens
cgaccgttgactattctctacaaaccacaaagacattggaacactatacctattattcggcgcatgagctggagtcctaagcacaggtctaagcctccttattcgagccgagctgggccagccaggcaaccttctatgtaacgaccacatctacaacgttatcgtcacagcccatgcatttgtaataatcttctaaaaaaaaaaaaaaaaggggg

SEQ ID NO: 96969 - DNA, 411 bp, Homo sapiens
tcgaccacgcgtacggttgagtattctgtactaaccactaagacattggaacactatacctattattcggcgcatgagctggagtcctacgatcagctctaagcctacttattcgagccgagctgggccagccgggcctccttctagggaacgaccacatctacaacgttatcgtcacaggccatgcatttgtaatgaacttgttcatagtgatacccatcatagtcggaggctctggcaactgactaggtcccctagaaatcggcgcccccgatatggcgtatccccgcataaacaacataggcttctgactcttacctccctctctcctactcctgctcgcatatgctatagtggaggccggagcaggaacaggttgaacagtctaccctcccttagcagggaactact

SEQ ID NO: 96970 - DNA, 421 bp, Homo sapiens
cggacgcgtgggcggacgcgtgggctctacaaaccacagagacattggaacactatacctattattcggcgcatgaactggagtcctaggcacagctctaagcctccttattcgagccgagctgggccagccaggcaaccttctaggtaacgaccacatgtacaacgttatcgtgacagcccatgcattggcaaaaatcttcttcatattagtacccatcataataggaggctttggcaacggactagttcccctaataatcggggcccccgatatggcgtttccccgcataagcaacataagcttgtgactgttacctccctctgtcctactcctgctggaatctgttatagcggaggccgaagcaggaacaggtagaacagtctaccctcccttagcagggacctactccaaccctgga

SEQ ID NO: 96971 - DNA, 410 bp, Homo sapiens
ccgtcatctactctaccatctttgcaggcacactcatcacagcgctaagctcgcactgattttttacctgagtaggcctagaaataaacatgctagcttttattccagttctaaccaaaaaaataaaccctcgttccacagaagctgccatcaagtatttcctcacgcaagcaaccgcatccataatccttctaatagctatcctcttcaacaatatactctccggacaatgaaccataaccaatactaccaatcaatactcatcattaataatcataatggctatagcaataaaactaggaatagccccctttcacttctgagtcccagaggttacccaaggcacccctctgacatccggcctgcttcttctcacatgacaaaaaaaaaaaaaggggggggcgttttta

SEQ ID NO: 96972 - DNA, 398 bp, Homo sapiens
ttgatttttcggtcaccctgaagtttatattcttatcctaccaggcttcggaataatctcccatattggagcttactactccggaaaaaaagaaccatttggatacttaggtatggcctgagctatgatatcaattggcttcctagggtttatcgcgtgagcacaccatatatttaccgtaggaatagacgtacacacacgagcatatttcacctccgctaccataatcatcgctatccccaccggcgtcaaagtatttaactgactcgccacactccacggaagcaatatgaaatgatctgctgcagcgctctgagccctaggattcatctttcttttcaccgtaggtggcctgactggcattgtattagcaaactcatcactagacatcgtactag

SEQ ID NO: 96973 - DNA, 514 bp, Homo sapiens
ctgggcaacacaggggagaccctatctctacagaaaaatgtttaaaaattagccaggtgtggtggcacatgcctgcggtcccagctactcaggaggctgaagtaggagcattgcttgaccccaggaggtcgaggctgcagtgagccgcgctcatgccacagctctccagcctgggcgacagggcaagacctgtctcaacaacaacaacaaaagtatccgttaagaattttttctgcaatcataaaatcataaaataaccagtatcaaagattttaaactgtaatttctatgatattcataaatataaaataaatattgttcaataaatatttattctaaagcactatgaaaagaactgtgggaaaagtaaaagatgagtcaaacgtgtacctcattcttataaaggacttactgtctggtaggtaataaactatgtaagccatgtacagcacaagttaaggcatgctaaattgcagaagacaggtgtagataatgtacttagggaggcaaaaag

SEQ ID NO: 96974 - DNA, 457 bp, Homo sapiens
  misc_feature (1)...(457): n = a,t,c or g
nattgaagntatagttaggctgngaaaanncnccggaaaaaccgggncgacccacgcgtccgcccacgcgtccgtgatcctacagggatttttatttaacaggggcccttcattcttctattgcgcacagggattttaagaataggaaaatagaaacattgaagaattacatgttttattacaaaatacatttattaagataaacactgaaagcttacaaaagccaaactaacaatagtaaaaattacttaataaagaatgtatcagccaggccaggtgcagtggctcaggcctgtaatcccaggacttttggaggccaacacagggtgcatcacctgaggtcaggagctggagacctgcctggccaatgtggtgaattcctgtctctacttnnnnaaaaaaaaaaatataaataaaaataaaaacacattttgggtgggccgggggggttcacccn

SEQ ID NO: 96975 - DNA, 420 bp, Homo sapiens
cctagcaggaattttttggtactagttgacaagctgattctaaaattcatatagaaatacagaggacctagaacagccaaaacaactttgaaaaagaagaaaaaagttgtaagacttacactacttatcttcaagtcttattataaaactatagtaatcacaatagggtggtatgggtttcaagacagacaagtagattgatggaacagaatagaaagtctggaatagattcattcacatatgtgataaacaaaatgtatatgtatacaatgaaatattataattcaatcataaaaaggaatgaaatactgatacgtgctacaacatggatgaacctttaaaacattaggctaattgaaaaaagccagtcacaaaagatcactatagagtggtctctatagaaatagaagataggttagt

SEQ ID NO: 96976 - DNA, 400 bp, Homo sapiens
  misc_feature (1)...(400): n = a,t,c or g
ttctcctcatactaggcctactaaccaacacacttttcatatacccatgatggggcgatgcaacacgagaaagcacataccagggccaccacacaccacctgttcaaaaaggccttcgatacgggataatcctatttattacctcacaagtttttttctttgcaggatttttctgagccttttaccactccagcctatcccctaccccccaactaggagggcactggcccccaacaggcatcaccccgctaaatcccctagaagccccactcctaaacacatccgtattactcgcatcaggagtatcaatcacctgagctcaccctagnctaatagaaaacaacccaaacccaatatttcgagccctgcttataacaaatatactggggctctattttag

SEQ ID NO: 96977 - DNA, 407 bp, Homo sapiens
cccacgcgtccgactagttctagatcgcgagcggccgccctttttttttttttttttttttccccaagggaaaattttttatttcccgggggggtgggcctttctcacccccaaaaatttaaaaaaattggggaaagggtaaaagttttttccctcccccccaaagggagcccaaaaaaaggggggtcccaaaaaacccttccctttctttttacccctttgggggtaaacccccccttgggccccccccgaaattggttcccccatcctcttaaccgggaaaaaaagcctttttttttttttaaacccccccccctggtttcttaacccccttggggggggggttatcccccctgaagggggggtatcttttggccccacattttgtccccacggaaggccccctg

SEQ ID NO: 96978 - DNA, 414 bp, Homo sapiens
  misc_feature (1)...(414): n = a,t,c or g
cccacgcgtncgcccacgcgtccgcttcaactccaagaacaaggactttgaattcagcatttagaaaatatcagccacacagtatagttttgtgaatagtgataatgaggaccaatcttaaaaatgattattttcaagcatatgtaactcaaccttaataataacaataatggtaaaaatcatttattgaacacctactcatgcacctaattggaagaaaaaaaaaaaaaaaaaaaaaaaaaaaaaaaaaaaaaaaaaaaaaaaaaaaaaaaaaaaaaaaaaaaaaaaannnnggggggggggttttttaaaaaaatctcgggggggccccataatccccgggggggaaaaaaaatttttttttttttttgggggggggataaaaaaacccttgtggggtttttggaaaaaact

SEQ ID NO: 96979 - DNA, 426 bp, Homo sapiens
tgtttatttacttaacttttagagacagggtctctgtcgcagtggcacgatcttaacctatgcctcccgggttcaagagattctcgtgcctcggcctcccgagtggctgggactacaggcattcaccaccacacctggcaacatgctgagactctctaccaaaaaaaaaaaaattacctgaccatggggaggcatgcctatagccctggctactcgggaccctgaggggggaggatcgcttgaacttggaaggtcaatgctgccgcggggagccgggagctgtgacccatgacccatggttgggccactccaccctgggggacaaagcaagaccctgcctcaaaaaaaaaaaaaaaaaggcctcacccggtggggaaacataaattttacccaggaaatttttttaaaaatttttatactatcaaa

SEQ ID NO: 96980 - DNA, 398 bp, Homo sapiens
actattctctacaaaccacaaagacattggaacactatacctattattcggcgcaagagctggagtccgaggcacagctctaagcctccttattcgagccgagctgggccagccaggcaaccttctagggaacgaccacatctacaacgttatcgtcacagcccatgcatttgtaataaacttcttcatagtaatacccatcataatcggaggctttggcaactgactagttcccctaataatcggcgcccccgatatggcgtttccccgcataaacaacataagcttctgactcttacctccctctctcctactcctggtcgcatatgctatagtggaggccggagcaggaacagggtgaacagtctaccctcccttagcagggaactactcccacc

SEQ ID NO: 96981 - DNA, 395 bp, Homo sapiens
agaccagaaagacattggaacactatacctattattcggagcatgagctggagtcctaggcacagctgtaagcctgcttattggagccgagctgggccatccaggctaccttataggtaacgaccacgtctacaacgttatcgtcacagcccatgcatttgtaataatcttcttcatagtaatacccatcataatcggaggctttggcaactgactagttcccctaataatcggcgcccccgatatggcgtttccccgcataaacaacataagctggtgactcttacctccctctctcctactcctgctcgcatgtgctatagtggaggccggagcaagaacaggttgaacagtctaccctcccttagcagggaactactcccaccctggagcct

SEQ ID NO: 96982 - DNA, 394 bp, Homo sapiens
aaaaaaaagaaaaaagaaaattaacttaagtaatgtttctgagcctgtcctcagggcacttccggtctaatgaagaacagctgtgagaacacaccacatgctgctgtttgtggcctgttctaggagtatggtcagggaggcgaggtgccccaaaaccctggagaagcaggggaggctccctggggaccagcagaggccaggcttgaaatggctcctaaagaaagtgtgggagtggtcagggaaacctctgtgggtggggtagattcagacggagggctccttggtgtctgaggtatggcaggtgtgggtgagcacacgtgggaaggaggatgggaaggggaagggacagaggtcagggaagaggtgacgaaggtgagattaggagggtagccac

SEQ ID NO: 96983 - DNA, 415 bp, Homo sapiens
  misc_feature (1)...(415): n = a,t,c or g
aagtaagggcagaattttaggagaaccagagtcacccgctggctctactgagattgttacacccagaatccttttgtgtttttttgtggttttttttttttgggggggaagttttgttttgcccccaaggggggagggtgggggggaattttgggttaatggaaactttggttcccggggtaaaaaattttttctggtttaacccccccaagaagcgggattaaagggcccccccccccttgcccacttattggttggttgttaaaaaaaaaaggggtttcccaatgtgggccaggtggggttcaaactccggaacctaaaggaattaacccccttgggcctccaaaggggcgggaataacggggggaaccacccgggccgggccacaaaattctttggaaaacccaaccttttn

SEQ ID NO: 96984 - DNA, 418 bp, Homo sapiens
  misc_feature (1)...(418): n = a,t,c or g
gtactatttatactaaaagagtaagaccctcatcaatagatggagacatacagaaatagtcagaccacatctacaaaatgccagtatcaggcggcggcttcgaagccaaagtgatgttnaaaaaaaaaaaaaaaaaaaaaaaaaaaaaaaaaaaaaaagggggggggccttttaaaaaaatccttggggggcccaaatttaacgggggggggaaaaataaattttttttttttaaggggggggaaaaaaaaaccacctggggatttttggaaaaaaaccttttttttgggggggggaattttgggcccacccccccaaaaaaatttaagggtttaagggaaaaaaaaaatttttaaggggtaaagggggaaaaaaaacctaaatttcttggggtttaaaaattttttttaaaaaaaaa

SEQ ID NO: 96985 - DNA, 391 bp, Homo sapiens
  misc_feature (1)...(391): n = a,t,c or g
ggattacaggcatgagccaccacgcctggccttctttcacttgtgatattaggttggaaatttgagatctttctaacttattaatggggacatttagtgctataaatttccctcttaacactgccttagctgtgtcccagagattctggtatgttgtatctttgttcccattagtttaaaagaagtccttatagcaagagaatcccatagtcttggtccaaaagctccttcagttgatggacaacttcagcaaaatttcagagtacacaatgtgcaggaattagtagtattcctatacgccaatggccaagctgaaagccaaatcaggaagacagtcccattgagaattgcaaannnnanaaaaaaaaaaaaataaaaaaaaaaaaaaatc

SEQ ID NO: 96986 - DNA, 432 bp, Homo sapiens
tttgacgtcatccctctacacactgaactgaccagcttagaaatgaagctaaaacacacctcagtttaaaaaaaaaaaaaaaaaaaagcttcgggaaggttaaaaaaacctaatctcataaaccccaccagggttcccaggggtttccccataatttactttaaaaggttttcccgtaagcattgggcacaaaccccatggggatttcacaggggtatcctcctggggcattgaggccctggccattgccacaaaaattcaggttttaaaagccctcatcagggtctacagccaaaaaaaaacacccgtttcttttcctgggttgggggctttttaattcctaaggtttatcaattttccagggcagaaaggtttgggcataacttcaattggacccatttaaagccttttttttttctttttggagggtaa

SEQ ID NO: 96987 - DNA, 409 bp, Homo sapiens
cacaaagacataggaacactatacctattattctgtgcaagaactggaatcctaggcacagctctaagcctccttattcgagccgagctgggccagccaggcaaccttctaggaaacgaccacatctacaacggtatcggcacaacccaagcattggtaagaatcttattcatagtaatacccatcataaccggaggctttggcaactgactaattcccctaataatcggcgcccccaatatggcggttccccgcataaacaacataagcttctgactatgacctccctctctcctactcctggtcgcatatggtatagtggaggccggagcaagaacaggttgaacaggctaccctcccttagcagggaactactcccaccctggagcctgcgtagacctaaccatgt

SEQ ID NO: 96988 - DNA, 396 bp, Homo sapiens
acaaagacataggaacactatacctatcattcctttcatgagctggagtcctaggggcagctctaaggctccttattcgagccaagctgggccagccacgcaaccttctacgaaacgaccacatctacaacgttatcgtgacagcccatgcatttgtaataatcttcttcatagtaatacccatcataatcggaggctttggcaactgactacttaccctaataatcggcgcccccgatatggcgcttccccgcataaacaacataagcttttgactcttacctccctctctcctactcctgctcgcatatggtatagtggaggccggagcaagaacaggttgaacagcctaccctcccttatcagggaactactcccaccctggagcctccgtaa

SEQ ID NO: 96989 - DNA, 398 bp, Homo sapiens
gtcacacgctccccacactcaacgcttaccatggggttttctcactaaaagtcaaattctcacacagaagtacaggctgggcaggaacaaaagtcatttttcagaagtaagcacaaggctggcagagctgggtcagacccagcaccatatgtattagccggatgcctgtgcagaagtatctcatcttttcttttcttttttttttccctttttttcttttttttcttcaaaagagacggggtctaacaaggctactcaagcgggtctaatactccgggggtaaagcaatcctcctgcctgggcctcccaaagtactgggattacaggcgggagccactgcacccagcctaaaactaatctttggggaaaaagtttcctcatctgcatgacaagaaatg

SEQ ID NO: 96990 - DNA, 398 bp, Homo sapiens
aaaccccctgccataacccaataccaaacgcccctctttgtctgatccgtcctaatcacagcagtcctacttgtactatctctcccaggcctaggtgctgggatcactatactactaacagaccgcagcctcaacgccaccttcttcgaccccgccggaggaggagaccccattctataccaacacctattctgattttttggccaccctgaggcttatattcttatcctaccaggcttcggaataatctcccatattgaaacttactactccggaaaaaaagaaccatttggatacatagggatgggctgagctatgatatcaatcggcttgctagggtttatcgcgtgagcacaccatatatttacaggatgaatagacgtggacacgcgatcatg

SEQ ID NO: 96991 - DNA, 407 bp, Homo sapiens
aagattatccagaatggtgcaaatttatcctctaatttactggctttcttcagctgggtctaatacggggagtctgccttttttattgcctcgtttctttatttgcacagctctatttgattctttttcttcttttcttttctttttttttttttttttggggggagggggctccctctttcccccgggggggggggctgggggggcaaaatgggttactggcgccccagacttccggttttaggggaatccttttggtttacccccccaaaggggggggaacaacggggggccccccattgccctggaggggttttttttttttaatttttttggaaaaaaggggtttacacatttggcgccggggggattaaataagggggtttaatcttaaacacaggggggct

SEQ ID NO: 96992 - DNA, 412 bp, Homo sapiens
tgggaccctgcctctaaaaaaaataaaaaaattaattggacgtgggggcccttgcctgtggccccaggttactggggaggatgaggtgagaaaattgcttgaccccaggagttcaagggtgcattgagcttgaacacactgcactgtactttatcctggatgacagagggggaccctgcctctaaaaaaaaaaaaaaaaagggggggccgttttgaagaagccctgggggggcccggttttccccggggaggcaacgcattagttttttccttaaaggggggcgatttataacgtccccttggaatttttggaagggacccttatttttggggggggacaaatggggccaacccccctccagagtttgggggctttgggggaaggaaaaaatttttaaggggatggggggag

SEQ ID NO: 96993 - DNA, 433 bp, Homo sapiens
cgttcagagacaacccctgcattctttggaaacagggaatgcctctctgaaggtatcactgccctgtttacattgcttctccagttccttaacagcatatgaagtatagttctaattcaaaattttagcatcacatacattagaacttttaattttggggaattggatggtcaaaagaaactttattaaatgcttttatgaaagattggctagaatggcttcatagtataaaaatatgagcttttttaaacatagaaaagcaattacaaatttaaatatggaaatatgaaatacgaaaataccaaaaaaaattggtagagatgggggtctcgctgtgttgcccaggctggtcttgcactcctgggctccaagcagtcctcccacctcagccttccaatgtgctgggattacaggcgtgagccaccacacccag

SEQ ID NO: 96994 - DNA, 430 bp, Homo sapiens
tgtgaacccgggaggcagagcttgcagggagctgatattgcgccactgcacttcagcctgggccacagaggagactccatctccttgaaaaagaaacgaatttaaggtaaaaccttcttttttgtaatgagggccccccccacagcccttttttttttgggggaagagggggggaccaaaccccttttttttttttttttctgaaaaaagggatgttttttggagacaaaaaaaggggggtttaaaaaatttttgggggccccttctccttaaaaaaaattgttaaaaaacttgggcccccacggtaaaaaaaagccgtttgccccccccccgttttttttttttttgttttggggaaccttactggttggggaaaagaccccttttttttttaagcttctttggaaaccctttctttttttttggcggg

SEQ ID NO: 96995 - DNA, 414 bp, Homo sapiens
  misc_feature (1)...(414): n = a,t,c or g
cccacgcgtccggactagttctagtaagcctctacctgcacgacaacacatannaaaaaaaaaaaaaaaaaaaaaaaaaaaaaaaaaaaaaaaaaaaaaaaaaaaaanngggggggggcccttaaaaaaaaaccctgggggggcccaaaataaccggggggagaaaaaaaaaattttttttttaaaagggggggaaaaaaaaaccccccggggaattttggaaaaaaaacctttttttgggggggggaaatttggggccccccccccccaaaaaaataaaccctttagggaaaaaaaaaaattttaagggggaagggggggaaaaaaaccccaaattgggggggggggaaaaagtttcttaacggggtttaaaaaaaaaaaaaatacccccctgcgggggtggaggggnnnnnn

SEQ ID NO: 96996 - DNA, 540 bp, Homo sapiens
ccccccgtcgtcgactgcgttggcaaccaccttcgttcccctagacggaacgccttcacaggcgcatcccccccggccccccctttggaaacccttggttagacaccctcagaaccgccccggaatcccggggcgacccacgcggccggagggggcagcaaaccaacacggtttatgtatacatatttaacaaacctgcacgatgaggacatgttccctagaacttaaagtataattttaaagaaaaaggcaaacgtagtttacattaagtccataactaaaatggttacaaaactaagggataaatcctttttttaaatcgtttttaaggaccaatgtgaagaatcttttacgaccctaaacgtagacattagaaatcaccaaaatcttcttgattctttggaacagcatggcaaaggagatttactataaggggcaaatgcatatcattgtgaaaaatgcaataaaaaggtacgggctgtccagctttgtttaattttgattacatttaatggatttagaaaaaataggtttttttgg

SEQ ID NO: 96997 - DNA, 403 bp, Homo sapiens
ctccttacacctaggaggtggatcctgtatcgtaggggccatctatttcatcacaacaattatcaatataaaaccggctgggataacccaataccaaacgcccctcttcgtgtgatccggcctaatcacaggaatactacttctcctatctctcccagtcctagctgctggcatcactatactactaacagaccggaacctcttcaccaccttcttgaaccccggcggaggaggagaccccattctataccaacacctattgtgactgttgagtcgccctgaagtttatattcttatcctaccaggcttcggaataatctcccatattggaacttactactccggaaaaaaagaagcatttgtatacataggtgtggtctgagctattatatcaattggctgc

SEQ ID NO: 96998 - DNA, 381 bp, Homo sapiens
aaaaaaagaaaactacaggccagtatctttgaacagagatgcaaaatccttaaaccaaattcaactacatatttaaaagatcattcattgtaatcaagtgggattcatcccagggatgcaaggatggttcaacatactctgatatggtttgtgtttgtgtccctgcccaaatcttacatttaattgtaatccccactgttggaggaggggcctggtggaacgtgattggatcataggagtggagttctcatgaatggtttaaccccatctccccttgctactatatagttagtgagttctcatgagatctgattgtttaaacctccctgctctctgtctctctcctactctggccatgtgtgttcccctgttgccttctgc

SEQ ID NO: 96999 - DNA, 405 bp, Homo sapiens
cccctgtctttagatttacagtccaatgcttcactcagccattttacctcacccccaaaaaaaaaaaaaaaaaaaaaaaaaaaaaaaaaaaaaaaaaaaaaaaaaaaaaaaagggggggggcccttttaaaaaaaccccttggggggcccaaattttcccggggggaaaaaaatttttttttttttttttaggggggctttaaaaaaccccctgggggatttttggaaaaaaccctttttttggggggggggcattttggccccccccccccccaaaaattttaccccttgggggaaaaaaaaaatttttaaggggaaaagggggaaaaaccccctttttttgttgggtggggaaaatttttttttccgggtttttataaaaaaaaattttccccccggggggtt

SEQ ID NO: 97000 - DNA, 402 bp, Homo sapiens
attcatacaggcttgagtgacaacttgaggacaaggcggcgcctccacaagatttcacacaacaacttcggtggccagagaagcagcaccgcatggtgtggcctgacaaggaggacatgcacaagcaattggttgaagcttcagagacattgaaatcccaagccaaagaactgtgagatgcccatcagcagcaaaagctggccctgcaggagttcttggagttcaatgagctcatggcagagctctactcccacaatcacaaggtgtgggacaaggaggaggagatggaagtagccatgcacaaagctgacatgatgtggcaggagatctgaagatccaagaagctcacaaagaggatgctgtttacccagatgcggaggatcacgcctgtaatcccatcac

SEQ ID NO: 97001 - DNA, 398 bp, Homo sapiens
ctgttattccagctactgaggaggctgagacaggaaaatcacttgaacctggaaggccgaagttgcagtgagctgaaaatgcaccactggactccaccctgggggacagagtgagactgtctctaactaaagaaaaaacagagtgcctacttgcccaataataccattaagaaattaacaggaagccgtacaatagaagatatttgcactgaatataacaaataaagatcctgtgtctataatatataaagaactcttcccgaccagccatttgaaaaattgactaaaacacaggacaccttattaaaatggagatctaaatgaactaaaggcctaaatgaacaagtactctatatcattaattgtcaagcaaatgccagagaaaaatataccacttt

SEQ ID NO: 97002 - DNA, 370 bp, Homo sapiens
aatacaaatgactaagaggtgacaagtagaaaactgtaacaaaaatgagctgggagcagtggcttacgcttgtaatcccagcactttggaaggctgaagccagagggtctcgaactcctgaccttgtgatccacccgccttggcctcccaaagtgctgggaattcaagcatgagtcaccacacccggccaagacataacaattcataatgggaatacacttaaaaacagagcatcaaaatatgggagacaaaaactgataggatgacaacaagaaatagatgaatctaccattatagctggagacgtccacatttctttaacagatgtggacacattccgcaggcaaaaaatcagactatagtggaactc

SEQ ID NO: 97003 - DNA, 405 bp, Homo sapiens
tgaaagtctaaaagactccttgatccataagcttcagaatgggtgttgtgttagcaagcatgaaaacaacattcatcttgtgcctctccatctgagctcttctatgaccaggtgccttgttgatgagcagtaatattttgaaagaaatcttttttcctgagcagtgggtctcaacaatgggcttaaaatgttcattaagccatgctgtaaacagatgtgctatcatccaggctttgatgttccttatacagagtacaggcacaggcagagtagatttagtataattcttaagggcccttggattttcagaatggtaaatgaacattggtgtgaacttaaggtcaccagctgcattagcccctaacaagagagtcagcctgtcctttgaagctttgaagctaggct

SEQ ID NO: 97004 - DNA, 407 bp, Homo sapiens
  misc_feature (1)...(407): n = a,t,c or g
ttatttcagattttacatggcattcccctcatacactgttttattncttcttttttttttttttttttttttggaaaaaaaaattttttcccccggggggggggggggggggaaaatttcctttttttgaaacccccccctccaaggttaaaaaaattttttttgtttaccccccttaaaagggggaattaaggggccggccccccaaccccgggaaattttgggtttttaaaaaaaaaaagggtttccccttgggggacggggttttttgaaacccctgcccttgggggaaccccccccctcccccccccaaaggggggggtttaaggggggggccccccccccccgcccttttttttttttttaaggatttttaaaaacttttggaaagggggtttttttaaagn

SEQ ID NO: 97005 - DNA, 404 bp, Homo sapiens
cacgcgtacgatcttagcctgatccgtcctaataacaggagccctacttctcctatctatgccagtcctaggtgccgggataactatactactaacagaccggaacctcaaaaccaccttctttgaccccgccggaggaggagaccccattctataccaacacctattatgaattttcggccaccctgaagataatattcttatcctaccaggctttggaataggctcccatattgtaacttactactccggaaaaaaagaaccatttggatacataggtatggcctgagctatgaaacccataggcttcctaggggatatcgcgggagcacaccatgtatttaccggatgaatagacgtaaacacacgatcctatttcacctccgataccataaatatgggtg

SEQ ID NO: 97006 - DNA, 469 bp, Homo sapiens
  misc_feature (1)...(469): n = a,t,c or g
ctttgctaccgtttcgtctcgcaaccgcnccggaanttcagggacgacccacgcgtccgccttattcgaccccgccggaggatgagacttcattttataccaacacctattctgaattttcggggaccctgaagtttatattcttatcctaccaggcttcagaataatctcccatattgtaactgactactccggaaaaaaagaaccatttggatacataggtatggcctgagctatgagatcaattggctttctagggtttatcgggtgagcacaccatatatttacagtatgaatagacgtagacacacgagcatattttacctccgctaccataatcattgctatccccaccggcgtcaaagtatttacctgactcgccacactccacggaagcaatatgaaatgatctgctgcagtgctctgagccctaagattcatctttcttttcaccgtaggtggcctgacg

SEQ ID NO: 97007 - DNA, 419 bp, Homo sapiens
ttctctactaaccacaaagacattggaacactatacctattattcggcgcatgagctggagtcctaggcacaggtctaagcctccttattcgagccgagctgggccagccaggcaaccttctaggtaacgaccacatctacaacggtatcggcacagcccatgcatttgtaataatcttcttcatagtaatacccatcataatcggaggctttggcaactgactagatcccctaataatcggggcccccgatatggcgtttccccgcataaacaacataagcttctgactattacctccctctctcctactcctgctcgcatctgctataggggaggccggagcaggaacaggttgaacagtctaccctcccttaggagggaactactcccaccctggagcctccgtagacctaaccat

SEQ ID NO: 97008 - DNA, 396 bp, Homo sapiens
tataaaacaaacttctttaagtgggacatgagtttattttttaactacctttcatacataacattctttataatggcattatttagcatctgagtgccaatagtttaccttctgttgggtgaagaaaaagccacagctttttttttttttttttttgggttcccaaacacaaaaaaggggggggggggtaaaacaaaggcggcctttttattgggccagttgggggtttgggggggggatggacttccccccccctcccttaaataaaccccctggggccctggggcagggaatttttaaaaaatttttttccccacttttttcccggggggaaaaaaggcaaatttgggaccttagggcaaaaaaattggggaaaaagggggggccgagtttttt

SEQ ID NO: 97009 - DNA, 395 bp, Homo sapiens
  misc_feature (1)...(395): n = a,t,c or g
gcagaggttgcagagagatgagattgtgccattgctcttcagcctgggcaatagcgggagtctcagaggagaaaaaaaaaaagaaaaagaattggcagtgatgccttcttggcatctgttcctacttggatctttggttaccaggactctttaaatggctttctcaaataggtaggattgtggagttacagctacttgaactgaaacagtacctcaggggaataaccaagcaaacactgaaaatactgcattgatattgctacaacatgggatttttttaaaatcttttttctgcttttccatttaaatatgggtaacttgcccattatgggaattaggggattactgcatcttaattaattatataaaaggctctgatgacactgtctttcacn

SEQ ID NO: 97010 - DNA, 393 bp, Homo sapiens
cgcacgcgtacgataaaaacccctgccataacccaataccaaacgcccctcttcgtcggatgcgccctaatcacagcagccctacttctcctatctctcccagtcctagctgctggcatcactatactactaacaaaccgctacctcaacaccaccttctttgaccccgtcggaggaggagaccccattttataccaacacctattctgactttttggttaccctggagactatattgttatcctaccaggcttcggaataatctcccatatggtagcttactactccggaaaaaaagaaccatttggatacatacgtatggactgagctatgatatcaattgacttcctacggattatcgtgtgagcacaccatatattcacagtagagaat

SEQ ID NO: 97011 - DNA, 395 bp, Homo sapiens
atttaagattcctttatgccttcatgtggcttgatagtttattccgttttgtaagggaataatattctgttgtatagatgaagcatttgtttatctattctcctactgaaggacacctttgttgttttcagtttttgatgattatcaaagaactgctataaaccgtcgtatgtaggttttgtgtgtcagtgtaagtttttcaatcagttgagtaaattcctggaagtgaaattgctttattgtatggtaaaactatgtttagctttagtgcgacaaggacaaactgttttcaaagtggctgtgccatttagccttctcactagcaagggattcattataaaatcataataatagtccacattcagtattctcaattgagatattaatgtacttgg

SEQ ID NO: 97012 - DNA, 435 bp, Homo sapiens
tcttatcctaccaggcttcggaataatctcccatattgtaacttactactccggaaaaaaagaaccatttggatacatagggatgggctgagctatgatatcaattggcttcctagggtttatcgtgtgagcacaccatatatttacagttggaatagacgtatacacacgagcatatttcacctccgctaccataataatcgctatccccaccggcgtcaaagtatttaggtgactcgccacactccacggaagcaatatgaaatgatctgctgcagtgctctgagccctaagattcatctttcttttcaccgtaggtggcctgactggcattgtattagcaaactcatgagtagacatcgtactacacgacacgtactacgttggagctcacttgcactatgtcctatcaataagagctgtatttgccatcat

SEQ ID NO: 97013 - DNA, 436 bp, Homo sapiens
cctcaacaccaccttcttcgaccccgccggaggaggagaccccattctataccaacacctattctgatttttcggtcaccctgaagtttatattcttatcctaccaggcttcggaataatctcccatattgtaacttactactccggaaaaaaagaaccatttggatacataggtatgggctgagctatgatatcaattggcttcctagggtttatcgtgtgagcacaccatatatttacagtaggaatagacgtagacacacgagcatatttcacctccgctaccataatcatcgctatccccaccggcgtcaaagtatttagctgactcgccacactccacggaagcaatatgaaatgatctgctgcagtgctctgagccctaagattcatctttcttttcaccgtaggtggcctgactggcattgtattatca

SEQ ID NO: 97014 - DNA, 409 bp, Homo sapiens
cccacgcgtccgcccacgcgtccggcttgcagtgagctgagatcgcgccactgcactccagcctgggtgacggagtgagactccgtctcaaaaaaaaaaaaaaaaaaaaaattttccccggcccggggggcacatgtttgtacccccacttttttgggaggccaaaggggaaaaaagttttgttttgccccttaggttaaagggcagggatgcaatctcggcccaaagaaccttcaacctaaaatttgcgggccacgggggttattgcttgttgcccaaactttttgggaggccagggcaggcaaacccttgggggtcaggatttcaaaaccaccctgcccaaaaggggaaatccccttttttactaaaaatcaaaaatttacccgggtttggggacgggtgcttgaat

SEQ ID NO: 97015 - DNA, 447 bp, Homo sapiens
  misc_feature (1)...(447): n = a,t,c or g
ctgcattccaccctgggtgacagagcgagactctgcctctnaaaaaaaaaaaaaaaaaaaaaaaangggggggggggggggccccccccttgggaaccccccattttttaaaagggggggggggggggaacccggggttttattttaaaaaccccccgccaaaaaaagaaaaaccccttttttttaaaaaaaaaaaaaaatttccggggccgggggggggggccttaaacccccccttttcggggggggggggggaaaaaaattttttaaccctagggggaaagagttgtaaggacccaaaacccccactttagataccaccggggggaaaaaaaaaaattttttttaaaaaaaaaaaaaaaaaccccggaccccggggattttttttttttgtgggggggaaaaccctgttaaaaaaacttttgggaaaaagaaattttttgtggg

SEQ ID NO: 97016 - DNA, 379 bp, Homo sapiens
ttctgttccattaatccatatatctattcatatgccagtaccacatagtcttgattgctgtggctttgtagttagttttgaaattagaaagtgggattcctccaactttgtatttttcaagattattttggctattcatcaggataaatgaatgggtgtagggcagtttaatggtatttcctaacatcctgccagggctaaattagagattggagagttttctttcacatgagacactgataattttttttttttttttgaaacggagtttcttttttgttgcccaggctggagggcaggggcgggatctcggttcactgcaacctccgcctttggggttaaaggaattttcccgcctcagcctccttagtagcgggag

SEQ ID NO: 97017 - DNA, 369 bp, Homo sapiens
  misc_feature (1)...(369): n = a,t,c or g
gtgatcccagctactcacgagactgactcatgaaaagcgcttgaacccacgaagcgaaggttgcaatgagctgagatcgcaccattgcactccagcctggtcggcagagtgagactccatctgaaaaaatgaacaaaaatttttctcatgtggtgggttctaagagggaaaaaaaattcttatttcttctgcattttgcggcatcataaatttttgattcagctataatttattcgaatgtaagatgtgagatagagattgaaatttatttaattcatttattagagtagtaggttatccatatgtctttggttgatcaatacattaaaattaaatgtcagttgagacagatcaaggttatatgacttn

SEQ ID NO: 97018 - DNA, 298 bp, Homo sapiens
atagactcctggccacaatgagaaagttacgcgagcacagctaaagccacggagcgagacatgtcggaccgaatgctgtcagcttcaggaatgccccgacggtactcggactaccccgacgcatacaccacatgaaacatcctatcatctgtaggctcattcatttctctagcagaaggaatattaataattttcatgatatgagaagccttcgcttctaagcgaaaagtcctaatagtagaagaaccctccataaacctggagtgactatatggatgcccccggctacgcgggcgct

SEQ ID NO: 97019 - DNA, 374 bp, Homo sapiens
  misc_feature (1)...(374): n = a,t,c or g
gaaatatttataacctgcaattttaaaataataaaacaataatgactgaaaaaaaacaatgaatcaggcattagaaattagaaaatgaacctaaacaaagtaaaaggggaaaataatcactataaaagctgaaatcaaacaacaacagcccaaaaaaaaaaaccaaaccaaaccagatttgctcatgaaagtacaatttatttgccaggaacagccaataatatagctaaatttctagccaaaaaaaaaaaaaaaaggttattccttaccattaaaaaacccccccttttgtcgggttttgaaattaaaaaattaaggcgaaaaacgttttttttaacttttgtcccaataaaaaactttttcttataaaaggn

SEQ ID NO: 97020 - DNA, 379 bp, Homo sapiens
ggaggctgaggcgggaggatcacttgagcctgggaggcagagtctgcagtgagccgagatcacgccactgcactccagtctgggcgaaagagtgagaccccgcctcactgtgtgttgtgggggagagatggaacaactaatttaccccttttttcgtgtcctttttatgttaatgcaaggtgatcattgaagcagcacagagttaaaaaaaaacaaagtcagagacagagacccagttaactctcagagcaacatcacaggtccactttttagaacaaaggccagatgtatttgtctgaaatcaagtaaaactgtggcacgtagttacactttaccattactggccaaccactaatgctcggactcatgggagttcaat

SEQ ID NO: 97021 - DNA, 375 bp, Homo sapiens
  misc_feature (1)...(375): n = a,t,c or g
gacacttaagacctacttgtgatatttaaatgatgcaataaaagacctattgatttggaaaaaaaaaaaaaaaaaaaaaaaaaaaaaaaaaaaaaaaaaaaaaaaaaaaaaaaaaaaaaggagggaaaaaaaaaaaaaaaaaaaaaaaaaaaaaaaaaaaaaaaaaaaaaaataaaaanngtggggggggggggggcggggnnnaaaaaatattatttttttaaatatattggggttgtttgtttttttttttttatgatggggagggaagaagaaanggtgtgttttttttaatttgtngttttaatttttaaaaagaaaaaaaatntttttttttttttttttgggggggnnatatatttaaaaaaaaaaaag

SEQ ID NO: 97022 - DNA, 378 bp, Homo sapiens
  misc_feature (1)...(378): n = a,t,c or g
atcaaagtacgtttgggtggttttcagtttgaggttattatgaatacatctgctgtgaacatttgtgtccagatttttgtttaaacatacccaatcacatggtatatgtactgtttaagaaaccgcctcactattgttttccagaatggctgtgtcattttgcattcccaccagcaatatgtgagagttccagtcactcttcatctttagcagcacttggtatattggtatttttttatcttagccagtctcataaatgtatagcagtgtgccattgtggtttcaatttgcattgccctagtggctaatgatgatgaacaactttttatgtgctcagttaccatccgtagatcctctttggtgaagtgtctcttgaan

SEQ ID NO: 97023 - DNA, 212 bp, Homo sapiens
ttttaatattaacccctcatgatggtttatatggtttgcaaacattttctcccaatccgtgggctgccttttcattttgttaatttttgttgttgttgtgcagaagctttttagtttgatatagttttacttgtttatcatacgtttcgacttaaggaagatgcatacataatatgtgctccttgtaaaaaaaaaaaaagtcgacgcggccg

SEQ ID NO: 97024 - DNA, 353 bp, Homo sapiens
ggaggtcaaggtcagcctgggcagtaaagtgagaccctatctcaataaaaagttagctgggcgtggtagctccagctacacaggaggatgaggcaggataatctcttgagcccaggagatcaaggctgaagtgagccatgttaatgttactacactccagcctgggcaagagtgagactctgtcaaaatcggtcagtcaatgagaaaagccttcatgacatctgtaatgacaaaaagtgacagaatatttgaattatcagtgtccctgagggcaaacagagaatgaaagggttagaaaacctatttaatgaaatattagatgaaaactatccaagtctagcaagagacctaaa

SEQ ID NO: 97025 - DNA, 394 bp, Homo sapiens
attttatacgcatttcaacatgtgttaagtttttatggaagttgactttttttttttcccttttttttttttttttttttttggaaaaaggaattttttttttcccccccgggggggggggggggggcccttttaaatttttgggcccccccccccccggggtaaagggaattttcccccccccccccccgggaaagggggaaaaaaggggccccccccccccccgggattttttttttttttttaaaaaaaggggggttcccccccgggggggggggggtttttaaccccccccctttgggacccccccccctggcccccccaaagggggggttttggggtttaaaccccttggcccgggccgggaagcgattttttaaattttttttttttt

SEQ ID NO: 97026 - DNA, 266 bp, Homo sapiens
gtttcaccgtgttggccaggctggtctggaactcgtgacctcaagagatccacccacctcggcctcccgaagtgttgggattgcaggagtgagccaccgcaactggctaccatttctaataaaagcaaacttttgttcaagtgtattcatcaaaaaggcccctcgcatgtgaccacagccaagccaggaagccttcttcaggtatccctagccagcctgcaggaggtcttggaaacttgttcaacggataaatgtcgacgcggccg

SEQ ID NO: 97027 - DNA, 429 bp, Homo sapiens
gccgaatgtggtggtatgcactgtactcccagatactcgggaggctgaggcaggaggatcacttgagcccaggagtttgaggccacagtgagccatggctgcgccactgcactccagcctcggtaagagtgagaccctgtctcataaaataaaaaacaaaaataaagacttcacgatgcttaggtaagaaaaattccctcagcaaaagcaattattagttgtacttgacacaaaggactggaactcatttctgcttgaatgtgcctacatagtccactttccatcttaggccataaatcaaggtgcaatacactaaatttaattaaacttcaaggtaatctagtttatctcattaaaaatcaacccatgaaaattgaattataggcaatttagaattctctctcaactggcccctccatggaaactaca

SEQ ID NO: 97028 - DNA, 186 bp, Homo sapiens
caaacatcgtcctttagcttcagaaggtcagtaataacaaacttcttcaagctaaaggacgatgtttgaacccattgaaaggaagctaaaaaccttgaaaaaagattagacgaatggctaattagaataaagagtgtagagaagaccttaaatgacctgatggagctgaaaacgtcgacgcggccg

SEQ ID NO: 97029 - DNA, 327 bp, Homo sapiens
ccagcactttgggagactgttgtgccaaacccccattaacctcagtagtgaaggcaccaggttgaagaggctgaagaagattcccagagcctgcaaacaagacatgggtttttttttttttttttttggggggggggggtaaaaaggaatcctaattgggccccccgggcgggggggcgggggggggatttaatttaattgaaccctccccctcggggtttaagggaattttgggccctaaccccccggagaagcgggaataacgggggcccccccccaggccgggctaatggggggttttttataaaaaggccaaagttccccctt

SEQ ID NO: 97030 - DNA, 162 bp, Homo sapiens
cttgctctgtcacccaggctagagtgcaccgttgcactctcgcctgggtgacagagcaagactttgtctcaaatttaaaaaaaaaaaaaaaaaaagaaagggccaaaagggaaatttaatttatcttggaaacgggggggtttcaccggcaacccggccgga

SEQ ID NO: 97031 - DNA, 131 bp, Homo sapiens
gcggagcctggttctaggaataatgggggaagtatgtaggagttgaagattagtccgccgtagtcggtgtactcgtaggttcagtaccattggtggccaattgatttgatggtaaggggtcgacgcggccg

SEQ ID NO: 97032 - DNA, 344 bp, Homo sapiens
ggggtctcacccttttggccaggctggtcttgaactcctgacctcaagtgatccatctgccttggcctcccaaagtcctgggattaccggcatgagtcaccgcacccagcctcaggtgaaatcttaatggaaggtgtccagtgctgtgagcagctcctggtcaccaagcactggccctctgtgtagggggtctggatgagatgggtgggcaaggcctttcaacagaagctggagtgtggtgtgaacttgctaatgactttgagatgccaagcctcacacacctcaaaccaggttggatttagcaggtggagaggctcaggaagacctctgtggcaggtgtgtct

SEQ ID NO: 97033 - DNA, 130 bp, Homo sapiens
gtgggagaaaatatttgcaaaccatgtatctgacaaaggtctaatatacagaatctataatgaacttcaacaactttataagtaaaagacaaatggccctattaaaaagcggccaaagtcgacgcggccg

SEQ ID NO: 97034 - DNA, 117 bp, Homo sapiens
  misc_feature (1)...(117): n = a,t,c or g
gttggccctgcttgggctgaagccgggcctcaagtgagccacttgccttggcctcccaaggtactgggattataggcatcagccaccgcacccagcctgtttttcaaagggcattgn

SEQ ID NO: 97035 - DNA, 349 bp, Homo sapiens
gaaacacaccttacttacatcttgagagcaggattaacaacttaagattttttttaaaaaaacttgcttaataaaaactcttttctagttaaaattttaattccaaatgtaaaaattgtcaaaaaaaaaaaaaaaaaagaaaaagggccccctcttttaaaagggattctttgaacctttcaggaccctcaagaaagggaaaaaaaaaaaattcaaaaaaaagggtattcccttttttagttctaaagtccaaaaaaacccaaaggggactgttttgaaatggatacaaaaccctgcatcggaatctccttttttccttgaggaacctagagaagaggaaaaggctttc

SEQ ID NO: 97036 - DNA, 343 bp, Homo sapiens
  misc_feature (1)...(343): n = a,t,c or g
ctcgaactcctgacgttgtgatccgctcgcctcagcctcccaaagtgctgggattacagccatgagccactgtgcccggccctaactgtccatttggctgcagcagctaaagtaggaggtggagaggtggtgggnggataattctgagaggtgggtggccagcctcagcagaatccaagtgggaatgaattaccacacccttgcacccgcgttgcatcaaaaaatgcaattaaagcaaactacaattctctgaagacagcccaacaattaacacttcagcacatgtttaccaactacctaccctgtgctaggtgtgaggctttatttgctatagatgcagact

SEQ ID NO: 97037 - DNA, 334 bp, Homo sapiens
  misc_feature (1)...(334): n = a,t,c or g
cgagatcgcgccattgcactccagcctgggcaacaagagcaaaactccatctcanaaaaaaaaaaaaaaaaaaaaaaaaaaaaaaccccttttaaaaagggcaaaaggaaaattcccgggggtaaaaaaaagcccctgggaaaatcaagggccccccccccccttggggggggggagaaaaacccccccccggggaaaagggcccctgaaaaaatttttaaaaaaaaaccaagggggaactgggaaacctttaaaagaatggaaaagggttttttaaaagggcaataaccgggcaacccataaaaagtaaagcccctttggggggggaaaaagg

SEQ ID NO: 97038 - DNA, 339 bp, Homo sapiens
tgaaaagctgggaagcttgagtagaaacaggaatgtgggttgactcatcatctgtgtatgattctatcctagcctcctgacccattgtctcttcttgcccaggggttgctggggcactgaagcaagctatgactctggaatttaaagtttatcaacaccacgtggtggccaactgcagggctttgtctgaggccctgacggagctgggctacaaaataggcacaggtagagacacagatggtgttcagcaggccctgcttgtggttggattaaggcttgcttctcagtttgtgcaaccaggatgtggcccaggctctgctgctgcagctgcaatgatgg

SEQ ID NO: 97039 - DNA, 340 bp, Homo sapiens
ctgctgcctttcatcttccaccattattataagctccctgagtcctccccagaaactgagcagatgccagtgccatgcttcttgtacagcttgtccaataaaacctcttcattataaattatctagtctcaggaatttctttatagcaatgcaagaacagcctaacgagattttagtaccactgtcttgataactgatagaactagtagacagaaaatccctacagatgtcagccaacttaacctaattgacatttataaaacactctaaccaacaataggcaaatacacattcttttcaagtacatacagatcactgagatagttcttattcaaagtaa

SEQ ID NO: 97040 - DNA, 354 bp, Homo sapiens
  misc_feature (1)...(354): n = a,t,c or g
caaaaaacaaacaaaaaagttagaagggtgttaagtgatttatctaagcggaggaaactacaccctttgttgtttttagaggggcttgtcagggagaagcaagtatactgaacagcaacaaaaagtatactcaacaaaactcaggacttggtaggaaagagacttaggacttggtaggaaaaggtctcttaagaaacagatgaggcttgagattaaaatcaggtagtggtgaaatgtctttctttttcattcttaaaaatttttaagtttttttagagacagggtcttgctttgttgcccaggctggagtgcagtggtgtgatcatagttcactgcagccttgagctcctgggn

SEQ ID NO: 97041 - DNA, 335 bp, Homo sapiens
aggagggtctgtcagaaggtttttgattactgattcaatgtctttacttgttataggtctgcagagattttctattttgccatgagtcatactgggttatttgtatccttctaagaatttgtccatttcatctaggttatctactctgtgggcatacagttgttcctcttataattcttttgttttctgttggtcagtaataaaattttcccttatacttctgattttagttatttgcaacatctctctctctttagctctttttattgggaaggggtcagtctaattaaaggttgtcaattttgttgacttctaaccaactaactttttgtttt

SEQ ID NO: 97042 - DNA, 362 bp, Homo sapiens
  misc_feature (1)...(362): n = a,t,c or g
ggcctcaggtgatccgcccgcctcagcctcctaaagtgctgggattacaggcatgagccactgtgcctggctgacctttttcttcttttattactgtacatgtattctaagttttgtttgtttctatttaacatggcatcataagcagttttcactatctttaaaaattctctgtaaatattttgatggctacaaaatattttactatgtggagtactataattttacttatctattttcacactactgggcattttaattgttttcagattttctgaagcaaacattttgggtatagcctttacctgcattttcttttattggtttagggtagattttctagttcataatttatgaagatn

SEQ ID NO: 97043 - DNA, 353 bp, Homo sapiens
caggcaccaggctagatttggcccatgggctgtagtgtgccaaccactggcttggggggataagggggaaggtcacatagctaattagtggtagagctaggatttgaacccatcttggggggaatcctgtgcgcctgtatgcttggctgcttctacattatgttgcctcttatcgtatcttcagtgtaagccactgtaaagatcagacatatttacctatactcttataaaactttttaatggagctgggcacggtggctcacacctataatcccagtattttgggaggccaaggcaggcggatcacctgagttcaggagtttgagaccagcctggccaacatggtgaaatgc

SEQ ID NO: 97044 - DNA, 341 bp, Homo sapiens
gtttggttctttcttttcttatttatttgcctaactagtgttccatctagtttattaattttttttttttttttaataaaaacagctccgggatggggggagtttttttttttttggaaaaagtttaaggggtttttttcccttaaaccttaactgggattggggttttttttggttttgggcaactttcagggggggtttcccttgggttttttggttttttaaaaaaaaggggggggggtgaaccccaaaacttttaaaatttttttttttttggggggaagagttccttttggccccccaacgggggaacggggggaatattcggggtaaccggcccg

SEQ ID NO: 97045 - DNA, 342 bp, Homo sapiens
gcgcaatctcggctcactgcactccagcctgggcgacagagcgagactgtctcaaaaaaaaaaaaaaaaaaaaaaaaaaaagggggggggggggggaaatcccaaaattaaaaaggggaaaacgggaaaacccccggggggtcctttaaaggggggagggggcccccaaaaaatttttttaattaaaaaacggggggcccttttttaaagaaaaaaaacccccaaaaaaaaaaagtggggccagggaacccgggaataaaaaaatttttaaaaaaaaaaaaaaaaaggcccctttttttttgggaccaaaattttttaaaaaaaaaaaaaaagggggctttt

SEQ ID NO: 97046 - DNA, 318 bp, Homo sapiens
cctgacaaagcctacggaatctgggacagaagacaaaaagggaagggactctaaggagtcagaaggaaaaacagaaaggacagagagcctaaggtcacaaaatggtggagaaaactctgtgtgaagttgtccttccacatcctctactgctgcattaaatacagctgcagctgccaacccattagctcttaacccacaagtatcactaagctcgctttcttgctgtccaatttctattaaaggttcctttgttccctagtccaactactaaactgggggatattatgaagggccttgagcatctggattctgcctaat

SEQ ID NO: 97047 - DNA, 334 bp, Homo sapiens
gattgcccactccctcaaaaaggttaatgtgacagaaattctccacctgctcaaaaaagacagcagacatgatctctttaaaaaaaaaaagttccaaagagattaagagatgaaaaataagattgggggagtttaaaggccttatactaaaaaccccaaaacataaaacagcccagagaaaataggctggaggaaataaaaaaatggaaaagagaaatatgtagaataaagaaatattctgatggtttaaaaaaaattggccgggtgcgggggctcacgcctgtaatcccaccactttgggaggccgaggcagacggatcatgaggtcaggaga

SEQ ID NO: 97048 - DNA, 291 bp, Homo sapiens
ctgggttcttatcctttgaaattggttgaggttgacttcatggccctcaatgtagtcccttctcataaatattccacatgtgcttggaaataatgcatgttctcagagtgttaggttcgatgttctatttatgtcccttggatcgaatttgtcaattgtttcattcaaatatcctttatcattaatttttaaagtcggcttgaaatatcagctttttgttttttatttttggaataaacaggccttatggggctcatgggtaaaaaaaaaaaaaaaaagtcgacccggccg

SEQ ID NO: 97049 - DNA, 278 bp, Homo sapiens
  misc_feature (1)...(278): n = a,t,c or g
agagaattgcttcaacctgagaggtggaggttgcacagtgagctgagattgcaccactacactccagcctgggtgacagaacaagactctgtctcanaaaaaaaaaaggaaaaaggccaaagggtttgtcccaaaaaaagcttaaggccggcccctgtttttgacaaaaaaaaaccaggggcccagggggaggggttcgcccctgaatggccaaggttttgggaggccagggggggaggactgtttggggccgggatttaagggtcaacccgcccgca

SEQ ID NO: 97050 - DNA, 349 bp, Homo sapiens
gggtataataagagaagaccatacttcaaaacgatttcttttgttttcatgcagctcatgaggcacccacttatgtagctttttcacttttccaatgcgcttcaaatgttgaatgactgcagaaggctctatgttgagctctttggcaacttttcgagtaggtttaagaggagcacctttgatgatcgctctcaattggttgatggctacttttgatggccagccaccaagagccttatcttcaagcctcttgacccccttgcacaactatttgaaccaccaccgcactgtacatttgttagcagatcctgggccaaatgcattgttgatgttgtgagctgtctctgct

SEQ ID NO: 97051 - DNA, 312 bp, Homo sapiens
tgctaatacaatgcgggtcaggccgcctacggggaggagaaagatgaatcctagggctcacagcactgcagcagatcatttcatattgcttccgtggagtgtggcgagtcagctaaatactttgacgccgggggggatagcgatgattatgggaacggaggtgaaatatgctcgcgtgtctacgtctatccctactgtaaatatatggtgtgctcacacgataaaccctaggaagccaattgatatcatagctcagaccatacctatgtatccaaatggttctttttttccggagtagtaagttacaatatg

SEQ ID NO: 97052 - DNA, 203 bp, Homo sapiens
gtgggtgcctgaggcacaagaatcacttgaacccaggagtcagaggctgcagtgagctgagatcgtgccacagcactccagcctgggcagctctgtctcaaaaaaacaaaacaaaaaaacccccaaaaaaccagaaaacagaagaaggcctgaaaaggctgccaacagtggcaagaatcaaggtattttcgtcgacgcggccg

SEQ ID NO: 97053 - DNA, 263 bp, Homo sapiens
ctaggttgaacactccttatgagaatctaatgcctgatgatctgtcactgtctcccatcacccccagatgggaccgtctacttgcaggaaaacaagctcagggctcccactaagtctacattatggtgagttgtatatttcattacatactataatgtaataataatagaaataggttgggcatgatgcccataatcccagcattttgggaggtccaggcgggtggatcacctgaggtcaggagttcaaggtcgacgcggccg

SEQ ID NO: 97054 - DNA, 336 bp, Homo sapiens
  misc_feature (1)...(336): n = a,t,c or g
taaaatttcaccttttgaaagttctgaacaaacagaacaattgagacaacgaaccaagaaacacctaaagttcagtcagcatcaggccttattttagccaaactgattttgcagtaaatttttctattaactagactatttaattaaaaattattccattttaaataagaattattcgatattatctgaggatacatattttttaactgtatgaaaataatatttttaaaagggctaggagcccggcgaggtggcttattcctgtaatcccagcactttgggaggccgaagcgggtggataatctaaggtcaggagttcgagaccagcctgaccan

SEQ ID NO: 97055 - DNA, 327 bp, Homo sapiens
  misc_feature (1)...(327): n = a,t,c or g
attgaaatagctcgaagattactttgaccctcctgctggcagacccacctccacccttcaacttctcctctcccaccaccctgctcttaactttttccttttccttttttttttttttnnnnaagggggggggggggggggnggaaaagggggggtaagagtgggggggaggggtggggggggaagggggatgtttttttaatggagaggttattaaatggtgtttaagagggatgtttgttattgatttattttttgtggaaaagtgtggggttgaaagggtttgaaatatgtgttttggttggagagtattttttgttttaattg

SEQ ID NO: 97056 - DNA, 346 bp, Homo sapiens
  misc_feature (1)...(346): n = a,t,c or g
tatcattccaccacacccaaatctcatgtcctcacatttcatgcctttccaacagtctccaaaagtcttagctcattccagcattaacctgaaagttgaagtccaaagtctcatctgagagagggcangnntntttnccttanaancctgnnnnntcnnnnncnntttnttttctttctatttaccctntnctttttctcttctcttnccttcctctccntttcttcttctccttttttttctttttctttttcctttctttttcctctctttctctttcttctttttttttttcttctttctttctcctttttttttttctttctcttctcctctcctcctcttn

SEQ ID NO: 97057 - DNA, 337 bp, Homo sapiens
taaaactagccaggcatggtggtacacgcctgcagtcccagccacttggagggctgaggcaagaggatcgtgaggtggcagtgagttatgatcgagccactgtaccccagcctgggtgacagagcaagaccttgtctcaaaattatacatgttaatatattctagtttaatattgcaaacatctttagaatttcatcagaaacgtgattttttctaagaaatgcaaaaggattttaggatttttaacacagaggacatgtttaacaaatgaatcctgacagacacctgcagtttagaataaatttgtgaacatccatgcgtataaagtgtcctcttg

SEQ ID NO: 97058 - DNA, 342 bp, Homo sapiens
gtgaacccaggaggcggagcttgcagtgagccgagatcgcaccactgcactccagcctgggcgacagagagagactctgtctcaaaaaaataaataaataaaataaataaataaataaataaacaaataaataaaataaaagatccaaccagctacaacattctcttaagccaaagcctaatctagtttaaggccctaactctcctcaattctgtgaaggctcagagaggtgagaaagcaacagaagaaaaatttgaaggtagcataagttgattcatgaggtttaagcaaataaaccatctctataacataaaagtgcaaggtgaaaaaccaagtactgat

SEQ ID NO: 97059 - DNA, 328 bp, Homo sapiens
  misc_feature (1)...(328): n = a,t,c or g
cgcgtggnattganngcattgagatgcgtgatgtatatacccagctaaacgatgacgaacataccccaccaaaccacaaaaaatgagagatcccgaggatccgacttcgcggccgcgctacatccctaggcacctttacataacagacgaggtcaacgatccctcccttaccatcaaaggaattggccaccaatgggactgaacctacgagtacaccgactacggcggactaaccttcaactcctacatacttcccccattattcctagaaccaagcgacctgcgactccttgacgttgacaatcgagtagaaccggcgacgcgggcg

SEQ ID NO: 97060 - DNA, 329 bp, Homo sapiens
  misc_feature (1)...(329): n = a,t,c or g
caagaattggcgctcgggatgaaagttcattggcagttactcataaacctaggaagatccacagaaaacttaccctctgggtatttgttaatgattccctcgttatgccacgaccagataagaatcaccagtgggcattcaataagaactgtttccctcttgtggatgtagggattgatccttaccttgtatatcatcttcgaccacatcagannnaaggaatcatattcctttatgaatgtgtaatgggaatgagaatgaatggcagatgtggagctattcttgctgattgaaatgggttagggaagacattgcaatgtatttcgctg

SEQ ID NO: 97061 - DNA, 153 bp, Homo sapiens
gtgtgtatgtatcacagttaccttattgatttgtccataagtggacacctaggttgtttctgtatcttgactattgtgactaatgctacaatgaacatgggagtccagatatctttttttttccagtagcttttggggtacaggaggtttggg

SEQ ID NO: 97062 - DNA, 341 bp, Homo sapiens
  misc_feature (1)...(341): n = a,t,c or g
ttctaataccaccacggtgggaaccaaatttcaacatgagttttggagcagacaaacattcaaaccatagcaccgctcaaacctttgatgagaccacatcctcagcaaacacctagattaaaatctggtgagctcttaaaacagagaacataactacactatgcctggacttctgacttatagaaactgtgagataataaatgtgtgtctttaaaaaaaaaaaaaaaaaaaaaaaaaaaaaaaaaaaaaaaaaaaaaaaaaaaaaaaaaaaaaaaaannnannaaaaaaaaaaaaaaaaataaaataaannaannnnnaaaaccccccanactatcttttt

SEQ ID NO: 97063 - DNA, 345 bp, Homo sapiens
ccgtcatctactctagcatctttgcaggcacactcatcacagcgctaagctcgcactgattttttacctgagtaggcctagaaataaacatgctagcttttattccagttctaaccaaaaaaataaaccctcggtccacagaagctgacatcaagtatttcctgacgcaagcaaccgcatccatattccttctaatagctatcctcttcaacaatatactctccggactatgaaccataaccaatactaccaatcaatactcatcattaataatcataatggctatagcaataaaactaggaatagccccctttcgtcgacgcggccgcgaattccagatctatg

SEQ ID NO: 97064 - DNA, 341 bp, Homo sapiens
tttcaccatgttggccaggctggtttcactcctgacctcaggtgatccacccgccttggcctcccaaaatgctgggattacaggcgtgaagcactgtgcctggtccatattcttttatatttgccaatgattggtccttttagaattcagaaattattgaaggcagctgtgtttgttttccttcaactccatcaggcctttattcaaagtcttttaactctgttttactttatttcattcccctgcaatagctaaggtctaacaccagattaattggaatattagctagcattcacaaaggcctagatctgtaactctgaaattggtcaaattccattaaa

SEQ ID NO: 97065 - DNA, 349 bp, Homo sapiens
gaaaacttccacagctgtgaaatgtgggaagcatttttctgtgggaggagcagaatggaaggggagggttggaatgacttcccaaggagaaccagtgagctggatcccagccagtattttaaatgttagcaagtaacttcagttttgaatatttctattaagatgagtcttcactgatgaattcagttcaaagttatagtcaaaacaggccaggtgttgtgcctcactcctctaatcccagcacttcaagaggccggggccagcggatcgcttgagctcaggagttccaaaccagcctggccaacatggtgaaaccccatctctgtgttgtctgctgataatacagagt

SEQ ID NO: 97066 - DNA, 328 bp, Homo sapiens
tgtttttttacttgagaccgtcctaatcgctaggcccgagccgttttcaacctacggagccgttctttaacattccactcgtactttctgtatctggacatactctccagagtcttgtccatctcattgatgataagggtggagccattgagctcatgcacaaggaaggccaggacagcagccttctgctggtgtggctgggcctgaaaaggctgggtgcgcaggcggtcacagagggctggctctactccatatgccataaggaagcagcgcaggatctctgacacattgtctcttgtcagggggatctcaaacaccttctccccca

SEQ ID NO: 97067 - DNA, 372 bp, Homo sapiens
gtaaaagcaaagcaaaacaagataaaatcataaagcagcaggccaagtgatgtatatatgtacggaaacgtgtcagtcagtaggagcttcatggtttccgtgtctgacttatcagagggaccgctatggaaaaagagagggaatgagaatttttcccaattagacatatgaggatatgttctagagttacctatgattaaaaattaattttataaagagactgatggaagctgggtatggtggctctatttccagtttttatttttatttatttatttttttgagacggagtcatactctgtcacccaggttggagtggagtgttgagatcttggctcactccaacctccgcctcccgggttcaagcgattc

SEQ ID NO: 97068 - DNA, 369 bp, Homo sapiens
tggaaggtcaaggttgcagtgagccatgatcacgatactgcagtccagcctgggtgacagagtgagactgtgtctcaaaaaattttttttaattttgtgtatattagcttgatttgggtttttttttttacttacaactgaaaattttgaccagtatatttaatgttagtctgaccatttctccagggggctttctacgtatttaaaaaatagtttggactttaatctcagggtaaacaatatatataggtacactcagtttatatatgagataatattcaggatcagtggagtgaaaatagtaaagtatcttccatttttcaatggcttaaagggaaaagtgttcataatgggtatagaattaatcag

SEQ ID NO: 97069 - DNA, 379 bp, Homo sapiens
caaaaatatgcaaaccacatctacaaaatgccagcatcacgcggcggcttctaagccaaagtgatgtttggatgtaaagtgaaatattatttggcggatgaagcacattgtgaggaaagttgagccaataatgacgtgaagtccgtggaagcctgtggctacaaaaaaagttgagccgtatatgctcgcggaaatggtgaagggagactctaagtactctgaggcttgtaggagggtaaaatatagaccccctaaatttgtaataagcagtgcttgaattatttggtttcggttgttttctattagactatggtgagctcaggtgattgatactcctgatgcgaagaatacggatgtgtttaggagtgggacttctacg

SEQ ID NO: 97070 - DNA, 378 bp, Homo sapiens
gccaggatggtctcaatctcctgacctcgtgatctgcccaccttggcttcccaaagtgctgggattacaggtgtgagccaccgtgcccggccaaatgtatccctttaaatgaaatctaaatttgtgtctaactacaggggtgggagatattgggaatgacagcctaatataattgggagagaagagggcaatcatgacctgttctacaaccctctcagctctttcttatactactcatgcattattgaccttgtataagataatagcttttcaagatgtgatcatgggggaaagctcctataaaatattactgtagaaatttatttcgcaaaagtttgatttgtgtgaaatttgttgtgtgtttatcaggatggagac

SEQ ID NO: 97071 - DNA, 333 bp, Homo sapiens
  misc_feature (1)...(333): n = a,t,c or g
ggatgtcagaggggtgccttgggtaacctctgggactcagaagtgaaagggggctattccttagtttattgctatagccattatgattattaatgatgagtattgattggtagtattggttatggttcattgtccggagagtatattgttgaagaggatagctattanaaggattatggatgcggttgcttgcgtgaggaaatacttgatggtttctcgtcatcttgcaaacttcataaaagtccatggtcctcttctttgccatgagtatactccctcctgtgaagatttcatctagtcccatagttttaaattccatttagctatactatt

SEQ ID NO: 97072 - DNA, 340 bp, Homo sapiens
aaccaactaaaggcaaaggtaaaaaacatgaagcagatgagttgagtggagatgcttctgtggaagatgatgcttttatcaaggactgtgaattggagaatcaagaggcacatgagcaagatggaaatgatgaactaaaggactctgaagaatttggtgaaaatgaagaagaaaatgtgcattccaaggagttactctctgcagaagaaaacaagagagctcatgaattaatagaggcagaaggaatagaagatatagaaaaagaggacatcgaaagtcaggtctttagccagttttttttaaaacatgacacagataaattaagttttaaataataaag

SEQ ID NO: 97073 - DNA, 403 bp, Homo sapiens
tgtcttttgagctacttattacttctccctcttcctgcatggccccattgctttatgtctgattacctcggaaagtcatcttggcagcagctgaaactacacagaccataccttttattagagttcccaccctcctggaaacataaaaatgcattgaacacgtgggtttcacctctagactacctcttttctgtgccaaccctctcacctctgcaggagaagctccagggattgatcatgtcccaggaagctaatctttttttttttttttttgggaaccaattctccttttgttgcccaggcgggaccacagggggggaatctgggttaacgtgaggctttgcctccggggttaaccccattttcttgcctgggcctccaaaggggttggacactgagggcc

SEQ ID NO: 97074 - DNA, 353 bp, Homo sapiens
ttttgattttgtgcagtttaataattttaattctgtatactggaaaggaaggcctttttgtatgtagtttagtgttggaaatttttttttttttttttttttttttttttggaaaagggattttttttcctccccctgctagttttcttttggtgttattaccatcttaaaggagcttctctcccgtaggtttttctttttttctacctccactgctatagctctctgttcaccctcttctttatatttttacaatcgctgaccccccatttttttttggtttgaacttttttttattatgatcccttaatgttcttttttttaacccttttcttggaattagtctaactttc

SEQ ID NO: 97075 - DNA, 328 bp, Homo sapiens
  misc_feature (1)...(328): n = a,t,c or g
ctggctgctgcatctcttttgatctcttgttctggccatcagtgattacatatcaaggttgctagacagatttgtttcttctgcctagaacagtttgcatgggctggtgttttccttgagcaaagattttaattactgattcaaagtctttaacggctactgatttttaatttcttcttgagtcagttttggtaatttatgtttttctaaaaatctaggcatttcttcttagtttttaaatttatttgcttacagttgttcatagnggtctcttacttttttttgagacaggattttgctctgttggtcaggctggagtgtgatagtg

SEQ ID NO: 97076 - DNA, 360 bp, Homo sapiens
ggcagcaggtgccaacacatatgtggtcacagtcaacacagctgcacagtcctgtgtgcagatgtgtgactacacagacatagacacatatgttgacacagacacatatgttgtcacagtcatgtgcacagtcacatggttatgtacacaggtgaaagcaaagacacacaaatgctgcacagacacatgtgcaaggacacaatggctcagtctttttttttttttttttaaaaggaatttttgttttgttgccaaggttgaagggaagggcaaaattttgggttaattgaaacctccccctccggggttaaagaagttttccggcctaaccctccggagaagggggaataacaaagcctg

SEQ ID NO: 97077 - DNA, 245 bp, Homo sapiens
ataactattagtggcaggttagttgcttgtagggctcatggtaggggtaaaaggagggcaatttctagatcaaataataagaaggtaatagctactaagaagaattttatggataaagggacccgggcgggggatatagggtcgaagccgcactcgtaaggggtggatttttctatgtagccgttgagttgtggtagtcaaaatgtaataattattagtagtaaggctaggagtctacgcggccg

SEQ ID NO: 97078 - DNA, 400 bp, Homo sapiens
  misc_feature (1)...(400): n = a,t,c or g
agcagccccaattttgggcatgttgggcttgaggcagaggggaaaatataagagacagaggcagctgctctgcctatggagtgctattcttttattcctttattttcttaataaactgctttaacttanaaaaaaaaaaaaaaaaaaaaaaaaaaaaaaaaaaaaaaaaaaaaaaaaaaaaaaaaaaaaggggggccccggggcgggaatccccaaattttaaaggggaaaattggaaaaccccccgggggtttttttaaggggggggggggccccaaaaaaatttttttttttaaaaaccggggggcccttttttttaaaaaaaaacccccccaaaaaaaaaacctgggcccgggcccccctggtttaaaaaattttttaaaagaaaaaaaaaaagccc

SEQ ID NO: 97079 - DNA, 367 bp, Homo sapiens
  misc_feature (1)...(367): n = a,t,c or g
cacatacataaggctccactgatttgctttgttaaaagaactctgttccatcacaggaataactctactaccttgaggcaggagaancgcttgggctcgggaggcagagggtgcagagagccgagatggtgccactacactccagcctgggcaacaagagcgaaactccatctcaaataaataattagataaataaaatggttcaggccacattgatacatatctggcctatcactttccacactgatgatgggagaactaggacatgcacacaggggttggagttggtcttttcctgcaaatacatttatttagcgttaaacagcaggaacaggagtctctttttgacaatgaaacttcttttttn

SEQ ID NO: 97080 - DNA, 385 bp, Homo sapiens
  misc_feature (1)...(385): n = a,t,c or g
cgttcctcctgcccgctgggcctcccaacgggccctcctcccctccttgcaccggcccttcctggtctttgaataaagtctgagtgggcggcnnaaaaaaaaaaaaaaaaaaaaaaaaaaaaaaaaaaaaaaaaaaanggggggccccctttttttaaaaaaaaaattttttgggggggggttttttttttttaaaacctgggggggcccccgggaaaaaaaaaaaaaatcccccccccggaaaaaaaaggggggggggtaaaacccccaactttgggggggaaaaattttttttttaaagggggttatttttggaaagcccccccaaccccccccaaaaaaattaaaaagtgccccttatttaaccccccggcgcccccccttg

SEQ ID NO: 97081 - DNA, 169 bp, Homo sapiens
atttcactgcaccttcgcccacacaggtattataatttaacaagttattttctgtgtgataaatgaaagacctcctattagctgggattacaggcatatgccaccatgcctggttaatttttgtatttttagtagaaacgtggtttcaccatgttgatcaggctgggct

SEQ ID NO: 97082 - DNA, 357 bp, Homo sapiens
  misc_feature (1)...(357): n = a,t,c or g
gtgctgtctcctgccgacaagaccaacgtcaaggccgcctggggtaaggtcggcgcgcacgctggcgagtatggtgcggaggccctggagaggatgttcctgtccttccccaccacgcccagctaatttttggatttttttttttttttagaaaaaatagggtttcaccatgttggccagtctagtctcggattcctgacctcaagggatccatctgcttacaattccctgctggggtcttagcaagaagtaaaatgagaaattttgtggatattctctccttaaaaaaaacaaaaaaaccaaaaacaaaaaaaaactttaaattaaataaanttgccccggcgccgcaccccccca

SEQ ID NO: 97083 - DNA, 357 bp, Homo sapiens
aagtttattgaattattctgaagccagaatttatttctacagtaatttctgggcaggttctaaaaaagtcatctgtgactttaggactgaagtgtttggggatgttcatccgttagttacttgttcattgcttgaacacctagctaatctttacctttgcatttgttttgatgtgaatcattattacagatacacgtcattatgataatatgatgatattcattatatacatcattattacaaccaatcttttaaaaaatgggctatttaaggctggtctcaaactcctgacctcaggtcatctgcccacctcggcctcccaaggtgctaggattacaggcatgagccactgtgtcc

SEQ ID NO: 97084 - DNA, 346 bp, Homo sapiens
gatcgcttgagcccaggagtttgaggcagcagtgagctgtgattgtgccactgcactccaggctgggcaacagagccagaccatgtctcaagaaaaaaaaaaaaaagaaagaaggtggggttgggaaaaaacaaagcaaaacaaaaacaccccaggggctactatagggcggagttataaaaagcttttatatagccttgataatatagcccatgatattataaggccctgaaaaaaaatctaactcaatttaaaaaataaccacagggggaccatgaagtcagtacacaaagataaaatatttttatcatatatggcaaaatatcatgtatatataaaatactat

SEQ ID NO: 97085 - DNA, 361 bp, Homo sapiens
cgagatcacaccattgcactccagcctgggcaacaagagcgaaactccatctcaaaaaaaaaaaaaaaaagggcggtttggggggggcacccttgtggccccaattatttggaaggttgggggggaagaataatttgaccctaaaaggaaaaggttctagggacctgaaagggcccctctgctttccgcccggggtattaaaccaaccctttgcttcaaaaaaataaaaaaaaaaacccccccttttaaggccaaaattttaaccttattggggtggggtgggaaaaaaaccagggaggccggcaaccccctttattccaatggaaatccagaagggtttttttaaaagttttggaccaag

SEQ ID NO: 97086 - DNA, 379 bp, Homo sapiens
aagaagactccatttgtatctgcttcatttactaaaaaatactggcaactagcactcatgaaagagctgttgaatgaataaatagatgaacacaatctaggaaccttattgctttaacgcgtaaaaaagtgcactctgaatttctagatgacagttgataaactgatatatagaggagaatccgagagtaaatgaggtatcattgctagtctgctgatacaatacagttccgtgatgcattcttgctgagtacaattgaaagttcaacattttaagcagaagtctacaaaataaaatgtgagctgggcgcggtggctcacgcctgtaatcccagcactttgggaggccaaggagggcggatcacgaggtcatgagttcg

SEQ ID NO: 97087 - DNA, 476 bp, Homo sapiens
  misc_feature (1)...(476): n = a,t,c or g
natttgggacatcgatgagcattattacgctgattacgccacgcttggcacgaggcaacaacaacctatttagctgcttcccaacctttaccttcgaccacctagcaacccccctcctaatactaactacctgactactacccctcacaagcatggcaagccaacgccacttattcagagaaccactatcacgaaaaaaactctacctctctatactaaactccctacaaagctccttaattataacattcacaggcacagaactaatcatattttatatcttcttcgaaaccacacttatccccaccttggctatcatcacccgatgaggcaaccagccagaacgcctgaacgcaggcacatacttgctattctacaccctagtaggctcccttcccctactcatcgcactaatttacactcacaacaccctaggctcactaaacattctactactcactgtcagtgcccaagag

SEQ ID NO: 97088 - DNA, 582 bp, Homo sapiens
  misc_feature (1)...(582): n = a,t,c or g
accttgttggccaggctggtatcgaactcctgacctcaggtgatccacctgcctcggcctcccaaagtgttgagattacaggcgtgcncgcacgcccagccaaaagaaaatattaactactaactttgaagactcctagacatctattcccatttctatccccttttccttcagacataacaattatcctgagatttatgtttataattctcttgcttttctttatagtttcagctacttactccaaaactatgttgtttatggatgtttttgagttttatataactatttcatatatcattctgtgactcgcttttttgtcaacattatgttcctgagattaagtagtgtaggctataatccattcatttttatgggacagtattccattggcttggactatattacaggttttaaaaatccattctcaggtgatagaaatgtgagttgcttcaaagttgaatttataggtctattacggaccatcttgtacatgtttactgatgggcatgcagaggctgttctgggcaagggcatcaacttcttgtgcaagggcatatgggaattttnggtttcgggcca

SEQ ID NO: 97089 - DNA, 378 bp, Homo sapiens
ggagttctgccacagttggctggttggctgtttatgattggtacaagcttaatttgaagttagttacaaagaatgcctctaggttaagttccagtttgtgtatggatgggttctgggtacagaaaaagccctaagctgatggctcctgcctagtctgtttttttttttttgaaaccggattttgtttttttgccacaattgttggagggcaggggcgcaatttgggttaattgaaccctttgcttttggggttgaggcctttttcctgccttgcccttttagttagatggctttacagaaccccccctttgggcggggttaattttggtatttttacaagagacggggttttgcctatttggccactctggtggcgat

SEQ ID NO: 97090 - DNA, 386 bp, Homo sapiens
ggctcccgatgaggcaaccatccagaacgcctgaacgcgggcgcatacttcctattctacaccctataaggctcccttcccctactcatacgactaatttacactgacaacaccctatgctcacttaacattctactactcactctcactggccaagaactatcaaactcctgagcccacaacttaatatgactagcttacacaatagcttttatagtaaagatacctctttacagactccacttatgactccctaaagcccatgctcaagcccccatcgctgggtcaatagtacttgccgcagtactcttgaaactatgcggctatggtataatacgcctcacactcattctcaaccccctgaaaaaacacatagactacccctt

SEQ ID NO: 97091 - DNA, 389 bp, Homo sapiens
ggagaagcagctgtagaaggacaagcaggtctaccgggccacgcaccgcctgctggtgctgggtgctggagaatctggtaaaagcaccattgcgaagcacatgaggatcctgcatgttaatgggtttaatggagagggcggcgaagaggacccgcacgctgccaggagctacatcgatggtgagaaggccaccaaagtgcaggacatcttaaacaacctgaaagaggggattgaaaccattggggccgtcatgagcaacctggtgccccccgtggagctggccaaccccgagaaccagttcatagtggactacattctgagtgcgatgaacgtgcctgactttgacttcccttccgaattctatgagcatgccaaggctctgtgggagg

SEQ ID NO: 97092 - DNA, 379 bp, Homo sapiens
accatttggatacataggcatggtctgagctatgatatcaattggcttcctagggtttatcgggtgagcacaccatatatttacagtgggaatagacgtatacacacgagcatatttcacctgcgctaccataatcatcgctatccccaccggcgtcaaagtatttagctgactcgccacactccacggaagcaatatgaaatgatctgctgcagagctctgagccctaggattcatctttcttttcaccgtaagtggcctgactggcattggattaacaaactcatcactagacattcgactacacgacacgtactacgttgtagctcacttccactatgtcctatcaataggagctgtgtttgccatcataggaggc

SEQ ID NO: 97093 - DNA, 430 bp, Homo sapiens
  misc_feature (1)...(430): n = a,t,c or g
cgaaaaagccagagcccccttaactgagaaccgaaccatccgagancnganacggaagcttggnacgagggtgaagaatggcgatggtaatttaatgggaaaagcattgaatctataaattactttgggcagggtgggcatcttcacgatactgattcttcctatccatgagcatggaatgttttttcatttgtttgggttctctcttatttccttgagcagaggtttgtagttctctgatacggtttggctgtgtccccacccaaatctcatcttaaattatagctctataattctcacatgtcatggaagggactcaatgggtggtaattgaatcatgggggcagggcttttccacgctgttctcatgatagggaataaggctcatgagatctgaaggttttataaaagggcagatcccctgtgaatg

SEQ ID NO: 97094 - DNA, 363 bp, Homo sapiens
gggcacagaaatggttacaagggctggacatagtagcttacatgtgtaatcccaatattttgggaggctgtggcgggaggatcactggaagctaggagttaaagaccagcctggggaacatagtgagaccctgtctcttaaaaaaaaaaaacaaaagaaagaaaagaaatgtcccaaggagccgtaagagtaaagcttttttcagggccctggactcagctttaccactgatttctttggggttctcaaatcagcttctgccgctgtatttcaggcatatcgtcctgatgaaagccctttgactttgacatgctgggagtttaaacacaaaatccaaagatcaacaaagccaggagggctggg

SEQ ID NO: 97095 - DNA, 427 bp, Homo sapiens
  misc_feature (1)...(427): n = a,t,c or g
nttgaaaacatctatgaccatgatttcgacaaccttgttgacatgactacgcccagcttggcactaggcccaataccaaacgccttttttcgtctgatccgcccttatcacagcaggcctacttttcctatttctcccagttctagctgctggcatcactgtactactaacagaccgcaacctcaacaccacctttttcgaccccgccggaggaggagaccccattctataccaacacctattctgatttttcggtcaccctgagggttatattcttatcctaccaggcttcggaataatctcccatattggaacttactactccggaaaaaaagaaccatttggatacataggcatggtctgagctatgatatcaactggcttcctaggtgttatcgggtgagcacaccatgtatttacaggggga

SEQ ID NO: 97096 - DNA, 380 bp, Homo sapiens
ggaactggaagaattcgcggccccaggaggtgatgagccactggcccagacagagagtgaaagcgaggcagagctggctggcttctccccagtggtggatgtgaagaaaacagcattggccttggccattacagactcacagctgtcagatgaggaggcttctatcttggagagtgggggcttctccgtatcccgggccacaactccgcagctgactgatgtcttcgaggatttggaccatcagagcctgccaagtgaaccagaggagaccctaagccgggacctatgggagggagaggagggagagctggcccctcccgaagacctactatgccatcctcaagctctgtcaaggcaagccctggactcggaggaagagg

SEQ ID NO: 97097 - DNA, 363 bp, Homo sapiens
ggggccctggagataaggcggctcggcgcattgctcttgaaaaccttgacatcacataaaagtggggcatgaggacccataagtgcgcaaagcaactgttatccaaacaacctttttgaagctcacgtactggggacctgaagctagagctgcaaattgagttggtgcgagagacgaaacgcaagtgttagagggttctgtagatcgatcgggcactgacttcccacctctacagcctgctgcagacccaagatgcactgggtgatgcctctgctgacctcatccagaagacctcatagcttcaggaggaatttggctactatgcaaagacacagaaactactatgcaggaatggggaaacgc

SEQ ID NO: 97098 - DNA, 434 bp, Homo sapiens
ggggccctggagatcacgtggctcggggcatttctggaaaaaagtatgacatcggccagaaatggggcatgggcacctataagtgcacaaaggaactgttatcacaacgatttggtctaggctcaccgactgtggacctggagctatagctgcaaattgagttgctgcgggagactaagcgcaagtatgaaagtgtcctgcatctgggccgggcactgacagcccacctttacagcctgctgcagacccagcatgcactgggtgatgcctttgctgacctcagacagaagtccccacagcttcaggaggaatttggctgctatgcacagacacagaaactactatgcaagaatggggaaacgctgctaggagccgcgaacttatttgtctctagcatctacacattgggcaccaagaccatggaagacacgctg

SEQ ID NO: 97099 - DNA, 402 bp, Homo sapiens
  misc_feature (1)...(402): n = a,t,c or g
ggcacgaggaagaattcattcctgcatgactcccagacctccttctgcttctcagactctattccgacaccctccaacatggaggaaacgcaacacaaatccaatctagagctgctccgcatctccctgctgctcatcgagccgtggctggagcccgtgcggttcctcaagagtatgttcgccaacaacctggtgtatgacacctcggacagcgatgactatcacctcctaaaggacctataggaaggcatcccaacgctgatggggaggctggaagacggcaaccgccggactgggcagatcctcaagcagacctacagcaagtttgacacaaactcgcacaaccatgacgcactgctcaagaactacgggctgctctactgcttcaggaaggacatggan

SEQ ID NO: 97100 - DNA, 401 bp, Homo sapiens
ggcaggagaattgcttgaaccagagaggcagaggttgcagtgagcccagattgcgccactgtactccagcctaggcaacagagtgagactccatctcagaaaaaataaacttgaattatttcatccaaaagttaaaggcagcccataaaattttttggggggagggggtacaagaagactcacattaaaaacattatacctaggaaaaagaatacatatgattataaatataatctaataaatttttaacccatgtcaccagttggaaaattaatatatatatgaatatatacacacacacacacacacacacacacacacatatatatattaatcaaagccagccaggcgcaggggctcatgtctccaatcctagcactttgagaggccgagctgggagg

SEQ ID NO: 97101 - DNA, 489 bp, Homo sapiens
  misc_feature (1)...(489): n = a,t,c or g
ggtgctattgtgttagtcaaatagtcttgatctttattttttaaagtgcttaatattttattttccaagagagatatgttaaaatctaacactgtgatttttggggtcaattttncctttttttttttttttttttttgaaaccggtttttctttttgccctaagggggggggccgggggggaattttaacccaaatttttccgggcttaggggaaccccccgcccgccccccttgggggggggaataagggccccccccccccccccgggttttttgttttttttttggaaaaagggggtttcccctttttgccccggggggttttgaaccccggggcccccaaagggtttgtatccacaagggtggggattaacggtgtaaccccggggccccacccctttcctttattttaaaccctttttttttcaattttttggaggggggggcttaaaaaaaaacccggccaagacaatttttactttttttg

SEQ ID NO: 97102 - DNA, 400 bp, Homo sapiens
  misc_feature (1)...(400): n = a,t,c or g
ggggaaaggagctccaaccacttccctcattaatgtggctggcacaaagataatagccaaggttgtggaggacaacaagctgcctggtgcaatttgttccttgacttgtggaggagcacatattggcacaccaatggccagagatgaacgagtgaacctgctgtccttcactgggagcactcaggggggaaaacaagtgggcctgatggtgcatgagaggtttgggagaagactggtggaacttggaggaaacaatgccattattgcctttgaagatgcacacctcaacttatatgtgccatcaactctattcgctgctgtgggaacagctggcccgaagtgtaccactgcgaggcgacagcttatacatgaaagcatccatgatgaggcttgaaacaan

SEQ ID NO: 97103 - DNA, 390 bp, Homo sapiens
caaggaatttcataagacgcatcccttggagaacatcaccctggcccccgatcccgagggccctgatggcctaccccctgtggcctacaacccctggatggacatcaggcaacgggaagacggccaaaccttaaacatcagggagccgtatgggccaattcctgtggacttttagcggaaaatccgccaaagctactttgcctctggggcataattggatacacaggacggacgcctcttgagtgctttggacgatcttcagctggccaacagcaccatcattgcatttacctcggatcatgggtgggctctaggtgaacatggagaatgggcctaatacaacaattttgatgatgatacccatgatcccctgatattctatgatactgg

SEQ ID NO: 97104 - DNA, 410 bp, Homo sapiens
ggaggggaaccgggaataactgggcccagggccactacacaaagggagccgagctggtcgactcggtcctggatgtggtgaggaaggagtcatagagctgtgactgtctccagggctttcagctgacccactctctggggggcggtacggggttcgggatgggcaccctgctcattaccaagatccgggaagagtacccaaaccgcatcatgaacaccttcagggtcatgcccttacccaaggtgtgagacacagagggggagccctacaacgccaccctcttggttcaccaactggtgggaaacacagatgaaacctactccattgataacgaggccctgtatgacatctgcttccgcaccctgaagctgaccacccccacctacggggaccgtcaccacctggtgtcg

SEQ ID NO: 97105 - DNA, 396 bp, Homo sapiens
ggagaagatgctgccaatatctatgcccgagggcactacaccattggcatggagaacattgacctcgggttggaccgaattcgcaagctggccgacccgtgcacgggtctgcagggcttcttggttttccacagctttggtgggggaactggttctgggttcacctcactgctcatggaacgtatctcatgtgattatggcaagaaaaacaagctggaggtgtctatttacccagcgccccaggtttgcacagctgtatttgagccctacaactacatccttagcacccacaccaccctggagcactctgattgagccttcatggtagacaatgaggccatctatgacatctgtcgtataaacctacatattgagcgttcaacctatactaacctg

SEQ ID NO: 97106 - DNA, 399 bp, Homo sapiens
ggagaaaattggctacaaccccgacacagtagcatttgtgccaatttctggttggaatggtgacaacatgctggagccaaatgctaacatgccttggttcaaaggatggaaagtcacccgtaaggatggcaatgccagtggaaccacgctgcttgaggctctggaatgcatcctaccaccaactcgttcaactgacaagcccttgcgcctgcctctccaggatgtctacaaaaatggcggtattggtactgttcctgctggccgagtggagactggtgttctcaaacccggaatggaggtcacctttgctccagtcaacggtacaacggaagtttaatctgccgaaaggcaccatgaaccttttagagaagctcttcctggtgacaatgtgggcttcaa

SEQ ID NO: 97107 - DNA, 402 bp, Homo sapiens
ggggaagatgctgccaataactatgcccgagggcactacaccattggcacggagatcattgacctcctgttggaccgaattcgcaagctggccgaccagcgcacgggtctccagggcttcttggttttccacagctttggtgggggaactggatctgggatcacctccctgctcatggaacgtctctcaattgattatggcacgaagtccaagctggagttctctatttacccggcgccccaggtttccacagcatgtagtgagccctacaactccatcctcaccacccacaccaccctggagcactctgattgtgccttcatggtacacaatgaagccatctatgacatctgacgtataaacctcgatattgagcgttcaacctatactaacctgaatagg

SEQ ID NO: 97108 - DNA, 408 bp, Homo sapiens
ggcagctgccttgggcaaaaactgtataatagtactacaaaaacagccacctagtggagttcaaaccacactaagaaaaatccatttagtaaattcccaaagttgcaaaacgtgtggacccacccagagtcccaccgggactggacagcccccactagattatactggatatgtgggcatagaccttatgtcaaattacccaaccagtgggcaggtagttgtattattggcactattaaaccatctttcttcctactgcccataaagacaggcgaactcctgggcttccctgtctatgcttcccacgcaaagagaagcatagctattggaaattggaaagataatgaatggccccctgagagaatcatacaatattatgagcctgctacttgggcacaagacggcttg

SEQ ID NO: 97109 - DNA, 406 bp, Homo sapiens
tggagacagtcttgctgtgttgcccaggctggttatgaactcttggcctcaggcagtcctcatgcctcagcctccctaagtgctcggattataggcatgccactgtgcctggccaaaaatacagattttttaatagatattactatggctcctattcttaaaggaaaaaatatgacattttaagactatatgcaagggatattccaataatatcttttttatttaaaaagccactaattagaatcagatttcattaggcaagtgaaatccagattttactagccagaaactgccaggtgtagaaacagcaagaacattttagtcacttcattgttgacatttttgactatcatagattaagtatcaaacacaataacagtattttgttatatgaaccaaatatatc

SEQ ID NO: 97110 - DNA, 358 bp, Homo sapiens
  misc_feature (1)...(358): n = a,t,c or g
tttatatctgtgcattggtctttgaagcttcccttttgtctgtaaacagcaaccagtcgctgacatgacatatttgtgtacaaaggacagtgataattagatatgctggaatttgtgtgtgtgtgtgtgtgtgtgtgtgtgtgtgagagagagagagagtgtgtgttgaaaaaatatggatgagaaactggtagttcgctgcttccttatgggggagggtagaaggcagaatanaaggtagaatagtataggtgactgaaatttttttggaggggaggggcagggtttaccattaatgtactttcattttgcaatagataatacttgatacattgttttgtgtggtttttaacatatg

SEQ ID NO: 97111 - DNA, 363 bp, Homo sapiens
ttattacttgagcccaccaatgggagaccaaccggggcaacatggcgagaccctgcctctacaaaaattagctgggtgaggcggtgcgcgcctgcggtctcaactactcaggagattaaggcaagagaactgcttgaccccaggaattcaggcctgccgtgagctattagggtggtacaaaagtaattgcgcattttgccagcaaaaaccacaattactttgcgtaaacctaacgctgtactccagcttggatgacaaagcgagagactctgtgtccacaaagacaaaacgagaggggaggggagaaaaataattaactgatacaagcaacaatatggaagaatctgaaaacatcatattaag

SEQ ID NO: 97112 - DNA, 127 bp, Homo sapiens
gcggccgagtagctagggttacaggcgcgcaccacctccatgcccagctcttttgtatttttaagtagagacagggtttcaccatgttggtcaggctggtctcgaacttctgacgtcgacgcggccg

SEQ ID NO: 97113 - DNA, 232 bp, Homo sapiens
gtgtcatgagcctgtggtcccggctactcgggaggctgagtcagaaggatctctttagcccaggagttcacggctgcagtgagctatgattgtaccactgtactccagcctgggcgacagaacaagactcctccaaaaacatgcagacttacatacacacacagaacaccgctagatgcttaggtgttcagctgcttcccactgaaggtgaaactcggggtcgacgcggccg

SEQ ID NO: 97114 - DNA, 335 bp, Homo sapiens
gtgaacccaggaggtgaaggttgcagtgagccgagatcgcaccactgcactacagcctgggtgacagagtgagactctatctcaaaaataaataaataaataatacataaaaacaaaagtgaggtcttttcacacatacccttttcacatttaaaatttctcacaaaggtaaggttaaaaattttagcagacccaaatccacatatataagaaattcagcctataatcaacagattaaacttgaagtattattccaaaatagggtaatgaaaaattggctaaaaagtagatgacttactctagacaatgaactagattctcagtcgacgcggccg

SEQ ID NO: 97115 - DNA, 136 bp, Homo sapiens
aaaaaatacaaaaaattagctgggcgcagaggcacgggcctgtagtcccagctactcaggaggcggaggcaggagaatggcgtcaacccgggaggcggaggttgcagttagccaagatcgtgcgtcgacgcggccg

SEQ ID NO: 97116 - DNA, 206 bp, Homo sapiens
ctcctgtagcccacaacttccctgatcagttttactagttattccccctgcctcaagtgttcaaatgtctatgaacaagtcaacagaatgagggttttgttttataagtcaaagcagaggctgggtatggtggcgcatgcctatgatcccagcactttgggaggccgaggcagcaagatcacctgaggtcagggtcgacgcggccg

SEQ ID NO: 97117 - DNA, 373 bp, Homo sapiens
  misc_feature (1)...(373): n = a,t,c or g
tgcttttgcctctcagctcttaagattcttccctttgtcttcactttagataatctgattactgtgtgcctgggtgacaatctttttgcaatgaatttcccaggtctttgagctttttgtatttggatttctagatctctagtgaggccagggaagttttcctcaattattttctcaaatatgttttccagacttttagatttctcttcttcctcaagaacaccacttattcttaggtttggctgtttagcgtaatctcaaattttttggaggctttgttcatttttgttttttgattttttttttaatttggctttgttcgattggattaattctgtcacctaagctggaatgtggtggcgtggtcttggtn

SEQ ID NO: 97118 - DNA, 90 bp, Homo sapiens
ctgcagtgctctgagccctaggattcatctttcttttcaccgtaggtggcctgactggcattgtattagcaaactcagtcgacgcggccg

SEQ ID NO: 97119 - DNA, 90 bp, Homo sapiens; identical to SEQ ID NO: 97118

SEQ ID NO: 97120 - DNA, 352 bp, Homo sapiens
aactgtttgttgaaccacccctgcgtcctaggtatgaagccaacttgaccgtggtggataacctttttgatgtgctgatggtttcaactcgccagccttttattgaggattttcgcattgaggttcatcagggatattggcctgaaactttcttttggtgtgcctctgtgaggttttggtatcaggatgacgctggactcataaaatgaattagggaggattccctctttttctattctttggaatggtttcagaaggaacagtaccagctcctctttgtacctctggtaggatttggctgtgaatccatctggtcctggacttttggttggtagactattaattactgcct

SEQ ID NO: 97121 - DNA, 357 bp, Homo sapiens
gtttacgcggccgcggttttcctttactttttttgttttaataagaaaatatgcactgtcatgtggaaagatttctatccaacattcttattaaaaaaaaaaaagtaagggaaaactaggaggcttataagggataaatttttgtttttttgagaggaagtttcactccgtcacccaggttggagggcagaaacatgatcccggttaactgaaatttccacctccagggttcaggggattttcccgcctaagcctcccaagcagttggaaccacaagcgggggacaccacgcctcgccaatttttgtactcccaataaaaacgggggtcgacgcggccgcaaattccaaatttatgg

SEQ ID NO: 97122 - DNA, 365 bp, Homo sapiens
tttgggaggctttaatcaccaacccatcaacatcaagcctcccccaggccggttcaaataaatgtatttaaataaaaaaaaaaaaaaaaaaaaaaaaaaaaaaaaaaaaaaaaaaaaaaaaagggggggccgggccggaaattccaaaattaaaaatgggaaaatcggaaaaacccccgggggtttttttaaggggggttggggaaaaaataaaatttttttttttaaaaaaaggggggccctttttttaaaaaaaaaaacccctaaaaaataaaaattgggcccgggaaccctcgtttaaaaaaatttttaaaaaaaaaaaaaaaaaggcccattttttttttggaccaaaaattttaaaaaag

SEQ ID NO: 97123 - DNA, 358 bp, Homo sapiens
  misc_feature (1)...(358): n = a,t,c or g
tttnttttctttgggtttgggggtgtatttttggtgtttttgtttttttttttttgtttttttttttttttttttttgtaagggggaaaaaaaaaaaaaaaaatttgggggaaaaaaaaaaaaaaaggggggaaaaaaaaaggggaaaatttttttggggaaaaaaaaaaaaaaaagggggggggggggggaaaaaaaaaaaaaaatttttaaaaaaagaagaaaaaaagggggggggggggcgccggggggcccatttaaaaaagggaaaaaaaaaaaggggggggggggggaaaaaaaaaggatattttcaaaaaaaaaaaaaaaggggggggttgggggggggccgaattttcaa

SEQ ID NO: 97124 - DNA, 353 bp, Homo sapiens
tcttgagtcacttagatcatttagattcagcttacatttatcttttatggaacatactctttttttttttttggaaagggggtttggctccttcccccgggggggagggcgggggcgcattttaagttggttgaacccttggtttccagggttaaggggattttccaccctcaccctcccgagtagcgggaatggcgggcccccccggttttttttttttttttttttttttttaaaaaggaaaagggggggttccccttttgggccaaggggggccaaacccccggcctttgggggacccccccgcccggcccccccaagggggggggattccgggggggaccccccctgcg

SEQ ID NO: 97125 - DNA, 364 bp, Homo sapiens
tctctacacatctaatgaatcactgggttctgtacattgtcttctaatgcattctattctaatatatttgatttccattaccttagaagtagcgtgctaactgcctcatccaatggatacttttgtgtcttatcctttctacaacacttaaaatgttggccacgcccctttgaactttcaactctcttgctttcactttttttttttttttttaaagggaaacagggtctcattttttcttggaggccggagtgcaggggaatcacagttcattgaacccttaacctccagggctcaggggatcctcctgcctcaccctcccaaagtgctaggattacaggcgtgagccactgccccctgcctg

SEQ ID NO: 97126 - DNA, 368 bp, Homo sapiens
  misc_feature (1)...(368): n = a,t,c or g
ggctactctggaggctgaggtgggaggatcattttagcctgggaggctgaggctacaggaagccgtcaaccactgcacactcgagcctgggcaacagagtgtctaaaaaaaaaaaaaaaaaaaaagggggggggccttttttaaggcaaagttaacccttgcggggtggaagggggaaaaaaaaaaaaaaactggcgtttttttttaaactttaaaaataaggcccaaagaaattcggaatcagggggggtcccaacagaggaaaaaggccgaactagggaaactgcaacaaacataccctgttttgaactttaaggccaccttttatggggagcagggggattactattaaacgtttttcaaacccn

SEQ ID NO: 97127 - DNA, 349 bp, Homo sapiens
gccattaatcattgtttttgtggtaattgtgtattgatgtcctttacttattttccggttattaatcttttaatttattataaatatggaaaatattttctcctagtctgtcacctttccttttttttttttttttttaaaacaaacagggtctcattttgttgtctaggctggggggcaggggggcaattttgactaattggagcctaaacctccctggttaagggaatcctcccttttaaccctcccaagtagtttggattacgggccccccccaacaggcccatctaattttggaattttttttgaaaaaagggggttttgccttgttccccaggctagttttgaa

SEQ ID NO: 97128 - DNA, 320 bp, Homo sapiens
atttttatcttactttgttttgagagcaatcctggcttcctagaatgagttagaaaatgttccctcctcttcacattgttgaaagagtttgagaaagattgatgttatttctttaaacatcaaatagaattgaccagtaaagacatctggttcaagaattttccttggtggaatttttttttttttttttttggggcaaagttttgttttggggcccatccgggagggcaggggccccatttgggttaagggcaagctccacctccggggttaatgcctttttcctgtttaagcctcccaaatagctgggactacgggcc

SEQ ID NO: 97129 - DNA, 374 bp, Homo sapiens
gcatgcgctcttgtacggaacgaccacatttactacgttgtcggcccaacctatgcattgggagaactcttctttacagaaacacccatcataatctgaggctgagacaactgattaggtccgctagtaatcggtgcacacgttgtggcgctaaccctcataaactacataagcttgtgactctgacccccctctgtcctactcctgctcgcatgtgctataccggaggccagggcaggaacaggttgcacagcctaccctcccttagcaggggactactcccaccgtgcagcctacgtgaacctaaccatcctctccttacacctagcacgtgtctcttctatcttatgggacactgatagcatcacaacaag

SEQ ID NO: 97130 - DNA, 427 bp, Homo sapiens
agattacactgttgtactccagcctgggcgacagagcaagactcccatctcaaaaaaaaaaaaaaaaaaaattttaccccacccaaaaaggggaccttaaaccccccagggggggcccggggtttgggcccaaagttttatttaacccattttttgtttttgaggcccaaaacatgaaaccccccctgttttttaaaaatggggggcccccccaaaaaaaggacgggggggtttccctaaaatttttttttttttttgaacacggggttcccctcctcccccccggaggggaaccaggggttggtttaattgaacctttacccgcggggaaacaacggggggccccggggcgaagttttggggcttttggaaaagtttggttttgtcccccaggttacttttaaaccccggggctaagggaaccccg

SEQ ID NO: 97131 - DNA, 394 bp, Homo sapiens
  misc_feature (1)...(394): n = a,t,c or g
gagaagaaactaaccaggattccctcagtaacgacgagtgacggcaggaggaccacgaggaaataccctcaaaactaacttgtttacaacaaaataaagtattcactaccaaaaaaaaaaaaaaaaaaaaaaaaaaaaaaaaaaaaaaaaaaaaaaaaaaaaaaaaaaaaaaaaaagggaaaaaaaaaaaaaaaaaaaaaaaaaaaaaaaaaaaaaaaaaaaaaaaaaaaaaaannnnnngggggggggggggtgaaaaaaatttaagggggggggaggttttttagggggagaataaaatatttttttttttttggggggggaaaaaaaaaaaaaaatattttttattaaaaaaaaaatctttttttgtgggggggaaataaaaaaaaaaaaa

SEQ ID NO: 97132 - DNA, 419 bp, Homo sapiens
ataaaatatgacttatcttttctttttaaaccttcagttttttcccatttctttttttttttggttttttggtattggggggggaaaaacaggggaaatgggaccccaaacccccgggggcggaaaaaccccccactttttcccccccaaaaatttagaaaaaaggggcccccccccccccccgggttaattttaaaaaattttgaaaaaaagggcccttgcctttttcccccggggggaaaaatttaaaaagcttttggggaatttggtcaatcggaaaccctctttgggtaaccccccccaaaaatccccaaaaaaaacccccttttttcaagggccccaaaaaaaattttttttttaagggcccaaaacccggggggaaaaaaacccaaatttttttttttctctgggaaaaaaaa

SEQ ID NO: 97133 - DNA, 411 bp, Homo sapiens
  misc_feature (1)...(411): n = a,t,c or g
atgtaattttcctcataacccacaacacacactctttcatatacaagcatagcagaagtatgcttcacaagcgttagcagtgcctggtgttcctgcttctcaccattctccccaacgctggcatggattgggtggtgggatttttgcccgtctggtgagtgtcacgtgatatctcccccgttaggctgagcccctcttcatgttttcattagccgttcctccacatttcctcttctgtggagggccggttcagctcttttgcccagtttctgttaagttgtttgaatttttgcacttttcctttattattcctattattatgnttttgagacagagtctcactctgtcacccaggctggagtgcagtggcgtgatctcagctcactgcaacctccaccttctgggtcaagg

SEQ ID NO: 97134 - DNA, 386 bp, Homo sapiens
atgcttagcccacacttcaggagtagagagttaggcttctcttccttgtgggcagaatagctacatacattacttgaaattattgtgcatggaagaattgtcttttcctccctacttattaatttattcaatctcttatttatactagcatactatcatggttatttattttatacttgtgttataatcaatactacttaatttaatttatttatttgttactcaaatttttccagctttggcctctgggagctctttcaattggctcctctgtcttttcaatacaactctagcagtgcatgtgtgtgtgtgtgtttgtgtgtgtgtgtgtgtgagagtgtgtgcgtgttgagagcatgtctttattctttgacatttcaagatgc

SEQ ID NO: 97135 - DNA, 412 bp, Homo sapiens
  misc_feature (1)...(412): n = a,t,c or g
atcgcttgagcccaggaggtagaggctgcagtgagccgagatcacatgactgcactccagcctgggtgacagagcaagactctgtctcanaaaaaaaaaaaaaaaaaagggataccccaattcccccctagggagaacataaaaagggtttttttttaaaaagaaaaaaaactggaaaaggaattcaggcttgttgtaaaagaaaaggccccttcttttgaataaaaggggggggggcaaaggtggtttaaagggcttttgggttttttaaaaaaaagcctggcccccttggaaaaattttcctcccagccccggggggcttggttggaagggtcctaaaaaaaaccaataaaaaaattttttttttttttccataggaacagggggggggtggttttcaatttggcgggaa

SEQ ID NO: 97136 - DNA, 409 bp, Homo sapiens
  misc_feature (1)...(409): n = a,t,c or g
cccacgcgtccgaaaattaaaaatttaatttataaattttaaaaaaaaaaaaaaaaaaaaaaaaggggtggggtttttttatttaattttatggggaaaatatttaaaaattttagggggggggttttttttttttttttttgggggggctataatatttttctggtttttttaaaaatttttttttttttttttgggggtttttttttacccttttttttttttttaaaaaaattttttttttttttggggtttttttttggaaaaatttcccaaaaaattttttttttttttgtgaattaaatttttttgttaannngnggggccccacctctttttttttttttttttttataaaaaanntttgcccgncngccaccactacaaatgttccttattttatggtttg

SEQ ID NO: 97137 - DNA, 362 bp, Homo sapiens
cacatattgaccatttttgtgtctcttttagaaaaatgtctattcaggtcttctgcccattttctaactggactatttgttttttcactattgaggtgtatgagctatttgcaaatttgggatatcaaccctttatgagatacatgctttgcaaatattttttctcaatccatacgctgctgtttcattttgttgatttagtaattaaaatagaaaatttaaaaattaaaaaacatgccttcttaattcttgtacataatagcacatgaagagacatttgtattgcttattcaataggaagaattatagtacatgcatatttgaaaacgtgatggtattttctggaagagagggctttcttt

SEQ ID NO: 97138 - DNA, 309 bp, Homo sapiens
gtatacttctgtgaatatactaaaaactatggggttttatactacaattagtatgtgaattaaatctcaataaatatgttttttaaaaaagtgtcaccgcattggttggagtggtggtcacctttcgcttgcctttctgtagcccagcccataacaatccttagggccctgtagaaaagcactttgaaagtcatgttgatttctatctccatttttaatttttattttttttgagacagggtcttgctctgtcacccaggctggagtgcagtggcgtgatctctgctcactgcagcgtcgacgcggccg

SEQ ID NO: 97139 - DNA, 365 bp, Homo sapiens
cggggtttcaccgtgttagccaggatggtctcgatctcctgacctcgtgatctgcctgcgtcagcttcccaaagtgctgggattacagtcatgagccaccgcgcccagcccataaaaccagtcttaagaaaaataaaatgagagtgagaataataataatgatgaccattacttatccagcacctgttgtgtgctgaatcttttaatgtattacttcaaactttaggctcaaatactcacagcaactctgaaagataaacattaacatggctattaaaagattcagacatacccaaatccctatagttagtgacagccagagttcaaacctaggcatttccagttccaaaatctgtgtacttata

SEQ ID NO: 97140 - DNA, 360 bp, Homo sapiens
cacgcgcggtggaaattttttgttatgatgtctgtgtggaaagcggctgtgcagacattcaattgttattattatgtcctacaagcataaaagtttgtttctcatccctttctttagatatagtaacagttataccagatatatatatatgtatatatatatatataattttttttttttttttcaaacaggcccgctcttgatgccaatgtttaaacgacaaggaataatactgctcactgtggcctacgcctcccggtttcaaaaaattatcctgcgtcagcctcccgagtatctgggatctcaggtgtgcaccatcacacccacctaatttttgtgtttttggtaaaaacggggttt

SEQ ID NO: 97141 - DNA, 386 bp, Homo sapiens
  misc_feature (1)...(386): n = a,t,c or g
gagacaatggggttttctagatatacaatcatgtcatctgcaaacagggacaatttgatttccttttatcctaattgaataccctaagtatttaggaatcttctccatttctttttatcaggtcaaagtacataagtacatattttagggtcttctgttcttgagggttttttttttgggttttttgttttttcttttcctattggaggtttgacacctatatttttctctgacattttggaaatttgcttcccaaagtcaaaaacataatgcctaacttttcccgatttggccaacatcaactttaaaattctgtggttatctttttaccaagagaatttgcagttttactgccccagccatttcctttttactgattagaatan

SEQ ID NO: 97142 - DNA, 186 bp, Homo sapiens
gttggttactgtatccttgtactaaagtttgaagtcaggtggcgtgatgcctccaacttcgttcttttggcttaggattgacttggcgatgcggactcttttttggtttcatatgaacttgaaagtagttttttccagttctgtgaagaaagtcattggtagcttgatggggagtcgacgcggccg

SEQ ID NO: 97143 - DNA, 366 bp, Homo sapiens
tcaagaccagcctgggcaacatggtgaaaccctataatttttttgtataaactttttatatataataaaagaaagaaataaaaaagaactcaattggagttctataacctggcactgaacaatccaaacatgaatttaagaaaatactgccatcaaaaagaaataaaatagcatcaaaaagaataaaatacttataaataaatttaacataagaagggcaagacatgtatactgaaaactacaaaacattgttgaaagaaattatagaagacctaaataaatataaagacatcccatgttcataaattataagacttgatcttgttatgatggcagtactcaccaaattgatctatagattcaaca

SEQ ID NO: 97144 - DNA, 287 bp, Homo sapiens
ccggggggaagtatgtaggagttgaagattagtccgccgtagtcggtgtactcgtaggttcagtaccattggtggccaattgatttgatggtaagggagggatcgttgacctcgtctgttatgtaaaggatgcgtagggatgggagggcgatgaggactaggatgatggaaccggaacatggagcaaaggtgactcttgttatgtttagcaaagagactggcaacattttgcccctgccctagagatttatggagctgcgagaattaatgtgaagtcgacgcggccg

SEQ ID NO: 97145 - DNA, 349 bp, Homo sapiens
  misc_feature (1)...(349): n = a,t,c or g
gacaggctggtcttgaagtctgaacctcaagtgatctgcccacctcggtctcccaaagtgctgggattacaggcgggagccaccgcgcccggccagcaaatattattaattcggtcccttaaccatgcagaccagcaagtcttagcctcattttcctagccctcattcaaaatggagttgctctggttcaaatacctctgacactttcttacaaatttaactgagattattggagctgaaattacagcttattctataacttttacttttgagcgttcatagtatgacactgatgatactagaaatgaaatctactcagggaatcatgtgtggctaataaaaaagatan

SEQ ID NO: 97146 - DNA, 377 bp, Homo sapiens
cgggaggcagagcttgcagtgagccaagattgccccactgcactccagcctgggcgacagagcgagactgtctcaaaaaaaaaaaaaagaagggttctaagggctcggttaacatccctttttaactaacaggggttaatccctttgggggccttgggttttttttggttttttttttttgggggggaaaaacccccaaaaacccaaatttttgggtggggggggaaaaccccttttaaccttaaaataaacccccccaaaaccccaaaattcttttaacccctggaaatttttagggggggccctccccaaaaaaaaagcccccctttcgcccgttgggaaaacgggccccaaccggcaaaaagaattcccccctt

SEQ ID NO: 97147 - DNA, 379 bp, Homo sapiens
gtgcagcgcaccagcatggcacatgtatacatatgtaactaacctgcacaatgtgcacatgtaccctaaaacttagagtataataaaaaaaaaaaaaaaaaaaaaaattcaccttgcaaaaaccggtgggattcttaaacccccccaacggggaggccaaaagccaaattataaatgaactcctgttaaaaattgccacaaaaaaaaaaaaaaacctaaaactacggctaaaaaaaaaagggaaggaccttttcagggggaactacaaccccctgttcaaaaaaatcaaagatgatccaaccaatgggaaaaactttccctgctcttgaatgggaaaaatcagttttgaaaaaatgaccttgctgcccaaagcaattta

SEQ ID NO: 97148 - DNA, 399 bp, Homo sapiens
cgtccttttaaatatgaagaccacactgaatcatcttctgtggactcaattttaagcaatctgataatataggccatcaaatattaccaagattgtattcccaaagtacattatgagggttatgaaaaattattttggaaatattttaaaactacaaaggagacagttttcatgccattataaatgggggaggaaggggcctttttttttttttttttttttttttttttgagggggacttttttttccccccgggggggggggggggggggaaatttaaacttttggggccccccccccccccggttgggggggtccccccccctaacccccccgaaaggtgggaaaaaaggggggcccccctcccccggggtttttttttttttttttttaaaaacc

SEQ ID NO: 97149 - DNA, 101 bp, Homo sapiens
cgttatcgtcacagcccatgcatttgtaataatcttcttcatagtaatacccatcataatcggaggctttggcaactgactagttcccgtcgacgcggccg

SEQ ID NO: 97150 - DNA, 126 bp, Homo sapiens
aatcaacaccctcctagccttactactaataattattacattttgactaccacaactcaacggctacatagaaaaatccaccccttacgagtgcggcttcgaccctatatcccgtcgacgcggccg

SEQ ID NO: 97151 - DNA, 349 bp, Homo sapiens
attttaatgacctgatttgcatttcaaaagatcactctggcaatggaaaaggccactgaagcacaaactgggggtgctaaaaaagcctgtcagggtacaaataatattatgaaatttttaaaaaagaaatgtattcctactaccatattttggatttcttttttttcttttcttttttttttttttgaaacaaagcctcatttttttaactggcctgaagggaaggggcccaatttgggttaattgaaacctttgcctctggggttaaagcaattttgcctcaccctcccaagaaagggtaattacaggcacgtgctaccacccccggttaatggtttttttttttttt

SEQ ID NO: 97152 - DNA, 347 bp, Homo sapiens
gttgaaccctgaggaggattctagaggatcacttcagtctgagaagttgaggctgcggtgagccatgtttgcgccactgcatgccagcctggctgacagagtaagaccctgtctcaaaaaatatatattgaacttcaaattctttgcaagatatatacatacatatttttggtcttatgctttattggtgccttctacaaaggctgagctgaatgcccttggggtaaatgcagatcctgcagacccagggaagattcgacaattttaaaattttttgtacagatggagtcttactgtgttgcctaggctagttttgaactcctgggctcaagcgatcctcctgcctg

SEQ ID NO: 97153 - DNA, 366 bp, Homo sapiens
  misc_feature (1)...(366): n = a,t,c or g
cggggtttcattgtgttaggcaggatctcgatctcctgacctcgtgatctgcccatctcagcctcccaaagtgctgggattacaggcgtaagccaccgcacccggctggaaaaggcacttatttttatatagactattcaactatagaataagatactgggcatttaagacagttctttcatactagagtctagcaaactatgtattaatattaaatataaccaaatatgtactttcttaatgtttaagggcccccccattattcacatacnatttttttttttttttttttttttaaaaaaagatttgttttgccccctacccgggagggcgggggaaaaattttggttccattgaccccccccc

SEQ ID NO: 97154 - DNA, 356 bp, Homo sapiens
attgggtgcagtgtacactgtttgggtgataggtacaccaaaatctcagaaatcatcactaaagaacttagccacgtaaccaaacaccacctgttcgccaaaaactattgaaataataataataaaatataactttataaaggacaaccaagtatggttacttctatttgaactagtcacattttgttccaccagatttatcacttttctcatactaataacatgggaaactaaattctaatttgatgtgctggtatttatttttgccttggtaaaacatttagtcctatctccaatgtctgtctaaaagaaatagacatctaactaatacaaaacaggcagactagctttattag

SEQ ID NO: 97155 - DNA, 345 bp, Homo sapiens
ttttactattttgatatatacaataaattattgttaactataatttcctaactgtattattgaatactagagtgtatttcttctaactgtatttttgtacccattagcaacttcttttttttttttaaacagggtctcactatgctgcccaggctggttgtgaactcctggcctaaagcaattttcctgcctaagtctcccaaagcgctggaattacaggcatgagccactgaccccagggagcaacttcttttaatcttcctctaaaagctctctttggaaggcaattttctcctttttaatttttttggctttggatttggggcttttttaaggcggagtctc

SEQ ID NO: 97156 - DNA, 410 bp, Homo sapiens
  misc_feature (1)...(410): n = a,t,c or g
gccggagcaggaacaagtggaacagactaccctcccttatcagggaactactcacaccctggagcctgcgtagacctaaccatcttttccttacacctagcaggggtcgcctctatgttaggggccatcagtgtcatgacaacagtgatgaatattgaaccccctgccataacccaataccaaacgcccctcttcgtctgatccggccgaaacacagcaggcctacttctgctatgtgtcccagtcctagctgctggcatcactatactactaacagaccgcaacctcaacaccaccttcttcgaccccgccggaggaggagaccccattctataccaacacctaaaaggaaagagaggaattattatttgctcacaccgagacagaatataanggctgggggggggcgg

SEQ ID NO: 97157 - DNA, 409 bp, Homo sapiens
aggaattagaaccttgtggtttagagctgggatttttagagtcatgggtctgggttcaaatctagctccttcactcatgagctccttgaaaatgagcaagttgcttactccaagcctcagtttctcattgtaaaatgagaagaataataatacattcttcacatttgatatacaaatggatgaaatattatggataaattatttactgtgccaggcactgtgctaaatagccaacagatattagccttcgtttttcttagtgaagagctcataatcaaaagagaaggtaagcacaaagacaaaaacaagacttataaagctacagaaacatgactgggcacagtggctcacgcctgtaatcccagcactttgggaggctgaggcggccatatcacaaggtcaggagttt

SEQ ID NO: 97158 - DNA, 468 bp, Homo sapiens
  misc_feature (1)...(468): n = a,t,c or g
actaaagcaatatattagtgatgccccatgtaattcttcaatgttaaacagggcagtcctctttcgaaagctaagatgaccatgcggcccttgtcctctgtatcatagtagcgccgttgaagatacagccgccactcacactaacactagcaccaccacatgtaaatagtcgcctgacaatgtggatactagcatagaaggttattaatgctgatagtaacagtggtcaagaacacacacttgagcaattgctatgcacggttgcaaatatgtcctaaagatggaaagtaataaaatatatttgaaatgtnnaaaaaaaaaaaaaaaaaaaaaaaaaaaaaaaaaaaaaaaaaggggggggggccttttaaaaaaaccctggggggggccaaatttacgggggggggggaaggatatattttttttcttagaggggggaaaaaaaaccccccgggggatttttgggaa

SEQ ID NO: 97159 - DNA, 420 bp, Homo sapiens
ccttcttcgaccccgccggaggaggagaccccattctataccaacacctattctgatttttcggacaccctgaagagtatatgcttatcctaccaggcttcggaatactctcccatattgcaacttactactccggaaaaaaagaaccatttggatacataggtatggtgtgagctatgatatcaatcggcttcctagggattatcgtgtgagcacaccatatatttacaggatgaatagacgtagacacacgagcatatttcacctccgctaccataatcatcgctatccccaccggcgtcgaagtatttagctgactcgccacactccacggaagcaatatgaaatgatctgctgcagtgctctcagccctaggattcatctttcttttcaccagaagaggcctgactagcattgtat

SEQ ID NO: 97160 - DNA, 418 bp, Homo sapiens
aacttaattaaccactcattcatcgacctccccaccccatccaacatcttcgcatgatgaaacttcggctcactccttggcgcctgcctgatcctccaaatcaccacaggactattcctagccatgcactactgaccagacgcctcaaccgccttttcatcaatcggccacatcactcgagacgtacattatggctgaatcatccgctaccttcacgccaaaggcgcctcaatattctttatctgcctcttcctacacatcgggcgaggcctatattacggagcatttctctactgagaaacctgaaacatcggcattattctcctgcttgcaactatagcaacagccttcataggctatgtcctcccgggaggccaaatatcattctgaggggccacagtaattacaaacttactat

SEQ ID NO: 97161 - DNA, 414 bp, Homo sapiens
tttcgtccggcctagccatgtgatttcacttccactccataacgctcctcatactaggcctactaaccaacacactaaccatataccaatgatggcgcgatgtaacacgagaaagcacataccaaggccaccacacaccacctgtccaaaaaggccttcgatacgggataatcctatttattacctcagaagtttttttcttcgcaggatttttctgagccttttaccactccagcctagcccctactccccaattaggagggcactggcccccaacaggcatcaccccgctaaatcccctagaagtcccactcctaaacacatccgtattactcgcatcaggagtatcaatcacctgagctcaccatagtctaatagaaaacaaccgaaaccaaataattcaagcactgctta

SEQ ID NO: 97162 - DNA, 423 bp, Homo sapiens
tggaacactatacctattattcggcgcatgagctggagtcctaggcacagctctaatccttcttattcgagccgagctgggccagccaggcaaccttgtaggtaacgaccacatctacaacggtatcgtcacagcccatgcatttgtaataatcttcttcatagtaatacccatcataatcggaggctttggcaactgactagttcccctaataatcggcgcccccgagatggcgtttccccgcataaacaacataagcttgtgactgttacctccctctctcctactcctgctcgcatctgctatagtggaggccggagcaggaacaggatgaacagtctaccctcccttagcagggaactactcccaccctggagcctacgtagacctaaccatcttctgcttacacctagcaggtgtctc

SEQ ID NO: 97163 - DNA, 409 bp, Homo sapiens
tgtgccctgtttgggttttcatgcagtgggttttctcccctttcctttttggctccctctccaccctaccatcacccacatcacccctactcccaagataactggttgataatttatgatgctttcttgcatattttatcaatgctcttagttatactatacatgtatagcgatagccattttatatgtacacatacaacacacagaacattgataatgtaatcatgttgtgcatacttctctacatgtctcttttttttttttttttttccggaaagggagtttaattttgccccccaggctggagggcaagggcataatcttggttaactgcaccctccgcctctggggttaaagcaattttcctgcctcgccctcctgagtagttgcaataacgggcccccgtccc

SEQ ID NO: 97164 - DNA, 394 bp, Homo sapiens
agctttagcaaatatgtgggaacagattcgctctctccatcagtatgctgtccataggatcatcagtttattttctttgctgtctaaaaaacacgacagagttctggaacaagccacacagtacttgagaggttctctgaatactaatgatgttcctctaccagattatgcacaagacctaactgtcattgaagaattgattccaatgatgttagagatcatcaactcctgactgacaaattcccttcaccacatcccaaacttggtatacgccctgctttactaacgcgatctctttgaacaatttcgaactcatccttcatttcaggatataatgcaaaatattgatctggtgagtgtaaatgaagacatttattatgattcttttttaagt

SEQ ID NO: 97165 - DNA, 418 bp, Homo sapiens
gactggggaaggactgagccatctgtgtggctgtatgggctgttctctagtgagtgagggggtaaaaggccaagcacattatgtggaaagtggggacatggcactgaagcagagtcaggagtgtggtctgagcccctaagaggagcatcagggagtccagtggccagaatgtgctaaggctggtggaaaatgctgataacaatgtcttgtatatggttctagcaagagtgagagggaagaggtaggcttacaactttctagggatggagagagtggacagaactaatcatattttatatcttcttcgaaaccacacttatccccaccttggctatcatcacccgatgaggcaaccagccagaacgcctgaacgcaggcacatacttcctattctacaccctagtaggctcccttcccc

SEQ ID NO: 97166 - DNA, 443 bp, Homo sapiens
ccaagaattcggcacgaggtcagcatgcacacgcagtcttaggtggacacatctgtgctgcacacatggacgcctggttctgtcaggacgtggcagcagttgtgcctcatggtgttgaaagtgttaccatgtcaagctcacaagttctgtggttgaaataaatgcagcgtggcatccagggtgcccaggggcatgtctgccctctcagtgtccaggactctagtttcgtgaccttccgtccagacctttccttgttgtccattatcagaggaggggccgtggttgctgtgtgtggccatgacaccctcccctggcgtccctgtgcccacagagagagcgctgtacagcatggaatgtgcgttccaccccctgttcagtctcaccagtggggcctgccggctggattaccgcacacccgataacaggtgagtgcagctgccctg

SEQ ID NO: 97167 - DNA, 410 bp, Homo sapiens
gaggtgcacctggggaggcaggcagagcctgatcagagcgatggtgaggaggacttctactacacagagctggatgttggtgtggacacgctgaccgacgggctgaccagcctgactccagtgacccccacagccttcatgccgcctgccttcccccgcctggagctgccagagctgctggagcccccagccctgcctagacccctgcggccgcctgccccgcccctgttcccgccccctgttctgagcaccgatgctaacccccaggcctgtcacagagaccgtgtctaccagggctgcctgacgcccgcccgcctggagccgcagcccacggaggttggagcctgcccacccgccttgtccttcacgatcggagtcaccctgaggaagccccgcggcgacacgaagat

SEQ ID NO: 97168 - DNA, 441 bp, Homo sapiens
tttcgtgcagcaacaaaaatctctttgcagcagcgttgaccacgtgaattgtcttggacgcagcagcagcgttgggcgttgaattcactttgccgggcacctcgcgggtctgatgtcccacgtgtggtggaaaatgcaatctggagtgttcctggggagctctgctgtgtaaaccttggctttacagtgagaagacgggctgatcacagatgtgaaccgtcaggtaaccagggctgcagtgagagccacagatttcatgggaagtggaagaggagatggaaagagagtcttgctgtgtcacccaggctggaatgcagtgtcacgatctcggctccctgcaacctctgcttcctgggttcaagcgattctcctgcctcagtctcctgagtagctgggatcacagaaactttgaataaacctacagaccttattagactcaag

SEQ ID NO: 97169 - DNA, 440 bp, Homo sapiens
  misc_feature (1)...(440): n = a,t,c or g
tcctctagagcggccgcaatacatgccgtcggaaatggtgaagggagactctaattactctgaggcttgtaggagggtaaaatagagacccagtaaaattgtaataagcagtgcttgaattatttggtttcggttgttttctattagactatggtgagctcaggtgattgatactcctgatgcgagtaatacggatgtgtttaggagtgggacttctaggggatttagcggggtgatgcctgttgggggccagtgccctcctaattgnggggtaggggctagggtggagtgggaaaaggctcanaaaaatcctgccaagaaaaaaacttctgaggtaataaataggattatcccgtatcgaaggccttttttgacaggtggcgtgtgggggccttggtatgtgctttcttgggtacatcgcgaagaaatcgccgacccgg

SEQ ID NO: 97170 - DNA, 428 bp, Homo sapiens
tcctctagagcggccgcaatacatcggttgttttctattagactatggtgagctcaggtgattgatactcctgatgcgagtaatgcggatgtgtttaggagtgggacttctaggggatttagcggggtgatgcctgttgggggccagtgccctcctaattggggggtaggggctaggctggagtggtaaaaggctcagaaaaatcctgcgaagaaaaaaacttctgaggtaataaataggattatcccgtatcgaaggcctttttggacaggaggtgtgaggtggccttggtatgtgctttctcgtgatacatcgcgccatcattggtatatggttagcggagtggttagtaggcctagtatgaggagcgttatgggagtgaagtgaaatcacatgcctaggctcgaggccataaagatgtctctaat

SEQ ID NO: 97171 - DNA, 415 bp, Homo sapiens
tattatgatttttgaagtctggggaatcatttttcattgacattttttgctagtgtgacttcattcgtcatgattacttggcactgaccaaaatgttgttactgagggaataatggagaatgcagctattcatgaagcaagaagaagctggtgcagtaaagatgtctttctcattgccttgcttttcccatgctgtccattttattcataccctcccaacttctttcccttcccttccatgtcaaatggatttttttttttttttttttaaacaaaaagtttaattgtgtcccccaggctggagggcaggggaaaaatttaatttaattgcaccccccccctcgggggttaaagaaattctcctgcctcagaatcacaagtagttgaaattacgggcgtgaaccacagccctcgg

SEQ ID NO: 97172 - DNA, 398 bp, Homo sapiens
acgaccggccaggaggaaccagcatttgtccattaaacaagagccctggctctgctaggtccacatcacgtcttggacaagtctgaagatcagaatgctgaggctgtgctctgccgaggctggtaaaaataaacctccaaacacatgtgcttgacatgtgtggccaaggaaatgtctaccgtgcctccagttggaggcttgtaccaggagaaacactaaagaggagggaagcggacaagcctatcacactggcagcaccagttagtaagggtaggcagcacacattgttgattcgaacgtgaattgtcttgcagagcaatttaacaatagctaataaagctgggcgtggtggctcacacctgtaatcccagcactttgggaggccaaggtgggtggat

SEQ ID NO: 97173 - DNA, 395 bp, Homo sapiens
  misc_feature (1)...(395): n = a,t,c or g
cccacgcgtccgcacggtgaaaccccgtctttactattacggtctccatctcctgacctcatgatccgtgcgccttagcctcccaaagtgctaggattacaggcatgagccactgtgcccggccagaatctttgatttaatcaagctcccattgctctgctggcttggtaaatttgagaacctctgctaaaggcattgaggagcccaggagatttctacatttatatgttcacataatcatatttgcattaggaagatacgtccaccatattgtgtgcaggatgcactaggcactagaacttgcagaatttggagcgaggcatggcagttgcgggttgtggatcangtgagagtagagggtgcttatacttangcagtgatgatggcaatggaga

SEQ ID NO: 97174 - DNA, 393 bp, Homo sapiens
  misc_feature (1)...(393): n = a,t,c or g
cacgcgtgcgcacggngaaacctcgtctttactattacggtatacatctcctgacctcatgatccgggcgccttaacctcccaaagggcgaggattacaggcatgagccactgtgcccggccagaatctttgatttaatcaagctcccattgctctgctggcttgggaaatttgacaacctctgctaaaggcattgaggagcccaagagatttctacatttatatgtccacataatcatatttgcattaggaagatacgtccaccatattgtgtgcacgatgcactaggcactataacttgcagaatttggagcgaggcatggcagttgcgggttgtggatcaggtgagagtaaagggtgcttagacttacgcagtgatgatggcaacggaga

SEQ ID NO: 97175 - DNA, 410 bp, Homo sapiens
  misc_feature (1)...(410): n = a,t,c or g
agaccagcctgggcaacacagcgagatctcttgggggtaaaacaaaaagaaaaaaaaaagttcatacttctccaataaataaagtctcacctgttaaaaaaaaaaaaaaaaaaaaaaaaaaaaaaaaaaaaaaaaaaaaaaaaaaaaaaaaaggacaaaaaaaaaaaaaaaaaaaaaaaaaaaaaaaaaaaaaagaaaaaaaaaaaaaaaaaaaaactctccccggggggggggtttataaaaaacctcggggcgcccttaagaaaaaccctttttttcggtgggtctttttttttggcaaaactacataaaaaaaaaaatgtgttttgggaaaaaaaaatctttttggtgggcgggagaaaaaaaacccccccctctttttttgttggcggtttccntcacctccccct

SEQ ID NO: 97176 - DNA, 381 bp, Homo sapiens
cccacgcgtccggacccacgcgtccgatttagacgacggccgcccttttttttttttttttttttttttttttttttttttttttttttttggggggtttttttttttaaaaaaaaaacaggggggggtttttggggagcccccccttttaaaaaaaggggggccccgttttttttaaaaaaaagagaacaggggggggcttttttaaaaaaaaaccgggggggggggggaaaaaaaaaaacccccccccgggggggggggcccccccaaaaaaaaaaggggccccccccccccccccaaaaaaaaaaaaaaggggggggccctttaaaaaaaccctgggggggggcccattttccgggggggggggggggtaaatttctt

SEQ ID NO: 97177 - DNA, 408 bp, Homo sapiens
ttggccaggctggtcacgaactcctgacctcaagtgaggtcacccgcctcggcctcccgaagtgctgggattgcagatgtgagccaccatgtccagccaagaattagtatttaaattttagatactctttttttttttttttttggaaaaaaagtttggctccttcccccttgctaaagggcgggggggggatttgggttaattgaaatttccgctttgggggtaaaagtttttctcgggcctaacccttcaaggaacggggatttacgggctggtccccccttcccagtggtttttttggttttttaaaaaaaaacggggtttacccttgccccccgggcttttttgggggtggataatccttcagctccaacaaaccaaaatttttttttttggggggccctaaag

SEQ ID NO: 97178 - DNA, 394 bp, Homo sapiens
  misc_feature (1)...(394): n = a,t,c or g
agtgggtgaaatgggtccctgggtgacatgtcagatctttgtacgtaattaaaaatattgtggcaggaaaaaaaaaaaaaaaaaaaaaaaaaaaaaaaaaaaaaaaaaaaaaaaaaaaaataatgggggggcccccctttaaaaaaccccttggggggcccacacccccccccggaaaaaaaaaaaatttcttccccttttaagggggcgattaaaaaacccccttttttttttttaaaaaaaacccctttcttggggggggccaaaaaggcccccccccccccccaaaaataaaaccccccgggaaaaaaaaaaattttttgggggggggggggggaaaaccccccctttttggggggggaaaaaaaattccnncnnncccctcaaaaaaaaa

SEQ ID NO: 97179 - DNA, 506 bp, Homo sapiens
  misc_feature (1)...(506): n = a,t,c or g
aggtgccnnnnnggggggggttagaacgcctgtagactgacttcatctgaagggtcgacccacgcgtccgcttttgtttatattgttttgtctcctaaattgttgtaattgcattataaaataagaaaaatattaataagacaaatattgaaaataaagaaacaaaaagttaaaaaaaaaaaaaaaaaaaaaaaaaaaaaaaaaaaaaaaaaaaaaaaaaaaaaaaaaaaaaaaaaaaaaaaaaaaaaaaaaaaaaaaaaaaaaaaaaaaaaaaaaagggggggggggggggttaaaaatggtgagaggggggggcccccccccttcggaaaaaaaaaattttttttttttttttttggaggggaatgaataaaagatcttggagagcaaaaaaaaaaaaatttttttttgggggggaaaaaaactacccaaaaacaacaaaaaaaaaaaggacgtgtgggggggatttttttttttggggggggggggggccccctactcgtgtg

SEQ ID NO: 97180 - DNA, 407 bp, Homo sapiens
ctagatctagatcgcgagcggccgcccttttttttttcaagaattggaaggggtggggagatatataaataaatcatgaaatcattacaaaaaaaaaaaaaaaaaaaaaaaaaaaaaaaaaaaaaaataaaaaattaaaaaaaataaaaaaaaataaaaaaaaaaaaaaaaaaaagaacaacctgcggggggcttctaaaaaaaaaataaagggaggacttaaatcccgcccctcccctggaacatgtcattttttaaataaaaaggtaaatttctttctattggagctataatttaaaaaaaaataatctttgttggggtaaaaaaaaaaccaccctccactcccttaattcttctcccaaaaagttaaataaattctttttatttgttatttgccccctcacaag

SEQ ID NO: 97181 - DNA, 379 bp, Homo sapiens
aaaaaaaatatatttggcctcctaacttgctgcggacgctgctgaagcctgatttcatttatgttaataggaatactcctcaaaaaaaaaaaaaaccggtggaacccgggggttggcggggcctcacttcccatggcccctttaccccccccaacccaaatttcattagggatctggccccaaaaaaagggtttttccctccaaaaaaaaaaaaggggggggccttttaaaaggtcccttgggggggccaaattttccggggggggggaaagtaattttttttccttttagggggggccttttaaaaccccctgggggtttttgggaaaaaccctttttttggggggggggccattgggggcccacccccctccggaat

SEQ ID NO: 97182 - DNA, 395 bp, Homo sapiens
ttccctggggacaactgagcagcctctggagaggggccattaataaagctcaacatcattggcggaaaaaaaaaaaaaaaaagaaaaaaaaatggaaaggacttttgtgggttcctttgggggataaaaatttaagggggggggggccgttttttggggtctcctttgggggcccccctacaggggccgggggggaagctttgcttttttcttttttttggggggggtaactcctgggggattttttttgggaaaactttttttttttggggggggataattttttcttacccccccccggggttcctcaccccttgaggccttttttttttggtgtgggggggggtgtttctcctgcctcccctcttgccctgtggaaaacattagggctcatg

SEQ ID NO: 97183 - DNA, 485 bp, Homo sapiens
  misc_feature (1)...(485): n = a,t,c or g
cgcccctccgtttgagntccttacttatagtctgagcaaccgcnccggaanncccgggncgacccacgcgtgcggccaaatttgtccagagtatctacactattttacattcccaccagcaatgtttgagggttggaattttttggacttccttgcgacatttgctatttaccattttcttgatcttagccatcctagtgagtataaagtggcatctcactgtgattttcatttgcatgttcctaatgactaatgatatcaagcatcttttcatgtacttattggccatttgagaatcttctttggagaaatgtttattcaaatcctttgcccatttttttttaaagaggcaaggtcttgctttgttgcctaggctggaatgcagcagtacaatcatagctcactgcagccttaaagtcctgagtccaagtgatcctcctgcctcagcctcccaagtagctaagactaaaggcgcaacaccctgn

SEQ ID NO: 97184 - DNA, 443 bp, Homo sapiens
cccaaacgtagcagcaccactatggaaactgtgtatttataaaaaacaataaaaaggcatatttcttctcttaactcatttgaaaagcaatactataaaacaatatgtattcatgtattgttgggtctataacatataggaatgtaatttgctaataattgcacaaaggaaggcagtaggggcaaagctgtactggataaaggaaatgaatccagataattcatttctggattcttgaatctacaggaagaaagagaaatagcatttttttttaaggttaacataaggctgggcgcagtggttcacacctgtaatcccagcactttgggaggccgcggcaggcggatcacctgaagtccaggagtttgagaccagcctggccaacatggtgaaccttgtctctacttaaacctacaaaaaaattagctgggtgttgtggtggg

SEQ ID NO: 97185 - DNA, 412 bp, Homo sapiens
aggttgcagtgagccgagattgcgccgctgcgctccatccacagagcgagaaactgtctcaaaaaaaaggggaggaaaggaaggaaaaacccggggggggacgggggaaacccccaaattggcccggccttttttggggggggaaatgggaaaacccccgggcaaaaaccccaccaaccccaaacttgggggcaggggaggcatttaaaaggggggggggggggcccaaaaaggaagggagtccccccaaaaaaaaaaacccccacaatttgggggggaacccccttggcatttggggtggaacccaattggtggggccacacaggaaaccctgggggagcggacccaaaaccacctggaagggaaaaataaagtggaggggcccaaataaccggacctcacacagggccgg

SEQ ID NO: 97186 - DNA, 475 bp, Homo sapiens
  misc_feature (1)...(475): n = a,t,c or g
gtgccaactgtcgccttaggaantcggcacgccgagagagagagagagagagagagagagagagagagagagagagagagagagagagagagagagattgccaccgcgagatcttagagaaaaaagagcccaggacgtttttgctacacacccaaattatgaatttgtgtgtgtgatcagacactatagaggatgtgtggtttatacaccattaacaaccgcacattctattgatgcacataagatgtgtgtgtgtgtaaaaaaacgccctctctataaaaaaaaaaaaaaataaaacttttgggggggggggcccggccccattttcccttttagggggggcttttaaaattccgggggccgttttttaacacgggggggggggggaacccnnnngcttncttaatttacccttgttgggaaaatcggcggccgtttttttacggacgtgctacctttatttttttgtagggcg

SEQ ID NO: 97187 - DNA, 376 bp, Homo sapiens
  misc_feature (1)...(376): n = a,t,c or g
gggggggnacggggagatttgggttttgacccgccttgatgaatcctgcacgagtctcgatcccttgacctcatgatccgcccacctcggcctcccaaagtgctgggattacaggcgtgagtcactgcacccggccacatcacctcccatgttctatcttacgtattcagaacttgttcatcttgtaactgaaagcgtgtaccctttgaccaacactgtttttcctgtcttaacaggatctacagatcaaggacaggggaggggatagtggaggaaaacggagttagtctgtttctaaatgaggggacagtatgtttcttggggcctgaggacagcttaataaagtagacaaatgaagaaaaaaaaaaaaaaaaaa

SEQ ID NO: 97188 - DNA, 344 bp, Homo sapiens
ccctccgcccgccgagactggaaaaacatccccaaattgcccccgccccggggaaaaaacccaacggggtttttttttttaaaaccgggggggccccaaagggggccgggcaaaaaggggggaaaaaatttttaatcctttggaaaacctttttaaaaaggggggggccccccccaattttgccccccccccccccggggggggtttttttttttttttcccgggggcccccccggggaaaaaaaggggggggttaaagggcccccccccccttttttttttttttggcccccacccccgcccaatctttttttccccccgggggcttaagggggcaaaaggtt

SEQ ID NO: 97189 - DNA, 212 bp, Homo sapiens
acttgggaagctgaggcaggagaattgcttgcactcaaaagatcaaggctgcagcgagctgcaattgtgccactgcactccaacctgggtgacggagagagatcctgcctctaaaaaatatattacagtggggaccctagtatttgaataaaaaccagtctaacttcagtgtgtgctgccctttccattatacccagtgctctcagtcacaa

SEQ ID NO: 97190 - DNA, 485 bp, Homo sapiens
  misc_feature (1)...(485): n = a,t,c or g
nctcgattgcactcggtcgngcgggcaattccccttctccatctcggcactagaattcgccactctcccaccccccagcccccacctctgtcttcaggtctcatcttccaccccaaaaatgtctgtctctctctttttgttttgtttgttgttggttttttatttctttttggtttgctttctgtttttgttttgtttttcttttttttctttctttttttttttttttacaattttggggccttcgggtccaaggaaaacctttttttttttgttaaaaagggggggaaaaaaaaacccaaaggcccccgtccttttttaaaaaaccaaaaaaaagtttgtccttttttttttaaaaaaaaaaaaaaaaaccccccccttttttttaaggggcccctttaaccccccgtgacccccccgggtgggccttttttttgcccccccttttgtttttgccccccccccgggcttttttttgccctgga

SEQ ID NO: 97191 - DNA, 410 bp, Homo sapiens
  misc_feature (1)...(410): n = a,t,c or g
cccatcctctgtcaacaaaagggtcatttgcgaattcctcttctcagtgatcatgaatctctgggccttgattnttttttttttttttttttttttttagaaaagggaggcccccccttccccttgggggggagggaagggccaaaatttggttaaagggaagcccccccccggggggaaagggttttttttgggcccaaccccccccccgagggagggggaaaaaagggccccccctacccccccgggtaattttttgtttttttaaaaaaaaaccgggttccccctggggggcagggggggcttaattctccgaccctaataacccccccgttaacccccccaaaggggtgaaaaaaagggggggggcccccccccccccccccggttttttttttgaaaaaaaaaag

SEQ ID NO: 97192 - DNA, 461 bp, Homo sapiens
  misc_feature (1)...(461): n = a,t,c or g
ggggaatcgagncccttngnnattgacgatcatctatccagtgcggtggaattctgctgttttattttctttattttatggttttcaatgatatatttgttgttctttgaggcttcagtgctataacctctattcttataagtatgctgtttagttgtatttaatattatttttttaaaatgtactgtctgctttttaactttagatgtcattggattttttatattttattttgaatgaagaccatcgcacagattgggaactgaatcttctttagagatgcttatcttggatatttttttctttttcttttttttttttttttttttgggggaaaactttacttgtgaaccccaggtggaagggcgggggggtaatttaacttaatggaaccttttacttggggggtaaaacaatttttcttcccttcccccctggagaacttaaaattccggggcccc

SEQ ID NO: 97193 - DNA, 468 bp, Homo sapiens
  misc_feature (1)...(468): n = a,t,c or g
agaaacctgataccntggnaannnctgatgacactaggacagngcggnggaattcgatctggaaactgagcttagaaagaaaaatgaagagcaatttcaacttgtttgcaaaatgaacagtacaaatggctaactacaataaccagtgtagagaagtccttaaatgacctgacggagctgaaaaccatggtatgagaactacatgacaaatgcacaagcttcagtagccgattcattcaactggaagaaaggatatcagtgactgaagatcaaatgaatgaaatgaacaatcctcccctcatccatggtttcattttctatggttccagttactcatggtcaaccatggtcagaaaacaggacaaactgagagtaaaagatgcaggaataaaacacagaaatcaaaataaagggtttactgctgaaaaatccgcttgaacaagcctgttaatgtgatcttcctgaatg

SEQ ID NO: 97194 - DNA, 452 bp, Homo sapiens
  misc_feature (1)...(452): n = a,t,c or g
accgaagacctttagtcacngtggtggaattcggctggtctcgaattcctgatctcatgatctgcccgcctcggcctcccaaagtgctgagattacaggcatgacccactgtgcccggccttacgttttaggtttacttcagtaaattaatagaggattaagtgtggatcattgtgttatatacatgccactgtgctggatgttacaaggaacacaagacctacttattattcttgctgcctgccaggatcacaatcatagaaagtagctgatgaataagaatatggtggaatcaatggattctttgccttagttcagcaaaatctatagtatggccactatggacaaattgaagccacattccttccagctattaccactgagaaagagacacttaaaacaagaaagctaactagttgttaagtaatcttgaagaacaattttttattttn

SEQ ID NO: 97195 - DNA, 421 bp, Homo sapiens
caggaggttgaggctgcagtgagctgtgatcgtgccactgcactccatccagcctgggatagaatactgtcagaaagaaagagagaaagaaaggaaagagagagagagagaaagaaagaaagagagaaattatacctgggtttggaccctgtgctcaccacaaaggagctgtgaccttgggcaatttatttcctagagtccaagtttcccaactggtacagaggagaaaaataataataacagtaatacctgacaggttgggagagattgtgctggtgtcacagagtctgtgacggcacttgtaagggagtgctgcataaatgagagtggctgctgttgttgcattattgttttacatggttataaaacttccctcaagccccgtttgaaaagagaaatcagtagttggcaaacaaattcg

SEQ ID NO: 97196 - DNA, 473 bp, Homo sapiens
  misc_feature (1)...(473): n = a,t,c or g
aattgttcctatcagtagggttattgtgagacctaaaatgtaattgaagtttttgcatgtgaccctgcccttaattcagttgctttaaaaacgtttgaacatagtagaaaatgtaacagtgttgctcttagtgtttctcatatatagggaataaaagaagaggttttataatagcacttgtctcacaagatttatgagcgatttgaattttacagatctattcctaagcaaaagagccttaagtcnnnnnnnnnnnnnnnaaagaaaactagcaggtacctttccgtttctgtggaagtcggggcccttccaaacaatattggctgctgctcaaaggatgggtgggaatgaccctaaagaaactcgagtcttccatgctggattnnnnnnnnnnctaggggaaaacaagtaagtctggaaaatctgaaaatggtaaggatatacttgatcccaaaaggttacttttcatttga

SEQ ID NO: 97197 - DNA, 439 bp, Homo sapiens
ctagactttcattacactgagcggaggaagtgccatgctctatactaaacgaataacctatctgagagtcaactcagataatacagatatctattgtcaagggagttattcccagaaaacagtagcaagggcagccacgagggctaaccaaataacttactctactgccagggaggaggtcttcacagctcatgcccagcaggatttgataactgtcatgggcctgtgctgctgagtggactgtaacacagcctgctaatttccccctagattacattcttcccttcttccttttaataagagaatcctctaaattttagaggcatatggccacccaactggaaactgcagcttccaggccaggcgtggtggttcatgcctgcaatcccatcactttgggaggccgagggggtcggatcacgaggtcaggagttcatgg

SEQ ID NO: 97198 - DNA, 442 bp, Homo sapiens
  misc_feature (1)...(442): n = a,t,c or g
ctttgaagttcgattacaccagngcggnggaattccatgctggtaatctcagcactttgggaggctgaggcaggaggattgcttgagtccatgaatttgtggttacagtgagtaaaatcacatcactgcactccagcctgggtaacagagcaagaccctgtctctagataaatagatagatagacagacagatagaacagctgtataaaagtgtttctgtgtttctgttctctgtccactcagtagccttggtaaaactgaatttgaaaggtggagaaaaacattgtagttagcattcaaaagataatatttgctgtgacagtgacctttatgtgagattacttgaaaaattgttaaaacaggtttgcacagtcctgaacactgaactggagagtttgctgacaattccgattccaaaggaaagctttccaaatcagtcatg

SEQ ID NO: 97199 - DNA, 442 bp, Homo sapiens
  misc_feature (1)...(442): n = a,t,c or g
cctagactttccataccctctacccangcggnggaattcgggaatggctgggtagatggctctaatccctgtaggcactggggatgttttctgttgcctgagaaccaggtgcctgggctgacaggtgttggcttggaagggtcttgttaacccacctgctttggccatgctgtctttattttttttattttataatatttattttaaatagcggagatagggtctcactctgttgtccacgctggtcttgcctcaagtagtcctcctgcctcagcctcccagagtgctgggattacagatgtcaaccacttcacccagcctgtgctgtctttattgaaaatagcaagcgatgattttccaaaccagaaggccaagcaggaaagcccagcgcgtcccttgccctcaaactcagctcttggggaggtgtccagtgacgtccttn

SEQ ID NO: 97200 - DNA, 461 bp, Homo sapiens
  misc_feature (1)...(461): n = a,t,c or g
nnnnttttgagtgcatgcgctngngcnggaantcggagctgttcctattcggccatcttggctcctcccctccttcaataaatatttgttgagcatgagcaccagtgccaaatactgtgcctaatcacagtggttgctgtcaaggagtatatacactagctggcgagactagtgtgcaaaagacagggttaaagggccagcagagaggcgaaggttgcatatgtattggagtattgcgttggaagatgctttctttttaagcttgtaagtaaagacaggaataacttaagagtaccttattgcatgaccgtgtagcaaaatatttaaagtctggacttctacattgaaacagatttgtgtttaaattctagctccaggctgggcgcggtggctcatgcctgtaatcccagcactttgggaggccaagacgggcggatcacaaggtcaggaaattgagaccn

SEQ ID NO: 97201 - DNA, 464 bp, Homo sapiens
  misc_feature (1)...(464): n = a,t,c or g
ggcgcggnnctttccatagatagcctagcncangngcnggaattctcacgatggtctcgaactcctgaccttgtgatccgcccacctcggcctcccaaagtgctgggattacagatgtgagccaccgcgcccagtcctatgttaaattttaagagttttgtgatttttttgtaactggatttatcagttcggtgctactaaattgtagttttctttggccagaaacagttgtgtggcaataatttcatagggttcaaactaaacataaaaatcaccaagtcataaaatgttcctttcctgttacctcttagaaaataaaaattaaagtccctggtctttgttgcaggacattcaggtttttctcttttatgggaatttttgtccattcagggtctgtccgtgcagagctcttgctatctgggaaataatgtgagttccttgtctctgtgttacaggaagaatat

SEQ ID NO: 97202 - DNA, 476 bp, Homo sapiens
  misc_feature (1)...(476): n = a,t,c or g
gagcagagnccgcctaggaaaccttcgatagatcaccgtaggacagngccgcggaattccataacgctcctcatactaggcctactaaccaacacactaaccttataccaaggatgtttcgatgtaacacgagaaagcacataccaaggccaccacacaccacctgtccaaaaaggccttcgatacgggataatcctatttattacctcagaagtttttttcttcgcaggacttttctgatccttttaccactccagactagcccctaccccccaattaggagggcactggcccccaacaggcatcaccccgctcaatcccctagaagtcccactcctaaacacatccgtattactcgcatcaggagtatcaatcacctgagctcaccatagcctaatagaaaacaaccgaaaccaacttatgcaagcactgcttattacaattttactgggtctctattttaccctcctacaagc

SEQ ID NO: 97203 - DNA, 467 bp, Homo sapiens
  misc_feature (1)...(467): n = a,t,c or g
gcagccactgagccataggactgcggctgtagcacnggcgacgccagccatcatgacccttggccataatatgatttatctccacactagcagagaccaaccgaacccccttcgaccttgccgaaagggagtccgaactagtctcaggcttcaacatcgaatacgccgcaggccccttcgccttattcttcatagccgaatacacaaacattatgataataaacaccctcaccactacaatcttcctaggaacaacatatgacgcactctcccctgaactctacacaacatattttgtcaccaagaccctacttctaacctgcctgttcttatgaattcgaacagcatacccccgattccgctacgaccaactcatacacctcctatgagaaaacttcctaccactcaccctagcattacttatatgatatgtctccatacccattacaatctccagcattccccct

SEQ ID NO: 97204 - DNA, 405 bp, Homo sapiens
ggcacgagggcttcaagaggctggtgccgtccaaaacgatccggtatccaggctttttgaccacgctatgctccaaggccatcgcgcgcaccagatggccattgttacctaccaggagtttggagaaacctatattccaaaggaccagaagtattgattcctgcatgaatcccaaacctacttctgcttcttaaactctattccgacaccctccagcatggaggaaacgcaacacagatccagtctagagctgctccgcatctccctgctgctcatcgagtcgtggctggagcccgtgcggttcctgaggagtatgaacgccaacaacctggtgtatgacacctcggacagagatgactatcacctcctaaaggacctagaggaaggcatccaaacgctgatggg

SEQ ID NO: 97205 - DNA, 365 bp, Homo sapiens
atgaaattcagtttttaagataaaatcatcctagattagcagtaaaaactaacatttctattctttttttttttttttttgggaaacaaagtttggttttgtggcccgggtgggggggccggggggcaatttgggttaagggaacccttggccccgggggttaaggggatccccgggcctaaccctaaaaagaaggggggattacgggtgggcccccccccgcgggggaaattttggttttttaagaaaacccggggtttaattaggggggcctggacctaaagggggcgggctaatcaggcagggtttttaaaatttggagggctagggcctttataaggcatcccttttttaaaaacctttac

SEQ ID NO: 97206 - DNA, 379 bp, Homo sapiens
ggcacgagcgttggtatccccaccggcggccaagagtttagctgattcgccgcactccacgggagcaatgtgaaatgatctgctgcagcgctctgagccctaagaatcatgattcttttcaccgtacgtggcctgactggcattggattagcaaactcatcactagacattgtactacacgacacggactacgttgaagctcactttcactatgtcctatcaataggagctgtatttgccatcataggaggcttcattcactgatttcccctattcttaggctacaccctagaccaaacctacgccaaaagccatttcactatcatattcatcggcgtaagtgtaactttatttccacaacactttctcggtctatgcg

SEQ ID NO: 97207 - DNA, 495 bp, Homo sapiens
  misc_feature (1)...(495): n = a,t,c or g
aacttgaattgcaataccgtcccgagnggngcaaatccgaggaacccgaggaggtcagggagcaagaccagagagacgagtccgaggaatgtgatgagcctcatgagtcctatgagccccacgctccctatgcgccccacaagccccgggactcctatgcaccttacgaactccatgggccccatgcagcccccaaactcctcaaggcccgtgaaccccgccagctccgccacacccgtgagccccgcaagtcccgcgaggccaaggaaaccgagttgcttcccagcgccgcagtaatgatctccccctctctgatcaccagagccccgccacggcctcagctgtctttcctgggtgaagaaagaatgtgagacttggcatgttgtctccatgcatatagtggaggaccggcattcaaagccatatcatgggccaggcatggtggctcacgcctgtaatcccagcactttgggaggctgaggcaggtgggtcacc

SEQ ID NO: 97208 - DNA, 480 bp, Homo sapiens
  misc_feature (1)...(480): n = a,t,c or g
gtcagccggggnnnccctgagaatacgacatggcaanccaagcgcacccccaggagatttagctggagaggttttgctttgcagaggagcagcacagtatgggacacttggcttttcctccccggctgttcaggaagccaacagaggtgccctgtgttctagcataaagagagggtgaggtaggggttgaaagtgtcttctagaaaggcttatctctagaccaagcttcccagccagtgtgccagcagatcttgagaccctcagcactcaagcaagagcctgtggctgctttgagactggtcacaaaaaacaggctcaagctatccttccacctcaacctcccgagtagctgggtagctgggactacgtgtgcaagccaccacatctggctgtgttgttgttgtaaagacagagtttcgtcctgttgcccaggctggtcacgaattcctgagctcaagtgatccacctgccttggcctcc

SEQ ID NO: 97209 - DNA, 400 bp, Homo sapiens
tgccgctgcagagcctcatggatgctatgccaaagtgctcgatgaatttaaacctcttggggaagagccttagaatttaatcaaacaaaattgtgagctttttgagcaacttggagagtacaaattccagaatgcgctattaggtcgttacaccaagaaagtaccccaagtgtcaactccaactcttgtagaggtctcatgaaacctaggaaaagtgggcagcaaatgttgtaaacatcctgaagcaaaaagaatgccctgagcagaagactatctatccgtggtcctgaaccagttatgtgtgatgcatgagaaaacgccagtaagtgacagagtcaccaaattgctgacagaatccttggtgaacaggcgaccatgcttttcagctctggaagtcaag

SEQ ID NO: 97210 - DNA, 477 bp, Homo sapiens
  misc_feature (1)...(477): n = a,t,c or g
cccccccccccccccatgagaccctnatcgagaccactggccangncgnggaattcctgggaggtaggctagttggaaagttaaggagactcaaggtcactgggtgggtgaagctgagaggtgacagcatgctggcagtcctcagagccctcgcttgctcttggcacctcccctgcctgggctcccactttggtggcatttgaggagcccttcagccccccactgcactgtgggagcccctttctgggctggccaaggctggagcccactccctcagcttgcagggaggtgtggagggagaggcacgagcgggaaccagggctgcatgcggcgcttgcaggccagctggagttctgggtgggtgtgggcttggtgggccccgcattcggagcagccagccagccctgctggccccaggcagtgggggacttagcacctgggccagtggctgcggagggtgtactgagtaccccagcn

SEQ ID NO: 97211 - DNA, 390 bp, Homo sapiens
gtgttgaattgtttgtcaggcaacttagacaaaaactagatgaagggtgcattgactcagccaggaagagctggcgggttgggctcccagtcgcagatggacatggccagcacccccaagccctcaccagatgaccagggctgctccatccacctgtggggtttccctttcctcgtctccctcctccctccctccctctctccttcacctccttctcctcccagacactctgtggggacccactgtgcgccctgagtcctccctcggcccctcggagcacttagggttccccactctagtgtgcctcggccacacgctgtccccgtggtgggaacaacttatcgctacagtcggggggcctggcccctgagcctggacttcagggggctt

SEQ ID NO: 97212 - DNA, 475 bp, Homo sapiens
  misc_feature (1)...(475): n = a,t,c or g
gtatgtcacgagggggggggattgaggnccnactgagtatccttagaccangcggtggaattccatcttctcttccttcagcctctggaaaccactaatctgctctctgtctgtatggatttgcctattctggctaattcacctaaatgaaatcaaataatatgtgacctatttgtcttctttcatttagcataatgtttttaagatttattcatgttggagcatgtatcagtgcttcattttatggctgaataatttttttttttttttttttgaaagggagtctcacttttttccccaggctggagggcaggggcacaattttggttaaccaaaacccccccccactcccccgccaggttaaagcaattttcctgcctaaccctcccaggcagttggaattataggcgggcccccccatccccagctaatttttttgtgttttcaggaaaaaggggtttcactatcttgcccg

SEQ ID NO: 97213 - DNA, 466 bp, Homo sapiens
  misc_feature (1)...(466): n = a,t,c or g
ggctgctcaattgagaccatttatgagaccataggacangcggnggaattcaaaatacagagatacatacctttggctgtgacattgtctataatgacaaaagtctgttactagcagggcacccatctacaaggaatgggttaaatattacacagtacatttatgtaacggaatagtatgcagtcaagaaaaaggaaaagaactacgcatttccgtatacaaaaccatgaagcaatcttcagtgcattggaaatgaaaaacaagctgtagaatgatgggtgcaggatgtccatgttttccttttaaatatatatatgctctgnaatgaatagagcatcataggaaagataagactttggaaaatgaggccctggccaggcgcagtggctcaggcctgtgatcccggcactttgagaggctgaggcaagcggatcacgaggtcaggagttcgagaccggcctggccg

SEQ ID NO: 97214 - DNA, 428 bp, Homo sapiens
  misc_feature (1)...(428): n = a,t,c or g
gctgaggcgggggaatcgcttgaacccgggaggcggaggttgcggtgagccatgatctcgccactgcactccagcctcgtcgacagagtgagactccgtctcaaaaaaccaaaaaacaaaaaacagtcaatggcattaaatataaatacatttacagtgttgtgtaaccatcaccactatggatcccccagactttgtcatcatcttcaacctaagcgctccctattaaatagtaactccccacttttcccaggccttggcaaccaccattctaatccctgtctctatgaatttgactcctctcgatacctcagataagcggcacaatgcagtatttatctgtcaagtccggaatatttcctttagcataatgtcttcaaggtccatcacgttgtagcatgtatctgaatttattcttttataatatn

SEQ ID NO: 97215 - DNA, 449 bp, Homo sapiens
  misc_feature (1)...(449): n = a,t,c or g
gtctgagccttcgccctcctgctctccctccatgtccacctaggaggctgcctacacctgggcaagggcacccgggctcggctggatttccaggaagacccaccctatgacgactgcccccactcccagaccctccccccagcctgggattgagccctggggatgacccggggttggcaagggaagagctgaaatcgccctgtccttggggaccccaccctttgtgccatctgccgtttccctagtgctgggcatccagtcagccctcaataaatgcttatgaatggagaaaaaaaaaaaaaaaaaaaaaaaaaaaaaaaaaaaaaaaaaaaaaaannnnannnaaaannnnnnnnnnnnnnannnnnggannnnnnnnnnnnnnnnaaaaaaaaaaaaanaaaaaannnnnnaannnaannnnnnannntttaaanaacccaccccgc

SEQ ID NO: 97216 - DNA, 393 bp, Homo sapiens
cctaggcacagatctaagccttcttattcgattcgagctgggccagccaggcaaccttctagggaacgaccacatctacaacgtgatcgtcacagcccatgcatttgtaataatcttcttcatagtaatacccatcataatcggaggctttggcaactgactatttcccctaataatcggtgcccccgatatggcgcttccccgcataaacaacataagcttatgactcttacctccctctctcctactactgatcgcatctgctatagtggaggccggagcaggaacaggttgaacaggctaccctcccttagcagggaactactcccaccctggagccttggtagacctaaccatcttctacttacacctagcaagagtctgctctatctt

SEQ ID NO: 97217 - DNA, 379 bp, Homo sapiens
acaagacgctacttaccctattatagaagagcttatcacctttcatgaacacgccctcataatcatttgccttatctgcttcctagccctggatgcccttttcctaacactcacaacaaaactaactaatactaacatctcagacgctcaggaaatagaaaccgtgtgaactatgctgcccgccatcatcctaatcctcatcgccctaccatgcctacgcatcctttacataacagacgagggcaacgatccctcccttaccatcaaatgaattggccaccaatggtactgaacctacgagtacaccgactacgggggactaatcttcaactcctacatacttcccccattattcctaaaaccaggcgacctgcgactc

SEQ ID NO: 97218 - DNA, 521 bp, Homo sapiens
  misc_feature (1)...(521): n = a,t,c or g
cccacgcgtccgcccacgcgtccgcccacgcgtccgatgactaacacccttaattccatccaccctcctctccctaggaggcctgcccccgctaaaaaaaaaaaaaaaaaaaaaaaaaaaaaaaaaaaaaaaaaaaaaaaaaaaaaaaaaaaaaaaaaaaaancgnggcgggggggggcgcctaaaaaaaaaaaaaccggggagccaaaacacaccgcgggtccaaaaaattaaattttttttttaaaaaaaggaataaaaaaaacccacccgtgaaaattgaaaaaaaaactttttttttgggggggaaaaaaaagaacaaacccccccaaaaaaataacgctcttaagaaaaaaaaaaattattttgagggggagggtgagtcactcctcctcttgtaatagggattaaaaaaaataaannnnaagaanaatttcagttgcaccggaatgacatgtataactacattaacataatacaaaaaaacatcaaaaagaacttctgaataatttaagtaaaaa

SEQ ID NO: 97219 - DNA, 416 bp, Homo sapiens
cttagcaaatggcacaccaggagattatatcccgtgcatggctcagagggtcctatgcccacggaaccttgctcattgctagcacagtagtctgagatcgaactggaacgtggcagcaaggctaggggaggggcaccctccattgctgagaattgagtaggtaaacaaagcggccaggaagctcgaactgggtggagcccaccgcagctcaaagaggcctgcctgcctctgtagactccacctctgggggcagggcatagctaagcaaaaggctgcagaaacctctgcagaattaaatgtccctgtctgacagcttggaagagaggagtggttctcccagcatgcagcttgagatctgagaacagacaggttgcctcctcaagtgggtccctaaccccagagtagcctaactggga

SEQ ID NO: 97220 - DNA, 508 bp, Homo sapiens
  misc_feature (1)...(508): n = a,t,c or g
gaattgctcactcagggagctcggattttaagacactattctgctgatgttcccagctgattaaagccactcccttcactatcttggtgtctgaggggttttgtccgcagctggtcccgctacagtgagatgggaaattttttaaattacatttttaggctgggtgcagtggcttactcctgtaatcccagcactttgggaggccaaggcgggtgaatcacttgagcccaggagctggagaccagccagaacaacatagcaagacccccatctctaaaataaaatttttttaatttttaaaaattacatttttatattatcttattactatatgctcactgaggaagagaacatttcaagcaatacagacatgaatataaatcaaatgctaaggttcttctcacctcgctgtaactcatagttgctagaagtgatcatttgaaaacgtggaaggctgcgcgtggtgcctcacacctgtaatcccattccttgggaagccatggaggtn

SEQ ID NO: 97221 - DNA, 472 bp, Homo sapiens
  misc_feature (1)...(472): n = a,t,c or g
attagaaccatgtagaacaaatatactagatgttaaagattacacaataaaggaacttggcaaaccaaaaaaaaaaaagggaaaaaagggaaaaaaaaaaaaaaaaaaaaaaggaaaaaaaaaaaaaaaaaaaaaaaaaaaaaaaaaaaaaaaaaaaaaaacaaaaaaaaaaaaaaaaaaaaanggggggggggggcgctttaaaaaaaatcggggggggggcccaaatttgggggggggggggaaattttttttttttttttggggggggggtttttaacccccccttttgttttttaggagaaacttttttttggggggggggggttattccccccccccccccccgcaggttttttttggggggggaaaaatatctttggggggggggggggggggcccccctctctttgtggtggggtgtaaagtgggggggggaaaaggatgtttattcatctgtgagggaggcacn

SEQ ID NO: 97222 - DNA, 392 bp, Homo sapiens
  misc_feature (1)...(392): n = a,t,c or g
taggaattatatccttcttgctcatcagatgatgatacgcccgagcagatgccaacacagcagccattcgagcaatcctatacaaccgtatcggcgatatcggtttcatcctcgccttagcatgatttatcctacactccaactcatgagacccacaacaaatagccattttacctcacccctcggacagcaaaaaatacctatatttatcccatattcaactaaaaaaggcctgatttttggggggggggaatattatatagaccccgggggggcacactgatctgcggtggtataaaaaacttctctttttttgtataagggataaaaaaaaaacgtttaggctgtgtgtggggactcaccttttttgtgggggagattagaaaagacan

SEQ ID NO: 97223 - DNA, 428 bp, Homo sapiens
cgcacgcttaagaccaccttgttcaaccccgacggaggatgagaccccattctataccaacacctattctgatttttcggacaccctgaagtttatattattatcctaccacgcttcagataaatctcccatattgtaacttactactccggaaaaaacgaaccatttggatacataagtatggtctgagctatgatatcacttggctgcctaggggttatcgcgtgagcacaccatatatttacagtatgaatagacgtagacacacgagcatatttgaccttcgctaccataatgatagctatccccaccgccgtcagagcattgagctgactcgccccactccacagaagcaatattaaatgatctgctgcaaagctctgagccctaagactcatctttcttttcaccgtaggtggccagaccgg

SEQ ID NO: 97224 - DNA, 485 bp, Homo sapiens
acccgtcatctactctaccatctttgcaggcacactcatcacagcgctaagctcgcactgattttttacctgagtaggcctagaaataaacatgctagcttttattccagttcttggattttgggattaggggaaatggaaaacttttggctagagaatagtttccagattgaattgtggaagaaaaatttggagtggaaggaggaaaccaggctgggaagtgcctcatgttctagccctgggtggggactttcacattttcagtagatgccagtaaaagattagagtcaggatggtattattattataatttcttttttttaaataatgataactgtggcagaaatgtggagaattgaatggagaagatggaggctggtagcaggatggctaaatattaagtcatggttaccaacgtttattgagtgccaactgtgtgcgagacattgccagagagagaagaggggtgtttttaataatacagc

SEQ ID NO: 97225 - DNA, 422 bp, Homo sapiens
cgaccgttgactattctctacaaaccacaaagacattggaacactatacctattatacggcgcatgagctgtagtcctaggcacagctctaaacctccttattcgagccgagctgggccagccaggcaaccttctaggtaacgaccacatctacaacgttatcgtcacagcccatgcatttggaataatcttgttcatagtaatacccatcataatcggaggctttggcaactgactagatcccctaataatcggagcccccgatatggcgtttccccgcataaacaacataagctgctgactcttacctccctctctcctactcctgctcgcatctgctataatggaggccggagcaagaacaggttgaacagcctaccctcccttagcagggaactactcccaccctggagcctccgtag

SEQ ID NO: 97226 - DNA, 480 bp, Homo sapiens
  misc_feature (1)...(480): n = a,t,c or g
attttctttttaacaaaattgcaaaataaataattttcctatgtattttctccctcaccaatctgaattcccaaggaagtcctgcaaacaacaaaatactatttgtttcaggctttccaatcaaaatacaatgaaaaagacaactgaaaatcatgctcttctatggatcaggaagtggcaaacatagaagcagcaatgtaagtctaattctggctacaccccctctaccccctctagagccaaaaaaaaaaaaaaaaaaaaaaaaaaaaaaaaaaaaaaaaaaaaaaaaaaaaaaaaaaaaaagaaaaaaaaaaaaaaaaaaaaaaagaaaaaanngggggggggggtgttaaaaaaattatgggtggggccccccctaccccctctggggggagaaatttttttttttttttaagggggggaaaaaaaaaaccgcgggggggttttgggaaaaaaaccctcttttttggggggaaaaaa

SEQ ID NO: 97227 - DNA, 449 bp, Homo sapiens
  misc_feature (1)...(449): n = a,t,c or g
catcatcattatctgtttcgtaggcctgtgtgcccttgtcctaacactcacaacaaagctaactaatgctaacatcttagacgctcaggaagtagaaaccgggtgagctatcctgcccgccattatgctagtcatcatcgccctaccatgcctacgtattctttacataacagacgaggtcaacgatccctcccttaccatcaaatgaattggccaccaatggtactgagcctacgagtacaccgactacggcggactaatgttcaacgcctacatactacccccattattcctaaaaccaggcgacctgcgacttcttgacggcgacaatcgagtagtacttccgaatgaggcccccattcggatagtaatgacatcacaagacgtcatgcactcatgagctgttcgcacattaagcttaagaacagatgcaattcccggacgtctan

SEQ ID NO: 97228 - DNA, 436 bp, Homo sapiens
  misc_feature (1)...(436): n = a,t,c or g
ctagttctagatcgcgagcggcctccatgactttttcattaaaattaaaaacaaaaaaaaaaaaaaaaaaaaaaaaaaaaaaaaaaaaaaaaaaangggggggggccctttaaaaaaaatcccgggggggccccaaaatccccgggggaaaaaaaaaaatttttttttctttttggggggggtttaaaaaaccccctggggttttttggaaaaaaaccctttttttgggggggggaaatttggcccccccccccccccaaaaaaaaaacccctcaaaaaaaaaaaaaatttttgggggggaaagggggaaaacccccccccctttcccccccccaaaaaaaaatgnnnnnnnnnnnnggaaacacctctctttttgggggggggcggttgggcacaccccccccccaatttgaaattgccccctcccggataattg

SEQ ID NO: 97229 - DNA, 426 bp, Homo sapiens
cgaccgttgactattctctacaaaccacaaagacattgtaacactatacctattattcggcgcatgagctggaggcctatgcacagctctaagcctgcttattcgagccgagctgggccagccaggcaaccttctaggtaacgaccacatctacaacgttatcgtcacagcccatgcatttgtaataatcttcttcataggaatacccatcataatcggaggctgtggcaactgactagttcccctaataatcggtgcccccgatatggcgtttccccgcataaacaacataagcttctgactcttacctccctctctcctactcctgctcgcatttgctatagtggaggccggagcaggaacaggatgaacagtctaccctcccttagcagggaactactcccaccctggagcctgcgcagacct

SEQ ID NO: 97230 - DNA, 405 bp, Homo sapiens
  misc_feature (1)...(405): n = a,t,c or g
gcagacacngncnnactcagctccactcgggtggagtggaagtggccagaccatttagacggacagggtcctcaccctacccctttcctgtgaggcaggggtggtggtggagttgctggaggtagaggagctatgtggagcaaaggccgacagaggggaaggaatggacctgtgagaggaagggaaggtggcagaaagtctcatttcaggaaggagggatagaaggaaggaaggaaggaaccccccccccccccgaaaaaaaaatcaaggggggaaaaaaatcaaagggaaggttaaggtgggttttggccagaattccaggcaacaggttgaagggacggggggccctaaataacgggggggataaacccctttttacccctaacaaatggcctgagctttttt

SEQ ID NO: 97231 - DNA, 408 bp, Homo sapiens
  misc_feature (1)...(408): n = a,t,c or g
cggacgcgtgggtttgatttagagagatttgtcctttttgatgttgcacaacaaatggtagagtctgggtatgtctgtgaaggtgatcacaagaccatggctaatgctatcatagacagagtatcattaattaagaggaaacgagagcagcggcagttggtacgggaggagcaagaaaaaaaaaagcaggaagagagcagtctcaaacagcaggtagaacaatccagtgcttcccagacaggaatcaagcagctcccttttgctgacaccggcatacctactgcttctaccacttcagcttcagtttctacacaagtagaacctgaagaacctgaggcagattaacatgaacaactacagtaccagcaacccagtttatctgtgttatctgatgggacggttgacagn

SEQ ID NO: 97232 - DNA, 406 bp, Homo sapiens
  misc_feature (1)...(406): n = a,t,c or g
tgccagcaaagccccatgctggagcctgtgtaacatctccttgggaggaagcagaataaagcaattttccttgaagccgaaaaaaaaaaaaaaaaaaaaaaaaaaaaaaaaaagggggggcccctaaaaaaaaaccccgggggggccaaaaataaccgggggggggaaaaaaaaattttttccccttaagggggggttaaaaaaacccccctggggatttttgaaaaaaaaccctattttgggggggggaaaaaatgggcaaacccccccaaaaaaattaaaaccctcaaggaaaaaaaaaaattttaaaggggaaaagggggaaaaaaacccgaaaatccctggggggaaaaagatgagnnnnnnnnnnnaaaaactaacantttgtgtagaattataaaaaaca

SEQ ID NO: 97233 - DNA, 431 bp, Homo sapiens
  misc_feature (1)...(431): n = a,t,c or g
cggacgcgtgggcggacgcgtgggcaaacccactccaccttactaccagacaaccttagccaaaccatttacccnnaaaaaaaaaaaaaaaaaaaaaaaggggggggggcgtttaaaaaaaacccttggggggccaaaatttaacgggggagggaaaagaaaaatttttttcttaaaggggggggaaataaaaaccaactggggatttttggaaaaaaaactttttttggggggggaaaaaaatgggaaaaacccccccacaaaaataaaacctttaagggaaaaaaaaaatttttaaggggaaaagggggaaaaaaaaccgaaaaggcttgggggtagaaaatttgggnncnnnnnnnaaaaaccttttatttgggggggggataattgggcaaactccccaaaaaaaaaaaactttaagggataataaa

SEQ ID NO: 97234 - DNA, 410 bp, Homo sapiens
  misc_feature (1)...(410): n = a,t,c or g
tatattgttgaagaggatagctattagaaggattatggatgcggttgcttgcgtgaggaaatacttgatggcagctccaggaacacggtgaaaaaaaaaaaaaaaaaaaaaaaaaaaaaaaaaaaaaaaaaaaaaaaaaaaaaaaaaaaggggggggggcctataaaaaaaatcccgggggggccaaaaattaccgggggaaaaaaaaaaatatttttttttttttagggggggttaaaaaaaacccccggggaatttttaaaaaaaaaatttttttttgggggggaaaaaaatggaaaaaaccccccaaaaaaaaaaaaacccttgaaaaaaaaaaaaaatttttaaagggaaaagggggaaaaaactctttttttttttttgtgaaaaaaaatgcngcncncccccna

SEQ ID NO: 97235 - DNA, 443 bp, Homo sapiens
  misc_feature (1)...(443): n = a,t,c or g
cttacacttaggagatttcaacttaacttgaccgctctgaccaaataaaaaaaaaaaaaaaaaaaaaaaaaaaaaaaaagggggggcccctttaaaaaaacccctgggggggcccaaaaaaacccggggggggaaaaaaaattttttttcctttagggggggcataaaaaacccccccgggggatttttaaaaaaaaacctttttttgggggggggaaaaattggaccacccccccccaaaaaaataaagctttcgggggaaaaaaaaaatttttagggggtaagggggaaaaaccaccccctaaaccccgggtcaaaaaaaatgnnnnncncccnctaatacacgatcctttgtgcaacgattaaagtcctacgcgatctgagttcataccggagtaatgcacggcgagttctatctacttcaaattccttcatgaacgaaa

SEQ ID NO: 97236 - DNA, 420 bp, Homo sapiens
  misc_feature (1)...(420): n = a,t,c or g
cttacacttaggagatttcaacttaacttgaccgntntgaccccttccaaaaaaaaaaaaaaaaaaaaaaaaaaaaaaaaaaaaaaaaaannggggggggcccctttaaaaaaatcctgggggggccccaaatccccccggggggaaaaaaaaaattttttttttttttggggggggtaaaaaaacccccccggggttttttgaaaaaaacccctttttttgggggggggaaaatggcccccccccccccccaaaaaaaaaaccccttggggaaaaaaaaaaatttttaggggggggggggggaaaaaacttttttttttttttttgttaaaaaaagttggnnnnnnnnnnccacacccccccccggcggggggggcggccccccccccccccccccnagacggccccccgcgcgccccc

SEQ ID NO: 97237 - DNA, 432 bp, Homo sapiens
  misc_feature (1)...(432): n = a,t,c or g
aacatccagtgtcgcatccacctttattatgagtctcttccccacaacaatattcatgtgcctagaccaagaaggtattatctggaactgacactgagccacaacccaaacaacccagctctacctaagcttcaaactagactacttctccataatattcatccctgtagcattgttcgttacatggcccatcatagaagtctcactgtgatatataaactcagacccaaacattaatcagttcttcaaatatctactcattttcctaattaccatactaatcttagttaccggctgcgngcgaattaacaataaaaaaaagaaaagcggggcggcccgctctaaggaatcctcagggggatcaaggggggggggcccgcataaataaaatttgagggcccccacggagtctgcttgtaagcatactttttt

SEQ ID NO: 97238 - DNA, 406 bp, Homo sapiens
ctctactaaccacaaagacattggaacactatacctattattcggcgcatgagctggaatcctaggcacagctctaaacctccttattcgagccgagctgggccagccaggcaaccttgtaggtaacgaccacatctacaacgttatcgtcacagcccatgcatttggaataatcttcttcatagtaatacccatcataatcggaggctttggcaactgactagttcccctaataatcggtgcccccgatatggagtttgcccgcataaacaacataagcttctgactcttacctccctctctgctactcctgctcggatgtgctatagtggaggccggagcaggaacaggttgaacagtctaccctcccttagcagggaactactcccaccctggagcctgcgta

SEQ ID NO: 97239 - DNA, 418 bp, Homo sapiens
cccacgcgtacgcggacgcgtgggttcacttccactccataacgctcctcatactaggcctactaaccaacacactaaccatataccaatgatggcgcgatgtatcacgagaaagcacataccaaggccaccacacaccacctgtccaaaaaggccttcgatacgggataatcctatttattacctcagaagtttttttcttcgcaggatttttctgagccttttaccactccagcctagcccctaccccccaactaggagggcactggcccccaacaggcatcaccccgctaaataccctagaagtcccactcctaaacacatccgtattactcgcatcaggagtatcaatcacctgagctcaccatagtctaatagaaaacaaccgaaaccaaataattcaagcactgcttattac

SEQ ID NO: 97240 - DNA, 525 bp, Homo sapiens
tttgctgttacaaaggcgtttagtttattctcatcagtatcactgatattctcatggttcacatttgccaacgccgctcctctccttacagtagttaaatgtgcaatctcacttgggggcccagggaggggtgggggctcggcccagggtggggagggcgttggcacttcacgtggacagggtgggcagcctgtcctgcgtgaaagaggtgtgggttgagtgggcggccagggaaggggagttggcaggggagggccccacagtcttttttctctggtggttggtgattctccattcagattccttcctggctgcccagggtgggggaaccatgcagctcagggcaggggaggaagagaaggaaaaagcagcaggccgcccaggggtaggggtggagggtgaatggcagggcaaggggggtacaggggtggctcctggggtaaggcacaaccctgtctttggctctcctggtgaggagtttcctcccctgcaccccctgcccgacccttctccccacccccccac

SEQ ID NO: 97241 - DNA, 465 bp, Homo sapiens
  misc_feature (1)...(465): n = a,t,c or g
attgacccctttgtagacactagtccgngcggnggaattcgtttcaccgtgttagccaggatgacctcgatctcctgaccttgtgatccccctgtcttggcctcccaaagtgctgggattacaggtgtgagccactgctcccggccagttatatagatgtttcttaatattgaagaaatatatatttggatgtgattagatttggttttaaaatttgctttttgagtaaaatttgcatagttaaaaaggcttacagttacccttattttggtcattcaaatatgaatgacctaggtaataatgattgaatacccaggtaataatgatacgttagtagtatcaaaatattaattaaatttttactaagttatttagctttcttgatgacctcacactaatttctaatccctaaatatttttcttgttttcctatatatacttctgctcctgcggtagattacccag

SEQ ID NO: 97242 - DNA, 467 bp, Homo sapiens
  misc_feature (1)...(467): n = a,t,c or g
attgagcccatcgtagaccctagtccagngcggnggaattctggaaaaggaaaattagagaactaaaatataatctttagacttaaaaagttattttcatttatattctgtttctaaacattattgtttattgttctaaatagtctttataaacaacataaaattctaaaaaacaacagtttgtgcttttgagtgaaattacatcatatgtttattggctgcataaaagagacttagactcccacacaataataatgggagactttaacaccccattgtcaacattagacagatcagcgagacagaaagttaacaaggatatccaggaattgaactgagctctgcaccaagcagacctaatagacatctacagaactctccaccccaaatcaacagaatatacattcttctcagcaccacattgcacttataacttcttatttcaatcatactttagttctcaattt

SEQ ID NO: 97243 - DNA, 462 bp, Homo sapiens
  misc_feature (1)...(462): n = a,t,c or g
atcgagatcctagaccagcgtcgnggaattcgatctcttgagcccaggagtttaaggttgcagtgagctgtgatcgtgccactgcactccagcctgagcaacagagcaggactgtctcaaaaataaaaacaaaaaaagatagccaagcatggtggtgtacacctgtggtctcagctgtaggtgtctcttgcagaggcaagaggattacttgagcccaggagtttgaggctgcaaggcagtatgattgcacctgtgaacagccgctgcacccgaatagtctgggcaacataatgagaccccactcatttcacgtctccaaagaaaacatacaaatgccagatgaacacatgaaaaaatgctcaacatcattagtcattagagcagtccaaatcaaaaccacaataagatgctacttcttaccacatctagggtgactacgataaaaaaagataacaacatgtt

SEQ ID NO: 97244 - DNA, 443 bp, Homo sapiens
  misc_feature (1)...(443): n = a,t,c or g
cttgagtacactacgccgcgcggngcaannccattataaaagcaggtgtgaaaactcagttatttcttttctgttcttttaagatggatgagaattgaaggatagatttcagttcatcttagtgttcattccatcacagatgagaagtagccctaactttaaattaaatataaatattatttagagttgctgttacatttctgtaggaaaatttgacaaatcatatgaaaattaatgttctagaccttgttagatcattttctaaaattcaaagacagattgtgatttcctagtaataagtaaatgtttgattaacactggtactatagaagttatgttaataggccaggcgtggtggctcacgcctgtaatcccagcactttgggaggccgaggcacgcggatcatgaggtcaagagatcgaggagaccatcctggccaaca

SEQ ID NO: 97245 - DNA, 467 bp, Homo sapiens
  misc_feature (1)...(467): n = a,t,c or g
ggtgcggnttttgntccaacggtagcangacgancngcaantnaantttatagtctctgtgggcttcattgaggacactgttgtgacatcatagccaagttatccccttgcccaatcctgcttccttttcttccccaaacaggtatccatttcaagaatatcccctaataaacatctgcacactcatctccatctcagaatctgcctcctggtaacctaacctatgatgggaactgctaggcagggaatgtcctgggagcaattagggaaggcttcatggaagagacactgtttatgttaggccgaatctcagcaggtgtagggcttagtgggtatcattgtgctgtagcaaaaagcacagccactttgctgggtgcagtggctcacgcctgtaatcccagcactttcggaggcctaggcaggcagttcacttgaggttgngagttcgagaccagtatggccaaccn

SEQ ID NO: 97246 - DNA, 453 bp, Homo sapiens
  misc_feature (1)...(453): n = a,t,c or g
atttgagancccctcgatgatcactagtccagngcggnggaattcgacacagcccatgcatttgtaataatcttcttcatagtaatacccatcataatcggtggctttggcaactgactagttcccctaataatcggcgcccccgatatggcgtttccccgcataaacaacataagcttctgactcttacctccctctctcctactcctgctcgcatctgctatagtggaaaaaaaaaaaaatgaaaaaaaaaaaaaaactggcgcccccttagtttaaagggccccttaaaaccccgtagaaaccccccagggggccctttaaggagcccccccttttggggtgccccccccccccgtttttttttgaccgggggggggcccccccccccggcctttttcataaaaaaagggaaaatactctcgcactggccggaggggggtttttattttg

SEQ ID NO: 97247 - DNA, 474 bp, Homo sapiens
  misc_feature (1)...(474): n = a,t,c or g
nggggagtcgccgttcgaagacccttagctcgtagatcactagtccagagcggtggaattccaccaaatggatctgctggcccgtagacttcagataagggcagctgagaactgaactctgacttctggtctttgttccaaatttcttcctgaggggcctagaggaagtcatgcccaggagccagagctaacattcttttctgctgaccccaaatttttagacaaagcttcgcctcctgaaccaattgcaaatcagaaaatctttgaacctacctatgacctgtggtctccctccctttgagatgtccctcctttttaggtaaaatcaatgtatagcctgtatgtattgatttacaactttgcctgtaacctctgcctctctgcctttaaaaacccttgcctggccgggcatggtggctcatgcctgtaatcccagcactttgggaggctgaggcgggcggatcacctgagatc

SEQ ID NO: 97248 - DNA, 473 bp, Homo sapiens
  misc_feature (1)...(473): n = a,t,c or g
cggattnnaaattgactgcgtgcactagtccagngcggnggaattcgcaaggagaatcacttgaacctgggaggcagaggtcgaatcgagccaggatcacaccattgcactccagcctgggcaacaaagtgagactctgtcaaaatcaaaaagaccagaatacaaaaaactccattgatctgagagtatcccctaaattatcgaaagacactcacattgaattggaatgacctatagtatagaggagaatgcgttgtatgtcagcagtatagatccaatccacattgcgctatccgcattataaatacattaccctcccactccccaagttcagcaaattagaagagaatctgaagtttgtaggaagggaataaagctgctataaacatttatgtgcaggtttttgtgtagactcgttttcagctcctttgggtaaataccaaggaaccaggttgctggattgtaagttaaaa

SEQ ID NO: 97249 - DNA, 462 bp, Homo sapiens
  misc_feature (1)...(462): n = a,t,c or g
aggcggtnnnnnnntttcgagatctctagtccgtgcggtggaattcctgggctgctgtgaacttcgcagacgtttgtgtttctttcccgcacggaaacttggacagaagctccttgtcacgtcccacagtcacacggcccctgcacgtgcttaaaagaagctgtggtgttttttttttgctttgtttcttaggctggnctggaactcctggcctcaagcaatccccccaccaccccctcccaaagtactggtattataagcatgagccaccatgcctggggtatctgtgtcttttccatttatttatagagttactttgtcttttactaattcaatgatctgtttaatcttttattaaattataaaaatgataaatacttttaaataagtgaaaaatgtccttcactctttagacccataatcttatctcaggaaataattgcagttgagaaaatgggcctn

SEQ ID NO: 97250 - DNA, 437 bp, Homo sapiens
  misc_feature (1)...(437): n = a,t,c or g
natgaggaatgangntcattcgaccgncnggnggaattcggaagttcttgtccaggccagtagaatagtaagtgccagagtaaagacttcgatatgtagcttgtttagaagtcaccttgaaaaaagaatattaatggtgggtaatatttttcactatctctttgcttactggaattaatgaattcagtaattctttttttttttttggttttggaaagggggttttaccccccccccttggttgaaatgcaagggcccaactttggttaattgaaccctccccctcccgggttaaagcaatttttttgcttaaccctccccaaaagttggaataataggcccccccccccccgcggggggaattttttggatttttaaaaaaaaagggggtttaattatgtgggccgggttgatttaaaactccggacttcgggccg

SEQ ID NO: 97251 - DNA, 451 bp, Homo sapiens
  misc_feature (1)...(451): n = a,t,c or g
aggaggccngnnnnnnnnntactgatactgactaccatcgngcggnggaattcgctttttaagaaggatggcattccatcttccccgaaatgcttctgcctcaaactcagttctcctcaacacccatctgaaatcctcctacggtagcctcccctagtcctaccttcccaaacactgctttgattggatcccacattgctccaaaccctcatggacaattcattttctgccaaaaagcatttcatgtgccttagcttctctccttcaatccgtttttttttttttttttttttggaaagggagggcccccttctttgccccccggggggaagggggggggattaaattttatttgaaccctcggcccccaaggtaaaaggaattccccgccccaaccccccggagaaccgggataaaggggccccaccccccacccgggtttatttttttt

SEQ ID NO: 97252 - DNA, 480 bp, Homo sapiens
  misc_feature (1)...(480): n = a,t,c or g
tgtattcacggccncnaagcagggcccccnnaattgaaaactgagacactagtanagngcggnggaattccgcggaggttgccatgagccgagattgcatcattgcactccagtctggatgacagagcaagactccatctctaaataaataaagttactttcttagtggttgttctagaggttatataacactatacttgagattaatattaccttaatactggcaacacatagacttggttttcatgttgtttcatttttacccccttctttgtgtgactgtcatacatattacggttctatatgctataaaccccaaaatacagtggtatacttattgtttaatgcaactttatgtcttttaatgaagttaaagagaacacagttttttatatttacctaggtactgtttaccttttcatttctttgagtagatttgaattactatctggaattatttcttttcagcctcaactattg

SEQ ID NO: 97253 - DNA, 452 bp, Homo sapiens
  misc_feature (1)...(452): n = a,t,c or g
ngaggaggccccnatcgagatccctattcagtgtcgtgtaattccaactactcacgaggctgagacaggagaatcacttgaacgcaggaggcacaagttgcagtgagcctagatctcaccattgcactccagcctgagtgacagagactcagtctcaaaaacaaaaagtaaaggtcttgggtttctctctgtaaatagcctttgtgtaatgggctttagattaatatcctttgactttattaataagtacctgtgtgcccaagtggatctcagctaactcatccttaaattctgtgcaaatagaaataaaccataaaatgagcctaactataacccacactcacttatcaagcattcccccaaaagatcagtgcgattcaagtaaccttgacctaaacttgtacactccggtgtacatctttgaccataaactctgggagatttccctctgg

SEQ ID NO: 97254 - DNA, 428 bp, Homo sapiens
  misc_feature (1)...(428): n = a,t,c or g
nttcgaattcgtagactactagtccagggtggtggaattcctcacgtctgtaatcccagcactttgggatgttgaagtgaggggattgcttgagccctggagttcaagaccaggctgggcaatatcgccagaccccatctcttaaaaaaagtagttctttactgttgcctctattgactcttgaatgcaagaaagaacatttgccctttgacttctaatattatcttatattctctcttcttcaaaagatcagaagcacatgctgtaaacatcaatcatgatcatctttgtctcccttatcagattgtcaaaattatatcttttcctattttcctgcataccttatctttttcctaaattctcagttctccaagttctcagaaatcataacttcagaccttgaaatgatgactctgttccacccccat

SEQ ID NO: 97255 - DNA, 315 bp, Homo sapiens
ggaattcggaactatgttgacaaatttcaaaaaagaatctgagggagactatggagtgctatgacaccaggaaaacttaaaactttgtgtaagatagactggccagcattagaggtaggttggccattagaaggaagcctggacaggtcccttgtttcaaaggtatggcacaaggtaacctataagccaaggaacccagaccagttcccttacagagacacttgattagagctggttttagaccccccacccccaacacatagtggttgagagaacagcagcataagtggctggcagaggcaaggaaagaccagc

SEQ ID NO: 97256 - DNA, 334 bp, Homo sapiens
gtcaggagttcgagaccagcctggctaacatggtgaaaccccatctctactaaaaatacaaaaattagccgggcgtggtggcgtgtgcctgtaatcgcagctactcgggagtacaggcgtgtaccaccacacctggctagttttgtttattttcctcaaactcctgggctcaagccatcctcttgcctcagccctcccaagtagctgggactacagatgcatgccaccacgctcagctaattttacaaattactctttttttttttttttttggaaaaaacaaccttttgttttgtgaagggattttcctttttttttggggggaaaacgcgaa

SEQ ID NO: 97257 - DNA, 334 bp, Homo sapiens
tgttttcgcgtcgacaatacttctgcttcttagggggccacaattattaatcgagtgtgcgcactggttgggcactgtataacttttcaaaccttagaagtagactgtgctcttcccaccttgtttcctgctccatattgatttttgcatggtccttgattttttttcaaatttttttgttttgaactacttttaaaattacagaagagtacaaaaaatgtacgaggagtttcctttctttctttttttttttcttattttttctttttctttcttattttttctttctacttttaacttttttctttgtcctctatgtgatctgtggtaccac

SEQ ID NO: 97258 - DNA, 368 bp, Homo sapiens
atttgctacaacatggatgaacctttagtacattatgttaagtgaagttagtcaatcacaaaaagacaaaatactgcatgattccactcatataaggtacatagtatagtcaaacttacagcagcaaagttttattacatgtgtatacaatctgtatttttattatataattttacgtgttaaaatattttatcatataaagctttgcttacatatgtagatttacaactgagaatacaactttggctgctaaaaactaattcttgaaagaaggcatgttggccgggcatggtggctcatgcctgtaatcccagcattttgggaggctgaggtgggtggatcacaaggttaggagatctagaccatcc

SEQ ID NO: 97259 - DNA, 367 bp, Homo sapiens
agcacttacagtaatgttccaggcacggcaaggagcgacctgcgttagccaggcagaatgcccgccttcactgagcttatttctttcatgggttttttttttttttttgaaacggagtctccttttttcccccaaaaaagggggggatttgggccaatggaaacttccgcttcccccccaaacccgggggttaaaggaattttcttgcttaacccccccaaaaatttggaatggcaggaccccccccacccccccaaccagttggaattgcgggcccccccccccatgcccgggaaattttggaattttttttttttttttttaaaaaaaagggggtttaaccccgggggccggggggggcaaaaac

SEQ ID NO: 97260 - DNA, 375 bp, Homo sapiens
tgtatacggggtcttctaatgtgtgggaggggggggggcatccatatagtcactccaggtttatggagggtgcttctactattaggacttttcgcttcgaagcgaaggcttctcaaatcatgaaaattattaatattactgctgttagagaaatgaatgagcctaccgatgataggatgtttcatgtggtgaatgcatcggggtagtccgagtaacgtcggcgcattccggataggccgagaaagtgttgtgggaagaaagctagatttacgccgatgaatatgatagtgaaatggattttggcgtatgtttgggctagggcgtatcctgggaatacgggaaatcagtgaatgaagcctcctatgatggcaaaaa

SEQ ID NO: 97261 - DNA, 351 bp, Homo sapiens
gagaatcgcttgaacctgggaggccgaggttgcagtgagccaagatcgcgccactgaactccagcctggatgaaaggatgagagtctcaaaaaaaaaaaaaaaaggacatggtttaaccccaaaaccttttcttaaaaaaaaattgggtaaaaattttcccctttcccaactggagggagttggaaaaaaaaaccaaaaaccctttgggtttaaaaaggggctggaactggccccttttaatgggaagggaaacggggaaaaccccaatacctggcggtgggggggtttttttaaaaaccttaaaaaaaaccggggttttttgttaaaaaattttcccctaaaaaaatttg

SEQ ID NO: 97262 - DNA, 358 bp, Homo sapiens
gagaatcgcttgaacctgggaggccgaggttgcagtgagccaagatcgcgccactgaactccagcctggatgaaaggatgagagtctcaaaaaaaaaaaaaaaaagactttgtttaaccccaaaacctttttttaaaaaaaaattggggagagattttcccccttcccaactggacgggtttgaaaaaaaaaaaaaaaaaacctttggggttaaaaaggggctgaaactggccccttttaaggggaagggcaaaggggaaaaccccaatatttggcgttggggggttttttttaaaaaccttaaaaaaaacggggtcttttgattaaaaaattttcccccaaaaaattttttttaagg

SEQ ID NO: 97263 - DNA, 377 bp, Homo sapiens
ctgtcattgagactgatctggaactcctgggctcaagcaatcctcctatatggatgcctcccatacaggcatgcaccacctcgcccaacgtccagtgtgtgtgtttgtagaaaaaaataaaatgtaaatttgcatattggtcatttcagtaattacaaagtagaaaaaagtttcaacagtggtcagacattttaaagaactagatcagcaatataaactgaccacttactagtagtatgtccacaggcatacctgtaatttttaaaacattttttttttatttagtgccagtttgggtttttttgttttgttttgttttgagatggagtctcactctgttgcccaggctggagtgcaggggctcaatcttggctcaa

SEQ ID NO: 97264 - DNA, 359 bp, Homo sapiens
gttttgtagagatagggtctcactatattgcccagttaggtcttaaactcctggcttcaagggatcctcctgcctcgacctcccaagtagctgggactacaggcatgcgccaccaggcctggccaagatcgggggtcttcatgtgttttgccttccatgctgtggaagcctgttggtttgctggagttcacactgctctttagctcaccaggagctccttctggagaataaacatacagatgtttggatgggtgggtggatggatagataggcagcgtgctgagctgggccagatcgagtcaggagtccttcccagatggcactggggatgtttctacagctggtgtacaggcagcaag

SEQ ID NO: 97265 - DNA, 146 bp, Homo sapiens
ttcctgtctataaaaataaaaataaaaggccagatgcagtggctcacacctgtaatcccagcactttgggtggccgaggcgggcagatcacaaggtcaggagatcgagaccatcctggctaacacagtgaaacgtcgacgcggccg

SEQ ID NO: 97266 - DNA, 358 bp, Homo sapiens
  misc_feature (1)...(358): n = a,t,c or g
gaaatctctgtaaagattactttggnntnaaacatttcctggtgtagcttataaatattgcaagacatttcccagcagaagaaaatttaaactattacactaaaaataaaaaacatactaccaataaagtatatttcattntaccataaaatactgggaaaataagagcaaactaaaccaaaatcaaggagaaggaaataataaagattatggcagaaattcatgagactaatgaaataggaaatagaaaagcaatagaaaaaaaaaatcaataaaaccaaagagtagntcttttccttttcctccttttttttagaatagggtctcactccattgccatactggagtgcgaggtgct

SEQ ID NO: 97267 - DNA, 298 bp, Homo sapiens
agagatttttctgcctcagcctctcaagtagctgggactacaggtatgcaccgccatgcccagttaatctttgtatttcgtgtgtgtgtgtgtgtgtgtgtgtgtgtgtgtgagagagagagagagagagagagagacggtgtcttgctctgtcgcccagactgttgctctgtcgcccacacttgagtgcaggggcgcgatctcggctcactgcaacctccacctcctgggttcaagagattcttctgcctcaaactcccaagtagctggggccacaggtgcgtggtcgacgcgcccg

SEQ ID NO: 97268 - DNA, 376 bp, Homo sapiens
caagtagctaggtctctaggtgccaccaccacacctggctaattttttaaattttattttactttttgtagatacagggtcttactacgttgcctgggctggcttcaaactcctggccccatgtaatctttctgcctcaaactcctgaagtgtgggaattacaggagtgagccaccatgccctgttacttttggctcttaaatgcaaccaattgttccaatttgtcatattcattctgctccatgctgtttgcatttatgactttataatggtgagatttagtttgcagtgttttcctcagttctacgattttcctttttgtttcattctgtttgtcagctcaaaagcccaattctgcttcctccgccttccttat

SEQ ID NO: 97269 - DNA, 334 bp, Homo sapiens
  misc_feature (1)...(334): n = a,t,c or g
aaacctcaaatacttattgagagactcatactactattgtcaaattttactgtggtgatttcagtgtaccatgcagttgttatagatttcaaaaactaaagttnnnnnnaacacaacagattatttcaagctcccttaaattctttctggaacaaggtaggacatgtataaacaaccactgtaacatctaaacacagttagagaatatacttcaaaatatggttggaggccaggcgtggtggctcacgcctgtaatcccagcactttgggaggccaaggtgagcggatcacgaggtcaagagatcaagaccagccttgccaacacggtgaaact

SEQ ID NO: 97270 - DNA, 512 bp, Homo sapiens
  misc_feature (1)...(512): n = a,t,c or g
aggggaannnnnnnnattgagaccctagcagngnggnggaattttcgagatctcttgacctcgcgatccgcccacctcagcttcccaaagtgctgggattacaggcatgagccagcgctcctggccagaaaatatttctaagcaagcagcatataacacttattttcatctgcagcatcatagttagctaagtgactttagggtaccttgatagaatattccattatagatgtagaaaacaagctagaatgacagaagatagtacattgtttgcgatcacaaaataaatcaaggcagaactgttactggaattgtactcaggatgagccattcaccaggtattgttttcctgacaagtatgctatgatgctatggcctgattactagagcacagttcagtagaatgtgcgtgtgtctatgcacatttgaccacatttccaagtcctacatactcttctgtgtgtctgccaaaccaaaacgtctataggagtacctcaccagaaacctttntt

SEQ ID NO: 97271 - DNA, 477 bp, Homo sapiens
  misc_feature (1)...(477): n = a,t,c or g
gggagaagcgggtcccccnacctgagannaattcangtcaggaanngcgnggaanncttgggtcagcgagtcgacttcctggaggaggtggtcctggaaggacagatgggatttgaatgaggcacaagggtggacagctccaggaccaggggtcagcctggcatccctcacctggaaggaaattgctgggaagtctcttgagagcagtgaccatttcccattcccgataaccgcatgtgggggtcctacaccaacccaccacaacctcaccgatgccgagcgctgttgcgcattcacactccggtcactctcgtgggtgtgccgaggcaccttcatgtggtttgaatctgcacgttcctgtaggtgaaccgtgctgagcctttcttcatgtgcttattggccaagggtgttcattcctttgtgaagaatgtgttcaaatcttttgctcattaaaaaaaattcgttgttaaaaaaaan

SEQ ID NO: 97272 - DNA, 487 bp, Homo sapiens
  misc_feature (1)...(487): n = a,t,c or g
ggtgagcncgccccaattganncccctnaactgagatctttagtccagngcggnggaattcgattttgctaagctggccaggttggtttcaaactcctggtctcaagtgatccgcccaccttggcctcccaaagtgctgggattacaggcgtgagccaccaaacctggccttagaattactcttagaacagtggaatgcccacacatccaagacaggcaagttcatggagactaagggaacagtggtatcatgtctcccttctcccttgtgcttactacaagaatggcaggcagaattccctacttatttaaaatatcactgatgnctcactctttttctttatattttatttattgatttgccacaaagtttaattcacctaagtgagacgtgcatatgatgtaactccactgtacagatacacagatctttacagaagaactatttttggcaacccctatgcccctgggtagggtccagaagtgn

SEQ ID NO: 97273 - DNA, 497 bp, Homo sapiens
  misc_feature (1)...(497): n = a,t,c or g
gtgggnnnnnaaatgagaccattagaagagcgctggaatacggcgtttgccatgtttcccaggctgaactaaagtgatctgcccacctcagcctcccaaagtgctggggttacaagcatgagccactgcgctcgggcaaacctgaaaacttttaaaatgaggtttccatccgtgagaatgggacccccaacccatccccatctcttgtcccacataacaaagtatgtgcttattttataggcatttacccatcgaatagcttctttgaaaaggcttgcctcccaaaatcatccctctattcatcagatgcttattgactcctttccctgtgctgggccttgaattaaggtcctaatttagacatgaaatgcatgctgatcaaacttatttgggggaaaaaggaggattctgtgaaatcatacccacaaataaaaaaacggacggaaaaatacaccccttgggttttgttcttaacaactttatttgtgccgggaaat

SEQ ID NO: 97274 - DNA, 467 bp, Homo sapiens
  misc_feature (1)...(467): n = a,t,c or g
ctgataacacaaacatgtcatgtaggttgtctaaaaataaaatgcatttaaactcnnaaaaaaaaaaaaaaaaaaaaaaaaaaaaaaaaaaaaaaaaaaannnggggcccccttaaaaaaaaggggcccttaaaaaccccggaaaaacccccgggggggccttttaaagccccacccttttgggggggcccccccccccggtttttttttggcggggggggggccccccccccggtttttttaaaaaaaaaaaaaaaaaattcccccctttgggggggggggggttttttttttcggggnnnnnnnnnncancaccctccntaaaactacacgcaacccaggacaaataatccatcctgcgaatgaccgactcgcgttttatatcggaggttcgtggtttttatcacaatctttcctagcaaaacagatggacaaatattgttatgtggaggggggtttggtaattt

SEQ ID NO: 97275 - DNA, 494 bp, Homo sapiens
atggggttttggggctcgagaccctagtcagtgtggtggaattcgccactgtgtccagccttgtctgaaatttcattaccaagtcggtattagaaaatattttgaactaataaattaaaatgaaagcacaacatcttcattacctctttttttttttttgggaaaaagttcctttttggtgccccgggggggggggaaggggggggagctaatttaatggaaccgggcccccccggggtaaagggaatttccgggcctaagccccctaagggggggaaatacgggggggggcccggaaccccaaaaaaagtttggttttttagggggagggggggttccccggggcggaaaggggtgggtttaaagggggtgacctagggaacccccccccctgggccccccaaaggggggggaataccgggaggagcccacgcccaggggcggcttaacttggttaaagctatatccccccccgggaatcgttttccaagggg

SEQ ID NO: 97276 - DNA, 464 bp, Homo sapiens
  misc_feature (1)...(464): n = a,t,c or g
aggcaggcnnctatgatactctaggtttggtcggcatttcgggcatgaccctggcctgtatttccagatactcaggaggctgaggtgggagaatcacttgaatccaggaggtcgaggctgcagtaagctataatcacaccactgcactccagcctgggcaacagagtgagaccctgtgtcttaaaaaaaaaatgtgacaacaatagccaaaaggtggaaacagctcacatgtccattggctgatggataatgcataagcagaatgtggtccatccatgtactgggatatgattcaatcataaaagagaatgaaggactgacacacgccacaacatggatggacctcgaaaacaggataccgagtgaaagaagccagacacagaaggccatgtagtttatgagtccatttatatgaaatgtccagaataggcaaatccatagagacagacagagagtagattggn

SEQ ID NO: 97277 - DNA, 461 bp, Homo sapiens
  misc_feature (1)...(461): n = a,t,c or g
gaggcttnnnnnttttgtgactgtcttagtccagngcggaggaattctgagctgataactaaatggagagtgccagccacagacatctggagggagagcttattactctggagtgtctgtgaagcaaaaatgctgcaggatggccggaaagcagtgaatgagggaaagaaggggatggcatgagctcagcagtgggcaggggccgggctatgcagagtatggcctttgagtgcagggcaaaatcatgtgataaaggtttacatagactggccaggggaactacagtaagacgtgattttggctttgggtgtcttcagttttaaagcacatgaactggccgggcgtggtgactcatgcctgtaatcccaacactttgggaggccaaggagagtgaagtgcttgagcccgagtttgagaccagcctgggtaacatggggaaacttgttctgcaaaagaaaaag

SEQ ID NO: 97278 - DNA, 422 bp, Homo sapiens
cgttgccttccagtctgggggacggagccagaccctgtctcagcgaacaggatagaaggaatccccttggctgggggtagcagaggcacccatggacagagctgctgtttctgtcctcccggtcccgtctcagccaccagaaaactgagcctcagggaggcaaggcccagacagagggtgctggggtggacaggctccaaggcacccagccaggggagcgaagccagcggccgacatgggaatgagtggtcagggctacacgaagcaggcagccccttaaggggaccccagccaaagagctggagtgcggctgcccagggaacccacctccaggaaagcctcaggagggagtggagggcacagccgagcgtccggaggggctgtgcctggacagcgagtggcacagccgtctccagcccgat

SEQ ID NO: 97279 - DNA, 415 bp, Homo sapiens
ggcgaccccgccggaggaggagaccccattctataccaacacctattctgatttttcggacaccctgaggtttatattcttatcctaccaggcttcggaataatctcccatattgtaacttactactccggaaaaaaagaaccatttggatacataggcatggtctgagctatgatatcaattggcttcctaaggtttatcgagtgagcacaccatatatttacagtaggaatagacgtagacacacgagcatatttcacctccgctaccataatcattgctatccccaccggcgtcaaagtatttagctgactcgccacactccacggaagcaatatgaaatgatctgctgcagtgctctgagccctatgattcatctttcttttcaccgtaagtggcctgactggcattgtat

SEQ ID NO: 97280 - DNA, 393 bp, Homo sapiens
ggcacgaggaagtattcattcctgcatgactcccagacctccttctgcttgtcaaactctattccgacaccctccaacatggaggaaacgcaacagaaatccaatctagagctgctccgcatctccctgctgctcatcgagtcgtggctggagcccgtgcggttcctcaagagtatgttcgccaacaacctggtgtatgacacctcggacagcgatgactatcacctcctaaaggacctataggaaggcatccaaacgctgatggggaggctggaagacggcacccgccggactgggcatatcctcaagcagacctacagcaagtttgacacaaactcgcacaaccatgacgcactggtcaagaactacgggctgctctactgcttcaggaag

SEQ ID NO: 97281 - DNA, 401 bp, Homo sapiens
ggcggggacagagtttgagcagattccctaagggaaggcactcatgcaggcaagcagacctatgctgggcctggggggccttacaaaaaagacacttttttttttttttttggaaaaaaaagtttggttttgccccccgggggggggggcaggggaataatctgggttaagggaagcccccccccgggggtaaaaaggattccccaccccccccccccaaagaggggggaataacgggccgggcccccaaggcggggtaaatttgggttttttaagaaaaaggggggttccccctggggggaagggggggtttgaaccccggggcctagggggacgggccaaacggggcctcccaaaaggggggaattggcaaaggggccccccagcgttgggttaaaaag

SEQ ID NO: 97282 - DNA, 434 bp, Homo sapiens
ggatattttatatcttcttcggaaccacacttatccccaccttggctatcatcacccgatgaggcaaccagccagaacgcctgaacgcaggcacatacttcctattctacaccctaggaggctcccttaccctactcatcgcactaatttacactcacaacaccctaggctcactaaacattctactactcactctcactggccaagaactatcaaactcctgagccaacaacttaatatgactagcttacacaatagcttttatagtaaagatacctctttacggactccacttatgactccctaaagcccatggcgaagcccccatcgctgggtcaatagtacttgccgcagtactcttgaaactaggcggctatgggataatacgcctcacactcattctcaaccccctgacaaaacacatagcctacccc

SEQ ID NO: 97283 - DNA, 455 bp, Homo sapiens
  misc_feature (1)...(455): n = a,t,c or g
atcgacnccatgatnaccgtctgaaccaccacnacgccaagcttggcacgaggcttacattttaaggggtagatttgagcccaggcattaaatattttatgtagcaggaggcacgagacccggggcttgggcctgtttttctgcagactttgtggcctttggtgggccacccagcttttttggcccttcattttctcatatggggctcaatgagataatctgaaggtggcttccagtgctgaaggtctgtggtcatataagtgctggcatgtttttttgtttgtttgtttctgagacagggtcttatcttactctgtttcccaagctggagtgcagtggtgcgaccatggctcaatgcaaccttgaactcctgggctcaagcagacctccctcagcctcctgaggagctgggactacaggttcatgctaccatgcctggctgatttatttattta

SEQ ID NO: 97284 - DNA, 463 bp, Homo sapiens
  misc_feature (1)...(463): n = a,t,c or g
gggggggattgagnactgttatgatcgtagaaccgccaagcttggcactaggaacagagaagtatatgcgaaattaaactggcaacatgttaacaattattgatgctgggcgaagatacatgagatgtcatcaaactattttcacttttttttttttttttggcgggggggtttcctttttttggcacccccccccccccggggggaaggaattttccggcctaacccccccgagagggggaaaaaaagggttggaatcaccccccccagtaaatttggttttttcaaaacaaacggggttttcccttgtgggccgggcgggtctaaaaccccggatttagggggacccaggggcctgggtttccaaaagggttggaatggggggcggaaccccccaggaggggttaattttggtttttaagggagaaacagatttccttttgtggcccgggtttgttttaac

SEQ ID NO: 97285 - DNA, 465 bp, Homo sapiens
  misc_feature (1)...(465): n = a,t,c or g
ggtgacgcgtctccgtgagcggccagccctgctggtcagcagcacgagctggacagaggacgaagacttctccatcctgctggcagctttagaaaagtttgaacaactgactcttgatggacacaaccttccttctctcgtctgtgtgataacaggcaaagggcctctgagggagtattatagccgcctcatccaccagaagcacttccagcacatccaggtctgcaccccctggctggaggccgaggactaccccctgcttctagggtcggcggaacctggtgtctgtctgcacacgtcctccagtggcctggacctgcccatgaaggtggtggacatgttcgggtgctgnttgcctgtgtgtgctgtgaacttcaagtgtttacatgagctggtgaaacatgatgaaaatggcctggtctttgaggactcataggaactggcagctcatcttgagaagcttcg

SEQ ID NO: 97286 - DNA, 486 bp, Homo sapiens
  misc_feature (1)...(486): n = a,t,c or g
gggccctnccaatagtagatcattagtccagtgcggnggaannnganccgatggataaaaaagactacccttgggtgatgggtgcaccaaaatctcagaaatcaccactgaagaacttttccatgcaaccaaacactacttgttccccaaacactactgaaataaaagtttaaaaaaaatacgtaagaacagacatagggaaaaagaaaaaaaattcaacttgaaaaaggtctggagtagtgaatactacagaaactccatagctaactttgactatgaaaaaaaaaaaaaagggtttttttacccagggggacctttttttaaaaattggggggagttattttaagggggtttttaagcccaggtttgggacccctccttgcctctaaggaaaaatccacggccaaatcaccgggggtcattatttctggagaaaacaaccccctttctaaaaacacagggcctaaaaacaaaaggcctttttag

SEQ ID NO: 97287 - DNA, 472 bp, Homo sapiens
  misc_feature (1)...(472): n = a,t,c or g
agtggagaggcnacnacnnnnntttgagttcactacactaggccgtgtggtggaattccccttccccatctcggcactagaattcgccactctcccaccccccagcccccacctctgcctccaggtctcatcttccaccccaaaaatgtctgtctctctctttttgttttgtttgttgttggttttttatttctttttggtttgctttctgtttttgttttgattttcttttttttctttctttttttttttttttacaattttggggcctccgggcccaaggaaaacctttttttttttgttaaaaaaggggggaaaaaaaaaccaaaaggcccccgtccctttgaaaaaaaacaaaaaaaagttggtcctttgtttttaaaaaaaaaaaaaaaaaaacccccccctatttttaaagggcccctttaaacccccttaaaaacccgagatgggccttttattttcccaccct

SEQ ID NO: 97288 - DNA, 415 bp, Homo sapiens
  misc_feature (1)...(415): n = a,t,c or g
cccacgcgtncgcctcgtagtaacagccattctcatccaaaccccctgaagcttcaccggcgcagtcattctcataatcgcccacggacttacatcctcattactattctgcctagcaaactcanaanaaaaaaaaaaaaaaaaaaaaaaaaaaaaaaaaagggggggggccctttaaaaaaaaccctgggggggcccaaattttacgggggggggaaaaaaaaaattttttttttaaaggggggggaaaaaaaaacccccgggggaattttgaaaaaaaaaccttttttgggggggggacaatttgggccaccccccccccaaaaaaaaaaggccccgggggaaaaaaaaaatttttaagggaaaaagggggaaaaaccccccttcatccctcgcctcaaaaaaattttcttaa

SEQ ID NO: 97289 - DNA, 401 bp, Homo sapiens
tcatcttctcttactctaagcaacaacaacaaatcatttctcaatcagtttgtgacgttcaatgaaatgtggattttatacgacaactggtgatgaccagctcagtggctagaccaagaagctccaaagcacttcccaaagccaaacttggaccaaaaaaaggtcatgttcgctgtttggtggtctgctgctggtctgatccactattgctttctgactcccggcgaaaccattacatctgagaagtatgctcagcaattcaaagagatgaaccgaaaacttcaacccctgcagtcagcaatggtcaacagaaagggcccaattctccacgacaatgcatgatcgcacattacacaactaaagcttcaaaagttgaactaactgggctacgaagttttgcg

SEQ ID NO: 97290 - DNA, 406 bp, Homo sapiens
cggacgcgtgggcggacgcgtgggatattttgctattactgtatgtgtatgtgactgctcaagcactttgtaaagaaattaggatattttagaatggtacactatgcattcaaatgaaatgtgcctttcactatgtcattctaagaaaacaagtgttttttgcagtcataaattatcacaaatgcacaaattaaagtctatatagattgaaaaaaaaaaaaaaaaaaaaaaaaaaaaaaaaaaaaaaaaaaaaaaaaaaaaaaaaaaaaaaaaaaaaaaaaaaaaaaaaaaaaaaaaaaaaaaaaaggggggggggggttttttatattttttggggggggggaaaatttttgggggggggggaaaaattttttttttttttttggggggggtttaaaaaagaaga

SEQ ID NO: 97291 - DNA, 408 bp, Homo sapiens
  misc_feature (1)...(408): n = a,t,c or g
attctgaacatttttttgaactttctcaattgcagttagtcttctgggacattgaagaaggcctagaactcaatcaaggaacaaaaatatctaagcattgtatttaaaaaacatgtgttagaggtttattaccttaggagatttttaaatatcatttatctgttaaatttagttgttgcatcagacattttgctcatttttccctttaataattatatctttataccanaaaaaaaaaaaaaaaaaaaaaaaaaaaaaaaaaaaaaaaaaaaaaaaaaaaaaaaaaaaaaaaaaaaaaaaaaaaaaaaaaaaaaaaaaaaaaaaaaaaaaaaaaaaaaannnnnnanngggggggggggnaaaaaaaannnngggggggggggggaaaaaaaaaggtttttttttttt

SEQ ID NO: 97292 - DNA, 410 bp, Homo sapiens
  misc_feature (1)...(410): n = a,t,c or g
cggacgcgtgggcggacgcgtggggggaatcctgacttttaaaatgtgagggtatttggaaaaaagaagggaaaaaaaaaaaaaaaagaagggaaaaaaaaggggggcccttttttagggttcttttggggggcccaaccttccgggggggggcccataaaaaatctcttctttttaggggggttttttttaacctgggggggtttttttttgaaggacccttttttttggggggggcccttttgggcccccccccccccccgatttttacgcctttggggaaaaaaaaaatttttaaggggaaaagggggcccccccccctcattttcttgtttttttaaatttgngggcncnccccccccccgccnccccccggnanaaaacctccccccccccccccccccactccg

SEQ ID NO: 97293 - DNA, 416 bp, Homo sapiens
  misc_feature (1)...(416): n = a,t,c or g
acaaaacacatagcctaccccttccttgtactatccctatgaggcataattataacaagctccgtggggaaaaaaaaaaaaaaaaggaaaagaaaaaaaaaaaaaaaaaaaaaaaaaaaaaaaaaaaaaaaaaaggggggggccccttaaaaaaaaccctggggggggcccaaccatgggggggggggaaaaaaaatatttttccccttgggggggggaaaaaaaaaaccccggggggaatttgggaaaaaaaacccctttggggggggggggaaattgggccccccccccccccaaaaaaaaaggcgcggggggaaaaaaaaaaatttaaagggggggggggggaaaaaccccccttattgggggggggaaaaaaaatgggggcnnccnacggaccagcccccgcccgcggaacg

SEQ ID NO: 97294 - DNA, 456 bp, Homo sapiens
attgattgattttaaaatattaagccaaccttgtattcctgggatgaaactaacttggtcatggtgcattattgtttgtatttactactgtattcattttgctaaattttaaaaggatttttgaaaaaaataaagaggattttgtgtctagaaaaaaaaaaaaaaaaaaaacaaaacatgaaaaaaaaaaaaaaaaaaaaaatagaaaaaggagcaaaaattgaaaggatttaatactagattgactttcgcgcaattttaaaagagatttttgaaaaaaaaaaaaggggggggtgtgtctttaaatattctgggggcgggcagctaacttctcttggagcggatatttttttttttatgttttaaggcatttttttaaaatatgagcttgttgtgaacaaaaaaacacccttttttgtgggagaagaacaaccacccccccccgtccttgtttta

SEQ ID NO: 97295 - DNA, 425 bp, Homo sapiens
  misc_feature (1)...(425): n = a,t,c or g
cccacgcgtccgcccacgcgtccgcccacgcgtccgtccacgcgtccggcctatttgtctacccaataaagcgtgttttttccagaaaaaaaaaaaaaaaaaaaaaaaaaaaaaaaaaaaaaagggggggggcttttaaaaagatttttggggggggcaaaatttggcggggggggggaaaagaatatttttttttttaaggggggggaaataaaaaccaggttgggattttaggaaaaaaaattttttttgggggggggaaaaattgggaaaatctccccaaaaaaaaaaaaaggttggagggaaaaaaaaaattttttgggggaaaggggggaaaaataaatgttattgcttgggtgtaaaaaattctggngannganaggaattggatctaccttttataattattattagtgtgggaatgg

SEQ ID NO: 97296 - DNA, 422 bp, Homo sapiens
  misc_feature (1)...(422): n = a,t,c or g
cttggtttgaatgggcgcttatcttgtcatcagggtttttgctataaaattggcagaaggaaagcattcttgcacagaggtgaatggccatgtgaggcaatagtgaggcggtatgagtgctattagtaatacaggctgagtatctcttacctgaagtgtttggtactagaagtgtttcagatttcgggtttttcagattttggaatatttgcattatacttagtgggtgagcatccctcatctaaaaatctgaaatctgaaatgctttaaagaacatttcctcttttaaaaaaaaatttattttcattttggagccaaggtctcactctgtcacccaggctggagtgcagtggcaggatcatggctcactgcagcctcagacttctgggctcaagctattctcccacctcagcctcccaagn

SEQ ID NO: 97297 - DNA, 405 bp, Homo sapiens
  misc_feature (1)...(405): n = a,t,c or g
gtttggtttgcttttgcttttctatttcttttagatgcttcattaggttgtttatttgatgttttcctactttttaaatgtaggtgcttatagctataaacttctctctcggtattgcttttgctgtatcccataggttttggcatgttgcgtttccattatcatttgtttcagtaaatgtttcagttttctttttaatataaagagtgatgttgtatttcgaaaaaaaaagctgaaaaacaaaaaaaaaaaaaaaaaacaaaacaaaaaaaaaaaaaccaaagaaaaaccaagggggggagcgngttgtgattggtgtcaggaagggcgcccctccctgttttacagacatagcaggaagctgggtttttggtgaactaatacaatcataatggctgaaatacg

SEQ ID NO: 97298 - DNA, 421 bp, Homo sapiens
  misc_feature (1)...(421): n = a,t,c or g
cgcacccacacagcacgtgctgtgacgatggctgaacggaaagtgtacactgttcctgaatattgaaataaaacaataaacttttaatggtaaaaaaaaaaaaaaaaaaaaaaaaaaaaaggggggggggcgtttaaaaaaaaacccgggggggccaaaatttaacgggggaaagaaaaaaaaaatttttttctaaaaggggggggaaaaaaaaaaaaagtggggaattttggaaaaaaaccttattttgggggggggaaaaaaagggaaaaaacccccaaaaaaaattaaagccttaagggaaaaaaaaaatttttaaagggaaaagggggaaaaacccccccaaaaccctgggcgtaaaaaaaatggggnnnnnaccaataataccgtgtgatcttgagcagccaagtacatcacaaaa

SEQ ID NO: 97299 - DNA, 413 bp, Homo sapiens
ctgccacccaggtgctggccctttgcctgtgatgtggtgtccctctttctctctcttgtccccccagctcagggccctacccccagcactcacctgaggcccgacctccaagcaggcctgggagggaagggctgtataccgttgccatggataccaccacccagaaggggtggggctgtttgttaccacgagcctccagggagaccccagaccaggcccctagagacagggtcttgctccgctgtccaggctggaatgcttcggtgtgatgacagcgcacgttaacctcgaattcctgggctcaggtgatcctcccactttcgcctcctgacttgctgaaactacaggcacacgcctccaccggcaggcccagaccacagcttctttgacctcagagacaggcactcacctaa

SEQ ID NO: 97300 - DNA, 399 bp, Homo sapiens
  misc_feature (1)...(399): n = a,t,c or g
gcggaggttgcagtgagctgagatcgtgccattgcactccagcctggcgacagagctagacttcgtctcaaagaaaaaaaaaaaaaaaaaaaaaaatgtattaaaaaaaaaaaaaataaaaaaattaaaggggggggccccttaaaaaagatccctgtggggagcaaaagacatcgggtaactgaaataaaaatttttttcaaaggaagggggggaataaaaaaaatgggggaaattttgaaaaaaaaaaaattttttggggggggtaaaaaaaaaaaaaaaaccccccaaaaaaaaaaagtgcttgggaaaaaaaaaaaattttttaagggggggggggaaaaaaacccgcctgggggggggggaaaaaaaacttcttnnnnnnnnaacaaaaacgct

SEQ ID NO: 97301 - DNA, 393 bp, Homo sapiens
tggactattctctacaaaccacaaagacattggaacactatacctattattcggcgcatgagctggagtcctaggcacagctctaagcctccttattcgagccgagctgggccagccaggcagccttctaggtaacgaccacatctacaacgttatcgtcacagcccatgcatttgtaataatcttcttcataggaatacccatcataatcggaggctgtggcaactgactagttcccctaataatcggcgcccccgatatggcgtttccccgcataaacaacataagcttgtgactcttacctccctctctcctactcctgctcgcatctgctatagtggaggccggagcaggaacaggttgaacagtctaccctcccttagcagggaacta

SEQ ID NO: 97302 - DNA, 425 bp, Homo sapiens
  misc_feature (1)...(425): n = a,t,c or g
cggacgcgtgggcgagcctacagtgagccgagattgcgccactgcactccagcctggacgacagtgagactccgtctcanaaaaaaaaaaaaaaaaaaaaaaaagggcgggatttttggggggcagggggcaccaaaaattttataacttccggaatgctaaggggcgttaatgggaagaaccttgccctcctcctccccaaggaatcctcaccaggggggccaccagaaaaaagggcagcaaaaaccctgcaggctggggtttttttgcctttaaaagggccacctgtactaaaaggaacggtttcacctttgcctgggggctgttttggaaccccttgttgcaaaccaaccattccccaaaaaatgttttttttcaatccatatccccaagaagggaccttccacaactcccagccataagct

SEQ ID NO: 97303 - DNA, 400 bp, Homo sapiens
  misc_feature (1)...(400): n = a,t,c or g
cggacgcgtgggcggacgcgtgggataaaacttaaaactttacagtcagaggttaaaaaaaaaaaaaaaaaaaaaaaaaaaaaaaaaaaaaaaaaaaaaaaaaaaaaaaaaaaaggggggggccccttttaaaaaatacccgggggggccccaaatttcccgggggcccaaaaaataattttttttttttttgggggggaatttaaaaaccccctggggttttttgaaaaaaacccttttttttggggggggaaaattttggaccccccccccccccaaaatttacgcctttggggaaaaaaaaaaatttttaggggtaaaggggtaaaaaccccctttttttttggggtctgaaaaattgcnnnccnnnccnacctcacctgttacccttagaggccat

SEQ ID NO: 97304 - DNA, 387 bp, Homo sapiens
gctttcaccatgttggccaggatggtctcaatctcttgaccttgtgatccacccgcctcggcttcccaaagtgttgagattacaggtgtgagccaccgcgcccagccgcctttttttttttttttttaaaaaaaaaaaaaactttggcgcccaaaaaatttaaaactttggaccttaccaccagggagcggagttgaatataaaccccgaaaataaataaggttttcttggaagggaaaagtaaaaggttttttgggggtggggcacagggcctctggcgggaaattccacccttttgggaggacaaggggggcaaatcacagggccaaaaaatggaaaccttcttgtttaacaggggaaaaccccgtttttactaaaaaaaaaaaa

SEQ ID NO: 97305 - DNA, 498 bp, Homo sapiens
  misc_feature (1)...(498): n = a,t,c or g
cgcgcantnannnnnnnnnnaattgacngccgtcggnaccgatcgataaccctgcggtacacccacgcgattcggctgggtgggggncgcgcgacgacacctggcctgctatcctgtacgggtaggtccctcatgtcactgcgggacacccagcgccaaagtcggactcttgactacctgaccagcaccccgcgctcccaggaacctcccgcccgcggagcccactcggattgctctccgcccgggtcggcggaggccccgtctcctgtacccggcgctgggactgctccgcaccgcgcggcttcctttcagcagctgcgggagcatgcggaggaggccctgccggccccgcgggtcatggaggagttccggcgctcctacagccgcctgtgcagggagagtggggccgagccccaagaggctgtcctgcagcagctgcaccagcttcccaggggccggctggacctggccacgcaaagcctgacggtggagacctgc

SEQ ID NO: 97306 - DNA, 379 bp, Homo sapiens
  misc_feature (1)...(379): n = a,t,c or g
ctcccaatcagcttttgttctagacttccccatccctaagccatcacttctccccgcagcccgcctgccgtgcatggctcctgtctggctcggacccaccccaactctccccagtgcctgccactctctgggactctcctcctcccctcctcttcccttagcctctcccacccggccacagctgctggagaataaatttgggatgctgaaaaaaaaaaaaaaaaaaaaaaaaaaaaaaaaaaaaaaaaaaaaaaaaaaaaaaaaaaaaaaaaaaaaaaaaaaaaaaaaaaannnnntgggggggcgcttaaaaaaaaaaacccggggggcccaaatcccccgggggggggtaaaaatatttcttctcctccaagggggg

SEQ ID NO: 97307 - DNA, 463 bp, Homo sapiens
  misc_feature (1)...(463): n = a,t,c or g
ggagcnnnnnnnnnaatgacgcatcgagacgtcccggacgtcccggaacgacccacgcgaccgaataccttgcacaaaaacatgtggccagaatggccttggtgggtaatcaagactgaatgatgccccaacggggagcatgatttatctctcccggcctatctactaccccacccacaagaacctgcatcaccctgttggcaggagctcagagccactgtcaccctcttggaaactatttatgtagcaagaggcatagacatgctcatgtcctgtgacccagtcattgtactcttggaagtttatttacaggctgagcttggtggctcacgcctgtaatcccaacactttgggaggccaaggtggcaggatcgcttgaggcaaggagttcaagaccagactgaccaacataacaagaccttgtctccatttacttcttttttttttaatgaagtttattgtt

SEQ ID NO: 97308 - DNA, 383 bp, Homo sapiens
ccccttctttttgaggatacttcctggaagctagttgcctactacaccccctcctacatcccatgtaccagaactgtggtcatgtggcatgcttagctgcaaaggagaatggaaaattcatgcaggcagcatgtggccagctcaattcaccagcactgtcactgaagaatgggaggctgtcagctgcatatgggggcagtgattgtgtctatctcttcccaatgtctaaaatggtgcttggcacacagtaggcacttaataagtatacgttgaatgggccgggcgcagtggctcatgcctgtaatcccagcactttgggaggctgaggcgggcggaacctgaggtcaggagttggagaccagcctggccaacatggtgaaacc

SEQ ID NO: 97309 - DNA, 472 bp, Homo sapiens
  misc_feature (1)...(472): n = a,t,c or g
natggaanactgaaggtcctgcgcacggaaccccggattgacccacgcgtccgcccaataccaaacgcccctcttcgtctgatccgtcctaatcacagcagtcctacttctcctatctctcccagncctagctgctggcatcactatactactaacagaccgcaacctcaacaccaccttcttcgaccccgccggaggaggagaccccattctataccaacacctattctgatttttcggacaccctgaagcatatattcttatactaccaggctgcgcaataatcatccatattgtaacttactactccggaaaaaaagaaccatttggatacataggtagggtctgagctatgatatcaattggctacctagggtttatcgtgagagcgcaccatatatttacagtaggaatagacagagacacacgagcgtatttcacctccgctaccataatcatagctatacccacc

SEQ ID NO: 97310 - DNA, 392 bp, Homo sapiens
  misc_feature (1)...(392): n = a,t,c or g
cagaagctgccatcaagtatttcctcacgcaagcaaccgcatccataatccttctaatagctatcctcttcaacaatatactctccggacaatgaaccataaccaatactaccaatcaatactcatcattaataatcataatggctatagcaataaaactaggaatagccccctttcacttctgagtcccagaggttacccaaggcacccctctgacatccggcctgcttcttctcacatgacaaaaactagcccccatctcaatcatataccaaatctctccctcactaaacgtangccnnagaaaaaggaaaagaccactttcacttataaaaaccaaaaaaaaannggggggggccctcttaaaaaagacctggggggggccacataaa

SEQ ID NO: 97311 - DNA, 505 bp, Homo sapiens
  misc_feature (1)...(505): n = a,t,c or g
tgtgcncggggnnatgatgnctttcaggtgagttttntggccctngatannngnannnnncnccnnnnnncnggggaagaatnacgcgggggcggttacatatattgtaacttactactctttgtaaaaaaaagattcattttggatacatagcgtatggtgctgagctatgagggtcaattgggagtcctagggcttatncgtgtgagcacaccatatatttacagtaggaatagacgtagacacacgagcatattttacctccgctaccataatcatcgctatccccaccggcgtcaaagtatttagctgactcgccacactccacggaagcaatatgaaatgatctgctgcagtgctctgagccctaggattcatttttcttttcaccgcaggtggcctgactggcattgtattagcaaactcatcactagacatcgtactacacgacacgtactacgttgtagctcacttccactatgtcctatcaataggagctgtattg

SEQ ID NO: 97312 - DNA, 433 bp, Homo sapiens
  misc_feature (1)...(433): n = a,t,c or g
cggacgcgtggggttcaagtctccaaatacaaacttctagtgtctcctccacttgtatgcaaattaggaaatgcaaaaataaggtctcttaaattgacagctatgtttgtttagatattcttcaaaattttataatttcttatattaccaatctcactcattttggtcatgtgtgtctttaacagctgttcaaaacaggntttcttcccttcctccttccttccttctgcccttcgttcccttccttctctctcttccccttctctttttcctgctttctttcttgtccctcttccctatccttcctttttttctttctcctctcttttcatcccttcttctttcctacgttactcattagtttttaggtgtttttgttttaaaatgcagggcagcttgngttaaggggttatctaatgcaatatattttgcc

SEQ ID NO: 97313 - DNA, 406 bp, Homo sapiens
acaccatatatttacagaaagaatagacgtggacactcgagcatatttcacctccgctaccataatcatcgctatccccaccggggtcaaagtatttagctgactcgccacactccacggaagcaatatgaaatgatcagctgcagcgctctgagccctaggaatcatctttcttttcaccgtaagtggcctgactggcattgtattagcaaactcatctctagacatcggactacacgacacgcactacgttgtagctcacttgcactatgttctatcaataggagctgcatttgccatcataggaggcttcattcactgatttcccctattctcaagctacaccctagaccaaacctacgccataatacatttcactatgatattcatcggcgtaaatctaact

SEQ ID NO: 97314 - DNA, 172 bp, Homo sapiens
ggggggggcccttaaaaaaaaccccggggggggcccaaatttaccgggggggggaaaaaaaaattttttcccaaaagggggggggtaaaaaaacccctggggggatttttgggaaaaaaaccttttttttggggggggaaaaaatggggaaaaccccccccaaaaaatttag

SEQ ID NO: 97315 - DNA, 392 bp, Homo sapiens
actattctctacaaaccacaatgacatgggaacattatacctattattcggcgcatgagctggagggctaggcacagctctaagcctccttattcgagccgagctgggccagccaggcagccttctagggaacgaccacatgtacaacgttatcgtcacaggccatgcatttggaataatcttcttcatagtaatacccatcataatcggaggctttggcaaccgactaggtcccctaataatcggggcccccgatatggcgcggccccgcataaacaacataagctgctgagtcttacctccctctatcctactcctgctcgcatctgctatagcggagggcggagcaggaacaggatgaacagcctaccctcccttagcagggaactact

SEQ ID NO: 97316 - DNA, 475 bp, Homo sapiens
  misc_feature (1)...(475): n = a,t,c or g
ctagttctagatcgcgagcggctgtgcagacattcaattgttattaaaaaaaaaaaaaaaaaaaaaaaaaaaaaacaaaaaaaaaaaaaaaaaaaaaaaaaaaaaaaaaaaaaacaaggggcccccccccaaaaaaaacccccgcgggccccccccccccccccccaagggaaaaaaaaaaccccccccctgaaggggggcaaaaaaaaccccccccggcccactgaaaaaaacccccccccccccggggggggcaacaacccccccccccccccccccaaaaaaacccccccccagaaaaacaaaaaacttggggggccgaggggggaacccccccccccaaacccccccgaaaaaaaaacgggtcacaacaaatcgccgaccccccatcaaacgcagcaaaaaaccgccaccccacccaagagccccccccccaaccnnaatgtattcccccacccccgacgccccccccccg

SEQ ID NO: 97317 - DNA, 388 bp, Homo sapiens
  misc_feature (1)...(388): n = a,t,c or g
cccacgcgtccgactagttctagatcgcgagcggcctccatgactttttcaaaaaaaaaaaaaaaaaaaaaaaaaaaaaaaaaaaaaaggggggggcccttttaaaaaaatccttggggggcccaatttttcccgggggggggaaattaaaattttttttttttagggggggaaaaaaaaacccccccggggtttttttgaaaaaaactttttttttggggggggaaaatttgggcccccccccccccaaaaaattaaccctttgggggaaaaaaaaaatttttaggggggaaggggggaaaaaaccccctatttgggtggggtgtaaaaatttgggnnnnnnnanaaaacccccttttttggggggggaaaaatgcgcccacccccc

SEQ ID NO: 97318 - DNA, 397 bp, Homo sapiens
  misc_feature (1)...(397): n = a,t,c or g
cccacgcgtccgctgcaacctctgtctcccgagttcaagcgattctcctgccgcacatctcccgatgtggcgtggtgagtttctctgnnctncccccccccctcggggcgctccttttttgtttttttgtgagtggagagtttttgtgtttgggtnaaaaagcgtttcactatgttggccaggctggtcttggactcctgacctagtgatccacccgcctgggcctcccaaagcgctgggattacaggcgcgagcctccgtgccagtcttttatatatttactagtgtttctccatccagcttggcctactgcctgagtttctaatccaatatgtccagttactaattgtgtatcccaggatacatcacttatacctgtctgtgccacatctgcaca

SEQ ID NO: 97319 - DNA, 408 bp, Homo sapiens
  misc_feature (1)...(408): n = a,t,c or g
caaaatggtgctttgagggtcagcctttaggaaggtgcagctttgttgtcctttgagctttctgttatgtgcctatcctaataaactcttaaacacanaaaaaaaaaaaaaaaaaaaaaaaaaaaaaaaagggggggccttttaaaaaaaaccctgggggggccaaaataaaacgggggaaggaaaaaaaaaatttttttcttaaagggggggaaaaaaaaacaaaccggggaaattttgaaaaaaaaactaattttggggggggaaaaaaaggggaaaaacccccccaaaaaaaaaaaacccttgggggaaaaaaaaaattttaaaggggaaaaggggaaaaaaaacctgaaaatgtttggggttataaaantgggggnnnnnnnnaaaaaaataatttttgtgggg

SEQ ID NO: 97320 - DNA, 414 bp, Homo sapiens
  misc_feature (1)...(414): n = a,t,c or g
gcggaggttgcagtgagctgaggtcgtgccgctgcactctagcctgggtgacagaatgagactccgtctctttaaaaaaaaaaaaaaaaaaaaagggcccttttaaagttctgaggggaaaggggccttcgggaaacaaaagggaaggggcaaaaaaaaaaatccaggggaaaccttgcccattttgggaatccttttaagttttggccaattttgccctacccctgaggggnaaannaannggggggcctgaagactctaaggggaaaggggccctccggacacaaaagggagggggccaaaagaacaaccccccgcagaacattcccctcttcgggaagtgctttggttgggtccatctttcctcccccccccaggaatctcataccccggccggggggtaacaacccctgg

SEQ ID NO: 97321 - DNA, 380 bp, Homo sapiens
ctacaaaccacaaagacattggaacactattcctattattcggcgcatgagctggagtcctaggcacagctctaagcctccttattcgagccgagctgggccagccaggcaaccttctaggtaacgaccacatctacaacggtatcgtcacagcccatgcatttgtaataatcttcttcatagtaatacccatcataatcggaggctttggcaactgactagttcccctaataatcggcgcccccgatatggcgtttccccgcataaacaacataagcttctgactcttacctccctctctcctactcctgctcgcatctgctatagtggaggccggagcaggaacaggttgaacaagctaccctcccttagcagggaac

SEQ ID NO: 97322 - DNA, 394 bp, Homo sapiens
gctgagctatgatatcaataggcttcctaggggttatcgggtgagcacaccatatatttacagtatgaatagacgtaaacgcacgagcatattgcacctccgctaccataatcatcgctatccccaccggcggcaaagtatttagctgactcgccacactccacggaagcaatatgaaatgatctgctgcagtgctctgagccctacgattcatctttcttttcaccgtaagcggcctgactggcattgtattagcaaactcatcactagacatcgtactacacgacacgtactacgttagagctcacttccactatgtcctatcaataggagctggatttgccatcataggaggcttcattcactgatttcccctattctcaggctacaccct

SEQ ID NO: 97323 - DNA, 251 bp, Homo sapiens
  misc_feature (1)...(251): n = a,t,c or g
nattgcatacgatgcccgtccgcnccggcattccagggtcgagccacgcgtccgcccacataggatgaataatagcagttctaccgcattaccttaacataaccattcttaatttaactattgatattatcctaactactaccgcattcctactactcaacttaaactccagcaccacgaccctactactatctcgcacctgaaacaagaaaaaaaaaaaaaggggggggccgttttaaaggaccctgggg

SEQ ID NO: 97324 - DNA, 403 bp, Homo sapiens
  misc_feature (1)...(403): n = a,t,c or g
cccacgcgtncgcccacgcgtncgcgcccctcttcgtctgatccgtcctaatcacagcagtcctacttctcctatctctcccagtcctagctgctggcatcactatactactaacagaccgcaacctcaacaccaccttcttcgaccccgcnnaaaaaaaaaaaaaaaaaaaaaaaaaaaaaaaaaaaaaaaaaaaaaaaaaaaaaggggggggggctttttaagagtcccccgggggggccccaatttcccggggggaaaaaaaaaaatttttttctttttagggggggtttaaaaaaacccctggggggtttttggggaaaaacccctttttgggggggggggaaatggggcccccccccccccccaaaaattacccccttgggggaaaaaaaattttttg

SEQ ID NO: 97325 - DNA, 431 bp, Homo sapiens
  misc_feature (1)...(431): n = a,t,c or g
atctgcattacttcatctaagccctttcacaaccccatgagattgataatattattatttcagctttgtgaatgagaaatggaattgcagagaagttaggtaacttggccaaagtcagacagttatgaagaggtaaagataaaacttgaacctaggcagactgacctcagagccctgggtttctgtctcagctttacagggaaaaaaaaaaaataaaaaaaaaaaaaaaaaaaaaaaaaaaaaaaaaaaaaaaaaaaaaaaaaaaanaaaaggggggggggttttttaaaatttcttggggggggccaaactttccgggggggagaaaaattttttttttttttttttgggggggattttaaaaaccgggggggggtttttggaaaaaaaccttttttttggggggggggctttgtggccccccccccctc

SEQ ID NO: 97326 - DNA, 470 bp, Homo sapiens
  misc_feature (1)...(470): n = a,t,c or g
gggcnnnnnnnnnnaatttcgagcccactagtcagtgtcgtggaattcccgacgactcacacatggacacctacgagcaggtagcctggtaccgtcagacgactgctgcggtgggaagcttttctccagtgtctgtcactgttcaattcggccctaattcctttcttctgtgttttccttggttcagggtgtgcttttctcctctctctgcctggatcgaaacctgccagacatgatgcagctatggagtgaaatatttaacaagtaactttatttgcaagagttgtccattcttggggtgtactagagatctttgtttgaagtactttaaaggagacagttttactcgtgtgtgttgttgttttccaagtctgacttttacttgtagttcatatggacttataaaatttctttggttgttaaagtactctgaaaacttaatcaactttccatgatactgaagggacgtg

SEQ ID NO: 97327 - DNA, 301 bp, Homo sapiens
tgaacatgagcacatgtctgcttctttccctcaaaagtcattaaacacaccaggaaaccataccaccatgaataagagttagaaaaaataaactacagaatcacactctgaaagactatagatatttgaattatcagatagagaatataaaatatattaaaagacagaattaaagtctggtaaaggaacaaaagactaccagaattggccagaacattttgaaaaaaaatctggaaataaaaatttaagttaaaattataaaaacaatgaccaggttaagacagcaaaataggtatacttg

SEQ ID NO: 97328 - DNA, 397 bp, Homo sapiens
ttcaatagtcacagaacctgtgctttttgtgaccaccttcttttgctcaaggatgtgttgagagatgtccttttttgtggggtggagctgtagtttacttcacctgattcgagtcctattttgggtgtttgtaatgtgtcaggaactgtgccaggtgccttacaggattgattcctttatgggcatctgacaagcccacccaccttatgtgaaaggcagaaccaaatagactccagaatgagacccaggtttgggtcccagctctgacacttctttttttttgagatggaggctgactctgttgccaaggctggagtgtaatggtatgatgtcggcttacagcaacctccgcctcccggggtgaagcgatattcctgactcagtctttaatgagcgg

SEQ ID NO: 97329 - DNA, 393 bp, Homo sapiens
caggctggtctcgaacttctgtgctcaagctatccattcaccttggcctcccaaagtgctgggattacaggtgtgagctaccatacccagcccacaaatgttcttaatagttatgacaaatgatgaatcctttccagaagattttcctttaaagtttgaagccaggcattgatttctctctagctatgaacgtcctagatggcatctttttccaatagaaggctgtttcacctacatagaaaatccattgttaagtatagctaccttcatcagcaatcttagctagatcttctggttagcttgctgcagcttctgcatcagcacttgctgcttcacctcacacttttatgttttggagaccacatctttccttaaatctcatgagccaacctt

SEQ ID NO: 97330 - DNA, 390 bp, Homo sapiens
ctcgatctcctgacctcgagatccttccgccttagcctttcaaagtgctgggattacaggcatgagccaccgcgccctgccgcatattttttctttaaaggggatccagtaaaagataatagaaatctttcatgttactttttttaaatttagaagttgactgaagtggcaacaagtagcctttgcaatcttaaaaagaacagtctccagaaattttcttacattccagtgtaacttcaaagtactgggtgttatgttttcagatcttaaacttgccctccgcctttaaagctctgggtttatgagcttgggctactgagtacgatttaatttcctactaggggtaagacccatagacactgtatgcagcactttccctgcttttcttgg

SEQ ID NO: 97331 - DNA, 406 bp, Homo sapiens
aaagagatttcatccattcattagttgcctgcttatgccccagacttcatcctcttctcttttctgtctccctaagttctggtcttatagcatttatagactgataacccctaaatatgcatctctagccagaccttacttctgaatgccagcctcttgtccccaatttgacatctgtatagcatacttaaatctcaaactgtactttaggttttctcaaaaaaaaaaaccaaaaaaaaacctttctctctccattctgttttggttggttggtttttgtttttgatttggaaacaaagtctcgttctgtcacccaggcttgagggcgggggggggatcttggtttactgcaacctcagcctccccatctccagggattctcctgcctcagcctcttcagaagctg

SEQ ID NO: 97332 - DNA, 408 bp, Homo sapiens
gcgtttgcacggagtgcaatcactgcgtccttacgggggttgcaaggcgtccgaagtatgagtccactaacaaaagtccagaaactcgccagataatagtattgggtctcttcaaaatatcggagaataatttctttctcgctgatcgcctaacttctactgacgaagcttggaagttgcagaaggctggagtgcaatggcacgatctcggctcaccacaacctctgcctcccgggttcgggtgattctcctgcctcaacctcccaaatagatgggattacaggcatgtgccaattctcctctgtgatacgtggacattgccatcccatgcaacaacaagggagctcactcagtgggtttgatgtggtggatgctggctcgggaagttctgcgcatgcgtggcaccat

SEQ ID NO: 97333 - DNA, 407 bp, Homo sapiens
  misc_feature (1)...(407): n = a,t,c or g
cagttattttaacttagaatgtgaagtatttaataattttattctcagttttggggcataatcataattacggggcaatgggaaaactcccactcaatattatattataaatgcatcaacaaaaaagaaagattctgttgtacctatagtattatgatatcaagtgttagccagtccttgcctaatgtattggcaaaacctcagtcctaaaagggtaagagaaatatcttatttggtcctgttaaaaacatcttctgtgatacccaattcacatcatgtgtcaactttttcagagaggaggtctcactggattgcccaggctggtctcaaactcctgcactcaagtgatcctcctgcctaggcctccctacgtgctgggattagaggcgtgagcagccacgcctggn

SEQ ID NO: 97334 - DNA, 403 bp, Homo sapiens
  misc_feature (1)...(403): n = a,t,c or g
aaaaattattctatagtgcagggttagatgacaatatagaagattttaaagcaatatattacaatttgtaattttcttggtgggaaactattagagtatttggatgtttaaaaactaatgtgtttttttaaagatcaacttgttataatgttgtgactatataatattagtggtactttgggattctaaaacaaagggacaagatgaacaactagcatgacaatttctttaaaaccagtagtatctagaaccataaaggagtagcagacaaagctatttaaagatttttgtccatttacaaatagctgattagtccaacacttcctgtaatcccagcactttgggaggccaaggcgggtggatcacgaggtcaggagatcgagaccatcctggctaacacaan

SEQ ID NO: 97335 - DNA, 378 bp, Homo sapiens
agtgagccgagatcgtgccattgctctccagactgggcaacagagcaagactccgtctcaaaaaaaaacaaaacaaaacaaaaactagtgccttcaactggggaatacctggctcttagttaaaagcatgagaaatttcctggttaaatggaacaattcagacacatcaagaaaagcccgaagtacagaatcaagttatactagaggaaaacattgtttttctaggccctcaagacagaatatttgagtgtcaggccgtaacagcagagttagaaccagagaaaaaagctatagtagccgggtgcagtgactcacacctgtatcccagtactttgggaggccaagatgggtggatcacttgagcccaggagttcaaga

SEQ ID NO: 97336 - DNA, 402 bp, Homo sapiens
  misc_feature (1)...(402): n = a,t,c or g
attattggaattttcttgcaaatttttttgttcagaaatcattgagattaaaatgcaggacttttttttacccctctcaaacaaaaactacagatcaaccatcaggaaacatctagaataccagagctatacctgaacttttcttaaccggctgttttgtattactaacgtaacatcttatgtcttaactctttaagacgatttatggctaggattactatatgttgaatttacagaattgacctagtcatgaaaatgactttacctgtttatcttttacacttcttttgttattggtggttggttttgtttttgttttttgagatggggtctcggtctgtcacccaggctggagtgcagnggagtgatcttggctcgctgcaacctctgcctcctgagttc

SEQ ID NO: 97337 - DNA, 353 bp, Homo sapiens
tttttttttttttagcttgcagaatcctaggacgttttattaattcatgatgcccactatccttgtgggagcaagaatatgcggcgtttcaagctccattcaaagaactacatttgacaaagttttatatcagtccaagagcccccaccccatctccccacacagccttggaagtcaagagccttaatcagaaaacacatgagaaggccaggcatggtagctcatgccctgtattcccaacactttgggaggctgaggtgcgcggatcacctgaggtcaggagttcgggaccagcctggccaacatggaaaaaccccatctctactaaaaatacaaaaattagccaggcctag

SEQ ID NO: 97338 - DNA, 411 bp, Homo sapiens
ttgtaatacctttactgaagttctttcttcacatggccgcaagttactgtatattgcctttcatgtcagcctgaaggactccttttagcatttcctgtagggctggtctactagtgacaaatttctccagtttttgttaatctgggagtgtcttaatttctacttcattactgaatatagttttgccagataaaattttttggccaggcttgctgggattacaggcatgagccaccgcgcctggcccaattaatccatatttttctagggaatgaatcgtgataaaaccagtgaattccatggttatgagcccgctgtcacattgccacctctgaaaagtgtatcccttgcagggagatgtttgagttttgacaccatttgggatagacaagacattctttaagtccatga

SEQ ID NO: 97339 - DNA, 421 bp, Homo sapiens
tttcaccatgttagccaggatggtctcgatctcctgacctcgtgatctccccgcctcggcctcccaaagtgctgggattacaggcgtgagccactgcgcccggccgagaacactgtttatgttcatttctcttcatggagtttcacgaaccactcagggaagataaattgaaccctagatcagtggaaggagcagctccctggttggttataaattctcaggggagtttttttttttaacccctctatttggaactcatagcaaaaaaaggcaagcatctatgttttccctctgtgctggaagagggacatttttttataccattttcctgtgtctggaacctttcgggggttttaaatttgtggagatctcagttcagcttctcaacctcagcctcagatggctcagggcttcatttttt

SEQ ID NO: 97340 - DNA, 422 bp, Homo sapiens
  misc_feature (1)...(422): n = a,t,c or g
ctgggatgacgggtgcccgccgccacgcccggctaatttttgtattttattagagacagggtgtaaccatgttgcccgggctgatatcgaattcctgacctcaggcctcaggcgtgagccatcacacctggcctgatttcctttcttttggttatatacctagcagtggggttgctggatcatatggtagttctatttttctttatttgaagaacctccaagctgttcttcatagtggttgtactactttacatttccaccaacagtgtacgggggttcccttttctccatatcctctccagcatttgttatcgtctgtcttttgcctaaaagccattttaactggagtgagatgatatctcactgtggttttgatttgcatttctgtgatcaatgatatgagtaccttttcacatacctgn

SEQ ID NO: 97341 - DNA, 171 bp, Homo sapiens
gtttccagccaatagcatttctatatgccaacagtgaacaatctggaaaagaagaaagcacttccatttacagcagctatgaagaatacctaggaatcaatttaacaaaagaaatgaaagatctataaaaggaaaactataaaacactgatggaaaaaattgaattggaca

SEQ ID NO: 97342 - DNA, 408 bp, Homo sapiens
  misc_feature (1)...(408): n = a,t,c or g
gtttcaccatgttagttaggatggtctcaatctcctgacctcgtgatccgctgcctgccttggcctcccaaagtgctgggattacaggcatgagccacggcgcccagcccttactcgttttctctttgtatttttgtaccttcagagactagatcatctaatcaggataaatagttttttcattatgtcagtaaatggtatgtttacttttgttgtgttaaaactatttaacctgatccacgcgtncgcggacgcgtgggcggacgcgtgggatcaggttaaatagttttttcattatgtcagtaaatggtatgtttacttttgttgagataaaattctgaaatttaggccagatatggtgtgtcatgcctgtaataccaggactttgggaggctcaggtgggcagaa

SEQ ID NO: 97343 - DNA, 402 bp, Homo sapiens
ctggtctggaactcctgaccttgtgatctgcctgccttggcctcccaaagtgctgggattacaggcatgatccactgtgcccggcccaatatttatcttttctttatgccataaacaaattattctcttccacctatttggaaatacacaatagattggtgtgctgtatagtcaccctactgatctataaaccataggtcttatttattctgttgaattgtatatttatatccattaatcaaactcttttcatcctccctcccccaaccctaacaggtctctggtaaccaccaatctactgtctatctttaagcatctgctttttggtgatgttgttttgttttttcttgagacggagtctcgctgtgtcacccaggctgaagtgcagtggtgcaacctcac

SEQ ID NO: 97344 - DNA, 396 bp, Homo sapiens
  misc_feature (1)...(396): n = a,t,c or g
ggtttcacaggatggtctccatctcctgaccttgtgatccactctcctcagcctcccaaaatgctgggattacagctgtgagccaccgcgcccagcctggnnttttttttttttttttttttggcccaaaaaaaaaaaatttttttttttaaggtgggggggaaggggaataaaaatattttatggggcctttaaccccggggtttaaggggaccctccggcctcacctttttaaaaaaaggggattacgggcttgggcctccccccggggttaatggtttttttttaaaaaaatggttttttttttaaaaaaaaaattgttttgaacccttaggttaaaggaatttttttgttttggcctcaaaaaaggttggttttacgggggggacccaaagg

SEQ ID NO: 97345 - DNA, 375 bp, Homo sapiens
tgttggccaggccagtcttgaactcctgacctcgtgatccccccgcctcagcctcccaaagtgctgagattacaagcatgagccaccatgcccggccgaaactaatagttttaaaaatgtattctagatgtcgactagtaaaggctttgctgttatctatacctaggtaatgttctagactagatgacaagtcgagtccacacctgagtgttgattttgactttaaaaaattaaatagaaagttaaagctattggctaaaattgtgagtttatctctatatttgtagatccagtcacacagtttagcatcatattatatcatgacattagttctacttttagaaaagtgtatcttttagctagaatatgtgctcg

SEQ ID NO: 97346 - DNA, 397 bp, Homo sapiens
  misc_feature (1)...(397): n = a,t,c or g
aaggcttgccttagatttctgttgggttgtgcagatctagaccacagttgtcatgtaacaaaggaaggagagtttgaaattacaggctcacagttaatgataaaattccaacctaaacccaagaccagacattccaaacactcaagtgagtcaatctgatgatttgtaaggcttaatgttgaaccgtcttcaaatgtgatgacctcatcctaactctttccaagctcccactttgggtatatcaagaggctgaatgtggtggctcacatctgtaatctcagcactttgggaggctgagtcaggaggattgcttgaggccaggcatttgagaccagcctgggcaacacagcaagaccccatttctacaaaaaaaattagccggatgtgttgatgcacn

SEQ ID NO: 97347 - DNA, 397 bp, Homo sapiens
tttacattcccaccaagtgtatataagtattcctttttctctgcgggctcaccaacaacttatgtttgttgactttttaataatagccattctcactcatatgagaagggatctcactgtggttttgatttgcatttctctgagattagtggatgtggagcattttattttgtgttcgttggctccttgtatgcctttggcgaagtgtctgttcatgtcctttgctcattttttaagggggttatttggtttttgcttgtttaattttttaagttcttttttttttgagacggagtctcgcttcatccccaggctggagtgcagtggtgcgatctcggctcacagcaacctcctcttcctgctttcaagcgattctcctgcctcagcctcctgagag

SEQ ID NO: 97348 - DNA, 330 bp, Homo sapiens
accgccccgacccacgcgtccgctgaataacaccatcaaccaaatggaaacaatttgtatgtatacaaaatgctacctaataatagcggaataaacattatttccaagcgcacatggaacactcataaaaataggccacattctgggccataaagcaagcctcaacaaatttaagagaattaaaatcatacaaagtgcgttctttaagcataatgggatcaaactagaaaacgataagagaaagataacaggaaaacatccaaacacttggaaactaagaaaacacacttctaaacccatgagtcaagaaatgtttttttaaaaaatgag

SEQ ID NO: 97349 - DNA, 445 bp, Homo sapiens
  misc_feature (1)...(445): n = a,t,c or g
nttgaatccgttcgcctgccgnaccggnccnnnnnaccgcccgacccacgcgtccggtttcaccatgttggccaggcttgtctcaaactcttgacctcaagtgatccgcccacctcagcctcccaaagtgctgggattacagtaccttctttacaataacagccttgatcacctaaaataaaaaacatatctgaccatcaaaactaaaattgcaaaacctaaattatattggtagtccagaattcttgttcatttatctgttttaatcatatgatcattaagaaaagtccaaagaatttggaattcatgtacagattagaagtctgaatggcactataaaattgagttgacagcattaatttccatttggaaaagtctgctagaggttattcatacaggaagaatttatcagaatttgcaactatctctaaagtagattacacat

SEQ ID NO: 97350 - DNA, 389 bp, Homo sapiens
atcatgccactgcactccagactccagcctgggtgacagagtgagaccccatctcaaaaaaaaaaaaaaaaaggaaggagggaaaaaaggggggggaaaaaaactaagttcctccctttaaaaaaaacccggtttttaaattggggcccaaaaaaaatttaaaaaattttggaacccgggccgggctggggggctaaggcctgaaaccccaccctttgggggggccgaaggggagggatcaccggccctaaggggacccccccccctcaccctccaaaggggggggataaccggggggggccatcacccctagcccatttttttttttgggggcaaaaaaaattaaatttggctccctataaaagggggggggtaatttcaagggggga

SEQ ID NO: 97351 - DNA, 381 bp, Homo sapiens
cggacgcgtggggaaatgaaaggcattaccatcctctttacttctctccaaagtgagagctgttgatgacacagcatcacctcctacatctaggcttttatttggggtttttttttgttttgttttgttttttttttaataaaagagatggagtctcactatgttgcccaagctgatcatgaactcccagcttcatgggctcctcccacctcagcctcccaatatgctgggatttcaggggggagccaccccacccagcattattttattttttattggattttttattttactgttttttgtggtggtggttttttgagacggagtctcgctccttcattcttcgcccaggctggagcgcagtggcgtgatctcggctca

SEQ ID NO: 97352 - DNA, 390 bp, Homo sapiens
ctaaaactgaagactcatttcaattgctgttccttctactcttccctccctctctttaggccatcattttcaaattagttgggttattctgccattgttgcttttcaaaaaatacaagcaaatatatataaatatttttctttcttatgcaaaagaaacattctataaacatttggtatctttttttcacttaaactgtatcttagatcattctatagcagtaaataagatattccttactctttttgcttttttttttttttttggaaagggagttttgtttttgttccccaggctggagggaaagggaggaaacttggttaactgaaacctccccctccagggttaaggggattctcctgcctcaccctcccaggaagttgggaaaac

SEQ ID NO: 97353 - DNA, 398 bp, Homo sapiens
gtttctccatgttggtcaggctggtttcgtactcccgacctcaggtgatccacgcctcagcctcccaaagtgctgggattataggtgtgagccactgcacctggcctacaggatgtttgtcatttttatcttcaaaaaatttaaggagttttccttgcaagattttcacatccaccacctttgctttcttttgccagtagtgagaatagctgctagcagatactccttggaggcatgaaggccatcaatcagtttcacagctggaaacagcgataagagtctatcagtgcctccctttaagcactgacacttggccctttactgaggtacttttctttcatttattaaaagccaaagccaaactgtaaatattcttttctgccaggggaagacaaaga

SEQ ID NO: 97354 - DNA, 399 bp, Homo sapiens
  misc_feature (1)...(399): n = a,t,c or g
cggacgcgtgggcggacgcgtgggtagccatccttaaaattgttaaattcttggacctgccaccagatagaagacttttaatatataatggcattaaaaattaataaatgggattagtgggaagattttgtttcagacaatttgataataaagagggaatattaacgatcaggtaaaaggagagccaggctattatattataagggtaaggacttaataaaatgttttaggccggatgcagtggctcagctttaatcccagcattctgggaggctgaggcatggggattacttgagttcaggagttcgagaccaaactgggcaacatagtgagactttgtctctactaaaaaacaaaaaatgaggctggaggaggtcaagactgcaataagctgtgatn

SEQ ID NO: 97355 - DNA, 375 bp, Homo sapiens
attgtgatgtatttttatcacccagttctcttccatgatacctatgtagatgtatttaaatcagttattttcacatctctttctctttttttttttttttttttttgggaaaaaaattctcttttttttccccaggtgggggggcggggggggaattttggccggggtttctggaaattttggcttcccgggtgggggccttttttttgtttaggtttccgagggaggggaaatttggggcccccacccccagccggggcggtttttggttttttggggaaaaaaaccaactttttttcttaaaataagaaattgggttaccccatggggccggggggggcttggaatccgggacccaaaaaaattggttgggtg

SEQ ID NO: 97356 - DNA, 401 bp, Homo sapiens
actagttctagatcgcgagcgggcgcctgcttgggcaacgagggaaactttggctccaaaaaaaaaaaaaaaaaaaaaggggggggaacaagcccaaaaccctggggggggaaaaaaaaatttttttggggggccgggccatcttttaaacccccccccgggttttttcgggaatggaaaaaaaagcagccccttcccggccgggtaagtttttttttttttaaaaaaaaaaaaacttaaggggccagggaaaattcttttttttggggggggggggaaattaatgggggggggaaaaagggaaatttaaccaaacccccccaaggggctggggaaggtcttcaaaaataaggggaattctcctttttgggaggggggtcctttgaaaaaaaaatggtccc

SEQ ID NO: 97357 - DNA, 405 bp, Homo sapiens
cccacgcgtccgaaaacagtcctaagcctcctccaccggaccgagcgcttctgtgttcactctgctctctatgcagccttcacagccagaggcagatggggacctgtctctcagcacagaataagcccatagcaggggctcaagtcacatggaatctgttcttactcagccttcattgagcgtcctcaagaaaatcaagaaatggtgccctcagttctccagcagagggagggagggaaagaggagattttctcaaaatattgcacctccatcccctgcaaaaattttttatacaccgggccaggcgcggtgggtcatgcctataatcctagcactttgggaggctgaggcgggcagatcacgaggtcaggagatcaagaccatcctgactaacatggtgaaacc

SEQ ID NO: 97358 - DNA, 391 bp, Homo sapiens
attggcatttctggaaattgagttacctgtgccaacttttatttgtagatagaatgggaattgttaaatggactatcaattcacaagaaatcttctcttattaagagcacaccagatacctaattccatttagttttcaataacttcttgtattcttgagtcagccacacaagtcatgtaattgcttcagatattccagcatgagcttcttgctaagaatgccacaagaacatgtttttcttttccccctttctttttcttgactggacatagcttttaataaattaatgaaggccgggcgtggtggctcacacctgtaatcccagcactttgggaggctgaggtgggcagatcacaaggtcaggagttcaagaccagactggccaatatg

SEQ ID NO: 97359 - DNA, 393 bp, Homo sapiens
aaaaaccttggccagtagtgaaacctgacattcacagattactactgggtagtggcaagagcacaggcactggcaccagactactcagtttagtatcctggccctgttttaggtgattctgggacaaggtacttaacctcgtttgtgcctcaattgccttacctataaaataaaagtaataactgtatttgcctcatacgttgttgtgaagattaaatgggatacgtataaagtgtttataacactgctggcacatagaaattactcaatagggctgggcacggtggctcattcctgtaattgcagcactttgggaggccgaggcaggcagatcgcttgaggttaggagttcaggaccagcctggccaacatggtgaaaccccatgtctaata

SEQ ID NO: 97360 - DNA, 409 bp, Homo sapiens
cggacgcgtgggcggacgcgtgggcggacgcgtgggctgctttcagcgcacacgggaagatatcagaaacatcctaggatcaggacaccccagatcttctcaactggaaccacgaaggctgaggcaggagagttgcttgaaccaggaggcggagcttgcagtgagctgagatcgtgccactgtagtccagccagggcgacaagagtgaaactccatgtcaaaaaatttaaaaaaattaaataaaagaactccacctcccaaaggtattggctaactccacgggcaaaaaaaaaaaaaaggggggggccgtttaaaagaaccaaatttatacgccgggggcgggggaggtattattttttttttggggcccccaaatttaattcgggggccggtggtttaacacgggggg

SEQ ID NO: 97361 - DNA, 407 bp, Homo sapiens
  misc_feature (1)...(407): n = a,t,c or g
aaaaaaaggaaagaaaggaatgaataaactttgtagtaatcaactgtgaacttcaaaccaggttgattttagtaacccaattgctttgatttgacattaatgtagtcttacagggctgtgcttgctgggcatgcttttacgtctgtgagataatttcggttcagtaaattggccaatctttttatttttctaagacacagaaatgtatttaataaaaacctcgagagagtgatgggtggaaccccttctccttgaaaaaaaaaaaaaaaaaaaaaaaaaaaaaaaaaaaaaaaaaanggggggggggggaaaaaaaaaaaagttttagggccgggggggggggggggggaantttttttttggggaacataaattattttggggggggcggtttttaaatagggggg

SEQ ID NO: 97362 - DNA, 366 bp, Homo sapiens
caccacggctggctaattcttaaattttttcggtagagatggggttttgccatgttgggcagtgtgatctcgatctcctgggttcaagcaatcctcctgcctcagtctcctaaagtgctggggttataggtgtaagccaccatgcctggcccctagtaaaacttttcgttaagcggaataagctgagttacgtttagattagcaacagacagggattttccatgtgagacttggtgcaaagagagaagttactaagaaaactgtatcaggcttgtctcccatgattgggtatgctatgatagagttaaacattggaatctcttttagaagtgatataatttattggcattttgaaaatgctatgta

SEQ ID NO: 97363 - DNA, 201 bp, Homo sapiens
gtatgtccagcctcactctccctgcctggtgctgtatgcgttccccctgttagctacatttgtgatcacatacccttcttttaagtgaatttttttcatttgatttgtcaataaacgaatcaaactggaaaaaaaaaaaaaaaaaaaaaaaaaaaaaaaaaaaaaaaaaaaaaaaattaattggaaaaaaaaaaaaaaaag

SEQ ID NO: 97364 - DNA, 403 bp, Homo sapiens
tgggagaatcacctgagcccaggaagtcgaggaagcagtgagccatgatcgcactactgcactccagcctgagtgacagagtgagactctgtctcaaaaaaaaaaaaaccaaacctccaggaggctgaaaaaaggctcaccctcctattaatcaaaaaggcaatttttaaaaatagggggagcccttgtttttccataaaatgggcaggctttaaaaaaataaaacaaggttggttctttgttgccacccgcatgggggataggtcaaggggcaccccgaacctgggggaaaactttttgaaaagctttttatcattttctatcaagatccaaagattttattaccttggactaaaaaattccccttctaggaatatatactaaaaatatgctttcaaaaagg

SEQ ID NO: 97365 - DNA, 403 bp, Homo sapiens
attaaaatggccacagtgacaaaggcaacatacagattctgtgttattccgagcaaactaccaatgttacttttcactaaactagaaacaaaaattctaaaattaatatggaacctagaaagagcctgaatacccaaagcaatactaagctgaaagaacaaaatgggactctcaaactcctgacctcaggttctccccgccttcggcctccccaaatgctgggattataggcatgagccatagcgcctggccacattgatttcttaatgtactgtgccacagctgctgtcacactataagcagggatatatagttgcaaacaaagaccatgtggcccacaaaacctgaaatatctactgtctggccctttacggagaaagtttgccaacccctggtgtaatgt

SEQ ID NO: 97366 - DNA, 397 bp, Homo sapiens
cggacgcgtggggtgtaccagtattcatacttggacctggttctctgaatttccctataaagaatataattaaacaaaatgcaaacaaaaactttcgattctgatacccatacaagtatttgttttactttgcattttataaacactaaacttcaatttatatttttattggctatttatttgctctttgtgaattttcccttcatatttattaactttttcgaagaacctggtttttgttttgatgatttatccagttgttttctgttttattgatgtataccctagttttattattttttctctgctttctttaggcttcacttgttctttttctatagattcctaagcttattgactttagatcttttttcttttctaatatagacagcccttt

SEQ ID NO: 97367 - DNA, 406 bp, Homo sapiens
  misc_feature (1)...(406): n = a,t,c or g
caaagatgatagaaacacagaacaccaagtacatccaaatgcttcagatcaggaagatgaggcttttgacccatatgaaaacttttttgaagacagtgatagtcccactaaatcttcatccactgagcctagcccccacattcacccagtggatattcagatgacaatttttcactgtgcagataattttgccagacaatatattttggccaaacttannaaaaaaaaaaaaaaaaaaaaaaaaaaaaaaaaaaaaaaaaaaaaaaaaaannnnnnnnnnnnggggggggggcccaaaaaaggggccccccccccccccccccggggggaaaaaaatttttttttttttgggccccccttaattttttccgggggggggttttaaaacggggggggggggggcccc

SEQ ID NO: 97368 - DNA, 404 bp, Homo sapiens
  misc_feature (1)...(404): n = a,t,c or g
cggacgcgtgggaatcacttgaacctaggtggcggaggttgcattgagccaagatcacgctgttgccctccagtctgggtgacaagagtgaaactctgtctcanaaaaaaaaaaaggataggaaaaagaaaattagggaaaatcgggatagcccctgaagaaccaattttattaattaattaattcaacgagggaaaaggaaaaaggaaactttggggtggggcataaacagggcttcaaaagaaaagaaaggttttatttttaaaaacaaataggggacacatgtgtattaaaaaattattcttggaactatccatacattattaggcatacttttaaatatatggcaaaacactataaaagaaactttttaatacaaaaccaatttgaacaataataaggcc

SEQ ID NO: 97369 - DNA, 408 bp, Homo sapiens
gtggattaaaccaaacccagctacgcaaaatcttagcatactcctcaattacccacataggatgaataatagcagttctaccgtacaaccctaacataaccattcttaatttaactatttatattatcctaactactaccgcatgcaaaaaaaaaaaaaaaaaaaaaaaaaaaaaaaaaaaaaaaaaaaaaaaaaaaaaaaaaaaaaaaaaaaaaaaaaaaaaaaaaaaagggggggggggggcttaaaaaaaaaaattttttttttccggggggggggggaaaatttttttttttttggggcccaaaaaaatttttgggggggggggtttttttaaccggggggggggaaaaaaaccccgcccccacccaaaattggggggggggaaacaccttttttttggggggg

SEQ ID NO: 97370 - DNA, 409 bp, Homo sapiens
aggtggatcgcttgaggacaggagttcaagaccatcctggaaaacatagtgagagcccatctctaccaaaaaaaaaaaaaaaaaggtaaaaaattttacccaaacgggggggggtatatttgaacccccacttctttgaaaggttgaggggggagaataatttgaccccggggggggagggtcaaagggaaacggaatcacccccttgccttccagctggggggaaaaacaaaatttttgtttaaaaaattcaaaaaaaaaaaaggggggggccttttaaagggaacaaatttttcccccggggggggggaaagaaaatttttttttaaggggccccaaaaataaaattcgggggccggttttaaaaaacgggggaagggaaaaaaccggggggtaaccaaaataaagg

SEQ ID NO: 97371 - DNA, 399 bp, Homo sapiens
agaactttgggatgaccagcatttaaggggcacatcaatcaacaggagacaataaaaaagacagaaggaaccatcagagatcaaccagattcttcgtcctcttgtacctaagaagcagaaaacctccaacccaaacaccgatgctttatatagaagacagttcacaaaataaagagcactggattagaaatctaaaaaaaaaaaaaaaaaaaaaaaggggggggggccgttttaaaggaaccaagtttacggccgggggggggggaggtaaaattttttttatgggggccccaaaattaaattccggggccggggtttaaaaacggggggaggggaaaaacccgggggtaacccaaataaatggcttggaagaaaatccccttttgccgggggggggaa

SEQ ID NO: 97372 - DNA, 393 bp, Homo sapiens
  misc_feature (1)...(393): n = a,t,c or g
cattttgtttatttatccaccaacagccagttgggttgcttccatcatttttctattgtgagtaatgctgctatgaacatgagtgtacaaatagctcttcaaatccctgctttcatttcttttgggaatatgcctagaggtggaactgctggatgatctggcagntctacttttaatttttttgtttttggtttgagatggagtcttgctctgtcactccggctggagtgcagtgagccgagattgcaccactgcaattcagcctgggcaacagaatgagaccctatctcaaaaaaaaaaaaaaaaattgaggcggccacatcagttatcctgacttttcaactattcaatatcgggagggacccacactacctcatggggtaactttgaaaa

SEQ ID NO: 97373 - DNA, 404 bp, Homo sapiens
  misc_feature (1)...(404): n = a,t,c or g
cccacgcgtccgctctacctctctatactaatctccctacaaatctccttaattataacattcacagctacagaatctaaaaaaaaaaaaaaaaaaaaaaaaaaaaaaaaaaaaaaaaaaaggggggggggcccttaaaaaaaaaaaaatttaaagccggggggggggaaaaaaaaaatttttttaaaggggccaaaaaaaaaaaatccggggggggggtttaaaaaagggggggggggaaaaaaccggggggaaccaaaaaaaaaggggggggaaaaaaacccctttttgcgggggggggaaaaaaaaaaaaagggccgggnttnnnnnnnnnnnnnnnnnnttnttttttttgggttcaaaataattntttgtnncttntttttggtttttgagcggggggg

SEQ ID NO: 97374 - DNA, 400 bp, Homo sapiens
  misc_feature (1)...(400): n = a,t,c or g
cccacgcgtccgctaaggaatcatcccaatttaggtgcacagaggtcacacatggtcacatatatgaagatgcaacagcctagaaggacatctgacaaacagcagagaaccagctgcctcaaggtgggagtgtgaagaatgattcttgttcctctcttacactttctgtacttcacaataaaatggaccatttaacacagaaaaaaaaaaaaaaaaaaaaaaaaaaaaaaaaaaaaaaaaaaaaaaaaaaaaaaaaaaaannnnnntaaaaaaaaaaaantaggggggggggttttgtagggaaaatattttttttgtggggggggggagaaaaatattttatttgggggggngtttaaatatataagggggggggggttttatgaataatatctttttt

SEQ ID NO: 97375 - DNA, 406 bp, Homo sapiens
  misc_feature (1)...(406): n = a,t,c or g
tttcgtgcagggggctggtttgggtttatggggagcttttgttgcacccatgcaggggcaatcagatcagcagggtcatgcaaaaaaaaaaaaagaaaaagtttggggcctctccgccccgggaaggggcccccccgggggaacccccttgaaggggcccttgaacccaaaaagaacccccccctttgaaaaaataagccccccccccggggcccgggggggggcgcccccccccaatggggttgggggggggaccggccccccccccctttttttggcccaaagcctttttcaaaaagggaccttttagcggccaggaatttggctttcctttaaaagggctttttttttggaaatttcctttttgaaaggaaccagggtggaantggtggttttttttttttta

SEQ ID NO: 97376 - DNA, 416 bp, Homo sapiens
tttcgtcaccgttttagccgggatggtctcgatctcctgatcttttgatccgcccgcctcggcctcccaaagtgctgggattacaggcgtgagccaccgcgcccggcccacagcatcattatttaatgagtatttctttgtcccaccccccaccaatctgcaatgacagctctataataaattaaatttctataaatgcagtggtctgtatacagattctttatactgttctactagtctatttgtctatccctgcatcaatgccatacttagctaccttttaatgagtgttgagttttgtatggggaaactttctctcccccagacacacatcttaattcttcagtggtgttgggatgttcttgggcttttgcccttccatataattttagaattttcttgtcaagtgtttttgt

SEQ ID NO: 97377 - DNA, 428 bp, Homo sapiens
  misc_feature (1)...(428): n = a,t,c or g
tttcgtggagaatcgctcangcccaaaggtagaggttgcagtgagccgagatagtgccactgcactccagcctgggtgacagagggagactccgtctcaaaaaaaaagcaagcaaaaaacaggtgtagtttaagaatgaaatatgaaaggaatgagtttacctccagtccatgctgaggaagtgggaggtgggagaggtgaagttgttttcccatggtcacccctgtcccttctcaggggtggtggagccaagagtgcaggctggctctgagcccaccacatggcaccgttagctgggaccagcatcatcctgcagccttcagcagggtgggggcccaactaggcaacctcttcaatggccagggttgacttggccaaacatgggcaccaccaggcctgtgtnttacttgatcatgcgggagggaccg

SEQ ID NO: 97378 - DNA, 420 bp, Homo sapiens
tttcgtcgaaaggtggaagttgcggtgagctgagattgtgccactgcactccggcctgaatgacagagcaagactctgtctcaaaaaaaaaaaggggaaaaaaaagaaaagggggggggccctaaaaaaaaaattttcccctttcccccggaaatttaaaaaaaggggttggggaaaaaaaaaaacccgggttttttttaaaaaatcgggaaagggtttttttttattttttccacagggggaaacccttaacaaaaaaaaaattttttttttttttggggaaaaaaaccaaacttttggttaaaaaaaactttaaaaaaagggtccccggggggcagacccggaaaaaaaaaaaaaaaagggggagggtttttttaaaaaaaaatttaaaaaggccggcgccacatttttgtaaaaaag

SEQ ID NO: 97379 - DNA, 410 bp, Homo sapiens
tttcgttgacagagctggagctggggggccacagggctcaggtggggacactggctacatggcagccccaggggcagtgccaggcctgggaaaactctgcagagtcattcatctactttttttttttttttttggaaagggggttttgttttgccccccaggtgggggggcgggggaaaaatttgggttaattgaacccttggcctccagggtaaaaaaatttttcctgcctaaccctccattgtagcgggaacaacgggggcggggaaaattttggaatttttttttttttttttttttaaaaaaaaaaggggttccacctgggggggcggggggggggggaacccccccccctggggggagggccccccccaccccccaaaagggggtggttatcggggtggaccccc

SEQ ID NO: 97380 - DNA, 412 bp, Homo sapiens
tttcgttgaggctgcagcgagctatgattgatccattgcactccagcctgggtacacagtgagactctgtctcaaaaaaaaaaggggagggggaaggggggttttaaaaaaaacggcatcccctgttttgggaaaaacaaaggggggaaaaggtttggaaaatcttttgggcatttctccactgggtaagggatcccgcccaccccacctttcccccccttggttttttccccaaaaaaaatgagcccggtgcccccacaaaaatttgaccccacgggtcaccaggaacttttttcttaccggccaagaggcgaaaccacccctttgccccctcacttatggaggggccaatttttaataaaacttttaaatcttcccaggggattttggttgggccaaaaaaagaaaggtg

SEQ ID NO: 97381 - DNA, 421 bp, Homo sapiens
  misc_feature (1)...(421): n = a,t,c or g
tttcgtgtccctctggggcgcctgagtagaggggagcatcagcagcagtagcagcagcaacctcccccgcccccgcctcctcccgggcccctccggccactcgcgggtccttctcggaagggctccttcaaaatccgcctcagtcgcctctttcgcaccaagagctgcaacggtggctccggcggtggggatgggaccggcaagaggccttctggagagctggctgcttcagctgcgagcctgacagacatgggaggctctgcgggccgggagctggacgcggggaggtgagaccggccgggggctggccgacaaacttccttttcttggtagggttccctttttatctattgctatcgcgatcctgacagttcttaaaatagggtcttcaggaggaggcagagnactgggaccaaaggtg

SEQ ID NO: 97382 - DNA, 432 bp, Homo sapiens
  misc_feature (1)...(432): n = a,t,c or g
tttcgtaaaggcagtgcccgctgccgagctccaaagcctgcaggggcggacggcgttcactgggggcaccatcgagcctctccccaaacagcacaggccccgcccgtcacgtgcagcgcccgaggctcttggatggatttctcccacgcctccggcccacaggacagagatctccacagtccttctcctgtctgccccagaggctgggccccaggtacccacagcccaacaggggcttctggggcctgaggacggaccccagtgggaggtggtaagtgagtggcaggggtccagcagcggatacatccaggcctagccccgggatagctcgtcctgcctggcatcanngttcacatcangaaaaagccagggtctaaagggactatcangcccggcacagtggctcacgcctgtaatcccaacactttggga

SEQ ID NO: 97383 - DNA, 484 bp, Homo sapiens
  misc_feature (1)...(484): n = a,t,c or g
catcatccctgtcggatgatacgccntggacaggaactcccgggncgacccacgcgtgcgaagcatgcctggctaattttttgtatcttttgtggagacattttttcaccatgttggcgagggtggtcttgggcggctgacctagagatccgcccacctcagcctcccaaagggctgggattacagacgtgattacaaaagccacccaaaaagctgggattacagcctcccaaagcgctgggattacagacgcgattacaaaagccacccacaatgctgggattacagcctcccaaagtgctgggattataggccacgcctggcatattttctcttttttactaacttcttagattaatatttctggctctcacttaactttttgggatcttgggttcttcagctgagaaaagaagaagttggaccaattcagtgatttctaactattttgagttatggacatctttgagaactggaacacctt

SEQ ID NO: 97384 - DNA, 392 bp, Homo sapiens
cttgaacccgggaggcaggggttgcagtgagccgagatcgtgccactgcactcaagcctgggcgacagagtaagactccgtctccaaaaaaaagaagaaaaaaggaagcaggttccagaacaccattcctagcgcattgccaggattcccagtgtcaggagaattgattttaggtggacctaacctttaacctacctagtgaaatagtcatcaccattatcatctgggtccagcggagcctttgtattttaaacatttttatgtcatttatatgaataattgacagacacataaaaaggagacagtggagaacaaatgtattagaaattttagtgttatgttgttgctaaaataattgcagttttatcattacttttaatggcaaacctcaa

SEQ ID NO: 97385 - DNA, 402 bp, Homo sapiens
  misc_feature (1)...(402): n = a,t,c or g
ttgaacccaggctgtaaaggttgcagtgagccgagatcatgccactgcactccagtctgggtgtcagaatgagaccccatctcanaaaaaaaaaaaaaaaaaaaaaaaaaaaaaaaccccggttttttttttttggggaaggggcccccttttaaaaaagggggtaaaaagcaattgctttggggggggaaaaaaaaaaattggtcttaaaaaaaaataaaaagggaaaccccaccggaaacccaaggttttggggaaaaccttttggccccaaggttcccccctggaaagggggggaaaaacaaaaaaaaaaggccattggcccaaaagggaaaaaatttgggtttttaaacctttggaaacaaaaaaaaaaaaaaaaaaagggggcccctttaaaaaaaa

SEQ ID NO: 97386 - DNA, 391 bp, Homo sapiens
cgttctgttgccaggcatggtggtgtgtgcatgtagtcccagctcctcggtaggctgaggaagaaggatctcttgagcccatgaggtagaggctacagtgagctgcgatcatgccactgcactccagcctgggcaacagaacgagaccctgtctcagtggtcttgaaggtcaaatagtacaaaacatgttggagaaagcaacataattcaaccagaagaaaataatgtattttctctaaaaaagaatttaccatagggtaaaccttggcaaggatctagctcaaaagtttagtccttttcattttattcgcccagaagataatgaaaaggactaaaccttggcaaggatctagctcaaaagtttagtccttttcattttattcgcccagaa

SEQ ID NO: 97387 - DNA, 394 bp, Homo sapiens
gcaaatgacagtttctttataaaacataacactgtaatcttgtaaaatgaaagtgttccagttacatcatttttggtgatttcagaaccattaaagttctgacagcctacttccccagtaaatctctctttgtagactgtggtccaaagaaggcttagagaaataattttgaatcttgattttgttccaactctgttccttaaatgcctaagaactgcgatttcttgagtatttgttaaaagcctactgtgtcagccaggcatggtggctcatgcctgtaatcccagcaccttgggaggctgaggcgggcggatcacgatgtcaggagattgagaccatcctggcaaacacggggaagtctctacttataatacaaaaaaaaaaaaagggggcg

SEQ ID NO: 97388 - DNA, 379 bp, Homo sapiens
gaaaaggaagagaatgctggtgcacaggggtttatcaaagcatttttctttagccttcctgcaggacccagatgattctgagatttcttctttgtagcaacacagtgttaagctgatcattataaagacttaacgtttaggagaaccagcatttatagagtttaggggcttaggaatttgccagatgtggtacaaagtagttcaactagcagaggacttgtctctttcatgcaaccttttttttttgagactgattctcactgtcacctgggctggagggcagggtcatgatcatggctcactgcagccttgaactcctgggctcagggggtcctcttgcctcagtcttctaagtagctaggactacatgtgcccagct

SEQ ID NO: 97389 - DNA, 466 bp, Homo sapiens
gcaacacggcgaaaccccatctctactaaaaatgcaaattagctggacaggggtggcgggcgcctgtcatcccagctacttgggaggctgaggcaggagaatcgcttgaacctgggaggtggaggttgcagtgagccgagatcgcgccatcgcactccagcctgggcgacaagaaggcaagggaggaaaaaagcagggaattcaggggcagcacctgggcgaggcaggcagagtcggcgcacatgggcgtgtgccagggagagtcggggccgcactgccggtgagtgggcaatggcagggccttctctggtgatcccctgattcaggcgccccaggagggttgcctgttgcggggggcgcatgtagctgcacgcccctctgtaattgctgaaataaaaagatggtctgctgtagtgcagagaatggcgtccccttaaaagatatattcaggtgctgaccctcagtc

SEQ ID NO: 97390 - DNA, 385 bp, Homo sapiens
ccgtgtctcaacaaagcaaaactgggcatgatggcatgtgcttgaacccaggagttcaaggctgtagtgagccaagatcatgccacagcactccagcctgagtgacagagggagaccccctctcaaaaaaaaaaaaaaaaaacgttcttaaaaaaatttggggcagggcctttaaggtccaaggtaaattttttaagggggggggggttaaaaagaaaaatgggggagaccctttaaacccttttgggggggggaaaagggggggaaaacacctctttttttttttggggggttgttttttttatgccccctttttatcgctggggcgggggggggggaaaaaaacacttggttttttttcgtgtaaacccccgcaactgggggg

SEQ ID NO: 97391 - DNA, 421 bp, Homo sapiens
  misc_feature (1)...(421): n = a,t,c or g
tgttagtataagtaacatgaaaacattctcctccgcataagcctgcgtcagattaaaacactgaactgacaattaacaaacccacaaaaaaaaaaaaaaaaaaaaaaaaaaaaaaaaaaaaaaaaaaaaaaagggggggggggctttaaaaaaaaaaaaattttttggggggggggggggaaaattttttttttttttggggggaaaaaaaaaaaaaaagggggggggggttaaaaaaaagggggggggaaaaaaaaggggggaaaaaaaaaaaaaaaggggtgggaaaaaatttttttttttgggggggggaaaaaaaaaaaagaagcgggggnnnnnnnnntnnnntttntataattttnttttattttaaattaacntntnataaaaataatattaaaaaaaaataaaatatattatt

SEQ ID NO: 97392 - DNA, 268 bp, Homo sapiens
gtccccatggggtacataatttgcaaacatcttctcccgttctctatattgtagcatgtatcattgtgagtcatccttttactttcttgatggtatctatagttttagctcttacatttagatctgcaaacgatttttagttaatttttaagtctagagtaagaaaaggatccaactttattcttttgcatgtggttatctagttgttgcagcagttcaagacataggaataccttttggatggggttgtttgctatttcagcttgtt

SEQ ID NO: 97393 - DNA, 388 bp, Homo sapiens
  misc_feature (1)...(388): n = a,t,c or g
acaccctcccctttggatgccccatacagttccttttaaggaaaaaacaatatcagtttccatgtgatgtaaagcaaagtgctaagctctcgacattcaccgtctctagtccctgtggtaaacagagtgctggtggcccattttacagaagaggaaactgagggtcaggaatggggctttccccgcagtctacccagttaggggtctggctcctgtgagctagaggtggggagctgctagcagcaggggcacctctaagcccttctccatgtgggcagggcggtggtggaaagcctgtggctgcgctaccatggggtgccaatggaagaagacgtggggcgggagcggcggcggcgagtgctgcaaacactggtctggttcctgctcn

SEQ ID NO: 97394 - DNA, 409 bp, Homo sapiens
  misc_feature (1)...(409): n = a,t,c or g
attaaaatccacaatgttgatgattttagtaccaaactctaaatatttctttcggggagaacctggaaaatcagagcaagtgcatattttacatgcttagaaggttacatttacacacacacacacgcacacacaaacacacacacaaacacatcgtggaagaaagttcaatgctttgagatgcttttgttaagctctactcaaaactacctgaatgaaaattaggaactttggaatgcatttggtgtataatttgacctaattttaacaatcatatatgaatggaaaaaaattttaattaaatgagtattcttgtaagccagacaattcagcaacacctttagtagtataagaatccactatactaataatgccaaggctgaaaggctatttcatgaaaaaaagtaan

SEQ ID NO: 97395 - DNA, 367 bp, Homo sapiens
aagctacggcaagttatttatctggaagatctacctacgatcattgatgaagggagctacactaaacaatggattttcaatgtaaattaaacagccttctattggaagaagatgccattgaagacttccgtaactagagaggagaagtcaatgcctggctttaaagcttcaaaggacaggctgactgtctttttaggggctaatgtagttagtgactttaagttaaagccaatgcccatttacaattccgaaaatccaaaggctattcagaatgatgctaaatctactctgcccatgctctataaaaggaacaacaaagcttgcatagcagcacatctgtttacagcatggtttactgaatatttta

SEQ ID NO: 97396 - DNA, 367 bp, Homo sapiens
cgcttggacccggaggcggaggttgcagtgagccgaggtcgtgccattgcactccagcctgggcaacaagagggaaactctgtctccaggaaaaaaaaaaaaaaaggtagagacaaggtttctttatgttgcccagccgggttttgaactccggggctaaagaaatcctcctgcctaaacctccaaaaggggggggattacaaaaataaaccactgggcccgggagtttattcattcagtttggacctggcaaacttttttacttccaacaagttcagtttatcacttattttgactaaaaaaaagcctgagggcttgaagtttcggaaaaggccatccgctgggctgaaactttgtctgactttgg

SEQ ID NO: 97397 - DNA, 361 bp, Homo sapiens
gcaagtgtccatttcataatagatggtgtcctaagtaggactgcttctttttttttttttttttttgggggggaaagggaattaatttttttccccaaggccgaaggggagggggcaaatttgggtttgtggaaacccccattttgggggtaaaaaaaattttggggccccccccccccaggggggtggaaaaaaggggggaccccaaaccccggggggagatttggatttttttttcgggggaagggggatttcacatggggggccggggggggtctaaccctcacaccacgggggaaccacctgttttggcccccaaaggggggggaaaaaagggggggaacaaataaacggggggttg

SEQ ID NO: 97398 - DNA, 377 bp, Homo sapiens
aagaaagaaaagaaacccattgtataatcatgatcataaataatagcaacaaagatggtggtagtgatcacagagtgtgccaggtgtggctgtaaggatcctacaggtaataacctttccaggtacagattggacagatccaaggacctctgacaaagagctccttcactgggaggaagaagcaacccacactgactggcttgctttattttactcgcatgctttatctcttttaaccttgtgatttggatacatgccttctttttttgagacacagtctcgctcagtcacccaggctggagtgcagtggcatgatctcggctcactgcaacctctacctcccgggttcaagtgattctcctgcctcggcctcccgg

SEQ ID NO: 97399 - DNA, 268 bp, Homo sapiens
ataaaagaaatttccttaatctgataaaaagaaggtatgaaaagcctatagctaactttgtattcaacagtaaaatagtaaacactttccatctaagatcaagtacaagctaaggatatccattgttaccacttctacttaacatattgaaggtcctacccaatgaaataaggcaacaaaaagaaataaaaggcagaaaaaacaaaggaaagaaaactatttctgtgtactcaatcatgttatctgcgaacacagaaaaacctaagaa

SEQ ID NO: 97400 - DNA, 388 bp, Homo sapiens
ctcagcagagaattgcttgaacccgggaggcagaggttgtggtgatctgagatggtgccactgcactccagcctgggtgacagagcgagactgtgtctcaaaaacaaacaaaaaagaaacagagaagtatatgcgaaattaaactggcaacatgttaacaattattgatgctgggcgaagatacatgagatgtcatcaaactattttcacttttttttttttttggagggggagtttaatttttttggcaccccccccctcccagggggaaggaattttcctgcctcaccctcccgagaagtggaaaaaaaaggttcgaataaccacccccacttatttttgttttttaagaacagacgggtttttaccttgtgggccaggcgggttt

SEQ ID NO: 97401 - DNA, 393 bp, Homo sapiens
  misc_feature (1)...(393): n = a,t,c or g
caaaaaaactaaaagatagccctgcacagtggttcacatctgcaatcccagcagtttgggaagctgagatgggaggattgtttgagaccaggagttcaagaccagcctgggcaacatattgagacctcatctctacaaaacagcagcagaaacaaaagcaaacaacaacaacgtacacaaacaaaaaaacaaagaaaggagggcagcccgagctgttcagctgagaattgccatggttctgagctgagcttgggacgcggttttcctttgcgggcaatcacagtagggggctagatgcccattaaggtagttagtgcttatcttccccagactctattcaattccaatgcaatgccattatctcagaacagatagaagggaaatggacttacn

SEQ ID NO: 97402 - DNA, 392 bp, Homo sapiens
cactgcgcccggccagtagtgggtattttttagaaacaacatttggttctttactgaaggctaacaaatggaagtccataaacataataatcatctttggtcagaggcagtggcttgtgcctgtaatcccagggctttgggaggccaacgcaggaagatcccttgaggccaggggttcgaaaccagcccagacaacatagtgggacctagtgtctaaaaaaaaaaaaaaaaaaaaaaaaagggggggccccccttttttttttttttgggtttgggggggggggggttttttttttttttttttttggcaccaaatccccaaaggggtttttttcaaaaaaaaaaaacctcccctttttttatttgggcgggggggttttgaaaaaaaaacc

SEQ ID NO: 97403 - DNA, 382 bp, Homo sapiens
tacatgagcacatatctgtgtttctattgggtatataatgaggaggggaattcctgagtccaggaagcctcatttctttctgtactctaagatgacagcctcatctacattcactgtttcaggggtcacccattgctgtgactcttttttttttttttttttggggggggggttcccttttgccccccaggggggggggggggggccccttttgggttaaaggaaacctttgcctcgggggtaaacccatttttccggcctaaccccccgggggggggggaacaacaggctttgcccccccccccgggttatttttttggggttttaaggggaaaggggttttaatgtggtaacccagaggggcctccatccccggcccccc

SEQ ID NO: 97404 - DNA, 472 bp, Homo sapiens
  misc_feature (1)...(472): n = a,t,c or g
aggnnctggcnnnttancttgaatagtagaccactagtccatgcggtggaattctgaatgggtggatggatggatggatgacaatgtgttttctgaattgaacagaactcttcagcatggtgctagaacagagagcacatgaccaagtccttgagtagcctgggaagggcaggacaacagatgacacctgggcagaggtggctgtgcttctgtgattaggagacaaagcatgccctggttgaggctccaaaggctgtgcccttaccacagagacatgtgactatatccttagaggctggaacatagaagccagaacatcttccccagccagagcagttcaggaccattctcccatattgaaaataatgatgaataggccacgcctgtaatcccagcacttgggaaggccaaggcaggcagatcacgagttcaggagatcaagaccatcctggctaacacggtgaaaccccgt

SEQ ID NO: 97405 - DNA, 431 bp, Homo sapiens
  misc_feature (1)...(431): n = a,t,c or g
agatcagttgctgattctggctcattcaacaggagcctcctcataacccactacctggacccccaacaggcccatatttgtgcaaataaagtgttccccagtgccactgtgaagctgtgactgaaatgcccctaatggatcaaaaactggctgcttttctgggctctgggtccctcatcctctttgtcttctcagggacttttttttttttaacttttttttttttttttaaaaaaaaatttttcccccccccccccgggggggggcaangggnaaaatttgggtttattgaaacctttgcccccggggtaaagggaaattccccccccccccccccggggaggggggaacccagggggcgcccccccccccccgggtttttttattttttttaaaaaaaagggggttccccctttgtggcccgtcttgtt

SEQ ID NO: 97406 - DNA, 466 bp, Homo sapiens
  misc_feature (1)...(466): n = a,t,c or g
aggggtgaaacggggacttaggcaagtacagnngcgcggaannctaatcactgatggaaaggccagggtcttgtctgacttcaaatccccagggcctgttagtgggcaatcaaagcaaatgtatgctttatatgcctatatttcttttttcttttctttctttcttttttttttttttttttttgggggggggggttttctttttgtttccccgggggggggggggggggggaattttggctaatgggacccttttgggccgggggggaggggatttttcggccttccccccccagggggggggaattaaggggccccccccccgggccggggtttttttttgaatttttaaaaaaaaggggggttccccttggggggaggggggggggaaaaccccgggccccgggggaaccttttgccttacccccccaagggggggggtttaaaaaattgacccccccccccg

SEQ ID NO: 97407 - DNA, 475 bp, Homo sapiens
  misc_feature (1)...(475): n = a,t,c or g
ggggatagccgggtcncnnncncctggaaaacggccntgcgggaagnaacncanaaaccttggttcctttctttctctcacattgttaatcattgtggtttggtggttttctgtcgcagtaacatttgaatcctttctctctgtcaaggcttttttttttttttttttgtgagaaaaaaaaaatctttttttttccccgggggggggggaaaggggggaatttattttaggggacccccccccccccgggggaaaggaattttttggcccccccccccgggggaaggggggccctttaaaaaccccgggggccctggcaaggtaaaaaaaaaagtgggggggggaccccttttttttcaaaagggaaaagaataccccggggttcgcaacacaaaaaaaaaacggtgtggggggggatttcccgggcccctcctgaacctgggggggcccggggggtggcgttaccctttggggg

SEQ ID NO: 97408 - DNA, 464 bp, Homo sapiens
  misc_feature (1)...(464): n = a,t,c or g
agggatagctggccgnncncaatggggaagnttggaacagnagagacgaggaantcttctgagaagttcttggaaatctttatgtctaagtgattgtattagatcagcaataatgactatgtaatctcaaaaaacaaataaaatattcttaacatggaaaaaaaaaaaaaaaaaaaaaaaaaaaaaaaaaaaaaaaaaaaaaaaaaaaaaaaaaaaaaaaaaaaaaaaaaaaaaaaaaaaaaaaaaaaaaaaaaaaaaaaaaggccccctctataataaagggggggggcacaaccccgagagggggcccggggcccctttctataaaccccccttttttttttttccccccccccccttttttttttttccccggggggggcccccccggtgtgttttttaaaaaaaaaaaaaaatttttttttaaggaggggggggggggctgcttttttttggtttgtgnc

SEQ ID NO: 97409 - DNA, 418 bp, Homo sapiens
  misc_feature (1)...(418): n = a,t,c or g
catgcctatcatatatgaaaacccagcccatgacccctagcaggggccctctcaaccctccgaatgacctctgccctagccatgtgatttcacttccactccataacgctcctcatactaggcctactaaccaccacactaaccatataccaatgatggtgcgatggaacaccagaaagcacataccaaggccaccacacaccacctgtacagaaaggccttcgatacgggataatcctatttattacctcacaagcttttttcttcgcaggatttttctgagccttttaccactccagcctagcccctaccccacaattaggagggcactggccctcaacaggcatcaccccgctaaatcccctagaagtgccactcctaaacacatccgtattactcgcatcaggagtatcaatcn

SEQ ID NO: 97410 - DNA, 391 bp, Homo sapiens
cataattcaagccaaagtgagtgctctgaaggaagggaacgtaagaacatatatcccaaggatctggcgggtgtggtggctcacacctgtaatctgagcactttggggtgccaaggtgggaggatcacttgagctcaggagttcgcgaccagcctgggcaacatagtaagacctcatttctatgttttttaattattaaaaaaaaaaaaaaaaaaaacccgagggaaactaaaaggcttttttgaggataaaaccctcgacctaaaatctgaaggaggggtaaaagtttgctgggcacagggccccaccaggggcagctggggaaggaactgaaaaaaggcctttgtaccccaaaaagcaaaggggaaaaggggggaaattgaagctaaaa

SEQ ID NO: 97411 - DNA, 425 bp, Homo sapiens
  misc_feature (1)...(425): n = a,t,c or g
tgggacgttacctgagcccgggagttggagaccagcctgggccacatggcaagacctgctctctttannaaaaaaaaaaaaaaaaaaaaaaaaaaaaatttttcccccggaaaaaaggggccccccctgcccccccactttttgggaaggctgggggggaaaaactttttccccccagggggttaatcttcaaaaaaccaaaaaaggcccccggggaaaaaaaaaaaaacctttttaaaaaaaaaaaaaaaagggggggcccttaaaaaaaaaaaaaattaaaggcgggggggggggaaaaaaaaattttttttaagggggcccaaaaaaaaaatccgggggccggttttaaaaaagggggaaggggaaaaaaccggggggccccccaaaaaaaggggggcgaggggnnnnnnnnnnnncnnccn

SEQ ID NO: 97412 - DNA, 375 bp, Homo sapiens
tccatttgtatgtcttcttttgaaaaatgtctattcatgtcctttgcccacttttaaattggattgttttttgtgttgctgaggtgtttgagttctgcatatctgtagctattatttaatctttggggttctgtgtgttgtgtgtggtgaccctaaagaccagacaggaaggttctcagacttcctgagagcaggcagatgtcacgaccctgtggatatctgaactttatccagtgtctgtgctcagaggcctgtggactgtgtagccctggacagttcacaatgcccatcaatgtatggggctgtatttaacctcccacgtaaggatgcggagtcaaggtgtgggtaggtcgtggtttccttggagtcagcttc

SEQ ID NO: 97413 - DNA, 421 bp, Homo sapiens
ttccaagctcaggtgaaggacttagctttggtgaggagaggcaaggcccattctgttgataacgggcagacgggaaaggtagggtgtgtgtagagaattgaagttggcacagagaggtgaactttgccgtcctggttcatgcagacaaggaagttgcctggctctaaacacagtgcttcagtgacttgtggtggattctgccgggctctaaagtattatccatagccgggtgcagtggctcacacctgcaaccccagcactttgggaggctgaggggggcggatcccttaagcccaggagtccaagaccagccttgctaacatggcaaaagcccatctccacataaaattaagtgtgctgacagatgcctgtaggctcatctacccaggaagctgttggggacggattacttgagcccatg

SEQ ID NO: 97414 - DNA, 418 bp, Homo sapiens
  misc_feature (1)...(418): n = a,t,c or g
tggaaagagaggagccagcggccctgcagtccttccagcctcccagctgaggcaacagacatggtcagaagccatctaggaccttcagcggcagtgaagtctccccagtcgatgccacacagaactgagatgagctgttctcaccaagctctgcccaagttccagagctaggaacaaataaacagttgttttaaaccacanaaaaaaaaaaaccctaaaaaaaaaaaaaaaaaaataaaaaaaaaaaaaaaaaaaaaaaaaaaaaaaaaaannnggggggggggccttttaaaaaaaaaaaattttaatcggcggggggggggaaaaatttttttttttttggggccccataaatatttttggggggggggttttaaaaaaggggggggggggaaacccccgggtgtttacccttttt

SEQ ID NO: 97415 - DNA, 422 bp, Homo sapiens
  misc_feature (1)...(422): n = a,t,c or g
tttcttaacctacacatagtctatacatagatgcatattttacccccagctggctagagatttatttgttgtaaatgctgtatagatttggttttcctttctttacttaccctggnttggatttttttttttttttttttgaagggatttatgctgttttaccaataggacaaaaatcctttgtagctggggctacccctcccttgttgaaacttacgggacctgggctggccttgggcataggacaggggcatcccggtggctttcccatgggactcatgcccctcccggagggtttttgtttttttcgggggttcttgggggttggttggttggctttttttccagaggggggaaagtctacagcgcaaaagggcttgaccctgccacctgatttgaaatactttcccctgccgcaggcn

SEQ ID NO: 97416 - DNA, 408 bp, Homo sapiens
  misc_feature (1)...(408): n = a,t,c or g
tctgaatggtcctgagggctagaacctgctgcacaggggctgggaatgggatccagcttcattatggctgctggggtgctgctgacccagccctgctgctgctccatgactttgtgtacaaaacttttttcatctgtaatgaatagtggcaataataaatattttttaagcgcctgaaaaaaaaaaaaaaaaaaaaaaaaaaaaaaaaaaaaaaaaaaaaaaaaaaaaaaaaaaaaaaaaaaaaaaaaagaaaaagaacaaaaanaaaaaaaacaaaaaaaaaaaacaaccannnnnnnnnnccgcccgccctatatgagaaaaaaccttgtaccccccccgatagaccgtttttttttttttagggccgcctcatnnacggcccggccccctttttaaaaacctttg

SEQ ID NO: 97417 - DNA, 425 bp, Homo sapiens
  misc_feature (1)...(425): n = a,t,c or g
tttcttgaaggcaggaacactgagtcacttaccagtgtatcctcagttactaaatatttgtgggagcagtaagcattataatcccctgttttaaagatgttcacattggcacaggaagagtcaaacagcttggattatcagttaggaattgtgttcagctgtgagtaatggagttacataaagttggagtccatcacagattctccacgttgactgcaattgtaaccacctgaggagctttaaaaaactaccactgcctgagtttcatccccagagattctgagttaattggtccaagtgtatgtgggggattgngattgtttaaaaaaagtctgggctgggtgcggtggctcatgtctgtaatcccagctctttgggaggctgaggcgggcagatcatgaggtcaggagatcaagaccatcctg

SEQ ID NO: 97418 - DNA, 398 bp, Homo sapiens
  misc_feature (1)...(398): n = a,t,c or g
aactatcaaactcctgagccaacaacttaatatgactagcttacacaatagcttttatagtaaagatacctctttacggactccacttatgactccctaaagcccatgtcgaagcccccatcgctgggtcaatagtacttgccgcagtactcttaaaactaggcggctaaaaaaaaaaaaaaaaaaaaaaaaaaaaaaaaaaaaaaantgggggggggccgttttaaaaaaaacaattttacccccgggggggggggagaaatttttttttttatggggcccccaaaattaaatcccgggggggggtttataacaacggggggggggaaaaccccgcgggccccccaaataaaaaaaaacangggtgctcacatactccaacgcctccactctctacc

SEQ ID NO: 97419 - DNA, 453 bp, Homo sapiens
  misc_feature (1)...(453): n = a,t,c or g
gggcacnttttggaccttgagaacctcggcagngcgnggaattcccccgggtcgcgctccggcgaacgcagtccctgaatgggcgcggcggacttgggaggcggactactcagtccccccgggaaggagggagctggggtccagatctttgctctgaaggagcctagggcaccgggctccaagaggagggagaaaccggggggcctggatttcttttcttttctttttcttttttttcttttctttcttttttttttttttttttgggggggggttttaaaaaaggagtttttgccccccagccgggaggcaaggggggaaatttttgaaaccccccccccttaaataaaaggaattttctgccctcacccccccggggactgacccttacattcctttggaattttttggaacaaaagtctttggcaaaaccctggcaaaacccaattcacc

SEQ ID NO: 97420 - DNA, 463 bp, Homo sapiens
  misc_feature (1)...(463): n = a,t,c or g
aagtccnnnnttcgagaccctgaagaccatctgaagngtcgnggaatttcggcgtcaaagtatttagctgactcgccacactccacggaagcaatatgaaatgatctgctgcagtgctctgagccctaagatacatctttgttttcaccgtaggaaaaaaaaaaaaaaataaaaaaaaaaaaaaaaaaaaaaaaaaaaaaagggggggaaccccccccgggggggaaaaaagaaaatttttctcccccaaaaaaaaaaaaaaaaaagggttcttaaaaaacccccaacccaaaaaaaattttttttggggaaaaccccaaaaaaaaaaagggggaaaaacccccttttggggggggggaaaaaaagcccccaaaaaaaccccttaagtgggaaaaaaaaggggaaaaaaacccccccgcccaaaaaaaaaaaaaaatttgntgggtggggggccccccctaaa

SEQ ID NO: 97421 - DNA, 461 bp, Homo sapiens
  misc_feature (1)...(461): n = a,t,c or g
attgaatagagttcgctatgaagngccgcggaanttttgtgtgagcgctcctgcctgcatacacatgcgtgcacttctggtacattttgaacaggcatcagattatgttcccacagcccctcttcatgggaatgaagaccttgtacgtctgaaatacagtttgtgaaagtcaaattgttatccctgtgacatagaacagccgttaaaaatgtatttcactggaatgtcattctaaatgaatatttttaaatagatatccaaaaataagaaaatacagtgattttagtgtaataaaactgatttcacaattgtttcaagaaactcggaaaataaaacttcaaactggaaaaatgtggccataagaatgcatggagccggacgcggtggctcatgcctgtaatcccagcactttgggaggccgaggcggacagatcacgaggtcaggagatcgagaccatctn

SEQ ID NO: 97422 - DNA, 463 bp, Homo sapiens
  misc_feature (1)...(463): n = a,t,c or g
tacatgagaccatagnaagcgtcgnggaattcgctccaagcgcggccaggagagccgtcggcggagcttcctgtttccgtagcccattagcttctggggtaggctgggggaggggcacaggtaataaagtaaatacctgcctaaaaaaaaaaaaaaaaaaaaaaaaaaaaaaaaaaaaaaaaaaaaaaaaaaaaaaaaaaaaaaaaaaaaaaaaaaaaaaaaaaaaaaaaaaaaaaaaaaaaaaaaaaaaaaaaaaaaagaaaaaaaaaaaaaaaaaaaagaaaaaaaaaaanagcgccccccctcccttggtgggggggcctttttttcttaattataaatatttaaaaagggaaaaaaagggaggatttttttgtttttatccccccccccgggcnnnccnacanggcgggggcggcgccccctctctttttttttaaaaaaaaaaaaaaaaaacacttct

SEQ ID NO: 97423 - DNA, 487 bp, Homo sapiens
  misc_feature (1)...(487): n = a,t,c or g
nggggcannnnnattgagnccccnattgaagatcactagtccgtgtggtggaattcgcctaggtagaatttgaggagaagcagttcccccagagaagtagtagtttgtccccaaataagggagacatgttgttgttcccagaataagggagaggtgccaggcagacaaaatagcagttgtctgtcatatcctctttttctgactgtgggtctctaggtcttcccacgtatatgtattctgtaccaggccagtcattgacaccagctgctgtgaagaccagggagggagctggcaaggaatagagcatccaaacttattatagttcaccactgaaagttttgaagatccagactttgtgagtagagaggaattctatgtactataaaataggaagggcaggccgggcgcggtgactcacgcctgtaatcctatcactttgggaggctgaggcgggcggatcatgaggtcagaagattgagaccatccn

SEQ ID NO: 97424 - DNA, 542 bp, Homo sapiens
atagagtagtgaggcagagatgggccttcatctcaagtcccaaaggaataaggggaaggaatggtaatgtgtgcagaatgttgagcacgtgtatacagaacatttaggatgtaaagtaaatcctctgcttgaagcagggaatcctccagaagctgctcaccttaactgtaattgctattccagcaagcattcctcctccacctacaggtaccaccagtgcatccaccaaaggaacctttagtgaaaatataaactgtaagcagttttatatttaatgtatacatataaaataattgaatatagcccaacagctttaccagtagctaaacaggaagaactcagctattttacctggttcagcacttccagggcaattgtcccttgtccagctatcactgcaggctcctggttgggatgtaccatggatgccttctggtttcttctgtaactcctttttgcaacattttctctggactgaaagtacattaatttagcttaattgatttgtatttaatagagtcccccaacaagttccatttggg

SEQ ID NO: 97425 - DNA, 302 bp, Homo sapiens
ccccttatcagatatatgatttgcaaatattttttcccattctaggggttacctttttactttattaattgtatcctttgatatgcagaagtctaagattttggtgtagtccaacttatagatattttttgttttctttagatgtcatatccaaaaaatcattgcaaatctaatgtcgtgaggcttaccccctatgttttcttctaagagtcttattgtttcagctcttgcatttaggtctttgatgtattatgagttaatttctgtttggttgttgttcgtttttgtgattttgagacgga

SEQ ID NO: 97426 - DNA, 473 bp, Homo sapiens
  misc_feature (1)...(473): n = a,t,c or g
aggagcggngnnnnnnnnaatcgatcactgtagagactggcggaattcgacaagtttcttcggctacaacagtcccgaaacctttatttcccaatgctacgacatgctacacatggtttacttttccccttaaaaatgccatccaatcttcaacctttttttttttttttttttgggaaagggattttatgggggccccccgggggggggggagggggcccaacccggctcaagggaagcccccgccccgggggtaaaaacatttttcgggcctaacccccctaagggggggggaaaaaaaaaaacggccccccgccggggtaatttttttaaggtaaaaaaaaaagggggttccccggggtaaccagggggggtttgaatccccggcccgggggacccccccccctaaccccccaaaggggggggaataaaggggtgaaccatgggggccgggcaaaaaaggccttccattt

SEQ ID NO: 97427 - DNA, 414 bp, Homo sapiens
  misc_feature (1)...(414): n = a,t,c or g
ccactatccatttccagattttgttcatctcagacaggaattttatacccattannnnataattccccattgccctcttcccttatcacctggtaacctccattctactttatttctctctgaatttacccatcctgatgctatggtctgaatgttagtgtctcctgaaaattcatttgtcgaaatcctaacccccaaggtgatggtataggctgtggggggacccctgggaggtgatgaggtcatgagagtggagccctcatgaatgggaatagtgcccttataaaagagacctggggatccgggtgtggtggttcacgcctgtggtcccagcactttgggaggctgaggcaggcagatcacgaggtcaggagatcgagaccatcctggccaacatggtgaaaccccgtctct

SEQ ID NO: 97428 - DNA, 460 bp, Homo sapiens
  misc_feature (1)...(460): n = a,t,c or g
cgatggganaagaaaaancctgagaacctcggtagatactcgcacagngcggnggaattngatctttcaccttttaagacagtgtctcgctgtgttgcctgggctgggagtgcattggcacagtcatggttcactgcagcctcgaccttccaggctcaagcgatcttcctgcctgaggatccatcatgcttagcaccacactggtctcgaactcctgggctcaagcaatcctcctgcctcagcctcccaaagtgctggtattataggcatgagccaccacacccagtcattttacccagttttaaatcagattggtcatttttcactgttctttatgtagtctggtttttaaccccttgtcagatatatattttgcagatgttttgtcccattctgtaggttgtctcttcactcttgtttcctttgctgtgcaaaagcctgtcagtttgatgtaatccca

SEQ ID NO: 97429 - DNA, 471 bp, Homo sapiens
  misc_feature (1)...(471): n = a,t,c or g
cccccccccggccgncnnnnnattgagacctttgagaccctctgcagngnggcggaattcgagattgcagcctctgcccggccgctaccccgtctgggaagtgaggagcgtctctgcctggctgcccatcgtctgggatgtgaggagcccctctgcctggctgcccagtctggaaagtgaggagcgtctctgcccggccgccatcccacctaggaagtgaggagcgcctcttcccggccgccatcacatctaggaagtgaggagcgtgtctgcccggctgcccatcgtctgagatgtggggagcgcctcggcccggccgtgaccccgtctgggaggtgaggagcgtctctgcccggccaccccgtctgagaagtgaggagaccctgcgcctggcaaccgccccatctgagaagtgaggagcctctccgcctggctgccaccccatctgggaagtgaggagcgtctccgccc

SEQ ID NO: 97430 - DNA, 485 bp, Homo sapiens
  misc_feature (1)...(485): n = a,t,c or g
gaanacgaaanctcgaanccccnnntttgtagatccactagtccgnngcnnnacaattcgggtttcaccatgttgaccaggctgctcccgaactgctgacctcagatcatctgccctcctcggcctcccaaagtgctgggattacaggcgtgagccaccgcgcccggccctctttagcccactcattcactcactccctcgctctctaacccactcctgctcactcactcattcactggctcactcactctctaacccactctctctcattcccttgctcgttctctagcccaccctcgcacactcattcactggcccgccccttaggtgtgtgctcctgtaccaacactgaaatccagctgtcacaacaggcacccactgactccagcctcatggaaccaccattcaccaggcttgaggggaggatgtcacggcgcgctgctcccttcggtgccagccaggatggggccgggtgggtgcagctg

SEQ ID NO: 97431 - DNA, 468 bp, Homo sapiens
  misc_feature (1)...(468): n = a,t,c or g
gtgcgaaacctcgagatcgctagtccagtgcggnggaactccagccagccagccagggtgcctaagaagcccaagttatcacttggactggaatgtgtttgtgtgtgtgtgtgtgtgtgtgtgtgtgtgtgtgtgtgagagagagagagagagagagagagagaggaaagaaattcgctagagcgcgagggagtgagagaggattaagagaatcccaccccccctcctttgtggtgctttgcacttggtgtgctctcactctgtgctcttgaccccatcctctttgtgtgctctgagaggacggtttctctctctactctctgtctgcacacgtgtgtgagattgtctttctatactgccccgtgcttgagagcgcccgcccactcatgtttctctggaatctggcgcatgtctgttattatgagtggcacctcttctctgtgtctctcgagttccacacagtctctg

SEQ ID NO: 97432 - DNA, 407 bp, Homo sapiens
  misc_feature (1)...(407): n = a,t,c or g
cggacgcgtgggctgcactccaacctgggtgacagagcaacactccatctcaaaaaaaaaaaaaaaaaaaaaaaaaaaaaaaaagggggggggcccctttaaaaaaaaaaaattttaccccccgggggggggaaaaaaaatttttttttttggggccccaaaaaaaaaaacccggggccggttttaaaaaagggggggagggaaaaaccccggggcaacccaaaaaaaatgccgcggggnnnnnnnnnnnnnnnnnnnnnnnnnnnnntnnnttcntnnnnnntnntnntgttttcntnnncccccacncccnttttgtgtctgattttttttntgtgtgcccctccccccctgggcttgtgtgttgggtggttccccttttttccttctttttggtgactgttcgg

SEQ ID NO: 97433 - DNA, 379 bp, Homo sapiens
  misc_feature (1)...(379): n = a,t,c or g
cattatcctttaagtcatacatgaatagttttctttaaaattcaataccagcaaaaacactgcttttttttatattgaggtttatacagttgatcatactttcaatattcatatttttcttttctgtgatccttgttttctatttatacttctaatttatattctatcatgtatatcttataagctgtctccaataatctgcagaccaaatcacagtaaaagtaggcacaagtctataaactacaactttttacttttgttctgtttcattttgtttcaatatggggtctcactctgttgcccatgctggagtggagtggtgcgatctcagttcactgcagccttgacccctgggttcaagcaatcccacctatgcctn

SEQ ID NO: 97434 - DNA, 381 bp, Homo sapiens
ctcctttttgcaagggatatctgttatctagttttatttgaagcatttgtctgccctttgacttttaagtcagtgatcacattggagagctaaaggtagaatgggcgagcagcgacagaggtttctgaggtggcacatgaatatggctccatctggtcctgtaggtccttccatcaggattgccactccaccaccagtcagggaataacagtgttcagaggcaaaataagattctgtgaacacagaattctggctttttcttttttttgagatggagtctcactctgttgcccaagctggagtgcagtggtgggatctcggctcactgcaagctctacctcctgggttcatgccattgtcctgtctcagctactctggagg

SEQ ID NO: 97435 - DNA, 388 bp, Homo sapiens
  misc_feature (1)...(388): n = a,t,c or g
aagacttacacttcattaccaagagagatttaaccccccaaaaaagcaatgttgtttttgcatctaaaagtcnnnnnnnnnnnnnnnnnnnnnnnnnnnnnnnnnnnnnnnnnnnnnnnnnnnnnnnnnnnnnnnnnnnnnnnnnnnnnnnnnnnnnnnnnnnnnnnnnnnnnnnnnnnnnnnnnnnnnnnnnnnnttttagaaagtcaattaatgtgagataccatgttaacagaataaatttgaaaaaccacacgatcattccaatagatgcacaaaaaccatgagaaaaacttcaacaacacttgacaatgaaatattcaataataatgaacagcaggaaactttctcaacctgctttaaggaatttattttaaaaaccctcagg

SEQ ID NO: 97436 - DNA, 390 bp, Homo sapiens
caggcctcatgctggcatcaggccataagttgcctggagaatatgtgatctattgttttggtgctctcttttacttttctatttttaaaaatcaataaatcacaagtaaatcctttaataagcattgaatgaacaaataaattcagctttccccttattgggaggattatgctttttttgtttgtttgttagttttttgagacggcactccagcctgggcgacagagcgagactccgtctcagaaaaaaaaaaaaaaaaaaaaaaggggggggccctttaaaaggaaccatgtttattaccggggggggggaagaataaatttttttttggggggccccaaaaaaaaatttgcgggcccgtgttaaaaaacacggggggggggaaaacct

SEQ ID NO: 97437 - DNA, 391 bp, Homo sapiens
acgcccacgcgttcgattgaatccctcaaaatcatccattagggtgagaatccacttcttccaaaatcctgttaatattgatattttgacctcccatgaatcacgaaagatcttaatggcatctgcaatgctgaatcctctccagaagttcttcaatttactttacctaggtccatcagaggaatcaatggcagctatagccttatgaaagggatttcttcttttttattcatttattattataattagacgggggctctctcttgtcgcccaagctggagtgcattggctcgatatcccctcaccgtatcctgtgcctaccgagttactactattctcctacctcagcctcccaagtgggtgtgattactggcatgtgccacctcgcctg

SEQ ID NO: 97438 - DNA, 399 bp, Homo sapiens
  misc_feature (1)...(399): n = a,t,c or g
attcctaattcatttttcaggaagctgtgatacagggtgaaataaagtcttgtcttataaaccaggaccctaaaccccacactatgtaatagaaacacatgtgtttttatgtctcaaataaaactattatatcacttaaaaaaaaaaaaaaaaaaaaaaaaaaaaaaaaaaaaaaaaaaaaataaaaaaaagaaaaaaaaaaaaaaaataattgggggggggggcccccttaaaaaaaaaaaattttcccggccggcgccaaaaaaaatttttttttttgtgggggcccaaaaaaaaaaagggggggggggggttttaaaaccggggggggggaaaaaccccgggcctccccaatatttttggggggaggaggnnntttttttgnngncaacattatct

SEQ ID NO: 97439 - DNA, 393 bp, Homo sapiens
ctgagtttgggaagttgaggctgcagtgagtggtgatggcaccactgtacaccagcctatgcaaaagattgagatgctgtctcaaaaaacaaaaagacaaaaaaacaaaaaaaccccaccaaacacacacaaaaagcaatgtttaattgaatcacctcctaagtgtaagatgtggaacaaagctgatataagagaggacaaagccactggagatacagattcattcattcgttcatggatgtttgctgagtgcctcctatgtgttaggtcctgtcctcttagtgctggggacttagcagtgaaccacgcagacaaaaactctgcctcctgggagcttgcagtgagccgagattgcgccactgcactccagcctgggtgacagagcaagcctcc

SEQ ID NO: 97440 - DNA, 396 bp, Homo sapiens
  misc_feature (1)...(396): n = a,t,c or g
cgaatcacttgaacctgaaaggcagaggttgcagtgatctgaggttgtgccaccacactctggcctgggcgacagagggagactccatctcaaaaacaaaaacagtacaataaagaaaattacagaataacattcctcatgaacatacatgtaaaaatctttaacaaaacagcaaattgattccagcaaaaaatcaaaaagaataacgcaccaggcccaaattggatttatgtaaatggggaattcaagactgaaccgaattnnaaaaaaaaaaaaacancctactaaaaaaaaaaaaaaaaaaaaaaannnntnnnnnnnaannnnnnnnntnttnnnnnggggggggggcgcttaaaaaaaaaaaaaatttttgtgcccgggccgaacaaaatt

SEQ ID NO: 97441 - DNA, 390 bp, Homo sapiens
attctcagacctttctatagcagagtggctctgaaactttgtctcaaattccttttttttttttttttttggaaacggggccccccgcggcccccgggggggggggcagggacccaatctgggttaaggggagccccccccccccgggtaaaagcaattttctttcttaacccaacccagaggggggaataacgggggcgggcccccaccccgggtaaattttggttttttaagaaaaaacggagttcccccaggggggccgggagggccccaacccccggacctggggaccggccccccccccccccccgaggggagccccccccccgggcctcaattttcaaaaaccaaaaggacggcccctggccagccaaagggcggccctttttt

SEQ ID NO: 97442 - DNA, 438 bp, Homo sapiens
  misc_feature (1)...(438): n = a,t,c or g
ggcatttctgattttttaaaaatataaccaagtgcacataaacatacgtacagaaaaattgaggaataagtttcacgaatcagtaactgtcctgtgtgcattgtgctcagtattttctgtgtattcctctttttatatatgtaatgcttattggcacccactaaatttctgaccattgatgaatcttttgcccatgtttgaaaatcactggtttattagataaaacatcctgtatcaagattagtaaagcctcaaccaccnnaaaaaaaaaaaaaaaaaaaaaaaaaaaggggggggnnaaaaaaaaaaaaangngnnaagggggggggggggggaaggaaaaannttttaaaaannnnaaaaaggggggggggggggggaaaaaataaaaaaaggggggggggggaagaccgggtgttttttatttattagggncct

SEQ ID NO: 97443 - DNA, 413 bp, Homo sapiens
cccacgcgtccgctcaggtggctgaggcaggaaaatcgcttgaacccagaaggccaaggttgcggggagccgagatcatgctactacactccagcctgggcaacagagtgagactccatctcaaaaaaaaaaaaaggggggggccgtttaaagggaccaactttaacgtccgggggcgggcaaggactattttttttaagggggccccaaaaatcaacttcgggggcggcgttttaaaacggggggggggggaaaacccggggggaaccccaataaattgcgcttggcaggaggctatgacatccatgggtttcaactgatttaaatattcttttataaaaggcccttagcaagaaaaaagagtcctatttgcttgagtaataacaacccagacagaaataacactaactgcc

SEQ ID NO: 97444 - DNA, 438 bp, Homo sapiens
  misc_feature (1)...(438): n = a,t,c or g
ctcctgtgtaaagcatttttttccttttatctgaaacagtgatttatatgaactgttggaataatggaacctcaaactacagatgtgtatgtaaaattgcataaatgcactgacttccttctccctgactatatttttaataaacagcattatcctaaaaaaaaaaaaaaaaaaaaaaaaaaaaaaaaaaaaaaaaaaaaaaaaaaaaaaaaaaaaaaaaaaaaaaaaaaaaaaaaaaaacggacaaaacaaaaaaaaaaaaaaagggaaaaaaaaaaaaaaaggggggggggggctccccaatgacttaccttatcccccccccccccgcccttatattatttttttttttgagggaccaannannnggggggggggggcgggaataaaccagggggcggttgaaaaacacggctctctcccaacattttggggtag

SEQ ID NO: 97445 - DNA, 424 bp, Homo sapiens
  misc_feature (1)...(424): n = a,t,c or g
gcggccgctatttggtctcattgaagccaacacagaacttgctgctgtgttttttcttcagggataaataaaatacttacggaaaaaaaaaaaaaaaaaaagggaaaaaaaaaaaaaaaaaaaaaaggggggggcgggaaaaagaaaaattgtgggaggccggggggggcggaacaacaagaggtttataaaaggagaacagcgggggcaacatggggaaaccccgaataaaaaaaaagggggggaaagcgcggggggcgccgctgggcgtttcgtcggnncagttnntttaaaggggtgagggggagaagtgcttgagcccaggagggggaggttgcagtgaacacaaaacaacaccactggcctatccaggcttgggaaaaaagaaggaaactcaatccggaaaagaaaaaaaatagggggg

SEQ ID NO: 97446 - DNA, 411 bp, Homo sapiens
  misc_feature (1)...(411): n = a,t,c or g
caagctctccacccacattggcctcccaaagtgctgggattgcaggcttgagccaccgcgcccggcctctgctttcaagaatagtatcaattaagatcccttctttaggccagttgtggtggcttatacctgtaacgccaacacttttggaggcagagacaggaggattgtttgagaccacacatttcagaccagcctggtcaccacagcaacaccctgtctctgcaaaaaaaaaaaaagggggggcccttttaaggggatcaagtttaacgcccgggggtgggcaaggaaaaagttttttaagggggccccaaaaaaaaaatccggggcccggttttaaacaacgtggggaggggaaaacccggggcgacccccaaaaaataacgcgctaggggnnnnnnnnnnnnnnnn

SEQ ID NO: 97447 - DNA, 418 bp, Homo sapiens
cgtaaaacaaggtggattaatgaacagatgccttataaaacaaaagcactgaaatgttaagggcagaatctaggtggtggggtatgggggtatgcacagaaaaattcccttgactttaactgaaagtgtcctaatggggaaatggcacattggggtttcggggccatgtaatggcacaggtttctatcatggccctgcacctgcttttgagtctgtaacttggtattatttttcctaaagcgggtcctccagattataaaagcctcaggcatcagccaggtacagtgactcacgcctgtaatcccagcattttgggaggcaggcggatcacctgagggtcaggagtttgagaccagcctggccggcatggtgaaaccccatctctactaaaaatagcaaaagttggctgcgtgtagtg

SEQ ID NO: 97448 - DNA, 412 bp, Homo sapiens
  misc_feature (1)...(412): n = a,t,c or g
tgctggctgggttcggtggctcatgcctgtaatcccatcactttgggaggccaagacaggttgattacttgaattcaggagttcaagaccagcctggacaacatggcaaaacacgtctttaaaaaaagaaaagaaaaaagaaaaacagaaagaaaaaaaaaaaaaaggggggccgtttaaaaggatccaattttacttccccgggctggcaacgaaaaattttttttatggggcccccaaaattaaattcctgggccgcggtttaacaacgtcgggatgggaaaaacctgggcgtaccccaattaaatccccttggnnnnnnnnnnnnnnnnnnnnnnnnnnnntttttttggggggggagtgggattnttggangtttggtgaaatagggaagtgggagtaatagatgttg

SEQ ID NO: 97449 - DNA, 357 bp, Homo sapiens
attcagttctgtagccttgggagtatactatacaggaagtttattggcatgagatttcagaattaagtgggaaaacaattctttaagcatgtacagaaaagtgacctgaaatgtttttgggtgatgaacttacagactttttttttttttttttttttggggggggggttttttttttgtgtttttccctcccgggggggggggggggaaaaaaaaaaattattttggccctgggtaaagccattcttccgtttgggccttccgggggggggggaataaaggccccaccccccttggtttttttttgggaaaaaggggattttctttgtttcgccccgccccgggcgggggtgtgtt

SEQ ID NO: 97450 - DNA, 375 bp, Homo sapiens
aaatttggatgttgaagttctgcagaatttctaaaaccaatctcaacctcttaaaagatagcacatttctgggtaagaccacatagggttcaaatcccagttctatgacttactggctggttgatcttgagcaagtcacttcatctgtctatctgtggctagtttcattatcatcttttttttttttttggacccaaagcctcttttttgttcccaaggcgggaggggggggggggggtttggtttttttaaaccctttccccccaaggttaggggggtcccccgcccccacccccccggggggggggattggaggcccccccccccccccctggtttattttttgttttttgggggaaaaggggggtttccccg

SEQ ID NO: 97451 - DNA, 483 bp, Homo sapiens
  misc_feature (1)...(483): n = a,t,c or g
tttacataacagacgaggtcaacgatccctcccttaccatcaaatcaattggccaccaatggtactgaacctacgagtacaccgactacggcggactaatcttcaactcctacatacttcccccattattcctagaaccaggcgacgtgcgactnnttgnnnnnnnnnnncnnnnannannannantntggggggnggtngnnggnggagaaatttttgttataaaaatgatagaaaaagtgaacattttgtgaatcactcgagatgcgttgaatgtattgataagcaggctgcgtggaatttcctgacgttgacaattccttggcacttacaaaagagggcgccgataaaatattttttctcacaaggcgggttgggcgtttggacggattcaagaagagctccaacctttggaatattataaaaaagtggggggatatggcacgacctttcgcttgtaaggggaagaggtgaaggaacctg

SEQ ID NO: 97452 - DNA, 369 bp, Homo sapiens
ctagcaaactcaaactacgaacgcactcacagtcgcatcataatcctctctcaaggacttcaaactctactcccactaatagctttttgatgacttctagcaagcctcgctaacctcgctaaggagggatagcattaggagaaatacgtaatgtagatgatgagttgatgggtgcggcaaaccagcatggcacatgtatacctatgtaacaaacctgcacattctgcaaatgtatcccataactttaagtataattatttttttcagatggagtcttgctctgtcgcccaggctggagtgcagtggcacaatcttggctcactgcaagctccccctcccgggttgacgccattctcctgcctcagtctc

SEQ ID NO: 97453 - DNA, 372 bp, Homo sapiens
atacaataaaaaatataaaagatgcttgtggaacaatctgactatagagtccttctggatattaatccatatttttctctaactctttaagtgctagctcagccacatgtaattgaatagtttttctcttaatttcattttatcaaatctttcaaccttatttttacataaacaaatgtctttttatgcattcatatttaatcacttatttatttaagattgaattaaattacttcgttaaaatagtaatttcaaccatcaggaattatagtgaaatggcttatttaaaaccatctggtcaaaaaatgggcaaaagatttgaatagacatttctcataagaagacatacagatagcgcacaggcatatgaga

SEQ ID NO: 97454 - DNA, 389 bp, Homo sapiens
  misc_feature (1)...(389): n = a,t,c or g
agctcctgacctcgggtgatccactggcctcaccctcccaaagtgctgaggcaggagaatcgcttgaacccgggaggtggaggttgcggtgagccgagattgcatcattgcaccactccagcctgagtgacagaggaagactctgcctcaaaaaaaaaataagcagaaaaaaggagggcgggggggggttttcttttttggggaaacctcacctttgggaaaaaaacactttttttttgggggggggagaaaataaaacaaattttttaccccgggggctgcttcctttaggaaaagaaaaaggaccccggggctggtaaaggtttccttatccccccaaactccaatttgcttttggggataagaacccttaccccttgaaaaatgtn

SEQ ID NO: 97455 - DNA, 395 bp, Homo sapiens
aatacatcagatttttgtattaaacctcgagcctataatgaatctgaacatcactgggacatggttagacgccatctataaggaaaagaagataatcttaccttagatatttctaaattgaaagaacaaatttttgaaacatcaaaagcccagttaaatctggtgtcagaaacggaggcaatggtaaaagctgttgacagcctcacaaatcttaaccctgtcacttgggttaaaaccattggaaattccactattgcaaattttgtattaattcttggatgtctggcctctctattggtagtctacaggtatatccagcagctccggagagacagcgaccagcgagaaggggccatgatgacgatggcggttttgtcaaaaagaaaagggggaaa

SEQ ID NO: 97456 - DNA, 391 bp, Homo sapiens
cggagtttcaccatgttggtcaggctggtctcaaactcctcacctcgtgatctccccgcctcggcctcccaaagtgctgaaattacaagcgggagccactgcgcgcagacactcatgctttttaatcaggggagctcaatacaagtatgtagggaggctccttcaaaacgcctttccctaggctctatcacagacctatggaattagccctccggatggacattgtgaaaaaaacttaccccatcacgacagttgctttaagacagcctattctgactgctgaacattttgttttcccctaagatctttgcatcatggatcatttaagtttgactgaactgctttatttttctatttgcatgatggaggataaaaggaggaaaactggggg

SEQ ID NO: 97457 - DNA, 402 bp, Homo sapiens
gagaatcgcttgaacccaggaggcagacgttgcagtgagccaagatcgtgctactgcactccagcctgggcgacagagcgagactccatgtcataaataaataataaataaattaaaaaatatacctatcatctgcttttcttttctttttaatgaaaatttctgtgctggttatatatcatgaacctatttttgtttgttttcagacatggctcttacttaaacaatgtttattcatgccaaagcgaacaacaatgtaacttctctttataggcaacggctgaactttaatcctctatggatacccctcaggctcttgccttctgctgatatttctaaattactgccttgttggaagaatgtgtccacttcaggcagatactgccaggataccagaaagaa

SEQ ID NO: 97458 - DNA, 393 bp, Homo sapiens
cgggagtttgaggatgcagtgagctatgatcacaccactgcactctagcctgggcagcagcaagcctccatccaaaaaagaaaaaaaaaaaaagaaaaaaaaaatcggttaaaagtcagggggctttttattctcactatgctatggcaattttaaactatatcagggaaaaaaaacttttcctcaagtggaaataacttttaaatattaaccataattacggcggagttttagaaaaaaaaaaaccataatcctatacctacaatttaaaaaaaagccaaaatttaccccaattattataaatttaaaaatagcttttttttttttttgagggggaggctggttttgccacccaggttgaagggggggggggaaatttgggttgtttggaat

SEQ ID NO: 97459 - DNA, 419 bp, Homo sapiens
cttgaactggtgggctcaaatgatcctccctcctcagcctctcaaagtgctgggattacaggcataagcgatcatgcccggcctgttatgtagtctttataacatttttttaaaaagaggaaatgctaagcaaatagatgttattaaaattgtagtgcaaaccaaaacgagaatgtgggaagatgttataagatgtatgataaagatctttcaattcttatatcttaatttcttaaaaggaaatacagagcaagcagggactcagagctatctgcatacccatgttcatagcagcatcattgatgatagacaaagggtagaggcaacccaagtgtccatggagggaagaataaataaacaaactgtggtataaacatttaatggcctatcattctgccttaaaaaggaatgaaatcctg

SEQ ID NO: 97460 - DNA, 379 bp, Homo sapiens
  misc_feature (1)...(379): n = a,t,c or g
agtccatccatttaccacttgatggaggtttgggttgtttccactttttggctttcataaatactgctgctgcaaacattcacttgcaagtttttatatggacatgggttttcatggggtaaatgcctgggtatagaattggtgggtcatatgtttaactttttacgaaactgccaaactgttttccaaagtggctatatcatttacattctccccatgcctctggattcatagttagaaagcctttctccacaccagggttaaaagaggaattcagccgggcgcggtggctcatgcctgtaaccccagcgctttgggaggccgaggtgggcggatcacaaggtcaggagatcgagacaatcctgcctaacacggtgan

SEQ ID NO: 97461 - DNA, 418 bp, Homo sapiens
  misc_feature (1)...(418): n = a,t,c or g
ttttcatggctgcagagtgttccattgtatgtcttatcctaacttatgaccggttttctatttagagaaattgagactatttccagcaaacaatgctgcgctgacatgatgctcgttcgttggggtatctgcaggccaacttcctagaagcagaattcccagcctgtgttggtagctgctatggtctgaatgtttgtgtcccctcaacatttatgttaaaatccccgaggtgataatgttaggaggtggggcctttgaggaggtaattaagtcatgagagtagagcctttgtgaatgggattggtgcctctaggccaggcgcggtggcttatgcctgcaatcccagtgctttgggaggctgaggcgggaggatcacttgagcttangagtttgagatcagcctgagcaacatggcaag

SEQ ID NO: 97462 - DNA, 414 bp, Homo sapiens
aatccacccattacaaattacaattcaatgatatatatttgtagaatattcttttttttttttttttttggaaaaaatctaatttggttccccagggggaagggcagggccaaagtctgggttaatggaaccccccccctcgggggctaaggggattttttaatttaacccccccaagaacggggaataaagggggggaccccccaccccaagaaaattttggtttttaaagaaaagggggggttacacaagggggggggggggggtctaaaaccccggccttagggggaccacccggcctcaccccccaaaggggggggaataacgggcaggacccccggcccccggcaaaaaaatttggtttggggaaaaaaaaaaaaaacaggcaattaccctttttgggcttttttaggg

SEQ ID NO: 97463 - DNA, 397 bp, Homo sapiens
  misc_feature (1)...(397): n = a,t,c or g
agatgaatagattgcaaaaattttctcccattctgtaggttacctgtttgctctgatgatagtttcttttgctgtgcagaagctctttattttaatgagatctcatttgtcaatttttgaggcaggcattgttattaccccaatttcataaatgaggaaatgacagacagatagatagatagacagatatgccagttgtccctgaggaggcgaaattttgctcagttgaaaaccactgtgatatagatagatgatggatacatagatagatattagttagacagaaaatagctagatagataatagctagatagatagtaatggtcaatgatagtttgtgatcaatgataggtaatagatgacaggtagataaatgatcgatggtcaatagatgatn

SEQ ID NO: 97464 - DNA, 379 bp, Homo sapiens
gaatttggcaccattttccagaagaggaaaccaatgtgcagggaggtgaagcgatttgatcaggtcatgaaggtaggaagtggtccacaggactttacagcaggtctagccctgtaacaggggagaccaacaccacatcaggaaacaggaagacgttggaagtcgtctctagggcagaaatgtcccttgtaggggaggaggggaaatgataggaagttcccggctggcatgacaatgtgattatttcaatgagcttcttagaatggaaatattggggccgggcgcagtggctcatgcctgtaatcccaacactttggggggccgaagcgggtagatcacgaggtcaggagtttgagaccagcctggccagcatggtgaa

SEQ ID NO: 97465 - DNA, 380 bp, Homo sapiens
  misc_feature (1)...(380): n = a,t,c or g
agtgaatgctgataacttcagcaagttatccagaagatctagctaaaataattgatgaaggtggctacaataaatcacagattttcaatgtagatgaaacagctttaaattgaaagaagacaccatctaaaactttcacagctagagacaagtcaatgcctggtttcaaagcttcaaaagacaggttgaccctacttttaggtgctaattttaagttgaaaccaatgaatgacctcattttaatttgattacctctggaaagttccagtttccaaagaaggtcacattcttctgggaatgaggacgtcaaaatatcttttttggtgggacacaatggaacccgtagcatcatccttctgtatattttccattttcattan

SEQ ID NO: 97466 - DNA, 445 bp, Homo sapiens
atttgaacgccgttacgacgtccgggcaccgtgccggacctccccggacgacccacgcgtccgattagttctgtcagcttttgcttcatatattttagcgctctattattagatatatacatgtttagtattatgtcttattggtgcatttactctcttatcattatgtaatgtccttctttatctgtgataattttctgtgatctgaagtctactttgtctaaaaataacatacgcactcaacttccttttctttcttccttcctttctttcttccttcctttctttctctctctctctctttccttccttccttcctccttttctttctctctctctctctctctctttttttgacagactctcgttctgtggccctggctggaggtcaggggggggatcttggctcactgctacctctaccatgagcaattctcctgcctcc

SEQ ID NO: 97467 - DNA, 380 bp, Homo sapiens
ttttacttatacagatcttgtacatactttgtcaaatttatacctaaatatttcagttttgggggtgttagcgtaaatgatgttgtgtttttaatttccaattctgctgttcattgctggtcacagttaatttttgaccaaggcacaaaggcaattcagtggagaaagaatagtcttttcaacagtgatgctgaaataagtggatatccctgtgcagaaaaaaaaaaagcaaaaaaaatcaaccccccaaacaaatggacttcacttatattttgccccttatacaaaatgaatttgtaatgggccataaacctaaatgcataaaaattctggaaacaggagataatgtttgtgacattgagttaggcaagtttttatct

SEQ ID NO: 97468 - DNA, 385 bp, Homo sapiens
  misc_feature (1)...(385): n = a,t,c or g
tttcaccgtgttagccgggatggtctcaatctcctgacctcatgatctgcccgcctcggcctcccaaagtgctgggattacaggcgtgagccaccgagcccagcctaaggttcaaatttctaagaatgataaagaaggactttgagggctggtctctgttacctccctagcccatctctcaacatctccttccttgcttcctgtgactaaattccaaccattctgaactccttgggaaccccaagtcaggtggcatactttgcagggagccccaacccacctcttcgctccctttcaaggtctaggctgcccttcctcagcacaacgtccccactggtgactggacattcatccctctctctcacttgaaacgcagtccctctan

SEQ ID NO: 97469 - DNA, 381 bp, Homo sapiens
ttggcttgaacccaggaggtcaaggctgcagtgagccgtattgtgccactgcacttcagcctgggcaacagagcgagaccctgtctcaaaaaaaaaaaaaaaaaggggggaaaaaaaaaacccggggttgggggaaaaggggcaaaaggggctgggttcttaaaaagaaaacaaccgggttttttttaaaaaggggggaaaaggaaagggccgggggcccacttttttgggggaaaatcctaaaaaaagattgggccagggggcaggaaaagccccccccggggggtgggggcccaggggcaaaaaaaagccccacctggggggaaagggttaaggggccagaaaaagcccccccttgggggaaattgtttagggcaaagg

SEQ ID NO: 97470 - DNA, 400 bp, Homo sapiens
  misc_feature (1)...(400): n = a,t,c or g
ggcgcttcacatctacagcaggggttgcctagtgccctcaggtccttgttcttcacatccatcttcacctcacagcattgcaaatgtgacaggtagaccagatggccaaaatgtgtgcttgccctaaaacttaccctgaatgtttaagaataaattttcttagggcattgtttctattgtcagttaaattgcttactggtagcaatcatttcagtatgtataagtatatcaaagcatcatgttgtgcgcttcatacaataaaatttaagttttatttatttttattattattttttgagatggagtctcaccctgtcacccaagctgtagtgcggnggcgtgatcttggctcactgtaacatccgcctcccgggttcaagcgattctcctgtcttatcct

SEQ ID NO: 97471 - DNA, 409 bp, Homo sapiens
  misc_feature (1)...(409): n = a,t,c or g
cctgccaggatggtctccatctcctgacttcgtgatccgcccgcctcggcctcccaaagtgctgggattacaggcgtgagccactgcgcccagcctgcatattttaaaatgactagaagaatgtaattggattgtttataacacaaagaataaatacttgaggggatggataccccattttccacaatgtgattattacacattgcatgcttgtatcaaaatatctcctgcacctcataaatatacacacttactatgtacccacaaaaattaaaaattcaaaaaaatctagacctaggtggcttcactggtaaattttatcagacgtttaaggaagaaatagtactaactttatacaacangctcctgcagaaaattgagtatgaggaaatattttccaactcagtcg

SEQ ID NO: 97472 - DNA, 412 bp, Homo sapiens
ctctacaaaaacttttttaaattagctgagcatggtggtgtgtaccaaatactcaggaggctgaggcaggaggattgcttgagcccgggaggttgaggttgcagtgagtttaaatcatgccactgtactccagcctgggtgacacagcaagaccctgtctcaaaaaagtttttctaggccaggatctatagtcttcaccagactaccaagtaaatccgtagcacacatgattttaggaactcatagctctctgtggacccaggtggcatgcacatttgagtaagatttgcgtttgattggcctctcctactttcttggtcttattttcattttagtggttttgagttgtctcttattgatcactacttcgatctgttttggagctagatggagtataaattctaaacaagta

SEQ ID NO: 97473 - DNA, 414 bp, Homo sapiens
ctttaccctctccaagcaggtgaggaagcaatgctcgaaaatcctaggagcctgttccagttcaaaagaattcagggatcctaatttacaaacgtcagataatctcgttcaggggttggcaaactctagcctgtgggccaactccagctgccatctgttttggtaaataaagtttcattggagaatagccaccctcattcacttacatgttctctatggctgtttttgcactatgagggcagagctgagtagttgcaccaaagccaaaaatatctggccaccatcagccaaaaatatctggcctttaagaaaaagtttgctgccgggcacggtggctcatgcctgtaatgccagcactttgggaggccgaggcgggcggatcatggggtcaggagatcgagaccatcctggctt

SEQ ID NO: 97474 - DNA, 367 bp, Homo sapiens
cggacgcgtgggcggacgcgtgggctataatttgtattaatagtgtgaagaaagaaaagagaagactcagatctggctcagaattctgattaaagctatttatgttagtataaccttgggcatgcttccacaatttctctaaaagtccctttcctcatctatataaaggggaatcataatacccataccatagaatcgttttgatgtttaaatcaaggatcaaactagctatttaaggacctgttctggggccaggcatggtggctcgcacctgtaatccccgcattttgggaggccgaggcaggtggatcacttgaggtcgggagttcgagaccaaccttgccaacatggcaaaaccctgtctcta

SEQ ID NO: 97475 - DNA, 375 bp, Homo sapiens
attaatttgtatttattcttactaattttcagattcatgctttgcttgtagcaattaaaatgtagttacagccaggtgcagtggtgcacacctgtagacccagctacttgggaggataaggtgggagaatcatatcatgagcccaggagtttgagcccagcctgggtaacataggaagatgctatccccctttttttttttttttttttttggaagggggttttctttttcccccgggtgggggggagggggccaattttggtttattggaattttttccttccgggttaaccccgttttttttttttaaccttccgagggggggggggggggggcccccgcccccctgcccggtttattttttttttttttttt

SEQ ID NO: 97476 - DNA, 377 bp, Homo sapiens
ctgaacttcaggtttgtgtatctggctgtatacctgttacttctacttgaatgtctaataggtatctaagacaacagctctgaaactgaactcctgatttccacctcgcccatctgtacctctgtagtctgcatctctgttcatggcaactctatctttctagttgctcaggctaaaaacttggagttttgactccttttcctccctcacagcccatatagaagctatctgcagatcctattgacagtttattaaaaatatatcttggccgggcgcagtggcttatgcctgtaatcccaccactttgagaggctgaggcgggtggatcaagaggtcaagagtttgagatcaccctgacatggtgaaaccccatctct

SEQ ID NO: 97477 - DNA, 407 bp, Homo sapiens
  misc_feature (1)...(407): n = a,t,c or g
cggacgcgtgggcggaggttgcagtgagccgagactgagccactgcattccagcctgggcgacagagcaaaactctgcctcaaaaaaaaaaaaaaaaaaaaaaaaaaaaagggggggggcaaaacccctctttttaaccccgggggttttaaaggggggtgggcccaaaaaaaaccttaagccaaagggggaaaattggggggaagggaattcggcaccctttaaaagggaaaaaaaaaaagttttttaagggaaaaacccgcccaggtttaaaaaaaaaaaaaaaaaaaaaaaaaaaaaaaaaaaaaaaaaaaaaaaaaaatatattnaannntnnnggggggggaggggcgccccatccaatctccaagaacgccttattagggggaaagttttttttacaacag

SEQ ID NO: 97478 - DNA, 391 bp, Homo sapiens
  misc_feature (1)...(391): n = a,t,c or g
cggagttccactgtgttagccaggatggtctcgatctcccgacctcatgatctgcccaccttggcctcccaaagtgctgggattacaggcgcaagccgccatgcccggcctaaaaattcttacacaggctttgcttcatgaaaccctttatcaaactgtttggtcattttttgattttcacctgagttgataattgcaactgaattcatcttgaacattgagaaaacagtaaggacccatgagagaatttttaaaagtcaaccaacaatatcccagtcctcaccagcaggtggtttaaagcatctttcagaatttgaaatcagttttaatgatggtcactaacatgaatcatgttaacataattttaagcatgttgtacttaatgttctgn

SEQ ID NO: 97479 - DNA, 395 bp, Homo sapiens
tgtgttggtgcacacctatagtcctggctacttgggaggctgaggtgggaggatcgcttaagcccggaagggtgagacttgaggctgtagtgagcagtgattgtgctgctgactccggtctggatgacagagcaagaccctgtctcaaaaaataataaaaataaaaataaataatatataattaataatatataattatatatgatatataataatatatcatatatataaaataattttaaaagaaagattaaaaaaacttcagtgactgagtgacataccagttactgtgataaaagcatggggaattgccgggcgcggtggcttatgcctgtggtctcagcactttgggaggccgaggtgggcggatcacaaggtcaggagatcaagaccat

SEQ ID NO: 97480 - DNA, 422 bp, Homo sapiens
cggacgcgtgggtgagcgtggtggcacactactgtaatctcagttactcaggaggtaggagaatcacttgaacctaggaggcaaaggttgcagtgagccgaggttgcaccactgcactccctcctgggcaacagaacaagactccatctcaaaaaaaaaaaggtccttcataaaggcccttcatatgtgaccatgcaaaaccaaggcacccggaaaaaacggaaattttattttttaccacccaccaaattaaatttttgccccttaacctttttaaaaatataaaagcaccaggccccaggggagccctgaaggaaaaggctaccacttgtgaaggcctccagggcccagggtctacaatgtggggggccccctttggttcagccaagttttaataaaactaaacctgctctacagtaaaa

SEQ ID NO: 97481 - DNA, 420 bp, Homo sapiens
  misc_feature (1)...(420): n = a,t,c or g
aacaaaagcaaaatgcaatagtcacattctattctaataaaatgaaatataaaattttataaagtaagaaatatgatttttagtttacctgtaatgtgaattgttacattggttctgttttaagagacattgaaacagacagcagaaattttatagtagacagagaaaggacctctgtatcctatttcttttattaactgcaaattaaaagctatgcatgtagagttgtgttggaggtttcttgaaggtattttcatagacagatgagagaagatatagccaaggtagccaagacatgttttttcttttcttttcttttcttttttcttttttctttttgggcgacaggttctcactctgttgcccaggctggagtgcagnggcgcgatcatatctcactgcagcctcaacatcctgagg

SEQ ID NO: 97482 - DNA, 412 bp, Homo sapiens
ccttgaaagatggatgagatgtcacttagcagggaagggactcccaagcagaggggctacagagaggcaggaaagtacagagcttatggaaggaagaaagagcacaacagtgtggctgtgctgtttgcacaggtgtgggcatcgtggggcggttggttagaaactgacgggccaaactggatggtgtggactcccccatacaggcatatagatgccactgttcaggcagagagaagccattagggaatagaagaggcatgtggtaattttagggtgattgtcctaaaatcatctttggctttggaaggggaagagcctagcggcagagactctagttaagaggctagtggaggccgggcgcggtggctcacgcctgtaatcccagcactttgggaggccgaggcgggcggat

SEQ ID NO: 97483 - DNA, 408 bp, Homo sapiens
aggcaggagaatggcttgtacccaggaggtggaggtagcagtgagccaagatccagctactgtgctccagcctgggggacaagagcgagactccatctcaaaaaaaaaaaaaagcttttttagtttttttggaaaaaaaaaccgggtcaacccttggttttttttgttacccagggagggaagggggttatagggggggaaatcctttaaccctggtttttaatttttggaaataaaaaaaacgggggaaaaaaaaaccccggccggggttttgggtcaaaaaaaaaaggacaggccctggtttccaaaaaaaagcttttgggctgggggcggccccaaaaaggaagggggattttggcaaaaaaaaaaactttttttgtttccaaaaccttgggccggggccctagg

SEQ ID NO: 97484 - DNA, 405 bp, Homo sapiens
  misc_feature (1)...(405): n = a,t,c or g
aaacactcccagattacttgccatctctgagactctccattttaaaaaaggagaaagtttcattgaaggataagggacagaccatacaatggatttcaccccacttttttttttttggaaaagggattgggttttgtggccaaactgggagggaaggggcccaaaatgggttaatgggaccttaaacttctggacgctaggggggccctcccatttaacctttaaaagaactgggaaccccgggggggggcaaccaggctgggcaaattgggggggggggggggggggggggttgtgtgggtgagagggggggggggggaaactctggcttttatttaggtcgccggggcaaattaaaaattaagggggccccggcttttttcggggggtgccccaaaagggggn

SEQ ID NO: 97485 - DNA, 401 bp, Homo sapiens
caaaaattcacctttaggagaatttttgagaaaacctttacattaaaaaagagggaggaaagatatcaagaaaagttatgaaaaggttttctcaaaaattctcctaaaggggagggtctctttcttttctcttttccttttttttttctttttttggcaacctggctctggcccaggctaaagtgcagtggtgcgattatagcccggtgcagcctctaactcctgggctcaagcaatccaagtgatcctcccacctcaaccttcggagaagctgggatcacagctgcaggccacgcccagtttcctccccccgactccccccccccaaagacacgggcccaccatgttacccagcctggtctcaaactccccagctaaagcagtcctccagcctcggcctc

SEQ ID NO: 97486 - DNA, 396 bp, Homo sapiens
  misc_feature (1)...(396): n = a,t,c or g
tcttcannnaactcttagcgagaagtttctggtttttgcttctcctctttcctcatatctccctgccctggcttctttaaccaacctttgctctgtggactatttaaggaaaaaactttaatcggccctttgctgattatggggaaggagggttctccagcagagctcaggaaatagctcacttctccctatttctgaaacattgaggatgaaaacagagagtgacacagacaggaggccgggttggaaggaatagttttaggtctggtggccaggcggactgggctaatactgaactccaccacttttgggaggccagggcggacggatcacgaggtcaggagatcaagaccatcctggctaacgtggtaaacccgtctctactaaaaatacaac

SEQ ID NO: 97487 - DNA, 388 bp, Homo sapiens
caagactggtcttgaactcctgggcttaagcaatcctcctgcctcagcctcccaaagtgctgggattataggcatgagccactgtgcctggccaaacttatttctttattggaatcatcatctatatcctcataaaaagtatactgcttcttcttaactaaataatggagtaaggaatgtcttcaatggctattttggtattcatgtggcagactgttaaatatttttttctcttctatctatcttggttaactatggcctgactaaaaacagcattctttggataagctaaaatgcagtctgggaagaatagtcagttttgaagttggagaccatgtatcctcgagcatgaataaagcctggacattggcttcctatagagatttcg

SEQ ID NO: 97488 - DNA, 405 bp, Homo sapiens
ttctcatatccattacaatttggaaaaacattttaaaaaccccctcctagggaggtaaatatctgttctgatctttacctccctaggagggggtttttaaaatgttctcatatccattacaatttggaaaaacatttaaattttttttttccatctctagggagaaattggctttacgatgaacatgttagacattggtggaggattcacgggaactgaatttcaattggaagaggtaaacttctcagtaaatgacattaacaaaataattgctttctttgttacttaaggggtggatgtgtaaagcaggatttttactatggccaaaactaaaccctataacatctctttaaaattatgttcttaaaaaaggaataggcggttagtagacctagctaactttgg

SEQ ID NO: 97489 - DNA, 415 bp, Homo sapiens
  misc_feature (1)...(415): n = a,t,c or g
cggacgcgtgggcggacgcgtggggcgagctgccgcccttttttttttttttaaaaaaaataaaaaggcatttgggccccgttgtttcttttgttcctcccaaaagaaggggtaaaaattttttttttttgaaaaaaaaaaaacaccctaactctttggttgggggggaaaattgtagtgggaaaccccctttttgggggttttaaaaaaatttttttttaaaaaaggaatagggggttggaactgattttttaaaacccacatagtggaaattgggggaacttttgaaaagcaaaggggaaattttttaaatttattacccctaaaataagggactttaatttttggcaaaccaccattttctttgggaggggtctaaggtttttgggaggggaaaaccagcccattttttttn

SEQ ID NO: 97490 - DNA, 407 bp, Homo sapiens
ccgtgttagccaggatggtctcaatctcctgacctcatgatccacctgcctcggcctcctgaagtgctgggattacaggcatgagccaccgtgcccggccctcaggtgtgttttttatggctgagtgatttcaaatagaattccatctagcttttagaatgttagctactgaggaaaaaaataaaaatttttcttccattttggctatagagaattaatatatttccacaagaaaatgcggtaggtaattggtgagttacacagattcgtgaaaacatcagtttcttttcttgcagggtgaatttgcaaaaataaatatctttgttctatatcctgtttttcgatttctgagtttaatggtaaattttatgtcatgaaacttggtacctcctagaagtgttcccata

SEQ ID NO: 97491 - DNA, 393 bp, Homo sapiens
acggtgtttcgacatgttggccaagctggttttgaactcctgaccttgagatccaactgccttgacctcgcaaaatgctgggactgcaggcgtgagccaccgcacctggcctaccctttttaaatcacaggtgggccaaatggcttacccagccatccgttccagggcaccaagtgcatctcagtcactgctgtgtctgcaaagcccagaagtaactctccagctaactgtgcccaggccttatgattcataccctcctacaggctcctagagaaattcttttcatacttgtgcatgactctttgcatgcccaagacttctgcacctctgagggtctactccgtaaacctccagcagccccagtaacatgcagtcgacagtaatcagggccct

SEQ ID NO: 97492 - DNA, 422 bp, Homo sapiens
  misc_feature (1)...(422): n = a,t,c or g
cccacgcgtccgcccacgcgtncgcggacgcgtgggatgcagtttctgatcaatgtgttaatagaggatcctaaaacatagaaaaagcaggtcacattcaaaggaacagcgatgagaatggcatcatgtttcttattagccatgctgaaggataatgtaggaatgttttccaatgatttatgatatataattttataaattatttaaattgtgaattcagtagagtaagcatattttcagggccaagtatagtggctcatgcctgtaatcccaagcctttggcaagctgaggctaatggatcacttgagcctcaggagttcaagagcagcttgggcaacatggtgaaaccctatctctacaaaaagaaaaaaaaaggtttgcgcttggagtcccagctgcttggaagctgcacatggaggat

SEQ ID NO: 97493 - DNA, 414 bp, Homo sapiens
gcaggagaatcacttgaacccgggaggtatcgaaggttgcagtgagctgagacctcaccactgcactccagcttgggcaacagagcgagaccctgtctcaaaaaaaaacaaaaaaacaaaaacaaaaacataaaatcctaggatgagggctatggtagttaccagccagggactgtggacgaaaaccaatatatattataacaccacactggtactatttgagtcactagaaatgtaacagtggagaaggaaaataaggtctctgtcctcagcaaattgcattctggcagtgagggagacagaccaatgggtaaataagtaaataaaaaatatttattataaataggacatggaggctgggtgcagtggctcatgcctataatcccagcactttgggaggccaaggtgggtgga

SEQ ID NO: 97494 - DNA, 420 bp, Homo sapiens
  misc_feature (1)...(420): n = a,t,c or g
cttttttctgtctacagaattactttcatgtccattatttagaataggggtcatcagatcttttctatagagggccagatatttttacaggccatgtctctgtcacaacttctctgctctgcccttgtggtacaaaagcagccatacacgatgtataaaggaatggagatggctgtgtgcctttgagacttttttttacaaaaacagatagtggcctggaattggccgctgagctatagtctgtccactcctgacttagaacaactcagtgaagtggaagttacctgtcctattttatagaccaggagaattgcttgaacccaggaggcagaggttgcagtgagccgagatcgtaccattgcactctagcctgggtgacaagagcgagactctgtctcanacaaacaaaaaaagagcagn

SEQ ID NO: 97495 - DNA, 393 bp, Homo sapiens
tcgcccacgcgtccgcttttaataaaattgggtctcgacttctgggtattctttaaagtttgtgtttttttttggaaaaaaataatcctgaatttcccccaacccattggaggggaactcctttttggaatttggacccccagccccagggggggggccccaaagcctttccctttggaccccccggggttaaattaagtggacagcgggccccgggcccacggggtcggcccccaaaccggggagggggcctcccaaaaaatgcccatccccctttctgggggtttttttgcgccccacttgggaaaaaaacccggcccctccccaaatttttttaagcttgggggttttggaaaaaaaaaaccaaacccctttaaggggcgggccccgggg

SEQ ID NO: 97496 - DNA, 405 bp, Homo sapiens
  misc_feature (1)...(405): n = a,t,c or g
atttaatgctgaaaaaatattctgtagtttaaaggtacgacaatttattttactattcacttactgaaggacgtcttggctgcttccaagttttgacaaccatgaataaagctgctataaacatcaaaaaaaaaaaaaaagggggggcccttttaaaagaaccaaattttactcccgggggagggaaagttttttttttttttatggggccccaaaaataaattcccgggccggggtttaaaaacggcgggaggggaaaaacccggggggtccccaatttaaatcccttggaaaaaaacccctttttcccaaggggggaaaaaaaaaaaaagcgggtntgntggttttttannggcctgggtgtaaacgggatatttgttcaaacaagagccggacaaaacttac

SEQ ID NO: 97497 - DNA, 433 bp, Homo sapiens
  misc_feature (1)...(433): n = a,t,c or g
ccatgatgcgcaaggccatccgagggcacctgtaaaacaacccagctctggagaaactgctgcctcatatccgggggaatgtgggctttgtgttcaccaaggaggacatggcaccattccagaaaccagcattgttacaacaccatagccagtatatttagtttggcttttcctaacatagaaatcttcaaagctggggaagtggaaataaagttttaaaaatgagagagcagttttccaactatgtcaacccaaaaaaaaaaaaaaaaaaaaaaaaaaatataaaaaaaaaaaaatttaaaaatggggaagaggaaaaaaaagaaattaaaaatgagagagcagnnttncnggggggggggggggggggaaaaaaaaaaatttttttagcggggggggggggaggatttttttttttgttgggtggcacccc

SEQ ID NO: 97498 - DNA, 423 bp, Homo sapiens
  misc_feature (1)...(423): n = a,t,c or g
cccacgcgtccgcccacgcgtacgagatggggtttcaccatgttggtcaggctgctcttgaactcctgtcctcgtgatctgcctgccttggcctcccaaagtgctgggattacaggcatgagccaccgcaccagcctgagaatgcttttaattgagacagcagacacaggagcaagagcaagtttgggacggtaagaacatgagtttattttggctatatggagcgtaaggtgcttcaatgaactgtctttaaccaggcggttaaaaatatgggtgttttgcagagaagcaagataacggcttcaggtatagattttaaagcattcagcaaacacgtggtgatccaagtcatgcaaatgaatggaatggatcattggctcattgatccattggatcacacctgtaatccaatggctggnatgg

SEQ ID NO: 97499 - DNA, 425 bp, Homo sapiens
  misc_feature (1)...(425): n = a,t,c or g
cccacgcgtccgaaccagccccggccttgctttgtctggcctcacgggtctcaaattttctaagaaccaaaaaaaaaagggaaaaaaaccccaaaccaccaaaacccaaaaaaaaaaaaaatccccaaaaaaaaaaaaaacccccaaaaaaaaaaaggggggggcccctttaaaaaaaaaaaattttaacgcccgggggggggaaaattttttttttttttaggggcccaaaaaaaaaaatcccggggcccgttttaaaaaagggggggggggaaaaacccgggggacccccaaaaaaaaggcggtgggaaaaacccccttttttcgggggggggaaaaaaaaaaagaaagccccnnnnaattttataaaaaaataaaaaaaaaaatntttgggggaaaaaaaatttttcccaacccaccccccc

SEQ ID NO: 97500 - DNA, 405 bp, Homo sapiens
cagggttttgccatgttggccaggctgatcttgaactcctggccacagatgatctgcctgcctcggccccccaaagtgctgggatttcaggcctgagccactgtgcctggcctgtttagccacatgtgatgagtagtcttaaatctttgctggctactaggccctccttgcatagagtgaaactccaaaaaaatggcctaagaaaaactagggagttgtatatgaaaaattcctaaggtttacatgtggcatgagacatttgaactctgactaccaactgtagagtccttggggacaattatgaaggcccccataaagattacatcttggtcagacgtggtggctcacacctgttatcccagcacattgggagaccaaggcgggtagatcacttgaggccgggag

SEQ ID NO: 97501 - DNA, 417 bp, Homo sapiens
  misc_feature (1)...(417): n = a,t,c or g
actagttctagatcgcgccactgcactccagtctgggtgacagagcaagactgtctcaaaaaaaaaaaaaaaaaaaaaggggggggggggttgctccaacccgggggggggggcccccttttttttggcaaagaaggggggcccccccccccttaaaggggggccccccacctattttttggggttaaaaaaaaaaatttctcccaaatttggttttgggggcccccctgggggtaccccaaacctattttgggggggtttttttttaaacccccgggctttgatttgccttttttggccacttaaaaattttggccccctccaaaaaaggatctttcccccaaaatgggccctaaaaaagagggcctttaaaaaaaacactagggcccccccctaaaaaaaggaaacccgctcccn

SEQ ID NO: 97502 - DNA, 422 bp, Homo sapiens
  misc_feature (1)...(422): n = a,t,c or g
ctggcacgtcatgctgaagaaactgaaggatgccctggttattgcaaaagacttcattctctcctccggagaggaggcagtagagcctgacacgcagcgcccgtttgtggcaggcggactttaaaagtgcatccgcacgccccctcctggcctccaagcagctgggctcacccaccgccgacctggcctgagccgtctggaaccacctgggcccctgagggcactgtggtcacactgggccctcctcaggaactctccctgcgcagaggcgtgtcttatcactgcccccctccctagccccttatttgggggcggaagtggcctccaccccttccctgtttgtaaatattctgtggagaaaagaggacttcagggagtaaaaaagccactgatgaaaaaaaaaaaaaaaaaaaaggagnnna

SEQ ID NO: 97503 - DNA, 404 bp, Homo sapiens
  misc_feature (1)...(404): n = a,t,c or g
cccacgcgtccgcccacgcgtccgggacgggctctgaaccaccccagctctcaggggccccgccctgggtaacacacgtctgcggtgttacccacgactgcctgggacctggccaagggctccacacaccaagaccaaggtgaggggaggtggtgggtggggaccagccctgcctctcttggagaccccgagggtatggcgccaggccagcctggagtcgggtgtggggcggttagtgtgagcattacgtcttcttttccctaaagtggctgaaaatgtccccggggccagtccctcaaggcaccctgctggactcaatgcagcaaaaagagttggggtggttggccggntgcggtggctcacgtttgtcatcccagcactttgggaggctgaggcgggcggac

SEQ ID NO: 97504 - DNA, 422 bp, Homo sapiens
cgcttgggcctgtgaggtggaggctgcagtgagctgagatagcgccattgcacttcagcctgggtgacaagagcaagactgtctcaaaaaaaagaaaaaaaaaagaaagggccacggaagggggaggtggcaacgggcagtgtctggacaagaggagagctgaaatcatgggcactataagtccagccaggcttcgggatttttttcttttctttttcttttctttttttttttggaaactttgtctaaaaggggaaaaaaaaaaagggaggggggggggttttaaagggtggcccggcttaagggccaaccccccccccccccaccttttggggggcccagggggggggatcccctgggggcagggatttaaaacccccccggcccacttgggaaaacccctttttttttaaaaaaaaaag

SEQ ID NO: 97505 - DNA, 481 bp, Homo sapiens
  misc_feature (1)...(481): n = a,t,c or g
agtgctctganccaggagtcanngangatgctncganccgtcanncccgggtcgacccacgcgttcggagagtaatttatagggctcaggcgtttgtgtatgatatgtttgcggtttcgatgatgtggtctttggagtataaacctgtgaggaaaggtattcctgtaatcctagagctttgagaggctgaggtgagaggatcgcttgaggccaggagttcgggaccggcctaagcagcatggtgaggccccatctcttccaaaaaaaaaaaaaaaaaaaaaggggggccccctttaaaaaaaccaattttacccccccggggggggaaaggttattttttttttttgggggcccaaaattattttccctggccggctttttaacaccggggggttggaaaaacccggggggtccccaattttattcttttgaaaaaaatcccctttttccccaggggggaaaaaaaagaaaaagcccggnn

SEQ ID NO: 97506 - DNA, 390 bp, Homo sapiens
agttcccattattgagtacttgtcctgttctttaggggtgagcttttccttgctttgtgatagggagagttatttctaagggaaaggaatgtaccctgtatttctttctttttctttttttttttttttttttcgaaaaaaaatttttttttttttcccagggtggaaaaaaagggggggaatttggttcaatggaaccttttccttctgggttaaaagaaacccccctccctcaccttcttgaggaggggaaattttgggccccccccccccccccggtttatttttttgttttttaataaaaaagggattttacccttgtggcccgggtggtctccaaccggctcccctcaagggaaaaggggttggattaccggccttaaccccccc

SEQ ID NO: 97507 - DNA, 402 bp, Homo sapiens
  misc_feature (1)...(402): n = a,t,c or g
cccacgcgtncggagtgaacatggtaatgaccttgccatagcagctcttggtgctctgaatggctgcgcaccaggcagtgcccaagacctccgtgctcccagctgggattctgtgcacatccagagtttgtgttttgggggttgttgttgttgttgttttctttttgagatggagtcctccagcctgtgcaacatgtgcaacagaacaagaccctatctacngaaaaaaaaaaaaaaataaaaaaaaaaaaaagaaaaaaaaaaaaaagaataaaattaaaaaangggggggggcctcttttaaaaagaaaaactttccccggggggtgggggggaatttttttttttttttttggccccaaaaatttttgggggggggggggtttaaaaaggggggggggg

SEQ ID NO: 97508 - DNA, 384 bp, Homo sapiens
tctgggcaacatggctaatcctcatctttttaaaaaaaaaaaggttagctgggttggggggcgtttacctggggacccagctacttggaaaactgaggggggaggaaggcttaagcccaggaaacggaggttgtagtgagccaaaattgcgtcactgggctgggcaaaaaacaaaccaaccaaaaaaaaaaaaaaaggggggggccgttttaaagaacccagttttactcccgggggttggcaactttttattttttttttggggccccaaaaattaattccacggcccggcttttaaaagcgcggggttgggaaaacccttgggtaacccaattttaatccctttgaaaaaaatccccttttccccaatgtgggaaaaagggg

SEQ ID NO: 97509 - DNA, 405 bp, Homo sapiens
atattttctttctgtccccacacttaaaagaccactcttctaaaccaggccacaatcattcaagcaaaggcaggcacttggggccatcctcctccactttcccctagggaaaacaaacaaaaccaaaaaaaaaaaaaaaaaaaaaaaaaaaaaaaaaaaaaaaaaaaaaaaaaaaaaaaaaaaaaaaaaaaaaaaaaaaaaaaaaaaaaaaaaaaaaaaaaaaatgggggggggggcccttaaaaaaaaaaaaatttttcggggggggggggggaaaaatttttttttttttggggggcaaaaaaaaattttggggggggggggttttaaaaagggggggggaaaaaaacccgcgggcccaacaaaaatatgggggggggaaaaacccccctcgcgaggggagag

SEQ ID NO: 97510 - DNA, 414 bp, Homo sapiens
ctcctgaacctgaacctgggaagcagaggttacagtgagctgagatcgcaccactgcactccagcctgggagacagagggagacgccgtctcaaaaaaaaaaaaaaaaaaaaaggggggggggggggggggttcccctaccttttttggaaaggaggccggggcccaaattttttaaaaccctttttttgcccccaacctttaaaaccttgggggggaatcttggtttttttttgggggaaaaaaaaaaggggggttttttttaaaattaaacctttttttcgggaaaagggggggaaaaccgcccattttttttttcaagaaaaagggggggggggggaaaactttttttggggaaaaaaaaatgggggggggagggggacattaattttggtccggaaacttttgggaagtt

SEQ ID NO: 97511 - DNA, 397 bp, Homo sapiens
ctgagatcatgccactgcactccatcctgggcaacagagtgagactctgtctcaaaaaaaaaaaaaaaaaaaacccttaaaaacctttccccgcaaaaattaaaccgggcgggaaaaatttttttaagggttttccccctggaaaaaaagggtcaaacccaacttttgtaaaacagggggggggggggtttttaagggccggggggaaggaaaaaaaaaaaaaaggccctttggggttgaaaattggctttccccaaaggaaaaaaaaacccccccttttttaaaaaaaaaaaaaatttgggggcctggaaaaaggggcccaaaaaaattaggttccccccttcccaaaaaaaaagggaaaaaggggggccaccccccttggagaataaaatttttt

SEQ ID NO: 97512 - DNA, 380 bp, Homo sapiens
tttaaacttcttttggtgatgggtgctacctgctacaggggttgtctgctttattatgattttctaaagttcttgacttaccaaacacacacacacacacacacacacacacacacacacacacacaaaattggtttaaagctgatgtaagaactattctcctctgataggtcaaaaacaaagacaattaaaaaacactcacattcatatcttttttttctttcttttttttgtgcgcaggggattctccaaacagagagaagtcacctgttaccacacctagaagtctctctttttaaggaataagattatgagtgagggtgattttaatttataacatttgagtgcctcaaaaaatattcagggcggggggcggcggg

SEQ ID NO: 97513 - DNA, 391 bp, Homo sapiens
agacgggatttcaccatattggccaggctggtctcaaactcctgaccttgtgatccgcctgcctcggcctcccaaagtggtgggattacaggcatgagccaccgcacccagcccccttttgtgattagtgggtgttttcagttttgaggagggaagatctaccttccaaattgcagggggggcccagagaacagcctggtatgcaggaccagggtgaaggtgaagctgttcatatcaccccaggtctttgaaggggaagaaaaagttcaaggcatttcatgttaaaacttactgtttagaaaacaatactgttgatattaaaaatataataatagcatcattattaccaagaagaccttaataaagaaaattttacaaaagaaaatcatta

SEQ ID NO: 97514 - DNA, 386 bp, Homo sapiens
  misc_feature (1)...(386): n = a,t,c or g
gcgctccattatttaacacctagctctcccataagaaaactgaggattagttgtttaaaataaagaaattacttagtaattttatctaaaatataaaccatgttaaaatttcccatttcttttgaaattgtttttaacatctgcctttttttcttttatttttttctgagatgaggttttgctcctgtcacccaggctggagtgcaatgacacgatctcatctcgttgcaacctccgcctcctgaggcaggataatcagttgcacccgggagggggaggtttcagggagccaagatcacgctactgcacttcagcctgggtgacagagcaagactctgtctcanaaaaaaaaaaatctgtgaaacacatttagtgcggagggaccc

SEQ ID NO: 97515 - DNA, 395 bp, Homo sapiens
  misc_feature (1)...(395): n = a,t,c or g
gttttaccatgtttaccaggctggtcttgaattcctgaccttaggtgctccgcctgcccctggcctccctaagtgctgggattacaggcgtgagcaactgcgcccagctgtcaaaactcttaattagcccggtttggtagtgcatgcctgaagttccagctactcagttgggaggatcgcttatgcctgggaggtacaggctgcggtgagccatgatcatgacaccacacaccagcctggtgacagacttgttgacagaccctgtctcaaacaaaataaaaacaacaggcagtaataaaaccttctagccaccaagcctagagagttttattaatgagaatagtgagttgtgagttttgctaaatatgcccgttctttgaattccagttttatan

SEQ ID NO: 97516 - DNA, 387 bp, Homo sapiens
caataattgcttatgcctataaaactaactttccttgggaggacatgtaaagcagcacaattcataatgctttgggggttattttcctcctctccgctaaaacacacaatttctaacctagtatggcccactgtttacacacacatatataaagatgtccccacaactaaaaactttaagagatcaacttcatcacaaactattatataattcttttttttaacagacagggccttgctctgtcccccaggctatagagcgggggagcaatcataactcatggtaccctcaaacacctggactcaagcgaacctcccacttcagactcttgagtagctggcacctcaggcacataccaccatgcctagctaagtttagtgatgtagg

SEQ ID NO: 97517 - DNA, 400 bp, Homo sapiens
atggtctcgatctcctgacctcgtgatttacccttctccgcctcccaaagtgctgggattacaggcgtgagccaccgcgcccggccgtacttaagtcttaacatgtatcaataacaattatagggatagactctattattatgcccatttccatctgctgcaagtctcataattagcaagtgttagaactgggattcgtctggctccatacttcatgctgttatatatgaaactggtttgcttctcttttaaaacttacgttttaatatttcttgatgccagtaaagattattaaatgcaaatagaagggaaaggctttgtttactgtctgctttagtataatttaaatattcagtttttgtatgtgaaatagaggagaaaagtatatgttaagagagtt

SEQ ID NO: 97518 - DNA, 397 bp, Homo sapiens
tcacttgaacctggggggtggcagttgcaatgagctgagattgcactgctgcaccccagcctgggcgacagagtgagaccctgcctcaaaaaaaaagaaaagttttaaaataacatcagccttcacctgtcagattgtcatgctttaaaaattcaaatcactcataccctttaaccaacaatacaatttaaagaatttttcttccaggaatacttgttgaatgtgtggaaaatcctgttagaggatattcagtgtttgttcataagcagcattgtttatgatggcaaaaattgaaaacaaccatatgctaatcaggaatggaatatcatagtgcatttataaagaatgagtattctatgtatactagagatgccagaacatagagcaagtagggaga

SEQ ID NO: 97519 - DNA, 387 bp, Homo sapiens
gatggtcttgatctcctgaccttgtgatccgcccgcctcggcttcccaaagtgctgggattacaggcgtgagccacggtgcctggcccaagtcatggtcttaaaagattattataacatttaatatttggaggtcacaagttttttctttgttttaatcaaatgggaaatattttggaaaccatattcagctctgtgccccatatcgctctctctttttaaaggtaatctcatacctttgcgatatactctagttccttcctggcccctaaatggtctttgtaagatacaactcaggaggattattttgcagtccaaagtactcaaaacaaaacaggcttcaatgactcattgttaccctccttttaaactctggtatttcagctat

SEQ ID NO: 97520 - DNA, 393 bp, Homo sapiens
ggaggcagaggttgcagtgagccaagctcacacaactgcactccagcctgagtgacaaagagagactccatctcaaaaaacataaataataaaatagtaaaataaaaatgttaactgacagagacagagcctagagaggtgacaatgcaataacaatgccagaatgttctgagagaggacaggcaaacccagagctggccctgactctgcagccctgtactcctacgatctacctctgccctctcagtcccatctcctcaacatctgtgtgaggttaggcaagttatttaacccctcttagtcttagcctcctcttctgtgacatgggcatagtaacacccctccaatggggctggaaaggtcagtgaatccacatgggtgagacacctttga

SEQ ID NO: 97521 - DNA, 391 bp, Homo sapiens
  misc_feature (1)...(391): n = a,t,c or g
gaggctgtagtgagccgggatcgcaccattgcactccagcctgggagacagagcgagactccatcncaaaaaaaaaaaaaaaaaaaaaaagggggggggggggggggggcacccccctgaaacccaaaattttggggaggccagggggggggaacccccggggggggaaaaaaaaaaatttcccggccaaaaaggaaaaacccccttttttaaaaaaaaaggaaaaaaaaattggcccgggggggggggccaatcctttaaccccaaattgggggagggggggggggaaaaaatcttttaccccgggaagaagggggttgaatgaaccggaaaccccccccttgccctcaaggggggcaaaaaaaagaaaatctcttttaaaaaaaaaaaa

SEQ ID NO: 97522 - DNA, 401 bp, Homo sapiens
gcagctagagaaaagggccatattacctataaagggaagcccatcaaagtaacagcagacttctcagcagaaaccttacaattcagaaaagattaggaaacctttttttttttttttttttttttaggggggggggtttttttttttgtgccccgggggggggggaaggggccctttttgggttcccggaacctaaattttggggggtaaaggaatttttttggcttacccccccgggggggggggattaagggggggggcccccctgggggaaaaattttggttttttaagaaaaaaggggttttttttttgtgggaggggggggtttttaaccccccacctttgggggaccggcgtggtttttttcccaaaggggtgggtttaagggggggggccccct

SEQ ID NO: 97523 - DNA, 402 bp, Homo sapiens
aattgcttgagcccgggaggccgaggttgcagtgagctgagatcgctccattgcactccagccagggtgacagagtaagactctatctcaaaaaaataaataattaattaaataaataaatgtcaaaagttagatgtatgtagaacgctacgagaatttctggaaggaaagaactcctttagctagttcaatcagtgattacttcattttaaaaaaaggcattaggtctgggatttgaattggggatgagctataaacccataatccttaaaacaaaatctaacagacttccccaaaaccctaggttggagaaagctcaggaagtgcataggttggagaaagctcaaatagttcatcatgttgagcaactgattatctcatcttgaactctctagaaaacag

SEQ ID NO: 97524 - DNA, 393 bp, Homo sapiens
aaaaatcctcatcaaagtggagatagaaggaacataccgcaaaataacaaatgccatatgtgagaaacccacagctaacattgtaccgaataggaaaaaattaaaagcctttcctctaaggaatggaacaaggtaaggatgcccagtttcaccagttttatttaacataacactggaggtcctggccagagtaatttattcagagaaataaataaagggcaccaaaattcaaattagtatagccactatggagaacagtaagaagtttcctcaaaaaactgaaaataaaactactatatgttccagcaattcaactactgggtgtatatccaaaagaaaggaaatgcatatatctaaaagacatctgcactctcctgtttattgcaacactat

SEQ ID NO: 97525 - DNA, 398 bp, Homo sapiens
  misc_feature (1)...(398): n = a,t,c or g
ctgctcctccgcggcagcggcagcccggccggccccaggctcctcagggcccccgccggctgttctggggcttgtcagtggccggcgtcctttaagcctcaggcctctgcatgccgcctgtagggcctgtcggggtaggtaggccgagaggaggacgaagggaggctcggacgagaaggagggggcgaaagggctacctggctcctgtggtactcccagggcctgggccaggcggggaatgcgcacgggaactgctttttggacccctagtctgtgggggggggggaaantcaacacacaccaacccctacgcttttatcacaaacactaaacgcaccaccacggcctgtatggtgtacatatacaccccactctgtactgccacgaaacataacaaa

SEQ ID NO: 97526 - DNA, 382 bp, Homo sapiens
atccacctgcctctggcccctcaaagtgctgggattccaagtgtgagccactgcgcccggccctgactccctttttaaagaacctgttgccatgttgagaacagactgttggggtgaggctggaagcaggctacccagtagctgtggtttggatctcgggcggcatccggggagaggtgagaagcagtgggctgctgggtccagagccaataggatgtgccttcaaagtggatgtagggtgtgagggaaaggcaggggtccagggtgttccaaggtgtgggcctgggcagctggaaggagggagaagactgggcggaggatggggtttgaggcaaaagagcaggagctcattttggaccgaccatgtttgagctgtccactg

SEQ ID NO: 97527 - DNA, 397 bp, Homo sapiens
gctgctcgggaggccgaggcaggaaaatggcttgggcccgggaggtggaggttgcggtgagcggaaatcgcgccactgcactccagcctgggtgacagggtgagactccatctcaaaaaaaaaaaaagggagagagagacaaagggggctttttttggagccctgggccacccttccactgaaaacacaatggagtggggctaaccaaatctgcttttttacataaacaatggggcaaaggaagcaatcaaatgtgcttttgtctcaggggaccctaaaagggaaaacggatttttttgtcttttgcccacaaggaattttcctgggaccaaatggggagggacaaaaaaaggcttttttttttgcccctattttattaaggagaagagggggaggg

SEQ ID NO: 97528 - DNA, 389 bp, Homo sapiens
  misc_feature (1)...(389): n = a,t,c or g
ctggcccttcctccctccctttcacaatgtcagcttctccaattctaccacccaaacccccagacttttgtatgggagttttccttccttcattcatgaaataaaatggcacctatctctacttctataaagttcctccaaactgggagaagataatttcctcaaaccttaaaatgcttggcttagggttgagctcggggaacaaaacccacaagcctgacatgctgtcaaaagggnaaaaacttttatttttatttttatttatttattttttttgagacggggtctcgctctgttgcccaggctggagtgcagtggtgcaaactctactcactgaaccctctgccatccctggggcgggtggtactcctgtctcccccatttgaggg

SEQ ID NO: 97529 - DNA, 381 bp, Homo sapiens
agagccttcataccagttcttatttcacagccttggctgctaagacttggaaagaaggccaaagagaaaagaaaaccaaggtaggacttagttaaggatgtctataatgagattacacatgacatgcaatcttatctggctctagtgtttaaggattagaagatatcaagtctagcaatggtgaactttcatcatcttcatcagctttcatcttctgggttcattctgattgatcagtagcagctacagagaatatttggccaaagatttaaggttcagcagcaaacagtcataatggctctgctctaaagaattccgagggctgggtgcagtggctcacgtctgtaatcccagcactttgggaggccaaggcaggtggat

SEQ ID NO: 97530 - DNA, 386 bp, Homo sapiens
tgttggccagtctggtcttgaactcctgacctcaagcaatccacttgcctcggcctcccaaagtgctgggattacaggcaagcccagcctcatagaaacttgttataggttttagtaactggtagaattagctaccttcttgctttttttttggaggggttttcctattaattctggttggttaattcttcccattaaactttttaatcaattggtctacctccagaaggtaactttaagcttttattgttatttaaactttataagtttatgtaggaaaaactagaatctttatgatactgaattttcccatttaagaacaaggaatgcatttttttatttaagtttatttttctgttttcaggggttaaaccactcattagttg

SEQ ID NO: 97531 - DNA, 412 bp, Homo sapiens
  misc_feature (1)...(412): n = a,t,c or g
cgatctcctgacctcatgatccgcctgcctcggcctcccaaagtgctgggattacaggcgtaagccaccgcgtccggccctctttgctttttcttagacctcctagcagatgatttgacttgagttttattctaaaataacaataaagtttcaattttatactcttattttagttttccactatcaaagtttaccgcttagaggtaatatttaatgagactttaatcagacttctgcggttctgatttacatgtttgtgttttatctttgtaaggcggaaagatgctagatgggcacctaactttgcaaaccattttttaaataaatgttgcaatattaaaagcttcttggttaaaacatgaatgaagtacctttcactgtttcagctaccatggtgagcatagaattgaan

SEQ ID NO: 97532 - DNA, 404 bp, Homo sapiens
  misc_feature (1)...(404): n = a,t,c or g
ctggtatctggatgggagcatccacaggaggtggccttcaagtcacagcaggtggctgacatgcattagtttgctgaagtagcaccaaaaaacccagtgcccttgtctgagtcctgttttcatactagtgaaatttcagctgctaacaagaatcacgtctgatgcagacacaaagcccagtggctgccccaactccctggccacctcctactgtccgagaaaacactgaaatatagcagtcccaaaggactcagaagtcagcattgaaagcttctgtttttgttttgttttggttagacagagtctcgctctgtcacccaggctggagtgcagtggcgcaatcttggctcactgcaacctcttgctgctggatccaagcgattctcctgcctcagcctcctgan

SEQ ID NO: 97533 - DNA, 411 bp, Homo sapiens
atggtctcgacctcctgacctcataatccgcccacctgggactcccaaagtgctgggattacaggcgtgagccaccgcgcctggcctatttcacttttataaaaaagaaaaaaaaagatggttgtgaattgctaaatttatttcccaactcatgtatggacactgcacacgttcacccagctcatctgacaggaggatagactggcggcaaatcagcagtaggtctcttgactaccagtttagtactcttgcgagggcaccattgccacggtaagcatatttatcagattcttcaggaggtgcatttgtgtgtcttgggtattctgctgacataagagttacctaattctgaagccaatcagcccctcaccactttcctctttgctgtcagatggtcttctgctctacttg

SEQ ID NO: 97534 - DNA, 424 bp, Homo sapiens
  misc_feature (1)...(424): n = a,t,c or g
gctggagtgcagtgagccaagattgtaccactgcactccagcctgggcgacagagtgagactacacctcanaaaaaaaaaaaaaaagggaaaaaaggccccgggggggaggccggtttaacttgggttttttcaaaaggggtgccttttttcagggggggggggaaattttgaaaaaaaaaaactttttttaaaacctttttttttaaccgggaagggaaaccctttttttttggccggtttttttaaataaaactggggggggaaaaaaatgtggaaaattaaaaaaaaaaaaaaagtttggggttaaaaaaaaaccacctccctttttgaggggggggtttttcccccaaaatttttttttggttttgggtttgggtttgaaaaaaaaaaattttttttttccccccgggggggaaaaaacc

SEQ ID NO: 97535 - DNA, 413 bp, Homo sapiens
cccacgcgtccgcttaaaatatagaaatgagctgttttaacatcagcatacctgtaaactttgtgatggttttatatttaaattataaatgaggggagagaaacaatcatactctgtgtagggtcttttgaagctttgataccttgcaaacaatgtaacttcagtcaagtaatctaaaaaaccgcttttaaaaactggtgacttttaaacaacttgtattgaacagtgtaataaaactagaaggctgggcgcggtagcttacgcctgtaatcccagcactttgagaggctgaggcaggtggatcacaaggtcaggagttcgagaccggcctgatcaacatggtgaaactactaaaaatacaaacatctctactacaaaaaagtctactaaaaatacaaaaatcagccaggcat

SEQ ID NO: 97536 - DNA, 426 bp, Homo sapiens
  misc_feature (1)...(426): n = a,t,c or g
cggacgcgtgggttgcagaacagcaaagattgctgtctgttccttcctctggaagattcatcccagaggagcacctgccagatgccagctggagctctcctgtatgaggtgtctgttggctcctactgggaggtgtctcccaatcaggagacacggagttcagtgatccacttgaggagttagtttgacctttagcagagctcgaacgctctgagatctgctgctcgaacgtgctaggagatctgctgctctcttcagagccgtcaggccaggacgtttaagtctgctgacgctgtgcccacatctgccccttcccccaggtgctctgtcccagggagatggnggttttatctctaagcccctgactggngctgctgcctttttttcagaggtgccctacccagagaggaggaatctagagaggcg

SEQ ID NO: 97537 - DNA, 417 bp, Homo sapiens
agattttgatagggattgcattgaataatatatcaatcactttaggtagtattgacatcttaatattaggaagtcttcaatggatgtgcttccatttgtttgtgtcatctttcacaatttctattgttgttgttattgttgttttgagatggagtctcgctctgtcaccattgcactccatccagcctgggcgacaagagtgaaattccatctcaaacaaacaaacaaacaaacaaacagatataaaaaaagaaaaaaaaagaaaacagccttccctgaaagttgtttgtgatgcttatggtctaggatgtgaaatttacaggatgatgaaacatgcacatattaatagtgttccatattatttttgaatgtggtttgacttttctaacgatcagcagtgacaaacttgtgtactag

SEQ ID NO: 97538 - DNA, 374 bp, Homo sapiens
acatgagccaccacggccggcctttccctcccttccttgacctcatctctacttccggtgtgtttccttttaggccattctggaggaaaacaaggagaagctgccacttgacatcaaccccgtggtgcacccccacggccacatcttcaagtgcgtagcccccccccactgcttgggctgggacttgtccgcagtccccgcctcccatgctttggggttcccacagccccagaacagtgcttggcacgtggcacgcagcaagtcagccgcatcctgtttgggcacagcagtgacaagtgcagggagtggagttcttgggaccccaaataaaatgccccaaaaagtgagagagcgagcaaggcttttctggagaa

SEQ ID NO: 97539 - DNA, 437 bp, Homo sapiens
gaaaataaaataaagaagaaaattaaaatcatctgtctttccacaatccagagataaccatttctaatggctttttttttttttttttttgggaaagggaacttgggtcggtcccccagcttgagccggggggggggaaatttggataaagggaacctttgcctttggggttggggggaatttcccgccttaaccccccggggaggggggaaaaaaggggggggcccccccccccggataatttttggggtttttagaaaaaaggggttttacccaggggggcgggcggggcttaaacctctggccttaagggaatcaacttccctggccctccaaagggggggaatggaaggctggcccccccacgcgcggccttaattgtttttttttaaacagtcccttttctttgggtggcacccaaaccttttggttggttg

SEQ ID NO: 97540 - DNA, 420 bp, Homo sapiens
cacgccactgcactccagcctgggcttcattagtgaaactccatctcaaaaaaaaaaaaaaaaaaaaatttttccttttttggtcttccccccccctgggggaaaaaaaaaattttgggggggccccgggggggtttccaaaaaaaccgggggggggggggacccttgggggttttttttttgggacccctgggccgggggcccccttttttttaacttttcctggccgcccattgttaaaagggcccctttgttttttggggggaaaaaacggccccccttgcccggggcccgggtttttgccaaaatttttttcttttaaaaattttccaaaaaaaaggccgggggggggggttccccccttttaccccacccttttgggggggtggggggggccaatccccagggccggaaaacaac

SEQ ID NO: 97541 - DNA, 404 bp, Homo sapiens
agaaaggcttgaacctggaaggcggaggcaggagaaaggcttgaacctggaaggcggaggttgcagttagccaagatcatgccattgcagtccagcctgggcaacagagtgagactctgtctcctaaaaaaaaaaaaaaaaaaaaaattttcccccccccccctttgggtttaacccctttacccgggggagggtccccctcccccaaaaaaaaagggcctaaaccttttagaaattttaaaaatttcgggggccgtttttcaaaaccttaaaaaaccggccccaaaaccgggggggccattagggtttttttttattaaaaaccccccccgtggagaaaggcccataggcaaacctttaatccttaaaaccggcccaaggggaaaataaaaaccccccttttc

SEQ ID NO: 97542 - DNA, 388 bp, Homo sapiens
gagaagggcgtgagcccgggaggcagaacttgcagtgagcagagatggtgccattgcactccagtttgggcgacagagcgagactccgtctcaaaaaaaaaaggcatgtctaataatttcagtttaatacttaggtcctggaataataaaggacagggggggacttatttccaacaaaagtttatttacccttgttttcttaaaataaaaggacattcttacataaactgcaaaatattcaaaaaatgatgaaatttgagtctgcatgtgcatgtcacagacgtaaatgtaaggattattttgcaaaaattggattgtcaaatacattgggttgattttaattttgaattgaatatactacaatgccaaggtttagggggatgtaagg

SEQ ID NO: 97543 - DNA, 396 bp, Homo sapiens
aaattgaggccaaaggatcaagacacttggccaacgcagcagagtgccatagtggtggaatttgtgcctccttctgtatattttgtgaaaagtatcagtgaaattcttttttttttttttttgaaaaaaaatttttttttggggccccagttaaaggggagggggcaaattttggttaaagggaacccttgccccgggggtaaaaagaaatttcccgccccacccccccaaagagggggaaaaaagggggggcccccccccccccaatttatttttgtttttttaaaaaaaaccggggtttaaaaaattgggccggggggggtttaaacccccgcccttggaattgcccccccttttttccccaaggggggggaataaagggggggaccccccccc

SEQ ID NO: 97544 - DNA, 375 bp, Homo sapiens
accgggaggtggaggttgcggtgagccaaaaacgaggggctgcactccagcctgggctacagagcgagactccgtctcaaaaataaataaataaaaattaaaattaaaaaataattcttggttgtatgctaaaagccttgcaagtagccccactggaagataggaagagtggggctgttttacaaatgagcacatataagcagaacgaggccgccataattgaaatgaaggtccccgtcccggggatgtgttcatcgctacttcaccctgtcattcggatccaatgtgtgaccagccagctccaataacagatccatactctgggaattatttttaacactcggcaggatgctttcttcctgtagttataggctt

SEQ ID NO: 97545 - DNA, 392 bp, Homo sapiens
cggacgcgtggggtgccactgcactccagcctgggtaacagagggatactccatctccaaaaaaaaaaaaaaaaaaccccccctaaaaaccggttttttaaaaattttgggaaaagagggggcccccaaaaggggggaaaaaaggggcccacaaacccccccggggtaaaaaaaaaaaaaatttttgttttttaaaaaaagggatttggggggagaacaagggttagggaaaatccccggcccaaagggaaccttggggaaacccacccccccccgggggggtattaataccgggaaccaccccccccccacactttggtttttctaaaaccgaaaagggcccgcttaaaggccaagggggggccccgggaggaaaaagggggaactccttc

SEQ ID NO: 97546 - DNA, 390 bp, Homo sapiens
  misc_feature (1)...(390): n = a,t,c or g
cccacgcgtgcgcccacgcgtccggataaacacaagtaacctcttgcacttgtaatgttgaaaaattatttctgtatctctaaccatcttggaaaattgaggaccatcaaaatgaccaaataatctgtaattttgagatatatctgtagagtagatttgttgcagcagtgtgaaaaacacaaagaaataagagcagaaaaataagaaccagttgttttatattcatcaacttaaaataatgattatttaaatttgttaagattaacaagagggctaactagtatatatttttaaaattagaacttgttggccgggtgcggtggcgcatgcctgtaatcctggcactttgggaggctgaggtgggcgggtcacaaggtcaggagatcaagn

SEQ ID NO: 97547 - DNA, 384 bp, Homo sapiens
ttcgcataatatattttaccaatattagtgctgtattcatgtttttgttctggtctttgtaccctgtacatttaaaaaaaatattgtgtcttagattgtcagcacctagaagttaaaggctgtacatctatttttataaactggcatatgaaattaaaagtctaatacatgttttgattatattggacaaaagttattcagtctttaacataatttctccaagtttaactttgatcacttgaagccgggagtttgagaccagcctgagcaacatgggaagaccacagctctacaaaaaaaagaaaaaaaattagccaggcatggtgctatacctctgtagtctcaccttcctgggaggctgaggcaggaggattctttgggccc

SEQ ID NO: 97548 - DNA, 409 bp, Homo sapiens
gaaaattaagtggcaaactgtgtctctgggttgccataaacgaacagaatccagaaacagaaagcaaagactgacagttcattcgttctttaaacaaattacatagctgtacgtttatttactgatgcatgaagggttgcagtgaagagcaaaatgtttaccctaactactttcattttctttttttggggggggaaagtaaaggtttatttaaacatttttttttttttgggggggaaacacaaaatttatatgaggtttaaaggctttgggcagaaaaaaaaaaaaaaggggggggccctttaaaagaatcaaatttaagggccggggggggggagagaaaaattttttttttggggccccaaaaataaattccgggggcggggttttaaaacggggggggggggag

SEQ ID NO: 97549 - DNA, 401 bp, Homo sapiens
  misc_feature (1)...(401): n = a,t,c or g
cccacgcgttcggcctcacaaagtgctgggattataggcatgagccaatgtggccagctccagaccatatctttaaacagcattgcccctcaaacctaaaaaaaaaaaaaaaaaaaaaaaaaaaaaaaaaaaaagggggggccccttaaaaaaaaaaaaatttaaagccccgggggaggaaaaaaaaaatttttttaaaggggccccaaaaaaaaaattccggggccgggtttaaaaaacgggggaaaggaaaaaaccggggggaaacaaaaaaaaaacgtttggaaaaaaacccccttttccccggggggaaaaaaaaaaaaaaccccaaannnnnnnnnnnnnnnttggagtaaaacacgggctcctcccataaatttatcttctaaacaaccactccc

SEQ ID NO: 97550 - DNA, 406 bp, Homo sapiens
atgcctgtagtcccagctacttgggaggctgaggtgggaggatcacttgagctcgggaaattaaggttgcagtgagccgtgatcaccccactgcacaccagcctgggtgacagagtgagatcctgtgtcaagaaaaaggaaaaaatatccagtggtgaaccaaaccctaagaggcttcctttcacctgcccactagcacactagcacacccagagatgctcatgatgtgaaaggcagaaatgggacacattcattgatcagctaagagccccaatagatgacagatgctgtgctaaatcctagacaggttgggggcctccttaacctcgtaagcccacctcctggttttttttttttttgttttaacccggggcctaaaaacgggtggggtggcataaggggaacg

SEQ ID NO: 97551 - DNA, 409 bp, Homo sapiens
ttgaacctaaggggggcagaggttgcagtgagccaagatcagcctggatgaaacagcaaaacttcgtctcaagaaaaaaaaaggcgggttattagactgagcctacgctcgagggtaggggatgacacaaaagtgaacaccaggaggtggggagtctttgggtggcatcttaaaaatctgcctaccacattggttttgaaaaagatggagaaaattctggaaacctactttatgacccctgacctacacgatcctcatactaccagttactttaatggttgccagcttcaggccatcaaagttggaggaaccattactgatctcattgtgttctgaattgtcagcaagccaaatgccgctggtctcagcttaaacgagaacgttaatgccaaatttaatgatctgatct

SEQ ID NO: 97552 - DNA, 383 bp, Homo sapiens
  misc_feature (1)...(383): n = a,t,c or g
ctttatagctctctttacaaagcactttgtacttgattgattcattatataagaaccgtaaagcaactctgagagttagtcagagaaaagctaaagatgcagggagttttttgtttgtttgtttgtttgtttgttttttgagacggggtcttgctctgtcgcccaggctggagtgcagtagcgcgatctcggctcaatgcagggatttttgtgtatctgcatctgcagaggttgttggagccatcctgtctattcgtttctttctccagcctctcttancagctgggaagagagagtggagagaaagagggatcaggacagatgtggacacggcagaagaagaggagcctgctgtgacggacttccttgaaatgacaaacaaa

SEQ ID NO: 97553 - DNA, 430 bp, Homo sapiens
  misc_feature (1)...(430): n = a,t,c or g
aacctttcagcaggaccaaattgatcaagattaccagaaagtgggctcccttcgtgacagggcaggactgcatcacccaccaccagcaggctgtgcagggcaaggtcctcgcaggggctcaagttgggtatataggcagcttcagtataatatgccttagcaatccacttaaaaaaaaaaaaaaaaaaaaaaaaaaaaaaaaaaaaaaaaaaaannnggggggggggccctttaaaaaaaaaaattttttccgccggggggggggggagttttttttttttttaggggccccaaaaaaaaaattcggggggggggtataaaaaagggggggggggaaaaaacccggggaaaacaaaaaaaaaagggtgggaaaaaaatccctttttggggggggggaaaaaaaaaaaaaaacgnnnnnnnnnnnnngnga

SEQ ID NO: 97554 - DNA, 395 bp, Homo sapiens
cggacgcgtgggagctgagatcgcaccgctgccctccagcctggtgacagagcgagactccgtctcaaaaaaaaaaaaaaaggggaaaaaaaaaaattttccgcttttaccttttctttaataaacgaaaaaaattcttgaatggggggaaccttggggttattccttgaaaccccacctttttggggggcggggggggccaaatcatttgaacccgggatttggaaaccaccctgcccagggggggaaacccccttctttgttaaaaaaacaaaaataagtgggggaggggccccccattgggggcttcacctcctcgaagggttaaaccataaaatttttttaaccggggaagccaaagtttgcagggccccaaaatggtccccttgccctcc

SEQ ID NO: 97555 - DNA, 409 bp, Homo sapiens
gcagggtttcaccgtgttagttctgatggtctcgatctcctgacctcatgatccgcccgccttggcctccccaaatgctgggattactggtgtgagccaccgcacctggcagaaaattcttaagcactctgagcttgaggtatggttgtctcagggtttcaaatggaatatctccggtcccaagaacacctcaaggagagaagacctgaataaacatttcaaaggttttaaaaattacatcattttagaatctaaaggaaccttagaggtcgtctggttcacctctgcccattttattgatgaagaagctgaggcccagagaagccatagaactttatgaagttctgtatttaatggcaaaactgggtctataagctaactttcccaagtgctgacctgatctaatata

SEQ ID NO: 97556 - DNA, 394 bp, Homo sapiens
  misc_feature (1)...(394): n = a,t,c or g
cttgaatgcaggaggtggaggatgcagtgaatcgagatcgcgccactgcattcaagcctgggccacagagcgagactccatctcaaaaaaaaaaaaaaaaaaaaggcaaaaggggaacccccagggtttaaaaaattttggtttgacccttaaaaaaaggggggttaaaacttccccccaataaatcctaaaggggggttaattttaacggccggggggggggaacccccccccggaaaccccaccttttggggggcccaggggggggggatcacagggcaggaaaataaaaaccttcttggtaaaaaaaggaaacccttgtccttccnnnnnnnnnngnnatgnaacanncacttttctaaaaaaaaagtaaaaaagggaaaaaaaggggggg

SEQ ID NO: 97557 - DNA, 496 bp, Homo sapiens
aaacaacgtttacaatggaatgtggagtggcatgtttgcacgcacctgggatgctagacaccttgagaggagggcactgagattatatttcaaaatgatataatacctgcatccctaaaagtgcattttactaaggcactttggctatctgagcttcacaggctatctggagaatacacaataatccttccagccaggcacaaaagatcacttattatataattccatttatatgaaatattcagaatagttaaacctatagaggcagaaaagttagtatttgtttatggctggcgaggggacagatgtgaggataggaaggtgatagctaaagagtttggagcttcttaccaggtgctgtggctgacgcctagaattccagcactttgtgaggccatgacaggtggagcttatgaggtcaagagctttagaccagtctgaccaacatggtaaaacctcaactccatttaaaaaaaaaaaaaagggtcgtcctttt

SEQ ID NO: 97558 - DNA, 372 bp, Homo sapiens
ccaggaggcagaggttgcagtgagccgatattgtgccactgcactctatcctagatgacagagtgagactacatctcagaaacaaaaaacaaacaaaaactccattccagcctgggcgcctctctccaggccctcacttccaacccagaacacactagattccagagggaaacccagtcgccagcctgaagctggcattcaggttgcccttctcagggaactcaaagggtgacgcaagaattttctctgattagcttgatttgagacagggcctatgtcagcccacgccagaatgcagtggcaagatcatgggctcgctgcaaccgtgaccttgctggagatgagcgatccttacgcctcgggctaccaaat

SEQ ID NO: 97559 - DNA, 398 bp, Homo sapiens
  misc_feature (1)...(398): n = a,t,c or g
agagaaggtacccaaatggtggttcaaacacaggctggctaataagctgtgaggtgacttaccaaaaaaacaacaacaacaaaaacccttgaacttctgctttcaacttctactttatgctagattatttggtccaatcttcctggtctaacacctggctacatataacaacaaacatctgcttgaatgtgttggaaaggtgatgattaattgccaggctgatatattaaataaaatggaaatctcaaaagttggggcanaaaaaaaaaaaaaaaaaaaaaaaaaaaaaaaaaaaagggggggccctttaaaaaaaaaaaaatttataccccgggggggggaagaaaattttttttttttgggggccccaaaaaaaaaaacagggggcgggtttaaaa

SEQ ID NO: 97560 - DNA, 396 bp, Homo sapiens
tgtatttactccatggctctaattctttgtttactcctatgacttcactttcagaacaagctccgtgagagcaggacagtaggtgttcaacagatatgtattaaatgaagggaaggagaaaatggggaaaaagaggtccttacaaatccaagctagctaacatctcaaggagtttcccgttgcaaaatagggatcttataaagaagagtttggagggtggccaggagaagggcaacaaagggaaagctcttcttgaaggagcagattgctactttcttccttactttctctatctcttatttctttttctttctttctttctttcttccctgatgctttcttttctttatctttctcttctttattatcttctttctctttaattctctctctctt

SEQ ID NO: 97561 - DNA, 414 bp, Homo sapiens
cggacgcgtgggcggacgcgtgggatcgcggcggccgccctttttttttttttttttttttttgaaaaaaaaaaagggtttttttgggcccaaaaaaaacccccttttttgggggcccaaaaaaaaaaaggccccccttttttaaaggagtaaaaatttttcccccccccccaccaaaaaagggggggggggccctttttgccgggggggccccttgggggggggaaaaggggggccctgtttttttttaaaaaaaaaaatttggggggccccccggaaagggggggggtttttaaatgggggcccctccccccctgggtcgggggaaagggacccctgattttccaaaaaaccccggggggaaaaccccttcccccccaggaaccccctccgggacccttggaaacgggaaac

SEQ ID NO: 97562 - DNA, 393 bp, Homo sapiens
ttatagtcaactgagtatctacaggtgaaacaaagcatactgatatttaacatggtctttctacataacaagcatctacctaaaccatgttatagtcaactgagtatctacaggtgaaacaaagcatactgatatttagaaagaccaaaatattttgaaagtctaatgtacacggttttcattcattcttttaacaggcctgtgaagtacgtatatgccacaacaatttgatataaaactttttctttaattttttgattatttttttttagagacagggtctcgttctgtcacccagaccggagtgctgtggtgttatcatagttcactgtagcctcaatctcctgggcccaaggtatcctcctcgcacagcctcttgagtagctaggacta

SEQ ID NO: 97563 - DNA, 394 bp, Homo sapiens
ttcccctattctgagcccataaaagacccagactcagctgcagtgaggagagaaatcaccctgctgtgggggttggggaccactccctgcatcccctctccactgagagctgttcttttgctcaataaaattcttttctacccatcctcaaaaaaaaaaaaaaaaaaaaaaaaaaaaaaaaaaaaaaaaaaaaaaaaaaaaaagggggggggcccctttaaaaaaaaaaaatttttccccccggggggggggaaaattttttttttttttggggccccaaaaaaaattttcgggggggggttttaaaaaaagggggggaaaaaaaaaccggggggccccccaaaaataggggttgggaaaaaacccctttttgggggggggggaaaaaaacaag

SEQ ID NO: 97564 - DNA, 422 bp, Homo sapiens
  misc_feature (1)...(422): n = a,t,c or g
cccacgcgtccggttttagtttgtagcatttttattgtatctaagagtctgtgctaaataggcagttacaaaaaaaatgttgagagaccagtagaaatgtctatattagagatataaagtagagaaagtagagaatcactggcatactttaaagccactgagtaagatgaggtcagctgaagagagagaaaaagaaattaagcaacagagaaagtctcagagcagaactctaggaaatttcaatatcttgaagatgagtatcagaagacccagaacagaggctagagaaaacagctgataagcccccatagccaagacaattctaagcaaaaagaacaaagctggaggcatcacgctacctgtcttcaaactatactacaaggctacagtaaccaaaacagcatggtactgggaccaaaaan

SEQ ID NO: 97565 - DNA, 333 bp, Homo sapiens
cgggatttcaccgtgttggccagaatggttttgatcttctgacctcatgatccgcctgcctcggcctcccaaagtgctgggattacaggcatgagccaccgcgcccggccagatgaaagtattttctataatatattttactgaacccagtagatccaaaacagtctctgtcttcaacgctggagcgcagtggcgcaattatagatcaccatagcctcaacctcctgggcaacatggcaaagccccatatttacaaaaaatacaataagtagccaggtgtgggggcgtgcacctgtaatcccagctaattgggaggctgaggcacaagaattg

SEQ ID NO: 97566 - DNA, 399 bp, Homo sapiens
gcacaaatagaggcaaaggctgcttttccatataatccaaactaggttatattctgtcttggagaaggagcctgtaaagaaaaaaccattactgaggggcaaacgctatctatgccatgggaatataccttgtgatagggataaataccctggaatagggataacataaaggctggagctgccctattcaccacagtcactatcacagagcttggaacataagaagggcctaggacacagtccttttttgatacggaagttcactctgtcacccaggatggagtgcgaaggagaaaccttggatcacttctacctccgcctcctgggatcaagtgattcttctacctcagtctcccaagtaactgggattacaggcgcctgccaccacgcccggttaat

SEQ ID NO: 97567 - DNA, 422 bp, Homo sapiens
ccgacgcgtccggcagccctcctcctcccttcccctcattcacaccaggttttggttttaggcatgtgcatatctttggttaattgcaagtgtcaaggaattagggttcccatgaaactagctcttccagcccaggattgcagatttccccgtgcactgtgtttgtccttagatcggtgtagtgcgcggtcattacattcaacaaggaaacaatttattccaatgatcatttccctctccctgtatttttttttccctcgtagacttaggggtctcgctttattgtctgggctggtctcaaactctggacctcaagggatcctccctcttcagcttcccaaagtgctgggattacaggcagtgagccaccacgcctggcctccctgtgtatttctttccattccctgtgtttaccttttttc

SEQ ID NO: 97568 - DNA, 519 bp, Homo sapiens
  misc_feature (1)...(519): n = a,t,c or g
gctccatncnccggggngtggggngnnnnnnnnanaattgatgnactgagaatccttcgcngnnncnaannnnnggnncgacccacgcgtncgnacnnnnnncatactgcactttcctagactgagattatagccacagacagatgattattcaagacagataacagttaataaaatgaaatgtgatgagtgttacgatggtaggggggtacagcattctgtaaaaacaccaattaagtaggggcaaacctagtgtattagttagggaaggccttgcagaaaaagtggatttttgttttgttttgttttttaattgagacctacaggctcagggaataagccaagtgaagagagatgattttacacacacacacacacacacacacacacacacacacacacacttgtttttttctttttttttttgagacagtctttctctgttacccaggctggagcgcaatggcttgattttatctcacggcaacctccgtctcctgggttcaagagatttttctt

SEQ ID NO: 97569 - DNA, 414 bp, Homo sapiens
aggatttgcctactctggacatttcatataaatgggctcttacactctatggtctattctgactggcatcttttacttagcataatgttttcagggctcacccatgttgtagcatgttgtatgttccattttatggccgaataatattccactgtatggatatactgaattatatttctcctttcatctgtctttttaaattttttaaatatatagatatatatattttgtggagacggagtctcactatgttgtccaggctggctcaagcaatccttctgcctcagcctcccaaagtgttaggattacaggcatgtgccaccacgcccaacctcctttcatctgttgacaaacattggggtccttcagttcttgaagcttcaagccaccctgtctttcacgcttttccttctg

SEQ ID NO: 97570 - DNA, 409 bp, Homo sapiens
gaagttaacatttgctgtttaggattactgagaaaaactcttgctctcattggcctctcttacctcccaggcagcttttctatttccggagcatccctacacagttatttctaacccatgtagccctgccaactatatttttaccctaagctcaggaactacttttcatcagttttatgccaaaagttgatgtgtcacatatgagtaaaaaaaaaaaaatctcttatctcctcctactggagataagccaaattagggcagaagccaaaccaaaaaaattcaaaccaaatattaatctgaaatatgtttttttgttcatttgtttgagacagggtctcaccatgttgcccaggctggtctcgaactcctgagttcaagagatcctcccacctcggcctctcaaagcact

SEQ ID NO: 97571 - DNA, 417 bp, Homo sapiens
  misc_feature (1)...(417): n = a,t,c or g
taaatgtcttattaataatttatatcaggatagtctgttttatacagtacctgagttaccaagcaattgtttttctttttaccaaggtataacttatgtacagtaaaattcaccctttataccatatatgtttgtgagttttggcaaaggtgtactgacatgtaattgccaccacaatcaagttacagaacagtcctatcatcgcaaaaatttcctccatgccccctttatagtcagtcctcccctccactcccctgcttaataaactctaaaaatccaaaaaaaaaaaaaaaaaaaaaaaaaaaaaaaaaaaaaaaaaaaaaaaaaaaaaaaaaaaaaaaaaaaaaaaaaaaaaaaaaaaaaaannnngggggggggcccccaaaaaaaaaacccctctctccccccccccccccc

SEQ ID NO: 97572 - DNA, 415 bp, Homo sapiens
  misc_feature (1)...(415): n = a,t,c or g
attgcatagcatagttcaggccataccatcatggtcatgttctaagaacacataataatagctagaattggaggtagaggcagattacttataatgccagtcttttaaaatcctccttaattggcaagagtctgaagaagcttggttggatttagaatttgtgaattcgtgtgaatgccatgaattctctaatatggagggggaaagagaaggaaattattgaacaactgctgtgtgcctggcactgtgtgaagtgcttttatatctattactctttcattttggtctcacagtaggtcttttttgtttttttgtttgtttggttgtttgttttttcagacggagtctcgctctgttgcccaggctggagtgcagnggcacgatctcggctcactgcaagctctgcctcccaggg

SEQ ID NO: 97573 - DNA, 415 bp, Homo sapiens
tacaaggtttatgttgaggcatgtctcagaatttttctcctccttaatgctgaacaatactccattggatgcatataccacattttgcttatccattcattcatccatggatacttgggttactttcacattttagctgttgcgaataatgctgccattaacgtggatatgcaactaaaagagtactgtaaacaaatgccaacaaattggataacctggatgaaatggacagattcctagaaacacaaaacctactaagactaaataatgaagaaacagaatatcagaatagacctgtaactagggaggagattgaatgagtaatcaaaaatctcctgacagaaaagaaaaaccctggacctgatggcttcactggtgaattctaccaaacatttaaggaaaaactaataccatt

SEQ ID NO: 97574 - DNA, 414 bp, Homo sapiens
  misc_feature (1)...(414): n = a,t,c or g
cagattgttcccaccaattctgtatgggtatctgctcagcattcctgtgtttcactgagaacctcatgcccccactctcttcaacaatttcttacttttcccagatcccaatttctcacaaatgagaactaacctcaattcctaagaaataacctcaattcctaatttccaaaaaaaaaaaaaaaaaaaaaaaaaaaaaaagggggggggcccttttaagggaaccaattttttggcccggggggggggaaggaatatttttttttagggggccccaaaaaaaaattccgggggcgggttttaaaaaccggggggggggaaaaacccgggggacccccaaataaaacggttggggaaaaatcccctttttccccggggggaaaaaaaaaaaaaaaaaacgccannnnnnnnnna

SEQ ID NO: 97575 - DNA, 426 bp, Homo sapiens
  misc_feature (1)...(426): n = a,t,c or g
cccacgcgtccgatctgaagcccacccatcaagtaggtggattgaattggcagtgggagtttgtgaaaattttcttacgattgttttaatattctcagtgaattaggaaataaagtgcttagctgagannnnnnnnnnnnnnnnnnnnnnnnnnnnnnnnnnnnnnnnnnnnnnnnnnnnnnnnnnnnnnnnnnnnnnnnnnnnnnnnnnnnnnnnnnnnnnnnnnnnnnnnnnnnnnnnnnnnnnnnnnnnggggcggccgttttaaaggatcaaattttacgtccgcgggcttgcaaggttttannnnnnnnnnggggccaccaaaattcatttcccggcccggggtttaacaacgtggggagtggaaaaaccctggggtccccaatttattcgctttgagcacatccccttttggccggtggg

SEQ ID NO: 97576 - DNA, 429 bp, Homo sapiens
  misc_feature (1)...(429): n = a,t,c or g
ctcgtgatccacccgcctctgcctcccaaagtgctgggattacaggcgtgagctaccgcgtccggccagaaactatttaagtttttaacttaaaatatttaaatttttaaaggcacttttctatagagatcttgtaaaaacaactcttattttttaagcctttccacatagtttagttgcttcttcacaacttactgctcttcatccaatttagtatataaattactaactctaactgcttcttctcatctccatttcctcataagtgttcccgtgccacgtaaaacttgtattaaagaaattcgatctatagtctattaacgtaattctcaggtgcagtcgggaccctaagagaatggaggtggagttttgctgccctgcaccctttaaaatttcagagagggcattgggtttctccagctctttagn

SEQ ID NO: 97577 - DNA, 427 bp, Homo sapiens
caccaccacacctggatcatttttaaatttttttgtaaagatggagtctcgctatgttgtctcagctgggctcgaactcctggccttaagcgatcatcctgctttcgcctcacaaagtgttgggattacaggcatgagcaactatgcccagccttcaagcatttttttttatattgacataatttcatgtctacagaaaagatgcaagaatagcacaagaattcctgatacccttcacccactgtccccaaaggggtaacattttactacattagctacatttgctttatcatattaattctctccgccatcacatacaaatttgtgcacacatacattgtttcactaaaccatgtatgttactcaaatgaagctccattatctttaaatatttaactgtgtttttcttaacaacaaataatttaag

SEQ ID NO: 97578 - DNA, 402 bp, Homo sapiens
  misc_feature (1)...(402): n = a,t,c or g
cccacgcgtccggagatggcccctcttccattcctgatattggcaataagttcttccttctttttttgttttgggctagaggggtatcaattttattgatcttctgaaagaaccatccctgtttcattaatttttctgtattgtttttctatttcaaattttgttcatttctgctctttattatttccttccatctgcttggtccgngaaactgatagaagattaaagtcaggggggtcactgagcaaaacccttataaaatgtatgacgtgttttgttgtttttagggatggtgtctcgttatgttgtccaggctggattcaaactccagggctcaaatgatcatcctgtatcagcctcccaagtagctgggactacaggcacatgccaccatgcccagct

SEQ ID NO: 97579 - DNA, 409 bp, Homo sapiens
  misc_feature (1)...(409): n = a,t,c or g
cactcatcgcccttaccacgctactcctacctatctccccttttatactaataatcttataaaagggggaaaaaaaaaaaaaaaaaaagggggaaaaaaaaaaaaaaagggggggcccccctttaaaaaaaaacatttttcccccccggggggggaaaaaaatttttttttttatgggccccaaaaaaaaaaatcccggggccgggtttaaaaacggggggaggggaaaaacccgggggccccccaaaataaaccccttggaaaaaaccccctttttcccgggggggaaaaaaaaaaaaagccgcggntnanntnttaatnnnncccccctccattctcttttggaaagaaaagagcgccccccaccaaacancctggcgccgggttacaccccaattgttataactcc

SEQ ID NO: 97580 - DNA, 406 bp, Homo sapiens
cccacgcgtccgcccacgcgtccgcccacgcgtacgctagttctagatcgcgagcggcgcccttttttttttttttttaaaagggggggctctttttgttgccaagggggaagggaaagggaaaaatttgggtaaaaggaaaccttggcctcaaaaataaaaaaaattttccggcctaaccctccgaagaaggggaaaaaaagggggggccccaccaggcggggaaaattttaaaatttggggggaaaagggggttaaacaaggggggaaaaacgggccaaaagcttaaacctggggggattcccccacctggcccttaaaaagttggggaaaaaaaggaaaaaccccccgccccaggccaaaaattgttttttaaaaaaagaaaaggccaaaaaaaaaatttttg

SEQ ID NO: 97581 - DNA, 397 bp, Homo sapiens
  misc_feature (1)...(397): n = a,t,c or g
attgagataaagatgggttggttttggttttggttttgtttgcagatgcctcagatctaggtcaacagattaaaagtacttgtaaatgttcaaaaaaaaaaaaaaaaaaaaaaaaaaaaaaagggggggggccttttaaaaaaaaaaatttttactcccggggggggggaaagaaaatttttttttaaggggcccaaaaaaaaaaaaccggggggggggtttaaaaaccggggggggggaaaaaaccggggggcacccaaaaaaaatcgtttgggaaaaaaccccttttttcgggggggggaaaaaaaaaaaaaggcccccnnnnnntnttnnnnttntttnttttttttnttggtggannnnnnnnntnnncccaaannnnnntntttttttntan

SEQ ID NO: 97582 - DNA, 409 bp, Homo sapiens
cccacgcgttcgggaggttgaggtgagattaaatcatgccattgcactccagcctgggcaacaagagtgaaactctgcctcacaaaaaaaaaaaaaaaaaaaaaaaaaaaagggggggaaggggagatttttaaaaaaaagagtttttctttcttggggaaacaaaaaaaaaaaagagggcctgcttttttttaacccccaaataatataaaaaaattttttttgggggggggtttttttcccacggggggaataaaaagggggggggtttaaccagcttaaaaaaaattctttttaggggaattttttttttttgcaaaaaaaaaaaaacctttttaaaattttttaaaaaaaacttttttttaaaaactttgggaaaaaaaaaaaatcctttggaaaaaggggtttt

SEQ ID NO: 97583 - DNA, 427 bp, Homo sapiens
ctgacatttaagcctgtggtccattttgagtttgtttctgtgtatgttgtgatataggagttcaacttcattagactctcagttctgtttcattgatctatgtttgtccttacgccagtaccacaatgtcttgagtactatagctttgtagtaagttttgaaatcaggaagtgtattagcccgttttcatacttatatgaagaaccgcctgagactgggtaatttataaaagaaagaggtttaactgactcacagttcagcatggctagggaggccttgggaaacctaacaaatcctggcggaaagcgaaggggaagcaaggcaccttcttcacaaggtggcagaaaggagaaggaacgcaggaggcactaccacacacttagaaaaccatcagatctcatgagaactcactcactatcacgagaag

SEQ ID NO: 97584 - DNA, 392 bp, Homo sapiens
gcaggagaatcacttgaacccaggaggatgaggttgcagtgagctgagatcatagcactacattccagcatgggcgacagagtgagactctgtctcaaaaaaaaattacatatgataaacttcccacattttcagtggtgacttttaacacatgtatccagctgtgaaaccactaccccaatcaagatgtaggaactaacatctctggaaagttttctcatgcccctctgcagtcagtctcccctcgaaggccccacatcccctttaatctttaatcgttgagaacattttacctgacacaaagcattttataactttaaagtaatgatcatgcacaaaatttatggtcttgtgtaggagaccatgtgagaattcgggagagatgcaaggaa

SEQ ID NO: 97585 - DNA, 397 bp, Homo sapiens
  misc_feature (1)...(397): n = a,t,c or g
ttttggcaagctatgtttttagaggaattcgttcattagatctgccttttcaaatgtattgaataaagttgttctctttttgacatctgaaaaaaaaaaaaaaaaaaaaaaaaaaaaaaaaaaaaaaaagggggggagaaaaagagaatacctaacgcggcggggggccggagaaaacaataaatatttttataaataaaaaaaaaaaaaaaatacgtgtggatagaaaaaaaaggggtgggggaggaaaagggagcgggaaaaaaaaagattgggggggaagaagaaatttccccctttcgaagaggagggaaaaaaaaaacccgggngggtcaacaaggggtggctatttttatatcaaaaagtttttttataaacgggatgtttaggcgccaaa

SEQ ID NO: 97586 - DNA, 392 bp, Homo sapiens
tcgcggacgcgtgggcggacgcgtgggtgctgccatccacataagagatgacttgctgctccttgacttctgccatgagtctccccagccatgtgaaactggagctatctttggaatgagcagcctgcattcagaaattgaagttgacttatagagccaataaaagccccttggaagagctggtcttgtaccttgtctatgcagttcctttacaggatttctgatgtgaaaaacggagccttgctctgttgtccaggctggagtgcagaggggccatctctgttcactgcaacctcagtctcccatgttcaagcgattctccctcctcagcctcccaagtagctgggattacagagtcttgctccgtcatccaagctggagtgcagtggtgc

SEQ ID NO: 97587 - DNA, 394 bp, Homo sapiens
gagaattgcttgagccagggaggtggaggctgcagtgggccggggtggcgctaccgcactccagcctgggcgacagagcaagactccatctcaaaaaaaaaaaaaaaaaaaaaaagggagggggggattttttccccggaaaaaattggggggggggggggcccccccaacaaaagggaaaaaaaaaaaggggggtttgggggccccccccaaaaaaaagaaaaaacctttttttaaaaaaaaaaaaaaaaattcttttggggggggggccaaacccttaacccccaatttacgggggggggggggggggaaaaatttttaaccccggaaaaaaaaagttggggggaatctgaaatgccccatttccctcccggcggaaaaaaaaaaaaaaaaa

SEQ ID NO: 97588 - DNA, 412 bp, Homo sapiens
cagaggcggaggttgcagtgagcggagatcgtgccactgcattgaagcctgggtgatggagtgagactccatctcaaaaaaaaaaaaccaaaaaagggccctttggtttggaaaggaatgggcccttgaaaaaaaccctcaaattccttcaccttttgggggaaaaaaaaaaggtttaaaagcctaaaatttttaaaaaaatttttcctttgaattaaaaggtggccccattaacctaatttaatttaattttttcccttcaggggggggggggggcctttaactcgggctcttttttttacgttggcaatcccccaggaattaaaaaaaggggtccagaggttggattttttttatacccaccttttcgggggagggaacctaacagggttcctttttttgtgaccggggg

SEQ ID NO: 97589 - DNA, 411 bp, Homo sapiens
  misc_feature (1)...(411): n = a,t,c or g
cggacgcgtgggagatttatacctacctaaggaccttgtaagggatgttgtggggttttttgttgtttttcttgttgttttgtatttttttttaactctaatctcaatgacagattaaaggaacgttgtgggtttggtttggtttggtttggtttggtttggtttggtttggtttggtttggttaaaaacagagtcttgttctgtcgtccacgctaaagggcacttggcctttccccaaatgacgccacggctgaaagaacaatactgattggctctctttctacctcccgcactaatttggagcactgaactataagattaagaacaagcggggctttttatcatctcccgccgaaagaaaatacttctattagaatctaatatactacgtccttttaaaaaaaaaaaan

SEQ ID NO: 97590 - DNA, 410 bp, Homo sapiens
acaacccctggaagtagctgttccataagtgctccttgactgactctcatttatgttaaaaagaaaaaaaatccatacagcagaaaatttttcaactttgaggccaggcatgggggcttacagctataattccagcactttggaggccgaggcaggaggatcactaaagctaaggagttcgagatcagcctgggcaacctagcaagacctcgtctctactaaaattccaccccccccccaaaaaaaaaaattaactggcaggcaagggggcatgcaggcctgtcccatttactcagggccagctactctgggggctgaggtgcaaggactgcttgagcctggaaggttgaggctgcagtgagccggaattgtgccactgcactccagcctgggcgaagagagagaccctg

SEQ ID NO: 97591 - DNA, 410 bp, Homo sapiens
agtatgcagaaaagcatcatacaacaaattagtttccttcctataaatgtatctcagagaacttagccacatgcaggaccatcaaaaatctataaacattacaataaggcaaagcttgagctaaaatgtggaggaattagtgaattttcctgtgcacatgataattcacatgagatagcaagatgttttcaaatatagctgccatacaatgattgttttttgttttttgtttcttctgtgcagggacaaatgagatcctctattgggctttatgtctaaagcttgcatttcaagcaatttcctcactcgaggtcaggagttcaagaccagcctggccaacatggtgaaaccccatctctactaaaaatacaaaattatccagtcatggtggcaggcacctggtatcccgg

SEQ ID NO: 97592 - DNA, 392 bp, Homo sapiens
tttttgcccagccaacagttttctgatgtagatagacagttctgacaggactttttttttttttttttttttttgggaaagggggcccccccccccccgggcaaaaaagggggaacccccttcccaaaaaaaaaaacaaaggggggggggccccggggcccccccttggaacccccccccttgggggggcccgggcccccggaacccgggggcggggatttaaaaaaaccttggcccccccagggaaccccccctctataaaaaaaaccaaaaatgggggggggggggggggggcccccttaaacccccggtacggggggggggggagaaaaaaaccccttaaccccggggggggggcccaaaaatggccccccccccccccccccgggggg

SEQ ID NO: 97593 - DNA, 384 bp, Homo sapiens
gttcctcaagattgccttgactcttcttggctctttgtatttccaagtaaactttagaattaacttgtcaatttccataaaaattactactgggatattgattggcattgcattgaatctctagttcaatttgagtagaattaatgttttataggttgagagcatcccaagtatgaaaatccaaaatccaaaatgctctaaaatctgaaactgcttgaagctgacatgatgctcaaagaaaatgctcattggagcattttggatttctgatttttggacttgtgatgcgatgctcaactgggaaataaatataatgcaaatattccaaaatctaaaaaaaaattgaaatcccaaacacttctaatctcaagcatttcggataag

SEQ ID NO: 97594 - DNA, 408 bp, Homo sapiens
tcatcggttatttatgtaggtgaaatcatcatttaagttttaggaacgtatgtaaatgcaagcatttagtaatttatgttcagtgactttaaatcataattttagtaaccttaccttttccagttaacattttgtaaatattttcatgtgaaacaaatttgtttctcatttctactggatgggaaatgtcctcagtagatatccccagttcacttagcagttctctttctgccatgtgaggctgccttcagttttctgatatttatatacaaggaataaaattttgattttctttgcacataaagcatttttcctagatgcaaagtatgtatgtgtgtgtgtgtgtgtgtgtgtgtgtgtgtgtgtttgtgtgtattttggaataggagagggaaatctaccttcgtg

SEQ ID NO: 97595 - DNA, 412 bp, Homo sapiens
  misc_feature (1)...(412): n = a,t,c or g
ttcagatatctttgtacttaaggcttacaagtttgaattatggaatactataagggttttttgtttatttgtatgtttttatatgaaagtacataaatgacagactacctccaagtaaaaaaaaaaaaaaaaaaaaaaaaaaaaaaaaaaaaaaaaaggggggggcccttttaaaaaaaaaaattttttttccccgggggggggaaaattattttttttttttagggcccaaaaaaaaaaatttggggggcggtttttaaaaaggggggaaaggaaaaaaccggggggtacccaaaataaaggggtttggaaaaaactccttttttgggggggggaaaaaaaaaaaaaccccgggggtgnnnnnnggggggngtgggagataaacccgcgtttcaaacaataaatatgccat

SEQ ID NO: 97596 - DNA, 216 bp, Homo sapiens
cggacgcgtgggatcgctagcaggtacggggcttcttgtcgggtgatgaaagtgttctgaccagctacagggagccaggatcgtgccactgcactccatcctgagtgacagagcgagaccctgtctcaaaaaagtaaataacgtaaaatggcaaagcttatgtgaattacatctgaatagtaagctttcagatgtttaaaaaaaaaaaaaaggggg

SEQ ID NO: 97597 - DNA, 406 bp, Homo sapiens
tgtgaacgtctcttttccttggcagtcagacttgtaacttgcaggaacagtcattaaaataacttttactgagggttatttacatgccaggcattgtgcatggcttagctcaggttgccccccaagaacccactggggccaattccatatgttacacagatttcctattcattttacagatggggaaaccgaggcctgggaaggaaaattaacatgttcaaggtcacatagtgaggaagacatagggttagttcaaaccccatctctatttagaggagacgtggtctttctctgttgcctaagctggagtgcagtggcgtgagcatagctcactgcagctttgacctcccaggctaaagcgatccttctgcctcagcctcccggctgctcggtaggcttaggcagg

SEQ ID NO: 97598 - DNA, 831 bp, Homo sapiens
tgggcggattacaggtatgagcagcctcgcccggcctcaattactttttatattgacaaagagaagatgttgcaatgtcctcaaacgtaaaacaccccctacagttccaattctgggcctgtcttctatctatctttgcccttctggtccgttccctgttctgagccccagggaacttagggctgaaagtcacccccgaagcctcagaccagatcgggaggccacacgcagctcatggggacagagggcccagggtgacggtccactcatgagaggtgctatgtgactccagggagtctgtccctctccgggctccaatccccagcccaagctcagatgacccagcctgtgtccctttagcggccgaggagccaccacctgttcgggggctggaggatggcttcccagaggacctgggacactcacctagctcgttcatggcacggcggtactcctcatcaaaggacagcttcataacagcacaggtggcctggcagatctgcggctcgatggggatcggggctgtgggcacagggaccagatcagagcccccattcccaggaaatgtcccaggtgactcccgaaggtcccccccccccccgcaacccgcccgccccaggcctgaaggatcccgggagctttgcaaatggctgcaaagttgggacttcctttcccagcctctctaagatgggatgatggggtggcctctctcactcagccttgggaagggaggcgaggtagttcctggagcaccacacctttcagctgtgcttctgccctttttaaaaataaaactgacgagacagggtctcgctctgttgtccagactgg

SEQ ID NO: 97599 - DNA, 431 bp, Homo sapiens
atataagtgtaaagtggggattcattgttttgacgtggaaatcccagttgtcccagcaccatttgttaaagatactattctttactcattgaattattttggcacccttgtcaaaaatcaattaaccatcgtgtgaaggatttttccctggactctcaatttttgcatatgtactcataagaggttggtctgtagtttccttaggttgtttgtctgggtttggtatcagggtaatactgccctcagagaatgagttgttaccttttacttcaacctacttgtatcctgttatatttaatgtgagttacttaaagacagcatataattaggtttttataatccaaactgataatatgtcgaattggcgtgatgaggccatttatgtttaatgcaactattgaaatgtttggctttagatctacaaaaaaaaa

SEQ ID NO: 97600 - DNA, 450 bp, Homo sapiens
  misc_feature (1)...(450): n = a,t,c or g
catgacatcatnacactaggccangtggtggaattcctatgagtttatgcatttcttctaggttttctagtttgtgtgcatagagatgctcatagtagtctctgatgatcttttatctttctgtggtgtcagttgtaatgctacctttatcatttttgattgtgtatatttgaaacttctctcttcagttctagttttctgatgacatatacatatcagataatttaccagagaagtagaatacataaaaaagaatcaatgacaactctagagttgaaaaaatactataactgaaattaactcaatatacaggttagacacaacagaagagattagtgaactggaaaattaataggaaaaaaatacgtagtaccttgtatatgattgnggttgaaaaaaaatttctgctgctacccttactgggacattgcttgggttccatttttttaa

SEQ ID NO: 97601 - DNA, 400 bp, Homo sapiens
tgcctacaccaaaaagttattatctcgaactgactctgagccacaacccaaacaacccagctgtccctaagcttcaaactagactacttctccataataatcatccctgtggcattggtcgttacatgggccatcataaaattctcactgtgatatataaactcacccccaaaaaaaaaagaggctgagaaggacctaaactaagactagatgggggggggccatgttctaggaagcctccctggatctacagcaagcttgggcaactcgcttttggtattcccttagtttaccacaaattaataaaactctcttaggaacattatggagaaactctctgtgatttggggtgagcttatcagccaccccccccgctagagtattttatgtgtgggccaaa

SEQ ID NO: 97602 - DNA, 403 bp, Homo sapiens
tgcctagaccaagaagttattatctcgaactgacactgagccacaacccaaacaacccagctctccctaagcttcaaactagactacttctccataatattcatccctgtagcattgttcgttacatggtccatcatagaattctcactgtgatatataaactcacccccaaaaaaaaaaaaaaaaaaaaaaaaaaaaaaaaaaaaaaaaaaaagggggggggcccctttaaaaaattcccggggggggcccaatttttgggggggggggaaaaatattttttttttttttggggggggtgataaaaaacccccccgggctttttggaaaaaacccctttttttgggggggggaaatttgggccccccccccccccaaaaatttacgccttgggggaaaaaaa

SEQ ID NO: 97603 - DNA, 463 bp, Homo sapiens
  misc_feature (1)...(463): n = a,t,c or g
agagcggnnnnnnnaaactgatactacggcactgcaggaacncngggngaccacgcgtncgacnacacagaactaatcatattttatatcttcttcgaaaccacacttatccccaccttggctatcatcacccgatgaggcaaccagccagaacgcctgaacgcaggcacatacttcctattctacaccctagtaggctcccttcccctactcatcgcactaatttacactcacaacaccctaggctcactaaacattctactactcactctcactgcccaagaactatcaaactcctgagccaacaacttaatatgactagcttacacaatagcttttatgagaaaaaaaacaaaaaaaaagaagggggggggccttttaaaggacccttgggggggccaaattttagcggggcgtgaaaaaataaagttttttccttaagggggggggaataaaaacctgg

SEQ ID NO: 97604 - DNA, 405 bp, Homo sapiens
aactaatcgtcccaacaattatattactaccactgacatgactttccaaaaaacacataatttgaatcaacacaaccacccacagcctaattattagcatcatccccctactattttttaaccaaatcaacaacaacctatttagctgttccccaaccttttcctccgaccacctatcacaccccatcctattaaaaaaaaaaaaaaaaaaaaaaaaaaaaaaaaaaaaaaaaaaaaaaaagggggggggggccttttaaaaaatttttgggggggcccaaactacccggggggggggaaaaaaaattttttctccttgggggggggaaaaaaaaaccccggggggggttttggggaaaaaacctttttttgggggggggaaaaaaggggcacccccccccccag

SEQ ID NO: 97605 - DNA, 256 bp, Homo sapiens
gggggggggcctttaaaaaaaaccctggggggggcaaaataaaacgggggggggaaaaaaaatttttttttcttaaaggggggggaaaaaaaaacccccggggggatttttggaaaaaaacctttttttgggggggggaaaaatggggaaaaaacccccaaaaaaaattaaaggcttaagggaaaaaaaaattttttaaggggaaaagggggaaaaaaaaggttaattgttgggggggagaaaattttttttaaaa

SEQ ID NO: 97606 - DNA, 412 bp, Homo sapiens
  misc_feature (1)...(412): n = a,t,c or g
cttgaacccagaaggcgaaggttgcagtgaaccgggatcatgccattgtactctagcctgggtgacaggagcaagactccgtctcanaaaaaaaaaaaaaaaaaaaaaaatttaaaaccgggaaaacgggtttcattggtttcccaaagccggttttaaaccccgggggtaaaagaaatccccccccttgcccctcaaaattgggggaaataaagggggaaaaaaagccccccggccaaaaaaacttaagtttttaaaaaaaaaaatgaaatttttttgttttttttaagggcccggggcgggttttaaaaaaaaaaaaaaaagggggccccccctaattttccccaattttttggttttttttccaaaattcccccaaaggtgggtttcctggattccaatttaaaaaata

SEQ ID NO: 97607 - DNA, 487 bp, Homo sapiens
  misc_feature (1)...(487): n = a,t,c or g
gacggcccgcnnaatggagccatgatgaccntacgcagngngcnggaattctgtttgtggattcccctacagtgtagagaatcagaagacccaagttctagtcttggctttggccctaattggcagtgatttgggacaagcctcttaatctctttgatagcctataaaataagggaattggacactctaatgtctcttttatctatagctaagaagatgttctataatcttatgatgtgaaacaggaaaaaccaaacggcatataagcatccaaatattgggcttatgtatttcattctttctttctctctttttttttttttttttttaagaaaaaaaatttttttttttgtccccagggtggggggcaagggcccaatttgagtttaagggaaccttcccctcccggggtaaagaaattatttgggcttaacctttcgaagagttgggaataacaaaattgccccccaccccccattattttttt

SEQ ID NO: 97608 - DNA, 488 bp, Homo sapiens
  misc_feature (1)...(488): n = a,t,c or g
agcgcngcncccaattgagattgaagtcagtgncgaggaactcaatcacttgaaccagggaggtgaaggttgcagtgagcagagatcgcaccactgcactccagcctgggcaacagagtgagactcgtctcaaaagaaaaacaaattttggtacatccatccatgcaacagaatagtaacaactaccaatacacccatgactgaatctccaaaacattatgctgagtgaaagaagccagacatcaggagatgtccagcatgattccattcatatgaaactccagagcaagcaaaaccaacctatacagacaatgcagattaatggatgtctggggctggagagggaggtggaaattgactgggaagagagagaaggaatgctttggggtgatggaaatgtggccatncagtccaccagccggtgcactccagcctgggtgacaaagggagactctgtctcaaaaaaaaaaaaaaaatgtcaggtgtgg

SEQ ID NO: 97609 - DNA, 402 bp, Homo sapiens
ggcacgaggcaacctcaacaccaccttcttcgaccccgccggaggaggagaccccattctataccaacacctattctgatttttcggtcaccctgaagtttatattcttatcctaccaggcttcggaataatctcccatattggaacttactactgcggaaaaaaagaaccatttggatacataggtatgggctgagctatgatatcaattggcttcctagggtttatcgtgtgagcacaccatatatttacagtaggaatagacgtagacacacgagcatatttcacctccgctaccataatcatcgctatccccaccggcgtctaagtatttagctgactcgccacactccacggaagcaatatgaaatgatctgctgcagtgctctgagccctaggatt

SEQ ID NO: 97610 - DNA, 420 bp, Homo sapiens
acacgaggagccacagaactaatcatattggatatcttggtcgaaaccacacttatccccaccttggctatcatcacccgatgagggggccagccataacgcctgaacgcaggcacatacttcctattctacaccctagtaggctccctttccctactcatgggactaatttacactcacaaaaccctagggtgagtaaacattctactactcactctcactgcccaagaactatgaaactcctgagccaacaacttaatatgaatagcttacacaatagcttttataggaaagatacctttttacggactccagttatgacttcctaaagcccatgtcgaagcccccatcgctgggtcaataggacttgccgcaggactcttgaaactaagcggctatggtataatacgcctgacactg

SEQ ID NO: 97611 - DNA, 410 bp, Homo sapiens
  misc_feature (1)...(410): n = a,t,c or g
ggctaattcattcaacttttgaagcattggttgtgcgacatgcagtttggtgttgttgtggagaaaaattgggccctttctgttgatgaatgtcagctgcaggccttgcagttttcagtgcatcacattgatttgctgggcatactactcagatgtaatggtttcacagggattcagaaagctgtagtggatcaaaccgtcagcagactaccaaacagggaccatgatcttcttttcgtgcaagtttggccttggggagtgctttgaagcttcttctcaatgcaaccactgagctggtagtcaccagttttcatataaaatccacttttcatcacatgtcacaatctgataaaaaaatgggttgttgttgttgcatataataagacaagatgccatttcnaaatgatatt

SEQ ID NO: 97612 - DNA, 462 bp, Homo sapiens
  misc_feature (1)...(462): n = a,t,c or g
aggagagagcgcncgggcccaaatttcancgtcnttgcanacgccctgntnggtacgaggctatattctggagctgaaaaagtacaataaatgataattggacttttcacttaatatctttcaccaaatttcaaaaggtttgaggcactatttcttcaaatatcctctctgctcctttctctccctcttttccttctataattcccacaatacatatgttagttctcttgatgggggtccacatgtttcttaggctctgttcacttttcttcaatctttttttctggttggtcttcagaggcttagttatttttgtgctgctggcatataacacaagaaactgggtagcttgtaaagaaaagaatttatttctcacattcctggaggctaggaaggccaatatgaaggttctagcatctggcaagtgtcttcttgccttatcttcccatggtggaaggtgag

SEQ ID NO: 97613 - DNA, 566 bp, Homo sapiens
  misc_feature (1)...(566): n = a,t,c or g
aggtgntccccnnnnnctcgatcacccttcgatccacatccgtgtggaggaattcanagacataaattgctttgtgaacatgtgaaaaaatgctcagctgtacttataataagagaaatgcaaactaaaaccacactaaaataccatttcttactcgttacaatagcaaaaattttcaacttaatacacttttgacgaagtgtcggagagacactcatatgccagtgggctggtaggaatgcaaaatcatgacccttttggaggagaatttctcaatatttaacaaaactgtatgtgtgtgtgtgtatgtatacacacagttagaattaacaatttttctaggaagggtagagggaggagagatgagagattgattaatgggtacaaatatacagtttgatagaagaaataaaacctagtgtttgataggtcagtagggtgactgtagcttacaaaactattatatatatctatgtatatacacacacatatacatacgnatattatatatatatatatatatatttttttttttggagaggaagactacttctgttgcccgggtg

SEQ ID NO: 97614 - DNA, 481 bp, Homo sapiens
  misc_feature (1)...(481): n = a,t,c or g
cgcgatcgagtacatatcnagngcggnggaattcgctactcaggaggctgaggcaggaggatggcatgagctttggatgtcaaggctgcagtgaactgtgattacatcactgcactccagcctgggtgacagagcaagaccctgtatcaaaaaagaaaaaaaaaaaaaaggcttaccctgaccctattcccaaaaaaacagataaatcaaatggcaaaaaaggccctgacttttccagaaaaaaccccccaaaaaattcccccccccccccttggcaaaggagcacagcatttaggggcagggctgcaaaatcctgccccacccattgaaaatgaccttgttctcggtcttggaacacttggggatgtaccctgtattttcacagtacttgattttcacagaaactggttgccaaggaaaaaaaccataagggcccctataatcccaccattttgggaggccgagggggggggatcatctg

SEQ ID NO: 97615 - DNA, 468 bp, Homo sapiens
cttcgatagcactacgccagagcggaggaattcgtggtgcacacccatggtcccagctatttgggagactgaggtgggaggatcacttgagccaggaggtcaaggctacagtgagccatgatcacaccactatctatactccagcctaggcaaaagagtgagaccctgcatgaaaaaaaaaaaaagggccccaaactttttttttcaggggcccggttaggggaaaaaaaaggaaggtaaccttgccccccaatatatattaggggttaaaaataacaataccggcccggaggttttagggccataaaaatatttccaatttgggattttttaaggggacaaaggccaaacaaacaggggggctcacacctgtatccccaccttttggggaggctgaaaggaaacattcctttagggccaaaagtttgaaaacagtcggggcaacatagggagaccctgtctttacta

SEQ ID NO: 97616 - DNA, 472 bp, Homo sapiens
  misc_feature (1)...(472): n = a,t,c or g
cggtgtcgcggancttanaaaccgggccattgggcaangnaccngccgcggaannngncccatgcccaatgacaggtacttccttagcccctgccctggcttcacagcttcctaaatgccaccccttcccaagccagtctctgggccaaggccccattcctgcagcccactgggtggcccccaactcagcaccccacttactggcccacgtccagccagtctcagtttgcccatctctgaggggatttgtgggtgcatcacagccatcctgtgggctgtttggtaccttgttctccagatgttgggtctgtctctcttcatggcctgaaggggagcaggctcctcatgctctgctcacaaaaaatggtggctcggtctagcaagtcccagttgctaaacattttttaaaaatagaactaaaggccgggcgcggtggctcacgcctgtaatcccagcactttgggaggccgag

SEQ ID NO: 97617 - DNA, 453 bp, Homo sapiens
  misc_feature (1)...(453): n = a,t,c or g
gggagaccccgccannnaatgagaccctatgagagcgctggaaccgattttcttatatatagctgaaatatatattcaactttgatttaccagagtatatgaaaaacataatttacattcagcattttatagtgtatgtttatattcagctttttatagtatatgtgaaatcctagaaaagtattattttcctgaataagaaccaggaagaaactgattaaagagctataccacataatttctctagtactagattatcttacagtcttctacctcttcaagatacaaaagtcatggctgtgaggctatcattacccttttaccaaagttggaaaaggacagcatccaaaataagtcagctataaaaaaaagtaaagtcggccgggtgcggtggctcatgcctgtaatcccagcactctgggaggctgaggcgggcggatcacttgaggtcgg

SEQ ID NO: 97618 - DNA, 411 bp, Homo sapiens
  misc_feature (1)...(411): n = a,t,c or g
cgcatccataatccttctaatagctatnntnttcaacaatatactctccggacaatgaaccataaccaatactaccaatcaatactcatcattaataatcataatggctatagcaataaaactaggaatagccccctttcacttctgagtcccagaggttacccaaggcacccctctgacatccggcctgcttcttctcacatgacaaaaactagccccctgcttctaaaaaaaaaaaaaaaaaaaaaaaaaaaaaaaaaaaaagaaaaaaaaaaacaagcagacacacangcctggggggggggccccttaaaaaaaaaaaaaattttccccgggggggggggaaaaaatttttttttttttggggccccaaaaaaaaaaaaaggggggggggtttaaacaccggaagaa

SEQ ID NO: 97619 - DNA, 475 bp, Homo sapiens
  misc_feature (1)...(475): n = a,t,c or g
cgcccccccnnnnnatgaagcttttgatgacgctccganccgcaanncccgggncggggnnnnttctgccatattgtaacttactactccggaaaaaaagaaccatttggatacataggtatggtctgaggtatgatatcaattggcttcctagggtttatcgtgtgagcacaccatatatttacagtaggaatagacgtagacacacgagcatatttcacctccgctaccataatcatcgctatccccaccggcgtcaaagtatttagctgactcgccacactccacggaagcaatatgaaatgatctgctgcagtgctctgagccctaggattcatctttcttttcaccgtaggtggcctgactggcattgtattancaaactcatcactagacatcgtactacacgacacgtactacgttgnagctcacttccactatgtcctatcaataggagctgtatttgccatcatag

SEQ ID NO: 97620 - DNA, 431 bp, Homo sapiens
  misc_feature (1)...(431): n = a,t,c or g
aaannacaatacacgtggttctctgtattcgcagtctgtttcaccaatttgggggacagcaatttgccctgtgaccttgcttctctgacagatccaagaggagttggtgatttttcagtttgttcagtttttccttgttgctaggacaggtggtgacttccaagctcctcatgcgctggatcacaaagtaaaagtctaccgctttttgtaattttcttcataaaacttttaaatatcttttattagatttcttgcaagatactccgtaattnttttttttttaagagatggagtctcactctgtcactcaggctggactgctggggngtaatcacagcttactggtgcctcaaactcctgggctcaagagatcttctcttctcagcctcctgagtaaccagtactacaggtctggccctcacacctgataa

SEQ ID NO: 97621 - DNA, 393 bp, Homo sapiens
cccacgcgtccggtgatatgtagagagcggcacaccttaaggagttatggtgctgcaatgatgttagctgaggccactgtggatttttcgcacgaacattaataaactaaaaacttcatgtgaattaaaaaaacggataaaaaggtaaaaataggaaaaaaaaagggaaaatttaactttaaatgggggtttttttttaaataaacctggggggggtttaaaaatcccagcccaggggaggggtgaattaaaaaaatgcatgactttaatgaaatgtttttacaaaattgttggaaaatccttttttttggggggggttttttcacgggacaaatttttccaagggcagccccccccataaataaaaacatccttgtgtgggggggggggaaa

SEQ ID NO: 97622 - DNA, 388 bp, Homo sapiens
cagtgaaccactatcacgaaaaaaactctacctctctatactaatctccctacaaatctccttaattataacattcacagccacagaactaatcatattttatatcttcttcgaaaccacacttatccccaccttggctatcatcacccgatgaggcaaccagccagaacgcctgaacgcaggcacatacttcctattctacaccctagtaggctcccttcccctactcatcgcactaatttacactcacaacaccctaggctcactaaacattctactactcactctcactgcccaggagctaaaaaaaaaaaaaaaaaaaaaaaaaaaaaaaaaaaaaaatattgggggcccccctttaagggccccctcgggggccccaaactaa

SEQ ID NO: 97623 - DNA, 401 bp, Homo sapiens
  misc_feature (1)...(401): n = a,t,c or g
caggactattcctagccatgcactactcaccagacgcctcaaccgccttttcatcaatcgcccacatcactcgagacgtaaattatggctgaatcatccgctaccttcacgccaatggcgcctcaatattctttatctgcctcttcctacacatcgggcgaggcctannanaaaaaaaaaaaaaaaaaaaaaaaaaaaaaanggggggggccccttaaaaaaaaccctggggggggccaaattttaccggggcgggaaaggaaaaattttttcctttaagggggggtgaataaaaccccactgggggcttttgggaaaaaaccctttttttgggggggggacatatgggccccccccccccccaaaaattaaaccctctggggaaaaaaaaaatttttaga

SEQ ID NO: 97624 - DNA, 393 bp, Homo sapiens
cccacgcgtccgcggacgcgtgggccttcataggctatgtcctcccgtgaggccaaatatcattctgaggggccacagtaattacaaacttactatccgccatcccatacattgggacagacctagttcaatgaatctgaggaggctactcagtagacagtcccaccctcacacgattctttacctttcacttcatcttgcccttcattattgcagccctagcagcactccacctcctattcttgcacgaaacgggatcaaacaaccccctaggaatcacctcccaaaaaaaaaaaaaaaagggggggccgttttaaagaacccttgggggggccaaacttaacgcgggcatgcaaggtaatagctttttccttataggggggcgtataatag

SEQ ID NO: 97625 - DNA, 457 bp, Homo sapiens
  misc_feature (1)...(457): n = a,t,c or g
tgtttcanattgagatagttgtccgtgcggnggaattccagaatannnnncttgctctcttaatagaaatcttgtaaagaaaatccatcttccttatttcactgtttctttccctaaaagtttttgtataccacccctttatcaagaattaagatgttggggaaaaaaaaaaaaacaaaacttttggggctaaaaaaggccagcttcacttccctcaaggatgacccatttatctgtatttaaaaggggttttttttttttttccctttcccaacaaccgggtttggggggggggtccctaacaaaaaaaccgcctttgggggggaaaaacttttacctaaatttaaatttctttccaggggtggggggaaacctttttttaattaaccccccaactggaaaagccgggggtggggggggccccccgggttggtttttttttttttaaacacaaaaa

SEQ ID NO: 97626 - DNA, 420 bp, Homo sapiens
gatcgcttgagcccagaaggtcgaggctgtagtgagctatgattgtgccactgcactccagcctggttgacagagcaataccctatctcaaaaaaaaaaaaaaggggtttcctttgttccggagtttggaaaccctttgccccaccagggggggttcaggaccctttgcccccttttttggggcaaaaaccgggccttaaccttggccattccttaaccccttactgggggggccccgggttgttttaaaaaagctttccttgttccccctggccctttccatttgggcggggggcgggccccttccccggttggggggggaaagtaaccctggttttccttcccccaatcttaacccttgccggaaggggaattggttccccttgttggaaaaacaaatgggtgaggactgggggcaaa

SEQ ID NO: 97627 - DNA, 446 bp, Homo sapiens
  misc_feature (1)...(446): n = a,t,c or g
atcgaccaatggtaggacattagaccangcggnggaattcgcttgggcccagcaagcggaggttgcagtgagccggggtcgccccattgcactccagcctgggcaacaagagcaaaactccatctcaaaggaaaaaataaaaaaaatttttggagggggtaaaaaaatttaaccaggaaaaccggggaattttgggtgaaaaaactttttttggcagaatattaattttaggtaccaacccccaaggggggggcctggtaattttttaaattccccacattttgaaaaaaaaaagcctttcctttatagaaaaatttggaacctttttatgggaaccattccttccgaaattaaccaaatcttggtttaaaaaaagttggcttttatccaaaaattttagttgccccactgattttaaaaggggggggggatggttaaaaaataaa

SEQ ID NO: 97628 - DNA, 373 bp, Homo sapiens
  misc_feature (1)...(373): n = a,t,c or g
caacgatacttcccttaccgtcaaatcaattggccaccagtgggagtgaacctacgagtacaccgactaccgcggactagtcttcaactgctacatacttcccccattatttctagaaccaggcgacctgcgactccttgacgttgacaatcgagtaatactcccgattgaagcccccattcgtataataaatacatcacaagacgtcttgcactcatgagctgtccccacattatgctgaaaaacagatgcaattcccgggcgtctaaaccagaccactttcaccggtacacgaccggaggtatactacggtcaatgctctgaaatttgtggagcacaccgcagatccatgctcatcgtcctagagttagtn

SEQ ID NO: 97629 - DNA, 359 bp, Homo sapiens
  misc_feature (1)...(359): n = a,t,c or g
ctcacacctgtaatcccaacactttgggaggacaaaacaggagggtcgcttgaggccaggagtttgagaccagcctgggcactgtatcgaggccgactctatttgattattattattatttttttttttttggagaaaaagtctcgctttggcccccaggtgggagtgcaggggcaaaatctaaggtcactgtaagctccgcctcccaagtccttgccattctcccgcctaagcctccccagaagctgggactacaggttggacctatggttgcttttaaaagactacaattatagcccactttttttttggccctggagtgtttatgataatattttacgaggggttatttagaagtn

SEQ ID NO: 97630 - DNA, 351 bp, Homo sapiens
tggggtctcactatattgcccaggctggtctcaaaaacccaggctcaagtcatctgcctgcctcggccgcccatagtgctgggattacaggtgtgagccaccatgcctggctgaagattttttttaaagagtctgtttcagattattcacctcatttgaattccagaaaaaatgctgtgtatgtttcctttttttttttttggaaaaaaagttttgtttttgttccccaggcgggagggaaagggttaaatctgggttcattgaaattttcccctttaaggttaaagcagttttcttgcctaaccctcccaagaagttaggaatacgggcttgccccaccccccccagtta

SEQ ID NO: 97631 - DNA, 385 bp, Homo sapiens
cggccgcgtcgacctgacatagaatagcaagagaggcggactcaagaggtcctccaggcggtggcaaaaaaagtgaaagaggaatcccagctgcctggcaccggtgggccaaaaaatgtgcttcagcctgtgccgagagcaaaggcagaaagaccaaaaaagcaggctgaagcgtcgggtctgaaaaaagagacggatgtagtgttgaaagtagatgctcaggaggcaaaaactgagccttttacacaagggaaggggggggggcagaccaccccagaaagctttgaaaaagctcctcaagtcacagagagcatatagtccagtgagcttgtaaccacttgtcaagccgaaaccttagctggggtaaaatcacaggagatggtgg

SEQ ID NO: 97632 - DNA, 282 bp, Homo sapiens
taacagccattctcatccaaaccccctgaagcttcaccggcgcagtcattctcataatcgcccacgggcttacatcctcattactattctgcctagcaaactcaaactacgaacgcactcacagtcgcatcataatcctctctcaaggacttcaaactctactcccactaatagctttttgatgacttctagcaagcctcgctaacctcgccttaccccccactattaacctactgggagaactctctgtgctagtaaccacgttctccgtcgacgcggccg

SEQ ID NO: 97633 - DNA, 407 bp, Homo sapiens
cggaacgagactggaaatcatgagccgaaatcatgggatcttcccattcactctggagatcttcaaggacaatgagtttgaagagccttaccgggaagctctgcccaccctcaagcttcgagactccctctactttggcattgagcctgaggagcacgtgagcggctaggaaagcttggaggagagctgctttgccacccccacctccaagatcgacgaggtcctgaaatactacctcatccgggatggctgagtttcagatgactcggtaaagcagtacacatcccgggatcacctagcaaagcacttccaggtccctgacttcaagtttgagggcaaagaccacaaggaagtgattctgcactgacgggatcttgtctgtggagtgatggacgagcgttcccgct

SEQ ID NO: 97634 - DNA, 422 bp, Homo sapiens
  misc_feature (1)...(422): n = a,t,c or g
ntcgaaaactggttgaccatcatacgccaagcttggcacgaggcagaccggaacctcaacaccaccttcttcgaccccgccggaggtggagatcccattctataccaacacctattctgatttttgggtcaccctgagggttatattcttatcctaccaggcttcggaataatctcccatattgtaacttactactccggaaaaaaagaaccatttggatacataggcatgggctgagctatgatatcaattggcttcctagggtttatcgtgtgagcacaccatatatttacagtaggaatagacgtagacacacgagcatatttcacctccgctaccataatcatcgctatccccaccggcgtcaaagtatttagctgactcgccacactccacggaagcaatatgaaatgatctgctgg

SEQ ID NO: 97635 - DNA, 376 bp, Homo sapiens
ggcagaccgcaacctcaacaccaccttcttctaccccgccggaggaggagaccccattctataccaacacctattttgatttttcggccaccctgagggttatattcttatcctaccaggcttcggaataatctcccatattgcaacttactactccggaaaaaaagaaccatttggatacataggcatggtctgagctatgatatcaatcggcttcctagggcttatcgtgtgagcacaccatatatttacagtaggaatagacgtagacacacgagcatatttcacctccgctaccataaacatcgctatccccaccggcgtcaaagtatttagctgactcgccacactccacggaagcaatatgaaatgatct

SEQ ID NO: 97636 - DNA, 374 bp, Homo sapiens
  misc_feature (1)...(374): n = a,t,c or g
agttaaatttgagatattaaaaaacgaagaaatactgcttactacacagttggactctcttaaaagacttataaaagaaaaacaggatgaagttgtctattacgatccatgtgaaagtccagaggaacttagtcattgactgtggtggggctgcaggacgataagaattcggaagtgaaagaactcagaaggcagtgccagcagctggagtctgttaaacggggcagtctgtgtcaaaagagcttctctccagagtagaaagacggagtctcactctgtagcccaggctggagtgcaatggcgcgatcttggctcaccgcaagctccccctcccgggttcacgccattctcctgcctctgcctcgcgagtagcn

SEQ ID NO: 97637 - DNA, 432 bp, Homo sapiens
gggtgtgtgtgtgagagcccatccaggcatgctcttcccggcgtgtgtgtgtgtgtgtgagagcccatccaggcatgctcttcccggcgtgtgtgtgtgtgtgagagcccatccaggcatgctcttcccggtatgtgtgtgtgagagcccatccaggcatgctcttcccggcgtgtgtgtgagcccatccaggcatgctcttcccggcgtgtgtgtgtgtgtgtgaccccatccaggcatgctcttcccggctgtgtgtgtgtgtgtgagagagagcccatccacgcctgctcttctaggcgtgtgtgtgcgagagaccccatccaggattggctttctttgccgaatgcacgcctctttcttgtgctctcacagtgcgcgaggggcgacatcatccaaaaatacgacggcgcgtctgtatctggcattatg

SEQ ID NO: 97638 - DNA, 414 bp, Homo sapiens
ggcagaccgcaacctcaacaccaccttcttcgaccccgcctgaggagtagaccccattctataccaacacctattgtgatttttcggtcaccctgaggtttatattcttatcctaccaggcttgggaataatctcccatattgtaacttactactccggaaaaaaagaaccatttggatacataggcatggtctgagctatgatatcaattggcttcctacgggttatcgtgtgagcccaccatatatttacagtaggaatagacgtagacacacgagcatatttcacctccgctaccataataatcgctatccccaccggcgtcaaagtatttagctgactcgccacactccacggaagcaatatgaaatgatctgctgcagtgctctgaaccctaggattcatctttctttt

SEQ ID NO: 97639 - DNA, 470 bp, Homo sapiens
  misc_feature (1)...(470): n = a,t,c or g
tggataantttgatacctaatgcacttgcnnacgccaagcnnggcacgagggttaacatggtatatgtattgttattaaagtaagggacccacgtttaatgttttttatttatttcatgaggaaaagctttctgtagaggaacaaatttgagaacaagtttcaggaaattgtcttttttgttgatgttctctaatcatgttctcctttctgtatcaacgattttaaaaatattttactttatggtatgccttattttttttccttttgcggggaatttttgttctattgattatccatataaattttttttttttttttgaaacggggtaatcttttgtctttttggcgggcgggcaggggcacaattttggctcactgcagcttcattcccccaggactaagggatttttttgcctaaccctcctgaaaagcttggaaaacgggcatgccccaccatcccgggttaatg

SEQ ID NO: 97640 - DNA, 434 bp, Homo sapiens
ggggatattatggggcctggcgccatggctcatgcctgtgatctctgtgcttcaggaggttgaggggggaggttcacttgagcacaggagtttgagaccaacctgggcaacatagcgagaccccgtctcaaaataaagatataggatattacaaaggatagttatgaacagccagatataagagatacacagagggaggcctgggggaaggggtgcaaagcttccgtgtcttctctaggcactgcaccctctaggaagctccatgagttcagttatccagaagccctctgcatcccttttgggtttttatgggcttcattataaaggcatgattgggccaggcacagtggctcatgactgtaatcccagcacattttgaggctgaggtgggagaatcaattgagccctcaggtggcaactgaggctgcagtgag

SEQ ID NO: 97641 - DNA, 459 bp, Homo sapiens
gacttagctaacgccatgcttggcacgaggcggggatccaccgtgttagccaggatggtctcgaactcctgactttgtgatctgcccgccttggcctcccaaagtgctgggattacaggcatgagccaccgcgcctggcccattatcttcctcttttgaggtaatggatttgtttggagatggcatgttagtacacgactgaatatggaaaggatatcgagctatctattttgttaattttatttttggtttttatcatctagatttttatcatggattagtctgaaatttaaagttctggccagccggttttctttcatcttgtagtttttacagtatttccactgcgcatatgcaaaatgggtattacataactgtatcatatttggtattgataatatttttcttttttgaaacgaatcttctttgttccccacccttaattgaatacctgtgttt

SEQ ID NO: 97642 - DNA, 469 bp, Homo sapiens
  misc_feature (1)...(469): n = a,t,c or g
nattgaaaatcgatagccacttgcccangaccacgccaagcttggggaaggcagcctgcatgtgagacgctgggctctccagggaggggaagacttcattcgggctgcggccccatgctcaggtccggtctatttagaacactttttttttttttgggaaaaaccaaaccgcgggggggaaccccacaaggcctgtaggggaaccccgttttaacggcggttttttaaaccgggggtgggggaaagggaagggaaaggaaagggcttttaacaaaaaaaaccccgggggggggggggacccttcccggggtttccccgggccaaaaaccaccccccgggtcccccccattttggttaaaaacccctttttggggaaaaattaaaggggggcggggaaaaaccaccggaaccctttttaccttgttcagggggaaaagggcaccggaaattttaattcccccaggccccc

SEQ ID NO: 97643 - DNA, 424 bp, Homo sapiens
  misc_feature (1)...(424): n = a,t,c or g
ggcaaatatacacaatagaannnnaaaaaattttcgttacttttttgtttgttttgagatggagtcttgctctgtctcccaggctggagtacagtgagccaagatggcgccactgcactccagcctgggtgatggcgtgagactccatgtcaaaaaaaaaaaaaaaagttgggggggagaaaaaattggcccagcccgggggcctccctctggaattccaaccttttgggggggaaggggggggggattttttgggggcaggaatttaaaacccccccggcccacgggggaaaacccttttttttaaaaaaaaaaaaaaaataaccgggcgggggggggggcccctggtacccccccttctccggggggggggggggggaaaacccctaatttttgggggcaaagggttccagagccccaattt

SEQ ID NO: 97644 - DNA, 402 bp, Homo sapiens
  misc_feature (1)...(402): n = a,t,c or g
ggcgtgcaggtagaggcttactacaagtgtgaaaacgtaggcttggattaaggctaccgcgatttctaggatagtcctttcaattataattgtgaacatgatccgtgtctagggaaggataatggttgatattgctagggcggcgcttccaattaggtgcatgattaggtggcctgccgtaatgttagcggctaggcgtacggtcagggctattggttgaatgagtaggctgatggtttctataataactactatggggataaggggcggaggtgagccttgtggcaataagtgggctctggcatttttaatctatcaccctattcaaaaactaatggttgtatacacaacatgaaaacattctcctccgcataagcctgcgtcagattaaaacactgaatn

SEQ ID NO: 97645 - DNA, 649 bp, Homo sapiens
tatatctcctaaaaacattaaaatgtttaaatgcagaaaacaaaattgtttgtagaatacaattataaggatgcacaaaataaaaagactacaagacaggacggacgtctctccaaatgttacaaaaaattaaagagagctgcaggcggggaggagggaggaatctgtctccccctgggactactctggctcaccgcccctccctgactgctcctttggcccttatcatctccagaggcaagttcaggtagatctgaattttgtcacacacgctgtcctgtaagcccagaagtcccctgggcactgctctcgcctcccaggcccagacagtacctagaactgggttctctctggggcaagggcatcccatttatccccctcctagactgtgtccccttcaaaaaggctgcaacagtgaactctgcgtttatgctcacctcccccaacctcccatctctttctgagttaacagagaggccaacagctggtcctccagtccccaagctgaagctgggcagctcttgggcacataggcatggtggcagctatgccagggctccatcccatgccttcttcagctgagcacctcttcctggggccccagagggaacacagcccctggctgatggcacagggtcagggtcctacc

SEQ ID NO: 97646 - DNA, 464 bp, Homo sapiens
  misc_feature (1)...(464): n = a,t,c or g
atttgagaacttaagaacngtcgnggaattctgctttcaccatgattgtgaagcctccacaaccatgtggaactgtgagtccattaaatctctttcctttatgacttacccagtctcaggtatgtctttattagcagcataacagcagactaatgcaacaggctaagaagggagttacagtattggccagggtgattgacctggactatgaagacgaaatcagtctactactccacaatggaggtaaggaagagtaggcatggaacacaggagaacccttagggtgtctcttagtattgccatgccctgtgattaatgtcaatgggaaactacaacggcacaatcctggcaggactacaaatggcccagatacttcaggaatgaaggtttgggtcactccagcaggtacaaagccacaacctgctgaggtgcttgctgaaggcaaagagaataaggaatgtggg

SEQ ID NO: 97647 - DNA, 575 bp, Homo sapiens
  misc_feature (1)...(575): n = a,t,c or g
tcctacgctctcgtcctctccacatcattctctcgtgcggtttattagttacaccccgctccctctctccccccccccccccgcagcgtttgagactttgtagaccatccngcagngcggcggaattctttttctcattgagaacaaaactccactttgcaacattgcctctgcgtatagaggggagcaagactttataaaactgttgctagctttaccatggctgctgaattagctgaattcaccatggaggtctgtttgatgttgcagctaaaaatattatccacgaagaagttgaaaaatatgacaagcagtatcgaggcaaggagcttctgggatttgccacctacaagacatttgagatcatcgtgcatcagtacatccagtagctggtggagcccgcccttagcatgctccagaaagccatggaaactatccagcaagctttcattaacgtggccaacaaacattttggcgaatttttcaaccttaaccaaactgttcagagcacgattgaagacataaaagtgaaacacacagcacaggcagaatacatgatccaacttcaggtcaga

SEQ ID NO: 97648 - DNA, 411 bp, Homo sapiens
  misc_feature (1)...(411): n = a,t,c or g
atcgcttgaacccaggaggcagaggttgcagttagcctagatcacgccactgcactccagcttgggtgacaagagcaaaactccgtcttaggggaaaaaaaaaaaaaaaaaaaaaaaaaaagggtgggggccaaaaaaaaggggggaaaaaaaaggggggggttggggaaaggaaaaacccccgttttaacccaaaaaagggggttaccctaaacgaaaaaaggggtagggccccttttaaaaaaaaaaaaattttttccctttccgggaaaaccccaaaaaagggaggggggggcggggtccaaatgttttttgaaaaaaaccccctggggggtgggcaaaggaaaaaggttgggtacctaaaaaccttggggcccttaaaggtctatgggaaccccttttgatttgttn

SEQ ID NO: 97649 - DNA, 397 bp, Homo sapiens
cccacgcgtccgctagttctagatctcgagcggccgtcctttttttttttttgggacccttgggggggggggaaccataaggggggaattctttgaatattcccttaaaaaaccttttaaaggggggcccccaaaccctcgcggggaaatcccccagggaaaaggcgtgtaaaacccaaaacccatttttaaaaatttggcaaaaatggggaaaaggggttttttgccggtgggttttcccattttccttgggcagggggggataaaaaaaggggaaaaatttcgcgcaaaaacccttcggggctttttaaaaaaaaaaaacccataggggcccccttgggggggtttaaataaaaagggaaatcccctttttaaaaaaaaaattcccccttctttt

SEQ ID NO: 97650 - DNA, 410 bp, Homo sapiens
  misc_feature (1)...(410): n = a,t,c or g
cccacgcgtncgcctgcttcaattgccctttcaataagcttggatctctatttaggaaaggccctttaccttggtaagggttttcaaaaatttcttggctatttctggcctccttttttcatattttagaattaattttttatatgtacaaatacacatacatacttttttcaggaagttgttcgttttatcttatgttttcagatttactgatgtaaaattttttttttatattcttcctttcttccccccacatttcttatttggctggatttgtagctatgctgctctgtaattttttatttatttttgctttctcccttttttttttaatggaccaacctcaccatagattgggctatttttattaatttttttttttaaaaaacccacctttgggtttggtggaa

SEQ ID NO: 97651 - DNA, 433 bp, Homo sapiens
gggttctgtttccatacaacattgtttatttccgattccttagaagatcctttattatgaataacctcagtgtaatgttaatttcccgtccccatgtcaaaattgtcaccctaagccttttttttttttttttttttttttggggggaaggggtttttttttttcccccccttgggggggggggatttttttttttttttgggggggtttttttttttgggttaaagggcccccttccaaggtggtgaaaaccaggggttgccccaaccccccggggcgtttttttttttttttaaaaaaggggggtgccccgggttgtttaaaattttgtaactaaaaaaatggcccccttttttgtttccaaaggggggggatttttggggaaaaacattggcccccccctatcttttttttttttaaaaaagatttattt

SEQ ID NO: 97652 - DNA, 416 bp, Homo sapiens
  misc_feature (1)...(416): n = a,t,c or g
tgaaaatgtttagacgggctcacatcaccccataaacaaataggtttggtcctagcctttctattagctcttagtaagattacacatgcaagcatccccgttccagtgagttcaccctcaaaaaaaaaaaaaaaaaaaaaaaaaaaaaaaaaaaaaaaaaaaaaaaaaaaaaaanataaaaaaaaaaaaaaaaaaaaaaaaaaaaannngggggggggggggttaaaaaaaaaaaaattttttaccggggggggggaaaaaatattttttttttttgggggggaaaaaaaaaaaaaacggggggggggtaaaaaaaaaggggggggggaaaaaaaaccctggggacaaaaaaaaaaaaaaggtggaaaaacaactttttttgggggggggaaaaaaaaaaaaagacggccganaaa

SEQ ID NO: 97653 - DNA, 257 bp, Homo sapiens
caaactcctgagccaacaacttaatatgactagcttacacaatagcttttatagtaaagatacctctttacggactccacttatgactccctaaagcccatgtcgaagcccccatcgctgggtcaatagtacttgccgcagtactcttgaagctaggcggctatggtataatacgcctcacactcattctcaaccccctgacaaaacacatagcctaccccttccttgtactatccctataaaaaaaaaaaaaaagg

SEQ ID NO: 97654 - DNA, 351 bp, Homo sapiens
  misc_feature (1)...(351): n = a,t,c or g
aaatattttgtgataatgcagggataatattttgatatttttgtggaggcgcgatctccatatgtttttcaggttggccttgaactactaggctcaagcaatcctcctgcctcagcctcccagagtgttgggattacaggcgggagccactgcgcccagccttaagtaactattttatttactacttgtaccttgcacgtaaatggttaaatttaatgtattaaatttttaattcataacatacctattctggtaataagcttgcaatacatatttggctttttcctttaaaatatgggaaatgtggaaaacaatgatctccaccatattatggtagacttatatttttan

SEQ ID NO: 97655 - DNA, 339 bp, Homo sapiens
  misc_feature (1)...(339): n = a,t,c or g
cccacgcgtccgcccacgcgtncgggcggaggttgcagtgagccgagatcaggccactacagccactgcactccagcctggcaatagagtgagactccatctaaaaaaaataaaaaaaaaaaaataacctatttttctgtaaaaaactgggggattagggtttttatagagattatattaaattcattcaccactgttaggccatagaaatgtctttgaaaaattaaattttttgaccctggagcaagaatatgttgaaaagtggctgggtgcagtggctcacgcctgtaatcccagcactttgggaggctgaggggagcgaatcacaaggtcaagaag

SEQ ID NO: 97656 - DNA, 365 bp, Homo sapiens
  misc_feature (1)...(365): n = a,t,c or g
tgcgatgacacctgacaggnnnnnttgggtttctttaatgacctccgctctagccatgagggttgacttctacttcataacgctcctcatactagggctactaaccagcacactaaccatataccaatgatggcgcgatgtaacacgagaaagcacataccaaggccaccacacaccacctgtccaaaaaggccttcgatacgggataatcctatttattacctcaaatgattgtttcttcgcaggatttttctgagccttttaccactccagcctagcccctaccccccaattaggagggcactggcccccaacaggcatcaccccgctaaatcccctagaagtcccactcctaaacacatccg

SEQ ID NO: 97657 - DNA, 492 bp, Homo sapiens
  misc_feature (1)...(492): n = a,t,c or g
cgttctanagaagnananaactgaagaccnactgaggttctacganagacaaccgganggaagtacgggtcgagccacgcgtccgcaccaactacaaagacttgttaaagtttttgtaaagcaaaggctatgacttcgaatctgaaacagagacagagacaattgccaagctggttaagtatatgtatgacaatcgggaaagtcaagataccagctttactaccttggtggagagagttatccaacaattggtattaagccacatttttaaagataattatgccaacattaatgctgagaaactttctggaaattaagtttgataagcaggaactgtgctatttttttatttttggcttttatttctcatataactattcaagttgaataattttgagaaactgattgatttattgttccccccccccctccctttaattatctagttaaatcattttcgggacattacacctgtaagatcacacccggatg

SEQ ID NO: 97658 - DNA, 402 bp, Homo sapiens
aagaaaggcacatcagcatagtgagcaagagtatggtctttgcaatgtatgtcttcggttcatatcatcttttccttagtagctatgtgatcttaattagttttgcacatacagttgaccattggtgattttaagcaaccctatctcatatgtacaatattggtaaaagaacaattcccacttagggcattgttagaggaacaagataaaatgtgtctaaaggacttagaaaagtacctagcacacagtaagtaataaatattagttgtcggccgggcgtggtggctcgcgcctgtggtcccagcactttggggggctgaggcgggtgaatcacgaggtcaggagttcgggaccagcctggccaacatggtgaaaccccatctctagggccgggcgcggtgg

SEQ ID NO: 97659 - DNA, 385 bp, Homo sapiens
cggacgcgtgggagaatcgcttgaacccagggggcggaggttgcagtgagccgagattgcgccattgcactccagcccgggcagcaagagtgaaactccatctggcaaaatactcagatcttaagtctatagttctataaattttttttttcgagacagagttttgctcttattgcctaggctgaagcgcaatggcgctatctcagccaccatgcccagccacagcacaaattctgatgggtttacatcctacgttggccacttctagctgtgggaccttgggcaagttacttaatctttttatgtcagttttctcatcagtaatataaggatagtaatacctctctgggttttagattaaggaagttaatataataaaaagcat

SEQ ID NO: 97660 - DNA, 411 bp, Homo sapiens
tagcggccgcgcgccggggcaggaggagccggggcagggggagcagggctctgaagggttggggtcagcacctgggggaggtgagagaggggtgcagaactcattcgttcctggtctgtactcatggggtcccttcccccttattctcctccccacttccttgtctttctctcttttttttttttttttgaaaaggaaaccccctttttcccccaagtttgaagggaaggggggaaattttggttggtgaaacccttgccccccgggttaaaagaatttctccgcccccaccccccaaaatattgggaataaagggccccccccccatgcccaattaatttttggttttttaataaaaaaggggtttaccccttggggccaaggcgtggctaaacccccgcccccaagaat

SEQ ID NO: 97661 - DNA, 398 bp, Homo sapiens
gcgccggggcaatttttgtatgttttagagtgacagggtttcctcatgttgcccaagctggtcttgaagtcctgggctcaagagatcctcctgccttagcctcccaaagtgctgggattacaggtttgagccactgtacctggccagattggtcttaatgaggtgctatagtacacacaatacatacataatgtactgtcaaatgcagaggctttttcaagggcataggtatttatcagtaagtacttcatctgcaacaagaccatacttagacaattttttttttttttgtaaaaacaaggtcatgccatgttgccaaggctagtctcaaactcctggcctcaagagatcccctcacctgagcctctcaaagggctgaaattatagggatgagcccg

SEQ ID NO: 97662 - DNA, 373 bp, Homo sapiens
  misc_feature (1)...(373): n = a,t,c or g
gcgccggggcaggatgcttcccagaaccccagggaggccaggcaatgatgcacagcaacctcaaaaacattcgctggttgactgattatttatttatctattttattttttatggacagggtctcactctgtcgcccaggctggagggcagtggcgcaatcacggctcactgcagccttgacctcctagcctcaagggatcctcccgccaaagtgctggaagggtgaagggtgtgagccactgtgcctggctacttttagattttttaagttttgggaaaccttacacatataaaaaagtagacaaagtagtatcatttgaagcanatcccagatatcatataatttaatatgaatgctttcagtgataaggc

SEQ ID NO: 97663 - DNA, 421 bp, Homo sapiens
ctcaggctgaaacactgagtaagttacatagacctcgcttaacctcccttcctgctaatgtgaaaaatacatacttgccctggctacctcaccgggctgttattgctggaatcagaggagataacatatgtggaagataaagtgaataaaagtactttggggaactaggaaaaaaaatttttttttaaaggaaaaaaaaaagggggggcccgcccaaaagaaaaaaactttagggggggggaaaaccgggggattacctttttataggggccccaaaaaaaaacccccttggcggcgttttaaaaaaggggaggggggaaaacccggggggccccaaattaatggggttgggaaaaaccccctttttgccgggggggggaaaaaaaaaaaaggccccgggtttttttcctgttttatttcc

SEQ ID NO: 97664 - DNA, 405 bp, Homo sapiens
cggtgttttgccatgttggccaggctggtcttgaactcctggactcaagcaacctacccagcgtggcctcccaaagtgctgggattacagacacgagccacctcacctagcctgatgagatttttaaaaaatattttctctgtacttttcattctcttttaatgaggaccaatgtacagttgaaataactggaacaaattatttttggtgtgtgtgacaattctgtttttaatgctatttgaacaagtgggccattagccagatttgtctttttgttgtaaaacaaaatttgactaattttacatgtttataaatcttatgctctcactgtttgtttttatttaaattacaattttatctgtttcctgacattgtctcctatatatttctattattaattgcaaa

SEQ ID NO: 97665 - DNA, 389 bp, Homo sapiens
  misc_feature (1)...(389): n = a,t,c or g
cattcctaaccattcctaaccattcctaaccattcctaaccattcctagccattcctgaccaagtgcgcagctcggcagcactaagcacattcacatggctgtgcagccgtgaccgcctccttctccagaacttctccatcttcccaaactgatgctctgtccccattcagcacacactcctcgtcctcctcccaaccctgggaccgtctgcacatactcgcccaggtcaagccctgccttcccgcaggagggcccttcaagtggggaggggctggggggcctggtcagcttgttctccagcccccctaaccatgtccaccctgcccccacctcancagagtcagggagaggcaggggcggaagggtccccagggagggagcctatgtg

SEQ ID NO: 97666 - DNA, 385 bp, Homo sapiens
ctttatgggtcgtcctttttttgggccttttaaaatttattttttaacccccaaaacttttggggcaaaaagaaaccccgaagcccttttaaaagcccctttttgccccgggggttttgtttgggggtcccggggaaccaaaaagggaaaaaaaggggggggcccaagggggcccaaaaaagttttccccccccccccccccattttcatttccccccccgaaaaccctttgggtggccccccttttccaagaaacccaaggccttagactttgccctcctttttttttttaaaggggcaaaggggcccttttttaaaaaaggggggggggccggtttaaacccccccctccccccccgggacttttgggcccccccaccccgcc

SEQ ID NO: 97667 - DNA, 365 bp, Homo sapiens
aaggaaagtagagggtcgagtttcatgagatgaagatttgaagctaacagagctcctccgatactacatgctcaacattgaagctgctaaggatctcttatacagacgcaccaaagccctcattgactatgacaactccaacaaagctctggataaagcccggtttaagagcaaagacctcaagtcggattgcgcacacccacgagattgctgacgagcctaagccccctatttcttatttgcaaaaaatgaactggtagttccgaccggggaacagcggcattttttacaagatgttccattaattgtccaaagaactcttacattgcgtacaccggatcacacttccctcccgctttcgctcc

SEQ ID NO: 97668 - DNA, 362 bp, Homo sapiens
catgacccttggccataatgggaggtttcttcacactagcagagaccaaccgaacccccttcgaccttgccgaaggggagtccgaactagtctcaggcttcaacatcgaatacgccgggggccccttcgccctattcttcatagccgaatacacaaacattattataataaacaccctcaccactacaatcttcctaggaacaacatatgacgcaccgccccgaccttagctctcaccatcgctcttctactatgaacccccctccccatacccaaccccctggtctacctcaacctaggcctgctatttattctagccacctctagcctagccgtgtactcaatcctctgatcagggggac

SEQ ID NO: 97669 - DNA, 414 bp, Homo sapiens
aggaagagaagtacccatttttgttggtataataagtagcacgagcaaagagtcagtgatttcgatgagactatagttggaagctgattctgattctgtctgtatatgacacgggcttggaaaggttgatgaagatgttggataactgaatcagcatctaaaaagatcaaaatatgttggaatgacagtgatcaaatctaatgagaatcctggctttagatactttcaagactccattaagtgaaagatggattaaacttttaaggctaataataatacttttttatttttttgagatggagtcttgccctcttgccaggctggagtgcaatggcgcgatcttcgcttattgcaaccttcgccttctgggttaagcgaatttcctgcctttccctcccgggtagctgggatggg

SEQ ID NO: 97670 - DNA, 422 bp, Homo sapiens
  misc_feature (1)...(422): n = a,t,c or g
agatggtcctggaggcagtcctcacctctgcctccctcgctcctccaacagctgccttctcccgggttccagcctctcagtgtgttggaaaggtatgggtgcggggtgggggggagctgaatcttcaatcggaataaaagcagccctccccttcaaaaaaaaaaaaaaaaaaaaaaaaaaaaaaaaaaaaaaaaaaaaaaaaaaaaaaaaaaaaaaaaaaaaaaaaaaaaaaaaaaaaggaagggggggggggggaaaaaaaaaaaataatttcgccccgggggggggggaagattttttttttttttgggggaaaaaattatattcccggggcggggttttaaaaccnggggggggaaggacacacccccccccacacataatttgtgggggggggaaaaaaaaggggggtttgtcagaat

SEQ ID NO: 97671 - DNA, 426 bp, Homo sapiens
  misc_feature (1)...(426): n = a,t,c or g
tccacctttattatcagtctcttccccacaacaatattcatgtgcctagaccaagaagttattatctcgaactgacactgagccacaacccaaacaacccagctctccctaagcttcaaactagactacttctccataataaaaaaaaaaaaaaaaaaaaaaaaaaaaaaaaaaaaaaaaaaaaaaaaaaaaagggggggggggggcttaaaaaaaaaaaaatttaacgggggggggggggggaaaaaattttttttttgggggggcaaaaaaaaaaattggggggggggggttaaaaaaccggggggggggaaaaaacgggggggaaaaaaaaaaaaaggggggggggaaaaaannnnnnnngnnnnnntngnaggcgggaaagggtttaatactcaggaggggtggtggggaccctcggagacg

SEQ ID NO: 97672 - DNA, 411 bp, Homo sapiens
  misc_feature (1)...(411): n = a,t,c or g
atctacccattaacctaccttccttcatcgccccaccctgtacacccactacccagcctctggtaactatcattctactctctacctccatgaaataaattttttagctcacatgagtaagaaaaaaaaaaaaaaaaaaaaaaaaaaaaaaaaaaaaaaaaaaaaaaaaaaaaaaaaaaaaaaaaaaaaaaaaaaaaaaaaaaaaaaaaaaaaaaaaaaaaagggggggggggtgtaaaaaaaaaaatttttaagaggggggggggggggggaaagtttttttttgattgggaattctaaaacttgcaggggggggggggttaaaaaacccgggggggagaaaaaaaaccgcgggcacccaaagaattctttgggaaaaaaaaaannnnnnnnnggnaagagggggggggg

SEQ ID NO: 97673 - DNA, 431 bp, Homo sapiens
tttcaccgttttggccgggatggtctcgatctcctgacctcgtgatccgcccgcctcggcctcccaaagtgctgggattacaggcgtgagccaccgcgcccggccttccttccccaaccttgaaatcctgaattcaaaagaaaatatgagaagatagtttgcctcatataaggcaacaggttgcttaatctttcttgcctatacacattcaagagctccagaaaactttctgatctacttaggatgcctgatcatcttcttgggtaaaagcaataagtcctacacagaatcaccaaaaccatgtctgttcaaggggtcttatacctgtgatacatgattgcatgcttcatgcaaaagggcttgttctgtgcaggggcatatctgggcatgggggttaacttctaattagaagactagttgctgaggaggag

SEQ ID NO: 97674 - DNA, 401 bp, Homo sapiens
tcgtgttgataaggagttgaatttacttatttgataaaaatttgacatggtttttgaaacaaaagggttttctatttagttactagtaagtcacaaaatttaattcctggtcagtgtaggctttactgtactctagaatatttgtagaataagtgatttggtgttatactcaaagagaaaaatgtatgtaatcctttgcatttcatgatatacaaattttaaaatggtaaattagtttcagttttttttgggttttgcttttgtttttttgagatgtagtctcgctgtgttgcccaggctagagtgcagtggcgcatttttagctcactgcattttctgcctcccgggttcgagcgaatctcctgcctcagcctcctgagtaggtgggattacagatgccc

SEQ ID NO: 97675 - DNA, 409 bp, Homo sapiens
  misc_feature (1)...(409): n = a,t,c or g
catggagtagcacacaactgttccaagaaaggatggtgtaggtatagatagatgtagctctccaagacatattgttgaatggaaaaaagcctgttgaagagtgatatacctcacacattattgggggttttttgttttttttttttgagacggggnntcgctttgccccccaggcgggggggcgggggggccccttcatttaacttttgcctccttccgccgggtccggggggacccaccctccttcttacttgatatccccggcccccatgcccaaatgatttttgcgcttttaggggagccgccgtttccccatgttggccaagcccggaccgacagcttggggcatccccatacccccccttttttcctcacgggcccgggtcccgccctaatcggggggtgtggg

SEQ ID NO: 97676 - DNA, 397 bp, Homo sapiens
tttcgtgcttgagcctagcacaggtggcgctgctgattcatctctgaaatgaccacatctgaactgggcgcaggggttcatgcctgtaatccccacacttcgggaggccaagatgggtggattgcttgaactcctgaccttgtgatctgcccgcctcagcctcccaaagggctgggattacaggcatgagccaccgcacccgggctataatggctactttcaagtttttgacagaaaattctaccatctatgtcatatcaatactgactttttttatgacgaaactttctgcttttgttttttggttggtggccctgcatactaagttattttggattgtatcccggacattttgaataatatgtcatgagactctggatttttttatttttttttg

SEQ ID NO: 97677 - DNA, 427 bp, Homo sapiens
  misc_feature (1)...(427): n = a,t,c or g
gtccggaatnnncggtcgacgatttcgtccgcaatacactcttcgtcttaacccattctcatctgtcacatgacctaggttgtgtcagcttcctatagatacctgtagtaatgtggaacaaatgtaccagagcccatncttttttttttttttttttttttttggaggggggttttttttttttttttggggggggggggggggggatttttttttttttttccccccccctttttggggttaaagggatttttttggctccccccttggggggggggggaaaaagggggggccccccccacccctttttttttttttttttttttaaaaaggggggggttccccttggggggggggggggggcaattttttcccccttaaaaatgggggggcccgcccccccaaaggggggttttttaggggctga

SEQ ID NO: 97678 - DNA, 388 bp, Homo sapiens
tttcgtctgaggcaggagaattgcttgaacccaggaggtggaggttgcagtgagctgagatcgcactactgcactccagcctgggtgacagagcaagagactctgtctcaaaaaaaaaatttttttaattaaaaaacattcagaaaagcaaagagtacagggaatttccatatgcctaacacctcaattcaacaattaccaatataatgccaacatcatgatactttatccttgattattcaggatatatctcccaaaactcagtatactctctaatattattataaacctaacataatgaatagtgagtagtttcctactatcatttaataaccagttaatgtggccaggcctgggtgatgctggtaaatttacagttctgaatgtc

SEQ ID NO: 97679 - DNA, 411 bp, Homo sapiens
  misc_feature (1)...(411): n = a,t,c or g
tttcgtganccgcccacctcagcctcccaaagtgctgggattacaggcgtgagccaccgtgcccggccggttcttgctttttataaagggggctggggagtgggtggacagggatgtgatcctggaatccagaactccatcactcagcctgtgtcttagtggggtgttaatggaggatgatggaaaatagcccacttctgatttctctctctccctcatagctctgtagaaatattttattattgaacaccctgtaattcagggttggtggcgattttatcaggtcatacaagtctacagttgacctttgcattatctaagaagacttgtgtttgcttagccaaggataaacaagaatccagtgtgggtggcttagggcttgnagctgtggtctctgtgtgcagggttgct

SEQ ID NO: 97680 - DNA, 429 bp, Homo sapiens
  misc_feature (1)...(429): n = a,t,c or g
tttcgttatatatcctgcactacctctgccacaccctcctcctcctcctccaccactatctcnnnnnnnnnnnnnnnnnnnnnnnnnnnnnnnnnnnnnntttcctcctcctcctcctcttcttcctggtcagggtcgcactctgacccgtcctctgcccgctccagctgggcagctggggagtcgggagtcgtgtggagcgccgccatcctccctgggagcgagcctccacgtggcctgaaatgcagatggacgccagtgacgggctgctctcagcacaccacacggtcccctcacagggtctcccgcagcctggcgggggcgcagggagcaggatttactcctcctgttatgtagttgaaggcaatggagatgagggaggaccgggccttcccacgatcttaccctgcaccatcaagacattctgta

SEQ ID NO: 97681 - DNA, 432 bp, Homo sapiens
  misc_feature (1)...(432): n = a,t,c or g
tttcgtgcattgtgacactaggaatggactcacacaggacttcctgcctccttgcagacactggggcaggaggaaaggggaaggcatctgaggcaggagtagaggggctgctgggctccttacgggaggttaaaggaggaaaagctgtgacctgttgagatggtgagggtcgaggtgggagccctgaggagggaagcttgggaacaggcaatgtgtaacgtggtctattgctacacttgggcctggggaaaaagtgacagaatgaaaagttgagccactggcctggcagtagcactgatcagagctccagcttaacaggcagggtggagggggatggccctatggaagagcagngtgttgccctcagtttccttatctgtaaaatgggaatcgtactccctttgttgctggtggntgcgaggattaaacaan

SEQ ID NO: 97682 - DNA, 451 bp, Homo sapiens
ctaatttttgtgtttttggtggagatgaggtttcgccatgttggtcaggcgggtctcgaactcctgacttaatgatccacccgcctcagcctcccaaggtgcagggattgcaggcgtgagccaccgcgtccatccacataggcatgattgattaaaccattggccattggtggtcaacctaaccttcagcggctctctccttccaggaggaggtcgtgacggaggtggggctgaaaatgggaaccctcaaattacacggttattccccggcagccccatcctcaggggctttccaaaagtcacctcattaacataaaaccaggtgtggttgaaagaggcttggaatgaacaaaattcatgccatttcatctttattgcttccgatctatttcaggaactgcatacaaaaatctaaacattggaactcttcttgcctttatcacttaggaag

SEQ ID NO: 97683 - DNA, 404 bp, Homo sapiens
ataagatctagtatttgatagcacaacagggtgactacaatcaaagatttattgtactttttttttttttttggaaagggggttttttttttccccccgggttggaaggccgggggcccatcctggtttaggggccaaaacaaccggggttaaaggaaacccccccccttaaccccccaaggggggggaccccgggggggtcccccccccccccgggtgttttttttggttttttttggggaaagggggtttttttttattgcccggggggggttaaaacttcgggaaaaaaaaaaaacctttggtttggccccccaaagggggggaattaaagggggggacccccggcccccccccttattaaaaaaaaaaaaacaaaattgcttttggttaaacaaaaaaaa

SEQ ID NO: 97684 - DNA, 400 bp, Homo sapiens
cggacgcgagggtttctgtattctctttgaaaagagatttacttaggcacctgtagtcccagctgcttggaaggctgaggttggaagattgcttgagcccaggagtttgaggccagcctgggcaacatagtgaggccccatctctaaaaaagaaaaaaaaaaaaaaaaaaggggggttttccccccccttttggggaaaccccctttttttccaaaccttctggtttgggttccactggcccaaaaggggccctttttccaaaggatgggggccccccaactaggggggggtaaaaccctttcccaaaagggggcccaaaagggaccctttttttaaaaaaaagggggcccccaaaaaagggggggattttcccaatcaagaaaaaaaacctttcacggg

SEQ ID NO: 97685 - DNA, 446 bp, Homo sapiens
tcgcgcctcggccttctgaagtgctgggattactggcgtgagccaatgcgcccagcccaaataacccttttttttgttttttttaaacaaaggccctctttttacccccaagagacagggaaagccccgaaattttccaacataaaccccttgcccccgaggaaaaaaaaaccccccccccccccccccctaagggggggaaaaaaggggggggccccccccccccgggaaatttttttttttttttggggaaagggggttccccggggggggggttttatttttggacctgggaacccccccccttgggcctttaaaagggggggaaaaaagggggaggccccccggcccgggcccaaaaaaaccttttttataaaaaagaaaaaaaaattctccccccacggggggggaaaggggaaggggggggaaaaaacactgtctccccc

SEQ ID NO: 97686 - DNA, 387 bp, Homo sapiens
actattaaatcaaccaaccaaacaaaatgttaaataaaggaagcagatgagtatgtgctaactaggctggcatgtgtctttgttggtgacatggagcctctgtcatcccctcacagactgcatacgaggattggttcatcaccctctacaacgtgctgtacaccagcctgcccgtgctcctcatggggctgctcgaccaggtaggagcctcgcacaagcagggacacttctggacagatgagaatgcgttagagaagtcccaagcaaacgtttcaatgcattcttctggtgtttacttctttctgatcaaaccctattataattctgttgtcaggcatcaagggtcatggctgtgcttcttgttttgtaataaggaaagaggatttc

SEQ ID NO: 97687 - DNA, 422 bp, Homo sapiens
  misc_feature (1)...(422): n = a,t,c or g
gattcccaaagtgctgggattacaggcgtgagccactgcgcccttcctcccttcagactttttaataggcacacattaaattttacatgtgttatatacatgtataattttgtgttttgtgttacaaagttaaattttgtgttttgtgttacaaaattacattttacatgtgttatatacatgtataattttgtgtttacatgtgttatatacatgtataatttacatgtgttatatacatgtataattttgtattttggctttatttgctggtttatcataagattccccatatcatgagtctctgtaatgatcgttttttatggaggcagatatttcattgtgtagatgtgtcatcactgatcagttaaactttatttgctcactcttgcagcattaggaactgagaatgtttcagtttn

SEQ ID NO: 97688 - DNA, 402 bp, Homo sapiens
ctgaaatgtagcactcagccccattaaaatgccttctaggaaaaatccgacttgcctcctctcatcttgctgaatttatcttctctctactcatctgcattatcaattcagctggatttccatcacctttgatatatctttttttttttttttttttttaaaaaaggaatctcttttttttccccaacgggggggggggggggggaatttgggtttattgaaaccccccccccccggggaaagccctttcccccccccaattttccgggggggggggaaaaaagggccccccccccccccctgggttatttttttttttttttaaaaaaaagggggttcccccatttaccccggggggggctaaatttttggccccggggaccccccccccccccccccccg

SEQ ID NO: 97689 - DNA, 413 bp, Homo sapiens
cggacgcgtgggcttcagcctgggtgacagagtatgactctgtctcaaaaaaaaaaaaaaaaaaaagggggggggggggaaaaaaaaaacaatttcccaaaaaaattgggccccggggctccctttttaaaccccgggggggggaaaaacccctttccttaaaaacccccccccccccctttttttaattttgaaaacccccttttaaaaaaggtggggcagaaccctgggaaccctttttaaaaccccctttttgtttaaaagaccgggggggggccccaaaaatttattttttccccaacccccctggggcccccaggggggctgcttttataaaaagggggggggggaaataatagggcccccccttttttttccccctcgcaaaaaggaaccacacccccttaaggaag

SEQ ID NO: 97690 - DNA, 409 bp, Homo sapiens
  misc_feature (1)...(409): n = a,t,c or g
agcatctgttattttttgacttatgaaaaacagccattctgatgggtgtgaggtggtatctcattgtgggttttcttttaatttctctaatgactagcgatgacctttttttttttttaaaaagggctggaaacccacgggtaggttttttttggacaagcatgggggggggttattgccctacttttaaaggaaaggtgggcctttttttggaaacctggttaaaattttaaaaaaatcgggggggtaaaaccttggcaaaaaacaaggttggaaaaaattttttttttttgggaggggggggggggggaccaattaaaagttcccttggggggaaaaaacctttttatttaaaaagggcccatttggacatttttggttttgggggaaatggtttggggaacctccn

SEQ ID NO: 97691 - DNA, 395 bp, Homo sapiens
tgtgaacccaggaggcggagcttgcagtgagccgagatagtgcctctgcactccagcctgggtgacagagcgagactccgtctcaaaaaaaagggctgataatgataaacagggagcactccggtcctttttcttaggttttccttttttccttcctctccaccccacaagttttgctttttaaccaaggtgtctctgcttgatgaaattcacatgctagtctaaatctttttttctcccttgtaacatttatgtgccccaaactggttagtatatgggtacagcattccctttccaattgggaagcggaaaaagagagtatgggatattttagaagggagcctttgaaccttattatatttccccatcattgatagtgacaatcttaaaagggt

SEQ ID NO: 97692 - DNA, 391 bp, Homo sapiens
cttaaaatggcacgtgctttacacatttcacaccccccacctgcaaagaacagatgccttctattccctggctcccttgcattgttgcccaaagtagttacatatgaccttttactgagacaacttgcaatgtttctttttttttttttggaaaaggggtctcctttttttgcccaggggggggggatttaaatcaacgggacccttttcctttggggttccagggaccccccccccccccccccctggggaggggggattaacgccaaagccccccccccccggttaaattttattttttttggaaaaaggggatttccccttgttggcccgggtggtttaaaaccggcaaaaaaaaaagaatccccccccctccccccccaaagggggt

SEQ ID NO: 97693 - DNA, 413 bp, Homo sapiens
aagtagtatctcctaacatactacttttactttaaggcacctaacatactgatgaagcttaactacataccagacagaatctctaggcaaaggaaccagatattggctgtggtgggttgctttttttttttttttttttggggcgggttttttccccccccccccgggggatttttttggccccccgagttttaaccccccccgggggggggttttttttatccaaaagggccccaaatatgaaatttttttgccccccccccgcccccctaggggaaaattcccccccccccccttgggggggggggggaaaaaaggggggcaaaagggcgggggggggggcgccaacccataaacccccccttttggggggggggggggggggggtcttttgggggggggggtttaaaacc

SEQ ID NO: 97694 - DNA, 423 bp, Homo sapiens
tcgcggacgcgtgggtaaagtgcttataagcctatttaatacagatttactttggttactgtgtattttgatttgttttcacaaaacgcaataattgtgcaatggttaatgccattctaggatgaagtgtgtgtgtgtgtgtgtgtgtgcacgcgtgtgtgtgtgtgtgtgtgtgtgtgagagagagagagattagagaagtctagagaagttctgtccaggcctctctcttttgtaagagggggtggattccctgcttttggacgctctgctgtcaaaaaatatatcttaaatctgatggccggccgggcgcagtgtcttacgcctgtaatcccaaatatgtgggaatacaggcacctgacaccacgcgcgtattttttttgtatttttagtagagacagggtttcaccatgttagccgggg

SEQ ID NO: 97695 - DNA, 419 bp, Homo sapiens
tttttagtagagacgtagtttcaccctgttggcctggctggtcttgaactcctgaccttaggtgatccacctcggtaatccaccttaggtgatccaaagtgctgggattacaggtgtgagccactggacccggcctctgtaagcttttttctgtgtttaaaacttttcatttttgtacttttaaaacttttttttttttttaaaccccccctttattctaaacttacccgggggcgggataataattataattattttccacctccaaatcctggcccattgccccattggagggccgacaaaagcataattgggggaaaccgccgcctcctataaaaacaaggccttttttaaaaaattttcctgaaggacttgctgggggctggtttacggttaacttattttttaaataaagaacc

SEQ ID NO: 97696 - DNA, 397 bp, Homo sapiens
ggagaaagaggttgcagtgagctgagatcatgccactgcactgcaacctgggcggcagaatgagactccatctataaaaaaaaaaaaaaaaaagagcccccaaaattttttttggcgggtttttcgggggggggaaaaaaaaccccataaaaaaaaggggtaaaattaaccccggcaaaggggggggggggccttataaaaaaaaaagggaaaacccctttttttgtggtaaaaaaaggttcaaaaggcgggagaaaaaaaggccaaaagctttttgggggggggcccccctcttttggaaaaaaaaaaaggttttccgggggggaaaaattttgggggttaaaaaaaaaaccggtttaaacgggaaaaaaaaaacctggtggggtttttcttttgg

SEQ ID NO: 97697 - DNA, 408 bp, Homo sapiens
agaaaatgaaaacttgaaataatgcttagtcatgctattcaattactccatggcctttttttttttttttttttggccccctttggggggaacccggaacaagccccccctgaaaaggggggaccaattttttcccctgggggggaaaaaaaggtaagtacctcctttgggggcaaaattggggaaaaaaaaaccttttaaggccccgggaaaccttccaatattgggggttttcccaaaaaaaaaaagggctttggccccaaaggaacccgccctgggggggggggggaaaaccttccagaaaatttttgggccaaaaaattaaggcctcaaaaaccccaaaagctttttgttcctggtaaaaaaacataaaaaaaaccccgggcccccaaaatttggggtggtttc

SEQ ID NO: 97698 - DNA, 408 bp, Homo sapiens
  misc_feature (1)...(408): n = a,t,c or g
tttcaccatgttggccaggatggtctcgatctcctgacctcgtgatccgcccgcttcagcctcccaaagtgctgggattacaggtgtgagccactgcgcccggccctctgttgatatttctttctttcttggtttacctgaaacaagaaatttgtagaattttaagtattaatgagctaggaaaagtaatgagttcctataagaggatacttgtaaatacttaaaaaaaaaaagctttatctaaaactcttgtttttttgggacaactttttttttgtttttatagccaacattataaaaaagggccctaaattttattaaggaaaaatcttaaccccggtttgggccaatttttttacaaaggttggaaggaatcctggaagttggaaggcggattttattttggtn

SEQ ID NO: 97699 - DNA, 432 bp, Homo sapiens
  misc_feature (1)...(432): n = a,t,c or g
cggggtttcaccgtgtgagccaggatggtctctatctcctgacctcatgatctgcctgcctccgtctcccaaagtgctgggattacaggcatgagccaccgcacccgggttttttggggtttttttgctttttctttttctttagagatagtgtccagcctgggcaacagagcgagaatccgtctcataaaaaaaaaaaagatgaggggcctttttggaaaggggcggggaaaatttttttatttaaaccaaattcttctgcactttgaggctttaacccgcggaatccccctaaaaacccccccctccctttaaagccccttttttttaaaggcgcgcaaaaaaagggtggggaaaaaaacccccctttcttggtttatgccttgatccccaacctttgggggtggggggggaaatcgattccttttgggn

SEQ ID NO: 97700 - DNA, 330 bp, Homo sapiens
ctattgcgcgtacggacgcttcttttgcgcgtgatgcaccaggaaagccagttttatttaaggctcggtgggtcatgttttatgaaacgatcctactctaaattgcattctggaccaagacaccctctatggatccatcatgataaatgagtattatgaacgcgcatcggatgcctgggccctccttccagatgaggagcaattgccagagggagatcaaactgtgattgcataatgagcttgagatatgagtgggggccagcagcatcgagtaagcctggccagagctgtctacagtggggccgacgtctacctcctggatgatccctt

SEQ ID NO: 97701 - DNA, 426 bp, Homo sapiens
  misc_feature (1)...(426): n = a,t,c or g
ccttactggatggagcacttaggcatttgtatctgactgaacaggaaattgggagctgttaatgtgattgaacaggtgagtgactcaacaggtgctcgcttttcgatgactctagcagctgggggtgggatgactaaaaacaggaagcagacctggaaagggaggagggatgggaagggtgagaggcaagccacaaatagaatcagtagaatctagtgactgactagggaggaggagttacaagacacttaaagaagaattagataaatccacttaaggtctaacaangacttttcttttcttttctttgtgagagacagagattctctctgttgcccaagctggagtgcaagggggcgatcttggctcactgaagcctttgcctcttatagtgaagagaatctcatgcctcactctcttgagcaa

SEQ ID NO: 97702 - DNA, 409 bp, Homo sapiens
agaattgcttgagcccaggagttcgaggtgagctatgattacaccactgcacttaagcctgggtgacagagcaagaccctgtctcaaaaaggaaaacaaaaaattactgagagcggtggctcacatctttaatctctgccctttgggaggctgaggtgagagggttgtttgaagttgggagttctagtccagcctgggcaatacagcaagaccccatctctactaagaaaaaaaaaaaaataagcaaaaaaccaaaaccaaagagggggcgcccttttaaaaaaacgctatttttctgcccggggtgggggaaatattttttttttttgtggggccaaaaatactgagcgcgggcgtggtataaacaaccggagggggagaaaaccccgggtcctcacccaataattgc

SEQ ID NO: 97703 - DNA, 405 bp, Homo sapiens
gaaggagaatcacttgaacccgggaggtgtgttgttgcagtgagctgagatcgtgccactgcactccagcctgggcgacagagcgaaactccgtctcaaaaaaaaaaaaaaaaaattttagggggcggggggaaaaggggaaagggcggggtggttaccccctggaaaaaaaagtaacaggggttgggtttttccaaaaaatcaccctggggtaaatttcttttaaaaaaaaaactctctggggccccaagaaatctgatatttggggagggggaatttggcacctctatcccggtgtccggccaaatggggtgggccctcttttttcaatttgggtggaaacgggcccaaacccccttataaaattcgaacggggggggagagggccattccttttcttgtagg

SEQ ID NO: 97704 - DNA, 386 bp, Homo sapiens
gtgcctgtagtttcagctacttgggaggctgaggtgggaaaatgacttgagcccacgaggaggaggctgcagtgagctaaaattgcaccactgcactccaacctgggtgacaagagtgaaactgtgtctctcaaaaaaaaaaaaacccacccaaacccaaacccaacccaaaccaaaccaaacgggggggggatccccgggttccccttttttaaattaaaaggtttaaattcccgaaaggtttttgaacccaaccttcttgaaaacgcccccaaaggcccgtttaggggctggcttcaccctggaatccccacctttttggaaaaggggggaaaagggattttttggccccaggatttaaaaaccacttgggccaaaaaacaaaa

SEQ ID NO: 97705 - DNA, 341 bp, Homo sapiens
gagattgtgccactgtgctccaacctgggtgacaaagcaagactgtctcaaaaacaaaaaacaaacaaaaatctagcaacctggatgctaagtgaaaaaataaaaacagaatgagatataaattcaaaatatacaaataatacagatcttgtaaaaaacaaatagtattaattagataaacacgaaagaatgattgccttatgagctgggaggaaaatgggagaaaggcaagtgtatagaaaaatgaaagaattttaaagcagaaatgaagaatttttgaaaagtttggtgatctttaaacttgatttgggttgaatgagagataaagaaaattaatagga

SEQ ID NO: 97706 - DNA, 379 bp, Homo sapiens
  misc_feature (1)...(379): n = a,t,c or g
atttttttattttttttacttttaatcttttaaaggaagggtgacagagtctcttagttttctttcatctgagaacatctttgttttgccttcattcctgaaggacattgttgctggatgtagacttctggtttcacagttcttttcttttagcacttcaaacatcaagttccactgtgctttggcctccgtttttctccatgagaaatctacaggcatttgaatcgatgttcctctatatgtaatgagttgtgtttctctggctgctttcaagaatttttccttcatctttgcttctagaagnttgattatgaaggatctttatgtagggatctttgacttcatcctggtttaagttgcttttttaattaataaaatt

SEQ ID NO: 97707 - DNA, 387 bp, Homo sapiens
gatatcttgaaaaacaggaaaattgttagccacctctgcccctggagatgggatcatggtgatggtggagactttttgtttggttgtttctttctttctttctgtctcaaaaaaaaaaaaaaaaaatccccttccccaaataaaaaaccctttacctaaaccttgttgggtttttaaaagggcccccacccccaaccattgaaaagcctttccgggaccccccaaaacccccccttgaaaacaaccaaaaaaacaaattccttgccggccccccaaaaaaggtcctttctgtatataaccaaaccctggtataaatccttccccccttttttttgaaaaaaaaaacaaaggaaaggccccccccttcaaaaattcaaaacaaaaacc

SEQ ID NO: 97708 - DNA, 407 bp, Homo sapiens
gaataccttccaagaccagagtggcagctccagtaatagagaaccccttttgaggtgtagagatgcacggagggacttggagcttgctattggaggagttctccgggctgaacagcaaattaaagataacttgcgagaggtcaaagctcagattcacagttgcataagccgtcacctggaatgtcttagaagccgagaggtatggctgtatgaacaggtggaccttatttatcagcttaaagaggagacacttcaacagcaggctcagcagctctactcgttattgggccagttcaattgacttactcatcaactggagtgtacccaaaacaaagatctagccaatcaagtctctgtgtgcctggagagactgggcagtttgacccttaagcctgaagattcaactg

SEQ ID NO: 97709 - DNA, 396 bp, Homo sapiens
gaaaaattagcagagtgtggtggtccgcacctgtggtcccagctatacaggaagttgaggctggaggatctcttggacccaagaggtcgaggtagtagtgagccatgtttgcaccactgcactccagcctaggtgacagagtgagaccctgtcaatcaatcaatcagtaaaatagtgggcatcacatagtggatctgagttcctttagggaatggtcccaccctgagacaaggaaagctgtaggaggccttgtggcacactcacactaaactacatgtagatgtgaccaccactcatctaactctagtatgggtcacccaacatttctgggtgcaaaacatatatcctaactgtactcaggcctttactacacactgcagcaacatgcatgttgga

SEQ ID NO: 97710 - DNA, 373 bp, Homo sapiens
aaattgcattgaagagtggaagaaaagtcgacataagagaattagggcatgttgtttgcccaggctggtcttgaactcctgagctcaaccaatccacctgcctcggcctcccaaggtgctgggattacaggcgtgagccaccgtggctggcccttaatatgttttaaaaggatgtttaatactcttcattactgtgttatgcaatagttgcatgatgatttttctgatttctacattctattttttttctttttaaaatggagcacagaagtacttagtttctgatgtttttccatcttggcccagaaatttcctttttttttgttattttatgaagcacaaaactaaatatttttgaaccaagagactactg

SEQ ID NO: 97711 - DNA, 376 bp, Homo sapiens
agagacagggtttcactgtgttagccaggatggtctgtgtctcctgacctcgtgatccacccgcctcggcctcccaaagtgctgggattacaaaatgcgtgagccaccacgcccggctgatggttttattaatataagggactttaaccctttgctcaggacttctacttgctgctgccatgtgaagaaggacatatttgcttcccctttcaccatgattgtaagtttcctgaggcctccccagccctgcagaactgatcccatccagaatacattacctttagtcatcatgtctcctgtggctcttcttggctgtgacagtttctcagctttcccagttttaatgaacttgccattttcatcagattgtaccaag

SEQ ID NO: 97712 - DNA, 388 bp, Homo sapiens
ctgggcataggggacccagctcctcctgaggttgaggggggaggatctcttgaatctaggacgcggaggttgcactgagccgcgattgcaccactgtgctccattctgggagactgagccagaccctgtctaagaaaaaaaacaggcggccaaagccaaaaactcccttttaaccgctgccttactgaaaacccaggtaaagaaagactctgttgcatggtaataattatcgccctttgaaaaaagaccagtcctcattctttacccgtggcctgacaaggcgagttatgcggattacacacctttctaaaagaaaggctggttgttttttttggtgcacggacatgaccctttttgccatgaccgtgttttagacacccctgttttt

SEQ ID NO: 97713 - DNA, 391 bp, Homo sapiens
ggctattatcaaaaagacaaaaagtaacagatggtggtgaggatgtagataaaggggaatgctagtacactgtttctggaaatgtaaattagtacagccactatgaaaagcagcatggaggctgtgatggttaatatgagtgtcaacttgattggattgaaggatgcaaagtattgctcctggctgtgcctgtgagggtgttgccaaaggagattaatatttaagtcagtggactgggaaaggcagatccaccctcaatctgggtgggcacaatgtaatcagctatcagtgcatccagaataaaagcaggcagaagcaagtggaaagactagactgacttagtcttccatcctacatctttctcccatgctggatgcttcctgccctcaaa

SEQ ID NO: 97714 - DNA, 424 bp, Homo sapiens
ctgagttgctgggattacaggcatgtgccaccacacccggctaattttgtattctcagtagagacggggtttctccatgttggtcaggctggtctcggcctcccaaagtgctgggattacaggcgtgagccaccacgcctggccaggctatttaattacttttaatattaacgtgaataaattcttctctcactttttcttttttctttgagatggggtctctgttgctgaggctggtgtgctccggcaccatcacagcccattgcagcctcaacctccccaggctgaggtgatcctcccacctcattttttgtatttttttgtagagatggggttttgccatgttgcccaggctgatctctaactccttggctcaagtgatctgcccgccttagcttcccaaagtgctaagattacaggtgtg

SEQ ID NO: 97715 - DNA, 427 bp, Homo sapiens
gttgccaggctggtcttgaactcctgaccttgtgatctgacagcctcagactcccaaagtgctgggattacaggtgtgagccaccgcgcccagcctaaaacttctgatcttaaagaccagaacaaaatcaaaccacctgttccaatcccaatcttaaagttcaggagatggtcaagtaatttcttgatcagaaaatcagatggaaaggtaactaagtgttgtacagtcacctattatttcaatgaaggtacagcattcaaatacttaagcagaaggacataaacttgtattttcaaaatacgggagggaaaaaaatcaaagcacaacactttgggaaaaggtgttcaagctatttcagaacatgtttttgaggaggaaaaaagtttaaaatactctgaagttgagatttgcatcaagtctttgctat

SEQ ID NO: 97716 - DNA, 435 bp, Homo sapiens
ccagcatgggcaacatagcaagaccctatctctacaaaaaacaaatttttttttttaatgagctgggtatggggtcttatgcctgtaatcccagctactcgggaggctgaggcgggaagatagcttgggtccaggagtttgggaagtttacagtgcgctgtgatcatgccactttgttcccggaaccaagctgggtccaggagtttgggaagtttacagtgtgctgtgatcatgccactttgttcccggaaccaagctgggtccagctgtgttttctggaggcccaataacaggaagcagacaaactaggaaagaagggaatttattgctataaccagatacaaggagaaggccagagataattccaccagaccaactcaaagggttgcaattttcttagtgcttatataggttggggttatgtgccttcatgca

SEQ ID NO: 97717 - DNA, 549 bp, Homo sapiens
ccacgcctggccagaagtttttaaattgggaaaattttattaattcttagctaggccaatcttacctgcttttactcaggaaatgtttttctttcaacttccaggttggggatttggatatcagctatattaatatagagggaatcactgccactaccagccctgaatccagaggttgcactctgtggcctcagagcagcaaacacacccttcctacagaaaccagtcccagtgtgtacccacttagtgaaaatgttgaagggacagcccccccttaagcccaccagtccttcatgtccccaccaagttgggggggttcccccctgaatcttttttttggggggggggggtttgaaaaggaacaaagtcctttaaaaaaaaaaagttttaccctttatcccttgggcccccccagtgaaggggaagggcatttttagccctcccccctttgtttccctccagggtttcaaagccccccaaaaactgggattcctagtggggatgaattgggctttttttagactacccctggcccggataaaaaaaaaa

SEQ ID NO: 97718 - DNA, 366 bp, Homo sapiens
gacaactgcaggccgggcgcggtggctcatgcctgtaatcccagcgctttgggaggctgaggcaagcagatcacttgggctcaatgtaagaattaaagaaagaggagagagacacgaatggtggcttctcagtcaacagggacaggtttattttaaataaacttgagaggggcagctggctgaattaggtcagagccacactctcttacagactgagagtttttaaggattctgggtgggagagtttatcagaggcttggactgcttctgtgtctctttgttgtgcttatctgggagggagagttgtgtgtctgttcccatacatctttctgtagctgcaggcatatccccccaagtctgcgttta

SEQ ID NO: 97719 - DNA, 383 bp, Homo sapiens
  misc_feature (1)...(383): n = a,t,c or g
gataagtccctgtaaatctgctttttgtttttttaggctaacccagcaaagcatcttgagctctgctactctcttgggtttctgccagtgaggctggccattttttaaccacctccacaaataccataacccttcagtttttttccaagccagattccaggaataatcctgtttgtagaaactggacatgccactaaaacagaaggaggctaataagngatcttatttcttgcttctcaatcgtgaaactttcttttttaagagataaaagttttaggaggcccggtgcggtggctcatgcctgtaatcccagcactttgagatgccaaggtgggtggatcacgaggtcaagagatcgagatcatcctgatctcaggtgaaac

SEQ ID NO: 97720 - DNA, 344 bp, Homo sapiens
gaagcagtcagattggaggctggtaagaggagcatggaggatcagggcaccgaggagtggggtgttttagccaaggttcctgaattcacgtcggaggaccactgaaggttcttcagctagagaatgtcatgaataatttttttttttttttgaaactttgtccttcaggctggagggcaggggggcaacctgggttccttgaaacctccacctccggggttaaagcaatttttgggcattacttttgggagaagctgggaccacgggcccacgtcatttacccgggctaatttttgtatttttagaaaaaagagggttttactttgttgcccaggctggtctca

SEQ ID NO: 97721 - DNA, 363 bp, Homo sapiens
gctttgaggttttcctgtaattccagctactcgggaggctgaggtgggagaattgcttgagcctgggaggcgaaggctcactgctacctaggcaacattgatttcactgcctcttcaataaatgatccaataaactgctttcatagctcatttcattcatttatcgattcacaaatattaactggaaattcctagtttaaactggagctagtcattaagtgagagctagaaatgactcttggcctgatttgacagtgactgctcatggacggtatctgagccatacatactctagagccatgggagacactgaaagacataggactaactgaaaagaagtaaccagtaggaaaactatgaaag

SEQ ID NO: 97722 - DNA, 354 bp, Homo sapiens
ctttcttccagttgatcgcatcagctcctgaggcttctgcattcttcacgtagttctcgagccttggttttcagctccatcagctcctttaagcacttctctgtattgggtattctagttatacattcttctaaatttttttcaaagtttgccacttctttgcctttggtttgaatgtcctctcgtagctcagggtaatttgatcgtctgaagccttcttctctcatctcgtcaaagtcattctccatccagctttgttccgttgctcttgaggaactgcgttcctttggaggaggaggaggagaggcgctgtgcgttttaaagtttccagtttttctgttctgttttttcccc

SEQ ID NO: 97723 - DNA, 361 bp, Homo sapiens
cggcacgaggagttactagatacaactattatatccaaatgctacaaaagcttgttttctttcatcatgcaattccttaggaagggtagagattaaacactgcaatatttgtttcctagcaacacccacatattagtgatacaaattttccactggaaaacaattttattttggtcattgtctttgaaattgcatcattgtaacccttctctatgccaaaatgatcttttttggcatcttgttctgtcgccccccactggagtgcagtggtacaatcatggttcactgcagccttgacctcctgggcttgagtgatcctcctgcctcagcctccccggtagctaggagtacaggcatgcac

SEQ ID NO: 97724 - DNA, 356 bp, Homo sapiens
atcagtattagattgtatgttcacaattatatgggggagaacctatatgggtgggaactctttgtgccaaccagagcccagaggtttctctctgctctgattactctctcaactctctcaaattgccttttaaagaaatctttatttctgttaagattttagagctatttgtttttgggttttgcttaattttttgcatattctgttaatgcaaaaaattgcattaaattattattattatttttgagatagaatcttgctctgtcgcccaggctggtgtgcagcggagcagatttggctcactgcaacctccaccttccgggttcaagtgattctcatactacaacctcctgagt

SEQ ID NO: 97725 - DNA, 381 bp, Homo sapiens
actggaagagaattcacttttaagatcgtggtgcagaaagtatagagttatattcagacatcttatgctttaagattgaattattataaaccatacattgaatatatttttaatttttttctttaaaacaaaacagtgtttttcttctgcctccctcaccatccttattctgtattaggacactagtcttcatataatacaaaacagactttctatatcaaaaaaaaagttataaaccttgtattttatttattgagacagggtcccactctgttgtccaggctggagtgcagtggtgcaatcatagttcactgcagccttgacctccctcaagcgatcctcctgtctcagcctcctgagtaactgggactgcaggtgcat

SEQ ID NO: 97726 - DNA, 323 bp, Homo sapiens
tgttacgctgcacatgatggtatatgttagtgatgaagagttggaaatagaaataaagtagtaacatttataatggcataaaccatagtgtctagagataagctgtacaaaaattggacaagacctgtacactgaaaactataaaacactgctgggaaaagtctgtaaatgcccaaataaataaaataccacattcatggatcaagcggaagtcagtattcttaaaatatcatttctccccagattgatctatagattaagaataatcccagtcagaatcccagcaggcatttttgtggagattctaaaatttggatgaatac

SEQ ID NO: 97727 - DNA, 346 bp, Homo sapiens
tacttctggtctcttggtgagacgtttcaggactcaccctgagaggatttgtaccgtcatatgtcttcactgcctctctcctggtcagctggaggctgaatttcagcaggaaactttgctaatgaagcctcttcagctggtggaggctgaactttaacagaggcctctgcaattgtagtggctgcctcagcagcaggagtctgttcagttggtgcctgaacttcggcatgggtctccccagcaggtttgagctctgcttaatcagtggcctcttcggctaatggagcatgtatttcagctgggagttttttctattggtggaggctctatttcagcagaagccagg

SEQ ID NO: 97728 - DNA, 384 bp, Homo sapiens
cgtggattgggaaataatatatgcaatctggatatctgagaaggagctaatatccaatatatatcacgaactcaaggaacccaatagcaagaaaacaacttaattaaaaaataggcatgccaggcacaagtggtgcacacctgtagacccagctatttgaaaggctgaggcaagaggatggcttgaggcctagagtttgactccagcctgggcaacagagtaagaccctcatctcttgggggaaaaaaaaaaaacccgggggggaaaagggaactgaaccaatatttcggaaatgaaaactttgaagggtccacccaatacaggaaaaaaggcctggaatccttcaatcctcaggaaaaggcgaagtaaagccttactgagaaa

SEQ ID NO: 97729 - DNA, 413 bp, Homo sapiens
aaagtgttccctttttaccacatccataccaacatctatttttttttaattttttgattatggccattcttgcaggactaactcaccttttaaaaggtgggtggttagggaccttgagcctagctgtttttccccagcatctaccaacatagctggaagagaagtaggctgtgttataagacaagcaatctttggactattatttgtgttattttatattccaaatatatttccagcacagagttaccatcttttctcaggtttaaaaacaggaaaggaaggccaggtaccgtgcgtggctcacgcctgtaatcccaacactttgggaggcaggaggatggcttgagtctaggagttcaagaccagcctgggcaacatagcaagaccccatctctacaaaaaataccaaaatt

SEQ ID NO: 97730 - DNA, 394 bp, Homo sapiens
  misc_feature (1)...(394): n = a,t,c or g
gaaatatttgttacaaaaaggtggtctgggctgggcgtggtggctcatgccagtaatcccagcactttgggaggctgaggcgggcagatcacgaggtcaggagtttgagagcagcctgaccaacatgggagtcctgagaggagaggtctgaaggagaggagaggtctgatggtgatgaaagccacttttctaggtcttcggcatcatctggaacacatagtgggtcatagagaattacgggacttacataataatagtaagaagaagattagctcacatcctttgagtactccgcatgtgccaggcactgtgctaaaaccctgtaggttgattctctgctttaagcatcaccagaagcctgtgaggaaacctccgaattctccatcttacaggn

SEQ ID NO: 97731 - DNA, 376 bp, Homo sapiens
tgtgcaggtaggtaatactagttagtaaataaagggaaaactatttttttttttttgaaacggggggtggttttgccccccaaagggaagggcaggggcataaacacagttaacggaagtttaaacttccggggtcaaggaaaccctttggcctaaccccccaaaaaaccgggaaccaaaggggggggccacaaccccggggaaatttaataattttttggaaaaaaggaggcctaacaatgtggcccaggcgggtctggaatcccgggaccaaggcggccctccggcctaaccctccaaaagggcgggacctatgggcgggagccatcccccctacccgggccaacaaaagaaaatccccggctaaccaaaacag

SEQ ID NO: 97732 - DNA, 383 bp, Homo sapiens
  misc_feature (1)...(383): n = a,t,c or g
ctcggcgtggctgatgtgagaggatcacttgaaccctgaaaggttgaggctgtggtgagctgtgatcataccactgcactctagcctgggtgacagagtgagaccctgtctcaaaacaaagaaacaaagaaacaaaaatgttcatatttggctgggatgggnggncacacctgcactttgagaggccgaggcaggatgatctcttgaaggcaagagttcaagaccaccaattttttcgcctcatcctaccaaagtgctggtgctatgatgatgggtgtgagccactgcacccagcctattatagcaaatgatgttacatactttttaccagtgctcatccactggaaaataacatgagacattggtttttttggccggcgcag

SEQ ID NO: 97733 - DNA, 424 bp, Homo sapiens
ggattctgaggctttagaaacacttggacccgggaggcggaggttgcagagaaccgagatcgtgccattgcactccagcctgggtgacaacagcgaaactccatcttaaaaaataaaaataagtagaacttaagtcaccaagcgtgatccatacttaaagatgagaaccgaaccagatagataacctgatttttgtaaaaaatgtttccatgtctaaatgtatatgcacaaaacattcctgaaaacttaagtaagaaacttaatagcggctattacatctcacgagtgggcatggacaggagggaggaggaagggagggaacttttacttttcttactgaactcctctgtatggctcgaattttattaatttctatgcgcacatttttatgactaaaactcttaatgaaaaccttcaatgcagg

SEQ ID NO: 97734 - DNA, 383 bp, Homo sapiens
tttttacaaccatgagtagggtttttttttttggaagggccccgggttctatataaaaaaaccccccagaaaaaggaatttaaatattttaaaagggcaaaccacctttaaattttgggctttggcctttttgaaaagggaggtaaaaaaagccccctccagtttggttttggttttggttttggttttggtttttttaaccttttttggaaaacaaagccctgctttttcccccaggtgggagggcagaagaccaatttgggttacctgcaccctccccctccggggttaaagcaatttttctgcttcaccctctggagaaacggggtcaacaggcatgggcccccatgcccggtataattttgaattttatagaaaaacag

SEQ ID NO: 97735 - DNA, 375 bp, Homo sapiens
  misc_feature (1)...(375): n = a,t,c or g
ttagtctttggactaanccactaanagcgncagctactcaggagtcttaggtgggaggattgcttgagctggggaggttgaggctgcagtgagccatgatcctgcccctgcattccagcttgggtgacagcgagatcctgtctccaaataaacaaatcattacctgctgaaatagtcattcccagtttatataatcagatagctagagggtaactatagacaagaaagcctgtggtttaatttgataggaaagactctaacctcattgagagaaaacgatcagaaaatattccttttctaatggcaagagaggaaaaacttataaattacgttcatattatatagggagtggggtattcaccagccagcctattt

SEQ ID NO: 97736 - DNA, 375 bp, Homo sapiens
  misc_feature (1)...(375): n = a,t,c or g
aattaatatctttccttccccnnccgaaaaaaaaaggcactttttttttgccaagggggatcccaaccgcccccatcaaacctaatggatcccccccccccgggggaaaaaaaaatttcctggttaaaccttttcccaaaaaaggaaaaaaaaaaattttaaaaaaaaaaaaaatttttttaaaaggtaaaaaaaaacccttttttaaaaccaaaagggagaccccccccaggggaaaaaaaaaaaggaaaaaaaggaaaaaaacccactccccaaaaggggaaagggtttctttttgccccccccccaaaaaaacccattaaaaaaagcccccattttaaaatacccaaaaaacaaaaaaatttttggcaaaga

SEQ ID NO: 97737 - DNA, 376 bp, Homo sapiens
  misc_feature (1)...(376): n = a,t,c or g
gaatgnattgactaaatttttgaaagaaaaccttgaatagggggcataaatttggattctgggtccctaaacaacaagaagaacaagtgctaccttggtctttataaattgaaaaaaataaatttccttttttttccctttccactttcccgtatctgaaatgatttcatggtatttgtgccttcagctgattgaataattatcttaatttccagcctgggtgacagagtgagaccctgtctcaaaaaaaaaaaaaaaatatttttgaatggagccaaaaagggattggggccggggcaaaaaaaaaacttaaggctttaagaaagaacaaaaaactccttttaggtcccccggggaaaactttggaattataatg

SEQ ID NO: 97738 - DNA, 382 bp, Homo sapiens
cgctattttgcccagactggactccaactcctggcctcaagcaatcctcccaccttggcctcccacagtgctgggattataggcattaagtcactgtgcctggcctcccaatttcttttgtgttttttttttttcccccctaaaagaaataacttttaaaccttgggttggtttttaatccttttcaaaattttggttttttttaaaaaaggggtaacaaccacggaactaatggttttagaaaccaggggaccaccctactgcaaataatggaggaagggttttttttgaaccttggaccatcacctttaaaacctgaagtcaacactgccttttttttttttttttagggggaccccaaaacttagggggtggatttttt

SEQ ID NO: 97739 - DNA, 381 bp, Homo sapiens
gacaactgcaatctcagctactcagtagcctgaggccggaggatcacatgaacctaggagttgaaggctgcggtaagctgtcattgcaccactgtactttagcctgaatgacagagtaagactccatctcttaaaaaaaaattttaaaaaagaaatgcttttagaaaaagcatagctttttgtattaaatatgagttaatatacacatgctgcttgaagcaagatatgaaagaatttgacatctgggtatagtgagtacctgcgatatttctttcaattttaacatgtgttgagttgtacaattcttagtttcgtattgttttgtatgaatcttttacctttaaaggaacctgttttaggctcaccactgacagattgagc

SEQ ID NO: 97740 - DNA, 363 bp, Homo sapiens
cataaacacacattatctttgcactaagcaaaaataataagtatttttaagggaacaaaataacattttaaatacgttttagggctgggcacggtggcttacacctggaatcccagcactttgggaggccaaggcaatcaaatctcttgaagacctgaatgcctaagcttagcaaacctatgctccttcctgagaggagtcactacatccgattatgaacacacttatccgtgaccctgtggtggtgacatctttcagagtcactgtggatacatccaccattgcgagacattggctcttctgttgggacttactacaagcctccattggccacattttgatactaggcccagggtgaactgg

SEQ ID NO: 97741 - DNA, 189 bp, Homo sapiens
ccccgccctacactgtgtattaaccagagcatctttgacccaatgatttgagataccagttttatcatatactagatgtttatatgtaattggatctaattctagaaattatattttattccattgatttgatagcttattcttgtgccagtaccatactgtttaatgaaagaggtttgtagcatgttt

SEQ ID NO: 97742 - DNA, 374 bp, Homo sapiens
ggacaagaacacagattcataataaacctacccagtcaatttggtataaaggcttagaaggtggaactggccacattttgaattggaggtaaggatcaggaatgctaatggagagacataggattttcttatggaaacaagaaacaaataacctctgggcagtattagagcccagagagtgataagcctcttctaacttcaatattctatgtacaaattcacaagactttttttttctttttttttttgaaacggagtctcactttgtaccccaggctggagggcaagggcgcgattttggttaaccgaaggctccccttccggggttaacgccattttcttgcctttgcctggcgagaagctggaactactgg

SEQ ID NO: 97743 - DNA, 392 bp, Homo sapiens
  misc_feature (1)...(392): n = a,t,c or g
atcgcttgaacctgggaggcagaggttatagtgaaccgagatggcgccattgcactccagcctgggcaatagagtgagactccatcttaaaaaaaaaaaaaaaaaaaaaaatttgtcatttaattagttaaaaaaaaaaaccttttggaatgcttaaattattggttttaacccaaaaaacacttttcttccagggaaggggaaaaaaaaaattccaaaataaaggggtttttgttgggccaaaacattgttttttaaaaaggggacccaacttttttagtatcaggggattttgttaaaaagttcaaactgttaaaaaaaggaaaatcgggcaatatactaagtctgggtttttggggggcaaaaaaaggttattgttgaccaaagggctn

SEQ ID NO: 97744 - DNA, 369 bp, Homo sapiens
  misc_feature (1)...(369): n = a,t,c or g
ggagtgcaatggcgcaatctcaggtcactgcaacctctgcctctcaggttcaagtgattctcctgccccagcctgggcgacaagagtgaaactccgtctcanaaaaaaaaaaaaaaaaaaaaaaacccaattttaatttttttaccccccccaaaaaaccctttttaaacttgaaaacccttgaaaaaaagggttttccaaaaaaagggccctttagggggtttggaaaaaaaaaaaaaaaaaaaaaaaaaaaaaaaaaaaaaaaaaaattttttttttttttgggggggggggatttttttttttttaaggggggaatatttttttgggggggggggggggtttaaaaaacggggggggggagaaaaa

SEQ ID NO: 97745 - DNA, 315 bp, Homo sapiens
cacaaggcgggtaacaaagggcccatgaggcctgattaactgatctgacaaaccatctgtcacccacagccctaagccacactgtgaaactgcctagggtggcaccagctttttatcttcctcagggtcctcccctcaggcccccaagtcaccccatcatggtccagattctcccctgagtgactccatccccatggtcatttcccctcctgagcctccccctctgagggccaagggctgtcctcagggccctcctggggcttcctggtggggaacaacctgaggcaggaggataagctcttattcagagcattg

SEQ ID NO: 97746 - DNA, 712 bp, Homo sapiens
gtatatgcatgttataatgttaacgtgaattgccttttttctttctgaggtgaggaatgtgacccaaaattcctttggtaagagaaaaataagtcagttcattctaattttagttttttaatatagtaatttggtttccttttttcttactaagggagctttcagtcttgtggcacctgtgacccataggttttctttaaaaaattattgtttaaagctgggtatggtggcatgtgcctgtggtcccagctacttgcgaggctaaggtgagaggatcacttgagcttaggagttcaaatccagcctgagccaacataacaagactttgtctctaaacaacacagttattgtttaaagaatctgaaatcttcatctttaattcaggtagcaatgaatcgagcccaagtttgtttgatatccagttccaagtctggagagaggcatctttatcttattaaagtatcgagagacaaaatatcagacagcaatgaccaagagtcagcaaattgtgatgcaaaaggtaataacttcatttgcattatgttatataaaatttggctgaattgaaaaagactcatgaagtaacactggacagcaatctaattgaaaatatacttttcaaataaaatgaaattttccaatctaaatctctcaagtgtaataaactcattcgatgttaaaaaggaaaggctaaatgcaaatactttaaatt

SEQ ID NO: 97747 - DNA, 369 bp, Homo sapiens
  misc_feature (1)...(369): n = a,t,c or g
taggtgatatgttcaagctggtcacttgctcatttgtttattaaagctttactggatgctttgggactgggaggaagtagactaactactgtgtattaaatatttgtttgtaaggcactgtattaaatgcttgagcagcttcattattcgtaatactatggatcagctgtttgaccctttaactgaagagaaaacagtctcagagaggtgaagtgaattttcttaaggtcacacagccagaatgtggcaaggctgggattttatttatttattatttttttgagatggaatctcactctgtcggccagactggggtgcagtggtgcaatctcggctgactacaacctctgcctcctgagtcaagtgatn

SEQ ID NO: 97748 - DNA, 336 bp, Homo sapiens
tcacaccactgcacttcagcctgggtgacacacggagaccccatctcaaaaataaataaataaacaaacaaacaaatatgaatactagctgagcaggtggcccatgcctgtagctccagtacttgggaggcaaaggcaggaggatcacttaagtccaggagttcaggttcagcctgggcaacatagtgagaccctatctctattaaaaatttttggccgggcacggtgtattttttaatagagacagggtttctccatgttggttaggctggtcttgaactcccaacctcaggtgatctgtccaccttggcctcccaaagtgctgggattacaggc

SEQ ID NO: 97749 - DNA, 390 bp, Homo sapiens
atgacttagcaaggaattctactcccttgcttctccatgtcctctgaagaaagaggaagaatctactctaatacgttttctttctttttttttttttggaaagggagtccaataaacccccagggggggagccaagcaaaaaaacccaggtaaagggaaccctcaccttcgggcttaaccccccaaagacccgggaatggagggcccccccccccacccgggcaaaattttttttttaaaaaaaaagggggttaaccgggggggcccgggcgggcttaaacccccggcccaaggggaacccccccccttggccccccaaaagccgggaataaaagggggggacccaggggccgggccaaaaatttccttaaaaaccaaaatgggcccact

SEQ ID NO: 97750 - DNA, 399 bp, Homo sapiens
aaattcccatcacgtcttgggaacacattcaaattgcccactcagcctttgatatctttttgcctttttttttttttccaaaagggaagcttggcagggtggccaacccggaatggaaggggcaaaaaaaaagttcatggcaccctaaccctccaaggggggggggggggaattttctggcctaacccccccaaaccagtggaacccaagggcacagccccccccccggggtgaattaattttaattttggaaaaaaaaaggcctgcgccaaatgcccaacccgggcctgaaaacttgggcccaagggaaccctcccccttggccccccaaaagggcgggaataaaagcgagaacccatggcccccacccccttaattttttttttttcaaaggggcat

SEQ ID NO: 97751 - DNA, 377 bp, Homo sapiens
ggagtatttattctagtttccttcaacttctgggctttctttctttcttttttttttttgggaaaacaaattttggttttaatgccccagccggaaagccagggccagaatttggccccccaaaaccccccccccccggggtaaaggggattcccggccttaacccccccaagaaccgggaataaagggatggccccccaggccccccaattttttggatttttaaaaaaaggggggttttcccatggggggcagggggggtttaaaaccccgaccctagggaatttgccccccttggccccccaagggttggggaataacgggctgggcccctggcccccacccttttttttttaaaaggggaacctgccctccaa

SEQ ID NO: 97752 - DNA, 356 bp, Homo sapiens
ggagaatgaggtagaaatgaattcagaaagacagaaatattaacaaattactactaaaggtttcttttttcttttctcttcctttttttttttttccttccctttcctttttttccgaaaccgggatttaatttggccccccgggtgggggggaggggccccatcccgggcccctggaggcttaaccccccgggggcttaagggaccttttaccctaaccccccaaaaaagttggaccaacggcctgaagggttgaaccccttagcccgggcaaatttttggatttttttttggaaaaaaaagggccccctggggggcccaaggcgggtttgaaccccggggcctaagcaaccccc

SEQ ID NO: 97753 - DNA, 375 bp, Homo sapiens
agatgttagagtactgaactttacaggggacttcaggaatttttgagggaaatttttttttttttttagggacggggatctcactttattgcccaggctggagggcctgggggggcgatcatggctcactgcagctttgacctccggggtcaagcagtcctgcctcgaccccgctggggagaagctgggactacaggcatgtcccaccaggctgggctagttttttttttttcaaaacattgcctaacggggtaacccaggcgggtttggaactttggggctaaaccctgggccttccaaggggctgggataacgggctggacccttccccccgggccttttttttttttataaaaaacagtttaatggaagaag

SEQ ID NO: 97754 - DNA, 375 bp, Homo sapiens
ggatattcactgcatcatgcaaccatcaccacaaacaattgtagaacttttttttttttttgggggaaaaatttttttttggtgcccagggtggagggaaaggggggaaatttggttaaccggaaccttcggggccaagggtaaagggaattctcggcctaaattttccaaggaagggggaataaggggaggcccccccaacccctggttgttttggttttttaaaaaaaacggggtttttccatggggggaggggggggttaaaacccccaaccctagggggttggcccggttaaaccccccaaagggggggaattaagggggggggcccacaaccccaccccaattggaaaaatttttttttcccggaaaaaa

SEQ ID NO: 97755 - DNA, 305 bp, Homo sapiens
tcagcttgttgatttctcaaaaaaagttctcctgggattttgactggcattgctttgaatttatagatcagtttagagagaagtgacatcttaacaatattgattcttccaatccctaggcatgggatatttccctatttatttagatctttggtttctttctttaatgtttttagatcttgcccatattgtcttatatttataggtaaggatgtaatatgcttgtaggtgctgttgttgagtaaatagttgaattcatgaatagataaaagtgtcaacctacttgtgagtacttgtcttgattc

SEQ ID NO: 97756 - DNA, 392 bp, Homo sapiens
aatacactcccgcatctgtcagcccgggagctatgagcagatcccctgtagagcccaccagggaccctggtatcataagcacagtgaagcccagaccagtgaggaggcctcccgccacttgggtcctgaggcaaacgaaatcaactggcttgtgtccaaagacctcaggacccaccaaccaccgtctgtcctccctcccttctgcccttcctccttcctcccttccttcctccctttcctccttccttctttccttccttcctttttaccttctctccctccttccttcattccttccttttctgcctttcatctggttttctctctttccctccttccttctcagcttccttctctccttccttttttccttccctgcttctttccctccc

SEQ ID NO: 97757 - DNA, 431 bp, Homo sapiens
  misc_feature (1)...(431): n = a,t,c or g
tgcaatacatgtgtgcgttagtgtgcttattggtgtgtatgaatgtgtggagagagactgtgttggtgtgtgtgttcgtgtaacagagtgtgttgtgtatgagtggaaagagtgtgtgtgttggtgtgtatgagtgtgtgttggtgtgtgtgctgctgtgcaagacagtgtgtgagtgtgtgtcactcacgtatagagtcttccagaccgtcaagtgggcctgtggccccgtccaaatgccagacacacctataccttccaaaactctctgctcctccagctgcaggtctgtgggatctgccctctgaagccaccgcctccctttctggttctctctgccagccaagctgtcccaggactcggagctttgccactttggtctcttccatgtatcataggccagtcacaggtgaattacaatccatcacccn

SEQ ID NO: 97758 - DNA, 427 bp, Homo sapiens
aatacaatgcccgggagattgaggctgcagcaggccgagatcacgccactgcactccagcctgggtacagagtgagaccctgtctcaaaaaaaaagttctaaaattaggccaggcttggtggctcgcacctgtgaccccagcactttgggaggcctaggcaagaggatggcgtagggccaaaagtttgaaaccagcctgggcaacacagggaagctgcacctctttttatttattaatgaatgttccaaaattagattttggtgatggccacacaactctgtgaatatcctaaagaccactgaaatgtaaactttaaagggtgaaccgtataaagctcttaaagaaaaagaaaaagcttatcaaacgtatccgtagtacagagcccactctaccccacctcagtgacacgtatccataatacagagc

SEQ ID NO: 97759 - DNA, 402 bp, Homo sapiens
aatacattggaggagggtgagaaacagaattaatatttactggatacttggcttagtacctaggtgacaagaataatctatacaacaagcccccattacatgagtttacctatataacaaatctgcacatgtactcccaaacctaaaatgaaagttaaaaaaattacaatgctatccaataacatgagatatttatatatacatttaacacaagatatataagatcttgacattgacctatgaaacactgctgatatgaatttaaaagacctaaataaatgaagagaaatacattgtttaaggatttgaagactcaatattattaagacatcgatttttctaaaattgccctatagagttcatgcaattccattcaaaatctcagcaagatcttttgttgaa

SEQ ID NO: 97760 - DNA, 402 bp, Homo sapiens
aatacagcctctccttaaacccagcgtgggctattcaggatagaaccctttctctcctgatgcaaggtggtatttttgccatggtaaatgttcttttaccacatttcatcaaatctaagagattattgattgtaatatgtaacactgttttatggaccactttataaagaaaaattactcccaattaaaatatggcataccattatttataagatatacaatgatatcagagacataaaaatatgtatagaatttgtttctcagacctggagaaatgcagttaagctagtgacaggtggctgagattatcattttgcttcatcttgtttttagagacaaggtctcactctgtcacccaggctggagtacagtggtgctaccacggctcaccgcagcctcgac

SEQ ID NO: 97761 - DNA, 431 bp, Homo sapiens
aatacatgcccttaggatagacttatgaccttccaatgccagggcttccctgcaatgccccatctatgacaggtgtaaagggggttgacatgctgacatgcactgcttaacccagagccgccccccagtgagcacttccaataccagcaatgcctatgctcagtcctcaggttctaacctaaagtagatctcatcttatacaatgcaagtattcctgagaagtggtgcctatattaaaatttagatagctgatcccctgtttaaacacagtaggaaagtcttgttgggcaaagaaactgggtagcaaaatatttttatagaataacagctccaggccgggcgcagaggctcatgcctgcaatcccagcaccttgggaggccgaggtgggcggatcacaaggtctagagattgagaccctcctggccaacat

SEQ ID NO: 97762 - DNA, 366 bp, Homo sapiens
aatacaaccttgcttgcaactaatttctgtgccttttccatacatgtgtgcttgctttccctgtacagcaactgtgcagcgtggggtggggctgcaaggtggagaatgccgaccgggaggaaaagcaaccctgtgattcacaggctcgggaggagccacggctctgtaggcgtggatttaacagggcaccaaacatcaataccagacatgagaaactgttttttgtttgtttgttttaaacggggtctcactctgtcacccaggctggagtgcaggggtgtggtcatagctcaccgcagcctcaacttcctggacccaagcgatcctcccacctcagcctccggagcagctgggatacaggcatgg

SEQ ID NO: 97763 - DNA, 397 bp, Homo sapiens
aatacagtgtgtgtgtgtgtgtgtgtttgtgtttgagtgtgtgtgcgaaagagagagagagagaggcagtgagagagagactggctcccattttccagggctgctgtgggaggatgccccggatgccccaggactacattacctgggtctcataggtgtccccacacaggctgagtggtgtgcctgcctgcatctctctgtgggggctgtccagccatgcattcagggacatgggctccatgatggatcgtgtgctcagagggaatggtggctccttgagcagctggtctgcgcccacagcatgactattgtcggtgttctcgggacccagcccacccagccccagtgggccccggtcccaggggccccaggtctcatttgccaaaacaggctctgt

SEQ ID NO: 97764 - DNA, 387 bp, Homo sapiens
aatacattactgcccacactaaacattttggtgtattttctttcagggatattattcttttcttggtcaaactttttttttttttttgaaagggaaggtggctctttttcccccaggggggagaacgggggcacaatgggtaaacagcgcccccccaaaccgggggaaaagagaatccccccccccccccccccaaggaccggggaaaaaaggcaaatgcccccccccccgggggaatttggtatttaaaaaaaaacgggtttttccctattgggcaaggcgggccagaacccccccccccaaggggacccccccccccggcccccccaaaggggggggaaaaacgggggggacccccccaccggcccgggaaaaaacttttaaaaa

SEQ ID NO: 97765 - DNA, 398 bp, Homo sapiens
aatacacgtgatctgaatctgaacctttcattagacatctctgctctgagggaccatctgtggggtgagaagaaattgggctcagtgcttaccatgtggaaagggaggaagggctctccacatgggacacaagggacagccatgaaggacagaggctgacgagacctcccagggtgagctccttccagcactggctggtacctgttgcttctgcaaatgttccccagaccctctgcactctcgcaggtcagagtaaaaaaaggatggattctttcattttaaaaaaagtttgagacagggtcttactctgtcacccaggctggagtgcagcggtgtgatcatggcttgctgcagcctcaaactcttgggttcaaaggatcctcccacttcagcctcct

SEQ ID NO: 97766 - DNA, 395 bp, Homo sapiens
aatacatccctgtgagatgacaacacacgatgatgccattgtccactacggactaactcagtgcccggcactttactccattggctcagttacagctcagaaaaccctggaaggcaggctccattatcacccccattttaggaacaaggaactgggcctctggagttctgtggctgtccctgctgtgtgccaggcacatatatcaactcactgactcataactttgtgtggtaggtaggattttttatttaacttttcaattttttttttttggtaaagatggggtctcgctatgttgctcaggctggtctcaaacccctggcctaaggcaatcctcctgcctcagcctccccaagggctgggattacaggtgggagccaccacactcagccggg

SEQ ID NO: 97767 - DNA, 421 bp, Homo sapiens
  misc_feature (1)...(421): n = a,t,c or g
aatacaggtcgtctttttatagatttctgcttagttcctgcacactatgtgcccctcatcctggctgctaatttctgtttctcccccagccctgctgtccaggcaggtgcccccagaccctgtgcaggtggaggagaagctgttgccccaacctgtgatccagcatgacgtggaggccgagaagcagctgatccgggaggtgagacccaagcgggtgggaacatggagaagggacaggcaggtggggcccagcgggaagggcagggctgccgctggggtccaacgcgatatcaccgtaccttcaccgtgggtttggtcctgagaaagctgaagctcaaagagatgccaggacttgcccaaggtcacacagcaaagagtctgagccaggatttgaacttgagttcttgacttcagactgctn

SEQ ID NO: 97768 - DNA, 413 bp, Homo sapiens
aatacattcctggtgaaaaggaaaaaaagtgaaaagtgaataaggagacggggtcaattccgccttttttttttttttttttttggaaaaaaaggtttggttcatccccccggggggggggccaaaaccggaatttgggttccgggcaccccccccccccggggtaaaaaaaattttcgggtttacccccctgagaacgggggaataaaggcccctccccttccccccgggtaaggggtggttttttaaaaaaaacgggggttccccaatgtggcccgggggggtttgaccctccgaccctaagggagcccccccccctggcccccccaaggggggggaataaaggggggagcccccttgggtagggtggaattttgcccttttaaaggaaagaaagcctctatttaaagaaa

SEQ ID NO: 97769 - DNA, 396 bp, Homo sapiens
aatacatgtggggcatctaccatgggccaaacacggtgctgagctccaaggcagactgacgtagctcctcctcccgcaaaaccatggcctggcctggcaacttctccattcagccggaaacacagaccagagactgttactttcctcctcgtgataaggaaatctcaaacctcaagaactcaaaggccaggtgctccagaagggtaaaggaaaaagcaaatatttcttcctttatcttgataagccagcaacctgccggtgaccttgctcaagctgcgtcttccctgggccgtggtttctgcatctatgatcccaacaatttggaaggcccaagcaggaggagtacttgaggccaggagtttaggaccagtctgggcaacagagcgagacctcgtg

SEQ ID NO: 97770 - DNA, 408 bp, Homo sapiens
aatacacgcgcgctagggataaaaaaaatcttgtttgggattatcacaaaactgagaaggttgccaactccctaactatagtagtacacatgtagtcttagaataacccaggaccactttttttttttttttttttttttgggaaaaaaaatttttttttttcccccgggctggggggcaggggggcaaattttaacttccccaaaaacgcccccgggggtaaagggaatcccttggctaaaccccccaagagggggggggcccgggggccccccccccccccccaccctttttttgggtttttaaaaaaaaaggggtttccccggggggggccaaaaaccccgacctaaaggggaccccccgcctctaccccccaagggggggggattaaagggggggcccaccccc

SEQ ID NO: 97771 - DNA, 383 bp, Homo sapiens
aatcacttgaacctatgaggcagaggttgcagtgagccaagattgcaccactgcactccagcctgggtgacagagtgagactctgtattaaaaaaaaaatcatacattcatttgggtcaaaacccaacagttagaaaagtattactataaagagtccatctccttttcctgtccccatcttgatgccacctccataggcaactcttgttggtagtttctttcctttccttccaggtactttctattaagatggaaaatatgaaattgctaatatttgaccagggttggcctataaaatggcaatttcatactgttcaacctaatataaacaaatgcatagattcctgttcttctctttcttacacaaaaagtagcatattatg

SEQ ID NO: 97772 - DNA, 404 bp, Homo sapiens
attttcaagatggtaaatgagcattggcttcaacctaaagttgacagctatgttagcccctaaaatgagagcctgtgcttttgaggttttgaagccaggcattgacttctcaactatgaaaatcctagatgtcatctccttccaaatctgttttttcatttagccaccttcatccatgatcttacctagattttctggattatttactgcagtttctaaattagcacttgctgcttcactttgtacttctatataatggcaatggtttctttagttaatccttatgaactggctgggtgcagtggctcatgcctgtggtcccggcactttgggaggccgaggcaggctgatcactaggtcacgagaccgagaccatcctcgccaccatggtgaaaccttgtttt

SEQ ID NO: 97773 - DNA, 363 bp, Homo sapiens
cccacgcgtccgctagttctagatcgcgatcggccgcccttttttttttttttggggtctgggaagaaaaaaaacccaggggtttttttatattttgggggggggtggaccccccccaaaaaaaaaaaaaattcccttggttggggggggggggggttaaaaaaggggggggggggggttttttttaaaccccttccttttttgggggggggcccttttttaaaaaactcggggggggtggacaaaaaaaaaagggctcccccattttttaccaaaacccccttgccttaaaaattttggggggaaagggggggggtggtttttttcaaaggggaaagaaactttggaaaaaaaaaaaatctg

SEQ ID NO: 97774 - DNA, 362 bp, Homo sapiens
cattttacaaaataccttttcatctcatgttgaaaataatagcttttatgttggatgcaggattgctgtaagaaaggcatacctatgaacactaatgttattcaagaaaaagcgacatcattatatggcagcttaaagcataaggaaggtgaaggacctaaagctggagaatttaatgccagcaaaggatggcttgataattttagaaagagctttggctttaaaaatgtcaagataacaggagaagcagcttctgccaaccaaaaggcagcagacaagttcccagatgccattaagaaaatcattgaggaaaaaggttatctgcctgaacagatctttaatgcaggtgaaagtgctctatt

SEQ ID NO: 97775 - DNA, 365 bp, Homo sapiens
cttacgttcttcttttaggcatttttacttaaatatctcactgtcacttcacactgaacacaacaaaaactggcttttttttttttttttttagaaaaaaaccctttttttttcccgccccacagttgggcggatttttttttaaaaaaaccccatgggtttaggccgggccccggggcccccccccggaacccccaccttttggggggccgggggggggggaattggggggccggaaaaaaaacccccccgggcttaaagggggaaccccccttctttgaaaaaatacaaaaaaaggccccgggggggggggggggcccttgaccccccccctcccgggggggtcaaccaagaaaagggccgcc

SEQ ID NO: 97776 - DNA, 394 bp, Homo sapiens
gtccggaattcccggggttttagataaagggaatgacatccattctaattgctgttgaactatggaagaatttggatgtatctcaagattcttgggttactagataaccttaaaactttctcccttgtgtgtgttttttaaatgagtttttagtttttctatggtatagagaacatacttttcaaattctaaatgttagataatttgcccgttttttaaaaaattttcttggagacagggtctctctcactgttacccaggctgtacagtggcatgatcacagcttactacagcctgtgccttcagttgatccacctgtctcagcctcgttaggagctgagaccatagacacatgccaccatgcccaactaatttttaaattttcagtattttt

SEQ ID NO: 97777 - DNA, 372 bp, Homo sapiens
tattattagtattacatgtatttttcaaaaaatctgtttaataaccattacaataaaaatctcagtctgacataaaagacgtctaagtcttagactatagttcgtttatttccagcaatatcaagtacacattatggaaatggaagagagtcccttggaattttgctatagtgagattggactggtattattttaaaggattacattttctcttttaacttaactttaaaaaccaatgttcttaccattcaaccctgcaatcttattactgggtatatacctaaaggaatataaatcattctaacataaagacacatgcatgcgaatgtttattacagcgctattcacaataacaaagacatggaatcaacg

SEQ ID NO: 97778 - DNA, 370 bp, Homo sapiens
agtagagccacctttattaattgtcttacctagaccttctggataacttgctgcagcttctacatcagcacttgctgctttaccttgcacttatatgggaggaagatggcttccttccttaaacctcatgaacctcaaagacctgttttatccagggtctagctactttacagtgggagagtccttcagagtatgtatcccaccacataggttaaagtggaggtcttcaggaaccatgttcagttgaactcagtgcctgtcacaatgattcattgaatgagtaacttaccttctgggacttctgctagcttcaaacttttctcctgcagcttcctcacattttccagcctttctagaattaaaaaagagg

SEQ ID NO: 97779 - DNA, 395 bp, Homo sapiens
  misc_feature (1)...(395): n = a,t,c or g
catgcaccaaccctggctactcaggaggccaaagcaggagaattgcttgaacccgggagggggaggttgcagtgaaccaagatcgcaccactgcattccagcctaagcaatagagcgagactccctctcaaaaaaaaaaaaaaaggggggggccttttaaaaggaccaaatttaaggcccgggggcggggaaggaattattttttttatggggccccaaaatttatttcggggggcggggtttaaaaacgggggggaggggaaaacccggggggtccccaaatttatcgccttgggagaaannnnnnnnnnnnngannnnannattattcctgatcaggtgctgggtacaactgataacagacataccccctgccattcaagaggagctagatct

SEQ ID NO: 97780 - DNA, 415 bp, Homo sapiens
cccatttgtaatagagtcttttattattttgaaaaggccctttttcttattgagaggcaaataattattgttccaaaatcttccttgtctgatattaataaaccactctggcctttataaaaataagctgtatcatggagtatgttttccatccttttatttggctggcgcaaaagtaattggggtttttgcaattacttttgtttgtgggaaggagcatgtttatatttgcccttgagctgtcccacgggtggttggggagcagcctatctttttaacctgtttgtgtcaagcagtcctcccacctcagcctctcaagtagctgggaccacaaacacatgtcaccgtacccagctaatttttgtattttttgtagagacaagactttgccatgttgcctaggctgggctcaaat

SEQ ID NO: 97781 - DNA, 423 bp, Homo sapiens
aaaaatggatattaggaacgttttgttgtttaaaaaaattactttgtttttacactttggtagaaaaaacttaaggaatatttcaaacataatacaaagtgagcagaatagaatagtgagcttttatgtaaccattcttttttttttttttttttgaaaaaaaaaaaagggtttggtttggcccccaggggggagggaagggggggaaaaaaaaatgggggggggccaaaaacccgggggggaagggaaccttctgccttaacctggcgaggaagtaagaataagggggccccccccccacccggggtaaatttaaaaattttaattttttttgggggaaagggaatttaagggggtgccccgggtgggaaagaatttttgggctaaagaaggcctttgggtggggccctcaaaagggggggg

SEQ ID NO: 97782 - DNA, 425 bp, Homo sapiens
  misc_feature (1)...(425): n = a,t,c or g
aaaaagtaaaaggaactcggcaaatcttacccccccccaaaaaccactctagttcaccagcaatggatccaaaccaagaagaaatccttgatttacctgaataagaattgaagaggttagttattaagctaatcagggggataccagagaaaggcaaagcccaatgcaaggaaatccaaaaactggcacaagaagtgaagggagaaatattcatggaaataggtagcttaaagaaaaaacaataaaaaattcaggaaactttggacactcttttaaaaatgcaaaatgccctggaaagtctcagcaatagaattgaacaagtagaagaaagaaattcagagcttgaagacaaggtcttcaaattaacccaatccaacaaagactnnnnnnaaataaaaaaaaaaatattatataatgtgggtggt

SEQ ID NO: 97783 - DNA, 424 bp, Homo sapiens
gcttgtgcctgcagtcccagctacttggtaggctgaggcaggagaatcccttgaacttaagaatctgaggctgcaatgagccatgattgcaccactgtactccagcccaagtgacagagcgagaccctgtctccaaagaaaataaaggaagctttatccctatgaaaattggaaagctagtatcactcactttaaatagaatgtgtaactgtaaaaatagtgaaaaagaaaatgtataactccttttgggaagaatctagccttgggaagcctcctccccaagtcttgccaccctttttattccctatgaagattagtatgataaagagaaacacaaaatacactagcccggtagtggctctatatttagaagaattaaaagagatttataagatgaataacttataggggaggaagttatccg

SEQ ID NO: 97784 - DNA, 394 bp, Homo sapiens
aaaaacaccaccaccatgtctcctgtgtttgggttatcagagtagggactgaatcccttcttttctgtacacctgaagggtttttcttgcctctgttcctggattctaaattgagtatgtttctccaatgtctaacctaacgtgatttgaaggggtttttttttttttgagggcgggtttctttttttgtgtcttggtcctaaagagattttttagtatgattttttgtgtttgtcttttcactttctggaggctttttttttatattatttgttaatctagcccttgttgtgttattttctatttttaaatctacttccgttttttgtaactctttttcgtctttatgttttatctccattttctttgttagtataatcatttttcaattttt

SEQ ID NO: 97785 - DNA, 387 bp, Homo sapiens
ccttattttacttaataatggccctaaagcacaagagcagtgatgttggaaattcgaatatatatgccaaagagaagctggaaagtgcttcctttaaggaaagaatttaaaaatcatatgttgaggttgctaaaatctatggtaaaaatgagtattgtatctatgaaattgtgaagaaggaaaaataaatcatgcatagtatatacagggttcagtactatttgcaatttcagacatcactggaggtcttggaacgtattccccatgggtaagtggggaatactgtatattctatataaaaggcccatttctgataagtagtttatgattattttctccaagttttcattttcttaagtgtcttctggtgagcagaaattattcatt

SEQ ID NO: 97786 - DNA, 388 bp, Homo sapiens
  misc_feature (1)...(388): n = a,t,c or g
tttcattcttactagtgcagatacttgatactctattattattaggtattaccaggcttcagagtgctaaatcaattcattggcttatttgccagtggcttaaatgtaatataaaaccagagttgannnnnnnnnnnnnnnnnnnnnnnnnnnnnnnnnnnnnnnnnnnnnnnnnnnnnnnnnnnnnnnnnnnnnnnnnnnnnnnnnnnnngtatatctnnnnnnnnnnnnnngggggggccgttttaaaggatcaaattttacttccccgggcttgcaaggaaatagtttttttatggggcccccaaaattaaattcccgggccggggtttaacaacgccgggaggggaaaaacccgggggtaccccaatttaatcgcttttgggag

SEQ ID NO: 97787 - DNA, 375 bp, Homo sapiens
tttcactcttgtcacccaggctggattgcaatggtgtgatctcggctcactgcaacctctgcctaccaggagaatggtgtgaacccgggagtcggagcttgtagtgagccgggattgcgccactgcactccagcctgggtgacagagcaagactctgtctcgaaagaaaaaaaaaaaaaagaaccggccggaaaaaaaaacctaaccttcctgaagggtttcccccggattttaaaaaggccggtcccggcgggcccattttgccttgggaaagcttttggggggtgaacctgggggggaaaaaattaaaaaggggggggtcccaacccttaagggacctttattttggggggggggggctggaatcttgaagtt

SEQ ID NO: 97788 - DNA, 414 bp, Homo sapiens
  misc_feature (1)...(414): n = a,t,c or g
ccttcgcgtaccggtccccaaatcccgcgccgacccacgcgttcgaactgtccgaaccagtttctgggattctgaggttgcagngagccaagatcacgcctttgcactccagcctgggctacagagcaagactccatctcaaaaaaagaaaggcatggattgctagtatttttgaaaggctttatacactacatacggcttttaataaacctttttgcagcaagagggaggaaaagagttttgtttgctttaggaggtagggaaatgtggtaggtgtttcatgcggcctaggaggaggatatgaatgaatggatactatggaatgccagtgatctcgataaggtgggaaccatcctgttcatgttcttttaaggctggttttaagcactatgggtagctgaattttctggcttg

SEQ ID NO: 97789 - DNA, 406 bp, Homo sapiens
  misc_feature (1)...(406): n = a,t,c or g
gaaatactttgtaactttgtatatgaatcaaaacaaacgagcaggcatttctgtgatgtgttgggcgtggttggaaggtgggttctgcgtgtcccttcccagcgctgctggtcagtcgaggagcgccatcatgtcttaccagtgacgctgctgacacccctgacttttattaaagaataagctgtcgtttnaaactaacaaaaaacaagacccaaaaaacaagngcgggggggggggggcctgaaaaaatattaattggtgggacggggggggggaccttgtttttttttttttggggggaaattaattttcagctgggggggggccccataacccagggcggtgggggtcaaagccccgggtcaaacaaattaatgatgcctgggggatnntntttgcatgaacg

SEQ ID NO: 97790 - DNA, 427 bp, Homo sapiens
  misc_feature (1)...(427): n = a,t,c or g
gtggcaggatcgcttgggcctgggaggttgaggccgcggtgagctgagatcatgccactgcactccggcctgggtgacagagtgagagcccatttaaaaacgaaaaataaagggaaaaaaaaggacagaacaggagtcccggagacagaaccttgcataaatgagaatttgccgtatgacagagaagcatcaccaaccagtggggaggaaaaaaaaaaaaaaaaaaaaaaaaaaataaannnnnnnggggggggggggggggggattgttcccggccgccgcgcgccgaaaaagcnntttaaaatagttataaattttcaatttctaacaccaattttcgcaccttcagaagggggaagggggggaagccaccctctttctcctttttaaaccnnnnnttnnnnncnctnnngnnngccccagtggg

SEQ ID NO: 97791 - DNA, 396 bp, Homo sapiens
tggagcgaaacatcgttatgcggtgtatgactgtgttcaggtgtgcctttttgtttgtctcctctgctgtgtgttgtttcccctttcctgcctactctaggtttttagaaatattttgatttgctaaaaacttatgattcccccctcgcccggccagccgccccgtccgggagggaggtgggggggtcatccccccgccaggccagccgccccatccgggaggtgaggggcgcctctgcccggccgcccctactgagaaaagaggatcccctctgcccggacgccaccccggctgggaggttggcccagcatgtcattgagaacgggccatgatgacaatggcggtgtttgggaataaaaaaccgggaatggtggggaaactactgagaagtcggt

SEQ ID NO: 97792 - DNA, 407 bp, Homo sapiens
  misc_feature (1)...(407): n = a,t,c or g
ttgaacccgggaagcagaggttgctgtgagccgagattgcgtcattgcactccagcttgggcaacaagagtgaaactctgtctaanaaaaaaaaaaaaaaaaaaaggggggggcccctttaaagggtcctaattaaaaaaccccgggccggaaggaaaaaagttttttttaaggggccaccaaaaaaaaatcccgggcccgcggtaaaacacctgaaaaaggggaaaacccgggggaacccccaatatatccccttggaagaaaatntgntaatatgtccaggggaggaagactgtgtcttgacaacaaccttcttgttaaaatccggaaggggccacacgaaaagcaaaacagggcccgggacactgagattaggagataacccccgataaccttcttgcgccagg

SEQ ID NO: 97793 - DNA, 384 bp, Homo sapiens
cggacgcgtgggctagttctatatcgcgagcggccccctttttttttttttttggggttttgggttttttttttttttaaaaagagccccctttttttggggggcgtttaaaaagggggggggaaaaaaaaaaaacccccccagggctttcaaccccccgggggattgtttttttttttcccccccttttttccccccggggggggaaatggggggggggggggggaccccccttttggggcccccccccggggggggggggcccccccccccccctaaatgggaaaagggccccccggagttttccggggccggggtttttaaaaaaaaaaaaaaaaaaaacccccccccgggaaaaaaaaaccccccctttttttttttttt

SEQ ID NO: 97794 - DNA, 392 bp, Homo sapiens
ctgggtttcaccgtgttagccagaatggtctctatcttctgactttatgatccacccgactccacctcccaaagtgctgagattacaggagtgagccactgtgcctggcctgttttttgtttctttaacaaaaagttatagagacttctatgagtattgtaccgaatctaaatcacaattgggtatataatcattgagcgatattcatttttccaatcagtatgggatttatatctatttatacatgtttttaatcattttgatcaatgtttatagatttcaaggtacaaacctcactttttatgtttattcctaaatatttcttactttaagttctttagcaaatggaattggtttttaattttcttttaaaattatttattgttaatgtc

SEQ ID NO: 97795 - DNA, 402 bp, Homo sapiens
gggtttcgccgtgttggccgggatggtctcgatctcctgacctcgtgatccgcctgcctcggcctcccaaagtgctgggattgcgggcgttagccaccgcgcccagcccatttggggggaaattctaatgcaaaagagccagggctcccagcctgcccacttctaagtggacacatgcacagggctgtgtgggtcaggtgggctacagccacgctgtgaaggcccctcatgagggggactcattaaacaaagcatgcagtccaccagactgtgagatgtttcacagccaagaaaaacggatgacgatggcaggcatacgcctggggataaggaacgatctccaggccagactgttagaaaaaacaaggtcacagcaccatgcgtgtgtgtgcgtgtatggta

SEQ ID NO: 97796 - DNA, 428 bp, Homo sapiens
  misc_feature (1)...(428): n = a,t,c or g
tcctctccacgtggtcctgacctgtcctctgtgagcaagagaaacaggactggtttgggggtgtcctgtctcagtggacacaggacaccacggttttcagtacaacanggaaaaaaaaaaaaaaaaaaaaaaaaaaaaaaaaaaaaaaaaaaaaaaaaaaaaaaaaaaaaaaaaaaaaaaaaaaaaaaaaaaaaaaaaagggggggggggcataaaaaaaaaaaaaaaaaaaaccggggggggggggaaaattttttttttttttatggggcaaaaaaaaaaaaccggggggggggttttaaaaaaagggggggagaaaaaaaacccgcgcccaaaaaaaaaaatttgttgtaaaaaaaantntgcttttttttgtgcttttttttaaataaagattgttcattgtagttggaggtccaacaaaaaag

SEQ ID NO: 97797 - DNA, 404 bp, Homo sapiens
cccacgcgtccgcttaggcatctggtgtaaagagagactttttctttgctacttttttttttttttggaaaggggattttgttttttggcccaggggggggggcccggggggaattttggttaaagggccccccccccccccggggaaaaaaaaatccccggcccccccccccggggggggggggaaaaagggccccgggaaccagggcggaaaatttttggttttttaaaaaaaaaagggggtggaccatttgggccggggggggttgggcccccgaaaaagggacccccccccccaaaacccccaaaggggtggggttacggggggaaaccccccgcccaaaaaagggggggctttttttttgggaaaaaaagggcccccttttttaattgggtaaacggcg

SEQ ID NO: 97798 - DNA, 413 bp, Homo sapiens
tgagaacatgcggcgtttggttttttgtccttgtgataaccactattttgtctctcagagaagccacgatactttgagtatgctatatacctaatgctaagtttaaaatttctggaaagttgcattatgtctgtaaattcttctgcagttagtgcttctgtatactactagtggtagaagattgaaagagaacccttaacatcttggaccttggaaaaacttgacccagaagtctttcaccaaaaatttgcatttacctgaagagccaaagcaattttgagaaagaagaacaaatttgaaggactcacactttctggtttcaaaacacattacaaaactacaataatcacaacagtgtggtattgacataaagacacacaaatagaccaatgtaatagaatagagagctcagt

SEQ ID NO: 97799 - DNA, 392 bp, Homo sapiens
aactacagtcagatggctgaagcattttggctcttgggtcccatcttgagctgccaggtgcctcaaatatggactggaggagtggctgtcactgtggttcgctcccatgttagatacagggctagtctcagctctgccactccccatgtgtgaccctgggtgagttacttaattccctaagccctgtttcctcatctgtaaaatggagatgttaatagcactttttttttttaaattataactttttgggaaagggggtttcgttctgtccccaggctgaagggcaggggcgtaacctgggttaattgcaccctccgcctcctgggttaaagcaatttttttgcctcaccctcctgagaaactggaaccataggcttgtcccacccccccct

SEQ ID NO: 97800 - DNA, 410 bp, Homo sapiens
  misc_feature (1)...(410): n = a,t,c or g
cccacgcgtccgaagatattgtacataaaagaatttttttgtctttaaatagatacaaatggctatcaactttaatcaagttgtaacttatattgaagacaatttgatacataataaaaaattatgaccaaaaaaaaaaaaaaaaaaaaaaaaaaaaaaaaaaaaaaaaaaaaatggggggggggcccttaaaaaaaaaaaatatttttcccggggggggggggaaaatttttttttttttaggggggcaaaaaatatataacggggggggcgtataaaaaaacggggaaagaaaaaaaaccggggcaaaaaaaaaaataaatgggggagagaaaaanattntcttcctttctaacctgggttcacctccaatgctcactcaaggtaatcacaaccaactactaattcaa

SEQ ID NO: 97801 - DNA, 399 bp, Homo sapiens
cggacgcgtggtctgaatcgtgagcggacgccttttccacaactaacctacacggactcgggcctgatttatttacaccaaccacccaactatatataaacctaggcatggccatcctcttatgagcgggcgcagtgaatataggctatcgctctaagattaaaaatgccctagcccacttcttaccacaaggcacacctacaccgcttattcccatactagtgattatcgaaaccatcaacctactcattctggcaacagccctggtcgtacacctaaccgctatcattactgcaggccacctactcatgcacctaattggaagcgccagcctagcaggatcaaccattagccttccctctacacttactgtctttacaattctgattctgctgacga

SEQ ID NO: 97802 - DNA, 410 bp, Homo sapiens
agaagtaggcagcctggacccgtgatcaagattctagagatcagcctggacaacagagaaaggccctatctcaaaacaggcatattaataatagtatctttccttggccctatgacattcagaatacacatcagctctttaaagaccatatgaagtctcacactaaagaaggctcctggccgggcatggtgggttatgtctgtaatcccagcactttgggagctgtaaacccaacactttgggaggccgaggctggtggatcatgatgtcaggatattgagaccatcctggccccgtctctactaccaatacaaaaattatctgggtggggtaccgggagcctgtaatcttagctactcaacaagctgaggcaagagaatcgcttgaatgagggtgctgtgagccaagaa

SEQ ID NO: 97803 - DNA, 414 bp, Homo sapiens
cccacgcgtgcggaggatttattaatggttagatttttgtggaaaatatctcacaaaagcgctcttggctcatgtgcttcctgttttatttatctatgggatctactgctacacattgtctttgaatgatcaggctttatctgagaatgacattaaaacagcacaaaaaatgtacattgtgtacttactgtgctaggtgctggaaacacgaagatgaaaagagccagagcctttgcttttcagaagctcatggtctgttggagcaatagacttgaagaatgtgatgaggagggtattaattaaaagttgtacgccaggcgtggtggctcacacctgtaatcccagcaccctgggaggccgaggcgggcagatcacgaggtcaggagatcgagaccatcctggctaacacagggt

SEQ ID NO: 97804 - DNA, 386 bp, Homo sapiens
atggcgcccagcctctgtctttcaaataaaaaaaggggatttattgggcccggttttgccggggcccctaagcacccggggaggggccaagggcacccaagggaaaaactggctttttttaaaaaggggccccccaaaccgggtttaaaaagttttttggttttaaaaaccccccccccaaaaccctttttttttttaagcccaaaggggggggccctgaaaactgaagaggaaccgtaaacaaaaaaaaaagggggggccgaaaaaaaaccccccccaggggaaaaaaggcccctgggacccttttgccccaaaaagcccaattggggttaaaaagggccgggaaccccccccttttggaaaaaaaccgggcaggcttgttagcg

SEQ ID NO: 97805 - DNA, 395 bp, Homo sapiens
  misc_feature (1)...(395): n = a,t,c or g
aaactctacctctctatactaatctccctacaaatctccttaattataacattcacagccacagaactaatcatattttatatcttcttcgaaaccacacttatccccaccttggctatcatcacccgatgaggcaaccagccagcgaactttctttacctcctagtatcatttcatgaaaattagtagcacctgcacaatggggccttggagacaggaataaaaggaaaaatctggaatggaatcacatgacgcaacaggctatgaagactccctgcccggctgctatatgtctggtaaacagaataaatagtacttgagcatccctgannnaaaaaaaaaaaaaaaaaaaaaaaaaaaaaaaaaaaaaaagaacgggggcggggcggggggag

SEQ ID NO: 97806 - DNA, 400 bp, Homo sapiens
ctcagattttgttgggagacactatttcctcttccttacaacccattttcgtttcatttttcttttcttttcttttctttttctttttttttttttttggggggaaaattttgtttttgtccccaaccgggggggggggggccaaatttaaatttacgggacccccccccccgggggtaaaaggaattttaagcccccccccccccaagggggggggaaaaccaggggtcccccccccccccccccaatggggggggattttaaaaaaaaggggggttaaaccatgggggggggggggggtttaaacccccgccccaaaagaaacccccccccttggcttcccaaaggggtaggaataaggggggggcccccccccttttaaaattttaaaaaaaaaaat

SEQ ID NO: 97807 - DNA, 385 bp, Homo sapiens
  misc_feature (1)...(385): n = a,t,c or g
ccgtcatctactctaccatctttgcaggcacactcatcacagcgctaagctcgcactgattttttacctgagtaggcctagaaataaacatgctagcttttattccagttctaaccaaaaaaataaaccctcgttccacagaagctgccatcaagtatttcctcacgcaagcaaccgcatcccaccctgcgnaaaaaaaaaaaaaaaaaaaaaaaaaaaaaaaaaaaaagggggggggggggttaaaaaaaaaaaattttttcgccgggggggggggggaattttttttttttttttggccaccaaaaaaacactccgggggggggctttaaaaaagggggggggggaaaaaaccggcgccctcccccaaaagtctttttggaac

SEQ ID NO: 97808 - DNA, 399 bp, Homo sapiens
cccacgcgtccggcgagtcctcccgtttaaacgcattcaatttttgggtctctctctctctctctctctctcttcttcacttctctctctctctctctctcctctctctctctcctctttctcccccctctctccctcctctcctctctctctcctctcttatgagaacctctcttctctttctcttttcatacatattctactaggtgtggcccccttcttcttctcctttctctcctttctctccctcctccgtggctcttatactccattcctgcagaagagagagggctacacttaaagaaaaaaaaaaggagggggggggggggggggccccccccccgaattcttcttatcgttatttaaaacatagaagattttttggggagggggggggtg

SEQ ID NO: 97809 - DNA, 375 bp, Homo sapiens
  misc_feature (1)...(375): n = a,t,c or g
ctgagatgaaatgctgcacctgaaatttacttacattttaaattaaactttgaaagacacaatcattcccaaagtaaatgaaaatttatacaactaagatttcttaaattccaaagttcaaggggnnnncnncccgnnctgnnntnnnngccnccncccnccnnngnnncncgacnccccccccggtcccccccccgcgggggcggggcgccgcgcgcggcgcccagggcgccgcggcccnccgccgggcgggccacccgcccccccgcccgccccccncccgngcgcgggccgggcggcgggggggcgcggccgccccccggcccggccgggggggcgggggccggccgcccggcccgccgggggggggggccg

SEQ ID NO: 97810 - DNA, 404 bp, Homo sapiens
  misc_feature (1)...(404): n = a,t,c or g
ttagaaaagaattgttgttgggctgggcgcagtggatcgcacctgtaatcccagtcactgggtagccgacgtgggagggtagcttgaggccaggagctcgaaaccagtccgggccacacagcaagaccccatctctaaaaaattaatataaatataaaataaattaaaaaaaaaaaaaaaaaaaaaaaaaaaaaaaaaaaaaaaaaaaaaaaaaaaaaaaaaaaaaaaaaaaaaaaaaaaaaaaaaaaaaaaaanggggggggggggctttaaaaaaaaaaatttattgcggggggggggggggaaatttttttttttttttttggggaaaaaaatatttttcggggggggggttttaaaaagggggggggggaaaaaacccggcgcccccaaaataaaatatt

SEQ ID NO: 97811 - DNA, 417 bp, Homo sapiens
  misc_feature (1)...(417): n = a,t,c or g
tctgagaatcactcacccataaccacgcgctcactttcttgatattactctcttacagctatctggctagtgcaagtaatttggccaacatgtcagaactactaaaaataaagaaatcagccatgaaaaaaaaaaaaaaaaaaaaaaaaaaaaaaaaaaaaaaaaaaaaaggggggggggccttttaaaaaaaaaaaatttttaccccgggggggggggaaaaatttttttttttaagggggccaaaaaaaaaaattgggggggggggttaaaaaaaaggggggggggaaaaaacccggggcaaaaaaaaaaaaaaagcggggggaaaaaaannnnnnnnnnnntntgnngncnnttnttntttcttttttttttcttnntggtctcntatcttttctttcttcatcgcttttcgtg

SEQ ID NO: 97812 - DNA, 377 bp, Homo sapiens
  misc_feature (1)...(377): n = a,t,c or g
agacggttccatttgcgtagagagaatctgcaggagaagcagacttggatgggaattttttttttttttggggtggcagggcccccaggcccaggggggaaatccttttcccccccttctttttttttttaggggaaaaacactttttttacccccccgccggggggggggggccaaaacctggttggggaaaattcaaactcaaaccccccccccccaagggacccccccccctctggcccctcggaaaaaatttaaaaaaaaacaccccccccttttcttgtgggcccaaacacaaaaaacaaaaaatantttgggggggggggctcccccaaaaaaaaaacactcctccccccgcctcccctcgaccccttttc

SEQ ID NO: 97813 - DNA, 431 bp, Homo sapiens
cccgagttacctttccagcttcatgcttgtcattggccctcgcttactccagaatctaatcatagtgggtgatttgcatttcctctcagacatttgcacctctgcacacactgtgccttacttctgagctgcctttctcccctcattggcctcggaaaacatggttatctttttttttttttaaagttcgggggtacaggaacggaactggcaggtttgtaaataagaaaaacagggccattggggtttggtggacaaaataaccccctccccaaggtataacccccaccgggcttaactttttttcaaaagggtcccccccccccccccttccccccatttcaaaaaccccgtttccttaaattctacccaaaaagggagggaccccccccccccaaggttggtttaacgccaccccctgggctcctgag

SEQ ID NO: 97814 - DNA, 388 bp, Homo sapiens
aggacgcgtggggcctagggtgttgtgagtgtaaattattgcgatgagtaggggaagggagcctactagggtgtagaataggaagtatgtgcctgcgttcaggcgttctggctggttgcctcatcgggtgatgatagccaaggtggggaataaacaatgcaacttacatcgctactgcatttcttttttgttttactttttaaagctattatcatagttttacatattttgggggtacatgtgatattttggtacatgtattatatataatatgtaattatcaagtcagggtaattgagatatccatcacctcacacatttatctttttttttgtatcaggaacattacaggtcttctctagctactgtatttcaatatagatgctag

SEQ ID NO: 97815 - DNA, 377 bp, Homo sapiens
gcaaaaatgatttctcactgtagtttttatttgcatttctttattcgggagattgatggggatataattttttgttaattttttttgtgaattatttttccatgcctttttttcactatttttaaaaactgatataatcttctctattgatttgttagaaattattatatatgcccatgtttgtcatatatgctgtaatttaatttttagtttatattttgtcttttactttaatggttctttaaaatatatcaaatgttaaaatttatttgcaattatacttgattttgctgacgtctcttttctcatatttatgtttaggactggcaaaagacaaaatgacaaccaatttagtttaaagatcttaattggctttg

SEQ ID NO: 97816 - DNA, 412 bp, Homo sapiens
aaaaattctaaagttaaaaatgcaactgacttgctgaagaatgcatcagagtctcctcatagcagaattgatgaagcagaagaaagaattagtgagcttgaagacaggctatttgaaaatacaaagtcagaggagacaaaataaaaaagaataaaaaaatgaagtatgcctacagatctggaaaatagtctcaaaagggcaaatctaagagttattggccttaaagagaaggtagggaaagagctatgagtaggaagttttttcaaagacattatatgacagaatgtcccaaacctagagaaagataacattcaagcacaagaagcttatacaacactaagcagatttaacccaaagactacctcaaggcatttagcaatcaaactctcaaaggtcaaggataaagaaagga

SEQ ID NO: 97817 - DNA, 412 bp, Homo sapiens
agctgttcccttttctcccagcctcaccaccatctgttgttttgttactttttaataaccattctgaatgttgtgagatggtatcgtattgtggttttgatttttttttctgatgattagtgatgttgagcttttttttttttcctttcccacctttattttaaaggccgggggcccttgtgaaggtgggccaggttcttaaaaaaaaaaaagggggccaaccctgtttgcctccccctagttttaaacccccccccccttaaccggtctttccggaggccccccctttcccccccccccttttgggaccttgggggaaaaaaaaaaaaaaaaaaaaaaaaaaaaagggggccccccctaaaaaaaccccaatttacccccccccggccggcaaagtttatttttttttttg

SEQ ID NO: 97818 - DNA, 390 bp, Homo sapiens
ctatttggaagtatccatgcttcaataagtgattgctcccttgcccttccccctccccccacccccttcttctttttttttttttttttttggaaaagggggctcttctttttgggccccagctaaaagggggggggggggaatggggttaagggaacccttggccccaaaagtaatttttccccccaaaccccccctaaaaatccggggccccaaagaaaagggggccccccccttttgaaaatttagggcccccggggggggccgaaaaaaaaaaaggggggggccctttaagggacccaaatttaccgcggggggggggggaagaataaatttttttaaaggggcccccaaaattaaatcccggggcgcggttttaacacggggggg

SEQ ID NO: 97819 - DNA, 400 bp, Homo sapiens
aaacactttattttcctctcacccttcattattgttttcactgcatgtaacattgagattgatgattgtgctccattgtcttctagcttgtgttatgcctgttgaaagtacaaaatcattctggaagcttatctattgttagctatttccctcttctggaagcttgtaggatcttccctttgtttccactgttctgaaacttgtaaatgatatgctttaatatggttgtactgtattttaaacaattatgctctgcactcagtgtttttttggtgttgtttttgttttttaatttttaaatttatttatgtatttttaaatttattgtttttgtttgctttttgagaaggaatcccactctcgcccaggctggagtgcagtggcatgatcttggcgcact

SEQ ID NO: 97820 - DNA, 386 bp, Homo sapiens
aagggagcttatccgatgttgcctgtgggcccagtgtcccatcacagtgcttttttttttttttttaaaaaagaatttttttttttttgggccccaggggggggggaaaggggaaaatgtgggtgaatggaaaccccccccccaaggggaaaggaaatttttcggcctaacccccccaaagaggggggcctaagggccccggcccaaaaaacaaagtaatttttggttttaaaaaaaaaagggggttttatggggggggccagccccccaaccttgggaaggaattggctgggcccccaaaggggggggaaaaacggggaaaaacccaccccgggggcaaattttatgcttttttaggggggggacttttttcaaaaaaacgtaac

SEQ ID NO: 97821 - DNA, 393 bp, Homo sapiens
  misc_feature (1)...(393): n = a,t,c or g
aactgctttccgcagtggctgaaccaatttacagtccagcccacagtgtagaggaattcccttctctcacatgctgctgagtttgtaatttcattgttatttttggctcctgtgaatttcccttacttttttttttttgaaaacccaacaatttttttttcaacatttttaggggtttttaaaaaaaaaaaaagttgggtgggggggctctttggtttttttttttttttttgggaaaaaaattcccaaaaaaaaaggggggggggtttttccccgggccccttttattttttttccccccggggggaaaaaagggggtctcccccccctcttttttaaaaaaaagggggggaaaaaaggggggggggggggggtttttttttttctttaaan

SEQ ID NO: 97822 - DNA, 442 bp, Homo sapiens
cacgatggcggactctctctctatttttatctgggtgatgggtactaaagagcctctgtagggggaagagaaaaagtcacgcacgggcagcccagagcccgcagtttctttaatgggggagaagggcacatgagatagtcctcacagtttgacaaatgtggtgtgttgtaaggacgggagccttggttgcatttttggccctggcagggagagcctcccttccattgcagtgctccccgagtgtccgccaaactgcagccgtccagggaagagaaggattgagtgaagaacatgcattttgggggttgggatttttgttattggtgttagaaacagggtctcactgtgtcgcccaggctggagtgcagtggcatgatcatggctcactgcagcttcgaccttgtggactcaagccatcctcccacctcagcctcccaagtag

SEQ ID NO: 97823 - DNA, 413 bp, Homo sapiens
aagaggctctttatgaacagatgatgaaagatctccaagctaaatcattaagcaagttaaccaaaaaagcaagttaaagaactaggtgctagctgggtgtggaattgtatgcctgtaactccagctactcaggaggctgaggcaggaggatcgcttaagcccgagagtgtgaatcaagcctgggaaacacagggagaccctgtctcttaaaaacaacaacaacactagtgctgctgtccactcccagcaatgtttatatccgactaacacacctgccatgaactatgtaaaccgaataaaatccaaagaaaagaataaaccagttgttggaagcactggtgaccaaccagagcggccaggattttggggatcaagctcctggaaaggagggaaatgccctttctggagggagc

SEQ ID NO: 97824 - DNA, 404 bp, Homo sapiens
  misc_feature (1)...(404): n = a,t,c or g
cgngactcgctggcactcatctgaagagctgaaaatttctgaagaggtgtagggagaaggacagagcatgggtgtctatgtttgaatgcaggaactttacctctctgggcctcagtttcggcatctctaaaatgggaatagtaatgctccatctcagggtacttaagaggattttaatgagagagggctgtaggccagtgtttggctcatagacatgaatggtgttgtaactgattgttgtgtatgaactgtgtgtttttcagtgtatatatatactgaacttctgcctccccagttcaaatgattcccctgcctccacctccccagtagctgggactacaggagtgtgccaccacgcccggctaatttttgtatttttaagaaagacggggtttcgccatgtc

SEQ ID NO: 97825 - DNA, 397 bp, Homo sapiens
  misc_feature (1)...(397): n = a,t,c or g
cgccttcgctggcactcatctgaagagcagtttatttctgaagaggtgtagggagaaggacacagcatggctgtctaggtttgaatgcaggaactttacctctctgggcctcagtttcgtcatctctaaaatgggaatagtaatgttccatctcagggtacttaagaggattttaatgagagagggctgtaagccagtgtttggctcatagtcatgaatggtgttgtaactgattgttgtgtatgaactgtgtgtttttcagtgtatatatatactgaacttctgcctccccaggtcaaatgattcccctgcctcaccctccctagtagctgggactacaggagtgtgccaccactcccggcttatttttgtatttttagtagagacggcgtttcgn

SEQ ID NO: 97826 - DNA, 405 bp, Homo sapiens
ggttccccaggccatggtgattttaaggggaatgaagactgtactgctttattaaaggcctaaatgtcaaaaacaaaacttttagaatagttttttttttttttttggaaacaaatttcccctttggaccccaaggggggggggaaggggccaattctggcttccccgaacccttggctttgggggtaaaaaaaggcccccgccccccccccccgggggggggggaataaggggccgggccccccggcccgggaaattttggtcttttaaaaaaaaagggggttccccgggggggggggggggggcccaaacccccaacccaaaggttccccccgggccggcccccccaaaaaaaaaaaaatttttttgggcccgctttggggaaaaaaaaggtttttttttttt

SEQ ID NO: 97827 - DNA, 456 bp, Homo sapiens
gatgcaccttcggaaccggtccggaattcccgggctcttggcctgtgcccgactgctgactgccatcaagcccactgtgttggggtttcctgtcagtcatgcccggagccctgcctctagccagtgccctctcccagcctggtttctttcgagcatttcctgcgggttagctctggggatcttttcctagcctgttcttacctgtgttattgccagaaagaaatcttttttttttttttgaaaagggttttttttttttcccccgggggggggggggggggggggatttttttttcttggaaaaaccccctccggggttacccccttttttctgcctaacccttttgggaaggggggaaaaagggcccccccccccgggccgggttaatttttttttttttttttaaaaaaaacggggtttacccggggtttaaattcaccctcgggaaccccccg

SEQ ID NO: 97828 - DNA, 405 bp, Homo sapiens
aatttttcttacatatatgtatagttcacatttatttcaatgtttattattagaagtgtttttggtctttttttgatagtttggtgatgtttctatgaccagaaatatgcatatgaacttgaactcttgtttatatccattagcctacggtaaaattggttttgttgtaccttgttttgcttaaagtcgcagtttccaagaacctacgatgatgaggaggacttactgtgtagcagcaacgacagattttatggaaaaggatattatccaatacagaatttctttatctaagacagtctaaaatgatgcaccttgtactctaacctaccgtgaatacattaaaaagtctcaaatcaggccaggcacggtggctcacacctgtaattccagcactttgggaggctg

SEQ ID NO: 97829 - DNA, 370 bp, Homo sapiens
  misc_feature (1)...(370): n = a,t,c or g
cagagaggcacacagaaccagtttatttctcatgaatttataggaccacagtcagcacagagcaaatggtacaagtgcagatggctggggtgagggcgggggcctctgctgctgccttctcttctctccagctgcctgagtactggcacacagcgggcagtgaatctgaggagctgtggcctcgcagtcgctgcaggctgagccagaaaggagggccaggggaggtaagactcactcctgcaggagcgggttggtgatgaagggctgggggaactcgggtctctctgggatgaagtcacccctccttcctgggccggtccccagcccntccccacctgggccagctagctggggttccctgcagcagcgg

SEQ ID NO: 97830 - DNA, 416 bp, Homo sapiens
ggaggatcacttgagcctgggaggtcaaggttgcagtgagccatggtcatgccacttcaccccggcctgggtaacagagcgagaccctgtctcaaaaaaaaaaaaaaaaaaaagggcccccccccccccccccttttttttaaaaaaggggtttaaaaaaatttttttttttgggggggttttaaaaccccgggggaaggggaaatattttttaaaaattttaaaacccggggcccccaaaaaaattggaaaaaaaaacctttttaaaaaaaaaatttcaaaaatttttaaaaaaaaaaaaaaaaaaaccccccccaaaaaatttaacgggggggaaaaccccttttttttttttttccaaaaagggattgggaaaaaaagggattttgaaatttaaactttattcccccaagggg

SEQ ID NO: 97831 - DNA, 393 bp, Homo sapiens
tttcgtaaaaaaacgggtctgagcctcccgggttcgaccaggtgagaggtggcaacacctccggccgctccggggtagggtgttgggcaaatgggcgtgcaaaggacgggcagctccctggaaggtcggggtaactgctccgggaccgcggggcccaaggccggtctcctcccagaaggattaaatgccaccgaggggatcccgtggggtgtctcccggcgcggactaggctgacagacccggctctccgctcccttcggcgccagagacaggatctcattctattgcccagactggagtacagtagcacaattatggctcaccataacctctaactccagggctcaagttatcctcctgtctcagcctcccaaattgctgggattacaggta

SEQ ID NO: 97832 - DNA, 454 bp, Homo sapiens
tcccgggtcgacgatttcgttttatgacttgtctgctttctggtagttagtatacaagggtcaatctatggctagtgtttattggtaattttaaaatctttaaaaataagtagctgggcacagtggcttacgcctgtaatcccagcaccaggcctttttttttttttttttttttggggaaaggttttttttttttccccccctttaatgggggggggaggaatctgttttatgagacccctcccctttccggggaaaaagattttttttctcctcaccccccggtggtgggggaaaaaggggccccccaatatttcctgatttttttttttttttttaaaaaaaagggggtttctttttttttgcgcgggggggggggggcctacctgccgagggggacccccccgtggttgattgaaaagttggttgtttttatagagccgcccccgacccc

SEQ ID NO: 97833 - DNA, 426 bp, Homo sapiens
  misc_feature (1)...(426): n = a,t,c or g
tttcgtattcaaaataatcttaaagaatctcagtgagatacaggaaaacttacagttcagcaaaatcaagaaaacaattcatgatttgaataagaaattcaacaaagagacaggtaacataacaaagaaccaaacagaaatcctagagctgaagaattcaatgagtgaaataaaaaatacagtcaagagcttcaacaatagactaaaccaagcagaagaaagaatttctgaacttgaagacagatcttttgaaatgacacaggcagacaaaaaaagaaaaaagggtgaagaaagcctacaggatgtattgtataccatgaagtgaacaaatatattatggtcattccagaaggagaagagaaaggagaaaggcttanaaaacatacttaatgaaatagtagctgaaaacttcccaagtcttgaaat

SEQ ID NO: 97834 - DNA, 427 bp, Homo sapiens
  misc_feature (1)...(427): n = a,t,c or g
tttcgttgtgaatatactataaaacattgaattgtacactttcaatggtatataaattggtatgggaattgcatggtatgtaaattatatgttaataaagctgttacttaaaaacaagcaaacaaaaaggatccaaacatagatgccaacctgaatcgttaaatagccaaagtggaacagtttgagcaagaaaataaataatgatagtattggattacaacccaaagaataaagtaaatatccagaagtccatacagatataatgacatggctgaatagataaacaggagaagggacaaatcccacataatgaatgtagaagggatatgagaaatgaaaacaagccaaagcccccccaaatcagaagattcaggtgcagggtcctgctgcaggtagaggacctggagacaagaacagccaggcagtn

SEQ ID NO: 97835 - DNA, 425 bp, Homo sapiens
tttcgtaagattaagacagaggtcacggaattgagtggtatgtgttgggctaatggcagagacttggtgctcatagcactttttatgcttcttctgttggtatgctagaccacttttttctcccagccttttcagttgttttgtacttgtgtattttccaggatgggtaatccttaaactaagggtaagctgcactttacccttgttctgttgactttctatccaaatttctcagatcagaaatctcatttatctctttataaatattatgggcaaaatattacgggcaaaaaggaagtgaggaacctcagatgcagtggtaaatcaaacgatatttttgaggccgcgcacggtggctcattcttgtaatcccagcactttgggaggccgaggcgggcgaatcaccaagtcaggagatcgagaac

SEQ ID NO: 97836 - DNA, 412 bp, Homo sapiens
tttcgtatcccccgcgccctccgctcgctggggttataattgcctctcaccccccggaggggttattttgggggtggttggaggcggtggcggcggcggcgaggaggggaatttccttgtgcctccattcccgggaggggggagcggcgttggaggccaccgtttccagatctttatttttttttttttggaaacagagtttttttttgccccccgggctcgagggcaggggggggttctgggttaaataaaccttccgtctttggggttaaagcagtcttggaatcccaccctccaagggggtggggccttcataataaacaacagaaatttgggatggggggggcccggattttcagtggcacatccccacataaaggccttgccaagggaaaaactctccacctcccag

SEQ ID NO: 97837 - DNA, 401 bp, Homo sapiens
tttcgtctacaaaggaaagtgtgcagtgccatataattgttaggctgttttgtattatgaattacatggaaggattttgatagtttttcagtgcttagggtttctaaagcttttcatctggctctgcctgcctttatcgggaactgtattaagtgccatatcaagatgggtatttatcctgaggaaaaatttaaaaatatacacaaatatttatacttggagatagatgtttgtgggcacattagacttggaaaaaaattttttttttgtttttttttttaaggcagcgtttcactctttttgcccaggctggagggcaatggcttgatctcagtttattgcagcctccgcctcctgggttcaagcgattctccggcctcagcttcctaagtaaataagat

SEQ ID NO: 97838 - DNA, 433 bp, Homo sapiens
  misc_feature (1)...(433): n = a,t,c or g
tgtcggattaccggnngnnnnacgcgtccgcccatttgcaagtccgggtggcagggaggtgacagtctgtgggggtttgggcagagaaggtcaggagaggcggctgagatggcacaggaagcccttcttgcccctagctgctacctcctgcgccgtggttccacggagcgtcactccctctgtgacttctgggtcagccgatggggatggacagagtctggcagtgggtgcaggaaccctcgccacagtgggtggccttgaactcctgaactcaaatgatccacctgcctcggcctcccaaggtgctgggattgcaggtgtgagccaccgtgcctggccatgaactttatcttaattttaagataaggtggcgttcggtggctcatgcctgtagtcccagaatttttggaggccgaggcaggtgaatcgctag

SEQ ID NO: 97839 - DNA, 342 bp, Homo sapiens
tacgtagcaaactcaggaattgatcacagctgccctgatgctaaaaggttccctttttttacaaaccgtgtctattgtgtcctgtagagcaggtttctgaggctgcagtctgtgggcctgtgggaaagggtgtctatggttagtcctaagagaatgcttttttttttttttttttttttgaaaggggtttttttttttgcccccagggggggggggggggggggaattttaatttaatgaacccccccccccccgggttaaaggaattttcccgcccccccccccggggaagggggaaaaaccgccccccccccctttcccgggctatatttttgtttttgg

SEQ ID NO: 97840 - DNA, 341 bp, Homo sapiens
cccgtctctacggaaaatgcaaaaattggccaggcatggtggcacactgctgtggtcccagctgtttgggaggctgagacgggaggattgcttgagctctggaggtcgaggctcccagactcatggcagtgagttgtgatcataccactgtattccagcctgggcaacagatggagaccctgtctcaaaaaacacaaaatttttttttttttttttttgaaacggagtctcgttcattcagggggctcacaatttccgttcattgaaggctttgcctcccaggttaaccccttttttttgcttaagcttcccgagcagtggggataaccggccccccccca

SEQ ID NO: 97841 - DNA, 324 bp, Homo sapiens
gagcatttaaatagttattgatgtgggatattgagcagtattgagggacctgctgaaggctgggaccatgaatttatggtggttccagtctgtgctgttatttttctccagtagcactcagcagtccagatcagggcaagggaattattgacaggagagtgactgaagtgattgaaatgatacagtgagcaacctaagcatgatttaaaaaggaaaatgtgactgggcgcggtggctcacatctgtaatcccagcactttgggaggccgaggcaggcggatcacaaggtaaggagttcgagaccagcctggccaacatggtgaa

SEQ ID NO: 97842 - DNA, 409 bp, Homo sapiens
tacggtctcactatgttccccagattgtattgcaatggagccatcatggcttactgcaggcttgacctcctcgggtcagcggatcctcctgcctcagcctctggagtagctgggactacaggtgggggccaccacacccagctgatgtttgtttctgatcctaggaatcggatgcacaaggacatcaagtggctgccagggtctcccacgttctagagaaggatgccttacttgtgttccgctccctgtgcaagctagccatgaaaccccttggtgaaggccctccagacccaaagtaagcagacagcagttcttggccaccttcagtccaatgatccagcaacacatggtactttgtttcacacttcccttgttccaagaagtttcagtgtcatgactctgtgtcagg

SEQ ID NO: 97843 - DNA, 411 bp, Homo sapiens
cagagacggcgttttgccatgttggccaggctggtcttgaactcctgacctcaagcgatccacctgcctcaggcctccaacatgctgggattacaggcccagccacaaagagtgccccttgatggagctaagtcagcggccctcacctgggggcatttgactctctggcgatgcttctggctcaggattggagagctctgctagaaagtgctaagttcttcccactgttgtgaaaaatgacgacggactctcaccgttcaggaggttagaggttcaccgcgggcccactgggccaaatcaaggcgtggaaagggctggttccttctggaagttccagggagagtgtgcgccctcgccttttccagcttccagagagccacgcacatcccttggctcatggcccctcccctt

SEQ ID NO: 97844 - DNA, 402 bp, Homo sapiens
  misc_feature (1)...(402): n = a,t,c or g
ttttgctcttgttgcccaggccgagatcgcgccacttcagtctagtctgggcgacagtgaaactccatctcaaaaaaaaaaaaagggggccccccggtgggggccccctttttttttccaaaaaaatttttccccccccccccttggggaaaaaaaaggtttaattttggggggggggggggggcctcccccttaaacccccacctttttgggggccaaggccgggggtttattggggcggggtttcaaaccccccccggccaaggggggaaaccccctccttttttgaaagggaaaaaatttaccgggggggggggggggcccctttttttcccacctcctgggggggtggaggcaaaaaatttttttacccccggagggaaaatttttgcttacccaaan

SEQ ID NO: 97845 - DNA, 409 bp, Homo sapiens
acgcggggattcaccacgctggccatgctagtttcgaactcctgaccttgtgaaccgcgcgccttggcctaccaaagtgctgggattacaggtgtgagccaccgtaccctgccggatacaacaacttctgcaataaaaaggagaccaatactacttcaatggggtacttactacagagagtacacctcagcttgagtgaggagccccgagtccttggcgcaggttggccttggtgtcacaggggtcttgggtaagttactttatctctaaatctcactctccacagaagaaaaagagaagcttgggttaatctaaaggttcttccaacttgcagattttgtgcaggatttgggggccgggggagctactctgggttgcactctcctctatccaaattgtcttgcgtcac

SEQ ID NO: 97846 - DNA, 404 bp, Homo sapiens
aaaaggcaaaggaggagcattggcacattttacatggcagcaggcaagagagcatgtgcagaggaactgccctttataaaaccatcaggtctcaagagactcacacactattagtggaacagccacatggggggaaccacccccatgattcaattacctcccaccaggtccctcccatgacgtggggattatgagaactgcaattcaggatgagatttgggtggggacacagtctaaccatatcaattaggaattaacattttttgtttttgggttttttgagacaaggactggtttggttctgttatccaggctggagtgcaatggcatgaacttggctcattgcaacctccacctcccaggctcaagtgatcctactgcctccaccctctaataagctgggc

SEQ ID NO: 97847 - DNA, 408 bp, Homo sapiens
  misc_feature (1)...(408): n = a,t,c or g
caggtgtttcaccatgttggactggctgttcttgttctcctgaccttgngatctgctcgccacggcctccgaaagcgctgggattacaggcgtgagccactgccctgggcctacaattttcttaactagggttgaaggctctgaaaatatgcagaaaatcatataatggccttatgaaggttgtatatatggcagaaggattctgtttttctggacaataaagataaaaaagtagaatatattactgacatcagtttagaaaaatgtatagtagtgtagtgtacatacaggtaattgaacaaagaaatatcaataacaattggtaagagcatttttttttttttttggaaacggggtctccttttgtcccccaggttgaagggcagcgcaaaaatctcgcttcgtttt

SEQ ID NO: 97848 - DNA, 406 bp, Homo sapiens
ccacgcgtccgcccacgcgtccgctcacaccctcttttgttttttggttccagatcttatattcagtgatttcctctggttctggaccccacaactccaagcttcctattggttccagttctcctgatcggtaatacatttggttccaaatccagacctcttaatctctctcttttttttttttttttttggaaaaaaaaacccctttttgtccccagggggggagaagggggtttaattttgggtttttggacccccccccctgggggttcaaaccattttggggccctacccccccaaatatgggggaataccgggttgggccccccccccccacttatttttttttttttaaaaaaaacagggtttctccatggtggcccgggtgggtttgaaccccccaccc

SEQ ID NO: 97849 - DNA, 434 bp, Homo sapiens
  misc_feature (1)...(434): n = a,t,c or g
aatatttcaaagaaaaaatgtaaaaagcatatggcccactatacaccttgagaaaaaaaaaaataaaagctttagtaaaaagttgagccaggccctgtagctcacatctatagtcccatcactttgggaggcggagggggcaaaattgcgtgggctagggaggccagcttgcagggagtcatcattatgccactgcactctaccctgggtgacagggtaaaaccttgtctcaaaaaaaaaaaaaaaaagggggggggcccttggtttttttttttaaaccctttttccccccccccccggaaaaaaaaaaaaataaaaaaaaaaaaaaaaaaaanngggggggggggccctttaaaaaaaaaaaaataataccggcgggggggggggagaatatttttttttgggggcgcaaaaatataaggcgggcgggcggg

SEQ ID NO: 97850 - DNA, 414 bp, Homo sapiens
ttgggttgctgccacccccaacctggtttttgttggccggggcaactgccaggattggtttaccggcccattccttaccaggggggggtgggggggagtcctttttccacctgtcaaaagggtaataaaagggttggtggctccattttctgggcccataccgataagaaaaaaccaccagaaagtagggggttttttggaaccaaataaaaccaactttaaggaataaaattttgttgaaaataaaaacaccaggagggggataaaaaaaaatgttcctgaaaaaaaaaaacctcaaaagggaattcctttgcctccccaaatcttcaatgagaaccagacctggggggattttgacttttttttctttgcaaagaaaaagaaaataattaattccttccttggttgggctcc

SEQ ID NO: 97851 - DNA, 384 bp, Homo sapiens
cagaaaaatagcttgaacccggaaggtgtaggttgcaggaacccaaaatcccgtaattgccctccaccctggccaacaaaaccaaaactttgtttcaaaaaccaaccaaccaaccaaccaaccaaccaaaaatttacccaggcttgggggcggccccctgtaatgccacctactcaaaaggctgaggcagaaaaattggttaaacccagaaggcaaaggttgcaggaacccaaaataatgccattgaactccagcctggccaacaaagaaaaactccttttgtaattaggtaattaattaaaccggagaaggagagagggagttccaaaaccgtgaagggacgcccgtttcctccactgttcacttgttaacccaccaaccttt

SEQ ID NO: 97852 - DNA, 406 bp, Homo sapiens
aagggttgcaggacaaaaacccccatgttgggttgaaacacccggagtttccttcacagtggggaggccacaagtccaaaatcaaggggtaggcagggggggtcccttttgaaggctgtcccaggcctttcccacatccagggtaaccttaagccacatccttggggccaccgcttttgtttcaacccggccgtttcttccccaatttccgaattttttttaataaggaagccgggccttgattcaggccccctagtccggttggtttttggtttttggtttttggtttttctgaaacagggtctaattttgttgcccaggctgaaatgcaagggggtgatctcagctaactgcaaccttcacctcccaggtggcaattctcctgcctcagcctccctagaagctg

SEQ ID NO: 97853 - DNA, 440 bp, Homo sapiens
ttttgaaataaataccgcccatcttcattattaatggattcggaattggcaaaaccatctacccgctcaaatttatgggtaattccaaaatcattactcgaaccgctttccagggatttctggatccgggtaagggaaggaaaaatttgagtcacctgaggtttagttctcacgatgctaataaaaacttacctgaaactgggtaatttacaagggaaagagatttatttgactcccagttcaccatggctggggaagcctcaggaaacttacaatcttggggaagggggaagcaaacccgtccttcttcacatgggggcagcaaggaaaagccaagcaaaaggggcaaaagcagccaggggcaggggctcatgcctgtaattccagccctttgggaggccaaggcaggtaaatcacgaggtcaggagttcaagaccagc

SEQ ID NO: 97854 - DNA, 421 bp, Homo sapiens
gggggcacgcctgtgatcccatttacttgtaagactgaggaaggaaaatcatttgaacctcaaaggcaaaaattgcagggagctgaaatggccccactgcactccagcctgggggacaaagaaagactccgccgcgaaaaacaaaaaccaaccattaccaccaccaaaaggagttaagtctccacctcaaagggaacatgggttgattgttacatgcatgtttgttcaataaccatgagtcaggaggaccttcataattattcatagctcctcctgtaacctgtggaatatgtatgtttagccaacctattcagcatcaagttcctacccctgctcctccttggaagggcctgcctctggtctttgccaaaaattgaacttcctggcctgtgggatggccaccttgcaggcctttaacgct

SEQ ID NO: 97855 - DNA, 367 bp, Homo sapiens
cacaaaaccaacattcatttcaaacttgtaatggtttcaaatgtattcactttttttttttttggaaagggattttctttttgtgccccggggggaagggcggggccattatttgggttggttgaaaccccccccggcagggaaaaggcatttttcgggccaaaccctccgaggaggggggaataaagggcaatggccccctgcccgggaaaaattttggttttttaaaaaaaaacggggttcccccggggtttgaatttttggcccgggggaccccccccctttggcctccaaaggggggggaataacggggggaacccctggcccgggcccgaatttttttggttttaaaaaaatttcaaaattg

SEQ ID NO: 97856 - DNA, 375 bp, Homo sapiens
tcgctcggagcagccggccggctctgccagttcgggcaatgaggggcttagcacccgggccagcggctgcggagggtgtactgggtcccccaacagtgccagcccaccggcgctgtgctcgatttctcgccgggccttagctgccttcccgcggggcagggctcgggacctgcagcccgccatgcctgagcctcccacccactccgtgggctcctgtgcggccaagcctccccgatgagcgccgccccctgctccacggcgcccagtcccatcgaccacccaagggctgaggagtgcgggcgcacagcgcgggactggcaggcatctccacctgcagccccagtgcaggatccactgggtgaagccagctgggct

SEQ ID NO: 97857 - DNA, 375 bp, Homo sapiens
atcccaaggcgacccggtgccctggatggcctggaagctggtggctatgtctcctcctttgtccctgcgtgctccctggtggagtcgcacctgtcggaccagctgaccctgcacgtggatgtggccggcaacgtggtgggcgtgtcggtggtgacgcaccctgggggctgccggggccatgaggtggaggacgtggacctggagctgttcaacacctcggtgcagctgcagccgcccaccacagccccaggccctgagacggcggccttcattgagcgcctggagatggaacaggcccagaaggccaagaacccccaggagcagaagtccttcttcgccaaatacagtctcgctctgtcatccaggctggagtaa

SEQ ID NO: 97858 - DNA, 363 bp, Homo sapiens
ctggaggactgggggggccgtggagcgcgtgcccactatgatggcttctccctggaacccgagagcgaccactaccgcctgcggcttggccagtaccatggtgatgctggagactctctttcctggcacaatgacaagcccttcagcaccgtggatagggaccgagactcctattctggtaactgggccctgtaccagcggggaggctgctggacccatgcctgtgctcagtaaatactcgatgcagtgtatgccacagggcctaagtatcaagtacactgtgaagctttacattgataggatatctcccatgtggagctgaacgccaacgttctgtataaaccccacatttgcccagggact

SEQ ID NO: 97859 - DNA, 361 bp, Homo sapiens
  misc_feature (1)...(361): n = a,t,c or g
aactggaagaattataatcctgtctcaaggacttcaaactctactcccactaatagctttttgatgacttctagcaagcctcgctaacctcgccttaccccccactattaacctactgggagaactctctgtgctagtaaccacgttctcctgatcaaatatcactctcctacaaaaaaaaaaaaaaaaaaaaaaaaaaaaaaaaaaaatttttttttaagggggcccgagctttttcccttttgggggggggaatttttaatggggcccgggccggtttttaaaaaggggggggggggaaaaaaaagccccncctcnnccaccccctccctccanccccaaccccaccacccaccctgcn

SEQ ID NO: 97860 - DNA, 443 bp, Homo sapiens
  misc_feature (1)...(443): n = a,t,c or g
ccgccgttgcgttgagctacaagccgccggnctccacagtgatgtggatcagcttgctggcttggtttttccaggctgtccttggccacttgcatcgcccgcaaggcgcgctccagctggtccttggcctcggcgtgccgccgctcctccttcttgagacgctcctgcgcctcggcttgcagtttctgctggctcaccagcgtggcctcccccgagtacttgaggtcttccagctcccgctgcagttgttgcttctcctgcttcagcctcaccaacgtctgctcggtctcgctcttgagcgtctccaactgcgcgaaggtgtcgccctgggccaggaaccgccgcaccaacgagtgcgtctcgtcagtgccagtggcgtccttgaccttgccaaagatcacctccatctggtacatgctccagcgctgccgcagctcctactn

SEQ ID NO: 97861 - DNA, 432 bp, Homo sapiens
gtgtcgatgcgggaaactctcagcggccgaatacaggtgttgttattatttgtcacctttttatataatgaaactttaaaaaaatctgataggtgtacaaataaaagcagtgacctccagctgtgaggacagggagagtgactggggacggggaggctgggcggtgtgcaggtgtcgctcctggaactaggggagccacggtctgtgccccgcatcctcaggggtggctccagttctcgggaggtgcctgaggcctggctggaggcatctcaggggaaagctcagaggcgggtcaggcagagggctgggggcaaggatccgtattcatcgggggtacctgggccaggacaatgcttggcggggagctccacagactggctgcttgaggcagaggctttggagcagcagaggcaggtggaaatgacaggtgag

SEQ ID NO: 97862 - DNA, 424 bp, Homo sapiens
aatacagtcctgctatgttgcccagggtggtcttattttcctgggcacaagctatccttccttatgcctcccagagcactaggattacaggcacaagcgaccacatccagcctgcgatttctttttatgctttctttgtgtatctaaattttctacaagtagcatgtgttgcttttataataaaagaggaagcattcttgccactgagcttatgaaaaagaaaaaaaaagagaccagggatgctaaaaaaaaaataaagaacacatgattttccttcagattcctagggattgtccctctctgtcgcccaggctgtagtgcagtggtgtgatctcgtatcactgtaacctccacctcccagggtcaagcaattctcctgtctcagccctccgagaatctgggactactagcacccaccaccatg

SEQ ID NO: 97863 - DNA, 441 bp, Homo sapiens
aatacaaggggggctgcagggccacctcagatgcctcatcctccacgagcttctgcctttcctgaaaatccctgtggaaggaagaactgaggccaagtctcggggccctgagcctcgggttcctcacctgtgaaatgggctggcccagcaggtacatggagaaaagggggtctgggttggggtccaacgagggtcagaggaaggggcccaaggagaagaccaggggcctcctcaggctatgccaggcagcaaggcccaggacaccctggcttcccaccctcccccaggagaaggctttctgtccctgcctgtgccctgtgccctgggcagacctcagggaccagggctgggttggctgtgtggccccagataggcttgtgtctcaaggcacaaggtgcccgctcctgcccaagggaccacagcagcgactgagtcctgcgg

SEQ ID NO: 97864 - DNA, 419 bp, Homo sapiens
aatacatggtggtgtgctcttgtagtcccagctactcaggatggtgagggaagagaatcgcttgagcccagcagttcaaggctgcagtgagctgtgatcgtgccactacactccagcctgtgtgacagagacccccgtcttaacaaagcaaaacaaaacaacaataacaaaagggctgtaaagggcattattgggacaaccgcgggaaactggagatggaaaatagataacagcattgaactgatgtggtcattgtattttggtaatataggaggttcttgttcttaaggggaacctggataccgaagtatttgggaggggggtatcacggtatctgcagctaatggtgggggctgagtggggaggaaaaaagaaaaatacccctatataaacccaaaaaggagagaaatgaaacgtgg

SEQ ID NO: 97865 - DNA, 404 bp, Homo sapiens
  misc_feature (1)...(404): n = a,t,c or g
aatacatgtgttggtcatcttgttctggtcactgtgtgcagaaatctgcaccaggaaagcagtctggaaacgaagcacctggtagctctcctcgggcagcgtctggaggacctgcagtgtcgctggcaccctctggctttcatcaatgttgaggaagcccaccacatgagggtagaggtcaaaggtgagcaggggctcacgaagctcccggaggaaggtcttgaggatgactgctggcaggtgcagctcattgtactggtcgaaatccacaggcagtcccatgttgtacttctgctgcacttcccggaccacttgggtgtcggccgacctccggaagatgccctccctggggatagcccgtgcctgctatttagcgcacactcctccctgactcaccatgggcn

SEQ ID NO: 97866 - DNA, 392 bp, Homo sapiens
aatacagcggcgcattccggataggccgagattgtgttgtggaaagaaagataaatttacgccgatgaatatgatagggaaatggattttggcgtaggtttggcctagggtgtagcctgagaataggggaaatcagtgaatgaagcctcctatgatggcaaatacagctcctattgataggacataggggaagggagctacaacgtagtacgtgtcgtgtagtacgatgtctagggatgagtttgctaatacaatgccagtcaggccacctacggggaaaagaaagatgaatcctagggctcaaagcactgcagtgagccaagattgtgccactgcactccagcctgggggacaaagagagactccgtctcaaaaaaataaaacaaaaataa

SEQ ID NO: 97867 - DNA, 421 bp, Homo sapiens
tggttatcgtctcagccgccgcaatacacgggtggcgggctcctgacgtcctttttactttttaggctaggctggaggccgaggctgcaatgagtcgagatcgcatcactgcactccggcctgggcgacagaatgagatagtgtcaaggaaaaaaaaaaagggttgtttttttggtaaccgttttaccacctaccccagttttaagcatttccttccatgtatgtccagttttccaatgatttattccctagaggggaaaccggcgagttaaaaaaaatggggctgaattttgctgacttttgccaaacgacccctagcgggaggggccactcttgaaccttgaaagggggggggagggaccatgctttttctgccactaacgaggaatttcttgagggagggacctcaggatcccaaaat

SEQ ID NO: 97868 - DNA, 379 bp, Homo sapiens
ttcgccattcgtgccattgcagtccagcctgggcaacaagagtgaaactccgtctcatggaagaaaaaaaaaaagaaggaaaagaaaaaggacggacgagaaccagccctgaaagcaccccttgagggccaggccagggccaggagcgcccagggctcaggggggggctcagggctcgggggggggccggagggcggggccatgcaggaagctggtccatcggggacacactggaaaccccaaaagggagcctgggctcatcccccaaggggaggggagatccctgggaatccatccatctaacggttgccacaagccctgtccttctagggggagaccacccccacgccccaaacagggaaggggacgcatgcaaaac

SEQ ID NO: 97869 - DNA, 415 bp, Homo sapiens
atgtgacatgccgcgacgtaagcttgatcctctgagcggccgcaatacattggggtttgtctgtgttgtctgggctcaaacttctgggctcaagtgatcctcctgcctctgcctcccaaagtgctgggattacaggcatgagccactgcgcccagtctgggtatactttaaactatggcaccccagtccgtggaagcctgggttttatttcagtgtgttttttcctttttatctgccactctgcaccacagcatcgctgttttgctcctgcctgccaccttgctgctctagagtgactttggtgggcagtgaatcctcgtgcctctggcctgctggctgagacccgcgctaagcttgtcccgtcacagcagggcagcgggagagactgttgttgggggcccgaagtggtgagggt

SEQ ID NO: 97870 - DNA, 446 bp, Homo sapiens
  misc_feature (1)...(446): n = a,t,c or g
ttcgccattcgcgctgtccgagaccttgtcgctgtcggacgtgagtgactcgcagttctgcagtcgcaggtccgactcgctctccacgtagcgctccaccttgatctgcatcgcgcccagagcaccgaagccgtcctcgcccgccttggggttctcaaagtccgagtgctcgaagctgtcgtcgctggcgcggctgtccgggttactggagctgtggccgtcgtcgctgcagttcatgtccgtgctccacgcgttgctgcagttgttcctgtcgctgtcgtcgtcatcctcctggcctcgggctggacctcccttccacccctcttgttcgccacttccccccgctcttcctcgttgtcggccctgcctcgctccgcggtgtgccccgtcgccactcccctctcttcntgctgtttcgttcgcgttctcgccgcccgtgtgtttcg

SEQ ID NO: 97871 - DNA, 365 bp, Homo sapiens
  misc_feature (1)...(365): n = a,t,c or g
aatacatactgctatattggtacacgtacactgggactgaacaattaggtaaatcgatggtggatggtagtagcaggttttccactgttggagggggaagaggctacaatgatccgtttgctaaggattagagttgaaaacatcaatgagaactcatatttagtttagtatagttacagatgattacacattgaaatgttcatatacgtttatgtgtgtttacgcatgggttaacttacacacatacacttctttgctttgtcagctgaaagaggcttaaagaaacaacactccggccgggcgcggtggctcacgcctgtaatcccagcactttgggaggccgaggcaggcggaatcacaaggcn

SEQ ID NO: 97872 - DNA, 452 bp, Homo sapiens
tttcgtccggtcctcccctcctgctgggcttggcagggctgccattggtgggaggagccccaatctgtctcccagcctggagctgccccctggcttggcactgccctctgtgcctctgtgctctccctggactgcctgctggctctgcccgccctgggccttctgtgcgggttgggaggggatgggctcagaggagtgagcggcacttgtccagggcccagtgcgtggccgctgctcatggcagcctctgcctagagccctcagtggctcccctgtgcccctggggtagctcccagcaagccttgaccctgaaccccctccctgcctggtcgcccctccttcgaagactcttgctcatcccccaagtcccatctctccctggggtggcaggggcatctcttaggcccgcctcgctgggtgcccctgcagacactctgcagcccgcatgtatt

SEQ ID NO: 97873 - DNA, 436 bp, Homo sapiens
  misc_feature (1)...(436): n = a,t,c or g
gcagcatgccctctcgatgcgngatcctccgagcggccgcaatacagttgttcttgaatgttatttctcagttataagttggttgtatctctatattatttttgtaccaggcaacagttataggttgggaaccaggcacacgtccctcaagtttgaaagaattcccttgggtttcttcgacggtctctgagagtcttttagtgaaacttggtgggatgagccgctcttttatattcagctgagctgtgcaagagtcttttcccacttcattcacagcatagcaggtatattgtccagaatctcctttgtctactttgaggactgtcaggtgggcgctgttttccagataactaatctggtactttccgccacttcgtatttctctgctgtctttggcccagctgacctttatcggttgtgtgcccgtgacgtggca

SEQ ID NO: 97874 - DNA, 403 bp, Homo sapiens
aatacaatggggaatggagttattgcttaatgagaagagtttatgtttggagtgatggaaaaatgttggaaatggatagtggtgatggttgcctaacattgggaatgtaattaatgtcactgaatttacacttagaatcattacgagggcaaattttatattttatcacacacacaaaaataggcaaaggtaaagtttctacagtctcatgaagaaaagattaaataaaaagcttagtcacacctgacttgtgtgacagtaaaattatccctggacttgaggtcagaagatcagagttaactctcgatctcttgaccttgtgatctgcctgccttggtctcccaaagtgctgggattacaggcatgagccaccatgcccggcccagagttaagtctcttattg

SEQ ID NO: 97875 - DNA, 379 bp, Homo sapiens
aatacatacctgggcttggttgactgtgctagtgcaccactgaatgcgaaggatgaaggtgaaggcatggatagagacaaggttggcttcgcaacatcagctgcagacattttgagcttctgcaaaagttttaggacatccgtccactaggtagcgggaggacatgcaccttggacttccctgcacttctgcaaagtgatgtttcctggtgcactggaagtccttgtctaaagcagctgggcccgactccatggcttcctcatcctcaaaggtgagttgacaggcagaagccttgacctactctccctctgcctgaatcacctgctccgggagatcttggcgcctctcctgctcccttgaactatacagaacctgggct

SEQ ID NO: 97876 - DNA, 451 bp, Homo sapiens
aatacatcttccctttcttctagttgatccttcaaacattgatattttagcttcagttttttgttctcattttcattctgggttaattcctctgtcagtctgtcacactgtgatttcaacttctccagctgaccacgatgaattttagccatattcttctcttctaaactttcagccttcagagtcctgatatgattctcagcctcactcttttctttcttaaagtgcttcataagctcctggatattctgttcgggttttgttatcacactctgcaatgatgaggtgagatctttcactccctctggtgcacatctcgttccaactctaactgcgtgatgattgtagctgttccttcatccctggaatttgcctgggcaatgaaggcccaaaggccccttaggcactggttttcttggctcttccattattgaaccctcatatatatacc

SEQ ID NO: 97877 - DNA, 400 bp, Homo sapiens
cattactagtagagcggacgcaacagttcatgaatcaccaataaatgctaattagatctttattttttttacagacagtgtcttgctctgtcacccaggctacagcgcagtagtgcaatcctagctcactgtaaccttaaactcctaggctctggcgatccccccaccccggcctcccaaagtaaggagattacaagcatgagataccacatctagccaaatctttaaaactcaatgtgttgaaattgtgtttttgacacaacacacagaataggagaaaatatttgggaatcatatatctgataagagattaatatccagaatgcatgcagaattcctaaaactcaacaacagaaaacccattttcaaaataagcaagggttgcacagcaatctgaacg

SEQ ID NO: 97878 - DNA, 382 bp, Homo sapiens
aatacatggtgcacatctatggtcccagctacctgggaggctgaaatgggaggatcgccggagcccaggaagtcgaggctgcagtgaattgtgatcacaccactgcactccagtctgggtgacagaaggagaccctgtctcgaaaaaaagaattaatatttgcaaacagaatttaaacgaaaaaacaaacttaactgtggatactccaagacattcgttcactcataaaatcaaatctctgaatcatttccaaatgtttctttaatctccagataccgcaacatataaatctgctgagccacctcaaatatctacctaaagaataaaggtttgccaccaaatacaaagttccatttcctatgagcttataatgcactctata

SEQ ID NO: 97879 - DNA, 371 bp, Homo sapiens
attacctgggggttcaccgtcttagtattgatggtcttgatctcctgacctaatgatctgcccgcctcggcctcccaaagtgctgggattactggcgtgacccaccacgcccggccaatttttattttatcttatttaaataaccatatggggctagtggctaatgtattgaacactaccgctgtagaccatacgaaataaatataaagcagtctcacctttggaaaaacagaagactcttactgtctcataatataaatgaaaactgaaatactaagataagtagaacgttttttaaagaacaaaaacaagagataacctaatgaaagctataaaagtccattggataataatgctaccagtactaggct

SEQ ID NO: 97880 - DNA, 369 bp, Homo sapiens
atacatggggtctcactatgttacccatgctggagtgcagtggctattcataggcaccatcttaacaatctgcagcctcaaattcctggcctcattccatcctcctacctcagccactagaggagaagcgacttgaagtgtgtgccactgcacctggctggtgtcattatttcttacttaagccatttggataggtgtgtggtaatatttcattgtggtttcaattttcatttccctaatggctaatgatgttctttttacatgtttatttgccatctgtaattctcttctgtgaaacttctgttcatgtcttttgctcatttcctaaccgagctctttgctgttcctttttactgttgagttttgaga

SEQ ID NO: 97881 - DNA, 377 bp, Homo sapiens
aatacatttctgtagagacagggattcactatgttgcccaggttggcctcgaactgctgagctcaagcaatctgccctccttggcctcccaaagtgctgggattacaggcactgagccaccaagcctggtctgcaatcagttttccttctaggtcttaagatcttccttattcttcttgtaaggggtgtggatagatatttatgagtggtagcggcaaacttcagaggaccagaaataatgattcctaaaaggactttcaggaaaagatggctgcctccacacacatatcagatactcctctctctgaaatgcactaccagatgtctcacgtacttggatgacacacaatccagggaaagaagtgaatccaaccttg

SEQ ID NO: 97882 - DNA, 425 bp, Homo sapiens
tcgtcgcttatgccgcgacgtaagcttgatcctctatagcggccgcaatacagggttcttctttaggactctgttatggatcttcttgcgtggcgctcgaagggctctttggatctctgggcttttcaagattctgctaagatctggattaatcatcttgtgcatgggaagattgtagctactcttgagggaagcggctctacgccaagtgccgtacaattcatctaacttccggaaagcactttcagtccaaatgcagaaacgtgccgcatgccctccaggagcatgcttcataatgttcagcttgcttacattacacagaggacttccagggatgttaccgacggccttgcatagaccattatcttcattactaatgatgccccgctcccctgtcctgggtaccgtgactgtcttgcgccttg

SEQ ID NO: 97883 - DNA, 372 bp, Homo sapiens
aatacaggtggtgatttatttgatttatttgccctcttcaagattatgtcatctgttctgatgtcacgtcatgtgttgttaaaaaaatcttagctacaacagggaggagacttagagatgatagtgttcaattttccttttttttttttgggaaagggggttcacttttggccccccgggttaaagaacaagggggggatctgggttaatggaaccctcggccgcccaggttaagggaattccccggcctggccctcccaagatgttggaataacgggctggcccccccccccccgcttattttggtatttttagaaaagagggggttccccctagcgggcaagatgggcctaaatctcctgcactcccgcc

SEQ ID NO: 97884 - DNA, 388 bp, Homo sapiens
atacattcctcctatttttttcctcaaagctttttatactttacatttgaaatcaatttctgtaatacttatagagctattcaaattatctatttcatattaagtgtatagtcttttttttgagaaagtggaccatttcttctaaattgtcaaatttatgtgtgcacagctgtttgtagtatttcttttttacctttataatgtcttcaggatctataccaaatttccatggttcatgcataatatgctaatttgtgccttctctttttttttcttttatcagaattcttagaggcttgtcacttgtattgatggttccaaagaactagctctgcgccggtgatttcccttattctttttgatttcagcactatctattagccgctcc

SEQ ID NO: 97885 - DNA, 405 bp, Homo sapiens
gtctgcacccactagttgggtcactctaaccgaccgcatacagctcatgataaacctcaataaattctttctttgtgacctcggaaccagctttgtcctttgatttatgcaattctttgaacttaagctcaattttgctcgtttttaaaccaggattgaggtttctgattcattgcacagcattacacagagatatatgtccaaggttatctacatcaatttcactagacatttgcgaaacccaccaagacctcatgttatcttggctactttctaacatatcaagtgcatgtcttccatatgaaaataggtaccgcagccctgttacccggatgtttgcaacatgtgaggggtgggcaccccaacccagtgactcctaattctctccatatatgacggaccacg

SEQ ID NO: 97886 - DNA, 365 bp, Homo sapiens
aatacatgctgtttaagttctcgttccatccgtgatggcaggccaggatacatagtagaccctccagaaagcacaatgtgtttgtagaattcagatctggtaccaacgtcagctgcctgaattgtgctataaagcaattcatcaacaccaactccttcaacattgatcaagcgaggctgaaataaagcttctggtgcttcaaatctctctcccccaactttgatgatacgtccatctgggagtgtataccactcatctaatactgtggtttttaaggccagtttctgctcttgctcaatattatatcccacgtatcaccatttttctttattcatgacaaccgttttatatcaccatacgggttg

SEQ ID NO: 97887 - DNA, 662 bp, Homo sapiens
tttcgtccccatctgtcttgtctccctgtgggtgacagccccccatggtatagggaggaaactgctggggagcttggagtgcctgcctggggtcaccttgacaggacaacagggctcgaggggggaggcgcttcttcctgaagtggccgtatcttgccctgaccgccacccccacccgggactgggcctctcatcagcacagggctgggcggggtggggacaggtggtgaggctgctgtgcagcagcgctagaagctctagaaactgcttgctgggtttcgtgccatagcctgtcggagggcgtctgggtgggtccagtctggctgtgtcggatggtgccttggtgcagaaccgcgtgcctcccatctgcggccagcggggctctgtccacttccggtattggaatcaccaggcatgttgcgtgcgtgagcatgtgcggtcttgtggacacctccaggtcctagacatgagaagcctgttgattcagaggctgcgtggtctccaggggttggtttggcctctgcctccagcttcgagtggacggatggctttccctgagcagcctgcctctgtggccaggcggtgatgctgccgtcacatgtggctgcgcatccccgacgagatcatcgacatggtcaaggaggaggtggtggccaagggcc

SEQ ID NO: 97888 - DNA, 467 bp, Homo sapiens
aatacagggccggcgacagatgtacagaatagccaattcctcatacacttttcctggacccacgggacacaacttcacaccttgttttgtaactccaaccttaccatcttccatgacatacacacacgaccccacgtctacttctttgacgatgcgactgtccttgccatactccaccgggtacatacaatccacaatctcctggatctgcgacagctccaagttcttcataaagtcattgtcaaggatagcttcctttataagatccttggactgagccctcttggggtaaaagggcagggtcacatgactgacatcctggacgtcgaaggcggaggactaggcggatatcgcctgccgcttggtgcgcggatcgccctgcaacgtgctcgcgctctgctacagcgcatgatgggcggcacgcccggaaacacgaaatcgtgcacctagacaatttcgaaccggag

SEQ ID NO: 97889 - DNA, 504 bp, Homo sapiens
agccgctgtccgcgacgacgcttgatcctctagagcggccgcaatacatcgctttctttttaaaaaattttatacaatacccagttcatgattacttctactcttaacactcaatccccctaattaaacctttttttgactacttcaattataatgccttacacttaaaaaacaaaaaaaaactattattacattttctgaatttgactccttagctaaatttatttcatggtaaacaacagtacctagaacgtgctagattaaatacatattgttgggaaaaaaaagaaatgatttgttctagattgagaaagatttaagagggccaacagtctgggcatggtggctcacacctgtagtcccagaattttgggaggccactgcaaccttcacctcccagattcaagcaattctcctgcctcaccctcctgagtagctgcaattacaggcacgaaccaccatgcccggctaatttttgtatttttagaagagacaagggtttgg

SEQ ID NO: 97890 - DNA, 478 bp, Homo sapiens
  misc_feature (1)...(478): n = a,t,c or g
aatacagggggtaggctatgtgttttgtcagggggttgagaatgagtgtgaggcgtattataccatagccgcctagttttaagagtactgnggcaagtactattgacccagcgatggggacttcgacatgggctttatggagtcataagtggagtccgtaaagaggtatctttactataaaagctattgtgtaagctagtcatattaagttgttggctcaggagtttgatagttcttgggcagtgagagtggctagtataatgtttagtgaacctacggagtttcagcttctgcccaaactcgaacttgacaatctccaactggagcaggagtatacagagctccttggcctttcccctcagtttgttttcccccaagtaaaaagggttgggcgccttgtgttctaaaacaaaaaaacatattttttccccgaatatgttggtttttccccattttatcgataaagttgaggaagtcg

SEQ ID NO: 97891 - DNA, 494 bp, Homo sapiens
gggccgtttccttgcctcttcctctgccccgcttcggccgcctcccgcctctcagggtcggggttgtctgtccccttcgctgtcacatcctccgcacccagcgcttggaaggtgctccatcacggtgacagacaggtgccaagcaggctggcgtctgggaggaacttcggagccggctctccctaggccccgagcttggccgcatccgtccttactctggtgaccctgggcaggtcactgactcttcgggcgctttggcatcctcgcttgaaaggggctgctatcctgcagccttgctggtcggtgagggtgagggtgaaatgtatctgggcccctatcacccaacatgagacgggctgaagcgcttgtcacttgcaaagccgccggggggggagacccgcctcactagaagcggccacactttctggggggagggaatccctccctccgcggtttgcttgtgacaaaagagtgaccccgaggtcccgtcttca

SEQ ID NO: 97892 - DNA, 470 bp, Homo sapiens
  misc_feature (1)...(470): n = a,t,c or g
aatacaaagagcccagatcatgccactacactccagcctgggtaacagagcaagactccgtctcanaaaaaaaaaaaaaaaaaaaaaaaaaaaaaatggggtgggcccgggggcctcccccttgaatcccaacctttttaaaggcccaggggggttgaacaacaaggcaagaatttaaaaatggccctaaaaaaaccgccacccgggaatttcggaacgggacctggagggggaccaatttttccttaaagggagccaaataaaacctgggggaaacaagggcaaaagttgttccttgggaaaaatggtaaccccttaaaattcccacaaaaaaaacaaccggaaaccaaaaggggaaagcccgggggtcccaatggnntnntntgttnccccgcatacatatatatatggtagcttcaataaccttggtgcttcgttctgttttacatcactgaaaaattataatctgg

SEQ ID NO: 97893 - DNA, 195 bp, Homo sapiens
  misc_feature (1)...(195): n = a,t,c or g
aatacaaagagcccagatcatgccactacactccagcctgggtaacagagcaagactccgtctcanaaaaaaaaaaaaaaaaaaaaaaaaaaaaaaaagggtgggcccggggggttaccccctgtatcccaacctttttaaaggccaaggggggttgaaccacaaggcaggaatttaaaaagggcccggaaaaat

SEQ ID NO: 97894 - DNA, 531 bp, Homo sapiens
tttcgtggcagctgaggtgagagacggcggcggcggcgcgggcacccggccccccagcgggaggatgaagcggcggaacgccgactgcagtaagctccgccgccccctaaagcggaaccggatcaccgagggcatttacggcagtacatttttatacctgaaattcctggtggtgtgggcacttgtcctcctagcagattttgtcctggagttcagatttgaatacctgtggccattctggcttttcatcagaagcgtctatgattccttcagataccagggactggtatgtctggtaatacatgttttccatgtgtggggaccattcagctgtttagagtagatgttattagcaatactcaggtaactatgttaggattagctaatagggtctgttaactgaaattgacctctaaactattttgtctaaacccattgatcaaatagttacattttctcctcctctcccattccagtgaaacagaacagtggaggaagcaataattactcaggcttttggagggctgtatt

SEQ ID NO: 97895 - DNA, 516 bp, Homo sapiens
aatacagggtacagagtatgcctgccatgacgaagagcttatgcatgctgtatggtagtgatgacagcacagcagagtggatgtgctgaatgccacggaactgtacactgaaaaatggtgacggcgctaactttatgtgaatttcaccatgattttaaaagagcccagtgtttattatcaacctcattgcaagaggagctttgctcaaaatttcaagtatttgctcacacggtttatttactgaatatctattagtttctaagccctgtgttcagcgctaagggagaggggagaaaggaaaggccttaagaacctcacacttcatcaggagagaatgggaggaaggtaagccctgaagacatgacaatgatgttcattagaacaaattctttgcggttgcaatggctcacgcctgtcatcccacccctttgtgaggctgaggccgccagatcacctgaggtcacgagtccgataccagtctttccaataagacggaacgccgtttcttctacaact

SEQ ID NO: 97896 - DNA, 487 bp, Homo sapiens
aatacaagtgttgtgataagggtggagaggttaaaggagccacttattattaatgttgatagtagaatgatggctaaggtgacttcatatgagattgtttgggctactgctcgcagtgcgccgatcagggcgtagtttgagtttgatgctcaccctgatcagaggattgagtaaacggctaggctagaggtggctagaataaataggaggcctaggttgaggttgaccagggggttgggtatgtggaggggtattccttccattttaattttttaagtgaataatatacacttataccattggcatttacttaccgctatgttaatacgttaaatacaacttcccattcttctcacttatcctcgtatgaggctgagcttaaaggattacttactataacactcccagttatggggagaatgaatatacatcttctatctcgatttctgggttgcaggatgctttaattatttcaataaagcttttg

SEQ ID NO: 97897 - DNA, 398 bp, Homo sapiens
  misc_feature (1)...(398): n = a,t,c or g
aatacatctgggctctcaattctactccaatgagtcaatctatctattcttatcccaatgacactgccttaattagtattaatacttctatctgatgaggtcaatttctcctcattgttctttttctatattctgttcctgtttagaattatcacatttaatatggagttgcattgaatctacttatcaattgggggaaaatgactttttttttttttttttttttttnnnaaaaaaaattttttttttttcccccgttggaaggcgggggccccatcacaaccatttggtcccctcccctcccgggttaaagagaatcccccgcccccccccccccaaggggtgggataaaggggttggcccccccccccaatctttttttttttttagacaagagg

SEQ ID NO: 97898 - DNA, 403 bp, Homo sapiens
aatacatgggcacgagaatcacttaaatccaggaggtagaggttgcaatgagccaagatcgcaccactgcactccagcctgagcaacagagactgtctcaaaaaaaaaaaaaaagcctggggtttttgggggggggcccacataggggggttggggagggggtatgggggccttttgaccttgtgttaaaaggtggggggggtgggggccatcatggaggggttgggttacgggggtttaattacccagggagggggggtaggcccgtgggttttggcccttgtgttggccaaaatgctccaccctcagtggagggttggggtaaaggtcccaacttgtttgtattttgtttataacccgggggggcagcccatgggggacctaccgctttttgtcccccact

SEQ ID NO: 97899 - DNA, 399 bp, Homo sapiens
aatacagtgtgtgtgtgtgtgtgtgtgtgtgtgtgtgtgtgtgtggggcggggggggtgtacaatcaaagtcttatctaggtcaggcgtggtggctcacacctgcaatcccagctctttggaaggccgagatggaaggatcacttacgcccaggagttcaaggctgcggagagccagttttgtgccactgcactccacctgggtgaaagagcaagactctctttctaaaaaaacagaaagcgagacaccaaccaaaaaaccccagtgtacttatgtgcgttggtgaatcacagaaggggccgttaatttcaacgtggggcaatgaaggggcctgcagggaggcagtgctctgaatctgataacaccccgccactctggggcgagggggataggtttcca

SEQ ID NO: 97900 - DNA, 406 bp, Homo sapiens
aatacattgtggtgtgtgcctgtagtcctagctcctctgtggggggctgaggtgggaggatcgctttgcttgagccaaggaggtcgaggctacagtgagctgagattgtgttactgcactccaccctgggcaacaggctggacgctgtctcaaaacaaaacaaaacaaaaagaatgaaagaaagaaagagaacaaaaccagacatctccttgtgtcctcttctgtccactaccttgcatccccccaagagaaaccactatcccgacttctaacagagtaagttagttttatctctctctgaaagtatataacatagaatcacacaatatgtaatcttttctgtctagcttctttgctcagtattatgtttgtgagattattctgtttcttgtgcttttacattctt

SEQ ID NO: 97901 - DNA, 423 bp, Homo sapiens
aatacaagctggggtgttggggagctttctttaatagtcattgtgatcaatatgcttcttccctacgtctggcttccaaaaggaaagttttttttccctcaaaactccaggttcccatctgcccctccacacagttctcccccagggctcaggagtgatttctctcactcaggtggtctgttcttccacctagaagtattatgggggctaccgctgccaccacctccaccacctgcctcgacccacgtgagaaggcctctgggtacccaaggctgcccgtgactggcctggtacatccacctaatctcagcttcatatcagaaagctaatgctgccccacaactaagctgcattctccaagactgtatcaggagtaaaggtgatattctcatcttcaccttctttacactgtgcctctcttag

SEQ ID NO: 97902 - DNA, 401 bp, Homo sapiens
gcgatacactggctacattttccaacaacatgtttttaagaaatataaggaaaaacaagtatttacttggaattaactgtagctttcatatattcttccaggagcaaagcagtttctgcctaaaactctagaaaaacactacttgtttacttacagaacactctaaagatgtacactcataataacagattacatatcagcctaatagaaacaaacacaacgtgaataacggcaagtaaaatctaactgcaggagagacatacgtgtatttaaaatgctcttccttacctggatgctcttcagaataaactcacttttttctctcacatccttgaagggacaccctttataacgcatagccagatgagcaagcgggtttaatcacccctccgaagactcgc

SEQ ID NO: 97903 - DNA, 469 bp, Homo sapiens
aatacactcgacctctgaagaacctctagcttcattctaatccaacttcagtactaaatgacattcccactggttgccatgacagttgacaatcaccgtgatgacccgaagagaccaaaaaaaggacaaaaaaaggggcagctccttgattccaggaaaatctacctcccttcccaagaaaaaacatgaatattcctcctcttggtcttaatttttattttttttagagacagggtcttaccatgttgcccaagctggtctccaattcctgggctcaagctttccttttgcctcctcgccttgctcttaatgcccagccccttcattaaggacacctgacgactaagctctgagtctttaggtttttttttcggattcgctgggagattgacacagagtctcactttgtcaaccaaactggagtgcagtggcacaatctcagctcattgaaacctccgccttccgaggt

SEQ ID NO: 97904 - DNA, 398 bp, Homo sapiens
aatacattgccgggtgtagaggtactcaagaggctgaggtgggaggatagcttgaacccatgaggtcaaggctgcagagaaccatgatcatgccactgcactacagcctgggcaacagagaaagaccctgtatcaaaaaaaaaaaaaaaaaaaaaaaaccccgggggtttccggccccattccctttcccaaccattcgggccccctaaataacccaaactccaaaaggtggccccccaaggccaactttgtaaaccgggggggggaaatacccaatttaatttgaaaaaaaccaaaaaaaaaattttagggttggccaaccaaaaaggtgaaaaaaaagtggggcccaagtcttaataaacaagaacaaaaaatctttttcaaaaatgtttattaaa

SEQ ID NO: 97905 - DNA, 563 bp, Homo sapiens
cgcccgtctcaagctagcatactctagaagcggcgaatacagccctccctgcaggacgatgatctaacctgaccttctggcagtgtgcagtgccagcagtggagaccactccctccagcctctgtggccccgtgccaagccccacctcctctgccacacccaagcccatcccctcctgagctgcctgccccccgccagactgtgccttggcagctgaggtccgagctctgcctgctgcgggccgcccccgcttctctgaggcctgcctcactccacagcccaatccgtgtgtgctctggccctgcctttgggatcattcacccacgagctgccccacaggctcctcctaagccccacacagctgcgccttcctccctgttccccgtctaggagggggcatgaccactgtccacccaactgtccatctacccatccactcaagcctgacatttgcctgggagtagccctcgccacctgcctgcctgacggcccccagaccaaccggccactgccttctgagtgtgccaccttccgcatactcatcctcctcgccctcctgagag

SEQ ID NO: 97906 - DNA, 405 bp, Homo sapiens
aatacattgtctccatgcagtcggggaaatggtggagcggctggcccagcctcgccggttatggcacccgcacatgcgtgtggccatgtgtgtccgtgtgagtgtacgcgtccctacgagggcccccctcctgacctgctcctccctcacctcatccgaagccggattcggtcagctgtgtaattcctccctcccacgtagctggcccaagtgggctgccagagatgaccctattagagcccaggggcccttgcccaccagaagtcccccccacctccccgtttgtaggatgagcatggtggccccacccacctgccaggagggcaagtggacggatggacggacggacggacggacggggaaggcatctggatttgaggtccactcactccttcctaacccccc

SEQ ID NO: 97907 - DNA, 413 bp, Homo sapiens
aatacacctcctgtgtgagttcgctcatttattcttatgtacttgcaacaactgaaagctttcccacactgcttgcattcatagggctcatctccagtgtgagtcctttcatgtattctaatgtaactggaacaactgaaggctttcccacattgcttgcattcataaggtttctctccagggtgacttctttcatgtatacgaaataaactgcgataatcaaaggctttcccacacaccttacatttgtaaggtacacctcccctatgcgttaacatgtgtcttccaatgcttacaagagaaataaaggtttctccacattccttacaatcatagggctttcctccaggatgaatcctttcctgacctggaaaagagcgatgaaaacttcatgctcggcccactaaataaag

SEQ ID NO: 97908 - DNA, 477 bp, Homo sapiens
aatacattggttatcttattttgacttatagaattgccattttgctaaaattttatataaatggtttttactgaattgtcaaactatgtttataaatttttgaagcatcagtgcccaccaaacttaatcagaatgaaaggtaagcattaggtaatatattttctaatatgaaagacagaagtgtgtggaaatcttgtatatttgataaactagggaaacaaacaagcaaatgaccacccttctcccactcaaggcaggggagcaacagggttagagcacattacaaatcttttgaaaagttgttagaatgcttcctgacaagacaaaaagagaattatcatctacttgttacatctgcagtgagaaataagatatttactgtattatcctaccttcgcctaatggcagaatccagaacccagggtatatttgtagctcccaaaaccaaaattccatcattgtctacaccaacccctg

SEQ ID NO: 97909 - DNA, 480 bp, Homo sapiens
aatacatgggggcactgagcatctcaatacatcttatttataggaaggtggactagagtagggataaaggtataattgcatatatatatatacacacacacatatatatatacacacatacacacacatatatacgcatatacacatacacacacacacacacacacacacacacacacacacgcgcgggaggtgtctctcgttataaccaacagaaggatgtgtggtattgtgtgagtgagaaactgaccttgaattttctgtgcgcgcgcttagacaaaaatattaagtggtttattatatcatggcgtgagagcaactgtggggggggcattcagagagtgtatatgtccaacaggagaatggtgtgaccgaacagtggtgacagcttctgaatgtcagggacaggtggtttttttctttctcaggagaaacacctatggtagagagaggggagaggaaacagaagacgggaagagt

SEQ ID NO: 97910 - DNA, 481 bp, Homo sapiens
atacattccggctgaaggctttttcacattcattacattagtagggtttttctccagtatgtgttctctgatggcgaataagagctgaacaataactaaaggctttcccacattcattgcacttacaagatttctcttttttaactgggtttgaattctgtttgatgcttcttttagtagaggtctcttctggagatggttcttgcgttacaaggtttgaactcacattgacacttttcccaaattcattatttacagggcctttgtcccaactgggtattgacttttcggtacctttatcctcatcttgacccgtctgtcggctacccagacgtgtggcttgcccagctttgccctggcctctgtccgatcagctgacattcatcgcagtgatggcccttcgcatttcttctctgtcgacctttaggggactccgtagctgaaataagatgaaaagactactcctgcattattcccatcc

SEQ ID NO: 97911 - DNA, 369 bp, Homo sapiens
aatacatggggtgcttttccagcctcccttaccaaaatggcaacaaaaccagacagaactcaaccccagtcccagtcctcagtgtgcagtcaggaggcatcgatagtggaggcagcagctgcctggggcctcagggcaccctgggggtgggggtgagggtggggccagcccagcctaggatggtcagcagcaaggtctcccgggggatggcttacctccctctgtctccctgtggtagtaaacggagtcccccacagccagccagaggccacctgaggagggagcacagcctctgccagcgctcttccctgtcaggagccagttagtggtcaaccccaggccttaggtcatcaccactgaaggttgttc

SEQ ID NO: 97912 - DNA, 366 bp, Homo sapiens
aaacaggctggtctggaactcttgatctcttgatccgcccgcctcagcctcccaaagtgctgggattacaggcgtgagccaccacacctggccgggaaagtactttttttttttctttggcagaggaaattacctgggcccccccgggtgggatggctgggccgaaaataaggctaatggaaagagccccctccgggaacaacccatttttcttgcttaagcccatgaaaaagggggaaaaacagcccccaccaataacgcgggggaattttttggtgatttaaaaaaaaaaggggccagccatgtgtaaaccagagggggctccttctttggggaaggggaccctgcggcctgcgcttcaaaaag

SEQ ID NO: 97913 - DNA, 363 bp, Homo sapiens
aatacaccccctggagagtgtcctcggtcaatgcataagtgatgcgggcgttgttgttgctatctgggtcctgggctgtcactgagaagatggaggctcctctggggttgttttctggaatgtaggcggagtaggataaatgagggaaggtgggtgggttgtcattgatgtcaatcacatgcagggtgatgtgagtttctgtggacagcggcgggcttcccccatctgaggctctcatactaatgttatattctgatatttgttcgccggccacggatgtggccccctctaaacggcactattgatatatagattcttctaacctaaaggggtgattttccacgacataaacttcaacctgcg

SEQ ID NO: 97914 - DNA, 377 bp, Homo sapiens
aatacattgtgggtgatcagcaggtctcagcagctccttggctcctatactcctagaggagctggtgatatcgtgggatgccctgccttcctgcagagacatgctgggccctgcagtcccagctacttgggagggtgaggtgggaggataacttgaacccgggaggtggaggttgtagtcagctgagatcatgccactgcactccagcctcttatgaatgtggcttcaatctctggacaagaaggagggtcagtttcccttgtctgcaagttgaactataagttaaattcctctcatagttatcttggtctctgtgccagcacactcctggggtagacggtcctcatgcctgagacactgaacctcatgatttcctg

SEQ ID NO: 97915 - DNA, 381 bp, Homo sapiens
  misc_feature (1)...(381): n = a,t,c or g
aatacacccttcctatactttgttacatttctgttgntgttttaagagacaaggactccctctgtcgcccaggttgacatgcagaggtgtgatcatatctcactgcaaccctgaattcctgggctcaagtgattcttccacctcagccaggtgtagtggcacatgcctgaagtcccagctactcaggaggccacagcgggaggatagcttgaatccaggagtttgagactgcagtgagctatgattgtgccactgcactccagcctgggtgagagcaagatcttgtctttaagaagaaaaagaaattacatattagagagcattaagttcttgatcatcataatacagactttccccattcttaaactactcaaggtagca

SEQ ID NO: 97916 - DNA, 445 bp, Homo sapiens
aatacagtcgtgttgggcatatgagagaggaggtggggtaccctttgagtggtttgtctgagaaggacggatggatgttggtgggaaggagaatgagaacagagtggtcggcccaagggaagagtccaaatgtcaggggcaaggaagggctgggaagtggagccttttctcctggaatgggaagctccaggaggcaggggcacgaggcggatccgggttagtgagcaagaactcctcttctgggtaccaggggtccgtcctatgtcctgggtcttggcatggcctaggagagtttgatggtggtgttggggcccatatccttgtcgtggaaccactccttggagtgggagaaatatggtttggtgcccattacactcgtctttagttctggctcccatcaggtacttacggggcttcattggtcatgagcttagatatgttttcg

SEQ ID NO: 97917 - DNA, 409 bp, Homo sapiens
aatacaggttgggcttggagctccaggcccaaggcagtcagcccaccacacaaccttgggctactgagtagattaagaccactatgaaaatacacaggacagtgcgaatctgaatcgtcaggcaccctggaaaacactggacccgggtgatgtgcaggtacaggacacaggccaccaggaagcagatgcataatactagcaggagcaggacgaccacactctgtgggaatattagaaggtagacaaggccaaataaggcagccaggatgagggtgaggacaacggcgctggtgaaatactcgtcctgaagctggtggtacttttgctcccgttcgacatgtttgtacttcagggtaaagaagatcagggctgccatctccagctctggctggcgggcttctaagaggcg

SEQ ID NO: 97918 - DNA, 411 bp, Homo sapiens
aatacatgctgggtgtggtggtaagcacctgtagtcccttatatttatgacgctgaggtgggaggatcacctgagcccaggaggtcaaggtggcaatgagccatgacggtgccactgcactccaacctaggcaacagagtgagactgtctctaggagaaaaaactaaaaaaaaaaattgcccgaccctccatttgaaactatatcggggttttctattttgggccccaattatatctagaactaaataagctccatgcaattataattattaggacttttcaatcttttaatatatagcaagccaaatactaaaggcggtctgcatggttaaaacataagggcaatcccccttatattattttttttgcaaaaatttcttggttttacccaaaactatattttccagtccc

SEQ ID NO: 97919 - DNA, 402 bp, Homo sapiens
aatacatttcctgtggtggcatacctggtgtgtccaattccaagatttgaaacatataattttttcaaattgtcttcagtaaagacgtgatttacaagacccattcccttgagaaatcaaaaagtgcaacttagaaaaaaacagactagtactgctagtaataaacgcctctcttctctgcccagccaatccaaataagacaaagaagtacatttaatatctctgtgtttcagaattctaatctaaaaaaaagtcaaaaacaaataacctaattgtaagaactgtgaagcacttacttaaaaaaatttactgaggcaaaagtcacataccataaaattaaccattctaaaaagaacaatttagtggcatttaataccttcacaatgttgaagcacttgtgtt

SEQ ID NO: 97920 - DNA, 406 bp, Homo sapiens
aatacatgtccactgtatttgtagattcacgctccagcatgtgttctcacatgtgcttgaagcgatgcgagatacctgaaggttttcccacactgcttgcattcatacggtctctctccagtgtgcgttctcacgtgcacacgaagggacgaggaacaactgtaggctttcccacattcagtacattcgtagggtttgaccccactgtgtgatctcacatgcttttgaaagtactgagcgtggctgaaggctttcccacattgattacattcgtacggtttctctccgctgtgggttcgcacatgctctcgaagggaggagtgacagctgaaggcttttccacaatgcttacactcatagggcttctctccagtatgcgttctcacgtggattccaacggaagagg

SEQ ID NO: 97921 - DNA, 426 bp, Homo sapiens
accggcagtgggaagtcctccttctctcttgccttcttccgcatggaggacacgttcgaaggtgagttgtaaggcgggcaccccacgtgtacccacagccaccagatgaggcctcagccctggcacgtggtcagacatgacaggaggcccagcagtcaccgccttcccctgcaccctcactgggacccatgcagggcacatcatcattgatggcattgacatcgccaaactgccgctgcacaccctgcgctcacgcctctccatcatcctgcaggaccccgtcctcttcagcggcaccatccggtgagccccaccacccctcaggcccacccagccccaggccggctcagttccatcagatctggagcacaaagaggagggggttgggggagaccaggatcccagaggtgtttcctgctcatgcct

SEQ ID NO: 97922 - DNA, 424 bp, Homo sapiens
aatacagagggggtggggaaggtactcacaggatgtacatgaagacacccagggaccacatgtcacatgacttgtcatacttctctggacccaggacctcaggggctgccagggcagagggacagcagggctctcagacccaagggtcttggagcccaggcaggagcctaaagcctgggcaaggtggggagcaggtacctgggctgggaggtagggcagagcagactggcgtctggcaccttttggaaaggcagcatgtgtgtgaagttgggggaggagaaagctcctggaaaaaaatcaaccactttcagacatacccctagctcccttgggcctgagcccctctgccagtctcaaccttggtgaaagaagagaagagaaggccagtctggggcttggtgggaagctgccgtaggtgagaggg

SEQ ID NO: 97923 - DNA, 399 bp, Homo sapiens
aatacattcctttgctcctttgtcagagatcagttgactttattcatgagggtctatttccgggcttgctattctattccattgatcaactcatctgttcttttaccaatactgcactgccttgaccacttttctttcattctttttaaaaaatgttaatataatttaatgagagccaatttaaataagaagtcgtaatcaagtattctgggaaatgcttagaattcaatgctccagggaagagaattggatgtgaaaactctcagaagcaggaaaacttacagacagtgttcaggctgccaacctccagcgtccccactcagtcctctccacccagctgggattccccaaaacacagccctgaattgtctatggtcagaggcagatcctagcttgctt

SEQ ID NO: 97924 - DNA, 440 bp, Homo sapiens
ttgctgtgcatgcccgcgtacgtaagctagttaggctctagagcgcacgccgggctggagaccccgcccggggagcccccagcaggaacaatgctagcctgcctgacccgagggaacttactggacgtcctgcaggagggcttcaatgaggtaactgtcctgctcctcccactcctcagctcccctcccccagcgtctcccgcccagtctccggaaggggtcctcctcctcctccatcctttggggaccccagagcaaatcgcccccagaaccccaaaggggctaaggtggtacttacggtgcagatgggtgaaccaggagaaatcagaagggctgcctgcccacagctaagctgggccatgaccttccctggtagcttacctgagcccaagaggacaggaccacaaattcagaaatcacctccttccagaagagggggt

SEQ ID NO: 97925 - DNA, 424 bp, Homo sapiens
aatacatgtggtggaggtgcacagctgtagtcccagctactcaggaggcttatgtgggaggatcttaactcaggaagtcaaggctgcagtgagctacgatcacatcactgcactgcagcctaggagacaaaaggggaccctctctcaataaatgaatattaggttggtgcaaaagtaattgcggtttttgccattgcttttaataaataaagagacaaaaggcaaactactaaggatagttatgaccaggggtggtactggcagaaatgtgctaacaatgtgtcctggagaaggaagctgtgcaagtggagaggaggagtaatttccagcctgccctccaattagtctttcctgagtcaacttaccccaagaaaacgcaagcagggagtaataaccttttctgatgggaggggcagtgacccaa

SEQ ID NO: 97926 - DNA, 437 bp, Homo sapiens
tagcttacctttgactctatacagcagaccggccgcaatacagctgctgcataagtgtagtaatggctttccagaaccagttcttagaagataccatattcattgcattctttctttgcataaactgttccttcctcgctcattgcaagataaacttcactttccacccctttgattgccacaatccgaactgccactgtcctgatttccatgatataacatagaagactcctttgttacgctacatcctgacataccgatgagaagacagatcatcctttaaggaaaaattggttttgattggcatcagcctttccaacagcaatgcttgctttattgcactacactttattatgcttctcagatattgcagttcttacaggttgaaggtttgtagcaaccgtgcaccacgcaagtctaccagtgccacttttctg

SEQ ID NO: 97927 - DNA, 406 bp, Homo sapiens
aatacatggggtggtgtatcaaaactattcacttataaaccattagatccattgcctttgctcccattacattgctggatgagtgctgatacctcattaccaaggccatccattccaatatttaattcaccaagcttttgaatggacctattaaggaactgttcattacgattctgctgctgatcacgaccatcctcctgattcacgcctccttcaagcaacatctgttgctatatatgccgctgttgctccttctgctctaaatgctgatgatagcgtaatctttgcctataatattcttgaaactgctctgttgaatctcgaagctcattgtttccttgtttagccgctcctggattctgcgctccattcgtacgctctttttttgaaacagaactctggcacc

SEQ ID NO: 97928 - DNA, 441 bp, Homo sapiens
gacttcattgatactatagcgcgcccgcactacagtccggcatattttcagccccttgtcatgggtcttatcatcgccattacgctctgtctcatcctcagagatgcgagagtcatcagcatgaagatccacaacagcctcctgccccgccaggggtttgatgtcggggatgaggctctttagtgattcagtggcgatactgatggaaggtttcttctgcgtggtggctgtgctggctccccagcgtcattgccaaccaggctggaccccctatgtgtcactggttccagctggcacccccttggtagctgagacaacggagatcttcctcttgaatgatttgggcagcgagctctgggatcttcagttcagccaatcgcacctcactgtgtactgtatctagtcaaccgccgggccaatcagaatgagccctccctgcta

SEQ ID NO: 97929 - DNA, 443 bp, Homo sapiens
gacgtattcttggatactctagcgcggccgcttcgccattcgtgcaatttctttctgtgctatctgttataagatttcttcaaatttattcctcaattcttctattggatgttttattttgattacatttttatttccagaagaaacttttatttcttgcttttgactcacttttttacattacctctatttctggttataaggatacaatgtcttcacttatttcttttcttttctttttttttttttttttttggaaaagggaacccctttttgcccccaggttggagggccagggcccaattttgggttaatggaagtccccccctccgggttaatgcccttttgccttaacccccggggaaggggggaatataggggcccccccaccttggccgggaaaattttgggattttttttttttttttaaaaaaaaggggttc

SEQ ID NO: 97930 - DNA, 464 bp, Homo sapiens
  misc_feature (1)...(464): n = a,t,c or g
tgtgcacgatgtgtggatactctcgagcgggcgcttcgccattcgtgctacacatatacatatatatgcacacatacacatatgcacacatacacaaatacacacataggcacacatacacacacatcctcagtctcaatgtaaagttcttatttctatgggtcacaaagaggtagaaaaacattgctctaagcaatgctcacatgttcacatgtgaaatgctaaaaagagcatggattttggagtcaaacagacttgaattctaggctggccctgacacctaccagctctatcatctaaaagggcaggggatctctcctctctcacctcatctgcgatatggggtagaaatccaccctccctcaactccagttaatgtaaagtgacaatgaaatggcagatcagccaaagtgatttctaaacagttaagtcctgtgcaaacgcatattaagattgttaatatn

SEQ ID NO: 97931 - DNA, 367 bp, Homo sapiens
aatacatgtcgggtgtggtgatgtgtgctttttatcccagctacttgggaggctgaggcaagagaatcacctgaacctctggggcagaggttgcagtgagctgaggtcatgccactgacagcaggactgtgtctcacaaaaaaaaaaaaaagctaattaactccccccaaaggggggtggggggattaaattccaccacccctgtctgatacccctccaccggctttgtcttattaaagaccccaaaaggttttttttttataaacagggactttttcagttaaaaccatttcccgacatcctttttttaacaaggagaaataaaacctcaaaagggctatgcccgggggaaaaggggccatttctg

SEQ ID NO: 97932 - DNA, 399 bp, Homo sapiens
aatacacggggtgggtgacaagggataacagactacacattgggtacagtatgcactgcttgggtgagggatgcaccaaaatctcagaaatcaccactaaagaacttattcatgtaatcaaacaccacctgttccccaaaaatctattgaaataaaaaaatgacaatttttaaaaaaggaaataaaaataatttttttaaaaactcaaaaacattttctaattatccaattctggaaggtattacaaaatagaaaaagagagacttttaaaaattatataattgtttagggaaattacttttaaatacctgaatcatcttaagaaaatgttgagatgttctaacattaaaaattgaattgtcggccaggcacggtggctcacgcctgtaatctcagcac

SEQ ID NO: 97933 - DNA, 434 bp, Homo sapiens
  misc_feature (1)...(434): n = a,t,c or g
cgcagcttgatctttagagcgacagcgtacgagtaccggtatattgaccaggctgacctcaaactcccagcttcaaagcgatcctcctgccttggcctcccaaagggctgggattacaggcatgagccaccatgcctggccaggttcatcttttggcaaatatttattgcctataagctgagataaaaacattataaaagcagacaaaggtccttgccttcacggggctcatgttgatgtgcatgtgacacttttgtttctgatccaagccattgggggacgatggcacagattttaggagggtggatcactctggggcaggtgcagaggagctgcctggcagaccagcctctgcttncactcctccctcctacattagccccatgcttaccatgaaatgacgtcctgctctttttcttcactcaaagccaaan

SEQ ID NO: 97934 - DNA, 476 bp, Homo sapiens
  misc_feature (1)...(476): n = a,t,c or g
nggaagcacagctgtcgaagtttggagcatctagaccggccgctgccccctgcactgcaggagacgtgtcctgtgagggcggagccgctgctgctggttcgcatcaatgcctctgggggcctcatccttaggatgggggccatcaaccgctgcctgaagcaccctctggccagggacaccccagtctgcctcctcgctgtcctgggggagcagcactcagggaagtccttcctcctcaaccatttgcttcagggcttgccgggcctggtgagggcggggcggggcaggagggaggcggggagcaaggatgggggttcctgcctgggggaagctgggtctggtattccggtctgtggggacaaggaaccgaccaactgatgctctcccttctctcccctgcaggagtctggtgagggcggccggccaagaggaggagaggcatccctgcagggctgcaggtggngcgccaatggcct

SEQ ID NO: 97935 - DNA, 442 bp, Homo sapiens
aatacattgagttgacagtagtttctaaactattggtttgagggacctaggtaggagttatatccgaagtctttaacaatgacaataacaatcctagaggatgaaaaataggcacaacgtcttattaattttaggataggagtaggaggaggaagtaggggagaggagtaattcaacacacagcactccatcacgaagtgatcatcagctaaagaagccattagattaagcctagagactcaacacaggcactacaggatatccttctaataagttgtgtatggctgttaggacataataacaagatactaagacagcacacttaattttttttttttttttaaacagagtcttactttgttgctcaggctggagtgcagggacataatctcagctccctgaaacctccacctcctgggttcaagcggttttcctgcctcac

SEQ ID NO: 97936 - DNA, 437 bp, Homo sapiens
cgctgcttgatcctctagagcggacgcatacatcccggcactctggaaagatcaatccgattgttgtttatgcctagtagttcgtggaccatggcctgatatgtccactggtttagcaatggggtgatggcatcatcacagcgatctaaaataaggagcaatggaggaacctctgtccgacggaattcaaacagttcatactctttagttatcacttgcttaacgcactctgcaagtctctttgctgcctctgatgagagctgataacgaatcatgggacacttcttcagagataaaaggagagctgtaagcccttgagttgttctagatagctgggctggatcccaatttcgaccctggcagcaacccaaaatattgagggaaaacaaatgtgggttcacagcaatgtaatcaccataaaattcctgaacctcagc

SEQ ID NO: 97937 - DNA, 408 bp, Homo sapiens
atacatgctggctcatgttaattcctgcctccgctcacgagctggggcctcactggcgtcaagtcccgtgtccagcccccatggtccagccctgctgctcaccactgggaggtgaagactgcgtagatgtggggagctgtgggagaatcggcggggagcaggaccgcgtggcggatgacgttgaagggcagctgccccggctgggtgcagagcagctgggccttcaggaaggtggtccacttcttctgcagcagcttttcgccgcccacgtcattcttgcagactctagccacccgcgatgtgtggagcctctcaaagaagtcaaactcgctggctgtctcctcgaagaagaagtagacgacctgggtcgaagggatggctgccacaaaggaggcgtcatgaagcccg

SEQ ID NO: 97938 - DNA, 418 bp, Homo sapiens
atacaccttgccagattttccacatcatcctcatcgtttatcccactgtcgtcttcttcagtcaaggacagctgagacttatcagtccccaggagcatgtactcccatctcacagggtcacccaggtcaaagatcaagtccttgcagcagttccagcaatcctgcatgttgatccagtagttcttgtggttccacaggctttcgatgcccaggaagtgctcatcctgggtgctgtagctatgtcctgtgaatgggtcgatgaagaagttctcaggcacctcgcgcttccccgatagcacaaggacccaggagtgcacccgcaggccgtgcagggcatccggctttgccttctccgcttccatgaggcgctcctcctcctccctcagccgcttcttctcctgggctctgatctcctgcg

SEQ ID NO: 97939 - DNA, 399 bp, Homo sapiens
  misc_feature (1)...(399): n = a,t,c or g
aatacactgtgtgtgtgttcgtttttgagaccaagtctcgaaaaataaagaaaggaaataaaataaaacaagtgaatgacaaaaaaactgccccttttctgtggtagacagaataatggtcccccaaagatgcccatgtcctaatcactggaacctatgaatatattaggttacatggcaaaggaaaatcaaggttacaggtaaaattaaagtgcttatcagctgtgagatatggtaattatcctggattaatcaggtggacccattataatcacaagtgttttttgtttgtgtgtgtgttcgtttttgagaccaagtctccctctgtcacccangctggactgcagtggcacaatctcggttaactgtaacctccgcctcccacgttcaagggatctg

SEQ ID NO: 97940 - DNA, 449 bp, Homo sapiens
  misc_feature (1)...(449): n = a,t,c or g
tgagctgctcgcgtcgtaagcttgatcctatagagcggccgcaatacattcccccatgtatgtaaatgttcttgtgatgcagaaaacccaagtccacaggtccaccaaagtgcggctgctgcttgggctccgtctgtcaacaggtggtttcctaatccacagttatcaaagtacggctgccaccttgtggggatgtgaggaacgggccgctaactaagagaagagcaacgggctgctgcatgccacacatcctgctgctccgaactggcccaaactcaggagtgggccgtggactggggctggggccggggagccgcgctcaccttgacctgctcattctaggtgacagcacagaagacaatctccgtgaagccctggctgggaaacatgcggaagcaaatgccaccgatgacctcgccatccttgatcaggacaaagtcttgggcttn

SEQ ID NO: 97941 - DNA, 406 bp, Homo sapiens
aatacaggcagcgtgtcatgggggggaccggcctcacactcgtggcgtatggggcccagtagtaatgctggcagctcctactgtggagcatgtcccaactccgaggccccgattccccgatgagggctaagctgacacaagggctactggcgccgtgtgtccttacgggagtatagggcagcgaaggccagaacgttaaggaacaggagggaggcccccacggcgatggtgacacttaattcagtggagtagtcacgagggttctccaccaggagtggccctgcatcctggtccccgttccaggacccctgggcattctcgttgctgtaggcaagagagatggctggccgcttggtgctccaggacttgccattgggcctgctggtgaagagggaacttttgggat

SEQ ID NO: 97942 - DNA, 396 bp, Homo sapiens
aatacatgtgggcgaaagaagaaaatgcgtttgaggcgtctggtgagtagcgcatggctaggtacgcataggctgcctcacgtcagtgcctgaggcctcttcctgtggcctccccactacgcctggctgctgctgacccttgggcacccttccctgcagaagtcggagcaggacgcgctccttcagaagccgctcccggacccagtcgcggtcccggcccaagacgtactccccaggaagaagacgccggtcacggtccaggagccccaccccgccgtaagatcctgacgtaagagctgcgctggtaactctgggaagctgcggcgcttagcttttgttaagacgactcgtgaagctccacctggtggcgctgacagttccctggtcacctactcg

SEQ ID NO: 97943 - DNA, 362 bp, Homo sapiens
aatacactcttcgttggtctctttctccaattgcacctttaccgatttggcgatggtgaccacctctgccacagcttcctcctttacaggggactcagctttcttcttctctggcacatgctttggtttctcttcctttttctctaccttatcttccttgggagcttgcttgacttccttttcttattcctctttctggtcacctttccccacttctgcttttgactttgcctcttccactggtgattttggcacacgatattgggctttctcttccactggtgattgtgacacaggagacttgcctttctcttccactggggatttcggcacaagagacttgccttcctctcccactggtg

SEQ ID NO: 97944 - DNA, 558 bp, Homo sapiens
ttctaggaccaacactcctgtggagacgtggaaaggttccaaaggcaaacagtcctatacctacatcattgaggagaacactaccacgagcttcacctgggccttccagaggaccacttttcatgaggcaagcaggaagtacaccaatgacgttgccaagatctactccatcaatgtcaccaatgttatgaatggtgtggcctcctactgccgtccctgtgccctagaagcctctgatgtgggctcctcctgcacctcttgtcctgctggttactatattgaccgagattcaggaacctgccactcctgccccactaacacaattctgaaagcccaccagccttatggtgtccaggcctgtgtgccctgtggtccagggaccaagaacaacaagatccactctctgtgctacaacgattgcaccttctcacgcaacactccgaccaggactttcaactacaacttctccgctttggcaaacactgtcactcttgctggagggccaagcttcacttccaaagggctgaaatacttccatcactttaccctcagtctctg

SEQ ID NO: 97945 - DNA, 459 bp, Homo sapiens
gaagctgatccttaagcggcgcatacaggctaggttaagtactgaatcattcctacatgattcctggcaggagaaacgtgacaaggtgcatctcaagacaactagaagtgcaacctcacgccttggaattgccggataaatgttccttggcctttgttgtacgcatcaaaaggattgatggcgggagtttactggtgcagagaaccattgcaagactttgcctgaagaaaatttttagtggtgtctttttaaaaatgctgcgtatagtggaaccttatgtgacctgaggatttccaaatctgaagtctgtctgggaattcattttgaaacatggacaagccaaggtcaagaataagaccatcggccagacgcagtggctcacgcctgtaatcccagcactttgggaggccaaagatgggtggatcatgaggtcaggagatcgagaccatcctggccaac

SEQ ID NO: 97946 - DNA, 423 bp, Homo sapiens
  misc_feature (1)...(423): n = a,t,c or g
aatacacctgctgactcttgctgctgggtggacaatgagacaaacagcagacaggcctggtgtggaaaaggaggtgtgagggagccggaaaggatgatgttggggcctggagtggccacatgggggcagtggagcgtcactaacatcagccagactggtcctcgggacagtgggaggctggggtggtcactgagcctgggccgagcgccctccatgaggctggctccatccagcagggccaggatcatggaagccaagtcatgggaattccctcgagacctgggcatgaattcacattcctccatttatagctgcatgacctaggcctcacctgcaagtgcaggtaataatggagaatcagatgagagattctaggcaaaatgcccagaccagtacggtgcacacagtccatgttgagtaaan

SEQ ID NO: 97947 - DNA, 649 bp, Homo sapiens
agggaggaaacttacacctgtaatttttacatactatgttttagtttgattctgaatgatttgcttttctctctctatatatatatttgtatataggatagagacctaggagatgaatatggatggaaacaggtgcatggagatgtatttagaccatcaagtcacccactgatattttcctctctgattggttctggatgtcagatatttgctgtgtctctcatcgttattattgttgcaatgatagaacatttatatactgagtaagtgcctacacttaactgtattatgtctttattgttcttaaatagttttaatcactggaatcttttaagtcaatcataattaaatcgttacttatttcctttatcttacagtttatgataaatatcataaatgcagacagacaaattaaataatgaacagtaatctgtatttttctgttacatgccaaaacttagtagcattactgaacattgtggttagttataaaggttatatgttccattaaagatatgaacagaggttactttcaatccagagctgtttgacaaagtaaatagcctttttttttcctaaagttgaagatccaattagagcttcatcagaagttcaagaatttcagttactaagttacttcatatttacc

SEQ ID NO: 97948 - DNA, 415 bp, Homo sapiens
  misc_feature (1)...(415): n = a,t,c or g
aatacagtcgtcgtcatcctcgtcctcatcatcctcttcttcatcttcatcgtcgtcgtcgtcgtcgtcatcctcgtcctcatcatctcttgcctagataactgaatagcctcctaactggtcctcttgtttcaactcttcctcccctccattttccacactgctgccaaagtaatctttctaatgtgcaaatctaattgtgtcctgttgtggatattgttttattctgctgtgaatgtttaacactgagcacacagtacagtaggcacttgataatcagtaaatgcttattgagtaaaaagaataaattactgaaacgtccagtaggcctacactttgacctatgaactaaagatgtaagtttcacagattaacattataaaatgtgtgaaaagcccagactgacaaccaaccn

SEQ ID NO: 97949 - DNA, 408 bp, Homo sapiens
aatacacctcccgtgcctgtgcgggaccctcttcctcccgtgcctgtgcgggaccctcttcctcccgtgtctgtgcgggaccctcttcatcccgtgtctgtgcgggaccctcttcatctcgtgcctgtgtgggaccctcttcatcccgtgcctctgtctgaccctcttcatcccgtgtctgtgtgggactctctattctgttgggcccagggaacacagggatgagttaggctcagcagccccttctttctaggagtgtatatgacatccgagtgagtgtgtctagctgttggagttacaccattcaactagtgatttaatataatattttatggtaaaacaaaagcatactatctgtagagtggaatgaataatttacaggaatttttaaggtcaaacagagacttt

SEQ ID NO: 97950 - DNA, 441 bp, Homo sapiens
tgaacttcgggatgaagggaaggcttcgtctgccaaacagagactcaagtgtgccggtctccaaaaatttggagaaagagctttcaaagcatgggcagtagctcgcctgagccagagatttcccaaagctgagtttgcagaagtttccaagctagtgacagatcttaccaaagtgcacacggaatgctgccatggagatctgtttggatgtgatgaagaaagtgcgggccttgctaagtatatcatgtgatctctagaacgaaattgccatatatggtaagataagttggtaatttcctcccttagtatattttctgctgattagaattatgcaatagttttatgtatcgcgtactgtgttcatgatcgctcgctgattgtataagatggattgtttgatttctcagaaggattcataatttctttcattgttagttttaa

SEQ ID NO: 97951 - DNA, 456 bp, Homo sapiens
agtctggtaacagacatgcccacggggtccacaaaggggaaacaggacccccacaggcatctcaaacaggaaggggtttaacacagggagtttggtgcttatggggttgctgggaaggctgcagagtgaccatggctcccacccacgtccaaccctgcaaccctgtgagagcagctgctttgtgcggggcaggggcagctctcctgcgagcccctccacctcccctcctgccccgtggggcctcagacacctgcccatcgcccgggcagaatggctcccgggccaccctcgtttctgagccctggctcaccctgcggtttgggcctggcgattccttgctcttgtcagccctgggttgctggtgttcctgatcaccatctctttccctcacccatgggaagagctggcctcagtccttccgaaaggtcagctggggaaggggtaatcccttggccg

SEQ ID NO: 97952 - DNA, 419 bp, Homo sapiens
ccggaatttaaattacaaaaattaaaacgttcacagaactctgcatttttggacataggagatgagaatgagattcagctgtcaaagtccgacgtggtactgtcattcaccttagagattgtcataatggaagtgcaaggcctgaagtcagttgctcccaatcgaattgtttactgtacaatggaagtggaaggagaaaaacttcagacagaccaggccgaagcctcaaggccacaatgggggactcaaggagatttcaccaccacccatcctcggcctgtggtcaaagtgaaactcttcacagaaagcactggagttctggccctggaagataaagaactgggaagggtgatattatacccaacttctaatagctccaaatcagctgaattacaccgaatggtagttccaaaaaatac

SEQ ID NO: 97953 - DNA, 448 bp, Homo sapiens
attcccagtagaatacaagttccatgaaggcagggatatttgtcttttttgtgcactgatttctcctaagtgcctagaatggtgcctgggatgtaggaggtattcaatccatacatattgaattgaatgcatgaatgaacaacttccctcagtgtcccagagtccactttctctcaacactgcaagtggtggcaagctggaaggtttgtgagcagtgctggagctgggctcttccaggtgcattcacaatagtttaaaatagcaggtgcatcagaggaggcctctttgttcctggtactatgctcattgatgtttactatgagccccttgcagactcaagcatccattgtttgccttttaaatatctctactagccgggtgcggtggctcacgcctgtaatcccagcactttgggaggccgaagcgggcggatcatgagggcaggaga

SEQ ID NO: 97954 - DNA, 444 bp, Homo sapiens
gacttcttgaccaaccactatcttcattttttacgcattgccggctcacagctgacaggcttagggactgctgtgcaactgtacagtgcatatgaagagaacaatagaacgtttcttttggcagctgtgaagcgaaatcataatcagtatgtgaatcccagtggcgtagccaccttctttgaaagcattaaagagatccttctccggcagagtggagtaaaggtggaatctgtggatcatgactcctgtgtgcatggcccatgtcagaatggacggagctgtctacgaaaattggctgtgagctccgtattaaaaagccgagagagtcttccagtcatcatcgtggcaaatgaacctctgcagcctttcttatgcaagtgtctgccaggatattctgatagctggtgtgaaatagatattgatgaatggcttccattcccttgg

SEQ ID NO: 97955 - DNA, 402 bp, Homo sapiens
taaacatctgtacaggatttagcttctttggtggcgagacttggattgtgatgccctcaggaagtctggtttcactctttctgtcactgtacgtcagcattcatgaaggacttgtattttctctgccttgtgaggtttggagacttgaaggaggacaaagtgacgcgccatgatggagccagctcagacgggcacctggcacacatcttcagacatgcggccaaggagctgttcaacgaggatgtggaggaggtcacttaccgagccctgaggtgtggggcagtatccacagcctgtctgtgcctgtggttagcacgtgtgcatggtgtgcctgtatggatctgtgcatgtggcggttctatggatggagtttacactagtcaaaatcaaaaggactttttt

SEQ ID NO: 97956 - DNA, 247 bp, Homo sapiens
gaaatagcgtgtgactgggttctgtatgtaaggggtaaaggtgggccccacaggatggctttttattttcagatgggacttgagtcaaggctgactgatttttattccttgagcttaatgggttctgctctcttttcaattgcacggagtggctgttctggggattgcccttattgctatgggggaggagattggtgcagagatggcattacgaacctttggccacttgctgagatatggggagccc

SEQ ID NO: 97957 - DNA, 435 bp, Homo sapiens
gggtggcacggtggttgatgggcagccaggctttcacggcgacagcctcagcaaggcccccgggatgaacagcctggagcagggcatggttggcctgaatattggggacgttagctcctccgccgtcaagacggtgggctctgtcgtcagcagcgtggcactgactggtgtcctttctggcaacggtgggacaaatgtgaacatgccagtttcaaagccgacctcgtgggctgccattgccagcaagcctgcaaaaccacagcctataatgaaaacaaagagtgggctgcccccttcacccataaagcataacatggacattggcacctgggataacaaggggcctgtgccgaaggccccagtcccccagcaggcaccctctacacaggcttgcccacagtcccagcaggtgggtcaaactcttccataacaaac

SEQ ID NO: 97958 - DNA, 406 bp, Homo sapiens
gaaacatctacgcctgaaggggaggcgggtcctattcagcggctggacattcctgttgagaacccagtcgagagcaagaacatttttctgggggcccctttgatcatctgccacgtgattgacaagcgcagtcccctgtatgacatctcagcaactgacctggccaaccaagacttggaggtcatagtgattctggaaggactgggcgaaactactggcatctccacgcgggcacgaaccttctacattgctgaggagatccaatggggccaccgctttgtgtccattgagactgaggaacaaagaccggattctgtggattactccaaatttggcaagactgacttggtaactacgtcacggtgcaatgcccgagagctggatgagaaaccttccatccttattg

SEQ ID NO: 97959 - DNA, 284 bp, Homo sapiens
cggtacgggcaccttgtgtgatctgactgccttgctgtccgcacggtatgacggggtgaggacgtgcatcttaccgtgctggaagacgatatcaacgatacctgtagctttgctcatccactatcatcagaaccaggcatcatgcggcaaacgcgcaatcatcttggagacgagacagcacaggctgttctgtgccgacccgaaggagcaatgggtcaaggacgcgaagccgcatttggaccgccaggctgctgccctaactcgaaatggcggcaccttcgaga

SEQ ID NO: 97960 - DNA, 284 bp, Homo sapiens
ttgaagattataatatactgctttcaataatgaaggggacaactaggccaatcaataaggagatagaagccttaaatgacactgttgaccaactagagctaacagatctctgtagaacactcaccccaacaatagcagagtattcattcttttcaagtgcacccaaagtattaatccaaccataagggcaggaaactagaaatcagtaccagaagtaaaactgaaaattcactactacagggaaattaaacaacatactcctaaataaaaagtcgaagaaaaaa

SEQ ID NO: 97961 - DNA, 420 bp, Homo sapiens
ggagcttggtgagagtgacgctgccatggggttgggtccctgaggccttcctcggagcattgggtgccaggggctgcccaggcttcctgagtggcccacctgggtgggaggctgccaccgcggcctgatcatgccctctgtgcccacacaggtctctgagcggcccctgatgttcctgttggacactcctggcgtgctggctcctcggattgaaagtgtggagacaggcctgaagctggccctgtgtggtgagccggggctggggctggggctgggaccggggcccctgccaccccacctttagggctggctttggcacagggcccctagacgggagttgttactgcctttgacctggttgctgccagaccttcctcgaagcttagtgtgagagctgtaatagtgcacagctgacaggca

SEQ ID NO: 97962 - DNA, 422 bp, Homo sapiens
cttcacttgtttaatccagcagcatcagcgccatctaggagcttgttctcaggccccatcctggaccctctgagtcgcgctctgggggtggggccggggatctgtggtttagcaagctctccggggatctctgaagggtgggaccagatccgcagctggactcatccacctgatcccgaccatctgtctggcttttgcagatctcaggtgtacatgcaccccagcctgtcaccgcccagcaccatgatcctctctgggggcacagccttgaagcctccatactcggcgttcccaggcatgcagcccttggagatggtgaagccgcagtctggctcaccctaccagcccatgagcgggaaccaagccctggtctacgagggccagctcagccaggctgctggcctgagtgcctcccagatgtt

SEQ ID NO: 97963 - DNA, 423 bp, Homo sapiens
gaacagtggaactcacactcctgggcttctagaagatctaagtaagaatggtaggctccctgagattaaacttcctgtcaacggttgcagtgacctggaggatagcttcaccatcttgcagagcaaagacctcaaacaagaacctctcgatgaccctacttgcatagacacatcagaaacatctctttcaaatcagaacaagctgttctcagacattaatctgaatgatcaggagtggcaagaattaatagatgaattggccaacacggttcctgaggatgacatacaggacctgttcaacgaagactttgaagagaagaaggagccagaattctcgcagccagcaactgagacccctctctcccaggagagtgcgagcgtgaagagcgacccctctcactctcccttcgcacatgtctccag

SEQ ID NO: 97964 - DNA, 429 bp, Homo sapiens
ttcaaaactgagctatatgtacttacatgcagttttcttgagttttagaagaatctaagttttaatatactgacctaaattttttaaataggatgttactttttagtcataaatgtatttctttatgtgttgtctaaaattgtggatctctcttatgagaaatctaaaatagatttttttttaaatctaatgattttttttcaagtttcagatggctttttatgtgtgtttggtatgaaactacatactaattgacgtatttgtatcatcaatccttaagaaattgtgtaactaaaaataagcgttttcccttctagcacagaaatttcacttcagcagcgactagagtacattgctcgagccattcttactgccaaaagttccactggcattgcatcaatatctgccgatggtgaatcgcttcgtgaa

SEQ ID NO: 97965 - DNA, 543 bp, Homo sapiens
tttttttttcagaaagtaacaaaatacatttatttcaaaaccatgaccgcccagctcaccaaagtcccataaaacctgtgaccgcattgcaccaggggctctgttggcatggagcctgaagacccagcgtcttgccagactgagaccgaaggtggacgcctgggtagggccagccgcgtgggagaggagaggagacccgatggcagtggaaggcagctcccacctggctcccgggacggccccatcgtgaggccagccaagggagggctttcgtccttggccgcagctgtccttgccagggtgggcgaggtggggaggacacaggctcgggccacactgacaccggtgtcagcattatgttctgatgcaccatgaacaggttcaggggcagggctgacccccaaaatggcctttaaaagcctaaaaccctggttatcaagtccttgcccatctacggggcctggagaggtgcctgtcagctggagcaagtggaggaagcaggcctcaggcgacaggccgaggcaggcacacgcgtgcagggcc

SEQ ID NO: 97966 - DNA, 378 bp, Homo sapiens
ttcaataccctgtctcaaaataaataaataaggagaagattacaagttgggaaatattttacactgaatgacaataaaaaaaagactgcacatcaaaacttgtgggtacagctaaggctgtatttagagggaaatacatagccttcggtacatacatttaaaaagaaagggaaaggacaagatccacaggaaggtataagacagcaagatggaacagactggcccaactcacctcatcacctcaatgtagcccttggcagcagccacgtgcagggcagaggcgcctgtgcgggggtgccgggcctctggcatggcgcccccattcagccagcacctcgtgtcatgaaggagcaattcctcttctgcccgcttggctgg

SEQ ID NO: 97967 - DNA, 453 bp, Homo sapiens
gagagactggcctttgaaagggctgatgggcttctcagggtggagagaactctggatatcacgcaggaagtctggcttaagcacatagccacagccgacattctggcggaaatgcccatcacagatgcccatttcaagccctgcagtctgcatattcatggccactgagggccccaggagaaaagacgagcacgattcaccatggaggccatccatcccctctttcagggagttaagaacataggtactgggtgcacggtacctgctggcaacatccactgagagcatttgtcagcctatcacttttcttgagcattgcccaaccctaccatgactacagaacttatttcccacctgctgatactccactgcctgttaccagtccctgatgcctgctcacccatgtggcagactgcatttcaaagctcctagggggctgtacttggaacaaag

SEQ ID NO: 97968 - DNA, 696 bp, Homo sapiens
cccaggcaagtaaaagggaatgtggctcttaacactagttcaatgttctgacctttgtccttcctgctcccaagcattgacacttgtgttagtctctttttctgaagtcagagacttggcagagacctccctatcatctaatctgaagaactctttgtttatagttctgaagaggcccattgtttctgactctccatattgtaaattcattgcagggcaacaacttcagaagagaatacattgtcactcagggaccgcttcctggcaccaaggatgacttctggaaaatggtgtgggaacaaaacgttcacaacatcgtcatggtgacccagtgtgttgagaagggccgagtgagtaaacagctttcctggcatcaaagctttgctttctgccacctggatagaattctgccccatcatcaaagtgaaaccccgcaaaacaacgtagggatcatgtgagagcattgttagtgacttataccactctgttcaaaagactctaatagtaaacccaagtgatgcctgattctgattctgggtctgaagttccagtcaaagctgtttccatttgagggctgggattagtggcagtgcccattacaccaaaaattacctggccacttggctactccattcttcagtgtctggctggaggagagaccctgccagagtcactggacctgcccctcatcccagg

SEQ ID NO: 97969 - DNA, 410 bp, Homo sapiens
ggggtcatggggacctctgcgccctgaccccaggcttcctttccatcccctactcccttctgatcactcttgggctctctcctgtactccaagccaagtgccccagggcccagcacaggccaggactgggcacagctgaccccgtagagattagggaggaacagtgcctctctttaccctgctgtgagcaccactggcctttccttcagatagcttgatcacctcccaacacatccctcacccacaggggagatcgaggtgaaatggtttgaggctgtccagactggcctgcccatgtgcatcctgggtgcattctttggaccgatccgacttggcgctcagagcctgcaagtgctggactcggagttgatcccatgggccgttcagaacgggcgcatagccccatgtgt

SEQ ID NO: 97970 - DNA, 412 bp, Homo sapiens
catcggggactcaggcgtgggcaagagcaacctgctgtcgcgcttgacccgcaacgagttcaacctgggattataggcgtgaaccaccacacccagattttttattcttttttaaaacgtttttgttcaaattcgtgtatttttgaatttggggtggggggttgctttttgattttgatccttccatagggaggagaaaaccagccactctttatctatcaaacctggtattatgaaacacaatatattttaatggtgaattttcattgtcctaatcaattttgcaaataatctcaaggctatccgactttgaaaaatgaattgctttaagacataaaagtatgtaaaagtaactgcatttgatgtatccttttgtgatagtatcacattgagatacgaaaaaagcccgtct

SEQ ID NO: 97971 - DNA, 538 bp, Homo sapiens
tcgatcatttcctttgttgtgcagaagctttttaacttgatgtgatcctatttgtccgtttttgctttggttgcctatgcttctggagtattacttaagaaatctttgccaagctcaatgtgctggagaatttcccggtatgattttgtggttccacatacattttaggattgttttgtctatttctgtgaagaatgtcattggtattttgatagggattgcattgaatctgtagattgctttgggtagtctgggcattttaacaatatttaaacttactgtagcaatctatagagtgagaccctgtctacaaaaaaaaatagttacttttgaagattgtgcagttttgtaattggttgcatttatcgtcaactctccttcaagcagcctttagacactgattttcacatctaagaagccaccaaatggttgatgttgttagtaatgcatctgttaccaacactcatctgtgagtcacatcatgcatttccaagttgatctgaaggtatattaggtgcttgccccaggaaccaaaatt

SEQ ID NO: 97972 - DNA, 423 bp, Homo sapiens
cctggagagagtatgttggataaaggacattgttgtggcagtaactggagagaacatggaagtaatgaaaagtattattcagaagtatcagcataaacgcatctcactggtcgaagctggagtgacccgccacaggtcaattttcaatggactaaaagcactggcagaagatcagatcaactctaaactctctaagccagaagtagtgattatccatgatgctgtgagaccatttgttgaggaaggtgtccttcttaaagttgtcacagctgctaaggaacacggggcagcaggagccattcgacctcttgtatctactgtcgtcagtccatctgctgatggttgcttagactactcgctagaacgtgccagacacagagcaagtgaaatgccccaagcttttctatttgatgtgatttatga

SEQ ID NO: 97973 - DNA, 389 bp, Homo sapiens
  misc_feature (1)...(389): n = a,t,c or g
gagaatataagaggcacagaggagagaccagggactctgggggacacagataagagtgacagaggccaggcacattggctcataccagtaattccagcactttgggaggctgacgcaggagaatcgtttgaaccgagttcaaggctgcagtgagccctgattgcactactgcactccagcctgggccacagagcaagaccctgtctcaaaagagaaaagagtaacagagaccccaagagagaccctgggaattggagacacagagggacagggaccctaagaactagacacagagagagatagaagaggccccggaagacacagataagagacgctaagagacagcagggataccattaaaagactttcangaagccaggcatggtgan

SEQ ID NO: 97974 - DNA, 434 bp, Homo sapiens
agtggttccaagaaaaccttgagaagtagccttgaggagcccaccatattggacatagaaaaatttcatcgagagtcattcttctacactcacttgataaatttcagtggtaagagatactgctgagcagcatccggcctggcatgtcctaacaccactaacaccgtctagaatgcttccgcccgcctgaccaccccctaccccgtcccttggtgcacccagacggtgactcgtcctgccctctgtggcggtggctgtacgtccctggcctgagctcgctccacagggcgtggtccctacaagggtataaactgaggagcccgggctggccctgagacatgaacagaaaatcttttcaacccatgcggggttggaaacaggcgaatgtaatcttgtgccttgattgagacacaggcattggataatactagaag

SEQ ID NO: 97975 - DNA, 433 bp, Homo sapiens
tgaacgggcgatattgcttcattgcaaattctcaggggtcacatgtggctagtggcagttgtattggacgacatggtgtcagaagattagcaggaaccagggtcttgcgcatgtgcccaggatggagtgtagcagtatgatcatagctcattgtaaccttaaactcttgggctccagtgatcctcctgcctcagcctcccaaatagatccttcttagaaattcctaaggctcaatgttgtgtggaagattctgagaaagaaaatagtttccgatctttgggattcccctgagatggtccaatctgcaaaaagttcattgccatttccatcaaggacactgagaacaagagtcttatccgcattgaatcctgggaattgagaagcttcagcagggcttccgctggaactaggatgaggatgtggacacccccaa

SEQ ID NO: 97976 - DNA, 390 bp, Homo sapiens
gccttcattggctgcaagggtcttggctcgtggatatgggaatttctccgtgtttgtactctggctgagaaaaaatgacaggatgcatggagaatgtgccccgaacgtgagtgtggctgtgagcacaagccacaccaccatcattggaggtggcatccgaggaggtggcggcggtggctacggctctggaggtagcagctatggctccggaggtggtagctatggttctggaggtggcgacggcggcggccgtggcagctatggctccggaggtggcaactatggctctggatgtgccggcagcggccatggcagctactgctccggaagcagcagtgggggctacagacggggctctggaggctttggcagttgcaactctggcggtcg

SEQ ID NO: 97977 - DNA, 441 bp, Homo sapiens
catcaagaccaggatcagcgtcatccataaggaggagtttggtttgacaccgattgagggtgccattgaagacatgaagaataagaccctgcagttagcatttgccattaaccaggagccgtctgatgcaaagatgcttcagatggtgctgaaaggctctgagggagctactgtaaatcagggaccactggaagtagcccaagtgtttttggctgaaattcctgctgatccaaaactctatcgacatcacaacaagttgaggttatgctttaatgaattcatcatgagatgtggtgaagctgtagagaaaaacaagcgtctcatcacggtagaccagatggaatatcagcaggaactcaaaaagaactataacaagctaaaagagaaccttaggccaatgatcgagcggaaaattcccgaacttgtcaagccaatattcag

SEQ ID NO: 97978 - DNA, 456 bp, Homo sapiens
ggaagtgcgaagccatgtgaaggtgctgggggagatgctagtcatgtaccgcaggccagggcaggccccgcccgaccaggaggccctgcaggtcgtgtatgagaggtgtgaaaagctgcggcccacgctgttccggttggcgagtgacaccactgatgacgatgatgcactctcggaaattctccaggcaaatgacctcctcacccaaggagttctgctgtacaaacaggtgatggagggccgggtcacctttggaaacagagtgaccagctcattgggagacatccctgtctccagagtctttcagaatccagcaggctgcatgaagacctgccccctgattgacttggaggtggacaatggacctgcgcagatggggactgtggtgccatctttgcttcatcaggacctggcagccttgggaaatagtgatgctcctgttacaggcatggtttt

SEQ ID NO: 97979 - DNA, 495 bp, Homo sapiens
gagagctagcacatgagcttcaataccctgtttctaccaaaaatacaggggaaaaaaaaaatttacctgagcgtaatggggcattcctgaaattccagttacctggaagggtggggcaggaaaattgtttgaacctggaagggggatgttgcagtgacccaaaatcgggccattgcattccaccctgagggacaaagggggactccttcacacacccccccaaaaaattacccaatttttaaaaatagcaaagggctaaaaaggccttttatatgcaaactacccaaagccaagccttgccgcctttacctgacctttacatcccagggggcaaagcccttttctttagtcatcccaaagtcaggtactaggcactagggaccatccctagggttaacagtttgcaaaaattactcaaactagccagtcttaaactgttaaccccatttcgccattcttgaggcactggcctggttctcccctggttctttctgc

SEQ ID NO: 97980 - DNA, 424 bp, Homo sapiens
  misc_feature (1)...(424): n = a,t,c or g
gttgaccagcagatgcgtcagaacttgttcactaccggggcccatcacctacagcaagccaacatccagttccgtacagatattgccaggacggaatacctttccaatgctgatgagcggcttcgctggcaggccagctccttgcctgctgatgacctttgcacagaagatgccatcatgctgaaacgattcactaggtatgagctcgggtgccaaggagaggcatgggaggaatgtggatggtgatcttgaatttttttcaaaatacacccttgtttgaagagaggaatagaaaatggggcgtgggcatacagtgctggcagcttggtgctcctgtgatggaggggcgtgtgctgctgtcgatattgtcaagtgtctgagttattctgcagtgaatgcttattgagaccttctaaaatcgagn

SEQ ID NO: 97981 - DNA, 427 bp, Homo sapiens
cctggacctgctgtcccagccctgccgcgctgtttacatctttgccaagaagaacgacattcccttcgagctgcgcatcgtggatctgattaaaggtaggtccagcctcgggtttggggaaccgaaaagtcaggaaggggacaggtaggcatacatagcttagggaacttctcccagcgccaccttcttcctggggccattgctggtctggtttggagaccgaacagagaaaggtgagccagcagggagatccaagagtcggggctccccaaaactctgctcggtctcacggaatagaccacggggttcccctgaggccgaataaaggggtggggatcatgaagagaagccagacaggaggacaaaaacgggcgcagctgggtgcaggggcacacgcctgtagtcccagcaactcgagaggctgggg

SEQ ID NO: 97982 - DNA, 489 bp, Homo sapiens
ggagcgaatagaacctcagttctccagggcgacacggacaccttatgttccgagcccctccgcctgccctgccctggaagccagactgcagaatgtagcccacgctgtgtctgtgggaaacacctgttggcctgcccccttcctggctcccctgggagttctggagggctgcatctcacctgcctcagtttccctcatactgaggtgcagccagtgagcaccccattccaaaaggggagtcacatggcacaagcaaagcctcttctctgtgtgcagatgcaggacctgcaggacattttgcctcggtctacaacccgctggcctggacggtcaccaccatcgtcaccctgactgttggtttccctggagtccgcgtcacagatgaggcgggccacccagtgccctcgcaggtgtccggcatccaacggtgtcttcaggggatgaaggctccacccgtgacggtgacagtgagcggtgagaaaggcagct

SEQ ID NO: 97983 - DNA, 407 bp, Homo sapiens
tctttcagatgggtttcagcccagcagaagcattatctttgccagttggagtgctggagactttggatcggttggtgccactgaatggctagaggtattctttatcatcccttcccatattggacacgagcttgtgggcttaggctgttgtccagaagtgatgtttttataggtttgattttaccacttttgcctttgcgtttagtctcagtagagtccagaattgaaaatgaatccctaatgctactgtatgtgataaataaacagatttatacttattagtgttttcccttctcttctagggatacctttcgtccctgcatttaaaggctttcacttatattaatctggataaagcggttcttggtaagtatccctttcattagctgtttatgaattcaggtgaa

SEQ ID NO: 97984 - DNA, 427 bp, Homo sapiens
atggttagagctgcttaaattctacacactggattgtgctttggaggaatatgtcatatgtgtacggatacaagatattttaacaagagaaaataataactggcctaaaaggcgaatagccattgaaggtgagatgatatgttgtatttcatttgtagaatattttatatgtgctactcattatctaattcagtgttaataatcctttggctttgaggcactatatatatatgtcactagattgtcattctttatttataatttttttagagacagggtctttccctgttgcccaggcagaagtgcagtgataggatcatggcttactgcatccttaaactcatgggtatcaagggatcctaagcttgctgagtagctaggactatatgcttgtgctacacatgcacagctagaatttttatttttc

SEQ ID NO: 97985 - DNA, 422 bp, Homo sapiens
gaccgtagacttccctttccagccctacaaatgccaacaggagtacatgaccaaggtcctggaatgtctgcagcagaaggtgaatggcatcctggagagccctacgggtacagggaagacgctgtgcctgctgtgcaccacgctggcctggcgagaacacctccgagacggcatctctgcccgcaagattgccgagagggcgcaaggagagcttttcccggatcgggccttgtcatcctggggcaacgctgctgctgctgctggagaccccatagggccgagttagccgaatgccacctgcctttgatacgtgagaacgttgtctgagaaccgtgacttctgtgcttgcttgtgtctggtcagcttgctacacggacatcccaaagattatttacgcctccaggacccattcgcaactcaca

SEQ ID NO: 97986 - DNA, 461 bp, Homo sapiens
gttatctacaataatcattaggtttctggaataacagtaagagctatgagagtgcatgattccatttctctccagaatatttcagtgctttctcaccttgaaaaatgaaaacaatctattcagacggttgggaatattttaattttctacttaaaactaaggttattctccacttgaggtaatgtagaggagattcttctctttactgtatctacatgtgttacattttagctcacaaacccttgttggtgatggagagttaacatgaataattaggacatcttggattatactgaactgctggctattaccatggtatttaaatgaatttataatcagatcttctaaatgttaggtgtctctaaacatcgaatttttcttgcagccttgtcttagaagaagaagcatctgattaccttgaattggatacaattaaaaatctcgtcaaaaaatattcacag

SEQ ID NO: 97987 - DNA, 434 bp, Homo sapiens
agcacaatacctgtcatgggtgaggaaatggaaggtggcaagaaatgtgtcagggatctgccatccctgggctatactttaggttgagctagggtgggaggctttagaggcacagattggatggtcagatagactctgataaataactccaatagctcctcgcaagagcatgctttactttaaccctccaagaatggaggttgcccttgctcacccaggaggacctaaattacacaggtttacattgaatccatagtatgtagggaaaacaaccatgtgaacactgtgatcacaaactaggcttaaattgatcttacttgtaatcctggtggtcctgcaggtcctacagctccaggaaatccgggtgctccttgtgggccagtgattccatccagtccaggcagcccaggatccccctgagaaacaaaggcagg

SEQ ID NO: 97988 - DNA, 440 bp, Homo sapiens
  misc_feature (1)...(440): n = a,t,c or g
tgaggtgggaggatcattggagcccaggagtttgaggctgcagtgagctatgatcgcaccactgcattccagcctgggtgcattccagagtgtgaccctgtctataaataaatatagaacagcagacctggcaaagttgtttcgtagaacgtctcacattttggatttatctgaatgcttcctttttttatcccccaacattttcctggaatagtccttgattttacggaagaaagatgaaatgagtagcttgtgtgctgacagtgaagaggaagggagacactcctgttttatctgctggggccagatttgtgccagccctgccttttccttgggtgtggttgagaggactgtgcgcagaccgcccccagccagccactggcggggtgtgttggtgcatctggcactggcggngtgtgttggtgcatctgggtgttagg

SEQ ID NO: 97989 - DNA, 450 bp, Homo sapiens
  misc_feature (1)...(450): n = a,t,c or g
ggacattgacttcaagtaccactttgacttctttagtgtgaacttcaatgaagaactggtggctttgtatggtggaagtcttcagaagcagaccaagtttgtacatgaatgtattaaaacaattctcaaactctataagggtcaagaatttgctccaaaaagtgtggcaataattggtcattctatgggtggccttgttgcaagagcattgcttacactgaaaaattttaagcatgatctgataaatcttcttattacacaagccacacctcatgttgctcctgtgatgccattagatcgtttcattacagggtcaactggatggctgaaggaccatgggtaggagagaaccttttcaatgtatatccttttgaatcttgaattcaaaaacatattaaaaatacattttaaagcatgtcatgtgtaagttataagaaggtangtaagggc

SEQ ID NO: 97990 - DNA, 430 bp, Homo sapiens
  misc_feature (1)...(430): n = a,t,c or g
accgtatcctggagctgtccgaactgtgactggcgcagatcgaggctgattttacgacggaattcgggtgcgaacagcaggccaccggagcgagctgttgactcgatcgaaacccttgcgacagaaagcgtacccccaacttcttcagagtgaattagaagaaacattcccttatagcgcagcatctcacttttcaaacctcgaaaggtttgagaacttggaaacatactaaactatgttgtacgatgggaggccgaggctgaactcagtaaccgctggttcaacgggcaggctgtgcacggtgagctgtctcctgtcactgacttccgggagtcatgctgtcgccagtatgagatgggggaatgtacccgaggtggcttctgcaacttcatgcatctgcggcccatttcccagaaccttcagaggcagn

SEQ ID NO: 97991 - DNA, 438 bp, Homo sapiens
ccctaacgcaggtttccccgcaaatgactggtcacgcgggactgaacaccgcacaggcaggaggcatggccaaggtaagtgaactgaagcactttcaatacttcctacctaaccgcgggctttccctccgagtaatgcgtaaaatgggaccacgtggcccactcctgtttttcctcttgggctctccacgtgccactcatgcttggaagagacagatttctttctaggataaagatctctgccccatttctgtctttaaaatgagaattcttaaagaagtaggacagcttgcaggtcaggcagttggaaagtacagggcctaatgtgtccgtgaacctggtagaggttgctttctgcctgtgtactgcccactgaggaggtgatcactggtcttgatgctcctctgtgggcattcacagaaatatctgttgggcacaa

SEQ ID NO: 97992 - DNA, 447 bp, Homo sapiens
tgaatatagacatgaaaatttgtttttagattgtctacacagtagcttcccctttttttgaacatagagtagaatttgcaatgcttttcttttttctccatcagtactataaggaaaatattattaaacacccctcccctgcccaacctttttttaaaatagagatgagttttgccatgttgcccaggctggtcttgaactcctgggctcaagcagtccgcctgctgcaacctcgcaaagtgcttgtattacaggtgtgagctaccatgtccggcccaccctttcaaacaaatttggttgtagctcgctataataatatactaaatctatgtttatttgaaaggagcctttaccttttaaagcaaaatgcactttccttaaatataaaagtaatatggtttactttaacatttaaagttcaccttatctggggaggccagaaggaat

SEQ ID NO: 97993 - DNA, 628 bp, Homo sapiens
gacattgtatacgagaaggagggcaagatgttccaagcaacaaggatgtcacatctctagattggaatagtgaaggtacacttctagcaactggttcctatgatgggtttgccagaatatggactaaagatggtaaccttgctagcaccttagggcagcataaaggccctatatttgcattaaaatggaataagaaaggaaatttcatcctaagtgctggagtagacaagactacaattatttgggacgcacatactggtgaagccaagcaacagtttccttttcattcagcaccagcattggatgttgattggcagagcaacaacacctttgcttcttgtagtacagatatgtgcattcatgtctgtaaattaggacaagacagacctattaaaacattccaaggacatacgaatgaagtaaatgctatcaaatgggacccaactggcaatctcttggcctcctgttctgacgacatgactttaaagatatggagtatgaaacaagacaattgtgtccatgatttgcaagcacataataaagaaatatatactatcaaatggagtccaacaggaccagggactaataatccaaatgccaaccttatgttagcaagtgcatcccttga

SEQ ID NO: 97994 - DNA, 443 bp, Homo sapiens
gaagattgtaacctagagacacttacgtcattaaatgtgtgttgattatcattattttttctgtcttttaggccctaataacaacaatcctcaaacctcagctgttcgaaccccgacccagactaacggttctaacgttcccttcaagccacgagggagagagttttcctttggtaagtaagcgttttatttttctttctttcatagttttaaatagaatacgttcattatgtttcattttaccaggtgaattgttcctattggtgagtcagtatatatcaaaggttaaaggaatagcccgtagagccaggctgcctgagttcagatctgagttcaaatccgatgccacttgggcaggcgaatacaccctgcctcagtttccctttgtgcaaaatggtaataacattactttctttctcatgaggttatggtgaggattataa

SEQ ID NO: 97995 - DNA, 438 bp, Homo sapiens
gactttcagaggcccagagatgaccatggtgacgtggactgggagaagctggttgagctgcttacagattgttcgaacctacaggaccaaacatacattctgtacattctttatgtcataaagggtcccagctgggacacaaatctttctggacagaacggggtcaccgttcaaaaccttcttggggagctctatgggaaaaccggcttgaaccaagagtggggtctgattccctacatctcaagccttttcaggaagaaagtggacgtcctggctgaggcctgcacagacctgctttcggaccagaagcagctcaccgtgggcctgtcggacgagccccgggagaagatcatctatgcgccccttcccccaaaggagctcacaaaactcatctacgaagccagtgggcaggacattatcattggcgtcctcacacaa

SEQ ID NO: 97996 - DNA, 428 bp, Homo sapiens
acagaatctgttaatgcctactttaaaggagcagatcccaccaagtgtattgtgaagatcactggtgatatgacaatgtcatttccaagtggaattattaaagtcttcaccagcaatccaactccagctgtgttgtgcttcagggtgaaaaatatcagcagactagagcagattcttccaaatgcacagcttgtgttcagtgatccatcacaatgtgattccaacacaaaagatttttggatgaacatgcaagctgttacagtctacctcaagaagctgtcagagcaaaatccagctgcttcttattataatgtagatgtattaaagtatcaggtatcattaaatggtattcagtccactcctctgaatcttgcaacatactggaaatgtagtgctagcaccacagatcttagagtggattataaata

SEQ ID NO: 97997 - DNA, 483 bp, Homo sapiens
gttgagggaccgtggagagtgtgcaccatagcccagggcgcctgagggcctatctggatgcagctgctaccggtcataggacagcaaacactattcattggattctgacttaagcaggcaccctgccgagtgccttaaaggtgtaatctccgttactcttcacagtacattaaaaaaatagttggccgggtgcagtggctcatgcctgtaatcccagcactttgggaggcaaaggcaggcagatcacgaggtcactatatcgagaccatcctgtgcaacatggcgaaatcccgctctacctaaaactcacagccctggctgtcactttcctaggacttctaacaggcctacacgatctgtacctgaccacaaacttaacgtagaatccccgctatgcacgtatgactgtccccaagctcaaagggattagaaagacccggccctgggcgttttccgttagaggggggtgcaaaatcgggtccg

SEQ ID NO: 97998 - DNA, 453 bp, Homo sapiens
ctcatggccgagaaggactcgctcgacccgtccttcactcacgccatgcagctgctgacggcaggtaagggggcctcccgtgtccctctgggtcgcccggccatcccgggcatgagtggccctggctttgttcctctcgcttcccgccccctcgggaccgaggcagtcgggagttccggtctcatcctcatttttgggagcctggattccacattcccacctcagcccggagtgcgtgggagaatttctaggctgcagtggaggcccgaaggcgactttgcgatcccctagcgctaatgtcttgatggatagtgctgagctccccgcccctttcccgactcttccctcctccctcctcttgcggctgccgggcgcgcagattcttccagaaatgaaccttcatttccccctttccctgaagggaaaccctttttgatcgcgggtggcgatgag

SEQ ID NO: 97999 - DNA, 422 bp, Homo sapiens
gattctgtgtcactcatggtcacggtttcccaggctctgccagtgactggttctctgttttattcatcgtcgcttgccctgaggttgaaccacgactgagaagcctcccacatgagtgttttctcccccagcggctgtggcttcactatgtgttccccttgcacagaggggcgttgcccgagagtggacttggtgccatccgcccacgtagacctcacagttctattcagtgacactgaagtacagtttggcacctctcgggaggcagtttgcatggagacatgcgtatgacttgtccattcatcgtgcttccaggtcagttcaaagatcctagaactcgcccggaagcagaggatgaacacggacatccggagaaacatattctgcacaataatgacaagtgaagattttttggatgcttt

SEQ ID NO: 98000 - DNA, 412 bp, Homo sapiens
gcacgaactaactttcaacagctctttgcaagaaatgtaatattggtactttaaaataatactgccttcaaatgatgcctgcctctttaaaatcttttgacatagttcttccagggacagatatggctgcatttatttcatagatggataaactgagcacagaactgtaatgaagacagaattgacatataagggcaaaagctaattaaacgcatcctcacaggtagcctttctttcagtgaacctgtaaactaatccagcaatacttattaaaattagttgttagaggctgggcatggtggttcaagcctgtaatctcagcactgtgggaggccaaggcggacagatcactcagagtcagaagttctagaccagcttggtcccactgggaaaccctgtgtctactaaaaaa

SEQ ID NO: 98001 - DNA, 405 bp, Homo sapiens
gtcacatcctctgacaagagcctgaaggtgctactggatgccgaggacaaggtgtttaatgagattcggaacgagcacttctccaatgtctttggcttcttgagccagaaggcccggaacttgcaggcccagtatgatcgccggagaggcatggacattaagcagatgaagaatttcgtgtcccaggagctcaagggcctgaaacaggagcaccgcctgctgagtctccatattggggcctgtgaatccatcatgaagaagaaaaccaagcaggatttccaggagctaatcaagactgagcatgcactgctagaggggttcaacatccgggagagcaccagctacattgaggaacacatagaccggcaggtgtcgcctatagaaagcctgcgcctcatgtgcctt

SEQ ID NO: 98002 - DNA, 594 bp, Homo sapiens
cagtccagtgcggtggaattccattcttcgctgctgatcgcgggattctttttggatagggttgacgttcgtggatagactcatatctgtgaccagtgtccgccaccgcggatggcaagagacctgatcggaccggccctgccgcccggcttcaaggcccgcggaacagcggaggacgaagagcgggacccgagccctgttgcaggaccagctctgccccctaattataaaagcagtagttcagattcatcagacagcgatgaagacagtagttctttgtacgaagaaggaaatcaagaatctgaagaagatgacagtggtccaactgcaagaaaacagaggaaaaatcaggatgatgacgatgatgatgatgatgggttttttggaccagcccttcctcctggatttaaaaagcaggatgattctcctccaaggcccataataggtcctgcattgccacctggtttcattaaatctacacagaaaagtgacaagggcagagatgatccaggacaacaggaaacagacagcagtgaagatgaggatattattggaccaatgcctgcaaaaggaccagttaactataatgtaacg

SEQ ID NO: 98003 - DNA, 433 bp, Homo sapiens
gggatttcaccatgttggccaggctggccttgaagtcctgacttcagataatctgcctgtctcagcttcccaaagtgctgggattacaggcgtgagccactgtgcccagctgagatctgatggttttaaaaagaggagctcccctgcatgagatctcactttttgcctgctaccatttatgtaagatgtgacttgctccttcttgccttccatcatgactgtgaagcttccccagccatatggaattgtaagttcaattaaacttcttttctttgtaaattacccagtctcgggtatgtctttatcggcagcatgaaaacggactaatacagtaaattggtaccaggagtgggatgttctgaaaagatacctgaaaatgtggaaacgactttggaactgggtaataggcagaggttggaacagttttgagggg

SEQ ID NO: 98004 - DNA, 366 bp, Homo sapiens
gatatatgccatcgtaaactcggtgttgaatgcccctctcatgccagcatcaatagattggtggttcaggtggtatcttccatcactgcctccctccggtttgaagggcccttgaatgtagacctaattgaattccagaccaacctggtaccttatccgagaatacatttccccatgacagccttcgcccccatcgtctctgctgacaaagcctaccatgagcagttctctgtgtcagacatcaccactgcttgctttgagtcctccaaccagctggtcaagtgtgatcctcggcttgggaagtacatggcctgctgcctactctatagaggggatgtggtccccaaggaagtgaatgcagcaatc

SEQ ID NO: 98005 - DNA, 164 bp, Homo sapiens
agacgaaggtgcgagatgagcactatgttcgcggacactctcctcatcgtttttatctctgtgtgcacggctctgctcgcagagggcataacctgggtcctggtttacaggacagacccttttggtacgctcgccgggtccgaggggcctggcgggcggtattc

SEQ ID NO: 98006 - DNA, 167 bp, Homo sapiens
ggacattgccatcccatgcaacaacaagggagctcactcagtgggtttgatgtggtggatgctggctcgggaagttctgcgcatgcgtggcaccatttcccgtgaacacccatgggaccttacttcgtcagtaatgggttagggggacggggcgggtgctacttagg

SEQ ID NO: 98007 - DNA, 172 bp, Homo sapiens
actgcatagggtcgcgtggtgggatctgaacggtgtagtccactgggttttcattctttggtttcttgggcatcttggaaggcagagggtccatgcctaggactttatggagctggccgaacgcctttgtttgctcctattgatagccgggtattaactagtgtacggttgt

SEQ ID NO: 98008 - DNA, 496 bp, Homo sapiens
gggaattattgcaaatactatgggtaccggggtccttcctgtgaggatgggcgccttcgggtgttgaagcctgagtggtttcggggccgggacgtcctatatctgggctgcaatgtgggccatctgaccctgagcattgcctgcaagaggggcccgtcccgcatggtgggcctggatatcgattcccggctcatccattctgcccgccaaaacatccgacactacctttccgaggagctgcgtctcctaccccagactttggaaggggacccgggggcatagggtgaggaagggaccaccaccgttctaaagagtgagctgcttcccagcctcgctgactgccagccggggtcccatcgctgccccccaagtgcccttggatggagcggacacatcagtcttccccaacaatgttgacttcgtcacggttaattatgggcttggatcgagatgacctggtggaggctccaacaccttggtaatgatgtggtgctct

SEQ ID NO: 98009 - DNA, 447 bp, Homo sapiens
  misc_feature (1)...(447): n = a,t,c or g
cgaccgtgtccacctcgcaggtgcgccagaactaccaccgggactcacaggccgccatcaaccgccagatcagcctggagctctacgcctcctacgtctacctgtccatgccttactactttgaccgcgatgacgtggctttgaagaactttgccaaatactttcttcaccaatctcatgaggacagggaccatgctgacaaactgatgaagctgcagaaccaacgaggcggccgaagcttacttcaggatatgaggaaaccggactgtgatgactgtgaaagcgcgctgaatgcaatggagtgggcattacatttggacaaaaacgtgaatcaagcactactggaactgcacaaactgaccactgacaaaaatgaccccgatttgagcgactacattgagacacattacctgaatgagcaagtganagccatcaatgaattggggg

SEQ ID NO: 98010 - DNA, 390 bp, Homo sapiens
cctgagacccctcgttttgcagtgagccgagatcatgccactgcactccaacttggaggacagagcaagactccatctcagaaaaaaaaaaaaagagaaatattttaaaaaattgggccaaaaactatataactcttgaaagtgaaaaggaaaggaaaagcaaacaaaggtcacgaaggtaggaggaaaaccaaaacggttggggaccatacgactgaccaaaaaaccttggtataatagggagggaaaggttacctggatgggatcaagggaatgaaaggtttcaatagggtcaacttttccggggcaaggggcttatgcctgaattaccagaaatttggaaggcttggagagggggattacctgcgggtccgaggttgaaaccccctg

SEQ ID NO: 98011 - DNA, 456 bp, Homo sapiens
ggacccatcagctatgtggtggtaatgcctaaaaagagacaagcactggtggagtttgaagatgtgttgggggcttgcaacgcagtgaactacgcagccgacaaccaaatatacattgctggtcacccagcttttgtcaactactctaccagccagaagatctcccgccttggggactcggatgactcccggagcgtgaacagtgtgcttctttttaccatcctgaaccccatttattcgatcaccacggatgttctttacactatctgtaatccttgtggccctgtccagagaattgtcattttcaggaagaatggagttcaggcgatggtggaatttgactcagttcaaagtgcccagcgggccaaggcctctctcaatggggctgatatctattctggctgttgcactctgaagatcgaatacgcaaagcctacacgcttgaatggttcaaag

SEQ ID NO: 98012 - DNA, 421 bp, Homo sapiens
  misc_feature (1)...(421): n = a,t,c or g
gtttcaccatgttggccaggctggtctcaaactcctgatctcagttgatccacctgccttggactcccaaagtgctgagattacaggtgtgagccactgtgcccagcctgttctctgtatcttaaatcaactctgtgccaaagcagttctgtcccctgactcccacccctacccaccaaaaagtggtagacatgaagggcaggtaagggaacagaaaatgtctccttgcagctatatatattttaaacgaactgtgtaataagtatgagctaaggagacagaaagacagtagatgagaaaagaagagtacctatacctacaaggggcaaaatgaatgcaatccttcatttgataagagagaactgaaagagaatattatttttctacaataaagcaagctgtcctctcaggataaagtggn

SEQ ID NO: 98013 - DNA, 532 bp, Homo sapiens
  misc_feature (1)...(532): n = a,t,c or g
tgttgcttgtgagctttaggcctgtagccctggttgtcagcctgtaaggatcatatacattcattcgttcattttgttttcagcaaaatttagagtacgtaataatgttgctgttttaagtatttcttctcaaatgtgaaaatctgcttttacagggaccttaaaccggaaaacattttgttaaatgaagatatgcacatccagatcacagattttggaacagcaaaagtcttatccccagagagcaaacaaggtgtgtgagttttatttctagcagagcctggctctgtgcttcagatggaaagcgacttctgaggagtgtttgcattgtgtcatcttcatcaacgactgaggtggggataccttggccgttctcaaacagatcttgaactttctctgggcaagaccctgccacgccagcaggtcttcctgggggggccccaggcagtgtgtgttggtgtagagtgggaggtcgctggttctcctcggcgcctgctctggntcatcctccctactcgtcttctggacaggg

SEQ ID NO: 98014 - DNA, 452 bp, Homo sapiens
acatggatgaaattgaaaagtaccaagaagtggaagaagaccaagacccatcatgccccaggctcagcagggagctgctggatgagaaagagcctgaagtcttgcaggactcactggatagatgttattcgactccttcaggttatcttgaactgcctgacttaggccagccctacagcagtgctgtttactcattggaggaacagtaccttggcttggctcttgacgtggacagtgagtaccttactgtgaaggtgataagcctccacctggtcttccagataggggtgatattcctgttccaagtgccccttactgacccgagagacgtcattgccgcaggcaggacctatgggcgcatataggttgtaatgaaactgtagtctcagttggaagcctatacatgaaatgggtcagtgagcaagggtctattcctaggcttcagccatgcc

SEQ ID NO: 98015 - DNA, 408 bp, Homo sapiens
ccatcacgtatggctaatttgttttgttttttttgtgtgtgtggagacagggttttgccatgttgcccaggttggactcgaacgcctaggctcaagtgatctgcccacctcagtctccctaagtgctgggattacagacgtgaaccactgggcccagtccaaaccttcaccttctaagggcactgggatgaacagaccgatcggtttgagggtgggcaaaggggtgtggtctaggttataaggaagtggtaccaaataactgtgtgcctgagttccaccgtatgattactaaaagcaggaccagaccagaaactgctaaagaacatggcctgtttgacatgttcatgagtcacctgacccacagcatatatgcttatgactaaaccctacactcctgagtctcaaaaa

SEQ ID NO: 98016 - DNA, 438 bp, Homo sapiens
gacaaggctaattgggcccaactgccctggagtcatgaatcctggaaaatgtaaaatgggcatcatgcctggccatattcacaaaaaaggaaggattggcattgtgtccagatctggcaccctgacttatgaagcagttcaccaaacaacgcaagttggattggggcaatctttgtgcgttggcattggaggtgatccttttaatggaacagattttattgactgcctcgaaatctttttgaacgattctgccacagaaggcatcatattgattgctgaaattggtggtaatgcacaagagaatgctgcagaatttttgaagcagcataattcaagtccaaattccaagcctgtagagtccttcattgctgctttaactagttctactgggagaaaaatgggtcatgccgggcaattattggctgaagaaaaagttta

SEQ ID NO: 98017 - DNA, 427 bp, Homo sapiens
cagcggttcagctgaggtagggacgtgctgtaggccggaatgttaccggctgttggatctgcggatgaggaggaggatcctgcggaggaggattgtcctgaattggttcccatggagacgacgcatagcgaggaggaggaaaagtctggcctcggcgccaagatcccagtcacaattatcaccgggtatttaagtgctgggaagacaacacttttgaactatattttgacagagcaacatagtaaaagagtagcggtcattttaaatgaatttggggaaggaagtgcgctggagaaatccttagctgtcagcccaggtggagagctctatgaagagaggctggaacttataaacgcgtgcctctgctgttcagtgaaaggcaatgggcttatagctattgagaatttgatgcgccagaagggggaat

SEQ ID NO: 98018 - DNA, 329 bp, Homo sapiens
aagatcacttgatcctgggaggttgaggctgcattgaggtgatatgaggccacggcactccagcctgggagacagagcgaaaccccatctcaaaaaaacaaagaaagtggatgcgtgctgctcctgccattggatcatcgcagcatttttcttttctctgatatgcgcctttttcctcatcgtgggggctcatgttttcgtaattccctctcgctactagattgtgagctgtgtgaaggaaggttgatatatgaggaggatgaacaggcccacgaaagatgtacttggatggacacatatcaatccaatggcttatcctatctgaatag

SEQ ID NO: 98019 - DNA, 447 bp, Homo sapiens
  misc_feature (1)...(447): n = a,t,c or g
gagacaacatactgagcagtaccccaccccctgccctgcacctcccgccagccgttgctctccccaggggtaactgctctcctggcttgtatcagtgtctaatggttttgcccgcttgtgaactccacatctgtgcagttgtttggcatgtatgattttgtctggcatttttcccatgacatattagtgtgactttaagagtaagttgctggaaacttcaggaccagtcatggcagaactgggctacagactcagagcagggtcccccctgctcaccgtcctggccgtcacaatgttcacgtgtgagcctgccttggcctggagtgtcggggcatcctgagaaataaagttggatagaaacgccccatataggctgggggcggtggctcacacctgtaatgccggcactttgngaggccgangtgggcggatcacttgangccangg

SEQ ID NO: 98020 - DNA, 394 bp, Homo sapiens
cggcacgagaggattcagctgactttgtgagcttcttcccagattttgtgtggacactgagagatttctccctggacttggaagcagatggacaacccctcacaccaggtaccagtcaaaaagataacaattttattctgccccgactctgtatccggaagttcacttctctgattcgaacatcccgctcctatcagtcaccggacaccgtcagtgtcgcgagctcccgaggcgcgagatgagcccctcggtctgccacgatgatcctctgctccagatctggccgcctccccaaagtgcatccaggcgtatactcgcctgtctccagcggagagagtatgcccccacgggcgtgtatcgccccctactccggtagggactctctctcgacacg

SEQ ID NO: 98021 - DNA, 434 bp, Homo sapiens
  misc_feature (1)...(434): n = a,t,c or g
gaaatattttatagggcccatctcagttcagactagccacatttaagtgcttcatagccacatgtggctcatggccatccatatttggacaatgtactttagactattgcatctgtatactcttgtgccgtcagctggggggtggggtgngnnnnnnnnnnnnnnnnnnnnnnnnnnnnnnnnnnnnnnnnnnnnnnnnnnnnnnnggnnngnnggngngggggggggggggggggggggggggggggggggggggggggggggggggggggggggggggggggggggggggggggggggggggggggggggggggggggggggggggggggggggggggngggggggggggggggggggggggggggggggggggggggggggggggggggggggggggggggggggggggggggggggggnggggggggggg

SEQ ID NO: 98022 - DNA, 329 bp, Homo sapiens
gggctcggtgggaggatggcttgagctcggtgggtggcttgcagtgaactgagattgcgctgctgcactccagcctgggcaacagaaccagagcctgtctttaaaaaaaaaaaaaaggttcaacagcaagggggctggccaggggggctaacacctgtatcctaccgctttgggaggctgacttaggaaaatcacttgaggccaggagttttgaggccaccctgggcaacacattaaaacagccaggagtgggggggcatacctgtagtccaagctatttaaaaggctgagggggaaggatcccgatcccttgagcctaattaaaagtg

SEQ ID NO: 98023 - DNA, 329 bp, Homo sapiens
cgtgcgcgacatcaaggagaagctgtgctacgtcgccgtggacttcgagcaggagatggccaccgtcgaattctcctcttctctggagaagagctacgagctgcccgatggccaggtcatcaccattggcaatgagcggttccggtgtccggaggcgctgatccagccttccttcctgggtatggaatcttgcggcatgcacgagaccaccttgaactccatcatgaagtgtgacgtggacatacgcaaagacctgtacgccaacacggtgctgacgggcggcaccaccatgtatccgggcattgccgacaggatgcacaacgagatca

SEQ ID NO: 98024 - DNA, 374 bp, Homo sapiens
gtgggtaacctttatttcccttctttttctctttagctcggctgattccaggggggggtttcgtcgagatgcacacacgagtgaggttgctcatcggcttaaagatttgccagaagaaaatttcaaagccttgctgttgattgcctttgctcattatcttcaccagtgtccatttgaagatcatgttgaattactgaatgaagtaactgaatttgcaaaaacatgtgttgctgatgagtcagctgaaaattgtgaccaatcacttcataccctttttggagacacattatgcacagttgcaactcttcgtgaaacctatggtgatatggctgactgctgtgcacaacaagaacctgagagaaatgaatgcttct

SEQ ID NO: 98025 - DNA, 352 bp, Homo sapiens
aaaagtcaggaggattgacagcagacttgcagaattagatagagaaattaggaacccccaaatttcatgtcaattgatctattccccctctttgtttcttggggcattcttccttttttttttttttgggtttttttttccccccccttatcttttggcccccaaaaaccaatttaaccccccccccctttgtacaggggggccggtaccaaggcctaaacccccgatccccccctgggaacccccccgtcctgcccccccgctttttagcccccagtgggatttaggttttcaaattgccccctttctttgggttataaatggggggggcccctcgggggggtcacgtgcg

SEQ ID NO: 98026 - DNA, 369 bp, Homo sapiens
  misc_feature (1)...(369): n = a,t,c or g
gcagtcttgtgagactctctttcattcttggaaagatgttgaagtttgctcttctgcgctgagttgcttgtcccaggtgtcagttcatttgcagggcctagagtccttgttcattcttccagggatggaggttgagcaaagagactcacaaatggcactagttgaaagtctggaatatgtaagaggagaaattagtaaagccatggctgactttactacctggaagacccatctgcttacttcagatagccaaggaggaaatcaaatgttggacgaaggatttngcgaagatttttcagagcaaatggaaattgccatccgagccatcctctgtgccatccagaacttagaagaaagaaagaatgaaaa

SEQ ID NO: 98027 - DNA, 368 bp, Homo sapiens
  misc_feature (1)...(368): n = a,t,c or g
ctcagatacatcccggcctcagctcccctgtccagccgctagggagaggtttcctgatgggccgctctccctcaggcctcttcctttcttcctttctcaggtgtataatgaacagatccatgacctcctggagcccaaggggccccttgccatccgcgaggaccccgacaagggggtggtggtgcaaggactttctttccaccaggtgtgggattgggctcgggtaggatgatcggccccatgggtccttggggttccctcacaaaactgtttggggatgccctgggtcctgtgatggtggtagcagtggtggtggtagcaagggggtgatgtanattctgaagagcagcccttcctgttaggggaag

SEQ ID NO: 98028 - DNA, 365 bp, Homo sapiens
atggcccatgccatggaggaagtcaagaaatgtctaggaccggatatgatggatgatatctgtcacgagcaatttctagagctgtcctacttgaatggagtacctgaaccctctcgtggacgtggggtgccagtgagaggccggcgagctgcacctcctccaccacctgttcccaggggccgtggtgttggaccacctcggtgggctttggtacgtggtacaccagtaaggggagccatcaccagaggtgccactgtgactcgaggcgtgccacccccacctactgtgaggggtgctccagcaccaagagcactgacagcagtcatgcagaggatacctttgtctccacctcctgcaaccaaagc

SEQ ID NO: 98029 - DNA, 746 bp, Homo sapiens
ccgacttcagagcctgaggaggctggtgcagaagccgggatgtggacagaggggtcacctgcggtcactacggactcttctctgaggctgacttgctgccctgccggatggtggtcaagagctgcacattcccaggagcagggctggccctgccggagagctttcctgggcagtggtgggcacgggggcgctgtccagcctgagtatcctcttccagatggccaggtgccggccctggccccctctaaggccaaactcccccctgcagggctggatcttcaacgtggttccttggttggtggcgattccggccagtctattcagcgggtttctctctgatcatctcatcaatcagggttacagagccatcacggtgcggaagctcatgcagggcatgggccttggcctctccagcgtctttgctctgtgcctgggccacacctccagcttctgtgagtctgtggtctttgcatcagcctccatcggcctccagaccttcaaccacaggtgagggccgactgctccatccaccagagcgccgtgctgcccgcacggccgaggcccgcacatgtgaagagggagctctgtccgcctctctcagtctcttcctcacacttcacccccttcccaagctgctgggcagtgactgcactgaagacccagtagttctttaggaaccagcaattcacttcagtgagcagcacgtgcgcgtgatttgtgcgaacatgctttccccacagcacttt

SEQ ID NO: 98030 - DNA, 760 bp, Homo sapiens
ctttcctccccatctccccgaattaggaaagtgggagtgtccgtggcatcagtgcgatgagtgcagcagtgcagctgtttccttctgtgaattcagtccacattcattttgtaaagatcatgaaaagggggccctggttccctctgcactggaaggccgcctctgctgctcggaacatgaccccatggctcctgtgtcaccagaatactggagcaagataaaatgtaaatgggaatcacaagatcatggagaagaagtaaaagaataaatgtgtggtgtcccctcctttctatttaagtgaaaaaagcaaatagatcatgcatttaaaaagaagagactgctacagtgcatacagcctttgccatcggaactgccttattaaagcaaaaatgggaaaccagttcatgcaggcagaagcagttggtggtgtctggtttttgtttgatttggttggtttgggattcttttgtggagggttaaattcccttggtcttttcttgccttttattgtgcttcagtgccattgcagcttgaaaaagaaatgtttttgcttaggtttcagtatttttatgcagcttcttcattgtgtcacattttgttttcatatctgtaacagagctctgctgctcaaccaatgctgcccgtgccaagagccttttaaatatgctttgtggattatggatacattaagcagccatagatgggtcatttttactgtaaaggctgatcaaggaagatacccctggtttggtagatctct

SEQ ID NO: 98031 - DNA, 383 bp, Homo sapiens
gaaaggtgctgaactggtcttcttgccctcaaacacaaggtctttaatgtatcctctagatcagggggttgtgaggacctttaaggctcattatgcaggatactctatggaaaggattgtcagtgctatggaagagaaccctggtagagaaaaaatcatgaaaaagctgttaaagctatcaagcccaaaagaaattcctgctggagaaaagctgtgtccaaatgatgctcatgacttcacggaacttgatgacagagtcattcatgaaaatcatgagtgagataggggatagctgctgtgatatctgtggtgatgaggtggatctgagattacagaatatgggtcatggatgtagtttgtgttgctttttattgggaattgcc

SEQ ID NO: 98032 - DNA, 371 bp, Homo sapiens
gaagtgggtaacctttatttcccttctttttctctttagcgcgacggattccaggggtgtgtctcgtctagatgcacacacgagtgaggttgctcatcggtttaaagatttgggagaagaaaatttcaaagccttggaggcgattgcctttgctcagtatcttcagccctggccatttgaacatcatgtggaattagggaatgatgtaactgaatctgcaaaaacatgtggtgctgatgagtcagctgataattgtgacaaatcacttcataccctttttggagacaccttatgcacagtcgcaactcttcgtgaaacctatggtgaaatggctgactgctgctcacaacccgaaccttgtgagaaagggt

SEQ ID NO: 98033 - DNA, 372 bp, Homo sapiens
gtgggtaacctttatttcccttctttatctctttagctcgggttattccaggggtgtgtttcgtcgagatgcacacaagagtgaggttgctcatcggtttaaagatttgggacaagaaaatttcaaagccttggtgctgattgcctttgctcagtatcttcagcagggttcatttgaagatcatgtaaaattaatgaatgaagtaactgaatttgcagaaacatgtgttgctgatgagtcatctgatgattgtgacaaatcacttcataccctttttggagacacattatgcacagttgccactcttcgagaaacctatggtgaaatggctgactgctgtgcacaacaagaacctgagagaaatgaatgctt

SEQ ID NO: 98034 - DNA, 379 bp, Homo sapiens
tttaggaagaatgctgaagacatcctaaccatggaggggttgagggccaccatgaagcatgaactggaggcagcacagaaaaagcattctctttgtgaattgctccgcatacccaacatatgtaaaagaatctggatcctgtcctttgtgaggtctgctggagtttgctggaggtccactccagatcctgtttgcttgggtatcaccagcggaggttgcagaacagcacagattcctgcctgctccttcctctggaagcttcattctataggagcacctgcctgatgccagccagagctctcctgtatgaagtgtctgttgacccctgctgggaagtgtctcccagtcatgaggcacaggtgttaatgacccacttaag

SEQ ID NO: 98035 - DNA, 334 bp, Homo sapiens
atagtctagtagtgacacctgaacagagagattgatccaagaaatgaaacagaaattccggaagttgacctgaatacacacacacacacacacacacacacacacacacacacacacgagggcgtgaaagactccatgaccctcagggtataagacgcattttttttttttttaaaaagggggtctcattttgtccccaaaagggggggcaggggggaattaccccagttaatttataccttaattcccccaaatttcccaaaaccccctggggctggggaaattttaaggcctaaccctttaccctaatgaatagtggaaactgggggcgccc

SEQ ID NO: 98036 - DNA, 331 bp, Homo sapiens
catagggctcggcgtggtgatgcacctatgctcccaactactcaggaggctgaggtgggaggatcgctcgagcccaggagttcaaggctgcagtgagctatgatcatgccacttgcactacagcctgggtgacaagagtgagaccctgtctaaaaatcatcattatcatcatcatcatcataatcatcatcatcatcctgcagggtattttaaaatgaaataacacacccaaggtctcatggctacttagaggtagaaggagaactcaatgccaggaagacctgatccaaccagaggctactactgcccttctttcaacagctcagggatc

SEQ ID NO: 98037 - DNA, 241 bp, Homo sapiens
  misc_feature (1)...(241): n = a,t,c or g
nacaccggcctcccaagccctggggacccacagtagctccagctgcgccaaaggcactcaccggcttgcacaggtcccggtcagttttcgcttccatctcccagacatggcggccatctggaagaaaggagcaggaaacgtctgtgactctgtgtggtggggagccccctccccagacacccccacgtgatcctgacccaaggcccctgacccatgagggcgccttgtcccaggagaccca

SEQ ID NO: 98038 - DNA, 349 bp, Homo sapiens
catgagcttcaataccctgagaccaggcattgcatttcccgttctttatttggtaatcctcttagggaaggacccaggcatgcaatatcccctccatcccatccccatgctccccacccagtgggaggactcacttggcaaaggggatgaggttgactccatcatcctgcacctgcatgactggacggggctgggtagttagtctcctttttggtgctgggaggataatggaaaagaagtcattcattcgggctggatgtggtggctcacgcctgtaatcccagtacttttggaggccaaggcgggcggatcatgaggtcaggagttcaagaccagcctggccaatata

SEQ ID NO: 98039 - DNA, 384 bp, Homo sapiens
taaaccgtatacatgaagacattgctgagagagctaaaaccttgccgtgcttctgtgtgtgctctttgtttatgaacagaatcaaagccagctgctaccacacgctcttctggaggaggaggtggtggcggtggaaaacgaggtggcaagaaagatgattctcactggtggtccaggtttcagaaggtttgatgctatacattgtgtgaattttgaggttatgatggtggcccagagaaggttgggaggcattagtgtagtgttggagggatttgtgtctcacagagcatagatcgtattgtggaatttcattcttcacagaagctgtctccctctctgcccagggtgacattccatgggacgacaaggatttcaggatgttct

SEQ ID NO: 98040 - DNA, 359 bp, Homo sapiens
ggcacgagctgtcaaccccacacgcctttggcacaatgaagtggggaacctttatttcccttctttttctctttagctcggcttattccaggggtgtgtttcgtcgagatgcacacaagagtgaggttgctcatcggtttaaagatttgggagaagaaagtaccccaagtgtcaactccaactcttgtagaggtctcaagaaacctaagaaaagtgggcagcaaatgttgtaaacatcctgaagcaaaaagaatgccctgtgcagaacactatctatccgtggtcctgaaccagttatgtgtgttgcatgagaaaacgccagtaagtgacagagtcaccaaatgctgcacagaatcctg

SEQ ID NO: 98041 - DNA, 373 bp, Homo sapiens
  misc_feature (1)...(373): n = a,t,c or g
caaattccaaaatgcgctattagttcgttacaccaagaaagtaccccaagggtcaactccaactattgtaaaggtctcaagaaacctaggaaaagtgggcatcaaatgttgtaaacattctgaagcaaaaggaatgccctgtgcagaagactatctatccgtggtcctgaaccaggtatgtgtgttgcatgagaaaacgccagcaagtgacagagtcaccaaatgctgcacagaatccttggtgaacaggcgaccatgcttttcagctctggaagactatgaaacatacgttcccaaagagtgtaatgctgaaacattcacctttcatgcagatatatgcacactttatgagaacgagagactattccagaan

SEQ ID NO: 98042 - DNA, 369 bp, Homo sapiens
cagagaatgtgaatatggcatagtttataagaggtgtgacgtaataatcatacttctaagaaatgcgagggaataattttatagtcttgaagtgggaaaatgacccagaagccataagggagatatattttactacttaaaactaaaaaacaaacagccaacaacaacataaaaaccccacaatatttatctaatatgtctaagaaattcagacatagtgaatttttttttttttatttgaaatggagtctagctttgcagaggtgcaatctcggttcactgcaacctacacctcccagattcaaccaattatcctgcttaagcctcccgaatagctgggattacaggtgcgtgccaccaaacctggtg

SEQ ID NO: 98043 - DNA, 362 bp, Homo sapiens
cagacggcacctggaaaatcgcatcactcccgcgctagggctgcgcttttccgacgggcttaaaaaacggcacaccaggagattatatcccgcacatggctcggagggtcctacgcccacagagtctcgctgattgctagcacagcagtctgagatcaaactgcaaggcagcagcgaggctgggggaggggcgcctgccattgtgcaggcttgattaggtaaacaaagcagcctggaagctcgaactgggtggagcccaccacagctcaaggaggcctgcctgcctctgtaggctccacctctgggggcagggcatagccaaacaaaaggcagcagtaacctctgtagacttaaatgtccct

SEQ ID NO: 98044 - DNA, 379 bp, Homo sapiens
gctgcttttacagaatgttgccaagctgctgatagagctgcctgcctgttgccaaagctcgatgaacttcgggatgaagggaaggcttcgtctgccagacagagactcaagtgtgccagtctccaaaaatttggagaaagagctttcaaagcatgggcagtagctcgcctgagccagagatttcccaaagctgagtttgcagaagttgccaagttagtgacagatcttaccaaagtccacacggaatgctgccatggagatctgcttgaatgtgctgatgacaggtcggaccttgccaagtatatctgtgaaaatcaagattcgatctccagtaaactgaaggaatgctgtgaaaaacctctgttggaaaaatcccact

SEQ ID NO: 98045 - DNA, 362 bp, Homo sapiens
  misc_feature (1)...(362): n = a,t,c or g
ctgcgacctgctcgcagtcttgtcttcccttggttcgcccctgggggctcaggattacgaggcctgaagctcctagaggctaaatgccagggggatggagtgagctacgaggaaaccactattccccgacccagcgcctaccacaatctgtttggattaccactgattagtcgtcgagatgctgaggtggtactgacgagtcgtgagcttgacagcctggccttgaaccagtccacggggctgcctacccttactctaccccgaggaacgacctgcttaccccctgccttactcccttacctggaacagttccggcggattgtattctggttgggggatgaccttcggtcctgggaagccgn

SEQ ID NO: 98046 - DNA, 330 bp, Homo sapiens
aaaaaaaagaaaggaaaagaaaatgaccctcagagataatgctaatatcaccagttggcctttcttgacatctcttttagtcttctctctttttcagaaatgtgagttctttgcgaaatgttttgaactgaattttaggtcattaaattgtgagttttggaatatagtggaagggacatgtgagtgttttagattagtagaatgacaatcatttcaatttctttaagtattttcatcttctgtttttaggaatggtggactcatctttggttaaatgaaggttttgcatcctggattgaatatgtgtgtgtagaccactgcttcccagag

SEQ ID NO: 98047 - DNA, 1091 bp, Homo sapiens
cggacgcgtgggcggacgcgtgggcgcgcgccggaagtacctacctgggataacggcggcgagcggacggctgcatttacggggtctcccggagggccagagtcgtggcttacagaagagacgaaatgtggtctgagggacgatatgaatatgaaagaattccgagagaacgagcacctcctcgaagtcatcccagtgatgaatctggttatagatggacaagagacgatcattctgcaagcaggcaacctgaatacagggacatgagagatggctttagaagaaaaagtttctactcttcccattatgcgagagagcggtctccttataaaagggacaatacttttttcagagaatcacctgttggccgaaaggattctccacacagcagatctggttccagtgtcagtagcagaagctactctccagaaaggagcaaatcatactctttccatcagtctcaacatagaaagtccgtgcgtcctggtgcctcctacaaacggcagaatgaaggaaatcctgaaagagataaagagaggcctgtccagtctttgaaaacatcaagagatacttcaccctcaagtggttcagcagtttcttcatcaaaggtgttagacaaacccagtaggctaactgaaaaggaacttgctgaggctgcaagcaagtgggctgctgaaaagctagagaaatcagatgaaagtaacttgcctgaaatttctgagtatgaggcgggatccacagcaccattgtttactgaccagccagaggaacctgagtcaaacacaacacatgggatagaattatttgaagatagtcagctaaccactcgctctaaagcaatagcatcaaaaaccaaagagattgaacaggtttaccgacaagactgtgaaactttcgggatggtggtgaaaatgctgattgaaaaagatccttcattagaaaagtctatacagtttgcattgaggcagaatttacatgaaataggtgagcggtgtgttgaagaactcaagcatttcattgcagagtatgatacttccactcaagattttggagagcctttttagatttttctgctcaggctaaaaaaaaaa

SEQ ID NO: 98048 - DNA, 371 bp, Homo sapiens
cacggctagctagtttgattgtcacgtctagacagctggtgctttcacagctctatggtacatttatcttgctcttcagtccactacacaaatgatacctcacaattcctttttcccaggccatggagaactgtaaagatgcaagattgaccacgtccatcggggcgtacaacttcaaccacaggctgctggagatgattctcaacaagccagggctcacgtacaagcctgtctgcaaccaagtgagcgccctcagcctcctctcctttctgttcttcatgcccctctttctgtcctattgccaagtatccattcattgagtcccacttatctttgtaaaagagaacattctagagaacaaagcctcttcc

SEQ ID NO: 98049 - DNA, 339 bp, Homo sapiens
aatgctgaatggctaatatagccttctctcaaatgtttggagtgtttgaaactctcaaacactgaaactctcaaatgttcagtgtttgaaaaccagggccctttttttttttcccaaagggatttacccccaaatcaaaaccctacccccatgtcccacaagtggacctgacccttacgtccgggttaatttgttgccaaaagggaaggggccttgtcttaaaaaaatttcagggaaccgaaaaactttgaaacccctgtttgataaaacattgaaatttttggtacccatggaaaaagtaccaaaaagtcctttaaatgttccagtgaaaaatatcaa

SEQ ID NO: 98050 - DNA, 358 bp, Homo sapiens
  misc_feature (1)...(358): n = a,t,c or g
gggttatgatggggtgaaaaggtggaccagagacggggacatcttcaataaggagctactgctaatccccatccacctggaggtgcattggtccctcatctctgttgatgtgaggcgacgcaccatcacctattttgactcgcagcgtaccctaaaccgccgctgccctaagcatattgccaagtatctacaggcagaggcggtaaagaaagaccgactggatttccaccagggctggaaaggttacttcaaaatgtactgcaagcatctggccctgtctcagccattcagcttcacccagcaggacatgcccaaacttcgtcggcagatctacaaggagctgtgtcactgcaaactn

SEQ ID NO: 98051 - DNA, 360 bp, Homo sapiens
ggcacgagaactggaagaattgaaatttagcatcacagttcttgaccagaatataattacagctacccctaatgtgagggtagggacagcgatgtgtgttatatccccagcatctagcagtgtcacagaagagacaaagacatttttctggtatgcatgagtataagaatggtttgcctaaataagactgtcctcatggctctgtgactgtgcctcttgtcaggtgtatgagtttagagtcaaagaatctagcatcatagctccagctcccgctgaggatgtggatactcctccaaggaaaaagaagaggaaacaccggctttaggagatgcttctgaaattttggatgaattatttctg

SEQ ID NO: 98052 - DNA, 338 bp, Homo sapiens
agcaggcacagtcccgggccgacgccccagcccgactgtagcctcaggaccggccagaggagcgtccaggtgtcggacacctcgtcgtgctcccagctgtcctcctcctcgggctcatcctcctcatccgtggcgcccgctgccggcacgtgggtcctgcaggcctcccagtgctccttgaccaaggcctgccgtcagccacccattgtcttcttgcccaagctcgtgtacgacatggttgagtccactgacagcagtggcctgcccaaggccgcctccctcctgccctccccctcggtcatgtgggccagctctttccgccccctgctcagcaagac

SEQ ID NO: 98053 - DNA, 343 bp, Homo sapiens
gatcattgatttcttcctgggggcctatctcaaggatgaggttttgaagattatgccagtgcagaagcagacccgtgccggccagcgcaccaggttcaaggcatttgttgctatcggtgactacaatggccacgtcggtctgggtgttaagtgctccaaggaggtggccaccgccatccgtggggccatcatcctggccaagctctccatcgtccccgtgcgcagaggctactgggggaacaagatcggcaagccccacactgtcccttgcaaggtgacaggccgctgcggctctgtgctggtacgcctcatccctgcacccaggggcactggcatcgtctcc

SEQ ID NO: 98054 - DNA, 371 bp, Homo sapiens
ataaactcaacgttgaaaatgtcctttgtgggggagaactcaggagtgaaaatgggctctgaggactgggaaaaagatgaaccccagtgctgcttagaagagatcttctttgcattagcctcatccttgagctcagcctctgcggagaaaggaagtccgattctcctgggggtctctaaaggggagttttgtctctactgtgacaaggataaaggacaaagtcatccatcccttcagctgaagaaggagaaactgatgaagctggctgcccaaaaggaatcagcacgccggcccttcatcttttatagggctcaggtgggctcctggaacatgctggagtcggcggctcaccccggatggttcatctgcac

SEQ ID NO: 98055 - DNA, 361 bp, Homo sapiens
ctggaagattaataaagatcttttctttttctttttcttctttttttagtgatggagtctaactttgtcacccaggttggagtgcagtagcatgatctcagctcactgcaacctccacctcccaggagaatcacttcggaggttgcagtgatcacgccgctgcactccagcttgggtgaggcagagtgagactttgtctcaaaaaaaaagagaatataggaaggcaatggagtgaagcagagtcaagtgaatcttgtttaattctcaaaaactaagcttatttccaagtttagttgtgctatcacacagtattaactgttgccaaatttaattattggcatttgtaatttacattgcttgg

SEQ ID NO: 98056 - DNA, 355 bp, Homo sapiens
gtgggtaacctttatttcccttctttttctgtttagctcggcttattccaggggtgtgtttcgtcgagatgcacacactagtgaggttgctcatcggtttaaagatttgggagaagaaaatttcaaagccttggcgttgattgcctttgctcagtatcttcagcagtgtccatttgaagatcatgtaaaattagcgaatgaagtaactgaatttgcaaaaacatgtgttgctgatgagtcagctgaaaattgcgacaaatcacttcataccctttttggagacaaattatgcacagttgcaactcttcgtgaaacctatggcgaaatggctgactgctgtgcaaaacaagaacct

SEQ ID NO: 98057 - DNA, 361 bp, Homo sapiens
tgaagatcatgtaaaattagtgaatgaagtaactgaatttggaaaaacatgtgtagctgatgagtcagctgaaaattgcgacaaatcacttcataccctttttggagacaaattatgctcagttgcaactattagggaaacctatggtgaaatggctgactgctgtgcaaaacatgaacctgagagaaatgaatgcttcttgcaacacaaagatgacaacccaaacctcccccgattggtgagaccagaggttgatgagatgtgcactgcttttcatgacactgatgagacatttttgaagaaatacttatatgaaattgccagaagacatccttacttttatgccccggaactccttttg

SEQ ID NO: 98058 - DNA, 373 bp, Homo sapiens
tcctcccaaccctcttctccctctgaatctgtctctgggactgtctctgtctccccgtcttccctcccttcctcaccctgtctatctctctctgtatgtctcttggtgtgtgtgtctctctcgatgtttttctctctgcctgtctgcctgtctgtacccctctgcgtctctccccgcccccatccgtctgtgtcgcacgcgcacccccatcgggcttctgctcttgtcaattgcccctggggccctgcccccacctccgccccagtttccttctacaagcctcagtctccagctttgaaaactgggcaggcgtccccccatccgcacccccaccccttccccacgccgagccctatgcagtctcaaaaaaaaa

SEQ ID NO: 98059 - DNA, 373 bp, Homo sapiens
  misc_feature (1)...(373): n = a,t,c or g
gccagctgacttgagtagtaactgtccacctcatggactgatctcagctatgagaatggtagtggagcatggtgttttgcctgcgacacacaggagtcatccccagctgtttttagaagatatgttggtaaagttaagggaaaccacttggcagggaatggcaaacacagcagtcagtttaaaaatgcttatagccattggagagacctgcaactgagcatttttcttaatttgaaaggttctaggggcagttctgaaagacaaaggtggtttgttttgttttgtttttggagacagggtctcactgtgtcacccaggctggagtgcagtggtgcaatcacagctcactgcagctgtaacttcccaggctcan

SEQ ID NO: 98060 - DNA, 343 bp, Homo sapiens
gaatcaggatacccagagaccacaactcagaaagctacaagtcaaaacattaagacttattttaacaaagagccaaatgggataaatctaaacaaaaaatacgtcaaagaagtatgcttaaatgaaactcacatgacctagctctaggcattcaactcccctgtgcttcattttcctttaaggtcctcactctaatgttataactttccttctttagagtcccaaagaggatcgaagttgtcaataagcagcaatgttttgaaaacaaacttttttttctgagcagtagacttaaaatattcagtaaaccatgccataaacagatgtgctgtcatccaggctt

SEQ ID NO: 98061 - DNA, 300 bp, Homo sapiens
gcagggtttcaccatgttggcgaggctgggctagggcttctaacctcaagggatccacctgcctcaccctgcaaaagggctgggattacaggcctaaaccaccacacctggccatttagtgttattctaacatatacctactattaaaggtggcttaagcacgatgacgttgtattgctttttcatttaaaagtcaggggcagttttccagagctgatcggacggataaagaaacaaggggccctgtttccttctttttgcaccaacattttcaacgcataacctgcatctcctgggccg

SEQ ID NO: 98062 - DNA, 333 bp, Homo sapiens
ggaagaaccatctagaagcctccataggcgagcaccccttctttccagaccactccccatcctgcccccacctcctgtctagcagtaactatcacagtctaagctgttttttggggggttttttttccgaaacaggatctgctccgtcacccaggctggagtgcagtggtgtgatcgcggctcactgcagcctcaaactcctgggctcaaccagtcctctcacctcagcctcctgggtggccgggattacaggaatgtgttggctttattcccctgctgtgtcgccaaggcccagccctgacctgacatgtacaagtcaattggagaatatct

SEQ ID NO: 98063 - DNA, 351 bp, Homo sapiens
ttcttcttcttctccttcttcttcttcttcctcttggtcttcttcttcctcttcctcttcttcctcctcttcctcctcttcttcttcttcttcctcctcttcttcttcttttttttttgctaattgaaggatgcagtcttctgggtccatagtgacttttccaggcttatattcgaatttttgccaggctaaaatttgaattccttgatgggaatagtcacgaagtttctgttctgttgcctcttggtcagcctgtgacttgatggagatcctgttaactgctgaagttcagcagcatctcccttcaccaagtgttcccctggtgactatgtccgaccaggttccagagtc

SEQ ID NO: 98064 - DNA, 124 bp, Homo sapiens
cacccaggctggagtgtagtggcatgatcatggctcactgcagcctcgacttgctggactcaagtgatcctcccaccttagcctcccaggtagctggaactactaaaaaaattagcctgcacca

SEQ ID NO: 98065 - DNA, 354 bp, Homo sapiens
gctcggcgtggttgtgctcgcctgtagccctggctactcaggaggtggctggtgccagagaatcgcttgagctcaggaggtagaggctgcagtgagccatgatcatgccatggcactccagcctgggtgacagctagatcctgtcgcaaaaacaaaaaaccataaacaattctacctggatgttcatagcagctttattaataacagccaaaatatggaaacggctcgaacgtccatcagctggtgaatggctaaacaaaatatggctttgccgtacaatgggagagaattataagaactacccacccatgatgctacagtgtggaccaacctcaaaggattatgctcagtgag

SEQ ID NO: 98066 - DNA, 352 bp, Homo sapiens
ctctgctggagaggaacaaggagctggaggggtccctgcagcagatgtactccaccaatgaggaacaggtgcaggagatcgaggtgagggccctgcatgtgcttgcccacacccctcgagggccccttggcctgtgtgtgcctttatgcaacttagaataaggtgccagcttatcggacacagccttagcccaatagcctggtacagttcacaactgtgctatcctgtacaaggatagcacagctatctcaggcagccctattgcacaactagattttttttttttttaaatagaccccaagtttcaccatgttgcccaggctggtctctaactcctgagctcaagtgatct

SEQ ID NO: 98067 - DNA, 385 bp, Homo sapiens
aactgggtactttataaagaggtttaattggctcggctgtacaggaagcatggctggggaggcctcaggaaacccacaatcatggtggaaggctaaggggagggaggcatgtcttacatggccaaagcaggaggaagagagagagaagggggagatgccacatgcttaaccagatctcgtgagagctcactatcatgagaacagcaaagtgggaggtgccacacacttctaaacaaccagatctcgtgacagctcactgtaatgagaacagcaagggggaggtgctgcacacttaaccaggtctcgcgaggctcactttcatgagaacagcaagggggagtttccacacacttaaccagatctcctgagagctcactatcatgag

SEQ ID NO: 98068 - DNA, 380 bp, Homo sapiens
gtttttggatttgttatgagttttaagacggagtctggctctgtcgcccaggctggaggttgcagtgagccgagatcacgccactgcactctaacctgggcaacagagctagactttgactgagaaaacacacaaaacaaatcacagcaacttcatgtgggccattgtcatggatgtccagcatggagacccactatgtgccaagcgcccacaaactattggatttgaggagcaacctgcaggtcagtgggtgaccaagatgaggaaggaaatggctggaccacaccactgttggctacaaatggccgaggagtaattgtgaactttatagtgaacttgagtccaagctgctatctaactgtccaaaagatgaacacgca

SEQ ID NO: 98069 - DNA, 343 bp, Homo sapiens
atcgcttgaacctgggaggcaggggtttgagcgagccaggattgcgccactgcactccagcctgggcgacagagtgagattccatctcaaacaaacaaacaaaaaaccaaaaaaacaaatttaactcttgactcgttctcttctcgccccagtcacatttagtagcagacctgttttattagaggagagttctcgcagtgttcgccctaacttggcccggtggaaaagcgtgtaagcctgtgttctttctgaaaccattttctggtcatttgggattttacgcaaatgcctgtagctgtatgagctgcactggacagaccaatgggggaggcgagacttcagg

SEQ ID NO: 98070 - DNA, 357 bp, Homo sapiens
gaggaaacagatctgcccacactcacactgttggtcaggttgaatacagtgaaatacactccaggttcaatggtatttagggcattgcaccagacatggcagaaagtgttacttaaattgataccatgctttcctttaccaatggtataatttgaaaagggaacacaaaaggtttagatgttcccttttgatcatttttttgggaggggaaagaaaattacaatccatacaactatggaatatttctcactatattcagattaggagatatgtcttagaaattccatccgggctgggtgcggtggctcatgcctgtaatcccagcactttgggaggccaaggcgagtggatcacctg

SEQ ID NO: 98071 - DNA, 370 bp, Homo sapiens
atggtggctcatgcctataatctcggtactttggtaggccgagtcaggaggatctcttgagcccagcagttcaagaccagcctggggaacatagtgaggccccatctcttccaaaatttttaaatatgaataaaactagaaatacaaaatctgtgttaagaaagctctcaaactttaccaaaagaccagacctaaataaagaagggccaagtgcagtggcttacgccttgaattccagcactttcagaaggccacgggggtggattacttaagcccagggagttcaaaaccacgtgggcacatgcgaaccccattggttccaaaaaatccaaaaataagccggccttgagacatcaacttgaagcccaac

SEQ ID NO: 98072 - DNA, 347 bp, Homo sapiens
cgtagttagaatttcttgcctaggaatcattcctgcttccagcacatgtagttgcagccctggtcctaagaccattgcatcaggtaggggaatgggggaaaaaaaaagaaaaggaaagttgaggtgatgtgcgggaaaaaagacagaaagaagtatcttgtaagtaagaagagactgtctttcacctttatccttcaggagctacttcaggaaccaaggacaaaagccaaatactttttaagaaaatatattcttggtcgggtgtggtggcccgcgcctgtaatcccagcactttgggaggctgaggcaggcagacttgaggtcaggagttcaagaccagcctggcc

SEQ ID NO: 98073 - DNA, 411 bp, Homo sapiens
tcttgatcagctcaaagtgtagttgtttagctctgtttatggttatgaacatattagcagaaataatttttaatagctaaattctaattggatatgcctccagttaagaaactttctatcagttagatcactgctactcaaagtgtgtttcatagactgtgtgaactgtttattactcatctatgataacatacatacagacaatatttagcttctagaaactattttaacaatttgacaatgccacaacacttttattgtactttataaaagtatcagtctgcaacatagtggaagttttgttgttttttgttggtttttttttgagatggagttttgctctgtcgcccaggctggagtgcagcggcacgatctcggctcactgcaacctccacctcttcggttcaagcg

SEQ ID NO: 98074 - DNA, 356 bp, Homo sapiens
cccgtgtctactaaaaatgcaacaattagctgggcatggtggcatgcacctgtgttcccagctacttaggaggctgaggtgttttcttcatagttacccatagcaagtgtcagagagtgatttaaaactgtatttttggtatgaaggaaaagaaagtcaagctttgaacaaataccaattgaaaggtggatactggatgtctgaaatgagtcacttaagtgccaaaatgccttaaatttaagagtttcttccatgatttctgcctctaaaggactttgacatctatttttttaaccaaggttttttattttttaaagcttattttcttactggaagagattcagcagagtgatatt

SEQ ID NO: 98075 - DNA, 341 bp, Homo sapiens
cattctgctcattcaacgcatgccggacatgcaggtcacacgtcacttccaaagtgctgggattacaggagtgaaccaccacgcttggccaagtttcttaatacaaggtactaaacactctttcaaaaataataagacttgttccatataaagttgagcatgaactctaaaaagaaaaaattaagcaacagatgaaaagtaggtatgtggaaataatggtatcaaatatgattttatacaaaatgtaccattcttcaaatgtgtaagtcttaatatgaatatttttggattgggagtgttgctcaacctaatttttaaagaattagtctcaaaccattcag

SEQ ID NO: 98076 - DNA, 353 bp, Homo sapiens
ctatactctagtgaattgcgcttttcattttaactgaagtcgtattgttctatccgactaagaatgctttactgtatagattgaatataaatgaatatgtggtgtataaatgtactctatttggttatcttttaccattcttagtggttctctctgtgttgacaggtggcggcgactttgaataaccttgcagtcctttatggtaaaagagggaagtacaaagaagcagagccgttgtgtaaaagagctctggaaatccgagaaaaggtacaaaagaagggggcagtcgttttctttgagatttttgttttgtgtgtgtgtggttttttttttttttttaaaagggaccccct

SEQ ID NO: 98077 - DNA, 409 bp, Homo sapiens
  misc_feature (1)...(409): n = a,t,c or g
ccagctgcagtttaggcagatatcttgttcaatctctgtcttcttgatccctgtcaaaataatttttctactcatatagtggccagttggctcaggcaggcatttcaagaggaatctgcttgttcctcacttttccagcataggacagtggtccagcccgcacagtcagcattgttctcagggacgatgtggcagccccacacagaggccaagagcaacagagcaactccaggatttatgagttgggacagtcgtcctctcattcatgatacatggagggactcaggggactcagcaggtccccctattgttttttagggcttttgtttttgtttttttttgagacagagtctcgctctgtcagccaggctgcactgcagtcgtgcgatcttggctcactgcaaccccn

SEQ ID NO: 98078 - DNA, 336 bp, Homo sapiens
ccaatgtgatcatttcaaaagtggagcctttgagaattagttagggttacattagttcatgagggcggggcccccatgatgggattaatgcccttataaaaagaggaagaaacaggagatctctctgctctctgccatatggcaacttggaagaatggcctcaccagacaccagatctatccacaacttaatcttggacttcccaccatccagatcataataagtaaatgtttgttatttaagccatgcagtctatgataatttattatagcagcccaaactaagacacccaaataaaatagaaatattaaaataagggcaaagttgatactgtag

SEQ ID NO: 98079 - DNA, 345 bp, Homo sapiens
agcatctgtatttccatagaaagatatgtcaatactagtaagggattgtggacattcctatgtgcctaaaggagttccaaggagatctgtggatgtttgtttagtagtagtttttataatttggcatccacatttgtttagagattttttaggtgctaatgataccttgaagtgattgtctctctgtaggatatgacagacatatgtggaagcatcttcaagaactgattagaaaatgaaactctcggccgggcacggtggctcacgcctgtaatccccgcactttgggaggccgaggcgagcagatcacgaggtcaggagattgagaccatcctggctaacatg

SEQ ID NO: 98080 - DNA, 365 bp, Homo sapiens
gagaatgacaggtaatcctgtttcttacccaaataagaggcgcagtccagaaagtttgaatatcccagatgtggctgacctaaggaactgtgaataaaaggatagataagaacattcgaagtggggagggaagacagaaatggaaagaaggtaagaaaaaatcagaggggaggcaatgagagaataatctaaagacacttgtggcattagatatgtcattttattttattttatttttattttattttattttattttattttattttattttattttttgagatggagttttgctcttgttgcccaggctggagtgcaatggcgctatcttggctcactgcaacctctacctcccaggttcaag

SEQ ID NO: 98081 - DNA, 385 bp, Homo sapiens
aaaagttaggagaaagcctattaggtatttctgacataccagttttcagagtcattgggtgactgagatgtcagtatataccaatactgtttggggaacaaaaattaaatgctcccaaaaagactacttggaagtattcagaaccatccccaaaccccaacatctatgagcaacacttatgtgtgtctgtaaccaagaagctttgcttgtctgtctcatatcaaaccagccatttcagaatttaactgttccagatagtcagagttaaggtaaccttcaaaatctagaaaaagtattttataaaattcaacatccctttatgataaaaactctcaacaaactagtcatagacagaacatacctcaacataataaaggccatatat

SEQ ID NO: 98082 - DNA, 336 bp, Homo sapiens
ccgatccctagtaggacctggaattcatgtcttccagtcaacagtttcacgctatttcactctcaattagagtcttattaaaaacttcagttctcatcttgacagttattggtctccttgatcaatctttttcttcaagccttcaagctccaaattgattgtggccacacttgcatgcacttttggagacagaatctctgtctcttaccccccaccctgcccacaccaagacggaatctcactctgtcgcccagtctggagtgcagtggcacaatctgggctcaccgcaagctccgcctcccaggttcacaccattctcctgcctcagccacccga

SEQ ID NO: 98083 - DNA, 381 bp, Homo sapiens
cattagttaaacttaccataacagacagaagaaatagaaaggttgagtagtcctattaaggaaataaaataattgaatcttttctacaaagaatattccagacctagatggcttcaatggtaaattctgtgaaacatttaagaaaaacaaagaacaagcaaagaaaagaagttggagaagctttttcagagaatagagaagaaatagatacgtagacttattttatgatctcagcataacattgatcacattacatgccaagggcattataagtaagggaaacaataatttagggtaattttattacattaaaattgaaaacttctgtctgggtgtggtggctcacacctgtaatcctagcactttgggaggccgaggtgg

SEQ ID NO: 98084 - DNA, 224 bp, Homo sapiens
taaaaggtgcgagtgagcaggtgaggggaaagactgaaaactatgagaaacagcaactaagacacaaaggaggtgggagactgcgttggtgccacagcacccacaccgtcctcttgcccccgtcacttgggttaaaaccaccggaaattccactattgcaaattttttattaatccttgtatatctgtcctttctatttttagtctacagttgtatccagcagg

SEQ ID NO: 98085 - DNA, 328 bp, Homo sapiens
gaatcactttgaacccaggaggcagaggttgcagtgagctgagatcgtgccactgcactccagcctgggcaacagagcgggactctgtctcaaaaaaaaaaaaaaaattcccccccccccctttttaacccattaccccaacgggggggcaggccctgggggccccgtttattggggaggttagggcgggaaaaaaatctttgaaccccagggggcggaggttccacccaatggaaagtcaactcggccgcaattcccaaatttataaatagaaaatccggaaaacccccgcaggttcatttaatgggggcatcggcccccttctaat

SEQ ID NO: 98086 - DNA, 447 bp, Homo sapiens
gcttcgtcaaccgactgctgattgatagcgtgagattacttcattcgagatgaacataccccaccagacctctcgaggagaccaattcaggatccgaattcacgaacactacattctgtatactaattcattggtagcgagacacttgggttgcttctgccttttgactattgtaaataatgatgctgtgatcattggtgtacaaatatctctttgagtccctgctttgaattcttttgggtatatacccagaagggaaattgctatatgggaattattattattattaattattctattgatttttttttgaaacagggtcttgctctgatgcccaagctggagttcactggcacagtcatggctcactgcagcctcgaactcgagctcaggcagtcatcccgcctcagcttcctgagtagctgggactacaggcatgggctgccg

SEQ ID NO: 98087 - DNA, 152 bp, Homo sapiens
ctcagcctcccaggtagccagacatggtggcgtgcacttatagtcccagctacctgggaggctgaggtgggaggatcacctgagcccaggaggtcgaggctgcaggtagccatgatcacaccactgcactccagctgtggtcgacgcggccg

SEQ ID NO: 98088 - DNA, 376 bp, Homo sapiens
  misc_feature (1)...(376): n = a,t,c or g
ctggtctcgaactactgacttcgtgatcggcccgcctcggcctcccaaggtgctgggattacaggcatgagtcaccacgcctggcctcttttactttcatatccagttcttcaacaaatcttattagctttacctccagattatattcagaattcctctacttctcagcatacccactactccaccctggtcagaggtactatcttttttggactgaattattgcagtaacattctaactgatctccttgcttctatacttgcccttcccatctattttttcttctcagtggagtgattctttgagttataagtcaaatcatattactcttacgagtttttggttcactcagagtaaaagtcaaaatccttataan

SEQ ID NO: 98089 - DNA, 116 bp, Homo sapiens
atggaccacaaggtcaggagttcaagaccagcctggccaagatggcaaaatcttgtctccactaaaaaatacagaaaaattagctgagcatggaggcacatacccgcaatcccagc

SEQ ID NO: 98090 - DNA, 99 bp, Homo sapiens
agagttatcaatttttacttttctgagaaagctccaaactgttctccatagtggttgtactaatttacatttccaccaacggtgtacaggggttccttg

SEQ ID NO: 98091 - DNA, 347 bp, Homo sapiens
  misc_feature (1)...(347): n = a,t,c or g
cttaacattaagtaaagtatatttggtcaggttttgaggacagcctttaggagcaaagattcaagttgccgtgaaaatacactctgattagcagcagttataagtaggggtttttttgtttgttttgttttgtttttgaagacagtttcactatgttgcccaggctggtctcgaactgctgggcttcagcaatcttcctgccttgacctcgcaaagtgctgggattacaggtgcaagccaccacaaccagcccacaagtaggtttttaaaggaaaagaagattggatgacgtgaagatattgaaaaaaaacaggctgactctgggcacactgcgtangagttagccn

SEQ ID NO: 98092 - DNA, 332 bp, Homo sapiens
  misc_feature (1)...(332): n = a,t,c or g
ctgcacttccctctaaggaagacactgttcatcgtctcaatttgtagattggaaaactgagtctccaagagattataaattgggcccagtcacacagctagcaagtgtcagagctggactggaaacccaggcctctctgactctagggccttccctctgcgatgganaannnannannnnaaaaaaaaaaaaaaaaaaaaaaaaaaaaaaaaaaaaaaaaaaaaaaaaaaaaaaaaaaaaaaaaaaaaaaaaaaaaaaaaaaaaaaaaaaaaaaananaaaaaaaaaaaaaaaaaaaaaaaaaaaaaaaaaaaaataaaaaaaaaaaaaaag

SEQ ID NO: 98093 - DNA, 389 bp, Homo sapiens
ggctgaggcgggaggattgcttgagcctgagaggttgaggctgtagtgaaccctgatagtgccactgcaccgcagcttgggcgatggagtgaggctttgtctcaaaaaaaaaataacgtatgtcttgaaggcagattctcaaacttgactctttactcacagtttctactcagccatacaacgttttatactgtttttttctgttaataagagaataggcccaggtgttgtggccatcatcgcaccaccgcagctggggtgacatgagtgagaccctgcctcagaataacaaaggaaaacccaagaattaagatattatgaaccagactatattggatgtattctagtaggtaaatacctttttagggctcaaattacacggctctttg

SEQ ID NO: 98094 - DNA, 344 bp, Homo sapiens
cggtcttttaattatattcaatgtatacttaattctataatttataattcaattataaagaacagaaaatttatttctgcacagttctggaggctgggaagtccaaggtcaaggcactggcaggttcagctgtctggtatgggtggcatgcttctaaaaatccaggtttgtgtttatgttccacatgaggtccaaattgtatctgggcttgaaatccaccaaactcacaagctttctcgaaggagacagggtgagagccattcaggatgtcatcccgtgcctgaaacacaagaggaaggaaaagcatcagaggcttcggggagtgacacgttctctccactgac

SEQ ID NO: 98095 - DNA, 296 bp, Homo sapiens
tctgactctttggtgccgtctcctactacttttaaggattcttctgattacgttgggttcacctgaataatctaggatcatctccctatttcaaggtcagctgattaggaatctgaattttcctttctgttgtaatatgacatgttcacaggtcctgaggtttagccaatctcctgacctcgtgatccacctgcctcggcctcccggagtgctgggattacaggcgtgagccaccgcgcccggccaaagttcccttatattcttttaaggatgaattgtgcacataaattgactat

SEQ ID NO: 98096 - DNA, 316 bp, Homo sapiens
ggcctcccaaagtgctgggattacaggcgtgagccaccacacccggccagaaactgcaagtacttttaaaagtatgatggaagatacatactttgtaatatacatacatacaaaatttgttctttgagcaaatttattcagttttactggcaatgaaactcataatgtttactcctcagaaattttaaaacatttgtttgttgaatgtatttattgtttctatcggcagtctttggaaatctgtcttgtgatagttctaataatatggtttgaatacagcattgtcatatgtcttatatgttggtcgacgcggccg

SEQ ID NO: 98097 - DNA, 337 bp, Homo sapiens
ccttgaaccattgtcatggttagcggttatttctgctttgccacacatattcagactgtattaatcctcgccgtttctttcttctgggtaccacattaagaaagaaaagctaaagtgcaattataggtacccctggctatttttgaatttgcatttgtaactataccctctgatgtttattccgtgtttgtttggggtcgtacgctgtagcttatgcctgtaatcccagcacttttcgaggccaagatgggcagatcacttgagcccaggacttcgagaccagtctgggcaacacggtgaaatcccatctcctcaaaaaatacaaaaaaattagctg

SEQ ID NO: 98098 - DNA, 334 bp, Homo sapiens
ctgacgcacgagaatctctgtaacctgggaggcagaggttgcagtgagccgagatcatgccactgcactccagcctgggtgacatagtgagactctgtctcaaaaaaaagtaataacaaaaaaaaaaggggatcgccagggataatatatatgaccactttcggttcatttcaggaatgcaaagttggggcaactttaaaaaacctataaattattaaatttcaaaattaaccttagccttaaaacttataaataaaaatttaccaaaattgccaaatccaccttcacagggggaatattaccagagttctttaaaggatccctagtcaactca

SEQ ID NO: 98099 - DNA, 97 bp, Homo sapiens
gggatagcgatgattatggtagcggaggtgaaatatgctcgtgtgtctacgtctattcctactgtaaatatatggtgtgctcacgtcaacgcggccg

SEQ ID NO: 98100 - DNA, 363 bp, Homo sapiens
ccaccgtattgttcaggctggtcttgaactcctgaccttgtgatccacctgcctcggactcccaaagtgctgggattacaggcatgagccaccacacccggccagcaatggattttaattaatagctagtgaatttatcataatgtcatgcttaaagcctagattttagttatgcggaatgtttaattggggtagtgagagagggctaccagagaacagagaaaggtaatggttacccatctccaaaatagccaccaccttctattaagcaaccatataaacaactcatgtacaagatttttgcaagcaaggtgtccccatttcacatttgagaaaaatgaggctcaaaaagattcactcact

SEQ ID NO: 98101 - DNA, 348 bp, Homo sapiens
  misc_feature (1)...(348): n = a,t,c or g
ttttaatgtcttgattgggggtttgaagtactaacgtttttacttttgatgaagtcaaatcaaatttatctgttctttttttgcttgcacttttagtgttatatctaagaaatcttcctaatccaaggtcatgaaggttcatgcctatgttttttgttcggttcgtttatgtgttttgtagcaactgggtttccccatgttacctggctgatcctgaccttaagcaatctgcccacctcatcctactcaagggctgggattacaggcgtgagccaccatgcccgggcgaacaatttattttgttttgggtctatgcccagtcatgggattactgggttgaattttacn

SEQ ID NO: 98102 - DNA, 290 bp, Homo sapiens
tttcctttgaattaaaacctagagtgttgtatttttctttctttttttttttttttttttttcccctttttgtcttttgggccgtttttattttttttttttttttccccccaaaccctcccccacggtttgggtttccgtaggggtgggtggggaccagggtcctttgagggggttggggtagggggtgttgggccccgacctttttttacgtgggtttgggcccgttgtagggggttgggcgctgtgtggttttttggccctttctgcggtgtggggcggagatctcg

SEQ ID NO: 98103 - DNA, 362 bp, Homo sapiens
  misc_feature (1)...(362): n = a,t,c or g
gtggcagggagcgtggctgttgcaggggcttggtcctacactaggaagtcattactgaatttgtatttaagataaattcctgaaggtggaattgcgtcattaaagggcttgccactagggtttttgaaacatattactaaatttccatgttacaagatatcttccttcttgggcgtgttgaaaattaagtgatactagnnnnnnnnnnnnnnnnnnnnnnnnnnnnnnnnnnngatggtgatgtgcttagtaaatttgtaaattttttttcttttaaggttgtagaaggaacgcctcttattgatggaagaagactcaagtatagattaaatggtgattttctttttttaagactcaaattg

SEQ ID NO: 98104 - DNA, 333 bp, Homo sapiens
tttacatttaccttttatttattgggagtttttgaggcaggttggagtgtaagaatgcaatctcggcttacagccgcctcgactttccaggactccctcaggtgatcttcctatctcagccttccaagtggctgagactacaggaatcacttaattctgtgatgtcgaagctgaagtgagccgtgatgatgccttgccctccagtctgagtgtttcagaaggtggagtttcgctcttattgcccaggctggagttcagtggcgtgacctcagctcaccgcaacctctgccgcctgtgttcaagagattttccagtcttcaccctttcgagtag

SEQ ID NO: 98105 - DNA, 351 bp, Homo sapiens
  misc_feature (1)...(351): n = a,t,c or g
gtgtgtgtgtgtgtgtgtgtgtgtgtgtgtgtgtgtatgtattttttttttttttttgtccaaaaaatggggcccccccccactatgtcccccaggcggcccaaaaaccctgggcccaaaggaatctccccccctggcccccaaaaatcgcgggaattccggccttacccccccccccccccccacattttttttttaatgaaaaaccgaggattccaaaaaccccggttttaaacccttttgccacccagaaacctaatttagcctattccctaaccctttttaacctttccccaccctttaaaggttcacctttaccaattggcctccaaaccctaaaaatttttttcn

SEQ ID NO: 98106 - DNA, 339 bp, Homo sapiens
ctccggttactataaaatttgtgttctgtgaggtatgtcttttctggtgaattcacttctggttctgcatgcctaatttagtattttgtttaatctgcatacctgggtttaaaattttttctttttttttttttttttttttttttttttttttttggggtttttcccccttttttttttcccaacaaaaaaaaattaaaacccccccaaatttttttccccccccaaaaaaggcccccaatttttttttttccccccccccctgggggaaaaaatttttttttttttggaaaatttttttttaacccccgggaaaaaggccccccaaaaaatttgggg

SEQ ID NO: 98107 - DNA, 357 bp, Homo sapiens
  misc_feature (1)...(357): n = a,t,c or g
cttgaactcctgaccttgtgatctgtccacctcggcctcccagagtgctgggattacaggcatgagccactgcacccggccccagatacaattatttttagtgatatcttcaagtttactgtttcttctgcccatttatttagcacattttctttgaattctttgaatgtatttaaatagttgctttgaagtcattgctaaatccagcatctagacccactcagagtccatttctgttcattgttgttcttcctgagcatgggtcacgttttcctatttctttatatgtctggtaactttgtgttaaaaactggatattttagatatgttaagtagcttttgatatattacgttctn

SEQ ID NO: 98108 - DNA, 345 bp, Homo sapiens
cacacctagctaattaattttttttggtagaaacaggatctcactatgttgtccagtctggtctcaaactcctgggctcaagccatcgtcttggctcagcctcccaaagtgctcggattaaccttgtggttttatcctaaacagcaataaatgaatggtattctaattctctgtgaagctaacttggctaggttgtctttgcctgagcttcttaacttgtccacataaataaatcactataatctggggttaactgagtattccttggagtttgcagggttctgaaagaacctaataaacacacagcttggtgaaatgtgagttatgtttctaaacttatgacct

SEQ ID NO: 98109 - DNA, 236 bp, Homo sapiens
cgcttgtggtccccgctacttgggaggctgaggcgggaggattgcttgagcccgggaggtggaggctgcagtgagccatgattgtgccattgcactccaacctgggtggcagagcaagactataaaataaataataaaataaaatagaatcttcaattacatgcatatcagggattcttactgtgcaaagcttttctctagatatttaattttttttttcagtttatgtgaagaaa

SEQ ID NO: 98110 - DNA, 322 bp, Homo sapiens
ctcgatctcctgaccttgtgatccacccgtctgggcctcccaaagtcctgggattacaggcgtgagccaccgtgcccggcctaactgctctgatatttttaaaaaaggtgacttggattaaagtatgcaaactcaaggagtagtacgagcccacttgagtcaagttagcttagttgctaaagagcttgataccaaaattacttttgtttacttgatgaatgggatagttgttgcacagggccactgatctagattactgtcttatttgtcaagtacttatagttgtagaagtagcagtgtgaaaattatcggaatggagaag

SEQ ID NO: 98111 - DNA, 324 bp, Homo sapiens
cggatttattttgtgtgtgtgtgtgtgtgtgtgtgtgtgtgtgtgtgtgtgtgtgtgtgttttatattttatatttttttagtctatactttacacaacagagaacaaaaatcacaacatacaggacactgtgaccccatgaaacgcaaagataatattccacaaaattcaatatcaattacaatatatttcacttctaaaaaaaccattacgcttcatctgtcttttcttaacacacttactcactactctcccctactttttgccctaaactgcttacttcactttcacccctgacatccttcatcacaccttcactttttc

SEQ ID NO: 98112 - DNA, 298 bp, Homo sapiens
tttttttgttttttggggggtggggaaaatttttttttaataaaaaaggggtttggggattttttaaaacccagggagaaggggggggggggggggggacctggccccagggggtaattaaacccttgggttgggggccctaaaaaccttacccaaaaggggcggggggaaattaaagggggggcccaaaaatttggggggataaattttttggggaccctggggggaaaaataaggggcaggggtttttggcccccggggatttggcttggcaacggggaagggggtaaaaaaagtt

SEQ ID NO: 98113 - DNA, 348 bp, Homo sapiens
tggaaagttcacttactcagaaagttcacaaagggttgtcagactaaggtgaaattctcagaaatataaaccaggtcactcattacctcgctagttcagagcactaagaaaaactttttccttttccttcattctcttctccataccatagtttagcctggactctttcctgcctttttttttttttttttttttttggggacgggtttttttttttgccccccggggtgggggccaaggggggaaattgggctcaggggaacccccccctccggggttaagggggttccccggctttaaccccccagggggggggttttgggggcctttgcccccttccccgggttt

SEQ ID NO: 98114 - DNA, 336 bp, Homo sapiens
  misc_feature (1)...(336): n = a,t,c or g
cattagcttaaccacggttaatgagcacagtaatatgttcatttatttcttaccatcttggtttcattcgtttatttctaataaaggtaggaaaggttttaaaaaaaaaaaaaaaaaaaaaaagtcaacccggggcgngaattnngggcccggtnnggnngtggtttttgtttttgttttttattttcttttttttttttttttttttttttttttaaattgggtgttttttttttgtttctacgggggtgacctggcgcctctctcctgatattgacttcttttgatttcaaattcttggggtgacctctttacacacccccgtatggttttacg

SEQ ID NO: 98115 - DNA, 116 bp, Homo sapiens
agggcaggagaatcgcttgaacccgggaggcagagcttgcagcgagctgagatagcgccattgcactacagcctgggcaacaagagcaaaactccctctcaaaaaaaaaaaaaaag

SEQ ID NO: 98116 - DNA, 347 bp, Homo sapiens
tttttggtagagacggggtttcaccatagtggctaggctggtcttgggctcctgaccttgtgatccacccgccttgacctcccaaggtgctgggattacaggcgtgagccaccacacctggccactttttcattttattaatggcatctttttaagagcaaaagatcttaatcctgatgatgtctaatttattgaaaaaaatttatggggctaatgctttatgtgtctaagaaatatttacctaccccaaagttgtgaagactttctttgatgttttgtcctaaaggactgacagttttagcttttacatttaagtctatgacccatttcaagtagacttttctgtg

SEQ ID NO: 98117 - DNA, 395 bp, Homo sapiens
cacgcctataatcccagctgctcgggtggttgaggcacaagaattgcttaaatctgggaggcttgttttgctgtgaactgagattgagccactgcacttcagcctgggtgagacaatgagattctgtctcaaaaaaaaaaaaaaaaaaaaatttacttaaggaatttttacctggaccctcccccaaattttttaaaaaaatttttctaaaggggggtttttttataaacccgggcaaaccccttttttggccccctcaaggttggaaaaatcccctttaaccttttcgaaatttttttcttttcaaatattatcccaaactttcccccaaggtttttaaacaccaaaaatcgcacccttggggctacgttttttttaaaccccttattttttag

SEQ ID NO: 98118 - DNA, 411 bp, Homo sapiens
aatttattttgattaaacttcttttatacaatttttatttacaattgtataaaagaagtttaatcaaaattggttctttttttgtggaaagtttgatgttactgtatggaaatgcaacaaatatttgtatgctgagcctggtgcagtgctgcatttctgtaatctcagtgctttcagaggctgaggcaggtggatcatttgagcccagcagtttgaggtgagcctgggcaacagagtgacaccctgtctcaaaaaaccccagaagtatttgtatgttgattatcctgatactttaataaatgcatttattagttcaaaaaaaaaaaaaggggctgccctttaaaaagatcccttggggggccaaagttttacattattatacaaattaatagttttccccatatggggggg

SEQ ID NO: 98119 - DNA, 427 bp, Homo sapiens
aatttattttgattaaacttcttttatacaatttttatttacgattgtataaaagaagtttaatcaaaattgattctttttttgtggaaagtttgttgttactgtatggaaatgcaacaaatattagtatgctgagcctggtgcactgctgcatttctgtaatctcagtgctttcagaggctgaggcaggtggatcatttgagcccagcagtttgaggtgagcctgagcaacagagtgacaccctgtctcacaaaaccccagaagtatttgtatgttgattatcctgatactttagtaaatgcatttattagttcaaaaacaaaaaaaggggaggccccacataagggttcctatggggacctaaagtaaacgctcatgggcaagtataaactcatcacttaatagagtgtgaattatatacaccgc

SEQ ID NO: 98120 - DNA, 385 bp, Homo sapiens
  misc_feature (1)...(385): n = a,t,c or g
ttggcctgtggaatggctcatgtttgtgcgtgtgtgtgtgtatatttatgggcatgggtgcatgcttggtgtgtatttgtacatgtctgtattgctgtgtccctgtaaatacatgcttgtgtatggatggaaganacatttaacacccatagtaagcctaaaagcatccaccatttaagaaagcgtttaagctcatctcccactacctaaaaaatcccagacatataactgaactcctcacacccaattggaccaatctatcaccctatataagaactaatgttaggataagtaacatgaatacattctcctccgcatatacctgcgtcataaaaaaactaaattagcgcatccgttttaaaaataccctagtgggcccctaccg

SEQ ID NO: 98121 - DNA, 379 bp, Homo sapiens
ataaaacccgttgattactatattcggaaaaaataaaataaaaataaaaaaacaaaaaaaaaaaaaaaaggggagagaaaaaaaaaaaaaaaaaaaaaaaaaaaaaaaaaaaaaagggggcccctcttttggggttaccacggggggcccccccccccccctccccccccggtggcattccttttctcttttgggggggggtttttttttcccccccccccgggggggcccccccccccccccggggggggttttttttcctcctcctttttgggggggtcttttttttttgggggggggggttttttccctcccccccccttgggggtttcgccctccgggggctttggcgctctccctcttttttggggggccccct

SEQ ID NO: 98122 - DNA, 393 bp, Homo sapiens
  misc_feature (1)...(393): n = a,t,c or g
ctcttagtaagattacacatgcaagcatccccgttccagtgagtaaaaaaaaaaaaaaaaagaaaaaagaaaaaaaaaaaaaaaaaaaaaaaaaaaaaaaaaaaaaaaaaaaaaaaaaaaaaaaaaaaaaaggggggggcggttttaaaaaaaccctgggggggcacaatttttcgcggggcttggagtaaaaaattttttccctttagggggggtttttttaaattggccggtgggcggttttttaaaaggtggttggggggaaaatgtttagctgggtttttttgggaggggctttctttttttggggggaacatattgggatcccatctttggaagttattctggccgtttggccataataaatttttaggggcgtaatggggggcaccn

SEQ ID NO: 98123 - DNA, 368 bp, Homo sapiens
cccagcccctcccccaccccggcatttcagcgtcaagtgcacttagcggggtacccggctcccccagcccccacacccgtcctgggtctcagggtggttccagcttctccttgggcagccagaagttggagtcccatcccccaaggcacatttttttttttttttttttgggaaaaagggaggggtcccaccattccccctgggcttgggaaacccttgaccccctaagggggcctggaaaaggggggagcttttggggctggggtaacccttaaccccattaaactgggacccaaggggtttccccaggcccttggggcaacccccccctttcccaccattgctgctaacctctggggcgggaccct

SEQ ID NO: 98124 - DNA, 381 bp, Homo sapiens
taatctcaagaaactaaggaagaataaataaataatataaaaataaaatgaaaaaaaaaaaaaaaaaaaaaaaaaaaaaaaaaaaaaaaaaaaaaaaaaaaaaaaaaaaaaaaaaaaaaaaaaaaaaaaaaaaaggggggggcctttttaaaagccccctggggggcccccttttttcccccctgcccccgctaaaatttctcccctaaagggggggtttttaaaattacatgcccgggccggtttttaaaaatgctgtgggggggaatttcccccccggggttttttttgggaaggccccttttttggggggggacaatttggggcgccccccctcccggaaattacagctcctgggggatataaatgttttttgggggg

SEQ ID NO: 98125 - DNA, 348 bp, Homo sapiens
ataaaatccgatgaatactatattggatgaaataaaattaaaatataaaaatataaaaatgaaagaaagaaaaaagaaaaaaaaaaaaaaaaaaaaaaaaaaaaaaaaaaaaaaaaaaaaaaaaaaaaaaaaaaaaaaaaaaaaaaaaaaaaaaaaaaaaaaaaaaaaaaaaaaaaaaaaaaaaaaataggggggattttataaatataatggggggggactcttttttaaaatgggggggataaaaattttttttttctttttttttagtctatataagaagcgtacttatattccgtttataattatattcctgtagaggtaagtttatctataattttttattat

SEQ ID NO: 98126 - DNA, 356 bp, Homo sapiens
acagaacagaacaactggaaactctaaaacgcagagcgcctctcctcctccaaaggaatgcagtgcctcaccagcaacggaacaaagctggatggagaatgattttgacgagctgagagaagaaggcttcacacgatcaaattactctgagctacgggaggacattcaaaccaaaggcaaagaagttgaaaacttcgaaaaacatttacacgaatgtataactacaataaccaatacagagaagtgcttacaggagctgacggagctgaaaaccacggctcgagaactacgcgacgaatgcagaagcctcacgagccgacgtgatcaactggcagaaagggtatcagccctggaac

SEQ ID NO: 98127 - DNA, 347 bp, Homo sapiens
aactgactcactttagaaagcaagttgctctccagtaggagagccatcaaggtacttctgaatgtcagcattaacactgcatgctacctacagtcactgtcaggggcacgaatatggagtacgtaccgaaagattttggccacatgttttgttagctaagtcaagtcttaaatgagccaaatgtagtatttgctgactaggaagtaagtcatttgaaattaacagtatttaggctgtacatggtggctcatgcctgtgatcccagcactttgggaggctgagacgggaggattgcttgagcccagaagtttaatgttacattgagctatgatggtgccactgcactt

SEQ ID NO: 98128 - DNA, 307 bp, Homo sapiens
acgatcacctatattaatctgtaatatacacttacatttctccctgcttgtaatcagtatacttaattttttcatatgagaaagttttcttatatagctttctagatagcaacataatccaaaacaacccaaaccatgaaagtacatgacactatctccagtacgcagtaagtacttaatacacattatacagatgaagaaaaaacagataaaactaaaaatgggccgggcacagtggctcacgcctgtaatcccagcactttgggaggccgcagcaggtgtatcatgagggcaagagattgagaag

SEQ ID NO: 98129 - DNA, 194 bp, Homo sapiens
cattaaacaagtagtttcaaccgctctgtcacccaggctggagtgcagtggcacaatcacagctcactgcagcctcaaactcccaggctcagcctcagcctctgtagtagctaggaccaccggcacgtgccaccatgcccagctaatttatttttcagagacagggtctcactatgttgacgtcgacgcggccg

SEQ ID NO: 98130 - DNA, 100 bp, Homo sapiens
gtcaattttggcttttgttgccattgcttttggtgttttagacgtgaagtccttgcccctgcctatgtcctgaatggtattgcctaagttttcttccatg

SEQ ID NO: 98131 - DNA, 153 bp, Homo sapiens
gcagaagaagcagaagcagaagcagaagcagaagaagaagaagaagaagaagaagaagaagaagaagaagaagaaataaagtattgatatttccatgtgaccagaaacttgatctaaaaattttaaatataattgaagacgtcgacgcggccg

SEQ ID NO: 98132 - DNA, 183 bp, Homo sapiens
caaaaattcagattttatttttcgtctcttcgaagacaagattaaggccttcagcatggcatccaaggtttgttttttgttttttgagatggagtcttgctcttgctgcccaggctggagtgcaatggcaccatctcagctcactgcaacctctgcttcccgggttcaaggtcgacgcggccg

SEQ ID NO: 98133 - DNA, 336 bp, Homo sapiens
  misc_feature (1)...(336): n = a,t,c or g
tctgacgattcgaattaccggaaacaaacaacaatatgaaggagagagggaagatgtagtgttgattccaagtttatattctgacaaactagaagaagatgaataaaagttgaaaactgggaaagagagttttggggtaagatttgagtttgaggttatgaaaggatatgcattcaggttgaaatggtctgagacagaaaggactacagagaagnttttntttttattttttgtctttttcttagcttcttcttctttcctttctctttttctcttttttcttccttgtttttttttttttttttcttttttcttttctttcttttttttttttcg

SEQ ID NO: 98134 - DNA, 190 bp, Homo sapiens
cttatgactgcacatacagttaatctgcagaaagaagtcatagattttttttttcttttttttttttttttttttttttttttttttttttttttttttttgttactataggcttcgcggctgggtattggacatgtgaactctggtattttgagacaccccctgagtgtgattattggggggggggatc

SEQ ID NO: 98135 - DNA, 108 bp, Homo sapiens
ctgattcaagcgactctcttgtcggagcttcccgagtagctgggactataggcgtgagccaccacgcccagccaacttttgtattcttagtagagacgggatttcacg

SEQ ID NO: 98136 - DNA, 131 bp, Homo sapiens
aggaaaagggcatacaggactaggaagcagataaggaaaatgattatgagggcgtgatcatgaaaggtgataagctcttctatgataggggaagtagcgtcttgtagacctacttgcggtcgacgcggccg

SEQ ID NO: 98137 - DNA, 319 bp, Homo sapiens
ccgggttcaagcgattctcctgcctcagcacctcgagtagctgggactacaggcgcgcgccaccacgcccagtaagaggaaataactctacattcaaatttgagcagggcacttggtgacctacttagacatgacattccttggcctccctttcagcaagatgagaaaactgaggcacagagaggtgaaataaggaatgaaatattactggatgaaataattatactgatcctagccttattttaaaaggtttttgctaaagctctactagactggaacagaacaataggtggtaaatactccattcctcagtgagatg

SEQ ID NO: 98138 - DNA, 340 bp, Homo sapiens
cttgaacccaggaagcgcaggttgcagagagctgagatcacaccactgcactccagcctggactacagagcgaggctctgtctcaaaaaaaaaaaaaaaaaaaaaaaaaaaaaaaaaaaaaaaaaaaaaaaaaaaaaaaaaaactttttttgggggggggcccctttgggaacgggaattccttttagggaatttttgggaaaaaaaaggggggggggcaaattttttccccttggaaaaccccaatggcccccaattaaaaacttggggaaaaaaagcctttttcccaagaaagggggggggccccttaaacccccctcagggtttttaccagggggcg

SEQ ID NO: 98139 - DNA, 335 bp, Homo sapiens
cacacatctagcctgattggcaaattggttttttttatacttcaaattctactcatgattggactgtttctcaccattccactgctacacctctgatccaagcaaccatcagctctgacctggcatactacaacagcctcctaacctgttcttcctgcttctgacctcactacctccctcgcaggtctattatccacagaccctttaaaagtcatagtcctgagccgggtgcggtggctcacgcctgtaatcccagcactttgggaggccgaggcgggtggatcacctcaggtcaggagttcgagaccagcctgatcaacatggagaaatccctt

SEQ ID NO: 98140 - DNA, 121 bp, Homo sapiens
ggccaagatgacaaaaccccatctctactgaaaatgcaaaaattagccagatgtagtggcaagtgcccgtaatcccagctattcaggaggctgaggcaggataatcggtcgacgcggccgt

SEQ ID NO: 98141 - DNA, 131 bp, Homo sapiens
gtcaccctgaagtcgatattcctatcctaccaggcttgggaataatctccgatattggagcttactactccggaatttcagaaccatttggatacgtaggcatggatgtgagctatgatcctgtaagactg

SEQ ID NO: 98142 - DNA, 365 bp, Homo sapiens
  misc_feature (1)...(365): n = a,t,c or g
ggtcatagctcattgcagccttgaattcctgggctcgagcgatcccccgaaatatatttattccatgaataacaaacaactcctagatccttgcttctcaaagtgtggtcttcagatatgcagcatcagcagcatcgggaggtttgttagaaacagaatctcagccttctgcggccggcaccgcctcggctgcggttccttccctcgaagcccagaccccagctgccttcaggccgaccccgcctggactcgcgccctcctctccgccagctccaggccctccggcgcccacgggaaaagtttgcgggaggcattttttgcgttcggagtcgagcgcttctgggccactccgggccctactcagn

SEQ ID NO: 98143 - DNA, 115 bp, Homo sapiens
  misc_feature (1)...(115): n = a,t,c or g
attactctgaacgttgtangagggtaaaatagagacccagtaaaattgtaataagcagtgcttgaattatttggtttcggatggtttctattaaactatgcggagcacaggtgag

SEQ ID NO: 98144 - DNA, 344 bp, Homo sapiens
catgcacacacacacacacgggcacacacaggcacacacacacacacacacacacgcagtggctatggcaatatatgtggtggtagtttaatataaaaaaaatcatgtgttgggtaattttctatatttttttgactattggtatagagagagatctcatattcatattttttaaaagagttttttatatacactcttatgtgtctactatatatatataacttgtgtgtggcacggtctgtgtatattgatgcaaagtgtgtgtatgtagtgtgtggcaaagagagttattctaagtgttaaaatgcgcgctaaacacattctatgtagaaatcggtgtgtaa

SEQ ID NO: 98145 - DNA, 364 bp, Homo sapiens
ttataataagaaaattggtggcaaaattcaaatcttttaagtacttgattcattttttatatcaagatagtcaataaatgtattacatattaggttttttctctcttgctattagcaatacttagtttaaacacataaatgaggcattcttttaaaatccaagtgtttgctatcaaagttgttttttaaaaaaaatctagtgattattcctctagcttgtaattaagcaaaactttgatgtattaaaataaccttctccaggccaggcgcggtggttcatgcctgtaatcccagtactttgggaggccaaggcgggcggatcgcgatgtcaagagatcgagaccatcctggccaacaaggtaaa

SEQ ID NO: 98146 - DNA, 328 bp, Homo sapiens
cggaatggtctcgatctcctgacctggggatccgcccgcctcggcctcccaaagtgctgggattacaggcgtgagccaccgcacccggccgaaacaaaatttttaaggactttatacctagtaaaaggtgatcagtagttagtgtacacaacttcaagtgtactttgatatacaagagtatttccaaaaagatgaggataactgaaattttcataaattcatttctcaactgtttaacatgctcagttgattactgaatatttctcatttgattatattcagagatttggggagttctttttttaattaatttctctccctagagaaa

SEQ ID NO: 98147 - DNA, 335 bp, Homo sapiens
ccaggatggtcttgatctcctgacctggggatctgcctgccttagcctcccaaagtgctgggattacaggagtgagccatccctgttttaatccatctgacatatttcttctgattatgtagctctcttagttcaagctttcctgtaggtgacccacagtccctgaggtagtcttttacttagctgcgccttcacttagttgtgggttaaatagattatatgtcaattgtttttatatcattcgatattttctcatcatttcgcgagctttgttatttaccttccttacatgctgcttctccacatttgacacctgctgtcataattaatatgcc

SEQ ID NO: 98148 - DNA, 405 bp, Homo sapiens
ctgtcacccaggctggagtgcactgggacaatctcagttcactgcagcctgggtgacagagtgagaccctgtctcaaaaaaaaaaaaaaaaaaaaaaaaaataaaaaatgaaaaagaaaaaaaattttttggaaaaaaaaaacccttaaaaaaaaagttacgggccgatttaattttgaaacccaaaaaaaaaaattttttaaaaaaaagggaatggaaaaaaagggaaaaggggggggaccccttttggaaaaataaaccccaggtaggaaaaaccgggaacaatttaaacctgggccaaaatggtctcggaaagggacccagtgatttaaaaaaaaacaccccggaaactaaattaaacttggttcaaaaaaaatttcaaatttttttttaaaaacttttttt

SEQ ID NO: 98149 - DNA, 92 bp, Homo sapiens
actggcctgtaatcccagctacttgggaggctgaggcaggagaatcctctgagcctgggagacagaggttgcagtgagccgagattatgccc

SEQ ID NO: 98150 - DNA, 335 bp, Homo sapiens
tctcaatctcctgaccttgtgatccgcccgcctcggcctcccaaagtgctgagattacaggcgtgagccaccatgcccggcctgatacttttgcttttcttattgaggtataaaatgtaagcaccttaaaattcccttcccttatatgaacactgcattttgctggatttttcagacacttaatttcaacaaccaagtgaataactcttaacatggaaattagagcttggtcccagtgactcagagctaaggctaatattgagcctgcagaagaaatttaataacggccttgttagttttttctggggagtctctcctgcagatgtcccagcctg

SEQ ID NO: 98151 - DNA, 322 bp, Homo sapiens
tgagatcgtgccactgtactccagcttgggcgacggagcgagagaccttgtctccaaaaaaaaaaaaaaaaaaaaatttttaaaaaaacctttaagcatattaaaattttaaaaattttcaaaggattttaatggggaaagggtttaaaaatcttaaaaaaaaaagtggtggtttaaaaaaaacccacttttaacgggggttaaaattttaaccccgggaatcctctaatttcccaagttctaaaaaccccccagaacaaaaaacaaggggttggtccttagggaaaaaaattttttttcccttaagggtataaaaagtcaa

SEQ ID NO: 98152 - DNA, 143 bp, Homo sapiens
agagcgagactgggtctcaaaaaagaaaaaaaaaaatcctatgctggccaagggggggggctcacaatggtaattccaatattttggtaggctgaggcagggggattgttcaaccccacccgggacaacatggtaaaacccct

SEQ ID NO: 98153 - DNA, 388 bp, Homo sapiens
ttatgtgttagttttaaaatcatgttttgttggtgacatttttcttcaataaattttattcaaaagatagcagcagaaaacttaacgtcactgactttaatacctaataaggcattccaactaaataagaaaaccccaaattctttacagtcctcagagttctgaaaatatgcagcatttacatatttctgttttaatgggtgttacaggtaaacgagggaaatttatggatatcttagatgtgacggagcgatgtcgattcagtctaaaaaaatgcacaggaattcaagaagacctaaataaatgggaaggcatcccatgtctgtggatcataagacttaatactgttaagatggcagtattctccaaattgatttgcagatttagt

SEQ ID NO: 98154 - DNA, 333 bp, Homo sapiens
ctagaactgcattgcattgaattaaatgggaattatcttcaaggctgcaaagtgttgagttgcaaggaaaggaaacctggtttcctttcttgtcatattttatccactgtttgacattgaagaagtcattgaacctctttgggtcttaatttcttcatttgatgaaggagagaaggttgaactagaatttttttttttttttttttttaaaaaaaagtctccctttgtcacccaggctgaattccaatggcccaatctaagttcactgaaacctcaacctcccaggttaaagcaatttttttgcctgggcctcctgattacctaaaataacag

SEQ ID NO: 98155 - DNA, 330 bp, Homo sapiens
ggctttgttcatattttcttattctttttgctttgtctttgttggattgggttaagtcaaagaccttgtcttcgagctctgaatttctttcttctacttgttcaattctattgctgagactttccagagcattttgcattactagaagtatgtccaatgtttcctgatgttttaactgttttttctttattctatctatttccttgaatatttctcccttcacttcttgtattgatttttggatttccttgcattgggcttcacctttctctggtgcctccctaattagcttaataactaacctcctgaattctttttcaggttaatcag

SEQ ID NO: 98156 - DNA, 332 bp, Homo sapiens
  misc_feature (1)...(332): n = a,t,c or g
gtcattcagtactcatgatgttgtactataaaagatttctacaataagaacagacagaactccagagagaaaacagaagataatccaaaacaggtttagaatgaacaagatttgaaggattacgaggattccagaattacaaatatttgaaggataaaatagtgagatatttatttgctttatnnnnnnnnnnnnnnnnnncccttcattttaagtttacctgaaagggtaaagcaactgcaggtctggccatcaatttatggaaaggttcatgaaactttggggaaaaaatgccctgggataaggttccatagggatcaaaggcttgctct

SEQ ID NO: 98157 - DNA, 151 bp, Homo sapiens
gcctgtagtcccagctacttgggaggctgaggcaggggaatcgcttgaacccggtaggcagaggttgcagtggcccaatatcgggtcactgcagtctatacttcgtgacatcgattggttatgttaccttaccctctgtagacgcgtgcga

SEQ ID NO: 98158 - DNA, 355 bp, Homo sapiens
ctttagtgtctttagtaaagagggggtttcggcgtgttgctcatgctgttctagaactcctgacctcatgaaccgaccaccttggcctaccaaagagttgggattacatgcgtgaaccaccacacccagccggtgattatgtttccacatatgacatttgattacacgaacattctgaccatagcacttcttaccgcttagacatataggctaagtcactatactaactttggctatccctatggagtgttgctggtatttgtattgcatggtctttctggccatgccttgtacttggacactttgagggtggattccagatttctaccatcatagatgctgtcactcactgttt

SEQ ID NO: 98159 - DNA, 141 bp, Homo sapiens
tgggtataatactaagttgagatgatatgatttacgggggaaggcgcttgtgaagtaggccttatttctcttggcctttcgtacagggaggaatttgaagtcgatagaaaccgacctggattactccggtcgacgcggccg

SEQ ID NO: 98160 - DNA, 419 bp, Homo sapiens
ggcacgagattcattcctgcatgactcccagacctccttctgcttctcagactctattccgacaccctccaacatggaggaaacgcaacagaaatccaatctagagctgctccgcatctccctgctgctcatcgagtcacggctggagcccgtgcggtacctcaggagtatgttcgccaacaacctggtgcatgacacctcggacagcgatgactatcacctactaaaggacctagaggaaggcatccaaacgctgatggggaggctggaagacggcagccgccggactgggcagatcctcaagcagacctacagcaagtgtgacacaaactcgcacaaccatgacgcactgctcacgaactacgggctgctctactgcttcaggaaggacatggacaaggtcgagacattcctgcgcg

SEQ ID NO: 98161 - DNA, 417 bp, Homo sapiens
ggcacgaggggcgcctgcaatcccagctactcaggaggctgaggcagaagaattgcttgaacacgggaggtggaggttgcagcgagccaagatcgcaccactcctttccagcctgggtgacagagcacggcttcatctcacaaatctcactaaagcctctttttatttctcatcccgaaccctttctcctttaaggggggcttgattgaatacaacccctcgctgcggtttctctccttctacctggatatgacgtgcgccctctgtaatgcctgcctccagctctgtctgccacatatcgacccgccctacctctcatctctggcgtctctcttttcagagccgtcacgatccatgtcctcacgcacctacgccacgattctcggatagggtctactcttaggcccatcgtcttcc

SEQ ID NO: 98162 - DNA, 286 bp, Homo sapiens
ttgcagagacggactcacctacaatgactttctcattctacctgggtacatcgacttcactgcagaccatgtggacctgacttctgctctgaccaagagaatcactcttaagaccccactggtttactctcccatggacacagtcacagaggctgtgatggccatagcaatggcgcttacaggcggtattggcttcatccaccacaactgtacacctgaattccatgccaatgaagttcggaaagtgaacaaatatgaacagggattcatcacagaccctgtggtc

SEQ ID NO: 98163 - DNA, 326 bp, Homo sapiens
  misc_feature (1)...(326): n = a,t,c or g
cgagctttacgcacgactcgactgccaagcacagctcacctagcggcaatggctgcaggaagaagcctatatcacaaaggaacagaagtattcattcctgcatgactcccagacctccttatgcttctcagactctattccgacatcctccaacatggaggaaacgcagcagaaatccaacttagagctgctccacatctccctgctgctcatcgagtcgcggctggagcccgtgcggttcctcaggagtaccttcaccaacaacctggtgtatgacacctcggacagtgatgactatcacctcctanaggacctagaggaaggcg

SEQ ID NO: 98164 - DNA, 378 bp, Homo sapiens
  misc_feature (1)...(378): n = a,t,c or g
ggcacgaggagagctagcaccatgagcttcaataccctgtctctactaaaaaaaaaaaaaaaaatagagaattaaaattagccaggcgggggggggcatgcctgtaatcccagttactcgggaggctgaggcaagggaatcggttgaacccaggaggtggaggttgatacctaaagcgcctttccgacgaggtcaccagcctcaccctgaaatcgggacccacgaccatgaccagaccttgggcttccaagaggcttgtcctacatgggggtataagcggcgcgtacctcggacatatgttggcgcaagtagggggaccccctgatcgtgagccacacagggaagccccggaccggcgcgctaagcgtagttaaaacn

SEQ ID NO: 98165 - DNA, 404 bp, Homo sapiens
ggcacgagtgaaataattttgccctaatttaccttatttgcaactgcagtatattttcctatgtcagttgttttcttgttgtccagtggctccaatctctgaatgtgctttgactatactacctttattagtacctagtctctgctttctggaataattgttacctgcatctgagatttgcagataagagagaatatttgcagaaatcttacccactctctaaaactctgctctaggccaggcggggtggctcatgcctgtaatcttagcactttgagaggctgagatgggcagattgcttgagcccaggagttcaagaccagcctggacaacatggcacaacctggtctctacgaggaacaaaacaaacaaaaaaaaaaccacaaaaaaaattggctagatgg

SEQ ID NO: 98166 - DNA, 372 bp, Homo sapiens
ggcacgagagaccatcttctgcttctcaaactctattccggcgccctggaacatggacgaaacgcgacagaaatccaatctacagctgctacgcatctccctgctcatcctcctttacagaactagattaacgttgccttgtatcactcaactccacatccttcagacatataaggtcaatgcaagatgctcccattttcatagttcctctacctgtggacctttatattcttgtacactatatgtctctctcacaggcctagacatgaaactctgccattctactctactcaaacaaaactccgcattaatgagtttattgaagattcaggttaacctgaatcaagttagcccagtcttcaatgctcactg

SEQ ID NO: 98167 - DNA, 347 bp, Homo sapiens
ggcacgaggataataagacagaatcaaaaagttctggcattgattcagtatggtggtgagggagagaaagaaagaatgtatacattttgtgaaatgagtaatataaaagtaagagcagattcaaaatgatattttttctttgataactttcttctcctaacttcaaaattaattttcctgagtgttaatagtgctggttgttaaatgagaaaagttttgaagtggttgatgtttcgattcttttaccacattttttaattgtaattttaatttttttttgagacagcgttttgctcttgttgcccaggctggagtgcaatggtgtgatctcggctcaccgcaacctc

SEQ ID NO: 98168 - DNA, 416 bp, Homo sapiens
  misc_feature (1)...(416): n = a,t,c or g
ggcacgagctcttgaacccagaaggcgaaggttgcagtgaaccgagatcatgccattgtactctagcctgggtgacaagagcaagactccgtctcaaaaaaaaaaaaaaaaaaaaaaaaaattaaaaccgggaaaacggggtttaatggggtccctaagccggttttaaaccccggggcctaagggaatttccccccttggccctcaaaattggggggaataccggggggaaaaagggcccctggcccaaaaaacctaagttttttaaaaaaaaatttgaatttttttggtatttttaagggccctgggcgggtttttaaaattaaccatacagggtgcccaccctaatttttcccaattttaaggcttttattcccggtttcccccaaaatttggtttcccggatttcaagttcn

SEQ ID NO: 98169 - DNA, 382 bp, Homo sapiens
ggcacgagcataaccctgtctctactaacaatacaaaaattagccaggcgtaatggcgcgcacctgcattcccagctacttgggaggctgaggcaggagaattgcttgaactggggaggtggaggttatatactgttgccatcaatagcctgctgcatggactgaaataatatgaggacatttatggaatgtcacgggttacttgtgactcattaggtggatacgcctacatcttaattgtaatagtatgataagattcgtacttggagtatctagtgtctttctgatactcgtgattctgcacatgtttatgttgatagtcgtgtgcctgtcgcttttctatagactaatatatcttcgctatattgacggcgtaggttcg

SEQ ID NO: 98170 - DNA, 375 bp, Homo sapiens
ggcacgagggggtttcaccatgttggccaggttggtctcgaactcccgacctcgtgatccgcccgcctcggcttcccaaagggctgggactgcaggcatgagccacctcacccagccagaataatacttttattattattattattttgagacaggggctcactccatcgcctaggctgaagagcagagccgtcctggacacgcaccgattgcgtttcctatgtcagctctagaaatccagtgacgtaactactcaaaccattgtgagtacagcactgatgactgcgtccctaatgaaattacatgcctatggagacatgtatgcaactctgatagtattagtaaccgcattggcgtgtcctaacgagtctatcg

SEQ ID NO: 98171 - DNA, 382 bp, Homo sapiens
ggcacgagctggaagaattaataaagatctttttgggttttttttaaggggaaccgggtttcccctgggtaacccaggagggcctggatctccggacctcggaatctgcctgcctgggcctcccaaagggcgggaataacggggggaacctaccggccctgcccgggggggccccataattttaagggccccaaggattttggaaaaagaaccggaccccgggcttaaactaaaagccccaagttgcctaaccctttaccaagaaaaccagtgggtcctttaaaccgttaaaccccacctttgcctaaccctttcaaactacaaagccctcggaagaaccattttctagaataaaacggttccatggactttgaaaacctgg

SEQ ID NO: 98172 - DNA, 94 bp, Homo sapiens
ggcacgagatcgcaatggcattcctaatacttaccgaacgaaaaattctaggctatatacaactacgcaaaggccccaacgttgtaggccccta

SEQ ID NO: 98173 - DNA, 344 bp, Homo sapiens
  misc_feature (1)...(344): n = a,t,c or g
ggcacgagcatgagcctcactcctgcagcatgaactattgttgttgttagttcttgttattgtagggggctgggctgtaggattggaggtatgaagatgcccatccaataaggtttgtggacatttgggcaggtgagggagtacagctggggtcatttttaggaattctgtcttgggctttaaaatggctagtcttggctgggcatagtggctcatgactgtaatcccagcactttgggaggccaaggtgggaggattgcttgaggccaggagttttagaccagcctgggcaatgtagtgagactctgtttctatttaaaaaaatacatatatatatatatatn

SEQ ID NO: 98174 - DNA, 347 bp, Homo sapiens
ggcacgagagcaccctcctagaaaccgagcccagagagctgccttgccccttctgccatgtgaggacggagcaagacggcaccatctatagaccaggaaacagcccctccccagacaccgaatctgctggcaccttggactcccagcatccagaattgggagaaataaattcctgttgttgataagccactcagtgtatggtattcttttttttttttggaaacggagtctcgttttgtcacccaggctgaagggcaggggcccaatctgggttcactgcaagctccgcttccggggttcccgccattcttgggcctaaacctccgagaaagctggaactacgggcg

SEQ ID NO: 98175 - DNA, 352 bp, Homo sapiens
ggcacgaggtgttggccgggctggtctcgagctccagacctcaggtgatccgcctgcctcagcctcccggggtgctgggattacaggcgtgagccaccgtgtccagctcctgggtgacagagcgaaattcagtctcaaaaaaaaaaaaaggggcattatacttccaggggaattttactcacccttaaaaaaaaggtttactttaaacaccccagataacccttaaaaccttcccattaggtgaagtaggtcacccccaaagggttaattccggtatgattccctttatggggttccaaaaataagctacctcttacaaacggtaaaatggggtttacccgggaggagtggg

SEQ ID NO: 98176 - DNA, 342 bp, Homo sapiens
agcaccgaatttctggcacttttatacaatagctacccgagcggaatgcaggacttccagcgtgactcactgaatcctattactcctgtactgaagtgatcgttccacctcagactcctgagtagtaaggactacaggtggcgtatccccacacctggctaatttatggattgctttgtacagatggggtctcactatgttgcccaggcttgtcttcaactcctagactcaatccttgtctatgttgtccaggcttgtcttgaactcctagacttccaatcctcccagcttggccacctaaagtgctgggattgtaggtgtgaaccactgtgcctggcggca

SEQ ID NO: 98177 - DNA, 330 bp, Homo sapiens
ggcacgagaagagcaaatgtacttggtgtgctgggtgattgcaattctgcttcaccattttccggagggaggccccatagcgggtcccatatttactgatgattctgactttcttggtgcatttggccatgtcaccgcaaactaagtctaagcccagagagctatgtgtttttttgtttgtttgtttgtttgtttttttaagtagagatgaggtctcgctgttgcccaagctggtcttgaactcctgagctcaagcaatcctcccgcctcagcttctcaaagtgctgggattacaggcgtaagccaccacacccagccttatttctaatt

SEQ ID NO: 98178 - DNA, 324 bp, Homo sapiens
aaaaaattagtcggtcgtggtggcggacgcgtgtattcacagctactcggtaggttgaggccggacaatggggtgaacccgtgtggaagagcttgcagtgatccgagtttgctgccttgcacttcagcctgtttgtcatagctggacttcagctttcttactacacaatatatcaggaggttaggattatagagttgatttttctgattcgataatcaatcatcttgcattgcatttctggacagtttcttcttatcacttaaactacccttataactttccaaatactttattaaattctgaattggtttttatctgttggct

SEQ ID NO: 98179 - DNA, 357 bp, Homo sapiens
ggcacgaggttgcagtgagccgagatcacgtcactgcactccagcctgggcaacagagcaagtctcaaaaaaaaaaaaaaagggaagggaaaaaacttttgggcaattctttttttgggtaatttaatagggaaagaggaacccgttttaaaaaaaaaaagggctttggattggcttttgttaaaatttttgctgggtggttaagggaattaaaaagaaatgggtttaaaggcctttaaggggggttaaaccctaaatccccagcattttgggaggccagggcaaaaaattcgttgaaacccgggacctaaaaaccacctgggacaacttagggaaacccccccctttatatttttg

SEQ ID NO: 98180 - DNA, 351 bp, Homo sapiens
ggcacgaggcagctgactttagctcctaaaaacagagtcaacctatcctttgaagatttgaagccaggcattgacttctgtctagctttgtaagtcctagatggcatcttcttccaatataaagctgttttgtctgtttttttgtttgttgattgattaattgtggcccaggctggtgttgagctcccggcctcaagtgatcctctcgcctaggcctcccaaagtgctgggattacaggagtgagccactggcccagctgaaaacctgctgtttcatgtaaccaccttcatcaattatcttagatctttccaattgacttgctgcaccttctacttcagcatattctgttt

SEQ ID NO: 98181 - DNA, 337 bp, Homo sapiens
  misc_feature (1)...(337): n = a,t,c or g
ggcacgagaaaacaaaaacaaataatcccatcaaaaagtgggctaaggacatgaatagacaattatcaaaagaagataatgataataaaataaatggttggccgggcgcggtgtttnacacctgtactcccacaagtgctgtgattaccggctccaacctacgttcccacccaggacacacagcgggatattataaacttacatatcatcactggtatcgcgatcattatattaaagatgacaaattcacaatcaaagcttggagaagcatgtcaataacaggaactcaataaaacacagcattctctataaagcactccgtcactgacctgattgg

SEQ ID NO: 98182 - DNA, 387 bp, Homo sapiens
ggcacgagagcatttgatgctgctataaggaagatggtttcccattaataaaagtggcactcagtttactttgtcttcgccagacaggcaaagggtaaattaaggcggttacctgtggtgtcccagctctttcccaaggctggactagtgtgagccgagaaccaggcaggactcactcacaggtccctttctctgctacttctgctctggttttatgcgaagccctatttcccagctgcttcgggtaaacaaggacttctgtgttgaaataataaccacttgggctgtgcgcggtggctcacgcctgtaatcccagcactttgggaggccaaggaaggtggagcatctgaggtcaggagttcgagaccatcctggccaacatggcca

SEQ ID NO: 98183 - DNA, 349 bp, Homo sapiens
  misc_feature (1)...(349): n = a,t,c or g
ggcacgagatgatctgtattttccttgttctctgtcacattacactagtacctaaaacagagcctgacagagggtgggccttaaaaaatgtttgcaaagatgaatagacaggcataaaagccctgcaagctactgaagtggtggctggtgggttgngngangnnnnnnnggnnngnnngggggngggggnggggggggggngggggagggggggggggggggggggggggggggggggggggngggggggggngggggggggggggggggggngggggggggggggggggggggggggggggggggggggggggggggggggggggggggggggggggggggggggggg

SEQ ID NO: 98184 - DNA, 347 bp, Homo sapiens
ggcacgagcggcacgagggtttcgccatgttggtcaggctggtcttgaactcttgacctcaggtgatcctcctgcctcagcctcccgaagtgctgggattacaggtgtgagccaccacacccagcctactaatttttaatttttttgaagggactggggtcgtgactagggtgctgtatttgacccatcgggaggcgggtggaccgtggctagctcgaaggattgcagcgctttcggacgtagctcgtaagtccgggtgggagcgtggagaagcggagtgagacgtggcgtctaggtgtgcgcggatctgtcgggtgcgggggggggatcgcgctcggctgagttgc

SEQ ID NO: 98185 - DNA, 350 bp, Homo sapiens
ggcacgagagaagctgaatggcaggggctgaataagaaataaaaaatttgtcacaggccaggcacaatagctcacgcctgtaatcccagcactttgggagaccaaggtgggaggattgcttgagccttgagtttgagaccagacagggaaatagtgtatgattgttctctttatttattagtatgattactattatattgatttgattagatgttgagctatataatggggccaggttgaggttatttatgttgtattgaggaagtcttgctttgatgttcatggatgtgctagaatagttcggttttagagcttactggtgtatatgcggattatttgtaaatgcatgg

SEQ ID NO: 98186 - DNA, 323 bp, Homo sapiens
ggcacgagtgttgaccagggtagtctcgaactcctgacctcaggtgatcctcccgcctcggcctcccaaagtgctgagattacaggcgtgagccaccgtactcagccacctctcactattattcaactttatctgggatactgctgaggcaggagaatggcggaacccggaaggtggagcttgcagtgagccaagattgcggcacgccagcctgggtgacagagcgagactccgtctcaaaaaaactagaataacaacacaggaacacaaaaaaaaaaaccagccgggggggattccccaaagacagggaacttggcgtcccc

SEQ ID NO: 98187 - DNA, 339 bp, Homo sapiens
ggcacgaggcggatgcttcccgcccaaagaaggaaccagaagcaggcaggatggggaagcagctggtggagaagccaaattgtttccttaagagaaagggatttacgggaggtggaggttgcagtgagccaagatcgcaccactgcactccagcctgggcgacaagagcaaaactctgtctcaaaaaaaaaaaaaaaaggagagagaaatccggatttcctgaccctccaggaggtcggtggggaaattttctttggcccaattttttccttggccatggggtacccccttattccaaagggcccaaaccctccgggctggggtttttgactcggctcc

SEQ ID NO: 98188 - DNA, 350 bp, Homo sapiens
ggcacgaggccgggtgtggtggggcatgcctgtaatcccagctacttaggcgggtgaggcaggagaatcgcttgaacctaggaggtggaggttgcggtgagcctgtgtctggagttggttccttccgataggtttgtggtcttgctgacttcaagaatggagccacggaccttcacagtgagtgttacagctcttaaagatggtagggacccatagagcgagcagtagcaagatttattgtgaggagcgaatgaacaaacctttcacagcgtggaaggggacccgagcgggttgtctctgctggctggcgtggccagcttttattcccttatttgtccctgcccatgtcg

SEQ ID NO: 98189 - DNA, 401 bp, Homo sapiens
acagctatgacataacgatatgacatgatcacaaaactatacgactcactatacgtaattggccccatttggccacgaacttggcacgagtgaatctgcacatcaaactgataaccgccaccgtttagagggctaccagaaacgcctggatgcctccggcctggagagggccagctaccccctggcagcagagttcaaggtaggaggcagaggctgcagcagtcaacccctcacactttgtgggtacccttaggagcagaacactggtcagggcttggagagtcttagaggtaggagacagagaccagatagggtggcacaatggagccccagaagacacacaccctgctattgtcaccctgtccctagatggacaaggcaggccgccccacctaagaaag

SEQ ID NO: 98190 - DNA, 366 bp, Homo sapiens
ggcacgagaagtggggtttcctttagaaaaacccctatacgatggggtgatcttttaagtttgtgctttttatgagcaacacagaaaatgctttaaaaacagttcagtaagactgaagaaaagatctgtaagcataaaacaaataccatcatcattaccaaaaattcagtgcttaaaatatagcttgagaatgtgagtatttatttccttattcctaagattttgcttttgaatacactatctgccggacgcggtggctcatgcctgtaatcccagcactttgcgaggccaaggcgggcgaatcacaagatcaagagatcgagactatcctggccaacatggggaaaccccatttctactaaaaaa

SEQ ID NO: 98191 - DNA, 333 bp, Homo sapiens
  misc_feature (1)...(333): n = a,t,c or g
ggcacgagattaatctcatgatcaattaactaaaaaataccaaaatcttcagcaacttctacatgacctgtgttgagtttcagtgatatcctcagcattattgagaaatgggttgagggagaaaaatggcttcaccggaaactgggtcaggtacttggttgatgggtggggtgtggngtgtttgtttgttttttgtttgtttttgagacagtgtnactctgttgcccaggctggagtgcagtggcatgatcactgctcactgtaccctcaacctcccagccttaagcaatcctcccgcctcggccttccaagtagctgggactacaggtacat

SEQ ID NO: 98192 - DNA, 321 bp, Homo sapiens
ggcacgaggtttatagaaaatttcaatatacaggccaggtgcggtggctcacgcctgtaatcccagccctttgggaggccaaggtgggtggatcgcttgagccaggagttgtggtcccacctacgcacaaggctgaggtacgaggattgcttgagccccaagacggcgcacggacgaaggagccctgagctagagcctccttataagcgacatctcatccgactatttacatgatcagagcactacagacgtagcgacccccagctcataagaagatatgactataagatattctacgctacctatttatccgaactcacc

SEQ ID NO: 98193 - DNA, 316 bp, Homo sapiens
ggcacgagcagtagtgggatcgcgcctgtgaatagccactgcactccagcctgggcaacatagcaagacactatctctaaaaaaaaaaaaaaaaaacaacaacaccaaaaaaaaaaaacagtgggccataaaaccagaaggggggccccttaaaggggccccaaaactttccgggaggctgaggcagaaaaaaaatttggccccaaaagtcaaaagttgcagggacctagaaaaaggccccggaccccaaaccgggccacaaaagaaaaaccctgcccctgggggggaaaaaaaaacctggggccctaaccgaaac

SEQ ID NO: 98194 - DNA, 331 bp, Homo sapiens
ggcacgagatggtctcgatctcctgacctcgtgatctgcccgtctcagcctggcaaagtgctgggattacaggcgtgagccactgtgcccggccaggtttggtctttccacatagtcccatattttttggaggctttgtttgttccttttcattctttttttttttctaattttgccttcctgttttttttcattaagttgatcttcaatctctactagaagtacaaaaaattagttaggcatcggggcaggggcctgaagtcccagttacttgggaggctgacccaaaatggcgcgaacccgggaggcggagctagcagtgagccgacat

SEQ ID NO: 98195 - DNA, 333 bp, Homo sapiens
  misc_feature (1)...(333): n = a,t,c or g
ggcacgagactggagaatcgcttgaacacgggaagcagaggttgcagcgagcctagaccacaccattgcactccagttcgggcaacaagatgaaactctggctgggcgcgggtggntnannnntnnanntnntnnnnnngnnntannnntttttntttttnnttatggtctttgntgtttanttnnatnnnttgntaatattggtattttgnnagtgaaataatttgttaaagnagggatttgaatgangggataggtataggggtttgagggtntgttaggtgttaattgatataggttaatatggatgaataggagaattaggaaggattg

SEQ ID NO: 98196 - DNA, 346 bp, Homo sapiens
  misc_feature (1)...(346): n = a,t,c or g
ggacccaagagacttttagcagtaatttttctctttttctcctgtcctttcttccttccttccttcctttctctttctttttcttttttcttcctttcttttttcttcttcctttcttccttcctttccttctctctctttctttcttgcttttttttttggttttttttttggttttgggaaaaaagggtttggctcggtggccaaaacgggagggcaggggcgggacctaagttaactaaaacctcaacctccggggtaaaagggattccccggcctaagcctccaaagaagctaggacaacgggcaccgtgaacaacgccgcggaaattttggaattttaaan

SEQ ID NO: 98197 - DNA, 367 bp, Homo sapiens
ggcacgagcttttttgttttttctactgaggtgggaggatcgcttgggcccagaagtttgagattacagtgagcaatgataatgccagtgcactccagcctgggtgacagagcgagaccctgcttcagtaaacaaacaaacacacattgttgcacaaccatcaccaccgttcatctctagaactttttgtctacctgtactgaaactctgtaccccttcagtaactccccattcctttctttccccagcacctggtgaccacttttgtattttgtttctatgaatttgactattctgggtactgcacatatgtgggatcttgcaaatctgtcccttttttgcctaccttatttcctggtacatagcg

SEQ ID NO: 98198 - DNA, 335 bp, Homo sapiens
ggcacgaggtggtgcacatctgtaatcacagctacttgggaggctaaagcacaagaatcgctggaacccaggaggtggaggctgcagtgaattgagattacaccactgcactccagcctgggcaacagagcgagaaaacctgatattgagagaagaatgtggatcttacagattcagacatgcctgggtttgaattctagctccaccaccttgggcaagtcccgtcacctgtgggccccattttgcacatcagtgcgatgcagcaatgacacctcccttgcaggcgatgcgtgaagaatgcccggcacagtgggcatcatcatttcacaaacacg

SEQ ID NO: 98199 - DNA, 331 bp, Homo sapiens
ggcacgagggtcgaggggacatatctggtcagcgttttgccatgttggtcaggctggtctcgaactcctgacctcaaggcctgccttggcctcccaaagtgctgggattacaggcataagccaccgtgcccagccacctctgaacactttatatagtatgtcttaggaacacagacatagcccggcgcactggctcacgcctgtaatcccaacagtttgggaggctgagtcggccggatcacgttagaccacgatgtaccgtctgaatcccgttaccactagggactctgaggactcactggccgttgctatgagcacactgaatcgcaag

SEQ ID NO: 98200 - DNA, 358 bp, Homo sapiens
ggcacgagagcctaggggacatatctggtcatcgttttgccatgttggacaggctggtctcgaactcctgacctcaaggcctgccttggcctcccaaagtgctgggattacaggcataagccaccgtgcccagccacctctgagcactttagatagtatgtcttaagaacaaagacatagcccggcgcagtggctcacgcctgtaatcccagcagtttgccaggctgagtcgggcggatcaccttatgtcaggagttcgcggcaaaaccccgttactactaaaaatacgggggattaactgggtgtggcggcgtgcacctgtaatcccagctactctggaagctgaagctggataatc

SEQ ID NO: 98201 - DNA, 334 bp, Homo sapiens
ggcacgaggtgttcatagaacgggtaattttaaaaaaagaaaaaagaccgcaacgagggatatgggaatgatgaaccaactatatatcataacaccacaagcagaaaccaattaaagagaaagctgacatacacaggagaaaatcaacaaacccaaaagttggttctgataaactctagtgctgcctgatgggttcatcttacctgctgcccagaaagcccaacacactgagaacagcaggttttttgcagcaaagaaagagtttaattaggccgggcatggtggttcacgcctgtaatcccagcactttgggaggccaaggcgggtggatcac

SEQ ID NO: 98202 - DNA, 372 bp, Homo sapiens
cttgaacccaagaggcagaggttgcagtgagccgagattgccccactgcactctcgcctgggcaaaagagtgagacttcatctcaaaaaaaaaaaaaaaaaaaacccttattggcaaaaggacaagggattggccccctttttgacccttacattttaaaccattttccaccacccgggaaaaaccggactatagggttgttggaatttaagcgtttaaaaagggggggaaggtttgagaaatttgccaaggatccccctgaggatgccctacttatttccaaaaggaaaaacagaaaaagggttagggccagtaaacaaaagggtaaaaatggggggggggttaagagaaaaaaaaaaaggaggaaaacac

SEQ ID NO: 98203 - DNA, 358 bp, Homo sapiens
ggcacgagactatctggtctttacagaaacagtttgtcaactccgtgtctggaggccacttggggctggcttaaagcatgacctaatcagagattcacgggtctcctcttcccttggaggtactctccttctccagtactgggccagctatgaagctaatgtctctcagctccaaacctacctgttgcatatactgtcaccagaaaactgattaaaagtccacgcccaggctgggcacagtggctcacacctgtaatcccagcactttgggaggccaaggcaagcggatcacaaggtcaggagatcgagaccattctgggttacacaagggaaccccgcggctatctaaaaacataag

SEQ ID NO: 98204 - DNA, 393 bp, Homo sapiens
ggcacgagccaaggtctccagcaccaccgttgcgaggtcgtctcattcttggggcttggactggaagggcactgtgctccctaaggccgcatggggttggggccctacaccctgagaaggggacacctggaccgtgggcagagcccgacccatagcaaggcctgggaagcagttttaggagaaacaggaagaggaaggaagttggggatgggcaaagaccgaggatggtgtggctctgatgctgagcgaagctataggctcttgttggataaaagcttttttaacagatgctgaaacattcaccttccatgcagatatatgcacactttctgagaaggagagacaaatcaagaaacaaactgcacttgttgagctcgtgaaacacaagcccac

SEQ ID NO: 98205 - DNA, 323 bp, Homo sapiens
ggcacgagtgcaaagatacttatttctcttttttactctagatggccctctacctgacccaagtatgatccgtggcagtgtgccaaaccagatgatgcctcgaataactccacaatctggtaaatagtgaaaaaaatttttttattttaaaagaatccccggtgtactgcaagataatacttgctacctgaacacccgctttatgccaacagcaagtgtcatgattacctgcccatagaggaagagggggtgaagagcaggttggctggcagatcacagggcaggtgacattaaatgatcaagtatccattaaaaaacaactg

SEQ ID NO: 98206 - DNA, 338 bp, Homo sapiens
ggcacgagcactattcacagacatgtatatcaaatatatatctgataatttaagcaaatagaaattctttgctcggaaatctttaagaatatgagaagaaattagcagcatatagtgtccagaaaaggtgggagagaacttcttaggtatggaaagtttatgtaataggtaatgtgtaactatttaccactaattctgtacctggggtaaaggtggtgttcaagaaatggagagccaggcctggtgtggtggcttatgtctgtaatcccagcactttgggagtccgaggcaggcagatcacttaaggccaggagttcgagaccagcctcgccaacacg

SEQ ID NO: 98207 - DNA, 357 bp, Homo sapiens
ggcacgagaaacgaccagaagttcagaattcaactgtggagttcattgcttcgtcagattacatgctgcgtcctcctcttcctcttcccttttgtttttttttgtttttttttaaaataaagatgggtgtgtcaccatgttgcccaggctcatgtcaaactcctagcctcaagcagtcctcttgcctcaatgtctaaatagctgagattacaggtgtgaaccattacaccagctcccaaaagacactcttaagagaatgaaaagacaagcaacagacggagagaaaatctttgtcaaggatatatctgaaagaggacttgtatttctagaatatagttttaaaaactctcacaactc

SEQ ID NO: 98208 - DNA, 339 bp, Homo sapiens
ggcacgaggaccttcggttcagggaacggacccaccaagcccgacctgctgcaggagctgcgggtggccaccgagcgcggcctggtcatcgtcaactgtacccactgcctccagggggctgtgaccacagactatgcagctggcatggccatggcgggagccggcgtcatctcaggcttcgacatgacatcggaggccgccctggccaagctatcgtatgtgctgggccagccagggctgagcctggatgtcaggaaggagctgctgaccaaggaccttcggggggagatgacgccaccctcggtggaagagcgccggccctcactgcagggcaacacg

SEQ ID NO: 98209 - DNA, 403 bp, Homo sapiens
agcttgaaccaggagacggaggttgcagtgagctgaaatcctgccactgcacaccagcctgggtgacagagcgagactccatctcaaaaaaaaaaaaaaaaaaaaaaaaggggggccctttaaaaggaacccttggggggcccaaatttaacgggggatggcaacgaaaaattttttcccaaaaggggggccaaaaaaaacccaacttgggaattttgggaaggaaccttaattttgggggggaaaaaaattggaacaaattccttacgaaaattaaagttttaagggaaaaaaaaaatttttaaggggaaaagggggaaaaacaagttgaaaagtttggttgttggaaatttttgtaaacgggaaaggatttagaaaaatttaaaccccggggctctttgag

SEQ ID NO: 98210 - DNA, 396 bp, Homo sapiens
tctagaccgacggccgccctttctgattagtaaacagttgaatcatggaaaaaaaaaaaaaaaaaaaataaatttattagagaaaaaaaatatataaaactatacgaaatgcacaaagacgataaaaaaaaaaaaggggggggtttttttttaaaggctccggggggggccctttttttgggggggcgtgcgattgttttttttttttctttggggggtttttttttttggggtgggtggtttttttggggggggcttttttttgggggggggaaatttggggggattccctccctaaagtttttcctttttttggggaaaaaattttttttttgggtgtgtggggggaaaacctggttgtttttcctggctgaaagaattttttccttagtgttt

SEQ ID NO: 98211 - DNA, 390 bp, Homo sapiens
agtctctctctgtcacccaggtggcacaatctccacccactacaacttctgcctcccaggctcaagggatcctcccacctcagcctcagcgtatgccctgctaatttttgtgttttttgtagagacagggtttccccttgttgcccaggcaggtcccaaactccagggcacaaactctatacccgcctcagcctcccaaagtgcagggattacaggcatgaatcactgcacctgaccccagctcattttcatttaactgccgaactatgtttcatagaaaggagggactggattatttaaatatatctttattggtagatatttaggtttgtttttctttctgttgtttttctattggtgaaacagatgcaatggacatccttgaatatg

SEQ ID NO: 98212 - DNA, 324 bp, Homo sapiens
ggcacgagtttataattatccttttctggggaccaacttataaagtaaaaaatacctggtggcattatctttgcttcagatgtattatgtttatggaattggaaatgtttgatttcttagtgtgtgtgtatcagtggattatgtagtttaaaatgtttgcatctgtattgcatgcataaacatgtccgtttccaagtgtggcctttaaatactcagggttttgtggtcgggcacggtggctcacgcctgtaatcccagcactttgggagcccgaggcaggcagatcatgaggtcgggagttcgagaccagcctggccaatatgg

SEQ ID NO: 98213 - DNA, 377 bp, Homo sapiens
ataaattccaattccctgattaaatctattttgttattaatcataacttgaaatcccttttcttttcttttcttttcttttctttctttctttcttttttttttttttttggaaaaagggccccggaggggggcccgggcccaaaaggggaaaccccatccaaaaaaaaaaaaaaaaaaaaaaagggggggggggaaaaaaaataaaacccaaaaacctttcagtcctttaaaggggccccggggccccccccggggaaaggggcaaactacacccaaagggccctaaaggggaaaaaagcggataccaaaaaaatcccccttggggggaacttttgggggaaaaacaggggagggaaaaaaggaaaacgggaaacc

SEQ ID NO: 98214 - DNA, 345 bp, Homo sapiens
cctaatttctcttaccctgtaaatttctgtgtgtgtgtgtgtgtgtgtgtgtgtgtgtgtgtgtgagagagagagagagatagacacagggaaagagtgagtttaccaaaaatataagataggaaggttgtcgtaacatcttccatttctcaattctgaagtccccattttcatccctgggagagttgttctaggatagggtagctaaaggaacagagaatatcagagtaatggaattagctaaaagggaaagtggtgacctgaagaccacactctaaagaaggggccagtgaatggcaaagaaagtgcagagcaaaaaacatgcaggtagatggggttctagtt

SEQ ID NO: 98215 - DNA, 374 bp, Homo sapiens
ggcacgagcggcacgagcggattacctgaggttagtagcttgagaccagcctgaccaacatggagaaaccccatctctattaaaactacaaaaaaattagctgtgtgttgtggtacatgcctgtcttaattcttagtcataattaattggctgatctaccatttgtcttttgagataattacattactcttaattgttgataatagctagaggaaagtcggcctcattattcgatgacgtttaatgtaagtgagaattacataaaataatgttcacattgtcttattacgaagtctcttcctcgattttgatgtataaaaagttattgtcttagttgagattcatcttatttgtcgtcactaggcagaagtatt

SEQ ID NO: 98216 - DNA, 321 bp, Homo sapiens
tggagaggctgaggcagcagaattgtacgaacccaagaagtgaaggttgcagtgagccaggatcgccccattgcactccagcagcgtgggcaacagagcaagactccgtctcaaaaaaagaaaaagaaaagaggaaaaaagaaaagaaaaagaaaatagtagtttagagctagctgagaagagctcttaacagaacagaactgataaggcgtgagtgttcccagagcacttattctctggccagctcatgtgtgtgacaatggcctggcactgacggttgtcacggcaagcccggctgtggctttgacacccatctaactt

SEQ ID NO: 98217 - DNA, 133 bp, Homo sapiens
attagccaggtatcgtggcgggcacctgtaatcccagctactctggaggctgaggcgggagaattgcttgagactggaaggcagaggttgccctgagccgtgatcgtaccacggctcagggtcgacgcggccg

SEQ ID NO: 98218 - DNA, 318 bp, Homo sapiens
  misc_feature (1)...(318): n = a,t,c or g
ctcactctgtgggccaggccagagtgcagtggggcgatctcggctcactgcaacctcctcctcccaggttcaagcaattttcctgttttaacagcaatacggatatgccatgttcacttaaccaattgtggaactttaataagtacagccagccagattgtaggcagatgacactgagtaatagccaggtttgagaatcacagctctatgatgatggagtcttacctgtatcagtaaatgactgtatatcatatgtcaagtctatgttgacactttctgcattttctactctccgaaaaattatcccaaggaaccacn

SEQ ID NO: 98219 - DNA, 326 bp, Homo sapiens
ggctgaagtgtttgacaccaaagcacttgcagataggattggggcagaagccaagttgacagtgtcacctgtccctcatttcaccctatcgcactaaagttctcccacacttgcatttcagtttcaatactttttctcatgtgccacaaaggaggctgtgaagttatcatttccaaagtctctgctgggcacagggtctcgctctgttgcccagcctggagagcagtggcacaatcatggctcactgcaacctcaacctgcccagctcaggttatcctcctgccttaccctcgtgagtggctgggaccacaggtgcgcaccacccg

SEQ ID NO: 98220 - DNA, 304 bp, Homo sapiens
attggatttaatactgataagagggctttctgtattgaccaggttggagtgtactggcaatatagcgaggcctttggctctccaaaaaaatagaaaaaaattagccaaacatggaggcatgcgcttgtgatcccacctacttaggaggctgacatgggaggattgcctgggcccaggaggttgaggttgtagagagccattgactgtgctgctggactcaacttggatgactgagcatgactgtctcatataaaataacaataattttactctttactaagaataggggctggtattttaatag

SEQ ID NO: 98221 - DNA, 261 bp, Homo sapiens
ccggtgaaagggtttaaactctttcaccgggtgtggcggctcatgcctgaaatcccagcactttgggaggccaaggcaggagaattggttgagctcaggagtttgagaccagtctgccaacatagcaagaccccgtctcattttaaaaataaaaaaataaaaataaagagttaaaccttttcagttttagtcctgttgcattttgggtttcttgttctccaacaatattgtaaataatattgtcagacgtcgacgcggccg

SEQ ID NO: 98222 - DNA, 329 bp, Homo sapiens
ttcagctactcgaaagactaaggcacaaaaattgcctgagcccaggagaaggaggttgcagtgagctgagatcgagccactgcactccagcctgggtgacacagtgagactctgtctcaaaaaaaaaaaaaaaaaaaccccaaattttttggggaaaaaagggccaaaaaaaattcaaattttttttaggcaaattggaaaaactccttaaaggtttatcccttaggggtttttaaaggcctttaaggaaattgtcacccggcccgaaattcccaaattttgaattcgaaaatcctgaaaacccccccaggttcctttaattggggccg

SEQ ID NO: 98223 - DNA, 170 bp, Homo sapiens
gggaggctgaggtgggaggattgcctgagcccaggaggtcaaggctgcagtaagccatgatcacaccactgcactccagcctggtgacagagagaccctgccaaaaaaaagaaaaaaaagaaaaaagtgtttcaaaatgctgccaaggggttaaaatgtcgacgcggccg

SEQ ID NO: 98224 - DNA, 324 bp, Homo sapiens
gcccagggtagtctcaaacttccagcctcaagcaatcttcccacctcagtttcccaaagcactgggattacaggtgtgagccaccatgactggccaaaactgcaagtacgtttctaaggaagaagaagccattgaagtttgcaacttgaagtctctgccacagcattatataaaaatatgaatgtttttggttataaattaccctcttcaacacacacagacacacagacacacacagacacacacacacacacacacacacatacaccctccagtatacatacctgggttcatggtcactggcataaagattatatttctcag

SEQ ID NO: 98225 - DNA, 179 bp, Homo sapiens
ggagaattgcttgaacctgggaggcagaggttgcaatgagctgggatagtgccactgcactccaacctgggtgacaaattgatactctgtctcatttatattaaaatttattattttaggctaattctttatttatacttatttttgatctttctattttttttgacttatatattatg

SEQ ID NO: 98226 - DNA, 363 bp, Homo sapiens
ggtaatgatgtcggggttgagggataggaggagaatgggggataggtgtatgaacatgagggtgttttctcgtgtgaatgagggttttatgttgttaatgtggtgggtgagtgagctataattgggtgaatttttccaaactttataaatacacttgcaaacatttatactcagcatcctagatgataatgttacaggcattgccttttcagttaatgtgtcatggccctttttctagactatgagtgcatagtcttctagtactaccaataacagcatttatcacgcatttactatatgccactaattctaacagctctgtgagacacttcatgaagaacttgatgtttcaggtaattctgt

SEQ ID NO: 98227 - DNA, 243 bp, Homo sapiens
gtggggcaaggtgaacgtggatgaagttggtggtgaggccctgggcaggctgctggtggtctacccttggacccacatgtactttgagttctttggggctttttacatttctttttgtcttttttttttgattttccctcatttatttttcgtgtcctctattcatattgtttcttctttttatttgcttttctataatttccccattattttttttacattgttttgtcatttctttctacg

SEQ ID NO: 98228 - DNA, 117 bp, Homo sapiens
ggcgtggtggcgtgcgctcccacttgggaggctgaggcaggagaatggcgtgaacgctggaggtggagcttgcagtgagccgagatagcaccactgcactggaggtcgacgcggccg

SEQ ID NO: 98229 - DNA, 320 bp, Homo sapiens
tgataaatggcttggttcacataataagtttagcttcaagttacattaaaacaaaataaataaaatgcacttaatcacttttttaaaaaaaaaaaaaaaaaaaaaaaaaaaaaaaaaaaaaaaaaaaaaaaaaaaaaaaaaaaaaaaaaaaaaaaaaaaaaaaaactgagcgccgggccaaattacaaaatttaaagttttaaaattttaaaaccccccagggtcttttttatagtgtattctccccccatcctatttttttttttttaaacaaaatggccccctttttttaaaaaaatcaccccctaatataaaaattg

SEQ ID NO: 98230 - DNA, 313 bp, Homo sapiens
  misc_feature (1)...(313): n = a,t,c or g
atgaaagaaaggtcaggaactagcatcccttatgaatgcctaacaatatgccaggttctacaatataccatgttcacataattctaacaatcaccctgtgaaaatatcatccctttataacggatgtatatcagctcaaaaagagtaagtgtatcggggcgtggttgcacacctgtagtcctagctactggggagggtgaagcaggagaatcctttgggctcaggagttcaaggttacattgagctatgattgtgccactgcattccaacctgggcaacagagcaagattcctgtctcttaaaaatatacccn

SEQ ID NO: 98231 - DNA, 382 bp, Homo sapiens
cttgccagcattggtcccaatccaatcccaattccatgctgggctgcttcgattcttttttttttttttttttttgggaaaagggcccgggttttgccctttggggggaaatgcagggggggccaaatttgggttaatggggccccccttttcccgggttaaagaattttccccttttaaccccccaaagaatggggatttccgggggccccccccatggccgggaaattttgggttttttaaaaaaaatggggtttcccctgggggcccaggggggcttaaaaccccggccctggggggacccccccccttgggcccccaaagggggggggataacctggcgggggccttgcccccagcaaattttttttttttaaatttt

SEQ ID NO: 98232 - DNA, 236 bp, Homo sapiens
ggttgaagcgattcttctgcttcagcctgggaggccaaggttgcagtgagccaagatcgtgccagtgcattccagcctgggagacacagcgagactccatctcaaaaaaaaaaaaaaaaaaaaaaacccggccgggggggttaaccttggaacccccaccttttgggggggttaaaccaaagggacccctgggggcagggatttaaaacccatttgggccaaattaggaaaccccg

SEQ ID NO: 98233 - DNA, 284 bp, Homo sapiens
ggaaggctgaggcaggagagtggcatgaacccgggaggcggagcttgcagagagccgagatcgtgccactgcactgcaccctgggagtcagcaagattccttctcaaaaaaaaaaaaaaaaagaccaagtcggctttaattgggaaaaattaactggccgattttaaaaaaagcccaaccggtttttacacctaaaaatttaatatggttataccaagaggaacccatttaaaggctttggacggaatggccaaaagttcgaacatttgaaaacccctttcccc

SEQ ID NO: 98234 - DNA, 473 bp, Homo sapiens
  misc_feature (1)...(473): n = a,t,c or g
cggctttattttgtattgacatagatttgctatgtgataggctcaagtgtactttgcataccaaaattggactgagagaaaaatgcattcttagaactaccatgattaaaagtaaggcctcatcggtgannnnnnnnnnnnnnnnnnnnnnnnnnnnnnnnnnnnnnnnnnnnnnnnnnnnnnnnnnnnnnnnnnnnnnnnnnnnnnnnnnnnnnnnnnnnnnnnnnnnnggaataggctgttaaaggcagaccctacctaagctaattagatgggcaccagcatggccagnnnnnnnnnnnnnnnnnnnnnnnnnnnnnnnnnnnnnnnnnnnnnnnnnnaatacagtgtgtgctgctaacctttggtggaaatccatcagtgcgttgacaagaatggtacacgcagcctgcaggtcttcgtcacagtcccctgaagccgaggactcagggagatagtgctcatggatcgcc

SEQ ID NO: 98235 - DNA, 357 bp, Homo sapiens
ggcacgagcttagccgaatgattttcatttttctaaagaacaaaacgtttgtgtgttaactttccattctctatacgtacatgggcacacagattgactataatggcacctcttgttccctgttgactgaagcacaccagctggatgtctctataactctatgattatgcaatgccctatcccacttgttaccacaatgcacgcctacaccccttatctccatactatgtattatcgacaccattagcctactcattcaaccaataacccatgccgtacgcctatccgctaacattacagcatgccacttactcatgcacctaattttactctccaccctatcaatatgcaccctca

SEQ ID NO: 98236 - DNA, 374 bp, Homo sapiens
ggcacgaggggaaaatgacttgagcccaggaggaggaggctgcagtgagctaagattgcaccactgcactccaacctgggcgacaagagtaaactgtgtctctcaaaaaaaaaaaaaaaaccaaccaaaaccaaaaccaaaccaaaccaaaccaaaccaaaccaggaaaggatcccccggtttccctcttttaaatttaaaagttatcagtcccgaaaagtctttgaacccaaacatactgaaaacagcaccaaaagtcacgttcaggaactggttaacacctgaaatcccaccattttggaaaatggaggaaaaaggatcttttgaccccaggatttaaaaaccattttggccaacataccaaaactcctttc

SEQ ID NO: 98237 - DNA, 314 bp, Homo sapiens
  misc_feature (1)...(314): n = a,t,c or g
cggcacgaggaaaagggaagttgtatttagccaacagcttgatcttattctcaaggctcaaatcgactgggtgtttgtaaacttctgtgcaaattggcatttttggtttttagacatgatgttttgtttgtacttcaaatgggtaactggttctcttggaaaaaatatagccatataactggtttttaacaaaataggggagtgggtgtgagagagtggcttggaaattgcaccagtggtggcagggcatggtggctcacacctgtaatcccggcactttgagaggccgaggcaggtggatcacctgaggtcan

SEQ ID NO: 98238 - DNA, 324 bp, Homo sapiens
agtaagaattaatttgcacacagggcttctaaaaagtgggccacttcttattttgagaaaaacttcaaaattatgtaataaatttcactgagaaatacaatattgacataaataacaatagaacaatatcaagtttttggtaaaataaaacgatattcatagcaagaagaacaatttatagcaacactcagagctgttgacctggggaaaggacagggtttgttgcatgggataagggcaagtgatgtggccaggcatgatggctcacgcctgtaatcccagcactttgggaggccgaagcaggtggatcgtgaggtcaagaga

SEQ ID NO: 98239 - DNA, 313 bp, Homo sapiens
gaagtatgaggcaaaaggccacacctacctacctcactttaaaattctgtctaaaaacctggtcacagaggaagatgttggctaactttaatgcgataatctagttcccctcaaaatggaaagctatttagaaaaaagctatttgctcaacgtgaggaacaatttatagaaactgacaagaatttttgtcctggggaaaggacagggtttgttgcatgggataagggcaagtgatgtggccaggcatgatggctcacgcctgtaatcccagcactttgggaggccgaggcaggtggatcgtgaggtcaagaga

SEQ ID NO: 98240 - DNA, 267 bp, Homo sapiens
ggcagaggtgatctctttaagctggggtagttaggaacaccagtaaagtgatgcttggagctcagccctgagtcatggtagttgaggttcagcgctcctactggctaggaaagttgtgtgtgtatatgtgtgtgtgtgttcagggctcccactggggtgtgtgtatgtgtgcatgtgttcagaactcccactggcttggaaagaaggggtgtgtgtgtgtgtgtgcgcgtgcacgcagaactactggcttggaaagaaggggtgtgt

SEQ ID NO: 98241 - DNA, 379 bp, Homo sapiens
  misc_feature (1)...(379): n = a,t,c or g
ggcacgagtaccctctgacccagcagttccacttaagtatttggtcctgaaatcttggtaaaagtgcccaaagatacagaacaaggatgttcactatagcatctcttagaatatggccccaaacaggaagcaaccccaacctctttcatgagggaggtcataaaattcctgcacatgcaacagtgccatcctctgcagcctgtcaaagaggcaggcagcactaactgctggactggaatgttctccaagatataataaatgcatttgtttgaaagcagcttgcagcacagtgcgtcaggcctctgagcccaagccaagccatcgcatcccctgtgacttgcacgtatatgcctagatggcctgaagtaactgaagaatn

SEQ ID NO: 98242 - DNA, 367 bp, Homo sapiens
ggcacgagtaaccattgaccaatccacatcaatgttaatgtagatattaacctcgtcttgacttgagtggattgtcctaaagcacattctacgtagtttctcagaaggttcctattgtgtccttgctcaatttatttgttggtctttgcaaaaaccaaacagatgtgacatacgacaatggctgactataaatgtaacctattattagccctaatcccaagtgttgtgctcattgtacaatctttactgtaacaaatcattatagaatataatgatttgcaggagaattgcttgaatccaggaggaggagttggctgcagtgatccgaggttgcggcactgtgctccagcttgcttgaccgtaccag

SEQ ID NO: 98243 - DNA, 346 bp, Homo sapiens
ggcacgagacccatctcaggtgcctgcgtactaagacctgtgttcaacagcggcggcggcggcggcggtgggctcggaggctcacagccagtggacagggttgagtcagtgagttcgtgcaagttggaatcgaagcctcttaaaatggcagatgatttggactttgagacaggatatgcagggcctcctcctacacaattcatttgatgctttatttcgtgtttttgattttcttattctattggtatatttattttttattctttgttttatttcactttactatttttataatcttattttattcttttattattttattattattattatatttctataattt

SEQ ID NO: 98244 - DNA, 354 bp, Homo sapiens
ggcacgaggagaaaggaaggaactggagcagtagctggaagggtatgcaggataatggaagaggacttttcctttttttttttttttggaaacggggtctggctttgcctctcggccttgtaccctgctgctgtttctctattcattgggtcctaaccctcgggtcttaatccgtgtcttcctcttcctctcttcatctcgctgttactactattacctcttccttggcctatctctattatttctttttttctatatcatgtatcttctctttattcgtttattcttctttgtcttatctggtcttctactcctcttgtcttcatattaccgttttatcatcttcttctttcg

SEQ ID NO: 98245 - DNA, 353 bp, Homo sapiens
ggcacgagccatgttggtcaggctggtcttgaacttctgacctcagtgatctgcctgcctcggcctcccaaagtgctgggactataggcatgaggcactgcgcccggccatgtatttattgacaggatctagctatgttgcccaggctggtctcaaccttctgggctcagctgatcctcctgagtaactggtactacacgtgtgagccactgtgactggttcgattagggttaaatttatttcaatacccatattgtgggaaaccatgaatttgttcgcttgcttttaaacatttactatttttaggtttcttactatattacacatttgctgaacaatctgggagtttatcg

SEQ ID NO: 98246 - DNA, 366 bp, Homo sapiens
ggcacgagaaaaaagctattgtgagccaccacacctggccacatttcagccttaaaataaaggggttcatctgattgtctcatcagttccataagatgctatatttcagtgattgctcatgattctgtaagaccattttgttgcatcctcagaaagtgtaaaagaagagggtttgttttttgtttttgttttttttttttttatttttatttttttttttattttatatatatgttttttttattttaaatttatttttattattttattatatattattattatttttatttttatattttattttttttatttatattatttaatattaattttttttttaatattttttatttttataggttt

SEQ ID NO: 98247 - DNA, 319 bp, Homo sapiens
ggcacgaggagagctacaccatgagcttcaataccctgataacataaaaagggaaaagcaactttattggaaatatctcttttaaggaaatggatggggaagtgccaggattaaaagaggctttccctaacactatagtggtattttaaattatccctttgtaggccaggcgcggtggcctgtaatcccagcactttgggaggccgagtcggacagatatcttgaggtcaggagttctggacttgccttgtcatcttggtgaaatcccttttctactatatattctaattatctcgtttatggtgtttcacctcctgat

SEQ ID NO: 98248 - DNA, 372 bp, Homo sapiens
ggcacgagttgtcctcatttcctgtcatacagctttttaaatcagtggtattaagagggataagagtgtcttttgaatgctaataagatggctggtagctgggagtctctagatagcttcaggaggagggctaggcagtatattatcacaggtttagagtgattacgtctttttgctctatttgcgtttttatttatgttttttttttattttctttttctcctttatgtgttttgttttgtattttttcttttttttttttttaccttttttctgtattatttttttttgtatttttttttgtactttctttgttctttggtgtttctattttttatttgctttatttttttttggttctttgtttttttt

SEQ ID NO: 98249 - DNA, 378 bp, Homo sapiens
taggacatgaacatccatttataatttttattctgatccagtagtcctcagagcatggttctagaaaccagcagtgtgtcacctgggcagttgttagaaatgcagattcttcaaccttacctcaaaccttctgactcagaaactgtagggggtggagctcaaactgttataaccgttcctccaaatggtttgcatacagactaaaatttgagaaacactgctttaattcatctttttttccaactgtacaagtactgccttagttcaccctcttttctatttgtctaggcttgtgctaagcaagaatagaaataaatttatcggccgggcgcggtggctcacgcctgtattcccagcactttgggaggccgaggcagg

SEQ ID NO: 98250 - DNA, 141 bp, Homo sapiens
taagatcacgccattgcactccagcctggcaacagagcgagattctgtctcaaaaagaaagaaagaaagaaagaaagaaaaagaaagaaagaaagaaagaaaaagaaagaaagaaagaaagaaagaaaaaaaaaaaaaagg

SEQ ID NO: 98251 - DNA, 349 bp, Homo sapiens
ctcaatgcaatctttatcaaaatactggtggcattactcattgaactagaaaaatcatcctgaatcttatatggaatcacaaaaattcccaaattatcaaagctatcctgagaaaaaaaaaaaaaaaaaaaaaaaaaaaaaaaaaaaaaaaaaaaaaaaaaaaaaaaaaaaaaggggggccccctttaaaaaaacccccgggggggccaaaatttaccgggggcgcaaaaaaaaaattttcccccaaaaaggggggtaaaaaaaaacccccgggggaatttttggaaaaaaccctttttttggggggggaaaaaaaggggcaaaccccccccaaaaatttaaaggttta

SEQ ID NO: 98252 - DNA, 330 bp, Homo sapiens
tatttttgtacgtaattttgaaagtctctactacagatgcaaaaattagctgggtgtggtggcggacacctgtaatccctgctacttgggaggctgaggcaggagaattgcttgaacctgggaggcagaggttgcagtaggccgagatcccacctgggcaacaagagtgaaactctgtctcaaaaaaaaaatagaaaaagtcactgctcttgtaaaacacatcgaggctgctcataaaacacggggcgaacggctttgaccatacaaagggggaatgggatctgcgatttatgtctccttacctctgcatgatgagagacaatttgcttg

SEQ ID NO: 98253 - DNA, 76 bp, Homo sapiens
acgactagcccctaccccccaactaggagggcactggcccccaacaggcatcaccccgctaaatcccctagaagtc

SEQ ID NO: 98254 - DNA, 369 bp, Homo sapiens
tcgcccacgcgttcgcccaaacccactccaccttactaccagacaaccttagccaaaccatttacaaaaaaaaaaaaaaaaaaaaaaaaaaaaaaaaaaaaaaaaaaaaaaaaaaaaaaaaaaagggggggggcccctttaaaaaaatccccgggggggcccaaaattaaccgggggaaaaaaaaaaaatttttttttttaaagggggggtaaaaaaaaccccccgggggttttttgaaaaaaaaactttttttgggggggggaaaaattggcccccccccccccaaaaaaataaaacccttaaagaaaaaaaaaaatttttaaggggaagggggggaaaaaatcgctttttttccttcgggaaaaaat

SEQ ID NO: 98255 - DNA, 370 bp, Homo sapiens
  misc_feature (1)...(370): n = a,t,c or g
tggaagtcggccgggaggagggaagaggacggcgaggagatggactcggccatggaggctgcgtggagcctgcttgggaaccgggatggcgtttgccttccaccatcaagttatttataaaatcaaaagtttcctccgaaaaaaaaaaaaaaaaaaaaaaaaaaaaaaaaaaaaaaaaaaaaaaaaaaaaaaaaaaaaaaaaaaaaaaaaaaaaaaaaaaaaaaaaaaaaaaaaaaaaaaaaaannangggggggggggtttttaaaaaaattatggggggggaaattttttatggggggagggaaaatattttttttttttattaggggggggaaaaaaaaaatgtgggggggttgagagaaaaaaacc

SEQ ID NO: 98256 - DNA, 374 bp, Homo sapiens
cggacgcgtgggattttttgttatgatgtctgtgtggaaagcggctgtgcagacattcaattgttattattatgtctaaaaaaaaaaaaaaaaaaaaaaaaaaaaaaaaaaaaaaaaaaaaaaaaaaagggggccccccttaaaaaaaaccccgggggggcccaaaataaccccgggaagaaaaaaaaaaatttttcccctaaaagggggccaaaaaaaacccccccggggaattttgaaaaaaaacccttttttgggggggggccaaatggggccccccccccccaaaaaaataaaacccccaaggaaaaaaaaaaattttaaaggggaaaagggggaaaaaaaaccccaaatccctgggtttaaaaaaattt

SEQ ID NO: 98257 - DNA, 447 bp, Homo sapiens
  misc_feature (1)...(447): n = a,t,c or g
atttgacccgttgaccggccggatgatcgggcgtaccacgcgtccgtagactggagccataaagttaatttgcacctagctttttggagaatagccatgattaactgctattcgtggtgggggtgggggggaaccctatgatttactatgcagatgaagagggtaggaactaaataaaggactttgtaagccaaaaaaaaaaaaaaaaaaaggggggggccgttcgcaatttaaacccacccgtccgaaaaaaaaaaaaaaaaaaaaaaaaaaaaaaaaaaaaaaaaaaaaaaaaaaaaaaaaaaaaaaaaaaaaaaaaaaaaaaaaaaaaaaaaaannngggggggggggcttttttaaaaatttctggggggggccaaatttttgggggggggaaaaaatatttttttttttttttggggggggttaaaaaacccccgggggggg

SEQ ID NO: 98258 - DNA, 378 bp, Homo sapiens
cccacgcgtccggatttacagtccaatgcttcactcagccattttacctcacccccaaaaaaaaaaaaaaaaaaaaaaaaaaaaaaaaaaaaaaaaaaaaaggggggccccttttaaaaaaccccctggggggccccaattttcccggggcccccaaattaaaatttttccccttaagggggggtatttaaaacccccctggggattttttgaaaaaaaccttttttttgggggggaaaaaattggggcaaaccccccccaaaaatttaaaccctttggggaaaaaaaaaattttttaggggaaaagggggaaaaaacaccttaaaaccccgggtttaaaaaaatttttcttccggggttttttttaaaaaaatttta

SEQ ID NO: 98259 - DNA, 359 bp, Homo sapiens
  misc_feature (1)...(359): n = a,t,c or g
cggacgcgtgggcggacgcgtgggttagtttcttattcatcaagatctcttttgagaatgtgacaaattaagcatacatagaatgcatatgggattatcctgataaagggaaacgaggacactaagactgtcaaatggaaatcttcttgtcaattggcaaacacttgggaattccacattagagcattgcttggttttaattgtttttttttaatttttaaaagacggggtctgactctcttacccaggctggattgcaatggcgtgatcattattcataataacttggaatctctgggcttaagcaatcctcccatgttagcttcccaagttgctaggactacggggttgtgctaccn

SEQ ID NO: 98260 - DNA, 346 bp, Homo sapiens
tagagtgcttagttgaacagggccctgaagcgcgtacacaccgcccgtcaccctcctcaagtatacttgaaaggacatttaactaaaacccctacgcatttatatagaggagacaagtcgtaacatggtaagtgtactggtaagtgcacttggacgaacaaaaaaaaaaaaaaaaaaaaaaaaaaaaaaaaaaaaaataaaaaaaaaaataaaaaaaaataaaaataatatataaatatgagtaattactttattcactctctattctatattcatttttattatattttattaagtatttgttttggtaggataccgttctttgctctggttctttatttttttg

SEQ ID NO: 98261 - DNA, 319 bp, Homo sapiens
cgcggccgcgtcgactttggtttttgttttttcctttttttgggttttgggtttttttttttttttttttttttttttttgggggcccccaaaaaaaattttaaaaaaaaagggggggggggggggggggggggggggggggccccggggggggccccggggggggggaaaaaggaacccggggggccaaaaaaaggggattgggggggcaaacggggggcaaaaaaaagagagaaattttcagggggggggacccccccggggggaaaaacgcgggggggggggggggccggggaaccccaaggggggggggttaaag

SEQ ID NO: 98262 - DNA, 451 bp, Homo sapiens
  misc_feature (1)...(451): n = a,t,c or g
ggcacgagagcttcaaccctgtcataatctcccagctggagcgaggggaagatccctgggtcctggacaggaagggggctaagaagagccagggcctgtggagtgactactcagacaacctcaaatatgaccacactacagcctgtacacaacaagacagtttatcttgtccatgggaatgtgaaaccaagggagagagtcaaaatacagacttgagtccgaagccattaatttcagagcaaacagtgattctggggaaaacacccttggggaggattgatcaagaaaataatgaaacaaagcaaagcttctgtctgagtccaaactctgttgaccaccgtgaagttcaggtcttaagccaaagcatgccactcactccgcaccaggcagtgcctagtggagagaggccctacatgtgtgttgagtgtgggaagtgctttggccggagttn

SEQ ID NO: 98263 - DNA, 444 bp, Homo sapiens
ggcacgagccaatgtgatcatttcaaaagtggagcctttgagaattagttagggttacattagttcatgagggcggggcccccatgatgggattaatgcccttataaaaagaggaagaaacaggagatctctctgctctctgccatatggcaacttggaagaatggcctcaccagacaccagatctatccacaacttaatcttggacttcccaccatccagatcataataagtaaatgtttggtatttaagccatgcagtctatgataatttattatagcagcccaaactaagacacccaaataaaatagaaatattaaaataagggcaaagttgatactgtagaaagtaaaaatgcagcagacatgatcaacaaatccagaagctggatcgctgagactaataagttgacaaacattaacaagtgttgataaggatatagaga

SEQ ID NO: 98264 - DNA, 445 bp, Homo sapiens
ggcacgagtttggatagaaaaataacatctcgttgtttttctggtcatagttgcccattgggcatcttcacgacaaatcatctctcattggaagaactgcacacgacatgactgtcctgtttgcctccctttgaaaaatgccagtgacaagcgaaaccaacaaagtaagtgagcacgggggcagagaagcttggagatgagaatagaagttgtttctaaagaaaattcagagagtaggtagggagtgggcaggggttatgagccatggagtgcagggtgaggtaaggcggacagcagcccaaggtacagccaagctcagagggcaggcgggctctccgtgtcaggaacggctgtgataatgttggaccctgactcactcactgcctctccctctccctgccccctgcatacatgcacttgaagcagcatggaacagcagagtccg

SEQ ID NO: 98265 - DNA, 378 bp, Homo sapiens
ggcacgaggatgaatttgataagatggggaatcaacatcaagccttgttggaagccatggagcagcaaagtattagtcttgctaaggctggtgtggtttgtatccttcctgcaagaacttccattattgctgttgcacattcttttgctggactttacttaatatttaacacagtttctgtcgttttttttttcttctctaacttcatttttcttattttatctttatttaactatttttgtatttctatttatatcttatttcttataattttcatttttatttttatttctagccttattgtatttttttgccttatttcctttaggtttctcttatttatttttttttctgctctttctcgtatctttatatatg

SEQ ID NO: 98266 - DNA, 492 bp, Homo sapiens
  misc_feature (1)...(492): n = a,t,c or g
ggctgtcctcatcgacncctataggcctcgctctgtcacccaggctggagtgcagtggtgtgatcatagctcacctcctgggctcaaacaatcctcccacctcaggttcccgagtggctgggactacaggcatccaccaccatgcccagcctcattgttttaattgcatttttccaatgtctagtgaggttgagtgccttttcatatgtttattgctcattcatattttgtcaagagcctgataagagtctcctgcccgttatctgactggattgtctttattatccttattatgatttgtaggcgttcttcacatacttcagatataaatccttttttataaatatttcccctagtggattagcgtgcctttaatgcacaaacttttgaaatgtgctactatttatcagttttttccattgaattcatggtttggttgtttgttcttgtctctttttttttgagacggagtctcgcactgtctcccaggct

SEQ ID NO: 98267 - DNA, 287 bp, Homo sapiens
ttttttttttatgagctttgggatctctgatctgggccacttttgcagggggtctagatattcttggagatcttcttaaagtacgacccacatttgttttctcctcttccttttctggcttctcttgcttggtttctggttctagaactttggggggagaatcgggcttctttttccgacttgatatccggattgtcaatttgatgccctctttctgcctttcagagggaatctctgcattttctgaggcagtggttggtttttctgggacccacctgtatttgggg

SEQ ID NO: 98268 - DNA, 340 bp, Homo sapiens
caagaccctgactaaccttgaccgtgctgaccaaataagaggtgcctcacaggcaggcagccctgcactggagactaggaagagtgcagccactgactgggctgggcggatctgggccttcctgtggagctgaactgcctgaattatcatgactctgaacttggaaggagcattaattgactgtatcctacgctccatgctttcttcatagaggaagaaaagtttctggaacagagtcgggcgggtagcactggctcaagcctgtaatcccagcactttgggaggctgtggcaggcggatcacctgaggtcaggagttcaagaccagcctggccaacact

SEQ ID NO: 98269 - DNA, 379 bp, Homo sapiens
tgagaagaaaatacaggaataaatcttcatgaccttggatttggcaatggtttcttagatatggcaccaaaagcacaagcaacaacagcaaaaaaaaaaaaaaaaaaaaaaaaaaaaatcaaaattaaaagctttttatttttagggggcctttttaaaaaggggaaaaaaacccccccaaaaggggaaaaaaattttggaaattttaaattttgggggggggacctaaccccaaaaatttttggggaccccggggcctcaacaaaaaaaaaaaaaccctttttaaaagggggcaggggtttaaaaaaaactttttttaaaaaaaaaaaaaaaaggggcccccaccccctggaaagcccctcccctttttctgtttttt

SEQ ID NO: 98270 - DNA, 350 bp, Homo sapiens
tcgagattttcaggagctaaggaagctaaaatggagaaaaaaatcactggatataccaccgttgatatatcccaatggcatcgtaaagaacattttgaggcatttcagtcagttgctcaatgtacctataaccagaccgttcagctggatattacggcctttttaaagaccgtaaagaaaaataagcacaagttttatccggcctttattcacattcttgcccgcctgatgaatgctcatccggaattccgtatggcaatgaaagacggtgagctggtgatatgggatagtgttcacccttgttacaccgttttccatgagcaaactgaaacgttttcatcgctctggag

SEQ ID NO: 98271 - DNA, 366 bp, Homo sapiens
  misc_feature (1)...(366): n = a,t,c or g
ccatttgactgcaaactctccctacaagattacgttaagaaagtcaaggaactatcacatagaaactcccacnnnnaaagtggtttgttgcttcgtacgacncgcangnagggnngagncgacccacgcggccggataactccagggatgaaactagnagccacagtgtttctgaaagcagctctggatctgactcaaagagggaaagtacttccagtgacagggaggcaaacgagccatcccacagggcatctcccgagcctgaacccccgccaacaaacaaatggcaacttgataattggctgaataaagtgaattaagcgtgaaaaaaaaaaaaaaaaaagggcggcccttatatagagacct

SEQ ID NO: 98272 - DNA, 393 bp, Homo sapiens
  misc_feature (1)...(393): n = a,t,c or g
aacttaacaaacatctgtgagctcactggccaatccatgaactagaatgttatcaacagcatggatctacccacgccttcccaatccagtcctgggtgttctttcaaacaacagtaatttggtgtcatctgccaatactttgcatgaaaatttgcttttgttatatttttacattaagtagaaaattgggctaagcaaccataagccatgctctacatctgagggtctgtgatttaatcagccacaccccttatctcatctttttctttcctcttcttcttcttctttttttttcgagagggagtctggctctgtcacccaggctggagtgcagtgagccgagattgcaccactgcagcagtctggcctgggtgatagagttgagatcctgtn

SEQ ID NO: 98273 - DNA, 462 bp, Homo sapiens
  misc_feature (1)...(462): n = a,t,c or g
agaaaactaaggagagtcgtgaagcagttgagaaagaatttgagcctctgctgaattggatgaaagatagagcccttaaggacaagattgaaaaggctgtggtgtctcagcgcctgacagaatctccgtgtgctttggtggccagccagtacggatggtctggcaacatggagagaatcatgaaagcacaagcgtaccaaacgggcaaggacatctctacaaattactatgcgagtcagaagaaaacatttgaaattaatcccagacacccgctgatcagagacatgcttcgacgaattaaggaagatgaagatgataaaacagttttggatcttgctgtgggtttgtttgaaacagcaacgcttcggtcagggtatcttttaccagacactaaagcatatggagatagaatagaaagaatgcttcgcctcagtttgaacattgaccctgatgcaagggggn

SEQ ID NO: 98274 - DNA, 1887 bp, Homo sapiens
ttttttttttttttcttaaatcaggttgtatttattaaaaacaaaatacaaaataacttggaattcagattattgtgatgtttatcccctaacaggtcagtcctaaagaaaaagctaattgtttcaagggtggtaacggaagaattttaagtaaggattatattaaatacatctagtttgatgcaaactgagttttattcaatgttggaggcctcactatgttcctctaagttttcaaccattaacaacccaaaccggttgtttccctcataccaacacttggtgtgtgcagtggttctccctctgttcttagaacagctggtattctgtttcttctgcctttttttttttgaatttgatctaccttttggtaggaatatttcagcgggggcatatgaccttgtggcattgaatagatattcataaagttgcttagcctcaggacatatgctcaggagactttctacagaggtcgatgctagcagttgctggcatagtccgtgcaccaggcttccactgtacagtcgagttaggtctggctctgggagaggagtggacagcagctggttgagatacatcccccatctggagacaggactgccactgacagaagatgtgagctgtgtctaagtccagtcttgtgcccagccgtgtctgcgccttcactctttggaactctgcatacaacatcttagcaccatcttcctgcagctcttccttaccagggctgttgattatggcaatcaagggccccactagcattgtgagcagtaaggattgtagatgatgtagctttgctttggtctcggtgtgctgcaaccagtagcaactgacagcaatgggcaacttcagtgaagtagggattggctccagaatggtctgtttcaccttcagggtttctaacagaagcatctgccgcctcctcaaggagagctcagtcaatctgcttaagtcagaatgatccttggccagttctactgcatcaatgattgaggttctgatatttttattaatcctttccacttcactgaaagctagaggctgaggaggcaatgcattccaggatgtcttgtccagatgtggtgaggcatttaaaagaagcccatagatgatttgcctgatgggctgagatattctgtgggcatttggttgctgcatgttttccacctgtgtgggaagaatggtccgtcttaggaccaaagcatcactgatgaaaggagatagctggcctttagctaaagccactaatacccattctggtaaaccaagattcaaggcatctggacagacataagtaccacactggaagaagtcctgtagcttcacctgggactgttggtattcttccatggaacagcagagaagttccttaacattttctcgatccttttttgggaggtatttcagaacattatctagtgcttcggtagggttggcaaaatgagacaaccaattcagaagtcccaggattcggtggtgtctcctccctttagaactggtagctccaagaggaagacgcgctttacttaagaatgtctccatgatgggtagattaacatggtcatttccacatagccccgcaaagagaggtagtagagctttattcatattgctgaagtgatggcagaatgcatcaagggaaaagcatttggcagggatatagttttgtgtgcccttaatagtgttcatatttctccactgaaagctattcaatgggcaaaacccagttttcaggtcaaaaatgcaaaagtcactatctgatgataacacagggcaattccaatggttagcaagtgtcataatgtcccgatctgcttctgaaaagcactggacaaaacacacccgcagcttgatcaaaacctgtatgaatacttcccggatgagtaa

SEQ ID NO: 98275 - DNA, 411 bp, Homo sapiens
  misc_feature (1)...(411): n = a,t,c or g
gttgagacaaatatgttcaacagagcccccttgtggagagagacaatgtacaactgtctatcaaaggccctgagaaggcctgtagcaaagaagcccactgcctttaattcggcatttcccaatattattaagccatagaacctccttttctaaattttgctatgtactcctgggggaactagtgttccacaaagtgccctctgcgaaacactgttctaagaatttaataattccaaaacctcccttgcccaanaaaaaaaaaaaaaaaaaaaaaaaaaaaaaaaaaaaaaaaaaaaaaanaaaaaaaaaaaaaaaaaaaaaaggggggggggccctttaaaaaaacccccgggggggcccccctctcactgtgggggggaaaaaaaattttcttttaatatggaggagaag

SEQ ID NO: 98276 - DNA, 447 bp, Homo sapiens
cggacgcgtgggcggacgcgtgggggcgcatgcctgtactcccagctactcgggaggctgaggcacgagaattgctggaacctgggaggcagaggctgcagtgagccaagtttgtgccactgtactctgtcaaaaaaaaaaaaaaaaattcattgaaccttaaggggaaaccgcaggaaaaaaagggaaagacaaattaccgggaaaatataaaaatagaaagttccttggaaacggggaaagcttttttataaaaagttacttaaaaggggaaggtttatttaaaactccttattcaaaaaacaaagagtgcctgttttatttataaaaccttcaaacaataaaggctgttaataaggccctcactgtaaatataaaaactaaggctgaaaggaaagggatggaaaaagatactctttgcaaatagcacccaaaggaaaagggtgg

SEQ ID NO: 98277 - DNA, 340 bp, Homo sapiens
aagcacagttgcatatatttgggagcccagaaatagagtactgaggtttggttttctctctctctttgccacagagacattaatcctagaaggctatatcttctcaagttaatggtatttttgttttgagatagtcttgctctgtcacccaggctggagtgcaacagtgcaatcattgctcactgcagcctctgactcctgggctcatgcaatcctcccacctcagcccaggagaatcgcttgaacccgggagacaaaggttgcagtgagccgagatcacaccactgtactccagcctggggaacaagagcaaaactccatcttagaaataaaaaaaaag

SEQ ID NO: 98278 - DNA, 432 bp, Homo sapiens
ctataaggctaatagttattggaataactattaaatatggaataactctataacgaatatatgtatttaatgtatattaaagccagtctttgattttttttccctggctgtgtcttcacagctgaaattgccaagtatggccactgcgtttcacaggccactctgttttctctgtacatccacagtggtttattttattttactgttttgctctgtattttatttttctagaaatgggatcttactctgtcacccaggctggagtgcagtggcacagtctcggctcactgcaacctccgcagtggtcttatgttttaacttttttgtggcatccttcttcctgggggtactttgtccagaatcatctcactccatgttttgatgggaaagtgccctgggtataacctgcgtcaggatcaacactgagctcac

SEQ ID NO: 98279 - DNA, 568 bp, Homo sapiens
  misc_feature (1)...(568): n = a,t,c or g
aggggaatcacttttttacatcgtgagtccgagagatgttgtagtggccaaggaacgagaccaagatgatcacattgactggctccttgaaaagaagaaatatgaagtacccttgattttacttctttgaaagtattgactcatctacagcatagagagagaagataaaatgtttttgtaataaatcttttatgtagtcaaagtagagtttcccaagccaaaaatatgtaggaagttaataactttctagtacccccttcagaaattagggaaccaaaagattgcaatggattgactggctttcctgttaagtgggggaggagttgggagtggaggggagangnnnnnnnnnnnnnnnnnnnnnnnnnnnnnnnnnnnnnnnnnnnnnnnnnnnnnnnnnnnnnnnnnnnnnnnnnnnnnnnnnnnnnnnnnnnnnnnnnnnnnnnnnnnnnnnnnnnnnnnnnnnnnnnnnnnnnnnnnnnnnnnnnnnnnnnnnnnnnnnnnnnnnnnnnnnnnnnnnnnnnnnnnnnnnnnnnnnnnnnnnnnnnnnnnnnnnnnnnnnnnnnng

SEQ ID NO: 98280 - DNA, 418 bp, Homo sapiens
cataaatgtacaacagcttcttaactctacacacgcacttaaattttttttttgatttaataaaataattctaaaggaaaaaaaaaaaaaaaaaaaaaaaaaaaaaaaaaaaaaaaaaaaaaaaaaaaaaaaaaaaaaaaaaaaaaaaaaaaaaaaaagggaaaaaaaaaaaaaaaaaaagggggggggggggctcataaaaaatggggggggggggaaaaaaccttctggggggttgtggaaaaaaactcttttttttgggggggaaaaaaaaaaccccccctctttgggggaaaaaaaaacctcattgggggggggagatattatggggcaacccccaaaaaaaaaacctttttggtggggaaaaaagaaaattttcatgcgggggaggggaaaaaaaaaatattatacagcgggg

SEQ ID NO: 98281 - DNA, 416 bp, Homo sapiens
agtagacgcttgaacccaggaggcagaggttgcagtgagccaagatcacaccattgcacttcaacctggtcaacagagcgagactccgtgtcaaaaaaaaaaaaaaaaaggttttttgccttaaagtttttgggggaggcaaatgttaaacccaccattggcgggcagaaaaattagggctgataaaatcttccacttgcggaatgccttaggaccttgggaaaaaccccccaattggggaaaaaggggccaaagggactttgaaaactttacccttgcagtaaaaaacagagcaaagctggatttcttttttttggggcctgattaaattttagggtcaaacgttcagttggatcatacccggttaataattatgactaaaaccttttttccactttggaataatggcccataaa

SEQ ID NO: 98282 - DNA, 403 bp, Homo sapiens
tcaaaagccgagataggccgaaggctaggcctcctgcggcaaacagttagccaagttgtaaatgcaaaggaaaagttcttgaaggaagttaaaagtgctactccaatgaacacacgaatgataagaaagcgaaacagccttattgctgatatggagaaagttttagtggtctggatagaagatcagaccagccgcaacattcccttaagccaaagcctaatccagaacaaagccctaactctcttcaactctatgaaagctgagagaggtgtggaagctgcagaagaaaagtttgaagctagcagaggttggttcatgaggtttaaggaaagaagccatttccataacataaaagcacaaggtgaagcagcaagtgctgatgtagaagctgcagcaagttatc

SEQ ID NO: 98283 - DNA, 425 bp, Homo sapiens
  misc_feature (1)...(425): n = a,t,c or g
atgagactgtgtctcaaaaaataaaaaataaaaataaaaaacaatgtattactcgatcacaatattttgatgattatatttcaaaataactactttctttgtaatctattggatgcaatttaaagcactattctgaaaaggctttaccagactgcccgcggtcactggctccaaagagtaaatgtcgcccactgctgggtggataaatggaaggccaggagcatccgggctctaaaggcagcggcatggaggtgcccaaggaggcccttcctgtatccctgccccaccctccttctcaaggggtgtctgggcctctttagtgcagggttggcgtctctctgacattgttttctctccttgcagctgaactcgtttgagcagctgtgcatcaattacaccaatgagaagctgcagcagctcttcan

SEQ ID NO: 98284 - DNA, 396 bp, Homo sapiens
  misc_feature (1)...(396): n = a,t,c or g
caaccttggtggcatgagcctgtaatcccagctactcgggaggctgaggcgggggaattgcttgaacccgggaggtggaggttgcagtgagccaagattgtgacattgcacacagcagtggtgacattgcttgcctgggtgacaagagtgaaactccatctcanaaaaaaaaaaaaaaaaagacctttgtttttgttaccttttaaaaactttgtcaagggctaaggttcatagtattaaaaaagcctgttttttgacgggaaattttttatccagtttatccacttaaccagcttgtggataacaatagcccccatttttttttggagatgttttttaacctcccccctccaaaaatgtttgaaacaaagaatagtcctgaatcttatactggat

SEQ ID NO: 98285 - DNA, 430 bp, Homo sapiens
  misc_feature (1)...(430): n = a,t,c or g
aaaagacacttatattttgattttacatgctggttacctgttccattgttgtcaaatgcccactctccatcagatgtgttcctccattttcttatccacaaagtactcctcacttttcaatttgtcatgttactaaatggtgttacattanaaaaaaaaaaaaaaaaaaaaaaaaaaaaaaaaaaaaaaaaaaaaaaaaaaaaaaaaaaaaaaaaaaaannagagggggggcctttttaaaaaaaccccggggggggcccaaacacacgggggggaaaaaaaaattttttttttttttttggggggaataaaaaaacccccccgggggtttttgggaaaaaccccttttttgggggggggggaattggggcccccccccccccaaaaaattctacccgcgggggaaaaaaaaaaatttgtgggggggggg

SEQ ID NO: 98286 - DNA, 407 bp, Homo sapiens
atcttcctacaactcctacaaattgctaatcttggctttaatattttagttttagcaaggtatcaaggaagggcagaggattttagccatatttcctaatgagaatagcattttaagtagaatgttttcaataatgccttaaatttgtagcaccattttgagttagtaaatttggaccctgcatttagagaagaggttaaactgtatttttggtttcaaataagaaatagtgcacatcttttggatggtttcttgtacaaactaatatgctgatattcaatcttttttttttgagtcacacatggtggcatgtgcctgtagtcccagctccttgggaagctgaggcaggaggattgtttaaacacaggaattcaaggccagccttggcaacatattgagactctctg

SEQ ID NO: 98287 - DNA, 416 bp, Homo sapiens
  misc_feature (1)...(416): n = a,t,c or g
cccacgcgtccgctccaaagtccattgcagagagcaggacagagtgaaaaagcccaggctctcgtcgctccaaagtccattgcagagagcagtacagaatcctatccagactgctgacttcataaggttgtcactcaatgagaaagctgtctcagtggcctctagagcagggaagaggtgccaagattaaagacctgacttcatttgctgcagcagcagtgtgaatgctttatctctgagctganaaaaaaaaaaaaaaaaaaaaaaaaaaaaaaaaaaaaaaaaaaaaaaaaaagggggggggggctggaaaaaaaaaaaaaaaagggttttttcgccccctatcccccccactaaaaaacccccccttttcactggggttttaagccccattttccaaacccgcgcctttgagg

SEQ ID NO: 98288 - DNA, 432 bp, Homo sapiens
  misc_feature (1)...(432): n = a,t,c or g
caccattgcattccagcctgggcaacaagaacaaaactctgtttcaaaaaaaaaaaaaaaaaaaaaaaaaaaaaaaaaaagggggggggccttttaaaaaaacccctggggggcccaaattttaccgggggtggaaaaaaaaaattttttttttttagggggggctaaaaaaaaccccctggggaatttttgaaaaaaaccttttttttggggggggaaaaattgggcaaaacccccccaaaaaaattaaagcttttggggaaaaaaaaaatttttaaagggtaaagggggaaaaaaaaccctaattttttttgttttaaaaatttttttttctggggtttttttaaaaaaaatttttcccccggggggccgggttttnnnncccnnnncccccccccccccccccccccccccccctttcccccncccgcg

SEQ ID NO: 98289 - DNA, 370 bp, Homo sapiens
ttttgattgaggttacagaaagttctttatataaaacttatttaaatttttcatatttcatctttgaaaaagtctgagaaaaatccataatattttctggtatgaaagtttgacagtattaatattttttttatattttcttaaatcattaaaccattttaatatatgttaactactaataaatggtttattctttctaactccatataagcttttccagcaaagattgtaataacacatttatgttctcgtttttctacagatataagtaaatttatatataaaaataccaaaaagaggctgggcgtggtggctcacgcctgtaatcccagcactttgggaggccgaggcaggtggatcacctaaggtc

SEQ ID NO: 98290 - DNA, 411 bp, Homo sapiens
  misc_feature (1)...(411): n = a,t,c or g
ggccccccagaccatacctctgacccacccagcccctgtggtagccccagcagttctcagggtgctgacctctctctcccacagaccccagacacccattgtccatagccttctcagggcagagtgggctggttgtgttgacaataaaacagtgttggtttgcnnaaaaaaaaaaaaaaaaaaaaaaaaaaaaaaaaaaaaaaaaaaaaaaaaaaaaaaaaaaaaaaaaaaannggggggggggcctttaaaaaaaccctggggggggcccccatttccgggggggggaaaaaaaatttttttttttttttggggggggaaaaaaaaacccccggggggtttttggggaaaaacccctttttgggggggggggaatttgggccccccccccccaaaaaaaaaagggggggg

SEQ ID NO: 98291 - DNA, 402 bp, Homo sapiens
ggcacgaggagaaaatcaaaaagtctttgatattggcttggacccaaattcctacatggtcacggttaatgagagtttagtagcatctgtttcctttagccaggcactgccccttccagctcttaaccccaattctggccacctaattcatttaccatactgcctgggcatgtaggcactgagtctgatatcagagaaagtgcatctagtagctaacaagcttgatcaggaaccctgtcctctttcttcctcttacctaagatatatatatcattgtatctgagtaacccttgtaccatggaccaaccccttaaatgtgtatgaacttgtcccttatagccatttgcaggaggtggctaccgccttggggcagcaccagaggaagagtctgcctatgtggca

SEQ ID NO: 98292 - DNA, 424 bp, Homo sapiens
catgcctataatcccagcactttgggaggccgaagtgggaggatcacttgagcccaggagttcaagagcaacttgggcaacatggcaagaacccatgtctacaaaaataaaaaataaaaaaattagcagcgtgtgggctggacatggtgggtgatgcctatattcccagcactttgggaggctggtctataacttccggactcaagtcattcacccaccttgggctccttaagtgctgggattacatgtgtgagccagcacaccggacaaaaatacataatccagataaggtctacacactgcatttgattgttatgaccataattctgtgtgagagtgtgtgtttttttttttttttttaaaaaacccgcgtttttattttgatcaccaaaattgttatccccgggagtgttaatttttcttc

SEQ ID NO: 98293 - DNA, 424 bp, Homo sapiens
  misc_feature (1)...(424): n = a,t,c or g
ttgagaaagccatgttgttagacatgggggcatgagttagcagttcttgtgagctttctcggtaaataaggggtcgtaagcctctgttgtcagattcacaatctgatgttttggttaaactatatttacaagaggaaaacccggtaatgatgtcggggttgagggataggaggagaatggtgcctcagtaaatatgttattaaatatgntcaaaaaaaaaaaaaaaaaaaaaaaaaaaaaaaaaaaaaaaaaaaaaaaaaaaaaaaaaaaaaaaaaaaaacagaaagatctaaaaaaaatggtgggggggggaaattataaaaatgtggggggggcccaaattttgggatacaaaaaattatgtttttcttttttttatagagtgttttaaagaagccacacctgttttcttgaaaaacgaact

SEQ ID NO: 98294 - DNA, 437 bp, Homo sapiens
  misc_feature (1)...(437): n = a,t,c or g
cccacgcgtccgagaaagagagaaggagatggcctccatgaaggaggagttcacacgcctcaaagaggcgctagagaagtccgaggctcgccgcaaggagctggaggagaagatggtgtccctgctgcaggagaagaatgacctgcagctccaagtgcaggcggaacaagacaacctggcagatgctgaggagcgctgtgatcagctgatcaaaaacaagattcagctggaggccaaggtgaaggagatgaacgagaggctggaggatgaggaggagatgaaccgctccttgccccgnnnnnnnnnnnnnnnnnnnnnnnnnnnnnnnnnnnnnnnnnnnnnnnnnnnnnngggggggggccctttaaaaaaatccttgggggggcccaaatttacggggggtgggaaaattatttttttttcctttagggggggga

SEQ ID NO: 98295 - DNA, 412 bp, Homo sapiens
gcaggagaatggcatgaacccgggaggcagagcttgctgtgagccaagattgcgctactgcacttcatcctgggcgacagagcgagactccgtctcaaaaaaaaacgaaaaaaagagatcagcctccttaaggagatttgacattttgtttggggcactaacgggaagaaaggcctcctgaaaactgtcaaggggggcctcacctgagggaagagctggtttcatttactttgttcaggttgtgcctgaagtacttggagatcacgctagcaaacctgctataaagcctgtggatacttgtctgcaaagcacattcacgaccattatcttactagatcctaccaacacccctgtgaagggcatgacagatttaactgtttaactgtaactttttttgagatagatgattgag

SEQ ID NO: 98296 - DNA, 579 bp, Homo sapiens
  misc_feature (1)...(579): n = a,t,c or g
aatgtgcaaaacatttttatttaaagactgtttttggagtttgcctttcagggttgagtaccgtgtgagggtccattgcccaccgtgggcacctgggacacccttctgttgtcctgagctggcggagccagtgtgggcagcatccggactcttcctaggcttccgcattgcccaagcaggcatagggctgggtagggatggtgttgagtcagcactcttcttcgtcatgccttttctaattttatccattactacagtagcacagagggagtgttctgctgcaggggaaactaaatcattagattttatgaactttttaaaagttaaaaacactagtgaagatggaaacttagttacagttgaaaactcttttatcttaagtgaacttgatttcctgtcttgtccctagagacaccatttcacacaggtaacccaggattgtctgtttccaggaattgcgaaagcccagctacgcagagatttgtcagagaacgagtaaagagcctccttcttccccattgcaaccccnnnnnnnnnnnnnnnnnnnnnnnnnnnnnnnnnnnnnnnnnnnnnnaaaag

SEQ ID NO: 98297 - DNA, 418 bp, Homo sapiens
cccacgcgtccgcggacgcgtgggaaaaatttaaaatttttttaaattaaaaataaatttaaaaaaaaaaaatggaaaaaaataaaaaaaaaaaaaaaaaaaaaatataaaatttttaaaaaaatataaataaaaaaaaatagggggggggggtttttttttttttttttggggggccctttttttgggggggggggggaattttttttttttttttttggggggttttttttttcgccccctgtttttttttggggggccccttttttttgggggggggggttttttgccccccccccccccccattttgtggccgggggggggtaaattattttttttggggggggggggggacacccctctttttttctccctttttttggttggtcttttaaaaaaaaaaaaaaaaaacttccc

SEQ ID NO: 98298 - DNA, 426 bp, Homo sapiens
  misc_feature (1)...(426): n = a,t,c or g
tcgcccacgcgttcgcccacgcgttccganaaaaaaaatttttaattttaaaaaaaaaaattaaaaaaaaaaaaggaaaaatttttnnaaanaaaaaaaaaaaaaaaaanaaaannaaaaaaaaaaaaaaaaaaaaaaaaaaaaattttttttttttttttttttnnannnntnnnnnnnngnggnnngttgtttttttttttgggggggttttttttttttggggggtgtggtttgggtttttttttttttggtgtggggggttttaagggaatttttttttttttttttggtttttggtttttttttttggggggggganngggggggccacccgcccccgtttttttttggctttgaaaggaaaaattttttcgggggggcggtttgnnnccccccccccccnnnnnttttttttttannnct

SEQ ID NO: 98299 - DNA, 416 bp, Homo sapiens
cccacgcgtccgcccacgcgtccgaccagccagaacgcctgaacgcaggcacatacttcctattctacaccctagtaggctcccttcccctactcatcgcactgatttacactcacaacaccctaggctcactaaacattctactactcactctcactgcccaagaactatcaaaaaaaaaaaaaaaagggggggccgttttaaagaacccctggggggcccaaagttaacgcgggctggcaaggtaaaagttttctccttatagggagccgaataaaaacctacctgggaattttgggaaagaacccttactttgggggggggacatattggcccaacctccctacagaaattaaaggctctagggaaaatataaaattttaaagggaataaggggtaaaacaagctgcataggc

SEQ ID NO: 98300 - DNA, 395 bp, Homo sapiens
  misc_feature (1)...(395): n = a,t,c or g
cccacgcgtccgcccacgcgtccgagaagttgcagtgagctgagatcacaccactgcactccagcctgggtgacagagagactctgtctcaaaaaaaaaaagaaaaaattcccaaatcttagtgtcggtttcaaaattttagggattttaaagggatagtaaaaaataccaggcttatgaggaatttcaatatgataggcttcttacattttaatagtaactcatctttgttccaggacccttgactgatgctagggaaaggataaagcataaaataccacccagttgggctctgattttgagttatttataataaagttgggggattatcataacatctcatatctttgcgtatgtggttttaatgctcggcagagcacaacactgatgatacn

SEQ ID NO: 98301 - DNA, 405 bp, Homo sapiens
  misc_feature (1)...(405): n = a,t,c or g
tctgctgaccctctccccactattgtcttgtgaccatgacacatccccctctcagagaaacacccacgaatgatcaataaatactaagggaactcagagacggcgcggatcctccatatgctgaacgctggttccctgggtccccttatttctttctctaanaaaaaaaaaaaaaaaaaaaaaaaaaaaaaaaaaaaaaaaaaaaaaaaaaaaaaaaaaaaaaaaaancaaaaaaaaaaaaaaacaaaaaaaaaaaaaaaaaaaagaaaaaaaaaaaaaaaaaacacncaccncgggggggggcccaaaaaaaaaaaaaaggggggggggcccaaaacagggcggggggaaagngaagaccctcccgcggagggggggaaaaacaaaaccgggggggggggagag

SEQ ID NO: 98302 - DNA, 412 bp, Homo sapiens
  misc_feature (1)...(412): n = a,t,c or g
cattcgaagaacccgtatacataaaatctagacaaaaaaggaaggaatcgaaccccccaaagctggtttcaagccaaccccatggcctccatgactttttcaaaaaaaaaaaaaaaaaaaaaaaaaaaaaaaaaaaaaaaaaaaaaaaaaangggggggggcccttaaaaaaaaaacctgggggggccaaaaataaaccggggggggaaaaaaaaaatttttttttaaaaggggggggaaaaaaaaacccttggggattttttaaaaaaaaaactttttttggggggggaaaaattggggcaaaaccccccaaaaaaaaaaaaagccttaaaaaaaaaaaaaaatttttaaggggaaaagggggaaaaaaaacctaaaatttcttgggggaaaaaaattttcaaaaaaaaaa

SEQ ID NO: 98303 - DNA, 405 bp, Homo sapiens
  misc_feature (1)...(405): n = a,t,c or g
tgtatccaatcctgcagtttctgtgcctcacttgcccttttctgtctataaatcttcccccatggcctccatgactttttcaaaaaaaaaaaaaaaaaaaaccaaaaaaaaaaaaaaaaaaaaaaaaaaaaaaaaaaaaaaaaaaaaaaaaaaaaaggggggcccccaaaaaaaaaaaccttggggggcccaaaataaaccggggtaaaaaaaaaaaattttttttctttaaaggggggtaaaaaaaaaacccctggggatttttaaaaaaaaaacccttttttgggggggggcaattggggccaacccccccaaaaaaaaaaaaaaccctatagaaaaaaaaaaaattttaaagggtaaagggggaaaaaacccccttattccccggggtgaaaaaaatttcan

SEQ ID NO: 98304 - DNA, 418 bp, Homo sapiens
  misc_feature (1)...(418): n = a,t,c or g
atggttctggcagggtggatgggagaagtcagtgagccctgagtgaggtcatcatacttttaaaacaggcttctgttttctgtgaaaagtcccttgaatcaagatgaaccaccacctatcacaccccatcctataaaaaaaaaaaaaaaaaaaaataaaaaaaaaaaataaaaaaaaagggggggggcccccttttttctccaatatttgtttaaaaaaaaaaaaaaaaataaaaaaaataaacaaaaataaaaaaaaaaataaaaaaaatattggggggggggcactttaaaaaaaattggggggggccctacttctcccggggaggcaaagaacctttctccttttaaaggggggtgtataaataaccttttgggggtttggaggggagaccacccctttgtggggggggaaaaan

SEQ ID NO: 98305 - DNA, 425 bp, Homo sapiens
  misc_feature (1)...(425): n = a,t,c or g
cccacgcgtncgcccacgcgtncgaattgcttgaacctgggaggcacgggttgcagtgagtcaagatagcaccactgcattccagcctgggcaacagagcaagactccgtctcagaaaagcgagaaaaggaaggagggaacacaggatcttgggatggggaaatccaaaagggacaaaggggatgcaaaaaaaataaatcccttcctttttacactcgattgaaaccaaaaagttcgttttcccaaaaacaaccataggcacctgttttggggaagattgccaaagatatgctggggatttggaaatcaaaaacatactgggcgagaatagtaaaaataaaaattgggtaaaaagaaactttattttgaagccaccctaaagggaaaaccggcaccacttgccataatcagaaagggatgataaa

SEQ ID NO: 98306 - DNA, 400 bp, Homo sapiens
ctgcagcccaggaggcagaggttgcagtgagccgagattgcaccactgcactccagcctgggtgacagagcaagactccatctcagtaaataaataaataaataaaaagcgctgcagtagctgtggcctcaccctgaagtcagcgggcccaggcctacctcactctctcccttggcagagaagcagacgtccatagctcctctccctcacaagcgctcccagcctgccctccagctgctgctctcccctcccagtctctactcactgggatgaggttaggtcatgaggacaccaaaaacctaaaaataaacaaaaagccaaacaagccttagcttttcttaaagactgaaaaaaaaaaaaaaaaaaggggcggccgttttaaaggatccctcggggggcc

SEQ ID NO: 98307 - DNA, 115 bp, Homo sapiens
tgtatatactacagcgatggctattgaggagtatcctgaggcatgggggtcaggggttgaggtcttggtgagtgttttagtggggttagcgatggaggtagggtcgacgcggccg

SEQ ID NO: 98308 - DNA, 417 bp, Homo sapiens
  misc_feature (1)...(417): n = a,t,c or g
ggcaaccagggtgggggctacggaggtggttatgacaactatggaggaggaaattatggaagtggaaattnnnnnnnnnnnnnnnnnnnnnnnnnnnnnnnnnnnnnnnnnnnnnnnnnnnnnnnnnnnnnnnnnnnnnnnnnnnnnnnnnnnnnnnnnnnnnnnnnnnnnnnnnnnnnnnnnnnnnnnnnnnnnnnnnnnnnnnnnnnnnnnnnnnnnnnnnnnnnnnnnnnnnnnnnnnnnnnnnnnnnnnnnnnnnnnnnnnnnnnnnnnnnnnnnnnnnnnnnnnnnnnnnnnnnnnnnnnnnnnnnnnnnnnnnnnnnnnnnnnnnnnnnnnntttttatttaacgggccgcagccttattcctttaatggggggaaatttaacttgggcccgggcggggttttacaacggg

SEQ ID NO: 98309 - DNA, 454 bp, Homo sapiens
  misc_feature (1)...(454): n = a,t,c or g
cagccagatagtggaatatcctccatccgttcttttaagaccatccttcctgctgctgcccaggatgtttattaccgggatgagattggcaatgtttctaccagccacctccttattttggatgactctgtagagatggaaatccggcctcgcttccctctctttggcgggtggaagacccattacatcgttggctacaacctcccaagctatgagtacctctataatttgggtgaccagtatgcactgaagatgaggtttgtggaccatgtgtttgatgaacaagtgatagattctctgactgtgaagatcatcctgcctgaaggagccaagaacattgaaattgatagtccctatgaaatcagccgtgccccagatgagctgcactacacctatctggatacatttggccgccctgtgattgttgcctacaagaaaaatctggtagaacagn

SEQ ID NO: 98310 - DNA, 432 bp, Homo sapiens
cggacgcgtgggcggggtttcactatgttggccaggctggtctggaactcctgacctcaagtcatctgcccgcctcagcttcccaaagtgctgggattacggatgtgagccaccgcacccagcttgatgtccctttttctttctccctatcccctctgccccaccagtgctgatgtcttagactgaacttactaaaaccccggattctttttcacctgaacttcttctaagccatgtctggcccactgtgtattgctgaggtcttacatagatctctgatcactttattctgttaggtttacctaaccattctatacatggagatgattcttggatccttatctttcaatgtttactatccctcaagggttatatctgtgaaatgtgatactatattttcatataagctgttaataaaaatatttaacagga

SEQ ID NO: 98311 - DNA, 398 bp, Homo sapiens
cttgaaaccaggaggcggaggttgcagtgagccgagatcgtgccactgcagcactccagcctggcgacagagcgagactccatctcaaaaaaaaaaaaaagggaaatggggattggaaagaattggttgggggggatccacaacaaataacggggccaaaaatcaacggggggaaaaatttggaaaaaaaggcgggttttaaaaatgggggccatttgaaaaacaaaaaaaaggaggccaacatttggtttttaacttggggggctttttccaacaaaaaaaaaaaaaacttggacaggaggttaaaaaaactggggagaaaagggatgggcaacccaaatttttttaaaatcaaaaacaaaagcctttaaggtccaaaaaaaatatttttggaaaag

SEQ ID NO: 98312 - DNA, 383 bp, Homo sapiens
cttgaaaccaggaggcggaggttgcagtgagccgagatcgtgccactgcagcactccagcctggcgacagagcgagactccatctcaaaaaaaaaaaaaagggaaatggggattggaaataatttgttgggggggatccccaactaataaacgggccacaaattcaccggtggaaaaattttgaaaaaaaggccggttttataaatgggggccagttggaaaccaaaaaaaaggaggccaacatttggtttttaacttggggggctttttccaacataaaaaaaacaaactttgacatgaggttaaaaaaacttgggagaaaagggatgggcgacccaaatttttttaaaattcaaaatcaaaagcttttaggttcataaata

SEQ ID NO: 98313 - DNA, 396 bp, Homo sapiens
  misc_feature (1)...(396): n = a,t,c or g
caagacgctacttcccctatcatagaagagcttatcacctttcatgatcacgccctcataatcattttccttatctgcttcctagacctgnatgccctttncttaacactcncatcggctctgactattcataagtgttcatagaaacttttatctatctgcggctgagaaggccgcaaaccataggatctcttacttgtttactaattctgtttatgcgcctacctaacgctggctgcataagaacctacagtctatatatcacaaggtttttctatcatgtccgacgctgaggatccagaaaccgcctgagatgtgagaataattaattgtgttgacagagctatgaagatggggttcgcgtactagtacctcgagttggataccgatccccag

SEQ ID NO: 98314 - DNA, 389 bp, Homo sapiens
  misc_feature (1)...(389): n = a,t,c or g
gtcaattttggcttttgttgccattgcttttggtgttttagacgtgaagtccttgcccctgcctatgtcctgaatggtattgcctaggttttcttccagggnnnnnannnntnnnngnnncgnnttttngggnnncgcnannnccngtttgggttttggggcccccgcgtttactgtgttttacagggagcgcttttgcctgtgtatatacccaatggggtttcctacgagtttttttacagggcaaatggaggattagngaccttttattaactctttgatcccgcgggtgtaccagactgtaaatgcctacgtttaattttattaagcctggaagaccactttttcttttccgatgaagcccaatttttgaggtcgacgttttcacg

SEQ ID NO: 98315 - DNA, 227 bp, Homo sapiens
  misc_feature (1)...(227): n = a,t,c or g
caatttcctttcctcatcccaaataaatgccttgttacccgaaaaaaaaaaaaaaaaaaaaaaaaaaaaaaaaaaaaaaaaaaaaaaaaaaaaaaaaaaaaaaaaaaaaaaaaaaaaaaatcttggacatgaaaaaaaaaaaaatatataatttcttcaaaagaaaaaaaataatgcccccccaaaaaaaaaaaaaaaaaagggggntgaaaaaaaacaaccaaggg

SEQ ID NO: 98316 - DNA, 374 bp, Homo sapiens
  misc_feature (1)...(374): n = a,t,c or g
cagcctaggcaacataatgaaatcctgcctctacnnnnaaaaaaaaaaaaaaaaaggaaaaaaaaaaaaaaaagggggggggggggggggaaacccaaaaaaaaaaaagggaaaaatggaaaaacccccggggggaaataaaaggggggaggggggaaaaaaaaaaaattttttaaaaaaaaaaggggggggcctttttaagggaaaaaaaccccctaaaaaaaaaaatgggggcaggaaaccctggaaaaaaaaaaattttaaaaaaaaaaaaaaaaaggccccattttttttggggccaaaaatttttaaaaaaaaaaaaaaaagggggttaaaaaaaaagttgggatttttttcccaaagtgtgggccccc

SEQ ID NO: 98317 - DNA, 324 bp, Homo sapiens
  misc_feature (1)...(324): n = a,t,c or g
gcaattttaaactattttgcaaaggatttttttttttgagacagagtcttggctctgnctcccaggctggagnacaggggcacaatcttggctcactgcagcctctacccgctgggttccagctgttcttgcaacctccgcctcccgggtccaagcaattcggccgcctgaaccttttgggaaataaggatttgtgggggctccctgttttacgagcacaccctcaggctcccccgttggcttttattttgtaacctcgactttgcctcgccttatggcttaaatggggccttcgggaagataggagttcctccgcctttgaca

SEQ ID NO: 98318 - DNA, 197 bp, Homo sapiens
actgcctggctttgctacacctttctaggcaaaggcagtatgctctccctctccttggcctccctggctgtccacacatccacacccactcacacacacatgcacatgatcatacacattacacaagcccacatgcccacagacatgctcacactcacactcacatgcatacgctgccatacacaacacactgtatt

SEQ ID NO: 98319 - DNA, 443 bp, Homo sapiens
cggacgcgtgggcaaaaaaataaggacacatagggcaattatagcctcttatgtagtgacagcaaacagtaaacacagcctaacccataggcagattaagcatgaaagctcacactaaaggtctatttaatcccatttccttttagctcatatattaggtctggctcttaacaaaaactcacaaggcatagtaaaagacaaaaatcacagcctgaagagccagagtaagcatcagaaacagacacacatatggcagagattttagaattatcagactaggattttgttgtttgtgtttttagagataggttctcactctgtcacccaggctagagtgcagtagcatgaacatagctcactacagcctcaaactcctgggctcaagtgatcatcctacctcagcctcccaaagtggtgggattataggaatgagctaccatgcc

SEQ ID NO: 98320 - DNA, 443 bp, Homo sapiens
  misc_feature (1)...(443): n = a,t,c or g
cggacgcgtgggctttctttaatggacccggggtctcactatgttgcacaggctggtctcggactcctcaactcaagagatccacctgcctcagcctcccaaagtgctgggattacagacctgagccactgagcccagctcctaaaactctcttttcatatgtgctactttaggctatgtttatttctgaatataggcaaatagcattacaatcaaaccagtagctagaactcacaaacatgaaattcttagagcagtactttataaaatttctgcctacctaaatgtagaccttaatattaaccatctgaggtgatatcttgcaagatattttctatatgcagatatacctgcccaagaaaaattatatttctttttaaaacagaggtgctttctggtttgctttgcagaatgaggagtaaaaaagggctattctggtgatn

SEQ ID NO: 98321 - DNA, 432 bp, Homo sapiens
ctttctcttttgaaggagaagccaagagctgagggtgtactcttaaaggcatgatgctatactgcggaggaacggggcctgcagtgggtaaacgtaacagactgtttttcttcttatctggctcctagcactgtgctcacctggggtgctgcaaactgtgaaaaggtttttagagttcagatgcatcttctcactaggtattgttacatttatatgtttatacagaaattagggcctgtggtattttttatgccattttgctaatgtacccagtattattttatagattagattcataaagcgcattcatctgagtctagtaagtcggataactttttttttttttttcaggcgttgcttttaaatttgcccaaaacctttgggcaagaacgggcaataaacagggcttcccgaaaaaaaaaccggggggtg

SEQ ID NO: 98322 - DNA, 421 bp, Homo sapiens
atcgcttgaacccaggaggcagaggttgcagtgagccgagatcacgccactgcactccagcttgggtgacaagagcaaaactccgtcttataaaaaaaaaaaaaaaaaaaaaaaaaaaaaaagggggggggccaaaaaaaaagggggaaaaaaaaaggggggttttgggaaaggaaaaaccccggaatataaccaaaaaaggggggggacccaaaggggaaggggggggggggcccaactaaaaaaaaaaaaattttccccggttccgggaaaaccccaaaaaagggggggggggccgggggccaaaaggtttttgaaaaaaaccccctggggggtgggtcaaggaaaaagcctggggaacttaaaacccctgggaccctaaaaggtaaagggaaacccctgggaaagtgggggttaaaaa

SEQ ID NO: 98323 - DNA, 425 bp, Homo sapiens
  misc_feature (1)...(425): n = a,t,c or g
cccacgcgtccgaacattttattttttattttttctttgagagggagtctcacactccagcctgcatgacagagcgaaactccatttcaaaaagaaactgagatttggcttgagaattaacttatccagggtcatagggtagtaatctatttttctcaactcaggaaagtcaggggaagacaggcgtgtgacagcacccttctaggacaccttcccaaggttgttaggcggatgttcccattcctgtcatttactgtggccgggctggagcccaccagccactacaggatgtttgtggacgtggtcttggtggaccagcaccactggcggtaccagaccggcaagtgggtgcagtgtggaaaggccgagggcancatgccaggtgcgcgcgcccctgggagcggcgggctctgntttcgctgggn

SEQ ID NO: 98324 - DNA, 462 bp, Homo sapiens
  misc_feature (1)...(462): n = a,t,c or g
attgtangcttagtacggtttgaattcttggtcgaccacgcgtccgcaatactatcacctacatgaaatgctaaaaagagtacttcaatcagaaagaaaatgacatgaatgatctcaaagcaaaaccatacatgctgaaaataaaaaaaaaaaaaaaaaaaaaaaaaaaaaaaaaaaaaaaaaaaaaaaaaaaaaaaaaaaaaaaaaaaaaaaaaaaaaaaaatagtaaaggggggggggtttttttttatttttttggggggggtttttttttttggggggaaaaaaattttttttttttttttttggggggggttttataaaaattgttttttttttttgaaaaaaatttttttttttgggggggggttttttggcccactttttttgaagaattttgttgtttgggaaatatatttttttttttggggtggggggaaaaacaagtttttttttttttgt

SEQ ID NO: 98325 - DNA, 442 bp, Homo sapiens
aagttaataccattgtttgtactatatttatttttggaactaccttctatatggagtctgtaacacaagttttccattgatagtagcaataaaagtttccatctcaaaaaaaaaaaaaaaaaaaagggtttaaaaaataaacctttttggggtcaaaaaaatttcccccttttattaaaaaataaacaaaagggaattcccaaaaatctttttttttaagggttggaaaccgaaaaaagggacgggaaccaactttaaaatttttttttttgggggggttccccctttgggaataaacccaagggttttttggggggggcccaagaaaaattggttttttttttcggggtttaaaaaatgggggtgggggaaaccctaaactaaggtttttaaaaccgggccaattggtggggcgggggaaaacaaaaaaaaaccaaggttt

SEQ ID NO: 98326 - DNA, 431 bp, Homo sapiens
  misc_feature (1)...(431): n = a,t,c or g
ctcagagaggctgagtcacctgcccagagccacacagccagcacgccaggcgctggcagctcctaaccccatcaatgcatctttttttggcatttgtctgacacatgcttgggctctgaaaaatgtgtcctgagtgcacgccagcctgggcaacacagcgagaccccaacttccaaaacaaaaaatgtgttctggggtcaaaaaanaaaaaaaaaaaaaaaaaaaaaaaaaaaaaaaaaaaaaaaaaaaaaaaaaaaaaaaaaaaaaaaaaaannaaaaaaaaaaannnnnnnnggggggggctcttttaaaaaaatttttggggggcccccaattttcggggggggaaaaaaaattttttttttttttatggggggggaaaaaaacacccccggggtttttttgtaaaaaaaacttctttgtgggggaga

SEQ ID NO: 98327 - DNA, 380 bp, Homo sapiens
ccagctacttgggaggctgacgggcgaggatcacttgagcctgggaattcgaggctacagtgagctatgattgcgccactgcactccagcctgggcaacagagggaaaccctgtttcaagaagaagtaataattaattcaaatacataatatttggtgttttcctggttgccgttattttaaccttcctgagtagtatttatatttacaaatgtagttggaaaaacttatgtgcctacaggttatgtaggtgctgtgaagagctgaagatggtctctatcctcaggacttaacaccctaaggcagtgtttccaattatagccactgagaccagcagtgttggtgatggtgccgctgtagacaaactagcctcttgaattg

SEQ ID NO: 98328 - DNA, 186 bp, Homo sapiens
gggggggccgttttaaaggatccttgggggggcccaagtttacgggggggggcaaggaaaaatttttttccttatgggggggggtaaaaaaaccccccgggggattttggggagggaccttttttttgggggggggaaaaattgggccaacctccctccggggatttaaggctttaggggaaataa

SEQ ID NO: 98329 - DNA, 427 bp, Homo sapiens
catgcctataatcccagcactttgggaggccgaagtgggaggatcacttgagcccaggagttcaagagcaacttgggcaacatggcaagaacccatgtctacaaaaataaaaaataaaaaaattagcagtgtgtgggctgggcatggtggctcatgcctatagtcccagcactttgggaggctggtctataactcccggactcaagtcattcacccacctcggcctccaaaagtgctgggattacaggtgtgagccagcacaccggacaaaaatacagaatccagataaggtctacacactgcatttgattgttatgaccataattctctgtgagtgtgtgtgttttttttttttttttttggaaacacgggtttgaattctgccacccagcttgtttccccgggattattatatcccccctccccc

SEQ ID NO: 98330 - DNA, 410 bp, Homo sapiens
ttgaggagggaggatggcttggggccaggagttcgagaccagtctgagcaacatagggagactctatctttaccaaaaaaaaaaaaaaaaaaaaaaaaaaaaaaaaaaaaaaaaaaaaaaaaaaaaaaaaaaaaaaaaaaaaaaaaaaaaaaaaaaaaaaaaaaaaaaaaaaaaggggggggggggggaaaaaaaaaaatgggggggggggaaaaaaaagggggggaaaaaaaaaaaattttttttttttttggggggggaaaaaaaaaacccggggggggatttaaaaaaaaaaactttttggggggggggggggtttggggcaaaacccccacgaaaaaaggggggggggggggggaaaaaaaaattttggggggggggggggggcaaaaaccccccccgggccggcg

SEQ ID NO: 98331 - DNA, 444 bp, Homo sapiens
  misc_feature (1)...(444): n = a,t,c or g
aaaaatctttgtctcaaacttggtattttggccttacctagatgcaaaatgaaaaaatacatattttctgaggtaaaaaggactctagacaaaaaagtgataaataaactcgacccaaaagattgttctaataacaaataagttgatgagtgtgcttctcacttgataggaacaatttttttttttatgttttgttctggctttatttctgtctgtttaactaggaaaatctaaagctgaaatcattcccttgcagccacttccactggttacgttggttcaatttaacaataggagctctgtcaagatcttttgatgaggcagcattactttttttccaaaatgatacgtattggccgggcacggtggctcacgcctgtaatcccagcactttgggaggccgaggcgggcggatcacgaaatccagagatcgaaaccattctn

SEQ ID NO: 98332 - DNA, 453 bp, Homo sapiens
  misc_feature (1)...(453): n = a,t,c or g
tgtatccaatcctgcagtttctgtgcctcacttgcccttttctgtctataaatcttcccccatggcctccatgactttttcaaaaaaaaaaaaaaaaaaaaccaaaaaaaaaaaaaaaaaaaaaaaaaaaaaaaaaaaaaaaaaaaaaaaaaaannngggggcccccaaaaaaaaaaaaaccggggggccccaaatttccccgggaaaaaaaaaaaaatttttttttaaaaaaaaaaaaanaaaaaaaaccccccgggaaatttttaaaaaaaaacctttttttgggggggggaaaattggccaaaacccccccaaaaaaaaaaaacccctaaaaaaaaaaaaaaaattttaaagggaaaaggggggaaaacaccctttttttttttgtggggaaaaaaatttcttactggggttttttaaaaaaaaatttcccccgggggcgggggtggcct

SEQ ID NO: 98333 - DNA, 427 bp, Homo sapiens
tacttgccgcagtactcttaaaactaggcggctatggtataatacgcctcacactcattctcaaccccctgacaaaacacatagcctaccccattctcctcctatccctcaaccccgacatcattaccgggttttcctcttaaaaaaaaaaaaaaaaaaaaaaaaaaaaaaaaaaaaaaaaaaaaaaaaaaaaaaaaaaaaaaaaaaaaaaagggggggggggccttaaaaaaaaatcctgggggggccccaataaccccggggggaagaaaaaattttttttttttttttggggggtattaaaaaaacccctccgggttttttagaaaaaaaacttttttgggggggggagcaattggcgccacccccccccaaaaaaataaaagctttgggggaaaaaaaaaaattcttggggggggggggggcg

SEQ ID NO: 98334 - DNA, 418 bp, Homo sapiens
cggacgcgtgggtgggactatttgctttttgttgttgagttgtagttctttatacattctggatattaactccttaccaaatatatgctttttacatattacctcccagtccataggttgctttttcgctctgttgattgtgtcctttgatgaaattttaagttttgatgtactgttgactctttctgtctgggggttctgtattcatggatcgaagcaaccatggatcaaaagtatttggagcatccatggattgcagtgatcattaatcaaaaatatttggaaaacaaaaagggtagttgcatctgtactaaacatgaacagacattttttcttgtcattattccctaaactatatagtataataaatatttacatagcatttacattgtattagaagttataaataacctaatga

SEQ ID NO: 98335 - DNA, 524 bp, Homo sapiens
  misc_feature (1)...(524): n = a,t,c or g
gcagtacctgagacatagacgactnttcatggatattgagagagaacaagttaaagaacaacaaaggcaaaaagaacaaaagaagaanattgaaaaaattaagaanaagagagagcaagaatgttatgctgcagagcagaggatcctaagaatgaactttcatgaagatccatattcaggagagaagttgagtgagatattagcccagttacaacttcaagaaataaaaggaaccagagaaaaacaacagagagaaaaagaatacctgagatatgtagaagctttacgagcccaaatccaggagaaaatgcagctgtataatattactttacctccactatgctgntgtggtcctgatttttgggatgctcatcctgatacctgtgccaacaactgtattttctataaaaaccacagagcatatactcgggcactacattcattcatcaattcctgtgatgtcccttggggtaattcaactctttgagtcgcaattcataattttgcttctgcacacaggcgga

SEQ ID NO: 98336 - DNA, 519 bp, Homo sapiens
  misc_feature (1)...(519): n = a,t,c or g
aatctatcananatggctcaaccgtttgtctctgtcactagcagtcactgctccaacggagcttanaccaacttcagctaaatggaattgcaacacaattggtggcttccagggacatatttatactttaacgaagaactgtaggggaggcaaacctttaactccaaggaatgagtccctagttattggatattaaccactataataggttatggcagtcaaatatttaggacaaagctgccttctctattctcaaagacctcagtttgcttcatgtattttggggctttattgctaggttgaaatatatttataatagtgatttcttctggatggattgaccctttatcattataaagtgtccttgtttgtctttggtaacaatttttgtctcanacttgatttattttattttattttttttgagatgcaatttccctcttgttgcccangctggagtgcagtggcgtgatctcggctcgccacaacctccaccttccaggttcaagcgattctcct

SEQ ID NO: 98337 - DNA, 492 bp, Homo sapiens
  misc_feature (1)...(492): n = a,t,c or g
ggngttntgccatgttggccaggctggtctcgaactcctgacctcaagtgatctgcccactttggcctcccgaagtgctgggattgcaggcgtgagccaccgtaccaggccccattcccacttttacttttattttctctacagttcatccttttttttttttttctttttggcccaaaggggaaacagggcccctcggggtaaaaaaaccccttttggtttggccacacttaatattaaaagtaacgggggggttttttggtttttatttttgggttttgggtttttgaaaagggagccaacttttgcccttgggctaaaagaccgggggggaaatttggtttaatggaaccttggccccccgggttaaaggaaattttttggcctaacccccccgagaatgggaaaccgaggccccggccccccatcccaacaatattttttggttttaaagaaaacccaatagaaccaatgtggcgaaggggggctgaa

SEQ ID NO: 98338 - DNA, 381 bp, Homo sapiens
attaaaataaactaccaaatggaacagaattcttatcttctttggttccaaatacttttttcttttcttttctttttttccctttctttttttttttttttttttggggaaaggggggccccccccggggggggggggccaaattttacccccttgaatttcccccccccggggtccccccccccccaaaggggggaaaaaaagggggcccccccccccccactaattttttgttttttaaaaaggaagggggttcaccctttgggcccgggggggttaaaacccccggccccaaggggttcccccccccttccccccaaagggggggaaaaaagggccagtgggcccaaaaacccccctaacaaacaaactttttttttt

SEQ ID NO: 98339 - DNA, 378 bp, Homo sapiens
ccgaggggtcatacaccaggttgttggcgaacatactcctgaggaaccgcacgggctccagccacgactcgatgagcagcagggagatgcggagcagctctagattggatttatgttgcggttcctccatgttggagggtgtcggaatagagtctgagaagcagaaggaggtctgggagtcatgcacgaatgaatacttctggtcctttgggatataggtttcttcaaactcctggtaggtgtcaatggccagatggtgcgcgcgatgggcttggagcatagcgtggtcaaaaagcctggataacggaacggtttggacggcaccagcctcttgaagccagggcaggcatagcagggcaaaagccaggagcagggacg

SEQ ID NO: 98340 - DNA, 393 bp, Homo sapiens
cttttttatatttttaaaaaaacttggagtttgtttttgtgttttttgtggatgatgtgtgtttttattttttttttttttttattatttgttttttttttgtgtttggggggaatccttgtatcttttattcccccgggcggagaaaaaagagaaaaaaaaaaaagaagggggggggaaaaaaaaaaaaaaaaaaaaaatgttgtttttaaaaaaaaaaaaaaaaacccttggggggggggggggggcttaaaaaaacaaagagcccggggggggaaaaaaaaaaaaaaaaaaggcggggggggctccgggggggggaagaaaaaacaaagcccactgcggggatgaagtgggaaaaaaacccccctcttgtggggttaaataaaaaaaaga

SEQ ID NO: 98341 - DNA, 407 bp, Homo sapiens
caggagtttgaagaaacctatatcccaaaggaccagaagtattcattcctgcatgactcccagacctccttctgcttctcagactctattccgacaccctccaacatggaggaaacgcaacagaaatccaatctagagctgctccgcatctccctgctgctcatcgagtcgtggctggagcccgtgcggttcctcaggagtatgttcgccaacaacctggtgtatgacacctcggacagcgatgactatcacctcctaaaggacctagaggaaggcatccaaacgctgatgggggtgagggtggcgccaggggtcaccaatcctggaaccccactggcttcgagggctgggggagagaaatactgctgccctctttttagcaataaggcgcgtgaccaagagaactc

SEQ ID NO: 98342 - DNA, 426 bp, Homo sapiens
caacaaagtgagacccctgtctctactaaagtaaataaaacaataaaataaaaaaaaaaaaaaaaaaaaaaaaaaaaaaaaaaaaaaaaaaaaaaaaaaaaaaaaaaaaaaaaaaaaaaaaaaaaaaaaaaaaaaaaaaaaaaaaaaaaaaaaaaaaagggtggaaaaaaaaacagaggtgttttgggaaaaaaaaaaagggtgcaaaaattgggtgttcacccccccgactctaaaaaaaaaccccccccattctctagagggggggggaaaaaaaaaaaaaacgggggctttcttttctttcttttttgtaaagaagaaaaaaaaaaaaagatttcttttaaaaaaaaaaaggggctaaagctgctttttttattctattttttactgggaatgtatactctgggggggggccgggaaaaaaaa

SEQ ID NO: 98343 - DNA, 372 bp, Homo sapiens
ctgggcctggcaggggtggaagaggaggtggcgagtcgcttgaatgcgggaggcagaggctgcagtaagccaagatcacacgactggactccagcctgggcgatggagcaagactccatgtccaaaaaaacaaagaatgaataccaaaggaggcaactgattcatttacaaagttctactagtggtttcttatatgtgcatgaacaatgaatttttctactgtaactgctcaacgtattgccctttaaagaaccaaaaaaagaaaataaaatatagcatgtacttttaaaattcaataggggaaaaaaatattttcaagcacttattttgggaaatttggacaacttatagcggcctacacagatgtgagca

SEQ ID NO: 98344 - DNA, 336 bp, Homo sapiens
gcacgaggagagagagagagagagagagagagagagagagagagagagagagagagagagagagagagagagagagagagagtctcgcgcccaattccgcgcgaggaaaaattcacaggcgccacacccccgggtctgtgagactctgtggacagaagagggcggctccttttatcccctgaccgaaaaagactttgcccagtgtgagagagcacacttctgtgttctcggtgtgtcacaccccccggggtggggcctctgtaaaaaaatgaacccggagtgtgagagggccacacactctctacatggagacgcagatatctctggtgttcttac

SEQ ID NO: 98345 - DNA, 446 bp, Homo sapiens
cagatttcacttattcattctgccatttttttctttgcaaatgtattaatttccagctattattaattcttcattttgcttttatgaactttgttttggtattctttttctaacatttgctggtagaagtttgtttctttttcttttattcctccttgtttattaattatttaaagctgtaattttcttctggtcactgcattaggtacgagattctcataagttctaagtaggcttttcatcactattttctagatattgtacaattttaatttcagcttcctctttgaccaaagagttgtgtgagaaaaaaaggagttttttgttttgttttgctttttggcttttaggttttttaagacagagtcttgctctatcgcccaggctagagtacaatggtgcgatctcagctcactgcaacctccacctcccaggttcaagcgatt

SEQ ID NO: 98346 - DNA, 390 bp, Homo sapiens
cccagacctccttctgcttctcagactcgggtccgacacccttcaacatggaggaaacgcaacagaaatccaatctagagctgctccgcatctccctgctgctcatcgagtcgtggctggagcccgtgcggttcctcaggagtatgttcgccaacaacctggtgtatgacacctcggacagcgatgactatcacctcctaaaggacctagaggaaggcatccaaacgctgatggggaggctggaagacggcagccgccggactgggcagatcctcaagcagacctacagcaagtttgacacaaactcgcacaaccatgacgcactgctcaagaactacgggctgctctactgcttcaggaaggacatggacaaggtcgagacattcctgg

SEQ ID NO: 98347 - DNA, 388 bp, Homo sapiens
  misc_feature (1)...(388): n = a,t,c or g
ggcacgagcaaagttgcatgagagaatgagactatttagactattacaaaccaaagcaccactcattaatttttttattgatgtgcttttagttctttttttttttctaaatactggggaaaaggttaaatttttataggagcatgttatgggatccattttgatataattactgatagccatttatagttgggggggttaaattttctttttaggcttttcttttttaataactggctaaaatctttttgtcattcagttctgctacaggttggatagaaaatcgccctcagtcaccagctacaggcagaacacctgtgtttgtgagccccattcccccacctcttccaccaccttttncatttgcctttgtaactttcttaataaa

SEQ ID NO: 98348 - DNA, 397 bp, Homo sapiens
  misc_feature (1)...(397): n = a,t,c or g
ggcacgagaaaaatataagatgtatgcagaaaactacactttgtagcaatctttgtaatagcaaaaaaattggaaacagcccaaatgaccactaatagtggactggttgaataaactggtaaatgcattttgcagctgttttgagagagagagagagagagaaagagagagagagagaaatatctttacgtaatgctattgagtgatctccagatggattaagagaaaaaagcaaggtaaaagatagtatgttcagtatgctgccatttctttaggaaaggtgaggatataatcataaatacatacatatatatntgtgtgtgtgtgtgtgtgtgtgtgtgtgtgtgtgtgtatatatatattgnnnttagaaacaaggtctctctctgtcacccan

SEQ ID NO: 98349 - DNA, 384 bp, Homo sapiens
ggcacgagctgggcttttattctttaatatttgcacaggcatgccctttattactttttttccccagatttcccccatttattctgaaatgtttgatcctttccctttaaactcgattgtattttggcttaactatgggttttggaaacaacacaggataaatttttttgactgaatggtaattcctctttttaataaggacactcaacacattatccttttttggggatacgtactaatttttttttttttgaaacggaacttcgtttttgttgcccaggctggagggcaagggcgttattttggttcgttgaaacctccgcctcccaggttaaagccattttcctgtttaagcctcctgggaacttgggattacaggagggt

SEQ ID NO: 98350 - DNA, 419 bp, Homo sapiens
cccacgcgtccggactagtttagatcgcgagcggccggcccttttttttttttttttgggttttttttaaaaaaggggttttttttttggtgccccgggtggaatggcaagggattaatttaatttaatggaacccttggcctccttaataaaggaaattatccgccccaacccccccaagaagggggaataaagggcgggccccattaggccaagtaattttggtttttttgaaaaaaaaggggtttcccctggggggcaggggggatttgaatttttgaatttgggaaccccccggcctggccccccaaaggggggggaataaaggggggaacccctggccccggtttttttttttttttttttttttttaaaaaagaaccccccttgggttcccagggggggggggggggataaat

SEQ ID NO: 98351 - DNA, 493 bp, Homo sapiens
gcaggagaatctcttgaacccagaaggcgaaggttgcagtgaaccgagatcatgccattgtactctagcctgggtgacaagagcaagactccgtctcaaaaaaaataaaaaacaaaaagcacttcctgacgggggaggcgggtttaactggtttccctaagccgggtttaaaccccggggccaaaagaaatccccccccttgccccccaaaattgggggaaaaaacgggggaaaaaaaggcccccggccaaaaaaactaaagttttaaaaaaaaaaaatgaaaattttttgttttttttaagggcccggggtgggttttaaaaaaaaaaaaaaaaggggccccaccctaatttcgcccaatttttttgtttttattccaattttcccccaaaatttggtttcccggtttccaatttcaaaggtttaaaaaaaaaaatggccttgaccgtttaattttcccaaaaaaccttttgggggggataagggttttggg

SEQ ID NO: 98352 - DNA, 488 bp, Homo sapiens
gggctccccctgacgcccgtcttagaggcccgtaattcccggcccgacccacgcgtccggtgagttgttgttaagacagccatccatgtgcatgagcatcatccagctttttttgttagcaaaacatttactgttttcttttcccttttaagactctgttgatgtgataatttgatttggaattataaagtcatctcttctctgcctacttcttttttttgccatgattactgagtggataacacaagccgtgacatgatacaaactgtacttatacttaatgatctctgccttcttgtagccacataacttcgagtcagttatctcctataacacacaggcctctttaaatgagttcttaataaaatatttgagccgttgttttaaaagctattcatggctgggtgcaatggctcatgcctgtaatcccaacactttgggaggctgaggcaggcggatcacttgaggtcaggagttcgaaaccagcc

SEQ ID NO: 98353 - DNA, 420 bp, Homo sapiens
tgctttcctaaccgtgcccccccccccttttttttttgtaaaaaaaagggcttttttttttttttttttacccaaaaaaaaaaaaaaaaaaaaaaaaaaaaaaaagggggggccccctttaaaaaaacccttgggggggcccaatactcccgggggggggaaaaaaaaatttttttctttttgggggggggttaaaaaaccgggccccgggcccctttttaaaaccccgggagggggaaaaaaccccgcccggggttttttgaaaaaaacccttttttttgggggggggaaatttggcccccccccccccaaaaaaaaaaggcctcgaggggaaaaaaaaaattttttaaggggaggggggggaaaaacaccgcccttcccccccgggggaaaaatttctcccaaaaaaaaaaaaaaaaa

SEQ ID NO: 98354 - DNA, 165 bp, Homo sapiens
cggacgcgtgggctagttctagatcgcgagcggccgccctttttttttttttttttttttttttttttttttttttttttttttttttttttttttttttttttaatttatttattttttttttataaaaaaaaattttttttaaaaaaaaaaaaaaataaataa

SEQ ID NO: 98355 - DNA, 422 bp, Homo sapiens
atcattgaatcacgggggtggtttcccctgtactgttcttgtggtagtgaataagtctcatgagatctgatggttttataaaggggagttccccggcacatgctctctcttgcctgcccccatggaagatgtgtcttgcttctcctttgccttctgccatgattgtgaggcctccctggccatgtgcaactgtgagtcaattaaacttctttccttttaaaaaaaaaaaaaaaaaaaaaaaaaaaaaaaaaaaaaaaaaaagggggggggcccttttaaaaattcccttggggggcccaatttttccgggggtgggaaaaaatatttttttttctttttggggggctttttaaaaaggggggcggggccggtttttaaaagggggggagaggggaaattctttttgtggatattttggaaag

SEQ ID NO: 98356 - DNA, 423 bp, Homo sapiens
tacttttctaatggaattctttttttcttttaatttttggtagagacagggtctcactatgttgcccaggatggtcttgaactcctggcctcaagagatcctcccaactgcacctctcaagtgctgggattacaggcatgagccattgctccctgtcctctaatggaatttttgttaggattaaatgagttaatagtttggagatttgagagactataatagaggaaacctctcttcccttcccaagttctgagtaattaagagctgggcaaggagaaataaaaacaaatgggattggccaggagcggtggctctctcctgtaatcccagcactttaggagggccagggcaagcaaatcctttgaggtcaggagttcaagaccatcctggccaacatggagaaaccctgtctctactgaaaat

SEQ ID NO: 98357 - DNA, 364 bp, Homo sapiens
  misc_feature (1)...(364): n = a,t,c or g
cttttttgacaggaaggtaacttagaagaaaaaataatctctgaaaaaagtcctcccaagaaggaagcaatatttattgtgggttctacattagtgttcacaaacttggctctgcctcagaattaggtggaaagtatttttgtgtgtgtgtgtgtgtgtgagacagagtttcactctgtcgctcccacctggnnnnnnnnnnnnnnnnnnnnnnnntgnnnnctntnnctnccggnntcnngcgaatctcctgcctcngcctcctgngttgctgggattacnggtgtcngcccccttgcctggcttgttnttgtttttttggtggnnnggcgggtctcccctgttggcccgctggtctcttatt

SEQ ID NO: 98358 - DNA, 437 bp, Homo sapiens
gcctacttaacaaagcgccttcccccgtaaatgatatcatctcaacttagtattatacccacacccacccaagaacagggtttgttaaaaaaaaaaaaaaaaaaaaaaaaaaaaaaaaaaaaaaaaaaaaaaaaaaaaaaaaaaaaaaaaaaaggggggggggcttttaaaaaaaattttggggggggcaaaaattaaccggggaaaaaaaaaaaaattttttttttttaaaggggggtaaaaaaaaaaccttgggggattttttaaaaaaaaatttttttttggggggggaaaaattgggaaaaaccccccaaaaaaaaaaaaagttttaaagaaaaaaaaaaatttttaaggggtaagggggggaaaacccccctttattgtttgggtgtaaaaaatttttttcctgggattaataaaaaattatttttcccggg

SEQ ID NO: 98359 - DNA, 186 bp, Homo sapiens
gggggggccgttttaaaggatccctgggggggcccaagtttacgggggggggcaaggtaaaatttttttccttttgggggggggtaaaaaaaccccccgggggattttggggagggaccttttttttgggggggggaaaaattgggccaacctccctccggggatttaaggctttaggggaaataa

SEQ ID NO: 98360 - DNA, 443 bp, Homo sapiens
  misc_feature (1)...(443): n = a,t,c or g
aagctcgacaaggagaacgccttggatcgagctgagcaggcggaggccgacaagaaggcggcggcgaggggcaagcagctggaagatgagctggggtcactgcaaaaaaaaaaaaaaggggggcctttttaaaggaacctttctgggggccgggtttaaccggggccggaaaacctaaatttttttctttttgggggggggatttaaaactttcttggggtttttgggaaagaaccttttttttgggggggggccttaggggccccccctccccccggaattttagggctttagggaaaactaaaaattttttaggggtaaagggggtaaaccaccctcattagcctggcggttggaaatttttttttccgggttgtgtttttgaaaatttttttccccggggctcttgtgtttnnnnnnnntnnnaactaccacctcacttt

SEQ ID NO: 98361 - DNA, 452 bp, Homo sapiens
  misc_feature (1)...(452): n = a,t,c or g
agataactttgtagctgttcttttattcactcaacaatatatattaaatgcctactatgggccaggcactattctaggtactttggatacatcagtgaacaaaataaagatctcagtcctagtggatcgtatacttaatgggagacagacaataaacaatacacaaaatgaatacattatgtactaccttagaagatgataatgactgttcagaaaagaaaaaaaagtagagaaagtgaagtcaggagttatagcggggtggggagggtgttggttaacagttttaaatagggtggtaaggatatctctctgaaaagtaaattaaaaaaaaaaaattgagacagggtcttgctctgttgcccaggctggagtgcagtggcatgatcatanctcactgcagcctcaacctcccaggttcaagtgattctcccacatcagcctcccaactagct

SEQ ID NO: 98362 - DNA, 121 bp, Homo sapiens
tgtaatcccagctgctcaggaggctgaggtggaagaattgcttgaaccccggaggcagaggctgcaatgagctgagattgtgccactgcactccagcctgggcaacaggtcgacgcggccg

SEQ ID NO: 98363 - DNA, 437 bp, Homo sapiens
gcctacttcacaaagcgccttcccccgtaaatgatatcatctcaacttagtattatacccacacccacccaagaacagggtttaaaaaaaaaaaaaaaaaaaaaaaaaaaaaaaaaaaaaaaaaaaaaaaaaaaaaaaaaaaaaaaaaggggggggggcttttaaaaaaaattttggggggggccaaatttttggggggggagaaaaaaaattttttttttttttagggggggaaaaaaaaaactcttgggggatttttggaaaaaaaatttttttttggggggggaaattttggggaaaaccccccaaaaaaaaaaaaaggctttaaaaaaaaaaaaaatttttaaaggggaaagggggaaaaaatttgttattttttttgtggaaaaaaaattttttttaaaggggttaaataaaaaaaatttttctcccggggg

SEQ ID NO: 98364 - DNA, 449 bp, Homo sapiens
  misc_feature (1)...(449): n = a,t,c or g
cccagagctggtgctgacttgagcccccatggcctccatgactttttcaaaaaaaaaaaaaaaagaaaaaaaaaaaaaaaaaaaaaaaaaaaaaaaaaaaaaaaaaaaaaaaaaaaaaaaaaaaaaaaaaaaaaaaaaaaaaaaaaagggggggggggtttttaaaaaaaccttggggggggcccctttttttgggggggagaggaatatttttttttttttttggggggggtttttttaaaccccctgtttttttttgaaaaaaaaactttttttgggggggggttttttttggcccccccccccccaataaattttctggccggggaaaaaaaaaaaatttttgggggggtggggggtaaaaattcaatattttttgtgggggggggggggtttttttcgaggctaaaaaaaaaaaaaaaaatccccccgcggggtgggggggnnct

SEQ ID NO: 98365 - DNA, 394 bp, Homo sapiens
caactttggaatatatgtttgccaatctccttgttttctaatgaataaatgtttttatatacttttaaaaaaaaaaaaaaaaaaaaaaaaaacaaaaaaaaaaaaaaaaaaaaaaaaaaaaaaaaaaaaaaaaaaaaaaaaaaaaaaaaaaagggggggggggccctttaaaaaattccggggggggccccccttcccccggggggggaaaaaaaaatttccccccttttggggggggtttaaaaacccccccgggggtttttggaaaaaaaccccttttttggggggggggcattgggcccccccccccccccaaaaaaaaaaccgcccggggaaaaaaaaaattttttggggggggggggggggcaacccccccctctccccgggggggaga

SEQ ID NO: 98366 - DNA, 410 bp, Homo sapiens
  misc_feature (1)...(410): n = a,t,c or g
cggtgtttgcatcttcagtggccacaagcataataaagcccctttgcctttctctgtattatattcaatacaatacatcaatagtcttgagaaaaaaaaaaaaaaaaaaaaaaaaaaaaaaaaaaaaaaaaaaaaaaaaaaaaaaaaaaaaaaaaaaaaaaaaaaaaaaaaaaaaangggggggggggggtaaaaaaaaaaaagaggggggccaaaaccacccgggggaaaaaaaaaaaaatttttttttttttgggggggaaaaaaaaaacccccggggggttttggaaaaaaaaaaaatttttttgggggggaggntnggggcaaacccccccccaaaaaaaaaagggtgggggggaaaaaaaaaatttttttgtgtggggggggggaaaaaacccaccacccccctc

SEQ ID NO: 98367 - DNA, 457 bp, Homo sapiens
  misc_feature (1)...(457): n = a,t,c or g
ctcacccgaaaggccagcctggggctctccggcaggcagcccgagacctgcacagatgaaggagcagaggttctgaccgagaggctgagccaggccggggtctgggcccttcagggagccgcggatttttatgttcagaaagggatcctggtttctaggtctttgctctgcaggatcgggatcaaagcgtgggaggaggtgggggtggacgtccatccggtgaacagtgaaggcgtttgtgaggtctttctggtcccagcatgaaataaagccttggcctgggggccgcttctttctnnanaaaaaaaaaaaaaaaaaaaaaaaaaaaaaaaaaaaaaaaaaaaaaaaaaaaaaaaaaaaannnnnnnnnnnnnnnnnggggggggggggcgtctttaaaaaaattctggggggcgcccccctctccgggggggaaaaaaaatttttttttttatta

SEQ ID NO: 98368 - DNA, 439 bp, Homo sapiens
  misc_feature (1)...(439): n = a,t,c or g
tgaaaacagactaatgcaattaccataatgggctttcaattgatgaacttgcatcactgactcctcaacacgcagctgacttcctactgtaattgttcaccatgcagacatttgtggagccacaagcataaccatcatggtatttaagattcgttctgtatctggatttatgcagtttatgaaaaatcatcaaactgtccttattattgggggcttttttctgtatatatgttatgcttcaataaaatatttacttaaaattaanaaaaaaaaaaaaaaaaaaaaaaaaaaaaaaaaaaaaaaaaaaaaaaaaaaaaaangggnnnnnaaaagggggggggcggggggggaaaaaattttgggggggcaaaaaaaaaagcggcccaaacaaaaaaaatttttttaataaaaaggggggggttttttgcggcgggccctt

SEQ ID NO: 98369 - DNA, 453 bp, Homo sapiens
  misc_feature (1)...(453): n = a,t,c or g
tctagatcgcgactgtccgcatggctccctcccgtcctggcaccaatttctgaataaagtcctttctaccagctaaaaaaaaaaaaaaaaaaaaaaaaaaaaaaaaaaaaaaaaaaaaaaaaaaaaaaaaaaaaaaaaaaaaaaaaaaaaaaaaaaaaaaaaaaaaaaaaaaaaaaaaaaaaaaagaaaaaaccccaacaaaaggggggggaaaaaaaaaaaaacccgggggagttggggaaaaaaaattgtgggggggggggggtccttgtgggcaaaccccacaaagaaaaaaaaaggggggggggaaaaaaaaaaaattttagtgggtgaggggggaaaaaaacacccaccccacccgggggggaaaggtgtgggtaaaggagataaagataaaaaaaaaagcgcgcggggggttgcnnnnnnnnnnnnnnnnnnnnnnccgggtccggg

SEQ ID NO: 98370 - DNA, 444 bp, Homo sapiens
  misc_feature (1)...(444): n = a,t,c or g
cttacttttaaccagtgaaattgacctgcccgtgaagaggcgggcatgacacagcaagacgagaagaccctatggagaaaaaaaaaaaaaaaaaaaaaaaaaaaaaaaaaaaaaaaaaaaaaaaaaaaaaaaaggggggggggggctaaaaaaaaaacctggggggggcaaaaaaaaaggggggggggaaaaaaaaaattttttttttaaaggggggggaaaaaaaaaacccggggggaattttggaaaaaaaaccttttttggggggggggaaaaagggggaaaacccccccaaaaaaaaaaaggggtcgagggaaaaaaaaaaattttaagggggaaggggggaaaaaaaacccccaattccgggggggaaaaaagtttccctcccgggggttttttaaaaaaaaattttccccgcggcggggggggaaaaaannnnnnnng

SEQ ID NO: 98371 - DNA, 420 bp, Homo sapiens
cgaaaggacaagagaaataaggcctacttcacaaagcgccttcccccgtaaatgatatcatctcaacttagtattatacccacacccacccaagaacagggtttgttaaaaaaaaaaaaaaaaaaaaaaaaaaaaaaaaaaaaaaaaaaaaaaaaaaaaaaaagggggggggcctttaaaaaaatacccagggggggccaaaatttttccggggggggaaaaaaattttttttttttttttgggggggaaaaaaaaaaacccggggggttttttggaaaaaaattttttttttgggggggaaaattttgggccccacctcccccaaaaaataacgggtttggggaaaaaaaaaaatttttggggggttggggggggaaaaccccctccctttcggttggcgagaaaaattttttaaaaag

SEQ ID NO: 98372 - DNA, 418 bp, Homo sapiens
  misc_feature (1)...(418): n = a,t,c or g
caacctcctgggctcaagtgatcctcccgcctcagcctctcgagtagttgggaccacaggggcatgccaccatgcctggcttttttttttttttggggggccccccaggcgggagggagggggggaaattggggttaatggaacccttggcctccaaggtaaaaggaattttctcccacctaaccctcccaagaagggggaataaagggcgcccacaacaaggcccagttattttttgaaaaaacgggccgcaatgtggggggggtgggcccaaaaccccgagccaaaaaaaaccctccaatttgggcccccaaaggggggggaataacggggggggagctataaccccggcccttttttaattaattttggaacattgggaaaaaaaggggtccccttaggggtggccagggggggn

SEQ ID NO: 98373 - DNA, 440 bp, Homo sapiens
  misc_feature (1)...(440): n = a,t,c or g
gcatggtgaccctgcctgtagtcccagagcattgggattacaggtgcgagccaccagggctgggccccagcattgtttattatagcaactattgcaaggcacctaaatgttagtcaaagggaatgatttaaaatattttgtggtgaattcattctattatgaagtaaagctatgagctacctttgattcagcctgggtgacaagagggaaattccgtcccaaaaaaaaaacaaaaaacaaaacaaaacttagcaggaatcataactttgagtattatactccaaaagagataacaataaatcctttaaaaataatacgtatactgggatagggccgggtgcggtggctcacgcctgtggtcccagcactttgggaggccgaggcgggcagatcatgaggtcgggagttcgagacaagccttaccgacatggtgaaacccn

SEQ ID NO: 98374 - DNA, 433 bp, Homo sapiens
taaaaaatatgggattataatcttttgttctttctttctttctctttttttaaaagaccaaggccttgccccgttgcctaggctggagtgcagtgtcgtatttgcagctcaccgcggcctcggcctcttgggctggagcgatcctcccaagtcagccttcctggtggctgggatcacaggcatgcaccaccatgcctggctaatttttaaagtacagttttctaatcttatgggaccgtggtcatatacgtggtctgctgttgactgaaatgtcattatgtgttgagtgactagctaataaaagtcacagcaaaaggagaggcttcagcagggaggggaagagtaatgtttatcccaacaggacgaggtactgttgataggataaagtcaacagaacagaagctactatttctttttaagggaaacaagatgg

SEQ ID NO: 98375 - DNA, 436 bp, Homo sapiens
  misc_feature (1)...(436): n = a,t,c or g
cggacgcgtgggaaaaaataacaaagtaatatcaacagtttgtaaggttatatttgcaatagtatgatgtgatataaagactataggtgttttagtcaggattcatgcaaaataacagtaaccactctgagtatttaaatagatggaaatcaaggcaggacatttttacactgttggtggaaaaacttaaaagtaaataatagatggtgaagtaacatcgatctggtgacagcagtttaaaaaaaaaaaaaaaaaaaaaaaaaaaaaaaaaaaaaaaaaaaaaaaaaaaaaaaaaaaaaaaaaaaaaaaaaaaaatttgggaattttggaaaggacccttcctttggggggggaaaaaaagaaaannngggggggggccttattaatataatttgggggggggaaaaaatttttgggggggggggggggtataatt

SEQ ID NO: 98376 - DNA, 437 bp, Homo sapiens
atgagacactgcctggcctgaatcaaccttttttaagtgtaatcagaaagagaggctttggcaggggctcttactgtgttttctgtaacaacaaaggtgtacaatgagagagtccacacagtgctgtactgcacacaccacagaatgtgtgagattttcctgtttgaatgtatgtctgcattatactcctgcaataatgctgaggacttgttgcaggagggcaaactaggtgaataaattacctgtgaatgaacaatgaagtcgttcctcttaagactgaaacaagcaggccagatgtggtggctcacgcctgtaatcctagcactttgggaggccgaggcggccagatcacaaggttaggagttcaagaccagccttgccagcatggtgaagccccatctctgccggaaaacaggaaatatctggcatggagtgtg

SEQ ID NO: 98377 - DNA, 427 bp, Homo sapiens
tttttgccaaatatccagataaccagttttcacatctgagacattacaaagtatctgcctcaattatttctgctggttataatgctttttttttttttggttttaagcccatggcagcttggactttttaccgggggggcccaaaaaaagccaccaatggttcccaaaaccaaaggatggaaaaccccccccattttcaaaaaagcctttaaaaaaaaaaacccctggaaaaaaggggggggggcaccccacccccggggcccggtccaagaagggcggctacccaagggggggggacccgggggggccctttttttttaaaaaacccgggcaaaaaaaaaaaacccctttccttttaagaagggattgacctggggggcgggcttgccttggttttgttcgcttatatttgggccacaggaggtgg

SEQ ID NO: 98378 - DNA, 225 bp, Homo sapiens
cccacgcgtccgttcattactaacaacattttccccgcatcccccttccaaacaacaatccccctctacctaaaactcacagccctcgctgtcactttcctaggacttctaacaaccctagacctcaactacctaaccaacaaacttaaaataaaatccccactatgcgcaaaaaaaaaaaaaaaaaaaaaaataaaaaaaaaaaaaaaaaaaaaaaatgaaggg

SEQ ID NO: 98379 - DNA, 1439 bp, Homo sapiens
ctctggccggaattcccgagtcgacgggaggcaggaggccgcctgtcgggattatcagtcatcgctcgaagacctgaccttcaatagcaagccgcacatcaatatgctgaccattctagccgaggagaacctgcccttcgccaaggagatcgtctctctcatcgaggcccaaaccgccaaggtttttatacaccccgcagcctcctattacttctaatactccctgattttagtgtcagcctcatcccaggtctcgcttccatcccaagggggacagtgttccttctctccaacccccccacccccctccaactcaggctcggtctttggcccaggcttcgagcatgggcctctgggggggagggagtggggaggataaagggtggagtcccacttccgctttccaactccctttttaggccaccgcattgtatatcccgacacacacacgctttgaatagagccctttggggtgggggagacttaaaggcagtttgtggtttggggaagtaagagttaacataagccattttaattccctgggaagtgggagagtgggtctcccattttccccaagcaccctttttggtaattgtgttctgtgggttggaaggaggtgaagggggacctgggagcgagctgttggtgggtgggaatagggatttggccccgagtggagcagccgcctgttaggagcccaacatggcgcctgaaaagcacatgatgcgaaagggaagagaggagaatccattccctgccagccaggcagctgctcactcccgtcagccccattttggggtgggggcggctagataaaacttttattctcctattggagggtctaatttgtcccaaaataggggcaagtggggttgagggtggggtttgggtggggggaggagatcttatccaacctgtaggtggagaactggcccagagggtaacaagtacttgcagtttctctgaaaagttcagtccctcctcctcttccttttctctttttctcccttccctgatagcgaaggagtgtttttctttaccccttgacagaagtggtcctctgccaccttatatttccctgtagtcctcctcttctgtggattcatatgggagcgatatgtcatttaagtaaagttactgttcaacttagttacaatgagttttaatagcgtcccagtgctacattttatttttcaagcttgtactcacggtttagttttttctagttgttagtgattgcaattatcaggatgagcctccttttagcagagtgaacccctttttaaaggccactttaacaacaaccaccaatatattgtttagagacggtttctgtctagtgtaaaacttgagtggtctgactctaataaatggttttgaaatgtgtgactggtattataaaatttgtgaataaaacatataaaatatgaaaaaaaaaa

SEQ ID NO: 98380 - DNA, 393 bp, Homo sapiens
aaagccacaaaagcacaaacttgggtcaaaggaatatcttataagagaaccccccggagaaaaaaagggaaaaataaaaaaaaaaaaaaggaaaaaaaaaaaaaaaaaaaaaaaaaaaaaaaaaaaaaaaagggggggggggcttttttaaaattttgggggggggcccctttttttggggggggggaaaaatttttttttttttttttggggggggttttttaaccccttttgggtttttttggggggaccctttttttttgggggggggttttttgggccccccccccccacaagttttttggttggggggggaaaaaaattttttttggggggggggggggaaaaacttttttttttttttttgggggggggattttttttcctaaaaaa

SEQ ID NO: 98381 - DNA, 396 bp, Homo sapiens
atcgcttgaacccaggaggcagaggatgcagtgagccgagtctgcgccactgccctctagcctggatgacagagtgagactccgtctcaaaaaaaaaaaaaggagggaaggaaatccctttttcacctttaaccccagggttaaaaaaaccggggaaaagttatttgggacccattttttttgccaaaaaaaaacccacttttcaggggggggacgggattaggtttaaaaattttaccggattttaaaaaccccctggtacctggggtttcaaattaaaaaaatttttttttggatttttcaaaaaaaggagggaggttaataaaaaatttaacttctttttcaaagggccaggggataacttgccaaaaggaaccatggggggaaagggcaata

SEQ ID NO: 98382 - DNA, 549 bp, Homo sapiens
  misc_feature (1)...(549): n = a,t,c or g
ccacctgcgttctccaattaactttgactccgtatccttctacggcgcttttcaactatatacctaccgaccatactctcgcaacatgtcggcnnnnnnnnnattgattttcatgngcctccgcaccggcaancccgggtcgacccacgcgtccgcttaaaatgagtcccacatgtctctttaacacactggtgttatgccatttgggattcttgtttccttgcaaatttgactttatactaccggggtcagtggtgaaggaaataatgcagtaacaaattctgcatttggcaaggaaaaggaaatctgaggacagcctaaagcacacttggatttaaattactttgtgctcaaatctgtgtgatctaggatcaagtttatgtctagagtgaagaggaatagcatccatgttaacaaattggtctatgaggctgggcgcggtggcttatgcctgtgatcccagcactttgggaggccaaggcgggtggatcacttgaggtcaggagttctagaccagcctggccaacgtggtgaaaccccatctctgct

SEQ ID NO: 98383 - DNA, 456 bp, Homo sapiens
aataaattgctaacaagacctgaaaggcaagtcagtgtactctgcagattcagtggagacagcactttcaattgttcattgggaggcttcctggaggaagtgtcacttgaaacaggagtttgttgttttctcatctcatcagatgctgataaactaaaaagtggtagtgagctgttctgaaatgatccatttcataccaagtaagccttacgccaaataatgtgttggaaaataaatatattttggatatttatttatttaacaaacattaattgagcatctactaggagataccaagacagacttattatctgttattaatacgctaatatttattgggagtagcagtcaaaaaaagacggccaggcacggtggctcacgcctgtaatcccagcactttgggaggccgaggcaggcaaatgatgaggtcaggagatagagaccatcctgactacg

SEQ ID NO: 98384 - DNA, 372 bp, Homo sapiens
aggagagtcgcttgaacccgggaggtgagggctgcattgagccgagactgcgccattgcactccagcctgggccacagagtgagactccgtctcaaaaaaaaaaaaaaaaaaggcctggggcaaaaactttaaaaaaacctttttttttaacaaccccaaacgggaaacaacaaacttttttccaaaggttatgaaaaaggcggtttggaaggccccccccccccccgaaaaaggtttttaacaaacgggggggacccccctgcttgaaacttgggaaaaaaacccgggcccaaccaaaaatcccttgggggattccttttatataaaaaacaaaaccaggcgggggggccggggggccacaggggctaacc

SEQ ID NO: 98385 - DNA, 347 bp, Homo sapiens
  misc_feature (1)...(347): n = a,t,c or g
attcaggaggctgaggcaagataatcgcttgaacccgggacgcanaggttgcagtcagccgagatcgcaccactgcactccagcctgggcgacagagcgacactgtctcaaaaacaaaacaagaaaaacctcagggtgactcgtgggcccctgggtccccagtgttcctgcaaactgcttcctgaagcagcctggagcagtgggtggggagggggagacacagccacggggagagcagaggtagctctggctgctgaaccagaagtggatgtcagtttgccaccagctcagctttaggagaagccaaggtttcaccctgaagggtttttgttatctgagttcagagg

SEQ ID NO: 98386 - DNA, 382 bp, Homo sapiens
cggacgcgtgggcggacgcgtgggcaacaatcctaatcctaataccaactatctccctaattgaaaacaaaatactcaaatgggcctaaaaaaaaaaaaaaaaaaaaaaaaaaaaaaaaaaaaaaaaaaaaaaggggggggggctttaaaaaaaaaccttgggggggccaaaattaaacggggggggaaaaaaaaaatttttttttttaaagggggggaaaaaaaaaaccccgggggaatttttgaaaaaaaaattttttttgggggggggaaaaatggggaaaacccccccaaaaaaaaaaaaggcttaagggaaaaaaaaaaatttttagggggaaaggggggaaaaaaacccccaattccttggttgaaaaaaaatttt

SEQ ID NO: 98387 - DNA, 126 bp, Homo sapiens
attcttataaagctgtcatcaacctgggaaggaattcaggctggaaaggagctcgaggagcagcacggcatccactgcaacatgacgttactcttctccttcgcccaggctgtggcctgtgccgag

SEQ ID NO: 98388 - DNA, 396 bp, Homo sapiens
  misc_feature (1)...(396): n = a,t,c or g
ttttattactttgagactatctcttctgggtctcaaatcagatctcagtttttaccagggctctctctggtaaactctaaattcttttttttttttttttttttccgggcgggggaacccccaaaaagtcccaagttttttttaaaaacccccaaaaccccattgggaaacccacccggatgggaaagggggaaaaacccccgcccccccggggaaaaaaaaaaaaaaaggggggacccccaaccttggggaaaaacaaaaacccggtcccgggatggccgggggcttttcttccccctctggaggaaaaaaaaaaaccctttcccggcccgcccccccttaaaaaaaaaaaaannnnnnnnnnnnnnnnaaaaaataaaaacaaaggggggggga

SEQ ID NO: 98389 - DNA, 360 bp, Homo sapiens
  misc_feature (1)...(360): n = a,t,c or g
ggttgcagtgagccaagatcgcgccattgcactctatcctgggcaacaagagcaaaactgcatctcataaaaaaaaaaaaaaaaaaaaaaaagggggccncgggggtggtaagccccctgaaaaaaaacaaaaaaacgggtacccggggaaaaaaaaaggggaaaaataatttgtggcgggcccacccagttaaactttccccgggaggggggcccaacccttgccaaaccccgtgggaaaaaaccctttccaaaaccttgttaaaaggggggggcctcttttttggaaagggccccccctgggggggggggggaggcttttttaacaaggaaaagggtacccctttaaaggaaaaaccc

SEQ ID NO: 98390 - DNA, 396 bp, Homo sapiens
gatcacttgagcccaggaggttgaggctgcagtgagccgagatcatgccactttattctatcctgggcaacagagtgagactgtatctcaaaaaaagaaaaaagaaaagaaaaagaaattgaatgagtcatagacttaagtttaaaactgcttctgggcagattcatagacagagaatatattaattggaaaatccttaaatttttaaaataattttgtacagaattctgatgattttaaatatggtacttgtaatctggggtttttggtgatttatttcaaactcttgagataccttcaacttgcaggcctgtgtagataacagaccctgttaatattcagaaattttcaattttctttttttcttttggggagactgaaatatctggtcaggat

SEQ ID NO: 98391 - DNA, 354 bp, Homo sapiens
ctggaggcagaggtgggagaactgcttgagcccaagaattcaaaactgaggtgtgaggatcacttgagcccaggagtttgagttgattgtaccattacactccagcctacgtaacacagtaagaccctgtctcttaaaaaaagaaaaaaagaaaaaagaaaaatctaacaatgcttctcaaggaactagaaaagaacacatcagacccaaaattacaaggaaagaattaataaagatcagaagagtaatatataaaactgagacttaaaaaaaaattcaaaggatcaacaaaatgaaaagttcattttttgaaaagaaaccattagactaaccaagagaaaagactcaaaatca

SEQ ID NO: 98392 - DNA, 100 bp, Homo sapiens
gctcactgaaacctccgactcccgggtttaagtgagccgagatcgcaccactgcactccagcatgggcgacagagggagactccgtcgtcgacgcggccg

SEQ ID NO: 98393 - DNA, 374 bp, Homo sapiens
cggacgcgtgggctagttcggatcgcgagcggccacccttttttttttttttttttttttgggaagggggggattttttttgggcccccgggggccaaaaaagaaaaccccggggggggagggatttacccgattttttgacccggggtggggaaaaggccccgaaaaaaaaaccccacccccctggggggggaaagggggccccaaaaaaatgaacctttggggtgccggaaaaataaaatttttagaaataaaggggaaaagtttccctcgggggaccacccccaatttttttggcccccccctttttttttcccccccaaaaacccagggcccggggaattttttggatttttcttttaaactaaaaaaca

SEQ ID NO: 98394 - DNA, 372 bp, Homo sapiens
tgtaattcaaaatacaaacaatactaaactgtaaaataaatgtaacaaagtccaataaagtttttatttttttctcatgatgaaaaaaaaaaaaaaaaaaaaaaaaaaaaaaaaaaaaaaaaaaaaaaaaagggggggggccctaaaaaaaaaaaccggggggggcccaaattaaacggggggagagaaaaaaaattttttttttttagggggggaaaaaaaaaaacccctggggaatttttgaaaaaaaaactttttttgggggggggaaatttgggcccccccccccccaaaaaaaaaaaccgcttggggaaaaaaaaaaatttttagggggaggggggggaaaaaaacgtgcattctgtgggggggaag

SEQ ID NO: 98395 - DNA, 404 bp, Homo sapiens
ggcctaccaaagtgctggggttacaggtgtgaaccactatgcccagcctaagattgacttttgagagatactctacttacctctacttaccaagaggaaaagagatataaacatattaaataacaagcattttatatacatttcccagttaatctacgtaataaccctgtgaatacagatgagaaaactacagctacaggaaataaagaagccttcccacagtaacactgcctataaatgacggaataaactcaggatgttttgaattcaaagcttatgtatgctctatgcacttcactctgcttcctgaggcaggtgagatgttttaatatctacttgcctgaatgttaatgtctgcccacagaaataagtcggagctctggagtagagaacacccgatgatt

SEQ ID NO: 98396 - DNA, 402 bp, Homo sapiens
cggggtttcaccatgtttgccaggctggtctcgaactcctgacctagtagtctgcccatcttggcctcccaaagtgctgggattacaggagtgagccattgtacccagccaggctatgctttttcattgcttttggttgactacactgttacagattacgtatagaggcatagagtatgttgttagctctcacagctaatatgtaatccagcgttggtccaagttaactgtacaccagaacatcacttcctgtgtagatgataacaattactaacgcatttcttgatccactgcaccagctctgatggagagacagttgaggactgagatgggctagcttcctgtttgtgcatttgatcttgaagcagctggggaatctcgcatccgtggtatagtacagtc

SEQ ID NO: 98397 - DNA, 406 bp, Homo sapiens
aattctgttattttttgtttggactattgcttaaattctcggagattcaatttctttatttgttatactagtgtctggcccatacaacacattcgtcaaatacttgtggaatgaggacccgcatttggaagtgtatagtgaaaaaggctgctctgcctatggagtagccattttttattcctttgctttcctaataaacttgcttttactttactctaaaaaaaaaagaagaatatatagtgaaaagaattgagaatgagcaaattacttttaagtacagttacaggaaaatattagtatgacttaaaattaatatgactatacaaaagttatagctcctggcccaatgtggtggctcacacctgtaatcccaacactttgggaggccaaggtggacagatcatct

SEQ ID NO: 98398 - DNA, 351 bp, Homo sapiens
catgaatttatttattaacatcaggtatatatttattttagaattccaagacaaccattggctggtaaagatgctgcttggaccaaggacagttgttctgccccacacaatcacttcctctctttttctttttttttttaaggctggtttttttttaataataaaacttaaaaacaaccctgcccgttacatgtattttttagtatttcaaattttccatattaaaactttttaaggtttttggccggccccaggggttcacgcctgcaatcccagcattttgggaggccagggggggcgggtcacagggccaaaacttggaaaccttcttggccaacatggggaaatccc

SEQ ID NO: 98399 - DNA, 340 bp, Homo sapiens
tctgaggcaggagaatcgcttgaatctgggaggcggaggtagcagtgagctgagattgtgccactgcactcctgcctgagcgacaaaagcgaacttggctatcagatacagaagataattcatttgcagaagggatattagtattgaacgaaaacctaaaaaaaggacttcttacccactgggacttttaagtttatttttgagggttctgtgcaactggcgtgcacaattgcatcaaagctggagggcctcttttctcctaggtgttctataactcaacaggaatcttcaaggatgcaggtggtcaagagcccatctatgccaccatcggcgcgggtgg

SEQ ID NO: 98400 - DNA, 345 bp, Homo sapiens
cacaaggatcctaaaagtgtggcagaaaaggaaatgttcagttaaaaatggttttctgaccatatcccatggtaccgtaagtattctcttttaatccatggtgtctgctgtattaggtgaggttggtgttggaggactttctgaagttagagggcaggagttgttctccgtgtgtgatggtattaaggatgtgtcttagagaatttccctgtcagaaacgcttgctggcctccgtcttgatttggtgcacctgcagcctgtttatgttttttttttttaattttaattttaatttttattttttattttagccagatggagtcttgtccttgttatcttccactc

SEQ ID NO: 98401 - DNA, 359 bp, Homo sapiens
  misc_feature (1)...(359): n = a,t,c or g
gcagtgagccgagatcacgccactgcactccagcttgggcgacagagcaagactccgtctcanaaaaaaaaaaaaaaaaaaaaaattttgctaatggaaaaacccttcctgggagggccacatatggaagaatccctttggaagggaaccctattggttaaaaaagtcggggttggaaaattgcccaactaataaaagtttttggaaccccaaaaataaaaattttgggaattggtttataaaaaatgggggcgggggcaaaccacaaaaaattttgaagacccccttgcccgtgtcccacttaaggtgggggggtaaaaaagggcaagcccctgcctttttgtttaacctctaaacga

SEQ ID NO: 98402 - DNA, 360 bp, Homo sapiens
atgtgatctgcccaccttgggctcctaaagtgctgggattacaggtgtgagccactgtgcccggccacatacatctttcaaaaagaaatactagtgagaagggccatccactctccgtacatcctctcctgtgatttgctgtgagacgtatggctgcctttgggaagctccttgtatgagaggggacagaacctgagtctgagaagcagagctcagaccctaagggagaatgggccactgccccagggagctccctgaggttgacgggcaactggataacacactctgctaaatggaagttaatgactgaaagtgaatcatgtgcttgctgtaaggaaattatgcaaacttcactgtagg

SEQ ID NO: 98403 - DNA, 341 bp, Homo sapiens
cttgaattaatttttgtataaggtgtaaggaagggatccagttccagctttctacatgtggctagccagttttcccaacaccatttgttaaatagggaatcctttccccatttcttgtttttgtcaggtttgtcaaagatcagatagttgtagatgtgtggcattatttctgagggctctgttctgttccattggtctatatctctgttttggtaccagtaccatgctgttttggttactgtagccttgtagtatagtttgaagtcaggtagcatgatgcctccagctttgttcttttggcttaggattgacttggtaatgtgggctcttttttggttcca

SEQ ID NO: 98404 - DNA, 777 bp, Homo sapiens
tgtatacacaggggaagaaatcctccagaagaaagaaattacaatcagagatcaggaagcaccatacctcctgcgaaacctcagtgatcacacagtggccatcagcagttccaccactttagactgtcatgctaatggtgtccccgagcctcagatcacttggtttaaaaacaaccacaaaatacaacaagagcctgaactgtatacatcaacgtcaccatcgtcatcgtcatcatcaccattgtcatcatcatcatcatcgtcatcatcatcatcatcatagctatcatcattatcatcatcatcatcatcatcatcatagctaccatttattgaaaactattatgtgtcaacttcaaagaacttatcctttagttggagagccaagacaatcataacaataacaaatggccgggccatggtggctcacgcctgtaatcccagcactttgggaggccaaggcaggtggatcatttgaggtcaggagttcaagaccagcctgaccaagatggtgaaatgctgtctctattaaaaatacaaaattagccgggcatggtggctcatgcctgtaatgccagctactcgggaggctgagacaggagaatcacttgaacccaggaggcagaggttgcagggagccgagatcgtgtactgcactccagcctgggcaacaagagcgaaactccgtctcaaaaaaacaaataaataaataaataaataaacagacaaaattcactttttattctattaaacttaacatacatgcattaattgcca

SEQ ID NO: 98405 - DNA, 264 bp, Homo sapiens
gtgcgtttgtgtgtgctgtgcgtttgcgtgtgtgctgtgtgtgcatgtgtgtgcgtgtgtgtgccgtgcgcccggaggagagcgaggctgccagagtgcgtgtgccgactgagccagtgtgagtgtgcaggggctggcggagagactgggagtcatgcaggaatgaatacttctggtcctttgggatataggtttcttcaaactcctggtaggtgtcaatggccagctggtgcgcgcgatgggcttggagcgtcgacgcggccg

SEQ ID NO: 98406 - DNA, 366 bp, Homo sapiens
  misc_feature (1)...(366): n = a,t,c or g
ggctgaggcaggagaattgcttgaatccgggaggcggaggttgcagtgagccgagatcgtgccactgaactccaacctgccaatagagcgagactccgtctcanaaaaaaaaaaaaaaaaggaaggaattgccttggaaaaaaatcccgcccttaaaaggaaggtttttttttggcggggggttttttaaaaaaaaaaattttggaaccttgttttttaccaatggtgggaataaggggaacctgcttgaggcatccttaaacctgggggggggggggaaaaaaccccggggacccacaaaaggcccctcttttagccggttaggggtttccttttttgcccccagttttggggggaggggggatt

SEQ ID NO: 98407 - DNA, 372 bp, Homo sapiens
atattatgcagccttaaaaaggaaggatattctgacacatgctgcaacgtggataagccttgagaacattatgctaagcgaaataagccagctacaaaaaagacaaatattgtatgattccacttatacgagtaatcaaatttccacaaacagaaagaaaaaagtggttgtcagggctgggaggagagggaaacaaggagttattgttcaatgggtgtaacatggcagtttttttggttttggggggggggtttgagacagagcctccctctgtcacccaggccggagagcagtggtgcgatctcagctcgctgaaacctctgcctcacaggttggagcgggtctcctgcctcagcctcccgagtggctggg

SEQ ID NO: 98408 - DNA, 176 bp, Homo sapiens
  misc_feature (1)...(176): n = a,t,c or g
ataatttgccttcctaaccattcccttatccaggctttttgacaacgctatgctccgcgcccgtcgcctgtaccagctggcatatgacacctatcaggagtttgaagaagcctatatcctgaaggagcagnaagattcattcctgcagaacccccagacctccctctgcttctcag

SEQ ID NO: 98409 - DNA, 353 bp, Homo sapiens
  misc_feature (1)...(353): n = a,t,c or g
gggtctcgatatgtttcccagcctgatctcaaactcctgggcttaaatgattctcgtgcctcgggcttccaaagtgttgggattacaggtgtcagtcactgcacccagccttaagtgcaattttcactgcaacttgaccacctcttcctggtgacttcataacaggtttttgttgttgttgttgntgntgnngnngnnnnnnnnnnnnnnnnnnnnnnnnntntntnntntnnttttttttnttttttttttntttttttttnttttttttttttttttttttttttttttttnttttttttttntttttntttttttttntttttttnttttttttttttttttnttttttt

SEQ ID NO: 98410 - DNA, 155 bp, Homo sapiens
catcttcctgctgctcatagagtcgtggctggagcccgtgcggttcctcaagagtatgttcgccaacaacctggtgtatgacacctcggacagcgatgactatcacctcctaaaggacctagaggaaggcatccaaacgctgatggggaggcttt

SEQ ID NO: 98411 - DNA, 89 bp, Homo sapiens
gcggaggttgcagtgagccgagatcatgccactgcactccagcctgggtgacagagggagactctgtctcaaaaaaaaaaaaaaaaagg

SEQ ID NO: 98412 - DNA, 380 bp, Homo sapiens
ggtttcactatattggccaggctggtctcgaactcctgaccttgtgatccacccgcctcggcctaaagtgctgggattataggcttgagccaccgtgcccggccagcaatttttaaaataggaaaaaaggatcttggagttacccatgtagttactgattccagggctcttcattctctcatgtagagacagattcccttttgctaccattgctcttctgtgggaaggacttcctttcacttttcatgatgcgcagctctgcaggggatgcatattctcacttttgtatgtctaaaaaagtttcagccaggcatggtggcttatgcccgtaatgccagcatttagggaagccgatgctgtcacatcacctgagggcagga

SEQ ID NO: 98413 - DNA, 407 bp, Homo sapiens
tttttttttccaattttaatcattcatctttaataataaaataggttcctatgcagtacatacctcaaacataaacttaaggttctgtttaacaacacccaaaaaaaaaaaaaaaatgggggggaagggggcccttaaaaaacaaagaaaaggtttttaaacataaaacctttaatttcttttcccgccaaaaaaaaaaaaaaaaaaaaaaaaaaaaaaaaaaaaaaaaaaaaaaaaaaaaaaaaaaaaaagggggggggggccttttaaaaaaattttggggggggcccaaatttccggggggaaaaaaaaaatttttttttttttttggggggggaaaaaaaaaccccccgggggtttttttgaaaaaaaactttttttgggggggggaaaaaaaaaaaaaaaaa

SEQ ID NO: 98414 - DNA, 383 bp, Homo sapiens
ccctaatccatctgtgcattcttctggtctttttaaaggcagaggaataaacacacacacacacacacacacacacacacacacacacacacacacagagagaggagagagagaaaagagggagacagcttttttgtgttggtggaaagttgtttttttttaggtaaaaatgccgtgtttatatgagggatgactgtgatcacaattcctatcatttttttgtctctcctagataagtttagtataaatcaggctccacagtgtcttagtgttttttaataaaccagatcacactcattcgggtactctttagggataatttcacacagcagaagtcagcccaaacttctctagttatgtaacaaagcatgtagtggccacgg

SEQ ID NO: 98415 - DNA, 129 bp, Homo sapiens
gaccacagctcactgcagcctcaacctcccaggctcaagcgatcctcctacctcacgctccctagtagctgggactacacatgtgtgccataacgcctgggtaaattttgtattttgtcgacgcggccg

SEQ ID NO: 98416 - DNA, 341 bp, Homo sapiens
atattttttattttgtttaaccttgtgtgtttattttttttgtgtattgtgggggggttttttttttttatttatacattgttttgccttctttgaggaaaaaaaaaaaaaaaaaaaaaaatataaaacattttttctatgaaaaaaagaagggattatctgtctcgggggggggggcaaaaaaaaaaagaaaaaaaagacttcttgagagttgggggggaggggggaatgtgaatttttggacacccccaacacatgaggggcccgggggggggggagggggcaaaaaaaggggaaatttaaaaaaaaaagggggggggggaaaaaaaaaaaacccccca

SEQ ID NO: 98417 - DNA, 343 bp, Homo sapiens
  misc_feature (1)...(343): n = a,t,c or g
ggtggaggttgcagtgagccaagatcgtgccattgcactccagcctgggtgacagagcangacaaaaaaaaaaaaaaaaaggggaggggaaaagggaaaaaaaaaattggcaaaggggggtttcaaaggaaatttaaggggcccaatccccacgggcggtttctaagggagtcccacaattccccaaaaaaagggtttccaaaaaaattttttgggaatccccctccaggaacttccaaaaaagtccccttaccacattaaaggcctttttttttaaaaccccaaaaaggggtggaaggcccccacggggaacctgttaaggaattcccaccacccccccaaa

SEQ ID NO: 98418 - DNA, 301 bp, Homo sapiens
cgggactggtaaacatggcgctgtacgtttcgccgattgtttccggtgaggttatccgttcccgtggcggctccacctctgaatttacgccgggatatgtcaagccgaagcatgaagtgaatccgcagatgaccctgcgtcgcctgccggatgaagatccgcagaatctggcggacccggcttaccgccgccgtcgcatcatcatgcagaacatgcgtgacgaagagctggccattgctcaagtcgaagagatgcaggcagtttctgccgtgcttaagggcaaatacaccatgaccggtga

SEQ ID NO: 98419 - DNA, 308 bp, Homo sapiens
gggagactgaggcatgtgagtcgcctgaacccgggaggcagaggttgaagtgagccgagatcgtgccactgcactccagcctgggcgacagagcgagactccgtctcaaaagtccttgtgcccttctagggtgcagacggtggtctctgcatctcctttgctccacgtgccaggcacaggtgcctgggaactacagaagaggttgaatagaaggcttaacaatgagtttggaagtcaggcacagagggtttgacttccgggggcaccccttgccagctgtatgaccctggcaagtcactctttctttt

SEQ ID NO: 98420 - DNA, 323 bp, Homo sapiens
gcacgaggagagagagagagagagagagagagagagagagagagagagagagagagagagagagagagagagcccccccccctctctcggggggggagcgagagttatttaaagagtgcgtggagagagcgtcttctattagagagagaccccctttttttttttgggggtaagatggggaatctgttcccccccccccccccccctgtggggaggggatatacaggggggggcctaattacggggggccctttctggtggggagagtgtgtttcacacacacaccacacacacacacacacacacacatatatgagtgttct

SEQ ID NO: 98421 - DNA, 298 bp, Homo sapiens
  misc_feature (1)...(298): n = a,t,c or g
gcacgaggagagagagagagagagagagagagagagagagagagagagagagagnnctttttttttttttttttttttttttgggggaaaaaaacgggattttttttttttggccccctttttttcccacagaaaaggaggaaagttaaagtgaccgcacaggcaaaggtcccttttttttggaaaaaaaaaaaggggaggggggttccccccctttttttttgcttcttttcccagggggggggggggggaaaaaaccccttccccccccccgggggcccccggggggaccggggcc

SEQ ID NO: 98422 - DNA, 298 bp, Homo sapiens
  misc_feature (1)...(298): n = a,t,c or g
gcccgagagagagagagagagagagagagagagagagagagagagagagagagagagagaaaaaaaaaaaaaaccactctcgggggggggggccgggcccccaattccccttaggggggggggtaaaaaaattcggggggggggtttaaacaaggggggggggggaaaaaaaannnnnnnnnnnnnnnntnnnnnctnnnntnnntanganntgcactgnttttcccnnttttatcaacttcataatctatcgnagcgtgcccgaccctctacaaatatttgattgggtctatatttg

SEQ ID NO: 98423 - DNA, 98 bp, Homo sapiens
gcacgaggagagagagagagagagagagagagagagagagagagagagagagagagagagagagagagagagagcgcggcgcgggggggggccccaca

SEQ ID NO: 98424 - DNA, 66 bp, Homo sapiens
gcacgaggagagagagagagagagagagagagagagagagagagagagagagagagagcggcgcgg

SEQ ID NO: 98425 - DNA, 73 bp, Homo sapiens
gcccgaggagagagagagagagagagagagagagagagagagagagagagagagagagagagagaccgcgcgg

SEQ ID NO: 98426 - DNA, 373 bp, Homo sapiens
gaggcaggagaatgctgtgaacccgggaggcagagcttgcagtgagccaagattgcgccactgcactccaacctgggtgacaagagcaagactccgtctcacaaaaaacaaacaaaactgactgattgaatatactaaaccaaactaaaatcatattcttttgattaagtttatccatggctgtattcttctatgaattcttccatttaattcttccacgattatcttctcctgtaaatacatcacaggagttagaattctctacccatcagctgtaccatgtcgcagaattcatgcaggcacaaagttggagttacagagatgggttgacagcaggcaaacttggcctatgtattataaccacaacttcaag

SEQ ID NO: 98427 - DNA, 355 bp, Homo sapiens
  misc_feature (1)...(355): n = a,t,c or g
ctccattgcactatgtactgttcagtgctcagttgtcacatgtagccagtggctgtcacataggatcgtgcagatgtagagcatctccattatcacagaaagttcttttggatgatgataggctgcctctggaaaagtccttaaatactaccgtccattaccttcattagcagaaccactgacaaactcaaatactttcctggacngnngnnnnnnnnnnnnnnnnnnnnnnntntgcnnnggnnnannnnnnggggnnnnnnnnnggggnnnggggaggnggggngnnggggngnggnnggggggggggggggggggggggggggggggnnnnggggggggggggtgngggggn

SEQ ID NO: 98428 - DNA, 358 bp, Homo sapiens
ctctgagtctctgtttcctcatttgtaaaactggatgggacactaactgcacttaacatgaggcctggtgcatgataaacactccccacatgggggctgcggttcccaccatgtcctcccctccctgaacccatcctttcccaccttttccaccaagtcgccctctgtgcctccagccagagccctgtggcctcctgactctaggtgggccctccaggtgggccatttggggctaacacctactactcgtcaagagtcggctcaggctcccagaaggaagcttgccctattagaaggaagttttcaaggccaggctcagtggctcacgcctgtaatcccagcactctgggaggctgag

SEQ ID NO: 98429 - DNA, 121 bp, Homo sapiens
cctgtccccactaaaaatacaacaaattagctgggcgtggtggtgggcgtctgcagtcccagctacccgggaggctgaggcaggagaatggtgtgaactcaggaggcggtcgaccgggccg

SEQ ID NO: 98430 - DNA, 324 bp, Homo sapiens
gtttagtaatggggtttgtggggttttcttctaagccttctcctatttatgggggtttagcattgattgttagcggtgtggtcgggtgtgttattattctgaattttgggggaggttatatgggtttaatagtttttttaatttatttagggggaatgatggttggctttgggtgtatattggacttctctctcaactttaatgtaggcttgaatttttaaaaaacaggtgaggggaaacaagggattttggggttttaagcctgagtgactaggaaaacatatgtcaataaatgggagagtggagagaaattggttggtttat

SEQ ID NO: 98431 - DNA, 328 bp, Homo sapiens
catgccattgcactccagcctggacagcaaacctagactccatcaaaaaaaaaaaaaaaaaaaggaaaaaatttaaaaattaaaggggccgggggaaatgggccttgaatcccagggcctaaagaaactgggggaagaagaaaaattggccctgggaattcaagggttgaagggacttttaatgcccccctggctttcccccgggggaaacaaacaaaaaccttttttaaaaaaaaaaaaaaaaaaaaaatttggggcccaaatttttgggccaccccccttggttaaaaggggggttttggggggaaaattcaacaaaaaacccgcg

SEQ ID NO: 98432 - DNA, 330 bp, Homo sapiens
acaaaatgtccttttagcaacattcaaagtaattaactgttacaatttccaaagcggcagaagtattgaagcacaaaaaaaaaaaaaaaaaaaaaaaaaaaaaaaaaaaaaaacccaaaaaaaaaacccccaaaaaaaacccaaacccccccccccaaaaaggggaattgggaaaaaaaattttcttttttttttgggaaagattccttccccaaaaaaaaagaccctgaaaaaaaattgggggaaaaaattttaaaaaacgggccccgggttttttaacttggggcccaaccctttttaaaggggggggaaaccccaggtttaatttct

SEQ ID NO: 98433 - DNA, 368 bp, Homo sapiens
ggcacgagctaaacccaagaggcagaagttgcggtgagccaagaccatgccattgcactccagcctgggcaacaagagcaaaagtccatatcacaaaaaaaaaaaaaaaaaaaaaagggtttaatttatttaaacccgggggttccctttctaattttttccccaaaaaaaaggaaaccccctggtccccccaaaattttgaaaaaaagggcccacggcgcttttccccaaggggaaaaaaccccccccttgcccttaggggaaaaaaaaaaggggggaaatccctttcggggaaaatttttcccccctttccaaggggaaaaacccccccatgggcctttatgggaacccaaaaaggggaatattcc

SEQ ID NO: 98434 - DNA, 381 bp, Homo sapiens
ggcacgagctggtcttgaactcctgacctggtgatccacccgcctcggcctcccaaagtgctggcattacaggcgtgagccaccgcgtccggtctcaattgattaaaagactttggtgatgatacagttagaaggaatttggaaatggagtggccatgatgtcatttaggggtcggtggctaggtcagcccgttccaagtgttttgggggtgttggtgggaattcacattggaaagcttggtgtgcaccatcattgggaactctggctgtctgctgcacatggcagggagcccctgaagatgaacgtgggaaggatatatgggaagcagattagttgggtggaacttgctgacaggcagaggagagacatgcaacaatgtg

SEQ ID NO: 98435 - DNA, 385 bp, Homo sapiens
acttgaacctcgcaggagtaaatctctaacatataaagagctcctacaaattgatgagactaaatttttatctaatttttaaaaagagcagataatcagtctattgtcaggaaaaagtacatatggctcttaaaaatgtgaaaaggtgattaacttcatcctaagagaaatgcaaattaaaattgtacttgagatattttcactcatcagattggcaataatcccaaagtttaataacatactctattgaggttgtagggaaaggtcttttcttgtttttttgggtttttttttggtttggtttttttttttttgaaaaggagttttgctattgttgcccaggctggagggcaatggcatgatcttggctcaccgcaccctttgc

SEQ ID NO: 98436 - DNA, 349 bp, Homo sapiens
tgcacgagggaccaacaaagtacagagatgcccagaacaggaaacggaccaatgtctgtgtgagtgcactgatgaaggggaaggcgctgatgatggggaggctgcccctcgtttgtgttgagtttacactatctgctgactcaacggggaaatatttgcctgagttactttctggcccttttgcctgaaagttttccagattctctgggcagaaagctctacttttaaaagacattttgaggctgggaacagcggctcacacctgtaatcccagcactttgggtggccaaggcaggtggatcatgaggtgtcaggtgtttaaaaccagcctggccaagatggtgaaacc

SEQ ID NO: 98437 - DNA, 378 bp, Homo sapiens
  misc_feature (1)...(378): n = a,t,c or g
ggcacgagaacttttattgcccaggcagtgctctgggcaggaatgaaggcaacatctttcctaaccctgaagcgacttttgtcaaggaaatgtgagtccccaagaaaagtcatacccagattcatcttgtctggagtggtactctcagaaacatttcattgtctgtgctacattttccctacctagtaaatgtcaaagccttcctcattggtacttgtttcggatcgccttcttgactttgtactattttcaggatggatcccaatttagaatcttcttgaagatactatatatttactaaacatattttgagcctgggtaatatagtgagaccttgtctcttctaaaaaataattaaccaggggtggtggtgtgcan

SEQ ID NO: 98438 - DNA, 351 bp, Homo sapiens
agattcccacacaataataatgggagactttaacaccccactggcaatattagacagatcaacgagacagaaggttaacgaggatatccaggacttgaactcagctctgcaccaagcggacctaatagatatctacaaaattctccaccccaaatcaacggaatatacattcttctcagcaccacatcgcacttattctaaaattgatcacaagatttatagtcaaggaaatcatgaaacagattgtagatatggcaaaaaaggtgggggttggaaggatgaacggtttccagatgtggattgtgagaaattcaagagccagtagacatcacaccacaggaattatcagag

SEQ ID NO: 98439 - DNA, 351 bp, Homo sapiens
  misc_feature (1)...(351): n = a,t,c or g
caagaatctgtgaattatctgtggctctgtttcttattaaccaataacgactcctaaaaatacaactgtttacatgtggggatgggctatagaattttttttttttttttggtcaaaacctgtttttattttttttttgacaggttgccaaccccccttggttgttggattatttaaaacaacttcaaatttccccatatgctggctttttaaagagggtgaggccttaaagaattttaaagctttttctcccaaacccaggccagtgaacaattaaccaaatccaagcaaggattggccttgagaaccttgcctccagtccaatttcctcctccaccacccagacctgan

SEQ ID NO: 98440 - DNA, 361 bp, Homo sapiens
  misc_feature (1)...(361): n = a,t,c or g
tttagtagaaacggggttttgccatgttggccaggctggtctcgaactcttgacctcaggcgagtgttgggattacaggtgtgagccacctagtccggcctattgttttttacacacaatagtgactatataccctcttttgtgtcttgcttttttcagctatctttgtgattgttagctattactgcataacaaaccatcccaaagcttagtgccttaaagcaatcaccttttattatttctcatgattctgggcttgccagggctcgctcatccatcantggcctgctatgggtcggcccggagactttgctgctcttggctgggctctcttacgcttatggagtcttgcctagacagn

SEQ ID NO: 98441 - DNA, 337 bp, Homo sapiens
tgtcggtcgggttggtcttgaactcctggcctcaagtgatctgcctacctcgggctctccaagtgctgggattacaggcatgagccactgcccctggcccaactttctgttaatctttattggatactttttcactgtgctgaccccatgtgaatactattcaggaggtatgacagtaccattatggttatagctgtggacactattcttttatgctctgtactcatagctcttcacctttaggaactagagtagatgtaaagcatttaagaattttaaggtttgagctatttcatgatcaacctgaaagggccataacttgtaggtaatacgtatt

SEQ ID NO: 98442 - DNA, 376 bp, Homo sapiens
aagcaagaatatctttggcatcacagactcagtaagcctgtttttttctaatgcacatacaaataaataaaatgcacaacttttaacataaaaaaaaaaaaaaaaaaaaaaaaaaaaaaaaaaaaaaaaaaaaaaaaaaaaaagggggggcccttaaaaaaaaaccctgggggggccaaaaaaaaacgggggaaaaaaaaaaaaaatttttttctaaaaggggggggaaaaaaaaacggggcccggggcgggttttaaaaaagggggaaagggaaaaaatttttttttggaattttttaaaaaaaaactttttttggggggggggaaatttgggccaaccccccccaaaaaaattaagggctttggggaaaaaaaa

SEQ ID NO: 98443 - DNA, 363 bp, Homo sapiens
atttcttatgtctgaacaagataatgatatcttagctaaaaataaacaaatggagcttctgggggaaccttctttccagtggctacagccactgactctcttgctgcctgaacctctgggtcatgaggctcctgtaatcaccaccaggtgcctagagaagtgctgttctccagtccttactgactcatacacaagaagctagctcagggcccagacacctggaggcagactaatccaggagagagtagggtaagaggggcccattagaagactgtgaatctggccggatgtggtggctcacacctgtaatcccagcactttgggaggccaaggcaggtggaccatgaggtcaggagttcgaga

SEQ ID NO: 98444 - DNA, 382 bp, Homo sapiens
gcagaggttgcagtgagccaagattgcgctactgcactccagcctgggcgacagagcaagactccgcctcaaaaaaaaaaaaaaaaaaaaaaacccaaattttttgggaggggcccggggggggggtttccccctttaaaccccacttttttaaaggcccgggggggaagaaaccctgggggcaaaaatttaaaaacccccctccccaatgggaaaaacccctttttttttttaaaaaaaaaaaaaccaaattttccccgggggggggggggcccccttaatcccccttttttggggaaaaggggggggaaaatttttttaaccccggaaagaaaaagttgggggaaaccaaaaatggccctttgccttcccccctgagaaa

SEQ ID NO: 98445 - DNA, 369 bp, Homo sapiens
tcagaatcaacttcttccagacccctgttaatgttgattctgacttttataactgacagtttcaaaagtcagaatcaacttcttccagacccctgttaatgttgctattttgatctccttccatgaaacatcagtgtttttattggcatctagaatgctgaattctttccagaagattttttctttgcccagattttggatctgggcaaagaggccaggaattcttcctaacatctgcaatgcccaggagagctcctccacaacaaaggattatccagccaaaattgtcaatagtgaaaaggctgagaaatcctatactggagaaagcatgtggaaacagagaagaaaaaaaaattaaaagacagaatg

SEQ ID NO: 98446 - DNA, 381 bp, Homo sapiens
caaaaaattaagtcttcaaaactcttttgaagtccactgggtgcagaacatcccccactgtgcctgaaaaccaaggaacttcaaaagagttttgaagacttaattttttgtaaaacacttacttgagattttgggttatccataatagaatgtatttcattagattctctgattctatataagaatgtgaaaagatcgatatattgttgttagaaataatgctatttctttccaattttttttttttttttttttgaaagggagttttgttttgccacccaggttggagggcaggggggggatttcggttcattgaaccctttaactcccaggttaaagtttttctcttgccttacccccccaataagctggattacgggg

SEQ ID NO: 98447 - DNA, 393 bp, Homo sapiens
  misc_feature (1)...(393): n = a,t,c or g
acagtttgcatttccctgaaaacagaatattgtttttaagagggttagaaacaaccagtgggaaaggcacatgctgctttgtttagtttttccttgttcaaactttgttggtcacattttcccatctgtattcttttttattaagaaaacagcttagggaggctgaggtgggaggattgcttgagcccaggagtccgaggttgctacaaaaacaccattgcactctagcctggacaacagagagaccctgcctcanaaaaaaaaaaaaaaaaaaaaaaaaanttttttttggccctttttcccttagaaaaattttttcaactttttttaaaaaaaaaaaaaaggaaccccctttttccaggccccccccaaaggaaaggaaattttaaaata

SEQ ID NO: 98448 - DNA, 382 bp, Homo sapiens
ggtttcaccgtattagccaggaagggctcattctcctgaccttgggatccgcccacctcggcctcccggagtgttgggattacaggcgtgagccaccgcgcccggcctgatttttctattccttgaaaatgcccagcctgggcatacccactcgcagaatattggactactgggttcgttattgcatcccacaggctgagcttgaataaatgctactaaagcctccagcgtgtttgttgcatgctgctctcccatcaaggcataatcgttgtataataagggatagtgtgacatttcttatcatattgcagcatgaagactgtatttcgtgcttattgtggatttcaggggtataacatttatatttgcgatacacaccatt

SEQ ID NO: 98449 - DNA, 380 bp, Homo sapiens
  misc_feature (1)...(380): n = a,t,c or g
cccacgcgtccgaatgaacacaattttgcctcatttgttacagccaggttgcatatgaatatatgggtgtatatatatgttatatataacattggatatttggtatatatactacatatgaatctatattcatgcatcctacaatacatttatatttaaatctactcatacataacatatatatgtaaatacacacacacacacacacacacacacacacacacacacatatacacttattcccagaacttccccaattctgaactttatagatctgcgcttatgtactgatatgaacttttaaaacacattttctttgaagtggggttacaaacatatggctgcgggctataggttagaatatatactaattgggcccn

SEQ ID NO: 98450 - DNA, 417 bp, Homo sapiens
agaatcactcgaacctgggaggcagaggttgcagtgatccgagatcgcgccactgtactccagcctgggtgacagagcgagactccatctcaaaaaaaaaaaaaaaaaaaaaaaaaaaaattttttttggattaagggaaaaaaaattaacacttttcccctttttgggaaagaaaaatgaaaattctggtttccccttaaaccctaattttttttttggggggaagggaaaaaaggccacactgggacccttggggttggttttaaggggggttcctttttttagggggggggaaacccaaaatggggaaaaccaaaaaccgggaacaaccttggaaaaatttgaaaagcatttttgggtgggcccccccccccttgaaaaaatttccccacacaaagggaaacaaacacaaaaat

SEQ ID NO: 98451 - DNA, 88 bp, Homo sapiens
atggaggagatgtataagaaagctcatgctgctatactagagaatcctgtctatgaaaagaagcccaagaagaaaaaaaaaaaaaagg

SEQ ID NO: 98452 - DNA, 374 bp, Homo sapiens
  misc_feature (1)...(374): n = a,t,c or g
ccctgtacttggccccttatttagtatttacagccttgttggcagaactatagcccataaccataatgtaaatagaagcaagtgttgcagccatagcataaagtggggccagctaagcagcttccccttgcagacagataaacgcgcctgatcactgaatgccctcctcggcaacgggaagaatggaagtgcctaggcagaattcagcaggccaaagcttctctccattcctgaagttctaaggtccatgtcctttttttctttagagtcagggtttcgctctgttgtgcaggctggagggcagcggtgcgatcacaaatcactgcggccttgatttcccgggctcaggcaatcctgcctcctcagccctccgn

SEQ ID NO: 98453 - DNA, 447 bp, Homo sapiens
  misc_feature (1)...(447): n = a,t,c or g
catgacaccctggagatgagancgtcggaccggcncgacccacgcgtccgttcagaaaagaagattcctttcaaaatattactgctcattgacaatgcccctagtcatccaaaagctctgatggagatatatgaggagattaatgttattttcatgcctgctaacacaacatccattctgcagcccatggatcaaggggtaatttcgaccttcaagtcttattatttgagaaatacatttcataaggctctagctgccatggatagcgatgtctctgatggatctgggcaaagcaaattgaaaaccttctggaaaggattcaccattttagatgccattaaaaacattcgtgattcatgggaggaggtcaaattgtcaacattaacaggagtttggaagaagttgattcccaccctcattgatgactatgaggggttcaagacttcn

SEQ ID NO: 98454 - DNA, 465 bp, Homo sapiens
  misc_feature (1)...(465): n = a,t,c or g
gccgtaggcgggcggnnncctgaaaactaggacatncgaaccacganacgccagcttggcacgagggatgtcatttaaaattctggatagtggggagaggacaagatggcctactaaaagcagcggtgattggaggctcccatcagaaaaaccataataagtgtgtgaatccttcactggcagccatggtatccaagttctctcatcaaaattgatgtgaaggtttgtcaaagatcaaatagttgtagatgtgtggagttatttctgaggcctctattctgttcctaatgtaaatgacaggttgatggtacagcaaaccaacatggcacatgtatacctacgtaacaaacctgcacattgtgcacatgtaccctagaacttaaagtattatgataaaaaataaataaataaaagtcgctgctattgtaaaaaaaaaaattgactagaaggcgggcattacccacg

SEQ ID NO: 98455 - DNA, 412 bp, Homo sapiens
ggcctcgtgccaaaaggactgcttgagcctgggaggtggagactgtggtgagctatgatcatgccactgcactgcagcctaggcaacagagtgagactctgtctcaaaaaagaaaaaaaaaaacgcaaaaaaaaatttggaaggaaggagggtatgccttttccattgtcttggattccatacacccggtgggacaggggcctaacagctttgtctttcgcaggcctgcaccctggctcgggggaatgctaaggggtttttaaagtacatccacaggaacaacgtaagcatgcccagtgttgccggccacacttggggacccgaccaactagtgaaaggtcagggagagacctgcccagccaccatacactttagcgacagcccctccctgaaatataccatgtacccaatg

SEQ ID NO: 98456 - DNA, 489 bp, Homo sapiens
tgggttcgataccgtttgacctggataaccctagctatggacgaaggtctattcactggttttgcaaaaaacactaacctacaaacccttctgggccaacaagcttgagtgcgatccggtctgcaatgatggaggaattgccatgtgcgatgttggcaaacgggccagcatggacaaacactggagtgccctgtggaaaccaggacaccgtgagctgagctgccaatcctgcttcaaagtgggatcacacattcaacggtatggaattgatttggaatcggaaggaagaatacttcccagagggaaaatataaagtcatctcttttatttcagtaacgtcccagtcacaggtgtgaggaagaatgagaagaaagagatgagcaagtggagaaggtcttgactacccaggttaagtgtgcttaattttttttttttttttttgacacggagtctcgttttgtcgcccattctggatggcaggggggtgat

SEQ ID NO: 98457 - DNA, 636 bp, Homo sapiens
aaccctttatgacacttgcagatgtagctcccaaaagtgttgacacattgcctaaatctagggcaggaggctcttcctgtagcacattcatcaacatctacacaggtcctcccatcaggagccagctgcaggccaggggatgggcactggcaccgtatttgtcctttaacaacatcacagccatactgacagtttgccatggagcaggtcagggcacttgagcaggaaccatccggcatgagcatatatccgttgagacagtagcacttgtagctgccgtaagtgttcatgcacctgtgcttacagggccggggcttcaggccacactcatttagatcccttgaaggcaaacttgtggcttggtgatccaggggttggaaaagaggctgttcactgccttggtcaagaggagctgggatgtgctcgtcttgattacaggtttttccagcataaccaggatgacacttgcacttgtttggcccgatacattcaccatgtttgcatcgtggttggcacacaggctgacactgtccccaagactggcgagcccagccccagcagcagtcaatcctcccaccataacgacataggccaatcgatgacactatttgcctgggccacctcccgtcgaactcg

SEQ ID NO: 98458 - DNA, 426 bp, Homo sapiens
cccacgcgtccgattttttgatgatgttttgtttgactactgtgttaaattctcaatagtcctaatagtttgtcatgtgattctcactctttcttgatagatgatcatatcattcacaatttattttccatttttagatcttatttattatatttttgcttaagccctttagagcagtggtgaataactgatgacttcaagcatcttgtctgaatcttgacattaataggaacgcttctaatttttacctttaaacctatagatgcttattataggtttctttcttcctttttttttttttttggggggcaaaccctccttttgtcccccaggctggagggcaggggggctttttgggttcattgaaccctttgcctccggggttaaagcattttttttgcctcacccccccaagtagcgggaact

SEQ ID NO: 98459 - DNA, 485 bp, Homo sapiens
taagatccccattcggaaccgcatggatatcatgcggaaccccacccgaattccacggtcgacccacgcgttcggtcataaagggaaaggaggaagtgagaagaaagaaacagggaaatgacagagcgttgctcagttacccaggctggagtgcaatggcatgatcttggctcactgcagccttcacctcctgggtttaagcggttctcgtgcctcagtctcccaagtagctgggattacaggctggagtgcgatggcatgaacttggctcacggcaaactccgcctccctggttcaagtgaatctcctgcctcagcctcccgagtagccgggattacaggcatgtgccaccatgccccgttggccaggctggtctcgaacaccttacctcaggtgatcctcccacctttgggattacagcaggctgaggaattaccaaggaggcaggaggtggagcataacacaccaagcctggtgccaatctg

SEQ ID NO: 98460 - DNA, 719 bp, Homo sapiens
  misc_feature (1)...(719): n = a,t,c or g
acagtggggtccatggggtggctcctccaaactgcatcagggaatcaggaagggactggcctggagccaaggggaaagggatgattgctcctgctgtcaccacctttttcccacagaagctcagcatgtcagccagatgaaccatggaaactggagaggaacacaggcgataaggaacagtgactgtgtccagggctgtagccaggatggcactgcagtggaagggcagaatggcctgtaagaagacaccaagaggggcacttggcctcgggcctggaaaagaatgtgtggaggcagaatgttaacaccagagagacccaggggatgaatcaggggtatgtttgaccccaggctggacaagcataggacagtgtgatctgagaggccacatcacagctgagttcaagctcgggcctcaagaacagagccagtacagacagcgactgactgggagcatgaggaggccctgtagcctgccgcagtcagaacaagagcaccgagacttacatcataatgcagatccatgaggatgagtcgcggcgtgtacgtctcctggccgtgcagcgtccggnccgtacgatacaggacgtcggggcacagctcttccgggggctccttggaatcggtcgctcggcccagcgcagcatcctgctggttccaccagtgcgcgcccangaaaccggnaaaatgtnccaactgcagtgtgagcacctccccgg

SEQ ID NO: 98461 - DNA, 402 bp, Homo sapiens
aaataataaaaaattatattctagtttactaacataagcacattagaactcataaaggagtatatatcatgatccttgaggtaaaatatcattaagtttctgaaaaaaaggttaggaattaacaactatatctaagttaattattctctcccttaatttttgtgccatttttctctggtctgattcttcatctctcttgataaaccttcacagctttcgtatttggcttctgcttctgcaactaccctttagcattattcaccaggatttcattcccttctggtcttattttacattttcttttttctttttttttaagatggagtttcactcttgtcgcccaggctggagtgcaatggcacgatctcagctcactgcaacctccccttcatgcattcaagc

SEQ ID NO: 98462 - DNA, 405 bp, Homo sapiens
ggaggcggaggttacagtgagccgagatcgtgccattccactccagcttggacaacaagagcaaaactccgtttattaaaaaaaaaaaaaaaaaaaaaagggggggtctgttttggggttggttttttggggccaaggccaaaggggggttttttttgatgtttaaaaaacctaaagggggcttttttttaaggtgtggaaatttttttgcgggggaccgttttttgggggcggggtttttgccaacaaaaaaacccccctgttttttgggtttttggggaaaaaaaaatttgttaggggtggacttttttaaccaccttaatttttttttttttttggcgttgcgaaaaaaaaaaaaaaacataattttttttttttaccattgctttaacaatttggcccatt

SEQ ID NO: 98463 - DNA, 419 bp, Homo sapiens
gcgcgggaggcaaaggttgcggtgagccgagatggcaccattgcactccagcctgggcaacaagagtgaaactctgtctcaaaaaaaaaaggaaatgctcacccaggtgatgccgatgcaatgggccaaagaccacacttacaggaaatactgctttgacttgcccggctctcctgaaagagacatttcttctgctgaatattgacatcgctaacattgatgcatagattgaaatgccatgcgcctaaaaaacatttgatcatgatcaccactatttgatattgatctgcctacagagttgaaaaaatggatcttacctaatgccaagttgaaatcaatgcctgtctatcctacaggatctatcctatgggattcattggggtactgttccaaacattcactcatatggctctttcctt

SEQ ID NO: 98464 - DNA, 179 bp, Homo sapiens
  misc_feature (1)...(179): n = a,t,c or g
cttctacagtccacttctgcttttttgttatattggttgtactgtcttcatctggtgctgctggaaaacattaaaagtagactcatttcagagttcacctttctcctgaacttgaaacagttcatcctcttccannnnnnnnnnnnnnnnnnnnnnnnnnttagaggtcgacgcggccg

SEQ ID NO: 98465 - DNA, 374 bp, Homo sapiens
  misc_feature (1)...(374): n = a,t,c or g
ggacaacatagcaagactctgtctctacaaaaaataaagaattagccaggcatggtggcgtgaacagagtgagaccttgtctccaaaaagaaatgactgagatttactcattcttcatgttaggcacattgattgagcatttggcagccattggcagcaggctttccattttgtacatgacttcattccatctccatgaagactctagctaggtcactcattgcccatggaccacagagaatatatttatatatatacatatattggagatggagtcttgctctgtcacccaggctggagtgcagtagtgcgatcttggctcaccgcagcctccgcctgctgggttcaagcgattctcctgcctcaacctaccn

SEQ ID NO: 98466 - DNA, 411 bp, Homo sapiens
  misc_feature (1)...(411): n = a,t,c or g
gcaggccgcctgtagtcccaactactcgggaggctgaggcaggagaatggcgtgaacccaggaggtggagcttgcagtgagccaagaacgcgccactgcactccagcctgggcaacaaaaaaaaaaaaaaaaaaaaaaaagggggccctttaaattaaaagggcccttaaaaacccggttaaaaacccagggggggcttttaaagggccaaacttttggtgttggcccccccccggggctttttttgaccggggagggggccccccccatgggttttttttaaaaaaaaaaaaaaaaggcctccatttgggggaaaggggggttttttattgggggnnngnccccaacacccagataaccaccccattcaatttgaaataccaaagtgataggattacagttttcactcat

SEQ ID NO: 98467 - DNA, 400 bp, Homo sapiens
cttgcttgagcctcatcccgctttctggaaagtacttttgcttcaataaatctgggcttttgttccttcaaaaaaaaaaaaaaaaaaaaaaaaaaaaaaaaaaaaaaaaaaaaaaaaaaaaaaaaaaaaaaaaaaaaaaaaaaaaaaaaaaaaaaaaaaggggggggggggccttaaaaaaaaccccggggggggccccctttcggggggggggaaaaaaaaaattttttttttttgggggggggaaaaaaaaaaccccgggggggtttttggaaaaaaccccccctttggggggggggggttttggcccccccccccccaaaaaaaataccccccgggggaaaaaaaaaaattttttgggggggggggggggacacaccccccttccctccggtggggg

SEQ ID NO: 98468 - DNA, 388 bp, Homo sapiens
taacttccctatagcaccccctctaccccctttagagccaaaaaaaaaaaaaaaaaaaaaaaaaaaaaaaaaaaaaaaaaaaaaaaaaaaaaaaaaaaaaaaaaaaaaaaaaaaaaaaaaaaaaaaaagagggggaaattttaaaaaaaggtagagtaataattaaatgggggtgggtgatgagggaaggaagaagtcttattgggggggtttttgatagggggggtgttttttttttttttgggggggttacttttgaggttagttattttttggggggggaattatatttaaaatttcctacttgtaaaatttatgtccccccgtcttttggttttttggtttcgcttcttttttatataataactcgtgtgggggtgtttacgag

SEQ ID NO: 98469 - DNA, 414 bp, Homo sapiens
tcgcccacgcgttcgcccacgcgttcgcccacgcgttcgcccacgcgtccgaaaaaaaaaaaaaaaaaaaaaaaaaaaaaaaaaaaaaaaaaaaaaaaaaaaaaaaaaaaaaaaaaaaaaaaaaaaaaaaaaaaaaaaaaaaaaaaaaaaaaaaaaaaaaaaaaaaaaaaaaaaaaaaaggggggggggggtttttttaaaaatatgggggggggggccattttttgggggggggattatttttttttttttttttttggggggggtttaaataaaaagttggttttttttttgaaaaaaatttttttttttggggggggggaaattggggccccccccccaaaaaaaattttggttttggggggaaaaaattttttttggggggggggggggggcccccgcccttcaccttcc

SEQ ID NO: 98470 - DNA, 408 bp, Homo sapiens
tctacaagacgctacttcccctatcatagaagagcttatcacctttcatgatcacgccctcataatcattttccttatctgcttcctagtcctgtatgcccttttcctaacactcacaacaaaaaaaaaaaaaaaaaaaaaaaaaaaaaaaaaaaaaaaaaaaaaaaaaaaaaaaaaaaaaaaaaaaaaaaaaaaaaaaaaaaaaaaaaaaaaaaagggggggggggggccaaaaaaaaaaaaccggggggggcccaaaaaattggggggggaaaaaaaaattttttttttttttaaggggggaaaaaaaaaaacccgggggggggtggggaaaaaaaaaatttttttgggggggggcaattttggcccccccccccccaaaaaaaaaaagccgcggggaaaaataaa

SEQ ID NO: 98471 - DNA, 411 bp, Homo sapiens
  misc_feature (1)...(411): n = a,t,c or g
cccacgcgtccgataaattacagctaaaatcttttttttcctttttgtatttgggctgtttcctctaaatttcttttttcttttcttttctttctggttctttcttttcttccttttcttttttttttttttttgggaaggggggttcccttttggtgccccgggcgggagggcagggcataaatttgggcccatggaacccttggcctcgggggtcaagggggtcccccgcccccacccccccaggatttgggaataaagggcggggccccccgggcccaaagggggaaacccccttttttcctaaaaaaacaaaattaacccggggggggggggggggcccaggaaccccccttcctgggggggggggggcccaaaaatgtttgaacccggggggggggggggggaggn

SEQ ID NO: 98472 - DNA, 394 bp, Homo sapiens
tttaaaatgcaagttttatttaagaggaactatctaatacgctgaaaacagtatcaggtatctgtaaaattgctttttgtaactcagaatcttggaacaaaaaaaaaaaaaaaaaaaaaaaaaaaaaaaaaaaaaaaaaaaaaggggggggcccttaaaaaaaaacccggggggggccaaaaaaaaccggggggaaaaaaaaaaaattttttccttaaaagggggggaaaaaaaaaacccccggggatttttgaaaaaaaaaccctttttggggggggggaaaattggggcacacccccccaaaaaaaaaaaccccctgggaaaaaaaaaaaaattttaaagggggagggggggaaaaaaaccctttatttcgggcggggaaaaaatttctcat

SEQ ID NO: 98473 - DNA, 397 bp, Homo sapiens
attcctcttcttaacaacatacccatggccaacctcctactcctcattgtacccattctaatcgcaatggcattcctaatgcttaccgaaaaaaaaaaaaaaaaaaaaaaaaaaaaaaaaaaaaaaaaaaaaaaaagggggggggcccttaaaaaaaaacccggggggggccaaaaataaccgggggggaaaaaaaaaaaattttttcctaaaggggggggaaaaaaaaaaccccgggggaattttgaaaaaaaaactttttttggggggggggaaaattgggccaaccccccccaaaaaaaaaaaagccgcgggggaaaaaaaaaaattttaagggggaaagggggaaaaaaaaaccaaaattcgttgggggaaaaaaattttttaaaaaaaaaag

SEQ ID NO: 98474 - DNA, 390 bp, Homo sapiens
ccccattggaagtttgtgattttgctttggcaaagtttcattgactagtaaaactcattctgttttagtgtatatttcaatataaatgtaaacattttgctcaaaaaaaaaaaaaaaaaaaaaaaaaaaaaaaaaaaaaaaaaaaaaaaaaaaaaaaaaaaaaaaaaaaaaaaaaaaaaaaaaaaaaaaaaaataaaaaaaaaaaacctgggcgggccccccgggggggaaaaaaaaaaaaacccccccgaaaaatttggggggaggaattttttttttttttttttttttttgggggcccccccccccccacctttttggggtaaaaaaaaaaattttttttttttggggggggggggggggaaaacacccccccaaaaaaagtggggg

SEQ ID NO: 98475 - DNA, 379 bp, Homo sapiens
agtattatgacttcttatttaaaataaataactattgccggttaaaaaaaaaaaggaaaaaaaaggggaaaaaaaaaaaaaaaaaaggaaaaaaaaaaaaaaaaaaaaaaaaaaaaaaaaacaaaaaaaaaaggggggggggccgtctataaaaataattggggggggccacctctcttcgggggggaggaaaaataattctttttctcatagggggggattaaaaaaacccttgttttttttggggagaacctattttttggggggggggggtctttggccccacccccccccaaaaaaaatcgccgggggggcaaaaaatataattctaagggggtggggggaacaaaaacctcttctttttcctcctggggaaaag

SEQ ID NO: 98476 - DNA, 374 bp, Homo sapiens
  misc_feature (1)...(374): n = a,t,c or g
cccacgcgtccggagaactctttgtaatcaataaagtttggggtgatgacaaatgttaaaaaaaaaaaaaaaaaaaaaaaaaaaaaaaaaaaaaaaaaaaaatttaaaaaaaaaataatataaaaaaaaaaaaaaaaaaaatctaaaaaaaaaaaccaccttccttttaaaaatctaaaataattactctccctctaatattctcattacaaacactttacatctttttcttatttttcttttttatccatttctctctctatattaaatttcttctcattaaataaaaaaaatccatattattttaatatataaataaaatttacctaatcttctcctttcaaaatcatcttatctcaattctaatataaaan

SEQ ID NO: 98477 - DNA, 368 bp, Homo sapiens
  misc_feature (1)...(368): n = a,t,c or g
cttgaacccgggagacgcaggttttagtgagccgaggtggtgccactgtacttcagcctcggcaacagagtcagagcccctcacaaaaaaaaaaaaaaaaaaaatttttatatatttatatatatttatattttgggttttatattttggggggtttatttttaaaaaggggggaaatttttttttttttttttgggggcctatttttttttttttaaaggggttaaagggtttttaacagtcaatccaataaacccactttttgtttggggggggggagttttaaaaggtttaagtggggggcataaaaccattggccccttacaggcaaagtggggaggaggacccaggggctttgtaaaaggttn

SEQ ID NO: 98478 - DNA, 360 bp, Homo sapiens
  misc_feature (1)...(360): n = a,t,c or g
acgagaattgcttgaacctggagggcagaggttgcagtgagctgagatcgtgccactgcacttcagcctgggcgacaagagcaagattccatctcaaaaaaaaaaaaaccaaaccgggaaattccttcaaaaaaacccccttttttacctttggggggggggggagaaccccaaaccaccccaaagccgggggccgggaaccctgggacctttggcccctggggccccctaaatgggttctggaaacccagggggacggggatccttccacaccccccccttcccatgggggggggaaaggggttacttgccagggcccatttttttcccacaggggctgaaaccacagcgttgtcccan

SEQ ID NO: 98479 - DNA, 376 bp, Homo sapiens
attgaatagaaaaggcacataaggcacttggcacagtacctggcagcacatttgttagataccaccactaccatcaccacaaccattaccaccaccattgtcaccatcatcatcctcatcaagacaacagtgaatgggaaaaagctcagtctctggagcctgacaaactttttttgaatcctggctttgccacttcacagctacgtggcctcagataagtgacaacttctttgaacttgattcttattctgtaaaatgggaaactcataaggctattgaaaagtgtataacatggttcttcacagtaagcactcaataaatgttagctattatgattattaaaaaggagtgatcaaggtcagtggttgcctggtgt

SEQ ID NO: 98480 - DNA, 364 bp, Homo sapiens
actagttctagatcgcgagccggccgccctatggattttggatttttttttaaaaaaaaagggcaccgggaacccccggggggtgtggaaaaaaaaaaaaaaaattgggggtcacggaaaacccccccttcgggggtaaaaaattttcctggctttgaccccccaaaaatgtggaataaagggggcccccccacccccccggttaatttttttggatttaaaaaaaaaagggggtttcacaaggggttgaaacccccacccccggaaattgccccccttaacccccaaaaggggggggaaaaaaagggggggcccccccccccccccaccccttttttggggggaaaatttcaggggaaaaggt

SEQ ID NO: 98481 - DNA, 385 bp, Homo sapiens
aataaatgtagatcgcgagcggccgcccttttttttattaaattttaaaaaaaaaaaatttttttgggggcccccttttaaaaaaaaccccgggggggcccaaaaaaccccccttttttcaaaaaaaaacttttttttataaaggccccccaaaaaaaattttcgggaaactctttaaagacccctttgggggggggggcactttttggccccccccccccccccaaaaggggcggggggggggaaaaaaaaaattttttatgggaaagggggggaaaaattggccccctcccccccgggccacaaggggggccaccccgggggaaaaaggggggggttttcccccccggggggggccccccccgggggggggaaaaaacccccc

SEQ ID NO: 98482 - DNA, 405 bp, Homo sapiens
cacaggcatgctcataaggaaaggttaaaaaaagtaaaaggaactcggcaaatcttaccccgcctgtttaccaaaaacatcacctctagcataaaaaaaaaaaaaaaaaaaaaaaaaaaaaaaaaaaaaaaaaaaaaaaaaaaaaaaaaaaaaaaaaaaaaaaaaaaaaaaaaaaaaaaaaaaaaaaaaaaaaaaaaagggggggggggttttttaaaaaaaaccgggggggggcccatattcaggggggggaaaaaaaaattttttttttttttaaggggggataaaaaaaaacacgggggggtaattaagaaaaaaacctttttttggggggggggcattttgcccaccccccccccaaaaaaaaggggcgccggaaagaaaaaaaattttttttggggtgga

SEQ ID NO: 98483 - DNA, 384 bp, Homo sapiens
aacaggctaaattaacatgaaatacttcatttggagggagaaaataaaatcagattttttcaaaaaaaaaaaggggaggaaaaaaaaaaaaaagaaaaaaaaaaaaaaaaaaaaagggggaggaaaaaaaaagaaaaaggggggggccaaacaagaacgaggaggaggtgggggggcccccgaaacaaaaggggggggggggggaaaaaagggggggggggggggggggggggttgatcgcggggggggggggggggggctgggccgcccgccgggggggggggagggagacccgagatggggggggggggaaaaatagggacaaacccccccaccaaaaaggggcggcggggggggggggggggggatgaaaggcgggagggg

SEQ ID NO: 98484 - DNA, 355 bp, Homo sapiens
tgccaaattatggtttttttaaaggtgcttttagattctaaggagaacagtgggggcccaggctctgaatgctgggtattctttttttttaattcgtctgggcttaggaggcagcaggtgattgggaggggggatactgtttcttactgcagaattgcagattcttttcatgctgtattataagcagcattaaaatttctagaggcctacagaactattcttttcaaagaagatggtgattaattataacacctgctctgttttttaaaatttttgttttatggctgggtgcagtggctcatgcctgtaatcccagcactttgggaggccaaggcgggcagatcatgaggtcagg

SEQ ID NO: 98485 - DNA, 364 bp, Homo sapiens
cccacgcgtccgcccacgcgtccgatcgggcccataccccgaaaatgttggttatacccttcccgtactaccaaaaaaaaaaaaaaaaaaaaaaaaaaaaaaaaaaaaaaaaaaaaaaaaaaaaaaaaaaaaagaaaaaaaaaaaaaaaaaaaaaaaaaaaaaaaaaaaaaaaagggggggggggcctgtaaaaaaagattttggggaggtaaatgttcaaatgcaaacctttgtgactttctttggaggacttggcagcacaagatgcccccgtgacctgaaaaaaaaaaaaaaattttttttgggggggaaaaaataggtgccaaccaactccctaaattgttttggggggggggattattt

SEQ ID NO: 98486 - DNA, 335 bp, Homo sapiens
atcagatgcggctccttgattttggacttcctagcctccaaactgtaaaaaataaacttgttttctttataaattaaaaaaaaaaaaaaaaaaaaaaaaaaaaaaaaaaaaaaaaaaaaaaaaaaaaaaaaaaaaaaaaaaaaaaagggggggccctttaaaaaaaaaccttggggggcccaaaaaaaaccgggggggaaaaaaaaaaatttttttttttaaggggggggaaaaaaaaaacctctggggattttttgaaaaaaaacctttttttggggggggaaaaatttgcccaacccccccccaaaaaaaaaaacctcctggggaaaaaaaat

SEQ ID NO: 98487 - DNA, 389 bp, Homo sapiens
agctgactttgtctgcagcccgacaacagatggaatgatgatcaaagtaaatcatttctaatagaaaaaaaaaaaaaaaaaaaaaaaaaaaaaaaaaaaaaaaaaaaaaaaaaaaaaaaaaaaaaaaaagggggggggccccttaaaaaaaaccccgggggggccccaaataaccccgggggggaaaaaaaaaattctcccccttaaggggggggaaaaaaaaccccccggggggcttttgggaaaaaccccctctttggggggggggcacatggggccccccccccccccaaaaaaaaacccccttggggaaaaaaaaaattttttaggggggggggggggaaaaaaccccccatttcccggggggagaaaaatttccccaaaaaaaa

SEQ ID NO: 98488 - DNA, 402 bp, Homo sapiens
  misc_feature (1)...(402): n = a,t,c or g
accaaacaagacaacttggattcagttgatgaattcctatgctttaatgtttttggttgcccttaattattaaataaacatttgttctgaaaaactcccaaaaaaaaaaaaaaaaaaaaaaaaaaaaaaaaaaaaaaaaaaaaaaaaaaaaaaaaaaaaaaaaaaaggaaaaaaaataaagaggggactaaacggncaaacctccctcctaaaaaaaagggaaaaaaaaaaaaaacgcgggaaaatttaaaaaaccaccctcgccctggggggggggggggttttggcgtccccccccccccccccatctgcccctcgggcgaaaaaaaacattttatcttaaaaaagagtaaaaaaaacccccctatcctccgcctagaaaaaaacctcctccctaacaaa

SEQ ID NO: 98489 - DNA, 447 bp, Homo sapiens
  misc_feature (1)...(447): n = a,t,c or g
atcgtctgcaggtaccggnccttagattcgtgtcgacccacgcgtccgcggacgcgtgggtgagaaataaaactagtaattacatatcttaatattcttgcttaacatatttttaatgccttgtgtattaagaaacgaggaaacaaataaaaataccattttcacaaaaactactttttttcccttttatatttctctcaaaatgtaagtcagctgtcaccagatggtcctttgccacagcttcctttaccgtatattaacagttcagcaacacgggttttttttggccatgacagacgaccagcggatggttagtaaagttttatttagcctaattacctaatgacaatttaaaaaaaacttcttttcctttctccatttaaaaaacgatgtatagttgaatatttgaaaattaatagctcagccgggtacgattggctcatgcct

SEQ ID NO: 98490 - DNA, 365 bp, Homo sapiens
  misc_feature (1)...(365): n = a,t,c or g
ttgaacctgggaggcagaggttgcagtgagccaagattgcgctactgcactccagcctgggcgacagagcaagactccgcctcanaaaaaaaaaaaaaaaaaaaaaacccaaattttttggggagggcccggggggggggtttcccccttttaaccccacttttttaagggcccggggggggggaacccctgggggaaaaaattaaaaaaccccccgccccaatgggaaaaacccctttttttttttaaaaaaaaaaaaacccaattttccccggggggggggggggcccctttaacccccctttctggggaaaagggggggggaaatttttttaaacctgggaggaaaaaggtgggggaacccn

SEQ ID NO: 98491 - DNA, 96 bp, Homo sapiens
ggaggcggaggttgcggtgagctgaaatcgtgccactgcactcctgcctgggtggcagagcaggactctgtctcaaaaaaaaaaaaaaaaaggggg

SEQ ID NO: 98492 - DNA, 394 bp, Homo sapiens
cggggtttcaccgtgttggccaggatggttttgatctcccgacctcgtggaccgcccgcctcgggctcccaaggggctgggattggaggcgtgagccgccgcgcccggctgtctgggctggtcttcagctcctgacctcgagtgatccacccgcctcagattcccaaagggctgggattacacatttgagtcacctcaccctgttctgtcatttaaggttctaaagtacttggagaggaagcaagagcagaaccacagcttcagccgtagcagaagaaagagacgggaagggagacaaatcttgtcttttttgagcagagtttccttagacactggtctaaagtttagagcaagacctgggcttggtggcgctgatggcaggcgtgcctgcccc

SEQ ID NO: 98493 - DNA, 383 bp, Homo sapiens
caaacatagtaatttgggttttaaacattgaataatttctaccttgttgaaataactgggggtccatttataagataatattaagaatgagtagagtaggctggtccgagtgcagtggtatttacaacctattgatcacaaccagttacagattgcttagtttcttcttcattccctctgtttcactgaactagccaaaaaaaaaaaaaaaaaaaaagaaggggggggggttaaaaacttgggaaaaaatgggagtttttttaaaaaaaaaaaaaggggggggggggggggggccccacccctggtattctaaccttttgggggggggggggggggggtttttttgaccccagagattaaaaaagggccggccaacccagtgt

SEQ ID NO: 98494 - DNA, 388 bp, Homo sapiens
  misc_feature (1)...(388): n = a,t,c or g
ccaccataattacccccatactccttacactattcctcatcacccaactaaaaatattaaacacgaactaccacctacctttacctgcccaacancccttannanaaaaaaaaaaaaaaaaaaaaaaaaaaaaaaaaaaaaaaaaaaaaaaaaaaaaaaaaaaaaaaaaaaaaannggggggggggcccaaaaaaaaaaactcggggggggccaaaaaaaaaccgggaaaaaaaaaaaaaattttttttttataagaggggaaaaaaaaaaaaacctcggtaatttttaaaaaaaaaatttttttttggggggagaacctttgcccccccccccccaaaaaaaaatacgccgcctgaaaaaaaaaaaattttttacgcggcggcggat

SEQ ID NO: 98495 - DNA, 390 bp, Homo sapiens
cccacgcgtccgatcgaacccatccctgagaatccaaaattctccgtgccacctatcacaccccatcctaaaaaaaaaaaaaaaaaaaaaaaaaaaaaaaaaaaaaaaaaaaaaaaaaaaaaaaaaaaaaaggggggggcccttaaaaaaaaaacctggggggggcccaaaaaaaggggggggggaaaaaaaatttttttttttttaagagggggaaaaaaaaaaccccggggggaatttttgaaaaaaacctctttttgggggggggaaaatttggccacaacccccccaaaaaaaaaaaaggcccgaaaaaaaaaaaaaaatttttaaggggaaagggggaaaaaaaccgggaaaagggggggggggaaaaaaatttttaaaaaaaat

SEQ ID NO: 98496 - DNA, 283 bp, Homo sapiens
ggtttcactatgttggccaggctggtctcgaactcctgacctcctgatccactcgccttggcctcccaaagtgttgggattacaggcgtgagccaccgcacctggccattttacctttagggaatacagagcttagtcatgataggaatgaatgtgcttgtccttgtactaaactgctcagagccttagcagatgctggggcagctctgtaggaaaggaaatggtgaggtaagtgggtcagggatcaaggcagtctgggaggggtgtgggggtgatgactcac

SEQ ID NO: 98497 - DNA, 449 bp, Homo sapiens
  misc_feature (1)...(449): n = a,t,c or g
ctcccttgacnaccncttcnanttnttaatgatccttgcaaaaanccccccaaacnnggctacgcgccattatacaataatgctcgcctacacgagcgtcggcattcctataaccgcagttgtgcttggaaaacaggcgataaaaggtgcgagatttcaggtgaggagaacgaccgaaaactatgacaaacagcaactaatacacaaaggaggtggcagaccgcctgggtgccacagcacccacaccgtcctcttgccccctgtcacttgggttaaaaccacaggaaattccactgttgcaaattttgtattaatccttgtatgtctgtcctttctattgttagtctacaggtgtatccagcagctccagagagacagcaaccagcgagaaggggccatgatgatggtggtggttttgtcaaaaagaaaagggggatatgcagggaaag

SEQ ID NO: 98498 - DNA, 335 bp, Homo sapiens
gggagagctctcccctgggacctcagccagtttaccagctctttggctgtcagagtcccagagttctagagtccagtctttcccaagttctttcgttgttggttttttttttttttttttcccgggggggggggtttccttttttgccccaggtgggggggaagggggggggtctgggttaattgaattttccccccccggggtaaaaaaatttttctggcttaacccccccccgattagtgggattggagggccctccccccgggccccacttatttgggtgttttttttataaaggggggggttcccccttgtggcccaggcggtttttaacc

SEQ ID NO: 98499 - DNA, 162 bp, Homo sapiens
aggaaaacattaagctgaaagcggggccaagcgagaaactgcctttccttttgctcctcagcagggtgctacagataaaaggttaaacatcatttatgcagccaaaaaacacatgaaaacatgcctaccatcactggccatcagagaaatgcaaatcaaaaa

SEQ ID NO: 98500 - DNA, 330 bp, Homo sapiens
attgcactccagcctgggcaacaagaatgaaactccgtctcaaaaaaaaaaaaaaaagggccggccgcggggtttcccccttgttttccccccttttgggggggccggggggggggtttttgggggccgggaaatggaccccttcctcccaaccgggggaaacccccgttttttttaaaaacccaaaaatttccccggggggggggggggccccctttttccccatttcttgggggggttgagccaaaaaatgggggtaaccctggaggggggggttttttgtaccccaaaattttcccctggccctcttttggggccaagagagggagc

SEQ ID NO: 98501 - DNA, 316 bp, Homo sapiens
gtcactatatatgttttaacatggaaaggtgtccacttaacagctgctaaatgtgatgcatttggtcgaaaagagattgagcagcacagaagtatatgctcaaaggtatgtgtgagcatgtgcacatgcacacacactttttttttttttttttttaaaaaaaaagcccccttttgtcccccttttgggagggaaaggggggaatttgggttatttgaaactttggcttccgggtttaaagaaagtttgcctaacccccccaagaactgggaattacgggggggcccccccacacaggattattttttgtttttta

SEQ ID NO: 98502 - DNA, 318 bp, Homo sapiens
gaactcccgacctcaggtgatccgcccacctcggcctcccaaagtgctgggatgacaggcgtgagccaccgtgcccggccaccctggtgggctttaaggctgtggaggcacctcggtcatggagtgaccaagtctcctgtgtggtagcatgccctgctgggacccaggcaagggttacttcttgtgaatagagacccagtgttgccatactttgctaccagattaggattgtcatgtgaaatctgatttttaaattttcttttaaaaatttaacatactttacagagcatgtgaaatatttgggttggagttgggctt

SEQ ID NO: 98503 - DNA, 333 bp, Homo sapiens
gtttgagcatcaggcacagaagcagaaaagcataacttttcttttttctttctttttttttttttttttttggaaaaaaagtttggtttggtcccccaggcaaaagggcaggggatggaattgggccaatggaaccgggaccctcgggggtaaaggaaattttttggcctaaccctcccaggaaatgggttataaattgggcccccccggcccccccgggtaaattttggatttttaggaaaaaacggggtttccccggggggcccaggggggttaaaaactcgggccctaagaggattgcccggcctgggctttcaaaaggttgggataacg

SEQ ID NO: 98504 - DNA, 289 bp, Homo sapiens
gcacgagctgtaatcccagcactttgggaggccgaggcgggcggatcacgagggtaggagttcgaggccagcctgaccaacatggtgaaacaccatctctactaaaaaactatatatacatatacatatgtgtggatgtgtatttatatgtatgtatgtatgtgggcgcatatatatatatatgtatatgtgggtatatatatatatggagatatctatccttaacctctgaacacacacacactagagccccgggccaataccgagtaatttattttttttgtggagc

SEQ ID NO: 98505 - DNA, 330 bp, Homo sapiens
gcacgaggagagagagagagagagagagagagagagagagagagagagagagagagccggcaccagggcgggggggcggggccacccacgcacctgtggggggaggaaggtgtggttttatcttccccgcagactggtgtgcgcgaaaagaatgcacccatctgggggtgtgcggcccctgtacttgccccgagagtgggaaggacccccttcggagtggactaggggtgaactcacaaagaatacacacctttatagataggtgtgcttcaacaacactgaccacacggttctgactgtattttgagagagtgggtggagacagctccg

SEQ ID NO: 98506 - DNA, 339 bp, Homo sapiens
ttgcaatcaggctgtcagccttatgctcgaactgaccataaccagcgcccggcagtgaagcccacatattgctgcaacggtcgattgcctgacggatatcaccacgatcaatcataggtaaagcgccacgctccttaatctgctgcaatgccacagctgcctgacttttcggagagaagtctttcaggccaagctgcttgcggtaggcatcccaccaacgggaaagaaactggtagcgtccggcgcctgttgatttgagttttgggtttaacgcgacaaatttgcgagggcgatcggagtaatcagagaatagctctccgcctacaatgacgtcatatc

SEQ ID NO: 98507 - DNA, 281 bp, Homo sapiens
gcacgaggagagagagagagagagagagagagagagagagagagagagagagagagagagagagagagagagagagagagagaggggcgcccccccccccccctcgtgggggtgtgcgagagagggggaccccctgcccgagcgcgagaggggcccgcgccctctcacccacaatctcatgtggggacccacacagggggcccaaaatctatagaggtgtgggggtgcacacacagagatatttctctgtggggagctctctgtgtataaacacacacaca

SEQ ID NO: 98508 - DNA, 259 bp, Homo sapiens
gcacgaggagagagagagagagagagagagagagagagagagagagagagagagagagagagagtgtttgtggagaagggagacatggtcactctccccgcggggatatatcaccgcttcggggggggcgaaaaaaaatacacgaaggccgtgcgggtgtgtgtgagaaaaccggggtggagagcgcacaaccggcccgctgaccattttggagcccgcgggccgcacgtgaaatttctggcacagaccgtctatgagt

SEQ ID NO: 98509 - DNA, 910 bp, Homo sapiens
ttttttttttttagcattttatgacttttattttacatgtcgccaacgtttgtacaacatacagtggctacatctaaaactttgagcatttttttatggcgcaaagagacagaaaggttaatgacacacttaactgttacagtgactttgggtagggccctaaagacagcacacgctccagagggcgggctgagtgttgttcacacttgggtcctgaatcgctgttgtaaggtacagagacacactttaactggggaatggggtccccacacagtgatcgccccacgggagggtgacagaatatgccaggaattgtcttggacatgggccccagtcaccacaatcagatggcttatttgaaacaaacaaacaaaaaaaacccttgattacgacacaccaaagctgttccaatttgtaaaaaactgtagttagttattacattgcaatgaaatctctttaccaaatcttgggccagtgttttacctggatagtgcttacattataaatattggtttttgcccttagtgctaacataagaaaaatcagttccttgtatactcaataacagagcttggaccagccaatgctgtctattcactcatggctataatgcagccgacagaattgttcaccatggaatgttttataaacctgttcatattccagagagacaaagactcaaaactacaagtgcaaagttgggtagagagagctgccagaaacactagctcattaggcatagaggccacagcaaatcaaattgttccacaaactcattcttcacacaaacatttaaaacactatgcagccaggtgtggtgactcacacctgtaatcccagcactttgggaggccaaggtggtcggatcacagggtcaggagttcaagaccagcctggccaacatggtgaa

SEQ ID NO: 98510 - DNA, 67 bp, Homo sapiens
gctcgaggagagagagagagagagagagagagagagagagagggagagagagagagagagatcttct

SEQ ID NO: 98511 - DNA, 699 bp, Homo sapiens
  misc_feature (1)...(699): n = a,t,c or g
acattactcctggctgaactgggaaccatttgtgatccctatagaagctgttctattagtgaagatagtggattgagtacagcttttacgatcgcccatgagctgggccatgtgtttaacatgcctcatgatgacaacaacaaaaaaaaaaaaagggggggcccttttaagggacccaatttttctcccccggtgcgggcaagtaaaaattttttttttgggcccccaaatttaaattcctgggcccgttttttaacaccgggggaggggaaaacccctggggttcccccatttaatccctttgctacaaaaanngaactaattgtgggaaagacaatatgaagtcaaacattccttttgagttatttttgttgacattccttggagaaggcaaaaaaaaaaaaaaaaaatttcggggggggcccgggaccccatttccccttatggggaggcgtttaacatttcattggcccctttttaacaccgtcgtaactgggaaaaaangttttttttctgtctcggtcgttcnntctttccgttggccgntggtcggtcctttgttcttggccggtgggttgtctctttgttcgtgggtgccttcgtgtccgnggtccggtgggccgttccctgtttctcgctccgctcgtcgtctgncccnccnnctcccgttgggggtggcggtcgcttgtttttttgttg

SEQ ID NO: 98512 - DNA, 322 bp, Homo sapiens
atggtgcagcagctcgccgtcgccgcagtaaattgcggcgtgattcggcactgatgaaccaaaacagcacagcagcacatcgcccggctgtgccgctgacaacggcacctgatacagccccgtcgcctccagattatccagatagagattctggccgttacgccaccagtcatcctcacgatgaaagtccggcatctcaatccccgccagatgataagcatcccggaacagtgtgtaacagtccgtcacaccgtgctcaaagcgccgcccggtgagatgcggcacacagcggaacttatgaatcgtcccccggcagaccagg

SEQ ID NO: 98513 - DNA, 352 bp, Homo sapiens
  misc_feature (1)...(352): n = a,t,c or g
ggcacgaggaagcacttcatttatttcaaacactgatggagtgcatgaaaagaaaggagcttatcactgttttccatattgggtcagatgaacatcaagatatagatgtagcaatacttactgcactgctaaaaggtaagcctctaagaacttttttatttgtaagaccttttattttatgtatgtatatgtgtgtgtatgtgtgtatatgtgtatgtatataaaatataaaaccttttaccatggctaaatgcttgcaaagtgaattttcagtcatttttctttgtgaaagacacaatgttggtttccttggcggcaagggaacttttaatttaatcttgtagaatttaan

SEQ ID NO: 98514 - DNA, 371 bp, Homo sapiens
ggttcgagacttaattgggaagcaagtcagcctgactttaaagcctgtataatataggcagggggatatttacttgtccccaaaaggcagttacctaaagaaaaaaacatcttatttcgcattttgccaaattgcttatcaactggaagatttctgattttaaatcattaattgcaaagggagcattttatagcatcttttttggtttgttttgtttttttgagacgggattttgctcgtgttgcccaggctggagtgcaatggcacaatctcagttcaccgcaacctctgcctcccgggttcaggggattctcctgaccagaatggtgaaacctcctctctactaagactacagaaattgactgggtgtg

SEQ ID NO: 98515 - DNA, 352 bp, Homo sapiens
ggcacgagcggcacgagctggaagaattattaaagaacttttttttttttttttttttgggaatttaaaaaaaaaaaagggtttattttggtggcccgggggggttaaaaaccccgaccttgggaacccccccccttggccccccaaaggggggggaataacgggtttaaccccccgccccggcccaatgggggtaatttttaaaaagtttggaaaaaaggggtccccttccccaacggggcccaaaagtttgggcccaagggaattttttggattggcccttcaaaggggtggggatttggggctaaaccaccggggccccccctttttttttggggttttggaaaccatg

SEQ ID NO: 98516 - DNA, 379 bp, Homo sapiens
ggcacgagccaacatggaggaaacgcaacaaaaatccaatctagagctggtccgcatctccctgctgctcatcaagacggggctggagcccgtgcggatcctcaggagtatgttcaccaacaacctggtgtatgacacctcggacagcgatgactatcacctcctaaaggacctacaggaaggcatccaaacgctgatggggaggctggaaaacggcaggcgccggactgggcagatcctcacgcagacctacagtaagtttgacacaaactcggacaaccatgacgcactgctcaagaactacaggctgctctactgcttcacgaaggacatggacaaggtcgagacatttctgcgcatggagcagtgccgctctgtg

SEQ ID NO: 98517 - DNA, 355 bp, Homo sapiens
ggcacgaggagagctatctccatgagcttcaaaaccctggaggcagaggctgttttaagccgagattgcgccactggactgcaacctcggtgacagcgagactcggtctcgaaaacggtaataataaaaataaaaaaggatgaagccaagctggaggaaagaggtcacctaaaatttaccactgaactttcacgcaccaaccttgaaatccaatgatattttcaaaccgcagaaacttacatatctggagtttggtgctatttgttacctccttttctttctttaccatgtacaaattcctctaatttttgggtttcaattgtatgaatgacagatacaagcagtttatggccaa

SEQ ID NO: 98518 - DNA, 368 bp, Homo sapiens
ggcacgagacagaaaatagcactgcaggggctcataggtcagctaccattggcaaatgtccagttctctatagccacccagatatagctacaggtaattgcgcataaagcggggtatttcctcaaagaactgggaattttgttttcagcattatatgccctaacaactacagaaatgttgaaggctgttgattgctaagactgccaggatgcgtttattttacttaaaaaaaaacatttgacagtttaactgaccgagcacagtggctcacacctataatcccagcacttcaggaagcttaggcaagcggattggttgagctcaagagatggagaccaacctgggcaacacgggaaaagcctgtctac

SEQ ID NO: 98519 - DNA, 376 bp, Homo sapiens
ggcacgaggtgagccgagatcacaccattgcactccagcctgggcgatgagcgaaactgtctcaaaaaaaaaaaaaagtgggggtctcttttttttacccaggctggtttaaaactccgggcctaaagggacccccccttttgggcctcccaaggggtgggaattacgggcgggacccccccccccctgccgggtggggaccttttttaaaacctaggtttttagggttaaaggctgtttttaaaccccctggaaaaaaccccctatcaaggggttttttttttaaaaacttggcatttggcctaaactttaaatcctacgcaatattccgggcttcaaggggggttaaaagttttctaatttttttctttaaacg

SEQ ID NO: 98520 - DNA, 363 bp, Homo sapiens
ggcacgaggttctgcaggctgcaaaaaaaacatagtggcttctgagaaggactcaggaaacttacaatcatggcagaaggggaaggggaagcaggaacgtctacaagggctgagaacgagaaagagagggcggcagggagccacatacttttaaacagtcggatcttgtgagtactcacacactatcacaagagcagcacagggggaaatccaccctcacgatccaatcaccttccaccaagccccacctccaatattggggattacaatttgacataaatttgggtggggacacagatgtaaacagtatcagtatagaaacacaatactgtgtctcacagctttaagtgctagctagaaaac

SEQ ID NO: 98521 - DNA, 367 bp, Homo sapiens
ggcacgagatgacttgaacccaggaggaggttgcagtgagctgagatcacgccactgcactccagcctgggcaacagaacgagactccatctccaaaaaaaaaaaaaacccccaaaatatttggggtaatttaaaaaaaaaatggaatttaaaataacatttttatagtctggcctactggcaggaccaggtttttatggtttttacccgggatggaaatctatgattttttaaaaaagcctttgagtttgtttaaaagaaattttggggaaagttttttggcggggggcccccagggtaccaggttaaaaattgggtttttttttttgggaaagcatatgggataaactaccagggatggcttttg

SEQ ID NO: 98522 - DNA, 355 bp, Homo sapiens
  misc_feature (1)...(355): n = a,t,c or g
ggcacgaggggttaaatcatgaatgtatttcatgtatgcaggttcaacttggcaaaaataaataaataaacaactttttaaattttaaattgcaactgctaatccactaattgagagtgagtcctgtggtcaaggtgagataggaaactttgtaccctcagcctcctcagtctctgaatgcctcttgtgtgtgtgtgtgtgtgtgtgtgtgtgtgtgtgtatgtgtgtgtctgtgtgtctgtgtanctaaattaaatataattcttgtatttaaaattatgtaatttttcatagaacatgccctctgattctaagcccactattctccccagcttttaaccagacctttcactgt

SEQ ID NO: 98523 - DNA, 365 bp, Homo sapiens
ggcacgagagagttttgtagagaaagggtttcgccatgttggccaggttggtctcaaactcctagcctcaggcaatcctcccaacttggcaacccaaagtgctggaattataagcataagccactgcacccagccttggagacagggtctttaaagaggtcattaaaattaaataaggtcattggggtgggccttaatccaatatgactggtgtccttataagaggaagacattaaaacacagacatgcccaggggaagaccatgcaaaggcactggaagaagacggcgtctacgagccaaggaaagaggccctcagaagaaaccaaccctaacagcactttgatctcagacctctggcctctaa

SEQ ID NO: 98524 - DNA, 355 bp, Homo sapiens
ggcacgagtcaagagttcgaaggcagaaaagaccgactcgcaagtcccctggaaaccgggaacgcaggggcgggacgagagagactggcagaggtctccacgtgcccaagtggggcctcaaagcctcttcaaaccccgcgccccggtgggcaagaaggcacccctgggcttggagggcggaggatgaggcattcagcgggacctagtcctaacccagcctgggagagcatcagggacccgtcgttaacgtcaactgccttgcttgttgcctgctctatctttcatatccacgaggatcccattctccatgatgtgcttatttcacgttgcatgtctatcaaaacatctcatagac

SEQ ID NO: 98525 - DNA, 358 bp, Homo sapiens
ggcacgaggtgaaccagtgcttcacagtccactttgattttcatcttttttttttcttcactgattcatcaaagttctttagttttttaagaattttgaaggggacagtaaaatataataaaattttcaaaggccttttttttctccttttacattttcattctcataaattcggtggggttagctagtacctttatgtggggaggagaattaaagttttctttcacttctggaattttaataattttccagccatttaaaattaagggacacccacaaaggggaattctaaggacaggaactttcaaagaggatcccgacgatcccgaaggaaataaagtaagtagtttattgcagg

SEQ ID NO: 98526 - DNA, 357 bp, Homo sapiens
  misc_feature (1)...(357): n = a,t,c or g
ggcacgagcccatatgttactcaacaatttttttcggggtgggggagacagggtctcacactgtcacccaagctggagcacagtgagctgagattatgccattgcactccatcctgggtgacagagcgagactccatctcaaaaaaaaaaaaaaaaaaacttttttatttggccggcccaacctttttcccttttggggggggaaattttaatttggccttgggccggcttttaaaacggggggggggggaaaaaaaganggntggcccttcccaaaatattttgccttgacttgcgggttgcggtgaatatcaattttctaaaaaagggaccttaataatggtttaggggggactn

SEQ ID NO: 98527 - DNA, 381 bp, Homo sapiens
  misc_feature (1)...(381): n = a,t,c or g
gcaccattgcactccagcctgggcgacagagtaaggctctgtctccnaaaaaaaaaaaaaaaaaaaaaaacaaaaaaanncccggggggttttttttccctgcccttggccccatccccaaattgccccccaattccccaatttttccaaattaaacctttatccccgcccccccgaataaatttttcaaaaaaaacctccccggggggggggttttttattaaaagggattaaaaactggggggaccaaaaaaaacccttccccttaaatttttttttttaaaaaccccccccaagggaaaattaaattttccccccaaatttttttcccggggggcccggtcggaaacccgggggaatttttccccaaaacctttggcg

SEQ ID NO: 98528 - DNA, 681 bp, Homo sapiens
ccaggaggaatggagtctccttagtgaggctcagagatgcctttatcatgacgtgatgctggagaacctgacacttatatcttctctaggttgttggtatggagcaaaagacgagacaccttctaagcagaccctttctatacaacaggagtccccactcaggacacattggacaggtggaaatgatgtcactctgaaactcaggctggaatacactggcatggtcatacctcactgcggcctcaaactcctggggctcaagtgatcctcctgcctcagcctcccgagtacctgagattagcccaggtaattcaagaattttttatagagatagggttttgctattttaccctgactgatgttcaactcctgggccttcaagtaatcctcttagccatacgccctttgaaagcactgggattacaggtgtgagccaccatggcccaggcccaaaaataatttttgtagaattagcatttctaggtagtgaagcagactgcaacagaatagttgggatatactttttttaaaaaggcatccacaatgattcagtcactatgtctgtgatggacaagcaggtacagaaattttcaggacctccataattatgaatctagtgtagcttaggtcattgtcagactaaatctaaaggttttgtggatttctgtagcctatcttggg

SEQ ID NO: 98529 - DNA, 369 bp, Homo sapiens
tgggcggctgttttgccgggtacttggtaagctaataaaggaaaatggagcgatcccgggagtcaaagcttgactggaccctatattgcaccacaacactccagcctgggtgactgagcatgactccatgtcaaaaaatcgaataacataaaataaattgccgcacaatgaaatgacaggggatgggtgcctattatttctaagggaaatagagtataatccacgaattttatatccagctaaattattgcccaatcaaaatatgcaaaagacacatgctgaagaacttaaagaatacagtctttctgagctctttaaaaaaaaaagtcttcatattaaaatttagtccgccaagatttttaaaaatat

SEQ ID NO: 98530 - DNA, 428 bp, Homo sapiens
cattgataaaaatatattgaatatgacacaaataaatggaaacacaactcatgttcgcagattgggagaattaattttgttaaaatgtccttaccacccaaggcaatctacacattcagtgtatttcctattaaaatcccatctgtctatctacctgtccatttatctatttagaaagaccgagagagagagagagagagaaaggttccttaaaaagttaaaaatagaactaacatatgatcctgtaaaaccactcctgggtatatattcaaaagtaatgaaatcaatacctaaaatacatatatatactcttagtgttattcacaaaagccaacatacagaatcaacatatttccactaattgatatatggataaagaaaatgtgagttataatatatgtatgaatattattcaaccttaaaaaaga

SEQ ID NO: 98531 - DNA, 397 bp, Homo sapiens
cccacgcgtacggacggggtttcactatgttggccttgctgatctcgaactcctgacctcataacccggccaccttggtctcccaaagtgctggaattacaagtgtgagtcaccgtgcctggcctacgtatacatttatctcataattacaaataataataccatggatatggaacttacttaaaacgatttgtgtccaaatcacagattgttatttttgttgaactatttgtttataaattaaaaatgtggttatctaattaattgagtcttcttacaggaagctattcctttggggagaaaattataacatcaggtaggagatttgcccaagtaactttctcccagttttacgtagtcaacaatatttattatgctcctacttcataataggatc

SEQ ID NO: 98532 - DNA, 375 bp, Homo sapiens
ggataggaacaagaggacatcaacttttactgttcatctcctatgagccagacctgtcgaggagttgtatcaatttcaccccacttatcctaactagaacactggcatgacagaggagaaagcaaggtcagaaggagtaaggagctagtagtcagtaacaggctttcaggaatggtgattctgaatccaaacataatgggggcttaacagcttctaacagcccaataggttctaatacgcaaagaatgccaagaaatcttaagacaaattagtgtctcagtcttaccaagggagaccaggctgctatggttctcctgcttttcatctctgtagaggttcacctgagatgaatccagctgtgtccacccaggagtg

SEQ ID NO: 98533 - DNA, 485 bp, Homo sapiens
  misc_feature (1)...(485): n = a,t,c or g
cccgcgcccccnnnnnnaaagatcccctcggaccgcccggatgatcgcgttgagcacccgtncgaccacgcgttcgatgaagttttgccatgttgctcaagctggtctgaaactcctgggctcaagcgatctgcctgcctcagcctcccaaaatgtggggatttcaggggtgagtcaccacacctggcccagattttattatttaagttaacattttgttaccattgcttaaagccacctggtccttttcatcagatagtttcttacagccaggcacagtggctcacacctgtaatcccagcactctgggaggctgagacaggtgaattgcttgagccctggagtctgagaccagcctaagcaacacagtgcaaccatgtctctactaaaagttttggtctcgatctactgaccccgtgatccgcccgccttggccttccaaagtgctgggatacanggcgnnnncnncnnnccnnncnannnnn

SEQ ID NO: 98534 - DNA, 412 bp, Homo sapiens
aaataataggagcttaaacccccttatttctaggactatgagaatcgaacccatccctgagaatccaaaattctccgtgccacctatcacaccccatcctaaaaaaaaaaaaaaaaaaaaaaaaaaaaaaaaaaaaaaaaaaaaaaaaaaaaaaaaaaaaagggggggggcccttaaaaaaaaaccctgggggggccaaaaaaaaacgggggaggaaaaaaaaaatttttttttttaaaaggggggaaaaaaaaaacccggggggaatttttgaaaaaaaacctttttttgggggggggaaaaattgggcccccccccccaaaaaaaataaaccctttggggaaaaaaaaaaatttttaaggggaaaggggggaaaaaacccccccatccccccggggaaaaaaaaattaaa

SEQ ID NO: 98535 - DNA, 406 bp, Homo sapiens
  misc_feature (1)...(406): n = a,t,c or g
agcctttctattagctcttagtaagattacacatgcaagcatccccgttccagtgagttcaccctctaaatcacccnanaaaaaaaaaaaaaaaaaaaaaaaaaaaaaaaagggggggggcctttaaaaaaaaccctgggggggccaaaaattaacggggggggaaaaaaaaaatttttttttttaaaggggggggaaaaaaaaaccccggggggaattttgaaaaaaaaaatttttttgggggggggaaaaatggggcaaaacccccccaaaaaaattaaacccttaaggaaaaaaaaaaatttttaaagggaaaagggggaaaaaaaacttaaaatttttgggggggaaaagttttttttcccggggttttttttaaaaaaattttcccccagggggggtagtn

SEQ ID NO: 98536 - DNA, 430 bp, Homo sapiens
  misc_feature (1)...(430): n = a,t,c or g
cctactttcaataatagaactatacacaacgattcaaggtagaatacttgaacaatattataaaccaactagacctaactgacatatatagaatactttacccaacagtagaatacacattttttaaaaatccacatggaacactctgcagaacagaccatatgctaggccataatacagggctcaataaatttaaaaggactgaatgcacacaaagtatgtcctctgaccacaatggaataaaatatcattcagcccccnaaaaaaaaaaaaaaaaaaaaaaaaaaaaaaaaaaaaaaaaaaaaaaaaaaaaaaaaaaaaaaaaaaaaaaannggggggggggggttttaaaaaaaattcgggggggggcccaaaaaacgggggggggggaaaaatttttttttttttttgggggggggaaaaaaaagg

SEQ ID NO: 98537 - DNA, 417 bp, Homo sapiens
aataagtgggttttgtatatctaagtccctaattaacaacagtgatacctttttgaattccttccatggtcttatcacctgctgtgaagtaggggaagtaggcagaacaggagtttttggaaaatattcagtatgaagatactgagcttacagaagtcaggtgatttgtttgaggcctgatagcccacagggacagagccaagacttcaacccatgcatcacaatactgcggcctctgctttctccagaaaaaaaaaaaaaaacatttttttattttttaaaaattttatttatggtttggaaaaaaagacttgttttgtcacccaggttggagggcaagggggggatcttggttcactgcaccctccccctcctgggttaaagcaattttcctgcctcaccctcctgagtagctgg

SEQ ID NO: 98538 - DNA, 385 bp, Homo sapiens
cagactccgccaagcacctgggtctgaagcacgtggtgtactgcggcctggagaacgtcaagcgactgacggatggcaagctggaggtgccgcactttgacagcaagggcgaggtggaggagtacttctggtccattggcatccccatgaccagtgtccgcgtggcggcctactttgaaaactttctcgcggcgtggcggcccgtgaaagcctctgatggagattactacaccttgggtaaaacgaagtgaaaactcactaggcacctggttgccctcctctccactcacctgcctccctctctcccttcttgcccctctgcagtggacacctgtcatctgagtgccttctatgtgtttagccctatgtgaagtgctgagaggga

SEQ ID NO: 98539 - DNA, 432 bp, Homo sapiens
  misc_feature (1)...(432): n = a,t,c or g
ttgaaatagcgccactgcactccagcctgggcaacagagtgagactccttccnaaaaaaaaaaaaaaaaaaaaggggcgggagttaaaaaattgaaccccccctttggggggggggaaaaaaaaggggcccaaccccttttttgaaaaaaatagggggggaaaattgccccccctttgaaaaaaacccccccccttttttttggaaagcccccccaccccccaaaaaattttaaaaaacccctttttttttcccccccaaaccccccnaaaaaaaaaaaaaaaaaaaaaaaaaaaaaaaaaagggggggggggcttttttaaaattttttgggggggcccaatttttgggggggggggaaaaatttttttttttttttttggggggggttttttaaaccccgggggggtttttgggggaaaccccctttttt

SEQ ID NO: 98540 - DNA, 399 bp, Homo sapiens
tgcacagctgtttatttccacaacttgtcccagaaggtgtttggcaccttgtttggtttgctgagctggtacgggacatacgggttttggtatccgaaagccttttccccaggacttcctccccagagctgtagtttgaatttgaagcaagatagttacaagaaataaaagagtaacagaggggggaccgaaaaaaaaaaaaaaaaaaaaaaaaaaaaaaaaaaaaaaaaaaaaaaaaaaaaggggggggggccttttaaaaaatccctgggggggcccaattttcccgggggggggaaaaatttttttttttccttttgggggggggaataaaaacccccgggggggttttggggaaaaaccctttttttggggggggggaaaaagggaaaaacccac

SEQ ID NO: 98541 - DNA, 396 bp, Homo sapiens
  misc_feature (1)...(396): n = a,t,c or g
cccacgcgtccgactagttctagatcgcgaccggccgccctttttttttttttttaaaggggtttttttttttgccccggggggaagggaaggggggccccaaaagaaaagggccccttaaactttgggggtaaaaaaatttttttatttttacccccccagggagggggtactggccccccccccccggggggattttttttttttttttttgggggggggacaacagtgaaanaaacaaaggggaccaaaaagagaaagnctttaacttgtatgggaaagaattcctccaaggaccaggcaaaaaagagataatgcagctgctgggtctgtcaaaagaaagaaaaacctctgtgcacgatgtcataaatttgccttnaaaactatataggttct

SEQ ID NO: 98542 - DNA, 419 bp, Homo sapiens
  misc_feature (1)...(419): n = a,t,c or g
cccacgcgtncgtctatactaatctccctacaaatctccttaattataacattcacagccacagaactaatcatattttatatcttcttcgaaaccacacttatccccaccttggctatcatcaccaaaaaaaaaaaaaaaaaaaaaaaaaaaaaaaaaaaaaaaaaaaaaaaaaaaggggggggggccttttaaaaaaaacccggggggggcccaaaattccgggggggggaaaaaaaatttttttttttttaaggggggggaaaaaaaaaaccccggggggatttttgaaaaaaacccctttttgggggggggggaatttgggcccccccccccccaaaaaatttggggcccgggggaaaaaaaaaaatttttaggggggggggggggaaaaaagggccttttttcgcggggggaaa

SEQ ID NO: 98543 - DNA, 410 bp, Homo sapiens
  misc_feature (1)...(410): n = a,t,c or g
cccacgcgtccgtctagatccgagcattccccctcaaacctaaaaaaaaaaaaaaaaaaaaaaaaaaaaaaaaaaaaaaaaaaaaaaaaaggggggggccccttttaaaaaacccctgggggggcccaatttttcccgggggggaaaaaatattttttttttttttttgggggggctaaaaaaaccccctgggggtttttttaaaaaaacctttttttttggggggggaaaatttggcccccccccccccaaaaaaataaaccctttggggaaaaaaaaaattttttaaggggaagggggggaaaaaaacctttttttttttttttttaaaaaatttttttttctgggttttttttaaaaaaatttttccccccggggcctttgttttcncccccccccccnnnnccccn

SEQ ID NO: 98544 - DNA, 451 bp, Homo sapiens
  misc_feature (1)...(451): n = a,t,c or g
natagatcgctctaggaccgccnatgattcccgtggcgacccacgcgtccggctcattagagaagggactgtacagagaagagcaagatccagatccttctggtcaccctgccctcttacactgcctggttggagagtgttcctcgtggggcttctcttgacctcgcctcgtcaagacagcctggctgcaggagggaaggcctccctgcaggggccaggatgccaggactcttgcctgactcctccagggcagacagtgacatctcacacggactccagacctctggtgcagtttgcaaaatggacagacacatttctctctcgccttcctcctcaccccctccccaataaagctaanaaaaaaaaaaaaaaaaaaaaaaaaaaaaaaaaaaaaaaaaaaaaaaaaaaaaaaannngggggggggccccttttaaaaatcccccgggggca

SEQ ID NO: 98545 - DNA, 385 bp, Homo sapiens
  misc_feature (1)...(385): n = a,t,c or g
cccacgcgtccggtcaagactgcactgagccatgattgtgccactgtactccagcctgggagactttttcaaaaaaaaagaaaaaaaaaaaaaaaaaaaaaaaaaaaaaaaaaaaaaaaaaaaaaaaaaaaaaaaaaaaaaagggggggggggtttttaaaaaatacttggggggggcccatttttacctggggagaaaaaaatatttttttttttttttgggggggatataaaaaaatccttgtgtttttttggaaaaaaaattttttttggggggggggatttatggggccacccccccaaaaaaaaatctacggtggggggaaaaaaaaaaattttttgggtttggggggtgaaaaatggttttattctttggggggaaaan

SEQ ID NO: 98546 - DNA, 398 bp, Homo sapiens
  misc_feature (1)...(398): n = a,t,c or g
tcttgctttcatcagcatatatttgagtcctcctctatgtcatggaaggttctaggtgatacagcagcaaacaaaacatttctgcctttttggaactaagagtgtagtgggcaaggtgggtaattaagaggtctaatgttaggcccagaaggataatgatgcagagtaagcagccagggtggaggttagaattttagacttagataatctgtgtaataatattatcttttttttttgtttttttgagctgacccccnnncnnnnccccccccccnnnnncccccccnnnncccccccccccccccncnncncccccccccncccgcccccccncnnnnnnnccccccnggcccccccccccccccccccccccccnnnccccccttttcctcaaaaaa

SEQ ID NO: 98547 - DNA, 402 bp, Homo sapiens
  misc_feature (1)...(402): n = a,t,c or g
gagagggagagggagagctgttgttgttgttttcaaaagatatccttgaggaaccccaagtatttggctggaatcctttggtgacagccagtttccttccaggaggttgcaacagagctgcatgtgtgtacatgtgtttggggggatacaaggaattgagtggttttctttcaatcatagcctcaccctcctgccatttgaggaagacggagggagaaggacaggatgggaggagataatttctgaaaaaaatttttttttttttttgagtttcacttttgttgcccaggcggganggcaagggcnnnattatggctcattggaccctccgcctccggggtttaaccttttttcttgccccagcctcccaagaatttggaattacacggcgccccccccccg

SEQ ID NO: 98548 - DNA, 418 bp, Homo sapiens
  misc_feature (1)...(418): n = a,t,c or g
ttgccaatagtagaaaatctgattttccacccagattaggtcttttatggaactgtagagagaaaacaaatcagcataataaacataagacatgagggaagatagtagtaatttgaaacaaaatttaaaaagaaagaaattttatatattcagctatattttataatagtcaaagcaaggaacacagtaaaggggtaataacgcaatggttacagccaaggaaaagaataataaatgggtaaatcagatgaagaaaacttcctagaaagaaggaaagtaccaatactgtggtgccagggacttaatagactgggcacggtggctcacgcctataatcccagcactttgggaggctgaggcaggcagatcacttgaggtcaggagttcaagaccatcctggccatcatggtgaaacctn

SEQ ID NO: 98549 - DNA, 407 bp, Homo sapiens
  misc_feature (1)...(407): n = a,t,c or g
ttgagaaagccatgttgttagacatgggggcatgagttagcagttcttgtgagctttctcggtaaataaggggtcgtaagcctctgttgtcagattcacaatctgatgttttggttaaactatatttacaagaggaaaacccggtaatgatgtcggggttgagggataggaggagaatggtgcctcagtaaatatgttattaaatatgtnaaaaaaaaaaaaaaaaaaaaaaaataaaaaacaaaataaaaaaaaaaaaaaaaaagctactataaaaaaaaaaaaaaaaaaaaaaaagaagggggggggggtgtttaaaaaattatgtggggggaaaacaatttctttcgtgtaaaaaataaatctttttttttttttagggaggttattggtcgacggcgggtgga

SEQ ID NO: 98550 - DNA, 411 bp, Homo sapiens
  misc_feature (1)...(411): n = a,t,c or g
cggacgcgtgggtcttacccttcattattgcagccctagcagcactccacctcctattcttgcacgaaacgggatcaaacaaccccctaggaatcacctcccattccgataaaatcaccttccacccttactacacaatcaaagacgccctcggcttacttctcttccttctctcctaaaaaaaaaaaaaaaaaaaaaaaaaaaaaaaaaaaaaaaaaaaaaaaaaaaaaaaaaaaaaaaaaaannnggggggggggccttttaaaaaatcctggggggggccaaaataaaccgggggggggggaaaaaaattttttttttttaggggggggttaaaaaaaccccctgggggtttttgggaaaaaaaccttttttggggggggggaaaaatggggccccccccccccaaaa

SEQ ID NO: 98551 - DNA, 409 bp, Homo sapiens
  misc_feature (1)...(409): n = a,t,c or g
tagagttaatgccaaagacagcaaatggttgacacctttacacagagcagttgcatcttgtagtgaggaagcagttcaggtacttttgaagcattctgcagatgttaatgctcgagacaaaaattggcaaacccctttacatatagctgctgctaataaagctgtaaagtgtgcgaagctttnnnnnnnnnntnnnnnnnnnnnnnntntnnnnnctnctttnttttctnnttttttttttttttttntnntcctttttttttgggcntttttcccctttttncttctttttttttccctttttnccccctttctttttttttcctcctttctcccctcttctttcttctctccctccccttcctttctccctttttccttttccttttttcttgttctttcccttttg

SEQ ID NO: 98552 - DNA, 440 bp, Homo sapiens
aaaggaaaatgtatttaagtgtgtcagaatagtggatctatatgtagaaataaccgatcgataggggaccaaagttagctgcgtgcgaattatatttactcagggagagatttgggaattatttttcctgacttgcataccatgctaaatattaagaaactgcatgtaagtctgagtagtcaaccacgtactaatgaagttttgtagtcttttaatagcatagtactttgcttaataaagatgatgtttacttgcgaaaaaaattactttaaaaaatacacatacaacactgctggtgggagtataaattacttcaatcattgtggaaagcagcttggcacttcctcaaagagctaaaagcagaactaccattcaacccagcaatcccattactggatatatacccagaggaatataaatccgtctaccttaaagacaca

SEQ ID NO: 98553 - DNA, 402 bp, Homo sapiens
cggagaattgcttgagcccatgtgggcaaggttgcagtgagttgagattgcaccattgcactccagcctgggtgacagagtgagactccatcttaaaaaaaaaaaaaccatttttcctacaaaacttaaaaaacaatttctttttgggggttaaattacaacaaaaggggagggatcaaagtagcaattcttgcccaaacatttatggaacatagtctggacatcatcaggctggcattggttgttcaggggggaacaaaacaaaaggggccaaaccaccttggagctcaaagtctagcaaagtctttgggaaaagagcatagtattaacatgcttaacaagggagggtgttattataaaaaaggccttgctgggcatggtggctcatacctgtaatcccac

SEQ ID NO: 98554 - DNA, 364 bp, Homo sapiens
cttgaattcttttcttggtcttcgtttctggttcttctgaccagctattgtgtctcagcttctccaacttgtcttctagtatcagtgccaaaggctgttacgtggtgagctccaggttttgaacgatgattctcaatgcttgagagccctggggcccctcagacaggtctctgaacccctcttctgagccttctttgccttggtctttacctagtgctgtggccaagttgactcttgtatgttgcctggactcacatatgcatctaaacagtgtgtgtcattgaactcctgacctcaggtgatagacctgcctcagcctcccaaagtgctaggattacaggcttgagccaccatgcccagcctc

SEQ ID NO: 98555 - DNA, 373 bp, Homo sapiens
ggcctcccggggtgttgggattgcaggtgtgagccaccgcgcctggcctttttttttttttttttttttaaaccggaattttttttttttccccaagctggaaggcaaggggggaaattttgttaatgggaagccccccccccggggtaaagggtttttcccggcccaaaccccccagggaagagggaaaaaagggcccggccacaagggcggggaaatttttggagaatttaaaaaaaaaaggggtttaattgggttacccaaaattgaccttgggaaccccccgccttggccccaaaaaggggggggattaaaggggggaacccccggccccacccttttttttttttttttttttaaaaaaaagttttgg

SEQ ID NO: 98556 - DNA, 346 bp, Homo sapiens
caactataaattactgctggagcaccacgtctacttgatcacaatatctttggcggattgagtttgcatcttcattgagataaaatattttctaatatctcatgtggaatcgtcatcgacctcctggctatctataactgggacgcttatgccaccaggctcgggatatataaacactgggacttcatcatcatagataaagataccagcagttgtcgcctctctttcagcagttacccacggtttttggagtctctggatgatttttacattcttagcagtggattgatattgctgcagaccacaaacagtgtgtttaataaaaccctgctaaagcaggtaatac

SEQ ID NO: 98557 - DNA, 361 bp, Homo sapiens
ggtttctccatgttggtcaggctggtctcgggctcccgacctcaggtgatccgcccgcctcggcctcacaaagtgtgggattacaggcgtgagcaacagcacctggccccccctctcatttttaaacggttaaaatgaaggtgttagaccgtctctaaggttctatacaatcaaaaatttattaaaataggtctatatattttacaacaattttgactttctgaatcttgcatcatggtgtctagaacatatgtgttcaattaatactgaattaattaaaatttatatacactgatgtaaatattttctaagtaaaatctttcatatgtatttaaataaaatttacctttttgccttcaat

SEQ ID NO: 98558 - DNA, 359 bp, Homo sapiens
atttttttcatatacctcttggccatttgtatgtttacttttgagaaatgtctgtttagatcatttgcccagtttttagtcacaaccctgtttattgttttctttccagttagaccattgtctttgataggaaagatatatgcgaagttgcttttacttcatctgccttctcaacatcaactaccatagccactcaaccccttgaagcaggaagtacttctgtgcctccttgcccttactgctggatatcttctatttgttcctccagaaacactacctttctgtacgctgctctgagccctgagagagatcttggacggaatggaccaatgggtctctctttgccttctggctgggtt

SEQ ID NO: 98559 - DNA, 328 bp, Homo sapiens
tgttggccaagctggtgtcgaactcctgagctcaagtgatccccctgcctcagcctatgaaggtgctgggattccaggcgtgagccaccacacctggcccaagcattttttccctgcgctttttgtcgcttgtatatcttcattggtgaattgtctgttccaattgtttgcctgtatttcaattgggctttctttttttttttttttttttagagagggcgatcttggaaaccttttaaaaattgcggggctaacttttttgggatgaacttggttgaaaaaattttttttcccattggaagatgggtttttttttgcacaaaagaac

SEQ ID NO: 98560 - DNA, 97 bp, Homo sapiens
  misc_feature (1)...(97): n = a,t,c or g
aaatggggcaananattgagaccatcctggccaacatggtgaaaccccgtctctactaaaaatacaaaaattaaatgggcatggtggcgcacgcctg

SEQ ID NO: 98561 - DNA, 351 bp, Homo sapiens
  misc_feature (1)...(351): n = a,t,c or g
caaagatttacttaaattatgtgaattaaaaaggcatttgggttgattcctatatattttaacaatttatgtaagcactcacttatctaaaccaatctgaatagaattcctcaaggaatttctggctgtatacacaatacgcaacataatatatgtacataggtataaaacactcctaaacatatctaggcacacgtgtgtgtatacacacatggagacacacacagagagatcttactgcattcattttagaattttatttttcttttatttatttattttgagatggagtctcactctgttgccgaagctggactgcagtggcactgtctcagctcactgcaacctccn

SEQ ID NO: 98562 - DNA, 325 bp, Homo sapiens
gtaatccacataggtgatctcggtgccatcccgctttaaaaaggtgtgtgtgggcttcactgaccagtcaatgtcatcaatggagtaggttctgttattgtatcttgtaaggacaatgagccctattagctgcttctcacacgtctgggtgaaacaggacaagccagttctttgacagagagcagtcatgaattccagaaccgtctcattccggaggactttgtaactcacatcagcactaaacaggagcttcctttcaaaatatgacacagaaatggcgaacccaggccaaagggataatttgtgctggggaatttccattggg

SEQ ID NO: 98563 - DNA, 347 bp, Homo sapiens
  misc_feature (1)...(347): n = a,t,c or g
gagatgcatcacttgtttttaaagtggctgagacagcaaatgaagaagaagttaaaaagatgtgtatgtataaatatccaggaaataagtgtgggagggagggaggaagggagaaaaagagagaggaagaaaggagggaaggaagaaaagaagggagagagggtctgagggagggagaaacagatgaagagagggaagaaggagaggagggattatcctattcaccatttaagaattcaatataggaaaatagaacttataagtgaatttttgaaactgatttatgtttatgctatataaattctaacatagcttcagctttatatctgatgaaagaataagctgan

SEQ ID NO: 98564 - DNA, 79 bp, Homo sapiens
  misc_feature (1)...(79): n = a,t,c or g
gggngacacatttttctctcaccatcaccagcctgcagcctgaagatattggaacatactactgtcagcagtatgattt

SEQ ID NO: 98565 - DNA, 339 bp, Homo sapiens
caaatataaaatagccgggtgaggcagggaattgcttgaacccgggaggtggaagttgcagcgagccgagatcacgccactgcactccagcctgggcaacagagcgaaactccgtctcaaaaaaaaaaaaaaaaaaaaaaaaaaaaaaaaaaattccccgggggcgggggttacccccggtatcccaccctttttggaaggcagggggggccgattggtttgacctagggaccttagaaccaccgtggccaaccggggaaaccccggtttttaaaaaaaaaaaaaaattaactgggggggggggggccccccttgtggccccaacctggggggggggtg

SEQ ID NO: 98566 - DNA, 275 bp, Homo sapiens
  misc_feature (1)...(275): n = a,t,c or g
gcgacggtggtaagatgtcgcgtattattggaggcaactgttctctactcttttagcagactctatatatccacttgaacgcatgaggattaaccatctctttgagacctttagncctcnnnnnnnnnnnnnnnnnnnnnnnnnnnnnnnnnnnnnnnnnnnnnnnnnnnnnnnnnnnnnnnnnnnnnnnnnnnnnnnnnnagattattgaagtagatcctgacactaaggaaatgctgaagcttttggacttcggcagtctgtccaaccttcag

SEQ ID NO: 98567 - DNA, 353 bp, Homo sapiens
  misc_feature (1)...(353): n = a,t,c or g
cgcgtcgaccgtcgccgcacgggctggttggggctgtgtctgtgggaggcgccggggtgatggcggtggagactctgtccccggactgggagtttgaccgcgttgacgacggctcgcagaaaattcatgccgaagtccaacttaagaattatgggaaatttcttgaggagtatacctctcaactgagaagaattgaggacgctctggatgactcaattggagatgnttgggattncaatctggagccgatggcatggaggcgtttgccttatgagcagtcctctgttttggaactcataaagactgaaaacaaggtcttaaacagggtcgtcactggttatgctgggttgggn

SEQ ID NO: 98568 - DNA, 217 bp, Homo sapiens
aaacagtccagcatgacggtgatggaaagtgaggtcagccggcttttcatcaacgtcatgctggactgtttgtgcaggcggctgaaggacaggaccagcgagcaccaggcggccaactgcttctgccgagtgtccacattcggttgtaacgtaaagaagggtgggaagcgatactgccacggccactcgaaactcatcgccatcgtcgacgcggccg

SEQ ID NO: 98569 - DNA, 350 bp, Homo sapiens
ggccaggcgtggtagctcacgcctgtaatcccagcactttggaaggccaagacaagaggatctcttgagctcaggagttcgagaccagcctgggcaacatagcaagaccttgtctctcaaaaaaaaaaaaccttgaaatcaagtctcgttctggcccccaggttgaagggcagtgccatgatttcggttcattgcaccctccgcctccttggtaaagggttaaagggattttcttgcctaagcttcccgagtaattaggactacgggcaggccccaccatgtcgggttaatttttttttttttttcttttataagaacaagtgtttcttttgggggcacgaggttgtcta

SEQ ID NO: 98570 - DNA, 352 bp, Homo sapiens
  misc_feature (1)...(352): n = a,t,c or g
gtcgagatcacgccactgcactccagcctgggcgacagagcgagactccgtctcanaaaaaaaaaaaaaaaaaaaaaaaaaaaaatttggggggaaaatttttaaaatgggaaaaaaaaaaaaaaccttaaaaaaccaaaacgttccaaaggttttaaaaaaaacccaaaaaaaagggcccccggggccctcccaagggaatttcttaaaatccaccccctggaaaaaatttttaaaaaacccccggggggggaaaaaacccttttgggccccaaaaggaaaaaaaaaaagaacgggggctttttttttcaaaaaagggaaccccaaaattccctgaaaaaaacctttaaag

SEQ ID NO: 98571 - DNA, 320 bp, Homo sapiens
cgggaggctaaggcaggagaatcgcctgaacccgggaggcagaggttgcagtgggtggagatcacaccactgcactccagcctgggggacagagcaacactctgtctcaaataaaaaaaaaaaaaaactttatggggaatttaaaaagggtccccccaccttttcaggtaataatttaaaagcacctttttagggcctcccagactgaataaaaaaattatcccttccttaaagccaaaaaattgggttaagctttaaaaccttaataggcataccacatatgtaatcccaaatggttggaaggaccaccctccacataa

SEQ ID NO: 98572 - DNA, 161 bp, Homo sapiens
atcttggctcactgcatgatacagctaacactctatggcccaggctggagcgcagccgtacgatcatggctcactatagccttgacctcccaggctcaagtgatcctcccacctcagcctcccatgtacgtgggactacaggcatgaggtcgacgcggccg

SEQ ID NO: 98573 - DNA, 361 bp, Homo sapiens
ctcaacttcaagataccatcttccacaactttcagctgaacaagtaatttgtagacatctgccatgtcagccaaaatcagcaaccgggtaacagcagagagcaaagctcgagctgcccgaaccatgttgcctcgcttcacagaagagcagggatcatctgcgaactctcctgcagcagccttcatcaaatcaccttgttttcgaacatcttctacagcagccacaagctcctccttgagaaactggctctccttcgcaattttatcccccttctccaagaaattctcagttgcttgttcaacagatgcagccaaaacatgggccttcttagaacgacctctcttcttattagagggccctt

SEQ ID NO: 98574 - DNA, 101 bp, Homo sapiens
agggcgtcctgaaagggcatgttcttggattccacctgctgcttccaggccccatactcacggctgttcatgaccacacgacgaccatagcacacttggag

SEQ ID NO: 98575 - DNA, 341 bp, Homo sapiens
ctttgatcaaaggggaaggtttctagcggctctgctttgtagtcaaactcagcaagaatcacacggttgtagccggtcaccagtggacatgatgtgtagccatcatacttctttgatggtgtttgattcttcataattacagaaattggcctatcaagtattcctgactgggcagctactgcagcagcggtctttgacgtatgaaggttggtgcagtccccaatcccaaacacatttgggtacctttggtgttgcagagtttctttatccacatccacccaaccagcagcatcagccacaggactggtcttgaggacatctggtgggctcattggaggtgg

SEQ ID NO: 98576 - DNA, 86 bp, Homo sapiens
caaatggctcgggaggctgagggaccagaattgcttgaacccaggagacggacgttgcaatgagccgagatcgtgccactgcactt

SEQ ID NO: 98577 - DNA, 326 bp, Homo sapiens
attccattggtctatatttctgtccttatgcgaataccacactgttttgactcccttggctttgtagtaaatttgaaattggaaagttttagtctcaaatttactacaaagccaagggagtcaaaactttgttttttttttttttttttttttttttttttttgtgttttttttattcttctttttttttaggcccttgatatttttgctaattttggattgggagaagatataattgtttaacatgttgaaaggggggggagcgaaagccaaagggtgaaaatgttttggttgagcatccttaattgtgacatatacgcccacct

SEQ ID NO: 98578 - DNA, 330 bp, Homo sapiens
cacaagaagcccaatccctaccagtacgcgatactggtagggatttgttacaataccctgtaacaaacatacatgtgcccactgactctaaaattaaattaaactaaaaaaaaaaaaactgcgaaaatcaaaagcaaaagtaaatttagtttttccaatagtcaaaacagattttaaaaaagtactgattaaaaaacttactgaaatgatcaggggatcccaaagttgaaaatacccaagtcaagaattgaaaacaaacttgaacttcagcactatggctgtacctataatttaaaagccattaaaataattaaatatcctatttcttaa

SEQ ID NO: 98579 - DNA, 346 bp, Homo sapiens
  misc_feature (1)...(346): n = a,t,c or g
gtgggaggcgctaaagaatgaacttgccagcatgggcaatatagtgagacctcatctctaccnaaaaaaaaaaaaaaaaaaaaccttttaaaatttcccgggcaaagggaaaagcccctttcccccaactttttgggagggttggggggggggaaaaacgggcccccggggggaaaaccctcaagggacccggattggccccctggcataaaacccggggaaaaaaaaaaaaaccccctcaaaaaaaaaaaaaaaaaaaaaaaaaagcccctttcaaaggggggggggggaaaaaaaacccctttaaaaaaaaaaaaaaagccccccccaaaggggttttaaaaaa

SEQ ID NO: 98580 - DNA, 348 bp, Homo sapiens
ttccatctttagtacagacaaggttgcgccatgctggccaggccggcctcaaactcctgacctcaactgattcgcccgcctcagcctcccaaagtgctgggaccacaggtgtgagccaccacgccatgccgaaagactgttctttgaatagtaattaaggtgtgctagaactaataagttggcctgtaatgtttctaatttcgtacaaattctttttcttttctaaacttaagacaaaacaactgatcctcatcctgcaatttattcaatgaccaagagttcatgggccaggcgccaagcttataaagctcttgttatgaacttttcaccgccgcttcctttgctatt

SEQ ID NO: 98581 - DNA, 346 bp, Homo sapiens
  misc_feature (1)...(346): n = a,t,c or g
ctggagtgcagtgaggcgggattggatcactgcactccagcctgagcgacagagagagactccatctcanaaaaaaaaaaaaaaaaaaaaaaaaaaaaaaaaaaaaaaaaaaaaaagggggggggttgggccggggggctaagcccggaaacctaacccttcgggggggccaggggagaaaaatatttgggggccatttaagggacacccaaaaactctaaagaaaagggcgggggtttaaaagaaccgggggggttaaaaaaatttttcaaaacccaaggtaaggtaaacgggcccgaaattccaaaatttaaaaagggaaaaaccggaaaacccccgaaggtta

SEQ ID NO: 98582 - DNA, 123 bp, Homo sapiens
ggggccaggcacagtggctcacgcctgtaatcgcagcactttgggaggccaaggtgggaggatcatttgaggtcaggagtttgagaccagcctggccaacacaatgaaaggtcgacgcggccg

SEQ ID NO: 98583 - DNA, 105 bp, Homo sapiens
aaacttgatagacttgcaagacatggcctgtatgagaagaaaaagacctcaagaaagcaacgaaaggaacgcaagaacagaatgaagaaagtcagggggacttgg

SEQ ID NO: 98584 - DNA, 114 bp, Homo sapiens
aattttttatttttatgggctttggtgagggaggcagggggtacctcgccattaatatttctagctgggtgcagaggaataccgtcttgtatctgcctatcctcctctacacag

SEQ ID NO: 98585 - DNA, 353 bp, Homo sapiens
gggggccaaggcaggagaatcgcttgaacctggcaggcggcggttgcagtgagccaagatcgtgccattgcactccagcctggggcacaagatcgagacttcgtctcaaaaaaaaaaaaaaaggctaccgcttttaattttttcaaaaaaaacttccaaaaaatttttggccccctttttttaggcattttttttcaggcaaaacacaaagggcccaaaaactttttttaaatttataggggggctttataaaaattaaaatcctgacttttaaaaagtcctatctaagcaaacaaaaatccaggccaaaaccctggaaaaaattttcaaaacaaaaacggggccgggggttt

SEQ ID NO: 98586 - DNA, 364 bp, Homo sapiens
  misc_feature (1)...(364): n = a,t,c or g
gcctgttgccctttctgtaccatttatttgctcccaatgtttatgataataaaggcaccgctgatggggacctccaaaaaaaaaaaaaaaaaaaaaaaaaaaaaaaaaaaaaaaaaaaaaaaaaaaaaaaaaaaaaaaaaaaaaaaannaannnnnaaangaggggggggggggggccaaaaataaaaaaattttagaggtggaaataaaaaaggccccccgaaaaacaattaaaaggggtgtgcaacacaaattttttttttttttaaaaaaaaaaaagctccctttttttagagaacctccccccccccatcctgtttttgtggggggtgcgaccctcttgaaaaaaaaaatttttttttta

SEQ ID NO: 98587 - DNA, 110 bp, Homo sapiens
ctgtcattctacagggctctaatgatgttgaacttgttgctgagggcaacagcaggttcacttacactgttcttgtagatggctgctctaaaaagacgtcgacgcggccg

SEQ ID NO: 98588 - DNA, 330 bp, Homo sapiens
  misc_feature (1)...(330): n = a,t,c or g
ctcccattgctgacaggggagctgagtatgtatccgcacgagagtggatgacgatttgctttgagcttttacagctcttaaaagcccacaaaaaggctattcgtagagccacagtcaacacatttggttatattgcacaggccattggccctcatgatgtattggctacacttctgaacaacctcaaaggtcatgaaaggcagaacagagtttgtaccactgtagcaatagctattggtgcagaaacatgttcaccctttacagctctccctgccttaatgaatgaatacagagttcctgaactgaatgttcaaaatggagtgttaaaan

SEQ ID NO: 98589 - DNA, 110 bp, Homo sapiens; identical to SEQ ID NO: 98587

SEQ ID NO: 98590 - DNA, 330 bp, Homo sapiens
  misc_feature (1)...(330): n = a,t,c or g
agaggacatanaagcaaaaagtaaaacagcaggagaagaagaaatgatcaaggctctcctaatctctgtcagaccttcacctttatgaccttgccttatctaccagaacacagatccctcttactaaagattagatcctgtgctgaaagagaaaccaagaaaaaagatgacattccagaagaagacaaaggaaatataaaacaatgtgaaatcaattacgtaaagaaatttcagagcttccaagaccacaaacttaaaataagtaaagaagagagtaaaattcttaaaaaggctcagaaagatggatttttgcatgaaacgcttctggan

SEQ ID NO: 98591 - DNA, 345 bp, Homo sapiens
  misc_feature (1)...(345): n = a,t,c or g
ctggaatccataaccccctgaaactgcttgcaaatattataaatgataccgacattttctggagaaggagttcaaagctttctgcacatttcccaatgagtccttgatctgaaataaattaagaacctctgctttacattcctcccgagatgtcaagtcttgatgggggctctgaaaggctggtggtgaccccggcctttttgggctctgtgtggcttgctcagcatgacccaaggcagggcatttctaatgatctggtgtctggcctttctcctaggaggatgaagaaggttataacgatggagaggtagatgacgaggaagatgaagaagagcttggtggtan

SEQ ID NO: 98592 - DNA, 177 bp, Homo sapiens
  misc_feature (1)...(177): n = a,t,c or g
atctttctggatctggggtaacttttgggtcataattcttaggcaattttcccttctttttctttttcttccctgtaccagaaattattatgcgaacntngcattccaattcnnngctcgtgctttgggcccttggggcgcttgtattgcttatcagagcagaggtcgacccggccg

SEQ ID NO: 98593 - DNA, 351 bp, Homo sapiens
  misc_feature (1)...(351): n = a,t,c or g
tgaacttccctacttaggtatcccatgagtgcttaatctttcatattcaaaatgtcctcactggacttgtcatctccctctcatgtcccagcgttccatctcacacccataaacatacacacatacacacacacacacacacacacacacacacacacactctntntntctctctctctctctgtgggcgctaacacagtttcatcatttacttggaagtgctgctccagaaggcatccatctttctgctgcaatttggactggttgctgtgtacgccgcctgcacatctgtggtcctgggggtcctggagaccaatatttgggcgctttcctttgacatactacatgaat

SEQ ID NO: 98594 - DNA, 147 bp, Homo sapiens
cccttataaagatggtttaacttaaaaagaggaagtgagaatggccctgtttgcaaatgacatgattgtatatctagaaaaccccttcgtttcagccccatatgtccttaagctgataagctgcttctgcaaaggtcgactcggccg

SEQ ID NO: 98595 - DNA, 85 bp, Homo sapiens
aagattgacccgtctctactaaaaatacaaaaattagtcgggtgtggtggtgcttgcctataatcccagctactcgggaggctga

SEQ ID NO: 98596 - DNA, 668 bp, Homo sapiens
cggccgcgtcgacaagcacctgtagtcccagctactggggaggccacggcacaagagttgcttggacccaggaggctcaggttgcagtaagccaagattgcaccactgcacactccacactccaaactgggtgacagagcgagactctgtctcaaaaaaaaaaaaaaaaaaagggggaattttttttaaaaaaccccgggaaaaaaaaacacctgggggtaaaaaccccccctttttaaacaaaaaaaacggccgggaaaaaaaaggggattttttttctttttgaaaattaatccgggttttttttttataaatccaaggggaccaaattttttttaaaacccataaaaggggtttccgggccctttattttgggttggcccccattggcccctttcaaaaaaggaaatacttaaatttaaaaatagttaaacccggggttccccaccgggtttccccccaaggggccaaaaccaggcggaaaaataaaatttttttccctaaaaaaactggggcggggcctagggcaccctaacttttaaaacgggcccccattttttttgccttgttaagggtcaacccggccgcaaatccggaccctcaaaaaatctttttttttgggttggggggggatttttcttccctccaaaaaaaggtttttcccctct

SEQ ID NO: 98597 - DNA, 85 bp, Homo sapiens
atcagaattttgtctaagattaaaaatgccctaacccacttcttaccacaaggcacacctacgccccttattcccatactattta

SEQ ID NO: 98598 - DNA, 364 bp, Homo sapiens
  misc_feature (1)...(364): n = a,t,c or g
cacagttgccatgtagaccccttgaagaggggaggggcctagggagccgcaccttgtcatgtaccatcaataaagtaccctgtgctcaaccaaaaaaaaaaaaaaaaaaaaaaaaaaaaaaaaaaaaaaaaaaaaaaaaaaaaaaaaaaaaaaaaaaaaaaaaaaaaaaaaaaaaaaaaaaaaaaaaaaaaataaaaaaaaaaaaaaaaaaaaaaaaanttttttttttttttttttattttttaaataaaaaaaaaccccccccctattttggttttccccaatctttttttttttangctccatatatttaaaaaacggcggggggttgttttttttcccccccacaaaaaaagaagggagg

SEQ ID NO: 98599 - DNA, 335 bp, Homo sapiens
cgcggccgcgtcgacggaggctgaggcaggagaatcacttgaacctgggaggcgaaggttgcagtgagtcgagatcgcgccactgcaccctaacctgggcaacagagcaagactctgtctcaaaaaaaaaaaaaaaaagggttttccccccaccccacccacggggtaaatttttttgggccggtggccccacctttttccccccccttaaaacggtcccctttcccggggggggaaaacccaatttttaatttgccccaagggctttgggaattgggggcagggatggcaaaggcccccaaaaacccttgtttatggttcctttacccaggttg

SEQ ID NO: 98600 - DNA, 337 bp, Homo sapiens
  misc_feature (1)...(337): n = a,t,c or g
ggaaaaattgaaaactttcagtggtccaagtgcactacattaaaaacagaagtgctaaccaatactgcctgtaaggatgttctgttcttatcacataaagattattgaaggattctgaaaagtcctgggttaagaagatgagtaagctcaaaatcttattagatactgaactttaatattatcttcagtcagagcctagtaatgcatcattgcacatgtgggcaaactttttttaaggggnncnnnncngcccctgnnnnnncnnnnnnncncccnnncnccnnnnccncccnncccccccccccccccccccnccccccncccccncccccccccn

SEQ ID NO: 98601 - DNA, 328 bp, Homo sapiens
  misc_feature (1)...(328): n = a,t,c or g
ctcaaatcagaatgggacaggtggagaaagtatttatggtgaaaaatttgaagatgaaaatttccattacaaggtaaagtagagaaaatgcatgttattgctgataaaaagattgttatatatctggaatacttgttggattaagacaccaaaaaatgtttcaagtgtgcttagattctccatttcttgtaataggaatcacttttgtaaataatggttctttaatatggaaaagttttcattcagtaatgattaattcagcattatttcattgtgatccagtttttatatgcttcagttaagccagtgagtttttaaatgcgaccan

SEQ ID NO: 98602 - DNA, 324 bp, Homo sapiens
caaagatgtaacatttttaaatggaagaaaggaaaaaaatactcatctttaatttttggtctttttcgtgccagaaaactctgaaaaaatatcccttcagcttcatttagctctgacttcaaattcatcttgggttcagagccccagccatttggaactcatgaatctgtgtagacacataaacatacgtgtggatcccacgggcttaagagaaggaatgcattatacagaggtatgtggctatgatatagcatcccctaacgcacgttcgctcttcagaggtccgatcactgcagttatagcagcacaagtaaatgaatcatc

SEQ ID NO: 98603 - DNA, 330 bp, Homo sapiens
  misc_feature (1)...(330): n = a,t,c or g
catgaacccaggaggcggagcttgcagcgagccgagatagcgccactgcactccagcctgggccacagagcgagactctgtctcanaaaaaaaaaaaaaaaaaaaaaaagatttgggggggggcccctttaaaaaacttttttttccccgggaccccaaaacgggggcctaaaaaaaaaagggggggggggaattttaagggaaaggggccaggttaaaaaaaccccttttgggggggggaaaaaagaaccttctttggaaagggccncccacccggcccggaattcccaaatttaaaaagggaaaatcgggaaaacccccgagggtcct

SEQ ID NO: 98604 - DNA, 327 bp, Homo sapiens
ggaatgttcatgttcctcaattacagggttcatatttgccccaacaatgctagaaacatacactttgtcccttgattttgttgttgttgttgttgttgctttgttttgtttgtttttgagacggagtctcgctctatcgcccaggctggagtgcagtggcacaatctctcagagcataggatcagtaagggctagtgaaaggtgttgaacagggaacccataccatcagatgcacaccccagaaatgctgcagtttggagaatgcattgaagggaggacaagaatagatggagggagaccagttaggaagcttttcattaatctaac

SEQ ID NO: 98605 - DNA, 354 bp, Homo sapiens
tagatgacttcgatttgcgagtttgcatttttaagggttgtttgaggtcccttccttatgttcactttagtaatctcactttagttcctgtgaagggaaatccctactgtgtctttagggatgggttaggatagtgggctgcctttaggaaggctaataaaaccttcctgagacaccttactaaaggtattcctcacctcatgaattggtctaagcatcagtcttggaggctcagaagcttgactttgaacccactgtaagagtagatccatctcttaaaaatagattcgtccataatggtcgaactaatttacactcccaccaacaatgtaaaagcattcctatttctccaca

SEQ ID NO: 98606 - DNA, 349 bp, Homo sapiens
  misc_feature (1)...(349): n = a,t,c or g
ctcgtccccagtggcttttccagaactactgccttcaccatgaagctccatgagctttcccactaaaaggcnnaaaaaaaaaaaaaaaaaaaaaaccccaaacccgggtgataatttttgaaaaaaggggccttccttattttccagcctggagggaaaaaaaaaaaggcccttaattgggcccaaatttttttttcaacaaaaaaaaaaggatttggccccaaaaaaaaaaggggaattcccaattaaattaaaaatggggcttttttaaaatttttatttttttaaaaaaaaacttttgggaaggaaaaaaaaatggggaagcctttttttatgtttttccaaaggg

SEQ ID NO: 98607 - DNA, 343 bp, Homo sapiens
gggaattggatgcatggcactcatattctccagcatcttccttacttagaggagatacctgtgaaagaaaaaagatctagtattcctctgtggtggtcttctcttttgtcagtggttccagtgaggtcattatttcataaatttcctaagatgaccaggggattcatagcaaaggtactgctagaagcagtgcaagtcctgtgataggagacttcgataactaccatatttggtttgctgaggattcatatgaggaaatgtcatggacaacttttgatcatactgcataggttaaaaactggataggtacacattatcggtttaagggcaaccttgataaggg

SEQ ID NO: 98608 - DNA, 356 bp, Homo sapiens
tatatttgagggtgggggattaataaaatattttttaattaaattaaaaaaattttggaaatattaatattttgggggggtgggggggttttttttttttttttttttttttttttggtttggcccgtcggggggggttttttttgttggtgtacaggctatttttttttttttttttttttttttgggaggttttttttttttggtgagggattatttttttgtggcagtgttttggtgggggttgctctttttttttgtgtttttttttgtggtgttttgttttgtgtttttttttttttttggttggaaaagaaaaaatatattttatggttgggtttttttgttttgttggt

SEQ ID NO: 98609 - DNA, 330 bp, Homo sapiens
  misc_feature (1)...(330): n = a,t,c or g
ttttttcttaatttagagaagaacatcaagatgctttccagttatacagataatggaatagtggttgcaactgctgaagacttcatgcaaaactttaaaaatcttgtgggctatcacaattcaatcacagaagaaaaccttccacagcttggtgctaatgagaatcttgagtcgcagtcaggtaacttttcagtggttttcattttctttaacgcagacagaaaaagaggaatggttttgctgttaccaaataatgaaatgaccattttgaaaccacgtacctcagtataaacagccatagggaaagtgtttcaagacatttatcattcn

SEQ ID NO: 98610 - DNA, 328 bp, Homo sapiens
ggctggtcttgaatttctggggtgaagtgatctgcccaccttggcctcccaacgtgctgggattacaggtgtgagcccctgtgcctggccacatcttaggctttgtggaccacatggtctctgttgcaactactcaactctgccactgcagcacaaaagcagccatagatgtaaaaagaaaataacatttcaggaccttctaaatgcattatgccaagggaaaaagtgctggaaacagtcatgtaacacagctgcttttcttctctggcgcatggccactgcttcctgacctttgtgttgagatgttacacgttaaccagactccctg

SEQ ID NO: 98611 - DNA, 337 bp, Homo sapiens
aagacgaagtgaccccaacttcaagaacaggcttcgagaacgaagaaagaaacagaagcttgccaaggagagagctgggctttccaagttacctgaccttaaagatgctgaagctgctcagaagttcttccttgaaaaaatacagcttggtgaaaagttactagctcaaggtgaatatgagaagggcgtagaccatctgacaaatgcaattgctgtgtgtggacagccacagcagatactgcacgtcttacagcaaactcttccaccaccagtgttccagatgcttctgactaagctcccaacaattagtcagagaattgtaagtgctcatagcttg

SEQ ID NO: 98612 - DNA, 325 bp, Homo sapiens
gtagatggatgcccagctaatcttttatcttctcaccgaagcttagtactgcgggctgaaacaatttctctaggtgagcacccctgtgacagaggagaacaagtaactctcttcctcttcaatgattgcctagagatagcaagaaaacggcgcaaggttattggcacttttaggagtcctcatggccaaacccgacccccagcttctcttaagcatattcacctaatgcctctttctcagattaagaaggcattggacataatagagacagaagattgccataatgcttttgccttgcttgtgaggccaccaacagagcaggctg

SEQ ID NO: 98613 - DNA, 326 bp, Homo sapiens
cctggagctgcaggatcccaggggaggggtctctctccccatcccaagtcatccagcccttctccctgcactcatgaaaccccaataaatatcctgaatattttgaaactttactatttagaaacatagttgcctatttaatgaagctgaaaagaacgtgtatcatctggaaactctggtcatggtctccattttgagatgaacttcatataaccaacattacacctctggctttgttgccaatatctaacacatgaaggaaacacagaagacgctgctctgtaactgcttcccatcactatgacatggaacaaataaaaatttgg

SEQ ID NO: 98614 - DNA, 111 bp, Homo sapiens
  misc_feature (1)...(111): n = a,t,c or g
caagactgcaaccaaattgattggtggtgnccattatgattcanagaacatcaaggctatccgtgacgggctgttagcccggcggcatgcccttacgctagctgcatgtct

SEQ ID NO: 98615 - DNA, 362 bp, Homo sapiens
  misc_feature (1)...(362): n = a,t,c or g
gcaggagctcgagagaagcatggctcagcggtgcgtttgcgtgctggccctggtggctatgctgctcctagttttccctaccgtctccagatcgatgggcccgaggagcggggagcatcaaagggcgtcgcgaatcccttctcagttcagcaaagaggaacgcgtcgcgatgaaagaggcgctgaaagtctttcctacagtggtcagcaccagctttatccagcatgaagtcgtggaagagtatagccacctgttcactatccaaggctcggaccccagcttgcagccctacctgctgatggctcactttgatgtggtgcctgcccctgaagaaggctgggaggtgcccccattctctgggn

SEQ ID NO: 98616 - DNA, 220 bp, Homo sapiens
ctgaatttgtacatgatggtgtttttttgacttataatcaacaattgccttactaagagtgatgttcctgaattgtttcctcagtaaaggtgtaccataggctgggtgcgatggctcatgcctgtaatcccagcactttgagaggccgaggcaggcggatcatctgaggtcaggagttcaagaccagcctggctaacatggcaaaacgtcgacgcggccg

SEQ ID NO: 98617 - DNA, 367 bp, Homo sapiens
  misc_feature (1)...(367): n = a,t,c or g
agcccctcctccccttcctgcacccgtacccccgtggtctttgaataaagtctgagtgggcggcnnaaaaaaaaaaaaaaaaaaaaaaaaaaaaaaaaaaaaaaaaaaaaaaaaaaaaaaaaaaaaaaaaaaaaaaaaaaaaaaaaaaaaaaaaaangggggggccgccgccgaaaacaaaaattttaattttttttttttaaaacccccccggggggccattatgtgggggggggccccccaaaaattttttttttttaaaaaaaaagggcccccctttttaaaaaaaaaaccccccccaaaaaaaaaggggggggcgaaaaccccgaaaaaaaaaaaattttttaaaacccaaaaaaaacccccc

SEQ ID NO: 98618 - DNA, 368 bp, Homo sapiens
  misc_feature (1)...(368): n = a,t,c or g
gacgggacacagcccttgtcctcatgggggcacagccagcagcatgcccaaggcgccagggtactcaccctcggcccaggcagcccaatctccggttgacatccctctgcagcaacccctccagcagggagcgtagttcaggggagaaggagtcgggcagctccacggcctttagagaggagtgggacattagcaggggcttaggaagagcccttgaccccatcccagctcaggggagagaggggtccaggcccccgcagagggacagatggggcacagcatcctagctcgcccagcagtcatgctccaacagcacggngagggcgagagcctatggggcaggaggtctgtctcagaggccagagtag

SEQ ID NO: 98619 - DNA, 366 bp, Homo sapiens
cttgaacctgggaggcagaggttgcagtgagctgagatcatgccactgcactccagcctgggtgacagaaactccatttaaaaaaaaaaaaaaagtaccccatgggggttactttgtagcacagctcctccctcccaggaagatgaggacccacaggaggccccaggcccagggggagaggacaggaccaggatggggggcacctgtgcacacaggcctccttccccgaaggggccaggcttttacccaaccaccttccgccttcaaagggtttttccatccaacaaataaatcaagctctgaggcaaaaaaaaaaaaaaaaaaaccccgggttgggagaaaaaaaaacgttggttatattttgat

SEQ ID NO: 98620 - DNA, 368 bp, Homo sapiens
cccgccttggcctcccaaagtgctgggattgcaggcatgagccaccgcacccggccgccagatgagtatcttagtggtacagtatataaagtcatgtttaaaaatgtctttctggtaaagcatacttggaaatattatttcaataaagagataaagagtttcacttggcaagaatgcctctgggctgaggttctccttcacgttctgtgtgggtatgtattttgatacctccatgtttaacaggtagaaaggaattttaaatcacagtcgggcgcggaggctcacatctgtgatctcagcactttgggaggctgtggcggtcagatcacgaggtcgggagttcatgaccagccttgccaacatggtga

SEQ ID NO: 98621 - DNA, 396 bp, Homo sapiens
  misc_feature (1)...(396): n = a,t,c or g
aacaaatcttacacagacttaacccaaaaggtattcaagccacacagggaggctgcagaaaggggaagctaatgtgtccctgggtgtgggtgcttctgaaggaggtatagagaactaaattctcatcgcccaagcaagaagtcctcagacatctaaaactgaaaaactgatcaacagtaaagattatttagaaacatggggtaagtactagaagaaagagctaaagatgatagaagctgcctgcagagcagtagtaaaggatgggtggagacgagtaagatggaggaatgtggcctggcacagtggctcatgcctgtaatcccggcactttgggaggccaaggcaggtggatcacgaggtcaggagttcgagaccagcctggccaacatggagaan

SEQ ID NO: 98622 - DNA, 398 bp, Homo sapiens
ctgtgaagtgttattttcactgcatgttctctttcatctcagcccaggtgtcctaaaccatcattaggcccctgctgagatgatggttgtactgtcttctgatcggactctgtttcttgggacagttgtcctgagtcaccttccgaggcccatgctttacagcatttcctagagcaacgagtcgagtcttcgagtaaatcctttttttttttttttttttttaaaaacgaatttttctttttgtcccccgggtggaaggcaagggccaaattttagtttattggacccccccccccccaaggtaaaggaaattttctgccttacccccccgaagaggtgggaataccggcctgcccccccccccccgcgaaattttggttttttaataaaaaccgggg

SEQ ID NO: 98623 - DNA, 160 bp, Homo sapiens
cagcaatccacctgccctgacctcccaaagtatggggattacaagcatgacccgccacgccctgcctattgcatgttttttggtttttgtttttttgttttttgagatggagtctcactctcttgcccaggctgaagtacagtagcggtcgacgcggccg

SEQ ID NO: 98624 - DNA, 349 bp, Homo sapiens
  misc_feature (1)...(349): n = a,t,c or g
ttttcgttcggtaagcattaggaatgccattgcgattagaatgggtacaatgaggagtaggaaatcgttgtgaaagtgttgaaggcacaagcacagagtcagaaagctaaataaaaaaatgaaacttttttgagtaataaaaatgaaaagacgaacagctactcctactcttttcccactttctactattattgaacccagtggataatttgaaggcagttgtattataagttcaataactatgtcctcaatagtataagtagccattacctctcgagtagtagctcgagctttaaccgtcatgccattaaatagttgtgtacttgtttgtacagaagatatttcttgn

SEQ ID NO: 98625 - DNA, 343 bp, Homo sapiens
catgaatgtggcagttctagtcaaagaacgctttctgttcaagaggcagctgcgtatttaaaagtaagcaatgaaattagaattttaatagctatattttaaaaaattatataaatcattgctacttgtaagaatcatatgtttgattattttaattgtactgttaaaagcttgggcctgctgtttggtataatatgagcagttatgagaaagtaaaattgttcaacttttttttttttttttttttttgggaaaacaaattttcctttttgtcccccagctggaggggcaggggtggatttcaactcctggaacggttccaaccgcgggttaagcgaatttt

SEQ ID NO: 98626 - DNA, 334 bp, Homo sapiens
aaaacgtctagagggcagtttacattttaagtggtacattagcttaacacctcttgtagtacacacaatgacctggcaaagagctatttcaaatgtttattcagttcaagaagagaatgtttgaatattctgcaaaccagtgatagtctgctaaataacagaaatatcactggtaatattcaaattggagagatgcatttattttgtaattctgtacttgcatgttagaaactcttgtcactttgactgcagatagatatcagtgcagttgtggcatataccatcgctgtaaaggaggatggggagctcaacctaatgaagaaagcagccagct

SEQ ID NO: 98627 - DNA, 334 bp, Homo sapiens
tgacaaggcaccaatgctaaaggttatagtgaattctctgaagaatatgataaatacattcgtgccaagtggaaaagttatgcaggtggtggatgaaaaattgcctggcctacttggcaactttcctggcccttttgaagaggaaatgaagggtattgccgctgttactgatatacctttaggtaaagttcacttagaagctttaaaaaaaaaagtaattaaattcttttacaagtttccattgaggtgtgatatacatacagcaaagtgcacaggtcttagatatacagctcagtgaagcttcagaaatgcatgcatgcatgtagccatgact

SEQ ID NO: 98628 - DNA, 335 bp, Homo sapiens
  misc_feature (1)...(335): n = a,t,c or g
ggaaaagtactatggcacaaactaggaatatgagtagggtcaagtaatgtttctttttttagtataatagcacctctattctaatttgctttaaatacctaagctaacttaacactgatatttttctagtagggtatgtatgctcctttagagacctatttggagctattacctacttttttttttccttttttgggggttatatttggatgtgaacaaaagaatttttacatttattttgtcagaaaaatattttgatatgaaaaagaaccaatgcaaagaaggtcttgacatctataagaagttcctaactaggatgacaagaatctcagagn

SEQ ID NO: 98629 - DNA, 336 bp, Homo sapiens
ggagctcttgacaccaacgtgctgcacattctgacactgcatcttgctcatggcaaccatggcaggatcacaggcagcatccacatcctgaaccaacagatgaatactgctggagatgacggggctgaacgtgcccatatctccagacagattgattcgatcaaacagactgacatccactttttctttgagtttttcttctagctgctgggtggcggccacacagtactctgccgtgctcatgatgttacagatgaggcagagctgctccagagtgaacttggctacttctgagccctccttttccttgaggaggctgctgatagtcagtcctcc

SEQ ID NO: 98630 - DNA, 358 bp, Homo sapiens
gcttgaacctaggaggcggaggttgcagtgagccaagatcatgccactgcaccccgtcctgggtgacagcaagactccatctcaaaaaaaaaaaaaaaaaaaaaaggggtaaaaaccctttaaaaaacggcggaaaagaaaattttaagttcctccaaatcttggttaaccctaaaaacagtttggaaaatttggccgtctgaaaattggggcagggggggcacatggggaaaaaggacaaaggaggtggaccatttttaaaggggttaattggaaaactgcccaaccttggcttgggcttggaataccctaaaaagggcctttggaaaagcaaaagtaattaattttgaaccccagg

SEQ ID NO: 98631 - DNA, 385 bp, Homo sapiens
  misc_feature (1)...(385): n = a,t,c or g
ctgaagtgctgtctagtgttcctaagtaaaggagggctgtgatgtgccttgtggagaaaaatatgtgtgttagataagcttcattcaggcacgagttttaggactattagctatgaattcaatgttaatgaaccaacagtatatattaatgtgtctttacatatatgcatgtatgtgtgtgtgtatgtatatatatgtgtgtgtgtgtgtgtgtgtgctcctcaatatacacacacttttcttttgacgtaagttctgggtctctagcacaggttcgcgttgtgtggggcgtcaccattcttatcgtagcgcctagcctccgagacttagttgatccttcgctcctcttttttctagatcttggacctctgtggttgcaccaccn

SEQ ID NO: 98632 - DNA, 137 bp, Homo sapiens
taatcttttgtctttttggtaatggccattttaactggtatgaggtgactgaggtgatatttcattgtgattttgattttcattttcttaatgattagtgatgttgaaaattttttcatataccgtcgacgcggccg

SEQ ID NO: 98633 - DNA, 366 bp, Homo sapiens
ttctgggatttattttaaaacactgcaggattaaaaaaagtggtcagtgacaactaaacaaagagtgataaaatttggctgggagcagtgactcacacctgtaatcccagcactttgggaggccgaggcaggcagatcacttgaagtcaggagttcgagatcagcctggccaacatggcaaaaacgcgacgctggtttttattttattactagctttcttgtttttagataggcgttttattttgttttttattttcttgttgatgtcgataaaagcgttttcttattattgtgttccggttgtttattctttctatgttgtgtttcatttaatgtcactttttcttattttcttctggtataatg

SEQ ID NO: 98634 - DNA, 407 bp, Homo sapiens
atttttatgactattaacttattttataattatgtttaagatcctagagatttatgagaaagaggaacaacttattataaaacaaattagtgagggtcaggaaaaagtgaaggaactgagacaattcaaggagcatcgcaaagccaaggattcagcactacaaagtatagaaagtaagatgcttgagttgaccaacagacttcgagaaagtcaagaagaaatacaaattatgaggaaaaaaaaaagaaaaaatgccgcccggggcccttattggaaatttaaatattcccaaaggtggaaaagcccgccaggtccctttcaatggggctgggggccccgtaaaaatttttttgtttaatacaagtgtgcgccttgcttaatgaaaatatcctccattaagacacaag

SEQ ID NO: 98635 - DNA, 402 bp, Homo sapiens
tggcctccaactcctgacctcaagtgatccaccggcctcggcctcccaaagtgctgggattgcaggcatgagtcactgcacccagccgcaagtacacctgatgccttctctttaccatttcagattcctgcaggtagacaccaaggatctcctcagagccagcgctgatctcatccacagagggatcacatgacctcatctgggaaaatataaaccctacccacctgcctgcccatttggaaatgcagactggaggacgctaagttcattcttacctatgtactaacaagtacacaagaagatgctcaatatcattagtccttggggaaatgcaaattagattataatgagattccagtgtacacccactagaaggctattaaaaaggacaataccaactgg

SEQ ID NO: 98636 - DNA, 325 bp, Homo sapiens
  misc_feature (1)...(325): n = a,t,c or g
aaattgtgtttggttatgaattctcccatgaaagctgcacctaggaatttctcttgtgccccttccttgtcactgctccctttttccttccgaaagacaaccaccaccttgacttctaacactgcagatgattttgcctattttgatttgtgtaaaatggaaccatgtagtatggttttgttttttgttttttgcnnnnnnnnnnngacaccgggccttgctctgtcaaaggctggacctcaccgccgcaatacggcttcattgccccctatcccattcactgactcgctccccactaccacacgtatcaatcgagaccctgccc

SEQ ID NO: 98637 - DNA, 384 bp, Homo sapiens
  misc_feature (1)...(384): n = a,t,c or g
gagaaatgaaaccatcactgtcgagtgatgatccatagtgggcacagatctttttctacaaaggctttgtgggccacaatgtctccaatatatttaatggcaaaaacagcaactacttttgcaccaacctaatagctacttaattgtgccactgggccgcaaaagcggccccaggtaaaacatcgatgaatgaacatggctgtgttccaatatagaatggtatttacaaaaacaggtagcccatgggcaataaagtttgcccacccttggtttagaatatggagtctggttgggtgcagtggctcacacctgaaatcccagcactctgggaggctgagggaggtagatcgcttgagtccaggagttcaagaacagcctgggcan

SEQ ID NO: 98638 - DNA, 342 bp, Homo sapiens
  misc_feature (1)...(342): n = a,t,c or g
gtcgacgcggccgcggaaaagttggaagctagcacaggttggctcatgaggtttaaggaaagaagctgtcttcataacataaagatgcatggtgaagcaacagttgctgatacagaagctgcggcagggtatccagaagatctagctaagatcactgataaaggtgtctacactcaacaacagattttgaatggagatgaaatagccttttgttggcaaaagataccatgtaggattttcctagctagagagnaagcagtgcccggctgcaacgcttcaaaggccaggctgactgtcttgttatgggcgaatgcagctggtgactaagttgaagccagtgtg

SEQ ID NO: 98639 - DNA, 363 bp, Homo sapiens
  misc_feature (1)...(363): n = a,t,c or g
ccgagatcatgccactgctttccagcctgggtgacagagcaagactccgtctcanaaaaaaaaaaaaaaaaaaaaaaaaaagaaaaggaaaaaaaaaaaaacccggttgaaaagtcggcaaaagttatttaaaacgaattaaggaaaaagggtgggggaaaaaaaaattttagtaacccggaaaacgggactaaaacaagtcccaaaaaaaacggaaaagccggaacacaaaaaaaaaacggtttttgtttttgggaaaaaatgggtttgggttaaaaaaaaatcagggtatcctaaaaagggcgggaaacttaacccaaaaaaggaccctgggcctgtggaaaacccagaattaagggttgg

SEQ ID NO: 98640 - DNA, 357 bp, Homo sapiens
  misc_feature (1)...(357): n = a,t,c or g
tttcggaaagcaactgcttttattcaagagctctgacagttgagaaacaagatcaaatcaataagatacagaagtgtagtaatcatgcatgctgtttaaacacccagaagatagctcttgattttctgtgaaaattaaggagaggtgggccagtccacctgttagtaaaaaatgttatttaagtatttctgaagatcttttatcccaagtgcctctgcttctgcctcaactctgtgccttaaatgttcccaaaacggacagccaggcgcggtggctcacgcctgtaatcccagcactttgggaggccaaagcaggcagctcacgaggtcaggagttcaagaccagtctggccaacan

SEQ ID NO: 98641 - DNA, 341 bp, Homo sapiens
gggattacaggcgtgcgccaccgcacctggcctgctggtaatgttctataccttaatctggataatagtttacatgagtgtgttcacaaaaatttatcaaacagtgtactaaggacttgtccatcttactataaataggctatatttcaactttttaaaatgtattccccaaaatttcaagtctacactaagccaaaagagttaagagaaataattttttttttttttttttgaaacagttttgttccgtcccccaggctggagggcgggggcctgatcctggttccttgaaacctttgcctcctggtttaaagggattttcttgccccacccccctgaat

SEQ ID NO: 98642 - DNA, 340 bp, Homo sapiens
ggctatgatcatagtttcttattctttttcctttggctttgctggatcgggttaagtcaaagaccttgtcttcgagctctgaatttctttcttctacttgttcaattctattgctgagactttccagagcattttgcattactagaagtatgtccaatgcttcctgacgatcaaactgtgatttctttattctatctattgccttgaatatttctcccttcgcttcttgaattgacttatggatttccttgccttgggcttgacctttctctggtgcctccctaattagcttagtagctaaccttctgagttctttttgaggcttatcagggattctttt

SEQ ID NO: 98643 - DNA, 383 bp, Homo sapiens
ggtggtgaaggtggccactcagccggctgacaatccccttgacgttctatcccggaagctccacctggggcccaatgttgggcgtgatgttcctcgcctgtctctgcctggaaaactggtcttcccaagctccactggcagccacttcttcatgttgggcatcggagacatcgttatgcctggtctcctactatgctttgtccttcgctatgacaactacaaaaagcaagccagtggggactcctgtggggcccctggacctgccaacatctccgggcgcatgcagaaggtctcctactttcactgcaccctcatcggatactttgtaggcctgctcactgctactgtggcgtctcgcattcaccgggccgcccagccctgcc

SEQ ID NO: 98644 - DNA, 383 bp, Homo sapiens
  misc_feature (1)...(383): n = a,t,c or g
gggctcagtgctgagtaagaagggagattacctcaaatatcactacaatgcctcacttctggatgggaccctgctggactccacgtggaatttaggcaaaacttacaatattgttctgggatctgggcaagttgtgttggggatggacatgggtctcaaagagatgtgcgttggcgagaaacggacagtgatcattccgcctcacctgggctatggggaagctggcgtggatggagaagtgcccggcagtgccgtattaatgtttgacattgagctgctggagctggtggctggccttcctgaggggtacatgttcatatggaatggtgaggtgtcacccaacctctttgaagaaattgacaaggatggcaacggagaagtcn

SEQ ID NO: 98645 - DNA, 383 bp, Homo sapiens
ggcagtcattgatgaagttcgcactggcacctaccgccagctcttccaccctgagcaacttatcacaggcaaggaagatgctgccaataactatgcccgagggcactacaccattggcaaggagaacattgacctcgtgttggaccgaattcgcaagctggccgaccagtgcacgggtctccagggcttcttggttttccatagctttggtgggggaactggttctgggttcacctccctgctcatggaacgtctctcagttgattatggcaagaagtccaagctggagttctctatttacccggcgccccaggttttcacagctgtagttgagccctacaacttcattcttaccacccacaccaccctggagcactctgatt

SEQ ID NO: 98646 - DNA, 452 bp, Homo sapiens
cggggagggcgggggcgtttcctgaaaactgatgtcactacgattacgccaagcttggcacgaggcagccattgatgaatttcgcactggcacctaccgccagctcttccaccctgagcaacttatcacaggccaggaagatgctgccaataactatgcccgagggcactacaccattggcaaggagaacattgacctcggggtggaccgaattcgcaagctggccgaccagagcacgggtctccaaggcttcttggttttccatagctttggtgggggaactggttctgggttcacctccctgctcatggaacggctctcagttgattatggcaagaagtccaagctggagttctttatttacccggcgccccacgttttcacagctgtagttgagccctacaacttcattctcaccacccacaccaccctggagcactctgattgtgcct

SEQ ID NO: 98647 - DNA, 385 bp, Homo sapiens
ggcagtcattgatgaagttcgcactggcacctaccgtcagctcttccaccctgagcaacttatcacaggcaaggaggatgctgccaataactatgcccgagggcactacaccattggcaaggagatcattgacctcgtgttggaccgaattcccaagctggccgaccagtgcacgggtctccaaggcttcttggttttccatagctttggagggggaactgggtctgggttcacctccctgctcatggaacgtctctcagttgattatggcaagaagtccaagctggagttctatatttacccggagccccatgtttgcacagctgtagttgagccctacaacttcattctcaccacccacaccaacctggagcactctgattgt

SEQ ID NO: 98648 - DNA, 390 bp, Homo sapiens
acggggatgctgccaataactatgcccgagggcactacaccattggcaaggagatcattgacctcgtgttggaccgaattcgcaagctggccgaccagtgcacgggtctccagggcttcttggttttccacagctttggtgggggaactggttctgggttcacctccctgctcatggaacgtctctcagttgattatggcaagaagtccaagctggagttctctatttacccggcgccccaggtttccacagctgtagttgagccctacaactccatccttaccacccacaccaccctggagcactctgattgtgccttcatggtagacaatgaggccatctatgacatctgtcgtagaaacctcgatattgagcgtccaacctatacta

SEQ ID NO: 98649 - DNA, 374 bp, Homo sapiens
ggtggcacgaggcagaggttgcagtgagccaagaccacgccattgcactccagcctgggtaatgagagcgaaactccatctcaaaaaaaaaaaaattttttactttcccaccttgatgtttacagaaatttattaaaagggattttaaccttcccatgggaaaaaatatttttgacattagtcaaaaaaatatgaaggggaaaaggggtaacgggagggggtacctacctgaaattaaagcacgtgaggctttggtaattgaaactgcaccggaaaaaaaagaccaaaaaccaacctcaaaaaatactgaaacacccccgtaccattttgaatcggtaaaaaaaaataggattattcagtcaggggtgctgagc

SEQ ID NO: 98650 - DNA, 412 bp, Homo sapiens
  misc_feature (1)...(412): n = a,t,c or g
nactgatnccctgacgncactctgannaccccaagcttggcacgagggaaaattcgttaacaagtcagatttccttcttcaatgttgtcttttgtggcctatctttacagcagctttgttagcactcaagagtgtttggggttggttttttttttaatctcatttctggctccattgggaatcccttgatttcccttccttcgttcaaactttttgaatatctttgaaaaaattctgaaaaaatctcattttcctttctaaaaggcctctccttttcgaacaggaactgcatttggaaatgggaaaacctcggattatctgctactgggaaactttgggtacacttttggggggataactgggtgtttgaaagctggattggaaacatcatattggacatggttcacccaca

SEQ ID NO: 98651 - DNA, 406 bp, Homo sapiens
ggggtggggcacacctgtggtcccagctgctcgggaggatcgcttgagcccgggaggacggtgctgcagtgagctatgattgcgccactgcactccagcctgggtgacacagtgagacccggtctctatagataaatgaatggatgaatgagggggtcaaggatcctcacccggcttccatttggagggaggagtttggttgagttcttgcaagggtggtacctaggaaatgcttgccagttctggagcccagacactgtccctggacatgagaccaggttctctgccctaggttatcattgggagcatcttcgaggtcatctgggctgtcataaaacctggcacatcctttggaatcagcgtgttacgagccctcaggttattgcgtattttcaaagtcacaaaa

SEQ ID NO: 98652 - DNA, 417 bp, Homo sapiens
  misc_feature (1)...(417): n = a,t,c or g
ggaagggctgtcaaatagtgggaggactgcttgagctcaggagttcgggaccagcctgggtaacatggtgaaaccctgtctctaccaaaaaaaaaaaaaaaaaaaattggtttttatttacggggggggggggggggccccctggggccccacttttttggggggctggggaaaaaaaatcccttgacccaaaaaggggagggttccgggaacccttaattgcccccttgccttttacccgggggggggggggacccttccttttaaaaaaaaaaaaaaagggatttattttccttggggggggggggggttttttttccgggggcctttttaaaaagggccccatgataatattccctcttttattggaaaaaccacctttttttttttttggaaggggcccctcttcttcccaan

SEQ ID NO: 98653 - DNA, 407 bp, Homo sapiens
gggcctgactaatttatttattttttgtagagataggattttactatgttgcccgggctggtctcaaactcccagcctcaagcaatcctcccacctcagcctgccaaagccctgggattacatgtatgagccattgtgcctgtacttcctttatccctggttctgcctctctctctctctttctttccccctctctcacacatacttttttggctgagccatctacctaaatatttagcataatctcctgaaacaaagatgttcttctgtataatcacattatgatttccatactcaataaatttatcattgactcaatactattatctaatatataggctatgttcaaatttctcatattggtctaataatgggtatagaactatatatataatgaaataactata

SEQ ID NO: 98654 - DNA, 479 bp, Homo sapiens
agagcctcctttgagaccttgagaactgtcttacgccaaccttggcacgaggaggaggctgaagcaggagaattgctttaacccaggaggtggaggttgcagtgatttgagatagtgccactgcactccagcctgggcaataaagggagactgtctcaaaaacaaacaacaaacaaaaattgcctggagccaaacttcaaggaaggtagctatctcttctgctctagaagctctgtaatcccaatggggctggcttcacatctgcaaaatagagaattatgacgatttgaaactccactagcacaataacatttctctgtcttattcactgctatatttgggaaatagagaattatgacaacttgaacctttttgctttcaatgctgaaatcactggtcagcattccctaggcttggagtcattctgtgtgagatcaacccctctttattatagcctgtacctaccaccttctcactcg

SEQ ID NO: 98655 - DNA, 406 bp, Homo sapiens
  misc_feature (1)...(406): n = a,t,c or g
ggggaaaggagctccaaccacttccctcattagtgtggctgtcacaaagataatagccaaggttctggaggacaacaagctgcctggtgcaatttgttccttgacttgtggtggagcaaatattggcacagcaatggccaaagatgaacgagtgaacctgctgtccttcactgggagcactcaggtgggaaaacaggtgggcctgatggtgcaagagaggtttgggagaagtctgttggaacttggaggaaacaatgccattattgcctttgaagatgcagacctcagcttaattgttccatcagctctcttcgctgctgtgggaacagctggccagaggtgtaccactgcgaggcgactgtttatacatgaaagcatccatgatgaggttgtaaacagacttaan

SEQ ID NO: 98656 - DNA, 400 bp, Homo sapiens
  misc_feature (1)...(400): n = a,t,c or g
ggcgaaaacatgattacagggacatctcaggctgactgtgctgtcctgaatgttgctgctggggttggggaatttgaagctggtatctccaagaatgggcggacccgagagcatgcccttctggcttacacactgggtgtgaaacaactaattgacggcgttaacaaaatggattccactgagccaccctacagccagaagagatatgaggaaattgttaaggaagtcagcacttacattaaaaaaattggctacgaccccgacacaatagcatttgtgccaatttctggttggaatggtgacaacatgctggagccacgtgctaacatacctttggtcacgggatggaaagccacccctatagattgcgatgccagtggaaccacactgcttgatgctn

SEQ ID NO: 98657 - DNA, 392 bp, Homo sapiens
gggcagacctgatgacttactgtgatgcccacgcctgtgaggatcccctcatcacccctgtgcccacattgagcggaagaagaagccatataatagcaacattggcttctacaccaagaggaatgctcttcgcgttgctgaggtctggatggacgattacaagtctcatgtgtacatagcgtggaacctgccgctggagaatccgggaattgacatcggtgatgtctccgaaagaagagcattaaggaaaaggttaaagtgtaagaatttccagtggtacctggaccatgtttacccagaaatgagaagatacaataataccgttgcttacggggagcttcgcaacaacaaagcaaaagacgtctgcttggaccaggggccgctggagaacc

SEQ ID NO: 98658 - DNA, 395 bp, Homo sapiens
ggggcactcccaccagaccgcatatactgctacaggcacttttcattcgagccatgctaccctgcccagattatgacactgataccaaaacaggcttggaccaagctcttaaaatatgtcaagcaatgctggacgaggctgccaaccagggctggctggtgactgtcctgaataacaccaacctgattcaaatggcgatccagggtcggtgggtaaaggactcttctcttcttacactaccctacatagaaaaccatcatcttcaccttttcaagaaacggaagccgattatgaaaggcccacatgctaagagtcggacctccatcgagtgccttcctgaactgatccatgcctgtggagggaaagaccatgtatttagatccctggtacaacag

SEQ ID NO: 98659 - DNA, 405 bp, Homo sapiens
ggcctcgtgccagtgaagtgtgtggattctcatgccatataacttgtgtaaacaaagctccaaccacttgtccagttcctcctgaacagacaaaaggtcccctgggtatagatcctcagaaaggaataggaacagcatatgaaggtcatgtcaggattcctaagccagctggagtgaagaaagggtggcagagagcactggctatagtgtgtgacttcaaactctttctgtacgatattgctgaaggaaaagcatctcagcccagtgttgtcattagtcaagtgattgacatgagggatgaagaattttctgtgagttcagtcttggcttctgatgttatccatgcaagtcggaaagatataccctgtatatttagggtcacagcttcccagctctcagcatcta

SEQ ID NO: 98660 - DNA, 393 bp, Homo sapiens
ggataacacggcaggagtttatcgatggcattttagcgtccaatttccccaccaccacgatagaaatgactgttggggctgacattttcgaccgagaaggggatgggtacattgattattatgaattcggggctgctcttcatcccaacaaggatgcgtatcgaccaacatccgatgcccctaaaacctttcatcagggtacaagacaagtggctcagtgcatatgtgcaaaaaggtttctggtggagcacatcggagagaataaataccggttcttcctctgcaatcactttggggattctcatcagatgcggctggtccgtattctgctcagcaccgtgatggttctcgatggcggaggatggatggccttggatcaatttttaacgactt

SEQ ID NO: 98661 - DNA, 395 bp, Homo sapiens
  misc_feature (1)...(395): n = a,t,c or g
ggataacacgccatgagtttatcgatggcattttagcatccaagttccccaccaccaagataaaaatgactgttggggctgacattttcgaccgagatggggatggctacattgattattatgaatttgtggctgctcttcatcccaacaaggatgcgtatcgaccaacatccgatgcctataaaatcgaagatgaggttacaagacaagtggctcagtgcaaatgtgcaaaaaggcttctagcggagcacatcggtgagaataaataccggttcttcctcgggaatcagtttggggattctcatcagttgcggctggtccgtattctgcgcagcaccgtgatggttcccgttggtggaggatggatggccctggatgaatttttagtgaataan

SEQ ID NO: 98662 - DNA, 393 bp, Homo sapiens
ggagaagatgctgccaataactattcccgagggcactacaccattggcaaggagatcattgacctcgggttggaccgaatttgcaagctggccgaccagtgcacgggtttacaaggctttttggttttccacagatttggtgggggaactggttctggggtcacctccctgctcatggaacatctttcacctgattatggcccgaagtccaagctggagttctctatttacccggcgccccaggttttcacagctgtacatgagccctacaactccatgctcaccacccacaccaccctggagcactctgattgtgccttcatgggagacaatgaggccatctatgacatctgtcgtacaaacctcgatattgagcgcacaacctatactaac

SEQ ID NO: 98663 - DNA, 482 bp, Homo sapiens
  misc_feature (1)...(482): n = a,t,c or g
tgaggcggngnnggttttnnttttggagaccattatgactaggattacactcagcttggcgcgacgacaaaattggctacaaccccgacacagtatcatttgtgccaatttctggttggaatggtgacaacatgctggaaccaagtgctaacatgccttggttcaagggatggaaagtcacccgtaatgatggcaatgccagtggaaccacgctgcttgaggctctggactgcatcctaccaccaactcgtgcaactgacaagcccttgcgcctgcctctccaggatgtctacaaaattgggggtattggtactgttcctgttggccgagtggagactggtgttctcaaacccggtatggtggccacctttgctccagtcaacgatacaacggaagtaaaatctgtcgaaatgcaccatgaagctttgagtgaagctcttcctggggacaatgtgggcttcaatgtcaagaatgtgtctgtc

SEQ ID NO: 98664 - DNA, 390 bp, Homo sapiens
ggcgtttccatggctgtcagtcttgtgataatttaccagtatgttgtcaggaacatgccagatccccacaaccttccaatagtggctggttggaagaaatacccactcttttttgggactgctgtatttgcttttgaaggcataagagtggtccttccactggaaaaccaaatgaaagaatcaaagcgtttccctcaagcgttgaatattggcatggggattggtacaactttgtatgtaacattagctactttaggatatatgtgtttccatgatgaaatcaaaggcagcataactttaaatcttccccaagatgtatgggtatatcaatcagtgaaaattctatattcctttggcatttttgtgacatattcaattcagttctatgtt

SEQ ID NO: 98665 - DNA, 462 bp, Homo sapiens
  misc_feature (1)...(462): n = a,t,c or g
gaataaaacttgannaccagtcttgacctcgattacgctcagcttggcacgaggatattggtgtatctgggaggtcccatgtgtctcagtggtggtccctgttttcaagaaagagtgtctgtgaatgtccatgtgtctcactgcacagctgtgatttttctgtgtctctgtgttttccagtctttgtgtgatgaaatataaaggcctagcaggctcagagttattaatgaattgtacttaagcgttgagaggcatatatttattgcactattaaattcttccaaaatatagttaaaaaaaaaagcttcacagttttttagtaagtttgagtgaatttttttttcagggagggggggacagagtctccatccattgcccaggctagagtgccgtggtgcagtctcaactcactgcaacctctgcctcctgggttcaagcgattctcgtgtctcagcctcccag

SEQ ID NO: 98666 - DNA, 403 bp, Homo sapiens
ggcgggtggggggttgaggcagaggatttcgaatatgctcctgatgtggagccgctggagcctacacttagcaacatcatcgagcagcgcagcctgaagtggatcttcctcgggggcaagggtggtgtgggcaagaccacctgcagctgcagcctggcagtccagctctccaaggggcgtgagagtgttctgatcatcttcacagacccagcacacaacatctcacatgcttttgaccaaaaggtctcaaaggtgcctaccaaggtcaaaggctatgacaacctctttgctatggagattgaccccagcctgggcgtggcggagctgcctgacaagttcttcgaggaggacaacatgctgagcatgggcaagaagatgatgcaggaggccatgagcgcatttc

SEQ ID NO: 98667 - DNA, 349 bp, Homo sapiens
  misc_feature (1)...(349): n = a,t,c or g
gtgagctgagatcctgcctgggcaacatattgagactctgtctcaaaaataaaaacgttcgggggagggatatgaatatttgcgcataagtctttttgtggacatatgttttcttttcttttggataattactcacaaatggaattcttggatcatagaataggagtatgtgtaactttataagaaactgcgttttccaaagtagttgaacattttttacactcttagcaatgcgtaagagttgtataataagaacttcacctccttgccaacgttcaatgttatttccttgggngcnnannnnnnannnttnnntnnnnnttantnananccnnnnangacactttta

SEQ ID NO: 98668 - DNA, 363 bp, Homo sapiens
  misc_feature (1)...(363): n = a,t,c or g
caaaatccaactctgagccatcttcttcctccatctctttcaacccccacaggggctgcctgctcttcacagctgtggaggtgagggtgggcgtgggcgggatgctgttcagctgcagactttcttcctgggacgaggagacgtcctctctgttaggcttggcaggccctgccaagcagatgcatacattaaccacagcccagggcctgcgacaggtgtgctctctttccaagacctgcccaggnattagtaaggnnnnnnnnnnnnnnnnnnannnnnnnnnnnnnnnnnnnnnnnnnnnnnnnnnnnnnnnnnnnnnnnnnnnnnnnnnnnnnnnnnnnnnnnnnnnnnnnnnnnnnnnnn

SEQ ID NO: 98669 - DNA, 373 bp, Homo sapiens
ttggagatggcagcgagctgagatcgtgccattgcactccagcctggttgacagagcgagacacttcatctcaaaaaaaaaaaaaaaaagaaaaaaagacgtggaaccctgcaccggaactttttttttttttattattggaaaaaaaagggcaaaaccagggtaaaccaaatatgaaaaaggttttataaataaaaaaaaggaaatttcatttcgggaaaggaggtttaaaaaccagggtttttgggcaacataataacggaaaaaaaaaaaaaggttaaaatgggggcccaaaaacaatttaagaattaaaacccccaaagaaaatcaacaaaaaggggtttggggtaaaatttaaaaacataacccttaa

SEQ ID NO: 98670 - DNA, 171 bp, Homo sapiens
ctttgttgatgtttctgtctaggtccagtaggtgtttgcagatcccttcttaagcctcaactgtgtttcctcggtttcccctggctgcaggatgctcgtcagaagttccgctctgttctggttgaagcaacggtgaaactggatgaactggtgacgaggtcgacgcggccg

SEQ ID NO: 98671 - DNA, 355 bp, Homo sapiens
gtgtgtcttgaactcctgaccttgtgatccacccgcctcggcctcccaaagtgctgggattacaggcgtgagccaccttgcctggccaaaaatctcagaattctttaagactgctttaattgctccatcagtaattttgaagcactttccttttttttttttttgcccttttgggcccttttccccacccccccattgggtgggaaaattttttcccgggaaaaagaaggggcaggggattccttgattaaaggataaacgggcccaaggggtggctgagaaaaaaaaagaacccactcgtttaacccgccgcaaaattcctaatttaaaactcttaaaatctagaaaccccccg

SEQ ID NO: 98672 - DNA, 140 bp, Homo sapiens
agcgattttccttccccagctacttgggaggctgaggaaggagaatcgcttgaacccaggaggcagaggttgtagtgagctgagatcgtgccactgcactccagcctgagcgacagagtgagacccggtcgacgcggccg

SEQ ID NO: 98673 - DNA, 330 bp, Homo sapiens
  misc_feature (1)...(330): n = a,t,c or g
tttacctccaaatccacctgcaaaacattactcatgctatggtatttctgaaatgtatttcaccatactgtgttgagggaaagatatttggtggcgatatacgacgctttttactagcaggaatagacattcaacatttaattgtggtcaatgtttaaatgaaacccacagatcagcctggcctcgttatctgcccgcctcggccacccaaagtgctgggattacaggcatgagccacctcacccaggcttatttatttatttatttatttatttgngagacaatgtcttgctttttgcccaaactggaatgcagtggtgggatctcggg

SEQ ID NO: 98674 - DNA, 230 bp, Homo sapiens
gttggtggcacgcatctgtagttccagctacttgggaggttgaggcacgagaactgcttgaacgtgagagtcagaggaggttgtgttgagccgagatagcaccactgcactccagcctgggtgtcagagtgagactctcccccctactccccaaaaaagagagtcatatagaaaaactttgtaaaaattaaattgtcagtgtctatgtcaaatttacgtcgacgcggccg

SEQ ID NO: 98675 - DNA, 349 bp, Homo sapiens
gccacgttggccaggctggtctagtactcctggcctcatgtgatcctccctccttggcctcccaaagtgatgggattacagtctgagtcactgccctcagcctatacatacatatttgcacacttatttattttggatacattttctagaagtgtaactattgggtcaaaggatgggcataattttgaaatgtgattattttctaaagagcttttatactgatatgccattgttggataaagccctgctagtagtgaataggagtgcgcccccacaacctttaaacttattctaactggcatagtgattctaggaaaaaaaaaaaaaaaaaaaaaaggcaaggcggccg

SEQ ID NO: 98676 - DNA, 375 bp, Homo sapiens
  misc_feature (1)...(375): n = a,t,c or g
acccgtattgttgtttttccaggatanaaaagggagaatnctccaagnctgactgggttttaanggattgaagaanttcccaagtgagctgcacacgaaacacgaatgatnaaattatatagccatantgaacccaggaggtgganggttgcacgtgagttaagatcattgctgctacacanctctaagcctgggcaacagcaaaagactcttgtctcagaaaaaaaaaaaaaaaattataagcattaacccctcaaaactaatgggattaaatccaacccagttagtactcacaggggaaagggttccaaaggcaaacaagttgaatgctggtttttttgacctggtggcaatgtgctgtgaaagtgagtgaag

SEQ ID NO: 98677 - DNA, 368 bp, Homo sapiens
gttttgattgttttttatttatgctatctagttcattgaatatttctccctttacttcttgtatctttttttttttatatcttaacatggggcttcacctttttttggggccttaccttaataaacgaccttctgaattttttttttggcaattcaggaatttctttttcttggtttggatccagggcgggggagctagggtgatttttggaggttgttaaaaaaccttgttttgccatattactaaaatggtttttctgattccttctcatttggataggctatgtcaaagggaaggtctggggctcaaggctgctgttcaaattcttttgtcccacagggggctctctttatgtagaagaactctc

SEQ ID NO: 98678 - DNA, 145 bp, Homo sapiens
atggacatgagggtccctgctcagctcctggggctcctgctgctctggctctcaggtgccagatgtgacatccagatgacccagtctccatcctccctgtctgcatctgtaggagacagggaggatggagacgtcgacgcggccg

SEQ ID NO: 98679 - DNA, 328 bp, Homo sapiens
accgtagatacccaaaacaaaccactcagggacgctgttcttcctgccacaaacactcagtcagtgaaaacggccctgctggccacaagttgttcaaggcagaaatctgccagtcatccctgtccacatcactccctacttctagttcatgccctttccacttcttgaatcacttgaaatcttctcaagcaagctgtttaatcctccaaatctctttttcttttttgagacggaatcttgctctgttgcccaggatggagtgcagtggtatgatctcggctcactgcaacctccgtctcctgggttcaagagactttcctgcctcagt

SEQ ID NO: 98680 - DNA, 338 bp, Homo sapiens
ccgggaggcagaggttgcagtgagccaagatcgcgccatggcactccagcctgagcgacaagagtgaaactccatctcgaaaaatagtaataataataataaaataaagaatacaacttagaaacagccaaatggaagccatgtataagacaaaggaagatgtgggggtggaaggggttgcgtggagcctccatgccctctctgggtgccattggtagactgggggaattaattccctggtgcttccagcctgcaaaatgagctcttgcaaccagtaagtccccgatcaaaggggtgcaggaggtggtaggtggaagttgaacagatggtaggtttgg

SEQ ID NO: 98681 - DNA, 328 bp, Homo sapiens
  misc_feature (1)...(328): n = a,t,c or g
aattgacataaaatttgaaaatattgccttccttcctcattattctactgggtatatttttctaagatttcaagnaaaagcctnnaattnaggaagaagataaaaaggagantgtggggggggggatatcaaattgggccggggaaatatagaatagggaaggggggggtccacccggggggggggggggggggatttggggggggagagggggggataagggggtggggggggggttctaaaggggggggggggtgggttataatggggggggggggggtttttgttttttggggaggaggggaaaattgggggtgtgagggggggg

SEQ ID NO: 98682 - DNA, 383 bp, Homo sapiens
  misc_feature (1)...(383): n = a,t,c or g
ttcaccacatccaaggtcatctagcttttctcttatgttatcttttaggagttttatagttttgccttttacatttagatctgtaatccattttgagttaatttgtgtagagggtgtacaagtctgtgcttaagttcannnnnnnnnnnnnnnnnggcttccgttaaaaacagtatgtctccgttccggaacttttcctttggtttactattatgaaaggactacaaggctgttgggcgggaactacaaggccaaaaagaaaatgtgggtttaaagccaaactttttaccttttaagccaaacctagttagggaaaggggactgggcccatataatctaaagagggatttgaccctttttatcttcgcagctactaccccgcg

SEQ ID NO: 98683 - DNA, 350 bp, Homo sapiens
  misc_feature (1)...(350): n = a,t,c or g
cccattgatcattgtttttggggcaattgtgcattgatgccctttacttattttccggtgattaatcttttatttcttcattaatatggaaaatattttctcctagtctgccacctttcctttttttttttttttttaaaaaaaaaaagggccccactttctggtttaggctggggggcaggggggaaatttttattccttgcagcctaaccctccttggataagggaatcctcccattccaccctcccaaaattttggaactacaggcacaccccaacaggcccaccaaattttggctttttttttttaaaaatgggttttggccttgttgcccaaactatttttaatn

SEQ ID NO: 98684 - DNA, 325 bp, Homo sapiens
  misc_feature (1)...(325): n = a,t,c or g
gagcaatgatgtcgttgatcttttgccgaggacggagatcaggtaggttccagtctgtgaaatggtttatttcattcattgtattgaattcagaatgttgtcttctttttgaattcagtgaggggaacttaacgtgatatcatcatttttttggagtctggaattaaaggttattttctgtttttcagtgataaaatcacttcagagttggtatctaagattggtgataagaattggaagattaggaaagaaggcctagatgaagtggcaggtcgncnnnnnnnnnnnnncnnnnnnnnnnnnncnnnnnnnnnnnnnntnnnnn

SEQ ID NO: 98685 - DNA, 188 bp, Homo sapiens
cagggaaatgcaaattaaaaccacagtgagataccaccttactactgcgagaatggtcttaataaaaaaatcagagaagaatagatgttggcatggatgtagtgaaaagggaacacttctacactgctggtgggaatgtaaactactacaaccactatggaaaataggatggagagtcgacgcggccg

SEQ ID NO: 98686 - DNA, 341 bp, Homo sapiens
cgggtgaccatgaatctgtttttatgtttctatggatttgtctattctgaacacttcacaaaaatagaatctcatttaagagatatgtatatatgtgtgtgtgtgtgtctgtgtgtgtgtgtgtctgtgtgtgtgtgtgtatgtaaaggcgtatatatatagagagagagagagattgagagactgggcagcctggggtttttttatttgcgcttttttttttttgggaaactataaccctatggctcccccggaagcttttttttggggggccattttttatgctaaatgttacctttacaaattcgtaaaaaatgggtgcccgccttcatagcccacca

SEQ ID NO: 98687 - DNA, 355 bp, Homo sapiens
tttttgtttgggggaaggactacgataactttaccttaacattcaagtccggtatgatgctccataaaaattgttactaagagactttttcccaaacggaatttttttggaagcactcaactgaaaacattttattagatgtgccatgaaacgcgaatgtacaaccttaattacacaccttaaaaggttccattttgtttgaaaatacatgtggcagttgctcttccagcaatcttattttatcatctgtaacataaacactatgagggtgaaaaaaaaaattaaaatacttcatacattctgaaaatctacaagaaatatgggcacaactatcagttataagcagcaatatttt

SEQ ID NO: 98688 - DNA, 373 bp, Homo sapiens
cagaaggcagaggttgcagtgagccgagatggcaccactgcactccagcctgggcaacagagtgagactccatcccaaaaaaacaaacaaaaaaattccaccttaattttaatagcaaaaaaattaatttctttttgctattaaagtagctggcagaaaattaaaaattacctacgtgctcacattttatttatttatttttatttttattttttgagatggagtctcactccgtcgcccaggtcggagtgccgtggtgcaatctcggctcactgcactccagcctgggctacagagtgagacttcgtctcaaaaaaaaaaaaaaaaaaaaaaatggatacctggtggaaaaaaaccttgggaaatatggggc

SEQ ID NO: 98689 - DNA, 364 bp, Homo sapiens
ctctcccatttcttcacttcttctagctccttaacacacactggtccaatttctgccccatcactcttggcaaaatccattatgacctccaggctgctaaatccaagatacagttcaggcctcaatctgctcatcctttcagcagctttcacagggcttctgagtagggttgagcagttttgccctgcacacaggtgccctgcagaggaatgaggtgggctgaatgaaactccttttttaaaaattcttggctggcatagtggctcacgcctgtaatcccagcactttgggaggctgaggcggacggatcacttgaggtcaggagttcaaggtcagcctggccaatatggcaaaaccccatctg

SEQ ID NO: 98690 - DNA, 221 bp, Homo sapiens
  misc_feature (1)...(221): n = a,t,c or g
ctcaggggttggagaccagcctggaagacatactgagatctcatctctactaggaaaaaaaaaaaaaaaatgacctggggggggagctgctcccctgtagccccaactactcggaaaactgagggggaaaaattgtttgaccccaaaaggtcgaggctgcagtaacctggaatcgggccactgcactccaggcgacgcggcncggggtcaacccggccgca

SEQ ID NO: 98691 - DNA, 371 bp, Homo sapiens
ctctattaccaggccctatgcctaacacatagtaagaacatcataagtcatttgttgcttgaagaaaaaacaaaagagtgaagactgatttttaatttactctttgtggtttcctatatttcccagttttctacattgggcatttatttctattataatcatacattgctgatgatattaaaaactagaataatggttttgctagtagattaaaaggcttaaagtccagggctgggtgtggtggcccacgcctgtaatctcaggattttgcaaggccaaagcgggcagaccacttgagctcaggagttcaagaccccagtccggacaacatagggaggccccatctcaattattaaaaaaaaaaaacaagg

SEQ ID NO: 98692 - DNA, 426 bp, Homo sapiens
  misc_feature (1)...(426): n = a,t,c or g
cggacgcgtgggatttaatttgatttacagagcggagtgtgttcttataaaaatatttaatgacattggttcttgtcttttgatcttttatttctgaaacactcaaacaccttacaaagtgctgagtaggtaatagtgacccaacttgtttgctaaatgattatttgtttaaatctgtacagttttaagtgttcacttatacaaagagtgtatatactttcaaataatttaaaatgctttatattatttggctagaaattgctgtttttaataaatgtgaattttttaaaaataaagatttttgcttcctannnaaaaaaaaaaaaaaaaaaaaaaaaaaaaaaaaaaaaaaaaaaaaaaaaaaaaaanaannnnnnnnnnaaanannnnannnnnnannnnnnannnnaaannnaaacccccctt

SEQ ID NO: 98693 - DNA, 437 bp, Homo sapiens
aaaaaaactcccattaaaaacaaaacatctttgtgttttgaacaaaggaattttcaatatttgattggtattctgttctgaagtctaggatatttttcagcctataaagccccctgttttatgcccttctaattctgatgtttgggtattgtgtgagtgcatgtgtttttttttttttttttttaaagcgggggggaccaaagggaaataaagcggggcctgtgacctttaaaaaaaaaaaaaaaagaaaaaaaaaacataaaaaaaaaaaaaaaaaaaattgggggggggggcgttttaaaaatttcctgggggggccccaattttaggggggggggagaattttttttttttttttttggggggggagaataaacacttcttggggttttttgagaaaacactttttttgggggggggaaaaaaaaaagaaacaa

SEQ ID NO: 98694 - DNA, 401 bp, Homo sapiens
  misc_feature (1)...(401): n = a,t,c or g
cccacgcgtncggtaaagctagacaaaggcccagaaattatactgtaaggaaatgttattgggagctgattgccagagcagaccacatatacagcaggatgtgcctgtggcatgaagattatctttctcttttttttttttttttttttaaaaggggggttttttttttgtgccccgggtgggggggaacgggatgaatttgggttattgggaccttttgcttccaaggtaaaagctttttttttgtttaacctttcaagaaagggggaataaaggggggggcccaaataattttggttttttaaaaaaaaaggggttttccccttggggccaggggggtttttaaatcccggccttaggggaaccccccccctgggccccccaaaggggggggaaaacat

SEQ ID NO: 98695 - DNA, 414 bp, Homo sapiens
  misc_feature (1)...(414): n = a,t,c or g
cccacgcgtccgcccacgcgtccgagataaaaaaaaattttaaaaaaaaaaaaaaaaaaaaaggggataaaaaagggggagtttatatagaggggaaaaagaggggggatggataatgatggtggtagtggagggggggggggggggttttttgtgtgggggggggggggggtttttttgtgggggggggggggatgttttttttttttggggggggggggggtttttttttggggggggggtgtttggggggggttttttttttttggggggggttgtggggggggaaagttttttttgtttggtggggggggggtgggggtaggtttgtttggggggggggggggngggggnggngggggtgttttgtgggggggtgaaaaaggggggngggaagnttttttgttggggttg

SEQ ID NO: 98696 - DNA, 434 bp, Homo sapiens
  misc_feature (1)...(434): n = a,t,c or g
ctttagaaatatccttttagaagcagcgagtgcatgggctaattatcatcaatctttatgtatttgttaaagaaacatctacaggatctttattggtgaccttttgtaagacattagtttgaggtactacctatgtacttgaaaataataaagtggcatttctttatgaaaaaaaaaaaaaaaaaaaaaaaaaaaaaaaaaaaaaaaaaaaaaaaaaaaaaaaaaaaaaaaaaaaaaaaaaaggaaaaaaaaaaaaaaaaaaaaaacccccnnnggggggccccccaagcaaacccgggggggggggcccccccccccgcggcagggggggaaaaaacttttttttgtgtggggccgataataaaaaaggcgtggggggttgaaaaaatccttcttttttggggggggatataaggagacaaccccccctccca

SEQ ID NO: 98697 - DNA, 403 bp, Homo sapiens
atcacttgaacctgggaggtggaggttgcagtgggccgaggtcacaccattgcactccagcctgggtgacgagagtgaaactccatctcagaaaaaatgaaaataaaaaataaaaggttgtgttattttttacctttattttttggaggcctatttggtattgtggaaacattttcaaattcagagaatcaaaaaacaataaaatcacccaaatcctgtcaactaaaggtaaccactgttaatattttggtgtctgtctttgtgtattattttctactctgagaaatacatctaaacctattgtcttatgtttattaagtagaattttaccattctttttgttgataaactgcttatctcatttcccaatgaaaagcttatatacttatttgtaactttaaat

SEQ ID NO: 98698 - DNA, 497 bp, Homo sapiens
  misc_feature (1)...(497): n = a,t,c or g
gggagggcccggggantttcccctagnagtcgcgtcagngatcntcgnancnncncganccangcgtncggctgcttttcattcaatttttaccatgtgccagcaccaaacgggctctgtgcaaagtactagctcatttaactgttataataactcaaaagtaggtgttactgttattatatttttaacagactagacactattatattaatattaccatatttctttaattcaaagatacattttcaatcaatatgtaccaatggtatcaattgatacagttgtgcccctctaccccctctagagccnnnnnaaaaaaaaaaaaaaaaaaaaaaaaaaaaaaaaaaaaaaaaaaaaaaaaaaaaaaaaaaaaaaaaaaaaaaaaaaaaaaaaaaaaaaaannnnnnaagaggggggggggttttttaattattttgggggggggcccaacattcgggggggggagaaaaattttttttttttttttaggggggggg

SEQ ID NO: 98699 - DNA, 360 bp, Homo sapiens
gatcacttgagtctgggaggcagaggttgcagtgagcagagatcgtgccactgcactccagcctgggtgacagaacgagactcagtctcaaaaaaaaaaaaaagttttagggccttggatatatttttttttaacgggaaaaaaatattggggacccttaggggaaaaaaccaaaaaccgcccagggaagtaagttcaggaaattacttccattttaagggcctatttgggccttgctataaatgaaagttagtcccgatgttttgaagatgtcttcccatcaaatggaccagccaaatggccactaacccttgttgcaggctgagaggcccaaaaccaacctggttatattttttgagg

SEQ ID NO: 98700 - DNA, 297 bp, Homo sapiens
tcaaactcctgaccttgtgatccgcccacctcggcctcccaaagtgctgggattacaggcgtgagccaccatgcccagctaagaaaatagttttatatatcttgattgataaaataatttaactgtataaattacttataagtcattaaaaataaggtaacgacgatgatgatggttaatatttcccaagcactttgtgctattagctttttggattattcatttactttcacaataacttatgagggcgttattatacccattttacagatgaagaaactgaggtcgacgcggccg

SEQ ID NO: 98701 - DNA, 347 bp, Homo sapiens
ggctggagtgcagtggcgtgatctcggctcactgcaacctccgcctcctgggttcgagcaattctcctgcctcagcacaatgcctaattttttataggcaatcaataaatgttaaagtaactgaatctccatctgctgtagattggattactgtttccaactgcccactccctccctgtaacgaagttacaacttccccctctgccccctagtcacaggatgtgcccttgcattaagtgggaggtcacttctccacctccctgaccttggcaccctcagccaattagatggaggcaaacatggcatcttccccaccttgcactccagccctttcccatgagaacagc

SEQ ID NO: 98702 - DNA, 363 bp, Homo sapiens
ctcatgagtgcaagacgtcttgtgagggaattattatacgaatgggggcttcaatcgggagtactactcgattgtcaacgtcaaggagtcgcaggacgcctggttctaggacatctttatatattcatggcatacacacacacacacaaacacacacacacacacacacacacacatacatgtggccttgatgcctcatacattgcaactattttcttataatttgttgccattcagctttatggcaccctttttatatataggttttaaattttgaagctgtcaaataaacaggtcttctctgttatgctatttatgtctaaatgaaggccttcctgaccttttggctgtaaacatattctc

SEQ ID NO: 98703 - DNA, 362 bp, Homo sapiens
attctgctgcctcagcctcctggatagccgggcgtagtggtgggcgcctgtaatcccagctatccaggaggctgaggcagcagaatcgcttgaacctgggaggcaaaggttgcagtgagctgagatcgtctcaaaaaaaaaaaaaaaaagaagccttttggttcccaaaaccaaaacttaaacccttccacaaaaaggaaattattggggtcccaaaaaaatggccccccttttagagacaccaaaaaagtggggagggttcaggggaaagggctaaggccggtaacccaaaggtttggggaggcctttggggaaaaatcacgggaacccaaaagttaaaaattacctggggtaataaaaaa

SEQ ID NO: 98704 - DNA, 155 bp, Homo sapiens
  misc_feature (1)...(155): n = a,t,c or g
gctgtagagacagggttttgccatgttgccaaggctgctcttgaactcctgcactcaaacgatccgctcgcctcagcctcccaaagcgctgggattacaggcatgagccaccgcgcctggccctctttattctctattctctcgncgaccggccg

SEQ ID NO: 98705 - DNA, 373 bp, Homo sapiens
  misc_feature (1)...(373): n = a,t,c or g
ggggtttcatcgtgttggtcaggctggtctcgaactcctgaccttgtgatccgcccgcctcggcctcctaaagtgctgggattacagacgtgagccaccgcgcctggccagcatataaatttcaactgaagcaatgggagtggaggaaatggaccaaggagagcatatagatagagtagaaaacagccagaggagaaccccacagcacctcaacatttaggctaagaaaagaggatgggctttgcgcggnggntcacntctttnnncnnttttctttttttgttttttctttttcttntttttccctttctcttcttgttttaatcttctttatcttcggtggtgtcgtcgcgttgcttgtttaccgatactt

SEQ ID NO: 98706 - DNA, 408 bp, Homo sapiens
  misc_feature (1)...(408): n = a,t,c or g
gtcccatctgtcctgaccaagaagctggcttaccaagagtgatcaccacaagggtccctcaacttcacagtgtatccgatccatcatattccctgcgccccctcccgagactctgatttagcaagtctgatgtgggcttatctagattctgtaaataaacacacaaaaaactcattaggtgctgattctgaagctcgtccatgtttggaaatcaccatcctccttcatgggctatggcagtatgctccttattggcctctaaattgtgctactcaaagtgtgatccatgtaccagcagcatgatcatcacctgggaacacgttaggctgggcatggtggttcactcctgtaatcccaacactttgngaggtcaaggcgggtggatcacctgaggtcaggagtttcaga

SEQ ID NO: 98707 - DNA, 414 bp, Homo sapiens
ggctactctggaggctgaggtgggaggatcattttagcctgggaggctgaggctacaggaagccgtcaaccactgcacactcgagcctgggcaacagagtgtctaaaaaaaaaaaaaaaaaaaaagggggggggccttttttaggggcgagtaaacctttgttgggttgggggggaaaaagaaaaggaaaacggccgatttttttcaaacttaaaaaataaggcccaaggaaattcgaaataacggggggtcccaacagaggaaaagggcccaactagggaaactggaacaaacaaaccctgttttaaactttaaggcccccttttttggggagcagggggattactataaaagctttttcaaaacctgcttggataacttaccccgcaggggcaagggagtttttttttttag

SEQ ID NO: 98708 - DNA, 377 bp, Homo sapiens
  misc_feature (1)...(377): n = a,t,c or g
atactccaggctgggtgacacagcttgaccccgtctcanaaaaaaaaaaaaaaaaaaaaaaaaaaaaaaaaaaaatttaaaaaaacggggggggccaaatgggccccctttttaaatttaaaaaaaaagggaattaagccccaaaaaaaaaagggatttttccaagggaaaaaaaaaagggggaaaaaaaaaaaaattcccaaaattttaatccaggggtttttccaaaaaaaaaaaaatttttcaaaaaaaaaaatttcccaaaaaaaaaaaaaaaacgggttttggcctttgggtaaaggcttctgcccaaaaaaaaaaacctaaaaaattttcaaaaacttttaactaaaggaaaccttgccttttttaaaaaa

SEQ ID NO: 98709 - DNA, 98 bp, Homo sapiens
caggagagtgcctgtgtgagtgtgtgtgcaggagagtgcctgtgtgtctgagtgtgtgagtgtgtgtgtgtgcaggagagtgcctggtcgagcggccg

SEQ ID NO: 98710 - DNA, 358 bp, Homo sapiens
gtgagctgagattgtgccattgcactccaacctgggcgacaagagtgagattgtctcaaaaaaaaaaaagggaaaaaaaaaaaaaaaattttgtgggcaaaaaaaagggaaaaaagggcaaaaaaccccccaaccccaaaaaaaaagggagcggcctgggttttaagggttttttattttcaaaattttttaaaacccgggggacaaccattatttgacagttgacccaggggttacacaaaaggggattcggggaatttagaaaaacagccccaaacgggattccaggacccagggttggagaaacccctgtttttataaaaaatacaaaataaggccggccgcggggcttcacccc

SEQ ID NO: 98711 - DNA, 351 bp, Homo sapiens
caaatatttttaatctatgtgcttacagttttaatcattaaatttacttaatttatttaaaatagaaagtcatggactttagtcttcattttaagaaatcaagttactttcttgttctattctacacttgttttgtttggcttcatttgggaatataacattgtgtttattagtttatttcaaaatatatttttctaagtggactgtttgaagtttctttaaaatttttaattcaaattcttgaactaaacaatgaattaaactaggccgggtacactggctcacgcctgtaatcccagcactttgggaggccgaggtgggtggatcatgaggtcaggagttcaagaccag

SEQ ID NO: 98712 - DNA, 341 bp, Homo sapiens
cgattatcccacctcagcttcccaagtagctgggactacaggcacacaccaccatgcctggctaatttttttttttttttgggaaaaaaaaaggcctggcctttttgaaggctgaaatgggggagttaaaaaaatcctccggcctaaccctccaaaagggggggaataacaggggggagcccccgcccccacccaaaaaaagtttttaaaaagttttcctgggaaaaaccctgataagcaaaggcaaaccccgtaaaaaatattggcaccttatttaaaaaacaaggggctaatccccctaactttaaaaaagctggaaaagccaaggcggccggaaattc

SEQ ID NO: 98713 - DNA, 345 bp, Homo sapiens
gttttcaccatgttggctaggctggtctggaactcctgacctggtgctccacctacctcagcttcccaaagtgctgggattataggcatgagctaccatgcccagcccaaccctttcttaatgtggatacttggacataatttttccatttttttttcctgagcctgtagattcttaattaataatagactttaagggtttattgccaaaggaaaggtttggaacttttataacaccagatttaatgctttaatttaaaggggatttcagggcctaacttgcacatttaataaaaggatctcctgtttgaccagcatgaagtttgaccttaccagcaggtacagg

SEQ ID NO: 98714 - DNA, 327 bp, Homo sapiens
cttaactgaattcggtgatacgctatcaaatctcaggattaaggacgtcgtattacatcaaatcattacaggaagtatgactgtatcagcggctttttacaaaaacaaacctccagacccttaccagaggcagcgagacaaatttttttttctgtgggtttttttattgaactttttgggggggggggggggggttttttttttttttccgggggggggggggccccaaaaaccgggggcgagactttggggggggggggggggtaaataacccggccccaaaatcccaatttatagaagggggaaagtcaaaaaccccccgcggcc

SEQ ID NO: 98715 - DNA, 342 bp, Homo sapiens
  misc_feature (1)...(342): n = a,t,c or g
cctgggggttaccctggcaagcaactcaagcccctatagccttttacccctattcttaactcctatccccaccagaccaaggccacccaaattttacaagtattaaatatggcttctacttggcattactaaaggcaaatccttaagaagtggatctctctcagaagttctgatactattctgttctctggtattaccacaccagtattcattaaatcacctacagaaataggccagatttgggtgtggttgctcacgcctgtaatcccagcactttgggttgctggggcaggaagatcatctgaggtgaggagttcgagaccaggtcgacgcggacgcgan

SEQ ID NO: 98716 - DNA, 159 bp, Homo sapiens
gttcagcctgttagggagctctgtgggtaggctggagggcactggcacgatctcaactcactgtaccctcccggcttcaagagattctcctgcctcaaactacaggctcacgccaccatgcccagctgattttttgtatttttaggtccacgcggcccg

SEQ ID NO: 98717 - DNA, 145 bp, Homo sapiens
tctcgctctgttactaggctggagtgcagtggcacgatctcagctcactgtaacctcccgggttcaagtgattctcctgcctcagactacaggctcacgccaccatgcccagctgattttttgtatttttaggtcgacgcggccg

SEQ ID NO: 98718 - DNA, 339 bp, Homo sapiens
  misc_feature (1)...(339): n = a,t,c or g
gtggtccgaaaagaagggatacggtttgagaaagagaaatccaaggacttcaagaaccacgtgatcaagtaccttgagacactcctttactcacagcagcaggtatgtaagttgtgtgtgaccttcatcctctactgcctgctccaaaggccagctgcctcctcggggcttctgcaacaagatgtgcaggccctgcttctgaggggctgggccctcctatagtccatcattgaaaataggtcctgctgctctgacatggagcatccaacagggtcttttaccaagcaggagggcccaggtctgctgccctcattctgaggtgagttagtttttgaggan

SEQ ID NO: 98719 - DNA, 344 bp, Homo sapiens
aacgggcgcctcctcccctccttgcaccggcccttcctggtctttgaataaagactgagtgggcggcataaaaaaaaaaaaaaaaaaaaaaaaaaaaaaaaaaaaaaaaaaaaaaaaaaaaaaaaaaaaaaaaaaaaaaaaaaaaaaaaaattttttttgggggggggggggggggcccaacccccccataacaaaaggggggggaggaaaaaaaaaatcctcccacgggggggagtgttttttaaaaacaaagtatgcccaccgtttccctccgggggggagaaaaaaagggtctttttaaaaaaaaaaaaaaaaagaatggggtgaaaaaaaaaaaaatcct

SEQ ID NO: 98720 - DNA, 268 bp, Homo sapiens
ggtttctccatattgggcaggctggtcttgaactcctgacctcagatgatccgcccgcctcggcctcccaaagtgctgggattacaggcatgagccaccacgcccagccctgacccatgttttgaaccaaattccagccacccttttatctgcaagcattttggagggcatcgcaatactgcagacccacctaacacaacagacaattccttcatgccaccgaaggcctggtgtgttcacatttttaatagtttggtcgacgcggccg

SEQ ID NO: 98721 - DNA, 290 bp, Homo sapiens
gaacaatgatcggatgtcagaggaatctgaactcctgcccacccaggaggcttctgggagtgagaaggtccaccccgaggcatctgcccagaggactgggcagcatacactctcacatggaagagatcaaaggctgacccggcttcagtcctggccacaccctgacccctgcctttacccataggcgccattgctgatgagcttaatggtctcgaagtcctcttcagagggtgtctttttagatggcagagatgccccatggccctcaatagaatcagtcgacgcggccg

SEQ ID NO: 98722 - DNA, 336 bp, Homo sapiens
aaagtgaccacttaatgctcaacacaagggccaagactagaacttcccactttcagtcatttccaagactgggatgtgacctcagaaaaaggtccagatagaaggcggctctaacagtcagagagtatggatatttgctggggtaagaggtcttattgccagcagccacaaaacctaactgttaagactgcaggcaggctttggaatcaaattaaactggatttttttttttttttgaaagggagtctcgctctgttgcccaggctggagggcaaaaatgcgatttgggcccactgaaacctctgcctccggggggcaagcgattttcacccctaa

SEQ ID NO: 98723 - DNA, 335 bp, Homo sapiens
gttagcggagatggggtttccttctatgaggcctttgccttcgtctcccacaaccacaccatctgaatagccaaagcagatgagggtactcctgagaacggggatccctccacggcggatgtccacacctccccactgattctcacggatgacattttctgtgatgaggcctttgccgttctcattcactgctatgccggcagcacggcccttgaagatgtggttcccgctcacaacggggtttccgtggtacaggatgtaaatgccagcctccttattggaaaagatttgattgttccggatgatgcctttcccattgccaaggacgacaatgc

SEQ ID NO: 98724 - DNA, 343 bp, Homo sapiens
gtcgacgcggccgcggggaaattggcgttaccaagatgcagtaaacttacaggtatgaaaccactgaaaagtttcccattccactatttttttttggctgtcaattatgagaattccaggattaggggaattaaatgttaaaaacgtttacatattgacatactgctgctgtatcgaatttagctctatttggatagatttaactattttaccttggccttcatagaactatgtaaaagaaaagcttattcccacttggaactggatggtcagtattatggattctactgaagctcaattaccttatggttctgcattaacatctgttgttgatcctggacag

SEQ ID NO: 98725 - DNA, 376 bp, Homo sapiens
  misc_feature (1)...(376): n = a,t,c or g
ctcagcctcccaaactgcagggattacaagcatgagccactacccccggcagattatcttttaaattatagtatttttgcatgagattccatgtccaaaattttcttttgctcatttttgtgtgaatttaacttttctgaacatttagaaggaaggttggtttaagcaacatttgtatctttaggagttttctgttctgctgttattctcttgtattttaaaaatatgatgaaactggacctttctcttacaccacacacaacaatcaactcaaaatggattaaaaggctacatacaagacctgaagccatcaaattcctagaagtaaatatagggaaaaagttctttgatataggccatgagataattnttgtcg

SEQ ID NO: 98726 - DNA, 356 bp, Homo sapiens
ctcctgacctcgtgatccgcccacctcggcctcccaaaatgctgggattacaggcgtgagccaccgcgcctggccataaagttgttttttagtctctactttaagttcctgacaacccaggcaggaccaagactccctaatgtaattggaaatgagatcagcacattggcacaagttctacaggttaacgggaaaaaggagccctacaatctgcttttagatgccagggagcctggctgggccttatcttgattactgactgatgccactggtaggactaagttctttgatctatgatgtttgaaagccaaaaggaaatgtgtcttaaaggaaaagggacttcttctagaccctcg

SEQ ID NO: 98727 - DNA, 379 bp, Homo sapiens
cttttggttcttcttgccctgagtagttaggaataggacaaccattccacctactggtctgtgatgattcagcaggaactactgaaagtcagatgattggcaccgagacccagggtatcaagagcacaagttggtagtgttatctgaatggaattatctggttcattttacctttgaacttacagcatttgttttttaacactatcctataacccactttccaaagtgtgggtgaaacagggagcttgttaaaaatgcatattcttggtccgggtgcggtggctcatgcctgtaatcccagcactttgggaggccgaggcgggcggatcacaaggtcaggagttcaagaccagcctggccagtatggtgaaaccccatt

SEQ ID NO: 98728 - DNA, 385 bp, Homo sapiens
  misc_feature (1)...(385): n = a,t,c or g
tgaactgagatcacaccactgcactccagcctgggtggcagagcaagactccatcacanataaaaaaaaaaaaaaaaaaaaaaaggaatctcaaggattgaaagactgacccattgcggtgttatcacgtccaaaaaaagtaggcatgttcacatactgttttgagagaattaggaaaattttatgagaaagttatttggaaaacatacaaaattaaatgtatttttccactcattttcaaaatgtactttagcacaagaggcctggtgcatagtatatatgagaagtatttaaatgaagggatcattttgtatgatttttcttacaaattcattaaagtatttcaagtaatatagaataattatttaaccagtgttgcaatggn

SEQ ID NO: 98729 - DNA, 317 bp, Homo sapiens
  misc_feature (1)...(317): n = a,t,c or g
gcaggggnnnnngggggagggnnccgnnnnnnttatgantactatgtctcgtgaccgaccgtcggataagacgtggacctataaccgcagtaatgtggtgatgccggatgatggcgcgccgttccgctacagcttcagcgccctgaaggaccgccataatgccgttgaggtgaactggattgacccgaacaacggctgggagacggcgacagagcttgttgaagatacgcaggccattgcccgttacggtcgtaatgttacgaagatggatgcctttggctgtaccagccgggggcaggcacaccgcgccgggctgt

SEQ ID NO: 98730 - DNA, 525 bp, Homo sapiens
  misc_feature (1)...(525): n = a,t,c or g
aggggnatgganttatgcccgcctgcaggttaaggcagaggctgcgtataagaaagcagacgacatctggaatctgcgcaaggatgattattttgttaacgatgaagcgcgggcgcgttactgggatgatcgtgaaaaggcccgtcttgcgcttgaagccgcccgaaagaaggctgagcagcagactcaacaggacaaaaatgcgcagcagcagagcgataccgaagcgtcacggctgaaatataccgaagaggcgcagaaggcttacgaacggctgcagacgccgctggagaaatataccgcccgtcaggaagaactgaacaaggcactgaaagacgggaaaatcctgcaggcggattacaacacgctgatggcggcggcgaanaaggattatgaagcgacgctgaaaaagccgaaacagtccagcgtgaaggtgtctgcgggcgatcgtcaggaagacagtgctcatgctgccctgctgacgcttcaggcagaactccggacgctggagaagcatgccggagc

SEQ ID NO: 98731 - DNA, 430 bp, Homo sapiens
tttcgtgcactccagcctggcaacagagtgagactccatcttaaaaaaaaaaaaaaaaaaaaaaaaaaaggggttgggccccatctttttaaaagggttcccaaaaaggggaagggaaaaaaccccttcccattttttttttaagggccggttttcccccaatcccaaaaaaaaaacctttccaaaaaaaaacccccccccccaatttttttttggggggggggggcaaaaatcctaaaaaaaggccccccaactggtttttcccccctttttgggggggggaacccccggggggggtttttttcggggattaaaaaaacggtccaccccccccaaaaaagggggggaatggccccttttcccgggggggggaaaaaggcccctttttttttttttgggggcaaaaaagcttttggcaaaaatccccctt

SEQ ID NO: 98732 - DNA, 401 bp, Homo sapiens
tcatgtcctccagagcatcttcatcagtttccctgtctgtaaaatgagtgtttgtattagtttcctgtggctttttttttttttttttttgggaaaaaaaatttttttttttttgccccgggggggaaaaaaggggaggattttggggccctggaacctttgtcccccagggtaaagggatttcccggggcccccccccaaaaaattaggattacgggggcccccccccccccccaattttttttttttttttaaaaaaaaaaggtttttcccttgggggccaaggggggtcaaaaccccgggccttggggaacccccccgccccccccccccaagggggggggatttttgggggggcccccccccccgtggcccaatttgttttttaaaaaaaaaaaaat

SEQ ID NO: 98733 - DNA, 428 bp, Homo sapiens
  misc_feature (1)...(428): n = a,t,c or g
cggagtctcactgtcgcccaggctggagtgcagtggcatgatcttggctcactgcaagccccgcctcccaggatcacgccattctcctgcctctacctgcacgacaacacataaaaaaaaaaaaaaaaaaaaaaaaaaaaaaaaaaaaaaaaaaaaaaagggggggggcccaaaaaaaaaaaaaaatttttcccccgggggggggaaaaaaaaatttttttttaatggggcaaaaaaaaaaaaaccgcgggcccctgttaaaaaaacgggggaaaaaaaaaaaggggggaaaaaaaaaaaaaaatgttttgaaaaaaaccccttttttgggggggggaaaaaaaaaaaaaaaaaacgnnnnnnnnnnnannnangnnngaagaaanaatnnntaagaatgggtagtttataggcaggcaaaagcatct

SEQ ID NO: 98734 - DNA, 396 bp, Homo sapiens
aggttgcagtgagccgagatcgtgccactgcactccagcctgggtgacagagggagactccatctcaaaaaaaaagtgagttggggagggggtcaaccatgtttctcccatggatagggtggcttttggtactcatggacatgtcctttcatctttatgtctgaaaaatactaattccttcattcattagttattcactgagtgcccactgtatgctagccactgtgctacttggggggtatagagaagacagaggtcttgctttcatggagcttatattctacttggggagatatttttaaaaagtacattttgcattctggggctgatcctttgtttttttttttttttaagggaaacaggtggtgaatgtcaaccaccctgtgacactgaccc

SEQ ID NO: 98735 - DNA, 444 bp, Homo sapiens
aatacatgtcctccactcaattgtgagcacgacagctgaaaattcacagccatagtgccactcaataaatatttatagaacaaataaatagattaatggtcacaatagtattttttattaaaagatacaatctataataaaatgtttgacaaatgcccttaccagttggtgcatgctccagactttagggcagagaataggattgctttagggggaaaaagtcactttgatattaggagcatagaaagagttcttacgaattcttgttctagtctttaccatcttgggaagaaagggggtttggaatgaaaattgaattcatcagccagtttgtgtggctcacgcctataatcccagcactttgggaggccgaggcgggcacatcacgaggtcaggagatcgagaccatcccggccaacatggcgaaaccccatatccactaaa

SEQ ID NO: 98736 - DNA, 413 bp, Homo sapiens
tttcgttttatcgaggatttattcctgtgcttcagacggtaacagttctaattatcggagacccatcactacatggcgatgcttggtcgtggatggaattcttcctcaccgtgattttcattgctctttggatgctccccttgattgggcttaccatagtggtgaatgccatttggtttcaagatatagctgacctggcatttgaggtatcatggacgaagcctcacccattccctagcgtcagccaaataattgctgacatgctcttcccccttttgctgcaggctcttttcctcattcagggaattgctgtgagtctctttcccatccatcttgtcggacagctggatagcctcctgcatatgacccttctctactcactgtactgctctgaatatcgtctggtcattaat

SEQ ID NO: 98737 - DNA, 409 bp, Homo sapiens
gctggcgagaagacgacagaaggggatggactcagcatatatgaatattttcacagggcagctgaaaggacttgcagattgactggatgtggggggaaggaaggaattttaggatggcccccacgcttcctgccttgaaagtcactatctgtgtcacagaaatgaaagcaggggtgctcaccaattcaacacgtttattgggcactgagctatatgtatgaaattgtgccaaagatgtgctgacttaattttccccaaatgcccgacccatggatgctgtaaagaaatgctgatgctgggcgtggaggctcatgcctgtaatcccaacactttgggaggctgaagtgggaacatcgcttgagcccaggaagtggggaccagcctgggcaacatgccgaaatttcgtctg

SEQ ID NO: 98738 - DNA, 398 bp, Homo sapiens
  misc_feature (1)...(398): n = a,t,c or g
aatacaggggaggctgaggcggctggatcacctgaggttgggaattcaagaccagcctgaccaacacggaaaaagcccgtctctactaaaaatacaaaattagccggatgtggtggtgnccccccnnattccccgctctcttccgagtctgacgcgtgtgccctgtctggccccggcctgcgccagattcgatattcctctactggtcccactccctcggccttgcttcccggcgtgccttgtgtgcgcgcatgagcctccatatgcgccctactggcctccgctcattcctgcctccattcttctcggcctctcctgtgctggtacttgcactggttgcctgttggctctgtctgcgcactcactcttctgcgtcggtatttccacctcccccgcct

SEQ ID NO: 98739 - DNA, 437 bp, Homo sapiens
  misc_feature (1)...(437): n = a,t,c or g
agctgggactacaggcgtttaccaccacatccaactaatttttttattttttgttttttttttttacaaagggggtctcgctgggttgcccaggatagtctcaaactcctggcattaagcaatcctcccgccagggcctcccaaagggctggcattaaaggggaaagccaccaggcccggcctatttttggggcctgtttttttttgcctcccggcaggcaggtctgaccgctggatgcatgtttgctgttcgtgtctttcccacaccaccgtgcacgtggaaggggctccaaaggcttttattattcgggcgttggggcgcgctgtaatcccagctacatgggaggctgaggcgggagaatcacttgaacccaggaggcggaggttgcagtgagctgaaatcaccccactgcactccagcctgggtgatccaaaan

SEQ ID NO: 98740 - DNA, 416 bp, Homo sapiens
  misc_feature (1)...(416): n = a,t,c or g
cccacgcgtccggtgtgagcccttctcactggattttatacccttgtgtctgtgtacataaatatatatacatatatatatatatataaaaactttgtacaaaaggcanaaaaaaaaaaaaaaaaaaaaaaaaaaaaaaaaaaaagggggggggccttttaaaaaaacccctgggggggccaaattttaccggggggggaaaaaatatattttttttttttaaggggggtaaataaaaaaccccgggggaattttgaaaaaaaaactttttttgggggggggaaaattttggccaaacccccccaaaaaaattaaacccttggaggaaaaaaaaaatttttaaaggggaaagggggaaaaaatgccttctatttcttgttgtaaaaaaattgggcccnctttattgaacaacatag

SEQ ID NO: 98741 - DNA, 398 bp, Homo sapiens
ttttttataagtaatagtcttaaatttcttcacaggtagagcactagtttgcccccaaagtcataaatttgtctctctctctttctgactgtgcatgtctgtgtgtgtgtgtgtgtgtgtgtgtgtgtgtgtgtgtgtgtatgtgaaatggtctttggagtctccataccatgtaattaaagctatgggcaaaacccatgccttttgtatttttgaagcttattgtaaaagacgtgtggtggagatccccacacccacttagtggcgcctaatgataaaagagccccatactctcctgttcacttatgttctctgcgcctaaaaggatatagaggttaagagtacatgcagaccttatttttggaatggaagtctctaagacacccactttaccctaa

SEQ ID NO: 98742 - DNA, 402 bp, Homo sapiens
cggacgcgtgggctagttctagatcgcgagcggcggccctttttttttttttttttttttttttttttgggggaaaaaaaaaaatttttttttttttggaaaaaaaaaaaaaatttttttttaaaaagggtggggggccttttcccggggggggggaaaaaaaaaaaatttcttttttttgaaaaaaaaattttaaaaggtttttttttaaaaaaggttttttttaaaaaaaaaggggcccgggttttttcctttaaatttaaaaaaaaaggggttttttattaaaaaaaaaaaaaaggggggggcctttttaaaaaatccctgggggggccaaattttcccgggggggggaaaaaaaattttttttttttttgggggggggaaaaaaaaccccgggggggt

SEQ ID NO: 98743 - DNA, 406 bp, Homo sapiens
atataattcttttcaagtgctgggttataaaataagtttcaataaaaatctaaggctttaaattatactaagtatattccatgaccataatctatcaaattaaaaaccagcaataacaacataactagcaaatgcccaaatctttggaaactaaacaacatatatgtaaataacccatgggccaaataaatcttaatgaagattagaaaatatttttaactgaaggataagaggagtacatttcaaattttgtgatttaaagctaaagacagtgtgcacacgattttttttttaagacagggtcttgctctgtcactcaagctgcagtgaagtggcagaatcacggctcactgcagcttcaacctcttgggctcaagcaatcctcctgcctcagcctcctgaatgg

SEQ ID NO: 98744 - DNA, 403 bp, Homo sapiens
  misc_feature (1)...(403): n = a,t,c or g
ctcagaagcccgtgtctcagtgcaggtggagccgtggggacagcgtgaaggtgtctccagccaggccccaggcactgggaggccctgggtctccccccagccacacccagtaggtgtggaggataaaggcttctgtggaaaaaaaaaaaaaaaaaaaaaaaaaaaaaaaacaaaaaaaaaaaaaaaaaaaaaaangggggggggtccaacctggacctcatgatgggggggggggggggttttaaaaaaaccatatccgggcctttttgtggagggagggttatgagaaaatatttttttttttaagagaaaaaaataaaattcccctggggcttttaaaaggacacacactttttggggggggaccaactgggggcaaaccccttttttttttttttttttt

SEQ ID NO: 98745 - DNA, 407 bp, Homo sapiens
cctgacctcatgatccgcccgccttggcctcccaaagtgctgggattgcaggcgtgagccactgcgcccagcctgagtattaggctctttagagttagaagaaatctttgttataaccctgttcaactttccacctaaaataatcttttttttttttttaacatctctcaaagggctaggataacgggggggacccactgcccccgcccaaaaaaattaaaaacggtctttccataagggggggggccaggtacctgggttaaaacatggaaatttgaccaggggggcaaaggccatgggtttgaccttcatgagaataaggatcttttttttttttttttttggaaccagccccgccccccttttaaaaaaaaaaataaaaaaaaaaaggggcgcggagggggggg

SEQ ID NO: 98746 - DNA, 383 bp, Homo sapiens
  misc_feature (1)...(383): n = a,t,c or g
agggcacacagcagcaggcagggaggaggcggaggtggcaaataaacctgggcaattttgtttatacaaaaaatagaaaaaaagttccaagttaaaaaaaaaaaaaaaaaaaaaaaaaaaagggggggggccgtttaaaaaaacccttgggggggccaaatttaacgggggggggaaaggaaaaatttttttccttttggggggggtttttaaaaccaacttgggaattttggaaaaaaaacttttttttggggggggaaaaaattggaaaaacccccccacaaaaattaaaggctttagggaaaaaaaaaatttttaaggggaaaaaggggaaaaacaacctcaattggctgggggttaaaaaatgggnnnnnnnnnnanan

SEQ ID NO: 98747 - DNA, 364 bp, Homo sapiens
  misc_feature (1)...(364): n = a,t,c or g
cacactccagcctgggcgacagagtgagactccgtttcaaaaaaaaaaaaaaaaaaaaaaaaaaaaaaaaaaaaaaaaaaaaaaaaaaaaaaaaaaaaaaaaaaggggggggggttttttaaaaaatcttgggggggggcccaaaatctggggggttgaaaaattttttttttttttttttggggggggttataaaaaacccctggggttttttttggaaaaaattttttttttgggggggggaatttgggcccccccccccccaaaaaaaattagcttttggggaaaaaaaaaatttttttggggggggggggggaaaacccccctttttttttgtgggggaaaaaaannnnggggggnnnnc

SEQ ID NO: 98748 - DNA, 400 bp, Homo sapiens
cccacgcgtacgctttacttggtaaaactaggcttaatgggtccagctgaaatttttttatcctcttttcaggaaattcgccttattgattatgataaaatggtggatcatagaggagtacgggtagtggcatttggacagtgggctggtgtggcaggtaagtatgccagggcttacatcacccacttcctaaattggcttggggaataactgagagtcttctcttttctgctggccggggataggagagtttatttccatggaacaatggaaaatgaaagcatgctgtatgctgatggatacatgaggaataaagtatgaagatacatggtaaaaatattttattgcggaaattcaaaaaaaaaaaaacggtgcccggtgttaagggtccctgcggggg

SEQ ID NO: 98749 - DNA, 394 bp, Homo sapiens
cccacgcgtccgctttacttgttaaaattaagcttaatgggtccagttgaaatttttttatcctcttttcaggaaattcgccttattgattatgagaaaatggtggatcatagaggagtacgggtagtggcatttggacagtgggctggtgtggcaggtaagtatgccagggcttacatcacccacttcctaaattggcttggggaataactgtgagttttctcttttctgcggcaaggggataggagtgtttatttccatggaaaaaattaaaatgaaggtatgctgaaggatgatgaatacaagtggaataaagtatgaagataaatggttaaaaatattttattgcaaaaattcaaaaaaaaaaaaaaggggcgcccgtttaaaagaaccc

SEQ ID NO: 98750 - DNA, 420 bp, Homo sapiens
  misc_feature (1)...(420): n = a,t,c or g
ctctgcggggcagggccttcctggttttgtacactgctgtacccagatgcctacaaccatccctgccacatacaggtgctcaataaacacttgtagagcanaaaaaaaaaaaaaaaaaaaaaaaaaaaaaaaaaaaaaaaaagggggggggcccttaaaaaaaaacttcggggggggcaaaaataaacgggggaaaaaaaaaaaaaatttttttttaaaaagggggggaaaaaaaaaaaccggggggattttggaaaaaaaaaatttttttgggggggggaaaaaaggggaaaaacccccccaaaaaaaaaaagcccttaaggaaaaaaaaaaatttttaagggggaaggggggaaaaaaacccctaaattgggggggaaaaaaaaaatggganannannnaaaaaaccactataagggn

SEQ ID NO: 98751 - DNA, 476 bp, Homo sapiens
  misc_feature (1)...(476): n = a,t,c or g
ggggccagggccttgctccgaaaccanggacgtctggaaccgcccgaatnccgggcgacccaccgccgcgatgtctggatgataagcgcctgccgtcacgcccggtaatttttgtatttttggcagagacggagtgtgaccgcgttggtcaggatggtctccaactcctgacctcgggtgatcacccccacctcacctttccaaactgctataattacaggcgtgagccaccgcgcccgacctcttctggttttcaacatgacattgaaacactacattacagaaggggaaaggctgacaggttcaaggctcatcttcccaagtaaccgcagttttcgttgagtgtcattccagacgttccctctgcacctggcctataagtaaacagacatatgtgcatccgtgtgtttgcttcacttttggccaaacggattcgtgttctcgagctgctgcggcggccacaaggaacccggatg

SEQ ID NO: 98752 - DNA, 409 bp, Homo sapiens
tcccctcgccaggtaatggtagtttctgtgggaccattctgtgatgaatatgcccaaggggtaagccttagatatgaattgtctttcaatttaacatctgttgttcagcttttcaaatcacataagccctgtattcttggtgaatcgagctgttgtgataaagagaaatgttactatttttaatctttgttaagcctgaatggattatattacttctttaatgcttttctccatgattccataatcagaagacatatttggatagtgctttatgtacacttgtatattttgttgtatttgttttaagagatgggatctttctcttgccccaactggagtgcagtggtacagtcatggctcactgtaacctcaaactcctgggctcacgcagtcctcccgccttggcctt

SEQ ID NO: 98753 - DNA, 476 bp, Homo sapiens
  misc_feature (1)...(476): n = a,t,c or g
ggaaataaactgatagccntgcgttgatcaccgtaatnaccgggccgacccacgcgtgcgatggattcccaaaggactcgctgtgtgggctggcacatcctgctggccccgggatggatggtgtccgctgctcggagaacaggaacctgtcctgagaccctgacccgagacccaggaaggtttgggaagacagatcaaggtactgggagcataaggggaagtgagtgcagggatgaggaggaggagattggattacagatgaggaatcacggaaagcactcacctaaagttcgacagccaccaccccctgcgtttttattgccccttctcagtgctgtgtgtcactccccactcccaaaagattttgtttgattaggctttattcttctttcttttttagagacaaggtctcactctgttgcccaggccgaagtacagtggtgtgatcatggcttactgcagcctcaaactcctag

SEQ ID NO: 98754 - DNA, 402 bp, Homo sapiens
gaagtccaaggtcaaggtgctgtcaaggagatgtctcaactaagaattttaaaagaaactatgattgctcgcctacaatttttcaatgcagcctggaaaagcagagataatccacttgttctgggacctatagagggaatcctgaaagagaactggcaaaagtccacagaaaaagtagagatggggtttcatcgtgttggccaggatggtctcgatcgcctaacctcgtgattctcccacctcggcctcccaaagtgctgggattacaggcgtgagccactgcatccagccacatgtgtttaattttaaggttctttattttatggtacttgcctaacatatggtaatataaaaatggtgaatagaaaatttaacttgagatgatggctagatttatctaag

SEQ ID NO: 98755 - DNA, 412 bp, Homo sapiens
  misc_feature (1)...(412): n = a,t,c or g
atagagaccatcattgctaacatggtgaaaccccgtctctactaaaaatacaaaaaaaaaaaaaaaacccgttgcccggccggggggggggccccttttatccccattttttgggggggttggggcagaaaatgggcgtaaccccgggggggggactttgcagggaggggaaactgcccctttgctctccacctggggaaaaaaagggaaaccccgcaaaaaaaaagcctttcccccccaaatttggaaccctggggactgtccagggaacccctcactttttgttgggggaagggccccggggaaacagttggccaaaccctgggggcgttaaacacaaagttttttttgacccagcatttcttttttttatccctttgtacccccaaattaatggaaccctcactccccn

SEQ ID NO: 98756 - DNA, 238 bp, Homo sapiens
ccccccttgactcgcctgcggacccatggttattctgctcaaacgtcccggacgcctgcgaccggctgtctgccatgctgcccggtgtaccgacataaccgccggtggcatagccgcgcatcagccggtaaagattccccacgccaatccggctggttgcctccttcgtgaagacaaactcaccacggtgaacaatccccgctggctcatatttgccgccggttcccgtaaatcctcc

SEQ ID NO: 98757 - DNA, 89 bp, Homo sapiens
ttttttttttttaagacggagtctcgctctgttgcccaggctggagtgcagtggtgtactcttggctcactgcaacctccacttcccgc

SEQ ID NO: 98758 - DNA, 371 bp, Homo sapiens
cagatgaagatttctcagattttgatgaaaaagctgatgatgaagattttgtcccatcagatgctagtccacctaagaccaaaacttccccaaagcaagtatcttatctaatatgggttttgtcatgattgtttctaatatattgttttttgcttgacacatttagaattggttgtcaggatttttttttttaattctagacttagtaacaaagaactgaaaccacagaaaagtgtcgtgtcaggtatgtatttaagtaaaagtagtgagacatctgccttactgggacactcagatccaactgggttctaatcctggctacattatccaagtacttcctttggaaataaattttaggtctttttaacatt

SEQ ID NO: 98759 - DNA, 481 bp, Homo sapiens
  misc_feature (1)...(481): n = a,t,c or g
natgatcgcctgcggaancatcgccccgcctgcacgaattcggcacgaggagagagagagagagagagagagagagagagagagagagagagagagagagagagagagagagagagagagagagagagacactcgcgccgaatggcgcgcgaggctttttttttttttttttttttttttgcccgcggaccaatgtttttttataaaaccgtcgggccaaaggtttttaccccccggcggggggggggtgccctgaaaaaaccaaaagcctgttttttttcccccaagcttattgttgactcaaggtctttacaaaaaaaagatgcggggcgtgcctgttataccccccccccccccccccccgtttgtgaaggatcccccgcctcctcccccccctttgggggaaggggaaaaatttttgggggggtgtttcccccctttacagggagggggggggccccccccctttggggccgttttt

SEQ ID NO: 98760 - DNA, 480 bp, Homo sapiens
  misc_feature (1)...(480): n = a,t,c or g
ggcggcgnttnaaatgacggcgtatagatancgttacgannggacncgacaacaaaaaagacctgcttatctcggtgggcgatttggttgatcgtggtgcagagaacgctgaatgcctggaattaatcacattcccctggttcagagctgtacgtggaaaccatgagcaaatgatgattgatggcttatcagagcgtggaaacgttaatcactggctgcttaatggcggtggctgggtctttaatctcgattacgacaaagaaattctggctaaagctcttgcccatacagcagatgaacttccgttaatcatcgaactggtgagcggagataaaaaatatgttatctgccacgccgattatccctttgacgaatacgagtttggaaagccagttgatcatcatcaggtaatctggaaccgcgaacgaatcagcaactcacaagacgggatcgtgaaagaaatcaaaggcgcggacacgt

SEQ ID NO: 98761 - DNA, 448 bp, Homo sapiens
  misc_feature (1)...(448): n = a,t,c or g
actgaagtcgttagcnctngcggnggaanncaaagtaaccttgaaaactaagttgtcactcatggtgaggtgagaggtcagacatgcctccttatatcctctccctcactaaccaggatcaggctttcttccctaaggcctaaacagaaaccagccctttcaaaagactccaccactgacatcaaccaactgcctgacactgcccctccttttttgcctaataagagactaccaagcatggagtggttcttgtcagtctgtggaggaggtactgtaaaggtttttgtgtcctctgcttcacccttttttttcctctgagacaaagagcctcactctgttgcccaggctagggtgcagtggcgtgatcatagctcattgcagcctcaaactcctgggctcaagcaatcctcccacctcggcctccagagtagctgggatgacaggctca

SEQ ID NO: 98762 - DNA, 205 bp, Homo sapiens
cagggcccaatgagaatagtagaccactagccagagcggtggaattcgcgccaccacacccggctgattttagtatttttagtggagatggggtttcactttgggaggccgagggtggatcacctgaggtgaggagctcgagaccagcctgaccaacacagtgaaaccccgtctccactaaaaacacaaaaattagccgggcatg

SEQ ID NO: 98763 - DNA, 408 bp, Homo sapiens
aattctggaaattcaacaaataaataacacaggggaaggaaaactgtattccataaaatgtttgttacaaatgtttgccatagccttgtcgaagatgttgaaagatcagttcagtgaatcatgtatggtacatatacctgatcattgtcattcaggggcacaggagaaattttagctactaggagaaatgtttatggctgtgaaatgggaaaatatgcaaaactgtattccacaatagtaattgtatttaaaaaacgcatgtatgtggctgaaggttgaaaggagatactcaggaggctgaggcaggagaatggcgtgaacccgggaggtggagcctgccgtgagccgagatcgcgccactgcaccagcctggcggacagagcgagactccatctcaaaaaaaaaaaa

SEQ ID NO: 98764 - DNA, 428 bp, Homo sapiens
gatagggcccaaagcacatttaacagaagagaaacctgatggccttatcaatgaagctactaggcaagttgctttggcagatatcgttctcattaataaaacagacttggttccagaagaagatgtaaagaaattaagaacaacaattagatccataaatggactaggacaaatcttagaaacacaaagatcaaggctcagcagctgatagactcagcaacaggcagccaggagctctgaggctcacagctggcagtctagttccactcagtctctacttgagaaattctttctttggaggtacagcagaggccttagaatctcactctggtttgagacagagtctcactgtgtcccccaagttggagtgcggtggtgcgatctcggctcactgaaacctctgcctcctgggttcaggcgattctcct

SEQ ID NO: 98765 - DNA, 472 bp, Homo sapiens
  misc_feature (1)...(472): n = a,t,c or g
catcgaaatccattcccatangcagngngcnggaattcatttttcttctcttcacttctcccatccccccaaaaaaatctaatttctgtcattttggggacaatatcactctcactgagagtgcatgttcacatacaaccatgaatagaggtggttgccatgggctataccagaaatccccataattaatagggcattaggtagactattcataggggtcttgcctcagtcctggcaagtcctagaccacgtattactatggcggccccactaaacaaatcttcaaagatttggaaaaaaagatcaaaccgtttccaataactaattggcatctctgagcaaagttcacatgtatttccagtaacataaaactatccaacaccaggccgggcacggtggctcatgcctgtggtcccagcactttgggaggtcgaggcgggcagatcacggggtcgggagatggagaccatcn

SEQ ID NO: 98766 - DNA, 426 bp, Homo sapiens
  misc_feature (1)...(426): n = a,t,c or g
gaagatagcgccattaacacactccaatgagaaaactcttgttacaacaaccctttactcaggttactgctgttcttcatgttcattggaatctctaggcctttcagtatgtcatttncttcctttttttttttttttttttttttaaaaaaaaaaattttttttttccccccaagttggaggggcgggggggaaatcaaatttaatggaattctcttttcccggggtaaaagagtttttatgtttttcccccccaagtttttgggaaaaagggggggttgccccccccctattttttttttgggtttggccaaaaaaaggggtttcccctttggggccggggtttttttgaccccctgcccttaaggggccccccccccctccccccccaaaggggtgggataacggggggggcccccttccccc

SEQ ID NO: 98767 - DNA, 475 bp, Homo sapiens
  misc_feature (1)...(475): n = a,t,c or g
gtggcntnnnttttgttgacgtccatagtccangcggnggaattcgatctcttgaccttgtgatccacctgcctcggcctcccaaagtgctgggattacaggcatgagccaccgcacccagcctgtttttgttgtattctgtgttgtttcaaaaattggaataaatctccctgtaaataactcatgaaaaagacaatatatatattttaaatatatattttaataaaggttttataaatagatgatttatattcctcttggaactcaaaagatgtggtaagttttgcaaatcagggtaagctccccctgcgttctgtaatgttaatgggtggtggtatagtacagaaaatgtaactttcattgaaaaatcttttttagaaaagggtagagtgtgtgtttccctttcctttcttgagctcattcttcctgctttcaaggccattgtggtcttaagaaataatcaggtcctgaaacg

SEQ ID NO: 98768 - DNA, 446 bp, Homo sapiens
  misc_feature (1)...(446): n = a,t,c or g
attgacgacctatttgatgccgtcgatancncnngngaaatggaattttttgagaacaggtcttcttaagaagaacattatgttctgggaatattacaaaactgttacttttcctattcatctctcaaattttagagagaaaactttgccttatgaccctcaattctttaatggatccaagaagggtaattgatttgatgtttattttttacttgcacggctgggattgacaatttctacgttccttacttgtgagaccagaaattggaagtctctgacttcatttttttgtgatgtttgatggatgatagctttaaaatctcattattgccaggcatggggactcacacctataatcccagcactttgggaggcggaggcaggcagatcgcttgagcccaggagttcaagcccagcctggccaacatggcaaaaccctgtctctn

SEQ ID NO: 98769 - DNA, 465 bp, Homo sapiens
catcgacacatttagacgaccattagaacacgcggaggaattccaactctgttctcctttttaaagatagttttgtctattgtggataccttgacattccacatacattttaggatgaaacgtgctattctgcagaacatgtctgggattttaaaaataggaattgcattaaagatatagatcactttgggtagttcagccatcttaacaatattagttgttctaatccaggaacacaggatagctttgtatcttaattaaaacaaaattttttttgagacagggtctcactctgtcagcctggctggagcgcagaggtgtgatcatggctcaacgtagtcttgacctcctgggcttgctcaaatgatactcccacctcagcctgccaagcagctaggttaacaggcatgtgccaccaagcccagctaattgttaaaaatctttattgtacctctttggttatgg

SEQ ID NO: 98770 - DNA, 464 bp, Homo sapiens
gaaattctatgctacattagttaggtacgttggggatcgcaaaaacctagtctgtcgagaaatgtccatggcgcttttatcgaaccttgcccaaggggacgcactagcagcaagggccatagctgtgcagaaaggaagcattggaaacttgataagcttcctagaggatggggtcacgatggcccagtaccagcagagccagcacaacctcatgcacatgcagcccccgcccctggaaccacctagcgtagacatgatgtgcagggcggccaaggctttgctagccatggccagagtggacgaaaaccgctcggaattccttttgcacgagggccggttgctggatatctcgatatcagctgtcctgaactctctggttgcatctgtcatctgtgatgtactgtttcagattgggcagttatgacataagtgagaaagccagcatgtgtgaatgaagattagag

SEQ ID NO: 98771 - DNA, 470 bp, Homo sapiens
  misc_feature (1)...(470): n = a,t,c or g
gcccactgatngcctcngnnnnaactgatgacatnagtacagtgcggtggaattcccgccttggcctcccaaagtgctaggattacaggcgtgagacactgtgcccagcctatttttaaaattgtttatggagacagggtctcaccatgtggcccaggctagcaccactacgcccagctaatttttcatacaggtgggatttcaccatgttgcccaggctggtctcaaactcccgagctcaagcagtccaccccacttggcctcccaaagtgctggtattacaggtgtgagccactgcgctcagcccggttgattatcaattttatagttagtagattatgtggtctaagaaatatctgtctatctcaagatcatgaaaattgtctcctctgtttcattctacaagctttatcgttttatcttttttgtttgggtttatgatccaatttgacttaattgttgcatatgga

SEQ ID NO: 98772 - DNA, 473 bp, Homo sapiens
  misc_feature (1)...(473): n = a,t,c or g
ttgaatagccttnnnannnattgtagacccttagtccatgcggtggaattccggaagaattgcttgagcccgggaggtggaggttgtggtgagccaagatcgcgccattgcactccatcctgggcaacaagagcgaaactccgtctcaaaaaaaaaaaaaaaaaaggtattccttaattttaggggactttggggggaactaaataacaaaaataggtccagttttgcttttttttgctttaaaaataaatttcatttttagcgccccactaaccgttttattgaaatagtatataaaggtataccgatcattttttgttttttttaatgggattggtttttaaccaaaaaggatttttaaaaattttcctatttttcaggaaattatgcctttcttgttattaaagggaacccccattccaaacgggttaagtccttagggggagggtttgtacccatttatgggagctgcg

SEQ ID NO: 98773 - DNA, 435 bp, Homo sapiens
  misc_feature (1)...(435): n = a,t,c or g
attgagcccctngnnatcgaggacctctagtcagtgcggtggaattcctttcccctttcccttcaactcttcgtacattcaatgcatggatcaatcagtgtgattagctttctcagcagacattgtgccatatgtatcaaatgacaaatctttattgaatggttttgctcagcaccaccttttaatatattggcagtacttattatataaaaggtaaaccagcnnaaaaaaaaaaaaaaaaaaaaaaaaaaaaaaaaaaaaaaaaaaaaaaaaaaaaaaaaaangggggggccgttaaaaaaaaggggccccaaaaaaccccggtaaaaccccccgggggttttttttttgccccccccctgggggtttccccccccccgggggttttttttgcgggggggggggcccccccccggggtttttttaaaaaaaaag

SEQ ID NO: 98774 - DNA, 466 bp, Homo sapiens
  misc_feature (1)...(466): n = a,t,c or g
aggcggtccaattgagncctancgtcagnggcatccgatnnagcnaacaaaccacgtcaancctacgctgtgcaagtaataatgtgattaaatttttgttggaggttacttcttccaagttgagtatggactattggcagattttattttttgcttgtcacttaaaactggctaaggtagataagctttgcacgaatgtaattcaaaatacactgtatacatatgtgtgtatctatgtgtgtgtgtgtgtgtgtatatatatgaaacaactgccatttagtcattccttagacaaatatgtgaatatttaccttatacaccaggccctgttttagattctggcaatatagcaatgaataaaacccacaaaaatccttgcccctgggccgggtgcggtggctcacgcctgtaatcccagcactttgggaggccaaggcgggtggatcacaaggtcaggagattgaag

SEQ ID NO: 98775 - DNA, 468 bp, Homo sapiens
  misc_feature (1)...(468): n = a,t,c or g
gagggcagggngncnccccatagaaaccccactgagacnctagtaagccggcggaattttacgaaacatgtcggagctgtttgcctgggtggggctgggtaccgtacctggcaatgcctgggattttcataattagcacgtacataaagaagtacattctgttcaagtgataactgagcctcaatcaagcagaaactttttgcttgaaattaaaaaaaaatttctattagtgaaatttctttttttttttttttggaaagccccctgttattaaaaaaatttttgaaaaattttggaaaaattttgtttaacaaaattttattgaaaattgtttttggcaaaatggtaatatttcggaagaaaggttttttttatggaaataccaaaaaaaattttttttcggaaaaaaaaaaaaagaataaaaancaaaaaaaaaaaaaaaaaaaaaaaaaaaagggggggggcttg

SEQ ID NO: 98776 - DNA, 344 bp, Homo sapiens
cagtgtcccctcctcagaaccagttgtgattactagtttcttgtgtgtcctgcttaagatgttttgttttttttgtgtgtgtgtgtgtgtgtgtgtgtgtgtgtgtgtaaatattccccaccacctccaccttagtttattttctccgcacatagagtgatataccatatacacggctacactattctgaaccttctttcttcttcttttttttttaaaaaaaaaacatttttgggccgggcgcaggggttcacccttgtaatcccaccattttggggggccaaggcaggtggatcggggggtcaggatttcaacaccaccctgtccaagagggagaaaccttt

SEQ ID NO: 98777 - DNA, 110 bp, Homo sapiens
  misc_feature (1)...(110): n = a,t,c or g
caaggtgcatggtgaaacgccatctctactaaaagtacaaaacattanctgggcctggtggcacatgccggtaattccagctatgtgggaggctgaggcgagagaatcat

SEQ ID NO: 98778 - DNA, 332 bp, Homo sapiens
ctcagctgctcaggaggccgaggcaggagaatcacctgaacccgggaagcagaggctgcagtgagccaagattgcaccactgcactccagcctgggcaacagtgcaagactccatctcaaatactaataataataataataaatgtccatgactgttaatggcttagggggatggtggagtatcagaatagaaactgtatcatagcagcagcggagtgtgtaaagaaagggaaatggagacaaatgaaacaacttttttttttttttttaaatatgaggcctcactttgttgcccacctggagggcaggggtttttcccaggccctcactgg

SEQ ID NO: 98779 - DNA, 373 bp, Homo sapiens
ggcggtagcagctgacaagggggtcccactgtaccgccacatcgcaaatctcgctgggaaccctgacctcatacttccagtgccagccttcagtgtgatcaacgggggctcccatgctggaaacaagctggccatgcaagagttcatgattctgcctgtgggagccagctccttcaaggaagccatgcgcattggcgccgaggtctaccaccacctcaggggggtcatcaaggccaagtatgggaaggatgccaccaatgtgggtgatgaaggaggcttcggacccatcatcctggataacaatgatgccctggagctggtgaaaacggccatccaggcggctggatacccagacaaaggggcgatcggcagg

SEQ ID NO: 98780 - DNA, 490 bp, Homo sapiens
  misc_feature (1)...(490): n = a,t,c or g
acgccccccctcagtnacttagtatgacganccgnannnncgncgaanaananngccagggtcgcagacgtgtgtgagtccatgaaggagcatcttttggttcttgttgagagggccaagtacatcccaggtttctgcgagctccccctggacgaccagggggccctggtcacagcccatgctggcgagcacctgctgctcggagccaccaagagatccatggtgttcaaggacgtgctgctcctaggcaatgactacattgtcccttcgcactgcccggagctggcggagatgagccgggtgtccatacgcatccttgacgagctggtgctgcccttccaggagctgcacatcgatgacaatgagtatgcctacctcaaagccatcatcttctttgacccagataaggaaactgaggcatgattaacttgctcaaggtcacacaaccggaaaatggcagagctcggatttgaactgcagaccacctgtc

SEQ ID NO: 98781 - DNA, 478 bp, Homo sapiens
  misc_feature (1)...(478): n = a,t,c or g
nggggggagggcgcccnnnctaccgagaactcagtnngacccgcacnngncncggaanntnnnggaactgaaggagggtgggaaggttttaattattttaaaaatagagatttggactttctatgttgcccaggctggtctcaggctactgggctcaagtgaacctgcttcctcggctcccaaagtgctgggattacaagcgtgagccactgtcccagcagggaggtgttttttttaaagctgattcactggaggcagggtgggcaagtggcactgctggtggccacccctcacagtccctgctgcccccagtaccgcctggcacccatcccccgggcccgccacgactttgcctgcgccagcctgatcttcgcctgcatcctgctcgtccatgtcctgctcatgcccagagtcagtgcagggaggggtgtgggggtccggcctgctgggatccaggctggaaggtgactatgaacct

SEQ ID NO: 98782 - DNA, 471 bp, Homo sapiens
  misc_feature (1)...(471): n = a,t,c or g
natcgatagcantcgctagngcggngcaattcctttaaaaaatgcattcctttactttttctttgttttcttttggtagaagctatgcttggtttgtccttaaggcaatataaagtagtgttgatggttctcaaagtgtggtctgcagacctctgaggatccctgagaccatttcaggggtctgcaaagtcaaaactgttttcataatcttattaagatattatggcatcttttttacagtgttaatgtttgcatttacgttgcagaagcagtggtgggcaaaactgatgacttggcattaaccacagcagacgtcaagctatactcatggttattttattctctgttgtcacacatactcagttaaaaaaacaacgacagttcacttaagaatgtctttggccgggcacggtggctcacgcctctaatcccancactttgggaggccgaggcgggcggatcatgaagtcn

SEQ ID NO: 98783 - DNA, 490 bp, Homo sapiens
  misc_feature (1)...(490): n = a,t,c or g
aggcgctnnncggccggcaatggagaccatnggaatggagagcctaggaagnngcgnggaattcctatgttgcccaggctggagtgcattggctactcacaggcatgatcatggtgtattatagcctcaaactcctggcctccagcgatcttcctgtctcagctcccaagtagctcccaagtgtgcaactgagactacaggtgcaaaacacagtgccctggcttctctgtaaattttagaatcagtttgtagacagtgtctgggaggaaaaactttttatctaccctcaggtttagtctttggggacctgtgaattaaacagacgaaagatatattaacaagagaaggccaagcgtggtggcttacacccataatcccaacactctgggaggctgaggcgggaggatcacttgagtccaggaggtcgaggctgccgtgggctagcatcatgccactgcactgccccatgggcaacagagcgagacccctg

SEQ ID NO: 98784 - DNA, 222 bp, Homo sapiens
gactttcatttcacagcctacacaggtgcctttatatgctgggcacaacttcagaaaacgtttctcccttcagcctactagaactgctctccaggttggccacccttctgggcgattactgtggctccctgagcgaggggaccatctcccgcaatgtggctctggtatacgaactcctggatgaagtgctgagactagagtctcgctgtgttgcccaggctg

SEQ ID NO: 98785 - DNA, 457 bp, Homo sapiens
  misc_feature (1)...(457): n = a,t,c or g
tagactttcgagacactagtccacgtggtggaattcctcaagaggtggagggtgcagtgagccgagatcacaccactgcactccagcctgggtgacagagcgagactccgtctcaaaaactaagaagaagattaataataaaccagcactggcattgccagcagtccatcctacctcgcatccaggttcgtgagctaccaagtgtccccacaaagctgtaaaacaacatgaccactgtaggtacgtttctgtaaaaaggggactgagtcttctaaccctgtaccacacatatgtgtgcagagagagccagctccatcctgctctcccagaagcctgaacagctgtgccctatctcgtagcagtggcactccaggaagggggcgggcggctgtgccccaactcgtatcagtggcactccatgaagggggcgggcggctgtgtctgagctcgtaacaan

SEQ ID NO: 98786 - DNA, 459 bp, Homo sapiens
  misc_feature (1)...(459): n = a,t,c or g
tgggcggnnnntttgactgcgtaccatggccgtgtcgtggaattccaaaggcttttacttcagcaagtggattctttgagatctgctttcttccttgactttgccctgtttaatggtacaccacagcccagtgggagacatttgattgctcatttcctttgccaggtcaatttggtgactgacagaggctcacgggcaggctcttcagttgtctgggtgcccagcagtgacagagccgtctcatggaactcctcctaggaactacagagtgggcaattgaaaatgcagagaactcccccgattcactcaaaacccttcatccaaagccagctgcacctcgacaggaactaatctgatgggcctctctctgtcacccaggctggagtgcagtggctcgatctcagctcgctgcaacctccgcctcccgggttcaggtgattctcccgcctcagcctcctg

SEQ ID NO: 98787 - DNA, 482 bp, Homo sapiens
  misc_feature (1)...(482): n = a,t,c or g
cccgcgcccnnnnnnttttgaaatcgtatgacattagtcagtgtggtggaattcgcttgaagccctgaggtggaggttgcagtgagccgggatggcgccactgcactccagcctgggtgacggagtgagactttgtttcaaacaaacattctgttagtaattcccctagagattacaatgtgaaccttgacttattagagtataaataagtagtttacctcttcacaggcaatgcaagaacttaaatcacttgaattttatgtacttctctcctgacttatatgtttttgtttttattattttcttttttaaatttaattttatttttaaagacaacatctcattttgtcacccaggttggagtgcagtggtgaggtagaccaccagaggcactagcaatcccaaattcccttgatgtctctctaaaataataattggttgcagttggccccagggaacaggtgtctaccactagacacaan

SEQ ID NO: 98788 - DNA, 454 bp, Homo sapiens
  misc_feature (1)...(454): n = a,t,c or g
gtgcgcggcnncccccctaaatgatcatagaccagctggcggaanncgaacatgtttgtccattaacaaacttataatagctgaaaaacagggttgtgagaacagcttcagttaaaattgtcctgtctagtttgaatatttcaagaacagaaagccttttttttttttttttttttttggaaagggggtctctttttgtgccccggggggaaaggcgggggacccttttaagttaagggaaccccccccccccagggtaaaggggttttttggccccccccccccaagtggggggaataacgggccccccccccccccccgggtttttttttggttttttaagaaaagggggggttcccccttttggccggggggggttttaaccccgggggggggacccccccccccggccccccaaaggggggggattaacgggctggaccccccggcccgg

SEQ ID NO: 98789 - DNA, 451 bp, Homo sapiens
  misc_feature (1)...(451): n = a,t,c or g
gggcagggnnccccaactagnaccttganatctgggaaanccggggnncaccgattaggctgggctcgagctcctgacctcgtgatccacatgcctcgacctcccaaagtgctgagattacaggcgtgagccaccgcgcccggcctaatgggcgttttaacagttcatacagtttggtattattattcccgctctacaagtgaagaaattctgagaggtgatgtcgtcgatgcagggtcggcccgaaataggcggagttgggattcgaactcatttcacaggcagagggaggagagcagccatagccacctccactggttccgactccagctcccgggctcgcaggagtaaacgcgcatgctcagggagctcggtcgcgcatgctcagcgcaacggcggggaagactccagccgccagggggagcgcgtgccgttcttgcctctctggccn

SEQ ID NO: 98790 - DNA, 498 bp, Homo sapiens
  misc_feature (1)...(498): n = a,t,c or g
catggaataatgggttcatggattaatggttatcatgggagtgagaccaatggctttgtaagaagaggaagagggacctaagttcgcaccctcaacccccttgccatgtcaggccctctactgcctggattctgcagagtcctcacagcaagaaggccctccccagatatagtccctcgaccttggacttctcagaccccgtaattgtaagatatacattcactttctgtatagatcacccaatttcagaaacagaaaatggatcaacacaggatgcatccatgctctacgtggacatcatcctctttcctccatttcattggccctgaagacatctgttctagatcctctgtctgttgcccttcatgaatttttggacactaaacttggcctttaagaaaaatataaatgagcttttatttnnnnnnnnnntcgacaatggcagcatctacaaccctgaagtgcttgatatcacagaggaaactctgcattctcgcc

SEQ ID NO: 98791 - DNA, 614 bp, Homo sapiens
  misc_feature (1)...(614): n = a,t,c or g
ggcaatcttctgagtggctgggactacagatgtgcgccaccatacctggctattgatcaatttttagtttaccaaacaggcattatgttctgggtcccattctgtgtcgggttctcttttcactcggcaccatggctttaggatccatccatgctgctctgtgaacgccgagttgctttaactgcttggtgctccatgaggcatccccttttgtgtctctgtcctcccagtgagggaccccatcgtaccctactcccctcccacaaaggaagctgtagtgcgcgtcctcaggcgtgtccccatatggatctgctggcattcgtttgtcagtgcacccaggggtagaagtccttggtctcagtctgcagacgtctgcctgagtgcagccaggtgcccccccagagtgggtagccttgtccacatgcccatcagcagcacctgaggggtcccaacagccctacatcccaccaactttctgcttttttccagtcaaatggctcttgagtgttacctggctttatttatttatttattttttgagttgggtntctgttgcgcaggctggagtgcagtggtgcaatcatggctcactgcagcctcgaccttccaggctt

SEQ ID NO: 98792 - DNA, 485 bp, Homo sapiens
  misc_feature (1)...(485): n = a,t,c or g
cgcccgccccagncnccnttagaaaatcgataacactatgcagagacgaggaattcgcaagactccgtctcaagaaaaaaaggaaagaaaaaagaaaactccaatgtcctctcctattgcagccctaggaagatgcaggattagaggccttcccccctttctaaaggctccccctggggtccaaggagggtctgtcggggttgctcaaaggcggccttatggagcaggggtatggtgtgtgaatggggttgctgcttaccaaaagtcttattctcaggcagaaaatagggtgcattgtcattcacgtcctcaatggtaatgaggaggcttcctaggagacaaggtcagctggctttggctctgggcaaaagcttgacccaaagagcctgggcctcaaccctgtgccccacagcctcaaccccatgccccgcagcctcaaccccgtgccccgcagcctcaaccctgtgccccgcagcctcaacccn

SEQ ID NO: 98793 - DNA, 459 bp, Homo sapiens
  misc_feature (1)...(459): n = a,t,c or g
gagcgnnnnnnnnnnngnnatcgagatcactagtccangttgtagaactctagatgaggaccccggagaacctagagctaactaacccccaggagtttggcagcagttgggctgcagttgagtgcccagacaccctcgatcctcgggatatgtgtgtcctgaatcctctccgagaaccatttgccaagaaggagtgcagcatcctgctcagtgaggtgtttgagatctgccaccctgtggttgatgtcacttggttttactcaaactgcctgacagacacatgtggctgcagccagggtggtgactgtgagtgcttctgtgccagcgtctccgcttatgcccaccagtgttgccagcatggggtggctgttgactggcgaaccccccgcctctgccgtgagtgtcccagacaatcacctgaggggacagagtagagtgtcacctgtgggcatgccctat

SEQ ID NO: 98794 - DNA, 418 bp, Homo sapiens
ggcatttctttgtgttggagacattccgtatcttctcactattggaaaattacaataaatggttgtaaattcagtcaccttatagagcactgcacctgtccctcctgtccatcgtcctcctgtgcctgttccccagcctgtggctgccccctccccagagaagccgatgcttgctggagcttggtcggtgctctgggtaaggagacgctggggctcacgccgtgctcaggctgctccctggtcatccaggcacttctcacctgcctttctcctccctgaccacctcccccctaggactgaagcgggtcacgggcgggtttaactccaagaacagatgtgatgccaggacctattgctacctgctgcccacgtttgcctttgcgcacaaggaccgggacgttcaggatgagacctaccg

SEQ ID NO: 98795 - DNA, 460 bp, Homo sapiens
  misc_feature (1)...(460): n = a,t,c or g
nntgatgaccttcgtccgngcggnggaattcgtttcaccatgctggtcagtctggcctcgaactcctgacctcaagtgatccacccgcctcggcctcccaaagtgctgggattacaggcgtgagccaccgcgcccagcccaaagcaggtacatttttatccccatttcacagatgaggaatctgaggctcagagaggcaaagtctctcccaaataccacagagcttgtgaatggcagaactgggaggaaagtccccttccctgaacctcagtgttcccatctgcaaactgttcctccaggagaggctggaaggggccagcctcgtgcgctcccggaggtccagctgccctcgggacaggcaagtggctgtccaggccactgcatggtgtatcactttcagttcctgggaagaaggttaaatacctccgaggggcccattgaggctgcggcagcaaaggag

SEQ ID NO: 98796 - DNA, 1344 bp, Homo sapiens
cctgagacctcggaccacatacgccagcttggacgaggccgaagcgagaggacctggtgtaccagtccactgtgaggctgcccgaggtccggatctcagacaatggtccctatgagtgccatgtgggcatctacgaccgcgccaccagggagaaggtggtcctggcatcaggcaacatcttcctcaacgtcatggctcctcccacctccattgaagtggtggctgctgacacaccagcccccttcagccgctaccaagcccagaacttcacgctggtctgcatcgtgtctggaggaaaaccagcacccatggtttatttcaaacgagatggggaaccaatcgacgcagtgcccctatcagagccaccagctgcgagctccggccccctacaggacagcaggcccttccgcagccttctgcaccgtgacctggatgacaccaagatgcagaagtcactgtccctcctggacgccgagaaccggggtgggcgaccctacacggagcgcccctcccgtggcctgaccccagatcccaacatcctcctccagccaaccacagagaacataccagagacggtcgtgagccgtgagtttccccgctgggtccacagcgccgagcccacctacttcctgcgccacagccgcaccccgagcagtgacggcactgtggaagtacgtgccctgctcacctggaccctcaacccacagatcgacaacgaggccctcttcagctgcgaggtcaagcacccagctctgtcgatgcccatgcaggcagaggtcacgctggttgcccccaaaggacccaaaattgtgatgacgcccagcagagcccgggtaggggacacagtgaggattctggtccatgggtttcagaacgaagtcttcccggagcccatgttcacgtggacgcgggttgggagccgcctcctggacggcagcgctgagttcgacgggaaggagctggtgctggagcgggttcccgccgagctcaatggctccatgtatcgctgcaccgcccagaacccactgggctccaccgacacgcacacccggctcatcgtgtttgaaaacccaaatatcccaagaggaacggaggactctaatggttccattggccccactggtgcccggctcaccttggtgctcgccctgacagtgattctggagctgacgtgaaggcacccgccccggccactccatcaggcactgacatctccgcgaccggttttcatttcttttctaaactatttccagtcttgttcttagtctctttccatctgtgtcttggcttccttcagtcggtttaattaaaacaaacagaacaattttccccaaaaaaaaaaaa

SEQ ID NO: 98797 - DNA, 402 bp, Homo sapiens
  misc_feature (1)...(402): n = a,t,c or g
tgaacccaggaggcggaccttgcagtgagccgagatggtgccactgcactccagcctgggcgacagagtgagactcagtctcanaaaaaaaaaaaaaaaaaaaaaaaaaaaaaaaaaaaaaaaaaaaaaaaaaaaaaaaangggggggggccttaaaaaaaaaacccggggggggccaaaaaaaaaggggggaaaaaaaaaaaattttttttttaaaaggggggggaaaaaaaaaacccgggggggattttggaaaaaaaaccttttttgggggggggaaaaaaagggacaaccccccccaaaaaaaaaaaacgcctgggggaaaaaaaaaaattttggggggggggggggggaaaaaccgtttttttttgtgggggaaaaaaaagtgccccccccccccca

SEQ ID NO: 98798 - DNA, 402 bp, Homo sapiens
tagaagtgaaaattaaagaacatttcaaaattgtgggtgcccggtcagcagcatcagcattacctgggatcttcttggaactgcaaattatagagttcccgtcaatctgatgaatgataaactctggggatggggcccaacaattggtgctctcacaggtgattatgacacacagtaaaacttaagaaccgctcaactacagttacctcctgaataacatgggggtcaggtgaaccaactcctgcccctgcagcatccaaaattcatgtataacttttgactcccccaaacccactccaccttactaccagacaaccttagccaaaccattttaaaaaaaaaaaaaaaaaaaaaaaaaaaaaaaaaaaaaaaaaaaaaaggggggccctttttaaaaaatcc

SEQ ID NO: 98799 - DNA, 199 bp, Homo sapiens
  misc_feature (1)...(199): n = a,t,c or g
gggggggggccgttttaaaggatccttgggggggccaaattttaccggggcgggcaaggtaaaagttttttccttatggggggccgaataaaaacctacttggggattttttggaaaaaaccctttttttgggggggggcgaatggggnnnnnnnnnnnnnnnaaaattttagcttgggggggaaaaaaaaattttttt

SEQ ID NO: 98800 - DNA, 517 bp, Homo sapiens
  misc_feature (1)...(517): n = a,t,c or g
gcggatctaccctgngcctgacacagagaagtatgcccgcttcttcaagcacaatggctccctcttccaagagactgctgcttccaaggccagagaggagtgtgccagctgctgccgggacagctggacaccatgaggcctcaagaaattgtggaagaggaggagctggagcggatgaaggccctgctacaaagggagactctcatccgaagcctgggtattgtagagcagctcacccgtctgcagcaccctggcccccagggccagaaaaaaacttcatgagagtcgggtgagggtccctgtgaagtctcccaaaggaaaagggaacaagggctgtcattccaggacatggtgttggctcaacaaaggagggctgtgtgatgggtatctgcagtggagcctgggaaagcgagtgcgctagctggcnnnnnnnnnnnnnnnnnntnnnnnnnnnnnnnnnannnnnnnnnnnnnnngggggggctgttttaaaatctcttggggggacaattttgtt

SEQ ID NO: 98801 - DNA, 452 bp, Homo sapiens
tgagatactagaacttctttttgatgcatacttgtgggaagattttgattatccatgagattacagttgtaacttcatagactcccaaagggaaattcttgagataaggtctcactacgttgcccaggctggcctcaaactcctgggctcaaacaatcctcctgcctcagcctcccaaagtgctgggattacaagtgtgagtgaccatgcctggccaacccacagctttcaaagcgtgctgatttcaactgctactctgatgcaggactgtctgctgactccagaagtggctgagaggctgagaagttgagcagagattctgacaaccctgctgggccaggggcgaaaattggaatccaaggcatgccacagaatagaagcctgactactcatgctctaagttaggtcattagaaaaccaaacccttcgaggacgtatacactaggaataag

SEQ ID NO: 98802 - DNA, 407 bp, Homo sapiens
cccacgcgtccggcggcaggcaagagagcttgtgcaggggaactgccctttataaaaccatcagatcttgtgagacttattcactatcccaagaacagcatgggggaaaccgcccccaagattcagttacctccaccgggtccctcccatgacacatgggaattctgggagctacaattcaagatgagatttgggtggggacacagccaaaccatatcagggtatgtatatataatctgttatttattccagtgccttttgtagaaaagaactgccctttctccaccaaattgcccttacagctttgtcaaaaattagttgtccatatatgtatgggtctatacctggactctttattctcttccctggatttaactgtcttggtcctccaacttggttccttctca

SEQ ID NO: 98803 - DNA, 421 bp, Homo sapiens
  misc_feature (1)...(421): n = a,t,c or g
cgaacgaaaaattctaggctacatacaactacgcaaaggccccaacgttgtaggcccctacgggctactacaacccttcgctgacgccataaaactcttcaccaaagagcccctaaaacccgccacgtctccatacccattacaatctccagcattccccctcaaacctaanaaaaaaaaaaaaaaaaaaaaaaaaaaaaaaaaaaaaaaaaaaaaaaaaaaaagggggggggggcccttaaaaaaaatccctgggggggcccaaaatcccggggggggggaaaaataatttttttttttattgggggggcttaaaaaaacccccgggggggttttgggaaaaaaaccttttttggggggggggaaaaagggggcccacccccccccaaaaaataaagcccttgggggaaaaaaaaatttt

SEQ ID NO: 98804 - DNA, 464 bp, Homo sapiens
  misc_feature (1)...(464): n = a,t,c or g
tctcgggtcgacttacgcgtccgcccacgcgtccgacactgccatagagaccctaggataaannnntacgaaaannnnntttttttacatatgtttccaaaagttttaaatacaactacaaatataaccatgtgctctnatnnacanntaattttntttttttgggggggggttttttttttttttgaaataattgattaatacctcaattctccatcctggctgtacattcaactcatctaaggagcttttaaaacacaaattcctaggggcaattaaataaaaatgtctggggatgggatccaggcaaggttacttttagagacggggtctcgttatattgcctacattggaatgcagtggctattcacgggcacaggcatagcgtaccacagcctcaaactcctgggttcaaacaatcctgcctcaggctcccaagtagctgggactacatgccactgtac

SEQ ID NO: 98805 - DNA, 462 bp, Homo sapiens
  misc_feature (1)...(462): n = a,t,c or g
ctgtcctccatttagatgagatacactgtattgtagggtggcacttgcatctctagaatataagtatcacctcataatagtggacattatatcccaaatttaattctaggaagacgacatctaatagaataacctgtgatgtaagtcaggcataaccagataagtcatatattatttgtgtgtgtgtgtgtgtgtgtgtgtgtgtgtgtgtgtgtctgtgtgtatgggtgtgtatggaatgtcctanggcagagataggtttggaaacatgtatgtattggctagagaattacattacatcatatagaaattgggaggaatataacatttttagatgcaaattatttccagaagaatgtttaatctcatgcccacgtgaataatcatctctttaaaaaaagcaactgctcagaatgaacgtggaaccaggtgaaagnccctgcgctcttctcttaacaaagg

SEQ ID NO: 98806 - DNA, 413 bp, Homo sapiens
  misc_feature (1)...(413): n = a,t,c or g
aatcgaacccatccctgagaatccaaaattctccgtgccacctatcacaccccatcctaaaaaaaaaaaaaaaaaaaaaaaaaaaaaaaaaaaaaaaaaaaaaaaaaaaaaaaaaagggggggggggggttaaaaaaaaacccgggggggggaaaaaaaaaagggggggaaaaaaaaaaaattttttttttttagggggggggaaaaaaaaaaaagggggggattttgggaaaaaaaattttttgggggggggggaaaaagggggaaaaaacccccaaaaaaaaaaaaggggtggggggaaaaaaaaaattttggggggggggggggggaaaaaacccccttttggggggggggaaaaaaaatgaggggnnnnaaaaaaaaaaatttggggggggggaaaaggggaaacaacc

SEQ ID NO: 98807 - DNA, 429 bp, Homo sapiens
gtatctcattatggttttaatttgaattcccttaatacgtaatgatgttgggcttcttttcatgtatttatttgccatctgtgtatctttttcatgaaatgtttgttcagatcttttgcctatttttattggattgtgtgttttcttattatggtatttaacttgtcactgttaggatacatttcaaaaatcctgaccaagttctaacagtagaatgtgtcagtaaatgctcagtttaagtaaaatgtcacattgcaaactaactaccagggtgtggcccagcaatcttaagtactttccctggaagtttctgtaatatgcagaacactttcaattgaaataaatgctgttaaggaggtcaactcaacctttccaaatttttattaattaaaagcagttgttggagagttgtagaaaagtattttttca

SEQ ID NO: 98808 - DNA, 409 bp, Homo sapiens
  misc_feature (1)...(409): n = a,t,c or g
tactgcgggatatactagtaaactacatagactcagccacttacaacttacaagtggatacatccaatttaaaagcctatcctccttaaaaaaaaaaaaaaaaaaaaaaaaaaaaaaaaaaaaaaaaaaaaaaaaaaagggggggggggcttaaaaaaaaacccggggggggccaaaaaaaaggggggggggaaaaaaaaaatttttttccaaaaagggggggaaaaaaaaaccccgggggggaatttggaaaaaaaaccctttttggggggggggaaaaaaggggaaaaaccccccaaaaaaaaaaaaggcccgggggaaaaaaaaaaattttaaaggggaaaggggggaaaaccccccccaaaggggggggggaaaaaaaatggggnnnnnnnnnnnanaacccccc

SEQ ID NO: 98809 - DNA, 395 bp, Homo sapiens
  misc_feature (1)...(395): n = a,t,c or g
ccaacctcctactcctcattgtacccattctaatcgcaatggcattcctaatgcttaccgaacgaaaaattctaggctacatacaactaaaaaaaaaaaaaaaaaaaaaaaaaaaaaaaaaaaaaaaaaaaaaaaaaaaaaaaaaaagggggggggcctttaaaaaaaaaccccgggggggccaaaatttcccgggggaaaaaaaaaaaaaatttttttttttaagggaggttaaaaaaaaaccacgggggaatttttgaaaaaaaacctttttttgggggggggaaaaatggggaaaaaccccccaaaaaaaaaaagcccccaaaggaaaaaaaaaaattttaagggggaaaggggggaaaaaatccggtttttgggggtggtaaaaaannnnc

SEQ ID NO: 98810 - DNA, 479 bp, Homo sapiens
  misc_feature (1)...(479): n = a,t,c or g
cgggttanaaaactgatgcctgcggaatccgatgggagacatagagagagagagagagagagagagagagagagagagagagagagagagagagagagctccagcgcgcgggcgcgctgtgtctctctgtctctggaccgatataaaaaccgggtgtatatgaaagttgccgaggctctgtgtgagtgccgcctgctcgcatacatatcccaggcgcccacacagatgttctttctcttgcgccttataaacatcatacacgcgcacactctcacccaagagaacgacatgtgtctccacaccaccctggagattctgacgctcgcccgacagagagagcgtgtgcccctgtacctgcgtgtgctgcagcggatggagcacaaaaagaaacaccccggctttgtgctaaacaactcacacaacctggtgcgcttgtggcagcagctctacctgcacagagacagagacagcatctgtat

SEQ ID NO: 98811 - DNA, 483 bp, Homo sapiens
  misc_feature (1)...(483): n = a,t,c or g
aggatgtgccnagntgcnccctactaccgccgtcagaatncgctcagcnggnctcaaactcctgacctcttgatctgcccgccccagcctcccaaagcgctgggattacaggtgtgagccaccgcgcctggctgaaacttttaattttaaatcataggttttttttctgaaagatgaatatataattttttcagaaaatggtatatgtttattcattaagtagaaaatatatgtgtaaccacttctaatgtaacatttcccttggctaatattatcctggactgcttatccaacaaccagtgtagttgacctcagagaataatccaaaaaagtggtaagggctgaatcaagcttaataagtggcctacctcttgcatctgcaagatttgtcttgggaacactgtatgacacaactgtggctgcagttgcagctgaactgttatggttcagaatgttccaaaactcaagtcttcctcttcttaa

SEQ ID NO: 98812 - DNA, 471 bp, Homo sapiens
  misc_feature (1)...(471): n = a,t,c or g
aatagatcagccnctagagatgcgctccgagattgattctcagaattactgcaactgtgatgctggccggaatgaatggactagtgacacaatagtcctttcccaaaaggagcacctgccagtcactcagattgtgatgacagacgcaggccgaccacattccgaagcagcttatacactggggccactgctctgccgcggagatcagtcattctggaattcagcttccttcaacactgagacttcataccttcatttccctgctttccacggagaactcactgctgacgtgtgcttcttttttaagaccacagtttcctccggggtgtttatggagaacctggggatcacagatttcatcaggattgagctgcgtggtaagctcgccactctggacaagtcacagggtacccattatttagcaataaaagctttaactcaaaaaaaaaaaaaaaaaaaaacccggggggg

SEQ ID NO: 98813 - DNA, 481 bp, Homo sapiens
  misc_feature (1)...(481): n = a,t,c or g
cattcgcccgccttgaagaattcggcacgagcggaccatgcagcgctntgggccccccgtttcccgctaagcctggcctgggcaaatggagcgaggtcccactttgcgtctccttgtaggcagtgcgtccatccttccctagggcaggaattcccacagttgctactttcctgggagggcctcatgttttatctggttcttaaatgtttgttactacagaaaataaaactgcgctactatnaaaaaaaaaaaaaaaaaaaaaaaaaaaaaaaaaaaaaannnngggggggggggggggcgngaacacaaaaaaaaaaagaaaaaaaaagaggggggggggggnnnannggggggggggggggggaaaggaaaannnnntnntnnntnnnnnnnntggngcggccccanngacgcgaagggacaaggaaagaaacnncnnnccnncnccncggggggggcnacacccggaggccaaaccagg

SEQ ID NO: 98814 - DNA, 422 bp, Homo sapiens
aggagtcgcggctgagttcgccggactgcacgaattcggcacgaaggaaaaccctatgagtgtaatgcatgtggaaaggccttcaatcggagtgcacatcttactgaacaccagagaactcatactggagagaagccctatgtttgtaaagaatgtggaaaaaccttcagtcgaagtacacaccttactgaacatctaaaaattcattcttgtgtgaaaccctatcaatgtaatgaatgtcagaaactgttttgctatagaacatcactaattcgacatcagaggacgcatacaggagagaaaccctaccagtgtaatgaatgtgggaaatccttcagcttaagctcagctctaactaaacataagcgaatacatacaagggagagaccctatcaatgtaaaaaaaaaaaaaaaaaaaaaaa

SEQ ID NO: 98815 - DNA, 530 bp, Homo sapiens
  misc_feature (1)...(530): n = a,t,c or g
ggtttggggnnnaatggacggccgtcngaannnnncncaattgcaccgcctgcaggaattcggcacgagcccaaatgtcagaatgcacccatgtctgaggtcatccttcctttgaaatacctgccacgatgactgcagctcctgcaggtttccctccccaggtcccgtgggaagatgtccgttatctctttgatgagatcatgtatggaggccacatcacagatgacggggattgcaaactgtgtcgggtgtatttagaagaattcatgaatccatctctgctagctgccctgtcaggaacacatgcatgtggtgaaaaaccgagacttccagccaacagccatgtgagcgagccatcttggaagtggatcctccagccccagtcaagccttcagatgactgcagctttggccaacatcttgactgcaacttcctgagagaccctgagcaagaatcacaccatgaagatgttcctagttttctgattctcagaaactggctgccatgtgaagaaagacatgtttgcttcc

SEQ ID NO: 98816 - DNA, 471 bp, Homo sapiens
  misc_feature (1)...(471): n = a,t,c or g
attgancgcctgaggtgacatcgcgttcgccgactttggtctgctcaattttgacagcccacatggcattccacttatcactggcatccttccactctttcgaaaactcctccagtctgctggcgatatcctccgtcagctcgactttttccagcagctccttgccgagatgggattcggctatcttgcctttgaaaaaatccaggtaaccttccgcatcatcgctcgcccgaccgacggcctccacgaatgccgatttgccaacggtgttcacactgcggatataaaagtaataatcatggcccggcttgatattgatactggcggctatccagtacagcgccgtaccaagataacgcgtgctggcttcaacctgtctgatatccgcaatctgcttttccgagaaccagaactcaaactgtaccgtcgggtcataaacggcaagatgcggcgtggcggttatctgaaaat

SEQ ID NO: 98817 - DNA, 491 bp, Homo sapiens
  misc_feature (1)...(491): n = a,t,c or g
cccccccccatcgaccgccttccgaattgcaccgcctgcaggaattccgcacgagtgatgacagacgcaggccaaccacattccgaagcagattatacactggggccactgctctgctgcggagataagtcattttggaattcagcttccttcaacactgagacttcataccttcatttccctgctttccacggagaactcactgctgacgtgtgcttcttttttaagaccacagtttcctctggggtgtttatggagaacctggggatcacagacttcatcaggattgagctgcggggtaggctggccactctggacaagtcacagggtacccattatttagcaataaaagctttaactcaaaaaaaaaaaaaaaaaactcgggggggggccgggcccccatttccccttatagggagccgaataacaattcacgggccgccgtttaacaacgcggcgatgcgggaaaaaannacttggnngnnnntccg

SEQ ID NO: 98818 - DNA, 464 bp, Homo sapiens
  misc_feature (1)...(464): n = a,t,c or g
naagtagaccatagtccagcgggnggaattctttttagtagagacggggtttcatcatgttgtctaagctggtctcgaactcctgacctcatgatgcacccgctttggtctcccaaagtgctgagattacaggcatgagccactgtgcccggccccagcagaggagttttctacactgaggagaggattcttggagagctttagtcattacccaggaccccacaactaggaaatggaagagccaggttcaaacacaggctgtgtggccccaacgtgaattgtttaaaagctgaattatactttagtagaaataatacagtcagctgtcacctggcatgtcttcaactagaattctctatgaattgttgngttactggactgccaagacaaatcttgtttataatacaaatcttcaagaaccgtcttaaccatccgaagattaaacagtgttcattgtggtttat

SEQ ID NO: 98819 - DNA, 466 bp, Homo sapiens
  misc_feature (1)...(466): n = a,t,c or g
natcgtagaactgagtnccgtgcggnggaattcgggccagatgctatgccaagcaccttatataggaaagtatttgcatttcatgaattttgagatgcagtttttgaaactggagtgtatcttaaagttggtgtcttctcagtgtcagcaaggcagcagttgcaacattgctgttctcgtcgcctgtggatgtgcaaactgggtgtgctcttcccattgtcatcatttttgttgagtaatgtgcattgttgataaccacatgtgttcagtgtaagcgctttttaagatgccttcaaaaacattatactgtgatttggtattataataaaaggtggttttatactcnnnanaaaaaannnaaaaaaaaaaaaaaaaaaaaaaaaaaaaaaaaaaaaaaaaaaaaaaaaaaanaaaaannngggggggggccgatataaaaaaaagggccctaaaaaccccttttatt

SEQ ID NO: 98820 - DNA, 420 bp, Homo sapiens
  misc_feature (1)...(420): n = a,t,c or g
gagcccaatgcactcacaaaagttcttttatttattttttgttttttgagacgggtctcactctgtcatccaggctgcagtgcagtggcagcgatcacggttcactgtagccatgacctcctcaggctcaggtgatcctcctacctcagcctcctgaatagctgaaactacaggcgcactactacagattctcctggaaagccttgagaaggagatgcaaagctgccaacacctcgattttagcctaatgagacccatttgggactctggatctccacaactgtaaaataataaatttgtgttcttttangccnnanaaaaaaaaaaaaaaaaaaaaaaaaaaaaaaaaaaaaaaaaaaaaaaangggngggggnntaagggggggggggccccttaaaccccccgtataccccttttgg

SEQ ID NO: 98821 - DNA, 451 bp, Homo sapiens
  misc_feature (1)...(451): n = a,t,c or g
catcgagatcatangccacgcggnggacttnctgctgggcctctctccgcagccgcgagacccgcgcttggcgcataggccggttctaatttacaagaacaccgcggcctgaggccggagagtcccttcaacccgggaggcggcggctgcagggagccgagacggcgccattgccctccagcctgggcaaaaagagcgaaactccgtctcaaaaaaaaaaaacatggccgaaaccaggaagttgcgcaagggcgccacggccccttttttcccggcctgggtccggagggtttccttccgaggcgccccggttcccgcaagcggaggaaagggcggaacgtgccggggccggagctcaaaggccctggggccgttttgttctcccgccatcgaaggggcggggctgacctgaggcctccccgcaaaggtccccgaggcggcgggggcgggg

SEQ ID NO: 98822 - DNA, 467 bp, Homo sapiens
  misc_feature (1)...(467): n = a,t,c or g
ggcgaaanactgatatcctcgacagcgtcgnggaanncgtacagcagcagcagcgggcccaggagcagcagcagcagcacccggttttacaccttcagccccagcagataatgcagctccagcagcagcagcagcggcagatctctcagcaaccttacccccagcagccgccgcatccattttcacagcaacagcagcagcagcagcaagcccatccgcatcagttttcacagcaacagctacagtttccacagcaacagttgcatcctccacagcagctgcatcgccctcagcagcagctccagccctttcagcagcagcatgccctgcagcagcagttccatcagctgcagcagcaccagctccagcagcagcagctcgcccagctccagcagcagcacagcctgctccagcagcagcagcaacagcagattcagcagcagcagctccagcgcatgcaccagcag

SEQ ID NO: 98823 - DNA, 450 bp, Homo sapiens
  misc_feature (1)...(450): n = a,t,c or g
aggtggcnnnnnnnnaactgactgcatacntctagaccagncnggtggaattccgcttgaacccaggaggcggaggttgctgtgagccaacgttgcaccatttcactccagcctgggcaacaagagctaaactctgtctcaaaaaaaaaaaaaaatggattttgaagttgaaaaaaaattttaaaatcatttaatcaccccttttttgtctacagaggaccaacctccaccccgtaaagggaaagcttgcaccctaacatcctgcattaggggggttaacatcaccgcccccactgaaacttaaatatcctgactgtgtctgacaccttttatataccacagtttttccaagtggcctgctgtacaaagcctttaaaaaatctgcaaacccccaatgttgaggaaaaaaattgatttatattgcttaagtttgaacaaaataagaacttg

SEQ ID NO: 98824 - DNA, 476 bp, Homo sapiens
  misc_feature (1)...(476): n = a,t,c or g
aggatgtgccaggggnnncnnnaattgatgatcatgataacngtggnggaatccgccgggatggnctctatctcctgagctcgtgatccgcccgcctcggcctcccattgtgctgggattacaggcgtgagccaccgcgcccggcctaagcccatgttttaactgagcatcaggttggggtccaaaccaagaagagctgggcataggagttactttctcagtgctctgagagtagcacttttctacataccacaggtgtactgttatggaggcctattttgtagggtaattttgcataaagtttctgccccgagactcttgaggcattatcctaccatttattcagacccaggagacaactgctgatgtcatgaggcacattatgggcttccctggaaccctaacccagcaaccagcttttggtgtctagtctcacactcattttctcccacttgacttgtgttctcaaccagagc

SEQ ID NO: 98825 - DNA, 476 bp, Homo sapiens
ttttactttgtataatttttaacataaacataaatattttgagaaatagatatgttaaaaccattggaggaaaatatattgtaaagtatacaatagaaaaaaaatcaagcacaatacaacaaatacaacaaaaaattatcaaaattttcagaggaacagaacaaaatctagttttacaatcttcagaattcaatcccattataataaacatataaagaaacatattcaaagaaaaaggcaatcaatagagactgacctcgagatgacccagatgttggaattagtgtggatttttaaagtagttattgtaattcttactaaaatcaaaaccccaaaaacccttaaaataaatggataggaaatcacagcagagaagaagaaactacaataataacaaaggcttaagtggaaattctagaagtgagaacgttttcaaaattaaaaaataataatcagttgcgttcaggagcagcttg

SEQ ID NO: 98826 - DNA, 448 bp, Homo sapiens
  misc_feature (1)...(448): n = a,t,c or g
naacttcagtgtctactaggacagcgcggnggaantcctcgccttctggcagacacagtacaacaacatgaatgctgtcaacctcttctttttctggatcaaggcacctgggattcccacacccagctttgcttcaaggcgcactcattctcccttcttttcttttcttttttttctttttttttttttgggaaaaaagggttttcccctttgtggcccgggggggcctaaatctctgaatttaaaaacccccccccttggccctccaaagggggggaaataaggggggaaacccttggccccaacctaaattttttttttaaaaaattgggggggctggccggaattcccttttttctttaaaaaaaggggtccccgccccccattggggagaaaaaccccccctctcccttttgggggggccctaagggagagaaaaaaaacaccc

SEQ ID NO: 98827 - DNA, 464 bp, Homo sapiens
  misc_feature (1)...(464): n = a,t,c or g
ggatgcccncnttnctcnttccatgcgattanattaagtgtcgcggaattcctcgccttctggcagacacagtacaacaacatgaatgctgtcaacctcttcttcgcctggatcaaggtacctgggattcccacacccagctttgcttcaaggcgcactcattctcccttcttttcttttcttttttttctttttttttttttgggaaaaaacggtttttccccttgtggcccagaagggcctaaatttctgaatttaataacccccccacttggccctccaaaggggtgggaataacggggggaaccctttgccccaaccttaatattttgttttaaaaaatgggggggctggccggaatttccatttttcttttaaaaaaggggtttccgccccccattgggggggaaaacctcccccttgcttattggaggggccctaagggggaggaaccagaccccccc

SEQ ID NO: 98828 - DNA, 472 bp, Homo sapiens
  misc_feature (1)...(472): n = a,t,c or g
agtnaagancaccccannnnnnnttcctaaagatctntttataacctcngaaannncgnggacacaggctgtgcactgcagcaccagtgaattcaccaagacgaaaagttgagcacggtttgtgagacatggatttgcaatgaggagtcatttaccatgagtgtgtatacatgactcaatattgtttatttaagggagcagagcacagtcattgaagacatgagtgtgaagcataaggcctggctctagcaatataaaacactggcacgttccctaactttagtggattcctctgtgttcaaatgggaaagtggtacccatctcccgggctgtgggtgatcattgaatgagacacatgtcagaagccctgcacatcacaggcccggcgcgaccgctcacgcctgtaatcccattactttgggaggccgagacgggctgatcatgaggtcaggagatcaagaccatcctggct

SEQ ID NO: 98829 - DNA, 461 bp, Homo sapiens
  misc_feature (1)...(461): n = a,t,c or g
atggggtnnnnnnncccgatcacatagcatttgcgnggcattacttattaaccttttaaaatgtggtttaaaggcaaagttcagcccctgaatactaaaaataattgaacatacagtacttgcggatcactctgtatgagacaaagggagtagtatgaagttttatgtttttttcccccttaaatgaaatctacattagtcttttaaaaatatgtatttttgataaccctagctgacagaactccatcgcaaggttattgacttattttggcagaatgtgtttattattttgtacctctgtacacaagcacgtatgtctcacttgacattcagtgcgtcttaatgaaaaagaacacaaattgctcaatgcanaaaaaaaaaaaaaaaaaaaaaaaaaaaaaaaaaaaaaaaaaataaaaaaaataaatantaaaaatttttttttttggcgcccctcctcc

SEQ ID NO: 98830 - DNA, 485 bp, Homo sapiens
  misc_feature (1)...(485): n = a,t,c or g
tggacgggnnnnnncctggagaccctaggtttgagggcgttggcgnctcgatctcttgaccttgtgatccgtccgcctcggcctcctaaagtgctgggattacaggcatgagcgactgagcccggccaatggcagggctttctgtgagttgagtagaaggactatctcaaagttccccatgatcagttgagggtctatacctcaggtttctccacatcacaggagctgtctgtagtgtttgcacactcttaagggactaccctgatatcttcatgattgtcagagggctgtctgagctttctgtgacctagggaagagttagcccaagatctccctgatcaaaaaaggaataatcataacaattataattattattattattttggagacaggatcacacttttgtgctgaggctagagtgcagtggcacaatcacagctcactgcagcctttacctcctgggctcaagagatctctcctgcctn

SEQ ID NO: 98831 - DNA, 455 bp, Homo sapiens
  misc_feature (1)...(455): n = a,t,c or g
agggcaacccncggcccgnnnnnnaatcgagnacctatattgcagtgcggtggaattcggaggctgcagtgagctgagatcacgccactgcactccagcctggccaacagagcgagactgtctcaaaaagaaaaaagaaagtaagtatataaatatgagatagtacttgagttattacttgaggttaagctactaaaagcaatatccccatattttgaattatgaccttatagcaccaatacctattgcagtaccttgcacagatattcaataaacatttgttcaatgaataaatgaatgaaaagtaaaagcatacttatagccaagaatatgaagagaatgtttactttttttttcatttaggtctggcaatgtaatttccaaccaatgatctgaatacaggtcatataaactgagctctctggacagaagagtaatgcatcatggcaaattat

SEQ ID NO: 98832 - DNA, 442 bp, Homo sapiens
ggggaaatgagacactatccgctggggacttccaactttaggaagcaagtcaactacaaatgagaaaaaaagagagaaaagaagaaaaaagaaggaacagcaacagagtgaagcaaatgagctcaggaatcttgcttttaagaaaattccccagaaatcctcccatgctgtttgtaacgctcaacatgatcttccattgtcaaacccagtacagaaggattcacgagaagaaaattggcaagagtggagacaaagagatgagcagctgacatctgaaatgtttgaagcagatcttgagaaggcattgttactaagtaaactagaatatgaagagcacaaaaaggagtatgaagatgctgaaaatacttcaactcagtccaaagttatgaataaaaaagataaaagaaagaatcatcagggaaaagacagacctctcacagta

SEQ ID NO: 98833 - DNA, 457 bp, Homo sapiens
  misc_feature (1)...(457): n = a,t,c or g
aggatgagcncccccnncatgatgactgaagacatngcggnggacttcataaaatggaaaagcttcatttcagtcaagctcaatgaacattgttttcatcagtgagatgtgtgatttttgtacctactttgattctcttgatcactgcgttttttttccccacagtgaacttttacagcttttactcgacaatatctcttcctcctcttaatgatatcaccccaatattttttattgaggtgattttacaagcagtgatatgtacagatcttaagtgcacaattaaatgagtttagacaaatgcatatactcatataataccatctcaattaagatacagaccactgggctgggcacagtggctcatgcctgtaatcccagcactttggggaggccaaggtgggaggatcgcttgagctcaggagtttgagaccagcctgggtaacacggagaaacn

SEQ ID NO: 98834 - DNA, 436 bp, Homo sapiens
  misc_feature (1)...(436): n = a,t,c or g
attgtagaccatattaagngcggtggaattctgccaagcttctgctctgaaagctgaggccctgggtgagcagaaaaccttccagttaaggaggggtccgctgtgctcctgtaatacttaggttgaggtgataactagccttaactagccaggttggtcaccttggttacaagcgtgtgtcttcttttccagtaagtaggggggttttctgttcatcgtttcgattagtttaattccacagtggtcagaaagcgtggattgggtggtttcattcatttgaacttgattcagacttccttctttgcccaccttgtggtcagcttaacatatgtgctgtgtgtgtctttttttgtttgtttgtttttgagacagtctcacttcgttacccaggccggagtgcagtggcacaatcttggctcactgcaacctctgcctn

SEQ ID NO: 98835 - DNA, 435 bp, Homo sapiens
  misc_feature (1)...(435): n = a,t,c or g
nttcgaatagcagnaccactaggccagngcggtggaattcataaaagaacacccaggtgtggtagagcatgcctgtagtcccagctactttggagactgaggagggagtaccccttgagcctgcgaggcgcacgttgcagtgaaccaatattacatcactgcactctaatctgcttgacagatcaagatcctgtctcagaaacacccatctagcaaaaaaaacctagaggcgctatttctttttaaagtttgctttttctttcttacccaaattactaatctatgccactaacgaaaggaatacaaacctccatatgtattattatctccacagccctgcggaaggacaatctgatttttaactttcatgctacaaataataattggagtagattaatttgaattttatcaacaaaattattgccatatgatgtt

SEQ ID NO: 98836 - DNA, 442 bp, Homo sapiens
  misc_feature (1)...(442): n = a,t,c or g
attagtgacctcngannnncnctgatgacctctagtccagtctggtggaattcgtacaccaggcatttgctataatttatgttttatttaaatacttctttagaacctttctaggtgctagtcattattcttggcactttgcataatcttcctagtatgtgtgtttttgtaatttcttggttcttcctcaaaggcagctatcactttatactattgtcaatatatggaattctttttttttttttttttttttgaaaaaaatttttttttttcccccccgggtgggggggaagggcccaattttattttattggaatttccccccccggggttaaaaaaaatttcctgccctacccccccaagggggtgggattacggggttgcccccccccccttagttaatttttggttttttaaaaaaaacggggttccccccccttgg

SEQ ID NO: 98837 - DNA, 359 bp, Homo sapiens
  misc_feature (1)...(359): n = a,t,c or g
caagattcagttcaggtgttacctcctaaacaaggacttcttttcaccttctcaggctgtgctaagtatctttctccagcatttccacagagcagcagtgcacatctcttattataacagttaccatgccatgctgtaattatctgtttacatctacaagcatagactgtcaactactgaagatcaggatcactgcatctccagcatgtggcagagtgcctggcacatcacaggtcccaataacaattccttgaactgggccaggcacggtggctcacacctgtgatcccagcacttcgggaggccgaggcgggcagatcacgatgtcaggagatcgagaccatcctggccaacacggn

SEQ ID NO: 98838 - DNA, 130 bp, Homo sapiens
cacaaccacagctcgctgcaccctccatctcctgggctcccacctcagcctcccaagtggctgggactacaggtgtgtgtcaccatgcctggctaatttttctattttgggtagagagtcgacgcggccg

SEQ ID NO: 98839 - DNA, 96 bp, Homo sapiens
ccgggaggctgagtttggagaattgcttgaacccgtgaggcggaggttgcattgagccgacattgttccattgttctccagcctggttgactagag

SEQ ID NO: 98840 - DNA, 448 bp, Homo sapiens
  misc_feature (1)...(448): n = a,t,c or g
ggatatgatcgtgggtatgacagatatgaagactatgattaccgatacaggtaatgttttaacttgagctttctgttctaaattagatgatagtagtgttacttggcacttttatgttggatacatatgaataaaaacttgatttttaaaatagatcatatatgacgcctttgggagcagaagttagcagtctgtatatgtcagtattttgttgtgctatatacttttctgggctcattggcagaaagagaacttaatattaagtagttatcaccttaggtacattattattttgaatgatgaggaatttttattttcatctgcctcagtggagtgattatatagtatgctaagtaatctttcatttcttacagaagacgatcaccttctccttattatagtcgatatagatcacgatcaagatctcgttcctacangcccagtatgg

SEQ ID NO: 98841 - DNA, 202 bp, Homo sapiens
cccattttattgcagggaggtggagggagtgtgctggggtgtgagcttttatgatgctggaatacatcaatgagggggcctatttgggaggctgaggcgggagaatcacttgaacctggggggcggaggtcgtgcggtgaggcaagaacatgccattgcattccagcctgggtagtaagagcgaaactcgtcgacgcggccg

SEQ ID NO: 98842 - DNA, 349 bp, Homo sapiens
aacacagaaatttgacaaagtctgcatctgtagtgtgggaagccagaaaaaaaaaaaaaaaaaacccccttttgacaaagcccctttgggtttaaaacccttatataattaatttttgctcttgggaaaaaaatgcccctaaagggatagaagggaaaacccgtttggggaccccctgaaaaattccaaataaaaattataaaaccagcccaggcccgggggctaacccctgaaatcccacctttttggaaggcccaggcgggggtatcacctgaggccaggattttgaaaccaccctgaccaacatgggaaaaccccatctcttcttaaaatatgaaaattacccggc

SEQ ID NO: 98843 - DNA, 764 bp, Homo sapiens
gtcgcgataaacatatcaataatttgaaaaagaaatgccagaaggaatcagagcagaaccgggagaagcagcagcgtattgagaccttggagcgctacctggctgacctgcccacactggaagaccatcagaagcagagccagcagcttaaggattctgagttgaagagcacagagctgcaggagaaagtgactgagctggagagtttgctggaggagacccaggcaatctgcagagagaaggagattcaactggaaagcctgaggcagagagaaacagaattctcctccgctggacatagcctgcaagataaacagtctgtggaggagaccagtggagaaggtccagaagtggaaatggagtcctggcagaagcgatacgattcgctccaaaagattgtggagaagcagcagcagaagatggatcagttgcgctcacaagtacagagcctagagcaggaagtggctcaagaagaaggaacaagccaggccctgagagaggaggcccagcgaagggattcagccctgcagcagctgcgcacagccgtgaaggagctttcagtgcaaaaccaggacttgattgagaagaatctgacactccaggaacacctgcgccaggcccaaccagggtctccaccttcaccagacacggcccagctggcacttgagctgcaccaggagttggccagttgccttcaagatctgcaggctgtctgtagcattgtgacccagagggcccagggccatgaccccaatctctccctg

SEQ ID NO: 98844 - DNA, 365 bp, Homo sapiens
ttttgatttttgtagacacagggtcccaccatgttccctaggctggtcttgaactcctaggctaagtgatcctcctgccttggactcccaataagtacaggggttacaggcatgagccaccatacctggcctctctgacagacttaatccaagaggaaatcttaaatacatttagaaaaacagataagctccatattcttcagacaatcctccaaagatgactggagctatcaatgagctttttgtttattatttttaaaattttcttttgtagagatggggccttgcttggtgcccaggctggtctcgaactcctagcctcaggcgatcctcccacctcagcctctcaaagtgtttgggttaca

SEQ ID NO: 98845 - DNA, 263 bp, Homo sapiens
aagaaagccagcccaggctgggaaaagtggcttacacctgtaattccagtgctttgggaggctgaggttggaggatcacttgaggtcaagagttcaagaccagccagcacaacagagcgtgacgctgtctctacaaagtaaagagtcagcccgtcctttgaatctttgaagtcagatattagcttacctagagctgtgaaagtcctaaatggcatctcctgaagtaaggctgttttgtctctgttaaaacgtcgacgcggccg

SEQ ID NO: 98846 - DNA, 358 bp, Homo sapiens
tgccatgttagccaggctggtcttgaactcctggcctcaagtgatccacctgcctcagcttcccaaagtgttgggattacaggtgtgagccaccgcacttggtgattcctttgtatttatattccaaaccctattcagagacttctcaggcctttttctccatacccagtgccttaaatcggttctgaattggtctttggttggattgagactgttttcatctggcattcagaccttgccttcttactcctccttactcctccttagacctgtttgtcctcatgtcttactgcttcccagctcagcgtctccactctagttgggttagtcagggcccacgtaaatgaaccttcaaatg

SEQ ID NO: 98847 - DNA, 129 bp, Homo sapiens
  misc_feature (1)...(129): n = a,t,c or g
atacacaagtggngggattgtaaaatggtacaaccactttggaaaagagcttggcaatttcttatgaatctaaacacacatttatcctgtgacccaactgtcctgctcctagatatacttacccaatag

SEQ ID NO: 98848 - DNA, 382 bp, Homo sapiens
  misc_feature (1)...(382): n = a,t,c or g
cgtgaacccgggagatggagcttgcagtgagccaagaccgcaccactgcactccagcctgggcgacagagggagactccatctccnaaaaaaaaaaaaaaaaaaaatttccttaaaattgggcaacaaaggacccccggtttaatttccccaaccggggaacttttttccaaagccttcaaagcccaaaaatcaaccaagggcggagggggcaactaaactagtttttcccaaggggggtaaccaaaaatttgggaaggtacctcccgctaaccggggtttaagggacaaaaaaaaggcgaaaagaatactgggccaacgagggcccctcaaaatttaagttttcccctagtacccaaacaataccacagggccaaataacc

SEQ ID NO: 98849 - DNA, 382 bp, Homo sapiens
ggagaattacttgaacatgggaggtggaggttgcagtgagccgagcttgcaccactgcagtccagccttagcgatagagcgagactccgtctcaacaacaacaacaacaacaaaacaacaacaacaaaacaaccaacttgggctattttcttatccttttaatcccttgatttaatcttttgctgatgatggttggtgtgacttcagatatgaaacctcttaaatttatggtcaggaattcattctgtttgtgtgaatgtttctgttttgaagagactctgttcttctcatgtccatcatgagatgctaattttaagtgtttgtttcttctttaaaattgcctttccacagctgcacggaacgtcatgaaggaccaacgcct

SEQ ID NO: 98850 - DNA, 388 bp, Homo sapiens
ataaaaggcaaccaaattgggaaaaaagaagtaaaattatttctgttcacagatgacatgatcttatatatggaaaaccctaaagattcagcgaaaaactactataaacaaagcaaaacattctgcctgcctgtggtactaggaagaagctgcaagaggacttgccctctggcctgaaggcaatgtaaagagcagccaagtattattgatatttcctcacccttcggctctcagtaaaggatggtttttccactctttcaggatgcgatgtatagctctttgtacagcctgcaacacacaacttaatcaccacctctctggccactgccacaggtcttacagcagcagtccccaaccttttcggcacccaggactgggttttttttat

SEQ ID NO: 98851 - DNA, 366 bp, Homo sapiens
ccaggttagtctcaaactgctgggttccagtgatcctcccgccttgacctcccaaggtgctgggattatgggcgtgagccaccgcactcggcccagaaacacagattttaaaaataatactcaaaagtccaaaaatactcagtagacatttggaagcatctaactgtaatgaaatggaatgacagaaagaaaactagagagaactacagtaagttagcaatggaatcataagcgaatctgaagaaacctgttttcattaaatatggaagggttatagcttgaagcctattggaaatatgaatgtgaaggaaattgactttgtcaatgaccagatttttatatcaaccttccttttttctgtccttt

SEQ ID NO: 98852 - DNA, 204 bp, Homo sapiens
aaactttaagatttagaagaggctgttgtggcctggtgtgatggctcatgcctgtaatcccagcactatgggaggctgaggagggaggatcgcttgagcccagaactttgagaccagcctgggaaacatagtgcgataccatctctgttaaaaaaaaatttaaaaaagaggttgttgatcattaagatggcgtcgacgcggccg

SEQ ID NO: 98853 - DNA, 369 bp, Homo sapiens
gctttttagcacctataagacagactataatatggtttgttggagggcaaattataatattcattatagttaacaagtatatacatacatacacataaatatattaacttattagggttttaaaaaaatttgctgtgatatatagtccatcctttcagccgattaatttgtttcagtattaatggaattctcttgatttttttttttttttcccttcctttttcaggggctattcaagtatgggaaaagttcaggatgcctttattttttacaggcggtttattgataaatcaaaaccaagggcaaatacatggggttcaataggggggctatatcagcagcaaattcaccccatggatgctttacggg

SEQ ID NO: 98854 - DNA, 327 bp, Homo sapiens
  misc_feature (1)...(327): n = a,t,c or g
cgggaggcaagcagacaattactgcattaattaaagaaggaatctgtgaagacctggattgggaagaaaacattggagaaagcgaagctcctctgggcnanncnantaatgggacaggtggagataggctgagcaacaggagaagagctggaaggtggtcagagaaggggacagggagctgggaaacttgccaggagcctagttactgagaagttcccagttgaagatggcagggagattttttttttcttttttgtgagacggagtcttgctctgtcacccagactggagtgcagtggcgtgatctcagctcactgcaacctctgt

SEQ ID NO: 98855 - DNA, 480 bp, Homo sapiens
  misc_feature (1)...(480): n = a,t,c or g
agaggtnnnnttacgaatattatgaccttgctggaattccgggaggctgaggcaggagaatcgcttgaaccctggaggtggaggtttcagtgagttgagattatgccactggactccagcctgggcgacagagtaagactgtctcaaaaaaaaaaagtttaataaaattgttaaagtttaatgacacaaaactttgatttataaaactaatatatgctctggatatgcaaataaacaagattattaccccctttggctatgggtagggataagggttatttacattttctaaattgaagcaagttataaaaagtttttttgtatcaaaaactaggcttggacctcttttattctttttgaaatggagaagttaagctactaattttgttttcttgctttggttagagacctgcaaaattcaatcagatggattctcacacccgtttgcaaatgactgcctctggccctgttgctcatcct

SEQ ID NO: 98856 - DNA, 473 bp, Homo sapiens
  misc_feature (1)...(473): n = a,t,c or g
cgaaggtcggggtccnnnanccagggtaactgncnatcggngaaanncnggnnctaacccaaatactcctgtttcttccatgatgttgctatttcatctgaagcctattcatgagaatttattctaaggaggcattataataagcaaacagatactctggaagatatttggaagtaggcacctgatggccttttttttttttttttaaaaaaaaacggggtttatgttccccaggtgggtctggaaactccgggggcaagggaaccctcccaccataccctccaaaagggttagaataacgggcggaacccgggggccccgccccgggagggccttttatcttataagaataaaaggggatcccctgtttcttggaaccccctctgagggggaacaaaggttgggaagggcctaaaatatttaattttgggcccaaggttaaaaacccccccgggtgcggggagcaaataaaa

SEQ ID NO: 98857 - DNA, 467 bp, Homo sapiens
  misc_feature (1)...(467): n = a,t,c or g
agtgcggnnnnnnnnnaactgagaactgagaccttatgcaangcggnggaattnggaattcaaacatttggaaaaaatgtggttgtggctggaagatccaagaacgtagggatgcctattgccatgcttttacacactgatggagagcatgaacggccaggaggtgatgcaactgtgacaatagctcacagatacacccccaaagagcaactgaagattcatacgcagctggcagatattatcatagttgctgcagggtctctctctatttcccatgctggagtgcagtggcgcaatcatggctcactgtagccttgacctcctgggcccaagtgatcctcccacctcagcctcctaagtaggtgcacaccaccacgcgtagctaatttttgtattttttgtagagagatttcaccattttgcccaggacctctccaactcctgaactcaagcgatccacctgcctg

SEQ ID NO: 98858 - DNA, 460 bp, Homo sapiens
  misc_feature (1)...(460): n = a,t,c or g
ctcgacaattgatgatatagcacagngcggnggaattcctttaacaaatctctctgtgcctctctttcccctacccctcccagcctctcgtattctttgttctattttttttacttatatgaaatcacctttaaacacacacacacacacacacacacacacacacacacacacacacgcaaatgagggggagatatatataaaatacacattttttctgtacccagatatttttattttaacaatctaaattggagattattatgtatcacccaatataaattaatctcattctttctaacaggcgaatattacatatatagttttaaatcagtctctattgataggcaggttgtgcccttactctagtttgaggctgctttaaagaaatgctacaggacatattgctgcacacacatctttgcattcatttatgtgtgagnagaagagaataatttta

SEQ ID NO: 98859 - DNA, 517 bp, Homo sapiens
  misc_feature (1)...(517): n = a,t,c or g
aattgcgatccctattccagngtggcggaattcttcgagtngcctccgccgtgnggtgtaaatataagtatgctggagctcatccagggaataaacattatgagctctcaaaaaatgttttcggcacaacctggcgtgaatgcttttctccggagaaacactgaaggcggcgttcttgcgattcaagggtacactgcgtccacgtttatttcagtttcagactgaggtctgctaagaagcccggcctcaaactcaagataaaaacagaaaagtcccagtgttgacgggagtggaggagcccgtgttcgcttcaaggtgccggcgtgctgctctaacctgtgctatatatactcgagcactctccatataatgcctccatttaccaacttgctcttaaaaaataccaaagcaggccgggcgcggtggctcacgcctgtgatcccaacactttgggaggccgaggcgggcgcatcacgaggtcaggagatcgagaccatcctggccaacgtggagaaac

SEQ ID NO: 98860 - DNA, 503 bp, Homo sapiens
  misc_feature (1)...(503): n = a,t,c or g
cggatatanggggnnnnnnnnnntttcgaganccctatccttgtggtgcaattcttctaatcaaaggcctttcagattggaggtatggatatatatccagaaatgcagttgtgattctatgtgacacttgaattattcaccttctcttttccacctttcttctttgatgaaaaaagagccaataatctcgaatttgttccacactgcctgtcttggtattagccacatgcacaagatacactggatgtttctctcccttaggttctgtccatgagacctaggattcatgggagtgcagcccgggaagaagacgaacacccttatgaactgttgttaacagcagagacaaagaaagtggtgttggtggatggaaaaacaaaaggtacgttccccacaactcctggcagaaccaactccaaagggatttttaaagtttgtgatcctgagtggaaagggaagatgtcgtaactatgatattccttgggttgtggtggttgggtttn

SEQ ID NO: 98861 - DNA, 1319 bp, Homo sapiens
aaaatttacatactgagcagtcaggtgtgtggcgtgcacctataagccaggctattcgggaggttaaggctggaggatcacttgagcccacgagtttgaggctacggtgaactatgatcataccactgcactccagcctgggtgataacgtgggaccctgtctcttttttaaggaaaataaaagaatgtacacattgatataaattttcatctaccagaatggccagaatccaacattttaataacatctacattggtaatgttgcaggttagcaagtactatcataaattttagatggtatgtgaattgatgactacccctatgaaggacaatatgccaatatctttcaaaattataaatgcacacagtctttgcccccaaaattcttatctttgggaatttattctacaggtacaatatttatataaatgtgaaatgacatatgtacaaggtctggaaacaacccagctgcccattaatagaggacgggttaattcaacactggcacattcacataacagaataccaagtatctacttcaaaaaatgagaaaactatctagtcatatgtgaagactgcccaagaaatactagggtgaaaaaaatgaagtcgtatgtatatgatgtcaatttttgagtaaaaatgagagaaaaaataagactttccatttgtatatgtttgtacctgtctacaacagtgtgaatggaaacctaagaaaccaagagcacaggctattcatggtgggagatgagtgtgcagtggaggaagctgggccaaggacacaggaacacattcactgaataactttttatattgtttgtttcttttaaccatgtgaatgtattacctattcaaaaaattaaataagataagcatattttataagctttatgattcaatacaaatcaaacaatgcttttaattgttcccactttgtagctgaatggaaataggccaacttacaaaatgtcacaaaggttctagaatcagtctttctcgtctcaaattcttgctccacaacctagaatttgtgactatggacaggttacttagccttttttatcctcagtcttcttacttataaaacagagaagtaattgtacctacctactagtgctattgtgaagattaacggtgtattcttttaaagccaaactatgcatgtaaaagcccttaatacaatgccagccaatgcttgccattatgataagaaacaacctcagactacttataaatacattttctcccttctccacaggttacaatcaaattctcatgccataaaaagaaacacttaaaatagcggggaaaaacaagt

SEQ ID NO: 98862 - DNA, 420 bp, Homo sapiens
gggctgggattatgggaatgagccgccgtgcccaaccccttacaagggtttttatgtcgtcatgatatcaccaattttttcggagaaatgcctggattcactaggacgaccccacagttttgcattcatacctggctgaataacctgggggtttcagaactggttcagtatctttgctggacttttttttccaataggaatctgaactgtgattccacctaaagaaagaactgttccttaactccactggctcgtcaaagtaactgtaggagcaagagtactacagcgactttggagggccttgttgacactcgtcctgggctctctcacttccacagatgtgggggatgcctccttgaagttaatggcagtcacatatctaggtctagcccatgagacaggagcagacactatggtgtc

SEQ ID NO: 98863 - DNA, 493 bp, Homo sapiens
  misc_feature (1)...(493): n = a,t,c or g
cagagagngncncccnccattgagacctgatgacatgctacgcccgcttggcacgaggcctcgtgccaaagaatgtaaatcttttagtttgattcttcttatccttgaaggaaaattagcttatggtataacacgtaaaaaaaaaattactgtttataaaatttttaagagaaatagaacccgtaattgatgattacattattacagaatttggcagtacctaaaaatagtgagattttctcctctcattattaaacattattatagaaaaatgtttttaattatgtaaatattttatttctcaggccgggtgagagcaaaactttcagcaccacttgctggcatgggaaatgccaaggcagattctagaggaagaagtcgaacaaaaatggtgtctcaatcacagcgtatgtattgcttatcagccctcctatatttgtcactatgttaggataagnggcgttgcttttgattactgcattacacgaatgac

SEQ ID NO: 98864 - DNA, 423 bp, Homo sapiens
ggggcccaagtgcaatgaattcttcaccaatgaattctaccagacatgtaacaaaaaattaatacaaattcttcacaagctgttccaaaaagcagaagaacaggaatatttcccaattttcttttcttgtgatatccttttctagttttgggattagtaatattgacctcattttaatgaagtcaatatatttcaaaacatcatactgtacaccataaatatatgcaatttatgaatttatgtataaaataaagtcaatattacactaatgacaaaactagagaaggataccacaaaaaaagaaaattacagaccaatatctcttctaaatatagacatgaaaatcctcagcaaaatactacaaaaccaaattcagcaatatatacaaagcattatacaccatgaccaagtgaaacttctccg

SEQ ID NO: 98865 - DNA, 423 bp, Homo sapiens
  misc_feature (1)...(423): n = a,t,c or g
ggggcggcgtttgcacggagtgcaatcactgcgtccttacgggggttgcaaggcgtccgaagtatgagtccactagcaaaagtccagaaactcgccaggtaatagtattgtgtctcttcaaaatatcggagaataatttctttctcgctgatcgcctaacttctactgacgaagcttggaagttgcagaagatggagttcgctcttgttgcccaggctggaatgcaatggcatgaccttggctcactgcaacctctgcctccccagttcaggtgggtctcctgcctcagcctcccgagtagctgagattgcagaaaccacaataaaggctctcgcccacattcttccctcaccctctgcctcctgactgacactggtgctttcctgggtgaaccctgacggtgtggcatgcctcttcttgtgn

SEQ ID NO: 98866 - DNA, 530 bp, Homo sapiens
  misc_feature (1)...(530): n = a,t,c or g
nccggcnnnattgancccaattgatccctattcagtgtggcggaattcgcctttaatgcctataaagtccagacagaaaaagaagaaaaagaagaagcaagatcaaagtacaaagaggctaaggaatcctttcagcgttttcttgaaaatcatgagaaaatgacttctacaaccagatacaagtaagatgtttagtgttacatggcctatgtttactacattgttgtttgtgtcatacttttctgccatgtgcagtagctgatccagagctcattaaataaaactagatgattatgaatgtgggaacttgatgaggtacaaaataaatctgtagttaaatgtagaatttaacttgttgacttaataagtttttgagagactggaagaaagggagaaagactgtattcaataatcaagttggaggccagacgtggtggctcacacctataatccctaccgtttgggaggccaaggcagcagatggcttgagcccangagttcaagacagccttggctacatgggcaaaccc

SEQ ID NO: 98867 - DNA, 484 bp, Homo sapiens
  misc_feature (1)...(484): n = a,t,c or g
aggagcggggnnnnnnnaactgagaactgagtacatgcggnggaactccggaaggctgaggcaggagaattgcttgaacccagaaaggggaggttgcagtgagccaaggttgtgccagtgtgctccagcgtgggcagcctgggcaacagagcgacactctgtcaaaaaagaaaaaatcaacttataaacacagaagagttgaaaaaatactacagtgaacacctatatgctattcaattggattcaccagttaccattttgttatatttgctttctctccctagcatatgtaagattgtatatgtgccctttttttaagtaagttgccaatctcatggcacttcacttttaagtacttttgcagatatcgtctaagaactaggatattctcctatgtaatcacagtaccattaatccacccaaaaaatttaacaatacgctaatgatacctaatgtatagtttggaatcagctttcttgtagaa

SEQ ID NO: 98868 - DNA, 489 bp, Homo sapiens
  misc_feature (1)...(489): n = a,t,c or g
aggtttcccnnannaganngnnnccttgagaccctaggattgatgaccttagtacagtgcggtggaattccaggattttgccatgttggccaggctggtctcaaactcctgacctcaggtgatctgcctgcctcggcctcccaaggtgctgggattgcaggcatgagccaccatacccggcctattttattacattttatttattttattttattatatcatccaccatgtctggcctattttattatattttaagatattttaatatattacgtgtgttgtaattggattatcatcggtgagctttgtgagtgagtgtcttggagatgactcctcctgaccagcccaggaccagctttcttgtcaccttgaggtgccctcgccccatcacactcttacgcattactctatgtctactgttatgggtgtgtaattgtataccatagatgcttactctgtaaacagacacttctagactgtgttatttcg

SEQ ID NO: 98869 - DNA, 439 bp, Homo sapiens
  misc_feature (1)...(439): n = a,t,c or g
natcgggcctgaagnacatngcggggacttcggccctgagtgatgcttatgttagtgtgtgttcaagtctttataggccaaggttgaggcctagataagaagagggctcagaggagcctggttagagcctgatcaaggagagaatctttgccagatatactgataggcataaaaatatggatcaatctcaaaaatatactaagtggtccaggtgtggtggctcacacctgtaatcccagcactttgggaagctgaggtgggagggttgcttgagccgaggagttcaagaccatcttgggcaacatagcaagactctgtctctatttaaacttaaaataaataaatatatatatatacacacacatatatagtcctaagtgaaagaagctttactgaaacatgtacatatagatgaaatcttaggacaggcaaaactaag

SEQ ID NO: 98870 - DNA, 460 bp, Homo sapiens
  misc_feature (1)...(460): n = a,t,c or g
ctggaacnnnnnttcgagttcgttagccctngcggnggaattcggngaatagtagctatcctaatgggtgttaggtggtatctcattgaggttttgatttgtatttttctaatgatcagtgatgttgggtatcttttcatgtacctgttggccacgtgtatgtcatctttggaaaaatgtctatataactcccttgcccattttttatagttttttttctttttttcattaaactttttattatttttattttatttatctttttttttacagagacagggtcttgcaatattcctcaggctcaccttgaattcctggacttaagtgatcctcccaattcaacctcttgagtagcttttgactacaggcgtgcaccactgtgcctaggtttttgcccatttttaaataggattatttgatattttgttggtgagttgtagaaattacttatatattaaat

SEQ ID NO: 98871 - DNA, 454 bp, Homo sapiens
catcgaaccattgtagacctagcagtgcggggaattcgaggagagaaggagaggaagaaaggagagagaaacaaagagaagcaagaaaaggagagaaggaaaggaaggaaggaagaaaggaaaaggaggatagagggcatgcctgtcttgttctaggtcttacagtaagagcttacatttcactgtttaatatgtggacagctggacattttcttctatacatggcatttattggcttgagatgcattagtcctatactaattattatttacagattatcatgagggaatgttgcattctgtcaaacttttgttttgttttttgggctggagtttcactcttgccatccaggctggagggcactggcgcgatcttgggtcattgtgccctctgcttcccaggttaaagcaatcttcctgcctcaacctcctgagtagctgggattacaaacgcc

SEQ ID NO: 98872 - DNA, 488 bp, Homo sapiens
  misc_feature (1)...(488): n = a,t,c or g
gcgtccnnnaaatgagncccctggtanaccagcacangcggnggaantctggagggcaaaagagtcagaggaaggaatgcagtagaagaaagggcgggagagattcagagcttgacttgccccactgttgctggctttgcagcaagaacacaggacctcagtcctacaaccacatggaactgaattctactgacaacctgaatgagcctggaagtggcttctccccagagcttagccttgccaacaccttgaaaaacttgaagcagagaaaccagctgagcccaccaggtatctgatctactgaactgtaaggatgacaaaactgtattgttttggctgggcatggtggcccatgcctataatcccagcacttttggaggccaagacaggcagatcacttgagccaaggagttcaagaccagccccaacatggtgaaactctgtcccttaaaaaaaaacaaaaacaaaaacaaaactttattggttta

SEQ ID NO: 98873 - DNA, 492 bp, Homo sapiens
  misc_feature (1)...(492): n = a,t,c or g
agcgttctnnaaactgagaccatagatagatctggcggaanncccangcccagccccgaaaacccttttacagatgaagatgctgaggctcagagaggttagataacttgcctaggcacacacagcttctaagtgacagagtttgaatgcaggtctgtgtgtctgtcttcaaagcctgtgcccttgcctgtgtcagccctgggaggcactggttaacctgtctccatctcaatcatccttaggtgtctctccctccccactcctggctcccgtgtcctctgcatgctggaagggatggatgggataagcctgggctgggtgcccctgccatctctgcctgtgccactgcatcctctagacctgagtctccctgtgtgccgacaggttggcgggacgaagactggcgtggtgcggtacgtgggggagacagactttgccaagggcgagtggtgtggcgtggagctggacaagccccttgggaagaatgatggn

SEQ ID NO: 98874 - DNA, 413 bp, Homo sapiens
  misc_feature (1)...(413): n = a,t,c or g
actttgtccaatattaatatagccatataatttttcccttggttaatatttgcatgatctattttcatcctttcagttttagactatgtatgtctacatacttaaaatgtttcttttgtaaataaaatatggctgtgttttattttttaaaaaaaaaaaaaaaaaaaaaaaaaaaaaaaaaaaaaaaaaaaaaaaacaaaaaaaaaacccatataaaaaaaaaaaaaaaaaaaaaaaaaaaaannngggggggggcccccctttaaaattttggggggggggccccctactcccgggggggggaaaaaatttttttttttttttgggggggggggataaaaccccccggggtgttgtgggagaagaacccttttttgggggggggggcacatcccccccaccccccccggggg

SEQ ID NO: 98875 - DNA, 398 bp, Homo sapiens
  misc_feature (1)...(398): n = a,t,c or g
cccacgcgtccgcccacgcgtccgcccacgcgtccgtccacgcgtccgcccacgcgtccgaaaaaaaaaaaaaaaaaaaaaaaaaaaaaaaaaaaaaaaaaagggggggggtttttaaaaaaatttttgggggggcaaaatttaaggggggatgaaaaaaaaaaatttttttttttaaaggggggtattaaaaaacctcttgggattttttgaaaaaaaaatttttttttggggggggaaaaaattggaaaaacctcccaaaaaaaataaaagttttaaggaaaaaaaaaaatttttaaggggaaaagggggaaaaaaacccttaaatgggtgggggaaaaaaaatgnnanannnnngaaaaaaaaaaaatttttggggggagaatttgttttatttg

SEQ ID NO: 98876 - DNA, 392 bp, Homo sapiens
cggggtttcactgtgttggccgggatggtctcgatctcctgacctcgtgatccacccacctcggcctcccaaagggctgggattacaggcatgagccactgcgcccggccagaacttttagattttctcatttcccagctgcatgttaggtaggattattttaatttagctttacaaagttacatatttaaattacgctaaaatgcagctgtctgcactcactggatttaaatagtgtagctgatttttgtagcattactttagtgagttagtacctacgggccaaagccttaagtgttagaaaggctagagtctagccacaagtcgaattgtcaaagaaaagccaagcattatacttctttatctggctttctgtatcatttccttattag

SEQ ID NO: 98877 - DNA, 417 bp, Homo sapiens
  misc_feature (1)...(417): n = a,t,c or g
ccctgtctttagatttacagtccaatagcttcactcagccattttacctcacccccaaaaaaaaaaaaaaaaaaaaaaaaaaaaaaaaaaaaaaaaaaaaaaaaaaaaaaaaaaaaaaaaaaaaaaaaaaaaaaaaagaaaaaagagagggggggggggggaaaaaaaaaagaccgaggggggactcaaaaattggagggggggggaaaaaaaattttttttttaaagggggggtaaaaaaaaaagggggggggatttttgggaaaaaaaaaatttgggggggggggggaaaaaggggaaaacccgcacgaaaaaaaaatgggggggggggaagaaaaaaaattttgggggggggggggggcgccccccttggggaagnggggggggggaaaaannnacccggcttcccaataaacg

SEQ ID NO: 98878 - DNA, 504 bp, Homo sapiens
  misc_feature (1)...(504): n = a,t,c or g
nggagcgtgccnngnnnaatgatcgactgaggntcctccccgaaanccccgggtcgacccacgcgtccgactttctaaaaaggtgaagctcaaagtcacacattcatttataaggcgcatgagtttctcattttcccatgtacgagcattgtaaaggaattcagctgtattaatttctatttcagatctagaattgacattttgccttcttgtttccaggtgtttctattttttgtattctttcagagaaatctcatatttcggtgtatttattgctgttactactatatttactgctgaaaactgtaacaacctgaagatttgtaaaatgttaaacatagttcattaaaaataataaaataaatctaanntgtnnaaaaaaaaaaaaaaaaaaaaaaaaaaaaaaaaaaaannnnnnnnnaaaaaaaaaaaaaaaannnnnaaaaaaaaaaaaaaaaaaaaaaaaannnnnnaaaaggggggggctttttaaaaatccctccg

SEQ ID NO: 98879 - DNA, 419 bp, Homo sapiens
cggacgcgtgggggaagcattggtaattatttaagtgaatataaaatgtcagcttatttttctcagtgaatcttttgtaatagtcaactcacatcaccccataaacaccagaaaaaaaaaaaaaaaaaaaaaaaaaaaaaaaaaaaaaaaaaaaaaaaaaaaaaaaaaaaaaaaaaaaaaaaaaaaaaaaaaaagggggggggggattttaaaaaaaaaatcgggggggccaaataaattcggggggggggaaaaatatttttttttttttagggggggtaaaaaaaaaacgccggggggatttggaaaaaaaaaaatttttttgggggggggaaaaattggaaacaccccccccaaaaaaaattgcccccgggggaaaaaaaaaaatttttgggggggggggggggaaaaccccccca

SEQ ID NO: 98880 - DNA, 444 bp, Homo sapiens
  misc_feature (1)...(444): n = a,t,c or g
cttctgtaactattggatgacgctttctccagcttagccctaaataaagcacagtttanaaaaaaaaaaaaaaaaaaaaaaaagagaaaaaaaaaaaaaaacaaaaaaaaaaaaacaaaacaaaaaaaaacaataatacccaagccgccccttttttaaaaaaacattgggggccccccccttcttaggcctaaaaaaaaaaaattttttttttttttggggggggaaaaaaaaaccccccttgggttttttaaaaaaaacccttttttttgggggggggaattttgcccccccccccccccaaaattttcccccccctgggaaaaaaaaaatttttggggggggggggggggacacccccccctctaaggggggttttaaaaaaagggnnccncnnnnnaaaccacaccttcccatgtggggaggcttgaaatctaccccccc

SEQ ID NO: 98881 - DNA, 442 bp, Homo sapiens
cttcatttaccgccctacaatctgcaagcactcacagacttttacttattaagcagacattacaatttctgcgtcacatttcctcccgactctctgttcacagaagcaatcactacaaaggttttatgtgaatcttactcttagagctaaaaaaaagtagggctgggcgcagtggctcacacctgtaatcccagctattagggaggctgaggcaggagaattgtgtgaacccaggaggcagaggttgcagagagcctaaattgtgccactgcctgggcaacagtgagatcctgtctacaaaaaaaaaaaaaaaaaaaagggcattgggatttttttatacacccttaaaccaccttttttacctttaggcgttgggggtgcccctggaaacggttctcaaccctcagggtggggggcagcctgggccataaaaagctggcca

SEQ ID NO: 98882 - DNA, 414 bp, Homo sapiens
  misc_feature (1)...(414): n = a,t,c or g
cccacgcgtccgcccacgcgtccgcccacgcgtccggaaaacctttttccaaggacaccaaaaaaaaaaaaaaaaaaaaaaaaaaaaaaaaaaaaaaaaaaaaaaaaaaaaaaaaaaaaaaaaaaaaaggggggggggtttttaaaaaaattttgggggggggaaaaattttgggggggggaaaaaaaaaaatttttttttttttaggggggtaaaaaaaaaaattttggggtttttttggaaaaaaatttttttttggggggggaaaaatttggaaaaaacccctcaaaaaaaaaaaagtttttgggggaaaaaaaaattttttggggggggggggggaaaaaattttttttttttgggggggaaaaaaaatggggnnnnnnnnnnnnacacccccccnngggggggaagaag

SEQ ID NO: 98883 - DNA, 413 bp, Homo sapiens
gccctacctactcggagggctggggtgggagggttttttgagcccagtttttcaaggctgcagtgggctgtgattgcaccactgtactccggcctgggtgacagagcaagaccctgtctaaaaaaaaaaaaatcattttctgtgccttttgggatgatcctatgataataaatcccttattctggaaaccgggtacattaatatatatgtatatgcgaaaccaactttgcttttctgagctcaatccaactcggtcatgttgcataagcctttttatatatggctggattcaattcgctggtatttggtcggccctctctggctatattccaaacacatattcctggaccattttctactatgcagtatagcattatctagcatagcctatactgtgcttacatgtacattat

SEQ ID NO: 98884 - DNA, 409 bp, Homo sapiens
  misc_feature (1)...(409): n = a,t,c or g
aaaccctcgttccacagaagctgccatcaagtatttcctcacgcaagcaaccgcatccataatccttctaatagctatcctcttcaacaatatactctccggacaaaaaaaaaaaaaaaaaaaaaaaaaaaaaaaaaaaaaaaaaaaaaaaaaagggggggggcccaaaaaaaaaaaaattggggggggcaaaaaaaaaccggggggaaaaaaaaaaatttttttttttataaggggggaaaaaaaaaacccccggggggaatttgaaaaaaaaacttttttttgggggggggaaaaaagggcaaacccccccccaaaaaaaaaaacccttggggaaaaaaaaaaaattttgggggggggggggggaaaaaaattttttttttttgtggggaaaaaaaaggngggnnaa

SEQ ID NO: 98885 - DNA, 396 bp, Homo sapiens
caccccttgctcaggctatataccgccattttcagcaaaccctgatgaaggctacaaaaaaaaaacaaagaaaaaaaaaaaaaaaaaaaaaagaaaaaaaaaaaaaaaaaaaaaaaaaaaaataaaagaaaaaaaaaaaaaaaaaagaaaaaaagaaggaatgggggggggggtaagctactttggaaggggggggggcagattcttacgaaagaaaaaatacttatcttggttgcagtgagttacacttgtaatatcaacaatttgggaaggcaaaggaagtggattattgggggtgggaaatcagaaccaaattatgaatttaagagaaatattggggccgggcgcggtggttcattgctgtaatcccagcattttggaaggcaaggggggggg

SEQ ID NO: 98886 - DNA, 335 bp, Homo sapiens
ccaactgtcaaacacgtagggaagtgatctagatagagggatgtgtttttccaggcctgctcccataaattattgaacctgctttgggattggatgtaggagtatctgaacacgtgtgtaaggatttgtcatagccatgcccatttccttcccccttcctacgtttcgtttgccctgttgcccagattcctttttaaggtggtacttttgtatatgcaggtgtttggagagggaaccgaagctgtaaagaaatctttagagggaatatttgatgacattgttccagatggcaaggtaaaaataaacgtgtgttttcttttctaaaagtaccacaa

SEQ ID NO: 98887 - DNA, 596 bp, Homo sapiens
  misc_feature (1)...(596): n = a,t,c or g
ctggtgtccaaattcggatcatgccctgtgtaggctctctctatcctcccttatagctctttagtgtactgtcaccgggagggctcatgctgtgagggcattttttgcatggtgttaagactagttaaagaattttaagctgttgttatttgcagtcaattgtagtacttcatgtatcatgaattcaagtactatgatcagacagacatctctctctctctnanacacacanacacanacacacgcacacatacacacacacacacacacctgaggaaatggctgctttgggttctataaggaccattccatgtttaaagtcctagttgagctgaatgctaaaaacctgcccccttgcctccctctgagatgatatcatttcctggcttcgtcaatgctgcctgtctatttgcatgctgggttctgaggactagtgagaaggtgaccagagtttgggtggggctggtttttacccactggatttggtgagaatatgaagcatccagtgtgtaccagggtttctgaaccacgggaaaggcgtaggaaaacaaacattcagagcccctgtaaaacgagaaaggaaaaaccagccagtg

SEQ ID NO: 98888 - DNA, 410 bp, Homo sapiens
cggacgcgtgggctttgccttgacgtggatggctgctgactgaccaaggtggtggttgctgaaggttgaggtggctgtggcaatttcttaaaataagttgttaataaattttgccatgttgatcaagccttcctttcacaaaagattactttgcccagattcatcaaaggaatcactatgtatagcagctatagccttacaaaatgcatttcttaaataagatgacttgaaaattgaaattactccttgattcataagctgcattatggaagttgtgttagcaggcatggaaacaacatttatctccttatacatctccatcagagctcttaaatgaccaggtccattgtcaatgagcagtaatatttggaaaagaatcttcttttctgagtaggaggtgtcaacagtgg

SEQ ID NO: 98889 - DNA, 398 bp, Homo sapiens
  misc_feature (1)...(398): n = a,t,c or g
gcttgagcccgggaggcttaggttgcagggggctgttatcatgccactgcacttcagcctggacaacagagcgaccctccatctcaaaaaaaaaaaaaactccgttttttaccatattggggaggcaaaaaaaaaaaagccccattaatttttggatgggttgcctttggaacaccctgggatggtaacaaaacttccttaaccagtcctgggattaaccccacggggaccctcgggtgattggggtttttcccggggaggaacccctgaaaccctttctttagcccattttttttgggaccaaaaaaaaccctgcccggggcaaaaaaaacaaaggaaattttcccggtgggaacatactccaacaggggggtgtggttgcttgggttggcccaaan

SEQ ID NO: 98890 - DNA, 390 bp, Homo sapiens
  misc_feature (1)...(390): n = a,t,c or g
tttgggtgctaatggtggagttaaagactttttctctgaccaaaaaaaaaaaaaaaaaaaaaaaaaaaaaaaaaaaaaaaaaaaaaaaaaaaaaaaaaaaaaaaaaaaaaaaaaaaaaaaaaaaaaaaaaaaaaaaaaaaaaaaaaaaaaaaaaaaaaaaaaaaaaaaaaaaatttgggcgggttttttttaaaaaaaaaagggggggccccctcttttcggccgctctaatgatctttttttttttttttggggggggataaaaaaaaaaaattttttttttaaaaaaaaaacccttttttttggggggaaaaaaaatataaaacaaccctcccccttcttttccctgggggaaaaaaaaaatttnttttggggggggcgcggggcccc

SEQ ID NO: 98891 - DNA, 388 bp, Homo sapiens
gaagaagcacccccaaccttctagtccgctccgagtttggcctggagcattggagacattggctaatgtaatacgcagagcctgagtgaggccggtgggcttctccaacagagaaaagacattggctttgggtaccatgctgagggagggggttaggcctggcgggggcccattcaaaggaggccgtgctcggtggcttaagcctgtcataccagcactttgggagaccaaggtggtaggatagcttgaggccaagatagcaagaccaccctggtcaacatagcacgaccctgcctctacaataaaataacgaaagacgccccagggaatgaagccatccacgagcaacctggaacagaggcaggagcctgaggcctgagccatggct

SEQ ID NO: 98892 - DNA, 412 bp, Homo sapiens
agacagttaagtaccctggcttacaagggtgaatgattgaaatgcacccaggttccgacatctcctgggctgggatggcgtgattccacgactgctgtagacctgaaaggtccaggattttacggaatttcttgctctcctctgcaggcatccagagcattgcggatgcctaccgcctagccctgccccaaggtctcctctatggccctaccaactttgcacccatcatcaaccatgtggccaggtttgcagcccacgctgcacatcaggggactgcctcggtgagagtcgtgggtggcagtggcagtggtggcaatcaagggcttccttgagggctatggaacaaaggactttttttttttttttttttttgaaaggaacttttgtttttccccccaggctggaagccatg

SEQ ID NO: 98893 - DNA, 483 bp, Homo sapiens
  misc_feature (1)...(483): n = a,t,c or g
gggtnccggggattcaaaacccagggngcttcgctagtgactgtaagaacggcccgacccacgcgtncgcccacgcgtccgctgcactctagcccaggcaacagaacaagaacctgtctctaaataaataaataaaaataataataataaaaaagatgttttccctagaaaaaaagaaaaaaaaaaaaaaaaaaaaaaaaaaaaaaaaaaaaaaaaaaaaaaaaaaaaaaaaaaaaaaaaaaaaaaagggggggggggctaaaaaagaatctttggggggggccaaaaataagggggggagaaaaaatattttttttttttttaaaggggggaaaaaaaaaaacccggggggatttttgaaaaaaaaacttttttttgggggggaaaaaaaagaaaaaaacccccccccaaaaaaaaaagcccggggggaaaaaaaaaatttgggggggggggggggggaaaaccttctaaaaaggggggggg

SEQ ID NO: 98894 - DNA, 429 bp, Homo sapiens
  misc_feature (1)...(429): n = a,t,c or g
aattcaactctgttctcctgcagcctctccatggcttcctcaggcccaatctgggactccgtgttgggggagaatgacggctccagctccacattaagcgtgatgacccaccacacaaaaaaaaaaaaaaaaaaaaaaaaaaaaggggggggcggctaaaaaaaaacccggggggggccaaatttaacccgggcaaaaaaaaaaaaaacttttcccgaaagaggggcggaaaaaaaacccggttgggaattttgggaaaaaacctaaatttgggggggggaaaaaaatggcccaaccccccaacaaaaattaaaggcttgggggaaaaaaaaaaattttaaggggaaaagggggaaaaaaaaccccaaaagcccggggataaaaaaagtggannnnnnnncnnaagaaaccaccaaatttggcttgaaa

SEQ ID NO: 98895 - DNA, 169 bp, Homo sapiens
acccaggagagcatcatggacctggagaatgacaagcagcagctggatgagcggctgaaaaaaaaaaaaaaaaggccggcggttttaaagaatccttgggggggccaaagtttaccggggatggcaagagaataattttttctttatggggaggctttttataaccacc

SEQ ID NO: 98896 - DNA, 259 bp, Homo sapiens
  misc_feature (1)...(259): n = a,t,c or g
gggggggggccctttaaaaaaaaccctgggggggcccaaatttaccggggggagggaaaaaatatttttttcctttaggggggggtaaaaaaaaccccccgggggatttttggaaaaaaacctttttttgggggggggaaaattggggccaacccccccccaaaaattaaaggctttgggggnnnnnnnnnnttttaaaggggaaaggggggaaaaaaacccccaattccttgggggttaaaaattttctttaaagaaa

SEQ ID NO: 98897 - DNA, 455 bp, Homo sapiens
  misc_feature (1)...(455): n = a,t,c or g
acctgagttacatagcacttgccgnggcannncctncgccttccaagttcaagcaattctcctgccccagcctcccgagtagctgggatttcaggttttcgctgtgttggtcgggctggtctccagctcctaaccgcgagtgatccgccagcctcggcctcccaaggtgccgggattgcagatggagtctcgttcactcagtgctcaatggtgccccggctggagtgcagtggcatgatctccgcttgctacaacctccatctcccagcagcctgccttggccccccaaagtgccgagattgcagcctctgcctggctgccaccccgtctgggaagtgaggagcgtctctgcctggccgcccatcgtctgggatgtgaggagcgcctcttcccggccgccatcccgtctaggaagtgaggagcgtctctgcccggccacccatcgtctgagatgg

SEQ ID NO: 98898 - DNA, 408 bp, Homo sapiens
gggtttcaccgtgttggccaggatggtcttgatctcctgacctcgagatccgcccgcctcagcctcccaaagcatgatgatattttttaaaaaagctattggataccacttgctaacactacattaaccatataccatccctttcctatacaaacagatctggcttctagagctatatagtaatttataagaattacagaggacagagcagcatattagtaccaccatcgggtacagttggaaaaatccagattatgtgaagctctggggtcttcaacaaataaattgcaaagaaaaaaaaaaagcacagcaaagcaaagtcttgtgtgacatttacaagacagttggaagtttgaatactggctgattacttgatggtattgggactgttactaatgtttttaaagg

SEQ ID NO: 98899 - DNA, 409 bp, Homo sapiens
tgtgtgtgtgtgtgtgtgtgtgtgtatttttagatagacggcgattcactatgttggccaggctggggttgaactcctgacctcgtgattagcccacttcgacctcccaaaggggggggattacaggtgtgagctaccacgcccggccatcatggctcttataaagcctctgtgctttggtaaagcccgtggtttttaatcaggggagttttgcccccttggggacatttgacaatgtctggaaatatttttgggtgacacaactgggaatagagcgctgctggccagaggcgcctcttcatattctggagggcacagtgcagtccccacaaagaagtgttatatggtcccaatgtttattgggcggccgccggtggttaaaaaaccctggtgaccccgccccccgccg

SEQ ID NO: 98900 - DNA, 375 bp, Homo sapiens
  misc_feature (1)...(375): n = a,t,c or g
cgtggtggcacatgcatgtggtcccagctacttgagacactgagataagagggtcacttgaacctgggaggttgagactgcggtgagctgtgattgtgccactgcactccagcctggatgagaatgagatcctgtctggggactgggccgggggaaaagacctagtaggagaaggacctactagaaatctagtaggtaggaatgaaattatgaaatgaggcagtgaatttgagagaagcggagaatgagtggtattcatggaaactgattgtaaaggcaaggaaaataagaattcatttttttcttctgggctgtgctcctgtgtaagtatgaggtttctactgttttaggtctgcactacataaagttccccan

SEQ ID NO: 98901 - DNA, 393 bp, Homo sapiens
  misc_feature (1)...(393): n = a,t,c or g
cggacgcgtgggcggacgcgtgggatatgcaaatcaataaccataatccatcacataaacagaaccaatgaaaaaaaaaaccacatgattatctcagttgatgcagaannngncnctcttnaaattcactctgcaaagctgaaaaaaaaatcttttagcctcaggtggggtgcaccccggagcaaaaaaaatacaagggggggtgccgtgctttccaacaaattgtttttcaattggcaagacttggggggggtcatcacctttgggggggccgctatcttgatggcaatgctggagtaataattcattttttgcgaagaagttcgtggacattttgataaaccgacgcattggattacttgatttcttaggaggggatatataaagaacacg

SEQ ID NO: 98902 - DNA, 386 bp, Homo sapiens
ctaaagacaagctttcaccatgttggccaggctgttcttgagttcctggcctcaagtgatctgcctgctttggcctcccaaagtgctgggattacctgtatgagccactgtgcccagccttatatatctattaattttattccagcagcagaaactcagcaaagctctccagagttggttcctctccctgcatcccagaagactccatccttctctacaccccttttctctctaccataaataaagattctattaggggtgccatttcttctgctctaaaatgggaatattaatctcttcatgagactattgtaaaagtgaagaaaataatatatgtgaaagagctttgcgttctctaaatcaccatagattttaaagaatcgctg

SEQ ID NO: 98903 - DNA, 415 bp, Homo sapiens
tttccttattccaagaagcaccgtgagcagaagacctaaaacaagacccatagagtaaagggacatgggaaacaaaatggcaaatctgacatcagaaaaaaatgaagaagaaaataaataaaaaatatagccttcatacttttaagtaaaatgaatgtaagctagttgcaaaagacataaaattaataaaagataacaacttaataaaagatatcaaatctaatctgtctctctcacatgcacagacacacacacacacacacacacacacacacacacacacaaagtgttgaaaggataatcacgcacgccgattttaagaaataaatgtaaaaataaagtcatcaaaaactgtcaccgcattaagaacctaggggattaagaaagaccacatagaaaatagcatccatgagca

SEQ ID NO: 98904 - DNA, 412 bp, Homo sapiens
tatacttattttttacaaagggaaaaaaggggaatttgtgccatggaaactaaagatcccatttatttgtgtcattatgccaaaaaataacaacagtgttttctctctggcttatttagagtggtagagcttctttgacgtttcctatttctacctctgcttgtatcgagctgtagaactcttcatttagaatataacattttcaaatattgaaaaattacttttttttttgtgggattgccactaggtggtgggtataatatgtgaggaatgatcagcagtaataatagttctgatagtttcgggaattgcttgaatccgggaggcaaaggttgctgtgagccaggatcgtaccactaccctccagcctgggcgacagacactttctcaaaaaaaaagaaaaaaaaattag

SEQ ID NO: 98905 - DNA, 395 bp, Homo sapiens
gtatttattatcgttgtttgcatggaaaacctgagaatagacaggcatattatcggaattaataacagggcttaccaagagtaagaagtaaatgcagtaccacgagtatagccctggatgctggagaatgagctcggattacacgcttcctatttagcaatgagcacaccgctgtctcctgtcgagattgaatgtgccagtaagaaaatctttactttttgctaattagcagattttttttttttttgaactgaaggggcctttaaaagggggagagggccaggcacaggggttcatgcctgtaatcccaccattttgggaggttggggcacggggattgcttgaaatcaaaattttgaaaccagcctgggcaacatggcaaaacccctttttta

SEQ ID NO: 98906 - DNA, 410 bp, Homo sapiens
  misc_feature (1)...(410): n = a,t,c or g
cccacgcgtccgcatttactcgaagatgttataaataggatgccaaatcaaaagtaactggaagagagtagcatggaccactaagaataccaacaggaaagattaacccttgaatgagagtagactttatagaaatgttaaggagaccaggaaggactgttttggttagatgctgacaacaagaagaataaaaacataacccactggggaaaaaaaaaaaaaaaaaaaaaaaaaaaaaaaaaaaaaaaaaaaaaaaaaaaaatcataaataatnntggggggggggggcctaaaaaaaaacaatttttaaagggcggggggtagaaaagttttttttttttttgggggcccaaataaaaaatccgcggggggggtttttaaaaggggggtgggggaaaacctccttctcn

SEQ ID NO: 98907 - DNA, 385 bp, Homo sapiens
  misc_feature (1)...(385): n = a,t,c or g
atggcctgagcctgctgcacacagctgtgtgttattgggacttgagtttcctcatctgtaagtggggacaactgacagtacctcccatgtagcattgtcatgaggattatatgagccggttcatctccacagcttaaatcagtgcctagcacattataggcacctgataaaataacatcttgcaattctatttttaatttttttttaatttatagagaggggtcttattatgttgcccagcttggtcccaaactcctgggctcaagggatcctcctgcctcagtcttccaaagtgctgggattacaagcatgagctaccacgcccagccacatcttgcaattctatactgtttttcaatttacagggtgctttcatgtatcatcn

SEQ ID NO: 98908 - DNA, 374 bp, Homo sapiens
gtgactgtaatcccagctactcgggtggctgaggcaggagactcgcttggacctgggagggagaggttgcagtgagccgagatcacgccactgcactccggcctgggcaacagaactgtttaaaaaaaaaaaaaaaaagccttgagggaccccagcacagaagctcacgccgggaatcctaacactttccggggccgggggggggggatctccggagctaatgagttggaaaacaccccattgccctccggccggggcaaaaaaactgtttaaaaaaaaaaaaaaaagggggggcccttttaaagaaacaatttttacggccgggggggggggaagtaatattttttttttggggcccccaaaatcaattcgcg

SEQ ID NO: 98909 - DNA, 376 bp, Homo sapiens
ctcctggcccgttttccctgtgcttctccctggagtctgagaaacagatgttgccgtggtcccctgcctggtagagcccaagagattctctacagctgtgctggccagtgctgcagccacaggccacatggggtcacagagcacttagaatacaccccctccccccccaaaaaagagaatgtcctatatctcatgataattttattgcacattgaaatcttaatattttggatatattgggttaaataaaatacattcatcaaattgattttatcccgatgtttaaaaactcccaggctgggtatggtggctcatgcttgtaatcccagcactttgggaggccaaggcaggcagatcacttgaggtcaggagttcg

SEQ ID NO: 98910 - DNA, 382 bp, Homo sapiens
  misc_feature (1)...(382): n = a,t,c or g
gtggtggctactaaaggttggagtgactgtggcaatttcttaaaataaaacagcagtgccnaaaaaaaaaaaaaaaaaaaaaaaaaaaaaaaaaaaaaaaaaaaaagggggggggtttttaagagaaaggttttttttcgggggggggggggaaatttttttttttttttttgggccctttaatttttttttgggggggtttttataaaacgggggggggaaaaaaaaaggggggtataaaaaatttttttttttttgaaaatttttttttttttttgggggggaaaaaaaaaaaaagggcccnnnnncccnnnnnnncnnnnnnnnnnnnttnnnnccttttgtcttttttttctataaaaacaaatgggcgctctttttt

SEQ ID NO: 98911 - DNA, 396 bp, Homo sapiens
actccacttcaacctgagcaacagagcaagactccatctcaaaaaaaaaaaaaaaaaggcaccctaggtctaactccaaagttcatgccttaaacggaaatattatataacctcattaaaattatttttaggaggggggttttgtattaaaaataataagggaaggtattgggcctcatttcctaggtttggaggaggagggttcaaaatttcatgaacatattttttgggaaaaacaccgggagagttttccaaaacagggaccaattccccattttatggagctggggacttggggcctttccaaaaacccatattttagggttaaacaaagggttgaacacatagaggggtttaaaaatttttttaatgaaaaaaaggattttctaaaagaac

SEQ ID NO: 98912 - DNA, 390 bp, Homo sapiens
  misc_feature (1)...(390): n = a,t,c or g
cccacgcgtacggcctgggcgacaagagcaaaaccctgtctcaaaaaaaaaaaaaaaaaaaaaaaaaagaggggggggggggggtttttttaaaaaaaaaaacgggaaaccccccggggggggttttttggggggttggaaaaaaaaaggaaaacccccccccgggccaaaaagggaaacccccccccttgttaaaaaaaaaaaaatttttttttgttggggggggcccccctttgggttttttttttttaaggggggggggggggggggttgttttccccccaaaacgaagggtttcgggggggtttggttccccccccccctttttcctgggggaaaaaaaggaaccccttttttcaaaaacccnaaaaaaaaaaaaaaaaaaaaaag

SEQ ID NO: 98913 - DNA, 380 bp, Homo sapiens
tgacacacgcctgtaatcccagctactcgggaggctgagacacaagaagcgcttgagcctgggaggcggaggctgcagtgagccaagattgtgccactgcaccactccaacctgggtgacagagctccatctcaaaaaaaaaaaaaaaaagattttcttggggcccccccaaccccttttttatttttttcctttggggcgcaacccttgttgttgccggtagaaaaagtctccctcccccgggccggaaaaaagggcaggcacctccactttacattgtctttacggttaatgatctaaaacaaagggaccccccctgtttccaagtttctttatatcagccctaaaaaaagcttttgaggggtcctacgggcctaact

SEQ ID NO: 98914 - DNA, 406 bp, Homo sapiens
tactcaggaaggctgaggcagtagattcacttgtactcgggaggtggaggttgcagtgagccgagattgcgccattgctctccagcctgggcaacaagagcaaaattccatctcaaaaaaaaaaaagacttattttctcttttattaagatattaaaccatgcagggtcttctaagggacagagaggggaagactaaatgattggaagatttgcctttaaatataatggtttactttccctctcccattttataaactcataggatgagtgaaaggagaattcttttctgtttttctgccctaagggtttccttctctctttgaaccctagggaataggtccaaaacaggcgggctttatgggctcattcatcttgattccttgcaaagcagagcaggtgttcttt

SEQ ID NO: 98915 - DNA, 402 bp, Homo sapiens
aaatgggctggtgttaagggagctggtgatgtccaagaatgtagctccataaatgtgtaggttttttttgtttttgtttttgttttagagatgggtcttgctgtgttgcccaggctagactcaaacccctgggctcaagtggtcttcccatctcagcatcctgagtagctgagactacaggcgtgcgccaccatgcccagcttctccataaatttttaaaactattgccatgtctgattctgttggcctggctctggcaggctgtttgggggttggatggttcgaaaggatggtgtgtgttaccatggcaatgttcttctccatgcaggaaggccccagaggttgatcctacacaagtgactgtgtgtttttcgtggttcttcccatggggtgatacagggt

SEQ ID NO: 98916 - DNA, 398 bp, Homo sapiens
  misc_feature (1)...(398): n = a,t,c or g
acggggtttcaccgtgtcactcaggatggtctcgatgtcctggcctcgagatccgcccgtctcggcctcccaaagtgctcggattacaggcgtaagaacacatttctaagcttcacactgctgtcctgttgtcatgatgataggtcaaacttactgcagcttagtttgggcgggacattttggctgggaacaccaatacccngaaaggtcatgtttacattcttgtgtgagcctttctttaaccactgagtgtattttctatcatgattatcatccacttcttgctgtgtattggcatgagggagtctttgtcctcctccatttgttcatccaaaaattactgaatagctaattaaccccgatgctggggatacaccaaacatgattcctgcaccttt

SEQ ID NO: 98917 - DNA, 381 bp, Homo sapiens
  misc_feature (1)...(381): n = a,t,c or g
gagacagggttttgctgcgttgcccagagtggtctccaactcctagattccagcaatctactcgctttggtctcccaaagtgctggggttacaggcatgagccaccgctcccggccataaataatttttgagaataggtacctgtagtgctgctgatgtagctgggtattgaagaaaaaggcaaaacgttataaagtttctgtaaaaacccggggttgtgggagtgggcaaagaaggaaggaagaagatgatatgacttggctgtattgctaaacgttgtgctacttccncattcactaaggattgaagtccagttaaccttgggctttgttaaaacttggggggggaattctcttttacatatttatacactaaaaacac

SEQ ID NO: 98918 - DNA, 382 bp, Homo sapiens
cggacgcgtgggttgcagctgaagctgagggtcagaatgatacaattgaggaacccaacaaggtccagaaaaggaagaggggaataaatgataatgtgcctgctgggcaggcacattagactgatgtccattcaggatgcagaaacttgttttagtgatcatgaattactagaaagagaaaaggaaaaccaaaacccttgagtgtattatctcaacaatgtctatatggtaaacagaaatactgttttcatttcctaaggctacataacaaactaccacaaactgggtagcttaaaacaacagaaatgtattctctcacagttctagaggctagaagtctaaaggtgttgacacggccattcgggctttggaggctgtatgg

SEQ ID NO: 98919 - DNA, 389 bp, Homo sapiens
caccatcttggacagactggtcttgaactcctgaccttgtgatccacctgccttggcctcccaaggtgctgggattacagatgtgagccaccacacctgacctttattattattattttttaagcatctccatcctttctgacacacgaatatgtttcagggtctgcttatgcccttttctgtgctaatgaattatttttaatctatgaaaagtactaaaagtgattgcagttgtgtaacaacaataatcattagcttgtgaaaagcacacatttcagaatttattgtaatatctcttatacccacttttgtagaataaagccaaggtatatttaaattctattctgttttgtgactttgttcctattttctgttggtatagatataac

SEQ ID NO: 98920 - DNA, 412 bp, Homo sapiens
  misc_feature (1)...(412): n = a,t,c or g
actttgacaaatgtgaactctcggaaatagtatggtggtgaaacttgtactgcatgaacatccggatggcccagttttctgaacccacaagctgcattgctttctttttaacttgaagtagcatgaaggctcaaaagttttgttgggtacttttaattgagaagtagttttggttgctcttgattacacagtaaatcaatanatcgaaaaaaaaacaaaaaaaaaaaaaaaaaaaaaaaaaaaaaaaaaaaaaaaaaaaaaaaaaaaaanaaaanaaaaaaggggnnttttnnnnaaaaggggggggcttttaaaaaaaaaaaaaaaaataaccccgggcgggggggaaaatttttttttttttaggggccccaaaataaaagacggggggggccgaaaaaaaaaacggggg

SEQ ID NO: 98921 - DNA, 184 bp, Homo sapiens
ccaacatagtgaaaccctgtctctactaaaaatacaaaaattagccgggcatggtggcaggcacctgtaatcccagctactagggaggcttttgaacccaggaggcagaggttgcagcgagctgagatcgcgccactgcactccagcctgggtgatagagtgagattcagtctcaaaaaaaaaa

SEQ ID NO: 98922 - DNA, 561 bp, Homo sapiens
  misc_feature (1)...(561): n = a,t,c or g
agtatacaagtaaaggattctagttcaaacaattaccgtagttaaaggtaacagaattcttagtgtttccctaagacaagcattgtaacactgttatcctatttttaaaaatataaagcnnnnnnnnnnnnnnnnnnnnnnnnnnnnnnnnnnnnnnnnnnnnnnnnnnnnnnnnnnnnnnnnnnnnnnnnnnnnnnnnnnnnnnnnnnccttctcttacctctgctctgaagttgtgatttcttcaaggagtcctgattccttatagaagaatagtatttttaagccaaaatctgcatgttagatgtgtaaaaattgtttttaaaatctcacagagggctgagtgcagtggctcacacttgtaatcttagtactttggaagaccaaggtgggaggatctcttgagcccaggagtctgaggctgtagtgagctatgattgtgtcactgcactctagcctgggtgacagagcgactgtcaaaaaaaaaaaaaatccagttaattccttgaaataatacccagtattcaaaagccatataggaaaagaatgcaaagttgacca

SEQ ID NO: 98923 - DNA, 415 bp, Homo sapiens
  misc_feature (1)...(415): n = a,t,c or g
aagaagggaaagcagctttttctcaggaaaagtcacgaagagtaaaagaagaaaatccagagattgcagtgagtgccagcaccatccccgaataaaaaaaaaaaaaaaaaaaaaaaaaaaaaaaaaaaagggggggggccctttaaaaaaaaaaaattttaatggcggggggggggaaaaaaaaatttttttttaaggggcaaaaaaaaaaaaattagggggggggttttaaaaaagggggaaaggaaaaaaaccgggggtaaaaaaaaaataaaannnnnnnnnnnnnnnnnnnnnnnnnnnnnnnnnncncngggnnnnnnnnnnnnnncncnnnnnnnnnnnnnncncnnnccnncncnncccncncccggcccccccccccnccccccccccccccccccccccccccccc

SEQ ID NO: 98924 - DNA, 373 bp, Homo sapiens
caggaactgaaaacgaaatactgcatcttgtcgcttacaagtgggagctaaacactgagtgcacatggatgcaaagaaaggaacaacagaccttggggcctacttgacgatggatggtgggaggagggtgagaatcaaaaaattgcctaccagatactgtgcttattacccaagtgacaaaatatctgtacacacgcaacccctgtgacacacaatttacctgtttaacaaagctgcacatgcactcctgaacctaaaataagagttaaaaagaaataaaaaccaaataccccaggagaattgcttgaacccaggggacggaggttgcagtgagccaagattgtgccactgcactccagccagggtgacagca

SEQ ID NO: 98925 - DNA, 404 bp, Homo sapiens
  misc_feature (1)...(404): n = a,t,c or g
cccacgcgtccgggtccccagaactggacccctttctcattatgggatgcgctctgatttatcaatgtccttcttaaagtgtgttaataaagaactcatctagttctccagatatagtgtggccagttttgagtgtagtgagactttaatttcctgtgatctggaaattgtacatttgttaatgcagcctaagactaccacacctttttgtcacttacagtggttcatatgacacagtcagcaaacatttctgtgcctgcctccaaacacatttccccatttnnaaaaaaaaaaaaaaaaaaaaaaaaaaaaaaaaaaaaaaaaaaaaaaaaannnnaaaaaaaaaaannnnggggggggggcccttttaaaaaaaaaaaattttttcccccgcgcccaacaaa

SEQ ID NO: 98926 - DNA, 398 bp, Homo sapiens
  misc_feature (1)...(398): n = a,t,c or g
cctggctgcagaacacagaaaatatgttaaactacaagaatgggtgagctctccagcctgggcaacagagcaagacgccatctcaaaaataataaataaataaccccccacaagaccctacgatgtgacccaggaggcaagaactgtccatttaatcacggaaggaataaggcattaccaccagttaagtggattctgtcacctagttcgatataccatgttgtcattttattacaggcagtataaaaagaaatcattatcactcnnaaaaaaaaaaaaaaaaaaaaaaaaaaaaaaaaaaaaaaaaaaaaaaaaaannnnggggggnnnnnatgaggggggggggggnnaagggggggggggagaaannnngngttttttaagggggaaaaataatt

SEQ ID NO: 98927 - DNA, 407 bp, Homo sapiens
  misc_feature (1)...(407): n = a,t,c or g
actttgtgtatttgaaaactgctttataatctcattgattaaaaggactctcaaagatnnnaaaaaaaaaagaaaggaaaaaaaaaaaaaaaaaagaaaaaaaaaaaaaaaaaaaaaaaacagagagaaaaaaaaaaaacccaaaaaaaaaaaaaaaaaaaaaaagagggggggggcccaaaaaaaaaaaaacaatcacccggcgggggggaaggcgtatttcttttttttggggggaacaaaaaaaaaaaggggggggggggacaccaaaccactgggagagaaaaacagcccggcgcaaacaaaaaaactgggggggaacaaccccccctttgtggagcggggaaaaaaaaaaaaaaccccggggattnccaaacgcagggcttcatctaggggggtactgaaan

SEQ ID NO: 98928 - DNA, 411 bp, Homo sapiens
  misc_feature (1)...(411): n = a,t,c or g
agtcactaaggtggaaggaatgtaggaatctcaggctctcagagtcagacctcagaaggctcccaggcaatgatccttgaggtgcagaaacccccttctcagccctgccccacatccttcatgagcattcctcaaactctgcctgaatgtctccagagcccgagaactcaccgcttctttggtggccccttccagctggggacagttctgaaataaagctcttccttctcagcnnaaaaaaaaaaaaaaaaaaaaaaaaaaaaanaaaaaaaaaaaaaaaaaaaaaanannnngggggggggggggggggggagaaaaaagaaagggggcccccaaaaaaaaaaaaaagggnnnnatttaaaaaccccaaaaaaagaaaaaacggggggggccccaaagaggggggggggc

SEQ ID NO: 98929 - DNA, 392 bp, Homo sapiens
  misc_feature (1)...(392): n = a,t,c or g
accagttaaatttctggacaaatgaataggacaaatgaacatttgttagtttaacaactagcaagaaacattcctgcaatttgagtttttaaatttaccatttttataaggaatataacagatgcatagtatcgtgctgtgttgaantaacaaattgacttattgatagtaaagctatttttagacatgttcaagtcaatcatatatatttcttcagttgtttgaccaggactaatatggtgattttttttttttttcaaattaaaaaaagcggggcattttcactgtttttttttttcatctaaatccagtataaaatactcccccaaaaggaaaatgattgggacaaaattcagggccagttagcgattccagtttcctcactgaatttt

SEQ ID NO: 98930 - DNA, 173 bp, Homo sapiens
taacattcacagccacagaactaatcatattttatatcttcttcgaaaccacacttatccccaccttggctatcatcacccgaggaggcaaccagccagaacgcctgaacgcaggcacatacttcctattctacaccctagtaggggaagggagcctactagctagatcgcga

SEQ ID NO: 98931 - DNA, 429 bp, Homo sapiens
  misc_feature (1)...(429): n = a,t,c or g
tttcgtgtcagtgtattattttagaaacatggctctacttattcccatggcatgggaaggaacctcttagggtcaaaatggtaaaaatgctattggcagaatgattcactgtgaatcatgaaatacatctaacattgtggggaggggaggcaaaagaaaacatatttcagcacattttcctctttatatagagctgatttaatatctactaaccagggactcaacctaaaaaagaaaaggaattagggccgggcatggtggttcacacctgttatcacaccactttgggaagccgaggctggagtgcaatggcgcgatctcagctcactgcaaccactgcttcctgggttcaagcgattctcctgtctcagactcccaaataactgggattacaggcacgtgccaccacgcccggctaattttttgttn

SEQ ID NO: 98932 - DNA, 402 bp, Homo sapiens
tttcgtggtttctccactttggtgaggctggtctcgaactcctgacctcaggtgatccacctgccttggcactcccaaagtgctgggattacaggctggtctcgaactcctggcctgaagtgatcctccaacctcagcctcccaagtagctgggattacaggtgcaagccactgtgtcagttggtcaccgcatgtgtgagagttccccccacacttattcagtcggtcaccacttgtgtgagagtcgcccctgcatgctcattcagtcggtcactacatttgtgacagtcatccccgcatgctcattcagtcggtcaccgcatgtgtgataatcacccccgcatgcttgttcagctcgtcaccgcgtgtgtgagagtccccaccgcacgctcgttcagccgg

SEQ ID NO: 98933 - DNA, 462 bp, Homo sapiens
  misc_feature (1)...(462): n = a,t,c or g
aggatgtgnaattgaagccnactgangacatcggannngcannnnnggnnnnnnnnttttgtgtctcgccaggccatgccctctgcctgcccctgttttcagggattttgccgtggctggggagacacaagcacgtgactgactagacagggaggtacgagctggtcgagctggtggtgccgtggggacccagaggaagtcttggggtccagggagccccctgggctgggggaagggccctttggtatgtagagtttactgctgagaaagcaggcccagcaaagggaaatgagcttgcaccaggcctcctggaggtctgggcgagtctgcgagggtcacgctggcattggacacgggacagagactctgtcaccctggctagagtgcagcgatgcgatcttggctcactgcagcctccacctcctggcctcaagcggttctcccacctcagtctcctgagtc

SEQ ID NO: 98934 - DNA, 414 bp, Homo sapiens
tttcgtatttgagaccagcctgggcaacatggcaagactctgtttctgcaaaaaaatacaaaaattagccaggtgtggcgtatatctgtggtcccagctacttggaaggctgaggtgggaagattgtactccagcctgggcaaaagagccagacctggtctgtctgaaaaacaaaaacaaaaacaaaacaaaaaacagcaaaaagtaggtctcctccaaccggattacttaaagtctaaaatttatgtagtagtaccatctagtggcaaaagaggacactgctttgctatttgattatatgtgtctttggagcagccagggaaataagtgtttatgggttagggaaatgtgaacactgtatattaaggaaatatttatttttaagtataatgatattattgtgtttgcgcttac

SEQ ID NO: 98935 - DNA, 381 bp, Homo sapiens
tttcgtgctagaactcctgggttcaaacaattctccctcctcggcctccgaaagcgctgggattacaggcgtgagccactgtggccagcccctgtttaatttttgaagcgccctcaaactgttttccacagcagctgcagaggagatactcggaggaggaggaaagagaagtcacggagccctgttcttaaccgagttttgcagtcacctccccgtattcctctctcactctgaagccgagcacagaacccagcctctggtggtaccgagtgaaggttggcctggttggttggatggatggccaaatgaactccagaccactggattgtataacaggacagcaagaggcagcacagagccgtggaaagaacctgtagccat

SEQ ID NO: 98936 - DNA, 436 bp, Homo sapiens
tttcgtgaggggccaggcctgcccataggcaggaagtctaagtggcctgttggtgacaggaacctcatgacacacaagtggagaacacacagacatgcccctcatgctgaattaaggcctgaggctcaaggaaaattagtttttatgtgatatgagagttttatatgtaactttttttttttttggaaagggggtttctttttttcccccaggttggagggcggggggggaatttggtttaattgaaaatcccccccccgggtttaaccctttttttttgcttaaccttccgaagaagggggaattaagggcccccccccccgccccaattttttttttttttttttttgaaaaaagggggtttacccggttaacccaggagggtctaaatttctggacttgggaacccccccccttaaccctcccaaggggtggg

SEQ ID NO: 98937 - DNA, 465 bp, Homo sapiens
ctagaaagccgtcgctttgaagacggtacgcgagttcccgggtcgacgatttcgtgggacccacctgaggaggcagtctgtccgttctcagatctccagctgcgtgctgggagaaccactactctcttcaaagctgtcagacagggtcattcaagtctgcagaggattctgctgccttttgtttggcaatgccctgctcccagaggtggagtctacagaggcaggcaggcctccttgagctgcagtgggctccacccagttcgagcttcctggctgctttgttttccttctgaagcctgggcaatgtcaggcacccctcccccagcctcgcttccaccttgcaatttgatctcagactgctgcgctagcaatgagcaaggctccgtgggcataggaccctctgagccaggtgtggaatataatctcctgttgcgccatttgctaaaaccagaggaaaagcgcagt

SEQ ID NO: 98938 - DNA, 483 bp, Homo sapiens
  misc_feature (1)...(483): n = a,t,c or g
cggccccgatttgaggcccattgatgccgtccgcangcagccaccggnccggnnnnccgggtcgacgatttcgtcaggatgatctcgatctcctgaccttgtgatccacccgcctcggcctcccagagtgctgggaatacaagcgcaagccaccgcgcctggcccctcctcatagtctctttctcagaggctttggcttcatgtgggaatggtctctgggcaggactttgaacctcatccctgccgtattgtccccaataagggggactgacctccactgcctagcagtcagaatggaagcctagaacgaatctcagagctgggagagatattaaaggtctcctagtctgaccccttcattttgcagatggggaaactgaggcccagaaagagacagtgactggcctgagattacacagtgagaggcagcttcagaggagggagaaggacctttcccccacacttctgcccagctgccttttc

SEQ ID NO: 98939 - DNA, 405 bp, Homo sapiens
  misc_feature (1)...(405): n = a,t,c or g
tttcgttaacaaatccttaggcattagattctcataaatagtgtgcaacctacatccctcacatgtgcagttcacaatagggtctgcactcctaggataatctaatgctgccactgatctgtaatatgaacaatggggagtggctgtgaatactgatgaagcttcgctcactcactgttcatctcctgttgtgcagcctggtttataacaggccacagactggtatctgtctgtgccctgggtgttgggggccccgatgtagggcaattacatttattcatttatttattgagngcaatggcatgatcctggctcactgcaattttcaacttccaggatcaagcaattctcctgcctcagcctccccagtagctgtgattacaggcatgaaccactatgcccggt

SEQ ID NO: 98940 - DNA, 412 bp, Homo sapiens
  misc_feature (1)...(412): n = a,t,c or g
tttcgtgtccagggtggaaaaaacccaaattctattcattcttctagagacagaaactacatgtccgagatgaaaaatatactgggtgggattaacatcagattatatcttgcaacactcaaagacaaagcaatagatactatccaaaatcaaacacaaagagaaaataaaaactggagaaagaaaggaaggaaggaaggaaggaaggaagaatagagcatcagtgagctgcaaaacaatgtcagtatcctaatgcatgtgtaatgaaagtcgccaaagggcctgtagagtcagagaaatttaaaaaaataatagtggctgggtatggtggctcacacctgtaatcccggcactttgggaggctgaagcgcgcagataagttgagctcaggggtttgagaccagcctcggcn

SEQ ID NO: 98941 - DNA, 356 bp, Homo sapiens
acctgctgtgtgacctcctgtgcctcagtttccttgtctggaaagcaggaataagacctgcctccttgggttgttttgggggttagatgaacagtgcccaagcgtaacaccttctccccaaaaatggtggctattacgactgctgggactgtcagcacttcggtactggccctgggaaaccgagaaagtgctctgcccacgcgtttgggttgggccctttgttgctttattttttggggggggcgggggcacagagtcccactctgtcatccaggctggagtacagtggcgcgatctcggctcactgcaacctccacctcccaggttcaagcaattctcctgcctcagcctcctgg

SEQ ID NO: 98942 - DNA, 410 bp, Homo sapiens
  misc_feature (1)...(410): n = a,t,c or g
tttcgtgcaatggcagtttctgaagacaggtagtgacagaagccataaagcagttgagtctctgggatatgagaaagtagagaaagcaatgactgtaaactattctttcaggagcttaaacactaagggaaagttagagttgctgggaaagatttcagttaatttatatgctaagtggaaacacttcagagaaaaaggccgaagatacacaaacaccttgggtccaacagcaacagctgccttctactccactgagaaaacagagttcttacctgtagtggaacaaacatgtaaaccattcattgattcattcaataaatatttattgccaggcgcggnggatcacgcctgtaatcccagcactttgggaggccgaggcgggaagatcacaaggtcaggagatcgagacn

SEQ ID NO: 98943 - DNA, 409 bp, Homo sapiens
  misc_feature (1)...(409): n = a,t,c or g
tttcgttggatgatgatctccttaaactcttgctaccattaatgctgcagtattcagatgagtttgttcagtcggcctacctgtctcgtcggcttgcctacttttgtgcccggcgtctttccttgctgctgagcgatagccccaacctccttgctgcccactcaccccacatgatgataggaccaaacaactcgagtatcggggcccccagccctggcccccccggccctggcatgagccccgtgcagctggccttctcagattttctttcctgtgcacagcatggnnnnnngnnnaannnannnannnnnnnannnnnnannnnnannaacaaaaaaaaaaaaccannanaaaaaaaanaaaaaaacaanaaaaggaaaaaaaaaaaaaaaaanaaaacaaaacaaag

SEQ ID NO: 98944 - DNA, 428 bp, Homo sapiens
  misc_feature (1)...(428): n = a,t,c or g
cttgggaggctgaggcaggagaatcgcttgaacccgggaggcggaggttgcagtgagtggggatcgcgccactgcgctccagcctgggcagcaaagcaagactcgtctcaaaaaaaaaaaaaaaaggggggcccctttaaaggaaaaaaggttaacgcccggggtttgccaaagtatttttttttattgggggccccaaaaaaaaaatcccgggcccgttttttaaaaggggggggggggaaaacccttgggggttccccttttagaagannncnnntttttcccgaggttaaaagacccagaaaaaactgggtcaccgggagggccccctttgtaccctagcaaaaaaatttggcacaaattggggtttgtaaaaaagggcggaggggctggggatttttctcctttacaaaggggggggcacaagg

SEQ ID NO: 98945 - DNA, 381 bp, Homo sapiens
ttggaaataatttgccttcagaattctgaaggccttgctgcattgttttctagcttgtcatccttttgagaagtctgaagacattctgattcttgattgtaaaaatgttttgcttttctggaattttgtgtttcctatattctgaaatttcataaggttgtagcttggtgttacgtctatttttaacaatttttcttggatatttgtgtaccttctgaatctgtaaaattcattagttctgggacattttctttaattattttattgacagatgtattagtctttgaggactgtcataacaataccacagtctgctctctgtttgtctgttattggtgtataagaatgcttgtgatttttgcccattgattttgtatcctg

SEQ ID NO: 98946 - DNA, 391 bp, Homo sapiens
atgtaagtggagtagtattttagtcttttgtgtttggcttttttcacttagtgtaatgcttctgaagctaaccgaagagctttttcacatttgttgcgtgtatggatttgtttctttttgagcagtgcacattttaaactaattatcagttttatcctgtatttaaacaagtttcataaaatattaacttgctcatattgtctgtggaagtgaaacttaaaagttagcatcaaataatttacacaaaacatagaggttgggtgcagtggctcacgcctgtcaccctaacactttgggagggtgaagcaggaggattgtttgagcccaggagttgcagaccagcctgggcaacatggcggaaaaaaaattagctgggcacagtggtgcttgg

SEQ ID NO: 98947 - DNA, 394 bp, Homo sapiens
acggggtttcaccaggatctcgatcttctgacctcgtgatccgcccacctcggcctcccaaagtgctgggattacaggcccgagccactgcgcccagccaaatctctctttttattgataaactaatgcagagtaaggaaattctagtatcagtctcacaatgaattagcagaagtatacttaagagtttcagtccagtgttctctctatcacagctttacttctaagattggtgccagttgatagcaatcttgcaggtagatagagggtagagaaagtctgggcacggtagctcatgcctataattccagaatcttgggaggccgaggcaggtgaaccatttgaggccaggagtttggggccagcctgagcaatatagcaagatcctgtctca

SEQ ID NO: 98948 - DNA, 412 bp, Homo sapiens
ctctgccgtgcccgaaacgggacagctagaggcaggagagtgggagccagtgtccaagggcagatactgagtttggttctagaaacgcttaaggcagctgtatggggcaggctccagaccccaagggaaaaatggatcacttggtggaataagactgattatttaagctaaggcagtggatgaaaaatcctagagagaggctgagatctacaacatgaacaaagacaaatggccaagttcatgtcatggtttagacccagctctgcaggaagagaaatgcattttttttccttgccacaaatcattctcagaaaggccaaagcaggtggggcacggtggctcatgcctgtaatcccagcactttgggaggccgaggagggcggatcacgaggtcaggagatggagaccattg

SEQ ID NO: 98949 - DNA, 392 bp, Homo sapiens
  misc_feature (1)...(392): n = a,t,c or g
ctttatataagnttttggctttatatatatataaatggctttatatatatataaatggctttatataagccattaacttatataaaatctgcttactaattttatagtattcaattttgtgaatgtattatttatttagctatctcctactgatagtttattttttatgtgggtgatatgaatactgtttatagcacatctttacacatatatgagaaaacttttgattgctttattatacttaagtcatgtaagtgaaattgtagtgtctaacagcatatgggagtcaggtggtggctcactcctgtgatctcggcattttgggaggctgaggcgggaggattgcttgaggccaggagtttgagaccagcttgtgcaatatggcaggaccn

SEQ ID NO: 98950 - DNA, 397 bp, Homo sapiens
ttctttgtttccttctattaaatagtttcaaagaaatcttctgactccttcagagcagtcacatgtattgtttctccagcttggaagactctgtgagatcatctatgactacagttttgatgtaggaaggacataatgatggggactagctggatggggactgggagggagtgtcttggaatctgctcaaagttccatgtgaataaccctcgtggaagatgttcatggtgagaaggactgaaggaacctgctgggctgttcaccatggaatactacacagccagaaaaaggaacaaaatcatgccctttgtagtgacatggatgcagctggaggccattattcttggtgaatcaacacaagaacagaaaaccaaattctgtatgttctcacctgtag

SEQ ID NO: 98951 - DNA, 399 bp, Homo sapiens
ggtgactccattccccgctggttcgcctacccattctcagccgaccgcaggggagtttggccaccatgtgcacgtgcgtactgtgtctgcctgcagttaccaaaaggtacccatgagcagatatccaggggaagaaagtctgacttacttagtgcttcggaggatctacacagacttctgctgagtttgctgtttgcttctactctgagtagctttttattaaggttgagggtaaattctttttaagaagtattaatattttaaatgaatcactccttttcctttcctccaatggcccaggacttcttaaaaagctgggggtttggccaggtgtggtggctcatgcctgtaatcccagcactttgagaggccaaggcgggaggacagcttgaggccagg

SEQ ID NO: 98952 - DNA, 418 bp, Homo sapiens
tgccttttccccacaccggcacggaggagccacgtgttcggtggtcgttcggacgtggtgatttgcaggtgacatcgcaggtgttgagatgacactgaggatgttgaatattggggaggtgaagcaactgactctttttttgcttgagacagggtctcacttcgttgcctaggctggagtgcagtggcacaatctcggctcactgcagcctcgacctcccaagctcagagacggggattcgccgtgttgcccaggctggtcttgaactcctggagtcaagcgatctgtccaccttggcctcctaaagtgatgggattacaggcacgttgcccctggcctcgcaggagtcggccgtggtggaggacctgctgtacgtgctggtgggcgtggacgggaggtacgtcagtgctcagcccct

SEQ ID NO: 98953 - DNA, 423 bp, Homo sapiens
caggatttccagattagtctgggcaacacagtgaaacacatctctacaaaaaaaaaaaaaaaaaaaaaccctggggggggggccttgtggggttacccttgtacccccccctctggggggggttgccccaagggttttttttgccctcagccttccagggttgcgggggtttttttttttccccttttcctccggcctggggggacaaatcccttttttccaaaaaaaaaaaaaaggggggaaaaaaaaaaccttttttttggaaaaaagggggggttcccccctttttccccccctttttgggggggtttttccccccccccggttttaaccacctttttttttaaaccttcctttttcctttaaaacccaaagttttttcccccccgaattgcctttccttttataaaaaaacccagagag

SEQ ID NO: 98954 - DNA, 412 bp, Homo sapiens
caatcaggcagcctaatacaaggtcctgcaggggccaagggtctttccatatcgaggacctgcctttccttctaaggcagaaggacctgccttagaaattccttctatttctaaggaaatagaacctcactgaggttctattcattaatttaatagaaagaaaaaaaacttaagtgagagggttttttttctgttttctggttttctttctttctttctttctttctttctttctttctttctttctttctttctttctttctttattttggctagacttagaagtgcattctgcacttctagcaacatcccactggccagaacatttgctatatagtaaaagtggcattaaagagaaagaacccagtaatgaggcttggtaatgcgccccaaaagagagattagagtcagg

SEQ ID NO: 98955 - DNA, 399 bp, Homo sapiens
gtatgtaaagctatgaagaacagtacttgcatagaaacttttctctttaattattgaatatttctgcttcctgtatgttttgttcacaattaggcatgccgttgccactgggcagtatagaaatgatgaacaggctgtcattactggactgtagttaaagaggatgtcttgtccaggctgctgccactgggctgtatgtaaggaggttcttctgtccaccccaccgctactggactctcttccctgtaggtaagcccctaataaaatcccatgttttgtctgggcggggaggctcatgcctgtaatcccaaattttgggaggctgaggtgggtggatcacttgaggtcgggagttcaagaccagcccgaccaacatggtgaaatcccccctctactaaa

SEQ ID NO: 98956 - DNA, 390 bp, Homo sapiens
cggggtttcaccatgttggtcaggctggtctcgaactcctgacctcgtgatccgcccgcctcggcctctcaaagtgctgggattacagatgccagccaccaagcctggcccaaacaaggtctttttaagcagggtgggggtttcatctagggaactgggtgcttagaagctctctcagaagggttggaggagtaggttcttgactggaagggagcccaggacgacaccgaaccatcctgtcaggggtgccgccatgaggaggggggagtcaggagccgctgagttcaaggaaggtgtgaccgctgcaacagtcaagtgtagagctacactgtcccatagggtaaccactggccacacatggctattcacaattaattaaaatgtaaacag

SEQ ID NO: 98957 - DNA, 403 bp, Homo sapiens
tggtactacgggcatgtgccaacacggtcagctaattttttataatttgtagaaacagagtcttgcaatgttgtcctggctgttcttgaactactggactccagtgattctcctgccttggcctcccaaagtgttgggatcacaggcgtgaaccactgtgctgtgtaaattagtacaacctctatggaagacagtatggaggttccttaaagaactagaagtagatctaccattcaatccagcagtcccactactgggtatctacccaacggaaaagaaatcatatgaaaaaggcacatgcacacatgtgtttatagcagcacagttccaaattgcgaggatatggaaccaatctaagtgcccaccaatcaatgagcaaaaaaaaaaaaagggggcgcccgtt

SEQ ID NO: 98958 - DNA, 402 bp, Homo sapiens
  misc_feature (1)...(402): n = a,t,c or g
cttggcttgcatcatttcagctttcagtgcctttcctaggaatggagtgaactgctaaaagaagagctctggttgtggttgtcacttagagctctctcccctactgtttctgctggaggctgatttgcttttctgggtcttctcagttttttctgtgacctaagcataaattgtctttgagatcctggtaatctcatattttaaaagttttccacaaaagacaactgaatggaacacttttttttttcacccctttaaagtatttaattggccatcaacggtggctcacgcctgtaatcccagcactttgggaggtcgaggcaggcagatcacgaggtcaggagatcgagaccatcctgcacgacnncncntnnnnnaaanaannnntgnnnaaaataaaaa

SEQ ID NO: 98959 - DNA, 397 bp, Homo sapiens
  misc_feature (1)...(397): n = a,t,c or g
cacacacacacacacacacacacacacacacacagtgattatgtgatactctgggagttgcaacaacactgtgtgtgtgtgtgtgtgtgtgtgtgtgtgtgtgtgtgcgcgcgcgcccccccncnantgtgtgtgcgcgcacacacatctgtgtgtgtatttctacaaatccgggtgaaaccctcccagtttataaatcactctcatctctcttttgttagaaagacacatatcttttgggggcaagaaaaaaaccgtgtggtaacacaaaatagagtgcaacatttttttgacacccccttctatttccgagtggaagtgggggaggcgtgaagattgtcttttctccccattcctgcgccacagaatatatttgtgtgccggcgcacattttttc

SEQ ID NO: 98960 - DNA, 392 bp, Homo sapiens
aaaaaaaaaagccaggcatgggggtgcacaccctgtagtctcagctacttggaaagctgaggggggaggatcttttgagcccaggagttcaaggctgcagtgagctatgattgatgcaccacactctaacttgggctacagagggagaccttgtctccaaaatgaaaagaagtatggctgcaggctacattcaaactaagatcacaacgaagtgttgagtatgtataaatgtatgtggatatgtttgtgtctaagtgtatttccactaccatgctaaggtatgtttgtgtgtgagtatgtttcctccagtatgctaagttttgacacatgcaggcatctaacttggtgttatctgtccttcctttgcccaaagcatagattataattgttca

SEQ ID NO: 98961 - DNA, 404 bp, Homo sapiens
cctcttatcaatattttgagccatctaatccttctttgccggaattatttcagttttgttaaattttgtatccgacatacatcactcctttatgttgttatctccctctttcatgttttattgtgtgtagtgtcatttttaacggacagaagggcccataatgcctctgtgacctatgggtttgttttgcctgtgacattcaaaaacagtcccttgccgggcgcggtggctcacgcctgtaatcccagcactttaggaggccgaggtgggcagatcatgaggtcaggagttcaagaccagcctggccaagccaggagttcgagaccagccttgccaacatagcgaaaccctgtctctactaaaaatacaaaaatgagctgggcgtggtggtgggcacctgtaat

SEQ ID NO: 98962 - DNA, 450 bp, Homo sapiens
  misc_feature (1)...(450): n = a,t,c or g
cgcccccgattcgnagtatcgcnnnncnnnnggaannnnngggncgacccacgcgtccgtnngnttggcaatgatttcttagatgacaccatacacaccaaaagaaaaaagagacaaagtggattttttatcataatttttttgagacggggtaatgccgtgctgtnnnnnnnnnnnnnnnnnnnnnnnnnnnnnnnnnnnnnnnnnnnnnnnnnnnnnnnnnnnnnnnnnnnnnnnnnnnnnnnnnnnnnnnnnnnntgactttatcgtaatttgtaaatctgtcataatttacaactttgtccatcaaaggacactatcgagaaggtgaaaagacagcccatagaatgggagaagatatttgcaaaccatatatctcataagggtctannnnnnnnnnnnnnnnnnnnnnnnnnnnnnnnnnnnnnnnnnntgacaattccatttaaa

SEQ ID NO: 98963 - DNA, 269 bp, Homo sapiens
gttccgggcgcttgaaacaactgggggttgcccttaaaaaatagggggcaaggccacgggccccaggggttaacccttggatcccaagcttttgggaagcccaagggggttaaatcttggggccggaaaatggaaaccatcggggttcccatggagaacccccgtttttgttaaaatcccaaaaaataaccgggccttggggggggccccctgtagcccaagttcttgggggggccgaggtagaaaaatgccggaaactcgggaggggg

SEQ ID NO: 98964 - DNA, 463 bp, Homo sapiens
  misc_feature (1)...(463): n = a,t,c or g
ggaattgaaactgaaaccctcggnttaaatgggtttgnangaacnannnnnntggaannnccgggattnnnnnaccgacgaggtttctccatgttgttcagactggtcttgaactcccgacctcaggtgatctgcctgcctcggcctcccaaggtgctgggattacaggcgtcagccaccatgcccagcctagaggtcatgtttttgatgtcctcttggaatattcgcaacaaggtgttttcactttattaagcttccttggattcagtgttttctttgaacctcttttttgctgaaaatctgttgagggtctggggaacacattttgggaaatgctgagcatatctgattatcctgatctgcaccataaccaagggatagctctatgacttattagagtaagaccattttgccttcactcaataaatactagntttttggttttttttttttcaatttcttg

SEQ ID NO: 98965 - DNA, 451 bp, Homo sapiens
ggcctcgtgccaagcttggcacgaggcgcggcctcaggaacttggatacgattggtgttgctgttgatttgattcttctgtttcgtgaactgcgagtggaacaggaatctctgttgacagcttttccctgtggcctgcagtttttacgcaacattgcctcacggcatgaagattcccagtctattggttgggtgcatgccttcccaccacctgtctggccctgcttaagtcttccgccaccacacacgggtagctcctcttccatcaccctgccccccctcctcccccaccgcccacacccccctcctcactcccatccccctatggccaccctctcccgtcctccctaccccccccctcctcacccccccccccaccccctccctccctccttatctccacccgccctatccccccctccccccccccctccacctcccccctctctccc

SEQ ID NO: 98966 - DNA, 458 bp, Homo sapiens
  misc_feature (1)...(458): n = a,t,c or g
ggggattgcgggccggcnnnccccggggttttggggaactgnacanacncnnaanttnananaantagnatttgcgttgcacccgtggagagatgaaagggaatggttggttttcaggtccacctccacccagggtaagagagttggaacgttctgtcagctaacttgctagacactgtgctccgaactacttcagcaggggatccacattgcacagctgagccattagaagtcttcaggtgattcgctgaaaatctatctccttggaccttcaccgcacagagacctagtgcatcacagaaattcaacgactggcgacctgcagtggctcacgcctgtaaccccagcactttgggaggctgaggtgggaggattacttgagcccaggagttccaggctatggtgagccatgatggcaccacggcactccagccgggggcaacagagcaagaccttan

SEQ ID NO: 98967 - DNA, 453 bp, Homo sapiens
  misc_feature (1)...(453): n = a,t,c or g
gggatgcgagccgcnnnncccggaaacttcgnacgagcaagngcgnggaantnaaggtttcaccatgttgtccaggctgatctcgaacacccaacctcaagtgatctgcatgcctcagcctcccaaagtgctgtgattacaggcgtgagccaccgcacccggccagatattgcctttgctccatccatttcttcttacttctcttgtgttgctgaaatctctctgctgcatctatcagagtccttccccaaacagtttctgtagatggctccccctaccaccctgactcttcactgggcactaaagccgattttttaggcatgcacattccatgtcacaaacaggaagcttctcattcttttttctcccagcgtggggaattgagcacataatactccaaataaccatcagatgattctaattccaacatgaccacgtccaggcaactgaact

SEQ ID NO: 98968 - DNA, 395 bp, Homo sapiens
tccgagagccgctctcccaggctccccgctgcagcggcggggctgccaggggcggcacactccagcgccagccagagagctagcgccgcttgaggccggccggggacgaggcgctttacactgcctgatgggtactagcagcccaccccagccagatggaggacaaggcctctccaagtctcaaggaaatgcacaatccttccttacctctggcctcagaactctcagcatctcattgattagcaacctcatctgtggcaaatctaaggaacaccttctacttaaaattgaagtcttctgtgctgggtgtggaggctcattcctgtaatcccagcactttgggaggccaaggagtgcggatcacaaagtcaggagttcgagaccagcctggccaa

SEQ ID NO: 98969 - DNA, 411 bp, Homo sapiens
ctatgattggcagttcctttcttgtaagctgtaaagacagttttgaggttttttttggttttaaaaaaattccttgttgtatgtaggttggaaaataacaagccaccccaaataactaatttggagaaaatattaagagatagacttggatttgtacattataggttcattgccctcaagtggcagaaggaaaagcatatggaatatgaacaagtgtgaactctgccccaaacagtgggcaaaaagcttctgtagaagaatgttttggacaagtcacaaaagtcaagattcaaaatgttttccttggctgggcgcagtggctcacgcctgtgatcccggcactttgggaggccggggcgggcggatcacgagatcaggagattgataccatcctggctaacacggtgagat

SEQ ID NO: 98970 - DNA, 404 bp, Homo sapiens
agtagattagttagacagggttttgcccttctgactccttggtgattatctctttttagataattactattcatgtacctttctcaatgcccttaggtgagagaatagcttcctttcttcctgatttgattctgtagcatagacaaccttcctttcagggggctggattcatttaactcttatcttcaggccagctgctgtgcttgcacctgggggaaggaggtttgcttgtgtgctgcatgttgacccttatacattttatctaagagaacattttcaaatgaaagaagctgtctaggcctggtgcggtggctcacgcctgtaatcccagcactttgagagacccaggcaggtggatcccaaagtcaggagttcgagaccaggctggccaacatagtgaaacg

SEQ ID NO: 98971 - DNA, 479 bp, Homo sapiens
  misc_feature (1)...(479): n = a,t,c or g
agaatacaaaancctgaatnacatgataccctcccaanccgattnccggnagacccacgcgtgcggaaggtatgcaaagccagccatctgttggggtagataaaagttgtttcatctgagttttgagatcttggggtcccatccgtaacctgcaaggaaaagtcaaggtcacattcagtggatactaggagagtgccattcctctccccatttctgcacttcatacccagagcagaggattcctccatgcctagcactaaggaaagagatccttcccatcttgctctcacagagtccacttttgctgaaaagcaataaatagctacgatagccagcagttcagcttcattaatggaaacctaaattaatgatggcataagcaagatcagcttatttctttctcacttaaaagatcaagcaggccaggtgtggtggctcacgcctgtaatcccagcactttgggaggccgaggcgggtgg

SEQ ID NO: 98972 - DNA, 395 bp, Homo sapiens
agaaactaacagttccacaggcactgtcttaagagctgtaacacccaccatgaaggtctgcagttttactcctgagccagcgagaccatgaacccagcgcaaggaaaaaagtgcaagtacatccgaacttcagaacatcagaaagaagaaactctggacaggccccctttaagaactgtgacaccacctgcgagggtctgcggcttcattcttgaagtcagcccaagaacccaccgattttagacacactgggttcaagcgattttcctgcctcagccttccaagtagctgggattacaggtgtccaccaccacgccggggtggaggagtgctctgtttaccaggctggagaacagtggtgcagtcttggctcactacaacctccatctcccagg

SEQ ID NO: 98973 - DNA, 479 bp, Homo sapiens
  misc_feature (1)...(479): n = a,t,c or g
ccgcgccatcgaaatcgaggactntcacgacagngcggcggaattcattcataccctgttatttgcttgtttattctcatgggttcttctgtgtcattgccattttcatcggttgcttgcctgcttgcctggttattgccttccttccttccttccttgcttccttccttccttccttccttccttccctcccttactggcagggncttcctctgtctctgccgcccaggatcaccccaacctcaacgctttggaccgaccaaacggtcggtctgcctctgatccctcccatccccattacctgagactacaggcgcgcaccaccacaccggctgacttttatgttcgttctcatgttttccgcaggcgtcatctcacgtgtcgaggtgagctcgaacttttaggctccagagatcctcccgcatcggcctcccggagtgctgtgatgacacgcgcgggcacgacggaagttcactctn

SEQ ID NO: 98974 - DNA, 458 bp, Homo sapiens
  misc_feature (1)...(458): n = a,t,c or g
gcgggccgaatcgagatcataggccgtgncgaggaattccgggttttgctgtgttgcctaggctggtctcgaactccggagcttaagtgatccacccactcgcgtgagccaccgagcccggtctgcttgctcttgtgtttgtttctatgatcatcataaaagcagttagtattgttgttgcaattactattgttgtttaatggaatccacccttcctgagccctcggaagtgggctgccagagcagacactgagtggggagttgggaaaactgcccaggagccaggtctctcttctcgcctgcaggcatacgaggagcggcagcggcactggcagcgagagcgtgaggccctgcgagaggactgtgcggcccangcacagcgngcacagcgggcccaacagctgctgcagctgcaggtgttccagctgcagcaggagaagcggcaattgcaggacgac

SEQ ID NO: 98975 - DNA, 439 bp, Homo sapiens
aattcggagtgccaggttagcaggcagacacataaggagtagtgcacctgaattctactgtgaacttgaaggctgggtgagaaaggggaaatagaattgtttccttctcctcttctgagttaaggactggatctaggcacattttcaaaacagggtatctctttcctattttatccttttttttttttttggaaaaaaagtttaatttttttccccgggggggagggcaggggaaaaatttgggtttatggaaccccccccccccgggtttaaaaaaaccctctggcttaaccccccggggaagtggaaacaacgggcccccccccccatcccggtttattttttggaatttaaaaaaaaagggggttggcccaatatggtgcaggtgggcctcaacccccggccctaatgggacccccttatttgggcccccaaaggc

SEQ ID NO: 98976 - DNA, 469 bp, Homo sapiens
  misc_feature (1)...(469): n = a,t,c or g
nggtgaaaaatgatnatcgtaggacagtgcggnggaactctggcaggccgcctgtagtcccaactactcgggaggctgaggcaggagaatggcgtgaacccaggaggtggagcttgcagtgagccaagaacgcgccactgcactccagcctgggcaacaaaaaaaaaaaaaaaaaaaaaanngggggccgggcgggggggaaaaaaattgaaaaccccaatttttggacccccgggggggcccaaattggggggaaaaaaaaaaaaccccccccggcaaaaatgggaaaaccccggtttttaaaaaaaccccccccccccccccaaaaaaaaatggggggggggggggcaacacccgggagcccccactttattagggggtaagggaaaaaaattcttttaccccgggaggaaaaagttgaaaaaaaaaaaaaatgggccatgtccctccggccggggaaaaaaaaaaa

SEQ ID NO: 98977 - DNA, 135 bp, Homo sapiens
tatacttgggagactgaggtgggagaattgcatgagcctgggagtttgaggctgcagtgagctatgattgtgccactgcattccagcctagggacagagcaaaatcctgtctcaaaaagaaaaaaaaaaaaaagg

SEQ ID NO: 98978 - DNA, 398 bp, Homo sapiens
  misc_feature (1)...(398): n = a,t,c or g
attttgggcaaagttgcggagacacattcctctgtccacctaagaaatcagaagactcttctgttgatttatgtttaatcatttcagtagtttccccacagtgatcatttctgcattttctggcttttgttttcttggctgaaagtgaatggtgactgttaggaatgtcagggactagtgacccagtcctgtttctctgtgttttagttattaaaaagaaattctgtacccccnnnaaaaaaaaaaaaaaaaaaaaaaaaaaaaaaaaaaaaaaaaaaaaaaaaaaaaaaaannnnaaaaggggggggcccttttaaaaaaaaaaattttttcccgggggggggggaggagttttttttttttttgggggcccaaaaaaatactgggggggggcggga

SEQ ID NO: 98979 - DNA, 387 bp, Homo sapiens
tgctgttgtacaagctcaccgaggcgcacacctgggggtggacacggtgggcagagacctggagaccacagagggagatcggggatggcctggggctgggtccctcatttaccagactgtgagcatagctcatgctgcacagccaggggacaagctgcttccagacccggatgttgtccacatgcagccactgccccatgatcacctccatgtataagagcgggatcccgaataagagaagcatgaagaagtacatcaggatgaagctgcctgggaagggagccaggggctgtgctcaggcagccaggagtcctggccctgtccccattttcccctaggagcccacgtgcccaaccccagcaacaccaaaaaaaaaaaaaaaaaaaa

SEQ ID NO: 98980 - DNA, 389 bp, Homo sapiens
  misc_feature (1)...(389): n = a,t,c or g
gggaatgtcatggtcttgctttactaagttttgagactggcaggtagtgaaactcattaggctgagaaccttgtggaatgcagctgacccagctgatagaggaagtagccaggtgggagcctttcccagtgggtgtgggacatatctggcaagattttgtggcactcctggttacagatactggggcagcaaataaaactgaatcttgttttcagaaaaaaaaaaaaaaaaaaaaaaaaaaaaaaaaaaaaaaaaaaaaaaaaaaannnggggggggggggataaaagggaaaaaatttaccccccggggggggggaaaattttttttttttttaggggcccaaaaaattttttccgggggcgggttttaaaaacggggggggggggaa

SEQ ID NO: 98981 - DNA, 389 bp, Homo sapiens
cccacgcgtccgatttttaatagagacggagttttgccatgttggccaggctggtctcaaactcctgacctcagttgatccacccacctctgcctcccaaagtgctgggattacaggcgtgtgccacctcgttcggccggaaaaatcttaaatggagcagcttgtttggaactttctttgaaaccaccaatattacttatttgcaaaagatatccataggttagtacattaattgactgtatagcacatatgaatcttacctcatgaaatcaggtaagcaaaaagtattaacaatattttaattcctttaaatgaaatcaaattctgcccttgggggcaggtgtggtggctcgtacctgtaaccccagcactttgggattctgaggtga

SEQ ID NO: 98982 - DNA, 383 bp, Homo sapiens
  misc_feature (1)...(383): n = a,t,c or g
acgcgtggggttgaaacttggtgccagaaacagggcatttaagcccctttctcatgtgagagaataatataacattttcagttcttaaaaaataacttgctgttggatttttaaaatgaatgatggctatcagattgctagattccatttaaaactgtgatgtgaaagttttattttaaaatgttaatgtttacaatatgctgaaaattgtatccttagaaattgtgtagttgaggatgaaaactttatgtcagcctaaaaataggcacggcagtacaagtttttcaaatttcagaattcaagggcccaggcatggtggctcatgcctgttatctcancacactgggaggccgaggtgggagggtcgcttgagcctangagtt

SEQ ID NO: 98983 - DNA, 394 bp, Homo sapiens
aaaatagtattaaatagaaatttggatctgtacaaagtaatatagactgacagacattgtaaatatgttggcaaatagaaaatatttttgtttctttatagtgtatacacacaacacactctatatagaaacactacatcctatatatatgtagaatatatagtttagaaattatatatatacacacacacaagcaagaaacaattggaatttgaaatttaaaatggatgccatttacaatgacttcagagaacataatatatttagggataaaccaaaaccacctaacctaaaactacaaagtattactgaagaaaaccccgtctctactaaaaatataaaattagcccagcattgtggcgcatgcctgtaatcccagctactcgggaggctg

SEQ ID NO: 98984 - DNA, 470 bp, Homo sapiens
  misc_feature (1)...(470): n = a,t,c or g
tgggccatagaaactgaagcncgttgctaccgcaccgcaagtcccggaactaccgcacgcgacccacgcgttcgctgaggcagaagaatggcatgaacctgggaggtggagcttgcagtgagtctagatcgcatcactgcactccagtctgggcaacagagcgggactccgtctcaaaaaaaaaattatttactatagaacttgtatatgtattcttgaaaaagaattcaaagggagaacctcttcccaaggtgctgggattataggtgtgagccacccaccatgcacggccaaactatggactttggttaatgctactgtatcaatattagttcattaaattgagtaaaaattctttttgggcaatttttggggtaacctaaaattggtctaaaacatattattaatatttggtaaaagaaaaaaaaaaaaaaaagggcggcccgtttaaaggatcccaccttacctcc

SEQ ID NO: 98985 - DNA, 393 bp, Homo sapiens
  misc_feature (1)...(393): n = a,t,c or g
cggacgcgtgggatgttgtatgtacgcatatatggaccggagtctgctgagtttataaggttccaaaaatatggtaaaatcttggtttttgttaatttatctcaataaaagcccactggaactccgaaaaaaaaaaaaaaaaaaaaaaaaaaaaaaaaaaaaaaaaaaaaaaaannggggggggggggggggaaaaaaaaaattttttttggggccccccgaaaaaaaattttttttttttttttttaaacctaattaattgtgcccccccgggggtaaccaaaggggggggggaagaaacccccccccccccccccttttttgggggttttnnnnnnnnnnnnnnnnnnnnnnngnggcnncnnaaatcnnctgccctgggcctcaacttaa

SEQ ID NO: 98986 - DNA, 407 bp, Homo sapiens
  misc_feature (1)...(407): n = a,t,c or g
cgtgaacccgggagcctgtaatcccagggaggctgaagcaggagaattgcttgaacccagaagttgaggttgcagctgagattgcaccattgcactccaccctaggggacagagtgagtaagactccatctcaaaaaaatgaaaaaaaaaaaaaaaaaaaaaaaaaaaaaggggggggcccttttaaaagaacaaaatttaacgcccggggggggggaagataaatttttttttttggggccccaaaaaaaaatttcgggggcgggtttttaaaaagggggggggggaaaaacccggggggaccccaaattaaaggcggtgggggggnnnnnnntgnnntnnngngnatgcatgttcctgttgatgtaaattgacgtctcgtggaaacaaaaaagatatgtatcccg

SEQ ID NO: 98987 - DNA, 423 bp, Homo sapiens
  misc_feature (1)...(423): n = a,t,c or g
acttatatctgcagcttatatctgcagtgtttgtgttaggaacctagcttttataatgtgttaactttttaactcagtattctggctttgggattttttgttttgtttttggaaacatttcagaagtggaatgtagcctgttaaaggtgtgcacaaaaatattttgcatgtgtttttttttttgcctgggggaattctactttttagcaaaaataaagccccccaaaggatgtgcaattcccaaaaaaaaaaaaaaaaaaaaaaaaaaaaaaaaaaaaaaaaaaaaaaaaaaattngggggggggggctttaaaaaaaaaaaaattatttgggggggggggggggggggtttttttttttttttaacccccccaaatttcccccgggggggggtttgtttaaaagggggggaaaaaacgcccc

SEQ ID NO: 98988 - DNA, 430 bp, Homo sapiens
  misc_feature (1)...(430): n = a,t,c or g
cttctcctcccaacaccatatcaccacatcaaccaggactccagtaataaatatcatgagactaaaaaaaaaaaaaaaaaaaaaaaaaaaaaaaaaaaaaaaaaaaaaaaaaaaaaaaaaaaaaaaaaaaaaaaaaaaaaaaaaaaaagaggagaaaaaaaaaaaaaaaaaaaaaaaaaaggggggggggggggttataaaaaaaaaaggtgataaagggggggggggggggaaaaaaaaatttttttttaggacccaaaaaaaaaagggggggggggggggataaaaaaaagggggggggggaaaaaaaccggggaaaaaaaaaataatttgggggggggggatnnatttcancgcccatgccccacaaaggtgggaaaaaagtggaaattaatatttgatattgttaccaaaatataaaaaatggggg

SEQ ID NO: 98989 - DNA, 425 bp, Homo sapiens
  misc_feature (1)...(425): n = a,t,c or g
ctcctcctgcctcctgacccaggactgctgaatacaaagatgttaatttttaaaatgttactagtataatttattctatgcattttataaaataaataaagctttagaaaaaaaaaaaaaaaaaaaaaaaaaaaaaaaaaaaaaaaaaaaaaaaaaaaaaaaaaaaaaaaaaaaaaaaaaaaaaaaaaaaaaaaaaaaaaaagcggggggggagaaaaaaaatgatttattgtgtggggggccttaaaaaaaaaactggggagaaaaaaaagaaagggcaacaaaaagggggggcggggggggganccaccggggaaattgatatccccccggaaacccaacaattttggggtttttgggacnnnnagaaatgnaggcattaaaataaaggtgattaagaggaaaaaaaaacagtaaggagaaag

SEQ ID NO: 98990 - DNA, 414 bp, Homo sapiens
  misc_feature (1)...(414): n = a,t,c or g
tcgaaacacttctcaaaaggatatacgtattgaccccaacaataaatgtttgtggcttgtgaaaaaaaaaaaaaaaaaaaaaaaaaaaaaaaaaaaaaagggggggggttttgggggggggttttttttttcccgggggcggcggccgaattttttttttttgggggccccttttttttttttttgggccccctttttcccccgcggggggggggggacccccggggggtccccccttttttcccttttggggggttnnnnnnngnnnnnnnnnnnnnnanacnnnntggntntcacattttttttgtggtgggggggtgctctcttgttggccggctctattcgtttcttgtgtttcggctctgcttctgtcttctcgtctttgtcgtcctcggtctcgctctgtgttttccg

SEQ ID NO: 98991 - DNA, 417 bp, Homo sapiens
  misc_feature (1)...(417): n = a,t,c or g
tttcaatccatggttggttgaatctacatgtgtgaaagctgcagatatggagggccaactgtcctcacaacgtgtgaagcagtatagcgttatttgaaaatggacttggattggttgtaaatgtatgttgcaaactctaggacaaccacnnnaaaaaaaaaaaaaaaaaaaaaaaaaaaaaaaaaaaaaaaaaaaaaaaaaaaaaaaaaaaaaaaaaaaaaaaaaaaaaaaaaaaaaaannnnggggggggggcctttaaaaaaaaaaaattttttttcccccttggggggggaatttttttttttttttggggcccaaaaaaaataaaggggggggggggttaaaaaaaaggggggggggggaaaaccccgcggggccacaaaatattgtggggggggggggggggnatnnnncgg

SEQ ID NO: 98992 - DNA, 404 bp, Homo sapiens
  misc_feature (1)...(404): n = a,t,c or g
gcagagactgcagtgagccatgattgagccaccacactccagcctgggcaacaagagcaagactccatctcaaaaaaaaaaaaaaaaaaaaaaaaaaaaaaaaaaaaaaaaaaaaaaaaaaaaaaaaaaaaaaaaaaaaaaaaaaaaaaaaaaaaaaaaaaaaaaaggggggggggggggggaaaaaaaaaaaaaaaattttcccccgggggggagaaaaatatttttttttttttggggaaaaaaaaaaaaagggggggggggggttataaaaaaagggggggaaaaaaaaaaccccccccaaaaaaaatttttggggggggggggnnnnttttttntttnatnnatacaaaacatgttgagttaccaaataaaatttttaaacctcataaaaattccccgga

SEQ ID NO: 98993 - DNA, 372 bp, Homo sapiens
cggacgcgtgggtttccagaaaagctttggtgtcatctcctgcctggggctgcagagtgtttgcgtgcagaggtgggaggggcatctgaccctggagagatgggctgtatctcacaatcttgcaagggctcctgcctctcactctctcattcattcattaatttattcactattcactcaacaaatattgattggcctggtgcggcggctcacacctgtaatcccatcactttgggaggctgaggtgggaggatcacttgagcccaggggttctaaaccagcctgggcaacaaagcgagatcccatctctattattaaaataaaatttaaaaaattacgtattgagcacctggtatgggctagacccttata

SEQ ID NO: 98994 - DNA, 398 bp, Homo sapiens
caggtgatccgcccgccttggcctcccgaagttttgggattgcaggcgtgaaccaccgtgcccggccagagcacgagctttttaacctctgttgaggaaacggggaccggtcacggtagctcaggcctgtggtcctagcacttcgggaggctgaggcgggaggatcgcttcagcccagaagtttgagaccatcctgagtaacatagtgagagccccccgtttacacacacacacacacacacacactctttttttaaattgaggaaacagatggtgagttgaacatgagcaattattccttatatatagtatttccttagtttttcttctcaacattcatttgcccagtgaaaagaaaaagcaagtagctgggaccacaagcgcacaccaccatgcgt

SEQ ID NO: 98995 - DNA, 401 bp, Homo sapiens
gggcttccacttgaccacctatggcaaccggaagcagatgcagagacatgtgcgcgaggcttcagcccgccccttacagggaaccccccccccgggccacgccctggagtggacgctggaaaatgtgctcctggcagcccctcggccgcggaaggcacaagtcctcttcgccatcgtggccagcgagacaagtagctgggacagggagaagctatggactctgtccctggaggccaaatgcaagggcattaccctctttgtgctggccttgggtccgggggtggggacccatgagctagccgagctagccgagctggtcagtgctccctctgagcagcatctactgcgcctacaaggggtctcaaagccagaggttaactacgctcagggattcactcggg

SEQ ID NO: 98996 - DNA, 419 bp, Homo sapiens
cccaactaatattgtttcacgataaattatcacccaaactactttcatggggaaatgtagatattttaattaatttttttctttcacactgttcacctgaaagagctagacgccttcaagctaaaatgatgactaatttggttatggccaaggaccgcttacaacttctaggtatcaattaatgtataatttgatgtgggatgtattggaaatgtgtgttcaatgaaactttaatttgtagaaagaaatagatcagtgattgaaaatgtggtccaggctttttaacataaagaaaacgtataacatatacaaaaacagaagagcataatggacttctttttttttttgagatggacgcttgctctgtcacccaggctggagtgcaggggcgggatcttggctcactgcaagctctaccc

SEQ ID NO: 98997 - DNA, 417 bp, Homo sapiens
  misc_feature (1)...(417): n = a,t,c or g
gaggacaagcaagaaatagcctgaggaggctctggctatcctaacctgagaggcagggtagttgtggggcttctaggggaagggcatctcctgtccctcaaatctttgtgctcattccatagctgcctgggccgggcaggactgacccacctcccacccgctgccctagtgaggctgcacagctgcagccgctgtggagttggcagccactggatgttcaggatcttctgtaagaatcgtggttaggccgggcacagtggcacacacctgtaatctcagcactttgggaggctgaagctggaggatcacttgagcccaggggttcaagactaggctgggcaacatggtgaaaccccatctctacggaaannaananttaataccnnnaaaaaaaatcccattctgcaaggttttttc

SEQ ID NO: 98998 - DNA, 416 bp, Homo sapiens
agatatgagccaccacgcctggccaaaagggaattcttttacctcatatgggggcatttattacgtagaacaactgctgtatgcctaatataaaaggattataaatgtaactaaaatacctattataattatatacaacaaaagatacttgggataaatctaacatggcaagattgttttggatgaaacataaaattttttaaaatcaagtaggggaatgggttttgaggaaaggtactctgggagatttaattatgtctatgctgtttcatttcttagtggttaggagcaaagatgaaaaaaatactaagatttggccaggtgcggtggctcacacctgtaatcccagcactttgggaggccgaggtgggcagatcacgaggtcgggagttcgagaccagcctggccgacatggc

SEQ ID NO: 98999 - DNA, 310 bp, Homo sapiens
agagacaggggttgcaccatgttgcccaagctggaacttattttcaaatactaaatcttgcttttaggtggcactctaatttttaattacagcatcagattactattttgatctttaattaagtcctaatgacaaacattaatgaactaaagaaaccaagataatgcctcaaaaccctagtgggaattccaaaattccaacaaaaatcagaattaagccttttacaaatatatgagccggaaggccaggcacagtgactcacacctgtaatcccagcactttgggaggccaaggcgggaggatcacctga

SEQ ID NO: 99000 - DNA, 373 bp, Homo sapiens
  misc_feature (1)...(373): n = a,t,c or g
cgagaaagtaatgagttgtgaccaatagttaatatattttctaaatttaaatgtactaccgccacaaataactgcgttttggattattaaactatccacagtaatttaaagtgaatcatcctcttcatttatagctaaattctctaggccaaaagaaacatggattcatgtcttgtatttactgtcagatttacattattttcagagatatttcataaataaccattacgtttcagagctttcttgctgttttcagtagttagcaatttctttttcttttctttcctttttttttctttttttgggggggagtcttgcactgtcacccaggctggagtggtacagtggcaccatctcggctcactgcagcctn

SEQ ID NO: 99001 - DNA, 382 bp, Homo sapiens
  misc_feature (1)...(382): n = a,t,c or g
tgacatttagtgttgtgcctttatgtgctcaataaatgcttcatgagtacattaataggaccaagacctgaatatcagatttcatcaaattgaagacatgtcaattgtaagattaacatttctttttatatgccactaaggaagataaaagcactgctaattcaaatatggcacagtcttatcacttaacatattttctgaatattgaaagagttatttagacttatctagacatagatttgaattatatatcactgctaagaaaagaaaatggctgagtgcggnggctcatacctgttatcccagcactttgggaggctgaggcggataaatcatttgagcccaggaggttgagaccagcctgagcaacatggtgaaacct

SEQ ID NO: 99002 - DNA, 373 bp, Homo sapiens
gagaattgcttgaacccaggaggcagaggttgcagtgagccgagattgcgccattgcactccagcctggatgacagagtgaaaaaaaaaaaaaagggcccttagttttttggccagaaaaaaaaaaatcgggggtggtcttcactgaaaggacccctgggcttttaaacagggccccttttccccccggggggaacttgtgtggggggccccaatatcggggggaaaaaacaatttttttttttttttactcgccctcaatacaacaaaaagcctttttgaccccaaagggcggggggcttttccctacacataaaccattttctccggggcccaccagggggggggcctaaaatcgatttgggaaacataat

SEQ ID NO: 99003 - DNA, 413 bp, Homo sapiens
  misc_feature (1)...(413): n = a,t,c or g
cacggtgactactaagcacttaaaatgtggctggtgcaactaaggaaccaaattttcaacttaaatttgttttaactgatttaaatgcaaatagctgcatatggctagtggctgctatactggacagcacagccctagagacagagctactgagtagggaaattgaaggacatagtggtggtacatgtggaaaatggaggagagcctcatttgggcaagaaagaaccaagagggacaggattcataatggtgggtgagacagagggagtgacaaatacaagggagcaagaagggaaacagaaataaaatttttgcactgctnnnnaaaaaaaaaaaaaaaaaaaaaaaaaaaaaaaaaaaaaaaaaaaaaaaaaaaaaannnnnggggggggcccctttttaaaaaaatcctt

SEQ ID NO: 99004 - DNA, 413 bp, Homo sapiens
agaccacataccttttcaagccacacacattggcaaccatctctaacctgcccccatgccccattgtcatcgtgtccccccaacctctgtctttgtttttttttttttttaaacaaagtctcactccaccctgggcaaaaaaacaaaacactgtctttttttttttctcaatataaaaaggggggggggggaaaaaatatataaataggggggggggggggggggtatacatatacccccatatatccccccccccatacatatgcgtgggtatatatacccccccccatttatgggggggatatatatataaaaatatagggatggggttatatataggggagggggggggcgccccccccacagtttttaaaaatataggttttgaaaaaaaaacaaaagaattgttgttt

SEQ ID NO: 99005 - DNA, 411 bp, Homo sapiens
  misc_feature (1)...(411): n = a,t,c or g
ggaggtgaaggttgcagtgagccaagatcgtgccactgcaccccagcctgggcgacagaacgggactccatctcaaaaaaaaaaaaaaaaaaggggggcccttttaaaagaacccatttttcctcccccgggcttccaagttttttttttttttttggggccccaaaattcaattcccgggcccgctttttaacaccccgggaagggaaaaaccctgggcttcccccattttatcccgcctgagnntnnnggnggcctccanaatccatttttgccccctgaccctgtctcactgtggcataacatccaccctaaataaagatctaaccctgaatgacaactttccactgtgtgttattggggacagcccaccctatttttcattgcaggaaggaagtgctagggctccct

SEQ ID NO: 99006 - DNA, 371 bp, Homo sapiens
actctgtctcaaaaataataataataataataataataataataataataataataatgattagctggatatggtgttgagtacctctaggttccagttactcaggaggctaaggtaagaggatcattggaggctgggagtttgaggctgcagtgggcggtgatcacaccacagtatctagcctgggcaacagaataagaccatttcaaaataaatttttttttttagttaaaaaaaactgaatctctcggggttctagttctaagtaagatagaggaagcagtctgtctctcccactggctgcaactaaaagccctggaaataatggatctgaggactctgaaaaagaaatattaacaaggctgggtgcg

SEQ ID NO: 99007 - DNA, 385 bp, Homo sapiens
tgagaggcggaggttgcagtgagccgggatcgtgccattgcactccagcctgggcaacaagagtgagactccatctcagaaaaaaaaaaaaaaaaaaacattgctggaaaaaaagccccttaggaagttcccctaacccttgtaaaaaaggagggggccccgcccacctttggaaaaaagaaaggcttggaaagggcttaaatgctgagggggttttgcaggcaaacctaacaaatttttttgactgaccaagggggggggaaaagggaaagcccaagggggacccccttttttttgagcaacgggaaaaacaaaggggccattaactttttgtggactaaaatttaaccccggggcttggggggcaaaattttaaaaatttttc

SEQ ID NO: 99008 - DNA, 392 bp, Homo sapiens
tttcgtatggccggctcctaccctgaaggtgcacctgcaatcctcgccgataagaggcagcagttcggaagccggttcctgagcgatccggcgcgcgtcttccaccacaatgcctgggacaatgtggagtggtcggaagagcaagccgcggcggcggagagaaaagtccaggagaacagtatccagcgggtgtgccaggagaaacaagttgattatgagatcaatgcccacaaatactggaatgacttctacaaaatccacgaaaatgggtttttcaaggatagacattggctttttaccgaattccctgagctggcacctagccaaaatcaaaatcatttgaaggattggttcttggagaacaagagtgaagctccgtctcaaaaaaaaaa

SEQ ID NO: 99009 - DNA, 444 bp, Homo sapiens
  misc_feature (1)...(444): n = a,t,c or g
ngtnnnaagagccggnnattgaaatcccgatgacttgtanggccggaannncgggnngaccacgcgtccggtttttagtagagacggggnttcaccgtgttggccttgctggtctcgaactcctgacctcgtgatctggccaccttggcctcccaaagtgctgagattacaggctcgagccaccacacctggccccaaatagattttcaaagatgtctcacagcatatgttctctaaaataaagatgaggttgtccagcacaatataccatctctagaacaaagtatcaagatttaattgttttccagttttaatgggaaaacacatcccagtgattttaaggtctttaattcaaaatgggacggaccaatgttattggtttggcgaaaatggctttttcctgtttgcggaccttggaagaggtgagaaacaagagggttatgt

SEQ ID NO: 99010 - DNA, 398 bp, Homo sapiens
ggaggcggaggttgtagtgagccgagattgcgccgctgtactccagcctgggcgacagagcgagactccgtctcaaaaaaaaaaaatttaaaaaaatttttttgccccgggcttggcttgtaccaaaaacaaaatacctggaccttataggggttgggggtctttgttggaaaaggaatttttttgggatttgccccaggcttgttttaaaaaccagggaaaattttcccacccccatgaggccaaccctttatttaaaaaaaatttttactgcttttccaggtaagggaggaggcctttgtataaaaaaatgggggggggggtagggaaatggtttgaatgaaaattttccaggagggcccagaaatttgcgcgggggggccctttctttttggaaa

SEQ ID NO: 99011 - DNA, 407 bp, Homo sapiens
ggattacaggcatgagccaccgtgcctggcctagtgctacacacttttaaacaaccaattctcatgagaactctatcaccagacagcactggggatggtgctgaatcattaaaatcacccccataatccaatcacctcccaccaggaccctcccccaacacgcggggattacaattcaacatgagatttgggtggggacacagagccaaaccatatcacactcccaccaacagtgcatcagcatttccttttctccacaacctcgccaacgtcggttatcttttgacttcttaattgtttttaagtttaaagctgttctggccgggcacagtggctcacacctgtaatcccaggactttgggaggccaaggcaggaggatcaactgaggtctggagttcgagaccac

SEQ ID NO: 99012 - DNA, 382 bp, Homo sapiens
agtgaatgctttaaaagttctgggtgattgagacagtttaaattttttttaattatagatttacttattttaaaatgttaccaaaaataaaaaagagctacttcactgagagccagtgtggtaatttacagagtattttaaatttaatgtacaatcaaccagtttggggaaagctttttaaaatgaacttctaatgttcattatcattcattaaggagtgtaagctgcatatttcaggtttacaagatagtagtataagtttagttaatttagggctggctattagaaacataagaaataagccaggtgtggtggctcacagctgtaatcccagcactttgggaggtcaagccgggtggatcacttgaggtcaggagattgg

SEQ ID NO: 99013 - DNA, 421 bp, Homo sapiens
  misc_feature (1)...(421): n = a,t,c or g
agcgcaggctcggcctgccttatccagtgggacggcaaagggtcactctaaaaattgctgcagccgggtcttgtcaggtggctgctggtggctccccaccggattttccttctccctctctctatctccacagatcccttcccaagaggagtctcctgctaaaacttcatcatctcaagttgacctgccacttcacccaaggaggcaagctcttgcctgtgacagtgtatttgccaacatggcncccnnnaaaaaaaaaaaaaaaaaaaaaaaaaaaaaaaaaaaaaaaaaaaaaaaaaaaaaanaaaaaaaaaaaaaanaaaannnaaaaaaaaaaaaaaaaaaaaaaaaaannaaagagggggggcggctaaaaaaaaaccacattctcccgccccggcggagagagatttattttttg

SEQ ID NO: 99014 - DNA, 417 bp, Homo sapiens
ggaggcagaggttgcagtgagccgagatcgcgccactgtactccagcctgggcaacagacagagactccatctcaaaaaaaaaaaaaaaaagggggttttcttttaccaaaaaaaaagggctggtttttttggaaaagggggcagacccttttaaattttaaaaaaaattttggacaggccttggcgaaaaaaaaaccccccccccacataattttagggaaaaaaaaaaggggggccaaaatgaaaaccaggcctaatttttttttgggtaaaacgggttgggtgaaaaacctttaaaccctattaatataataaaacgggggggggggattttttaaaaaaccccttcaaattaacaattccctttttttttggttggggggaccaacccatacaaaaattttgggaaaagttaa

SEQ ID NO: 99015 - DNA, 426 bp, Homo sapiens
ccttcaggcttctgtgagtaaggagcttctgttggtgggtacgtacttctaggcctcctcatctttttttttttttttttttttggggaaaggggggtctatttttccccccaagggggggggggaggggaaaaatttttttttatggaaacctggggcccccgggggggggggaccccccccccccacccctcgggggggggggaaaaaagggcccccccccccgggccaaaaaatttttttggggatgttttttgaaaaaaaaaggtttcaccatgggggcggggggggttttaaactccggggtaaaaagaaacccccccctttggcccccaaaagggttaaaaataagggggggaaccctgggggcggccaaccccttaaatttaaaaagaccctcccggaaaaaatggggttaaaaaaagg

SEQ ID NO: 99016 - DNA, 408 bp, Homo sapiens
cccgcctcgaccccccaaagtgctgggattacaggcgtgagccaccgtgcctggccattttcagtcattatttctgtggctactttttcatcctcctccttctgagattccagtgacacaaatggccacaattctgtcagtgggggttttgggcaaggcggtttccttagaggtggatagttgggcaggcactgtttcatctccatcatataacatcatctgcttgttgaatacaaaaaatatttcttccacgcatcctagaaatgcccccatcaaacatgacccaactttcacatggacagtcacaaaggggagaccagtcaaagttacactgagccactgtacccagcacacagtgcctcttattgatataagaccactcctggctaatttttgtatttttaatag

SEQ ID NO: 99017 - DNA, 398 bp, Homo sapiens
  misc_feature (1)...(398): n = a,t,c or g
cggacgcgtgggtgcaggcatgttgggatgtaagcctaggggaggtgctgcaagctcaagaaccaggcccacacattatatattaaaaaaaaaaaaacccccaaaaaaaaaaaaaaaaaaaaaaaaaaaaaaaaaaaaaaaaaaagaaaaaaaaaaacaaaaaaaaggccccggcgggggcgggggatctaagtttatattacccccgtgcagggaggaacaatcttttttttaactacctgccctgaaatgacctccctgggggaggtaaaaaaaattccagaatggaaagcccgggcgtttgtattcttttgaaccttgaaaaatggctttttgggagggcaggaaataaaactacccctcacctggccngggggctgtntagttggtgcctgtca

SEQ ID NO: 99018 - DNA, 405 bp, Homo sapiens
ctggagagctatatgtgtagctaaaagagatcgtgggacacagggatctgcagacaagaagaaaatcctacctctctacatgttctgcatctcaatttagcatctcctattgtctgtgggttttttttgtttttagttaattataattttgacataattaaccttccttaggttcagtgcggaaactttagaaatgtggctaaaatgaaagctaaatttagtcaatttttctagtttaagttcactaaaagccatgatctcagccatattacttaagctctctgtccctatcttccccatgaagatagtaattttatctacattaaatagtggctcctggccgggcgcagtggctcacgcctgtgatcccagcgctttgggaggtcgaggtgggcggatcacctg

SEQ ID NO: 99019 - DNA, 394 bp, Homo sapiens
  misc_feature (1)...(394): n = a,t,c or g
gaagactgccagtctgaatgcctttcctttctctccagaaattctaactcgagaatgcacagtggaaaatactgcccttgacactgtggaaagaagctgtcactggatttttctttctcaaatatgataaattatcaaagattactgaggaattggaaagagttagtggcatgaaaaagagagaccaaaatacaaaattgatgtagaaaggggaagtcagtatttatttctctttagaataagaaatacacacacacacacacacacacacagatacatgaacacacacacacgcacacacacacaaaggcattcatcactcaggtcttaagctcaggtggttagaagcagataatgccacagctttttccatggctgagtcagtgtcttagtn

SEQ ID NO: 99020 - DNA, 410 bp, Homo sapiens
  misc_feature (1)...(410): n = a,t,c or g
tgagccaagatcgcgccattgcactccagcctgggtgacagagcgagattctgtctcanaaaaaaaaaaaaaaaaagaaaaaaaaaaaaaaaaaaaaaaaaaaagggggggggcccccttaaaaaaaaaatatttttccccccgggggaaaaaaaaatattttttttttttttggcccccaaaatttttttcccccccgcggttttaaaaaccgggggggggaaaaaaccccggggccccaaaaaaatatagtggggaaaaaaccccccttttttgggggggggaaaaaaaaaaaaaaccgcgggnnnnnngnttttttaatatgagtgagaaagaatccgggggtgaaaacttttattgtgctatcctagaaaaacatttatcttaccgctataaatataaaacacccg

SEQ ID NO: 99021 - DNA, 402 bp, Homo sapiens
  misc_feature (1)...(402): n = a,t,c or g
gcatatagtcggagttcatccctgattcttcatcagaatacacattctgaagaaaaagcctaaggttgttttaaatctataaaatcaacgaatgaggctatcaaacatatggcaaatatgtatttgtctataatgtaaattttgtgtatatgggaccatttgatgatatgtcccactttgaaagccaaagagcaaaagtcattggtgattttgacctcaggatttgaaattaactgaaggaaactcagaagtttggtcagtcattgtgaatgaagatcatttttcatttgataagaattactggctgggcgcagtggcttacacctgtaaccccagcactttgggaggctgagacaggcggatcacgaggtcaagagtttgagaccacggtgaaaccctgtn

SEQ ID NO: 99022 - DNA, 507 bp, Homo sapiens
  misc_feature (1)...(507): n = a,t,c or g
ggggaacagggcnccccagatgccgccccctgaganngcttttggccagcaagacgaccggccggaatcccggtcgacccacgcgtccgtgaaaatatggcattgatataactttaacaaccacagatatcgggaggcaattcagaagtgggatgaagcactacagttaactccaaatgatgctaccctatacgagatgaaatcacaggtaataattatgaagaatttcactttccttatgaaattgtgctatgtttgttcggtgagtgagcaatgatgaagcaaaatagcattttctcccattttcttttacaaatacggtttctttgggaaaaaatatttcaccattatttatgggtctgtcttatgcataaaactggaaattcatttgcctttacaatgaagttaactgttattttagcctaactattgtaagataggaatcgggggctatcttttaaagtcactggtgggcaggtgccatggctcacgtctgtaatcccagca

SEQ ID NO: 99023 - DNA, 416 bp, Homo sapiens
cttgacctcgtgatccacccgtctcggcctcccaaagtgctgggattacaggcatgagccacggtgcctgactgtccattgttttttcgattcctttacatgtctaagcatttaccacatggttgaactgttggcacatgaagaaaaatgaaagatagctcataaataggattgactagtctgaatgcagagaaaagcaattagtacataaagcactgtaaaaaatagttctatgaagaggcataaacagtaaatattaattttctttctttctttctttttttttttttttttaaggacataggttttaactttgttgcccaggctggagggcaaagtcttaatgatagttcactgcaccctaaaactcctaagttaaagcaatcctcccactttagcctttaaggagctaggaa

SEQ ID NO: 99024 - DNA, 413 bp, Homo sapiens
  misc_feature (1)...(413): n = a,t,c or g
cccacgcgttcgctaacctacctttcttgttgttagctttagtatgatgaaatggaaataggaatttcctgacactgtttgactttttacactcttttttcaaaacggttgaggctgtagtgtgccatgatctgtgcagtgcacttgtctgtgaccactataacccactctgagcaacatagcaagatcccatctctcttttttttttattttgagatggagtcttgctcttgttgcccatgctggagngcaatgacatgatctcagctcactgcagccttcgcctcccaggagaaacgcttgaaccctggaggtggaggttgcaggaaagtgacattgcactattgcgctccagcctgggcaacaaagtgagacttcgtttctaaccagacccccccaacgagaatgaatga

SEQ ID NO: 99025 - DNA, 488 bp, Homo sapiens
  misc_feature (1)...(488): n = a,t,c or g
cgtaaccanagggatggccgggttncnnaaattgaaaccctgangntctggaaaaancggaannnnngggnngacccacgcgtncgctcaaaagaagaggaaaagaggggaggaggtgccaggnatatatatatatatttttaacaaccagtgcttgtgtgaactaatagagcaagaactcactccatctaaaaaaaaaaaaaaaaaagcactttttgggggccctgaaaggccctggagaaaaaacctggttccagggaccatgctgattttagcctttaccacagccaaacaaggacagccggttgctgcccctgttggtctgcctggggttcttgttcgccccccttttaatgctgggccacgggcccaaaagggcccggttgcccatctttttcccacaggaggcctatttcatcacctttaggctggtttttgccgaaaaaaagggctaccgggggcccctcaccatgtgcctggcgcccagg

SEQ ID NO: 99026 - DNA, 397 bp, Homo sapiens
aggtagatacctcattgtaattttaatttgcatttgcttaatgattaataatgttatgcatcttttcatgtgcttatttgtaaattgtatatcttctttggagacgcgtctattgaaatcttttgccttttttttttttttaagggatggtgtccccccctttaagggagaaattccttaggtattctaaaaacaggttttttatcaaaaaaaaggttggccggcactttttttggttgggggatggcttatcaattttgttacccgccccctaccaccaaaagagctaagtttaacctctaaaattaaaaactttcacccattgggagaaaattttattattttgtatgagggggggtgtttttatcctttgacctcccttgccccctccgtgaat

SEQ ID NO: 99027 - DNA, 409 bp, Homo sapiens
atacacccctgtactcccaaattctcattagtctgaggcaggaacattactttaaggcggagggcagaggttgcaatgagctgacatcatatcactgcactccagcctgggcaaaagacggagactctgtctcaaaaaacaaacaaaatacctaacacaaatcctgtatattttggctgctggatatctcacactactgaacaaaaggtgaatagattctcactgggtaatctacaatcatttggcacaacttgactatatggatagatattaattacagagctttttctgataaattcaaacacaaaatgaagcggttgaaggactcgggactattacatttcttttgaggattttactgaaagacaatagttattgactttttaataaatccttcatatatgcgcgc

SEQ ID NO: 99028 - DNA, 439 bp, Homo sapiens
gaaatccttttcttagtaatttatcctgctatcgaactccaaataaagcctccaactttttctacagactgaagaacgcaaagatagcgatgatgagaaatcagacaggaacagaccttggtggagaaaacgttttgtttcagccatgcctaaaggtaattttataaaatattagaacgctgtattagcaataagaggcaaagccccagaatctctttcagagagccaatgtctcaactcctctgtaagacttgctgggcttaagtttctagctactttgagggtgtagaaagtggttccactcagatgaatgctaaggcagagctttagaaatgttcttgttctttgcaggaagtgatagtggtttcataaatggaagtcatgcctgtcactattgtttaaatatcatataccattgaagttaaacatatagaggact

SEQ ID NO: 99029 - DNA, 399 bp, Homo sapiens
taaccaccctaaccctaacttccctaattccccccatccttaccaccctcgttaaccctaacaaaaaaaacccccccaaacttatcagaatcctcgttctttttcagactactgaaaaatgacatttactctgttaaatgtttaataagtgaataagtaaatgtatcaagttgtttatataataaattataaaactcttgaggcacttggtatgttaaaaattttaaactttagtaacattaggttacaggtatgatttaaaaatttgtaaatagctcaaaagggcaatgttttctttatatttcttatagccttaattttgttatccatgtgcataatttacctcatgatttcttttggtcaatcaggatctttaatacaatatagaaagtggggaaa

SEQ ID NO: 99030 - DNA, 490 bp, Homo sapiens
  misc_feature (1)...(490): n = a,t,c or g
nggcaaagggatgcccgggccncnnnnncctggggccttgnnatcatgcgcagnnncgnaannccgggncgacccacgcgtccgatgaattttcttctaaatactgggctatccacatctcataaacagatttcttcttttcattcaggtcaaaatattgggtaatttcttttgcagtttcttttttgatcaggggttatttaggagactattatttaatttctaaatactggagaattttatatagcatctttatgttaatgatctcaagtttaattccattgtagtcagagaacatgctgcataatttatattcttttttttttttgaaagggagtttcgctgggccacccaggctggagggcaggggccctccccttttttactaaaaatacaaaagttactcactgcaacctccacctcccaaattcaagcatttttcgtgtgtaaccctcccaaagcactgtgattacaggcgggagccaccgcc

SEQ ID NO: 99031 - DNA, 275 bp, Homo sapiens
agcgattctcatgcctcagcctcctgagttgctgggattacaggcgtgtgccaccatgcccagctaatttttttattttcagtagagacaggagtttgagaccagccaacaaggtgaaaccccgtgtctactaaaaatacaaaaattagctggacgtgctcacttgaacccaggaggcagaggttgcagtgagccaagattgtgcgactgcactgcagcctgggtgacaagagcaggactgtctcaaataaaaaaaattaaaaaaaaaaaaaagg

SEQ ID NO: 99032 - DNA, 424 bp, Homo sapiens
cggacgcgtgggttgggcaacaagagcaaaactctgtctcaaaaaaaaaaaaaaaaggggctttgccttccccccccagccactggggtttcccaccccttaaaaaaagggcaagggccttttttggaaagaatatttttaaaaaaatttttggggtaaatttttaaaataaaaaaattttggcccgggggggggggtaaccccctgaatccccacctttttgggggggccagggggggaaaacccccggggggggggatttggaaccccccttccccaatgggggaaccccccttgggaaaaaaaaaaacaaaaataacccccggggggttggggcagaaaaatgttttaaccctgggggggggggggggggggaacccaaaacaaccccctggctttttgccttgggagaaacaaaaaaaca

SEQ ID NO: 99033 - DNA, 417 bp, Homo sapiens
cccacgcgtccggatcacgccattgcactccagcctgggcaacagaggaggactctgtctcaaaaaaaaaaaaaaaaagaaaagaaaaaaaaaaaaaaaaaaaaaaaagaaaaactccctgacttggtttgggaggggggccaaaccccggaaacccaaccttttggggggccaaaaagggcaaaaaaattgggggcaggaatttaaaaaaaggggaaaaaaaatgggccttaccaaaaaaaaaaaaatttccccgggggggggggcccccctttgaaatcccactaagggggtgggggcaaaaaaaacccttgaaccccggggggaaagggttggtgaaccaaaaaaatgcctatggtctttaaccggggaaaaaaaaaaaaaatttttttaaaaaaaaaaaaaaagggggggccc

SEQ ID NO: 99034 - DNA, 197 bp, Homo sapiens
cccacgcgtccggggaaatgacttaaattaggtcttcgtcttcaccgtacaccataagataccaagtatgttctgcctgtatttaagagttgagtagggctgtgtgtggtggctctcgcctgtaatcccagcactttgggaggttgaggcaagaggattgtggcaggaggattgcttgagcccccaaaggccagggc

SEQ ID NO: 99035 - DNA, 197 bp, Homo sapiens; identical to SEQ ID NO: 99034

SEQ ID NO: 99036 - DNA, 396 bp, Homo sapiens
cccacgcgtccgcagaagaatcgcttgaacctgggaggcggaggttgcagtgagctgagatagtgccattgccctccagactgggcaacagagcaagactctgactcaaaaaaaaataaaaataaaaataaatcatggttcaaaaccacagttacttttgcaccaacctaacaaaatatggttcaaaataaaaggctgaatttcctattgtttttggaaaatcaggtttgacaaccctatgttgattccaccatctctctcctcatgtcctgggagaggattttgcctcagtgatcgcaaatacaagtgaacagtgaaggccatttccacctgactcaacagaaatgttggctggatcacaaaggctgtatcaatggcctagacctcccttctctt

SEQ ID NO: 99037 - DNA, 417 bp, Homo sapiens
cccacgcgtccgcttgaacccgggaggcagaggttgcggtgagcagagattgcgccattgcactccagcctgggtgacagagcgagactccaactcaaaaaaaaaaaaaaaaaagtaaactatcccctgcaaaccttccttaaaaaaggggctaaaaaaaaggaaatgattacgggcgggagccactgcacccaccctttttctgatttttttaatcttaaaacagggcagaattttttcctgggtcaaggcgcctttgtttgctaaaactccccctgttgaaaacggctccacagaaaaaaacgaagttgcagaatttttttttcaaaagggatttcctaagggaggaaagaatgagtggtggttgatatgtggctgccttgacctttctgaaggataaggctgcttcctttggtc

SEQ ID NO: 99038 - DNA, 404 bp, Homo sapiens
  misc_feature (1)...(404): n = a,t,c or g
cggacgcgtggggttgtgaggttggatgttaatattcatttttatctgtaccgatgtatgaaagacagcacaatttattgaaaatgaatcttttcctcattgtactgaagcactatttttttcacaaatcagctaaatatattgtgtggttctcttttnnaaaaaaaaaaaaaaaaaaaaaaaaaaaaaaaaaaaagannctttccctcattgaactgaagccctatttttttccacaaaccaccaaaaattttgtgggggtggtttttaaaaaaaaaaaaaggggggagaaaaaaaaaaaaaaaaaagggggaaatgngggggggggaaaaaataaagtgggggggcccacacccccctcctccccttggggaataaaaaaaaaaaaagggagctcgggtnnc

SEQ ID NO: 99039 - DNA, 409 bp, Homo sapiens
ctgcaagaggcattctgggaagagcccttcagtgggtgtactgagaaaaataaaactcttgatctattgtaacattgctagtatattaacatctataattttgtcagatataactgaatatttggactttaaaatatttaattagcaaacatttattaattgtctgtttgcctgacacaatactaagctctttatgcctaataaagtatataggtttgcaaggaaaagttcttatttttttttttaaacagttttcagctattgataagcttggacagaatattgctgtggttggcaagtttggttttgcacattactctttactcaccaaaaaatggaaactttttggaaacattacccaggagcaaaatatgatcgtgacaggtggcttatcctggtggaatgattt

SEQ ID NO: 99040 - DNA, 406 bp, Homo sapiens
  misc_feature (1)...(406): n = a,t,c or g
cccacgcgtccgcccacgcgtacgcccacgcgtncgtgtaatcccagctactcgggaggctgaggcagggagtcagaggttgctgtgagccgagatcacactactgcactccagcctggtgacagagcgagacttcgtctcaaaaaaaaaaaagaaaagtccttccccttggacttagcagtttcatttaaaggaatttctttctaggccatctgaaatatgttaaaagatttgaacaaataggctggggcagggacttcatgtttaaaacaccaaaagcgagggcaacaaaaaacaaaatggacaagggggatctaattaaactaaagagcttttgcccagcaaaagaaactaccttcagagggaccgggcaccctacaaaaggggagaaaattttcgcaacctc

SEQ ID NO: 99041 - DNA, 480 bp, Homo sapiens
  misc_feature (1)...(480): n = a,t,c or g
agtgctctgaccctcgagcctacgataaccctccganccgcaanncccgggtcgacgcacgcgtccgcagggtttcaccatattggccaggctggtgtctaactcctgaccttgtgatccacccgccttggcctcccaaagtgctgggattacaggcgtgagccaccgcgcccagccaacatactgaattttttactgacttatctataaattggagtgcatagtggacacatagccatccaaaagcattctaagtgaaccaagacataatgagccacctgcaacagctccattaataagtcccagatgctatcccatcagaaaagggccactcctcttactaaatggggaatttatactgaaaaaaaaaaaaaaggggcggccgttttaaaggatcaaagtttacgtacgcgggcatgcaacgtaatattttttttttagggccccctaaattaaattcacgggccgtggttttacaag

SEQ ID NO: 99042 - DNA, 414 bp, Homo sapiens
  misc_feature (1)...(414): n = a,t,c or g
ccacttttattcattcttatccctagccccttttcgttccctcatcccttctgtgggccaataaagtttattcttccccgggaaaaaaaaaaaaaaaaaaaaaaaaaaaaaaaaaaaaaaaaaaaaaaaaaaaaaaaggggggggggccctttaaaaaaaaaaaaattttcccccggggggggaaaaaaaaaattttttttttttgggcacaaaaaaaaaaaatccgggggggggttttaaaaacggggggaagaaaaaaaccggggggaaaaaaaaataaaagcgggtgaaaaaaaccccctttttggggggggggaaaaaaaaaaaaaacccccggtntnntnctgtctgctaaactaagggaaataataacttctgtagaataataaacatttatcccaaataaacacaag

SEQ ID NO: 99043 - DNA, 415 bp, Homo sapiens
acgaaagcgctgagattacaggtgtgagccgccactcccggcctgacctattttttcaggttaactttggaatggccttggctgaagggagagtccatcattcggttggggggcttcgaattttattgttggtttgcattgtaaacagtcctgtgggatcacagcgattagctatgtcttacactttgggatcacattgtaaccacggcctccgagtaagtgtggtctcttcttatgacttcctggcaagaggtgtctcctgcagaaaggaagaagcgcattgaactagtggatgctgctttgttttcttggtcctgaaactttccattttctgtaaaggtaaggttcttaatgccatcgaagacaatggtttaaagaactcaacattcacgtatttcacctctgaccatggagg

SEQ ID NO: 99044 - DNA, 416 bp, Homo sapiens
cggacgcgtgggtgagaaacggctaccacatccaaggaaggcagcaggcgcgcaaattaccccactccctctctggggtcgatgaagaggtgaagtgaccaaatgaaagaaagctgcattctcaaaaaaaaaaaaaaaaaaaaaaaaaaaaaaaaaaaaaaaaaaaaaagggggggggccttttaaaaaaaaaaaaataaacccggggggggggagaaaaaaattttttttttttgggccccaaaaaaataattcccggggggggtttaaaaaaagggggggggggaaaacccggggggaacccaaaaaatttgggggggggaaaaaccccttttttccccatgggggaaaaagaaaaagcgggcgtgatttaaatggtataccctgagaaaggacaaatacttttttattgcaaa

SEQ ID NO: 99045 - DNA, 403 bp, Homo sapiens
  misc_feature (1)...(403): n = a,t,c or g
acgcccacgcgtccgcccacgcgtacgacacaatcaaagacgccctcggcttacttctcttcattctctccttaatgacattaacactattctcaccagacctcctaggcgaccaaaaaaaaaaaaaaaaaaaaaaaaaaaaaaggggggggccctaaaaaaaaaaaaaaaaaaaaaaaaagggggggggggggaaaaaaaaaaaaaaaaagcccccccggggggagaaaaaaaaaattttttaaaaaaggggaagaaaaaaaaaagggggggggggggaaaaaaaaaagggggggggggaaaaccccggggcccccacagtttaagccgggggaagcccccctccttttgggggggggggaaaaaaaaaaaggggggggtaaanattggcaacaaaccttcg

SEQ ID NO: 99046 - DNA, 392 bp, Homo sapiens
agaaatacttaatgtaaatgacgatttaatgggtgcagcacatcaacatggcacatgtatacatgtgtaacaaacctgcatgttgtgcacatgtaccctataacttaaaatataataataataaaaagaagtacttccctgttcctcagacccattttccctcctcacttgtttccttttattctttaccttttcatcagcttaagaactttactctttttttttttttttaaaagggagttttgttttctcccccaggtgggagggcaggggccctttttaaattcgttgaaacctttgcctcgggggttaatgcaattttcttgcctaaccctcttgagaagcgggaattatgggcccccccccccacccccaattaattttttttttta

SEQ ID NO: 99047 - DNA, 402 bp, Homo sapiens
caatcactgcactccagcatgggcaacagagccagacaccatctcaaaaaaaaaaaattgaaatttctttagcatccagggtatttgcctctgggattttatagctccctccctaacacagggccagggaaacacacattttttgttaacacaagttgccccagaactacaagatttttgaaaaaaatagcaaagaaaatatgccatgttacgcaaactgttttacctcaaactcaccttgatttttaaaaataggttttattcataaatatttaaaagaatttgtatgggggattcttaatattgttttcaataggttcaattcccatgaaagggcaccacatgcaattgtttttgttaatggtactaccattgaaggtcatgttgagaaatgctattggg

SEQ ID NO: 99048 - DNA, 392 bp, Homo sapiens
attaactctttagaagggagcattatggcatcatttgtctaattatttgggacatttgcgtaaaagcatgaatagaattaccagaaagaaattatatccttaggtttctttttttttttttttggaaaggaattttgggggggccccccgggggggagggaagggggggggtttggtttctttaaaaactttggtccccggggtaaggggaattttcgggcctaaccctcggggggggggggaagggggggccccccccccccccccgggttggtttttgttttttgggaaaaaagggggtttctttttgggggggggggtggttgaacccccccccccagggggaggggccgcgcctggccccccggggcgtggggagggggggggaatac

SEQ ID NO: 99049 - DNA, 379 bp, Homo sapiens
tgtcaatgtgcgcatgggcccgtctgcacgcgtatgtgtgcgtggacacgtgtgagtgtgtttttcccccagcatatacggagccgtagtcttgaataagtcacccctgagatcccatgggtcgtcatccaccagtggctggggagggctgccttcccctttccctgcccagcgccttcctctggcctcacaggtccaggagcacaacgggcacgtgttcgccagctaccaggttagcatcccgcagtcgtgcgagcagtgcctctcctatatctggctcatggacaaggccctgctctgcagcggtgagtggctcccccaccaggccccaaaaccctccatgtcccccaccacccctcactgctcaagaggtcttcag

SEQ ID NO: 99050 - DNA, 421 bp, Homo sapiens
  misc_feature (1)...(421): n = a,t,c or g
gtttaagtcccattggtctagtaagggcttatcttaattaaagtggctgatttgcgttcagttgatgcagagaggggttttgcagtccttagctgttacagaaattaagtattgcaacttactgagggctttgaaggctcttggtctcgttacgcccnaaaaaaaaaaaaaaaaaaaaaaaaaaaaaaaaaaaaaaaaaaaaaaaaaacaaattattatttaaaaaaaaaaaaaaaaaannttttnnnaaccccnnngggggggggggtgttaaaaaaaaacacacaccccccccccggcttgaaggggcttttttttttttttggtgggcccattttttttaaaagcggggggataaaaacaagcggggggaagaaaaattatatccccgcccacatttttcgcgttgagaaagccttct

SEQ ID NO: 99051 - DNA, 387 bp, Homo sapiens
aacaccacttcaccatttcaccaaggtcatatgatttcattaactcaagtttttagccactctagtgcatcatgattgttttctacgtagacagttgcctttctgtgacagttttcattgtgtttatcttatttgctgtctttgttaggaaattttttctgcagttgcaatagtagctgtgtggctgtagaccttgttacttattttctgagcattgatttaccttttggtaaatgaggataataatacctgtatcacacaattatgaagatttaaatgaaaaagcagatgtagctgggcgcggtggctcaggcccgtaatcccatcactttgggaggccgaggtgggtggatcacgaggtcaggagttcaagaccagcctggctag

SEQ ID NO: 99052 - DNA, 412 bp, Homo sapiens
  misc_feature (1)...(412): n = a,t,c or g
caggctgagccactgcgcccggccgggttttctgtattttctagagagggtggacatttgtggcagttacctactgctacttagggggcgcggacacctcaagtcagacaccattcttaaaacagttaacacaaccattttattatatctcacagcgttgtgggttaggaatctggacagggagggcagggataatctttagttctgggccaccagctgggatcacttgagggggcttggctggcatacgggttagtctggggaccactgccccctttccggcatcctctgtgggatccagcatttttcttttttttttttttttgaaatgagatctcgctctgtcacccaggctagagtgcttttgtgcgatttcggttcactgcagcctctgcctcctgggtttaagaan

SEQ ID NO: 99053 - DNA, 378 bp, Homo sapiens
ctcattatattgctcaggctggtctcaaactcctgggctcaagcagtcctcctgcctcagcttcccaaagtgttgggattacaggtgtgagctaccacgcccagtgtatgtacttttatataagacttctttccctaagcgttatgtttttgggattcatctatgtttcatgtctcagtagttcataatattacacgattaacttttaaaagctcacgataaatattgttaaattgccctccaggaaaatgtgatgaaattttgtaattaaaaaatccctgagtggctgggattataggcatgcactactttaccctgccttgtggtcagatttttatttcataaggagcatgtgagagtgctttgtggtgcattcat

SEQ ID NO: 99054 - DNA, 400 bp, Homo sapiens
acaggctcttgctatgttgcccaggctaatcttgagctcctgagctcaagtgatgcttccacctcagtctcccaaaatgctgggaccacaggtgtgagccaccacgtccagccttacacgagttccttctcacaagttccacctctcagagcacagagcgcagccactgagaccacttccattttgtgggtgcaaaaactgagactgcaggtggttaggtgcagtgtctaaagtctcaggttatgttgtatatgctgcataaaggtcacgctgggaaggcgcgtccgtggggccacgtgtgggcctagccctggtgtattgggtgtgtacgtgcatggctgtggacacttctatgtgggaggggcccaaatcggctgtaagacctcacaggtgaggccag

SEQ ID NO: 99055 - DNA, 404 bp, Homo sapiens
aaagagagagagacaaagaaagaaagagaagaagaaagaagaatgaggaggaggagggaaggaaggaaggagaaaggaaggaaggaaagaaagaaagaaagagaaaaagaaagaaagaaaagagaagagaagaaaagaaataatctaggccaaagtgctgggattacaggcatgagccaccacacccggccaaaatctcataatgttttaagcaagtttacgaatttgtgttgggctgcattcaaagccatcctgggccacatgtggggcaggttagacaagcttaatgtagagcaatgcttctcaacagaactttctgcactgttcagtatcattgctactagccacatgagactatgggttatttgaaatgtggcttttgtgtgtctgaagagcagattttt

SEQ ID NO: 99056 - DNA, 397 bp, Homo sapiens
  misc_feature (1)...(397): n = a,t,c or g
cccacgcgtccggtttcaccatgttgaccaggatggtttcgatctcctgaccttgtgatctgcctgcctcggcctcccaaagtgctgggattacaggcgtgagccaccgcacctggcctgaaatatagctgactttcattcatctgtggagaaaacttttccccatagcacagtgaaacctagtgtatagcacagtgaaacctagaatggatgcccaaatcttttctaacactgtagttcctcccaccccacccctttgatagagtagttcacagcagcagaaggggccttgggttagagtctcctcccctctctcctcctctctggagggcttgcatgcaaagaaaagtatctcgaaaaagagggtgagggtttgtgagaggaggaggagatgccn

SEQ ID NO: 99057 - DNA, 398 bp, Homo sapiens
ggaggcgcaggttatagtgagctgagattgtgccattgcactcgagcctgggcaacaagagcgaaactccatcttaaaaaaaaaaaaaaaaaaggaccccttcgggctttaaaaaaaataggagggtaacctaatttagccctccccgccctataaaaaaggtcatttttttggaaaaccaggcggacccccaaaaccagggggggatctccaaactggggaaaaaaatctttatttcagggggaccccattttttatggatgggcaggaaaaaaaacaggtatttgggcccttaaacaaaaaggaacatggaaaattgggctattttctgttaaaaaaaccatcaccatcatttttttagtttactcaaaaaaggaaattattttttttatcattaa

SEQ ID NO: 99058 - DNA, 398 bp, Homo sapiens
aataaatttcctgttttaatttctaatgtgataaatataataggtatgtgccactgcactccagcctgggcgacagagcgagactccgtctcaaaaaggaaaaagaaagaaaagaaaagaagtaaattggccaggcatagtgtcttgtgcctgtaatcccagcactttgggagggcaaggcaggaggatcacttgagcccaggagtttgagaccagcttgggcaacacagtgagaccctatctttacaaagaaaaagtaagagaaacttaagaattaacaagaaaatgaaagatatttctgaaaaacattgcaaaactttactgaagctcataaaagaattgaataaatgctaaaacatattttgttcttgaacaggatagctctcacatttgtaagg

SEQ ID NO: 99059 - DNA, 392 bp, Homo sapiens
cgatctcctgacctcgtgatccgcccacctcggcctcccaaagtgctgggattacaggcatgagccaccgtgcccagcctggagctggttttttgaaaaaaaaaaaaaaaaaattaataaaatgggctactagcttgacttttaagaaaaaaagagagaaaattcaaataaccccattcaaaaatgtttggggggacacaagggcacatataaaaaaaatctttttaaaacttttaacttttcatttacaggaggagagtttgtaaaaatcatcatccacaagtcataattagggggggggcctactggagttttttccatttctgtattatataaacattggcatattaaaattggatttttcccaaaaacaagttttatatacttgtttt

SEQ ID NO: 99060 - DNA, 408 bp, Homo sapiens
  misc_feature (1)...(408): n = a,t,c or g
tggggaaactgaggctggggacatgacgtctgattgcttttgtgtacagctggggaaacaggctgggggaggcaggacatctgaccattctcatgcacagctggggaaactgaggctagaggataggacatttgactgcacttgggaacagctggggaaactgaggctggggagccgggacatctggctatcctcatgcacagatggaaaacagtcttggccgggtgccgtggttcatgcctgtaatcttagcaccttgggaggcaggggcggttggatcatttgaggccagggttttttgatttgttttgtttttttgagatggagtcttgctctgttgcccaggctggagtgcagtggcgtgatctcanctcactgcaagctctgcctcctgggatcatgccattc

SEQ ID NO: 99061 - DNA, 411 bp, Homo sapiens
ggtggaggttgtagtgagccgaggtcgcgccactgccctcctgcctgggcaacagagcgagattcttatctccataaaatgaaacaaagcaaaacaaagggagagagaatggaggttgcctgttactgcatcataatcttgtttatgctgactgatgcattagaggtactaatggcatgagaggaacaatttcctgagacacagtttactgaccatgaatttcctcaaaaccccagagagcaggcttctcaggaggagactcagtgtggaatcccttgccaaggtagaccctggttctgtagcaggacgagccgcaaacaaatctcctcaagacaccggattaaagaaggaaaaggtttatttggccaggagcgtcagcagatttgtgtcttaagacccgagctccccgaa

SEQ ID NO: 99062 - DNA, 399 bp, Homo sapiens
ataaaatgagacaacgtgattgtgggtgatattctgagtggacgccaacctcaggagtatttttctataatttaaaaagaaaggagagaagaaaaagagaaggagaaaaggaagaggagcgagagaaaaggaaggaagaaagaaggaaggagggacagagagaaagaaaaggaagaaaggaaggatgaaagaagggaaggagaggaaggagaggaaggaaggaaggaaaagaaagagaaagacattaagaggaggggagttgttccttgaaggtgctgaagtccctggcctttataagccatcacatcagccatctgctgtgcctggccctgtgaagttactagtaagccacccgtcactgccttgttccagggtcttgaaaccctgtggctattttcc

SEQ ID NO: 99063 - DNA, 414 bp, Homo sapiens
  misc_feature (1)...(414): n = a,t,c or g
cggaggcaggagaattgcttgaaccctggaggcagaggttgcagtgaattgagaccacaccactgcactccagcctgggtgacagagtgagaccctgcctcaaaacaaaacaaaacaaccatcctgcacaattatgagtgagagtaaatccaacacatctcacagcatcttgggaaaatgataaggctcactttcttctttcccttcagngngaactcatgtaataacttcagagaaaggcatttccctgctgtctggaagttgaactccttctacaaactggtggagcttgctgcccagtcctgtgccctccgagctgaagggaaggcgtggggattttctgttctactgaaatggcaggattatgtcatagcagtggttttgagtgtttagaggtagtgttattttaattaa

SEQ ID NO: 99064 - DNA, 394 bp, Homo sapiens
  misc_feature (1)...(394): n = a,t,c or g
nnnttatggagtggggaccaagggatttagggcaggagtgaaggaattccaagcactcttcctactgataacagttcacagccaactctgtcacatagaagggaccaggcaccactctaggcacatcattgtggttgtagacttcataaaccaaatagaaaatggaactttttttcctctggttttaagcaatggttgcatttggttactaatagtgtatctgttttggaatatttttacaagacaggagggtcaatttttttatggaaagttgtcacattactcagtttttgttttttgttttttgaggcggagttttgctcttgcccaagctggagtgcggtggtgcgatctcggctcgctgcagcctctgcctcccgggttcaagcgattc

SEQ ID NO: 99065 - DNA, 399 bp, Homo sapiens
ggaggcagaggttgcagtgagttgagatcacgccactgcactccagcctgggtgatagagcaagactccatctgaaaaataaatatataataaaagtaaataaaaaaataaaaatgactaaaagtcatcaaggtgagggctaccacccacggtttttcagatcattttatgtgttcattatatatttatcagaactcagggctgactttgaaaacatttctgtttatgtagttttcttggagaaagagcaaggaaaacagtttagaatgatagaatttgttctccttctttaaatgactagcagtaaggcatactgagaacttgcacttgcctgtttatctttctaataaagttaatttgaaggctgaaccctgaaatagaagtcaccctttgagctta

SEQ ID NO: 99066 - DNA, 395 bp, Homo sapiens
gatggtctcgatctcctgaccttgtgatctgcctgcctcggcctcccaaagtgctgggattgcaggcatgagccactgcgcccggcagatcctgttttaaaaacaaaaactaaaactaaaaaactgaaaagaaacaagcattatacaaatacttgtaaacaaaattctaaccctctccccctacagccatctgaaaggacccctcttttcagctgagtgcattccaaggtcaacctgaaaaactagttcaggccatgatggaagtggggttttgacattataccctcctcagttttgtaattcaggaaaagccaaccagcattaacatcaacacagaccttaaatctgatgaaaagcatttactatctattctctctgaagtctgctagctggag

SEQ ID NO: 99067 - DNA, 233 bp, Homo sapiens
  misc_feature (1)...(233): n = a,t,c or g
agagacggcgtgnnnnnnnnanantnncttgaacctgggaggcgggggttgcagtgagctgagatcgcaccattgtactgcagcatgggcgacagagccggactccatcctccacaccanatgaataggagatatataggtttacatgaatgagctttcttccccatgaaaataactgtgtcacttctcccttggtctaacccacacaaaatccccaccctgtctggcacaga

SEQ ID NO: 99068 - DNA, 389 bp, Homo sapiens
  misc_feature (1)...(389): n = a,t,c or g
gagggtgcccgggactgctcccactccaccctgtgcgtggatgtcgctggcctgaagataacctccgcatggccttcctcagccagctctgcccgaactttggcttcaccacttatctggccatgacctcgggcaggcagtttgcccagccttggcctcagtttcctcatctgtgcagtgggtacagctatcacagcatcgttctcattgggcagaagattaaagcgacagcttgtgtccagggctaaccatgctggcaccacagcacaccctgggaagatgcccgccctttctttgcatggattcttttttctttttcttttctttttttctttttctttctttctttctttttttttttttttttnaggaaaacaaagcctccttct

SEQ ID NO: 99069 - DNA, 407 bp, Homo sapiens
tcttgaacccaggatgcggaggttgcagtttgcttagattgcgccactgcactccaggctgggtgacaagagtgagactctgtctcagaaataaaaaataaaaaaacaaacaaacaaaaaacacctcatatatgacagctactctatgctatctctgaaccacatagcaaccctgaacattctacggagggggaaactaggactcagtgattaagtaaagggcccaatatcctgggccctataagtagcagagctgggactcaaacccatgctgtcagatttcaaatcccatgcacctcactgctgtgccatgctgcctctcttctgtggacagagataaagcagccaggcatggtagggcatgcctggaatcctagctactcgggatgctgaggtgggagaatcac

SEQ ID NO: 99070 - DNA, 401 bp, Homo sapiens
aaattgctgagattacaggcatgatccatcccgcctggcctccaagagtcagaattctgtcatcatttgattcctgctgtgtccatagcggccggcgctgggtcagcctggaatagcggctcaacacacgtccctggcacaaataatgaatttgagattcagtttgtacctgtgtcctgcacacctgtcactcctctgggctcagccagggccggagctgcctccactgcagcctaggtctcccaaattctaactgcccgtgtgtgtgtgtgtgtgtgtgtgtgtgtgtgtgtgtgtgtgtgtgtgtgtgtgtttctttctgcccacttcaccaaggggtgtgtgtgtgtgtgtgtgtgtgtgtgtgtgtgtgtgtgtttctctccccccatataaccaag

SEQ ID NO: 99071 - DNA, 391 bp, Homo sapiens
gacagcaaggagatgccacctaaaaacaagatggcgactagagtgcagcagcgaggacgaccagaggtcactctcgtcgccatcttggttttggacagcaaggagatgccacctaaaaacaaagaaaaagggaagaaatctggggcacagaagaagaaaaagaactggggtgcagatgtggtggccgagtccaggcacaggctggtggtgctggagaaggagctgctccgagaccacttggaggcatgccaaagggaggctgcagctgcccgggaagaggctgaacaagctctcggagagcgggaccaggccctggctcagcttcgggcccacatggcagacatggaggcgaagtatgaggaaatcttacacgacagtctggacaggctct

SEQ ID NO: 99072 - DNA, 393 bp, Homo sapiens
  misc_feature (1)...(393): n = a,t,c or g
gcaggagaattgtttgaacctgggaggcggaggttgcagtgaaccgagatcgcgccattgcactccagcctggggcaacaagagcgaaactgcgtctcanaaaaaaaaaaaaaaaaaaaaaggggggtttatatacacaggggggaaatattcacccgaaaaaaaaaaaaatatcttgttttttgcaacagggggggaacgggaaatttttatgttaaggaaaaaaccccgggcacaaaaaaaaaaccgccgcatgttttcattttttggggggagctaaaaataaaaacatttgacctatgggacgtaaaaagcaaaacaatggttcccaaaggttggaaagggaaccggccaattgggggggagggggggatggttaatgggtaaaaaaaa

SEQ ID NO: 99073 - DNA, 379 bp, Homo sapiens
ctctgcctcccaaagtgatgggattatgggcgtgagccatcgcattcggcctcttttttttttttttaaacatttttttccgggttttaaaaggggggtttaattatggtccaaagggaaaagggccaccggacaaaaaaacagtggcctttaaaaaaaaagacctttcccggggggcgggggctcccccctgaaaccccacccttttggggggccgggggggccaaacaacagaattttgaaacggccctgcccaaaagggcaaacccccgcctctgctaaggaaacaaaaataacccaggggggggggggggccccggtatccccaaatacgggggaggcgggggcagaaaaattgcttgaccccaggggacggggg

SEQ ID NO: 99074 - DNA, 408 bp, Homo sapiens
  misc_feature (1)...(408): n = a,t,c or g
gcgtgaacccgggaggtggagcttgcagtgagccgagatcgcaccaccgcactccagcctgggcgacagtgagacttcgtctcanaaaaaaaaaaaaaaaaaaaaaggaaattttgccccccaccggcttaatactttttaagtgggcccaacaacgggggggaaaaaaaaatattttttcaacctcccttaaaaggagaaaaaaaatttttggataaaccttttaaaaataaaaacccctttcacaaaaaaaaaagaaagggaaccaattctttttccttgcanaaaaaaaaaaaaaaaaaaaaaccccccgaaaaaaaaaaataaaaaaattttttaaaaaattggggggaaaatttttgggggccaaaaatttttaaaaaaaaccccccccacaaaaaagcgggg

SEQ ID NO: 99075 - DNA, 418 bp, Homo sapiens
  misc_feature (1)...(418): n = a,t,c or g
gcaggagaatcacttgaacccaggaggtgtaggttgtagtgagccaagatcgtgccattgcactccagcctgggtgacagagcangacaaaaaaaaaaaaaaaagggggaggggaaaggggaaaaaaaaatttgggaaagggggttttgcaaggaattttagggggcacattccccagggggggtttttaaggaagtccaacaatttcccaaaagaatgttttccaaaaaaattttttgggaatccctttcaaggaggtttcaaaagagtcccattaccaaataaaagccttttttttttataccccccaaaaggggtgggggccccccacagtaaatttgtttgggttttcccaccacccccccaaaaaagcgacccttttttgtgaagaaatcatttgaaaaccccccaaggtttt

SEQ ID NO: 99076 - DNA, 413 bp, Homo sapiens
ctgtctatttacatccgtccttacaaccatccttgtcctccttggtaccggatcaagctctttcccatgacatttggttaaaaaaaaaaaaaaaaaaaaaaaaaaaaaaaaaaaaaaaaagggggggaatttcccccccaagccccgttgggggggttggccccagggaaacctggggggtttgggggcctggggcaaatctttttcaaaggggggggggggttcgggaacttttttcccaaaaaaagaagggggaaaagggccaacgtaaccctgaaaaaaaacccccccacaaaaggggccccgggggtcccaaggaaaaatttattttttttgaaaaaaaaaaaaaaaaggggggaaagccttttgggaaaaaaaccaaacctcctcccccaagggtaaacccgggggga

SEQ ID NO: 99077 - DNA, 412 bp, Homo sapiens
  misc_feature (1)...(412): n = a,t,c or g
ggaggctgtgcacagactgtcttgaacatcccaaatgccaccggaaccccagcccttagctcccctcccaagcctctgtgggcccttgtcgggcacagatgggatcacagtaaattattggatggtgaaaaaaaaaaaaaaaaaaaagggggggccgttttaaagaatcaaagtttacgaacccgggcttggaaagtaatattttttttttagggccccctaaattaaattcacgggccggggtttaaaaacgggggaaggggaaaaaccctggggttaccaaatttaatggctttgaaaaaaatccccttttcgccaggtggctataaancaaaaaacccggnnnnnnnnnnnnnntnggnnaaaaanggtgggtgctagaaatatatagtggtaaaacttccactttttg

SEQ ID NO: 99078 - DNA, 381 bp, Homo sapiens
cggacgcgtggggtgaaggttaaacaatataatgcatgaaaactgcctcagacagtgactgcaacatggcaagtactcctggagtggtggctgctataatcattatcaccatggtaatggtgatcgtgatgatgacgatgatgacattggtgatggtgatgatgatggcaatgatgatgatgatgatattattcctttttttctttttttttatttttttatccttcagccaactcacatcaatatattctttgttttgttgttgttattattattatagtgtgtggtttttttgtttgtttgttttgttttgttttgttttttgagagggagtctcgctcttgtcacccagcctggagcgcaaaggcaccatcttggctg

SEQ ID NO: 99079 - DNA, 613 bp, Homo sapiens
gagtcgacccacgcgtccggagccaccacaccccgccgcggctgacttaaccttagatttcagattccctttcaatcatgcccgtttgcttgggtttgaccactccccactcctggatctggactgtttcttcctgttgctgtcagccttggttctagtttatagtcttgtctcctccgtttctgcttatggtgtggacaaatgaccttttttaagcagctggtaataattttacattgactggagcctgtgcatttgctcagagatgctacaatttttagatatttctaagacttctggattcttgaggtagttaaggattaaaaccagaaacagtcgaggttttttaaaagcagggtaagccatgaagtgaatacagggtgactgatgagaattaatcagatgagattaattcttttgggttttcttggttttaaggcatctcgaatgccccttgaaaatgtagttttccctggtggtgggcacctgtaatcccagctactcgggaggctgaggcaggatagttgctttgaacccgggaggtggaggttgtagtgagctgagatcatgccactgcactccagcctgggtgacagagtgagacaccatctca

SEQ ID NO: 99080 - DNA, 403 bp, Homo sapiens
cctttggcagatatattggtatggtttccatttttatgcttaaggttatcatggccaggcatgggggcttttgcccataattccagcagattgggaggctgaggtgacaagatcacttgagcccaggagtttgagaccagcctgagcaatgtggcaagaccctccctctacgaaaaaaaaaagagaaaaaccttttccccccccttctgggggcacccttttacccccacttcttgggggggttgggggggaaaaccatttgcccccgggagttaaaaaccagttggaacaaaataaccccccttttttacaaaaaaaaaaaaagggggggcccttttaaaggaaaaaattttatcgccccggggttgggaagaattttttttttttagggggccccaaaata

SEQ ID NO: 99081 - DNA, 412 bp, Homo sapiens
tcttctgttaaattgcggcaggcatcagattgaatcttatctaaggctggctccacttctggtagatagtcgaggaggatacaaaaacaggaatgtgaaagacatcaagagaaggtgaaagcagctccatccgaatgtaatttttaactccgcagatcacattatttctagagatcataataatctagattgcttgcaaaaggcacattcctgattcctcccctaaaattactaaacgcatatcttgaggtgtagatggagctgaaatcccaatttttttgaaaggaaatcttgctctgtctcccaggctggagtgcaccgtcgcgaactaaactcactgaaagctgcaccttccgggtacacaccagcgtcctgcgtgagcctcccgagtagctgggactacaggcgcccg

SEQ ID NO: 99082 - DNA, 412 bp, Homo sapiens
  misc_feature (1)...(412): n = a,t,c or g
ctcctggttgggacctgaggtcagccctcttctagctttccctgactagaaaaaattcctcctgctttcactgttgtcagtcacctcaatttcttcaccaaacttcttgtttttgctctgtgtctgccctatagcccctaattctgtagtcatccattgctcctcaagggcctctcaaagtccattcaggggctcaatagatattgaataaacagaagaaccccaaactagttggtacattttggttcaatgtaataattattttttactttttatttttttaaagagacggggtctccgctctttcacctggactggagtgtggtggcatgatcatagctcactgcaacctcgaactcctgggctcaagtgatccttctgccttggcctctcaaagtacctggaattaccn

SEQ ID NO: 99083 - DNA, 1512 bp, Homo sapiens
  misc_feature (1)...(1512): n = a,t,c or g
atggggtttatgactggcatctgcattgaggacaatgttgtgggaccgagccctgaatcagggtctgtactgactgtgggtggtgtcagaattcaaatgttagaccgctgtcacactgcccattgtcctgtgattccaggtcttctccgagggcaactgtggactgaaaacttagcggagagaaactcccatgacagacgcccttttcccacagttgtgtgttctcattttgcccaagacctttggccagagcagagcataaaagattcttaccaaaaagtgatactgagaaaatttgaaaaatgtggacatggcaatttacactttaaaaaaggctgtgaaagtgtggatgagtgtaagttacacaaaagaggttataatggacttaaccaatgtttgacaactacccagagcaaaatatttcaatgtggtaaatatgtgaaagtctttcatcaattttcaaattcaaagagacataaaagaagacatactgaaaaaaaacctttgaaatatatagaaggtgacaaagcttttaaccagtcctcaacccatactacacataaaaaaattgatactggagagaaaccatacaaatgtgaagaatgtggcaaagccttcaaccggtcctcacaccttactacacataagataactcatactagagagaaaccctacaaatgtgaagaatgtggcaaagtctttaagtacttctctagctttactacacataagaaaattcatagtggagagaaaccctacatttgtgaagaatgtggcaaagcctttatgtacccctatacccttactacacataagataatccatactggagagcaaccctacaaatgtaaagaatgtgacaaagcttttaaccatcctgcaactctttcttcacataagaaaattcatactggagagaaaccgtacacgtgtgataaatgtggcaaagcctttatttcatcctcgatccttagtaaacatgagaagattcatacgggagagaaaccctacaaatgtgaagaatgtggcaaagccttcacccgctcctcacaccttactatgcataagataattcatactggagagaaaccatacaaatgtgaagaatgtggcaaagcctttacatggtctgcaggcctccataaacataggagaactcatactggagagaaaccctacaaatgtgaagaatgtggcaaagcgtatactacatcctcaaatctaactgaacataagacaactcatactggagagaaaccttacaaatgtaaagaatgtggcaaagcttttaactggtcctcagaccttaataaacataagagaattcatattggacagaaaccaagaacgtgacaaaggattattttattattattatttttttgagagnnnnnnnnnnnnnnnnnnnnnnnnnnnnnnnnnnnnnncaggnnnnnnnnnnntttatttgtgtataactttaaaagcagatttttggaagcattgtaattacattaaaagtatacttgttcc

SEQ ID NO: 99084 - DNA, 422 bp, Homo sapiens
  misc_feature (1)...(422): n = a,t,c or g
nnnccgcccacgcgtccgacttgttattatctgtctttttatgtaagctatcctactgggtataaagaagatacacgaatggtcaataagcacatgaaaagatgctcaacatcattagtgtatcttctttggataaatttctattaaaatcctttgcctatttttttgcctttggataaatttggataaattttgcctttggataaatttctattaaaatcctttgcctttgtctctttatttttgagctgtaagagttctttacatattcaggaaatcggtcccttataagataagtgatttgataatatttcctcctattctgcttttctttttacttgatgatgttctatgaagcacaaggtttttaattttgagaaattcagtttattgattttttccttctgttgcttgggttgnta

SEQ ID NO: 99085 - DNA, 389 bp, Homo sapiens
  misc_feature (1)...(389): n = a,t,c or g
atttttgaaaagtgaatcagagtaaaagttccaatcgccctcttggactttttgatgatcagctattgaaatagcacgtatgttagagacagtcctcccagcaaacatgattttctattaaaatacatccaggtgacngaaaaaaaaaaaaaaaaaaaaaaaaaaaaaaaaaaaaaaaaaaaaaanggggggggggcccttttaaaaaaaatattttttttccggggggggggggggaattttttttttttttgggggcccaaaaaaaaaactggggggggggggtaaaaaaaaggggggggggaaaaaaaccgggggcaaaaaaaaaaaaaggggggggaaaaaccttcttttttggggggggggaaaaaaaaaaacacccgcannnn

SEQ ID NO: 99086 - DNA, 386 bp, Homo sapiens
  misc_feature (1)...(386): n = a,t,c or g
agtatgtacagaatgagctcagattggtggtctaattatgctgctactataaattcctgttgcctggactacggtttttgcttttcatgtgtttaaatcaacgataatcttggttttaagtccatacatcttacagatttggggtacaaatcaacataaataaaaccacttatttgtgtnnnaaaaaaaaaaaaaaaaaaaaaaaaaaaaaaaaaaaaaaaaaaaaaaaaaaaaaaannggggggggggcccctaaaaaaaaaaaaaattttaacgcggggggggggggagaatttttttttttttgggggccccaaaaataatttttcggggggggattaaaaaaaggggggggaggaaaaaaccctggggccccaattatattc

SEQ ID NO: 99087 - DNA, 420 bp, Homo sapiens
gcgtggggtttcactgtgttggtcaggatggtctcaatctcctgacctcgtgatccgcctgcctcggcctcccaaagtgctgggattacagtgtgagcccagccagctggtgtgtgctttttaagaaactgtgaaacttttccaagtgtgaactttacactttacattccctccagtcaggcaggagagttccagttcactccacatccttgtcaacacttgtcacctcattctgttacaaatgtccataagttttttggttttgctgtttagtagttctgtttttaggtggggatttgagaagattcaaaaagcatgctcctgctgctgcctctgtcttctgagaatctgtgatttaaaaaaaaaaaaattgaaccagaattggaaatagatgaaaagttgtgcctttagaaactttag

SEQ ID NO: 99088 - DNA, 391 bp, Homo sapiens
  misc_feature (1)...(391): n = a,t,c or g
tgatgagggaaggttctgtgcacacacattatggagctcacagtttgttttgtggagacaggttctctgcaaggtgaacaagcctctggcgtcctaagaaagccaaaattacatgcctgcaggaccacacctctgtccatgcaccaagtagagctctgtgcctccattgccagggggtagagctggcgtcacgcctcccatcaggagaggctccagaacaggggttagcgtacccacctgcaggccagcagtgacctgttttgtttgtattcattaaagacaggatcttgctgtgtcgcttatgctggagtgcagnggcatgatctcagctcactacagcctccacctcccaggttcaagcgatcctcctgcctcaggcctcctgagtagc

SEQ ID NO: 99089 - DNA, 405 bp, Homo sapiens
  misc_feature (1)...(405): n = a,t,c or g
aagaattctccaggatatccctgctgcctgggtgggagacaggggagagttggtagggagaggactgtgctgtggaggtatgactctgcaaggtgaccccggctcagcagctgatcagctctgtggccttgggcaggacacggggctccctgaactcctctctccacattggtaaagggtctggtcaggccagctgtgggctagtggtgagagtaacagagatactgatctgttactggaaacgccatgagctgattgctgtcattaacctccctgtactgagagttaaacaaacaggcacctaggatgggtgcagtggctcacacttgtgaccccagcactttgggaggccggngcaggaggatcacttgaggccaggagtttgagaccagcctgggcaacatg

SEQ ID NO: 99090 - DNA, 396 bp, Homo sapiens
tattcaattgatttacagtaaaagtgtcatgggtaattaaatatgtgaaagaataaccttttcaagaaatgaagctggaacaactggttatccatttagaaaaaaaaaataaccttgacgcttacattatgtaaaaaaatttactcaaatgatcatatgactaaactgaaaccatacaatattaagcaataataggagaaaatctccatgatcattaaggaatcacaattttcctcgataggccctaaaaagcaagaaccacaaaagaaaaaaaaaattgattaaggggactttgtaagatttagcttttggccaggcgggggggctcactcctgtaatcccagcactttgggaggtcggggggggcaggtcacctgagatcaggagtttgagagc

SEQ ID NO: 99091 - DNA, 391 bp, Homo sapiens
cttatattttcttcagtaaattcttcaatttcagaatttctggatagttctttttaaaaatttctatcactttggtaaatttctcatttatatcctgaattggttttctggtttattttggtattatttttcagaattgtcttgtttctcactgagctctaaaatcaatattttgaatcttttatctgggattttgaatgtttttttttctatttctggagtcagaaagaaaatttttttgattaagaggtattgctggctgggcacagtgactcacgcctgtgagcccagcactttgggaggccaaggcaggcagatcacaaggtcaggagatcgagaccatcctggccaacgtgttgtaaaaatacaaaattaattttgtaaaaataca

SEQ ID NO: 99092 - DNA, 395 bp, Homo sapiens
tttcaccatattggccaggctggtctcatactcctgacctcaagcaatctgcctgcctcagcctcccaaaaggctgggattacaggcatgagccactgcacccagccaataattatatttttatattctttattcttgcagctttccttctcatggcaagattttgtcatgaggaaaaaattttaagatgtagcaaagtacagagaataaaataacagatacatccacttaaccatcaacaagatttaacatatttgctttgtcatatttgcttcaaatttctctctctctacttttttttttaattaacgaatttattgagcacaggggagttaacttctttccatggggggcgaactcaaatactggcctttttttttttttttttttttggg

SEQ ID NO: 99093 - DNA, 402 bp, Homo sapiens
atcaattaagactaagaaaaacaaaagattttattttaccttcatttcttacttctctaaggcttttccgttgtttatgtagttccatatttgtgacctctgtcattttccttctgcttatagaaaatgtgttaatttttttgcaggaaaactctgctagtgataaattcccttttcaaaataatagatttcattttttagaacagttttagttccacagcaaaattaagagaaaaatataggcagttcctatacactcctatccccacaggtacacagcctctcccactattaacattctgcaccaggccggacacagtggctcatgcctgtaatcacagcactttgggaggccaaggtgggcagatcacgaggtcaggagcttgcaaccagcctggccag

SEQ ID NO: 99094 - DNA, 424 bp, Homo sapiens
  misc_feature (1)...(424): n = a,t,c or g
cgttttagccaggatggtctcgatctcctgacctcgtgatccgcccgtctcggcctcccaaaatgctgggattacaggcgtgagccaccgcgcccggccagttgttctcctttttaatctaaaacttaaaaaaaattttaaacttaggcaaagttagtaaagaggcttgtcagtagaaaacctggcatgtggaaacacatgactgagcctgcctatttctctggatttttttttctactacctgtgggcactcatctcatctttttaaagcatgtctattgaaactgcacacatgtggtgcttcagagccagggttctgactgtagttctgtccctttggcctagnttcagtttattttctgaacatctattccttcatctgtaagatgtaaacaacagtgactcctggggttggtttgagatt

SEQ ID NO: 99095 - DNA, 422 bp, Homo sapiens
tgtctatacatgtgtgtatgcatgtgtgtatgtatacatatagaggaatggcagtgaggatataatgacaacaaggaatattttacatataatttcgcctatttagaccgggggaattgattgatttatacctctaccttgttccagaaatgacttagttgacttatggaaatactacttatgaaaaattactttcaaaaataggcaaatcacttcacatccattaggatggctattataaacaacaacaagcaaacagaaaataacaagtgttggcaaggacagggagaagttggaactcttgtgcattgctgttgggaatgtaaaatggtgtggatgctgcggcaaatagtatggagtttcctcaagaagttaaacatacaattatcaagggatccagcaactctgcttctggctatata

SEQ ID NO: 99096 - DNA, 426 bp, Homo sapiens
  misc_feature (1)...(426): n = a,t,c or g
ccagatcgtgccactgcactccagcctgggcaacagagcgtgactctgtctcanaaaaaaaaaaaaaaaaaaaaaaaaaaaaaaaaacctttgtttttgggttttactttaagggccccaaaattttaaaaaaaaaaaaaaaagaggggcccctaaagggtgggggccaccctaaaaaaagcttccccccggggaaaaaacccttttaaaaaaactttgtgggttttaaattccaaaaaggtttttttaaacctttatttttaagaggccttttccccaaaaataaaaaaaaaaaaaaagtttttttaaacccttttttaaaaaacccaacgttggccaagaatgggggtttattcctttaatcccaaccttttgggaagctgaaaacgggggatcaacaaggcaaaaaaataaaaaccttcttac

SEQ ID NO: 99097 - DNA, 390 bp, Homo sapiens
cagaaaaaaaactacaagtcctgttaaattgcatgacagagatttactatcagttcaaaaaagacaaagcagaacgtagtaagtaaaatttgctatttgttaatttaataaatccctcttagtaattagttataattcagttaaattaatttggtatatctgtaagggtagcttcttaagctgtttttttcagagatgtgattctgtcaggaaaaaggttgattgtgtttaaaaaaaaaaaaaaacttttctttaaaaccaccttttggattcttttaaattggggtatgaaaaaccaaaccttttaagggccgggtggtaaaaaaaaagaatggaattggcccagggggaccttttttttggggggagggggttttttttttcctccag

SEQ ID NO: 99098 - DNA, 393 bp, Homo sapiens
accggcctgtgcgcggccatgtcctccctgcggccggggggcggcggagggaaggaaacaaggtctgactctgtgcagcggagggcagtggctcaatcatagctcactccagcctcagactcctgggccgaagtgatcctcccacctcaagctcctgaatagctgggactacaggcaacaggctgtgccaattttttcttcgaagagttttgttccaagctgggagccgtggctcatgcctgtcatcccagcactttgggaggccaagctgggcatggtggcatgtgcctgtggttccagttacttgggaagctgaagtgggaggatcgcttgagcccacgaggtcaaggctacagtgagctgtgatggtgtcattgcattccagcactccac

SEQ ID NO: 99099 - DNA, 422 bp, Homo sapiens
  misc_feature (1)...(422): n = a,t,c or g
cggacgcgtgggtttcttttttaaaaatggtaatgcttaagccgggcgtggtggctcacgcctgtaatgcttgcagtgagccgagatcccaccactgcactccagcttgggagacagcgagactccgtctcanaaaaaaaaaaaaaaaaaaaaagggggttttaaaaaaaaaccacaatttcttttttaaacccaagggggggtgggggctttcccaggggaaaaacaccacaaatatttgggtttaaaaaaaggttaaaggggcccccccacaaattttaaaaaaaaaagggtttaattaaaaattgggggggggaaaaaaagggaaaaaaaaaatttttttttttaaaacaatttttttcttccaccccccttctttttaaaaaaacgatttggaattaaaaggggggcacctttacaac

SEQ ID NO: 99100 - DNA, 409 bp, Homo sapiens
ggaggtggaggttgtagtgagctgagattgcaccattgcactccagcctgggagacagagagagactccatcctccatctcaaaacaaaaacaaaaacaaaaacaaaaacaatccaaagaaaaaaaaccccaaaaggcactgggaagcacattttgcaaatttcctagttctcgtttatccagtattaccaggacaaacagcattttctagagtaaacatttgatttgggtgaaatgttgactttcagatttgttactgaaacctaagagcattactgtctgaagatttctaatggtttctaggttaaaagacatatatcagggatactgactgctgcataataaagattgtattgaggaactataatatctgggtttaaatcctagctttgccacttaatagttattt

SEQ ID NO: 99101 - DNA, 447 bp, Homo sapiens
  misc_feature (1)...(447): n = a,t,c or g
tggaaaagtctgaccgcaaagatttctttaatggcagcatatgatgaatttacaaaatctgctcccacctataaatattcccagcaatctaaaaaaatgtgtacaatttttatagttttgctgacttggatggcagtgaatattgattagatgcataaattatgtgaagagtgagccgagatcatgccgctgctctccagcctggcgacggaacaagactccgtctcaaaaaaacananaaaaaaaaaaaaaaaaaaaaaaaaaaaaaaaaaaaaaaaaaaganaanaaaaaaaaaaaaaaaaaattttnnnnnnaaaaaaaannngggggggggcccttttaaaaaaaaaaaaatttttttcccccggcgcggggaatttatttttttttttagggaaaaaataaaaatatccggggggggtgttaataaaagaggggggggggag

SEQ ID NO: 99102 - DNA, 400 bp, Homo sapiens
  misc_feature (1)...(400): n = a,t,c or g
cggacgcgtgggaaatttttatcccattagaggtctcaggaagtctgatgtgtagcttcttttggaattctaggaccgaatcattgatgctggtcccaaaggaaactatgctcggttcatgaatcattgctgccagcccaactgtgaaacacagaagtggtctgtgaatggagatacccgtgtaggcctttttgcactaagtgacattaaagcaggtaagaatcatttcaggattctgcagctgacatctgaatttcagggcttttgttttttacaaacagcttcctcagattataattttaaacatttctatatgtaccgctctctggaattaagttcatttacatttttgtgcaaccatcaccaccatccgtctccagaactcttttcatcttccctn

SEQ ID NO: 99103 - DNA, 425 bp, Homo sapiens
  misc_feature (1)...(425): n = a,t,c or g
gagaggngatatcttagtctgcttttgctgctgtaacagaatacctgagactgagtaattttttttttttgagagggaggttcacttttctgcccaggctggagtgcaggggccctattttggctcactgcaccctccgcctcccgggggtgggggggggcgcctggggtcccggttgttggggaggttggccagaaaaactgctggaacccaggaggcggtggttgcaatgagctgggattgcaccactgcattccaccctgggggacaggcaaaactctgtctccaaaaaaaaaaaaaaaaaaaggcgccacagatatggggggggcttcttgatactactcaaaaaaaaaaccccccggttgttctctttccattgggggggggggggcaacccaccacccaaaaaaataatttttttcccc

SEQ ID NO: 99104 - DNA, 417 bp, Homo sapiens
  misc_feature (1)...(417): n = a,t,c or g
cggacgcgtgggcggacgtgtggttgaagaacagatggctagagcctgctcggggccatcccttgtgccccaggtcgttttggggcaggcttacctcaccggcacctcctggcccaaggccttggagcaccgttcccctgaccccgcgtctctcctcagagctgggttctgagtgtgggcgtccagccagccagggaccaggccttgctgggggcccaggcccacctgggacgggatggtgcttgccatggaggatggtgcttgcccgtggattgcctgtccacctccaagggcttgggtgggcttgcaaacagnggtgctcattaaatgcttggttggggccaggtgcggtggctcacacctgtaatcccancactttgggaggccgaggcaggtggatcacaaggtcaagagatt

SEQ ID NO: 99105 - DNA, 423 bp, Homo sapiens
  misc_feature (1)...(423): n = a,t,c or g
caccatttttgtttctaataaaatgtggatttgtacttgggaggctgaggtggaagaatcacctgagcgcaggaacttgaggctgcagtgagccgtgactgtgccactgtgctccagcctgggcgacagagagagagaccctgtctcaaataaaaaaaaagggggtccaataaaataaagtaaaatgtgggtttaacattgtttctaacattcctttttttttttgttcctttacccttaagctggcagtcctttgatccaccaggggggacaggcaatcatcttgacccaaaatccaaccccaggttggggcacaatggtttttcaaccagttttgaggcctgttaaaggcctgcanaatgccaatcatgtgactagttcccctgtggcctcccaaccaattattttcactaccgcggggag

SEQ ID NO: 99106 - DNA, 420 bp, Homo sapiens
  misc_feature (1)...(420): n = a,t,c or g
cggacgcgtgggttttgtggggatggggtctcactgtgttgcccaggctggtcttgaactcctgggttcgggcggtcctcccacctcagcctcccaaagtgctattattgcaggagtgagccaccgtgcctggccttattttccttcatagaatcaattaagcagtaccgtgtaagcaagtcccaggtaagacccatgtactttctgacttgtcccatccccgttgtaggtatcatgtctctttccttcactgctcagcatcttgtcctagtaggtgctctacaatcctcttgcaaagcccagcctcccttagccattctttgtaacactcgtcactacctgaaataaatctatcgatacagatgaatatatgactacaggtttctcaacttcagatccatgatgtacgtagccaggtan

SEQ ID NO: 99107 - DNA, 405 bp, Homo sapiens
gcgtgagccaccgtgcccggtccagactcccaaaatgatgggattacagatttatgtcatttcattggtggatgttgaaaacatggaagttgatgaagttatccaggacatgcttttgtagagccttctgaggaggtgaccaagacagaactcttgtaatcaccaatttaaggcctacaacaaaacaagaggagacagcaaaggagacagggaagaactaaagagctggttagagaaggaagagaaagatgaggtctgccatggaagcccaaggaacagtttgcagaagaaggagattcattggtcaatagggtcaagtgaggccgggcgcagtggctcacgcctgtagtcccaacactttgggaggccgagggcggatcacaaggtcaggagttccagaccagc

SEQ ID NO: 99108 - DNA, 406 bp, Homo sapiens
gagcttgcagtgggccgagatcgtgccactgcactccagcgtgggcaacacatcaagactccgtctcaaaaaaaaaaaggaaaaaaaaaagggaaaaacccttcctcctggaaaaaaaaaggggccccactttaacttggggggaaccaaaaaagggaataccccttggggaaagaaatgggccgccatctcattttaaaaaagggccccctttggcaccaaaacccccgggggggaacttgcacccagaaattgcccaggggccaggcagccccacggacgggaacaaaaagggggatttaaaccccacccccgtcttttataagtttaaaaccccggaacaggccattaattgggcggccccacctttcccatcggaaaaataaagctaaaaaaaatttttaat

SEQ ID NO: 99109 - DNA, 402 bp, Homo sapiens
ctccctcagtttccatctgctctggcagccctaaattccattcttggattcatcaagcccataagattatggctttgtatttgagctccagccactccacaacacacatacctgagagcttttccaggtcaaaagccctacacacataaatcactcctatgcaattccctttttttaagtgttgattcccaaaaaaaaaaaaaaaaaaaaaaaaaaaaaaaaaaaaaaaaaaaaaaaaaaagggggggagagccccctccgcccggacgcgcgcgcggcgggccttttttttaaaataaaaatatttacacctgtgtatccgactatataactctggggagagggaggagaaaggaagaggcacgcgtcgatctctcactgtcttccccgccctacctcccc

SEQ ID NO: 99110 - DNA, 399 bp, Homo sapiens
aagaagtggctttttttgtcaagtgcacagatcccaacaaagctttcgagacgtagaagaaacagggaaacatggcccaaagaaaggagcaaaataaatcttcacaaaccaatcctaaagaaacaaagacatgaattacctgacaaagaattcaaaatagccctcataaagatgctgtatgagctcaaggtaacaatgcatgagcaaaatgagaatatcaacaaagagacagaaaatacaaaaaaaaaaaaaaaaaaaaaagaaaacccccccctttttggaacgggaaaaaaccaatccccccctgaaaaattccaaatggggggtcaacccccacccccccccccccaaaaaaaaaaacccccacccccaaaccggttttttgtcttttcccccccc

SEQ ID NO: 99111 - DNA, 401 bp, Homo sapiens
cccacgcgtccgcggacgcgtggggtgtattttatgtgtggcccagggaagccaaatgattggacatccctgccttagactgaaatgtctgtggtgataaaatttcactgcattaggatgacgacatagtaaaaattcaagcattaattattacctgaagcttctctatttccgtctttgcagcttgcctggctttgccgatggcacagccccaataaccctatttagaaaaaaatatatataatcactgaattagtacactatcatatgtaattaatgactactaatgtttctataacctagtgaaaggatgctaaatgacttttaaaagcaagtatagaaaaatatagtcaaacacattctgatgaatgccaaagggctcaaaaatactaaaataccac

SEQ ID NO: 99112 - DNA, 399 bp, Homo sapiens
cccacgcgtccggaagaatactaacattcccttttgtgcttttccagcagtcccaaagaattcattgtccttaagtcaaacctggatatatatgaaggttgatttggtcagtcgtgtgtatctaccttctcatttgcttgttggcgagtagagcatctctggctcttacacagactgaatgtataagactctgggccatccataaccttcattattttgaccttccacattttctttcttctgccctttgttccttccttccttccttccttccatccatccatccatcttttcctttccctattttgtatttaaatgcttttgtactggccaggcacggtggcttacgcctgtaatcccagcactttgggaggccgaggtgggcggatcacgaggtta

SEQ ID NO: 99113 - DNA, 401 bp, Homo sapiens
  misc_feature (1)...(401): n = a,t,c or g
ttttttctttgggtgtgtgctgatcctgttactgagattaattacatggctctgcagtgtagtttacataaaaatgatgttttccacttgattgctgcagatatcaagagtttgttattttcaaatacccatccaataagagagatggggaggtttttagttatatatgctatatatatatatatatatataactggaaatgttttatatgttttccgaaaatacaataagcctctcttttattcagcgntcttcctcttttctcccttatgagaaaaaaaaaanaaaaaaaaaaaaaaaaaacaaaaaaaaaaaaaaaaaaaaaaaaaaaaaaagggggggccccttttaaaaaaaaaaattttttccggcgggggggggagaaattttttttttttttt

SEQ ID NO: 99114 - DNA, 430 bp, Homo sapiens
  misc_feature (1)...(430): n = a,t,c or g
gaacaacaaacattggaagagccatgggtgccacaacttccatagtagggagtgacaccagccaagcagaacgtccaggaggtacaactgtggtttcacctggagccagcagcacttcacagagctccaggccaggcacctctgtcacaccagacagttcagcatctgaaagtgaaacagttactacaaaagaattctctgggacaactgctatatctagaacttcccacaccggcacccctgcagcctcaggaggccaagcaactgggagcctgacagccaccactggggtagctcctggcacaactgttgcacctggcagttccaacacagaggccacaacttctgttggagaaaaaaaaaaaaannaaaaaaaaaaaaaaannnnnnnnnnannnnttttnnnannnantttttccgccgccgcccg

SEQ ID NO: 99115 - DNA, 436 bp, Homo sapiens
tttcgatctcctgacttcatgatccacccgcctcggcctcccaaagtgctggtattacacgcatgagccaccgtgcccggccaactttcttgaattacactctgttttatgagtgtgcatattttacctcctcagagaagagctctttgagatcaaagagccatgtcttagattctgtaattgtcggttttattcctgtaagtactactcacaaggctgggcacatacaggtgcttaatgtaaatgcagggaatgaatgctgctgcctgagatttgatctctccgctcctatcccatttagccatctggaaaggagtcagaggccacacacacttgagaatcttatttctaacatgaaggctaaccatagatcttcccaagtcaattcagattcctggttattgcaatttgctagtatattgggcactccaaaata

SEQ ID NO: 99116 - DNA, 422 bp, Homo sapiens
tctagatcgtgatttgcccgccttggcctcccaaaatgttgggattacaggcgtcagccaccgcgcccggccatctaccactttttttctttttcttttttttttaacaaacggaaaatagcctgggtttttcctaataatcaaaaacctacatgtttatcctgaaaactaacagcgtaaagaaggaagcgaaaattacttgtcatcccacgggttagggataacctccatcagcatttcaagggcggcctttggacttttttccatgtatatatggcggggggggactagatgtatgtctacatagagcaagcctatttttaacaaaaagcactcattttatacatctgtcttggaacataatttttccaacttaaaatatcttgagcggacatctttacatgccaataactataaaaata

SEQ ID NO: 99117 - DNA, 420 bp, Homo sapiens
ggaggtggaggttgctgcgagccgagatcatggcattgcactccagcctaggcaacaagagtgaaactccgggtcaaaaaaaaaaaaaaagtttttttggacaaattttcccaaaaaaattttttccttaccccccttggtggacccttccccacccttatttccactctttttttgccgaaaatgcatattatgagcccccccctttcggggggggggggaaaccaatattaggggttttttagggggaggggggccgggccctttttttggcccccctgagggggggggggccccggggggtttttttttaagaaaattctttcccccatttttccccgcccccccgccagggttccacaaaaattttttttttttggcaaccccacgcgagagaggcaccctttgaccttaggattt

SEQ ID NO: 99118 - DNA, 412 bp, Homo sapiens
  misc_feature (1)...(412): n = a,t,c or g
cggacgcgtgggcggacgcgtggggccgtctgctttcgttcccacaaagaaagcacctcaccccagcacagtgccacccctgttcatctgggctgcctggcagagagccttgctgtttacaattaaaatgtttctgccncanaaaaaaaaaaaaaaaaaaaaaaaaaaaaaaaaaaaaaaaaaaaaaaggggggggggcccctttaaaaaaaaaaaatttttcccccgggggggggggaaatttttttttttttttggggccccaaaaaaaaaaatggggggggggttttaaaaaacggggggggggaaaaaaccgggggccccccaaaatttttggggggggaaaaacctctttttttcgcgggggggaaaanaaaaaagaaaagcggnnnnnnnnnnnnnnnnnnnnntn

SEQ ID NO: 99119 - DNA, 401 bp, Homo sapiens
  misc_feature (1)...(401): n = a,t,c or g
cttttatgcttggttctatacaagacgccgtgacgtgtggcccctgtaggaagtcctggcctctgtctctaaatctgtcatctcagcccaacccctattcagattatctgtgccctctgcgtagccattcacttcgcctgggtgcaatcatgccttccttacccaacatttaacaagtccagccccagcaaaaaaaaaaaaaaaaaaaaaaaaaaaaaaaaaaaaaaaaaaaaaaaaaaaaaaaaaaaaaaaaaaaaaaaaaaaaaaaaaaaaaaaaaaaaaaaaaaaaaaaaaaaaaaaaaaaaannnnnnnggggggggggggaaaaaaaaaaaagaaggagagggggggggggggggaaagaaaaaatattatttgggtccccctccttttcccgccc

SEQ ID NO: 99120 - DNA, 411 bp, Homo sapiens
  misc_feature (1)...(411): n = a,t,c or g
cttttatgcttggttctatacaagacgccgtgacgtgtggcccctgtaggaagtcctggcctctgtctctaaatctgtcatctcagcccaacccctattcagattatctgtgccctctgcgtagccattcacttcgcctgggtgcaatcatgccttccttacccaacatttaacaagtccagccccagcnnaaaaaaaaaaaaaaaaaaaaaaaaaaaaaaaaaaaaaaaaaaaaaaaaaaaaaaaaaaaaaaaaaaannnnnnaaaaaaaaaaaaaaaaaaaaaaaaaaaaaaaaaaaaaaaaaaaannnnnngggggggggttttttaaagaaatnggtgggagaagggggggggggaaaaaaaaaaaatttttttgaagaaaattttttttttttggggggggggggg

SEQ ID NO: 99121 - DNA, 425 bp, Homo sapiens
  misc_feature (1)...(425): n = a,t,c or g
ccgtctatgtagcaaaatagtgggaagatttataggtagaggcgacaaacctaccgagcctggtgatagctggttgtccaagatagaatcttagttcaactttaaatttgcccacagagccccaataaacgatcccacagcctctaaaaaaaaaaaaaaaaaaaaaaaaaaaaaaaaaaaaaaaaaggggggggggcttttttaaaaaaatatttttttgccccggggggggggaaaaatttttttttttttggggccccaaaaaatatatttcgggggggggttttaaaaacgggggggggggaaaatacgggggggccccccaaattatgtggttggggaaaacttccttttttcgcgggggggttaaaaaaaaaacccccttaanntttctggggatatagaaaatttctctcttttgattg

SEQ ID NO: 99122 - DNA, 418 bp, Homo sapiens
accacattaaatggtcatgtgtcatcctcactgtagccccaccatgcaacatcactgggtagctttgttctggctgccagttgttatatgtaatattcgtagccatgagtcgtggcttcctggggccttggttaagctatatgaaactcttatgtaatcagcattccttcttccctagagaaaggattcaagtttttcagggtttgttcattgctcaggacctgacctttaagttgagttgaggtgtgaaagtcccaaagtggtcaagtttgaaagtcccaaagtggtcaagtgtagaggaggggcccaacacagtggctcacgcctataatccagcactttgggaggccaaggcaggcagatcgcttgaggcgaggagtttgagaccggcctggccaacatggcgaaaccccgtctt

SEQ ID NO: 99123 - DNA, 422 bp, Homo sapiens
tcgatctcctgaccttgttatccgcctttctcggcctcccgaagtgctgggattgcaggcgtgagccaccatgcctggccaaaacagatttttaaatgtgcatgctttgagccccagtgtttcccttctagggacatgtgaacaaggatgtatgatcaggattattcactgaagcgcagaataattcatttttaattgtaaaaagtcaaaagcaacctaagtgttcatctatgtgagggtagccaaatacgttggtacagtgggatactaatcagtggtttatgtttaatcaacatggattagcactgaaaaactgtgaatactgggcccaaaaaagcaagtgggagttcagcttctgcttaggatatacgaaaaaaaaaaaaaaagggcggccgctttaaaggatccaagtttacgtccgc

SEQ ID NO: 99124 - DNA, 401 bp, Homo sapiens
  misc_feature (1)...(401): n = a,t,c or g
cccacgcgtccgtgcaaacctccacagacttctccaaattctggaaaactctctcccagtagcaatggctgtatgaatacacttcatatcagcagcacaaacactgtcggggaagtgatcgaggccctgctcaaaaagtttctcgtgactgagagccctgccaagtttgcactttataagcgttgtcacagggaagaccaagtctacgcctgcaagctctcagaccgggaacatccactctacctgcacgacancncatannaaaaaaaaaaaaaaaaaaaaaaaaaaaaaaaaaaaaaaaaaaaaaaaaaaaaaaaaaanggggggggggggcctttaaaaaaaacccattttcacccccgggggggggaaagaaaatttttttttttgggggccaaaaa

SEQ ID NO: 99125 - DNA, 405 bp, Homo sapiens
cggacgcgtggatttgggcagggacccaaatccaaaccatagcaggggggtctcactgttttgcccagactggtcttgaactcttggcctgacaagcgatcctcccgcctcggcttaccagagtgctgtgattacagatatgagccaccacatcaagctaacatagggatcggcactctagcctgggcgacagaggagactacgtctcaaaacaattaattaattaattaaaataaataaccccatactttctgcctctgtggctttgcctgttctgggtatttcgtgtgaacggacccatgcatctggtggtccgggctcatttcaaacgctcagcccccatgtcggcccatggcctccggattggatggtgtgagctgggtgtgcgcggggtgctcaatccct

SEQ ID NO: 99126 - DNA, 389 bp, Homo sapiens
  misc_feature (1)...(389): n = a,t,c or g
acgagggcgtgactggcggtaacgcancgtatcctatgtttcaggtgcagccggtgcagcacgtgtatcctgcccaggtgcagtacgtggaagggggagacgccgtctacaccaatggagccatgtgcgtgcttctcccgcgggccacacccggaaccctctccctgactccagcctttgccacctggggaggcatcaagcaaattcctctcccttatgcttttggcgatgtgttcactaaatactgttaaaatgctattaggaaactgggcaatatctctacagaaggttttaaaattagccggacatggtgacaagtgcctagagtccctcccaggtaatcggggggccggggtgggaggatcgcatgggcccaggagttggaggct

SEQ ID NO: 99127 - DNA, 382 bp, Homo sapiens
gaaggagaatcacttgaaccctggaggtggaggttgcagtgagctgagatcgtgccgctgcactccagcctgggcgacagagcgaaactccgtctcaaaaaaaaaaaaaaaaaactttaggggggggggattaaaagggaaagggccggggttttacccccttgaaaaaaaatttccaggggttggttttttcccaaaaaccaacctggtttaaaattcctttaaaaaaaaaattttccggggcccctaaaaatctggtttttgttgagggaaaatttggcccctctccctggtccccgcccaaactgggggggccccttttttggatttggttggaaacgggccccaccccccccaggaaattgcctccggggtggggggc

SEQ ID NO: 99128 - DNA, 388 bp, Homo sapiens
  misc_feature (1)...(388): n = a,t,c or g
gatctttcaggagcataagaactgcggagagatgagtgagatagaagccaaggtcaagtacgtcaaactcgcacggtccctccgcacatatggcgtgtccttcttcctggtgaaggagaagatgaaaggcaagaacaagctggtgcctcgcctgctggggatcaccaaagactcggtgatgcgcgtggatgagaagaccaaggaagtgctgcaggagtggcccctcaccaccgtcaagcgctgggcagcctcacccaagagcttcacactggattttggggagtatcaggaaagctactattcagtacaaaccaccgagggagagcagatatcccagctgattgcaggctacattgacatcatcctgaaaaaaaaaaaaaaaaaaaan

SEQ ID NO: 99129 - DNA, 407 bp, Homo sapiens
attaaacataagtgaggaaaatacactcggattactctctagagcagtacttttccaaactcctttgaggttaaaaaaaaaaaagtttcccagtcttttcccctgcagagggttttttaactactttctcaagtagttgtttgtcaggaaattttaggaaatactggtgtaaaacagagcaccagtacattgttattcatctgtcaaaggagaggagtactaaaatcttctttagttctaatactctatgattacaatttttcttcctcatggctcccaaaaactgcctccagaagggggaccagtctttatttaagggctttctcaccatgttttttttgaggagggtaaattgaaaaaaccccggattaaagataaagataaaaaagttcctgagccagataaca

SEQ ID NO: 99130 - DNA, 409 bp, Homo sapiens
gaaggagaatcacttgaacccgggaggtggaggttgcagtgagctgagatcgtgccactgcactccagcctgggcgacagagcgaaactccgtctcaaaaaaaaaaaaaaaaaattttatggggctggggttaaaagggaaagggcggggtgtttaaccccttgaaaaaagggttccaggggttggttttttccaaaaattaaccctggggtaaaattcctttaaaaaaaaaattccccggggcccttaaaatcctggatttttgttaggggaaagttggccattaaccctgggtcctgcccaaaatggttggtctcttttttggaatttggttggaacagggcccaacccccccattaaattggtcccagggagggggggccgccatcctttattctctagggggacg

SEQ ID NO: 99131 - DNA, 431 bp, Homo sapiens
  misc_feature (1)...(431): n = a,t,c or g
gagttttatttactgaaaatcagatttcatcatttctcccccagttttctaactggctttgatttttgtttcttagcttgattgcttgctagtttttaaatgaggtaaaatatagattcggtgagatgcacagatcttgagtgtgcagttcaattgattttgataaatacacccatgtaactgccagctgaatcaagataaagaccattctcattactccagaccttcctgtgtttcagtagctttgttcacatgttcggcagcatgtgagacgaagttacctaagccgtaggcaattttatgtgattctgcatagtagtcaatatggtgataatgttactttcatcagaaggctcaaagtaatggacctgaaaagcaggaaaaangaggggttatccagaacttcaagagaactctctcaaaaaaaaaan

SEQ ID NO: 99132 - DNA, 411 bp, Homo sapiens
  misc_feature (1)...(411): n = a,t,c or g
cggacgcgtgggcggacgcgtgggggtggaggttgcagtgagcccagatcgcgccactgcactccaggccttggtaagagagcgagactctgtctcaaaaacaaaacaataaaacaaccaaactttgttataaaccagaatgaaaaaatgtgcaaaaaattaaaaataaactaaatcctagtccttcaagataccattatcagtactgaggaagaaaatgacacatgcactgagctgtcaatacagcctatttacattatgaagcttttaatctctgttcacaacaatgctatacagttcattacaataatgggaagaaatactgtttaattattaaagtaaaaatcacaagagatgttatcagagtaacattaaattacatgactgacatcaagtaacatttaatccttn

SEQ ID NO: 99133 - DNA, 406 bp, Homo sapiens
  misc_feature (1)...(406): n = a,t,c or g
gagtgctttacttccaactatgtggtcaattttggaataagtgcgatgtggtgctgagaagaatgttgatttgcggtggagagttctgtagatgtctattaggtccgcttggtgcagagctgagttcaattcctggatatccttttcttatgcaagcttctgcaaagttttctgacctcattccttggacttcttcaattctagcgtcttctttcttgttcagtttttgtctttaaaactccattgaagtgactcttacaggtctcctgcagtctacttgttgccaagttttcattatgttgggcttgatctagtcatccccttccatgcccagagacaagtctctccatatatataactgtacatccactgcatgttgncattctttagtttttttctcctcatt

SEQ ID NO: 99134 - DNA, 276 bp, Homo sapiens
gggggggggccttttttaaggcaaagttaacctttggggggtggaaggggaaaaagaaaaagaaaacgggcgttattttttaaactttaaaaaaaaggcccaaggaaattcgaaatcagggggggtccccccagaggaaaagggcccaactagggaaattgcaacaaaaataccctgttttaaactttaaggcccccttttttggggagcggggggattactataaaagctttttcaaaacctgcttggataacttaccccgcaggggcaagggag

SEQ ID NO: 99135 - DNA, 914 bp, Homo sapiens
  misc_feature (1)...(914): n = a,t,c or g
acgcccagcttggcacgaggagcagaagtctaagaacgagcctgaagacacagaggacaaagaaggttgtcagatggacaaagagccatctgctgttaaaaaaaagcccaagcctacaaacccagtggagattaaagaggagctgaaaagcacgtcaccagccagcgagaaggcagaccctggagcagtcaaggacaaggccagccctgagcctgagaaggacttttccgaaaaggcaaaaccttcacctcaccccataaaggataaactgaagggaaaagatgagacggattccccaacagtccatttgggcctggactctgattcagagagcgaacttgtcatagatttaggagaagaccattctgggcgggagggtcgaaaaaataagaaggaacccaaagaaccatctcccaaacaggatgttgtaggtaaaactccaccatccacgacggtgggcagccattctcccccggaaacaccggtgctcacccgctcttccgcccaaacttccgcggctggcgccacagccaccaccagcacgtcctccacggtcaccgtcacggccccggcccccgccgccacaggaagcccagtgaaaaagcagaggccgcttttaccgaaggagactgccccggccgtgcagcgggtcgtgtggaactcatcaagtaagtttcaaacgtcctcccaaaagtggtacatgcagaannnnnnnnnnnnnnnnnnnnnnnnnnnnnngcaaaaccagcagcagcagcctcagtcttcccaggggacgagatatcacaccagacaggctgtgaaagctgtccagcagaaggagatcacacagagcccatccacgtccaccatcaccctggtgaccagcacacagtcatcgcccctggtcaccagctcggggtccatgagcaccc
